United States Patent Application Publication US 2005/0244851 A1 - sequence listing, part 84

SEQ ID NO: 3271051 - DNA, 25 bp, Homo sapien
tcttggtgatagtcatagaaaccat

SEQ ID NO: 3271052 - DNA, 25 bp, Homo sapien
actcaggctccttgtagtacctctt

SEQ ID NO: 3271053 - DNA, 25 bp, Homo sapien
gaggtagtctgcaacgcgagatgcc

SEQ ID NO: 3271054 - DNA, 25 bp, Homo sapien
agtcatagccacttttcatgggcat

SEQ ID NO: 3271055 - DNA, 25 bp, Homo sapien
gcagtcatagccacttttcatgggc

SEQ ID NO: 3271056 - DNA, 25 bp, Homo sapien
cagtcatagccacttttcatgggca

SEQ ID NO: 3271057 - DNA, 25 bp, Homo sapien
tggctcttagagctaaactggtgag

SEQ ID NO: 3271058 - DNA, 25 bp, Homo sapien
ggcaccctaagtcctctgagggaga

SEQ ID NO: 3271059 - DNA, 25 bp, Homo sapien
taaagcaggcttaatgttgagagat

SEQ ID NO: 3271060 - DNA, 25 bp, Homo sapien
ctggctacctggagtaagagctggt

SEQ ID NO: 3271061 - DNA, 25 bp, Homo sapien
tctgaggtgggacagttcacctttc

SEQ ID NO: 3271062 - DNA, 25 bp, Homo sapien
tgggacagttcacctttcttgtttc

SEQ ID NO: 3271063 - DNA, 25 bp, Homo sapien
ttctgaggtgggacagttcaccttt

SEQ ID NO: 3271064 - DNA, 25 bp, Homo sapien
ctgaggtgggacagttcacctttct

SEQ ID NO: 3271065 - DNA, 25 bp, Homo sapien
gccacagttcgcctttcttaggcaa

SEQ ID NO: 3271066 - DNA, 25 bp, Homo sapien
gactggtatagagtgctacagccca

SEQ ID NO: 3271067 - DNA, 25 bp, Homo sapien
agctggccacagttcgcctttctta

SEQ ID NO: 3271068 - DNA, 25 bp, Homo sapien
atgcagacaccgactggtatagagt

SEQ ID NO: 3271069 - DNA, 25 bp, Homo sapien
cgttttagtagcacttgtcacattt

SEQ ID NO: 3271070 - DNA, 25 bp, Homo sapien
caccgttttagtagcacttgtcaca

SEQ ID NO: 3271071 - DNA, 25 bp, Homo sapien
tctcggatcctgataactcatccat

SEQ ID NO: 3271072 - DNA, 25 bp, Homo sapien
ttctctcggatcctgataactcatc

SEQ ID NO: 3271073 - DNA, 25 bp, Homo sapien
cattggaacattagtgtggacacct

SEQ ID NO: 3271074 - DNA, 25 bp, Homo sapien
agggacagtcccaccattgatcagc

SEQ ID NO: 3271075 - DNA, 25 bp, Homo sapien
gctgctgaggagtatagtagctctc

SEQ ID NO: 3271076 - DNA, 25 bp, Homo sapien
ccaggaggttgttatattgacgccg

SEQ ID NO: 3271077 - DNA, 25 bp, Homo sapien
cgagtgcttcctttctcttgcagta

SEQ ID NO: 3271078 - DNA, 25 bp, Homo sapien
ttcgagtgcttcctttctcttgcag

SEQ ID NO: 3271079 - DNA, 25 bp, Homo sapien
tcgagtgcttcctttctcttgcagt

SEQ ID NO: 3271080 - DNA, 25 bp, Homo sapien
ctttcgagtgcttcctttctcttgc

SEQ ID NO: 3271081 - DNA, 25 bp, Homo sapien
tgcagtccgagtggaatagtaaggc

SEQ ID NO: 3271082 - DNA, 25 bp, Homo sapien
ggtgggtgcagtccgagtggaatag

SEQ ID NO: 3271083 - DNA, 25 bp, Homo sapien
tccgagtggaatagtaaggcgaccc

SEQ ID NO: 3271084 - DNA, 25 bp, Homo sapien
cgagtggaatagtaaggcgacccat

SEQ ID NO: 3271085 - DNA, 25 bp, Homo sapien
cagccagtgcctgcaacgttgtagg

SEQ ID NO: 3271086 - DNA, 25 bp, Homo sapien
ggtgctacttcatccttgcctgcaa

SEQ ID NO: 3271087 - DNA, 25 bp, Homo sapien
tcattcttggattctttgtttaata

SEQ ID NO: 3271088 - DNA, 25 bp, Homo sapien
atagacgaagttccccaagacccag

SEQ ID NO: 3271089 - DNA, 25 bp, Homo sapien
ataagcatgggaagtcgcaggcagc

SEQ ID NO: 3271090 - DNA, 25 bp, Homo sapien
tgacttgccagagcttaagacctgg

SEQ ID NO: 3271091 - DNA, 25 bp, Homo sapien
taagcatgggaagtcgcaggcagca

SEQ ID NO: 3271092 - DNA, 25 bp, Homo sapien
gcctgacctgacttgccagagctta

SEQ ID NO: 3271093 - DNA, 25 bp, Homo sapien
catgagggctccttcggttgtgagt

SEQ ID NO: 3271094 - DNA, 25 bp, Homo sapien
ccttcggttgtgagtaacaggaaat

SEQ ID NO: 3271095 - DNA, 25 bp, Homo sapien
tttcctcataagctctgggtcctct

SEQ ID NO: 3271096 - DNA, 25 bp, Homo sapien
ggaaatatggccttggactcatcca

SEQ ID NO: 3271097 - DNA, 25 bp, Homo sapien
ggcatcccgctaaaacgtttgtcag

SEQ ID NO: 3271098 - DNA, 25 bp, Homo sapien
ggtgtgtctggaaaaggcatcccgc

SEQ ID NO: 3271099 - DNA, 25 bp, Homo sapien
catgatgggcattcagcggcatctc

SEQ ID NO: 3271100 - DNA, 25 bp, Homo sapien
gctttgcatgctggtctggtgtgtc

SEQ ID NO: 3271101 - DNA, 25 bp, Homo sapien
ttgttccaaccagtcgggcagccat

SEQ ID NO: 3271102 - DNA, 25 bp, Homo sapien
tcttgttccaaccagtcgggcagcc

SEQ ID NO: 3271103 - DNA, 25 bp, Homo sapien
aggttgcttacaacttgctcttgtt

SEQ ID NO: 3271104 - DNA, 25 bp, Homo sapien
tgctcttgttccaaccagtcgggca

SEQ ID NO: 3271105 - DNA, 25 bp, Homo sapien
cgtgttggactgactcctggattgg

SEQ ID NO: 3271106 - DNA, 25 bp, Homo sapien
ttggcaggtgcaggtttctgatttc

SEQ ID NO: 3271107 - DNA, 25 bp, Homo sapien
tcacctgttcactccctagctggct

SEQ ID NO: 3271108 - DNA, 25 bp, Homo sapien
tcagttccataaggcgtgttggact

SEQ ID NO: 3271109 - DNA, 25 bp, Homo sapien
ggcgttcaagcttgcctcggagcca

SEQ ID NO: 3271110 - DNA, 25 bp, Homo sapien
tgagaccatgtgtccttacccggct

SEQ ID NO: 3271111 - DNA, 25 bp, Homo sapien
tacatgtgtcccctggatcagagga

SEQ ID NO: 3271112 - DNA, 25 bp, Homo sapien
gctccaattgggcaggaaacgtttg

SEQ ID NO: 3271113 - DNA, 25 bp, Homo sapien
cagtccctagcgaaagaattggaat

SEQ ID NO: 3271114 - DNA, 25 bp, Homo sapien
ttctggtactcacattgacagagcc

SEQ ID NO: 3271115 - DNA, 25 bp, Homo sapien
gcttgagcctgtactaggtctagaa

SEQ ID NO: 3271116 - DNA, 25 bp, Homo sapien
ggctgcgctttgacaagctccttga

SEQ ID NO: 3271117 - DNA, 25 bp, Homo sapien
gagtccaaggatagcggacacaaga

SEQ ID NO: 3271118 - DNA, 25 bp, Homo sapien
agtggtagaattgaccagatttagc

SEQ ID NO: 3271119 - DNA, 25 bp, Homo sapien
cacaagacttttagtaccaatgact

SEQ ID NO: 3271120 - DNA, 25 bp, Homo sapien
tttagcaactgggtttagaggtgag

SEQ ID NO: 3271121 - DNA, 25 bp, Homo sapien
ttcctaaggaagcaccctgtagagt

SEQ ID NO: 3271122 - DNA, 25 bp, Homo sapien
tagaccttcgtagcctgcttggagg

SEQ ID NO: 3271123 - DNA, 25 bp, Homo sapien
cttggaggaaggcagtacttccttt

SEQ ID NO: 3271124 - DNA, 25 bp, Homo sapien
tcacagttctagaccttcgtagcct

SEQ ID NO: 3271125 - DNA, 25 bp, Homo sapien
tcttcgaggtattgcatcgcctggg

SEQ ID NO: 3271126 - DNA, 25 bp, Homo sapien
gcaaattaagcacatgcatataaaa

SEQ ID NO: 3271127 - DNA, 25 bp, Homo sapien
tctgttcatttcttcgaggtattgc

SEQ ID NO: 3271128 - DNA, 25 bp, Homo sapien
catttcttcgaggtattgcatcgcc

SEQ ID NO: 3271129 - DNA, 25 bp, Homo sapien
tggccaatatctcttctttggcctt

SEQ ID NO: 3271130 - DNA, 25 bp, Homo sapien
ttggtccttctgctttatgtctgta

SEQ ID NO: 3271131 - DNA, 25 bp, Homo sapien
cttggtccttctgctttatgtctgt

SEQ ID NO: 3271132 - DNA, 25 bp, Homo sapien
gtgcattcggaaaagccttctcgga

SEQ ID NO: 3271133 - DNA, 25 bp, Homo sapien
aaagccttctcggaagacgtggcat

SEQ ID NO: 3271134 - DNA, 25 bp, Homo sapien
aagacgtggcatggggacaccaaaa

SEQ ID NO: 3271135 - DNA, 25 bp, Homo sapien
actagaaaaagagagtgcattcgga

SEQ ID NO: 3271136 - DNA, 25 bp, Homo sapien
catagtaggctctcgaaaaaggctt

SEQ ID NO: 3271137 - DNA, 25 bp, Homo sapien
gatcctacatggcttcacgagagaa

SEQ ID NO: 3271138 - DNA, 25 bp, Homo sapien
gaccttgccaggttagtggtgcaca

SEQ ID NO: 3271139 - DNA, 25 bp, Homo sapien
tatttatttactagctctggcagca

SEQ ID NO: 3271140 - DNA, 25 bp, Homo sapien
cattagggtaaatccaaatgtgaaa

SEQ ID NO: 3271141 - DNA, 25 bp, Homo sapien
gtgaaagaggaatgtaggaaggcct

SEQ ID NO: 3271142 - DNA, 25 bp, Homo sapien
cttagaaacagtcattcgattcctg

SEQ ID NO: 3271143 - DNA, 25 bp, Homo sapien
ggatctgctccttagaaacagtcat

SEQ ID NO: 3271144 - DNA, 25 bp, Homo sapien
cacagctggagaaattggaattgct

SEQ ID NO: 3271145 - DNA, 25 bp, Homo sapien
acacagctggagaaattggaattgc

SEQ ID NO: 3271146 - DNA, 25 bp, Homo sapien
aggtgatgggaataacttggtgaaa

SEQ ID NO: 3271147 - DNA, 25 bp, Homo sapien
ggaataacttggtgaaaagaggtgc

SEQ ID NO: 3271148 - DNA, 25 bp, Homo sapien
gagggaggtgatgggaataacttgg

SEQ ID NO: 3271149 - DNA, 25 bp, Homo sapien
gatgggaataacttggtgaaaagag

SEQ ID NO: 3271150 - DNA, 25 bp, Homo sapien
ctcttctgtcaatgtctgttttcat

SEQ ID NO: 3271151 - DNA, 25 bp, Homo sapien
acttctcttctgtcaatgtctgttt

SEQ ID NO: 3271152 - DNA, 25 bp, Homo sapien
ttctaacttctcttctgtcaatgtc

SEQ ID NO: 3271153 - DNA, 25 bp, Homo sapien
taacttctcttctgtcaatgtctgt

SEQ ID NO: 3271154 - DNA, 25 bp, Homo sapien
agtgaccagttctccttgaatgagg

SEQ ID NO: 3271155 - DNA, 25 bp, Homo sapien
ttctgtcctcacatgacccagtggg

SEQ ID NO: 3271156 - DNA, 25 bp, Homo sapien
cctttgaaagggcacaacaactgtt

SEQ ID NO: 3271157 - DNA, 25 bp, Homo sapien
gagtaaacacagagcatatgaccct

SEQ ID NO: 3271158 - DNA, 25 bp, Homo sapien
ttaaactgctgccaagatcccacat

SEQ ID NO: 3271159 - DNA, 25 bp, Homo sapien
catcacgcgaatctgttctacctga

SEQ ID NO: 3271160 - DNA, 25 bp, Homo sapien
tgccaagatcccacatcacgcgaat

SEQ ID NO: 3271161 - DNA, 25 bp, Homo sapien
gatcccacatcacgcgaatctgttc

SEQ ID NO: 3271162 - DNA, 25 bp, Homo sapien
gcaaggaaagaatcacgcctgagtt

SEQ ID NO: 3271163 - DNA, 25 bp, Homo sapien
ttgccagagagtggtcaggagtttc

SEQ ID NO: 3271164 - DNA, 25 bp, Homo sapien
ggctccaaggcagacaccaagtagt

SEQ ID NO: 3271165 - DNA, 25 bp, Homo sapien
cagacaccaagtagtctctcaggag

SEQ ID NO: 3271166 - DNA, 25 bp, Homo sapien
tcatgcctgcatcagagcctggagc

SEQ ID NO: 3271167 - DNA, 25 bp, Homo sapien
catgcctgcatcagagcctggagcc

SEQ ID NO: 3271168 - DNA, 25 bp, Homo sapien
aaaggtgaaggtcctgtgcttgctc

SEQ ID NO: 3271169 - DNA, 25 bp, Homo sapien
gaaaggtgaaggtcctgtgcttgct

SEQ ID NO: 3271170 - DNA, 25 bp, Homo sapien
ctgcacaacattgaggaggctggtg

SEQ ID NO: 3271171 - DNA, 25 bp, Homo sapien
atgtggaaggaaattgtttaactct

SEQ ID NO: 3271172 - DNA, 25 bp, Homo sapien
atttggggatgtggaaggaaattgt

SEQ ID NO: 3271173 - DNA, 25 bp, Homo sapien
tgcatagttggggatttggggatgt

SEQ ID NO: 3271174 - DNA, 25 bp, Homo sapien
ctgcatagttggggatttggggatg

SEQ ID NO: 3271175 - DNA, 25 bp, Homo sapien
caggactccatattgtagaacttct

SEQ ID NO: 3271176 - DNA, 25 bp, Homo sapien
aggactccatattgtagaacttctc

SEQ ID NO: 3271177 - DNA, 25 bp, Homo sapien
gattaccacgggatctgctcaacat

SEQ ID NO: 3271178 - DNA, 25 bp, Homo sapien
tccagggcagttccagattaccacg

SEQ ID NO: 3271179 - DNA, 25 bp, Homo sapien
catcccctgtgtcaatatccagcag

SEQ ID NO: 3271180 - DNA, 25 bp, Homo sapien
tgctcacatttcacttcaagggaag

SEQ ID NO: 3271181 - DNA, 25 bp, Homo sapien
cagttcaacgataggcaggttgtcc

SEQ ID NO: 3271182 - DNA, 25 bp, Homo sapien
gaactcagtgcctccaatgtctatg

SEQ ID NO: 3271183 - DNA, 25 bp, Homo sapien
tagagtacgatagtagcattcctcc

SEQ ID NO: 3271184 - DNA, 25 bp, Homo sapien
tgagaatactgcaccccaagtaaga

SEQ ID NO: 3271185 - DNA, 25 bp, Homo sapien
tctttttctaacattgcctgagtca

SEQ ID NO: 3271186 - DNA, 25 bp, Homo sapien
cagcactggagtctggccgtgtttc

SEQ ID NO: 3271187 - DNA, 25 bp, Homo sapien
tgcctgagtcatggccttaatgcca

SEQ ID NO: 3271188 - DNA, 25 bp, Homo sapien
ccttcagcactggagtctggccgtg

SEQ ID NO: 3271189 - DNA, 25 bp, Homo sapien
gacctcatgaaagatgaactccctg

SEQ ID NO: 3271190 - DNA, 25 bp, Homo sapien
gttctgatccaatgccactccctga

SEQ ID NO: 3271191 - DNA, 25 bp, Homo sapien
tgggttctgatccaatgccactccc

SEQ ID NO: 3271192 - DNA, 25 bp, Homo sapien
aatgccactccctgacctcatgaaa

SEQ ID NO: 3271193 - DNA, 25 bp, Homo sapien
cttgaccttgtggcttcagcttggc

SEQ ID NO: 3271194 - DNA, 25 bp, Homo sapien
tgaccttgtggcttcagcttggcca

SEQ ID NO: 3271195 - DNA, 25 bp, Homo sapien
gaccttgtggcttcagcttggccat

SEQ ID NO: 3271196 - DNA, 25 bp, Homo sapien
ttgaccttgtggcttcagcttggcc

SEQ ID NO: 3271197 - DNA, 25 bp, Homo sapien
ttatcatcatcgagattatcctcat

SEQ ID NO: 3271198 - DNA, 25 bp, Homo sapien
attatcatcatcgagattatcctca

SEQ ID NO: 3271199 - DNA, 25 bp, Homo sapien
catcatcgagattatcctcattctt

SEQ ID NO: 3271200 - DNA, 25 bp, Homo sapien
atcgagattatcctcattcttcaca

SEQ ID NO: 3271201 - DNA, 25 bp, Homo sapien
catcttctctctctaccaccaccaa

SEQ ID NO: 3271202 - DNA, 25 bp, Homo sapien
tctctctctaccaccaccaaccacc

SEQ ID NO: 3271203 - DNA, 25 bp, Homo sapien
ttctctctctaccaccaccaaccac

SEQ ID NO: 3271204 - DNA, 25 bp, Homo sapien
tcttctctctctaccaccaccaacc

SEQ ID NO: 3271205 - DNA, 25 bp, Homo sapien
gaaagccaagattcctcaaggacag

SEQ ID NO: 3271206 - DNA, 25 bp, Homo sapien
ctcagatagctttctaacattttca

SEQ ID NO: 3271207 - DNA, 25 bp, Homo sapien
ttgcttctgaaagccaagattcctc

SEQ ID NO: 3271208 - DNA, 25 bp, Homo sapien
ctttatttattctcagatagctttc

SEQ ID NO: 3271209 - DNA, 25 bp, Homo sapien
gggacagtcagaggctgtttgctcc

SEQ ID NO: 3271210 - DNA, 25 bp, Homo sapien
ttgctccccagtcccaaggcgaaca

SEQ ID NO: 3271211 - DNA, 25 bp, Homo sapien
tgggacagtcagaggctgtttgctc

SEQ ID NO: 3271212 - DNA, 25 bp, Homo sapien
agtcccaaggcgaacagaggctcct

SEQ ID NO: 3271213 - DNA, 25 bp, Homo sapien
ccagcatccggttgactgacagaaa

SEQ ID NO: 3271214 - DNA, 25 bp, Homo sapien
gaaagtcaactgcatggatgttcta

SEQ ID NO: 3271215 - DNA, 25 bp, Homo sapien
agatcaatccagcatccggttgact

SEQ ID NO: 3271216 - DNA, 25 bp, Homo sapien
gcatggatgttctaatacaaatcac

SEQ ID NO: 3271217 - DNA, 25 bp, Homo sapien
gaagatttgaacagcactaccaacc

SEQ ID NO: 3271218 - DNA, 25 bp, Homo sapien
gaagaccaagcaggtgatggctgaa

SEQ ID NO: 3271219 - DNA, 25 bp, Homo sapien
taacatgcgtgaaatactaactaca

SEQ ID NO: 3271220 - DNA, 25 bp, Homo sapien
gattaatcacagtcatagttggaga

SEQ ID NO: 3271221 - DNA, 25 bp, Homo sapien
aagcgtaacccatcaggcttctcct

SEQ ID NO: 3271222 - DNA, 25 bp, Homo sapien
aaattctgaagcgtaacccatcagg

SEQ ID NO: 3271223 - DNA, 25 bp, Homo sapien
ttctgaagcgtaacccatcaggctt

SEQ ID NO: 3271224 - DNA, 25 bp, Homo sapien
tgaagcgtaacccatcaggcttctc

SEQ ID NO: 3271225 - DNA, 25 bp, Homo sapien
ccctgagtcatgttttaggtctcct

SEQ ID NO: 3271226 - DNA, 25 bp, Homo sapien
agcaggaactctgtcgagaatccgg

SEQ ID NO: 3271227 - DNA, 25 bp, Homo sapien
tctgtcgagaatccgggccttctgt

SEQ ID NO: 3271228 - DNA, 25 bp, Homo sapien
actggggccgctctcagcccttttt

SEQ ID NO: 3271229 - DNA, 25 bp, Homo sapien
ttgcttatcagacgctgggcttcct

SEQ ID NO: 3271230 - DNA, 25 bp, Homo sapien
ttcctccacgttcgcaggttcttgc

SEQ ID NO: 3271231 - DNA, 25 bp, Homo sapien
gcttcctccacgttcgcaggttctt

SEQ ID NO: 3271232 - DNA, 25 bp, Homo sapien
tccttgcttatcagacgctgggctt

SEQ ID NO: 3271233 - DNA, 25 bp, Homo sapien
cactgtgatgatctgcttgctgact

SEQ ID NO: 3271234 - DNA, 25 bp, Homo sapien
gtttcggctgtcactagtactatca

SEQ ID NO: 3271235 - DNA, 25 bp, Homo sapien
acggccaccattctcactgtttcgg

SEQ ID NO: 3271236 - DNA, 25 bp, Homo sapien
gaatcagcaacactgcatccacggc

SEQ ID NO: 3271237 - DNA, 25 bp, Homo sapien
gctaattgctgttaggagctcaaca

SEQ ID NO: 3271238 - DNA, 25 bp, Homo sapien
tggatttccatggaatgctctcttc

SEQ ID NO: 3271239 - DNA, 25 bp, Homo sapien
cttgctaattgctgttaggagctca

SEQ ID NO: 3271240 - DNA, 25 bp, Homo sapien
taattgctgttaggagctcaacagc

SEQ ID NO: 3271241 - DNA, 25 bp, Homo sapien
tcagctccaaagagtttagcacagg

SEQ ID NO: 3271242 - DNA, 25 bp, Homo sapien
cccatgtgctgctgtcctcattctt

SEQ ID NO: 3271243 - DNA, 25 bp, Homo sapien
agagtttagcacaggctggttccca

SEQ ID NO: 3271244 - DNA, 25 bp, Homo sapien
tccctggggtcaaggatgcagccag

SEQ ID NO: 3271245 - DNA, 25 bp, Homo sapien
ttctccctgggcgttctgtccttcc

SEQ ID NO: 3271246 - DNA, 25 bp, Homo sapien
tttctccctgggcgttctgtccttc

SEQ ID NO: 3271247 - DNA, 25 bp, Homo sapien
tctccctgggcgttctgtccttccc

SEQ ID NO: 3271248 - DNA, 25 bp, Homo sapien
ctccctgggcgttctgtccttccct

SEQ ID NO: 3271249 - DNA, 25 bp, Homo sapien
catttagcaactttctggaatcctg

SEQ ID NO: 3271250 - DNA, 25 bp, Homo sapien
tcctgagagtgaaatgtattgccca

SEQ ID NO: 3271251 - DNA, 25 bp, Homo sapien
gatgaaaaagtaacccatttagcaa

SEQ ID NO: 3271252 - DNA, 25 bp, Homo sapien
caagttagaagtgttccagatggat

SEQ ID NO: 3271253 - DNA, 25 bp, Homo sapien
cagaatcctggcagcggtgacacag

SEQ ID NO: 3271254 - DNA, 25 bp, Homo sapien
ggcatgtggggtgcgtccatattcc

SEQ ID NO: 3271255 - DNA, 25 bp, Homo sapien
gcagaatcctggcagcggtgacaca

SEQ ID NO: 3271256 - DNA, 25 bp, Homo sapien
gtggggtgcgtccatattccccagg

SEQ ID NO: 3271257 - DNA, 25 bp, Homo sapien
catctgaagggtagaactggatctt

SEQ ID NO: 3271258 - DNA, 25 bp, Homo sapien
tcgttcatgcagctattggcaggag

SEQ ID NO: 3271259 - DNA, 25 bp, Homo sapien
tagcatcagggatccaggagggact

SEQ ID NO: 3271260 - DNA, 25 bp, Homo sapien
tgacaaacaggcttcttcatagagc

SEQ ID NO: 3271261 - DNA, 25 bp, Homo sapien
taggctctgggtattgttggcaaaa

SEQ ID NO: 3271262 - DNA, 25 bp, Homo sapien
tggaggaagactaccacaccatgtc

SEQ ID NO: 3271263 - DNA, 25 bp, Homo sapien
ggaaggaactacacaaatggaagaa

SEQ ID NO: 3271264 - DNA, 25 bp, Homo sapien
taagcccatcttatatgtaacatgc

SEQ ID NO: 3271265 - DNA, 25 bp, Homo sapien
actgtgcctagaagcatatgccaat

SEQ ID NO: 3271266 - DNA, 25 bp, Homo sapien
aaggtggttaaaaagtgtctcacag

SEQ ID NO: 3271267 - DNA, 25 bp, Homo sapien
gaggccaagtggctgagcgggaagg

SEQ ID NO: 3271268 - DNA, 25 bp, Homo sapien
ggacagtaccctaaaaacaatgata

SEQ ID NO: 3271269 - DNA, 25 bp, Homo sapien
aaatattccatcagttgactgatgt

SEQ ID NO: 3271270 - DNA, 25 bp, Homo sapien
catcagttgactgatgttaatttga

SEQ ID NO: 3271271 - DNA, 25 bp, Homo sapien
tccatctgacttgctcccactttgc

SEQ ID NO: 3271272 - DNA, 25 bp, Homo sapien
cccagagcctgagggtacatgcctt

SEQ ID NO: 3271273 - DNA, 25 bp, Homo sapien
cacagcgcccagtctgcaactagat

SEQ ID NO: 3271274 - DNA, 25 bp, Homo sapien
ctagattcttgatggcgactgtgac

SEQ ID NO: 3271275 - DNA, 25 bp, Homo sapien
ccggccttcattcgttgcttccaga

SEQ ID NO: 3271276 - DNA, 25 bp, Homo sapien
tgatggcgactgtgacaaaatgatg

SEQ ID NO: 3271277 - DNA, 25 bp, Homo sapien
ctgcagacaaaagcgttccaagcca

SEQ ID NO: 3271278 - DNA, 25 bp, Homo sapien
tccaagccagattccttgttgacac

SEQ ID NO: 3271279 - DNA, 25 bp, Homo sapien
ctctgaaagagcaagtcacgctcca

SEQ ID NO: 3271280 - DNA, 25 bp, Homo sapien
gattccttgttgacactggtctctg

SEQ ID NO: 3271281 - DNA, 25 bp, Homo sapien
gcatgccctgttgtgagtccccttt

SEQ ID NO: 3271282 - DNA, 25 bp, Homo sapien
ttattcgccttggcgagggttgaaa

SEQ ID NO: 3271283 - DNA, 25 bp, Homo sapien
tattcgccttggcgagggttgaaag

SEQ ID NO: 3271284 - DNA, 25 bp, Homo sapien
catgccctgttgtgagtcccctttc

SEQ ID NO: 3271285 - DNA, 25 bp, Homo sapien
cctcatcacaaagcagggactttcc

SEQ ID NO: 3271286 - DNA, 25 bp, Homo sapien
tggagttgcaggaccacaccacggc

SEQ ID NO: 3271287 - DNA, 25 bp, Homo sapien
tttcctgaactgtgagtgtcctgtt

SEQ ID NO: 3271288 - DNA, 25 bp, Homo sapien
ttcccatgagtctaggtctgccctg

SEQ ID NO: 3271289 - DNA, 25 bp, Homo sapien
tcagagggaacaaatgcaagacccg

SEQ ID NO: 3271290 - DNA, 25 bp, Homo sapien
gagggaacaaatgcaagacccggat

SEQ ID NO: 3271291 - DNA, 25 bp, Homo sapien
gaacaaatgcaagacccggatgaag

SEQ ID NO: 3271292 - DNA, 25 bp, Homo sapien
ggtgtcagagggaacaaatgcaaga

SEQ ID NO: 3271293 - DNA, 25 bp, Homo sapien
tctcacacaagcatcacgaagaaga

SEQ ID NO: 3271294 - DNA, 25 bp, Homo sapien
caagcatcacgaagaagacatatct

SEQ ID NO: 3271295 - DNA, 25 bp, Homo sapien
cacgaagaagacatatctcaaacca

SEQ ID NO: 3271296 - DNA, 25 bp, Homo sapien
ctttactctcacacaagcatcacga

SEQ ID NO: 3271297 - DNA, 25 bp, Homo sapien
aactgcaggtgcaggttacagacgg

SEQ ID NO: 3271298 - DNA, 25 bp, Homo sapien
ctctccgagctgaatcctgtgaact

SEQ ID NO: 3271299 - DNA, 25 bp, Homo sapien
gaagtacagagctctccgagctgaa

SEQ ID NO: 3271300 - DNA, 25 bp, Homo sapien
ctgagtggcccggaagtacagagct

SEQ ID NO: 3271301 - DNA, 25 bp, Homo sapien
gacaatgttcaagaaatgcctgcca

SEQ ID NO: 3271302 - DNA, 25 bp, Homo sapien
cccgcctctgagctaggtattatta

SEQ ID NO: 3271303 - DNA, 25 bp, Homo sapien
gctttctggtgaacctgctggctca

SEQ ID NO: 3271304 - DNA, 25 bp, Homo sapien
tgtgttccagcaaacgctcaatagc

SEQ ID NO: 3271305 - DNA, 25 bp, Homo sapien
tgtcagtctggtgaagtagccctca

SEQ ID NO: 3271306 - DNA, 25 bp, Homo sapien
aaaatgagcatgtgtatggctaact

SEQ ID NO: 3271307 - DNA, 25 bp, Homo sapien
tggctaacttacgaaccctgccctg

SEQ ID NO: 3271308 - DNA, 25 bp, Homo sapien
gtagccctcagctcattttagcaaa

SEQ ID NO: 3271309 - DNA, 25 bp, Homo sapien
tctctctctccaaaggttaaccatg

SEQ ID NO: 3271310 - DNA, 25 bp, Homo sapien
aaggttaaccatgatcatgaattca

SEQ ID NO: 3271311 - DNA, 25 bp, Homo sapien
tctctccaaaggttaaccatgatca

SEQ ID NO: 3271312 - DNA, 25 bp, Homo sapien
ccaaaggttaaccatgatcatgaat

SEQ ID NO: 3271313 - DNA, 25 bp, Homo sapien
ctgagacttggctgcggtaggttac

SEQ ID NO: 3271314 - DNA, 25 bp, Homo sapien
tcctgatggttggtaccagggtgcc

SEQ ID NO: 3271315 - DNA, 25 bp, Homo sapien
gaggtgatttcacgcttctgctagc

SEQ ID NO: 3271316 - DNA, 25 bp, Homo sapien
gtaggttactgctccagttatggcc

SEQ ID NO: 3271317 - DNA, 25 bp, Homo sapien
tggacatccctggaatagagcaatc

SEQ ID NO: 3271318 - DNA, 25 bp, Homo sapien
tagagcaatccaagatgtgtcccac

SEQ ID NO: 3271319 - DNA, 25 bp, Homo sapien
taaggacagcaatgacatgcagccc

SEQ ID NO: 3271320 - DNA, 25 bp, Homo sapien
gaatgtggcccaatacaacttcatc

SEQ ID NO: 3271321 - DNA, 25 bp, Homo sapien
gcagttgtcatatttcaagtgtgtt

SEQ ID NO: 3271322 - DNA, 25 bp, Homo sapien
gctcaatagcttgcccttagatttg

SEQ ID NO: 3271323 - DNA, 25 bp, Homo sapien
tatcgagctagaataacaagcagtt

SEQ ID NO: 3271324 - DNA, 25 bp, Homo sapien
aaaggacaaatcagtgctcaatagc

SEQ ID NO: 3271325 - DNA, 25 bp, Homo sapien
ccgtggtaagcaagtgagggcatcc

SEQ ID NO: 3271326 - DNA, 25 bp, Homo sapien
gcagctgtgctgcactgttccgttg

SEQ ID NO: 3271327 - DNA, 25 bp, Homo sapien
ggcctgacttggtgtgaccagctct

SEQ ID NO: 3271328 - DNA, 25 bp, Homo sapien
cactgttccgttgtctccatggagg

SEQ ID NO: 3271329 - DNA, 25 bp, Homo sapien
tgtgcatattttccggtgcctgtga

SEQ ID NO: 3271330 - DNA, 25 bp, Homo sapien
attaacatggccgatatcctgtgag

SEQ ID NO: 3271331 - DNA, 25 bp, Homo sapien
cccactagtaagaggagttgtaaca

SEQ ID NO: 3271332 - DNA, 25 bp, Homo sapien
caagaaccagttctgcatactccaa

SEQ ID NO: 3271333 - DNA, 25 bp, Homo sapien
ggaatgcagcccttaaacacacctg

SEQ ID NO: 3271334 - DNA, 25 bp, Homo sapien
gaaagaaggcactgatagcatcatg

SEQ ID NO: 3271335 - DNA, 25 bp, Homo sapien
tgggcacagatcgtagctctgagcc

SEQ ID NO: 3271336 - DNA, 25 bp, Homo sapien
gaaacggagatgaaatcgctgcttc

SEQ ID NO: 3271337 - DNA, 25 bp, Homo sapien
taaagtctatagttgatcagaagat

SEQ ID NO: 3271338 - DNA, 25 bp, Homo sapien
tttttaaagtctatagttgatcaga

SEQ ID NO: 3271339 - DNA, 25 bp, Homo sapien
ctatagttgatcagaagattttgta

SEQ ID NO: 3271340 - DNA, 25 bp, Homo sapien
gaacatactccctagcccatggtca

SEQ ID NO: 3271341 - DNA, 25 bp, Homo sapien
ctgcaaaggaaaatgggacaactgt

SEQ ID NO: 3271342 - DNA, 25 bp, Homo sapien
ccaatttagaaggattgtataggaa

SEQ ID NO: 3271343 - DNA, 25 bp, Homo sapien
ggaaaatgggacaactgtcatccaa

SEQ ID NO: 3271344 - DNA, 25 bp, Homo sapien
gacaactgtcatccaatttagaagg

SEQ ID NO: 3271345 - DNA, 25 bp, Homo sapien
ccagtagattctgagggctcacaga

SEQ ID NO: 3271346 - DNA, 25 bp, Homo sapien
aattcttaactggatgaatgatagc

SEQ ID NO: 3271347 - DNA, 25 bp, Homo sapien
gcaggagcacttcaaacacaggatg

SEQ ID NO: 3271348 - DNA, 25 bp, Homo sapien
tccacgcactcattcagccagtaga

SEQ ID NO: 3271349 - DNA, 25 bp, Homo sapien
ggcttttgccacagcactacctaga

SEQ ID NO: 3271350 - DNA, 25 bp, Homo sapien
cagcactacctagagcataggaata

SEQ ID NO: 3271351 - DNA, 25 bp, Homo sapien
ttactgcagacgttgagacagatcc

SEQ ID NO: 3271352 - DNA, 25 bp, Homo sapien
actgcagacgttgagacagatcctt

SEQ ID NO: 3271353 - DNA, 25 bp, Homo sapien
ccaagtacctctttcagtctgatgg

SEQ ID NO: 3271354 - DNA, 25 bp, Homo sapien
ggctttaagaagtagcaagaagaag

SEQ ID NO: 3271355 - DNA, 25 bp, Homo sapien
gcagccaagtacctctttcagtctg

SEQ ID NO: 3271356 - DNA, 25 bp, Homo sapien
cagaagcagccaagtacctctttca

SEQ ID NO: 3271357 - DNA, 25 bp, Homo sapien
ggctgcacgcgacgcttgcaggcca

SEQ ID NO: 3271358 - DNA, 25 bp, Homo sapien
gcttagcacccgagccagtggctgt

SEQ ID NO: 3271359 - DNA, 25 bp, Homo sapien
atctggctcagtgattgtaaacgca

SEQ ID NO: 3271360 - DNA, 25 bp, Homo sapien
ccaggccgaagcaccgtggtgcaat

SEQ ID NO: 3271361 - DNA, 25 bp, Homo sapien
cgaacacatccacacatcagtagga

SEQ ID NO: 3271362 - DNA, 25 bp, Homo sapien
ccacacatcagtaggaacaaactct

SEQ ID NO: 3271363 - DNA, 25 bp, Homo sapien
tccgaacacatccacacatcagtag

SEQ ID NO: 3271364 - DNA, 25 bp, Homo sapien
acacatcagtaggaacaaactctgg

SEQ ID NO: 3271365 - DNA, 25 bp, Homo sapien
tgagaccaagaacccaccaattccg

SEQ ID NO: 3271366 - DNA, 25 bp, Homo sapien
cgcgagggtccgcagcttcattctt

SEQ ID NO: 3271367 - DNA, 25 bp, Homo sapien
gaagtcagtgagaccaagaacccac

SEQ ID NO: 3271368 - DNA, 25 bp, Homo sapien
caagaacccaccaattccggacaca

SEQ ID NO: 3271369 - DNA, 25 bp, Homo sapien
tctatgggcaaagtcatcatctctc

SEQ ID NO: 3271370 - DNA, 25 bp, Homo sapien
tgtttggtctatgggcaaagtcatc

SEQ ID NO: 3271371 - DNA, 25 bp, Homo sapien
ttggtctatgggcaaagtcatcatc

SEQ ID NO: 3271372 - DNA, 25 bp, Homo sapien
tctttgtttggtctatgggcaaagt

SEQ ID NO: 3271373 - DNA, 25 bp, Homo sapien
caagagctagggtttccagactttt

SEQ ID NO: 3271374 - DNA, 25 bp, Homo sapien
ggtgacacttacactgaggcttggc

SEQ ID NO: 3271375 - DNA, 25 bp, Homo sapien
cccaaacaggtagagaaggtgagtg

SEQ ID NO: 3271376 - DNA, 25 bp, Homo sapien
ctgaggatgccactacaggccacga

SEQ ID NO: 3271377 - DNA, 25 bp, Homo sapien
tgggagcatttaggagcagcattgt

SEQ ID NO: 3271378 - DNA, 25 bp, Homo sapien
ggtatacgctgaaaagtatatgcgg

SEQ ID NO: 3271379 - DNA, 25 bp, Homo sapien
aacgggtatacgctgaaaagtatat

SEQ ID NO: 3271380 - DNA, 25 bp, Homo sapien
cgctgaaaagtatatgcggaaagaa

SEQ ID NO: 3271381 - DNA, 25 bp, Homo sapien
agtatatgcggaaagaaagaagcag

SEQ ID NO: 3271382 - DNA, 25 bp, Homo sapien
tggctaaaaggccaacctcttggtg

SEQ ID NO: 3271383 - DNA, 25 bp, Homo sapien
ctaaaaggccaacctcttggtgcat

SEQ ID NO: 3271384 - DNA, 25 bp, Homo sapien
ctctttgctctctggctaaaaggcc

SEQ ID NO: 3271385 - DNA, 25 bp, Homo sapien
tgctctctggctaaaaggccaacct

SEQ ID NO: 3271386 - DNA, 25 bp, Homo sapien
ctctatgatgctgagcccctcttcc

SEQ ID NO: 3271387 - DNA, 25 bp, Homo sapien
tctctctcccataccatgacctttg

SEQ ID NO: 3271388 - DNA, 25 bp, Homo sapien
aactgtgcggtctgcctgacctacc

SEQ ID NO: 3271389 - DNA, 25 bp, Homo sapien
gtgtccaactgtgcggtctgcctga

SEQ ID NO: 3271390 - DNA, 25 bp, Homo sapien
aattctccgtacgtgtgtgtgctca

SEQ ID NO: 3271391 - DNA, 25 bp, Homo sapien
gaaattctccgtacgtgtgtgtgct

SEQ ID NO: 3271392 - DNA, 25 bp, Homo sapien
agaaattctccgtacgtgtgtgtgc

SEQ ID NO: 3271393 - DNA, 25 bp, Homo sapien
ccagaaattctccgtacgtgtgtgt

SEQ ID NO: 3271394 - DNA, 25 bp, Homo sapien
atccaagaatactggtagtcagaca

SEQ ID NO: 3271395 - DNA, 25 bp, Homo sapien
cagcacttctgcatccaagaatact

SEQ ID NO: 3271396 - DNA, 25 bp, Homo sapien
tactggtagtcagacaagttattct

SEQ ID NO: 3271397 - DNA, 25 bp, Homo sapien
acttctgcatccaagaatactggta

SEQ ID NO: 3271398 - DNA, 25 bp, Homo sapien
tcggtccaaatcttaacagccaggg

SEQ ID NO: 3271399 - DNA, 25 bp, Homo sapien
gagtagttctgtgcaaagtgtcaca

SEQ ID NO: 3271400 - DNA, 25 bp, Homo sapien
gaaataagccttgctaggcaaaagc

SEQ ID NO: 3271401 - DNA, 25 bp, Homo sapien
tcaagacgattggagccaaaggtgc

SEQ ID NO: 3271402 - DNA, 25 bp, Homo sapien
tgatagactgcttgatattatccca

SEQ ID NO: 3271403 - DNA, 25 bp, Homo sapien
gtatgatagactgcttgatattatc

SEQ ID NO: 3271404 - DNA, 25 bp, Homo sapien
gatagactgcttgatattatcccac

SEQ ID NO: 3271405 - DNA, 25 bp, Homo sapien
atgatagactgcttgatattatccc

SEQ ID NO: 3271406 - DNA, 25 bp, Homo sapien
taaaatgacctgctacatggtgggc

SEQ ID NO: 3271407 - DNA, 25 bp, Homo sapien
gagctgcagggttgaatcaaaagca

SEQ ID NO: 3271408 - DNA, 25 bp, Homo sapien
tgaatccgaatctgcccaccagagg

SEQ ID NO: 3271409 - DNA, 25 bp, Homo sapien
caggacctccataagtgtttgctga

SEQ ID NO: 3271410 - DNA, 25 bp, Homo sapien
tactgtaccctaagtgcctaggaca

SEQ ID NO: 3271411 - DNA, 25 bp, Homo sapien
tggcccatagtaagcacctaataaa

SEQ ID NO: 3271412 - DNA, 25 bp, Homo sapien
aatatgaccgatgttctttaagaga

SEQ ID NO: 3271413 - DNA, 25 bp, Homo sapien
agtaggacctaatgtaatatgaccg

SEQ ID NO: 3271414 - DNA, 25 bp, Homo sapien
cctaggactgcttcacctctaaata

SEQ ID NO: 3271415 - DNA, 25 bp, Homo sapien
tcaggatccacaaggaaccatgttt

SEQ ID NO: 3271416 - DNA, 25 bp, Homo sapien
ttgagggcctaagtcttactctgcc

SEQ ID NO: 3271417 - DNA, 25 bp, Homo sapien
gaatgtccagttcaccaatcccttg

SEQ ID NO: 3271418 - DNA, 25 bp, Homo sapien
tctctgagttaggtcccaagaacca

SEQ ID NO: 3271419 - DNA, 25 bp, Homo sapien
tgccaaacacaatccaagacaactg

SEQ ID NO: 3271420 - DNA, 25 bp, Homo sapien
ggagtggatcatacatccagtctga

SEQ ID NO: 3271421 - DNA, 25 bp, Homo sapien
actgtccttggattgcactgtcctg

SEQ ID NO: 3271422 - DNA, 25 bp, Homo sapien
cgtcatgtgactgcccggagttggt

SEQ ID NO: 3271423 - DNA, 25 bp, Homo sapien
gagccctgacattgctgcgctcggg

SEQ ID NO: 3271424 - DNA, 25 bp, Homo sapien
gcgcctcgcaaagtaagtcccgtct

SEQ ID NO: 3271425 - DNA, 25 bp, Homo sapien
gcctttatttctcgtcggcggcgcc

SEQ ID NO: 3271426 - DNA, 25 bp, Homo sapien
tgcgggcttgggaaagtgtggcggc

SEQ ID NO: 3271427 - DNA, 25 bp, Homo sapien
gcgggcttgggaaagtgtggcggct

SEQ ID NO: 3271428 - DNA, 25 bp, Homo sapien
ctgcgggcttgggaaagtgtggcgg

SEQ ID NO: 3271429 - DNA, 25 bp, Homo sapien
cagaaatctccgtgctctccgcgtg

SEQ ID NO: 3271430 - DNA, 25 bp, Homo sapien
atctccgtgctctccgcgtgtggca

SEQ ID NO: 3271431 - DNA, 25 bp, Homo sapien
tgctctccgcgtgtggcaacgttgt

SEQ ID NO: 3271432 - DNA, 25 bp, Homo sapien
gcccgctcacgattccctccaaagc

SEQ ID NO: 3271433 - DNA, 25 bp, Homo sapien
gaagacgccttaggcaactgcctgc

SEQ ID NO: 3271434 - DNA, 25 bp, Homo sapien
caattgggattggaggcagcatccc

SEQ ID NO: 3271435 - DNA, 25 bp, Homo sapien
ctactgacaaggagaagcacttttc

SEQ ID NO: 3271436 - DNA, 25 bp, Homo sapien
gcagcatcccattctcggttctgga

SEQ ID NO: 3271437 - DNA, 25 bp, Homo sapien
tgcgtcatacattccaagtggcata

SEQ ID NO: 3271438 - DNA, 25 bp, Homo sapien
ccaagtggcatatgtgtgctctttc

SEQ ID NO: 3271439 - DNA, 25 bp, Homo sapien
cctgttctttgtttcaaggctgggg

SEQ ID NO: 3271440 - DNA, 25 bp, Homo sapien
gctggggtttgcgtcatacattcca

SEQ ID NO: 3271441 - DNA, 25 bp, Homo sapien
gtaaacagactgtccccacgttctg

SEQ ID NO: 3271442 - DNA, 25 bp, Homo sapien
gccagttggaaggagtggaaactgt

SEQ ID NO: 3271443 - DNA, 25 bp, Homo sapien
ggaaactgtcactaatgtaaacaga

SEQ ID NO: 3271444 - DNA, 25 bp, Homo sapien
ccaagtgtgcgtactgagacagggt

SEQ ID NO: 3271445 - DNA, 25 bp, Homo sapien
cctgagcccactgtcagacccgggg

SEQ ID NO: 3271446 - DNA, 25 bp, Homo sapien
gcagccggcatgaagggcacttgtt

SEQ ID NO: 3271447 - DNA, 25 bp, Homo sapien
tcagacccggggagtgcacgggagg

SEQ ID NO: 3271448 - DNA, 25 bp, Homo sapien
taacggggtgccaagcatgggtgcc

SEQ ID NO: 3271449 - DNA, 25 bp, Homo sapien
ggagaaggatgggatgagaagagat

SEQ ID NO: 3271450 - DNA, 25 bp, Homo sapien
ctggagaaggatgggatgagaagag

SEQ ID NO: 3271451 - DNA, 25 bp, Homo sapien
tggagaaggatgggatgagaagaga

SEQ ID NO: 3271452 - DNA, 25 bp, Homo sapien
gaatcttatctgaagccatgtcctg

SEQ ID NO: 3271453 - DNA, 25 bp, Homo sapien
caagttggacttgccttggcaactc

SEQ ID NO: 3271454 - DNA, 25 bp, Homo sapien
ctttccgaagtacagggtgtgggca

SEQ ID NO: 3271455 - DNA, 25 bp, Homo sapien
ctgtttggacaagttggacttgcct

SEQ ID NO: 3271456 - DNA, 25 bp, Homo sapien
ccaaatttggctaatgagtgcctga

SEQ ID NO: 3271457 - DNA, 25 bp, Homo sapien
ggagacacatttgaacattgagcag

SEQ ID NO: 3271458 - DNA, 25 bp, Homo sapien
cactgagcacttaaaccaaatttgg

SEQ ID NO: 3271459 - DNA, 25 bp, Homo sapien
ctgaaagtgtgtctagtagcaggac

SEQ ID NO: 3271460 - DNA, 25 bp, Homo sapien
gctgcttttaggccgccagggacta

SEQ ID NO: 3271461 - DNA, 25 bp, Homo sapien
ttagcgctaagccagcccctcatgg

SEQ ID NO: 3271462 - DNA, 25 bp, Homo sapien
gggtttctgcaggtacaacaccagt

SEQ ID NO: 3271463 - DNA, 25 bp, Homo sapien
tctgcaggtacaacaccagtgccat

SEQ ID NO: 3271464 - DNA, 25 bp, Homo sapien
gcactggaggtccatccgtggccag

SEQ ID NO: 3271465 - DNA, 25 bp, Homo sapien
ccagtacagccgtgcttgtatgcat

SEQ ID NO: 3271466 - DNA, 25 bp, Homo sapien
tctgatttggatatggggccagtac

SEQ ID NO: 3271467 - DNA, 25 bp, Homo sapien
gcattgctttgatagaacataggaa

SEQ ID NO: 3271468 - DNA, 25 bp, Homo sapien
tgcaaaagcttgtgtgtgccaccca

SEQ ID NO: 3271469 - DNA, 25 bp, Homo sapien
tacacggcaccagattgttggaagc

SEQ ID NO: 3271470 - DNA, 25 bp, Homo sapien
aagtgaaccagcttgagggaccaca

SEQ ID NO: 3271471 - DNA, 25 bp, Homo sapien
gtgtcagtccctacacggcaccaga

SEQ ID NO: 3271472 - DNA, 25 bp, Homo sapien
tgttggtcagcatccaagcacctga

SEQ ID NO: 3271473 - DNA, 25 bp, Homo sapien
ttcagcattggattcagcagccagc

SEQ ID NO: 3271474 - DNA, 25 bp, Homo sapien
gaaggcaacgattacctccacaggg

SEQ ID NO: 3271475 - DNA, 25 bp, Homo sapien
tagataaccttgacctccaccagtg

SEQ ID NO: 3271476 - DNA, 25 bp, Homo sapien
tatggaggtctttgccaccaatggg

SEQ ID NO: 3271477 - DNA, 25 bp, Homo sapien
cagatttcaagctagtgcagtcacc

SEQ ID NO: 3271478 - DNA, 25 bp, Homo sapien
tggccccttgcaccggttagctaga

SEQ ID NO: 3271479 - DNA, 25 bp, Homo sapien
gatgagcccaaactttcgatctagg

SEQ ID NO: 3271480 - DNA, 25 bp, Homo sapien
tcccatgctggtcaatacgctttca

SEQ ID NO: 3271481 - DNA, 25 bp, Homo sapien
tctgaacaaaagcaacccagagcgg

SEQ ID NO: 3271482 - DNA, 25 bp, Homo sapien
ttagctgttattgtggaagacctca

SEQ ID NO: 3271483 - DNA, 25 bp, Homo sapien
gagttcagtgaatagcctcatgggc

SEQ ID NO: 3271484 - DNA, 25 bp, Homo sapien
gactttcaagccttgctgatctgct

SEQ ID NO: 3271485 - DNA, 25 bp, Homo sapien
aagaactcagaaaggtggctcttgg

SEQ ID NO: 3271486 - DNA, 25 bp, Homo sapien
ttggggactttcaagccttgctgat

SEQ ID NO: 3271487 - DNA, 25 bp, Homo sapien
ttaaagaactcagaaaggtggctct

SEQ ID NO: 3271488 - DNA, 25 bp, Homo sapien
cagtggccttccctactgggggttg

SEQ ID NO: 3271489 - DNA, 25 bp, Homo sapien
tgagctggtaacctttagggagggc

SEQ ID NO: 3271490 - DNA, 25 bp, Homo sapien
gagcacacctagtatttttcccaaa

SEQ ID NO: 3271491 - DNA, 25 bp, Homo sapien
cagcgtaggactggcagtggccttc

SEQ ID NO: 3271492 - DNA, 25 bp, Homo sapien
gaaatgagggtctaaagccttgatg

SEQ ID NO: 3271493 - DNA, 25 bp, Homo sapien
ggtctaaagccttgatgtaagcacg

SEQ ID NO: 3271494 - DNA, 25 bp, Homo sapien
tggtccacgttgaaatgagggtcta

SEQ ID NO: 3271495 - DNA, 25 bp, Homo sapien
ttgatgtaagcacgaaagcgtgtgg

SEQ ID NO: 3271496 - DNA, 25 bp, Homo sapien
agagttctcacgacaccctggagct

SEQ ID NO: 3271497 - DNA, 25 bp, Homo sapien
aacagagccagaaccacgggtggct

SEQ ID NO: 3271498 - DNA, 25 bp, Homo sapien
tgcctgctcccggaaggtaacaggg

SEQ ID NO: 3271499 - DNA, 25 bp, Homo sapien
cgggtggctccaacattcagatctg

SEQ ID NO: 3271500 - DNA, 25 bp, Homo sapien
ccaggaggacaaacactttggcttg

SEQ ID NO: 3271501 - DNA, 25 bp, Homo sapien
gccaggaggacaaacactttggctt

SEQ ID NO: 3271502 - DNA, 25 bp, Homo sapien
aggaggacaaacactttggcttgta

SEQ ID NO: 3271503 - DNA, 25 bp, Homo sapien
ggacaaacactttggcttgtaagta

SEQ ID NO: 3271504 - DNA, 25 bp, Homo sapien
aaatacccaggaacgtgattccagg

SEQ ID NO: 3271505 - DNA, 25 bp, Homo sapien
aggacaaatacccaggaacgtgatt

SEQ ID NO: 3271506 - DNA, 25 bp, Homo sapien
acgtgattccaggagagaatacttc

SEQ ID NO: 3271507 - DNA, 25 bp, Homo sapien
caggaacgtgattccaggagagaat

SEQ ID NO: 3271508 - DNA, 25 bp, Homo sapien
gaacgctttgctcctaattgtctgg

SEQ ID NO: 3271509 - DNA, 25 bp, Homo sapien
tgcctgcaccctcaatggagaaagc

SEQ ID NO: 3271510 - DNA, 25 bp, Homo sapien
tatgactcaggtttaagggtgggca

SEQ ID NO: 3271511 - DNA, 25 bp, Homo sapien
ggtcacgtgatcctagaagagccta

SEQ ID NO: 3271512 - DNA, 25 bp, Homo sapien
gcccgtgggattgctgcgtttcagc

SEQ ID NO: 3271513 - DNA, 25 bp, Homo sapien
ggattgctgcgtttcagcctcaggg

SEQ ID NO: 3271514 - DNA, 25 bp, Homo sapien
cagcctcaggggatggcccgctgat

SEQ ID NO: 3271515 - DNA, 25 bp, Homo sapien
cgtgggattgctgcgtttcagcctc

SEQ ID NO: 3271516 - DNA, 25 bp, Homo sapien
aagctccagagtcatttttaaaaca

SEQ ID NO: 3271517 - DNA, 25 bp, Homo sapien
tttttaaaacatgatcggagttcat

SEQ ID NO: 3271518 - DNA, 25 bp, Homo sapien
tagaccttattttgtggccatgagg

SEQ ID NO: 3271519 - DNA, 25 bp, Homo sapien
agctaccttattctttttagtggca

SEQ ID NO: 3271520 - DNA, 25 bp, Homo sapien
tccataccaggaaatatacagctac

SEQ ID NO: 3271521 - DNA, 25 bp, Homo sapien
catagaaatcaaatgctccctgtaa

SEQ ID NO: 3271522 - DNA, 25 bp, Homo sapien
tacatcccaacagtgtatgtggtcc

SEQ ID NO: 3271523 - DNA, 25 bp, Homo sapien
tgtatcaatgtacatcccaacagtg

SEQ ID NO: 3271524 - DNA, 25 bp, Homo sapien
tgtcaaattgccatcataaaggttg

SEQ ID NO: 3271525 - DNA, 25 bp, Homo sapien
gccatcataaaggttgtatcaatgt

SEQ ID NO: 3271526 - DNA, 25 bp, Homo sapien
taattcgggaaaagcatgtgtggca

SEQ ID NO: 3271527 - DNA, 25 bp, Homo sapien
tagcagctcgaaggtttgcccagaa

SEQ ID NO: 3271528 - DNA, 25 bp, Homo sapien
tacttttgggcaagcacctgaagac

SEQ ID NO: 3271529 - DNA, 25 bp, Homo sapien
tgactcagatccaagtgttccaagg

SEQ ID NO: 3271530 - DNA, 25 bp, Homo sapien
gacagtatttagatgcagatgagca

SEQ ID NO: 3271531 - DNA, 25 bp, Homo sapien
cacagataggcatggtgtcaaagtc

SEQ ID NO: 3271532 - DNA, 25 bp, Homo sapien
caggtgtgacatgttgccagcttcc

SEQ ID NO: 3271533 - DNA, 25 bp, Homo sapien
gattccatcacgcaaaagaacccag

SEQ ID NO: 3271534 - DNA, 25 bp, Homo sapien
ctttcttagagacatgttggagcag

SEQ ID NO: 3271535 - DNA, 25 bp, Homo sapien
actctcagtttggagacagaatgaa

SEQ ID NO: 3271536 - DNA, 25 bp, Homo sapien
taaatccagtgtcgttgtggctggg

SEQ ID NO: 3271537 - DNA, 25 bp, Homo sapien
caagtctgcgggaacctttcttaga

SEQ ID NO: 3271538 - DNA, 25 bp, Homo sapien
ctggcagctctggagcatcaccctc

SEQ ID NO: 3271539 - DNA, 25 bp, Homo sapien
atcaccctctgctgtcataacaata

SEQ ID NO: 3271540 - DNA, 25 bp, Homo sapien
gcatcaccctctgctgtcataacaa

SEQ ID NO: 3271541 - DNA, 25 bp, Homo sapien
ggcagctctggagcatcaccctctg

SEQ ID NO: 3271542 - DNA, 25 bp, Homo sapien
tatgtaaatgtttctgatgagtctc

SEQ ID NO: 3271543 - DNA, 25 bp, Homo sapien
tgtaaatgtttctgatgagtctcat

SEQ ID NO: 3271544 - DNA, 25 bp, Homo sapien
caaaatatgtaaatgtttctgatga

SEQ ID NO: 3271545 - DNA, 25 bp, Homo sapien
aatatgtaaatgtttctgatgagtc

SEQ ID NO: 3271546 - DNA, 25 bp, Homo sapien
tttaccacttatttcctcatatgaa

SEQ ID NO: 3271547 - DNA, 25 bp, Homo sapien
ttaccacttatttcctcatatgaat

SEQ ID NO: 3271548 - DNA, 25 bp, Homo sapien
tccaagctggctactgtgccatgtc

SEQ ID NO: 3271549 - DNA, 25 bp, Homo sapien
cagagaggagaagcataatggacct

SEQ ID NO: 3271550 - DNA, 25 bp, Homo sapien
ggtaagtcaggattctcagagagga

SEQ ID NO: 3271551 - DNA, 25 bp, Homo sapien
tctccgttgttgaggtaagtcagga

SEQ ID NO: 3271552 - DNA, 25 bp, Homo sapien
tgtatttgtggatatagaaagtccc

SEQ ID NO: 3271553 - DNA, 25 bp, Homo sapien
gacttgatatcaaggagttacccct

SEQ ID NO: 3271554 - DNA, 25 bp, Homo sapien
ccctggagccaatatctgactttca

SEQ ID NO: 3271555 - DNA, 25 bp, Homo sapien
cagacattgtgagcctttgacttga

SEQ ID NO: 3271556 - DNA, 25 bp, Homo sapien
ttcaaaggtcttgatattcagctgc

SEQ ID NO: 3271557 - DNA, 25 bp, Homo sapien
gcaaaagcaatctggattactgcca

SEQ ID NO: 3271558 - DNA, 25 bp, Homo sapien
gaaacctgccagtgaataccaagcc

SEQ ID NO: 3271559 - DNA, 25 bp, Homo sapien
caggtgtgacatgttgccagcttct

SEQ ID NO: 3271560 - DNA, 25 bp, Homo sapien
tgtgccaagatacatactaattgct

SEQ ID NO: 3271561 - DNA, 25 bp, Homo sapien
ggcatagaatcaaagctttcaggtt

SEQ ID NO: 3271562 - DNA, 25 bp, Homo sapien
tggcatagaatcaaagctttcaggt

SEQ ID NO: 3271563 - DNA, 25 bp, Homo sapien
atttcaatgtgccaagatacatact

SEQ ID NO: 3271564 - DNA, 25 bp, Homo sapien
catgttggtgatgtagtctataaat

SEQ ID NO: 3271565 - DNA, 25 bp, Homo sapien
catatccctactactacgttaaaag

SEQ ID NO: 3271566 - DNA, 25 bp, Homo sapien
tatgttaatatcatatccctactac

SEQ ID NO: 3271567 - DNA, 25 bp, Homo sapien
tggtgatgtagtctataaatagtat

SEQ ID NO: 3271568 - DNA, 25 bp, Homo sapien
aatgaggtggcttaagatgtaacga

SEQ ID NO: 3271569 - DNA, 25 bp, Homo sapien
tggcttaagatgtaacgacatccta

SEQ ID NO: 3271570 - DNA, 25 bp, Homo sapien
ctaaggaccgaatcactgaggttga

SEQ ID NO: 3271571 - DNA, 25 bp, Homo sapien
taacgacatcctaaggaccgaatca

SEQ ID NO: 3271572 - DNA, 25 bp, Homo sapien
ttgaatcgaggttttctgtaaagct

SEQ ID NO: 3271573 - DNA, 25 bp, Homo sapien
cacggcttgcactctctcagcagag

SEQ ID NO: 3271574 - DNA, 25 bp, Homo sapien
caggtgcgtggatgattcgttgaca

SEQ ID NO: 3271575 - DNA, 25 bp, Homo sapien
tcagaattggctgcaggagggaatt

SEQ ID NO: 3271576 - DNA, 25 bp, Homo sapien
acttcctaagtgcagatagtattgc

SEQ ID NO: 3271577 - DNA, 25 bp, Homo sapien
tagtattgcacacaagatattggct

SEQ ID NO: 3271578 - DNA, 25 bp, Homo sapien
ctggttgagagagaacaaaaaactt

SEQ ID NO: 3271579 - DNA, 25 bp, Homo sapien
caaaaacaagttgagccaagtagag

SEQ ID NO: 3271580 - DNA, 25 bp, Homo sapien
tgaactctaatgcacccacgaaact

SEQ ID NO: 3271581 - DNA, 25 bp, Homo sapien
taaatgacagtcctacaatgagcca

SEQ ID NO: 3271582 - DNA, 25 bp, Homo sapien
tcaagcattccatagccacatacgg

SEQ ID NO: 3271583 - DNA, 25 bp, Homo sapien
cctgctcactctgggaatggtcctg

SEQ ID NO: 3271584 - DNA, 25 bp, Homo sapien
taaactatatttagggccaagtgca

SEQ ID NO: 3271585 - DNA, 25 bp, Homo sapien
caagtgcagtgactcgtgtgtaatc

SEQ ID NO: 3271586 - DNA, 25 bp, Homo sapien
tggcatgcccatattcctagctact

SEQ ID NO: 3271587 - DNA, 25 bp, Homo sapien
tatatttcaatacgtccagggctct

SEQ ID NO: 3271588 - DNA, 25 bp, Homo sapien
catcaggcctcaatggtttactttt

SEQ ID NO: 3271589 - DNA, 25 bp, Homo sapien
taaaagagcaatattttggcagaga

SEQ ID NO: 3271590 - DNA, 25 bp, Homo sapien
tacttttggttaaattgatgttcag

SEQ ID NO: 3271591 - DNA, 25 bp, Homo sapien
gtaatgttgggcctcactaaaagct

SEQ ID NO: 3271592 - DNA, 25 bp, Homo sapien
tcatcatccagtagtttcccgaaag

SEQ ID NO: 3271593 - DNA, 25 bp, Homo sapien
ctttgagttgttgctatcctggaaa

SEQ ID NO: 3271594 - DNA, 25 bp, Homo sapien
catgcattggatttctgcagagctg

SEQ ID NO: 3271595 - DNA, 25 bp, Homo sapien
tctctcgtttcttgggatgcacagc

SEQ ID NO: 3271596 - DNA, 25 bp, Homo sapien
ttgctgggtacttttaggagattca

SEQ ID NO: 3271597 - DNA, 25 bp, Homo sapien
gagattcatgtccttcagtgggatt

SEQ ID NO: 3271598 - DNA, 25 bp, Homo sapien
tgttcctgatggtctaaaatttcaa

SEQ ID NO: 3271599 - DNA, 25 bp, Homo sapien
tctttgaactgttcgttttgctggg

SEQ ID NO: 3271600 - DNA, 25 bp, Homo sapien
gaagcaactgtgtcctagtaggatg

SEQ ID NO: 3271601 - DNA, 25 bp, Homo sapien
gactatataattaccggtggcactt

SEQ ID NO: 3271602 - DNA, 25 bp, Homo sapien
tatggcttgtcattcacacgggtgg

SEQ ID NO: 3271603 - DNA, 25 bp, Homo sapien
tattagatggatgtggacttctcag

SEQ ID NO: 3271604 - DNA, 25 bp, Homo sapien
agggcagtgcgagcttgtccaaagt

SEQ ID NO: 3271605 - DNA, 25 bp, Homo sapien
aagtgacagggagctaccagaagaa

SEQ ID NO: 3271606 - DNA, 25 bp, Homo sapien
gggagctaccagaagaagcagttca

SEQ ID NO: 3271607 - DNA, 25 bp, Homo sapien
cagtgcgagcttgtccaaagtgaca

SEQ ID NO: 3271608 - DNA, 25 bp, Homo sapien
gagagaggtaccagtattatgccca

SEQ ID NO: 3271609 - DNA, 25 bp, Homo sapien
ttcaggtggaggtccgagatgcttc

SEQ ID NO: 3271610 - DNA, 25 bp, Homo sapien
agagtgaatagccatgaccctgaga

SEQ ID NO: 3271611 - DNA, 25 bp, Homo sapien
gatttaatcccagcatgccggttta

SEQ ID NO: 3271612 - DNA, 25 bp, Homo sapien
tttgaattctttggcaggagactcc

SEQ ID NO: 3271613 - DNA, 25 bp, Homo sapien
catgacggagctagaattgaaaccc

SEQ ID NO: 3271614 - DNA, 25 bp, Homo sapien
aaaggtcttggctagctactctaag

SEQ ID NO: 3271615 - DNA, 25 bp, Homo sapien
gattaagggcttgcatatttaccca

SEQ ID NO: 3271616 - DNA, 25 bp, Homo sapien
tctttctgtttagaatggcctttcc

SEQ ID NO: 3271617 - DNA, 25 bp, Homo sapien
ttctgtttagaatggcctttccatt

SEQ ID NO: 3271618 - DNA, 25 bp, Homo sapien
ctttatctttctgtttagaatggcc

SEQ ID NO: 3271619 - DNA, 25 bp, Homo sapien
gtttagaatggcctttccattcttc

SEQ ID NO: 3271620 - DNA, 25 bp, Homo sapien
cacattgaaaaatccaaagttaaag

SEQ ID NO: 3271621 - DNA, 25 bp, Homo sapien
ttacacattgaaaaatccaaagtta

SEQ ID NO: 3271622 - DNA, 25 bp, Homo sapien
cattacacattgaaaaatccaaagt

SEQ ID NO: 3271623 - DNA, 25 bp, Homo sapien
tacacattgaaaaatccaaagttaa

SEQ ID NO: 3271624 - DNA, 25 bp, Homo sapien
caagttactgagctggttaccctgt

SEQ ID NO: 3271625 - DNA, 25 bp, Homo sapien
gtgacccgaatgagaagagtgacca

SEQ ID NO: 3271626 - DNA, 25 bp, Homo sapien
ttctacaagcatcccacgcagtggt

SEQ ID NO: 3271627 - DNA, 25 bp, Homo sapien
gatctcaggactcaagagtgacccg

SEQ ID NO: 3271628 - DNA, 25 bp, Homo sapien
tagcaaagaaacaagtggatccctt

SEQ ID NO: 3271629 - DNA, 25 bp, Homo sapien
ttcagaactcagttatagcaaagaa

SEQ ID NO: 3271630 - DNA, 25 bp, Homo sapien
gtgtcagaactgtttaaatcaaagt

SEQ ID NO: 3271631 - DNA, 25 bp, Homo sapien
caggtgcttcccttgacttcatgat

SEQ ID NO: 3271632 - DNA, 25 bp, Homo sapien
cagcaatatcaacaggaggaatatt

SEQ ID NO: 3271633 - DNA, 25 bp, Homo sapien
tgtgtttacatctatgctgatgcaa

SEQ ID NO: 3271634 - DNA, 25 bp, Homo sapien
tataaatggtgaactgcgacccgaa

SEQ ID NO: 3271635 - DNA, 25 bp, Homo sapien
taaagtcattgttggaacttccaaa

SEQ ID NO: 3271636 - DNA, 25 bp, Homo sapien
tcagcttaatattaatggctgccct

SEQ ID NO: 3271637 - DNA, 25 bp, Homo sapien
tctcatgaaggcaaatctgcatacc

SEQ ID NO: 3271638 - DNA, 25 bp, Homo sapien
gataactgctaggaatggagtactg

SEQ ID NO: 3271639 - DNA, 25 bp, Homo sapien
cccagaaagaatcgtgcccactata

SEQ ID NO: 3271640 - DNA, 25 bp, Homo sapien
tcctggccatgagacttttgagctt

SEQ ID NO: 3271641 - DNA, 25 bp, Homo sapien
cttttagtccaagaacagtctcctt

SEQ ID NO: 3271642 - DNA, 25 bp, Homo sapien
aaatagtgtcagtaagtatatttga

SEQ ID NO: 3271643 - DNA, 25 bp, Homo sapien
tcatcatagcttacagaattctggc

SEQ ID NO: 3271644 - DNA, 25 bp, Homo sapien
tcatctgtgtagtcatttcagctat

SEQ ID NO: 3271645 - DNA, 25 bp, Homo sapien
tgcggaaaaccgaacacatcgctga

SEQ ID NO: 3271646 - DNA, 25 bp, Homo sapien
cagtagggtggcaagaaatcttcac

SEQ ID NO: 3271647 - DNA, 25 bp, Homo sapien
taagtgtgtggtgctcaaccccaga

SEQ ID NO: 3271648 - DNA, 25 bp, Homo sapien
catgtggaccatgcgtgtaccagac

SEQ ID NO: 3271649 - DNA, 25 bp, Homo sapien
acagtgataagatgtcagaagtcca

SEQ ID NO: 3271650 - DNA, 25 bp, Homo sapien
cagaagtccaaagctcagatatata

SEQ ID NO: 3271651 - DNA, 25 bp, Homo sapien
tatatttaagattgttgttttctgg

SEQ ID NO: 3271652 - DNA, 25 bp, Homo sapien
gataggtctttaggaacgtggatga

SEQ ID NO: 3271653 - DNA, 25 bp, Homo sapien
atggcaaaatggaagatgctagtca

SEQ ID NO: 3271654 - DNA, 25 bp, Homo sapien
tggcaaaatggaagatgctagtcat

SEQ ID NO: 3271655 - DNA, 25 bp, Homo sapien
tttggaacactagacattcctaaag

SEQ ID NO: 3271656 - DNA, 25 bp, Homo sapien
ctagacattcctaaaggtagaagct

SEQ ID NO: 3271657 - DNA, 25 bp, Homo sapien
cagatcatcttgatacagatacaga

SEQ ID NO: 3271658 - DNA, 25 bp, Homo sapien
cttcagatcatcttgatacagatac

SEQ ID NO: 3271659 - DNA, 25 bp, Homo sapien
gggttacatggcctaaaactagaga

SEQ ID NO: 3271660 - DNA, 25 bp, Homo sapien
gaatggtggctcaccaaaagatatg

SEQ ID NO: 3271661 - DNA, 25 bp, Homo sapien
ggaggctacattcttttgggttaca

SEQ ID NO: 3271662 - DNA, 25 bp, Homo sapien
aatccccagaaaccatgaatgttac

SEQ ID NO: 3271663 - DNA, 25 bp, Homo sapien
agagggcctggtacccctattagtg

SEQ ID NO: 3271664 - DNA, 25 bp, Homo sapien
acccctattagtgttcatgaagacc

SEQ ID NO: 3271665 - DNA, 25 bp, Homo sapien
gggtgcccaatatgcctttgttatc

SEQ ID NO: 3271666 - DNA, 25 bp, Homo sapien
gatttcttctaacgaggaagagggc

SEQ ID NO: 3271667 - DNA, 25 bp, Homo sapien
ggtcttaatggacaatacccataca

SEQ ID NO: 3271668 - DNA, 25 bp, Homo sapien
tacccatacaatctatctggcccat

SEQ ID NO: 3271669 - DNA, 25 bp, Homo sapien
caaatcaaggctttgactggtctta

SEQ ID NO: 3271670 - DNA, 25 bp, Homo sapien
tggcccattaagtttagtcctgtaa

SEQ ID NO: 3271671 - DNA, 25 bp, Homo sapien
aacagcagcattgcctccgggagta

SEQ ID NO: 3271672 - DNA, 25 bp, Homo sapien
gggagtaactgacttatatctcatt

SEQ ID NO: 3271673 - DNA, 25 bp, Homo sapien
gcagcattgcctccgggagtaactg

SEQ ID NO: 3271674 - DNA, 25 bp, Homo sapien
ggagtaactgacttatatctcattt

SEQ ID NO: 3271675 - DNA, 25 bp, Homo sapien
caagacaacctgcttgtctgttcca

SEQ ID NO: 3271676 - DNA, 25 bp, Homo sapien
aagacaacctgcttgtctgttccat

SEQ ID NO: 3271677 - DNA, 25 bp, Homo sapien
agacaacctgcttgtctgttccatt

SEQ ID NO: 3271678 - DNA, 25 bp, Homo sapien
tgtagcatagtctgtgggttacctg

SEQ ID NO: 3271679 - DNA, 25 bp, Homo sapien
ggttacctgataggcctgtattaaa

SEQ ID NO: 3271680 - DNA, 25 bp, Homo sapien
tctatggttccaaatttcactacag

SEQ ID NO: 3271681 - DNA, 25 bp, Homo sapien
tacagtcagtttactattgtctaca

SEQ ID NO: 3271682 - DNA, 25 bp, Homo sapien
ggtggctatgcttggcagaagtgtg

SEQ ID NO: 3271683 - DNA, 25 bp, Homo sapien
tgggtgtgtttcggctgctttgttt

SEQ ID NO: 3271684 - DNA, 25 bp, Homo sapien
tctgttagttatgacgcaagcagcc

SEQ ID NO: 3271685 - DNA, 25 bp, Homo sapien
agcttcatctctgttagttatgacg

SEQ ID NO: 3271686 - DNA, 25 bp, Homo sapien
caagcagcccaaggattatgggctg

SEQ ID NO: 3271687 - DNA, 25 bp, Homo sapien
gctgagggtgcacaccaaacgggtt

SEQ ID NO: 3271688 - DNA, 25 bp, Homo sapien
tacgtgtatctgttcttcgcaaatg

SEQ ID NO: 3271689 - DNA, 25 bp, Homo sapien
tcttggctcctactgcaaattgtgg

SEQ ID NO: 3271690 - DNA, 25 bp, Homo sapien
tatttgaataagcagtaatctcacc

SEQ ID NO: 3271691 - DNA, 25 bp, Homo sapien
gcacaccatggctaccctggtttta

SEQ ID NO: 3271692 - DNA, 25 bp, Homo sapien
tatgacttgggtccaaaactgaaga

SEQ ID NO: 3271693 - DNA, 25 bp, Homo sapien
gactggaacttgtcctatgacttgg

SEQ ID NO: 3271694 - DNA, 25 bp, Homo sapien
cagtagaaccagatagcactgtcca

SEQ ID NO: 3271695 - DNA, 25 bp, Homo sapien
tcaatagcctatcaacaatgtggtt

SEQ ID NO: 3271696 - DNA, 25 bp, Homo sapien
gtgttaatgatgtaagcctgcaagc

SEQ ID NO: 3271697 - DNA, 25 bp, Homo sapien
tctttctcaagccaagtgaagggga

SEQ ID NO: 3271698 - DNA, 25 bp, Homo sapien
caccaggagatgagtgttaatgatg

SEQ ID NO: 3271699 - DNA, 25 bp, Homo sapien
tcttctccctatgcaagagatgaca

SEQ ID NO: 3271700 - DNA, 25 bp, Homo sapien
ttgatctccacttcagggagctaga

SEQ ID NO: 3271701 - DNA, 25 bp, Homo sapien
ccttgatctccacttcagggagcta

SEQ ID NO: 3271702 - DNA, 25 bp, Homo sapien
tgatctccacttcagggagctagat

SEQ ID NO: 3271703 - DNA, 25 bp, Homo sapien
cttgatctccacttcagggagctag

SEQ ID NO: 3271704 - DNA, 25 bp, Homo sapien
agcagcttcttttagagtcttcact

SEQ ID NO: 3271705 - DNA, 25 bp, Homo sapien
cagcttcttttagagtcttcactct

SEQ ID NO: 3271706 - DNA, 25 bp, Homo sapien
gcttcttttagagtcttcactcttt

SEQ ID NO: 3271707 - DNA, 25 bp, Homo sapien
cttttagagtcttcactctttccag

SEQ ID NO: 3271708 - DNA, 25 bp, Homo sapien
cccctgtggatacggagaaagagct

SEQ ID NO: 3271709 - DNA, 25 bp, Homo sapien
tgaatggcattagtgccctccccca

SEQ ID NO: 3271710 - DNA, 25 bp, Homo sapien
gaaagagctgtattaagagttggag

SEQ ID NO: 3271711 - DNA, 25 bp, Homo sapien
gctcaggttggaagtatgccatttt

SEQ ID NO: 3271712 - DNA, 25 bp, Homo sapien
gatgatggcttcatgcatgttattg

SEQ ID NO: 3271713 - DNA, 25 bp, Homo sapien
agtgatattgataatgaccctatga

SEQ ID NO: 3271714 - DNA, 25 bp, Homo sapien
atgatggcttcatgcatgttattgc

SEQ ID NO: 3271715 - DNA, 25 bp, Homo sapien
tgatattgataatgaccctatgagt

SEQ ID NO: 3271716 - DNA, 25 bp, Homo sapien
gaactgaaaacgtgttgaggcaaac

SEQ ID NO: 3271717 - DNA, 25 bp, Homo sapien
ccattcgctaacaggagaacagcac

SEQ ID NO: 3271718 - DNA, 25 bp, Homo sapien
tgcaaacatggatggaggagatact

SEQ ID NO: 3271719 - DNA, 25 bp, Homo sapien
cagaacttagttagagcagcccaaa

SEQ ID NO: 3271720 - DNA, 25 bp, Homo sapien
ggaagatgcctgaccctcaaaacaa

SEQ ID NO: 3271721 - DNA, 25 bp, Homo sapien
caggacttcatggacatttcccgca

SEQ ID NO: 3271722 - DNA, 25 bp, Homo sapien
tcccgcatgggaccgtttcagagtc

SEQ ID NO: 3271723 - DNA, 25 bp, Homo sapien
gcagctcagcgtggaactgtagccc

SEQ ID NO: 3271724 - DNA, 25 bp, Homo sapien
acggagaggactgtgaggaacctac

SEQ ID NO: 3271725 - DNA, 25 bp, Homo sapien
agaatgtgccgtttgggatagagcc

SEQ ID NO: 3271726 - DNA, 25 bp, Homo sapien
ggatagagcctagggaggaaaacaa

SEQ ID NO: 3271727 - DNA, 25 bp, Homo sapien
gaagaagatgagtaagcaactaagc

SEQ ID NO: 3271728 - DNA, 25 bp, Homo sapien
tgttggatctcctcccatcatcact

SEQ ID NO: 3271729 - DNA, 25 bp, Homo sapien
gtgcctggccgaaactggtttattg

SEQ ID NO: 3271730 - DNA, 25 bp, Homo sapien
actaagtccagaaagcgagggcttc

SEQ ID NO: 3271731 - DNA, 25 bp, Homo sapien
ttgccttacaacaaagttctgttgg

SEQ ID NO: 3271732 - DNA, 25 bp, Homo sapien
catctgtgagttattggagggcctt

SEQ ID NO: 3271733 - DNA, 25 bp, Homo sapien
tagatgtccctatgccattgcaagg

SEQ ID NO: 3271734 - DNA, 25 bp, Homo sapien
ggtattacacaaagaggagcagatc

SEQ ID NO: 3271735 - DNA, 25 bp, Homo sapien
tgagtgtaccccacattgcacagtt

SEQ ID NO: 3271736 - DNA, 25 bp, Homo sapien
tcaaagcaatctccctatggcctag

SEQ ID NO: 3271737 - DNA, 25 bp, Homo sapien
cgtcagctttgagcctttagccaga

SEQ ID NO: 3271738 - DNA, 25 bp, Homo sapien
tatggcctagaacctccgcttaatg

SEQ ID NO: 3271739 - DNA, 25 bp, Homo sapien
ttcttggaaagcaggtggatccacg

SEQ ID NO: 3271740 - DNA, 25 bp, Homo sapien
tccgaggactggtgcatatgatgct

SEQ ID NO: 3271741 - DNA, 25 bp, Homo sapien
catgaggataatggaggcacctcca

SEQ ID NO: 3271742 - DNA, 25 bp, Homo sapien
gaatgatgacactgacccaaagacc

SEQ ID NO: 3271743 - DNA, 25 bp, Homo sapien
ggcacctccagacagttacttacga

SEQ ID NO: 3271744 - DNA, 25 bp, Homo sapien
ggccactgcaaataagtccgctgcg

SEQ ID NO: 3271745 - DNA, 25 bp, Homo sapien
ctaatgttagcccaaaagagcccac

SEQ ID NO: 3271746 - DNA, 25 bp, Homo sapien
gaaaacacggtgtacaaagctgtct

SEQ ID NO: 3271747 - DNA, 25 bp, Homo sapien
aaaatagagttcgtaatggcaccac

SEQ ID NO: 3271748 - DNA, 25 bp, Homo sapien
tcagagacctgaagctcagcgatgt

SEQ ID NO: 3271749 - DNA, 25 bp, Homo sapien
taatattagtcagttgtaagcaccc

SEQ ID NO: 3271750 - DNA, 25 bp, Homo sapien
cagcggtaggtcttttggaacatga

SEQ ID NO: 3271751 - DNA, 25 bp, Homo sapien
gaaattgaaagactctgaccaggca

SEQ ID NO: 3271752 - DNA, 25 bp, Homo sapien
cagagcatcttgatatgagtccaaa

SEQ ID NO: 3271753 - DNA, 25 bp, Homo sapien
atgttgcagtggctatcctaaaggg

SEQ ID NO: 3271754 - DNA, 25 bp, Homo sapien
cttcttcagagcatcttgatatgag

SEQ ID NO: 3271755 - DNA, 25 bp, Homo sapien
tcctaaagggttgttcttcttcaga

SEQ ID NO: 3271756 - DNA, 25 bp, Homo sapien
cacatgcatgccacacggggtcctg

SEQ ID NO: 3271757 - DNA, 25 bp, Homo sapien
ccctagcagcaggactacgacacat

SEQ ID NO: 3271758 - DNA, 25 bp, Homo sapien
gccctttgctgctagtgcctgcctg

SEQ ID NO: 3271759 - DNA, 25 bp, Homo sapien
ctgaggacaggtccaccatgccctt

SEQ ID NO: 3271760 - DNA, 25 bp, Homo sapien
tgaatggttagcaaacttgcttact

SEQ ID NO: 3271761 - DNA, 25 bp, Homo sapien
tataatgaatggttagcaaacttgc

SEQ ID NO: 3271762 - DNA, 25 bp, Homo sapien
tggttagcaaacttgcttacttgaa

SEQ ID NO: 3271763 - DNA, 25 bp, Homo sapien
tcctatataatgaatggttagcaaa

SEQ ID NO: 3271764 - DNA, 25 bp, Homo sapien
gacaaaatgcatttgcaccctcgtg

SEQ ID NO: 3271765 - DNA, 25 bp, Homo sapien
taaacactaggcttgcagagaggtg

SEQ ID NO: 3271766 - DNA, 25 bp, Homo sapien
gatggaatagccttagtgacaccgg

SEQ ID NO: 3271767 - DNA, 25 bp, Homo sapien
ccctcgtgtggtccaagttacctga

SEQ ID NO: 3271768 - DNA, 25 bp, Homo sapien
tttcaagttatatttaagaatgtct

SEQ ID NO: 3271769 - DNA, 25 bp, Homo sapien
ttgagcccctgctttataccaggca

SEQ ID NO: 3271770 - DNA, 25 bp, Homo sapien
gatgccctataaccaagtttctatg

SEQ ID NO: 3271771 - DNA, 25 bp, Homo sapien
tactctctgctttatgtatatttgc

SEQ ID NO: 3271772 - DNA, 25 bp, Homo sapien
aagagatccctcaacaaagctagtg

SEQ ID NO: 3271773 - DNA, 25 bp, Homo sapien
tgtattacattttacgtggcaagcc

SEQ ID NO: 3271774 - DNA, 25 bp, Homo sapien
tgagactaaaaaggtgcagcagcgg

SEQ ID NO: 3271775 - DNA, 25 bp, Homo sapien
cagcagcgggtatgaagcctggtct

SEQ ID NO: 3271776 - DNA, 25 bp, Homo sapien
attttcctggttaagcatgctatat

SEQ ID NO: 3271777 - DNA, 25 bp, Homo sapien
ctcatggggagaccttagacttttg

SEQ ID NO: 3271778 - DNA, 25 bp, Homo sapien
tgtcgcaggcaaaaataacactact

SEQ ID NO: 3271779 - DNA, 25 bp, Homo sapien
caaatattcgtgttcattttcctgg

SEQ ID NO: 3271780 - DNA, 25 bp, Homo sapien
gattccccgatggagtagactgcct

SEQ ID NO: 3271781 - DNA, 25 bp, Homo sapien
gaaacgtgatcttatcccagtagag

SEQ ID NO: 3271782 - DNA, 25 bp, Homo sapien
gagtctcatgggagtgcgaaccctg

SEQ ID NO: 3271783 - DNA, 25 bp, Homo sapien
tatcatcatcgttgctaaaggacag

SEQ ID NO: 3271784 - DNA, 25 bp, Homo sapien
ggtcataatcaccaacatgcattta

SEQ ID NO: 3271785 - DNA, 25 bp, Homo sapien
agatattatcatgtccctgcacaaa

SEQ ID NO: 3271786 - DNA, 25 bp, Homo sapien
tatttgcattatcccgcttcatctc

SEQ ID NO: 3271787 - DNA, 25 bp, Homo sapien
gattcggtcataatcaccaacatgc

SEQ ID NO: 3271788 - DNA, 25 bp, Homo sapien
gacgtttacatcaagcagtttcctg

SEQ ID NO: 3271789 - DNA, 25 bp, Homo sapien
tggtcatcatcgactcagcatcctg

SEQ ID NO: 3271790 - DNA, 25 bp, Homo sapien
ttgatatcacaaaaacgtctccatt

SEQ ID NO: 3271791 - DNA, 25 bp, Homo sapien
cacaggcctcttcatcatttcacag

SEQ ID NO: 3271792 - DNA, 25 bp, Homo sapien
gatggccatttgacttggagtgaga

SEQ ID NO: 3271793 - DNA, 25 bp, Homo sapien
ccaaagtacataattcccagttcac

SEQ ID NO: 3271794 - DNA, 25 bp, Homo sapien
tcatggctctaggttaatctggtaa

SEQ ID NO: 3271795 - DNA, 25 bp, Homo sapien
cattatcctaagattgccatccatc

SEQ ID NO: 3271796 - DNA, 25 bp, Homo sapien
actaagccacaggtcatagggaggg

SEQ ID NO: 3271797 - DNA, 25 bp, Homo sapien
acgaacacaggactaagccacaggt

SEQ ID NO: 3271798 - DNA, 25 bp, Homo sapien
ctggaaagcagggtacacgaaaagc

SEQ ID NO: 3271799 - DNA, 25 bp, Homo sapien
atcataccaggcaccaaggaccact

SEQ ID NO: 3271800 - DNA, 25 bp, Homo sapien
catcctcaggaagtgaagatcagag

SEQ ID NO: 3271801 - DNA, 25 bp, Homo sapien
caagttctacgtaacacaagggcca

SEQ ID NO: 3271802 - DNA, 25 bp, Homo sapien
tggatacaggaagagcacctctcac

SEQ ID NO: 3271803 - DNA, 25 bp, Homo sapien
tggagggaaacttagcagagcccgt

SEQ ID NO: 3271804 - DNA, 25 bp, Homo sapien
tgttcccttgatctcatggagcgaa

SEQ ID NO: 3271805 - DNA, 25 bp, Homo sapien
aaacatcctggtgctaaaaggcagc

SEQ ID NO: 3271806 - DNA, 25 bp, Homo sapien
aaatcagcatctacaatgtggccca

SEQ ID NO: 3271807 - DNA, 25 bp, Homo sapien
gtattcttcaaagggctcggtccaa

SEQ ID NO: 3271808 - DNA, 25 bp, Homo sapien
ctcactgatgcactgtggaagtaac

SEQ ID NO: 3271809 - DNA, 25 bp, Homo sapien
tattgatctcactgatgcactgtgg

SEQ ID NO: 3271810 - DNA, 25 bp, Homo sapien
tgatctcactgatgcactgtggaag

SEQ ID NO: 3271811 - DNA, 25 bp, Homo sapien
cgtgtatattgatctcactgatgca

SEQ ID NO: 3271812 - DNA, 25 bp, Homo sapien
ttctggaattgggggaagcacttcc

SEQ ID NO: 3271813 - DNA, 25 bp, Homo sapien
gttctggaattgggggaagcacttc

SEQ ID NO: 3271814 - DNA, 25 bp, Homo sapien
ctggaattgggggaagcacttcctg

SEQ ID NO: 3271815 - DNA, 25 bp, Homo sapien
tctggaattgggggaagcacttcct

SEQ ID NO: 3271816 - DNA, 25 bp, Homo sapien
tgacatctggtatctaacctcaact

SEQ ID NO: 3271817 - DNA, 25 bp, Homo sapien
caggcagccctcggatgcttcttct

SEQ ID NO: 3271818 - DNA, 25 bp, Homo sapien
tcaaaggtgctttatatccatgaca

SEQ ID NO: 3271819 - DNA, 25 bp, Homo sapien
agatttctatcgcttttcaaaggtg

SEQ ID NO: 3271820 - DNA, 25 bp, Homo sapien
cacctggactggcaagggaatgcat

SEQ ID NO: 3271821 - DNA, 25 bp, Homo sapien
gattcaccgacatgaggcacctgtg

SEQ ID NO: 3271822 - DNA, 25 bp, Homo sapien
gccattgcaggaggctaagtcccca

SEQ ID NO: 3271823 - DNA, 25 bp, Homo sapien
gatttgacttcccacacggatctgt

SEQ ID NO: 3271824 - DNA, 25 bp, Homo sapien
ggtggatgaaagtcacaggctcata

SEQ ID NO: 3271825 - DNA, 25 bp, Homo sapien
caactttgcgaggttagtcttgtgg

SEQ ID NO: 3271826 - DNA, 25 bp, Homo sapien
cttaaaaactgcactcaagggagac

SEQ ID NO: 3271827 - DNA, 25 bp, Homo sapien
cgctaagcctcaaaagggttcttgg

SEQ ID NO: 3271828 - DNA, 25 bp, Homo sapien
tagtttagattgctactgtcccctg

SEQ ID NO: 3271829 - DNA, 25 bp, Homo sapien
tggatttcatttgcccacagctctg

SEQ ID NO: 3271830 - DNA, 25 bp, Homo sapien
tttactgtgtagtgaaaccatgcag

SEQ ID NO: 3271831 - DNA, 25 bp, Homo sapien
taagggaaggctccagcgaaagcca

SEQ ID NO: 3271832 - DNA, 25 bp, Homo sapien
tttctccgaatcacttcctcttaag

SEQ ID NO: 3271833 - DNA, 25 bp, Homo sapien
ctccgaatcacttcctcttaagaga

SEQ ID NO: 3271834 - DNA, 25 bp, Homo sapien
atgctctcagtttctccgaatcact

SEQ ID NO: 3271835 - DNA, 25 bp, Homo sapien
tcagtttctccgaatcacttcctct

SEQ ID NO: 3271836 - DNA, 25 bp, Homo sapien
atttaatttgactccccactactgg

SEQ ID NO: 3271837 - DNA, 25 bp, Homo sapien
aatcactaagtctgtcatttgggca

SEQ ID NO: 3271838 - DNA, 25 bp, Homo sapien
ccactactggtctccttctagacat

SEQ ID NO: 3271839 - DNA, 25 bp, Homo sapien
aatagcatatatcctgtttacacag

SEQ ID NO: 3271840 - DNA, 25 bp, Homo sapien
gccttcaagtattttgcggatagtg

SEQ ID NO: 3271841 - DNA, 25 bp, Homo sapien
caagtgatcttcatggaacaagtga

SEQ ID NO: 3271842 - DNA, 25 bp, Homo sapien
tctgccacttttgcactcttctctg

SEQ ID NO: 3271843 - DNA, 25 bp, Homo sapien
tgcggatagtgaggatgatcaaaaa

SEQ ID NO: 3271844 - DNA, 25 bp, Homo sapien
gaagttaaatagcagagaacactgg

SEQ ID NO: 3271845 - DNA, 25 bp, Homo sapien
aaggtgtcattgggcactgataaag

SEQ ID NO: 3271846 - DNA, 25 bp, Homo sapien
tgccagcaacgatcaggatgggtcc

SEQ ID NO: 3271847 - DNA, 25 bp, Homo sapien
gatgggtccaaagaccaaggtgtca

SEQ ID NO: 3271848 - DNA, 25 bp, Homo sapien
acagaaccaacttcatattgcaata

SEQ ID NO: 3271849 - DNA, 25 bp, Homo sapien
atattgcaataacacaagacacatg

SEQ ID NO: 3271850 - DNA, 25 bp, Homo sapien
caacttcatattgcaataacacaag

SEQ ID NO: 3271851 - DNA, 25 bp, Homo sapien
acacatgatggggaccagaccagcc

SEQ ID NO: 3271852 - DNA, 25 bp, Homo sapien
acatatctatatcggataactcctt

SEQ ID NO: 3271853 - DNA, 25 bp, Homo sapien
atatctatatcggataactcctttt

SEQ ID NO: 3271854 - DNA, 25 bp, Homo sapien
ttacatatctatatcggataactcc

SEQ ID NO: 3271855 - DNA, 25 bp, Homo sapien
tatctatatcggataactccttttc

SEQ ID NO: 3271856 - DNA, 25 bp, Homo sapien
tattcctccaagtggtcaaccagag

SEQ ID NO: 3271857 - DNA, 25 bp, Homo sapien
cattcgggtattccatgattctaca

SEQ ID NO: 3271858 - DNA, 25 bp, Homo sapien
gtttatcgatttctccttgcttggc

SEQ ID NO: 3271859 - DNA, 25 bp, Homo sapien
tcctccatgattgttgatcttccag

SEQ ID NO: 3271860 - DNA, 25 bp, Homo sapien
caaggtgaatgaaaatcatttgctt

SEQ ID NO: 3271861 - DNA, 25 bp, Homo sapien
gacaaggtgaatgaaaatcatttgc

SEQ ID NO: 3271862 - DNA, 25 bp, Homo sapien
ctgacaaggtgaatgaaaatcattt

SEQ ID NO: 3271863 - DNA, 25 bp, Homo sapien
aggtgaatgaaaatcatttgctttc

SEQ ID NO: 3271864 - DNA, 25 bp, Homo sapien
gtttgttcctgagaaataaaatcca

SEQ ID NO: 3271865 - DNA, 25 bp, Homo sapien
cttttgatgtttgttcctgagaaat

SEQ ID NO: 3271866 - DNA, 25 bp, Homo sapien
tgatgtttgttcctgagaaataaaa

SEQ ID NO: 3271867 - DNA, 25 bp, Homo sapien
tgtttgttcctgagaaataaaatcc

SEQ ID NO: 3271868 - DNA, 25 bp, Homo sapien
ggcaagtcctggtgaagttacgaaa

SEQ ID NO: 3271869 - DNA, 25 bp, Homo sapien
cctgtgatgtcttggcaagtcctgg

SEQ ID NO: 3271870 - DNA, 25 bp, Homo sapien
cctggtgaagttacgaaaattggag

SEQ ID NO: 3271871 - DNA, 25 bp, Homo sapien
attggagggatttagaaagattctc

SEQ ID NO: 3271872 - DNA, 25 bp, Homo sapien
aattagattgcaaacacacttccag

SEQ ID NO: 3271873 - DNA, 25 bp, Homo sapien
gagtgaataggtaaaattagattgc

SEQ ID NO: 3271874 - DNA, 25 bp, Homo sapien
tccagacatgatagctccaatgttc

SEQ ID NO: 3271875 - DNA, 25 bp, Homo sapien
taaggaggagagtgaataggtaaaa

SEQ ID NO: 3271876 - DNA, 25 bp, Homo sapien
caattgcatggagttgaacagggta

SEQ ID NO: 3271877 - DNA, 25 bp, Homo sapien
taaagaagcgcttggaatctcagca

SEQ ID NO: 3271878 - DNA, 25 bp, Homo sapien
ggccagaagtccaacatcgtttcag

SEQ ID NO: 3271879 - DNA, 25 bp, Homo sapien
tcagtagtcagaagttgagaggtct

SEQ ID NO: 3271880 - DNA, 25 bp, Homo sapien
tggaaatacaaggaacgtcctccca

SEQ ID NO: 3271881 - DNA, 25 bp, Homo sapien
cattgcatcttgtttacatccctgt

SEQ ID NO: 3271882 - DNA, 25 bp, Homo sapien
acatccctgtttcagttaattcctg

SEQ ID NO: 3271883 - DNA, 25 bp, Homo sapien
gactgacgtggaagcaatacttatg

SEQ ID NO: 3271884 - DNA, 25 bp, Homo sapien
tgtcctcccgactgaaaactccttg

SEQ ID NO: 3271885 - DNA, 25 bp, Homo sapien
tcagttgtcctcccgactgaaaact

SEQ ID NO: 3271886 - DNA, 25 bp, Homo sapien
cagttgtcctcccgactgaaaactc

SEQ ID NO: 3271887 - DNA, 25 bp, Homo sapien
gtcctcccgactgaaaactccttga

SEQ ID NO: 3271888 - DNA, 25 bp, Homo sapien
taaatgctagggagcacaattacca

SEQ ID NO: 3271889 - DNA, 25 bp, Homo sapien
tattttcctaatctaggtttcagca

SEQ ID NO: 3271890 - DNA, 25 bp, Homo sapien
caaaaggtgacggtaagttatctgt

SEQ ID NO: 3271891 - DNA, 25 bp, Homo sapien
caattttctgaaacgttcacaaagt

SEQ ID NO: 3271892 - DNA, 25 bp, Homo sapien
agtttttcagatctagaacttcagc

SEQ ID NO: 3271893 - DNA, 25 bp, Homo sapien
ctgtaaccactagctgacactaatt

SEQ ID NO: 3271894 - DNA, 25 bp, Homo sapien
cagtcaactaaaattgcaatcttgt

SEQ ID NO: 3271895 - DNA, 25 bp, Homo sapien
gaacttcagcctatgcagcatgtgt

SEQ ID NO: 3271896 - DNA, 25 bp, Homo sapien
ctttcggtgtcttgaaatattccgg

SEQ ID NO: 3271897 - DNA, 25 bp, Homo sapien
ttcggtgtcttgaaatattccggca

SEQ ID NO: 3271898 - DNA, 25 bp, Homo sapien
cggtgtcttgaaatattccggcaaa

SEQ ID NO: 3271899 - DNA, 25 bp, Homo sapien
ggtgtcttgaaatattccggcaaaa

SEQ ID NO: 3271900 - DNA, 25 bp, Homo sapien
gtctcttcacatgacacaaatgtgt

SEQ ID NO: 3271901 - DNA, 25 bp, Homo sapien
tcccttgcagtacattcatggtatg

SEQ ID NO: 3271902 - DNA, 25 bp, Homo sapien
gctttaagtttatctctgcagcact

SEQ ID NO: 3271903 - DNA, 25 bp, Homo sapien
taggttaatgcagttcacctcatac

SEQ ID NO: 3271904 - DNA, 25 bp, Homo sapien
tttgagtccagactggtcaatagag

SEQ ID NO: 3271905 - DNA, 25 bp, Homo sapien
tgagtccagactggtcaatagagca

SEQ ID NO: 3271906 - DNA, 25 bp, Homo sapien
gtttgagtccagactggtcaataga

SEQ ID NO: 3271907 - DNA, 25 bp, Homo sapien
ttgagtccagactggtcaatagagc

SEQ ID NO: 3271908 - DNA, 25 bp, Homo sapien
tagactaggcataggcaagttgaag

SEQ ID NO: 3271909 - DNA, 25 bp, Homo sapien
cctgttgaaggacctctagggcacc

SEQ ID NO: 3271910 - DNA, 25 bp, Homo sapien
ccatagctatgagaaacctaagaga

SEQ ID NO: 3271911 - DNA, 25 bp, Homo sapien
ctgtatagcaaaggagaacactact

SEQ ID NO: 3271912 - DNA, 25 bp, Homo sapien
aaaactaattgacactgtgtcccaa

SEQ ID NO: 3271913 - DNA, 25 bp, Homo sapien
attgacactgtgtcccaaaggtttt

SEQ ID NO: 3271914 - DNA, 25 bp, Homo sapien
ttccaaagagagataacatcggaaa

SEQ ID NO: 3271915 - DNA, 25 bp, Homo sapien
ccaaagagagataacatcggaaaaa

SEQ ID NO: 3271916 - DNA, 25 bp, Homo sapien
gaaatcagactaagcagcagcattg

SEQ ID NO: 3271917 - DNA, 25 bp, Homo sapien
tagtaaccaccaataaccaattcag

SEQ ID NO: 3271918 - DNA, 25 bp, Homo sapien
tcagtcaagaattatcagcggatgc

SEQ ID NO: 3271919 - DNA, 25 bp, Homo sapien
ccttacagaagaatgccaacgaatg

SEQ ID NO: 3271920 - DNA, 25 bp, Homo sapien
gaatttccatgcatattacaaccaa

SEQ ID NO: 3271921 - DNA, 25 bp, Homo sapien
ccttttcatgtatatacagagtgat

SEQ ID NO: 3271922 - DNA, 25 bp, Homo sapien
gatggcagtgatgaaacagttgtca

SEQ ID NO: 3271923 - DNA, 25 bp, Homo sapien
tacaaccaatggtgacttgtcaaag

SEQ ID NO: 3271924 - DNA, 25 bp, Homo sapien
tgttctaagcataatggcacatgtc

SEQ ID NO: 3271925 - DNA, 25 bp, Homo sapien
ggaagttcttgtctcaaatcagtag

SEQ ID NO: 3271926 - DNA, 25 bp, Homo sapien
taggagtgacgacctggaatggact

SEQ ID NO: 3271927 - DNA, 25 bp, Homo sapien
gaatggactgctgtatgctataggg

SEQ ID NO: 3271928 - DNA, 25 bp, Homo sapien
ctactggagggctgcaacaatggga

SEQ ID NO: 3271929 - DNA, 25 bp, Homo sapien
tgaagtgttctagcctgattaaagc

SEQ ID NO: 3271930 - DNA, 25 bp, Homo sapien
tctgctaccacttgcatgatgaagt

SEQ ID NO: 3271931 - DNA, 25 bp, Homo sapien
tgattaaagctgataggactactgg

SEQ ID NO: 3271932 - DNA, 25 bp, Homo sapien
aaagcagactggtcaccctcagact

SEQ ID NO: 3271933 - DNA, 25 bp, Homo sapien
tgagaatttgagtgtagaaaggtac

SEQ ID NO: 3271934 - DNA, 25 bp, Homo sapien
gaaaaggacttagattgtgtgggct

SEQ ID NO: 3271935 - DNA, 25 bp, Homo sapien
gaagaaagatcttaccctccaaggc

SEQ ID NO: 3271936 - DNA, 25 bp, Homo sapien
ttccactatgaattacccagtgtct

SEQ ID NO: 3271937 - DNA, 25 bp, Homo sapien
ccatgttaacattttaactctcctg

SEQ ID NO: 3271938 - DNA, 25 bp, Homo sapien
gattcttactgtgttcagagtaatt

SEQ ID NO: 3271939 - DNA, 25 bp, Homo sapien
tatgaattacccagtgtctagagtt

SEQ ID NO: 3271940 - DNA, 25 bp, Homo sapien
caaacagtttgtgggagaatgggct

SEQ ID NO: 3271941 - DNA, 25 bp, Homo sapien
ccattgtgcttctttgtaatcaaac

SEQ ID NO: 3271942 - DNA, 25 bp, Homo sapien
tttgccacagttaacccattgtgct

SEQ ID NO: 3271943 - DNA, 25 bp, Homo sapien
tgttctcaagtctgtatctgcctcc

SEQ ID NO: 3271944 - DNA, 25 bp, Homo sapien
ttaccagtaacacccaatcagaaaa

SEQ ID NO: 3271945 - DNA, 25 bp, Homo sapien
tttaccagtaacacccaatcagaaa

SEQ ID NO: 3271946 - DNA, 25 bp, Homo sapien
gatttcattttatgtgaggaattat

SEQ ID NO: 3271947 - DNA, 25 bp, Homo sapien
aatttaccagtaacacccaatcaga

SEQ ID NO: 3271948 - DNA, 25 bp, Homo sapien
tggtattttaggcaacttaactata

SEQ ID NO: 3271949 - DNA, 25 bp, Homo sapien
atggtattttaggcaacttaactat

SEQ ID NO: 3271950 - DNA, 25 bp, Homo sapien
cttaactataaacaaatttattcat

SEQ ID NO: 3271951 - DNA, 25 bp, Homo sapien
gaaactgaaaagctgaccctagaat

SEQ ID NO: 3271952 - DNA, 25 bp, Homo sapien
gaagacatcctgtgctggcaggttg

SEQ ID NO: 3271953 - DNA, 25 bp, Homo sapien
gaatccacaaaatgattccggctga

SEQ ID NO: 3271954 - DNA, 25 bp, Homo sapien
cactgaaaagtacaaaacgttgctg

SEQ ID NO: 3271955 - DNA, 25 bp, Homo sapien
gtcttaaagaacttatatgaacgca

SEQ ID NO: 3271956 - DNA, 25 bp, Homo sapien
gagtcttaaagaacttatatgaacg

SEQ ID NO: 3271957 - DNA, 25 bp, Homo sapien
tcttaaagaacttatatgaacgcac

SEQ ID NO: 3271958 - DNA, 25 bp, Homo sapien
tctgagtcttaaagaacttatatga

SEQ ID NO: 3271959 - DNA, 25 bp, Homo sapien
gaaatgccgtattgacagatgtggg

SEQ ID NO: 3271960 - DNA, 25 bp, Homo sapien
gcatcatcgctagacttcactgcca

SEQ ID NO: 3271961 - DNA, 25 bp, Homo sapien
gcaagcctcttgaagaaatgccgta

SEQ ID NO: 3271962 - DNA, 25 bp, Homo sapien
ctgagatgtaggagagtaccgtgtt

SEQ ID NO: 3271963 - DNA, 25 bp, Homo sapien
gacagcaaagatcacctggtggcca

SEQ ID NO: 3271964 - DNA, 25 bp, Homo sapien
tgaggaattcagaagtcattagact

SEQ ID NO: 3271965 - DNA, 25 bp, Homo sapien
tggaggcaaaactccttatctgagg

SEQ ID NO: 3271966 - DNA, 25 bp, Homo sapien
catcaagcagaccatctggaggcaa

SEQ ID NO: 3271967 - DNA, 25 bp, Homo sapien
gtaaggacagcgtccacacagcacg

SEQ ID NO: 3271968 - DNA, 25 bp, Homo sapien
tcagagtaaggacagcgtccacaca

SEQ ID NO: 3271969 - DNA, 25 bp, Homo sapien
agacccccatcagagtaaggacagc

SEQ ID NO: 3271970 - DNA, 25 bp, Homo sapien
ccccatcagagtaaggacagcgtcc

SEQ ID NO: 3271971 - DNA, 25 bp, Homo sapien
tctcagaattgccaatgaaggttct

SEQ ID NO: 3271972 - DNA, 25 bp, Homo sapien
ctgatctcagaattgccaatgaagg

SEQ ID NO: 3271973 - DNA, 25 bp, Homo sapien
gaattgccaatgaaggttctctgca

SEQ ID NO: 3271974 - DNA, 25 bp, Homo sapien
ccaatgaaggttctctgcacattac

SEQ ID NO: 3271975 - DNA, 25 bp, Homo sapien
tgatccatacttgtgacattgcaaa

SEQ ID NO: 3271976 - DNA, 25 bp, Homo sapien
tacttgtgacattgcaaatgaagca

SEQ ID NO: 3271977 - DNA, 25 bp, Homo sapien
caactctttcatcccaggggtatga

SEQ ID NO: 3271978 - DNA, 25 bp, Homo sapien
aaaatgatccatacttgtgacattg

SEQ ID NO: 3271979 - DNA, 25 bp, Homo sapien
ctccaactaggaagcccaacaaagg

SEQ ID NO: 3271980 - DNA, 25 bp, Homo sapien
taccaatttctaatgtaggcccatg

SEQ ID NO: 3271981 - DNA, 25 bp, Homo sapien
catcaagttgatttagcagtgctga

SEQ ID NO: 3271982 - DNA, 25 bp, Homo sapien
ggcccatggtttactttatggcaaa

SEQ ID NO: 3271983 - DNA, 25 bp, Homo sapien
taagaatagacacaatagtataata

SEQ ID NO: 3271984 - DNA, 25 bp, Homo sapien
cagcttcggtcttccaatgtgctgg

SEQ ID NO: 3271985 - DNA, 25 bp, Homo sapien
aacgttcaggcatacataagaatag

SEQ ID NO: 3271986 - DNA, 25 bp, Homo sapien
gattatcccccagctttaacaatta

SEQ ID NO: 3271987 - DNA, 25 bp, Homo sapien
aaactttcttgttatgtaagcactc

SEQ ID NO: 3271988 - DNA, 25 bp, Homo sapien
tcagtttccccattctagaacctct

SEQ ID NO: 3271989 - DNA, 25 bp, Homo sapien
ttgttatgtaagcactcagtttccc

SEQ ID NO: 3271990 - DNA, 25 bp, Homo sapien
ctctgattgtacgtaattctcatac

SEQ ID NO: 3271991 - DNA, 25 bp, Homo sapien
ctctgatcgtacgcgcttcacacac

SEQ ID NO: 3271992 - DNA, 25 bp, Homo sapien
tctctgatcgtacgcgcttcacaca

SEQ ID NO: 3271993 - DNA, 25 bp, Homo sapien
cctctctgatcgtacgcgcttcaca

SEQ ID NO: 3271994 - DNA, 25 bp, Homo sapien
ctctctgatcgtacgcgcttcacac

SEQ ID NO: 3271995 - DNA, 25 bp, Homo sapien
ctcacaccctctgatcgaacgcgct

SEQ ID NO: 3271996 - DNA, 25 bp, Homo sapien
tctcacaccctctgatcgaacgcgc

SEQ ID NO: 3271997 - DNA, 25 bp, Homo sapien
cttctcacaccctctgatcgaacgc

SEQ ID NO: 3271998 - DNA, 25 bp, Homo sapien
ttctcacaccctctgatcgaacgcg

SEQ ID NO: 3271999 - DNA, 25 bp, Homo sapien
tcgctgattggtcgctgctcgcgcg

SEQ ID NO: 3272000 - DNA, 25 bp, Homo sapien
gaccgggtgcgcctgcgtacttcat

SEQ ID NO: 3272001 - DNA, 25 bp, Homo sapien
aacgcggtagcctgcttggtggaga

SEQ ID NO: 3272002 - DNA, 25 bp, Homo sapien
tctcctgggtgacgggaacgcggta

SEQ ID NO: 3272003 - DNA, 25 bp, Homo sapien
ttcataatagtggaatttgactgac

SEQ ID NO: 3272004 - DNA, 25 bp, Homo sapien
taactctcttaattgtggcttctgg

SEQ ID NO: 3272005 - DNA, 25 bp, Homo sapien
tcttggagtaaattgcgtgagcttt

SEQ ID NO: 3272006 - DNA, 25 bp, Homo sapien
agctttattgtgtgatctctgtgac

SEQ ID NO: 3272007 - DNA, 25 bp, Homo sapien
aatatgacaacatattctgttggtg

SEQ ID NO: 3272008 - DNA, 25 bp, Homo sapien
gtataaaaaatggctctcatacata

SEQ ID NO: 3272009 - DNA, 25 bp, Homo sapien
gaatagacagttcacacaaaaatgt

SEQ ID NO: 3272010 - DNA, 25 bp, Homo sapien
tcacctatcagggtggcaaaattat

SEQ ID NO: 3272011 - DNA, 25 bp, Homo sapien
tatttaagataattgggacaccctg

SEQ ID NO: 3272012 - DNA, 25 bp, Homo sapien
cactgaaataggaatatggctgcga

SEQ ID NO: 3272013 - DNA, 25 bp, Homo sapien
ttaactgtgggcacttgtcatgtgc

SEQ ID NO: 3272014 - DNA, 25 bp, Homo sapien
taaccttatatacagaggagcctct

SEQ ID NO: 3272015 - DNA, 25 bp, Homo sapien
tctatgttccagatgcgagccgagg

SEQ ID NO: 3272016 - DNA, 25 bp, Homo sapien
cccagagagcaggtgttcggcataa

SEQ ID NO: 3272017 - DNA, 25 bp, Homo sapien
tacaaagattttaggcacggtgagc

SEQ ID NO: 3272018 - DNA, 25 bp, Homo sapien
tgtgttcacaagcacggtaggacgt

SEQ ID NO: 3272019 - DNA, 25 bp, Homo sapien
gtgttcagaaagattaaacgctgct

SEQ ID NO: 3272020 - DNA, 25 bp, Homo sapien
gaaaaagatttcagactgtacccag

SEQ ID NO: 3272021 - DNA, 25 bp, Homo sapien
ctgtacccagtacctgcgaacggag

SEQ ID NO: 3272022 - DNA, 25 bp, Homo sapien
agattaaacgctgctcagctgaaaa

SEQ ID NO: 3272023 - DNA, 25 bp, Homo sapien
caaaagccgtgccaaaactcaggat

SEQ ID NO: 3272024 - DNA, 25 bp, Homo sapien
cattggaagcacttactcgtggcca

SEQ ID NO: 3272025 - DNA, 25 bp, Homo sapien
cgtggccacacatactgcggaggaa

SEQ ID NO: 3272026 - DNA, 25 bp, Homo sapien
tagataggagtcgagatgtccctcc

SEQ ID NO: 3272027 - DNA, 25 bp, Homo sapien
gaaatgaaacaacggtgacctctcc

SEQ ID NO: 3272028 - DNA, 25 bp, Homo sapien
aaaacgatgacatgtaaccttgctg

SEQ ID NO: 3272029 - DNA, 25 bp, Homo sapien
gacggtcctttctggatacagagaa

SEQ ID NO: 3272030 - DNA, 25 bp, Homo sapien
cttctgtacggtggcaaaacgatga

SEQ ID NO: 3272031 - DNA, 25 bp, Homo sapien
acaaagacagggtcgtgactcagca

SEQ ID NO: 3272032 - DNA, 25 bp, Homo sapien
gaaagccagcctcaccctactggtg

SEQ ID NO: 3272033 - DNA, 25 bp, Homo sapien
tgaaggacactatgccgcatcctgg

SEQ ID NO: 3272034 - DNA, 25 bp, Homo sapien
tagggagacgtgacttgcatatcca

SEQ ID NO: 3272035 - DNA, 25 bp, Homo sapien
cacaggacaggactagatctctcag

SEQ ID NO: 3272036 - DNA, 25 bp, Homo sapien
gagacgtggtcaacacacacagagg

SEQ ID NO: 3272037 - DNA, 25 bp, Homo sapien
tccaacagggtttgtggaagccatc

SEQ ID NO: 3272038 - DNA, 25 bp, Homo sapien
aacctgatgggttgagactccagaa

SEQ ID NO: 3272039 - DNA, 25 bp, Homo sapien
taataaggaagtaatataccaacat

SEQ ID NO: 3272040 - DNA, 25 bp, Homo sapien
aatataccaacataatattttgctg

SEQ ID NO: 3272041 - DNA, 25 bp, Homo sapien
tttaatccaatcatttgcaaattaa

SEQ ID NO: 3272042 - DNA, 25 bp, Homo sapien
ttgctgtacaagatgacaatcttaa

SEQ ID NO: 3272043 - DNA, 25 bp, Homo sapien
cctaatttatactttgaaagatatc

SEQ ID NO: 3272044 - DNA, 25 bp, Homo sapien
acaaagaatacccagttctaggtgg

SEQ ID NO: 3272045 - DNA, 25 bp, Homo sapien
tcctaatttatactttgaaagatat

SEQ ID NO: 3272046 - DNA, 25 bp, Homo sapien
taaaaagtggctgtcgctagtgaaa

SEQ ID NO: 3272047 - DNA, 25 bp, Homo sapien
tttataatgggacaccaggtcatcc

SEQ ID NO: 3272048 - DNA, 25 bp, Homo sapien
caaggctttctctagaccagctgga

SEQ ID NO: 3272049 - DNA, 25 bp, Homo sapien
taagaggtgtacataagcctactgc

SEQ ID NO: 3272050 - DNA, 25 bp, Homo sapien
tctgggctccttatctttttctggt

SEQ ID NO: 3272051 - DNA, 25 bp, Homo sapien
tgaaggctttgaagattttgtcttt

SEQ ID NO: 3272052 - DNA, 25 bp, Homo sapien
tttctgggctccttatctttttctg

SEQ ID NO: 3272053 - DNA, 25 bp, Homo sapien
ttctggttttgaaggctttgaagat

SEQ ID NO: 3272054 - DNA, 25 bp, Homo sapien
ttctatagcatcttggtctttctca

SEQ ID NO: 3272055 - DNA, 25 bp, Homo sapien
gatgcctttatagcttgaagtgagt

SEQ ID NO: 3272056 - DNA, 25 bp, Homo sapien
tattgtaagctcttgtgaaggctgc

SEQ ID NO: 3272057 - DNA, 25 bp, Homo sapien
taaggtgggcttccttattgtaagc

SEQ ID NO: 3272058 - DNA, 25 bp, Homo sapien
gctcatcacaagatataagttggcc

SEQ ID NO: 3272059 - DNA, 25 bp, Homo sapien
taacaatggatgtctgctgtgagaa

SEQ ID NO: 3272060 - DNA, 25 bp, Homo sapien
taaaacgcattcattacacaggtgc

SEQ ID NO: 3272061 - DNA, 25 bp, Homo sapien
ttactgataaccataaagtcgggtc

SEQ ID NO: 3272062 - DNA, 25 bp, Homo sapien
agggactaggtttgccaccccagct

SEQ ID NO: 3272063 - DNA, 25 bp, Homo sapien
tgtactccgtctactccttgtgagg

SEQ ID NO: 3272064 - DNA, 25 bp, Homo sapien
tgtacaagtgcatcccttagaagcg

SEQ ID NO: 3272065 - DNA, 25 bp, Homo sapien
catgtttacagtccttttgctggag

SEQ ID NO: 3272066 - DNA, 25 bp, Homo sapien
actcatatgcaaggccaggtcctga

SEQ ID NO: 3272067 - DNA, 25 bp, Homo sapien
cctgaacaatacgatcatgtttgcc

SEQ ID NO: 3272068 - DNA, 25 bp, Homo sapien
tttgcctgtagacgagtgcttcccc

SEQ ID NO: 3272069 - DNA, 25 bp, Homo sapien
aactgggtcatgtaccccctcatca

SEQ ID NO: 3272070 - DNA, 25 bp, Homo sapien
aaataaggccagattgggccgggcg

SEQ ID NO: 3272071 - DNA, 25 bp, Homo sapien
cacatcttacaaccaaaatctaaca

SEQ ID NO: 3272072 - DNA, 25 bp, Homo sapien
cattcctatttctatgtgtccattt

SEQ ID NO: 3272073 - DNA, 25 bp, Homo sapien
tcctatttctatgtgtccatttaca

SEQ ID NO: 3272074 - DNA, 25 bp, Homo sapien
caggcagaagactccagttttgctt

SEQ ID NO: 3272075 - DNA, 25 bp, Homo sapien
ggctgtccactaggtcaccatcgca

SEQ ID NO: 3272076 - DNA, 25 bp, Homo sapien
gttttgcttactccggatctggctg

SEQ ID NO: 3272077 - DNA, 25 bp, Homo sapien
caccatcgcatatgctgtctgctgc

SEQ ID NO: 3272078 - DNA, 25 bp, Homo sapien
aaaagagatctgacttgtccacaag

SEQ ID NO: 3272079 - DNA, 25 bp, Homo sapien
caagtgacatgtgagcagtctcctc

SEQ ID NO: 3272080 - DNA, 25 bp, Homo sapien
gctgctacaggcttcacgtgtatgt

SEQ ID NO: 3272081 - DNA, 25 bp, Homo sapien
actttccgggcaacatcaaatgggc

SEQ ID NO: 3272082 - DNA, 25 bp, Homo sapien
cataggttaatgctttacttcgtgc

SEQ ID NO: 3272083 - DNA, 25 bp, Homo sapien
agctttggcctggtcataggttaat

SEQ ID NO: 3272084 - DNA, 25 bp, Homo sapien
tacttcgtgcacaccacatactcag

SEQ ID NO: 3272085 - DNA, 25 bp, Homo sapien
taatgctttacttcgtgcacaccac

SEQ ID NO: 3272086 - DNA, 25 bp, Homo sapien
ttcatagctggagggggaatcttta

SEQ ID NO: 3272087 - DNA, 25 bp, Homo sapien
taaatgcaatagacatcatagcacc

SEQ ID NO: 3272088 - DNA, 25 bp, Homo sapien
tctttaaatgcaatagacatcatag

SEQ ID NO: 3272089 - DNA, 25 bp, Homo sapien
tctgatatcttgattggctcccaaa

SEQ ID NO: 3272090 - DNA, 25 bp, Homo sapien
cttaatctgttcaacccgaggtctt

SEQ ID NO: 3272091 - DNA, 25 bp, Homo sapien
accagagagcgaatcttgggatgat

SEQ ID NO: 3272092 - DNA, 25 bp, Homo sapien
taatgaaccagagagcgaatcttgg

SEQ ID NO: 3272093 - DNA, 25 bp, Homo sapien
ccgaggtctttgaaaacgaagatca

SEQ ID NO: 3272094 - DNA, 25 bp, Homo sapien
gagagcatgtttcgtgcttactgaa

SEQ ID NO: 3272095 - DNA, 25 bp, Homo sapien
gtttcgtgcttactgaagaggctgc

SEQ ID NO: 3272096 - DNA, 25 bp, Homo sapien
tccatgatgagagcatgtttcgtgc

SEQ ID NO: 3272097 - DNA, 25 bp, Homo sapien
cttcatccatgatgagagcatgttt

SEQ ID NO: 3272098 - DNA, 25 bp, Homo sapien
caaactgctcttactccgggtgtca

SEQ ID NO: 3272099 - DNA, 25 bp, Homo sapien
tcagtgactcagcaacaatcgcctt

SEQ ID NO: 3272100 - DNA, 25 bp, Homo sapien
cacttgcattcagttccacgtagct

SEQ ID NO: 3272101 - DNA, 25 bp, Homo sapien
gatgctggtattgttcagtgactca

SEQ ID NO: 3272102 - DNA, 25 bp, Homo sapien
gtggttttgccaacaccaggagggc

SEQ ID NO: 3272103 - DNA, 25 bp, Homo sapien
agagccatcatctttgccggaaaat

SEQ ID NO: 3272104 - DNA, 25 bp, Homo sapien
aggagggcctgacagcaacgctgct

SEQ ID NO: 3272105 - DNA, 25 bp, Homo sapien
gcaacgctgctttaaaactagagcc

SEQ ID NO: 3272106 - DNA, 25 bp, Homo sapien
cagcgtaggagtttgttggcacagc

SEQ ID NO: 3272107 - DNA, 25 bp, Homo sapien
gcgaggttggcttatatttatccac

SEQ ID NO: 3272108 - DNA, 25 bp, Homo sapien
tcttttgccagtttcggagccagcg

SEQ ID NO: 3272109 - DNA, 25 bp, Homo sapien
tccaattatggtcttgagcgaggtt

SEQ ID NO: 3272110 - DNA, 25 bp, Homo sapien
gctccttgaaatccaggcttttcca

SEQ ID NO: 3272111 - DNA, 25 bp, Homo sapien
tgtcatcagccaaattcctagcctt

SEQ ID NO: 3272112 - DNA, 25 bp, Homo sapien
tgtcccttttggaagtcggcctgct

SEQ ID NO: 3272113 - DNA, 25 bp, Homo sapien
tcggcctgctctttttagattctga

SEQ ID NO: 3272114 - DNA, 25 bp, Homo sapien
tatccaagtgggctactcaacctgg

SEQ ID NO: 3272115 - DNA, 25 bp, Homo sapien
gttaatgcctcgacaaaaacttgta

SEQ ID NO: 3272116 - DNA, 25 bp, Homo sapien
gaatttctatcctgctaaacgtact

SEQ ID NO: 3272117 - DNA, 25 bp, Homo sapien
taaacgtactacagagagcaatcag

SEQ ID NO: 3272118 - DNA, 25 bp, Homo sapien
tggatttcttgcctggcatagtccg

SEQ ID NO: 3272119 - DNA, 25 bp, Homo sapien
gtttcaactgctatttcatacttgg

SEQ ID NO: 3272120 - DNA, 25 bp, Homo sapien
atagtccgaatcagattcaacaggc

SEQ ID NO: 3272121 - DNA, 25 bp, Homo sapien
tcttgcctggcatagtccgaatcag

SEQ ID NO: 3272122 - DNA, 25 bp, Homo sapien
taacgttcaattagagacttggcct

SEQ ID NO: 3272123 - DNA, 25 bp, Homo sapien
tcttggactgtccactatcacgacc

SEQ ID NO: 3272124 - DNA, 25 bp, Homo sapien
gacttggcctcatctcgttcaatag

SEQ ID NO: 3272125 - DNA, 25 bp, Homo sapien
gttcaatagactccagcacgcctgt

SEQ ID NO: 3272126 - DNA, 25 bp, Homo sapien
aagcttgataattagtgcgtttctt

SEQ ID NO: 3272127 - DNA, 25 bp, Homo sapien
gcccagagccttgggaccttctcga

SEQ ID NO: 3272128 - DNA, 25 bp, Homo sapien
ctttggtatttctttggagcccaga

SEQ ID NO: 3272129 - DNA, 25 bp, Homo sapien
gaccttctcgatttaagtagcttcg

SEQ ID NO: 3272130 - DNA, 25 bp, Homo sapien
tcataattgccagcttagaactggc

SEQ ID NO: 3272131 - DNA, 25 bp, Homo sapien
tttcataattgccagcttagaactg

SEQ ID NO: 3272132 - DNA, 25 bp, Homo sapien
tctttttgaggccacaggctctatt

SEQ ID NO: 3272133 - DNA, 25 bp, Homo sapien
ttctttttgaggccacaggctctat

SEQ ID NO: 3272134 - DNA, 25 bp, Homo sapien
ttttgtcagctgatgacttggaatg

SEQ ID NO: 3272135 - DNA, 25 bp, Homo sapien
cctattttgtcagctgatgacttgg

SEQ ID NO: 3272136 - DNA, 25 bp, Homo sapien
gcttcctaggactgtagctctttct

SEQ ID NO: 3272137 - DNA, 25 bp, Homo sapien
tgcttcctaggactgtagctctttc

SEQ ID NO: 3272138 - DNA, 25 bp, Homo sapien
cctacaggcaataagcaagagagct

SEQ ID NO: 3272139 - DNA, 25 bp, Homo sapien
ggcccaaagtcctaaagtgtcaaga

SEQ ID NO: 3272140 - DNA, 25 bp, Homo sapien
taatcttagcacagaatataccctg

SEQ ID NO: 3272141 - DNA, 25 bp, Homo sapien
gatgatttgctatcagaaccactga

SEQ ID NO: 3272142 - DNA, 25 bp, Homo sapien
tgaaaacgtttctcccgcttctgtg

SEQ ID NO: 3272143 - DNA, 25 bp, Homo sapien
aaattggcttggacagatgaaaacg

SEQ ID NO: 3272144 - DNA, 25 bp, Homo sapien
cgtttctcccgcttctgtgtccttt

SEQ ID NO: 3272145 - DNA, 25 bp, Homo sapien
gcttggacagatgaaaacgtttctc

SEQ ID NO: 3272146 - DNA, 25 bp, Homo sapien
tcacctttcaactagcaggacacta

SEQ ID NO: 3272147 - DNA, 25 bp, Homo sapien
aagggtcacctttcaactagcagga

SEQ ID NO: 3272148 - DNA, 25 bp, Homo sapien
ctagcaggacactacaataaactgt

SEQ ID NO: 3272149 - DNA, 25 bp, Homo sapien
gcaggacactacaataaactgtcat

SEQ ID NO: 3272150 - DNA, 25 bp, Homo sapien
gggatcaatcaagcccaagaagtca

SEQ ID NO: 3272151 - DNA, 25 bp, Homo sapien
tgcggtgaggggatcaatcaagccc

SEQ ID NO: 3272152 - DNA, 25 bp, Homo sapien
gctgcggtgaggggatcaatcaagc

SEQ ID NO: 3272153 - DNA, 25 bp, Homo sapien
cggtgaggggatcaatcaagcccaa

SEQ ID NO: 3272154 - DNA, 25 bp, Homo sapien
catgttttggctagagcctagaaca

SEQ ID NO: 3272155 - DNA, 25 bp, Homo sapien
gcctagaacacgcaagtatgaacac

SEQ ID NO: 3272156 - DNA, 25 bp, Homo sapien
tgtatattcagaacgcaaatagccc

SEQ ID NO: 3272157 - DNA, 25 bp, Homo sapien
gtatgaacactgatctgtactgtat

SEQ ID NO: 3272158 - DNA, 25 bp, Homo sapien
catccaacatggctaatgttctggc

SEQ ID NO: 3272159 - DNA, 25 bp, Homo sapien
ccaacatggctaatgttctggcaaa

SEQ ID NO: 3272160 - DNA, 25 bp, Homo sapien
cttcatccaacatggctaatgttct

SEQ ID NO: 3272161 - DNA, 25 bp, Homo sapien
catggctaatgttctggcaaactct

SEQ ID NO: 3272162 - DNA, 25 bp, Homo sapien
tggcgatggcttcatcatttaatcc

SEQ ID NO: 3272163 - DNA, 25 bp, Homo sapien
tcaagctgtaattgcttggcgatgg

SEQ ID NO: 3272164 - DNA, 25 bp, Homo sapien
caagctgtaattgcttggcgatggc

SEQ ID NO: 3272165 - DNA, 25 bp, Homo sapien
cttggcgatggcttcatcatttaat

SEQ ID NO: 3272166 - DNA, 25 bp, Homo sapien
aagcaaaatcagcataaaccttaag

SEQ ID NO: 3272167 - DNA, 25 bp, Homo sapien
aatcaagcaaaatcagcataaacct

SEQ ID NO: 3272168 - DNA, 25 bp, Homo sapien
aaaatcaagcaaaatcagcataaac

SEQ ID NO: 3272169 - DNA, 25 bp, Homo sapien
tcaagcaaaatcagcataaacctta

SEQ ID NO: 3272170 - DNA, 25 bp, Homo sapien
tactgatgtgggtgtaagttttatt

SEQ ID NO: 3272171 - DNA, 25 bp, Homo sapien
tgccaccatcttcttattagatctt

SEQ ID NO: 3272172 - DNA, 25 bp, Homo sapien
agatctttggacacttccagttcca

SEQ ID NO: 3272173 - DNA, 25 bp, Homo sapien
tattcttggtcttagtgttttcttc

SEQ ID NO: 3272174 - DNA, 25 bp, Homo sapien
ttgatttagaggccgccttcttaca

SEQ ID NO: 3272175 - DNA, 25 bp, Homo sapien
gtttgatgttccaagatgactattt

SEQ ID NO: 3272176 - DNA, 25 bp, Homo sapien
gactatttgtagatcttccattctc

SEQ ID NO: 3272177 - DNA, 25 bp, Homo sapien
gatttagaggccgccttcttacaca

SEQ ID NO: 3272178 - DNA, 25 bp, Homo sapien
catcatgaactggtcaggagcagca

SEQ ID NO: 3272179 - DNA, 25 bp, Homo sapien
taagcataaaccaaggcctaagcct

SEQ ID NO: 3272180 - DNA, 25 bp, Homo sapien
ggagcagcatatggcactcaactga

SEQ ID NO: 3272181 - DNA, 25 bp, Homo sapien
tataaaatagaagcccctgaagatt

SEQ ID NO: 3272182 - DNA, 25 bp, Homo sapien
tatatacctatttgtctgatacaca

SEQ ID NO: 3272183 - DNA, 25 bp, Homo sapien
agagaagctctctatcatatacaga

SEQ ID NO: 3272184 - DNA, 25 bp, Homo sapien
ggtttccctgcaaacatctaagaga

SEQ ID NO: 3272185 - DNA, 25 bp, Homo sapien
taagatgctactcaaataagtgtgt

SEQ ID NO: 3272186 - DNA, 25 bp, Homo sapien
tcaacaaatgtttcacgtaacctac

SEQ ID NO: 3272187 - DNA, 25 bp, Homo sapien
cctacaaagttcacctatggacttt

SEQ ID NO: 3272188 - DNA, 25 bp, Homo sapien
tgtttcacgtaacctacaaagttca

SEQ ID NO: 3272189 - DNA, 25 bp, Homo sapien
ttcctttggactgctactcaatgtg

SEQ ID NO: 3272190 - DNA, 25 bp, Homo sapien
cgtattattccggttattgtctcct

SEQ ID NO: 3272191 - DNA, 25 bp, Homo sapien
tgggtctggccctttcacgtacagc

SEQ ID NO: 3272192 - DNA, 25 bp, Homo sapien
gtacagcatcccgtattattccggt

SEQ ID NO: 3272193 - DNA, 25 bp, Homo sapien
cctttcacgtacagcatcccgtatt

SEQ ID NO: 3272194 - DNA, 25 bp, Homo sapien
caggtttagaagatactggcagttt

SEQ ID NO: 3272195 - DNA, 25 bp, Homo sapien
ggatcctgccgtgaaattttaccag

SEQ ID NO: 3272196 - DNA, 25 bp, Homo sapien
aatgtatgtaacaggatcctgccgt

SEQ ID NO: 3272197 - DNA, 25 bp, Homo sapien
ttttacctgcaacgtctcctctgac

SEQ ID NO: 3272198 - DNA, 25 bp, Homo sapien
catcctctttacgggagctatttac

SEQ ID NO: 3272199 - DNA, 25 bp, Homo sapien
tcatcctctttacgggagctattta

SEQ ID NO: 3272200 - DNA, 25 bp, Homo sapien
agtcatcctctttacgggagctatt

SEQ ID NO: 3272201 - DNA, 25 bp, Homo sapien
gaagtcatcctctttacgggagcta

SEQ ID NO: 3272202 - DNA, 25 bp, Homo sapien
ttactccaaagaatttccgaatgtc

SEQ ID NO: 3272203 - DNA, 25 bp, Homo sapien
attactccaaagaatttccgaatgt

SEQ ID NO: 3272204 - DNA, 25 bp, Homo sapien
tggtattactccaaagaatttccga

SEQ ID NO: 3272205 - DNA, 25 bp, Homo sapien
tattactccaaagaatttccgaatg

SEQ ID NO: 3272206 - DNA, 25 bp, Homo sapien
cccagtatctgttaagtctacctga

SEQ ID NO: 3272207 - DNA, 25 bp, Homo sapien
tgacagcaaaaagacccatttctac

SEQ ID NO: 3272208 - DNA, 25 bp, Homo sapien
tctgttaagtctacctgagaggcca

SEQ ID NO: 3272209 - DNA, 25 bp, Homo sapien
agaggccactcccatgacagcaaaa

SEQ ID NO: 3272210 - DNA, 25 bp, Homo sapien
ctgtccttcatacccaacgacacag

SEQ ID NO: 3272211 - DNA, 25 bp, Homo sapien
ctactgtccttcatacccaacgaca

SEQ ID NO: 3272212 - DNA, 25 bp, Homo sapien
tactgtccttcatacccaacgacac

SEQ ID NO: 3272213 - DNA, 25 bp, Homo sapien
tgtccttcatacccaacgacacagt

SEQ ID NO: 3272214 - DNA, 25 bp, Homo sapien
agtgcccggtccacaccaggcctgc

SEQ ID NO: 3272215 - DNA, 25 bp, Homo sapien
cccagaccccgagccgcacggcctc

SEQ ID NO: 3272216 - DNA, 25 bp, Homo sapien
caggagtgcccggtccacaccaggc

SEQ ID NO: 3272217 - DNA, 25 bp, Homo sapien
ggagtgcccggtccacaccaggcct

SEQ ID NO: 3272218 - DNA, 25 bp, Homo sapien
tgggccggttgaggaatctgttatc

SEQ ID NO: 3272219 - DNA, 25 bp, Homo sapien
tcaggatccattcgcgccaacaact

SEQ ID NO: 3272220 - DNA, 25 bp, Homo sapien
ttctcccgcgaagtgcaagaaggcg

SEQ ID NO: 3272221 - DNA, 25 bp, Homo sapien
cgaagtgcaagaaggcgaagacagt

SEQ ID NO: 3272222 - DNA, 25 bp, Homo sapien
actcaagaaatgttggccaatgtct

SEQ ID NO: 3272223 - DNA, 25 bp, Homo sapien
cggttctctatggtggctgtattaa

SEQ ID NO: 3272224 - DNA, 25 bp, Homo sapien
tagttccatattatgaagtcttaga

SEQ ID NO: 3272225 - DNA, 25 bp, Homo sapien
aggaacctacaaacggttctctatg

SEQ ID NO: 3272226 - DNA, 25 bp, Homo sapien
gcatttgtcccaaagagttctggaa

SEQ ID NO: 3272227 - DNA, 25 bp, Homo sapien
gctgtcctctggcatgttagtgaaa

SEQ ID NO: 3272228 - DNA, 25 bp, Homo sapien
tggaaattaccatgccctctgacac

SEQ ID NO: 3272229 - DNA, 25 bp, Homo sapien
gatttgcacaccaagtctcaggagt

SEQ ID NO: 3272230 - DNA, 25 bp, Homo sapien
taaggtggcatttgtggctaggcac

SEQ ID NO: 3272231 - DNA, 25 bp, Homo sapien
tgaggtcaggacctgtctggcctgt

SEQ ID NO: 3272232 - DNA, 25 bp, Homo sapien
tggcattgacgtgtttgaagagtcc

SEQ ID NO: 3272233 - DNA, 25 bp, Homo sapien
gatgtgcctttgtatcatatcagga

SEQ ID NO: 3272234 - DNA, 25 bp, Homo sapien
tggatcaccatcaacgagcctaacc

SEQ ID NO: 3272235 - DNA, 25 bp, Homo sapien
taagtgacatctacaaccgctctgg

SEQ ID NO: 3272236 - DNA, 25 bp, Homo sapien
tccaggcctacgctgggctgtgctt

SEQ ID NO: 3272237 - DNA, 25 bp, Homo sapien
gagcctctgttgcatgccgacgggt

SEQ ID NO: 3272238 - DNA, 25 bp, Homo sapien
tagtttttaagccatcatcgcacaa

SEQ ID NO: 3272239 - DNA, 25 bp, Homo sapien
tcaatgtaacaacctggagaatcac

SEQ ID NO: 3272240 - DNA, 25 bp, Homo sapien
taacccagtactgagagtcctcctt

SEQ ID NO: 3272241 - DNA, 25 bp, Homo sapien
gaaactgataactcttgaaaggagc

SEQ ID NO: 3272242 - DNA, 25 bp, Homo sapien
ccaggtcaattcagctatagcgcag

SEQ ID NO: 3272243 - DNA, 25 bp, Homo sapien
gattcactgaatagacctgaaggta

SEQ ID NO: 3272244 - DNA, 25 bp, Homo sapien
ggtatagaggattagccaggtcaat

SEQ ID NO: 3272245 - DNA, 25 bp, Homo sapien
taaaaacggctgcaggtacaatggg

SEQ ID NO: 3272246 - DNA, 25 bp, Homo sapien
ctaagacgtatagggcatggtgacc

SEQ ID NO: 3272247 - DNA, 25 bp, Homo sapien
tatgccaactgatcgtgacctctgt

SEQ ID NO: 3272248 - DNA, 25 bp, Homo sapien
gttacagagctatgactatggcact

SEQ ID NO: 3272249 - DNA, 25 bp, Homo sapien
aaaaaagatgtgacggtgcctgcct

SEQ ID NO: 3272250 - DNA, 25 bp, Homo sapien
aatattgtaccagtgacaggcaaac

SEQ ID NO: 3272251 - DNA, 25 bp, Homo sapien
tccctcgtggaacaaggagctttaa

SEQ ID NO: 3272252 - DNA, 25 bp, Homo sapien
tctggttcttgaaggaatagcaagg

SEQ ID NO: 3272253 - DNA, 25 bp, Homo sapien
ttttaggcaagaggaatattgtacc

SEQ ID NO: 3272254 - DNA, 25 bp, Homo sapien
caggcaaacatgaggccattcatca

SEQ ID NO: 3272255 - DNA, 25 bp, Homo sapien
tgcatatagaactttaggaataccc

SEQ ID NO: 3272256 - DNA, 25 bp, Homo sapien
gggtattcctaaagttctatatgca

SEQ ID NO: 3272257 - DNA, 25 bp, Homo sapien
gtttgcctgtcactggtacaatatt

SEQ ID NO: 3272258 - DNA, 25 bp, Homo sapien
tgatgaatggcctcatgtttgcctg

SEQ ID NO: 3272259 - DNA, 25 bp, Homo sapien
ccttgctattccttcaagaaccaga

SEQ ID NO: 3272260 - DNA, 25 bp, Homo sapien
ggtacaatattcctcttgcctaaaa

SEQ ID NO: 3272261 - DNA, 25 bp, Homo sapien
taaagctccttgttccacgagggaa

SEQ ID NO: 3272262 - DNA, 25 bp, Homo sapien
aagatgccagatgacacttaagacc

SEQ ID NO: 3272263 - DNA, 25 bp, Homo sapien
tgccagatgacacttaagacctact

SEQ ID NO: 3272264 - DNA, 25 bp, Homo sapien
gatgccagatgacacttaagaccta

SEQ ID NO: 3272265 - DNA, 25 bp, Homo sapien
atgccagatgacacttaagacctac

SEQ ID NO: 3272266 - DNA, 25 bp, Homo sapien
agatgccagatgacacttaagacct

SEQ ID NO: 3272267 - DNA, 25 bp, Homo sapien
taggtcttaagtgtcatctggcatc

SEQ ID NO: 3272268 - DNA, 25 bp, Homo sapien
ggtcttaagtgtcatctggcatctt

SEQ ID NO: 3272269 - DNA, 25 bp, Homo sapien
gtaggtcttaagtgtcatctggcat

SEQ ID NO: 3272270 - DNA, 25 bp, Homo sapien
aggtcttaagtgtcatctggcatct

SEQ ID NO: 3272271 - DNA, 25 bp, Homo sapien
agtaggtcttaagtgtcatctggca

SEQ ID NO: 3272272 - DNA, 25 bp, Homo sapien
ttattactgctctagttgaatgaag

SEQ ID NO: 3272273 - DNA, 25 bp, Homo sapien
tcagtaagtcatagtcttgaggtat

SEQ ID NO: 3272274 - DNA, 25 bp, Homo sapien
taagttttattactgctctagttga

SEQ ID NO: 3272275 - DNA, 25 bp, Homo sapien
ctacgtatagtttactatgaatcag

SEQ ID NO: 3272276 - DNA, 25 bp, Homo sapien
taaaagatggaattggcatgcattt

SEQ ID NO: 3272277 - DNA, 25 bp, Homo sapien
catgcattttactacgtatagttta

SEQ ID NO: 3272278 - DNA, 25 bp, Homo sapien
taaactatacgtagtaaaatgcatg

SEQ ID NO: 3272279 - DNA, 25 bp, Homo sapien
aaatgcatgccaattccatctttta

SEQ ID NO: 3272280 - DNA, 25 bp, Homo sapien
cattcaactagagcagtaataaaac

SEQ ID NO: 3272281 - DNA, 25 bp, Homo sapien
tacctcaagactatgacttactgat

SEQ ID NO: 3272282 - DNA, 25 bp, Homo sapien
tgtaaatccccatcaatacacttgc

SEQ ID NO: 3272283 - DNA, 25 bp, Homo sapien
ctgattcatagtaaactatacgtag

SEQ ID NO: 3272284 - DNA, 25 bp, Homo sapien
aggaactgttcagcaggctgatgaa

SEQ ID NO: 3272285 - DNA, 25 bp, Homo sapien
gaactgttcagcaggctgatgaata

SEQ ID NO: 3272286 - DNA, 25 bp, Homo sapien
ggaactgttcagcaggctgatgaat

SEQ ID NO: 3272287 - DNA, 25 bp, Homo sapien
atcaggaaatttttggatggtatct

SEQ ID NO: 3272288 - DNA, 25 bp, Homo sapien
tgaaaaaggaactgttcagcaggct

SEQ ID NO: 3272289 - DNA, 25 bp, Homo sapien
aacagttaaaaacaaggatatcagg

SEQ ID NO: 3272290 - DNA, 25 bp, Homo sapien
tattcatcagcctgctgaacagttc

SEQ ID NO: 3272291 - DNA, 25 bp, Homo sapien
ttattcatcagcctgctgaacagtt

SEQ ID NO: 3272292 - DNA, 25 bp, Homo sapien
agataccatccaaaaatttcctgat

SEQ ID NO: 3272293 - DNA, 25 bp, Homo sapien
ttcatcagcctgctgaacagttcct

SEQ ID NO: 3272294 - DNA, 25 bp, Homo sapien
cctgatatccttgtttttaactgtt

SEQ ID NO: 3272295 - DNA, 25 bp, Homo sapien
attcatcagcctgctgaacagttcc

SEQ ID NO: 3272296 - DNA, 25 bp, Homo sapien
tgggttaggctgatgtattaattgc

SEQ ID NO: 3272297 - DNA, 25 bp, Homo sapien
ttttaagtacagcacataatgaaat

SEQ ID NO: 3272298 - DNA, 25 bp, Homo sapien
atgggttaggctgatgtattaattg

SEQ ID NO: 3272299 - DNA, 25 bp, Homo sapien
agatgggttaggctgatgtattaat

SEQ ID NO: 3272300 - DNA, 25 bp, Homo sapien
aagatgggttaggctgatgtattaa

SEQ ID NO: 3272301 - DNA, 25 bp, Homo sapien
gatgggttaggctgatgtattaatt

SEQ ID NO: 3272302 - DNA, 25 bp, Homo sapien
atttcattatgtgctgtacttaaaa

SEQ ID NO: 3272303 - DNA, 25 bp, Homo sapien
ttaatacatcagcctaacccatctt

SEQ ID NO: 3272304 - DNA, 25 bp, Homo sapien
gcaattaatacatcagcctaaccca

SEQ ID NO: 3272305 - DNA, 25 bp, Homo sapien
aattaatacatcagcctaacccatc

SEQ ID NO: 3272306 - DNA, 25 bp, Homo sapien
attaatacatcagcctaacccatct

SEQ ID NO: 3272307 - DNA, 25 bp, Homo sapien
caattaatacatcagcctaacccat

SEQ ID NO: 3272308 - DNA, 25 bp, Homo sapien
ttctttttaagatgggttaggctga

SEQ ID NO: 3272309 - DNA, 25 bp, Homo sapien
gaaattttaagtacagcacataatg

SEQ ID NO: 3272310 - DNA, 25 bp, Homo sapien
tgggttaggctgatgtattaattgc

SEQ ID NO: 3272311 - DNA, 25 bp, Homo sapien
tacagcacataatgaaatactttct

SEQ ID NO: 3272312 - DNA, 25 bp, Homo sapien
ttttaagtacagcacataatgaaat

SEQ ID NO: 3272313 - DNA, 25 bp, Homo sapien
gtattaattgctttatcttcactcc

SEQ ID NO: 3272314 - DNA, 25 bp, Homo sapien
cattatgtgctgtacttaaaatttc

SEQ ID NO: 3272315 - DNA, 25 bp, Homo sapien
gaaagtatttcattatgtgctgtac

SEQ ID NO: 3272316 - DNA, 25 bp, Homo sapien
gcaattaatacatcagcctaaccca

SEQ ID NO: 3272317 - DNA, 25 bp, Homo sapien
taggagtgaagataaagcaattaat

SEQ ID NO: 3272318 - DNA, 25 bp, Homo sapien
gataaagcaattaatacatcagcct

SEQ ID NO: 3272319 - DNA, 25 bp, Homo sapien
tcagcctaacccatcttaaaaagaa

SEQ ID NO: 3272320 - DNA, 25 bp, Homo sapien
ctatgtctaactatgcctacaagat

SEQ ID NO: 3272321 - DNA, 25 bp, Homo sapien
tactatgtctaactatgcctacaag

SEQ ID NO: 3272322 - DNA, 25 bp, Homo sapien
actatgtctaactatgcctacaaga

SEQ ID NO: 3272323 - DNA, 25 bp, Homo sapien
gtctaactatgcctacaagattttg

SEQ ID NO: 3272324 - DNA, 25 bp, Homo sapien
tatgtctaactatgcctacaagatt

SEQ ID NO: 3272325 - DNA, 25 bp, Homo sapien
cctacaagattttgtctaaatcttg

SEQ ID NO: 3272326 - DNA, 25 bp, Homo sapien
caaaatcttgtaggcatagttagac

SEQ ID NO: 3272327 - DNA, 25 bp, Homo sapien
aatcttgtaggcatagttagacata

SEQ ID NO: 3272328 - DNA, 25 bp, Homo sapien
tcttgtaggcatagttagacatagt

SEQ ID NO: 3272329 - DNA, 25 bp, Homo sapien
caagatttagacaaaatcttgtagg

SEQ ID NO: 3272330 - DNA, 25 bp, Homo sapien
aaatcttgtaggcatagttagacat

SEQ ID NO: 3272331 - DNA, 25 bp, Homo sapien
cttgtaggcatagttagacatagta

SEQ ID NO: 3272332 - DNA, 25 bp, Homo sapien
gaaagatgaattaatccttgaagga

SEQ ID NO: 3272333 - DNA, 25 bp, Homo sapien
gttgcttgttcagtatctcaagccc

SEQ ID NO: 3272334 - DNA, 25 bp, Homo sapien
cttgttcagtatctcaagcccagaa

SEQ ID NO: 3272335 - DNA, 25 bp, Homo sapien
tccttgaaggaaatgacattgagct

SEQ ID NO: 3272336 - DNA, 25 bp, Homo sapien
caagcccagaaagatgaattaatcc

SEQ ID NO: 3272337 - DNA, 25 bp, Homo sapien
gcccagaaagatgaattaatccttg

SEQ ID NO: 3272338 - DNA, 25 bp, Homo sapien
ggattaattcatctttctgggcttg

SEQ ID NO: 3272339 - DNA, 25 bp, Homo sapien
agctcaatgtcatttccttcaagga

SEQ ID NO: 3272340 - DNA, 25 bp, Homo sapien
ttctgggcttgagatactgaacaag

SEQ ID NO: 3272341 - DNA, 25 bp, Homo sapien
caaggattaattcatctttctgggc

SEQ ID NO: 3272342 - DNA, 25 bp, Homo sapien
gggcttgagatactgaacaagcaac

SEQ ID NO: 3272343 - DNA, 25 bp, Homo sapien
gctcaatgtcatttccttcaaggat

SEQ ID NO: 3272344 - DNA, 25 bp, Homo sapien
ttgatgctgtgcaaatgccctctcc

SEQ ID NO: 3272345 - DNA, 25 bp, Homo sapien
gaaatactctgatactagctatggt

SEQ ID NO: 3272346 - DNA, 25 bp, Homo sapien
catgagtagtggttaatagcctagc

SEQ ID NO: 3272347 - DNA, 25 bp, Homo sapien
gatacattggagtagcttgcagtgg

SEQ ID NO: 3272348 - DNA, 25 bp, Homo sapien
tagtatcaaaataatggctgtccag

SEQ ID NO: 3272349 - DNA, 25 bp, Homo sapien
aaacatacctggctcggcctcttga

SEQ ID NO: 3272350 - DNA, 25 bp, Homo sapien
tataaacccttaagtagcaccaaca

SEQ ID NO: 3272351 - DNA, 25 bp, Homo sapien
ggagagggcatttgcacagcatcaa

SEQ ID NO: 3272352 - DNA, 25 bp, Homo sapien
gacagtgagagctgaaatttacgct

SEQ ID NO: 3272353 - DNA, 25 bp, Homo sapien
cagagtatttctggacagccattat

SEQ ID NO: 3272354 - DNA, 25 bp, Homo sapien
catcaagaggccgagccaggtatgt

SEQ ID NO: 3272355 - DNA, 25 bp, Homo sapien
gctaggctattaaccactactcatg

SEQ ID NO: 3272356 - DNA, 25 bp, Homo sapien
catcaacgttgttatccaggagaat

SEQ ID NO: 3272357 - DNA, 25 bp, Homo sapien
ggtgaaaaatatatccgcagggttc

SEQ ID NO: 3272358 - DNA, 25 bp, Homo sapien
tatccgcagggttcggatgagacca

SEQ ID NO: 3272359 - DNA, 25 bp, Homo sapien
atcaacgttgttatccaggagaatg

SEQ ID NO: 3272360 - DNA, 25 bp, Homo sapien
aacgttgttatccaggagaatgggt

SEQ ID NO: 3272361 - DNA, 25 bp, Homo sapien
tgaaaaatatatccgcagggttcgg

SEQ ID NO: 3272362 - DNA, 25 bp, Homo sapien
tggtctcatccgaaccctgcggata

SEQ ID NO: 3272363 - DNA, 25 bp, Homo sapien
acccattctcctggataacaacgtt

SEQ ID NO: 3272364 - DNA, 25 bp, Homo sapien
gaaccctgcggatatatttttcacc

SEQ ID NO: 3272365 - DNA, 25 bp, Homo sapien
attctcctggataacaacgttgatg

SEQ ID NO: 3272366 - DNA, 25 bp, Homo sapien
ccgaaccctgcggatatatttttca

SEQ ID NO: 3272367 - DNA, 25 bp, Homo sapien
cattctcctggataacaacgttgat

SEQ ID NO: 3272368 - DNA, 25 bp, Homo sapien
tgtgctgtaccttagtaactcagta

SEQ ID NO: 3272369 - DNA, 25 bp, Homo sapien
cattgagggcataagagctagtgaa

SEQ ID NO: 3272370 - DNA, 25 bp, Homo sapien
taatgtctaagatcagggctttggg

SEQ ID NO: 3272371 - DNA, 25 bp, Homo sapien
tagtgaaataaagcctccgcaagga

SEQ ID NO: 3272372 - DNA, 25 bp, Homo sapien
gaaaatcttggcagtgagtgttacg

SEQ ID NO: 3272373 - DNA, 25 bp, Homo sapien
tacagtccactgaatagacagaaca

SEQ ID NO: 3272374 - DNA, 25 bp, Homo sapien
tccttgcggaggctttatttcacta

SEQ ID NO: 3272375 - DNA, 25 bp, Homo sapien
aaagccctgatcttagacattagac

SEQ ID NO: 3272376 - DNA, 25 bp, Homo sapien
taaaacgtaacactcactgccaaga

SEQ ID NO: 3272377 - DNA, 25 bp, Homo sapien
taataactgtcacctgaaccaagcc

SEQ ID NO: 3272378 - DNA, 25 bp, Homo sapien
tactgagttactaaggtacagcaca

SEQ ID NO: 3272379 - DNA, 25 bp, Homo sapien
tatttcactagctcttatgccctca

SEQ ID NO: 3272380 - DNA, 25 bp, Homo sapien
ttccttgaaggcagggggcctgcct

SEQ ID NO: 3272381 - DNA, 25 bp, Homo sapien
agttccttgaaggcagggggcctgc

SEQ ID NO: 3272382 - DNA, 25 bp, Homo sapien
ggggcctgcctttggcttggtggtc

SEQ ID NO: 3272383 - DNA, 25 bp, Homo sapien
tccttgaaggcagggggcctgcctt

SEQ ID NO: 3272384 - DNA, 25 bp, Homo sapien
aagttccttgaaggcagggggcctg

SEQ ID NO: 3272385 - DNA, 25 bp, Homo sapien
gttccttgaaggcagggggcctgcc

SEQ ID NO: 3272386 - DNA, 25 bp, Homo sapien
aaggcaggccccctgccttcaagga

SEQ ID NO: 3272387 - DNA, 25 bp, Homo sapien
ggcaggccccctgccttcaaggaac

SEQ ID NO: 3272388 - DNA, 25 bp, Homo sapien
gaccaccaagccaaaggcaggcccc

SEQ ID NO: 3272389 - DNA, 25 bp, Homo sapien
caggccccctgccttcaaggaactt

SEQ ID NO: 3272390 - DNA, 25 bp, Homo sapien
aggcaggccccctgccttcaaggaa

SEQ ID NO: 3272391 - DNA, 25 bp, Homo sapien
gcaggccccctgccttcaaggaact

SEQ ID NO: 3272392 - DNA, 25 bp, Homo sapien
tggtgtaatacgcaagaacttggca

SEQ ID NO: 3272393 - DNA, 25 bp, Homo sapien
tctttaagcgatagagctgagagca

SEQ ID NO: 3272394 - DNA, 25 bp, Homo sapien
gaacttggcaaaaataggcatctgt

SEQ ID NO: 3272395 - DNA, 25 bp, Homo sapien
catcaggaccccttgttgggataga

SEQ ID NO: 3272396 - DNA, 25 bp, Homo sapien
tagaatgcacctgataatggcaccc

SEQ ID NO: 3272397 - DNA, 25 bp, Homo sapien
catgcatggctagatgggtacaact

SEQ ID NO: 3272398 - DNA, 25 bp, Homo sapien
gatgtgactaccaactagtactgca

SEQ ID NO: 3272399 - DNA, 25 bp, Homo sapien
gagacacttacgctgtataaagcac

SEQ ID NO: 3272400 - DNA, 25 bp, Homo sapien
tttataatagatgtacagggtgcca

SEQ ID NO: 3272401 - DNA, 25 bp, Homo sapien
tgccaagttcttgcgtattacacca

SEQ ID NO: 3272402 - DNA, 25 bp, Homo sapien
cattatcaggtgcattctagaaggt

SEQ ID NO: 3272403 - DNA, 25 bp, Homo sapien
aaaagttgtacccatctagccatgc

SEQ ID NO: 3272404 - DNA, 25 bp, Homo sapien
actggctaccgttcggactatttgt

SEQ ID NO: 3272405 - DNA, 25 bp, Homo sapien
gttgacaaatggtggggtaacagaa

SEQ ID NO: 3272406 - DNA, 25 bp, Homo sapien
aggaactggctaccgttcggactat

SEQ ID NO: 3272407 - DNA, 25 bp, Homo sapien
cagaaaggaactggctaccgttcgg

SEQ ID NO: 3272408 - DNA, 25 bp, Homo sapien
gctaccgttcggactatttgtagtc

SEQ ID NO: 3272409 - DNA, 25 bp, Homo sapien
taccgttcggactatttgtagtcat

SEQ ID NO: 3272410 - DNA, 25 bp, Homo sapien
ttctgttaccccaccatttgtcaac

SEQ ID NO: 3272411 - DNA, 25 bp, Homo sapien
gactacaaatagtccgaacggtagc

SEQ ID NO: 3272412 - DNA, 25 bp, Homo sapien
atagtccgaacggtagccagttcct

SEQ ID NO: 3272413 - DNA, 25 bp, Homo sapien
acaaatagtccgaacggtagccagt

SEQ ID NO: 3272414 - DNA, 25 bp, Homo sapien
ccgaacggtagccagttcctttctg

SEQ ID NO: 3272415 - DNA, 25 bp, Homo sapien
caaatagtccgaacggtagccagtt

SEQ ID NO: 3272416 - DNA, 25 bp, Homo sapien
gctttgataagggttaattctagaa

SEQ ID NO: 3272417 - DNA, 25 bp, Homo sapien
tttgataagggttaattctagaatc

SEQ ID NO: 3272418 - DNA, 25 bp, Homo sapien
tttaagcctgcatatttctggaaag

SEQ ID NO: 3272419 - DNA, 25 bp, Homo sapien
tctagaatcttaaagtaattcggta

SEQ ID NO: 3272420 - DNA, 25 bp, Homo sapien
gttgtcttttaagcctgcatatttc

SEQ ID NO: 3272421 - DNA, 25 bp, Homo sapien
aagtaattcggtaagtggtctgttg

SEQ ID NO: 3272422 - DNA, 25 bp, Homo sapien
ctttccagaaatatgcaggcttaaa

SEQ ID NO: 3272423 - DNA, 25 bp, Homo sapien
caacagaccacttaccgaattactt

SEQ ID NO: 3272424 - DNA, 25 bp, Homo sapien
gattctagaattaacccttatcaaa

SEQ ID NO: 3272425 - DNA, 25 bp, Homo sapien
taccgaattactttaagattctaga

SEQ ID NO: 3272426 - DNA, 25 bp, Homo sapien
ttctagaattaacccttatcaaagc

SEQ ID NO: 3272427 - DNA, 25 bp, Homo sapien
gaaatatgcaggcttaaaagacaac

SEQ ID NO: 3272428 - DNA, 25 bp, Homo sapien
ggtcatcagtgacacgtcttaatgg

SEQ ID NO: 3272429 - DNA, 25 bp, Homo sapien
gctgtccagaataccagcctgttca

SEQ ID NO: 3272430 - DNA, 25 bp, Homo sapien
cacaggaaccggcagtaggtcattt

SEQ ID NO: 3272431 - DNA, 25 bp, Homo sapien
tccagaagggaagtttgttgcaact

SEQ ID NO: 3272432 - DNA, 25 bp, Homo sapien
gctcaaatgtaatagtggtcatcag

SEQ ID NO: 3272433 - DNA, 25 bp, Homo sapien
caattttcgaattaaggttcagtgc

SEQ ID NO: 3272434 - DNA, 25 bp, Homo sapien
cattaagacgtgtcactgatgacca

SEQ ID NO: 3272435 - DNA, 25 bp, Homo sapien
gcaaccaaatgtgatgctgttataa

SEQ ID NO: 3272436 - DNA, 25 bp, Homo sapien
gttgcaacaaacttcccttctggaa

SEQ ID NO: 3272437 - DNA, 25 bp, Homo sapien
tgatgaccactattacatttgagct

SEQ ID NO: 3272438 - DNA, 25 bp, Homo sapien
gaacaggctggtattctggacagca

SEQ ID NO: 3272439 - DNA, 25 bp, Homo sapien
tcaggtttaaatgacctactgccgg

SEQ ID NO: 3272440 - DNA, 25 bp, Homo sapien
ttctgataattcagttgctcgttgg

SEQ ID NO: 3272441 - DNA, 25 bp, Homo sapien
tcttctgataattcagttgctcgtt

SEQ ID NO: 3272442 - DNA, 25 bp, Homo sapien
cttctgataattcagttgctcgttg

SEQ ID NO: 3272443 - DNA, 25 bp, Homo sapien
ttcttctgataattcagttgctcgt

SEQ ID NO: 3272444 - DNA, 25 bp, Homo sapien
ccaacgagcaactgaattatcagaa

SEQ ID NO: 3272445 - DNA, 25 bp, Homo sapien
caacgagcaactgaattatcagaag

SEQ ID NO: 3272446 - DNA, 25 bp, Homo sapien
acgagcaactgaattatcagaagaa

SEQ ID NO: 3272447 - DNA, 25 bp, Homo sapien
aacgagcaactgaattatcagaaga

SEQ ID NO: 3272448 - DNA, 25 bp, Homo sapien
ttctgataattcagttgctcgttgg

SEQ ID NO: 3272449 - DNA, 25 bp, Homo sapien
tcttctgataattcagttgctcgtt

SEQ ID NO: 3272450 - DNA, 25 bp, Homo sapien
gagggtttttcttctgataattcag

SEQ ID NO: 3272451 - DNA, 25 bp, Homo sapien
cttctgataattcagttgctcgttg

SEQ ID NO: 3272452 - DNA, 25 bp, Homo sapien
ttcttctgataattcagttgctcgt

SEQ ID NO: 3272453 - DNA, 25 bp, Homo sapien
agggtttttcttctgataattcagt

SEQ ID NO: 3272454 - DNA, 25 bp, Homo sapien
ccaacgagcaactgaattatcagaa

SEQ ID NO: 3272455 - DNA, 25 bp, Homo sapien
caacgagcaactgaattatcagaag

SEQ ID NO: 3272456 - DNA, 25 bp, Homo sapien
acgagcaactgaattatcagaagaa

SEQ ID NO: 3272457 - DNA, 25 bp, Homo sapien
ctgaattatcagaagaaaaaccctc

SEQ ID NO: 3272458 - DNA, 25 bp, Homo sapien
aacgagcaactgaattatcagaaga

SEQ ID NO: 3272459 - DNA, 25 bp, Homo sapien
actgaattatcagaagaaaaaccct

SEQ ID NO: 3272460 - DNA, 25 bp, Homo sapien
catcaatgtagaactcagccttctt

SEQ ID NO: 3272461 - DNA, 25 bp, Homo sapien
tcaatgtagaactcagccttcttgg

SEQ ID NO: 3272462 - DNA, 25 bp, Homo sapien
gaagggacgcacagttatcgtgaag

SEQ ID NO: 3272463 - DNA, 25 bp, Homo sapien
aatgtagaactcagccttcttggaa

SEQ ID NO: 3272464 - DNA, 25 bp, Homo sapien
atcaatgtagaactcagccttcttg

SEQ ID NO: 3272465 - DNA, 25 bp, Homo sapien
tcgacattactctgaagggacgcac

SEQ ID NO: 3272466 - DNA, 25 bp, Homo sapien
caagaaggctgagttctacattgat

SEQ ID NO: 3272467 - DNA, 25 bp, Homo sapien
tgtgcgtcccttcagagtaatgtcg

SEQ ID NO: 3272468 - DNA, 25 bp, Homo sapien
cttcacgataactgtgcgtcccttc

SEQ ID NO: 3272469 - DNA, 25 bp, Homo sapien
cattgatgtgattgaagtccctccg

SEQ ID NO: 3272470 - DNA, 25 bp, Homo sapien
ttccaagaaggctgagttctacatt

SEQ ID NO: 3272471 - DNA, 25 bp, Homo sapien
ccaagaaggctgagttctacattga

SEQ ID NO: 3272472 - DNA, 25 bp, Homo sapien
tacatctttactgcacgttccaagc

SEQ ID NO: 3272473 - DNA, 25 bp, Homo sapien
tttactgcacgttccaagcgttgtg

SEQ ID NO: 3272474 - DNA, 25 bp, Homo sapien
tccaagcgttgtgtggcctgacgag

SEQ ID NO: 3272475 - DNA, 25 bp, Homo sapien
tgcacgttccaagcgttgtgtggcc

SEQ ID NO: 3272476 - DNA, 25 bp, Homo sapien
tgtgtggcctgacgagtgtgttctc

SEQ ID NO: 3272477 - DNA, 25 bp, Homo sapien
gcctgacgagtgtgttctctcttct

SEQ ID NO: 3272478 - DNA, 25 bp, Homo sapien
gccacacaacgcttggaacgtgcag

SEQ ID NO: 3272479 - DNA, 25 bp, Homo sapien
tcaggccacacaacgcttggaacgt

SEQ ID NO: 3272480 - DNA, 25 bp, Homo sapien
gaagagagaacacactcgtcaggcc

SEQ ID NO: 3272481 - DNA, 25 bp, Homo sapien
cacaacgcttggaacgtgcagtaaa

SEQ ID NO: 3272482 - DNA, 25 bp, Homo sapien
gcttggaacgtgcagtaaagatgta

SEQ ID NO: 3272483 - DNA, 25 bp, Homo sapien
tcgtcaggccacacaacgcttggaa

SEQ ID NO: 3272484 - DNA, 25 bp, Homo sapien
cagactgtcgacattccagaaaatg

SEQ ID NO: 3272485 - DNA, 25 bp, Homo sapien
tcagcaatcagactgtcgacattcc

SEQ ID NO: 3272486 - DNA, 25 bp, Homo sapien
tattctcagcaatcagactgtcgac

SEQ ID NO: 3272487 - DNA, 25 bp, Homo sapien
caatcagactgtcgacattccagaa

SEQ ID NO: 3272488 - DNA, 25 bp, Homo sapien
ctattctcagcaatcagactgtcga

SEQ ID NO: 3272489 - DNA, 25 bp, Homo sapien
agcaatcagactgtcgacattccag

SEQ ID NO: 3272490 - DNA, 25 bp, Homo sapien
tcgacagtctgattgctgagaatag

SEQ ID NO: 3272491 - DNA, 25 bp, Homo sapien
cattttctggaatgtcgacagtctg

SEQ ID NO: 3272492 - DNA, 25 bp, Homo sapien
gtcgacagtctgattgctgagaata

SEQ ID NO: 3272493 - DNA, 25 bp, Homo sapien
ctggaatgtcgacagtctgattgct

SEQ ID NO: 3272494 - DNA, 25 bp, Homo sapien
ttctggaatgtcgacagtctgattg

SEQ ID NO: 3272495 - DNA, 25 bp, Homo sapien
ggaatgtcgacagtctgattgctga

SEQ ID NO: 3272496 - DNA, 25 bp, Homo sapien
ctgggacacactggggcccgctgtc

SEQ ID NO: 3272497 - DNA, 25 bp, Homo sapien
agtggagctctgtgcggcgtagttt

SEQ ID NO: 3272498 - DNA, 25 bp, Homo sapien
ccgtcctccgacatcttgtctggaa

SEQ ID NO: 3272499 - DNA, 25 bp, Homo sapien
ctgtgcggcgtagtttggtggaaaa

SEQ ID NO: 3272500 - DNA, 25 bp, Homo sapien
gcagtctccagtaggagtggagctc

SEQ ID NO: 3272501 - DNA, 25 bp, Homo sapien
tcttgtctggaacttccgcctggca

SEQ ID NO: 3272502 - DNA, 25 bp, Homo sapien
tgccaggcggaagttccagacaaga

SEQ ID NO: 3272503 - DNA, 25 bp, Homo sapien
ttccagacaagatgtcggaggacgg

SEQ ID NO: 3272504 - DNA, 25 bp, Homo sapien
gtcggaggacgggagaccgacagcg

SEQ ID NO: 3272505 - DNA, 25 bp, Homo sapien
gagctccactcctactggagactgc

SEQ ID NO: 3272506 - DNA, 25 bp, Homo sapien
ttttccaccaaactacgccgcacag

SEQ ID NO: 3272507 - DNA, 25 bp, Homo sapien
gacagcgggccccagtgtgtcccag

SEQ ID NO: 3272508 - DNA, 25 bp, Homo sapien
cataggacttccagggttgggctga

SEQ ID NO: 3272509 - DNA, 25 bp, Homo sapien
actgctgggcctcgtaattctcgct

SEQ ID NO: 3272510 - DNA, 25 bp, Homo sapien
tgtgggctttttggcctattcccgc

SEQ ID NO: 3272511 - DNA, 25 bp, Homo sapien
tcggcaagcgccatatgagcctggc

SEQ ID NO: 3272512 - DNA, 25 bp, Homo sapien
tggcggcgccagatgcgaatcctgt

SEQ ID NO: 3272513 - DNA, 25 bp, Homo sapien
gcccctcagtcttgccgggatggca

SEQ ID NO: 3272514 - DNA, 25 bp, Homo sapien
aggagcagccccaaagcgagaatta

SEQ ID NO: 3272515 - DNA, 25 bp, Homo sapien
gcgggaataggccaaaaagcccaca

SEQ ID NO: 3272516 - DNA, 25 bp, Homo sapien
caaccctggaagtcctatgcgggcg

SEQ ID NO: 3272517 - DNA, 25 bp, Homo sapien
aaagcgagaattacgaggcccagca

SEQ ID NO: 3272518 - DNA, 25 bp, Homo sapien
ctcatatggcgcttgccgagctggg

SEQ ID NO: 3272519 - DNA, 25 bp, Homo sapien
cacaacaggattcgcatctggcgcc

SEQ ID NO: 3272520 - DNA, 25 bp, Homo sapien
gtgctcgtgggggtactgggaatct

SEQ ID NO: 3272521 - DNA, 25 bp, Homo sapien
tgctcgtgggggtactgggaatctg

SEQ ID NO: 3272522 - DNA, 25 bp, Homo sapien
ttctgtgctcgtgggggtactggga

SEQ ID NO: 3272523 - DNA, 25 bp, Homo sapien
tcgtgggggtactgggaatctgaaa

SEQ ID NO: 3272524 - DNA, 25 bp, Homo sapien
tttctgtgctcgtgggggtactggg

SEQ ID NO: 3272525 - DNA, 25 bp, Homo sapien
ctcgtgggggtactgggaatctgaa

SEQ ID NO: 3272526 - DNA, 25 bp, Homo sapien
cagattcccagtacccccacgagca

SEQ ID NO: 3272527 - DNA, 25 bp, Homo sapien
cccagtacccccacgagcacagaaa

SEQ ID NO: 3272528 - DNA, 25 bp, Homo sapien
agattcccagtacccccacgagcac

SEQ ID NO: 3272529 - DNA, 25 bp, Homo sapien
tcccagtacccccacgagcacagaa

SEQ ID NO: 3272530 - DNA, 25 bp, Homo sapien
ttcagattcccagtacccccacgag

SEQ ID NO: 3272531 - DNA, 25 bp, Homo sapien
tttcagattcccagtacccccacga

SEQ ID NO: 3272532 - DNA, 25 bp, Homo sapien
ggaatctgaaaccatctgctctggg

SEQ ID NO: 3272533 - DNA, 25 bp, Homo sapien
tactgggaatctgaaaccatctgct

SEQ ID NO: 3272534 - DNA, 25 bp, Homo sapien
ggtactgggaatctgaaaccatctg

SEQ ID NO: 3272535 - DNA, 25 bp, Homo sapien
ctgaaaccatctgctctgggaaagg

SEQ ID NO: 3272536 - DNA, 25 bp, Homo sapien
tttctgtgctcgtgggggtactggg

SEQ ID NO: 3272537 - DNA, 25 bp, Homo sapien
gggtactgggaatctgaaaccatct

SEQ ID NO: 3272538 - DNA, 25 bp, Homo sapien
cctttcccagagcagatggtttcag

SEQ ID NO: 3272539 - DNA, 25 bp, Homo sapien
cccagtacccccacgagcacagaaa

SEQ ID NO: 3272540 - DNA, 25 bp, Homo sapien
cccagagcagatggtttcagattcc

SEQ ID NO: 3272541 - DNA, 25 bp, Homo sapien
agcagatggtttcagattcccagta

SEQ ID NO: 3272542 - DNA, 25 bp, Homo sapien
gatggtttcagattcccagtacccc

SEQ ID NO: 3272543 - DNA, 25 bp, Homo sapien
cagatggtttcagattcccagtacc

SEQ ID NO: 3272544 - DNA, 25 bp, Homo sapien
atgacgacagacgttctttctttgc

SEQ ID NO: 3272545 - DNA, 25 bp, Homo sapien
gcaaagaaagaacgtctgtcgtcat

SEQ ID NO: 3272546 - DNA, 25 bp, Homo sapien
gacgacagacgttctttctttgctg

SEQ ID NO: 3272547 - DNA, 25 bp, Homo sapien
cgacagacgttctttctttgctgcg

SEQ ID NO: 3272548 - DNA, 25 bp, Homo sapien
gacagacgttctttctttgctgcgt

SEQ ID NO: 3272549 - DNA, 25 bp, Homo sapien
atgacgacagacgttctttctttgc

SEQ ID NO: 3272550 - DNA, 25 bp, Homo sapien
tgacgacagacgttctttctttgct

SEQ ID NO: 3272551 - DNA, 25 bp, Homo sapien
gacgttctttctttgctgcgtctac

SEQ ID NO: 3272552 - DNA, 25 bp, Homo sapien
acgcagcaaagaaagaacgtctgtc

SEQ ID NO: 3272553 - DNA, 25 bp, Homo sapien
gcaaagaaagaacgtctgtcgtcat

SEQ ID NO: 3272554 - DNA, 25 bp, Homo sapien
gcagcaaagaaagaacgtctgtcgt

SEQ ID NO: 3272555 - DNA, 25 bp, Homo sapien
agcaaagaaagaacgtctgtcgtca

SEQ ID NO: 3272556 - DNA, 25 bp, Homo sapien
gtagacgcagcaaagaaagaacgtc

SEQ ID NO: 3272557 - DNA, 25 bp, Homo sapien
cagcaaagaaagaacgtctgtcgtc

SEQ ID NO: 3272558 - DNA, 25 bp, Homo sapien
taaaggttactgtgttgaagcatac

SEQ ID NO: 3272559 - DNA, 25 bp, Homo sapien
taggtttaaaagtctactatatata

SEQ ID NO: 3272560 - DNA, 25 bp, Homo sapien
gaagcatactgaacgattactgata

SEQ ID NO: 3272561 - DNA, 25 bp, Homo sapien
tgcctacaggtgtgttttaaccact

SEQ ID NO: 3272562 - DNA, 25 bp, Homo sapien
attacactagagcaattgctttggt

SEQ ID NO: 3272563 - DNA, 25 bp, Homo sapien
acactagagcaattgctttggttgt

SEQ ID NO: 3272564 - DNA, 25 bp, Homo sapien
aaattacactagagcaattgctttg

SEQ ID NO: 3272565 - DNA, 25 bp, Homo sapien
tacactagagcaattgctttggttg

SEQ ID NO: 3272566 - DNA, 25 bp, Homo sapien
tggccattgttgaagtctaggacac

SEQ ID NO: 3272567 - DNA, 25 bp, Homo sapien
gcagagggcagcttagtcttcagaa

SEQ ID NO: 3272568 - DNA, 25 bp, Homo sapien
tcatgataccaccaccagtgggtgc

SEQ ID NO: 3272569 - DNA, 25 bp, Homo sapien
aagtttcaaccctctgacatgtggg

SEQ ID NO: 3272570 - DNA, 25 bp, Homo sapien
catgacaagtattggcctgatgcct

SEQ ID NO: 3272571 - DNA, 25 bp, Homo sapien
ccacttattaaggtgtgaccctgag

SEQ ID NO: 3272572 - DNA, 25 bp, Homo sapien
tgggcacctttatgtatccagagaa

SEQ ID NO: 3272573 - DNA, 25 bp, Homo sapien
gagaaaagtcacatagtctgtcctg

SEQ ID NO: 3272574 - DNA, 25 bp, Homo sapien
tacaaattcggcaacatccaaatag

SEQ ID NO: 3272575 - DNA, 25 bp, Homo sapien
tcctcatttggacaggacaagtgcc

SEQ ID NO: 3272576 - DNA, 25 bp, Homo sapien
cagcatttggcatatctagacaaga

SEQ ID NO: 3272577 - DNA, 25 bp, Homo sapien
catcttcatacatctttggacttac

SEQ ID NO: 3272578 - DNA, 25 bp, Homo sapien
ttatgtagggatttgtataaccatt

SEQ ID NO: 3272579 - DNA, 25 bp, Homo sapien
gatattatgtagggatttgtataac

SEQ ID NO: 3272580 - DNA, 25 bp, Homo sapien
tattatgtagggatttgtataacca

SEQ ID NO: 3272581 - DNA, 25 bp, Homo sapien
atattatgtagggatttgtataacc

SEQ ID NO: 3272582 - DNA, 25 bp, Homo sapien
taatgcaaactgtacattctcagca

SEQ ID NO: 3272583 - DNA, 25 bp, Homo sapien
tgagacctgggatgtttaatgcaaa

SEQ ID NO: 3272584 - DNA, 25 bp, Homo sapien
cattgaactgcaaaattcctgaagg

SEQ ID NO: 3272585 - DNA, 25 bp, Homo sapien
tatttatgtaattttcatctgtaga

SEQ ID NO: 3272586 - DNA, 25 bp, Homo sapien
gattagtgaggaaaaccaataaata

SEQ ID NO: 3272587 - DNA, 25 bp, Homo sapien
tatttggggtgactggaaattaaca

SEQ ID NO: 3272588 - DNA, 25 bp, Homo sapien
taataatgatctaacacaagcaaaa

SEQ ID NO: 3272589 - DNA, 25 bp, Homo sapien
tataaaactcaacaagagacataag

SEQ ID NO: 3272590 - DNA, 25 bp, Homo sapien
ttaaccagaccatacatgtaaaggc

SEQ ID NO: 3272591 - DNA, 25 bp, Homo sapien
actttaaccagaccatacatgtaaa

SEQ ID NO: 3272592 - DNA, 25 bp, Homo sapien
tttaaccagaccatacatgtaaagg

SEQ ID NO: 3272593 - DNA, 25 bp, Homo sapien
aactttaaccagaccatacatgtaa

SEQ ID NO: 3272594 - DNA, 25 bp, Homo sapien
ggcctatggacaatttataaagtaa

SEQ ID NO: 3272595 - DNA, 25 bp, Homo sapien
ccaataaccaggaggaatgaagact

SEQ ID NO: 3272596 - DNA, 25 bp, Homo sapien
aaacacttggttcatgggccaggcg

SEQ ID NO: 3272597 - DNA, 25 bp, Homo sapien
tgtgatattaaagtgtggcctatgg

SEQ ID NO: 3272598 - DNA, 25 bp, Homo sapien
accagaaggagcatatggaattctc

SEQ ID NO: 3272599 - DNA, 25 bp, Homo sapien
ttcggaatttcaccagaaggagcat

SEQ ID NO: 3272600 - DNA, 25 bp, Homo sapien
tcttgttaggtggatcttgaagact

SEQ ID NO: 3272601 - DNA, 25 bp, Homo sapien
ggatcttgaagactaaacttcggaa

SEQ ID NO: 3272602 - DNA, 25 bp, Homo sapien
tataatgtactgaaatgggagcagg

SEQ ID NO: 3272603 - DNA, 25 bp, Homo sapien
tctgtactccatcgtaatattcata

SEQ ID NO: 3272604 - DNA, 25 bp, Homo sapien
ttgttcctagaattaatctgtactc

SEQ ID NO: 3272605 - DNA, 25 bp, Homo sapien
ctgagttgctatgagagatctttgg

SEQ ID NO: 3272606 - DNA, 25 bp, Homo sapien
ctgcctcgcaggttcaagcgattct

SEQ ID NO: 3272607 - DNA, 25 bp, Homo sapien
actgcaacctctgcctcgcaggttc

SEQ ID NO: 3272608 - DNA, 25 bp, Homo sapien
tcttgccctgttgcctgggctgcag

SEQ ID NO: 3272609 - DNA, 25 bp, Homo sapien
cagtgcagtggcacgatcttggctc

SEQ ID NO: 3272610 - DNA, 25 bp, Homo sapien
acctctccaagatagctggtgctga

SEQ ID NO: 3272611 - DNA, 25 bp, Homo sapien
gctgagatgtgcatagcaagctgtc

SEQ ID NO: 3272612 - DNA, 25 bp, Homo sapien
aaaaacactgttctgggtggaggct

SEQ ID NO: 3272613 - DNA, 25 bp, Homo sapien
tatacatactgctctgaggaaatgg

SEQ ID NO: 3272614 - DNA, 25 bp, Homo sapien
tatgaatgcgttcataatccaattc

SEQ ID NO: 3272615 - DNA, 25 bp, Homo sapien
cgaagataaaggctggctttagcat

SEQ ID NO: 3272616 - DNA, 25 bp, Homo sapien
ttttttatgaatgcgttcataatcc

SEQ ID NO: 3272617 - DNA, 25 bp, Homo sapien
ggacacgccgtccatcgaagataaa

SEQ ID NO: 3272618 - DNA, 25 bp, Homo sapien
caacagcatgggcaccatcacatgc

SEQ ID NO: 3272619 - DNA, 25 bp, Homo sapien
ttggaaatggtcacgagccgggaca

SEQ ID NO: 3272620 - DNA, 25 bp, Homo sapien
acatgcttcatatggatccttggaa

SEQ ID NO: 3272621 - DNA, 25 bp, Homo sapien
tcccactcagtgcaaataacaacag

SEQ ID NO: 3272622 - DNA, 25 bp, Homo sapien
gatgtgcaccttcatccatcaaata

SEQ ID NO: 3272623 - DNA, 25 bp, Homo sapien
gttccctaggtacttttggatcata

SEQ ID NO: 3272624 - DNA, 25 bp, Homo sapien
cacaactatttgttccctaggtact

SEQ ID NO: 3272625 - DNA, 25 bp, Homo sapien
gagaaagatccacaactatttgttc

SEQ ID NO: 3272626 - DNA, 25 bp, Homo sapien
cctctggtagtcattcatgtctatg

SEQ ID NO: 3272627 - DNA, 25 bp, Homo sapien
ttatcagttactgtattaaacagac

SEQ ID NO: 3272628 - DNA, 25 bp, Homo sapien
tatgatccgggaagcaaacctcctc

SEQ ID NO: 3272629 - DNA, 25 bp, Homo sapien
gtcctttttgaatgcaaatcccaaa

SEQ ID NO: 3272630 - DNA, 25 bp, Homo sapien
caataacgagctacttctggcaaat

SEQ ID NO: 3272631 - DNA, 25 bp, Homo sapien
gctgccaataacgagctacttctgg

SEQ ID NO: 3272632 - DNA, 25 bp, Homo sapien
agataaaccaaattcagaacatcct

SEQ ID NO: 3272633 - DNA, 25 bp, Homo sapien
acgagctacttctggcaaattcaga

SEQ ID NO: 3272634 - DNA, 25 bp, Homo sapien
aatgctgcttattctctgggcaaga

SEQ ID NO: 3272635 - DNA, 25 bp, Homo sapien
ggtccattccaatcgctgttgctac

SEQ ID NO: 3272636 - DNA, 25 bp, Homo sapien
cagagcacttatggagttaatgctg

SEQ ID NO: 3272637 - DNA, 25 bp, Homo sapien
agctcctgttgcttcacacagagca

SEQ ID NO: 3272638 - DNA, 25 bp, Homo sapien
ttcatcccctccaatcagtactctg

SEQ ID NO: 3272639 - DNA, 25 bp, Homo sapien
taggtccttgatggctgttccctct

SEQ ID NO: 3272640 - DNA, 25 bp, Homo sapien
ccaagtattagtggtgaggatcttt

SEQ ID NO: 3272641 - DNA, 25 bp, Homo sapien
ggaaagctctgaagaccaagtatta

SEQ ID NO: 3272642 - DNA, 25 bp, Homo sapien
cataggtttttgttggagtattcac

SEQ ID NO: 3272643 - DNA, 25 bp, Homo sapien
tgagttttgcacaatgcgtctagca

SEQ ID NO: 3272644 - DNA, 25 bp, Homo sapien
aatatgcgacggatactttctgctg

SEQ ID NO: 3272645 - DNA, 25 bp, Homo sapien
cagtcacaattttgtacccatttga

SEQ ID NO: 3272646 - DNA, 25 bp, Homo sapien
ggattacatgtaaccttggagaagt

SEQ ID NO: 3272647 - DNA, 25 bp, Homo sapien
tcagtgacctcattggaaaatgagg

SEQ ID NO: 3272648 - DNA, 25 bp, Homo sapien
tggccaatgggcgaagactttcatt

SEQ ID NO: 3272649 - DNA, 25 bp, Homo sapien
aaatcatgggcccagagtctaggca

SEQ ID NO: 3272650 - DNA, 25 bp, Homo sapien
catgatgtagggtgaaactggctag

SEQ ID NO: 3272651 - DNA, 25 bp, Homo sapien
ttacatgcatggaacaacttagggc

SEQ ID NO: 3272652 - DNA, 25 bp, Homo sapien
catgtaatggtgtacggaaaggcaa

SEQ ID NO: 3272653 - DNA, 25 bp, Homo sapien
ggctctggtcacctaaaaattagac

SEQ ID NO: 3272654 - DNA, 25 bp, Homo sapien
tggcatcatcaatattggtagaaaa

SEQ ID NO: 3272655 - DNA, 25 bp, Homo sapien
taaatacaagatcagcttctttgat

SEQ ID NO: 3272656 - DNA, 25 bp, Homo sapien
gattttttcctcgacaggattctac

SEQ ID NO: 3272657 - DNA, 25 bp, Homo sapien
tttgatggcatcatcaatattggta

SEQ ID NO: 3272658 - DNA, 25 bp, Homo sapien
cacgtagataactgttgaaacaaga

SEQ ID NO: 3272659 - DNA, 25 bp, Homo sapien
aggaggactggccacgtagataact

SEQ ID NO: 3272660 - DNA, 25 bp, Homo sapien
ggcacacggagattcattgtactgt

SEQ ID NO: 3272661 - DNA, 25 bp, Homo sapien
gatgggcacacggagattcattgta

SEQ ID NO: 3272662 - DNA, 25 bp, Homo sapien
cacgacaacacaaaaggaagtgttt

SEQ ID NO: 3272663 - DNA, 25 bp, Homo sapien
tgtactcctttgtgtctggcaacac

SEQ ID NO: 3272664 - DNA, 25 bp, Homo sapien
taagtcaaagcccactgtatgccct

SEQ ID NO: 3272665 - DNA, 25 bp, Homo sapien
aacttacgcaaatggaattatacgg

SEQ ID NO: 3272666 - DNA, 25 bp, Homo sapien
taggaagtgtaggagaattccacgc

SEQ ID NO: 3272667 - DNA, 25 bp, Homo sapien
ctacatgtgggtcctccaacatagc

SEQ ID NO: 3272668 - DNA, 25 bp, Homo sapien
caacaaccgttaccctgatttcagg

SEQ ID NO: 3272669 - DNA, 25 bp, Homo sapien
tgagcaatgacactacatgtgggtc

SEQ ID NO: 3272670 - DNA, 25 bp, Homo sapien
tgcaccgatgcaacagatcttctta

SEQ ID NO: 3272671 - DNA, 25 bp, Homo sapien
ctgcaccgatgcaacagatcttctt

SEQ ID NO: 3272672 - DNA, 25 bp, Homo sapien
ctagaaggaaaacagtaagactgtt

SEQ ID NO: 3272673 - DNA, 25 bp, Homo sapien
gctgcactagcatgaaacatatgga

SEQ ID NO: 3272674 - DNA, 25 bp, Homo sapien
gggagccacaaagattataatgacc

SEQ ID NO: 3272675 - DNA, 25 bp, Homo sapien
gatgacctagcctgttctcagctgc

SEQ ID NO: 3272676 - DNA, 25 bp, Homo sapien
ctctgaggaattatggaaatagtga

SEQ ID NO: 3272677 - DNA, 25 bp, Homo sapien
ggatcctggccactaataagcacat

SEQ ID NO: 3272678 - DNA, 25 bp, Homo sapien
actctgcggccaaaatgaggtcccc

SEQ ID NO: 3272679 - DNA, 25 bp, Homo sapien
aaacaaaagactacgactctgcggc

SEQ ID NO: 3272680 - DNA, 25 bp, Homo sapien
gaggcggcagggaaatctcatccaa

SEQ ID NO: 3272681 - DNA, 25 bp, Homo sapien
gcagttccaaaatgcggttcccgcc

SEQ ID NO: 3272682 - DNA, 25 bp, Homo sapien
cttgaataagaagcccagacgacca

SEQ ID NO: 3272683 - DNA, 25 bp, Homo sapien
gtcttgaataagaagcccagacgac

SEQ ID NO: 3272684 - DNA, 25 bp, Homo sapien
ataagaagcccagacgaccacatcc

SEQ ID NO: 3272685 - DNA, 25 bp, Homo sapien
gcagggaccgctcctatcccgatcg

SEQ ID NO: 3272686 - DNA, 25 bp, Homo sapien
ttcccagcagcaagcgcagggaccg

SEQ ID NO: 3272687 - DNA, 25 bp, Homo sapien
tatcccgatcgttcggacagcacct

SEQ ID NO: 3272688 - DNA, 25 bp, Homo sapien
gctcctatcccgatcgttcggacag

SEQ ID NO: 3272689 - DNA, 25 bp, Homo sapien
aggctgccacgcgttacactctgag

SEQ ID NO: 3272690 - DNA, 25 bp, Homo sapien
tgcgaaggcggaggcttcattcccc

SEQ ID NO: 3272691 - DNA, 25 bp, Homo sapien
gctcgatctgagctccctctcggcg

SEQ ID NO: 3272692 - DNA, 25 bp, Homo sapien
gttacactctgagtcccgggcctga

SEQ ID NO: 3272693 - DNA, 25 bp, Homo sapien
tcaggacattttggcctattgagag

SEQ ID NO: 3272694 - DNA, 25 bp, Homo sapien
tgccatgtaaatcagtgaatttgat

SEQ ID NO: 3272695 - DNA, 25 bp, Homo sapien
tgtcttgccacccatttaatacgta

SEQ ID NO: 3272696 - DNA, 25 bp, Homo sapien
gaatcaagaatcctcaagtctgtct

SEQ ID NO: 3272697 - DNA, 25 bp, Homo sapien
ttgtgcagctctcaattgccgtttg

SEQ ID NO: 3272698 - DNA, 25 bp, Homo sapien
ggttgtgcagctctcaattgccgtt

SEQ ID NO: 3272699 - DNA, 25 bp, Homo sapien
tctttcggcctgtaacatctcccca

SEQ ID NO: 3272700 - DNA, 25 bp, Homo sapien
gcaggttgtgcagctctcaattgcc

SEQ ID NO: 3272701 - DNA, 25 bp, Homo sapien
taagaggttagactctggcattcca

SEQ ID NO: 3272702 - DNA, 25 bp, Homo sapien
ccaagtatctgaggttatgagcaca

SEQ ID NO: 3272703 - DNA, 25 bp, Homo sapien
caggccatcatgtcccgctaagttt

SEQ ID NO: 3272704 - DNA, 25 bp, Homo sapien
ttatcaagcatagaccaagtatctg

SEQ ID NO: 3272705 - DNA, 25 bp, Homo sapien
aagtcccctacaagcaactaatggg

SEQ ID NO: 3272706 - DNA, 25 bp, Homo sapien
tttgtctgagaagagatacgcacac

SEQ ID NO: 3272707 - DNA, 25 bp, Homo sapien
gagaaagtcatcaggtgaaatgcca

SEQ ID NO: 3272708 - DNA, 25 bp, Homo sapien
gaaactctacttctgaatactggcc

SEQ ID NO: 3272709 - DNA, 25 bp, Homo sapien
gaggattgtagccacacttcagatg

SEQ ID NO: 3272710 - DNA, 25 bp, Homo sapien
taacaacagaccctggatggcacag

SEQ ID NO: 3272711 - DNA, 25 bp, Homo sapien
tagagtgatagacttccaaggttcc

SEQ ID NO: 3272712 - DNA, 25 bp, Homo sapien
tgaaatatgacttgctgaccatgga

SEQ ID NO: 3272713 - DNA, 25 bp, Homo sapien
aaagaatccagatttttaggtgtct

SEQ ID NO: 3272714 - DNA, 25 bp, Homo sapien
gatttttaggtgtctaatactagac

SEQ ID NO: 3272715 - DNA, 25 bp, Homo sapien
ggtgtctaatactagacattctgta

SEQ ID NO: 3272716 - DNA, 25 bp, Homo sapien
gaatccagatttttaggtgtctaat

SEQ ID NO: 3272717 - DNA, 25 bp, Homo sapien
cagctatagagttaggaaggcttcc

SEQ ID NO: 3272718 - DNA, 25 bp, Homo sapien
caaagccaggatgtacaaggaggaa

SEQ ID NO: 3272719 - DNA, 25 bp, Homo sapien
tgggcaagccttctaagttcaagag

SEQ ID NO: 3272720 - DNA, 25 bp, Homo sapien
agggattggcctaacagctcagaga

SEQ ID NO: 3272721 - DNA, 25 bp, Homo sapien
ccttgtaaggctagtgttgagtggc

SEQ ID NO: 3272722 - DNA, 25 bp, Homo sapien
tcaaatatcagtaacctaacaggcc

SEQ ID NO: 3272723 - DNA, 25 bp, Homo sapien
taacaggccctaatacagctttaag

SEQ ID NO: 3272724 - DNA, 25 bp, Homo sapien
taggtcagaggataacaaaagactc

SEQ ID NO: 3272725 - DNA, 25 bp, Homo sapien
taggaatggcagtaacacaggaagc

SEQ ID NO: 3272726 - DNA, 25 bp, Homo sapien
taagccagtttaatccatgacacag

SEQ ID NO: 3272727 - DNA, 25 bp, Homo sapien
tcaaatttccttcaatcaggccaga

SEQ ID NO: 3272728 - DNA, 25 bp, Homo sapien
catcttcgttcgtttggtcgtgcaa

SEQ ID NO: 3272729 - DNA, 25 bp, Homo sapien
tccacaggaggagctggtggatctt

SEQ ID NO: 3272730 - DNA, 25 bp, Homo sapien
acaggaggagctggtggatcttgtc

SEQ ID NO: 3272731 - DNA, 25 bp, Homo sapien
ttagtccacaggaggagctggtgga

SEQ ID NO: 3272732 - DNA, 25 bp, Homo sapien
gtccacaggaggagctggtggatct

SEQ ID NO: 3272733 - DNA, 25 bp, Homo sapien
acgaagtttcactctcaccgcctag

SEQ ID NO: 3272734 - DNA, 25 bp, Homo sapien
gtttcactctcaccgcctagcctgg

SEQ ID NO: 3272735 - DNA, 25 bp, Homo sapien
tatttgtcatatacaacatgttttg

SEQ ID NO: 3272736 - DNA, 25 bp, Homo sapien
aagtttcactctcaccgcctagcct

SEQ ID NO: 3272737 - DNA, 25 bp, Homo sapien
cataaatactggttctgaaaaggat

SEQ ID NO: 3272738 - DNA, 25 bp, Homo sapien
taaatactggttctgaaaaggatta

SEQ ID NO: 3272739 - DNA, 25 bp, Homo sapien
aaacataaatactggttctgaaaag

SEQ ID NO: 3272740 - DNA, 25 bp, Homo sapien
acataaatactggttctgaaaagga

SEQ ID NO: 3272741 - DNA, 25 bp, Homo sapien
agcatttaaaatctgcaacacttac

SEQ ID NO: 3272742 - DNA, 25 bp, Homo sapien
aaaaagcatttaaaatctgcaacac

SEQ ID NO: 3272743 - DNA, 25 bp, Homo sapien
aaagcatttaaaatctgcaacactt

SEQ ID NO: 3272744 - DNA, 25 bp, Homo sapien
ccaaaaagcatttaaaatctgcaac

SEQ ID NO: 3272745 - DNA, 25 bp, Homo sapien
gatcaatgcaataaccatccaggct

SEQ ID NO: 3272746 - DNA, 25 bp, Homo sapien
ccaggtaggctggatcctcttagat

SEQ ID NO: 3272747 - DNA, 25 bp, Homo sapien
gatgccattatcaccagagggtccc

SEQ ID NO: 3272748 - DNA, 25 bp, Homo sapien
tccaggctaccaagatcattgtaac

SEQ ID NO: 3272749 - DNA, 25 bp, Homo sapien
gaatccatatgaatccaagttaaga

SEQ ID NO: 3272750 - DNA, 25 bp, Homo sapien
tatataattgtggaaggtttaagaa

SEQ ID NO: 3272751 - DNA, 25 bp, Homo sapien
ttaagaacccacaaagccacgaatc

SEQ ID NO: 3272752 - DNA, 25 bp, Homo sapien
cccacaaagccacgaatccatatga

SEQ ID NO: 3272753 - DNA, 25 bp, Homo sapien
tgtcagtcagtagtcatgcccagcc

SEQ ID NO: 3272754 - DNA, 25 bp, Homo sapien
aataatagttaaggccagacctgat

SEQ ID NO: 3272755 - DNA, 25 bp, Homo sapien
tatacttattggttcagcagcccta

SEQ ID NO: 3272756 - DNA, 25 bp, Homo sapien
cctgtgtgaaatgcttgggaataca

SEQ ID NO: 3272757 - DNA, 25 bp, Homo sapien
gagctggcccatcctcagaagatta

SEQ ID NO: 3272758 - DNA, 25 bp, Homo sapien
tgttaacttagctggataccaagag

SEQ ID NO: 3272759 - DNA, 25 bp, Homo sapien
taagcacagctaccagttttcaagc

SEQ ID NO: 3272760 - DNA, 25 bp, Homo sapien
aagtggacaatacaccggtatgctc

SEQ ID NO: 3272761 - DNA, 25 bp, Homo sapien
tactttaggctaggcactgcactag

SEQ ID NO: 3272762 - DNA, 25 bp, Homo sapien
gaaggcatatatatcacccaaatgg

SEQ ID NO: 3272763 - DNA, 25 bp, Homo sapien
tctgtggaatttgatgggacaccca

SEQ ID NO: 3272764 - DNA, 25 bp, Homo sapien
caaatggactaggttcccacaaaat

SEQ ID NO: 3272765 - DNA, 25 bp, Homo sapien
tactgcccataaagccatgtggaga

SEQ ID NO: 3272766 - DNA, 25 bp, Homo sapien
cccataaagccatgtggagaaactt

SEQ ID NO: 3272767 - DNA, 25 bp, Homo sapien
actactgcccataaagccatgtgga

SEQ ID NO: 3272768 - DNA, 25 bp, Homo sapien
taaagccatgtggagaaacttctcc

SEQ ID NO: 3272769 - DNA, 25 bp, Homo sapien
cacaggcatctggcctctaattctg

SEQ ID NO: 3272770 - DNA, 25 bp, Homo sapien
attcctgaagacactctgtgtctgt

SEQ ID NO: 3272771 - DNA, 25 bp, Homo sapien
tgcagtaggactgggactgccgtaa

SEQ ID NO: 3272772 - DNA, 25 bp, Homo sapien
cctgaagacactctgtgtctgtgca

SEQ ID NO: 3272773 - DNA, 25 bp, Homo sapien
tgtctgtgcagtaggactgggactg

SEQ ID NO: 3272774 - DNA, 25 bp, Homo sapien
aatgaataagaaagggaagttagtg

SEQ ID NO: 3272775 - DNA, 25 bp, Homo sapien
atgaataagaaagggaagttagtga

SEQ ID NO: 3272776 - DNA, 25 bp, Homo sapien
ccactgtggttgaagcgtctgagac

SEQ ID NO: 3272777 - DNA, 25 bp, Homo sapien
tcaagggtaggcacatttcaggcaa

SEQ ID NO: 3272778 - DNA, 25 bp, Homo sapien
caaagtacatgactaggaggtccct

SEQ ID NO: 3272779 - DNA, 25 bp, Homo sapien
gacagaagggcagttgagtagccac

SEQ ID NO: 3272780 - DNA, 25 bp, Homo sapien
ggaaacatagtcacaaaacgaggga

SEQ ID NO: 3272781 - DNA, 25 bp, Homo sapien
ccgataatcagcttcaggtcattca

SEQ ID NO: 3272782 - DNA, 25 bp, Homo sapien
ggttttaagtattccgataatcagc

SEQ ID NO: 3272783 - DNA, 25 bp, Homo sapien
aacgagggaggctgtattacagatc

SEQ ID NO: 3272784 - DNA, 25 bp, Homo sapien
cattctgatgagaacaaatcctacc

SEQ ID NO: 3272785 - DNA, 25 bp, Homo sapien
ggcagtagtaagagaagttccaact

SEQ ID NO: 3272786 - DNA, 25 bp, Homo sapien
ccaactgctgttagtgcccataaag

SEQ ID NO: 3272787 - DNA, 25 bp, Homo sapien
tatataaccagtgatgaggcagtag

SEQ ID NO: 3272788 - DNA, 25 bp, Homo sapien
taatcaaggaagtatgcaggcaggc

SEQ ID NO: 3272789 - DNA, 25 bp, Homo sapien
tgtagtcctgatgcacagctgccac

SEQ ID NO: 3272790 - DNA, 25 bp, Homo sapien
caaggtgatccataaagaggctaaa

SEQ ID NO: 3272791 - DNA, 25 bp, Homo sapien
gaaaagaggcacaacagatccagct

SEQ ID NO: 3272792 - DNA, 25 bp, Homo sapien
gcaacttgagtgtatgctcccagaa

SEQ ID NO: 3272793 - DNA, 25 bp, Homo sapien
taaaatcctaactgctcctaagttg

SEQ ID NO: 3272794 - DNA, 25 bp, Homo sapien
ccaggtgtctacttgctataagaac

SEQ ID NO: 3272795 - DNA, 25 bp, Homo sapien
ccacagcccagcatataactaatga

SEQ ID NO: 3272796 - DNA, 25 bp, Homo sapien
aaatgctagtttggtgactcatgcc

SEQ ID NO: 3272797 - DNA, 25 bp, Homo sapien
ttctgaggcattcttaaggatcaca

SEQ ID NO: 3272798 - DNA, 25 bp, Homo sapien
tacaccaagttatcagagccatcac

SEQ ID NO: 3272799 - DNA, 25 bp, Homo sapien
gatcacaagtcctagtgcatgctga

SEQ ID NO: 3272800 - DNA, 25 bp, Homo sapien
cttctcattgcatgttcatgagagc

SEQ ID NO: 3272801 - DNA, 25 bp, Homo sapien
cagcttgattttacttgactgttta

SEQ ID NO: 3272802 - DNA, 25 bp, Homo sapien
cccagcttgattttacttgactgtt

SEQ ID NO: 3272803 - DNA, 25 bp, Homo sapien
ttacccagcttgattttacttgact

SEQ ID NO: 3272804 - DNA, 25 bp, Homo sapien
tacccagcttgattttacttgactg

SEQ ID NO: 3272805 - DNA, 25 bp, Homo sapien
caggttggtcgacatagcaaggcca

SEQ ID NO: 3272806 - DNA, 25 bp, Homo sapien
tctttaaggccaaatgtcttctttg

SEQ ID NO: 3272807 - DNA, 25 bp, Homo sapien
tcttctttggtcctggcaggaataa

SEQ ID NO: 3272808 - DNA, 25 bp, Homo sapien
tgagctgctatgtactataggaatg

SEQ ID NO: 3272809 - DNA, 25 bp, Homo sapien
tgggactacggaggcgcatgttatc

SEQ ID NO: 3272810 - DNA, 25 bp, Homo sapien
tcaagtgatcccatcccgagtggct

SEQ ID NO: 3272811 - DNA, 25 bp, Homo sapien
taggaaaacctacagtgttacagct

SEQ ID NO: 3272812 - DNA, 25 bp, Homo sapien
aaaaaacgtgcatgccctctgaata

SEQ ID NO: 3272813 - DNA, 25 bp, Homo sapien
gtgtctgctgaggacccactctctg

SEQ ID NO: 3272814 - DNA, 25 bp, Homo sapien
cttcgcttataaatgttaagcaagc

SEQ ID NO: 3272815 - DNA, 25 bp, Homo sapien
ggcttcgcttataaatgttaagcaa

SEQ ID NO: 3272816 - DNA, 25 bp, Homo sapien
tgccaccacaatggcttcgcttata

SEQ ID NO: 3272817 - DNA, 25 bp, Homo sapien
ccacaatggcttcgcttataaatgt

SEQ ID NO: 3272818 - DNA, 25 bp, Homo sapien
gccttggttccacttactgagcaaa

SEQ ID NO: 3272819 - DNA, 25 bp, Homo sapien
tccacttactgagcaaacagaaaaa

SEQ ID NO: 3272820 - DNA, 25 bp, Homo sapien
ttggttccacttactgagcaaacag

SEQ ID NO: 3272821 - DNA, 25 bp, Homo sapien
tgtcagccttggttccacttactga

SEQ ID NO: 3272822 - DNA, 25 bp, Homo sapien
cgcaacagattgcagcgcctggaga

SEQ ID NO: 3272823 - DNA, 25 bp, Homo sapien
tcggcagaaagaccgcctggagctt

SEQ ID NO: 3272824 - DNA, 25 bp, Homo sapien
gaccacgtcactcttagccacaaga

SEQ ID NO: 3272825 - DNA, 25 bp, Homo sapien
tgttttgattcgagtgaccacgtca

SEQ ID NO: 3272826 - DNA, 25 bp, Homo sapien
taagattaaccatagccaggcatgg

SEQ ID NO: 3272827 - DNA, 25 bp, Homo sapien
gatacataagattaaccatagccag

SEQ ID NO: 3272828 - DNA, 25 bp, Homo sapien
cagagtggtgcagtcgtatgatcct

SEQ ID NO: 3272829 - DNA, 25 bp, Homo sapien
cccatggcataatcaacttgataca

SEQ ID NO: 3272830 - DNA, 25 bp, Homo sapien
cctgtaatgcaaatttagtggagct

SEQ ID NO: 3272831 - DNA, 25 bp, Homo sapien
taagtggacctaaactaagcattct

SEQ ID NO: 3272832 - DNA, 25 bp, Homo sapien
ttggacaccaaattctctgagaccc

SEQ ID NO: 3272833 - DNA, 25 bp, Homo sapien
acacctgcagggtcaagtatgggcc

SEQ ID NO: 3272834 - DNA, 25 bp, Homo sapien
tacaccaactgaaaatgggccggac

SEQ ID NO: 3272835 - DNA, 25 bp, Homo sapien
caactgggagacttgttagaagcgc

SEQ ID NO: 3272836 - DNA, 25 bp, Homo sapien
tctagctgagtcagggcggcgttcc

SEQ ID NO: 3272837 - DNA, 25 bp, Homo sapien
ttagaagcgcagtcttaggcccacc

SEQ ID NO: 3272838 - DNA, 25 bp, Homo sapien
agctgcgggcggagacatggccaac

SEQ ID NO: 3272839 - DNA, 25 bp, Homo sapien
tcaggtctgaatcgccgagggagga

SEQ ID NO: 3272840 - DNA, 25 bp, Homo sapien
tggcggtggtcgtagcggtggcgga

SEQ ID NO: 3272841 - DNA, 25 bp, Homo sapien
ggaggaggcgggtacgaatcagctg

SEQ ID NO: 3272842 - DNA, 25 bp, Homo sapien
tgaagagcgaggaggtcagaaatga

SEQ ID NO: 3272843 - DNA, 25 bp, Homo sapien
cgcggtgcagcgaatcaagcgggag

SEQ ID NO: 3272844 - DNA, 25 bp, Homo sapien
gcagcgaatcaagcgggagttcaag

SEQ ID NO: 3272845 - DNA, 25 bp, Homo sapien
aggtgctgaagagcgaggaggtcag

SEQ ID NO: 3272846 - DNA, 25 bp, Homo sapien
cgagcctgagaaaacccgggaagtg

SEQ ID NO: 3272847 - DNA, 25 bp, Homo sapien
tcctcggagggatggaagctcacaa

SEQ ID NO: 3272848 - DNA, 25 bp, Homo sapien
tgctcgaaggcccacacttttgagg

SEQ ID NO: 3272849 - DNA, 25 bp, Homo sapien
ccagagcgctaggatggacggtctc

SEQ ID NO: 3272850 - DNA, 25 bp, Homo sapien
tgttgtgccacgaaacttcattatg

SEQ ID NO: 3272851 - DNA, 25 bp, Homo sapien
tcacagtgctctagtaatttgactc

SEQ ID NO: 3272852 - DNA, 25 bp, Homo sapien
tcataccaagatcaacaagaatgcc

SEQ ID NO: 3272853 - DNA, 25 bp, Homo sapien
caaaaaagttgcctcccgttgctct

SEQ ID NO: 3272854 - DNA, 25 bp, Homo sapien
aatattgactatagccccaaaaggc

SEQ ID NO: 3272855 - DNA, 25 bp, Homo sapien
gatacagggcagacaaaggatagat

SEQ ID NO: 3272856 - DNA, 25 bp, Homo sapien
tatgggattctaaagggtatctgca

SEQ ID NO: 3272857 - DNA, 25 bp, Homo sapien
ccaaaaggcttaactggttagagat

SEQ ID NO: 3272858 - DNA, 25 bp, Homo sapien
caaacgaagcagtggaaatggaaaa

SEQ ID NO: 3272859 - DNA, 25 bp, Homo sapien
gtcaaacgaagcagtggaaatggaa

SEQ ID NO: 3272860 - DNA, 25 bp, Homo sapien
gaaaaaagtctgtaactggttatga

SEQ ID NO: 3272861 - DNA, 25 bp, Homo sapien
tagtcaaacgaagcagtggaaatgg

SEQ ID NO: 3272862 - DNA, 25 bp, Homo sapien
acttttagataaaaggatgtactgg

SEQ ID NO: 3272863 - DNA, 25 bp, Homo sapien
ttttaaagatctgtgatagtgcatg

SEQ ID NO: 3272864 - DNA, 25 bp, Homo sapien
tacagactatattgtattccatgtc

SEQ ID NO: 3272865 - DNA, 25 bp, Homo sapien
tgtgctagttctttaatacagacta

SEQ ID NO: 3272866 - DNA, 25 bp, Homo sapien
ggatgtgaaatggtggtttattcta

SEQ ID NO: 3272867 - DNA, 25 bp, Homo sapien
tacttccctagtcagtagagatatt

SEQ ID NO: 3272868 - DNA, 25 bp, Homo sapien
cttccctagtcagtagagatattaa

SEQ ID NO: 3272869 - DNA, 25 bp, Homo sapien
tggatgtgaaatggtggtttattct

SEQ ID NO: 3272870 - DNA, 25 bp, Homo sapien
acgggttttgccatactggtcacac

SEQ ID NO: 3272871 - DNA, 25 bp, Homo sapien
ttacaggcatgccccgctaagcctg

SEQ ID NO: 3272872 - DNA, 25 bp, Homo sapien
gacgggttttgccatactggtcaca

SEQ ID NO: 3272873 - DNA, 25 bp, Homo sapien
gcatgccccgctaagcctggctaat

SEQ ID NO: 3272874 - DNA, 25 bp, Homo sapien
tactttgtatctcaatctgtgtgac

SEQ ID NO: 3272875 - DNA, 25 bp, Homo sapien
gtgtgactgctctatcattcattat

SEQ ID NO: 3272876 - DNA, 25 bp, Homo sapien
ctttgtatctcaatctgtgtgactg

SEQ ID NO: 3272877 - DNA, 25 bp, Homo sapien
ttgtatctcaatctgtgtgactgct

SEQ ID NO: 3272878 - DNA, 25 bp, Homo sapien
gtgcttggcccagaagttctatttt

SEQ ID NO: 3272879 - DNA, 25 bp, Homo sapien
gcttggcccagaagttctattttta

SEQ ID NO: 3272880 - DNA, 25 bp, Homo sapien
aggtctcactcacacgcttacccag

SEQ ID NO: 3272881 - DNA, 25 bp, Homo sapien
actcacacgcttacccaggatagag

SEQ ID NO: 3272882 - DNA, 25 bp, Homo sapien
aattttttattgaaagctgggcatg

SEQ ID NO: 3272883 - DNA, 25 bp, Homo sapien
ggatcactttagccccggaggcaaa

SEQ ID NO: 3272884 - DNA, 25 bp, Homo sapien
ttttattgaaagctgggcatgggcc

SEQ ID NO: 3272885 - DNA, 25 bp, Homo sapien
atggtaagtgcatgcctgtaggccc

SEQ ID NO: 3272886 - DNA, 25 bp, Homo sapien
gtcagcagggtcagattgcctctga

SEQ ID NO: 3272887 - DNA, 25 bp, Homo sapien
gtctttatgtggcatcctccctata

SEQ ID NO: 3272888 - DNA, 25 bp, Homo sapien
gatgcatcaccccaataatctgtct

SEQ ID NO: 3272889 - DNA, 25 bp, Homo sapien
taatagatatcatcacccagttgct

SEQ ID NO: 3272890 - DNA, 25 bp, Homo sapien
tcaaattagcttcaacgttatgtgc

SEQ ID NO: 3272891 - DNA, 25 bp, Homo sapien
gagttcttcactgttggttgttgac

SEQ ID NO: 3272892 - DNA, 25 bp, Homo sapien
gccttggaaatacattagaaccgct

SEQ ID NO: 3272893 - DNA, 25 bp, Homo sapien
ctccaagtgggcagggacttaggtt

SEQ ID NO: 3272894 - DNA, 25 bp, Homo sapien
ggtcagtgaaagttggatgcctcca

SEQ ID NO: 3272895 - DNA, 25 bp, Homo sapien
gatttgggcagtcccaaaaagcagc

SEQ ID NO: 3272896 - DNA, 25 bp, Homo sapien
ggattgtggaaagctatcgagatct

SEQ ID NO: 3272897 - DNA, 25 bp, Homo sapien
taagaagccttaagaggagaaatgc

SEQ ID NO: 3272898 - DNA, 25 bp, Homo sapien
gaatgttaatgtgagtcccactgga

SEQ ID NO: 3272899 - DNA, 25 bp, Homo sapien
gttaatgtgagtcccactggatggt

SEQ ID NO: 3272900 - DNA, 25 bp, Homo sapien
tttctgaatcatttaaggttatcat

SEQ ID NO: 3272901 - DNA, 25 bp, Homo sapien
taatgtgagtcccactggatggttt

SEQ ID NO: 3272902 - DNA, 25 bp, Homo sapien
taaggtcaaccatctaagtagcaca

SEQ ID NO: 3272903 - DNA, 25 bp, Homo sapien
tatggtaaccctaattatacagtct

SEQ ID NO: 3272904 - DNA, 25 bp, Homo sapien
tactaggtaaatacaacgattgctg

SEQ ID NO: 3272905 - DNA, 25 bp, Homo sapien
caaagttttactgttacccaagctg

SEQ ID NO: 3272906 - DNA, 25 bp, Homo sapien
atatattcttatggccgagtgcggt

SEQ ID NO: 3272907 - DNA, 25 bp, Homo sapien
tatattcttatggccgagtgcggtg

SEQ ID NO: 3272908 - DNA, 25 bp, Homo sapien
gatatattcttatggccgagtgcgg

SEQ ID NO: 3272909 - DNA, 25 bp, Homo sapien
gaatcccttgaatccatgagacgga

SEQ ID NO: 3272910 - DNA, 25 bp, Homo sapien
gagaatcccttgaatccatgagacg

SEQ ID NO: 3272911 - DNA, 25 bp, Homo sapien
atcccttgaatccatgagacggagg

SEQ ID NO: 3272912 - DNA, 25 bp, Homo sapien
ggagaatcccttgaatccatgagac

SEQ ID NO: 3272913 - DNA, 25 bp, Homo sapien
catctgtacttttatacctccttgc

SEQ ID NO: 3272914 - DNA, 25 bp, Homo sapien
tatctctggccttgttactcactga

SEQ ID NO: 3272915 - DNA, 25 bp, Homo sapien
taacaggatggattagaggacacag

SEQ ID NO: 3272916 - DNA, 25 bp, Homo sapien
ccaatagttaattgtcctgatgaaa

SEQ ID NO: 3272917 - DNA, 25 bp, Homo sapien
cagtgttcccaaatttagagagccc

SEQ ID NO: 3272918 - DNA, 25 bp, Homo sapien
taatggctcaaaactggaataggat

SEQ ID NO: 3272919 - DNA, 25 bp, Homo sapien
tcacccaaaggcagccagtaatggc

SEQ ID NO: 3272920 - DNA, 25 bp, Homo sapien
gacagaggttcttacttgactcaaa

SEQ ID NO: 3272921 - DNA, 25 bp, Homo sapien
gaatgcctcagggataagtcttgga

SEQ ID NO: 3272922 - DNA, 25 bp, Homo sapien
aacttgagactcctatcctgctgcc

SEQ ID NO: 3272923 - DNA, 25 bp, Homo sapien
tgaactgatagtctcctaacctgaa

SEQ ID NO: 3272924 - DNA, 25 bp, Homo sapien
cacttccttggtaagctcatctgat

SEQ ID NO: 3272925 - DNA, 25 bp, Homo sapien
tccctccacatacacatgcgcctct

SEQ ID NO: 3272926 - DNA, 25 bp, Homo sapien
catacacatgcgcctctaagagaag

SEQ ID NO: 3272927 - DNA, 25 bp, Homo sapien
tacacatgcgcctctaagagaagga

SEQ ID NO: 3272928 - DNA, 25 bp, Homo sapien
tccacatacacatgcgcctctaaga

SEQ ID NO: 3272929 - DNA, 25 bp, Homo sapien
cgagtgtgacttgacaccacgatgc

SEQ ID NO: 3272930 - DNA, 25 bp, Homo sapien
ctggaacacttccgggcacttggtg

SEQ ID NO: 3272931 - DNA, 25 bp, Homo sapien
acttccgggcacttggtgcacttga

SEQ ID NO: 3272932 - DNA, 25 bp, Homo sapien
cacagcgagggcacatgaagatgaa

SEQ ID NO: 3272933 - DNA, 25 bp, Homo sapien
cccccgggcaaccatggccgccgct

SEQ ID NO: 3272934 - DNA, 25 bp, Homo sapien
ccgggcaaccatggccgccgctgct

SEQ ID NO: 3272935 - DNA, 25 bp, Homo sapien
ccatggccgccgctgctgcttccac

SEQ ID NO: 3272936 - DNA, 25 bp, Homo sapien
accatggccgccgctgctgcttcca

SEQ ID NO: 3272937 - DNA, 25 bp, Homo sapien
gggcttgagccggtgtgcgatgtcc

SEQ ID NO: 3272938 - DNA, 25 bp, Homo sapien
gtgtgcgatgtccagggccgactcc

SEQ ID NO: 3272939 - DNA, 25 bp, Homo sapien
gctctccccttctgcgttctccgac

SEQ ID NO: 3272940 - DNA, 25 bp, Homo sapien
cttctgcgttctccgacaggctata

SEQ ID NO: 3272941 - DNA, 25 bp, Homo sapien
cttcggggctggctttggggtcctg

SEQ ID NO: 3272942 - DNA, 25 bp, Homo sapien
cgaaacttgaggctgtcggccacaa

SEQ ID NO: 3272943 - DNA, 25 bp, Homo sapien
aagatgaccttgtggcctcgaaact

SEQ ID NO: 3272944 - DNA, 25 bp, Homo sapien
ggccacaatggtcacgtcgcagaac

SEQ ID NO: 3272945 - DNA, 25 bp, Homo sapien
tagttgacgatgtccctaacagcga

SEQ ID NO: 3272946 - DNA, 25 bp, Homo sapien
gaagatggtgacctattcagagcct

SEQ ID NO: 3272947 - DNA, 25 bp, Homo sapien
ttaacatggatcctctgtgcctgtg

SEQ ID NO: 3272948 - DNA, 25 bp, Homo sapien
tgttggtgttgcatcacagctacct

SEQ ID NO: 3272949 - DNA, 25 bp, Homo sapien
tacttgacttcttaggatgggtagc

SEQ ID NO: 3272950 - DNA, 25 bp, Homo sapien
caaggaatttcaattccagggtaca

SEQ ID NO: 3272951 - DNA, 25 bp, Homo sapien
taccatcagccagttgctgtcactg

SEQ ID NO: 3272952 - DNA, 25 bp, Homo sapien
aaagtaaatgcttaccatcagccag

SEQ ID NO: 3272953 - DNA, 25 bp, Homo sapien
cacacgttctatttgcactgctgca

SEQ ID NO: 3272954 - DNA, 25 bp, Homo sapien
gaagtcttgaatgtgtcaccttttg

SEQ ID NO: 3272955 - DNA, 25 bp, Homo sapien
tgcaatcacctaaatggaagtcttg

SEQ ID NO: 3272956 - DNA, 25 bp, Homo sapien
gactgatacaccctcatgaacttgc

SEQ ID NO: 3272957 - DNA, 25 bp, Homo sapien
ttgttctgttactgcttcattggac

SEQ ID NO: 3272958 - DNA, 25 bp, Homo sapien
gcttgttagcttctctagatctcta

SEQ ID NO: 3272959 - DNA, 25 bp, Homo sapien
caggcatcataataaaagctagact

SEQ ID NO: 3272960 - DNA, 25 bp, Homo sapien
tggtgtctgctggaagtctactgcc

SEQ ID NO: 3272961 - DNA, 25 bp, Homo sapien
tgccattatagggaaccttgcttgt

SEQ ID NO: 3272962 - DNA, 25 bp, Homo sapien
ttaagaaatagttcccatttcagta

SEQ ID NO: 3272963 - DNA, 25 bp, Homo sapien
agaaatagttcccatttcagtaggt

SEQ ID NO: 3272964 - DNA, 25 bp, Homo sapien
gaaatagttcccatttcagtaggtg

SEQ ID NO: 3272965 - DNA, 25 bp, Homo sapien
atagttcccatttcagtaggtgtac

SEQ ID NO: 3272966 - DNA, 25 bp, Homo sapien
aaagcctgatgcaggcccagagcct

SEQ ID NO: 3272967 - DNA, 25 bp, Homo sapien
gaacagcggagtctgcgagcgcgcc

SEQ ID NO: 3272968 - DNA, 25 bp, Homo sapien
agaaagcctgatgcaggcccagagc

SEQ ID NO: 3272969 - DNA, 25 bp, Homo sapien
gcaggaacagcggagtctgcgagcg

SEQ ID NO: 3272970 - DNA, 25 bp, Homo sapien
cagccgagctgccaaatggtcaaaa

SEQ ID NO: 3272971 - DNA, 25 bp, Homo sapien
tgggtccggcctacatctaaaagta

SEQ ID NO: 3272972 - DNA, 25 bp, Homo sapien
tccagaaggctaaactgccagggtt

SEQ ID NO: 3272973 - DNA, 25 bp, Homo sapien
caaaaaatgcagagcccttagtccc

SEQ ID NO: 3272974 - DNA, 25 bp, Homo sapien
tgcttctacggcatccatcagggtt

SEQ ID NO: 3272975 - DNA, 25 bp, Homo sapien
tctgcttctacggcatccatcaggg

SEQ ID NO: 3272976 - DNA, 25 bp, Homo sapien
ttttctgcttctacggcatccatca

SEQ ID NO: 3272977 - DNA, 25 bp, Homo sapien
gcttctacggcatccatcagggttc

SEQ ID NO: 3272978 - DNA, 25 bp, Homo sapien
aaaactgaagtactgatcagcagcc

SEQ ID NO: 3272979 - DNA, 25 bp, Homo sapien
gaatgacacggtccttgctcaagaa

SEQ ID NO: 3272980 - DNA, 25 bp, Homo sapien
gagacctgtatatgttcccgttagg

SEQ ID NO: 3272981 - DNA, 25 bp, Homo sapien
tcaagaacaacaggagtaaccagag

SEQ ID NO: 3272982 - DNA, 25 bp, Homo sapien
tatagcgaactccttgtaggaaatg

SEQ ID NO: 3272983 - DNA, 25 bp, Homo sapien
ggaaatgctgtcaccgttacctaag

SEQ ID NO: 3272984 - DNA, 25 bp, Homo sapien
cgttacctaagcaggctacaaagct

SEQ ID NO: 3272985 - DNA, 25 bp, Homo sapien
cttgctggcttatagcgaactcctt

SEQ ID NO: 3272986 - DNA, 25 bp, Homo sapien
tgagtgcagaacttgcaatgaatgg

SEQ ID NO: 3272987 - DNA, 25 bp, Homo sapien
tgcgcccagccatgatagactttct

SEQ ID NO: 3272988 - DNA, 25 bp, Homo sapien
tagactttcttacctctcgttctgg

SEQ ID NO: 3272989 - DNA, 25 bp, Homo sapien
tatggaactaaatatgtgagtgcag

SEQ ID NO: 3272990 - DNA, 25 bp, Homo sapien
gacataccaggggtacatgaatatt

SEQ ID NO: 3272991 - DNA, 25 bp, Homo sapien
cttgtgacataccaggggtacatga

SEQ ID NO: 3272992 - DNA, 25 bp, Homo sapien
tgtgacataccaggggtacatgaat

SEQ ID NO: 3272993 - DNA, 25 bp, Homo sapien
acttgtgacataccaggggtacatg

SEQ ID NO: 3272994 - DNA, 25 bp, Homo sapien
tctagtaaactgtgatgccgggcaa

SEQ ID NO: 3272995 - DNA, 25 bp, Homo sapien
aaattcagcccatgtgcagcacaag

SEQ ID NO: 3272996 - DNA, 25 bp, Homo sapien
gctttgcggatgaccctacagtgga

SEQ ID NO: 3272997 - DNA, 25 bp, Homo sapien
gcacattctgctagggctttgcgga

SEQ ID NO: 3272998 - DNA, 25 bp, Homo sapien
tgagcccagaccatcagacaaaagc

SEQ ID NO: 3272999 - DNA, 25 bp, Homo sapien
cacttatttccaaatagcacaatgc

SEQ ID NO: 3273000 - DNA, 25 bp, Homo sapien
gctgaacaatgccaagaaacataat

SEQ ID NO: 3273001 - DNA, 25 bp, Homo sapien
taaagtgcacacattacctatgctg

SEQ ID NO: 3273002 - DNA, 25 bp, Homo sapien
tcacttttcatagcagggaaccgaa

SEQ ID NO: 3273003 - DNA, 25 bp, Homo sapien
caagtttttgcagaagctggagcct

SEQ ID NO: 3273004 - DNA, 25 bp, Homo sapien
cgcatttaaactccagataggcagg

SEQ ID NO: 3273005 - DNA, 25 bp, Homo sapien
catttttgcagaaaagtaggcaggc

SEQ ID NO: 3273006 - DNA, 25 bp, Homo sapien
aaataacttctgactcatgagctgg

SEQ ID NO: 3273007 - DNA, 25 bp, Homo sapien
caattcagtggcaaggcattagcag

SEQ ID NO: 3273008 - DNA, 25 bp, Homo sapien
gacttagtgctgctatccaatgccc

SEQ ID NO: 3273009 - DNA, 25 bp, Homo sapien
catgagctgggtaaacataaacgtt

SEQ ID NO: 3273010 - DNA, 25 bp, Homo sapien
cacatacatgcaaatagctgaggga

SEQ ID NO: 3273011 - DNA, 25 bp, Homo sapien
tattttcaattcacaacaccgggaa

SEQ ID NO: 3273012 - DNA, 25 bp, Homo sapien
gaatgatagccttaacacaaagagg

SEQ ID NO: 3273013 - DNA, 25 bp, Homo sapien
taattttgagatacgaacccacatg

SEQ ID NO: 3273014 - DNA, 25 bp, Homo sapien
gattctatcaccctgtagctcagcg

SEQ ID NO: 3273015 - DNA, 25 bp, Homo sapien
aaagactgataaattgggcacctgg

SEQ ID NO: 3273016 - DNA, 25 bp, Homo sapien
ggcccctaaggagagctgattctat

SEQ ID NO: 3273017 - DNA, 25 bp, Homo sapien
cgatcagactccacaatgcaaggcc

SEQ ID NO: 3273018 - DNA, 25 bp, Homo sapien
tttctgccgattcaagaggactgac

SEQ ID NO: 3273019 - DNA, 25 bp, Homo sapien
ctgcaataggaactgaaacatggct

SEQ ID NO: 3273020 - DNA, 25 bp, Homo sapien
gaaagtctagacaagtacgatcaag

SEQ ID NO: 3273021 - DNA, 25 bp, Homo sapien
gaagcacttattcgaagaactgcaa

SEQ ID NO: 3273022 - DNA, 25 bp, Homo sapien
agcagactggtcaagagtaaaggtc

SEQ ID NO: 3273023 - DNA, 25 bp, Homo sapien
catgacaatgttctcgctcattcct

SEQ ID NO: 3273024 - DNA, 25 bp, Homo sapien
gccaacaaatgataatatctgctta

SEQ ID NO: 3273025 - DNA, 25 bp, Homo sapien
tactaagaggtcaaagtggccaagt

SEQ ID NO: 3273026 - DNA, 25 bp, Homo sapien
tactgatccatttaattcgtagagc

SEQ ID NO: 3273027 - DNA, 25 bp, Homo sapien
accctttaagatacatactttcata

SEQ ID NO: 3273028 - DNA, 25 bp, Homo sapien
ggcactttgctaggcgctttcttta

SEQ ID NO: 3273029 - DNA, 25 bp, Homo sapien
tgggcgtttattttgtactaggcac

SEQ ID NO: 3273030 - DNA, 25 bp, Homo sapien
gatgtgaaagattgccaagagggca

SEQ ID NO: 3273031 - DNA, 25 bp, Homo sapien
tcagatcaggtttgagccttctgga

SEQ ID NO: 3273032 - DNA, 25 bp, Homo sapien
ctggatcagatgccatgagaggatg

SEQ ID NO: 3273033 - DNA, 25 bp, Homo sapien
ggaacacactagtactcagatcagg

SEQ ID NO: 3273034 - DNA, 25 bp, Homo sapien
tacaggtgcccatgcccacgaccac

SEQ ID NO: 3273035 - DNA, 25 bp, Homo sapien
ccatgcccacgaccacacccgggat

SEQ ID NO: 3273036 - DNA, 25 bp, Homo sapien
ggtgcccatgcccacgaccacaccc

SEQ ID NO: 3273037 - DNA, 25 bp, Homo sapien
atgcccacgaccacacccgggattt

SEQ ID NO: 3273038 - DNA, 25 bp, Homo sapien
gagtgggacctattacctattgaca

SEQ ID NO: 3273039 - DNA, 25 bp, Homo sapien
tatcctgagctgatcaaatctggga

SEQ ID NO: 3273040 - DNA, 25 bp, Homo sapien
gagttaagttctaaggccaaggtga

SEQ ID NO: 3273041 - DNA, 25 bp, Homo sapien
gagcatggcctgacattgagtttta

SEQ ID NO: 3273042 - DNA, 25 bp, Homo sapien
gaagttatgagataataacagatgc

SEQ ID NO: 3273043 - DNA, 25 bp, Homo sapien
gatgctattataaacggacccagga

SEQ ID NO: 3273044 - DNA, 25 bp, Homo sapien
gactggcactaagaatatactacga

SEQ ID NO: 3273045 - DNA, 25 bp, Homo sapien
aaatgtctaaattcccacttgagga

SEQ ID NO: 3273046 - DNA, 25 bp, Homo sapien
gtcgacgtcctctcctgggtttgga

SEQ ID NO: 3273047 - DNA, 25 bp, Homo sapien
catcatttttggtagcattgccctg

SEQ ID NO: 3273048 - DNA, 25 bp, Homo sapien
tgttgccctgggtagcctgatcaga

SEQ ID NO: 3273049 - DNA, 25 bp, Homo sapien
cctgagattcagacttgggtcgacg

SEQ ID NO: 3273050 - DNA, 25 bp, Homo sapien
gactgaaataatcctcacagggttc

SEQ ID NO: 3273051 - DNA, 25 bp, Homo sapien
cttattctttactgggtcaatattc

SEQ ID NO: 3273052 - DNA, 25 bp, Homo sapien
ttactgggtcaatattctttacagg

SEQ ID NO: 3273053 - DNA, 25 bp, Homo sapien
tattctttacaggtgtgactgaaat

SEQ ID NO: 3273054 - DNA, 25 bp, Homo sapien
tgcacctagtactccagcaggcttt

SEQ ID NO: 3273055 - DNA, 25 bp, Homo sapien
tttccttcccgttgctgataaaggc

SEQ ID NO: 3273056 - DNA, 25 bp, Homo sapien
tcagtgccagtgcttctaacatagg

SEQ ID NO: 3273057 - DNA, 25 bp, Homo sapien
tcgatttccggttgaagggttcagc

SEQ ID NO: 3273058 - DNA, 25 bp, Homo sapien
tataactcttatcgttacagaagtc

SEQ ID NO: 3273059 - DNA, 25 bp, Homo sapien
aacagaagtactcttgtctcttctg

SEQ ID NO: 3273060 - DNA, 25 bp, Homo sapien
tgaaatataactcttatcgttacag

SEQ ID NO: 3273061 - DNA, 25 bp, Homo sapien
tgttaacagaagtactcttgtctct

SEQ ID NO: 3273062 - DNA, 25 bp, Homo sapien
tgatggcacgcagacttaggcaaat

SEQ ID NO: 3273063 - DNA, 25 bp, Homo sapien
cacatcataaattcgggccgggtgt

SEQ ID NO: 3273064 - DNA, 25 bp, Homo sapien
tggaaaaacttacagagcctgcgtt

SEQ ID NO: 3273065 - DNA, 25 bp, Homo sapien
tatggcgaactatgcctgcgaggga

SEQ ID NO: 3273066 - DNA, 25 bp, Homo sapien
tatttgccacaatggttgatggtaa

SEQ ID NO: 3273067 - DNA, 25 bp, Homo sapien
gttgatggtaattgacattgaaatc

SEQ ID NO: 3273068 - DNA, 25 bp, Homo sapien
atggtaattgacattgaaatcagtt

SEQ ID NO: 3273069 - DNA, 25 bp, Homo sapien
caattcaatatttgccacaatggtt

SEQ ID NO: 3273070 - DNA, 25 bp, Homo sapien
ggactgggtcctttggtgaatctgc

SEQ ID NO: 3273071 - DNA, 25 bp, Homo sapien
cctttggtgaatctgcattgcacaa

SEQ ID NO: 3273072 - DNA, 25 bp, Homo sapien
cacagagagccacatcacatactgt

SEQ ID NO: 3273073 - DNA, 25 bp, Homo sapien
aatttcattgggaggactgggtcct

SEQ ID NO: 3273074 - DNA, 25 bp, Homo sapien
atctctggttaacttgatgttctct

SEQ ID NO: 3273075 - DNA, 25 bp, Homo sapien
tctctggttaacttgatgttctctg

SEQ ID NO: 3273076 - DNA, 25 bp, Homo sapien
aacttcaagcatgaaccataggcac

SEQ ID NO: 3273077 - DNA, 25 bp, Homo sapien
ttctttgtcattaaaacttcaagca

SEQ ID NO: 3273078 - DNA, 25 bp, Homo sapien
gtcattaaaacttcaagcatgaacc

SEQ ID NO: 3273079 - DNA, 25 bp, Homo sapien
ttaaaacttcaagcatgaaccatag

SEQ ID NO: 3273080 - DNA, 25 bp, Homo sapien
ggtttcgccaggttgccgactggtc

SEQ ID NO: 3273081 - DNA, 25 bp, Homo sapien
tagggtcacagagataaaaagatgg

SEQ ID NO: 3273082 - DNA, 25 bp, Homo sapien
tgaggcattaagtaacctgtttagg

SEQ ID NO: 3273083 - DNA, 25 bp, Homo sapien
ccatggtgtcctgggctcacactat

SEQ ID NO: 3273084 - DNA, 25 bp, Homo sapien
acacgatttcctaattccttggctg

SEQ ID NO: 3273085 - DNA, 25 bp, Homo sapien
tgggcaatctgttcaacacgatttc

SEQ ID NO: 3273086 - DNA, 25 bp, Homo sapien
tgcctaagacatttcactgcctcag

SEQ ID NO: 3273087 - DNA, 25 bp, Homo sapien
gcgttgatttagtttctggatgaca

SEQ ID NO: 3273088 - DNA, 25 bp, Homo sapien
cagtaaacctgtagacaaggcaatt

SEQ ID NO: 3273089 - DNA, 25 bp, Homo sapien
ggaggattcaatggccgactacagc

SEQ ID NO: 3273090 - DNA, 25 bp, Homo sapien
ggcaattgaaaatactcagtctgaa

SEQ ID NO: 3273091 - DNA, 25 bp, Homo sapien
cagattttagagttactagtcaaag

SEQ ID NO: 3273092 - DNA, 25 bp, Homo sapien
ctgatcaacatcttgtgatcttgta

SEQ ID NO: 3273093 - DNA, 25 bp, Homo sapien
gatcatgggctagcaggtgaatcat

SEQ ID NO: 3273094 - DNA, 25 bp, Homo sapien
tctttgatatcacgaagctgatcaa

SEQ ID NO: 3273095 - DNA, 25 bp, Homo sapien
aatctggatcatgggctagcaggtg

SEQ ID NO: 3273096 - DNA, 25 bp, Homo sapien
gtatggaactacatattcaggcaac

SEQ ID NO: 3273097 - DNA, 25 bp, Homo sapien
catattcaggcaacagtgataataa

SEQ ID NO: 3273098 - DNA, 25 bp, Homo sapien
gaactacatattcaggcaacagtga

SEQ ID NO: 3273099 - DNA, 25 bp, Homo sapien
tacatattcaggcaacagtgataat

SEQ ID NO: 3273100 - DNA, 25 bp, Homo sapien
tatatttgcacacggagaactctga

SEQ ID NO: 3273101 - DNA, 25 bp, Homo sapien
cagtttgccagagttaatgcagcat

SEQ ID NO: 3273102 - DNA, 25 bp, Homo sapien
gatcccataggaaaaatgcagtttg

SEQ ID NO: 3273103 - DNA, 25 bp, Homo sapien
cccattaaacaacaggtccctggca

SEQ ID NO: 3273104 - DNA, 25 bp, Homo sapien
cacaggatctttggcacacaaggca

SEQ ID NO: 3273105 - DNA, 25 bp, Homo sapien
aagtgccttatgcagcttctgagca

SEQ ID NO: 3273106 - DNA, 25 bp, Homo sapien
tcagtaaacattgtcgtgcgtgtgc

SEQ ID NO: 3273107 - DNA, 25 bp, Homo sapien
ctccaatgggagcagtaacttcaca

SEQ ID NO: 3273108 - DNA, 25 bp, Homo sapien
tgttctggggtaataatttcatggt

SEQ ID NO: 3273109 - DNA, 25 bp, Homo sapien
tcgcaagcgagacatatcagattta

SEQ ID NO: 3273110 - DNA, 25 bp, Homo sapien
agctaatcgcaagcgagacatatca

SEQ ID NO: 3273111 - DNA, 25 bp, Homo sapien
gagctgaaactgttctggggtaata

SEQ ID NO: 3273112 - DNA, 25 bp, Homo sapien
tgacgtacaaatatgggaaagctac

SEQ ID NO: 3273113 - DNA, 25 bp, Homo sapien
catttctagtcaaactctagcttag

SEQ ID NO: 3273114 - DNA, 25 bp, Homo sapien
tagcttagatacttcaccacaaccc

SEQ ID NO: 3273115 - DNA, 25 bp, Homo sapien
ttgagtccatgaacttaacacaggg

SEQ ID NO: 3273116 - DNA, 25 bp, Homo sapien
gagggagcctcaaatggtttctatg

SEQ ID NO: 3273117 - DNA, 25 bp, Homo sapien
tgagcactggtaacaatgagggagc

SEQ ID NO: 3273118 - DNA, 25 bp, Homo sapien
aatgcagaaagctagccggaaccca

SEQ ID NO: 3273119 - DNA, 25 bp, Homo sapien
gaaaacctggcactcttggacaaca

SEQ ID NO: 3273120 - DNA, 25 bp, Homo sapien
tagcatagcagtaccacataactag

SEQ ID NO: 3273121 - DNA, 25 bp, Homo sapien
gaaaccaggatcatgaaaaactgag

SEQ ID NO: 3273122 - DNA, 25 bp, Homo sapien
tatgcctttgccatgtactgtacat

SEQ ID NO: 3273123 - DNA, 25 bp, Homo sapien
gggtcctgcctaggtatcactgact

SEQ ID NO: 3273124 - DNA, 25 bp, Homo sapien
taaccaacatcgctgataataaccg

SEQ ID NO: 3273125 - DNA, 25 bp, Homo sapien
ggttgtttttcatacccaacagcca

SEQ ID NO: 3273126 - DNA, 25 bp, Homo sapien
attggcagatttagactggttgttt

SEQ ID NO: 3273127 - DNA, 25 bp, Homo sapien
taaccgaagggttgaattggcagat

SEQ ID NO: 3273128 - DNA, 25 bp, Homo sapien
cctcttcatctggagaccacagttt

SEQ ID NO: 3273129 - DNA, 25 bp, Homo sapien
agtacttcaggggaaacctcttcat

SEQ ID NO: 3273130 - DNA, 25 bp, Homo sapien
tacttcaggggaaacctcttcatct

SEQ ID NO: 3273131 - DNA, 25 bp, Homo sapien
ttgctagtacttcaggggaaacctc

SEQ ID NO: 3273132 - DNA, 25 bp, Homo sapien
ttctgggttcaagtgattctcctgc

SEQ ID NO: 3273133 - DNA, 25 bp, Homo sapien
tagctaggattacagctgccgtcac

SEQ ID NO: 3273134 - DNA, 25 bp, Homo sapien
gagtgcaactgtgcaatcatggctc

SEQ ID NO: 3273135 - DNA, 25 bp, Homo sapien
actgcaacctctgccttctgggttc

SEQ ID NO: 3273136 - DNA, 25 bp, Homo sapien
cagcattcagactcctactgagtgg

SEQ ID NO: 3273137 - DNA, 25 bp, Homo sapien
gaagcaaactgatctggtgctaaca

SEQ ID NO: 3273138 - DNA, 25 bp, Homo sapien
tataagttgttctggcacatcagca

SEQ ID NO: 3273139 - DNA, 25 bp, Homo sapien
ggtgctaacatagaaatgtggccca

SEQ ID NO: 3273140 - DNA, 25 bp, Homo sapien
ggcgtgtatacagtgcacagcctgt

SEQ ID NO: 3273141 - DNA, 25 bp, Homo sapien
ttttgcttggtgtggagtacccctc

SEQ ID NO: 3273142 - DNA, 25 bp, Homo sapien
tatttgtgaatatggcgtgtataca

SEQ ID NO: 3273143 - DNA, 25 bp, Homo sapien
tggtgtggagtacccctctttgctt

SEQ ID NO: 3273144 - DNA, 25 bp, Homo sapien
ctattttgtgacctgtatttctaaa

SEQ ID NO: 3273145 - DNA, 25 bp, Homo sapien
aaatttgaatagcagcttctgctac

SEQ ID NO: 3273146 - DNA, 25 bp, Homo sapien
ggaaggtctgtttctattttgtgac

SEQ ID NO: 3273147 - DNA, 25 bp, Homo sapien
tctaaaaatttgaatagcagcttct

SEQ ID NO: 3273148 - DNA, 25 bp, Homo sapien
gaacgaggtaggatgtgtaaaagac

SEQ ID NO: 3273149 - DNA, 25 bp, Homo sapien
gtaacaaggactcatatgtctctgc

SEQ ID NO: 3273150 - DNA, 25 bp, Homo sapien
gtcatcctccattcttaggcactgt

SEQ ID NO: 3273151 - DNA, 25 bp, Homo sapien
cattcttaggcactgtaacaaggac

SEQ ID NO: 3273152 - DNA, 25 bp, Homo sapien
gcgtaaaccattgtacccagccaaa

SEQ ID NO: 3273153 - DNA, 25 bp, Homo sapien
gaaggcaaattatgaccccacggaa

SEQ ID NO: 3273154 - DNA, 25 bp, Homo sapien
tcactaccaagcatagaaggcatgg

SEQ ID NO: 3273155 - DNA, 25 bp, Homo sapien
cagtggcactcgacaatctggaacc

SEQ ID NO: 3273156 - DNA, 25 bp, Homo sapien
tgtaagccaggttaaaagcccgtga

SEQ ID NO: 3273157 - DNA, 25 bp, Homo sapien
tgtatctggacttacaccctcctct

SEQ ID NO: 3273158 - DNA, 25 bp, Homo sapien
gttcaagtcctgaacggatagctgt

SEQ ID NO: 3273159 - DNA, 25 bp, Homo sapien
gtcccctctattgacttattcatca

SEQ ID NO: 3273160 - DNA, 25 bp, Homo sapien
cctgaacggatagctgtatctggac

SEQ ID NO: 3273161 - DNA, 25 bp, Homo sapien
tacagatgttgaagtttaaactaag

SEQ ID NO: 3273162 - DNA, 25 bp, Homo sapien
ctgtattaacttacagatgttgaag

SEQ ID NO: 3273163 - DNA, 25 bp, Homo sapien
cattatcttcagttaatctgataac

SEQ ID NO: 3273164 - DNA, 25 bp, Homo sapien
aatggctgtattaacttacagatgt

SEQ ID NO: 3273165 - DNA, 25 bp, Homo sapien
atttgttggttgcttaggatttgca

SEQ ID NO: 3273166 - DNA, 25 bp, Homo sapien
gatttgcaagtttccgggctatttc

SEQ ID NO: 3273167 - DNA, 25 bp, Homo sapien
ccatctctagaaaaggatttgttgg

SEQ ID NO: 3273168 - DNA, 25 bp, Homo sapien
gcacaggtgcgattctttccaacag

SEQ ID NO: 3273169 - DNA, 25 bp, Homo sapien
tgagaactctgtacacccttagaat

SEQ ID NO: 3273170 - DNA, 25 bp, Homo sapien
agaaacacatattcgtacatatata

SEQ ID NO: 3273171 - DNA, 25 bp, Homo sapien
caataataaaagtaactctcagcca

SEQ ID NO: 3273172 - DNA, 25 bp, Homo sapien
ttatggaaggctgatagataacccc

SEQ ID NO: 3273173 - DNA, 25 bp, Homo sapien
tgtacagctgtacacaaaatggttt

SEQ ID NO: 3273174 - DNA, 25 bp, Homo sapien
ggtgtgagccaatgtactgatcttt

SEQ ID NO: 3273175 - DNA, 25 bp, Homo sapien
caggtaggtttcttcagctcaggag

SEQ ID NO: 3273176 - DNA, 25 bp, Homo sapien
gtgcagctagttttctttaatgttt

SEQ ID NO: 3273177 - DNA, 25 bp, Homo sapien
gcagtataccattttagatacatca

SEQ ID NO: 3273178 - DNA, 25 bp, Homo sapien
ccaaaatgttgtcatgcagtatacc

SEQ ID NO: 3273179 - DNA, 25 bp, Homo sapien
gatacatcaagaatcttttgcctgg

SEQ ID NO: 3273180 - DNA, 25 bp, Homo sapien
acacccatcaccctgagttctgtta

SEQ ID NO: 3273181 - DNA, 25 bp, Homo sapien
gcgtgtgccaatagttctagctatt

SEQ ID NO: 3273182 - DNA, 25 bp, Homo sapien
ttaaatgagttcaagagaagaatga

SEQ ID NO: 3273183 - DNA, 25 bp, Homo sapien
tgaatgcataagttttccctcctga

SEQ ID NO: 3273184 - DNA, 25 bp, Homo sapien
gacaaaagtctagataggaatttac

SEQ ID NO: 3273185 - DNA, 25 bp, Homo sapien
atgcataagttttccctcctgatag

SEQ ID NO: 3273186 - DNA, 25 bp, Homo sapien
gctgagagtgaatggtaaatagaga

SEQ ID NO: 3273187 - DNA, 25 bp, Homo sapien
taacttgacaatagatatactccaa

SEQ ID NO: 3273188 - DNA, 25 bp, Homo sapien
aaattcctaagaccaatctccctgg

SEQ ID NO: 3273189 - DNA, 25 bp, Homo sapien
aattcagagctcacaatattgttac

SEQ ID NO: 3273190 - DNA, 25 bp, Homo sapien
actgtatgtaaaacaggctttaata

SEQ ID NO: 3273191 - DNA, 25 bp, Homo sapien
tcactgtatgtaaaacaggctttaa

SEQ ID NO: 3273192 - DNA, 25 bp, Homo sapien
aaaatacatatttctgtaagtaaag

SEQ ID NO: 3273193 - DNA, 25 bp, Homo sapien
tgtatgtaaaacaggctttaataaa

SEQ ID NO: 3273194 - DNA, 25 bp, Homo sapien
gaaaaagtgtgaagtatgatttact

SEQ ID NO: 3273195 - DNA, 25 bp, Homo sapien
aaagtgtgaagtatgatttactaac

SEQ ID NO: 3273196 - DNA, 25 bp, Homo sapien
agaaaaagtgtgaagtatgatttac

SEQ ID NO: 3273197 - DNA, 25 bp, Homo sapien
aaaagtgtgaagtatgatttactaa

SEQ ID NO: 3273198 - DNA, 25 bp, Homo sapien
gagaacctggttaaatttcttcaca

SEQ ID NO: 3273199 - DNA, 25 bp, Homo sapien
gaccgaagtttctcatcatcgccga

SEQ ID NO: 3273200 - DNA, 25 bp, Homo sapien
caggttgggctaattaataactcca

SEQ ID NO: 3273201 - DNA, 25 bp, Homo sapien
tcacaaaatcttgtgctttcccggg

SEQ ID NO: 3273202 - DNA, 25 bp, Homo sapien
ttgctatggtcatcagttttccaaa

SEQ ID NO: 3273203 - DNA, 25 bp, Homo sapien
tttccaaacatggcagaacagttag

SEQ ID NO: 3273204 - DNA, 25 bp, Homo sapien
ccaaacatggcagaacagttagcct

SEQ ID NO: 3273205 - DNA, 25 bp, Homo sapien
tgctatggtcatcagttttccaaac

SEQ ID NO: 3273206 - DNA, 25 bp, Homo sapien
tgtaggctgcttgtgcaaatccaat

SEQ ID NO: 3273207 - DNA, 25 bp, Homo sapien
gaagcatgttctgacacttccacat

SEQ ID NO: 3273208 - DNA, 25 bp, Homo sapien
caatagttcgcgtacatggctccga

SEQ ID NO: 3273209 - DNA, 25 bp, Homo sapien
catggctccgaagcatgttctgaca

SEQ ID NO: 3273210 - DNA, 25 bp, Homo sapien
tgtgggggacaagatactgagcaaa

SEQ ID NO: 3273211 - DNA, 25 bp, Homo sapien
ggatccaaactagcatataagtaat

SEQ ID NO: 3273212 - DNA, 25 bp, Homo sapien
gagcaaagattttctctaccaacag

SEQ ID NO: 3273213 - DNA, 25 bp, Homo sapien
acagcatttggatccaaactagcat

SEQ ID NO: 3273214 - DNA, 25 bp, Homo sapien
gagacaaggtgtccctatgttgcca

SEQ ID NO: 3273215 - DNA, 25 bp, Homo sapien
caaggtgtccctatgttgccaaggc

SEQ ID NO: 3273216 - DNA, 25 bp, Homo sapien
acagtggtgcaaactcggctcaatg

SEQ ID NO: 3273217 - DNA, 25 bp, Homo sapien
tacagtggtgcaaactcggctcaat

SEQ ID NO: 3273218 - DNA, 25 bp, Homo sapien
ctgagccagacccatcatagcttct

SEQ ID NO: 3273219 - DNA, 25 bp, Homo sapien
taataaatatgcagaagtttgtcct

SEQ ID NO: 3273220 - DNA, 25 bp, Homo sapien
ttgtcgtcaatgctgttctgataat

SEQ ID NO: 3273221 - DNA, 25 bp, Homo sapien
gaagacagtatttcttataaagctg

SEQ ID NO: 3273222 - DNA, 25 bp, Homo sapien
tgatcatttactaaggccaggtccc

SEQ ID NO: 3273223 - DNA, 25 bp, Homo sapien
ggatcatgtgatctaacctttaaat

SEQ ID NO: 3273224 - DNA, 25 bp, Homo sapien
catcatgacgaatagcttcttctgg

SEQ ID NO: 3273225 - DNA, 25 bp, Homo sapien
tggcagctgttattatagtaacaat

SEQ ID NO: 3273226 - DNA, 25 bp, Homo sapien
gcactttaaactcccaagttggcca

SEQ ID NO: 3273227 - DNA, 25 bp, Homo sapien
tcaagagttcataccagcttaggca

SEQ ID NO: 3273228 - DNA, 25 bp, Homo sapien
tatttttacagcagcagtactctac

SEQ ID NO: 3273229 - DNA, 25 bp, Homo sapien
ggcaggtcgcacaagctcaagagtt

SEQ ID NO: 3273230 - DNA, 25 bp, Homo sapien
catttcttagtgcacaacaaatgaa

SEQ ID NO: 3273231 - DNA, 25 bp, Homo sapien
aagttaggtcacaagtcatatctac

SEQ ID NO: 3273232 - DNA, 25 bp, Homo sapien
tatgtgtaataaaccagctagctta

SEQ ID NO: 3273233 - DNA, 25 bp, Homo sapien
cgagaccataccagagttaaaacct

SEQ ID NO: 3273234 - DNA, 25 bp, Homo sapien
ctaaatctgggtgattcattaaaca

SEQ ID NO: 3273235 - DNA, 25 bp, Homo sapien
cacactttctaatctcacaggaaca

SEQ ID NO: 3273236 - DNA, 25 bp, Homo sapien
ctgtgagatccttcgctaaatctgg

SEQ ID NO: 3273237 - DNA, 25 bp, Homo sapien
ccttcgctaaatctgggtgattcat

SEQ ID NO: 3273238 - DNA, 25 bp, Homo sapien
aagaggacgattctgtgttgccaaa

SEQ ID NO: 3273239 - DNA, 25 bp, Homo sapien
tagaagtcgaacaacagctaatcgc

SEQ ID NO: 3273240 - DNA, 25 bp, Homo sapien
aatcagaatctttggagccaaacaa

SEQ ID NO: 3273241 - DNA, 25 bp, Homo sapien
cattgccaaagaggacgattctgtg

SEQ ID NO: 3273242 - DNA, 25 bp, Homo sapien
aggtctgggtgtggctctatcaccc

SEQ ID NO: 3273243 - DNA, 25 bp, Homo sapien
ctacgggtgtgtggcaatatgcttg

SEQ ID NO: 3273244 - DNA, 25 bp, Homo sapien
ggtctgggtgtggctctatcaccca

SEQ ID NO: 3273245 - DNA, 25 bp, Homo sapien
gactacgggtgtgtggcaatatgct

SEQ ID NO: 3273246 - DNA, 25 bp, Homo sapien
aataataaatgaggatctatagcaa

SEQ ID NO: 3273247 - DNA, 25 bp, Homo sapien
gctgtggcatgacggataataataa

SEQ ID NO: 3273248 - DNA, 25 bp, Homo sapien
caaatacatgttctgacaaatcact

SEQ ID NO: 3273249 - DNA, 25 bp, Homo sapien
gttcctgaatcagatcaaatacatg

SEQ ID NO: 3273250 - DNA, 25 bp, Homo sapien
caaatatgttttgactcgcatgaca

SEQ ID NO: 3273251 - DNA, 25 bp, Homo sapien
ccaagagcgcaaattaaaagatacc

SEQ ID NO: 3273252 - DNA, 25 bp, Homo sapien
tgatacaagcatacacttctggtag

SEQ ID NO: 3273253 - DNA, 25 bp, Homo sapien
aaagagtatacaaggccaagagcgc

SEQ ID NO: 3273254 - DNA, 25 bp, Homo sapien
cctaatggggatggttatttctgag

SEQ ID NO: 3273255 - DNA, 25 bp, Homo sapien
tctctaatcattcccactggataag

SEQ ID NO: 3273256 - DNA, 25 bp, Homo sapien
tactacttctgaaaggatataagaa

SEQ ID NO: 3273257 - DNA, 25 bp, Homo sapien
atgaagaagatagttttatcaaaat

SEQ ID NO: 3273258 - DNA, 25 bp, Homo sapien
gcaaggtcaaaggactgtttattta

SEQ ID NO: 3273259 - DNA, 25 bp, Homo sapien
cttttcaatagcacttttgcaaggt

SEQ ID NO: 3273260 - DNA, 25 bp, Homo sapien
tgcatgcctcaatagtctggactgt

SEQ ID NO: 3273261 - DNA, 25 bp, Homo sapien
gcaatgcatgcctcaatagtctgga

SEQ ID NO: 3273262 - DNA, 25 bp, Homo sapien
caaatctagcatgtgcatttgtacc

SEQ ID NO: 3273263 - DNA, 25 bp, Homo sapien
gatgatagaactcatcaaatctagc

SEQ ID NO: 3273264 - DNA, 25 bp, Homo sapien
ttgtaccttcttattgtggctattg

SEQ ID NO: 3273265 - DNA, 25 bp, Homo sapien
tgaggttaataagaatggagtccaa

SEQ ID NO: 3273266 - DNA, 25 bp, Homo sapien
ccttttgttgactattacaacagtt

SEQ ID NO: 3273267 - DNA, 25 bp, Homo sapien
attacaacagttgtaaggtactgtt

SEQ ID NO: 3273268 - DNA, 25 bp, Homo sapien
ttttgttgactattacaacagttgt

SEQ ID NO: 3273269 - DNA, 25 bp, Homo sapien
tcactgagaagagagttctaaaaag

SEQ ID NO: 3273270 - DNA, 25 bp, Homo sapien
ttgatcactgagaagagagttctaa

SEQ ID NO: 3273271 - DNA, 25 bp, Homo sapien
tgatcactgagaagagagttctaaa

SEQ ID NO: 3273272 - DNA, 25 bp, Homo sapien
gatcactgagaagagagttctaaaa

SEQ ID NO: 3273273 - DNA, 25 bp, Homo sapien
agcagatgttatatgatttaaccca

SEQ ID NO: 3273274 - DNA, 25 bp, Homo sapien
gcaatcttccaattcaaagcagatg

SEQ ID NO: 3273275 - DNA, 25 bp, Homo sapien
tccaattcaaagcagatgttatatg

SEQ ID NO: 3273276 - DNA, 25 bp, Homo sapien
aaatttcattgcaatcttccaattc

SEQ ID NO: 3273277 - DNA, 25 bp, Homo sapien
aaagtatctattaaactgtggactc

SEQ ID NO: 3273278 - DNA, 25 bp, Homo sapien
tatctattaaactgtggactctttg

SEQ ID NO: 3273279 - DNA, 25 bp, Homo sapien
taaactgtggactctttgtatcctc

SEQ ID NO: 3273280 - DNA, 25 bp, Homo sapien
ctgtggactctttgtatcctccaaa

SEQ ID NO: 3273281 - DNA, 25 bp, Homo sapien
ttgtctggtaataaacaaaaatatg

SEQ ID NO: 3273282 - DNA, 25 bp, Homo sapien
gtctggtaataaacaaaaatatgtc

SEQ ID NO: 3273283 - DNA, 25 bp, Homo sapien
tgtctggtaataaacaaaaatatgt

SEQ ID NO: 3273284 - DNA, 25 bp, Homo sapien
attgtctggtaataaacaaaaatat

SEQ ID NO: 3273285 - DNA, 25 bp, Homo sapien
aatttcttctactatcgtgctttca

SEQ ID NO: 3273286 - DNA, 25 bp, Homo sapien
gcggaccacaggctctatatctcat

SEQ ID NO: 3273287 - DNA, 25 bp, Homo sapien
gatgaatgtcttgggattggcctaa

SEQ ID NO: 3273288 - DNA, 25 bp, Homo sapien
tcacaacacactaatagtatgtaac

SEQ ID NO: 3273289 - DNA, 25 bp, Homo sapien
gacgcacatctttattggggttcct

SEQ ID NO: 3273290 - DNA, 25 bp, Homo sapien
aattcagatgcaagatgcaaggcta

SEQ ID NO: 3273291 - DNA, 25 bp, Homo sapien
cagccaaacaacatgctacaaggag

SEQ ID NO: 3273292 - DNA, 25 bp, Homo sapien
tagatacgaaagatatcagccaaac

SEQ ID NO: 3273293 - DNA, 25 bp, Homo sapien
ctcatttatgaggaacttaagcctc

SEQ ID NO: 3273294 - DNA, 25 bp, Homo sapien
tagcccagatagttcctggccccat

SEQ ID NO: 3273295 - DNA, 25 bp, Homo sapien
tatgaggaacttaagcctcttatta

SEQ ID NO: 3273296 - DNA, 25 bp, Homo sapien
tcattttaaatctagcccagatagt

SEQ ID NO: 3273297 - DNA, 25 bp, Homo sapien
tccacactacatgggcctttctaga

SEQ ID NO: 3273298 - DNA, 25 bp, Homo sapien
cattcttacggttctaagttgacac

SEQ ID NO: 3273299 - DNA, 25 bp, Homo sapien
ttcagttccacactacatgggcctt

SEQ ID NO: 3273300 - DNA, 25 bp, Homo sapien
cttacggttctaagttgacacttgc

SEQ ID NO: 3273301 - DNA, 25 bp, Homo sapien
taactggctgttagtattgtgaaga

SEQ ID NO: 3273302 - DNA, 25 bp, Homo sapien
actggctgttagtattgtgaagata

SEQ ID NO: 3273303 - DNA, 25 bp, Homo sapien
tactaactggctgttagtattgtga

SEQ ID NO: 3273304 - DNA, 25 bp, Homo sapien
tctactaactggctgttagtattgt

SEQ ID NO: 3273305 - DNA, 25 bp, Homo sapien
caggtagtatgtgaatcatccaact

SEQ ID NO: 3273306 - DNA, 25 bp, Homo sapien
taacaagagaaacatacactggagg

SEQ ID NO: 3273307 - DNA, 25 bp, Homo sapien
cactggaggtagatatataaaatgg

SEQ ID NO: 3273308 - DNA, 25 bp, Homo sapien
aatacaagtacgtgttcctaacagc

SEQ ID NO: 3273309 - DNA, 25 bp, Homo sapien
ggagggtgatgctggcggaccactt

SEQ ID NO: 3273310 - DNA, 25 bp, Homo sapien
attacttcaggcccatgagttcgag

SEQ ID NO: 3273311 - DNA, 25 bp, Homo sapien
ggaattacttcaggcccatgagttc

SEQ ID NO: 3273312 - DNA, 25 bp, Homo sapien
gagggtgatgctggcggaccacttg

SEQ ID NO: 3273313 - DNA, 25 bp, Homo sapien
ggactggccccatgatggaacacct

SEQ ID NO: 3273314 - DNA, 25 bp, Homo sapien
cacatgtgacccacgggctgtgagt

SEQ ID NO: 3273315 - DNA, 25 bp, Homo sapien
agaactcactctcacaagatggcat

SEQ ID NO: 3273316 - DNA, 25 bp, Homo sapien
gaccaagcttgtttataagaaccca

SEQ ID NO: 3273317 - DNA, 25 bp, Homo sapien
ctcttaatggataggtaatctgaat

SEQ ID NO: 3273318 - DNA, 25 bp, Homo sapien
cctcttaatggataggtaatctgaa

SEQ ID NO: 3273319 - DNA, 25 bp, Homo sapien
taatctgaattacttagtctttctg

SEQ ID NO: 3273320 - DNA, 25 bp, Homo sapien
ctttctgtgactacataatgaggac

SEQ ID NO: 3273321 - DNA, 25 bp, Homo sapien
caatcctagctcactgctcaggtga

SEQ ID NO: 3273322 - DNA, 25 bp, Homo sapien
ggcacctgccaccatacaaagctaa

SEQ ID NO: 3273323 - DNA, 25 bp, Homo sapien
ctagctcactgctcaggtgatactc

SEQ ID NO: 3273324 - DNA, 25 bp, Homo sapien
tcctagctcactgctcaggtgatac

SEQ ID NO: 3273325 - DNA, 25 bp, Homo sapien
tgatctcggctccaagaaaaagggt

SEQ ID NO: 3273326 - DNA, 25 bp, Homo sapien
tgaacacatgggctatttaatgtaa

SEQ ID NO: 3273327 - DNA, 25 bp, Homo sapien
tgtaatgtagaaccttaaaggcttc

SEQ ID NO: 3273328 - DNA, 25 bp, Homo sapien
tttaatgtaaggaacctgtctagac

SEQ ID NO: 3273329 - DNA, 25 bp, Homo sapien
gctagcttcatgaaccttagaacag

SEQ ID NO: 3273330 - DNA, 25 bp, Homo sapien
tggactctcgagcatatgaacattt

SEQ ID NO: 3273331 - DNA, 25 bp, Homo sapien
ctctggactctcgagcatatgaaca

SEQ ID NO: 3273332 - DNA, 25 bp, Homo sapien
tgtaatatagctagcttcatgaacc

SEQ ID NO: 3273333 - DNA, 25 bp, Homo sapien
gctgtgcattaagatgttgctgagg

SEQ ID NO: 3273334 - DNA, 25 bp, Homo sapien
tgaggattgcgaactcccgcagcat

SEQ ID NO: 3273335 - DNA, 25 bp, Homo sapien
tgttgcattgtaacttgtggctgtg

SEQ ID NO: 3273336 - DNA, 25 bp, Homo sapien
tgttgctgaggattgcgaactcccg

SEQ ID NO: 3273337 - DNA, 25 bp, Homo sapien
ctgtggaacggtgtggacagcagga

SEQ ID NO: 3273338 - DNA, 25 bp, Homo sapien
ggaacggtgtggacagcaggagtag

SEQ ID NO: 3273339 - DNA, 25 bp, Homo sapien
tggaacggtgtggacagcaggagta

SEQ ID NO: 3273340 - DNA, 25 bp, Homo sapien
tgtggaacggtgtggacagcaggag

SEQ ID NO: 3273341 - DNA, 25 bp, Homo sapien
acttatttgttaagattctggccac

SEQ ID NO: 3273342 - DNA, 25 bp, Homo sapien
tatttgttaagattctggccacaat

SEQ ID NO: 3273343 - DNA, 25 bp, Homo sapien
cttatttgttaagattctggccaca

SEQ ID NO: 3273344 - DNA, 25 bp, Homo sapien
ttacttatttgttaagattctggcc

SEQ ID NO: 3273345 - DNA, 25 bp, Homo sapien
gatcttgtcggtgatctcttttacc

SEQ ID NO: 3273346 - DNA, 25 bp, Homo sapien
cgtggtgatcttgtcggtgatctct

SEQ ID NO: 3273347 - DNA, 25 bp, Homo sapien
tcttgtcggtgatctcttttacccc

SEQ ID NO: 3273348 - DNA, 25 bp, Homo sapien
ctcgtccgtggtgatcttgtcggtg

SEQ ID NO: 3273349 - DNA, 25 bp, Homo sapien
ccgtcggcactcacgacgccacaga

SEQ ID NO: 3273350 - DNA, 25 bp, Homo sapien
aggcttgggctgcgcggtgaagtcc

SEQ ID NO: 3273351 - DNA, 25 bp, Homo sapien
tcggcactcacgacgccacagaggg

SEQ ID NO: 3273352 - DNA, 25 bp, Homo sapien
cactcacgacgccacagagggcagt

SEQ ID NO: 3273353 - DNA, 25 bp, Homo sapien
ggacaacttttggttcacagtcctc

SEQ ID NO: 3273354 - DNA, 25 bp, Homo sapien
caacttttggttcacagtcctctac

SEQ ID NO: 3273355 - DNA, 25 bp, Homo sapien
ctgggggacaacttttggttcacag

SEQ ID NO: 3273356 - DNA, 25 bp, Homo sapien
ttggttcacagtcctctaccggcct

SEQ ID NO: 3273357 - DNA, 25 bp, Homo sapien
tctgtcaggtggttgcgccgccgcc

SEQ ID NO: 3273358 - DNA, 25 bp, Homo sapien
aaggtgcatcgagcgcccgggcctc

SEQ ID NO: 3273359 - DNA, 25 bp, Homo sapien
cgctctccgtctggccgaggaagag

SEQ ID NO: 3273360 - DNA, 25 bp, Homo sapien
cctagtcgggctgcacacaaagcgg

SEQ ID NO: 3273361 - DNA, 25 bp, Homo sapien
gactcggacccggacgcccctcgca

SEQ ID NO: 3273362 - DNA, 25 bp, Homo sapien
gtgcgcttgtgtccgtccgggaccc

SEQ ID NO: 3273363 - DNA, 25 bp, Homo sapien
gacgcccctcgcagaggcgcgcgcc

SEQ ID NO: 3273364 - DNA, 25 bp, Homo sapien
gtgtgcgcttgtgtccgtccgggac

SEQ ID NO: 3273365 - DNA, 25 bp, Homo sapien
acacaccggccggtcacgcgagcgg

SEQ ID NO: 3273366 - DNA, 25 bp, Homo sapien
gcgagagcacgcgagagcagcgcgc

SEQ ID NO: 3273367 - DNA, 25 bp, Homo sapien
gcgagcggcgcgagagcacgcgaga

SEQ ID NO: 3273368 - DNA, 25 bp, Homo sapien
gcggcgcgagagcacgcgagagcag

SEQ ID NO: 3273369 - DNA, 25 bp, Homo sapien
tggccttaggcttgttactcattct

SEQ ID NO: 3273370 - DNA, 25 bp, Homo sapien
taataagtattcagccaaatctgtt

SEQ ID NO: 3273371 - DNA, 25 bp, Homo sapien
tataatcctagttgttgaggcagag

SEQ ID NO: 3273372 - DNA, 25 bp, Homo sapien
tccaattctgttaggctgaccagca

SEQ ID NO: 3273373 - DNA, 25 bp, Homo sapien
cctcaaagcccttctcgtcctgggt

SEQ ID NO: 3273374 - DNA, 25 bp, Homo sapien
tcaaagcccttctcgtcctgggtct

SEQ ID NO: 3273375 - DNA, 25 bp, Homo sapien
tctccggcacgagctggggcatggg

SEQ ID NO: 3273376 - DNA, 25 bp, Homo sapien
gggtctccggcacgagctggggcat

SEQ ID NO: 3273377 - DNA, 25 bp, Homo sapien
tccggagatggtcttgatgcagcct

SEQ ID NO: 3273378 - DNA, 25 bp, Homo sapien
ttgtcaaaattaatggcctccatgg

SEQ ID NO: 3273379 - DNA, 25 bp, Homo sapien
gagctgtccacaacacagtcggcat

SEQ ID NO: 3273380 - DNA, 25 bp, Homo sapien
gacctcgatctctacggacttattg

SEQ ID NO: 3273381 - DNA, 25 bp, Homo sapien
gacattgcgggccacattagcgtcc

SEQ ID NO: 3273382 - DNA, 25 bp, Homo sapien
cattagcgtccgcataatccggcag

SEQ ID NO: 3273383 - DNA, 25 bp, Homo sapien
tctggatggcgttcggcgtcttgat

SEQ ID NO: 3273384 - DNA, 25 bp, Homo sapien
ggatggtcccgcctagacattgcgg

SEQ ID NO: 3273385 - DNA, 25 bp, Homo sapien
gaggtgggatgatccttcgagttcc

SEQ ID NO: 3273386 - DNA, 25 bp, Homo sapien
caaggcattgatgacttagtaaggg

SEQ ID NO: 3273387 - DNA, 25 bp, Homo sapien
tcatagagtgatgctcacttattct

SEQ ID NO: 3273388 - DNA, 25 bp, Homo sapien
attcatggagtgtttatattgcaca

SEQ ID NO: 3273389 - DNA, 25 bp, Homo sapien
gcattgatgacttagtaagggagat

SEQ ID NO: 3273390 - DNA, 25 bp, Homo sapien
taaatattcacaaccgaaggctgat

SEQ ID NO: 3273391 - DNA, 25 bp, Homo sapien
gacgtgttgtacttttcccattggc

SEQ ID NO: 3273392 - DNA, 25 bp, Homo sapien
tcaatgagaacgagcatgataacca

SEQ ID NO: 3273393 - DNA, 25 bp, Homo sapien
gatgcttcaccctttaaaagacgtg

SEQ ID NO: 3273394 - DNA, 25 bp, Homo sapien
tcttcgatgcaaagggacactttgt

SEQ ID NO: 3273395 - DNA, 25 bp, Homo sapien
aacactgggactcgagacctctaaa

SEQ ID NO: 3273396 - DNA, 25 bp, Homo sapien
ggttatttcgcttctctattctggg

SEQ ID NO: 3273397 - DNA, 25 bp, Homo sapien
cactctgtttaaagcaactgccata

SEQ ID NO: 3273398 - DNA, 25 bp, Homo sapien
ctccgagccgaagcggagggcctga

SEQ ID NO: 3273399 - DNA, 25 bp, Homo sapien
ctgcggcgccgcgttgtgcgttcga

SEQ ID NO: 3273400 - DNA, 25 bp, Homo sapien
gcggcaccggcttcgacgccctctg

SEQ ID NO: 3273401 - DNA, 25 bp, Homo sapien
gcggcgcggcgaatgaacccccaag

SEQ ID NO: 3273402 - DNA, 25 bp, Homo sapien
tgagcacatagtcctagcagagccg

SEQ ID NO: 3273403 - DNA, 25 bp, Homo sapien
cactcacacgttcggattttggaga

SEQ ID NO: 3273404 - DNA, 25 bp, Homo sapien
gactctctctaagccgtccgtttgg

SEQ ID NO: 3273405 - DNA, 25 bp, Homo sapien
tttccctccgaaagagagctagagt

SEQ ID NO: 3273406 - DNA, 25 bp, Homo sapien
tgccctcctactccatggttagtat

SEQ ID NO: 3273407 - DNA, 25 bp, Homo sapien
tcccactgtagctagagtaatctgt

SEQ ID NO: 3273408 - DNA, 25 bp, Homo sapien
tggttagtatcatgtctcacctggg

SEQ ID NO: 3273409 - DNA, 25 bp, Homo sapien
gttgcacgagcctcctaacagctca

SEQ ID NO: 3273410 - DNA, 25 bp, Homo sapien
aagagccaactttctcaaaggaagc

SEQ ID NO: 3273411 - DNA, 25 bp, Homo sapien
tgttagtatgcaagttaaacctgtg

SEQ ID NO: 3273412 - DNA, 25 bp, Homo sapien
taggattgagctggtaccaaaagaa

SEQ ID NO: 3273413 - DNA, 25 bp, Homo sapien
ttaaatttgcctttggagatggaga

SEQ ID NO: 3273414 - DNA, 25 bp, Homo sapien
aataacgtgtgctgttttttccaag

SEQ ID NO: 3273415 - DNA, 25 bp, Homo sapien
caatattgcagctatcagttggaga

SEQ ID NO: 3273416 - DNA, 25 bp, Homo sapien
tacatcctgaagagccgtttataac

SEQ ID NO: 3273417 - DNA, 25 bp, Homo sapien
taaatgattgagttaactgtgaggc

SEQ ID NO: 3273418 - DNA, 25 bp, Homo sapien
tatagttgtctcttatatttcttgg

SEQ ID NO: 3273419 - DNA, 25 bp, Homo sapien
cttcatagaatcattagctagaata

SEQ ID NO: 3273420 - DNA, 25 bp, Homo sapien
tcttatatttcttggttcctgtcct

SEQ ID NO: 3273421 - DNA, 25 bp, Homo sapien
cattagctagaatatctgaatatag

SEQ ID NO: 3273422 - DNA, 25 bp, Homo sapien
cagagtgaaatacaagagaaaagcc

SEQ ID NO: 3273423 - DNA, 25 bp, Homo sapien
cagataattgacctggtgtttgtgg

SEQ ID NO: 3273424 - DNA, 25 bp, Homo sapien
ggacagatccaagagatctaatttg

SEQ ID NO: 3273425 - DNA, 25 bp, Homo sapien
gcattactctgcctttttaaactct

SEQ ID NO: 3273426 - DNA, 25 bp, Homo sapien
ggtatcaagtctcatctggatgaca

SEQ ID NO: 3273427 - DNA, 25 bp, Homo sapien
gaagaacatggttgactcgtgccca

SEQ ID NO: 3273428 - DNA, 25 bp, Homo sapien
taagtcatgccaactggtatcaagt

SEQ ID NO: 3273429 - DNA, 25 bp, Homo sapien
tgttttttatctatgggcccaattg

SEQ ID NO: 3273430 - DNA, 25 bp, Homo sapien
aataaacatggcagctgagaatcct

SEQ ID NO: 3273431 - DNA, 25 bp, Homo sapien
ttatggctctgcaataaaacgaacc

SEQ ID NO: 3273432 - DNA, 25 bp, Homo sapien
tcaatacagtaatccagggcaaaca

SEQ ID NO: 3273433 - DNA, 25 bp, Homo sapien
tgagaatcctgagaaccgaatattc

SEQ ID NO: 3273434 - DNA, 25 bp, Homo sapien
gggaccgtttgcacagggaatcctg

SEQ ID NO: 3273435 - DNA, 25 bp, Homo sapien
ctggagggggcatgtttagggccaa

SEQ ID NO: 3273436 - DNA, 25 bp, Homo sapien
tgacctgaaggggaccgtttgcaca

SEQ ID NO: 3273437 - DNA, 25 bp, Homo sapien
gagggggcatgtttagggccaagaa

SEQ ID NO: 3273438 - DNA, 25 bp, Homo sapien
ccactttcgtgcagaaaatggtaca

SEQ ID NO: 3273439 - DNA, 25 bp, Homo sapien
atcctgactctggagtacgtctcca

SEQ ID NO: 3273440 - DNA, 25 bp, Homo sapien
tgaggcctggagctcgttataaatc

SEQ ID NO: 3273441 - DNA, 25 bp, Homo sapien
gcctggagctcgttataaatcatgc

SEQ ID NO: 3273442 - DNA, 25 bp, Homo sapien
ggcaccagcagaattccatgtgaga

SEQ ID NO: 3273443 - DNA, 25 bp, Homo sapien
tgggcctccatttgccctctactgt

SEQ ID NO: 3273444 - DNA, 25 bp, Homo sapien
ggagcttgtcgagcgtggcctcttc

SEQ ID NO: 3273445 - DNA, 25 bp, Homo sapien
ttccatgtgagagggagcttgtcga

SEQ ID NO: 3273446 - DNA, 25 bp, Homo sapien
gatgtttagctcagtcatacccgca

SEQ ID NO: 3273447 - DNA, 25 bp, Homo sapien
tttcaagcgaaagcaccaaatcaca

SEQ ID NO: 3273448 - DNA, 25 bp, Homo sapien
tccttgagatgagttatcgggagcg

SEQ ID NO: 3273449 - DNA, 25 bp, Homo sapien
ttaacacgcaaacgtacggtgccgc

SEQ ID NO: 3273450 - DNA, 25 bp, Homo sapien
gggtcagctgatgcccctaagcaac

SEQ ID NO: 3273451 - DNA, 25 bp, Homo sapien
tgggtaaagtgctcccttctgggtg

SEQ ID NO: 3273452 - DNA, 25 bp, Homo sapien
gcattagcattagccggtgggtaaa

SEQ ID NO: 3273453 - DNA, 25 bp, Homo sapien
taagcaacgtactggatacccagcc

SEQ ID NO: 3273454 - DNA, 25 bp, Homo sapien
tgaagtcaacgagggcttgcactta

SEQ ID NO: 3273455 - DNA, 25 bp, Homo sapien
aaaactggtgggctaccggtgctat

SEQ ID NO: 3273456 - DNA, 25 bp, Homo sapien
gctaccggtgctatttgaagtcaac

SEQ ID NO: 3273457 - DNA, 25 bp, Homo sapien
cagatgacatggaaaactggtgggc

SEQ ID NO: 3273458 - DNA, 25 bp, Homo sapien
ggtagcgattgcactcagatgggtc

SEQ ID NO: 3273459 - DNA, 25 bp, Homo sapien
gcgattgcactcagatgggtcatct

SEQ ID NO: 3273460 - DNA, 25 bp, Homo sapien
agctgccctagaccgctgctcctga

SEQ ID NO: 3273461 - DNA, 25 bp, Homo sapien
ctgggtagcgattgcactcagatgg

SEQ ID NO: 3273462 - DNA, 25 bp, Homo sapien
gaggttcctcttacgagacatcagg

SEQ ID NO: 3273463 - DNA, 25 bp, Homo sapien
tcagcaaatgaattggcatccgata

SEQ ID NO: 3273464 - DNA, 25 bp, Homo sapien
tgcaacaccatatgtccagcgaggt

SEQ ID NO: 3273465 - DNA, 25 bp, Homo sapien
gagctgcgtttctcatggtcagcaa

SEQ ID NO: 3273466 - DNA, 25 bp, Homo sapien
gaatgagggaaataggagaccatga

SEQ ID NO: 3273467 - DNA, 25 bp, Homo sapien
ccctcttgctttaggtagtaatgca

SEQ ID NO: 3273468 - DNA, 25 bp, Homo sapien
tgagcaccaccgcaatttctcttct

SEQ ID NO: 3273469 - DNA, 25 bp, Homo sapien
gagaccatgagttttgagcaccacc

SEQ ID NO: 3273470 - DNA, 25 bp, Homo sapien
tgtacaaggtacaaaacttctgtcc

SEQ ID NO: 3273471 - DNA, 25 bp, Homo sapien
cagttgctctcctgatggacatctg

SEQ ID NO: 3273472 - DNA, 25 bp, Homo sapien
ccttggtatgaacatttgggaggca

SEQ ID NO: 3273473 - DNA, 25 bp, Homo sapien
ttttgtccggcaaagcacgaggatg

SEQ ID NO: 3273474 - DNA, 25 bp, Homo sapien
tgtttcaggcctgcgtgtcagttcc

SEQ ID NO: 3273475 - DNA, 25 bp, Homo sapien
aacgatagccttgtcatatgacggc

SEQ ID NO: 3273476 - DNA, 25 bp, Homo sapien
tcagttccgcctcgtggatgttgct

SEQ ID NO: 3273477 - DNA, 25 bp, Homo sapien
taaagtcatccttgatcccaacggc

SEQ ID NO: 3273478 - DNA, 25 bp, Homo sapien
tgaagagcaggtctttccagccaat

SEQ ID NO: 3273479 - DNA, 25 bp, Homo sapien
ggagggcgtcaggtggagaattggt

SEQ ID NO: 3273480 - DNA, 25 bp, Homo sapien
tccatgtcaaatgtacatagaggta

SEQ ID NO: 3273481 - DNA, 25 bp, Homo sapien
ataggatggcacagagcgagcctgt

SEQ ID NO: 3273482 - DNA, 25 bp, Homo sapien
gtctctgtgcgtgtgaaccctggag

SEQ ID NO: 3273483 - DNA, 25 bp, Homo sapien
cctggaggcctgttgagggaccctt

SEQ ID NO: 3273484 - DNA, 25 bp, Homo sapien
tggtctctttgccagagtgggcaga

SEQ ID NO: 3273485 - DNA, 25 bp, Homo sapien
gcttttgcaacgtgaagcctccctt

SEQ ID NO: 3273486 - DNA, 25 bp, Homo sapien
tcactcctggacacatgtgacccat

SEQ ID NO: 3273487 - DNA, 25 bp, Homo sapien
ctgatgatgtaacccgcggcagctc

SEQ ID NO: 3273488 - DNA, 25 bp, Homo sapien
gcggcagctcactcctggacacatg

SEQ ID NO: 3273489 - DNA, 25 bp, Homo sapien
tgtgacccattctgaagattatctg

SEQ ID NO: 3273490 - DNA, 25 bp, Homo sapien
aaaatgtcttggcagccggacgcgg

SEQ ID NO: 3273491 - DNA, 25 bp, Homo sapien
gacagtgggttgacgaggataaaaa

SEQ ID NO: 3273492 - DNA, 25 bp, Homo sapien
gcaaaagctattaggtataattaaa

SEQ ID NO: 3273493 - DNA, 25 bp, Homo sapien
tatggctaactcatttgcaaaagct

SEQ ID NO: 3273494 - DNA, 25 bp, Homo sapien
caggccaggagacgaaacagaagga

SEQ ID NO: 3273495 - DNA, 25 bp, Homo sapien
tcttctccatcaatgagtgcaagat

SEQ ID NO: 3273496 - DNA, 25 bp, Homo sapien
tgccgtcaaccaggccaggagacga

SEQ ID NO: 3273497 - DNA, 25 bp, Homo sapien
tctccatcaatgagtgcaagatctt

SEQ ID NO: 3273498 - DNA, 25 bp, Homo sapien
acagttattgatgaggcttggccac

SEQ ID NO: 3273499 - DNA, 25 bp, Homo sapien
cctctgtgagtgaaatgcttgtacg

SEQ ID NO: 3273500 - DNA, 25 bp, Homo sapien
gcttgtacgaagctctgccatatgt

SEQ ID NO: 3273501 - DNA, 25 bp, Homo sapien
tctctgggtacaccccaagcagcgt

SEQ ID NO: 3273502 - DNA, 25 bp, Homo sapien
gctgctgctacaaaaggattcatga

SEQ ID NO: 3273503 - DNA, 25 bp, Homo sapien
tcagagtctcaagagtccatgaccc

SEQ ID NO: 3273504 - DNA, 25 bp, Homo sapien
atgaccccggaattttaagagctgc

SEQ ID NO: 3273505 - DNA, 25 bp, Homo sapien
cttggagagactatcaaaagctttc

SEQ ID NO: 3273506 - DNA, 25 bp, Homo sapien
ctactgcatgaacgtgcaaagagta

SEQ ID NO: 3273507 - DNA, 25 bp, Homo sapien
agtacatgtggtaggaccctctttg

SEQ ID NO: 3273508 - DNA, 25 bp, Homo sapien
caaagagtatagaagcaattttcag

SEQ ID NO: 3273509 - DNA, 25 bp, Homo sapien
aaatgtgagtacatgtggtaggacc

SEQ ID NO: 3273510 - DNA, 25 bp, Homo sapien
gcgcttgatgatgaccaagaaccct

SEQ ID NO: 3273511 - DNA, 25 bp, Homo sapien
acagagcgcttgatgatgaccaaga

SEQ ID NO: 3273512 - DNA, 25 bp, Homo sapien
gagcgcttgatgatgaccaagaacc

SEQ ID NO: 3273513 - DNA, 25 bp, Homo sapien
cagagcgcttgatgatgaccaagaa

SEQ ID NO: 3273514 - DNA, 25 bp, Homo sapien
cctccatctcctagcgtctgttttt

SEQ ID NO: 3273515 - DNA, 25 bp, Homo sapien
gggcagtcatccacctcttcacata

SEQ ID NO: 3273516 - DNA, 25 bp, Homo sapien
tttcctggcaaccttcagtgtctgt

SEQ ID NO: 3273517 - DNA, 25 bp, Homo sapien
tgtgagcacagcttgagggcagtca

SEQ ID NO: 3273518 - DNA, 25 bp, Homo sapien
caaaaccaaagtgagtgcagacctt

SEQ ID NO: 3273519 - DNA, 25 bp, Homo sapien
ccgacaagaggattttagggataca

SEQ ID NO: 3273520 - DNA, 25 bp, Homo sapien
tatggcaagggatagcagtctacca

SEQ ID NO: 3273521 - DNA, 25 bp, Homo sapien
gagcattgagtcacacactgagaaa

SEQ ID NO: 3273522 - DNA, 25 bp, Homo sapien
gattcctctcgttcagctccttggt

SEQ ID NO: 3273523 - DNA, 25 bp, Homo sapien
agcggatgtgcgtccatcccccctg

SEQ ID NO: 3273524 - DNA, 25 bp, Homo sapien
ctggattcctctcgttcagctcctt

SEQ ID NO: 3273525 - DNA, 25 bp, Homo sapien
tctcctggattcctctcgttcagct

SEQ ID NO: 3273526 - DNA, 25 bp, Homo sapien
gcagggaaatattgcacaattgtga

SEQ ID NO: 3273527 - DNA, 25 bp, Homo sapien
cagtgtttgcaacgggcagggaaat

SEQ ID NO: 3273528 - DNA, 25 bp, Homo sapien
gactgcagggtctgctatgagaaga

SEQ ID NO: 3273529 - DNA, 25 bp, Homo sapien
cagagagacagtgtttgcaacgggc

SEQ ID NO: 3273530 - DNA, 25 bp, Homo sapien
ggtgcccacaccataatgagctccg

SEQ ID NO: 3273531 - DNA, 25 bp, Homo sapien
ccaggccaatggatttgagtacagc

SEQ ID NO: 3273532 - DNA, 25 bp, Homo sapien
gtgtgatcaccttcaggtgcccaca

SEQ ID NO: 3273533 - DNA, 25 bp, Homo sapien
gaatcggctccatgcccagtgtgat

SEQ ID NO: 3273534 - DNA, 25 bp, Homo sapien
taattcctcatccacgacactatca

SEQ ID NO: 3273535 - DNA, 25 bp, Homo sapien
tcccaccatcacctatatctggaaa

SEQ ID NO: 3273536 - DNA, 25 bp, Homo sapien
ttctgacccattcccctgctgctca

SEQ ID NO: 3273537 - DNA, 25 bp, Homo sapien
tatctggaaactctaattcctcatc

SEQ ID NO: 3273538 - DNA, 25 bp, Homo sapien
cacgtcaagctcttttccctgcagg

SEQ ID NO: 3273539 - DNA, 25 bp, Homo sapien
cctgcaggctttgccccttcttcat

SEQ ID NO: 3273540 - DNA, 25 bp, Homo sapien
agctgcagtcggagtcagccctggc

SEQ ID NO: 3273541 - DNA, 25 bp, Homo sapien
catgcgtctgcgcacgtcaagctct

SEQ ID NO: 3273542 - DNA, 25 bp, Homo sapien
aaagtccagagaccagctcgtagga

SEQ ID NO: 3273543 - DNA, 25 bp, Homo sapien
cttttcatgggaactagttctaaca

SEQ ID NO: 3273544 - DNA, 25 bp, Homo sapien
ttcttttcatgggaactagttctaa

SEQ ID NO: 3273545 - DNA, 25 bp, Homo sapien
cagagaccagctcgtaggagagaga

SEQ ID NO: 3273546 - DNA, 25 bp, Homo sapien
ctgactctttatgtaacaggacaaa

SEQ ID NO: 3273547 - DNA, 25 bp, Homo sapien
tatcttgccaaagtagacatcaacc

SEQ ID NO: 3273548 - DNA, 25 bp, Homo sapien
atacaaatttgtccctatcttgcca

SEQ ID NO: 3273549 - DNA, 25 bp, Homo sapien
caaatacaaatttgtccctatcttg

SEQ ID NO: 3273550 - DNA, 25 bp, Homo sapien
gagactgccccgttgccagtctttc

SEQ ID NO: 3273551 - DNA, 25 bp, Homo sapien
gatgactcttcgagactgccccgtt

SEQ ID NO: 3273552 - DNA, 25 bp, Homo sapien
taaatggagagactaccaaaggaaa

SEQ ID NO: 3273553 - DNA, 25 bp, Homo sapien
gcagccaaatgcatgatgactcttc

SEQ ID NO: 3273554 - DNA, 25 bp, Homo sapien
tatgtccctattaggcctctttgat

SEQ ID NO: 3273555 - DNA, 25 bp, Homo sapien
tataggttatatcccgtatccctgg

SEQ ID NO: 3273556 - DNA, 25 bp, Homo sapien
aaccccactcgatcaccagctatgt

SEQ ID NO: 3273557 - DNA, 25 bp, Homo sapien
tatatcccgtatccctggcttttcc

SEQ ID NO: 3273558 - DNA, 25 bp, Homo sapien
atccccgtgagtttttccagtcgag

SEQ ID NO: 3273559 - DNA, 25 bp, Homo sapien
gtagggcctgtccaagtcccgtcat

SEQ ID NO: 3273560 - DNA, 25 bp, Homo sapien
ttgctttgccctctccagtgtctct

SEQ ID NO: 3273561 - DNA, 25 bp, Homo sapien
agtttttccagtcgagccctcttgc

SEQ ID NO: 3273562 - DNA, 25 bp, Homo sapien
agatgatcctggttacattatattc

SEQ ID NO: 3273563 - DNA, 25 bp, Homo sapien
tatggactgcaactttagaatcata

SEQ ID NO: 3273564 - DNA, 25 bp, Homo sapien
ttttgacaatatggactgcaacttt

SEQ ID NO: 3273565 - DNA, 25 bp, Homo sapien
gatgatcctggttacattatattcc

SEQ ID NO: 3273566 - DNA, 25 bp, Homo sapien
gacctgcacaaagccaaggtgcctt

SEQ ID NO: 3273567 - DNA, 25 bp, Homo sapien
tcatgggcgccagctgaacccatag

SEQ ID NO: 3273568 - DNA, 25 bp, Homo sapien
tgccatgagccataggttcacacac

SEQ ID NO: 3273569 - DNA, 25 bp, Homo sapien
gggcgccagctgaacccatagggtt

SEQ ID NO: 3273570 - DNA, 25 bp, Homo sapien
tgtttttgctcaggtaacagaattg

SEQ ID NO: 3273571 - DNA, 25 bp, Homo sapien
gtttttgctcaggtaacagaattgt

SEQ ID NO: 3273572 - DNA, 25 bp, Homo sapien
ccatagacctctccaaaaaggctgt

SEQ ID NO: 3273573 - DNA, 25 bp, Homo sapien
tgtgaaatgttgacaaacgagttaa

SEQ ID NO: 3273574 - DNA, 25 bp, Homo sapien
gttggatcaagtgccagccactgtg

SEQ ID NO: 3273575 - DNA, 25 bp, Homo sapien
cgagttaaagttggatcaagtgcca

SEQ ID NO: 3273576 - DNA, 25 bp, Homo sapien
ttcctgattagttgtatccatggcc

SEQ ID NO: 3273577 - DNA, 25 bp, Homo sapien
ttagttgtatccatggcccttgtcg

SEQ ID NO: 3273578 - DNA, 25 bp, Homo sapien
tgattagttgtatccatggcccttg

SEQ ID NO: 3273579 - DNA, 25 bp, Homo sapien
cctgattagttgtatccatggccct

SEQ ID NO: 3273580 - DNA, 25 bp, Homo sapien
tgtttgcagggagcttagatagcat

SEQ ID NO: 3273581 - DNA, 25 bp, Homo sapien
caccaggcccctgccttgggtgtcc

SEQ ID NO: 3273582 - DNA, 25 bp, Homo sapien
ctttggtgtctgtcacatcctccac

SEQ ID NO: 3273583 - DNA, 25 bp, Homo sapien
tccaccaggcccctgccttgggtgt

SEQ ID NO: 3273584 - DNA, 25 bp, Homo sapien
ccaggcccctgccttgggtgtccat

SEQ ID NO: 3273585 - DNA, 25 bp, Homo sapien
aaagtacttgctaagggcatgatcc

SEQ ID NO: 3273586 - DNA, 25 bp, Homo sapien
ttcagccatcaacaaaaatcccgtg

SEQ ID NO: 3273587 - DNA, 25 bp, Homo sapien
tgttagcggtgcttaaaggcctcag

SEQ ID NO: 3273588 - DNA, 25 bp, Homo sapien
gaacagataagtcccagataggagg

SEQ ID NO: 3273589 - DNA, 25 bp, Homo sapien
acatggagaatgagccccggctaac

SEQ ID NO: 3273590 - DNA, 25 bp, Homo sapien
taggcttgccaaacattgcggtggg

SEQ ID NO: 3273591 - DNA, 25 bp, Homo sapien
tcaatgttggcttaaggagagatcc

SEQ ID NO: 3273592 - DNA, 25 bp, Homo sapien
cacagcaaaggaagagaggcccatt

SEQ ID NO: 3273593 - DNA, 25 bp, Homo sapien
tctgtcttcgtgctggtcaccagcc

SEQ ID NO: 3273594 - DNA, 25 bp, Homo sapien
gtctgtcttcgtgctggtcaccagc

SEQ ID NO: 3273595 - DNA, 25 bp, Homo sapien
tcttctgtagtgtggcgatcgtggc

SEQ ID NO: 3273596 - DNA, 25 bp, Homo sapien
gatcccggcagtaggaattctctga

SEQ ID NO: 3273597 - DNA, 25 bp, Homo sapien
aattctctgaacgtttggagccacc

SEQ ID NO: 3273598 - DNA, 25 bp, Homo sapien
aaatggcacgtaactggccccgtag

SEQ ID NO: 3273599 - DNA, 25 bp, Homo sapien
tgaggagaagagacaaaaaggagcc

SEQ ID NO: 3273600 - DNA, 25 bp, Homo sapien
gaggagaagagacaaaaaggagcct

SEQ ID NO: 3273601 - DNA, 25 bp, Homo sapien
ctgaggagaagagacaaaaaggagc

SEQ ID NO: 3273602 - DNA, 25 bp, Homo sapien
ggagaagagacaaaaaggagccttc

SEQ ID NO: 3273603 - DNA, 25 bp, Homo sapien
attggctctaggacctccgtggata

SEQ ID NO: 3273604 - DNA, 25 bp, Homo sapien
ggtgaaatacagttgcccctcagta

SEQ ID NO: 3273605 - DNA, 25 bp, Homo sapien
gtccctgagagaaaatggcgtattt

SEQ ID NO: 3273606 - DNA, 25 bp, Homo sapien
cagaagacgggaatacaaagacaca

SEQ ID NO: 3273607 - DNA, 25 bp, Homo sapien
tggcctctagatacatgccagctgc

SEQ ID NO: 3273608 - DNA, 25 bp, Homo sapien
tggctctagaaaagcccctgctact

SEQ ID NO: 3273609 - DNA, 25 bp, Homo sapien
gaacagactgtgtcaacttagagaa

SEQ ID NO: 3273610 - DNA, 25 bp, Homo sapien
taaagttgcctgaactgttgacggc

SEQ ID NO: 3273611 - DNA, 25 bp, Homo sapien
ttgtgatcggtattcatgattcact

SEQ ID NO: 3273612 - DNA, 25 bp, Homo sapien
gttaaatggatgtcctccctatgtc

SEQ ID NO: 3273613 - DNA, 25 bp, Homo sapien
cttctgttaaatggatgtcctccct

SEQ ID NO: 3273614 - DNA, 25 bp, Homo sapien
tcatgattcactgcctcacagaaaa

SEQ ID NO: 3273615 - DNA, 25 bp, Homo sapien
tggaaaggtggtggcgtcgacacag

SEQ ID NO: 3273616 - DNA, 25 bp, Homo sapien
ggtggcgtcgacacagtgggaatga

SEQ ID NO: 3273617 - DNA, 25 bp, Homo sapien
aaaggtggtggcgtcgacacagtgg

SEQ ID NO: 3273618 - DNA, 25 bp, Homo sapien
ggtggtggcgtcgacacagtgggaa

SEQ ID NO: 3273619 - DNA, 25 bp, Homo sapien
tgcggcggctgcggccgcggctgcg

SEQ ID NO: 3273620 - DNA, 25 bp, Homo sapien
ctgcggccgcggctgcggcggcagc

SEQ ID NO: 3273621 - DNA, 25 bp, Homo sapien
ggctgcggccgcggctgcggcggca

SEQ ID NO: 3273622 - DNA, 25 bp, Homo sapien
ggctgcggcggctgcggccgcggct

SEQ ID NO: 3273623 - DNA, 25 bp, Homo sapien
catggaatactgagccccaatggca

SEQ ID NO: 3273624 - DNA, 25 bp, Homo sapien
gctgctggaaacatggaatactgag

SEQ ID NO: 3273625 - DNA, 25 bp, Homo sapien
ggaaacatggaatactgagccccaa

SEQ ID NO: 3273626 - DNA, 25 bp, Homo sapien
ctggaaacatggaatactgagcccc

SEQ ID NO: 3273627 - DNA, 25 bp, Homo sapien
tacaggccaccttgcccagcttttt

SEQ ID NO: 3273628 - DNA, 25 bp, Homo sapien
cagcctcaatctcttggcctcaaga

SEQ ID NO: 3273629 - DNA, 25 bp, Homo sapien
tacaggtacaggccaccttgcccag

SEQ ID NO: 3273630 - DNA, 25 bp, Homo sapien
aggtacaggccaccttgcccagctt

SEQ ID NO: 3273631 - DNA, 25 bp, Homo sapien
actatttaagaaacaggtgctgttg

SEQ ID NO: 3273632 - DNA, 25 bp, Homo sapien
cattaccagccgcactgcctttttt

SEQ ID NO: 3273633 - DNA, 25 bp, Homo sapien
atttaagaaacaggtgctgttgagg

SEQ ID NO: 3273634 - DNA, 25 bp, Homo sapien
ccactatttaagaaacaggtgctgt

SEQ ID NO: 3273635 - DNA, 25 bp, Homo sapien
ctgtaccaggtttaatggcaactgg

SEQ ID NO: 3273636 - DNA, 25 bp, Homo sapien
aattcggcaccagttcatatccttt

SEQ ID NO: 3273637 - DNA, 25 bp, Homo sapien
ttaatggcaactgggttgacggtag

SEQ ID NO: 3273638 - DNA, 25 bp, Homo sapien
gtagggatttccaaattcggcacca

SEQ ID NO: 3273639 - DNA, 25 bp, Homo sapien
ccagcagaatatcccccgaggtagg

SEQ ID NO: 3273640 - DNA, 25 bp, Homo sapien
cgaccagcagaatatcccccgaggt

SEQ ID NO: 3273641 - DNA, 25 bp, Homo sapien
cacgaccagcagaatatcccccgag

SEQ ID NO: 3273642 - DNA, 25 bp, Homo sapien
gaccagcagaatatcccccgaggta

SEQ ID NO: 3273643 - DNA, 25 bp, Homo sapien
caaagtagtccctgttgggcccaat

SEQ ID NO: 3273644 - DNA, 25 bp, Homo sapien
agtacatgacgaaggcgtagccgcg

SEQ ID NO: 3273645 - DNA, 25 bp, Homo sapien
tagttgttgagctcacgcactgcgc

SEQ ID NO: 3273646 - DNA, 25 bp, Homo sapien
caaagtccatcatgaggcgcagctc

SEQ ID NO: 3273647 - DNA, 25 bp, Homo sapien
ggctgcggtggaatcctctgcggtc

SEQ ID NO: 3273648 - DNA, 25 bp, Homo sapien
gctgcggtggaatcctctgcggtca

SEQ ID NO: 3273649 - DNA, 25 bp, Homo sapien
ctgcggtggaatcctctgcggtcat

SEQ ID NO: 3273650 - DNA, 25 bp, Homo sapien
atgtcaaaggcatccacagctggcg

SEQ ID NO: 3273651 - DNA, 25 bp, Homo sapien
aatgtcaaaggcatccacagctggc

SEQ ID NO: 3273652 - DNA, 25 bp, Homo sapien
gtcaaaggcatccacagctggcgga

SEQ ID NO: 3273653 - DNA, 25 bp, Homo sapien
aaaggcatccacagctggcggaaac

SEQ ID NO: 3273654 - DNA, 25 bp, Homo sapien
cccgacagctttgaagttttgcgaa

SEQ ID NO: 3273655 - DNA, 25 bp, Homo sapien
tgaagttttgcgaagctgctctcat

SEQ ID NO: 3273656 - DNA, 25 bp, Homo sapien
catttcatcagtaccccgacagctt

SEQ ID NO: 3273657 - DNA, 25 bp, Homo sapien
cagtaccccgacagctttgaagttt

SEQ ID NO: 3273658 - DNA, 25 bp, Homo sapien
cacgggcttggtccaggaactgtaa

SEQ ID NO: 3273659 - DNA, 25 bp, Homo sapien
gcttaggttgagtaaactgccccat

SEQ ID NO: 3273660 - DNA, 25 bp, Homo sapien
cagcttgtaggcagacttgattcca

SEQ ID NO: 3273661 - DNA, 25 bp, Homo sapien
gaaatgtgcacattgccacgggctt

SEQ ID NO: 3273662 - DNA, 25 bp, Homo sapien
ctaagcctttgagggatctggcaag

SEQ ID NO: 3273663 - DNA, 25 bp, Homo sapien
tgacctaagcctttgagggatctgg

SEQ ID NO: 3273664 - DNA, 25 bp, Homo sapien
gctcctttgacctaagcctttgagg

SEQ ID NO: 3273665 - DNA, 25 bp, Homo sapien
cctttgacctaagcctttgagggat

SEQ ID NO: 3273666 - DNA, 25 bp, Homo sapien
aacaggataagaccacgattggtga

SEQ ID NO: 3273667 - DNA, 25 bp, Homo sapien
tagcaatagccagtgttaacaggat

SEQ ID NO: 3273668 - DNA, 25 bp, Homo sapien
aatggacattggctgatagagtgga

SEQ ID NO: 3273669 - DNA, 25 bp, Homo sapien
ggaaggaatttccagtacagacaca

SEQ ID NO: 3273670 - DNA, 25 bp, Homo sapien
gaggtgagaagcttgcttgagctca

SEQ ID NO: 3273671 - DNA, 25 bp, Homo sapien
ttgggcgtggtggctgaagcctata

SEQ ID NO: 3273672 - DNA, 25 bp, Homo sapien
tggctggttgggcgtggtggctgaa

SEQ ID NO: 3273673 - DNA, 25 bp, Homo sapien
atcccagcactttgggaggctgagg

SEQ ID NO: 3273674 - DNA, 25 bp, Homo sapien
tgcatgccagagctcaaccgcttga

SEQ ID NO: 3273675 - DNA, 25 bp, Homo sapien
gcacataaatgaggcctgcccatga

SEQ ID NO: 3273676 - DNA, 25 bp, Homo sapien
tcggtagagattttatgccacaagg

SEQ ID NO: 3273677 - DNA, 25 bp, Homo sapien
tattacagtgcttgagctcgagctc

SEQ ID NO: 3273678 - DNA, 25 bp, Homo sapien
cttggctcagtcctacttggagaag

SEQ ID NO: 3273679 - DNA, 25 bp, Homo sapien
tttttacctcatatgacaggcaagg

SEQ ID NO: 3273680 - DNA, 25 bp, Homo sapien
cttagagaaggtatgaggattgatc

SEQ ID NO: 3273681 - DNA, 25 bp, Homo sapien
tcacactgaatcctagtctagtttg

SEQ ID NO: 3273682 - DNA, 25 bp, Homo sapien
gatttgtctggtcctttataagtcg

SEQ ID NO: 3273683 - DNA, 25 bp, Homo sapien
gtcgcagaacgagagtatacaggca

SEQ ID NO: 3273684 - DNA, 25 bp, Homo sapien
ttcaggcagcttccttgggattcct

SEQ ID NO: 3273685 - DNA, 25 bp, Homo sapien
caatttttgcagtgccctttgaggc

SEQ ID NO: 3273686 - DNA, 25 bp, Homo sapien
gcacagtggtttcaacaccagactg

SEQ ID NO: 3273687 - DNA, 25 bp, Homo sapien
gatgttcatcgcatggagaggccca

SEQ ID NO: 3273688 - DNA, 25 bp, Homo sapien
tgtactcggcagagtcaagactctt

SEQ ID NO: 3273689 - DNA, 25 bp, Homo sapien
gaagctccaaataacttatacaaga

SEQ ID NO: 3273690 - DNA, 25 bp, Homo sapien
ctctggcttgcaacaagcttaaatc

SEQ ID NO: 3273691 - DNA, 25 bp, Homo sapien
gctctggcttgcaacaagcttaaat

SEQ ID NO: 3273692 - DNA, 25 bp, Homo sapien
cacacccggtcacattaacttctgt

SEQ ID NO: 3273693 - DNA, 25 bp, Homo sapien
caccacacccggtcacattaacttc

SEQ ID NO: 3273694 - DNA, 25 bp, Homo sapien
tagagtgacagcaggcagttctgag

SEQ ID NO: 3273695 - DNA, 25 bp, Homo sapien
agtgacagcaggcagttctgaggtc

SEQ ID NO: 3273696 - DNA, 25 bp, Homo sapien
gtgacagcaggcagttctgaggtct

SEQ ID NO: 3273697 - DNA, 25 bp, Homo sapien
gagtagagtgacagcaggcagttct

SEQ ID NO: 3273698 - DNA, 25 bp, Homo sapien
catagtaagacatgattatgtggcc

SEQ ID NO: 3273699 - DNA, 25 bp, Homo sapien
tacagacgcaaaacagaagcctggg

SEQ ID NO: 3273700 - DNA, 25 bp, Homo sapien
gatgagataagctctgaggtagatt

SEQ ID NO: 3273701 - DNA, 25 bp, Homo sapien
gaaacaggactcaggtccaggagag

SEQ ID NO: 3273702 - DNA, 25 bp, Homo sapien
aggatctattaaggccactgtggca

SEQ ID NO: 3273703 - DNA, 25 bp, Homo sapien
gatctattaaggccactgtggcatc

SEQ ID NO: 3273704 - DNA, 25 bp, Homo sapien
ggatctattaaggccactgtggcat

SEQ ID NO: 3273705 - DNA, 25 bp, Homo sapien
caggcattctggctcttagagatca

SEQ ID NO: 3273706 - DNA, 25 bp, Homo sapien
gagatcacactttaccgcctcaagc

SEQ ID NO: 3273707 - DNA, 25 bp, Homo sapien
gtccaagaccaacagccagcaaata

SEQ ID NO: 3273708 - DNA, 25 bp, Homo sapien
gacaggaacttctgtactaacccag

SEQ ID NO: 3273709 - DNA, 25 bp, Homo sapien
tatcccgagatgtactcaagccctg

SEQ ID NO: 3273710 - DNA, 25 bp, Homo sapien
ccacttgtgctaaggaaaagccagc

SEQ ID NO: 3273711 - DNA, 25 bp, Homo sapien
caaggcagtcaggttaacaagggct

SEQ ID NO: 3273712 - DNA, 25 bp, Homo sapien
gtagatatatttcctcctgagccag

SEQ ID NO: 3273713 - DNA, 25 bp, Homo sapien
tatttacaattgcatcaggttacaa

SEQ ID NO: 3273714 - DNA, 25 bp, Homo sapien
tcagccaagaaacggaaatttttca

SEQ ID NO: 3273715 - DNA, 25 bp, Homo sapien
ttgcatcaggttacaaacagaggca

SEQ ID NO: 3273716 - DNA, 25 bp, Homo sapien
gaattgagtattcctaaaattggaa

SEQ ID NO: 3273717 - DNA, 25 bp, Homo sapien
gagtcactcaatcgttcaacaatgg

SEQ ID NO: 3273718 - DNA, 25 bp, Homo sapien
gagcgttataacacccaggagagga

SEQ ID NO: 3273719 - DNA, 25 bp, Homo sapien
aatcgtttcgacacaatgagcctga

SEQ ID NO: 3273720 - DNA, 25 bp, Homo sapien
tatgcgtggctttgttctagacccc

SEQ ID NO: 3273721 - DNA, 25 bp, Homo sapien
catgagctgcaaatctctggttaac

SEQ ID NO: 3273722 - DNA, 25 bp, Homo sapien
tgctaaccatcctgaaagcagtagg

SEQ ID NO: 3273723 - DNA, 25 bp, Homo sapien
aatttgaggtgatccttggtcatcc

SEQ ID NO: 3273724 - DNA, 25 bp, Homo sapien
tggtcatccataacattgcaggctt

SEQ ID NO: 3273725 - DNA, 25 bp, Homo sapien
gaaattcactaacatgggtgctcaa

SEQ ID NO: 3273726 - DNA, 25 bp, Homo sapien
tattgacaagaattccaaacagttg

SEQ ID NO: 3273727 - DNA, 25 bp, Homo sapien
tgcatgacaagctgatcatggttcc

SEQ ID NO: 3273728 - DNA, 25 bp, Homo sapien
tatacccaaggtatttgctctcaac

SEQ ID NO: 3273729 - DNA, 25 bp, Homo sapien
ctttatctaagcagtaagaatatgc

SEQ ID NO: 3273730 - DNA, 25 bp, Homo sapien
ggaaagccaagtcgacagctgcttt

SEQ ID NO: 3273731 - DNA, 25 bp, Homo sapien
gccaagtcgacagctgctttatcta

SEQ ID NO: 3273732 - DNA, 25 bp, Homo sapien
tatgcagatgggaccctcttctgtt

SEQ ID NO: 3273733 - DNA, 25 bp, Homo sapien
tacatggtgatggagcagcttatca

SEQ ID NO: 3273734 - DNA, 25 bp, Homo sapien
gccccttgacacctcaatgctttgt

SEQ ID NO: 3273735 - DNA, 25 bp, Homo sapien
ccccaagtgtcaggtgaaattacta

SEQ ID NO: 3273736 - DNA, 25 bp, Homo sapien
ttgaaatctgtatgtgccccttgac

SEQ ID NO: 3273737 - DNA, 25 bp, Homo sapien
cagatgttccttaaccacaattttt

SEQ ID NO: 3273738 - DNA, 25 bp, Homo sapien
taaatgtttcacaatcctcaaggga

SEQ ID NO: 3273739 - DNA, 25 bp, Homo sapien
cagtgatggtacagacaaattgctc

SEQ ID NO: 3273740 - DNA, 25 bp, Homo sapien
tgtttctactccaagtccaggtttg

SEQ ID NO: 3273741 - DNA, 25 bp, Homo sapien
caacggtgcttacttaaacaatggc

SEQ ID NO: 3273742 - DNA, 25 bp, Homo sapien
gcagcagttttacccctttgttata

SEQ ID NO: 3273743 - DNA, 25 bp, Homo sapien
ttgttatatgccctatttctcacca

SEQ ID NO: 3273744 - DNA, 25 bp, Homo sapien
gattggatggcagcagttttacccc

SEQ ID NO: 3273745 - DNA, 25 bp, Homo sapien
agcttcggggaccattgcttctgga

SEQ ID NO: 3273746 - DNA, 25 bp, Homo sapien
cacactctggcaacggaatgccctt

SEQ ID NO: 3273747 - DNA, 25 bp, Homo sapien
caacggaatgcccttcaaaaaccat

SEQ ID NO: 3273748 - DNA, 25 bp, Homo sapien
tggcaacggaatgcccttcaaaaac

SEQ ID NO: 3273749 - DNA, 25 bp, Homo sapien
ctcccacactctggcaacggaatgc

SEQ ID NO: 3273750 - DNA, 25 bp, Homo sapien
tttcaatgtcctcctgttgcagaag

SEQ ID NO: 3273751 - DNA, 25 bp, Homo sapien
cttatgtggatgggttccatcttat

SEQ ID NO: 3273752 - DNA, 25 bp, Homo sapien
gttgcagaagcttccggttagtcct

SEQ ID NO: 3273753 - DNA, 25 bp, Homo sapien
gtcctgggactaaagggcaattgac

SEQ ID NO: 3273754 - DNA, 25 bp, Homo sapien
cccagtgcatggtttacacaggtat

SEQ ID NO: 3273755 - DNA, 25 bp, Homo sapien
gcctggccctcatcattctatttct

SEQ ID NO: 3273756 - DNA, 25 bp, Homo sapien
ttatgtgacatatcacacaacccag

SEQ ID NO: 3273757 - DNA, 25 bp, Homo sapien
tattctcgagattcagagatgcaga

SEQ ID NO: 3273758 - DNA, 25 bp, Homo sapien
cagatagccaataagatagccatca

SEQ ID NO: 3273759 - DNA, 25 bp, Homo sapien
gcaaacattgcatctcaagtgccta

SEQ ID NO: 3273760 - DNA, 25 bp, Homo sapien
gagaaaatgggattatgaagtccag

SEQ ID NO: 3273761 - DNA, 25 bp, Homo sapien
tttatatagaggactcgagcatcca

SEQ ID NO: 3273762 - DNA, 25 bp, Homo sapien
tgagtagactgcaggtgtgcttcac

SEQ ID NO: 3273763 - DNA, 25 bp, Homo sapien
ctgcaggtgtgcttcactacacttg

SEQ ID NO: 3273764 - DNA, 25 bp, Homo sapien
tagactgcaggtgtgcttcactaca

SEQ ID NO: 3273765 - DNA, 25 bp, Homo sapien
agtagactgcaggtgtgcttcacta

SEQ ID NO: 3273766 - DNA, 25 bp, Homo sapien
tactgatgcctgacttagagcaatg

SEQ ID NO: 3273767 - DNA, 25 bp, Homo sapien
gactgctgcatgtagtgagactaaa

SEQ ID NO: 3273768 - DNA, 25 bp, Homo sapien
tgtaaaaaccattagctagagggcc

SEQ ID NO: 3273769 - DNA, 25 bp, Homo sapien
caccaggtttgacgaaggcaactac

SEQ ID NO: 3273770 - DNA, 25 bp, Homo sapien
ctggcctcaactggtaacgcccgcc

SEQ ID NO: 3273771 - DNA, 25 bp, Homo sapien
tgaatactccatatgtaccacaaaa

SEQ ID NO: 3273772 - DNA, 25 bp, Homo sapien
tcaactggtaacgcccgcctcagcc

SEQ ID NO: 3273773 - DNA, 25 bp, Homo sapien
tgtaccacaaaattccaaacctgga

SEQ ID NO: 3273774 - DNA, 25 bp, Homo sapien
gaagcaccgcgtccagccctatttt

SEQ ID NO: 3273775 - DNA, 25 bp, Homo sapien
ggcgtgaagcaccgcgtccagccct

SEQ ID NO: 3273776 - DNA, 25 bp, Homo sapien
gtgaagcaccgcgtccagccctatt

SEQ ID NO: 3273777 - DNA, 25 bp, Homo sapien
aagcaccgcgtccagccctattttt

SEQ ID NO: 3273778 - DNA, 25 bp, Homo sapien
cccgatgcagattaaaaaaggtgac

SEQ ID NO: 3273779 - DNA, 25 bp, Homo sapien
aaacctgtttgccattcccgatgca

SEQ ID NO: 3273780 - DNA, 25 bp, Homo sapien
tagggacttccgtactggacatcac

SEQ ID NO: 3273781 - DNA, 25 bp, Homo sapien
cagaattctccatgcaaggcgaggc

SEQ ID NO: 3273782 - DNA, 25 bp, Homo sapien
gactacaagtgggagccaccatgcc

SEQ ID NO: 3273783 - DNA, 25 bp, Homo sapien
gggattacagacgtgagtcaccacg

SEQ ID NO: 3273784 - DNA, 25 bp, Homo sapien
gattacagacgtgagtcaccacgcc

SEQ ID NO: 3273785 - DNA, 25 bp, Homo sapien
ctgggattacagacgtgagtcacca

SEQ ID NO: 3273786 - DNA, 25 bp, Homo sapien
gcctggcccatacgtcaatgtctta

SEQ ID NO: 3273787 - DNA, 25 bp, Homo sapien
caatgtcttaaccacttcttattgg

SEQ ID NO: 3273788 - DNA, 25 bp, Homo sapien
gagtctaattaaaggtcagatgaga

SEQ ID NO: 3273789 - DNA, 25 bp, Homo sapien
ccccttcaactaacgtacagatatg

SEQ ID NO: 3273790 - DNA, 25 bp, Homo sapien
gtaagccatggcgcccaggcttttt

SEQ ID NO: 3273791 - DNA, 25 bp, Homo sapien
tgtaagccatggcgcccaggctttt

SEQ ID NO: 3273792 - DNA, 25 bp, Homo sapien
gcttacaaacatacagggcactctg

SEQ ID NO: 3273793 - DNA, 25 bp, Homo sapien
gagtcactctgggacatagcatgga

SEQ ID NO: 3273794 - DNA, 25 bp, Homo sapien
cagtaatgctacaggaagaacccac

SEQ ID NO: 3273795 - DNA, 25 bp, Homo sapien
aaatgtggcttagggaatcatgccc

SEQ ID NO: 3273796 - DNA, 25 bp, Homo sapien
gattgctgatctctgctgggtgacc

SEQ ID NO: 3273797 - DNA, 25 bp, Homo sapien
ctttccaaggcctccgttacctgag

SEQ ID NO: 3273798 - DNA, 25 bp, Homo sapien
ctcctcagtgagccaaggattgctg

SEQ ID NO: 3273799 - DNA, 25 bp, Homo sapien
ctgacgcagagtctctttccaaggc

SEQ ID NO: 3273800 - DNA, 25 bp, Homo sapien
gacttgcttcggtgagtccaacctg

SEQ ID NO: 3273801 - DNA, 25 bp, Homo sapien
tcaaagggaccagagtagagatcag

SEQ ID NO: 3273802 - DNA, 25 bp, Homo sapien
tgttctaggatatacagtgcccctc

SEQ ID NO: 3273803 - DNA, 25 bp, Homo sapien
ggaacagaccacagtactagagagt

SEQ ID NO: 3273804 - DNA, 25 bp, Homo sapien
agtcatcatggcgttcagctgcagc

SEQ ID NO: 3273805 - DNA, 25 bp, Homo sapien
catcatggcgttcagctgcagccac

SEQ ID NO: 3273806 - DNA, 25 bp, Homo sapien
tcatcatggcgttcagctgcagcca

SEQ ID NO: 3273807 - DNA, 25 bp, Homo sapien
tcagtcatcatggcgttcagctgca

SEQ ID NO: 3273808 - DNA, 25 bp, Homo sapien
cacttcccttagagggaggattcct

SEQ ID NO: 3273809 - DNA, 25 bp, Homo sapien
ttaaataatacgagtacataggtgc

SEQ ID NO: 3273810 - DNA, 25 bp, Homo sapien
taatacgagtacataggtgcaataa

SEQ ID NO: 3273811 - DNA, 25 bp, Homo sapien
cctcagtctgtaagtaaggataata

SEQ ID NO: 3273812 - DNA, 25 bp, Homo sapien
tttaaaagagttctccaatcaccaa

SEQ ID NO: 3273813 - DNA, 25 bp, Homo sapien
aaagagttctccaatcaccaactgt

SEQ ID NO: 3273814 - DNA, 25 bp, Homo sapien
taaaagagttctccaatcaccaact

SEQ ID NO: 3273815 - DNA, 25 bp, Homo sapien
caatcaccaactgtatactctttct

SEQ ID NO: 3273816 - DNA, 25 bp, Homo sapien
attctttccaagatgtacatctcac

SEQ ID NO: 3273817 - DNA, 25 bp, Homo sapien
tcattgaattctttccaagatgtac

SEQ ID NO: 3273818 - DNA, 25 bp, Homo sapien
gaattctttccaagatgtacatctc

SEQ ID NO: 3273819 - DNA, 25 bp, Homo sapien
ttgaattctttccaagatgtacatc

SEQ ID NO: 3273820 - DNA, 25 bp, Homo sapien
ctgtaagaggcactacaactctgaa

SEQ ID NO: 3273821 - DNA, 25 bp, Homo sapien
gatcaaaacttttgcctccttgaac

SEQ ID NO: 3273822 - DNA, 25 bp, Homo sapien
ctgtgaaggcaatttggaccagcga

SEQ ID NO: 3273823 - DNA, 25 bp, Homo sapien
tggaccagcgatgacaccaggtgag

SEQ ID NO: 3273824 - DNA, 25 bp, Homo sapien
tcatggccactttcgggaaaatggc

SEQ ID NO: 3273825 - DNA, 25 bp, Homo sapien
ccagcctggtcgacagagtcaaact

SEQ ID NO: 3273826 - DNA, 25 bp, Homo sapien
cagcctggtcgacagagtcaaactc

SEQ ID NO: 3273827 - DNA, 25 bp, Homo sapien
cctggtcgacagagtcaaactctgt

SEQ ID NO: 3273828 - DNA, 25 bp, Homo sapien
agcctggtcgacagagtcaaactct

SEQ ID NO: 3273829 - DNA, 25 bp, Homo sapien
gtaacatactaacatcacaatgaga

SEQ ID NO: 3273830 - DNA, 25 bp, Homo sapien
cctgtcacccacaatcatatttatg

SEQ ID NO: 3273831 - DNA, 25 bp, Homo sapien
gcccctgtgatcaacttacataaca

SEQ ID NO: 3273832 - DNA, 25 bp, Homo sapien
tctaactactacctagcccctgtga

SEQ ID NO: 3273833 - DNA, 25 bp, Homo sapien
agaggatttataaattcgaattggt

SEQ ID NO: 3273834 - DNA, 25 bp, Homo sapien
cgcttccggcctacttttagaggat

SEQ ID NO: 3273835 - DNA, 25 bp, Homo sapien
caccgcttccggcctacttttagag

SEQ ID NO: 3273836 - DNA, 25 bp, Homo sapien
tataaattcgaattggtctaagttc

SEQ ID NO: 3273837 - DNA, 25 bp, Homo sapien
ccagatcaggaacctcaggcacgtg

SEQ ID NO: 3273838 - DNA, 25 bp, Homo sapien
acagcacggtgatggtttaaaggcc

SEQ ID NO: 3273839 - DNA, 25 bp, Homo sapien
tgctgaagagaaagcccgatgacca

SEQ ID NO: 3273840 - DNA, 25 bp, Homo sapien
tatcattcagttaggctcagctctc

SEQ ID NO: 3273841 - DNA, 25 bp, Homo sapien
cccatggcgggaacaggtttgttca

SEQ ID NO: 3273842 - DNA, 25 bp, Homo sapien
aaactcatgagccataggagggagc

SEQ ID NO: 3273843 - DNA, 25 bp, Homo sapien
caaagagacagggagcctagcaagg

SEQ ID NO: 3273844 - DNA, 25 bp, Homo sapien
ccagaggtcatgagctgaaaaactc

SEQ ID NO: 3273845 - DNA, 25 bp, Homo sapien
tttggatgctagatttcaacagaaa

SEQ ID NO: 3273846 - DNA, 25 bp, Homo sapien
atacttggtatgtattgcataaaat

SEQ ID NO: 3273847 - DNA, 25 bp, Homo sapien
ccaacatatccaaaacattgtcctt

SEQ ID NO: 3273848 - DNA, 25 bp, Homo sapien
ctcattttggatgctagatttcaac

SEQ ID NO: 3273849 - DNA, 25 bp, Homo sapien
tgtacttacaagcttcccaataaag

SEQ ID NO: 3273850 - DNA, 25 bp, Homo sapien
catgttgcctcaaatgtacttacaa

SEQ ID NO: 3273851 - DNA, 25 bp, Homo sapien
cctacatgttgcctcaaatgtactt

SEQ ID NO: 3273852 - DNA, 25 bp, Homo sapien
aaatgtacttacaagcttcccaata

SEQ ID NO: 3273853 - DNA, 25 bp, Homo sapien
tacttttgatagaatcctgagccca

SEQ ID NO: 3273854 - DNA, 25 bp, Homo sapien
gaacactaatcataagtacctggag

SEQ ID NO: 3273855 - DNA, 25 bp, Homo sapien
gacaggcggcggctttcatttcttc

SEQ ID NO: 3273856 - DNA, 25 bp, Homo sapien
gaacatgaggagcacataagacact

SEQ ID NO: 3273857 - DNA, 25 bp, Homo sapien
agggcggaacaacccaatatccatc

SEQ ID NO: 3273858 - DNA, 25 bp, Homo sapien
gaaatgaagtgctggacatgccata

SEQ ID NO: 3273859 - DNA, 25 bp, Homo sapien
aacatggatggactgtgagcatatc

SEQ ID NO: 3273860 - DNA, 25 bp, Homo sapien
gacattgtgaataagagatcagctt

SEQ ID NO: 3273861 - DNA, 25 bp, Homo sapien
tgagacaaagtccttgccatctggt

SEQ ID NO: 3273862 - DNA, 25 bp, Homo sapien
tccaaatggtaactaactacctgct

SEQ ID NO: 3273863 - DNA, 25 bp, Homo sapien
taaggctcattcaagccaggcgctg

SEQ ID NO: 3273864 - DNA, 25 bp, Homo sapien
aggttccggaatccctctccaaatg

SEQ ID NO: 3273865 - DNA, 25 bp, Homo sapien
cccattcagtgcatatgataagaaa

SEQ ID NO: 3273866 - DNA, 25 bp, Homo sapien
tttgaactcctcaacaaattgtgat

SEQ ID NO: 3273867 - DNA, 25 bp, Homo sapien
agaaagaactatgaacattagctct

SEQ ID NO: 3273868 - DNA, 25 bp, Homo sapien
tattaggcataatttgtctgtgtat

SEQ ID NO: 3273869 - DNA, 25 bp, Homo sapien
gcacttccgtttcatgccaggtcaa

SEQ ID NO: 3273870 - DNA, 25 bp, Homo sapien
aaaatacctaattgagctctgcagc

SEQ ID NO: 3273871 - DNA, 25 bp, Homo sapien
caaggcaaatgaacgcagagaggga

SEQ ID NO: 3273872 - DNA, 25 bp, Homo sapien
tgtccaaaggagagaacgaagccag

SEQ ID NO: 3273873 - DNA, 25 bp, Homo sapien
tatccatagcgtctgggaacgggtt

SEQ ID NO: 3273874 - DNA, 25 bp, Homo sapien
gaaatggccttcagaaaagcagaga

SEQ ID NO: 3273875 - DNA, 25 bp, Homo sapien
gaacccactgtggtcttcgtgcagg

SEQ ID NO: 3273876 - DNA, 25 bp, Homo sapien
gaagcaaggcacaatcaggaggctc

SEQ ID NO: 3273877 - DNA, 25 bp, Homo sapien
tctttgaagccactacttggagcag

SEQ ID NO: 3273878 - DNA, 25 bp, Homo sapien
tataacctgtagcttggaatcacgg

SEQ ID NO: 3273879 - DNA, 25 bp, Homo sapien
tacagacgctcacagaatagacggg

SEQ ID NO: 3273880 - DNA, 25 bp, Homo sapien
caacaacttgaggtggcaactgagc

SEQ ID NO: 3273881 - DNA, 25 bp, Homo sapien
tatctagaggttgtgtgttacgccg

SEQ ID NO: 3273882 - DNA, 25 bp, Homo sapien
caccttttagaatcggcacctgcaa

SEQ ID NO: 3273883 - DNA, 25 bp, Homo sapien
cctgagaaattcgtatgaccttgcc

SEQ ID NO: 3273884 - DNA, 25 bp, Homo sapien
gacagtacccaagagtggctgaact

SEQ ID NO: 3273885 - DNA, 25 bp, Homo sapien
gcttctgggcggtccaatcatgtat

SEQ ID NO: 3273886 - DNA, 25 bp, Homo sapien
taatctgagtctaaagtcacctgtg

SEQ ID NO: 3273887 - DNA, 25 bp, Homo sapien
tacaggaaacacgatgggactgact

SEQ ID NO: 3273888 - DNA, 25 bp, Homo sapien
tatatgattatctgccttcccagag

SEQ ID NO: 3273889 - DNA, 25 bp, Homo sapien
tttaggcttaactcccaggctctgg

SEQ ID NO: 3273890 - DNA, 25 bp, Homo sapien
gcttaaccttggagacttgcagaga

SEQ ID NO: 3273891 - DNA, 25 bp, Homo sapien
tccagtgggtcagaattgcttaacc

SEQ ID NO: 3273892 - DNA, 25 bp, Homo sapien
gacccgaaggcagcgaagttctctc

SEQ ID NO: 3273893 - DNA, 25 bp, Homo sapien
acaccggcaacttcccgtaaatctg

SEQ ID NO: 3273894 - DNA, 25 bp, Homo sapien
gccccaaaagtcacatgcctttcag

SEQ ID NO: 3273895 - DNA, 25 bp, Homo sapien
gggacttgaccagacggacttctct

SEQ ID NO: 3273896 - DNA, 25 bp, Homo sapien
catctgtccgagtcagacgctcggc

SEQ ID NO: 3273897 - DNA, 25 bp, Homo sapien
tgctgaaggttcaaagaaaatcggc

SEQ ID NO: 3273898 - DNA, 25 bp, Homo sapien
tttagtgcgctctgacctagagtta

SEQ ID NO: 3273899 - DNA, 25 bp, Homo sapien
ctctgacctagagttacggagggtt

SEQ ID NO: 3273900 - DNA, 25 bp, Homo sapien
gcgctgctcgttcagaagtggctca

SEQ ID NO: 3273901 - DNA, 25 bp, Homo sapien
gcaggcaggagcgtcacgcggacgg

SEQ ID NO: 3273902 - DNA, 25 bp, Homo sapien
gagcctcccgcatttcagtggagcg

SEQ ID NO: 3273903 - DNA, 25 bp, Homo sapien
tatacaagagttaaggagcctcccg

SEQ ID NO: 3273904 - DNA, 25 bp, Homo sapien
ctgtttatacaagagttaaggagcc

SEQ ID NO: 3273905 - DNA, 25 bp, Homo sapien
taagcctgtttgtaggcgcggaatg

SEQ ID NO: 3273906 - DNA, 25 bp, Homo sapien
tcagaaagaggagcttaggccactc

SEQ ID NO: 3273907 - DNA, 25 bp, Homo sapien
gaggcaaccgctgtctgaactagtc

SEQ ID NO: 3273908 - DNA, 25 bp, Homo sapien
caggactgcggcaaaatgtcttcca

SEQ ID NO: 3273909 - DNA, 25 bp, Homo sapien
tgattcggcaaagttccaccaaggc

SEQ ID NO: 3273910 - DNA, 25 bp, Homo sapien
agccacagtgcctgtcctggatttt

SEQ ID NO: 3273911 - DNA, 25 bp, Homo sapien
gagccacagtgcctgtcctggattt

SEQ ID NO: 3273912 - DNA, 25 bp, Homo sapien
gccacagtgcctgtcctggattttc

SEQ ID NO: 3273913 - DNA, 25 bp, Homo sapien
taaccgttgggtatgtacgtgcgcg

SEQ ID NO: 3273914 - DNA, 25 bp, Homo sapien
ttttagagatacgaagcaggtagac

SEQ ID NO: 3273915 - DNA, 25 bp, Homo sapien
gacaatttggatgcagtcccaccta

SEQ ID NO: 3273916 - DNA, 25 bp, Homo sapien
tactgcatgcatacggataaaggac

SEQ ID NO: 3273917 - DNA, 25 bp, Homo sapien
ttggcaaaaccaattaagtagatag

SEQ ID NO: 3273918 - DNA, 25 bp, Homo sapien
tctattggcaaaaccaattaagtag

SEQ ID NO: 3273919 - DNA, 25 bp, Homo sapien
agtagatagtaaaaccagagtgcat

SEQ ID NO: 3273920 - DNA, 25 bp, Homo sapien
tctctctattggcaaaaccaattaa

SEQ ID NO: 3273921 - DNA, 25 bp, Homo sapien
caatccaggatcctatgcggaggga

SEQ ID NO: 3273922 - DNA, 25 bp, Homo sapien
tggacactaagaaaatctccgtggc

SEQ ID NO: 3273923 - DNA, 25 bp, Homo sapien
aagggagcccagatattgccaacag

SEQ ID NO: 3273924 - DNA, 25 bp, Homo sapien
tcttgtcagcaggatttcaatccag

SEQ ID NO: 3273925 - DNA, 25 bp, Homo sapien
tgtttgacagcaagttgacaaggct

SEQ ID NO: 3273926 - DNA, 25 bp, Homo sapien
tgtgccttgctttggcgtctctgaa

SEQ ID NO: 3273927 - DNA, 25 bp, Homo sapien
ctcaggatgatcactgtgggttttc

SEQ ID NO: 3273928 - DNA, 25 bp, Homo sapien
gaaacccctttcaatgatgctaact

SEQ ID NO: 3273929 - DNA, 25 bp, Homo sapien
cgcttcctgggttcaagggattctc

SEQ ID NO: 3273930 - DNA, 25 bp, Homo sapien
gtacagtgggacaagctcagctcac

SEQ ID NO: 3273931 - DNA, 25 bp, Homo sapien
gattacaggcacacaccaccacgcc

SEQ ID NO: 3273932 - DNA, 25 bp, Homo sapien
ctgcctcagtctcctgagtaactgg

SEQ ID NO: 3273933 - DNA, 25 bp, Homo sapien
ttgccatgaagacccggtccgggag

SEQ ID NO: 3273934 - DNA, 25 bp, Homo sapien
ccggtgaggtccaggaactgtgcaa

SEQ ID NO: 3273935 - DNA, 25 bp, Homo sapien
aagagcgactctcccggcaacaggt

SEQ ID NO: 3273936 - DNA, 25 bp, Homo sapien
tgccccgaatcctgccggtgggagt

SEQ ID NO: 3273937 - DNA, 25 bp, Homo sapien
tcgccccgcagtcccggggctccca

SEQ ID NO: 3273938 - DNA, 25 bp, Homo sapien
ttcgcgggcagcagccgtcgccccg

SEQ ID NO: 3273939 - DNA, 25 bp, Homo sapien
ggccttcgcgggcagcagccgtcgc

SEQ ID NO: 3273940 - DNA, 25 bp, Homo sapien
cgggcagcagccgtcgccccgcagt

SEQ ID NO: 3273941 - DNA, 25 bp, Homo sapien
ctgtgaccgacgccgccctccgcgt

SEQ ID NO: 3273942 - DNA, 25 bp, Homo sapien
accgacgccgccctccgcgtcttcg

SEQ ID NO: 3273943 - DNA, 25 bp, Homo sapien
cgacgccgccctccgcgtcttcgtc

SEQ ID NO: 3273944 - DNA, 25 bp, Homo sapien
tgaccgacgccgccctccgcgtctt

SEQ ID NO: 3273945 - DNA, 25 bp, Homo sapien
gtttctctaggataaggccctccac

SEQ ID NO: 3273946 - DNA, 25 bp, Homo sapien
taagtcctgataacctaaattaggc

SEQ ID NO: 3273947 - DNA, 25 bp, Homo sapien
gcagcataatgttgtgaagtgcacg

SEQ ID NO: 3273948 - DNA, 25 bp, Homo sapien
ataggcacgctttgcaactttcaag

SEQ ID NO: 3273949 - DNA, 25 bp, Homo sapien
tcaatacaggctcatggtacacagt

SEQ ID NO: 3273950 - DNA, 25 bp, Homo sapien
caaatctcgaagtcttgctgtccat

SEQ ID NO: 3273951 - DNA, 25 bp, Homo sapien
tcttacaggacaaatctcgaagtct

SEQ ID NO: 3273952 - DNA, 25 bp, Homo sapien
attaaatatggatgatgatgtctta

SEQ ID NO: 3273953 - DNA, 25 bp, Homo sapien
aaattatagcgtgtggctcatcctc

SEQ ID NO: 3273954 - DNA, 25 bp, Homo sapien
tagggtagtccatgcctcaaggaag

SEQ ID NO: 3273955 - DNA, 25 bp, Homo sapien
tcctaaatgctcaattcaggtggca

SEQ ID NO: 3273956 - DNA, 25 bp, Homo sapien
tatcagtaaaacgtgtcagtgggct

SEQ ID NO: 3273957 - DNA, 25 bp, Homo sapien
tcgagttggtgactaaataggcttc

SEQ ID NO: 3273958 - DNA, 25 bp, Homo sapien
tactgactagagagaaaccactgtg

SEQ ID NO: 3273959 - DNA, 25 bp, Homo sapien
gaccgcttacaaaagactcgagttg

SEQ ID NO: 3273960 - DNA, 25 bp, Homo sapien
aatatcacaatcctagcaagaccgc

SEQ ID NO: 3273961 - DNA, 25 bp, Homo sapien
ttaagcctggccaactagagagcga

SEQ ID NO: 3273962 - DNA, 25 bp, Homo sapien
cgggccatacaaacagaggaaagct

SEQ ID NO: 3273963 - DNA, 25 bp, Homo sapien
ggtatctttgccctgaagctgaagt

SEQ ID NO: 3273964 - DNA, 25 bp, Homo sapien
tgcctgggacatgaacgggccatac

SEQ ID NO: 3273965 - DNA, 25 bp, Homo sapien
tggactagcaaaaatcacacggtgg

SEQ ID NO: 3273966 - DNA, 25 bp, Homo sapien
cctgacggatatggaggcagcacaa

SEQ ID NO: 3273967 - DNA, 25 bp, Homo sapien
gaacgtttacctctagcacatggac

SEQ ID NO: 3273968 - DNA, 25 bp, Homo sapien
taggcatgttggctagtcgttcccc

SEQ ID NO: 3273969 - DNA, 25 bp, Homo sapien
taaaggttgcttgtgacaggtccag

SEQ ID NO: 3273970 - DNA, 25 bp, Homo sapien
tagccgagtccttttgcatgtgcag

SEQ ID NO: 3273971 - DNA, 25 bp, Homo sapien
caatcttcaggtaaatagccgagtc

SEQ ID NO: 3273972 - DNA, 25 bp, Homo sapien
tatcacatgatggtggcaagacgag

SEQ ID NO: 3273973 - DNA, 25 bp, Homo sapien
ggcatttcggtgacagggcgtttct

SEQ ID NO: 3273974 - DNA, 25 bp, Homo sapien
gaactttctgagaaggcggcctggc

SEQ ID NO: 3273975 - DNA, 25 bp, Homo sapien
tgtcaatgagggataagacccctcg

SEQ ID NO: 3273976 - DNA, 25 bp, Homo sapien
ggcctggctaccaagcacttctgat

SEQ ID NO: 3273977 - DNA, 25 bp, Homo sapien
aaaacgtggcactcaaagcgctggt

SEQ ID NO: 3273978 - DNA, 25 bp, Homo sapien
tcagacacgttaccagcattaggct

SEQ ID NO: 3273979 - DNA, 25 bp, Homo sapien
ttaggctcgcaccagaaaacgtggc

SEQ ID NO: 3273980 - DNA, 25 bp, Homo sapien
gcaaatgtgtggacgtccttcccaa

SEQ ID NO: 3273981 - DNA, 25 bp, Homo sapien
gatcccaggatcaagcttaagagtg

SEQ ID NO: 3273982 - DNA, 25 bp, Homo sapien
tatagccaggccgaattcagaaagg

SEQ ID NO: 3273983 - DNA, 25 bp, Homo sapien
tctagcccaaatacaggacacctgg

SEQ ID NO: 3273984 - DNA, 25 bp, Homo sapien
tatgcggcatccaatcaggagatcc

SEQ ID NO: 3273985 - DNA, 25 bp, Homo sapien
ctccttgttggatgaggtcataaga

SEQ ID NO: 3273986 - DNA, 25 bp, Homo sapien
ggtcataagattttctatggcactg

SEQ ID NO: 3273987 - DNA, 25 bp, Homo sapien
cagtcacagtggcatcagccacgtt

SEQ ID NO: 3273988 - DNA, 25 bp, Homo sapien
agtcacagtggcatcagccacgttc

SEQ ID NO: 3273989 - DNA, 25 bp, Homo sapien
tgtctacaggtaacatgcccaagta

SEQ ID NO: 3273990 - DNA, 25 bp, Homo sapien
cgactggtttgtctacaggtaacat

SEQ ID NO: 3273991 - DNA, 25 bp, Homo sapien
ccagctcagtctttggtgttggaaa

SEQ ID NO: 3273992 - DNA, 25 bp, Homo sapien
tgcccaagtactgcacgtggaactt

SEQ ID NO: 3273993 - DNA, 25 bp, Homo sapien
aggagcacaaggaggtcgatctgta

SEQ ID NO: 3273994 - DNA, 25 bp, Homo sapien
gaggagcacaaggaggtcgatctgt

SEQ ID NO: 3273995 - DNA, 25 bp, Homo sapien
ggagcacaaggaggtcgatctgtaa

SEQ ID NO: 3273996 - DNA, 25 bp, Homo sapien
tgagttgagtgtgctctttaaggag

SEQ ID NO: 3273997 - DNA, 25 bp, Homo sapien
ccagagaaccatctgagagccttca

SEQ ID NO: 3273998 - DNA, 25 bp, Homo sapien
gagttgagtgtgctctttaaggaga

SEQ ID NO: 3273999 - DNA, 25 bp, Homo sapien
agttgagtgtgctctttaaggagac

SEQ ID NO: 3274000 - DNA, 25 bp, Homo sapien
tgcaaagggacatcgaggttcacat

SEQ ID NO: 3274001 - DNA, 25 bp, Homo sapien
tgcaggccagcgctttggcattctt

SEQ ID NO: 3274002 - DNA, 25 bp, Homo sapien
cctttcctgtaaggagctgcaggcc

SEQ ID NO: 3274003 - DNA, 25 bp, Homo sapien
tcgaggttcacattggccctttcct

SEQ ID NO: 3274004 - DNA, 25 bp, Homo sapien
tatctcttgctacataagcaaaatc

SEQ ID NO: 3274005 - DNA, 25 bp, Homo sapien
agcagatctcgtggagacttgtggc

SEQ ID NO: 3274006 - DNA, 25 bp, Homo sapien
gacttgtggcaatggcttttgctgg

SEQ ID NO: 3274007 - DNA, 25 bp, Homo sapien
ggtgtgtcacatcgaaatacatgac

SEQ ID NO: 3274008 - DNA, 25 bp, Homo sapien
ctggcagccttttcatagactatga

SEQ ID NO: 3274009 - DNA, 25 bp, Homo sapien
ggcagccttttcatagactatgatg

SEQ ID NO: 3274010 - DNA, 25 bp, Homo sapien
tcatagactatgatggatactttcc

SEQ ID NO: 3274011 - DNA, 25 bp, Homo sapien
tatgatggatactttccccaagaaa

SEQ ID NO: 3274012 - DNA, 25 bp, Homo sapien
ttcgtcctgtttcacctcctggaaa

SEQ ID NO: 3274013 - DNA, 25 bp, Homo sapien
tgcttcctcacgttctagctcagtg

SEQ ID NO: 3274014 - DNA, 25 bp, Homo sapien
agtgtcctccatgctagaaccggac

SEQ ID NO: 3274015 - DNA, 25 bp, Homo sapien
acattcgtcctgtttcacctcctgg

SEQ ID NO: 3274016 - DNA, 25 bp, Homo sapien
accacgcagccattctaagctgctc

SEQ ID NO: 3274017 - DNA, 25 bp, Homo sapien
tgtgctcaggccatctccatcccct

SEQ ID NO: 3274018 - DNA, 25 bp, Homo sapien
agccattctaagctgctcttcgcct

SEQ ID NO: 3274019 - DNA, 25 bp, Homo sapien
ccctcaccacgcagccattctaagc

SEQ ID NO: 3274020 - DNA, 25 bp, Homo sapien
gagccttcaggttgggagcccttga

SEQ ID NO: 3274021 - DNA, 25 bp, Homo sapien
gcccttgagggctatccttccgtta

SEQ ID NO: 3274022 - DNA, 25 bp, Homo sapien
gctctgttgctgcatgggacacggg

SEQ ID NO: 3274023 - DNA, 25 bp, Homo sapien
gcagggcccgtagccagctctgttg

SEQ ID NO: 3274024 - DNA, 25 bp, Homo sapien
tatgatgaagccaagagatgccagc

SEQ ID NO: 3274025 - DNA, 25 bp, Homo sapien
agagatcagagacgtcccaggaaag

SEQ ID NO: 3274026 - DNA, 25 bp, Homo sapien
gagctttgccagacacgttaagaca

SEQ ID NO: 3274027 - DNA, 25 bp, Homo sapien
ggttacctctctctgaatccgggaa

SEQ ID NO: 3274028 - DNA, 25 bp, Homo sapien
gatttgcatgcaccgtacacagagc

SEQ ID NO: 3274029 - DNA, 25 bp, Homo sapien
gcatggagcactggatagataacga

SEQ ID NO: 3274030 - DNA, 25 bp, Homo sapien
tctctcgggcactctatggccaggg

SEQ ID NO: 3274031 - DNA, 25 bp, Homo sapien
caactagaccgaagagcatggagca

SEQ ID NO: 3274032 - DNA, 25 bp, Homo sapien
cagccaccaattaccctttattgag

SEQ ID NO: 3274033 - DNA, 25 bp, Homo sapien
cagtattactgttctgacagatgag

SEQ ID NO: 3274034 - DNA, 25 bp, Homo sapien
tggcccctaacagtaactggacaag

SEQ ID NO: 3274035 - DNA, 25 bp, Homo sapien
ttacagtaacaccagccaccaatta

SEQ ID NO: 3274036 - DNA, 25 bp, Homo sapien
catgaagttaaatgggacgacacgt

SEQ ID NO: 3274037 - DNA, 25 bp, Homo sapien
tcggttccacctatcaaagccaggc

SEQ ID NO: 3274038 - DNA, 25 bp, Homo sapien
gctggaccccagctgatacaggatg

SEQ ID NO: 3274039 - DNA, 25 bp, Homo sapien
agatggactgtctcccacggaagga

SEQ ID NO: 3274040 - DNA, 25 bp, Homo sapien
gacttgccagtagacttctcactcc

SEQ ID NO: 3274041 - DNA, 25 bp, Homo sapien
tttgcagaagtctctgttgcatgct

SEQ ID NO: 3274042 - DNA, 25 bp, Homo sapien
tacttctcatgctgcgcacaactgt

SEQ ID NO: 3274043 - DNA, 25 bp, Homo sapien
ttcacaaactgagcacgcgaggcaa

SEQ ID NO: 3274044 - DNA, 25 bp, Homo sapien
cctgcctgggcttgctgatcggctg

SEQ ID NO: 3274045 - DNA, 25 bp, Homo sapien
ttgctgatcggctgcttggtctgct

SEQ ID NO: 3274046 - DNA, 25 bp, Homo sapien
tccagccacactgggaccgttttgc

SEQ ID NO: 3274047 - DNA, 25 bp, Homo sapien
gaccgttttgctccgaaacatacaa

SEQ ID NO: 3274048 - DNA, 25 bp, Homo sapien
cccagtcattgtcaacattcacagc

SEQ ID NO: 3274049 - DNA, 25 bp, Homo sapien
gaggatcccccagtcattgtcaaca

SEQ ID NO: 3274050 - DNA, 25 bp, Homo sapien
ctgaggatcccccagtcattgtcaa

SEQ ID NO: 3274051 - DNA, 25 bp, Homo sapien
agtcattgtcaacattcacagccat

SEQ ID NO: 3274052 - DNA, 25 bp, Homo sapien
gaatgaagagtattggaccacggcc

SEQ ID NO: 3274053 - DNA, 25 bp, Homo sapien
gaggctcaagtgtagaaatacccca

SEQ ID NO: 3274054 - DNA, 25 bp, Homo sapien
ttttcaacacaacacaaagctggcc

SEQ ID NO: 3274055 - DNA, 25 bp, Homo sapien
atatttaatatgtggccagtgcccg

SEQ ID NO: 3274056 - DNA, 25 bp, Homo sapien
ttgtctcaccttggtgtcatccaca

SEQ ID NO: 3274057 - DNA, 25 bp, Homo sapien
tcttcttgtctcaccttggtgtcat

SEQ ID NO: 3274058 - DNA, 25 bp, Homo sapien
agtatcttcttgtctcaccttggtg

SEQ ID NO: 3274059 - DNA, 25 bp, Homo sapien
cagtatcttcttgtctcaccttggt

SEQ ID NO: 3274060 - DNA, 25 bp, Homo sapien
cgtgcagaccccatcaatgaatagc

SEQ ID NO: 3274061 - DNA, 25 bp, Homo sapien
aatgaatagcccaccccgaacagtc

SEQ ID NO: 3274062 - DNA, 25 bp, Homo sapien
aatcatagaacgctgtccacggcag

SEQ ID NO: 3274063 - DNA, 25 bp, Homo sapien
ggcacgtgaggcgaaggcagtcact

SEQ ID NO: 3274064 - DNA, 25 bp, Homo sapien
agcgagcttgggctcgacccccgtt

SEQ ID NO: 3274065 - DNA, 25 bp, Homo sapien
gcgcagcctttgtcccgcaggtctc

SEQ ID NO: 3274066 - DNA, 25 bp, Homo sapien
gcaactcgctaagcgctgactcggg

SEQ ID NO: 3274067 - DNA, 25 bp, Homo sapien
tcgctgtccccgcgagcgagcttgg

SEQ ID NO: 3274068 - DNA, 25 bp, Homo sapien
acaaaggagagccgttccttcgcca

SEQ ID NO: 3274069 - DNA, 25 bp, Homo sapien
aaggagagccgttccttcgccaact

SEQ ID NO: 3274070 - DNA, 25 bp, Homo sapien
ggagagccgttccttcgccaacttc

SEQ ID NO: 3274071 - DNA, 25 bp, Homo sapien
gagccgttccttcgccaacttcctc

SEQ ID NO: 3274072 - DNA, 25 bp, Homo sapien
ggtgctacgacaagccccagggtgc

SEQ ID NO: 3274073 - DNA, 25 bp, Homo sapien
gccgccccaggtgctacgacaagcc

SEQ ID NO: 3274074 - DNA, 25 bp, Homo sapien
cagcggtgccgtcgctcaagcagcc

SEQ ID NO: 3274075 - DNA, 25 bp, Homo sapien
tccttccgaagtcgggcggggatgc

SEQ ID NO: 3274076 - DNA, 25 bp, Homo sapien
caccccttcaaaggctgcctctcct

SEQ ID NO: 3274077 - DNA, 25 bp, Homo sapien
accccttcaaaggctgcctctcctt

SEQ ID NO: 3274078 - DNA, 25 bp, Homo sapien
cattccagtgagtttggttgtctga

SEQ ID NO: 3274079 - DNA, 25 bp, Homo sapien
tccagtgagtttggttgtctgattc

SEQ ID NO: 3274080 - DNA, 25 bp, Homo sapien
cagtgagtttggttgtctgattctc

SEQ ID NO: 3274081 - DNA, 25 bp, Homo sapien
tgagtttggttgtctgattctctgt

SEQ ID NO: 3274082 - DNA, 25 bp, Homo sapien
gtgttttaacagtctccttgcctcc

SEQ ID NO: 3274083 - DNA, 25 bp, Homo sapien
ctccactcatctctaacaagctgtt

SEQ ID NO: 3274084 - DNA, 25 bp, Homo sapien
ggcctgcagtagtgttttaacagtc

SEQ ID NO: 3274085 - DNA, 25 bp, Homo sapien
gcacccggcctgcagtagtgtttta

SEQ ID NO: 3274086 - DNA, 25 bp, Homo sapien
cattcgggacaaagtggcatgcatc

SEQ ID NO: 3274087 - DNA, 25 bp, Homo sapien
caaggttatcaacagagcaggcggg

SEQ ID NO: 3274088 - DNA, 25 bp, Homo sapien
tctgagggtcatatcacaacaaggt

SEQ ID NO: 3274089 - DNA, 25 bp, Homo sapien
tgtcagaagcattcaccatgggtac

SEQ ID NO: 3274090 - DNA, 25 bp, Homo sapien
tgtcacttgggaacttagtagaaat

SEQ ID NO: 3274091 - DNA, 25 bp, Homo sapien
gttaggtctacaggtataccgtgcc

SEQ ID NO: 3274092 - DNA, 25 bp, Homo sapien
gtatggtccacagacagaattagtg

SEQ ID NO: 3274093 - DNA, 25 bp, Homo sapien
taaaccatgtgatctaattgctagc

SEQ ID NO: 3274094 - DNA, 25 bp, Homo sapien
gaaatgtgtcaggattagccagaag

SEQ ID NO: 3274095 - DNA, 25 bp, Homo sapien
ggaacacaatgatccagtaaccaat

SEQ ID NO: 3274096 - DNA, 25 bp, Homo sapien
ggaactaaattacttacctcaagca

SEQ ID NO: 3274097 - DNA, 25 bp, Homo sapien
ctggcaactcagtctactttgatgg

SEQ ID NO: 3274098 - DNA, 25 bp, Homo sapien
atgcacatgaaaagccaatcaccat

SEQ ID NO: 3274099 - DNA, 25 bp, Homo sapien
tgccaactttgtaacaaggtttgtg

SEQ ID NO: 3274100 - DNA, 25 bp, Homo sapien
acatgaaaagccaatcaccatgctt

SEQ ID NO: 3274101 - DNA, 25 bp, Homo sapien
caccatgcttacgaactactaaaag

SEQ ID NO: 3274102 - DNA, 25 bp, Homo sapien
cttatacatgtgttacctcgatttg

SEQ ID NO: 3274103 - DNA, 25 bp, Homo sapien
tgtgttacctcgatttgtccccaca

SEQ ID NO: 3274104 - DNA, 25 bp, Homo sapien
tatttcttatacatgtgttacctcg

SEQ ID NO: 3274105 - DNA, 25 bp, Homo sapien
tacatgtgttacctcgatttgtccc

SEQ ID NO: 3274106 - DNA, 25 bp, Homo sapien
cagcttctcttacgtcaatgaagaa

SEQ ID NO: 3274107 - DNA, 25 bp, Homo sapien
ttctcttacgtcaatgaagaagaca

SEQ ID NO: 3274108 - DNA, 25 bp, Homo sapien
ctcttacgtcaatgaagaagacaaa

SEQ ID NO: 3274109 - DNA, 25 bp, Homo sapien
tctacagcttctcttacgtcaatga

SEQ ID NO: 3274110 - DNA, 25 bp, Homo sapien
gggtgagacctgacatgtcacatcg

SEQ ID NO: 3274111 - DNA, 25 bp, Homo sapien
tcacatcgtggggtttggctccatc

SEQ ID NO: 3274112 - DNA, 25 bp, Homo sapien
gagacctgacatgtcacatcgtggg

SEQ ID NO: 3274113 - DNA, 25 bp, Homo sapien
tgagacctgacatgtcacatcgtgg

SEQ ID NO: 3274114 - DNA, 25 bp, Homo sapien
cctctagctgctgttatgatctgtg

SEQ ID NO: 3274115 - DNA, 25 bp, Homo sapien
tcaaggccatcaccgaaatgaacag

SEQ ID NO: 3274116 - DNA, 25 bp, Homo sapien
tgctagtgattagggctcagactct

SEQ ID NO: 3274117 - DNA, 25 bp, Homo sapien
agcccagctctagggaaatgtattt

SEQ ID NO: 3274118 - DNA, 25 bp, Homo sapien
tgcctgtttgccatgtcagcatcca

SEQ ID NO: 3274119 - DNA, 25 bp, Homo sapien
tagattcatgaacagggacaggacc

SEQ ID NO: 3274120 - DNA, 25 bp, Homo sapien
tgaggcaagacagcacataccatag

SEQ ID NO: 3274121 - DNA, 25 bp, Homo sapien
tgtaagtcagcaaaacggtcaagta

SEQ ID NO: 3274122 - DNA, 25 bp, Homo sapien
ggaccgccatgaacgatctgtctga

SEQ ID NO: 3274123 - DNA, 25 bp, Homo sapien
tgctttcagggacccccgaatgctg

SEQ ID NO: 3274124 - DNA, 25 bp, Homo sapien
caaggctaagccgtgctttcaggga

SEQ ID NO: 3274125 - DNA, 25 bp, Homo sapien
ctacggaacagtagcaaggctaagc

SEQ ID NO: 3274126 - DNA, 25 bp, Homo sapien
ccccgaatgctgctagtagaagaca

SEQ ID NO: 3274127 - DNA, 25 bp, Homo sapien
ctccatcaaccacgaggcaagaggg

SEQ ID NO: 3274128 - DNA, 25 bp, Homo sapien
aagaataaggaggaaggtgctcgcc

SEQ ID NO: 3274129 - DNA, 25 bp, Homo sapien
cattggcgaagtacacaaggatctc

SEQ ID NO: 3274130 - DNA, 25 bp, Homo sapien
tgtgcccctacccagaagataagcc

SEQ ID NO: 3274131 - DNA, 25 bp, Homo sapien
ctggcaggcccacagagacaagatg

SEQ ID NO: 3274132 - DNA, 25 bp, Homo sapien
ggagcattcggtcattggcctcagt

SEQ ID NO: 3274133 - DNA, 25 bp, Homo sapien
ctttgagacagtagcctggcaggcc

SEQ ID NO: 3274134 - DNA, 25 bp, Homo sapien
cctcagtcgccaagggcagaaatgc

SEQ ID NO: 3274135 - DNA, 25 bp, Homo sapien
gcaaagcaggccaacctgggtgctc

SEQ ID NO: 3274136 - DNA, 25 bp, Homo sapien
caaagcaggccaacctgggtgctcc

SEQ ID NO: 3274137 - DNA, 25 bp, Homo sapien
ttatccaattggcagtgagaagaaa

SEQ ID NO: 3274138 - DNA, 25 bp, Homo sapien
tctcatgtctggttctagcataaat

SEQ ID NO: 3274139 - DNA, 25 bp, Homo sapien
catttctcatgtctggttctagcat

SEQ ID NO: 3274140 - DNA, 25 bp, Homo sapien
tttctcatgtctggttctagcataa

SEQ ID NO: 3274141 - DNA, 25 bp, Homo sapien
catgtctggttctagcataaatgct

SEQ ID NO: 3274142 - DNA, 25 bp, Homo sapien
tgaatacttggccataatccttcct

SEQ ID NO: 3274143 - DNA, 25 bp, Homo sapien
tctggtttaggtcttggaactgaat

SEQ ID NO: 3274144 - DNA, 25 bp, Homo sapien
ggaactgaatcaaatgcgctaatgc

SEQ ID NO: 3274145 - DNA, 25 bp, Homo sapien
aatgcccagcgttggttgacaaagg

SEQ ID NO: 3274146 - DNA, 25 bp, Homo sapien
aaatcggaactcgtttccaatcatc

SEQ ID NO: 3274147 - DNA, 25 bp, Homo sapien
gaaaatcggaactcgtttccaatca

SEQ ID NO: 3274148 - DNA, 25 bp, Homo sapien
tgaaaatcggaactcgtttccaatc

SEQ ID NO: 3274149 - DNA, 25 bp, Homo sapien
aaaatcggaactcgtttccaatcat

SEQ ID NO: 3274150 - DNA, 25 bp, Homo sapien
gcgagtgcagcacgctgcggtccat

SEQ ID NO: 3274151 - DNA, 25 bp, Homo sapien
cacgcggatgctgacgatgggctgc

SEQ ID NO: 3274152 - DNA, 25 bp, Homo sapien
gatgctgacgatgggctgcgagtgc

SEQ ID NO: 3274153 - DNA, 25 bp, Homo sapien
cattctccaggatcaggtacatgtc

SEQ ID NO: 3274154 - DNA, 25 bp, Homo sapien
tttccaaacccacaacgatatctgc

SEQ ID NO: 3274155 - DNA, 25 bp, Homo sapien
cctttccaaacccacaacgatatct

SEQ ID NO: 3274156 - DNA, 25 bp, Homo sapien
aaacccacaacgatatctgcttcct

SEQ ID NO: 3274157 - DNA, 25 bp, Homo sapien
tccaaacccacaacgatatctgctt

SEQ ID NO: 3274158 - DNA, 25 bp, Homo sapien
aatgtgagtggagtcccaatcagcc

SEQ ID NO: 3274159 - DNA, 25 bp, Homo sapien
ccattgggatgtgctgctaggagaa

SEQ ID NO: 3274160 - DNA, 25 bp, Homo sapien
cggagcccctcagtaccatgtgtca

SEQ ID NO: 3274161 - DNA, 25 bp, Homo sapien
gagaacgtaaacagcctgccgtgca

SEQ ID NO: 3274162 - DNA, 25 bp, Homo sapien
tcatttttgcagtaggaaagttgcc

SEQ ID NO: 3274163 - DNA, 25 bp, Homo sapien
taggaaagttgcctgatgcagttgt

SEQ ID NO: 3274164 - DNA, 25 bp, Homo sapien
tgttgaccgcaacactacttttacc

SEQ ID NO: 3274165 - DNA, 25 bp, Homo sapien
cccaaatcccgactgtgtctcggat

SEQ ID NO: 3274166 - DNA, 25 bp, Homo sapien
acccatcccagagaacgcacagcaa

SEQ ID NO: 3274167 - DNA, 25 bp, Homo sapien
tctacccatcccagagaacgcacag

SEQ ID NO: 3274168 - DNA, 25 bp, Homo sapien
ccatcccagagaacgcacagcaaaa

SEQ ID NO: 3274169 - DNA, 25 bp, Homo sapien
catcccagagaacgcacagcaaaac

SEQ ID NO: 3274170 - DNA, 25 bp, Homo sapien
gtcccagaggagaagtgtgaccacc

SEQ ID NO: 3274171 - DNA, 25 bp, Homo sapien
ctcttgagaagcttgtgacagagca

SEQ ID NO: 3274172 - DNA, 25 bp, Homo sapien
tctgagagtagataagttcgtgctc

SEQ ID NO: 3274173 - DNA, 25 bp, Homo sapien
cacatagcagcaatctatagcacgg

SEQ ID NO: 3274174 - DNA, 25 bp, Homo sapien
gcacggaccatgaatgaaggataca

SEQ ID NO: 3274175 - DNA, 25 bp, Homo sapien
tctgttggagaaagcgcacttgcag

SEQ ID NO: 3274176 - DNA, 25 bp, Homo sapien
gagccaggcgagttcccaggatata

SEQ ID NO: 3274177 - DNA, 25 bp, Homo sapien
acaaaggcagtctcactccagtggg

SEQ ID NO: 3274178 - DNA, 25 bp, Homo sapien
gacttgccacgaagcaaccttgaga

SEQ ID NO: 3274179 - DNA, 25 bp, Homo sapien
gtgagatgtcttttcccttaggcca

SEQ ID NO: 3274180 - DNA, 25 bp, Homo sapien
gagatgtcttttcccttaggccaca

SEQ ID NO: 3274181 - DNA, 25 bp, Homo sapien
gatgtcttttcccttaggccacatg

SEQ ID NO: 3274182 - DNA, 25 bp, Homo sapien
tgagatgtcttttcccttaggccac

SEQ ID NO: 3274183 - DNA, 25 bp, Homo sapien
gcccttgtgcaaactgtccactagg

SEQ ID NO: 3274184 - DNA, 25 bp, Homo sapien
cctgaggtagtgtgggtgcccttgt

SEQ ID NO: 3274185 - DNA, 25 bp, Homo sapien
ctgcaggaaccaaaagccctgaggt

SEQ ID NO: 3274186 - DNA, 25 bp, Homo sapien
gggtgcccttgtgcaaactgtccac

SEQ ID NO: 3274187 - DNA, 25 bp, Homo sapien
aggtgtagcactcttaggtccaggg

SEQ ID NO: 3274188 - DNA, 25 bp, Homo sapien
aaatgcccagggaaccgactaactg

SEQ ID NO: 3274189 - DNA, 25 bp, Homo sapien
taacagatcactggaggcaaggagg

SEQ ID NO: 3274190 - DNA, 25 bp, Homo sapien
actaactgcctgctagctgcgtcct

SEQ ID NO: 3274191 - DNA, 25 bp, Homo sapien
tgacaaacaacgatgcaggcagagg

SEQ ID NO: 3274192 - DNA, 25 bp, Homo sapien
tgagcaggttcaatcatcagcacgt

SEQ ID NO: 3274193 - DNA, 25 bp, Homo sapien
tttacggagagaaacgccaagtgtc

SEQ ID NO: 3274194 - DNA, 25 bp, Homo sapien
tctgctactaaagaaaggccggtgc

SEQ ID NO: 3274195 - DNA, 25 bp, Homo sapien
tgtaggccacagggccagttcttcc

SEQ ID NO: 3274196 - DNA, 25 bp, Homo sapien
gggccagttcttcctgtgggcttac

SEQ ID NO: 3274197 - DNA, 25 bp, Homo sapien
actgtaggccacagggccagttctt

SEQ ID NO: 3274198 - DNA, 25 bp, Homo sapien
cacagggccagttcttcctgtgggc

SEQ ID NO: 3274199 - DNA, 25 bp, Homo sapien
ggtcctgggacacctcaacagaggt

SEQ ID NO: 3274200 - DNA, 25 bp, Homo sapien
tctgcagtcctcataagtgggcctc

SEQ ID NO: 3274201 - DNA, 25 bp, Homo sapien
tatcaggagcgccatcataagctgc

SEQ ID NO: 3274202 - DNA, 25 bp, Homo sapien
ggaacctgcagactggagcccatat

SEQ ID NO: 3274203 - DNA, 25 bp, Homo sapien
cagaagtatgcagtgaacgggagac

SEQ ID NO: 3274204 - DNA, 25 bp, Homo sapien
gagggacccagaggatgttgcgagg

SEQ ID NO: 3274205 - DNA, 25 bp, Homo sapien
gaggcaatggattcccaaaattcca

SEQ ID NO: 3274206 - DNA, 25 bp, Homo sapien
gaagcaaccgcaggtgagatcctgt

SEQ ID NO: 3274207 - DNA, 25 bp, Homo sapien
ggaggacttcgtatcatgcagccta

SEQ ID NO: 3274208 - DNA, 25 bp, Homo sapien
tctagtgatttgaggccctgcagaa

SEQ ID NO: 3274209 - DNA, 25 bp, Homo sapien
tgcaggcttcctcaagtggccaggg

SEQ ID NO: 3274210 - DNA, 25 bp, Homo sapien
tgaactccaactgcagatggtagct

SEQ ID NO: 3274211 - DNA, 25 bp, Homo sapien
ggatggcagttcacactttagcaca

SEQ ID NO: 3274212 - DNA, 25 bp, Homo sapien
ggaaagggactagcttgaactagca

SEQ ID NO: 3274213 - DNA, 25 bp, Homo sapien
aatgtgacgtatcccagtgctggcc

SEQ ID NO: 3274214 - DNA, 25 bp, Homo sapien
tggccaagctcatctctacagacat

SEQ ID NO: 3274215 - DNA, 25 bp, Homo sapien
taaaaaatctacacaggcacgcaca

SEQ ID NO: 3274216 - DNA, 25 bp, Homo sapien
tgctttacgtaaatgtgctccagag

SEQ ID NO: 3274217 - DNA, 25 bp, Homo sapien
tccataagaggaggcgacaaacacc

SEQ ID NO: 3274218 - DNA, 25 bp, Homo sapien
cacggtcacctatctggaagttacg

SEQ ID NO: 3274219 - DNA, 25 bp, Homo sapien
cagcaatgaaaagcttggactctgg

SEQ ID NO: 3274220 - DNA, 25 bp, Homo sapien
agggacgggctgacctacactgaga

SEQ ID NO: 3274221 - DNA, 25 bp, Homo sapien
catttagcagtggaacagtgatcaa

SEQ ID NO: 3274222 - DNA, 25 bp, Homo sapien
cactgagaggaagggtagcccagca

SEQ ID NO: 3274223 - DNA, 25 bp, Homo sapien
tttctacaaatacgctctaggttgc

SEQ ID NO: 3274224 - DNA, 25 bp, Homo sapien
gtgacactggcccactgcattggtg

SEQ ID NO: 3274225 - DNA, 25 bp, Homo sapien
aagtactttctacaaatacgctcta

SEQ ID NO: 3274226 - DNA, 25 bp, Homo sapien
tacaaatacgctctaggttgcaatc

SEQ ID NO: 3274227 - DNA, 25 bp, Homo sapien
gctttgctagagacaagggtcgctt

SEQ ID NO: 3274228 - DNA, 25 bp, Homo sapien
catttacacgggtccattttccagc

SEQ ID NO: 3274229 - DNA, 25 bp, Homo sapien
tgagaaatcacatgctttcggctct

SEQ ID NO: 3274230 - DNA, 25 bp, Homo sapien
catctgagctcgtaactgaaaaaag

SEQ ID NO: 3274231 - DNA, 25 bp, Homo sapien
tagtgaactcatctaaccgaactgc

SEQ ID NO: 3274232 - DNA, 25 bp, Homo sapien
cgatcattagtctgagggtctccta

SEQ ID NO: 3274233 - DNA, 25 bp, Homo sapien
tacatacatgccgagtgaacagatg

SEQ ID NO: 3274234 - DNA, 25 bp, Homo sapien
ccatcatggatcgaaagggacacat

SEQ ID NO: 3274235 - DNA, 25 bp, Homo sapien
catagcacgcaggaacagataacag

SEQ ID NO: 3274236 - DNA, 25 bp, Homo sapien
gactctggaacccactaaatcctga

SEQ ID NO: 3274237 - DNA, 25 bp, Homo sapien
aaaaagtacaactgcctacccagag

SEQ ID NO: 3274238 - DNA, 25 bp, Homo sapien
gagaccacaccatgagaagaccaag

SEQ ID NO: 3274239 - DNA, 25 bp, Homo sapien
tggctgaaagcaagtctttacaaac

SEQ ID NO: 3274240 - DNA, 25 bp, Homo sapien
ctggtggctgaaagcaagtctttac

SEQ ID NO: 3274241 - DNA, 25 bp, Homo sapien
tggtggctgaaagcaagtctttaca

SEQ ID NO: 3274242 - DNA, 25 bp, Homo sapien
ggtggctgaaagcaagtctttacaa

SEQ ID NO: 3274243 - DNA, 25 bp, Homo sapien
ctgggtcactgttgatactacaaga

SEQ ID NO: 3274244 - DNA, 25 bp, Homo sapien
tctgggtcactgttgatactacaag

SEQ ID NO: 3274245 - DNA, 25 bp, Homo sapien
caaagatgcatagcgtagggttgct

SEQ ID NO: 3274246 - DNA, 25 bp, Homo sapien
cgtagggttgctccttcaaactctt

SEQ ID NO: 3274247 - DNA, 25 bp, Homo sapien
agtttcaaagatgcatagcgtaggg

SEQ ID NO: 3274248 - DNA, 25 bp, Homo sapien
catagcgtagggttgctccttcaaa

SEQ ID NO: 3274249 - DNA, 25 bp, Homo sapien
caacaggagtgtgagctgaatgccc

SEQ ID NO: 3274250 - DNA, 25 bp, Homo sapien
ggagaaacgtcttcccagcaagagg

SEQ ID NO: 3274251 - DNA, 25 bp, Homo sapien
cagagagtgtacgtgagcttaggca

SEQ ID NO: 3274252 - DNA, 25 bp, Homo sapien
gaacctagggcattcacaatgggag

SEQ ID NO: 3274253 - DNA, 25 bp, Homo sapien
tctttcccccattcagaacagcaaa

SEQ ID NO: 3274254 - DNA, 25 bp, Homo sapien
tccaaatgtcactattaatctttcc

SEQ ID NO: 3274255 - DNA, 25 bp, Homo sapien
ctattaatctttcccccattcagaa

SEQ ID NO: 3274256 - DNA, 25 bp, Homo sapien
cagaacagcaaaatcactccatggc

SEQ ID NO: 3274257 - DNA, 25 bp, Homo sapien
gaagcctggctttgttgcgagagct

SEQ ID NO: 3274258 - DNA, 25 bp, Homo sapien
gaaactagggaatgcccatggctga

SEQ ID NO: 3274259 - DNA, 25 bp, Homo sapien
gattatcacctgaagacgagggcag

SEQ ID NO: 3274260 - DNA, 25 bp, Homo sapien
gactgacatcaacacttggcggaaa

SEQ ID NO: 3274261 - DNA, 25 bp, Homo sapien
gagcaaagacacttcaaatttagac

SEQ ID NO: 3274262 - DNA, 25 bp, Homo sapien
gcaaagacacttcaaatttagaccc

SEQ ID NO: 3274263 - DNA, 25 bp, Homo sapien
aaagacacttcaaatttagacccat

SEQ ID NO: 3274264 - DNA, 25 bp, Homo sapien
ctgagagcaaagacacttcaaattt

SEQ ID NO: 3274265 - DNA, 25 bp, Homo sapien
cctgctgagaactgggtagagagga

SEQ ID NO: 3274266 - DNA, 25 bp, Homo sapien
agaagctaaaatcatatcatctctg

SEQ ID NO: 3274267 - DNA, 25 bp, Homo sapien
gaagttctgaagctaatacaatgca

SEQ ID NO: 3274268 - DNA, 25 bp, Homo sapien
gaatgtctgtccactacaaaactcg

SEQ ID NO: 3274269 - DNA, 25 bp, Homo sapien
cgagggtgccctgcaaatgagtttc

SEQ ID NO: 3274270 - DNA, 25 bp, Homo sapien
tacaaagggttacgaatcatgtctc

SEQ ID NO: 3274271 - DNA, 25 bp, Homo sapien
ggaattccaaggactacggcaggca

SEQ ID NO: 3274272 - DNA, 25 bp, Homo sapien
tgaataaagacacattgcctgctgg

SEQ ID NO: 3274273 - DNA, 25 bp, Homo sapien
aatacggcctgcacattcaacaggc

SEQ ID NO: 3274274 - DNA, 25 bp, Homo sapien
agattccttccagcactcaatgtca

SEQ ID NO: 3274275 - DNA, 25 bp, Homo sapien
tggctgagaaatacggcctgcacat

SEQ ID NO: 3274276 - DNA, 25 bp, Homo sapien
gattccttccagcactcaatgtcat

SEQ ID NO: 3274277 - DNA, 25 bp, Homo sapien
catagcctcccttagggtgagttaa

SEQ ID NO: 3274278 - DNA, 25 bp, Homo sapien
gagttaaagggattcaagagtctcc

SEQ ID NO: 3274279 - DNA, 25 bp, Homo sapien
tagcacctgagacaatgatattaag

SEQ ID NO: 3274280 - DNA, 25 bp, Homo sapien
tctagaaggctccatatgtgacata

SEQ ID NO: 3274281 - DNA, 25 bp, Homo sapien
tgcagcacctgaccacataagggtt

SEQ ID NO: 3274282 - DNA, 25 bp, Homo sapien
cacatcagcgtatgtggcaggctaa

SEQ ID NO: 3274283 - DNA, 25 bp, Homo sapien
tctgagagtgctggatatgagtccc

SEQ ID NO: 3274284 - DNA, 25 bp, Homo sapien
gaacaactgaaaggtcagcctgaag

SEQ ID NO: 3274285 - DNA, 25 bp, Homo sapien
aagacctctgacctaggatctggga

SEQ ID NO: 3274286 - DNA, 25 bp, Homo sapien
tggctatagggcactctctggctgg

SEQ ID NO: 3274287 - DNA, 25 bp, Homo sapien
aatctccccaatctgggacagtgag

SEQ ID NO: 3274288 - DNA, 25 bp, Homo sapien
gattcttgccaactgagatgccaag

SEQ ID NO: 3274289 - DNA, 25 bp, Homo sapien
gagcccaaggctaataagatacgca

SEQ ID NO: 3274290 - DNA, 25 bp, Homo sapien
taattataatacgtctggccaagag

SEQ ID NO: 3274291 - DNA, 25 bp, Homo sapien
aagcttaccttgatgacctgttggg

SEQ ID NO: 3274292 - DNA, 25 bp, Homo sapien
aaagtactgcctcagtgagccctag

SEQ ID NO: 3274293 - DNA, 25 bp, Homo sapien
agacgggccgttcccactgagtcgt

SEQ ID NO: 3274294 - DNA, 25 bp, Homo sapien
cagaactaagtgaccctttcctaga

SEQ ID NO: 3274295 - DNA, 25 bp, Homo sapien
aataggtcccggcaatgtcactgac

SEQ ID NO: 3274296 - DNA, 25 bp, Homo sapien
tttcctagaaccctggagatctgct

SEQ ID NO: 3274297 - DNA, 25 bp, Homo sapien
ctctggaactagacactgaaaagat

SEQ ID NO: 3274298 - DNA, 25 bp, Homo sapien
tctggaactagacactgaaaagata

SEQ ID NO: 3274299 - DNA, 25 bp, Homo sapien
gcagaaatccaagggtcaaatgaaa

SEQ ID NO: 3274300 - DNA, 25 bp, Homo sapien
gaaatccaagggtcaaatgaaaata

SEQ ID NO: 3274301 - DNA, 25 bp, Homo sapien
tgcagaaatccaagggtcaaatgaa

SEQ ID NO: 3274302 - DNA, 25 bp, Homo sapien
tccaagggtcaaatgaaaatagatt

SEQ ID NO: 3274303 - DNA, 25 bp, Homo sapien
cactgactatggtaagaaagggaca

SEQ ID NO: 3274304 - DNA, 25 bp, Homo sapien
tggaagacaatcaacagcccagagc

SEQ ID NO: 3274305 - DNA, 25 bp, Homo sapien
tttgggagcgcccagaatcctgacc

SEQ ID NO: 3274306 - DNA, 25 bp, Homo sapien
tgtcagaatatagcaagcagggctc

SEQ ID NO: 3274307 - DNA, 25 bp, Homo sapien
catgcctctttcattagcacgtggc

SEQ ID NO: 3274308 - DNA, 25 bp, Homo sapien
gaattgaatctagccccgatgcctg

SEQ ID NO: 3274309 - DNA, 25 bp, Homo sapien
ggaacaggagctctgtagccacacc

SEQ ID NO: 3274310 - DNA, 25 bp, Homo sapien
tacctcacagggtggatgtggaaca

SEQ ID NO: 3274311 - DNA, 25 bp, Homo sapien
tttctgttattttggcaggatcttc

SEQ ID NO: 3274312 - DNA, 25 bp, Homo sapien
cactctttcaaggtaggcaggtttg

SEQ ID NO: 3274313 - DNA, 25 bp, Homo sapien
gcagtcctctggctagtatacaaca

SEQ ID NO: 3274314 - DNA, 25 bp, Homo sapien
agagctgcagtcctctggctagtat

SEQ ID NO: 3274315 - DNA, 25 bp, Homo sapien
tttagttggaaacatggccacccga

SEQ ID NO: 3274316 - DNA, 25 bp, Homo sapien
cagccagtctttcctacagccatat

SEQ ID NO: 3274317 - DNA, 25 bp, Homo sapien
gaaacatggccacccgatataaacg

SEQ ID NO: 3274318 - DNA, 25 bp, Homo sapien
ggccacccgatataaacgctacatt

SEQ ID NO: 3274319 - DNA, 25 bp, Homo sapien
atactgacaataatcgcctattttg

SEQ ID NO: 3274320 - DNA, 25 bp, Homo sapien
gacaataatcgcctattttggcaaa

SEQ ID NO: 3274321 - DNA, 25 bp, Homo sapien
gcaaacatcagtgggaccaagtgca

SEQ ID NO: 3274322 - DNA, 25 bp, Homo sapien
tttggcaaacatcagtgggaccaag

SEQ ID NO: 3274323 - DNA, 25 bp, Homo sapien
tacatgtgtgctcaaacagaccaac

SEQ ID NO: 3274324 - DNA, 25 bp, Homo sapien
tgtcagacttataggtaccagaggt

SEQ ID NO: 3274325 - DNA, 25 bp, Homo sapien
tctgggcggacacaattcaacttat

SEQ ID NO: 3274326 - DNA, 25 bp, Homo sapien
cactactttgggctggattctaaca

SEQ ID NO: 3274327 - DNA, 25 bp, Homo sapien
gtctccccagctgtgcactggcata

SEQ ID NO: 3274328 - DNA, 25 bp, Homo sapien
actgcacctggtctcaataaacttt

SEQ ID NO: 3274329 - DNA, 25 bp, Homo sapien
ctgcacctggtctcaataaactttt

SEQ ID NO: 3274330 - DNA, 25 bp, Homo sapien
tccccagctgtgcactggcataatc

SEQ ID NO: 3274331 - DNA, 25 bp, Homo sapien
tgctgtcacctcaaagagccttagt

SEQ ID NO: 3274332 - DNA, 25 bp, Homo sapien
ccaaggctcaggagggtgtgacata

SEQ ID NO: 3274333 - DNA, 25 bp, Homo sapien
ggtccgaggctaggaatgactacag

SEQ ID NO: 3274334 - DNA, 25 bp, Homo sapien
tatttagcccacagcatacttgaca

SEQ ID NO: 3274335 - DNA, 25 bp, Homo sapien
catctgcacaatgagttcgggtaac

SEQ ID NO: 3274336 - DNA, 25 bp, Homo sapien
tgatgcacatgctctgaacagttcc

SEQ ID NO: 3274337 - DNA, 25 bp, Homo sapien
tagaaaaggccctaatactggagcc

SEQ ID NO: 3274338 - DNA, 25 bp, Homo sapien
taagatggccctaagattcctgcat

SEQ ID NO: 3274339 - DNA, 25 bp, Homo sapien
tcaccatgcaatccactcccaactc

SEQ ID NO: 3274340 - DNA, 25 bp, Homo sapien
ggttgtcaccatgcaatccactccc

SEQ ID NO: 3274341 - DNA, 25 bp, Homo sapien
gtcaccatgcaatccactcccaact

SEQ ID NO: 3274342 - DNA, 25 bp, Homo sapien
ttgtcaccatgcaatccactcccaa

SEQ ID NO: 3274343 - DNA, 25 bp, Homo sapien
acaaactgataacctaactccctct

SEQ ID NO: 3274344 - DNA, 25 bp, Homo sapien
cacagtattaacagtctcgtatagg

SEQ ID NO: 3274345 - DNA, 25 bp, Homo sapien
aagctcagagagaatcgttttcccc

SEQ ID NO: 3274346 - DNA, 25 bp, Homo sapien
taggaggcagctatcccatgttgca

SEQ ID NO: 3274347 - DNA, 25 bp, Homo sapien
ttaaaaactgtgtcatcatcctact

SEQ ID NO: 3274348 - DNA, 25 bp, Homo sapien
ccaagcagagcaaagactctaggtt

SEQ ID NO: 3274349 - DNA, 25 bp, Homo sapien
cagctcatgaaggtgtaaattgggt

SEQ ID NO: 3274350 - DNA, 25 bp, Homo sapien
agcagagcaaagactctaggttaca

SEQ ID NO: 3274351 - DNA, 25 bp, Homo sapien
acaccccttacgataacctattctg

SEQ ID NO: 3274352 - DNA, 25 bp, Homo sapien
tgtgctaggccagagtaagtgatcc

SEQ ID NO: 3274353 - DNA, 25 bp, Homo sapien
tgttctaactatagcaatttcctcc

SEQ ID NO: 3274354 - DNA, 25 bp, Homo sapien
caaaacactttagatgaaattgtgc

SEQ ID NO: 3274355 - DNA, 25 bp, Homo sapien
tcctacgtagctgacgccagcatgt

SEQ ID NO: 3274356 - DNA, 25 bp, Homo sapien
ttttaatgcctggttttagagcctc

SEQ ID NO: 3274357 - DNA, 25 bp, Homo sapien
tgccccgccatggatctgcttttaa

SEQ ID NO: 3274358 - DNA, 25 bp, Homo sapien
cctcttagctagattgttggccaca

SEQ ID NO: 3274359 - DNA, 25 bp, Homo sapien
ttgtgagtgctcaagcatgcttgtc

SEQ ID NO: 3274360 - DNA, 25 bp, Homo sapien
catcagtttgtgagtgctcaagcat

SEQ ID NO: 3274361 - DNA, 25 bp, Homo sapien
ggccccttcactttactgtagagaa

SEQ ID NO: 3274362 - DNA, 25 bp, Homo sapien
tgtctttctacaagtggccccttca

SEQ ID NO: 3274363 - DNA, 25 bp, Homo sapien
ttaaggcagttctctaataacaccc

SEQ ID NO: 3274364 - DNA, 25 bp, Homo sapien
ggacatacacgagtcccagacaggg

SEQ ID NO: 3274365 - DNA, 25 bp, Homo sapien
cagggtgcagaaatttggtgtccag

SEQ ID NO: 3274366 - DNA, 25 bp, Homo sapien
tgtccaggtgacaaagtctgaatct

SEQ ID NO: 3274367 - DNA, 25 bp, Homo sapien
taccaagggctatatgtgacaatct

SEQ ID NO: 3274368 - DNA, 25 bp, Homo sapien
taaggcagtaattctagtgacagct

SEQ ID NO: 3274369 - DNA, 25 bp, Homo sapien
gagattaaggaacctggagctcaca

SEQ ID NO: 3274370 - DNA, 25 bp, Homo sapien
tggcctagatcctgggaaactttcc

SEQ ID NO: 3274371 - DNA, 25 bp, Homo sapien
caaggatgctgctactatggcatca

SEQ ID NO: 3274372 - DNA, 25 bp, Homo sapien
taccagaaggcaagggactgagact

SEQ ID NO: 3274373 - DNA, 25 bp, Homo sapien
ctaggatgactatgattaaaagaag

SEQ ID NO: 3274374 - DNA, 25 bp, Homo sapien
tcacactttgattctaccagaaggc

SEQ ID NO: 3274375 - DNA, 25 bp, Homo sapien
taaccattgttagactctggctgcc

SEQ ID NO: 3274376 - DNA, 25 bp, Homo sapien
gagagcatcacctggcacttctgag

SEQ ID NO: 3274377 - DNA, 25 bp, Homo sapien
tctgggcaaatagctcatgatgaaa

SEQ ID NO: 3274378 - DNA, 25 bp, Homo sapien
tccgtcccctgaagtacctcgtatg

SEQ ID NO: 3274379 - DNA, 25 bp, Homo sapien
cagaaagtcgtaactcagagtccaa

SEQ ID NO: 3274380 - DNA, 25 bp, Homo sapien
tagatgagaggctatgagaactgcc

SEQ ID NO: 3274381 - DNA, 25 bp, Homo sapien
tttgaactcaggaagctcactctag

SEQ ID NO: 3274382 - DNA, 25 bp, Homo sapien
taatggatcatgaggcgcattgcca

SEQ ID NO: 3274383 - DNA, 25 bp, Homo sapien
gaaccggctataccaggaagagcag

SEQ ID NO: 3274384 - DNA, 25 bp, Homo sapien
acttaactacaacagaaccggctat

SEQ ID NO: 3274385 - DNA, 25 bp, Homo sapien
gtcagtaaacgccaaacacaggaag

SEQ ID NO: 3274386 - DNA, 25 bp, Homo sapien
cagcagaaagggtgccatgaccaga

SEQ ID NO: 3274387 - DNA, 25 bp, Homo sapien
gaaagactggtctcaattagactag

SEQ ID NO: 3274388 - DNA, 25 bp, Homo sapien
taaagtagctgacttttaggatcct

SEQ ID NO: 3274389 - DNA, 25 bp, Homo sapien
gagtgcttgtttacgctgaattcag

SEQ ID NO: 3274390 - DNA, 25 bp, Homo sapien
aatgcctttaatgaacagatggcta

SEQ ID NO: 3274391 - DNA, 25 bp, Homo sapien
tttctgggctggatgacactgtggc

SEQ ID NO: 3274392 - DNA, 25 bp, Homo sapien
acgtctgtagttccgctgctggcca

SEQ ID NO: 3274393 - DNA, 25 bp, Homo sapien
tacttggccgtcttcagggctggac

SEQ ID NO: 3274394 - DNA, 25 bp, Homo sapien
tgcagtgcacagtcggttttggccc

SEQ ID NO: 3274395 - DNA, 25 bp, Homo sapien
tgccaaggtgtcaacacctgagtca

SEQ ID NO: 3274396 - DNA, 25 bp, Homo sapien
ctgccaaggtgtcaacacctgagtc

SEQ ID NO: 3274397 - DNA, 25 bp, Homo sapien
gccaaggtgtcaacacctgagtcag

SEQ ID NO: 3274398 - DNA, 25 bp, Homo sapien
gaagtacttctgacatggatcacca

SEQ ID NO: 3274399 - DNA, 25 bp, Homo sapien
ctggaagtacttctgacatggatca

SEQ ID NO: 3274400 - DNA, 25 bp, Homo sapien
caatggtgcaggaaataggttataa

SEQ ID NO: 3274401 - DNA, 25 bp, Homo sapien
ggatcaccaggcgtcagcaatggtg

SEQ ID NO: 3274402 - DNA, 25 bp, Homo sapien
tacgtcttctattcgtaaatgaaaa

SEQ ID NO: 3274403 - DNA, 25 bp, Homo sapien
atacgtcttctattcgtaaatgaaa

SEQ ID NO: 3274404 - DNA, 25 bp, Homo sapien
cgtcttctattcgtaaatgaaaact

SEQ ID NO: 3274405 - DNA, 25 bp, Homo sapien
tccctggaaaatcaagcctgaaaac

SEQ ID NO: 3274406 - DNA, 25 bp, Homo sapien
ctttccctggaaaatcaagcctgaa

SEQ ID NO: 3274407 - DNA, 25 bp, Homo sapien
ctggaaaatcaagcctgaaaaccat

SEQ ID NO: 3274408 - DNA, 25 bp, Homo sapien
ttccctggaaaatcaagcctgaaaa

SEQ ID NO: 3274409 - DNA, 25 bp, Homo sapien
tctcgtagacaagatcaagcactga

SEQ ID NO: 3274410 - DNA, 25 bp, Homo sapien
tgtcatatcagtgtctgtcaaaccc

SEQ ID NO: 3274411 - DNA, 25 bp, Homo sapien
cctgggatgccgtgtcatatcagtg

SEQ ID NO: 3274412 - DNA, 25 bp, Homo sapien
actgatcccacataagatactgcca

SEQ ID NO: 3274413 - DNA, 25 bp, Homo sapien
tcatgccttggactgagggatcaac

SEQ ID NO: 3274414 - DNA, 25 bp, Homo sapien
caatgtgttatgcagatgtgtgccc

SEQ ID NO: 3274415 - DNA, 25 bp, Homo sapien
gaaaccatgagagggtacgaaccac

SEQ ID NO: 3274416 - DNA, 25 bp, Homo sapien
gaaccacactctagttccagggaag

SEQ ID NO: 3274417 - DNA, 25 bp, Homo sapien
gaggcctcggcagttcccaagtcct

SEQ ID NO: 3274418 - DNA, 25 bp, Homo sapien
tagcgacagtcaacacattggcaga

SEQ ID NO: 3274419 - DNA, 25 bp, Homo sapien
cagaggcctcggcagttcccaagtc

SEQ ID NO: 3274420 - DNA, 25 bp, Homo sapien
ctggacaacagtgagcccatagcga

SEQ ID NO: 3274421 - DNA, 25 bp, Homo sapien
catagtcgcatgcaagatgaagtct

SEQ ID NO: 3274422 - DNA, 25 bp, Homo sapien
tgatgattagcatgcaggccctgca

SEQ ID NO: 3274423 - DNA, 25 bp, Homo sapien
ctgtattggagaggttagatgtcat

SEQ ID NO: 3274424 - DNA, 25 bp, Homo sapien
ggcaatctcacctgcgtttccctga

SEQ ID NO: 3274425 - DNA, 25 bp, Homo sapien
gagttactactaaagcacagggtgc

SEQ ID NO: 3274426 - DNA, 25 bp, Homo sapien
gaagttggctttgtgtgtatcctgc

SEQ ID NO: 3274427 - DNA, 25 bp, Homo sapien
caggtctgaagtcaagagctgtggc

SEQ ID NO: 3274428 - DNA, 25 bp, Homo sapien
gctgaagttctcacaacaaggaaag

SEQ ID NO: 3274429 - DNA, 25 bp, Homo sapien
cagaacattcttctcggctaaaaaa

SEQ ID NO: 3274430 - DNA, 25 bp, Homo sapien
tatagcaagaacaactactcctgaa

SEQ ID NO: 3274431 - DNA, 25 bp, Homo sapien
tttcaccaccccagataagattctt

SEQ ID NO: 3274432 - DNA, 25 bp, Homo sapien
tgatttagcagtttacaaggcacct

SEQ ID NO: 3274433 - DNA, 25 bp, Homo sapien
tccacagctgtccaagtgagttaca

SEQ ID NO: 3274434 - DNA, 25 bp, Homo sapien
cacacaacaggacagtgattctgca

SEQ ID NO: 3274435 - DNA, 25 bp, Homo sapien
tcttgacgtatctaatggccactaa

SEQ ID NO: 3274436 - DNA, 25 bp, Homo sapien
gcctcggcctgtaaatgctacttca

SEQ ID NO: 3274437 - DNA, 25 bp, Homo sapien
tcaaagaattatgttgtactccttg

SEQ ID NO: 3274438 - DNA, 25 bp, Homo sapien
tatcaaagaattatgttgtactcct

SEQ ID NO: 3274439 - DNA, 25 bp, Homo sapien
atcaaagaattatgttgtactcctt

SEQ ID NO: 3274440 - DNA, 25 bp, Homo sapien
atatcaaagaattatgttgtactcc

SEQ ID NO: 3274441 - DNA, 25 bp, Homo sapien
gactttttgacagctgtggctattg

SEQ ID NO: 3274442 - DNA, 25 bp, Homo sapien
ctgcgctgtgagaggtggatttccc

SEQ ID NO: 3274443 - DNA, 25 bp, Homo sapien
gggagcttctgtactgatactagac

SEQ ID NO: 3274444 - DNA, 25 bp, Homo sapien
cctgccctagcaaaggaacttccta

SEQ ID NO: 3274445 - DNA, 25 bp, Homo sapien
tcacataatgggtggaggcaaacct

SEQ ID NO: 3274446 - DNA, 25 bp, Homo sapien
gggattaccagcttacagcagactg

SEQ ID NO: 3274447 - DNA, 25 bp, Homo sapien
gacatgcatcaagggctgtaaggca

SEQ ID NO: 3274448 - DNA, 25 bp, Homo sapien
tatggtccagatcaaaatgcagcca

SEQ ID NO: 3274449 - DNA, 25 bp, Homo sapien
aagcacccaaggaggtcaggcagcc

SEQ ID NO: 3274450 - DNA, 25 bp, Homo sapien
tacaaagctcagaaggcaagctcct

SEQ ID NO: 3274451 - DNA, 25 bp, Homo sapien
ttcccaggtctttggtacaaagctc

SEQ ID NO: 3274452 - DNA, 25 bp, Homo sapien
ttaattaatagcaagcacccaagga

SEQ ID NO: 3274453 - DNA, 25 bp, Homo sapien
cactagcagcatatttaagtgatgt

SEQ ID NO: 3274454 - DNA, 25 bp, Homo sapien
tcaaggggcacctgagttgattcca

SEQ ID NO: 3274455 - DNA, 25 bp, Homo sapien
gtccactgtcaaggggcacctgagt

SEQ ID NO: 3274456 - DNA, 25 bp, Homo sapien
tattgtgagtagtgcactagcagca

SEQ ID NO: 3274457 - DNA, 25 bp, Homo sapien
cccggatgcagccacgtctttgtgg

SEQ ID NO: 3274458 - DNA, 25 bp, Homo sapien
aagtatcttcactgttctgactggg

SEQ ID NO: 3274459 - DNA, 25 bp, Homo sapien
tgggaggagcttggctattactagc

SEQ ID NO: 3274460 - DNA, 25 bp, Homo sapien
taagtagtggaactacagggcacac

SEQ ID NO: 3274461 - DNA, 25 bp, Homo sapien
gcttaaattattgtcagcctcagct

SEQ ID NO: 3274462 - DNA, 25 bp, Homo sapien
tttgcttaaattattgtcagcctca

SEQ ID NO: 3274463 - DNA, 25 bp, Homo sapien
cttaaattattgtcagcctcagctt

SEQ ID NO: 3274464 - DNA, 25 bp, Homo sapien
tgcttaaattattgtcagcctcagc

SEQ ID NO: 3274465 - DNA, 25 bp, Homo sapien
atgcttggctacagaccacagcagc

SEQ ID NO: 3274466 - DNA, 25 bp, Homo sapien
tccacggctgggcagatccgaccac

SEQ ID NO: 3274467 - DNA, 25 bp, Homo sapien
gttccacggctgggcagatccgacc

SEQ ID NO: 3274468 - DNA, 25 bp, Homo sapien
ctgttccacggctgggcagatccga

SEQ ID NO: 3274469 - DNA, 25 bp, Homo sapien
tactaatgtcacagggaaggtctct

SEQ ID NO: 3274470 - DNA, 25 bp, Homo sapien
tttgtttttactaatgtcacaggga

SEQ ID NO: 3274471 - DNA, 25 bp, Homo sapien
aggtgatccacatgactcagacttt

SEQ ID NO: 3274472 - DNA, 25 bp, Homo sapien
tccacatgactcagacttttttgtt

SEQ ID NO: 3274473 - DNA, 25 bp, Homo sapien
caggcggcacctaatcggaattcca

SEQ ID NO: 3274474 - DNA, 25 bp, Homo sapien
tttctgcacggactgactctaaggg

SEQ ID NO: 3274475 - DNA, 25 bp, Homo sapien
taagaaaccactatgctgctagatg

SEQ ID NO: 3274476 - DNA, 25 bp, Homo sapien
caaacaccaggtattgtgacgttcc

SEQ ID NO: 3274477 - DNA, 25 bp, Homo sapien
gatagaccacatatctgctgagaga

SEQ ID NO: 3274478 - DNA, 25 bp, Homo sapien
tagaggacagcttgggtaatgccac

SEQ ID NO: 3274479 - DNA, 25 bp, Homo sapien
gggtccctgcactaggtcaacaaga

SEQ ID NO: 3274480 - DNA, 25 bp, Homo sapien
cctaggctagactttgaaaatggca

SEQ ID NO: 3274481 - DNA, 25 bp, Homo sapien
tttgcattcataagcacctacggtg

SEQ ID NO: 3274482 - DNA, 25 bp, Homo sapien
catagaccatagcagggaatacccc

SEQ ID NO: 3274483 - DNA, 25 bp, Homo sapien
taggcatatcctaggccatccggag

SEQ ID NO: 3274484 - DNA, 25 bp, Homo sapien
ggaactcccaagtcttaccaagatg

SEQ ID NO: 3274485 - DNA, 25 bp, Homo sapien
tccttgcaaaggtaacaggtggctc

SEQ ID NO: 3274486 - DNA, 25 bp, Homo sapien
tagtgatacagagctacttgcccag

SEQ ID NO: 3274487 - DNA, 25 bp, Homo sapien
cagattaccatagctgagagccagc

SEQ ID NO: 3274488 - DNA, 25 bp, Homo sapien
tagtgactgttcgagctgagtaacc

SEQ ID NO: 3274489 - DNA, 25 bp, Homo sapien
taggagactctacctgagcacaaga

SEQ ID NO: 3274490 - DNA, 25 bp, Homo sapien
ttaaccggcgcatcctacatcagaa

SEQ ID NO: 3274491 - DNA, 25 bp, Homo sapien
tctaggtgggtgctagtctgccaac

SEQ ID NO: 3274492 - DNA, 25 bp, Homo sapien
tgactgatgtttgagcacgctagca

SEQ ID NO: 3274493 - DNA, 25 bp, Homo sapien
aaagaagagcaagtatccagcatgg

SEQ ID NO: 3274494 - DNA, 25 bp, Homo sapien
tgcatccacctttgtattattaggt

SEQ ID NO: 3274495 - DNA, 25 bp, Homo sapien
tagattatgcacaagacaacttcat

SEQ ID NO: 3274496 - DNA, 25 bp, Homo sapien
catggaaaagggatatgcatccacc

SEQ ID NO: 3274497 - DNA, 25 bp, Homo sapien
ttttgttaagagtgaaattgaggcc

SEQ ID NO: 3274498 - DNA, 25 bp, Homo sapien
catctagaacagtgttcgcatttct

SEQ ID NO: 3274499 - DNA, 25 bp, Homo sapien
gagcccgaactttgagcccaatctt

SEQ ID NO: 3274500 - DNA, 25 bp, Homo sapien
tgggtgtggtaggaatatcagtatc

SEQ ID NO: 3274501 - DNA, 25 bp, Homo sapien
gaagagagatcatttatagatacag

SEQ ID NO: 3274502 - DNA, 25 bp, Homo sapien
agaatcgtctgaggatggatggcca

SEQ ID NO: 3274503 - DNA, 25 bp, Homo sapien
tcgtctgaggatggatggccacagt

SEQ ID NO: 3274504 - DNA, 25 bp, Homo sapien
taaatatacacatctggggccggtc

SEQ ID NO: 3274505 - DNA, 25 bp, Homo sapien
caagagagtatatgggctcagggcc

SEQ ID NO: 3274506 - DNA, 25 bp, Homo sapien
catagctctgaaatgtgtggccgaa

SEQ ID NO: 3274507 - DNA, 25 bp, Homo sapien
tcagggccgcagcatttatccaagc

SEQ ID NO: 3274508 - DNA, 25 bp, Homo sapien
gagaggcttagaaggtttgaccaca

SEQ ID NO: 3274509 - DNA, 25 bp, Homo sapien
tttctatgggtctcagcatccttcc

SEQ ID NO: 3274510 - DNA, 25 bp, Homo sapien
tcaccgacgtgaagaccacctttca

SEQ ID NO: 3274511 - DNA, 25 bp, Homo sapien
cacaaatgtcatttctagcgtacca

SEQ ID NO: 3274512 - DNA, 25 bp, Homo sapien
cagtttcctggagtcggtcccctat

SEQ ID NO: 3274513 - DNA, 25 bp, Homo sapien
tcctacttgagaccagaacgggctc

SEQ ID NO: 3274514 - DNA, 25 bp, Homo sapien
gatgcggttacagcgcactagcttc

SEQ ID NO: 3274515 - DNA, 25 bp, Homo sapien
aacgggctccggcaactgagcatgc

SEQ ID NO: 3274516 - DNA, 25 bp, Homo sapien
ttcccggagcgcccagatcagatgc

SEQ ID NO: 3274517 - DNA, 25 bp, Homo sapien
gcagaggccgccaggttgggccgag

SEQ ID NO: 3274518 - DNA, 25 bp, Homo sapien
ctgctccacacctgatgcaatcagc

SEQ ID NO: 3274519 - DNA, 25 bp, Homo sapien
gaggccgccaggttgggccgaggag

SEQ ID NO: 3274520 - DNA, 25 bp, Homo sapien
cctgctccacacctgatgcaatcag

SEQ ID NO: 3274521 - DNA, 25 bp, Homo sapien
catgcatagagaacagtagttgcac

SEQ ID NO: 3274522 - DNA, 25 bp, Homo sapien
tatactctcgtaaatctggcttatg

SEQ ID NO: 3274523 - DNA, 25 bp, Homo sapien
gcttttgtggcatgggagctaatgc

SEQ ID NO: 3274524 - DNA, 25 bp, Homo sapien
tactctgccccaatagatatagagc

SEQ ID NO: 3274525 - DNA, 25 bp, Homo sapien
actggccctgttgaattcacgagca

SEQ ID NO: 3274526 - DNA, 25 bp, Homo sapien
cactggccctgttgaattcacgagc

SEQ ID NO: 3274527 - DNA, 25 bp, Homo sapien
ctggccctgttgaattcacgagcat

SEQ ID NO: 3274528 - DNA, 25 bp, Homo sapien
tataactgctaacgtctgcttgccg

SEQ ID NO: 3274529 - DNA, 25 bp, Homo sapien
gcttgccgatcagcccttagcttaa

SEQ ID NO: 3274530 - DNA, 25 bp, Homo sapien
ggcatctctttgtaagcagggagtt

SEQ ID NO: 3274531 - DNA, 25 bp, Homo sapien
taggcttaggtttgttcatatccag

SEQ ID NO: 3274532 - DNA, 25 bp, Homo sapien
agaagtccgcttctctgccgtggct

SEQ ID NO: 3274533 - DNA, 25 bp, Homo sapien
acacccaggcacttaagcacaagca

SEQ ID NO: 3274534 - DNA, 25 bp, Homo sapien
caccgagcgtgagcaaggagaagtc

SEQ ID NO: 3274535 - DNA, 25 bp, Homo sapien
cacaagcagagtgcacagctgtcca

SEQ ID NO: 3274536 - DNA, 25 bp, Homo sapien
cctttagcttggagtagtttgatct

SEQ ID NO: 3274537 - DNA, 25 bp, Homo sapien
agccatttgtctaatttttttcaag

SEQ ID NO: 3274538 - DNA, 25 bp, Homo sapien
tttagcttggagtagtttgatcttc

SEQ ID NO: 3274539 - DNA, 25 bp, Homo sapien
ctcctttagcttggagtagtttgat

SEQ ID NO: 3274540 - DNA, 25 bp, Homo sapien
aaggcactttttacatggtggcagg

SEQ ID NO: 3274541 - DNA, 25 bp, Homo sapien
gcgaggtctcacaatcatggttgaa

SEQ ID NO: 3274542 - DNA, 25 bp, Homo sapien
ctggcgaggtctcacaatcatggtt

SEQ ID NO: 3274543 - DNA, 25 bp, Homo sapien
catggttgaaggtgaaaggcacttt

SEQ ID NO: 3274544 - DNA, 25 bp, Homo sapien
gatgaactccctaagcctcgatgtc

SEQ ID NO: 3274545 - DNA, 25 bp, Homo sapien
ttgtgagcagcacatgagaacattg

SEQ ID NO: 3274546 - DNA, 25 bp, Homo sapien
tctgtagagtgaggtcagtatccgc

SEQ ID NO: 3274547 - DNA, 25 bp, Homo sapien
cagctgggtgccttggccgatgaac

SEQ ID NO: 3274548 - DNA, 25 bp, Homo sapien
attatctagtttgtgcacaaagaga

SEQ ID NO: 3274549 - DNA, 25 bp, Homo sapien
ttttctaatgtagctagcagtctat

SEQ ID NO: 3274550 - DNA, 25 bp, Homo sapien
tgcacaaagagatgtttatagtagt

SEQ ID NO: 3274551 - DNA, 25 bp, Homo sapien
actttttctaatgtagctagcagtc

SEQ ID NO: 3274552 - DNA, 25 bp, Homo sapien
gttgtaaacaccactgtatgggacc

SEQ ID NO: 3274553 - DNA, 25 bp, Homo sapien
tagttgtaaacaccactgtatggga

SEQ ID NO: 3274554 - DNA, 25 bp, Homo sapien
ttagttgtaaacaccactgtatggg

SEQ ID NO: 3274555 - DNA, 25 bp, Homo sapien
tgtaaacaccactgtatgggaccag

SEQ ID NO: 3274556 - DNA, 25 bp, Homo sapien
cacagttaaatctccctcactcatg

SEQ ID NO: 3274557 - DNA, 25 bp, Homo sapien
acctcttcaggacatttccttacag

SEQ ID NO: 3274558 - DNA, 25 bp, Homo sapien
taaggccttggcatccatctggaat

SEQ ID NO: 3274559 - DNA, 25 bp, Homo sapien
ctcactcatgtcacctcttcaggac

SEQ ID NO: 3274560 - DNA, 25 bp, Homo sapien
gattgaaacgtctgcttttcccaga

SEQ ID NO: 3274561 - DNA, 25 bp, Homo sapien
taatgcagcagtctcggtctttcct

SEQ ID NO: 3274562 - DNA, 25 bp, Homo sapien
tagactccatttggctttgtgttga

SEQ ID NO: 3274563 - DNA, 25 bp, Homo sapien
cctctcatctccataatgcagcagt

SEQ ID NO: 3274564 - DNA, 25 bp, Homo sapien
tcagaagaccttggacaacatttcc

SEQ ID NO: 3274565 - DNA, 25 bp, Homo sapien
gcctttggaggaggtagttgaatat

SEQ ID NO: 3274566 - DNA, 25 bp, Homo sapien
aacaataccttgaagattcccagtg

SEQ ID NO: 3274567 - DNA, 25 bp, Homo sapien
tggagcctgggatcttgggtcatat

SEQ ID NO: 3274568 - DNA, 25 bp, Homo sapien
catagatcctgactgacaaggctgg

SEQ ID NO: 3274569 - DNA, 25 bp, Homo sapien
catttttgtagagagactggtgggc

SEQ ID NO: 3274570 - DNA, 25 bp, Homo sapien
ggaagcaccagaggacctacaggaa

SEQ ID NO: 3274571 - DNA, 25 bp, Homo sapien
caccaaactggtcgtgtagaactca

SEQ ID NO: 3274572 - DNA, 25 bp, Homo sapien
gaagactgttttctgatgaaggcat

SEQ ID NO: 3274573 - DNA, 25 bp, Homo sapien
ctctgggaagactgttttctgatga

SEQ ID NO: 3274574 - DNA, 25 bp, Homo sapien
ggaagactgttttctgatgaaggca

SEQ ID NO: 3274575 - DNA, 25 bp, Homo sapien
tgggaagactgttttctgatgaagg

SEQ ID NO: 3274576 - DNA, 25 bp, Homo sapien
cagtgagaggtatttcggtcccaga

SEQ ID NO: 3274577 - DNA, 25 bp, Homo sapien
tctcgaccagggtgtgatagctctg

SEQ ID NO: 3274578 - DNA, 25 bp, Homo sapien
gggaaaatggaactaactctctgtg

SEQ ID NO: 3274579 - DNA, 25 bp, Homo sapien
caagcccatgcctagattggtgaaa

SEQ ID NO: 3274580 - DNA, 25 bp, Homo sapien
cccttgagatatgctcacatgcttg

SEQ ID NO: 3274581 - DNA, 25 bp, Homo sapien
ctccactgaaattctcgagttctgc

SEQ ID NO: 3274582 - DNA, 25 bp, Homo sapien
tccactgaaattctcgagttctgct

SEQ ID NO: 3274583 - DNA, 25 bp, Homo sapien
tggccagattgtggttttcctgtgt

SEQ ID NO: 3274584 - DNA, 25 bp, Homo sapien
tcaaaggtagtgcaagaaaatggta

SEQ ID NO: 3274585 - DNA, 25 bp, Homo sapien
aaaaagctgtttagcttgtgtggcc

SEQ ID NO: 3274586 - DNA, 25 bp, Homo sapien
taatcaatttgggactaaaaagctg

SEQ ID NO: 3274587 - DNA, 25 bp, Homo sapien
gagagaggcccatggaacaagtgct

SEQ ID NO: 3274588 - DNA, 25 bp, Homo sapien
ggagcagctcggatgagagaggccc

SEQ ID NO: 3274589 - DNA, 25 bp, Homo sapien
agagaggcccatggaacaagtgctg

SEQ ID NO: 3274590 - DNA, 25 bp, Homo sapien
gagaggcccatggaacaagtgctgc

SEQ ID NO: 3274591 - DNA, 25 bp, Homo sapien
ggtttgagggttgctgtcagtctat

SEQ ID NO: 3274592 - DNA, 25 bp, Homo sapien
tctgctagtcgttggtttttgaagc

SEQ ID NO: 3274593 - DNA, 25 bp, Homo sapien
tgtcaactgcaggttcaattggaac

SEQ ID NO: 3274594 - DNA, 25 bp, Homo sapien
gcaggttcaattggaacatcgtggg

SEQ ID NO: 3274595 - DNA, 25 bp, Homo sapien
ttcttattatgtttgattgttttgg

SEQ ID NO: 3274596 - DNA, 25 bp, Homo sapien
cttattatgtttgattgttttgggt

SEQ ID NO: 3274597 - DNA, 25 bp, Homo sapien
tcttattatgtttgattgttttggg

SEQ ID NO: 3274598 - DNA, 25 bp, Homo sapien
tacatgaaatcagcgagcataggtt

SEQ ID NO: 3274599 - DNA, 25 bp, Homo sapien
aattgtcttctgtgctactatgacc

SEQ ID NO: 3274600 - DNA, 25 bp, Homo sapien
gcttgggtagctccaggatcacccg

SEQ ID NO: 3274601 - DNA, 25 bp, Homo sapien
gaccagagcaattttgatcaccagc

SEQ ID NO: 3274602 - DNA, 25 bp, Homo sapien
taaaatctccactctggcatgacct

SEQ ID NO: 3274603 - DNA, 25 bp, Homo sapien
tccactctggcatgacctcctgcta

SEQ ID NO: 3274604 - DNA, 25 bp, Homo sapien
tgccaggccttgagttaaaatctcc

SEQ ID NO: 3274605 - DNA, 25 bp, Homo sapien
cttgagttaaaatctccactctggc

SEQ ID NO: 3274606 - DNA, 25 bp, Homo sapien
cctccagtgtggatcacaattcctg

SEQ ID NO: 3274607 - DNA, 25 bp, Homo sapien
tggatcacaattcctgttctcctgg

SEQ ID NO: 3274608 - DNA, 25 bp, Homo sapien
gtaaagaagttcgtatgcagcacgg

SEQ ID NO: 3274609 - DNA, 25 bp, Homo sapien
cagcacgggttacagcccacttctt

SEQ ID NO: 3274610 - DNA, 25 bp, Homo sapien
catttgagtgactgacactcctcct

SEQ ID NO: 3274611 - DNA, 25 bp, Homo sapien
gggaaacagatctgttacgttcttc

SEQ ID NO: 3274612 - DNA, 25 bp, Homo sapien
cccacaacagttgaaataaagccaa

SEQ ID NO: 3274613 - DNA, 25 bp, Homo sapien
cagatctgttacgttcttctagcat

SEQ ID NO: 3274614 - DNA, 25 bp, Homo sapien
ttttgaactggttcactggctcttg

SEQ ID NO: 3274615 - DNA, 25 bp, Homo sapien
agtaataggatctctgaggttccag

SEQ ID NO: 3274616 - DNA, 25 bp, Homo sapien
ctgcttcttagtaataggatctctg

SEQ ID NO: 3274617 - DNA, 25 bp, Homo sapien
tttgaactggttcactggctcttgg

SEQ ID NO: 3274618 - DNA, 25 bp, Homo sapien
ggctcttgccgtaattgcttttcca

SEQ ID NO: 3274619 - DNA, 25 bp, Homo sapien
gctcttgccgtaattgcttttccac

SEQ ID NO: 3274620 - DNA, 25 bp, Homo sapien
gaggctcttgccgtaattgcttttc

SEQ ID NO: 3274621 - DNA, 25 bp, Homo sapien
gatgaggctcttgccgtaattgctt

SEQ ID NO: 3274622 - DNA, 25 bp, Homo sapien
ctgagcaaggttcactcctgtgcag

SEQ ID NO: 3274623 - DNA, 25 bp, Homo sapien
cactcctgtgcaggccaagatggct

SEQ ID NO: 3274624 - DNA, 25 bp, Homo sapien
tgctgtgggcgttgttcgtggaggt

SEQ ID NO: 3274625 - DNA, 25 bp, Homo sapien
ggagagccaaatacagagcctgagc

SEQ ID NO: 3274626 - DNA, 25 bp, Homo sapien
tcagtgatgaatggcattttagtgg

SEQ ID NO: 3274627 - DNA, 25 bp, Homo sapien
ctcagtgatgaatggcattttagtg

SEQ ID NO: 3274628 - DNA, 25 bp, Homo sapien
gctcagtgatgaatggcattttagt

SEQ ID NO: 3274629 - DNA, 25 bp, Homo sapien
gcatctccaaagtgcaagaccattc

SEQ ID NO: 3274630 - DNA, 25 bp, Homo sapien
ccattcctttatataaccaccatgc

SEQ ID NO: 3274631 - DNA, 25 bp, Homo sapien
tcctttatataaccaccatgccatt

SEQ ID NO: 3274632 - DNA, 25 bp, Homo sapien
ttttagtatgcatctccaaagtgca

SEQ ID NO: 3274633 - DNA, 25 bp, Homo sapien
ggaaactgccatgctatcactagag

SEQ ID NO: 3274634 - DNA, 25 bp, Homo sapien
ctttgtatctgcctggagcgcccta

SEQ ID NO: 3274635 - DNA, 25 bp, Homo sapien
cataggattggatgcgactacccgg

SEQ ID NO: 3274636 - DNA, 25 bp, Homo sapien
tataagaggagagccaggaaagcgt

SEQ ID NO: 3274637 - DNA, 25 bp, Homo sapien
atcacaattggccacgctgacttgg

SEQ ID NO: 3274638 - DNA, 25 bp, Homo sapien
caagaattgagtatccccaacaggc

SEQ ID NO: 3274639 - DNA, 25 bp, Homo sapien
caagtgaggacatttcaacccgctc

SEQ ID NO: 3274640 - DNA, 25 bp, Homo sapien
tgtttggcaccaagactcattaagc

SEQ ID NO: 3274641 - DNA, 25 bp, Homo sapien
cagtgctgtattccctgtccatttc

SEQ ID NO: 3274642 - DNA, 25 bp, Homo sapien
taaatcccaaacaaacgcaatgggc

SEQ ID NO: 3274643 - DNA, 25 bp, Homo sapien
tccaccacaacatccccagtgctgc

SEQ ID NO: 3274644 - DNA, 25 bp, Homo sapien
ccagtgctgcaacctgaattcagtc

SEQ ID NO: 3274645 - DNA, 25 bp, Homo sapien
ctgtgacagccatacatcccgaagt

SEQ ID NO: 3274646 - DNA, 25 bp, Homo sapien
atgacaaccctgatttcaactgctg

SEQ ID NO: 3274647 - DNA, 25 bp, Homo sapien
tggagatgacaaccctgatttcaac

SEQ ID NO: 3274648 - DNA, 25 bp, Homo sapien
catacatcccgaagtggagatgaca

SEQ ID NO: 3274649 - DNA, 25 bp, Homo sapien
tcacaaagtcttatgtaacccaaac

SEQ ID NO: 3274650 - DNA, 25 bp, Homo sapien
acatctgagattgtgtcagccccac

SEQ ID NO: 3274651 - DNA, 25 bp, Homo sapien
ttatgtaacccaaaccacatctgag

SEQ ID NO: 3274652 - DNA, 25 bp, Homo sapien
aaaccacatctgagattgtgtcagc

SEQ ID NO: 3274653 - DNA, 25 bp, Homo sapien
tcgtcatcctcaggacggcaagtga

SEQ ID NO: 3274654 - DNA, 25 bp, Homo sapien
tgttgaacccggcttcttgagtgtg

SEQ ID NO: 3274655 - DNA, 25 bp, Homo sapien
tcatggccacattaggagcagactc

SEQ ID NO: 3274656 - DNA, 25 bp, Homo sapien
taaacttttgatgacaagatgtgga

SEQ ID NO: 3274657 - DNA, 25 bp, Homo sapien
cgtctgttgatcaagaagtccatag

SEQ ID NO: 3274658 - DNA, 25 bp, Homo sapien
aagaagtccatagtagcaggggcca

SEQ ID NO: 3274659 - DNA, 25 bp, Homo sapien
atctgagaagtgtggccagagggtt

SEQ ID NO: 3274660 - DNA, 25 bp, Homo sapien
tctgagaagtgtggccagagggttt

SEQ ID NO: 3274661 - DNA, 25 bp, Homo sapien
ccctgagtgctgaaccttcttagag

SEQ ID NO: 3274662 - DNA, 25 bp, Homo sapien
cttcttagagttgtcatgaaatact

SEQ ID NO: 3274663 - DNA, 25 bp, Homo sapien
gacagccgtcgtgtgtgcacatatg

SEQ ID NO: 3274664 - DNA, 25 bp, Homo sapien
tatttgcggattctgcccctgagtg

SEQ ID NO: 3274665 - DNA, 25 bp, Homo sapien
cagctttccaactaataagaggcag

SEQ ID NO: 3274666 - DNA, 25 bp, Homo sapien
tatactctctccattagaccctagg

SEQ ID NO: 3274667 - DNA, 25 bp, Homo sapien
tgccccaggtgcagtgctagatcat

SEQ ID NO: 3274668 - DNA, 25 bp, Homo sapien
gaacatttgtttggagacatcaacc

SEQ ID NO: 3274669 - DNA, 25 bp, Homo sapien
caagtttgatgccaaagccaagcca

SEQ ID NO: 3274670 - DNA, 25 bp, Homo sapien
cacacgaggtctttggtgcattcca

SEQ ID NO: 3274671 - DNA, 25 bp, Homo sapien
tccctggcacagtatgagaaacctc

SEQ ID NO: 3274672 - DNA, 25 bp, Homo sapien
tgaaagactacacaccgcagggaaa

SEQ ID NO: 3274673 - DNA, 25 bp, Homo sapien
ggttcatgacctacaccaaaaggct

SEQ ID NO: 3274674 - DNA, 25 bp, Homo sapien
aaaagtgtgtcagatggcaagagcc

SEQ ID NO: 3274675 - DNA, 25 bp, Homo sapien
tgtacatcacactcggaaaccaggg

SEQ ID NO: 3274676 - DNA, 25 bp, Homo sapien
ccaaaaggcttgaccacatcgtgaa

SEQ ID NO: 3274677 - DNA, 25 bp, Homo sapien
ctgtttgattcccatgtaagctttg

SEQ ID NO: 3274678 - DNA, 25 bp, Homo sapien
tttgattcccatgtaagctttggca

SEQ ID NO: 3274679 - DNA, 25 bp, Homo sapien
taagctttggcagtgatttccacaa

SEQ ID NO: 3274680 - DNA, 25 bp, Homo sapien
tgtaagctttggcagtgatttccac

SEQ ID NO: 3274681 - DNA, 25 bp, Homo sapien
agccccttggctattgttggccctt

SEQ ID NO: 3274682 - DNA, 25 bp, Homo sapien
gctggagaatgactttggtaaacag

SEQ ID NO: 3274683 - DNA, 25 bp, Homo sapien
acagccccttggctattgttggccc

SEQ ID NO: 3274684 - DNA, 25 bp, Homo sapien
aacagccccttggctattgttggcc

SEQ ID NO: 3274685 - DNA, 25 bp, Homo sapien
tgagtctcagctcccgtgtcagacc

SEQ ID NO: 3274686 - DNA, 25 bp, Homo sapien
ccgtgtcagacctctgagtcccaaa

SEQ ID NO: 3274687 - DNA, 25 bp, Homo sapien
caaacatagcgccacagtctgggtc

SEQ ID NO: 3274688 - DNA, 25 bp, Homo sapien
cagtctgggtcttcacatcttggcc

SEQ ID NO: 3274689 - DNA, 25 bp, Homo sapien
tttcctgtccttgacgtttagtgga

SEQ ID NO: 3274690 - DNA, 25 bp, Homo sapien
tgtttgagtcggaagagaaaaatgt

SEQ ID NO: 3274691 - DNA, 25 bp, Homo sapien
cgtttagtggaattgataaaaagca

SEQ ID NO: 3274692 - DNA, 25 bp, Homo sapien
agcatcaaggatctttgagttctgg

SEQ ID NO: 3274693 - DNA, 25 bp, Homo sapien
ttccaactcccaaatccccatctcg

SEQ ID NO: 3274694 - DNA, 25 bp, Homo sapien
tgttccaactcccaaatccccatct

SEQ ID NO: 3274695 - DNA, 25 bp, Homo sapien
cttgttccaactcccaaatccccat

SEQ ID NO: 3274696 - DNA, 25 bp, Homo sapien
ccaactcccaaatccccatctcgtt

SEQ ID NO: 3274697 - DNA, 25 bp, Homo sapien
ccctattaggtgtcgagcactgtgc

SEQ ID NO: 3274698 - DNA, 25 bp, Homo sapien
taaaatgtgcactcagacctgtaca

SEQ ID NO: 3274699 - DNA, 25 bp, Homo sapien
catgcctagtccttgaaccgtgtca

SEQ ID NO: 3274700 - DNA, 25 bp, Homo sapien
cagatgaattgcacagttggccctc

SEQ ID NO: 3274701 - DNA, 25 bp, Homo sapien
tcactgaagccctgttaggtgcttc

SEQ ID NO: 3274702 - DNA, 25 bp, Homo sapien
gttaggtgcttctgagtgggttcct

SEQ ID NO: 3274703 - DNA, 25 bp, Homo sapien
tcctacgatgatgtcaaccatattg

SEQ ID NO: 3274704 - DNA, 25 bp, Homo sapien
tgtgcccatggtacagtttcctacg

SEQ ID NO: 3274705 - DNA, 25 bp, Homo sapien
ccgactcccgttttcttcatcctct

SEQ ID NO: 3274706 - DNA, 25 bp, Homo sapien
gctgcatcctccgactcccgttttc

SEQ ID NO: 3274707 - DNA, 25 bp, Homo sapien
ggtgcaactcgttgcaaaaatagtc

SEQ ID NO: 3274708 - DNA, 25 bp, Homo sapien
ctcttcttcaggtgcaactcgttgc

SEQ ID NO: 3274709 - DNA, 25 bp, Homo sapien
tcttgacatagttgtgcagtccatc

SEQ ID NO: 3274710 - DNA, 25 bp, Homo sapien
gtccatctggcgtacagacggtcat

SEQ ID NO: 3274711 - DNA, 25 bp, Homo sapien
ttgacatagttgtgcagtccatctg

SEQ ID NO: 3274712 - DNA, 25 bp, Homo sapien
gtgcagtccatctggcgtacagacg

SEQ ID NO: 3274713 - DNA, 25 bp, Homo sapien
tcaagtccttgagaggcgatacagc

SEQ ID NO: 3274714 - DNA, 25 bp, Homo sapien
tgaatgtcaagtccttgagaggcga

SEQ ID NO: 3274715 - DNA, 25 bp, Homo sapien
tcaaatgagcttgaatgtcaagtcc

SEQ ID NO: 3274716 - DNA, 25 bp, Homo sapien
cttgagaggcgatacagctgctgta

SEQ ID NO: 3274717 - DNA, 25 bp, Homo sapien
taacgccaagaaggttgggcacaga

SEQ ID NO: 3274718 - DNA, 25 bp, Homo sapien
tttctgtgaacgcaaatccatgatc

SEQ ID NO: 3274719 - DNA, 25 bp, Homo sapien
ttccacagagaactaccaaatgcag

SEQ ID NO: 3274720 - DNA, 25 bp, Homo sapien
tccatgatcatgttgatctctccct

SEQ ID NO: 3274721 - DNA, 25 bp, Homo sapien
aagagaaaggtagcaaggagcttct

SEQ ID NO: 3274722 - DNA, 25 bp, Homo sapien
gaaaggtagcaaggagcttcttgct

SEQ ID NO: 3274723 - DNA, 25 bp, Homo sapien
agatggaaatgacaactgaagaaag

SEQ ID NO: 3274724 - DNA, 25 bp, Homo sapien
ttgcagatggaaatgacaactgaag

SEQ ID NO: 3274725 - DNA, 25 bp, Homo sapien
tggcctgaacttagaaccaccatgc

SEQ ID NO: 3274726 - DNA, 25 bp, Homo sapien
agcttttctggcctgaacttagaac

SEQ ID NO: 3274727 - DNA, 25 bp, Homo sapien
tttagattccatcatgtaattccta

SEQ ID NO: 3274728 - DNA, 25 bp, Homo sapien
ggcatctctgaatatgttttcccac

SEQ ID NO: 3274729 - DNA, 25 bp, Homo sapien
tttttgtaaccgatcatttacatgt

SEQ ID NO: 3274730 - DNA, 25 bp, Homo sapien
ttttgtaaccgatcatttacatgta

SEQ ID NO: 3274731 - DNA, 25 bp, Homo sapien
tttgtaaccgatcatttacatgtaa

SEQ ID NO: 3274732 - DNA, 25 bp, Homo sapien
cccaaattggaagtctgagtactga

SEQ ID NO: 3274733 - DNA, 25 bp, Homo sapien
tggaaaatgatgtgacccaaattgg

SEQ ID NO: 3274734 - DNA, 25 bp, Homo sapien
gatgtgacccaaattggaagtctga

SEQ ID NO: 3274735 - DNA, 25 bp, Homo sapien
ttggaagtctgagtactgagtaaag

SEQ ID NO: 3274736 - DNA, 25 bp, Homo sapien
tctcagatatagcccccctgtgaca

SEQ ID NO: 3274737 - DNA, 25 bp, Homo sapien
tagatctgggttttcacttctcaga

SEQ ID NO: 3274738 - DNA, 25 bp, Homo sapien
tctgggttttcacttctcagatata

SEQ ID NO: 3274739 - DNA, 25 bp, Homo sapien
ccatagatctgggttttcacttctc

SEQ ID NO: 3274740 - DNA, 25 bp, Homo sapien
attgactttccctctgtgcatagct

SEQ ID NO: 3274741 - DNA, 25 bp, Homo sapien
tagctttcattctgatcaaacatca

SEQ ID NO: 3274742 - DNA, 25 bp, Homo sapien
ctgtgcatagctttcattctgatca

SEQ ID NO: 3274743 - DNA, 25 bp, Homo sapien
gcatagctttcattctgatcaaaca

SEQ ID NO: 3274744 - DNA, 25 bp, Homo sapien
tggattccgaaagacaagtcaaggt

SEQ ID NO: 3274745 - DNA, 25 bp, Homo sapien
agatgaacgcgtgctgctccaggat

SEQ ID NO: 3274746 - DNA, 25 bp, Homo sapien
tcattgtactgttgtgaatccaaac

SEQ ID NO: 3274747 - DNA, 25 bp, Homo sapien
tatttgccagatagtataaacagga

SEQ ID NO: 3274748 - DNA, 25 bp, Homo sapien
gagatgattccttcgacagcctgga

SEQ ID NO: 3274749 - DNA, 25 bp, Homo sapien
gaaagcaggctccatatccaccttg

SEQ ID NO: 3274750 - DNA, 25 bp, Homo sapien
tacatcgactgctgggattccgagc

SEQ ID NO: 3274751 - DNA, 25 bp, Homo sapien
gaaagtcctaaacgcagtatccgag

SEQ ID NO: 3274752 - DNA, 25 bp, Homo sapien
tggataactgactaacatcaaggca

SEQ ID NO: 3274753 - DNA, 25 bp, Homo sapien
gacacattatagcttcaggaggccc

SEQ ID NO: 3274754 - DNA, 25 bp, Homo sapien
tgtaacaaaccattcttggagggcc

SEQ ID NO: 3274755 - DNA, 25 bp, Homo sapien
acctgactctgtgtttgcggacgca

SEQ ID NO: 3274756 - DNA, 25 bp, Homo sapien
ccctccaagtatggataagggccag

SEQ ID NO: 3274757 - DNA, 25 bp, Homo sapien
tattctcggaagttagtgagtctca

SEQ ID NO: 3274758 - DNA, 25 bp, Homo sapien
taaaagctctctgctagcatacacg

SEQ ID NO: 3274759 - DNA, 25 bp, Homo sapien
taagggccagtctacccattcatca

SEQ ID NO: 3274760 - DNA, 25 bp, Homo sapien
cagggctcacgtacaaccgttctag

SEQ ID NO: 3274761 - DNA, 25 bp, Homo sapien
tattctgacttgttgatgcccacga

SEQ ID NO: 3274762 - DNA, 25 bp, Homo sapien
ttctgttcagcaatgccagcatgcc

SEQ ID NO: 3274763 - DNA, 25 bp, Homo sapien
tggcttaatcacaggcagggctcac

SEQ ID NO: 3274764 - DNA, 25 bp, Homo sapien
gaggcttccagtttagagagaaggc

SEQ ID NO: 3274765 - DNA, 25 bp, Homo sapien
cagaggacagctatctagtttcaga

SEQ ID NO: 3274766 - DNA, 25 bp, Homo sapien
taactactggataagagggaaatcc

SEQ ID NO: 3274767 - DNA, 25 bp, Homo sapien
gatgggttgctgaaggtgtcctcaa

SEQ ID NO: 3274768 - DNA, 25 bp, Homo sapien
gaaataagcaaggtggtaagggctc

SEQ ID NO: 3274769 - DNA, 25 bp, Homo sapien
ggtctagggatgttttgaggctcaa

SEQ ID NO: 3274770 - DNA, 25 bp, Homo sapien
tatagagaaccattccacaaaggac

SEQ ID NO: 3274771 - DNA, 25 bp, Homo sapien
tgcagattctcaagggtcaggagac

SEQ ID NO: 3274772 - DNA, 25 bp, Homo sapien
ttttgattgagaaacggtgtatgat

SEQ ID NO: 3274773 - DNA, 25 bp, Homo sapien
gagtcaacctgctaccacttatcag

SEQ ID NO: 3274774 - DNA, 25 bp, Homo sapien
ggctttggagtcaacctgctaccac

SEQ ID NO: 3274775 - DNA, 25 bp, Homo sapien
tagaggttaagacgctaggctttgg

SEQ ID NO: 3274776 - DNA, 25 bp, Homo sapien
tgtgatagaaaggagatataaggtc

SEQ ID NO: 3274777 - DNA, 25 bp, Homo sapien
ttcctggaagttattgctacaatgt

SEQ ID NO: 3274778 - DNA, 25 bp, Homo sapien
ctttttatcctgaagtgcatcagca

SEQ ID NO: 3274779 - DNA, 25 bp, Homo sapien
ggtcaaaacattgcctgagctcact

SEQ ID NO: 3274780 - DNA, 25 bp, Homo sapien
caagttctccttaagggcctgaagc

SEQ ID NO: 3274781 - DNA, 25 bp, Homo sapien
gcaaagctgttgcacatggcgataa

SEQ ID NO: 3274782 - DNA, 25 bp, Homo sapien
tgcgacgagtttcagctggccaaga

SEQ ID NO: 3274783 - DNA, 25 bp, Homo sapien
tcagctagatttacactccgggacg

SEQ ID NO: 3274784 - DNA, 25 bp, Homo sapien
tagcagagtaccactagtaatgcac

SEQ ID NO: 3274785 - DNA, 25 bp, Homo sapien
tgtgcaactccatccgttatgtaag

SEQ ID NO: 3274786 - DNA, 25 bp, Homo sapien
catgtattgaagctagaatcgagtc

SEQ ID NO: 3274787 - DNA, 25 bp, Homo sapien
cataatgaacactagtcaccagcac

SEQ ID NO: 3274788 - DNA, 25 bp, Homo sapien
gaaatgatccacctcatatgtgagt

SEQ ID NO: 3274789 - DNA, 25 bp, Homo sapien
tatgtgagtccgtccaaaagatgtt

SEQ ID NO: 3274790 - DNA, 25 bp, Homo sapien
gagtgatttattgttcctgaggaag

SEQ ID NO: 3274791 - DNA, 25 bp, Homo sapien
gggccagtgttctatatcggttata

SEQ ID NO: 3274792 - DNA, 25 bp, Homo sapien
tccagggttacatagacagatgatg

SEQ ID NO: 3274793 - DNA, 25 bp, Homo sapien
catagttgaggtcaactattgaagg

SEQ ID NO: 3274794 - DNA, 25 bp, Homo sapien
tgctggatgtttgcatgtacctatt

SEQ ID NO: 3274795 - DNA, 25 bp, Homo sapien
catgtacctattgatgcatagttga

SEQ ID NO: 3274796 - DNA, 25 bp, Homo sapien
tgccttctatagaagggtttaagct

SEQ ID NO: 3274797 - DNA, 25 bp, Homo sapien
ttgccttctatagaagggtttaagc

SEQ ID NO: 3274798 - DNA, 25 bp, Homo sapien
attgccttctatagaagggtttaag

SEQ ID NO: 3274799 - DNA, 25 bp, Homo sapien
gccttctatagaagggtttaagctc

SEQ ID NO: 3274800 - DNA, 25 bp, Homo sapien
tgtgtgttcacagggagtcatgtcc

SEQ ID NO: 3274801 - DNA, 25 bp, Homo sapien
gatagcatagccagattacaaggca

SEQ ID NO: 3274802 - DNA, 25 bp, Homo sapien
tacaggactacaagaaatctggccc

SEQ ID NO: 3274803 - DNA, 25 bp, Homo sapien
tctgatcttcagagtgccctggttt

SEQ ID NO: 3274804 - DNA, 25 bp, Homo sapien
gctcttcaagaaacggattccatgt

SEQ ID NO: 3274805 - DNA, 25 bp, Homo sapien
ctcaggggcgttgtatgaaatgctc

SEQ ID NO: 3274806 - DNA, 25 bp, Homo sapien
tccaaagtgtgttcctcaggggcgt

SEQ ID NO: 3274807 - DNA, 25 bp, Homo sapien
gcaaacatggtagttggacagggat

SEQ ID NO: 3274808 - DNA, 25 bp, Homo sapien
tagccatcactgtaagcatatgata

SEQ ID NO: 3274809 - DNA, 25 bp, Homo sapien
gcagtcattagccatcactgtaagc

SEQ ID NO: 3274810 - DNA, 25 bp, Homo sapien
gtagcagtcattagccatcactgta

SEQ ID NO: 3274811 - DNA, 25 bp, Homo sapien
cagtcattagccatcactgtaagca

SEQ ID NO: 3274812 - DNA, 25 bp, Homo sapien
ctggcatcggctctgaagcttttgt

SEQ ID NO: 3274813 - DNA, 25 bp, Homo sapien
ggatgccttgataagccaaaatgca

SEQ ID NO: 3274814 - DNA, 25 bp, Homo sapien
tggcatcggctctgaagcttttgtg

SEQ ID NO: 3274815 - DNA, 25 bp, Homo sapien
aaaggatgccttgataagccaaaat

SEQ ID NO: 3274816 - DNA, 25 bp, Homo sapien
ccttgccggatatcactggtcttga

SEQ ID NO: 3274817 - DNA, 25 bp, Homo sapien
ggacagcctggaccttgccggatat

SEQ ID NO: 3274818 - DNA, 25 bp, Homo sapien
cacatggagcttgtcgggtgtcctg

SEQ ID NO: 3274819 - DNA, 25 bp, Homo sapien
tgtcctggggtgtcagcactctgca

SEQ ID NO: 3274820 - DNA, 25 bp, Homo sapien
aattgaccccaatccaaagcagtgc

SEQ ID NO: 3274821 - DNA, 25 bp, Homo sapien
taaactgcgcgaagaatggaaccct

SEQ ID NO: 3274822 - DNA, 25 bp, Homo sapien
gattgaacccgtgagaaccttatta

SEQ ID NO: 3274823 - DNA, 25 bp, Homo sapien
agttacgtggactgcaattgacccc

SEQ ID NO: 3274824 - DNA, 25 bp, Homo sapien
gaagaagagccccaagagaatccgt

SEQ ID NO: 3274825 - DNA, 25 bp, Homo sapien
caagtcactaagttggttgaggccc

SEQ ID NO: 3274826 - DNA, 25 bp, Homo sapien
caagagaatccgtgctgttaggagg

SEQ ID NO: 3274827 - DNA, 25 bp, Homo sapien
ggttcacaagatcgagccttcagct

SEQ ID NO: 3274828 - DNA, 25 bp, Homo sapien
ctgcttgggccacagacacacattc

SEQ ID NO: 3274829 - DNA, 25 bp, Homo sapien
gacacaaactgacacgcagacacag

SEQ ID NO: 3274830 - DNA, 25 bp, Homo sapien
ccccgatcagcaggcggagccctgg

SEQ ID NO: 3274831 - DNA, 25 bp, Homo sapien
acacattccccgagacagacacaaa

SEQ ID NO: 3274832 - DNA, 25 bp, Homo sapien
gcgcgattactttaggccctcaatg

SEQ ID NO: 3274833 - DNA, 25 bp, Homo sapien
tccctttattcttagcgcgattact

SEQ ID NO: 3274834 - DNA, 25 bp, Homo sapien
gacgacaatagccttgggcctaccc

SEQ ID NO: 3274835 - DNA, 25 bp, Homo sapien
tgaaatgagggcgacgccgttttcc

SEQ ID NO: 3274836 - DNA, 25 bp, Homo sapien
gctttggcaccgttgggtctttgga

SEQ ID NO: 3274837 - DNA, 25 bp, Homo sapien
ccccaagcgaatccgggatggaggt

SEQ ID NO: 3274838 - DNA, 25 bp, Homo sapien
gaacatactgctcttcactaaggcg

SEQ ID NO: 3274839 - DNA, 25 bp, Homo sapien
tctttggagcgaagataggacgctg

SEQ ID NO: 3274840 - DNA, 25 bp, Homo sapien
cctccattcgccccgcagctggggg

SEQ ID NO: 3274841 - DNA, 25 bp, Homo sapien
ctgctgcgccgcccttgccgggttc

SEQ ID NO: 3274842 - DNA, 25 bp, Homo sapien
gctgcgccgcccttgccgggttcgc

SEQ ID NO: 3274843 - DNA, 25 bp, Homo sapien
tgcgccgcccttgccgggttcgcct

SEQ ID NO: 3274844 - DNA, 25 bp, Homo sapien
tgcgcgctcctgcttgcgaaacttg

SEQ ID NO: 3274845 - DNA, 25 bp, Homo sapien
tgctgtccgggtcagtgctcttggc

SEQ ID NO: 3274846 - DNA, 25 bp, Homo sapien
tgctctcgtcgtccctggaagagtc

SEQ ID NO: 3274847 - DNA, 25 bp, Homo sapien
gagtcagactttttgcccgaggagc

SEQ ID NO: 3274848 - DNA, 25 bp, Homo sapien
taaataaaatgccaagagcgtgcgc

SEQ ID NO: 3274849 - DNA, 25 bp, Homo sapien
tataatacgggagcaaagtctgcac

SEQ ID NO: 3274850 - DNA, 25 bp, Homo sapien
ccatgtctctgctcgggtgggaaac

SEQ ID NO: 3274851 - DNA, 25 bp, Homo sapien
gatgcaagtcacagtttccgggaaa

SEQ ID NO: 3274852 - DNA, 25 bp, Homo sapien
acctccccggaccagtgcggcggag

SEQ ID NO: 3274853 - DNA, 25 bp, Homo sapien
cacacctccccggaccagtgcggcg

SEQ ID NO: 3274854 - DNA, 25 bp, Homo sapien
agcggggtcggtttccaggcgcgcg

SEQ ID NO: 3274855 - DNA, 25 bp, Homo sapien
ccccggaccagtgcggcggagcggg

SEQ ID NO: 3274856 - DNA, 25 bp, Homo sapien
gccgtggtccgtgaagagtttgtaa

SEQ ID NO: 3274857 - DNA, 25 bp, Homo sapien
tgtgaggtcgatcttcagggccagc

SEQ ID NO: 3274858 - DNA, 25 bp, Homo sapien
ggtagtgagtctccgcgaagaccct

SEQ ID NO: 3274859 - DNA, 25 bp, Homo sapien
gcttctcgttgaggccgccgtggtc

SEQ ID NO: 3274860 - DNA, 25 bp, Homo sapien
acagaggagacagaaagtgagcaaa

SEQ ID NO: 3274861 - DNA, 25 bp, Homo sapien
aaagtgagcaaatcagccggcagct

SEQ ID NO: 3274862 - DNA, 25 bp, Homo sapien
atcagccggcagctcgccggccgtg

SEQ ID NO: 3274863 - DNA, 25 bp, Homo sapien
tgacagaggagacagaaagtgagca

SEQ ID NO: 3274864 - DNA, 25 bp, Homo sapien
ggcttcctccgctgagaaagctgaa

SEQ ID NO: 3274865 - DNA, 25 bp, Homo sapien
aaggcggcttcctccgctgagaaag

SEQ ID NO: 3274866 - DNA, 25 bp, Homo sapien
gaaaggcggcttcctccgctgagaa

SEQ ID NO: 3274867 - DNA, 25 bp, Homo sapien
tcctccgctgagaaagctgaaggtc

SEQ ID NO: 3274868 - DNA, 25 bp, Homo sapien
ttatcgggttatactggaagccact

SEQ ID NO: 3274869 - DNA, 25 bp, Homo sapien
cgtacggactgctctggtggtccct

SEQ ID NO: 3274870 - DNA, 25 bp, Homo sapien
atcccggcgtgagggaagggcagcc

SEQ ID NO: 3274871 - DNA, 25 bp, Homo sapien
gcagccggacgtggccccaaaagtg

SEQ ID NO: 3274872 - DNA, 25 bp, Homo sapien
ccagccatacaggactcgtaggcag

SEQ ID NO: 3274873 - DNA, 25 bp, Homo sapien
agccatacaggactcgtaggcagag

SEQ ID NO: 3274874 - DNA, 25 bp, Homo sapien
cagccatacaggactcgtaggcaga

SEQ ID NO: 3274875 - DNA, 25 bp, Homo sapien
gctcagccaagtggaaaaatgaaat

SEQ ID NO: 3274876 - DNA, 25 bp, Homo sapien
gatggctcagccaagtggaaaaatg

SEQ ID NO: 3274877 - DNA, 25 bp, Homo sapien
ctggatggctcagccaagtggaaaa

SEQ ID NO: 3274878 - DNA, 25 bp, Homo sapien
aaataaaagatggatatggagaagg

SEQ ID NO: 3274879 - DNA, 25 bp, Homo sapien
cctatgagatgccttgtctgaggtc

SEQ ID NO: 3274880 - DNA, 25 bp, Homo sapien
tagtcctcataataaacttggctct

SEQ ID NO: 3274881 - DNA, 25 bp, Homo sapien
ggtctctagagcatatagtcctcat

SEQ ID NO: 3274882 - DNA, 25 bp, Homo sapien
gttttatgaaaaagcctcctatgag

SEQ ID NO: 3274883 - DNA, 25 bp, Homo sapien
taactcatccgtctattgggctggc

SEQ ID NO: 3274884 - DNA, 25 bp, Homo sapien
gaactgagctgtccaacctccctat

SEQ ID NO: 3274885 - DNA, 25 bp, Homo sapien
ttggacaatagcaaagcggttggtc

SEQ ID NO: 3274886 - DNA, 25 bp, Homo sapien
tgctggcgctttttacatgacaata

SEQ ID NO: 3274887 - DNA, 25 bp, Homo sapien
tcaggtgcccacaatcctccacaga

SEQ ID NO: 3274888 - DNA, 25 bp, Homo sapien
caggtgcccacaatcctccacagac

SEQ ID NO: 3274889 - DNA, 25 bp, Homo sapien
ccttttaggtttgcggactgtagtg

SEQ ID NO: 3274890 - DNA, 25 bp, Homo sapien
aaggagcgagcagtgatttgtggac

SEQ ID NO: 3274891 - DNA, 25 bp, Homo sapien
gcacctttcttgtccgattcctcag

SEQ ID NO: 3274892 - DNA, 25 bp, Homo sapien
aaattcttgccatgtaaatgcccag

SEQ ID NO: 3274893 - DNA, 25 bp, Homo sapien
gaaagcttagctgaatcgccgtgtg

SEQ ID NO: 3274894 - DNA, 25 bp, Homo sapien
tcatttggtttgttaggccctagca

SEQ ID NO: 3274895 - DNA, 25 bp, Homo sapien
cctagcagaataagggaaactattt

SEQ ID NO: 3274896 - DNA, 25 bp, Homo sapien
tcattaaatccttcctctcggtgga

SEQ ID NO: 3274897 - DNA, 25 bp, Homo sapien
caaattgcaacgctctaaatggttt

SEQ ID NO: 3274898 - DNA, 25 bp, Homo sapien
tggtcaccagacaagaggagaaaag

SEQ ID NO: 3274899 - DNA, 25 bp, Homo sapien
tgtacaatgcgtatttgataaagaa

SEQ ID NO: 3274900 - DNA, 25 bp, Homo sapien
tactgcggcgggaaacaaattgcaa

SEQ ID NO: 3274901 - DNA, 25 bp, Homo sapien
cacaaggctgagatcgtccaagttt

SEQ ID NO: 3274902 - DNA, 25 bp, Homo sapien
ggataggttgtcaagcacaaggctg

SEQ ID NO: 3274903 - DNA, 25 bp, Homo sapien
tttctgaacgcaactctgccgccga

SEQ ID NO: 3274904 - DNA, 25 bp, Homo sapien
tgctgtagggtttaagcgcgtttcc

SEQ ID NO: 3274905 - DNA, 25 bp, Homo sapien
ggtgccgtgagccttctcgcctttg

SEQ ID NO: 3274906 - DNA, 25 bp, Homo sapien
gagccttctcgcctttgtaccagga

SEQ ID NO: 3274907 - DNA, 25 bp, Homo sapien
gcggttccggaacgcctcgccagcc

SEQ ID NO: 3274908 - DNA, 25 bp, Homo sapien
tcgcctttgtaccaggagacctttc

SEQ ID NO: 3274909 - DNA, 25 bp, Homo sapien
atgagcaaatgcgcttgacttcatt

SEQ ID NO: 3274910 - DNA, 25 bp, Homo sapien
tcggatgagcaaatgcgcttgactt

SEQ ID NO: 3274911 - DNA, 25 bp, Homo sapien
ggatgagcaaatgcgcttgacttca

SEQ ID NO: 3274912 - DNA, 25 bp, Homo sapien
gagcaaatgcgcttgacttcatttt

SEQ ID NO: 3274913 - DNA, 25 bp, Homo sapien
tccatcatatccagaattaactcca

SEQ ID NO: 3274914 - DNA, 25 bp, Homo sapien
catgaagatgccgatttcgtccacc

SEQ ID NO: 3274915 - DNA, 25 bp, Homo sapien
gggctctatgttgcctccatcatat

SEQ ID NO: 3274916 - DNA, 25 bp, Homo sapien
ggtcctggtactcaagggctctatg

SEQ ID NO: 3274917 - DNA, 25 bp, Homo sapien
ccagcaagtctggagtgcgagggag

SEQ ID NO: 3274918 - DNA, 25 bp, Homo sapien
gggagaacatgagtgcagtctcgca

SEQ ID NO: 3274919 - DNA, 25 bp, Homo sapien
tcttcttgacgatgacattctttct

SEQ ID NO: 3274920 - DNA, 25 bp, Homo sapien
tcgcactgggacaagttccacagta

SEQ ID NO: 3274921 - DNA, 25 bp, Homo sapien
tgacagcgtccaagggtttctgagg

SEQ ID NO: 3274922 - DNA, 25 bp, Homo sapien
tttctgagggcagaaagacccagcc

SEQ ID NO: 3274923 - DNA, 25 bp, Homo sapien
cagcccgaaaagtctctctctaaca

SEQ ID NO: 3274924 - DNA, 25 bp, Homo sapien
tcttcattgttcgtgaggcagggct

SEQ ID NO: 3274925 - DNA, 25 bp, Homo sapien
tcaacctcaattctggtccctgtaa

SEQ ID NO: 3274926 - DNA, 25 bp, Homo sapien
caacctcaattctggtccctgtaac

SEQ ID NO: 3274927 - DNA, 25 bp, Homo sapien
tgtaaccacaccaataggggagaaa

SEQ ID NO: 3274928 - DNA, 25 bp, Homo sapien
ttgtgttagctccaggaaccttctg

SEQ ID NO: 3274929 - DNA, 25 bp, Homo sapien
tttgggctcccatgggtagcccagg

SEQ ID NO: 3274930 - DNA, 25 bp, Homo sapien
gctcccatgggtagcccagggactg

SEQ ID NO: 3274931 - DNA, 25 bp, Homo sapien
tccctttgggctcccatgggtagcc

SEQ ID NO: 3274932 - DNA, 25 bp, Homo sapien
tgttattccctttgggctcccatgg

SEQ ID NO: 3274933 - DNA, 25 bp, Homo sapien
aacacttggtcttgtaggttcctgg

SEQ ID NO: 3274934 - DNA, 25 bp, Homo sapien
cctctgcagtgtccacgtttaagcc

SEQ ID NO: 3274935 - DNA, 25 bp, Homo sapien
gcagtgtccacgtttaagcctttaa

SEQ ID NO: 3274936 - DNA, 25 bp, Homo sapien
gaatatctttctgatgggtcacggt

SEQ ID NO: 3274937 - DNA, 25 bp, Homo sapien
cacggtaagggcaccaccaaataga

SEQ ID NO: 3274938 - DNA, 25 bp, Homo sapien
gtgaagcaaggaatgtgccgaacat

SEQ ID NO: 3274939 - DNA, 25 bp, Homo sapien
cagtgactcagaaggacagagaagt

SEQ ID NO: 3274940 - DNA, 25 bp, Homo sapien
ttctagctcaatccccagtgactca

SEQ ID NO: 3274941 - DNA, 25 bp, Homo sapien
tggtatggccagagttttctagctc

SEQ ID NO: 3274942 - DNA, 25 bp, Homo sapien
gagttctgagtcctcgcagatgcca

SEQ ID NO: 3274943 - DNA, 25 bp, Homo sapien
tgttttttccctatagaatgtggag

SEQ ID NO: 3274944 - DNA, 25 bp, Homo sapien
ttttcaaggtctaagcagtttgtct

SEQ ID NO: 3274945 - DNA, 25 bp, Homo sapien
gcagatgccatctaaccgaggagcc

SEQ ID NO: 3274946 - DNA, 25 bp, Homo sapien
ggttttccacaagctgcgtcagaga

SEQ ID NO: 3274947 - DNA, 25 bp, Homo sapien
caagctgcgtcagagacagctgaag

SEQ ID NO: 3274948 - DNA, 25 bp, Homo sapien
tttccacaagctgcgtcagagacag

SEQ ID NO: 3274949 - DNA, 25 bp, Homo sapien
aatggttttccacaagctgcgtcag

SEQ ID NO: 3274950 - DNA, 25 bp, Homo sapien
cttcttttcataaggctccttgtca

SEQ ID NO: 3274951 - DNA, 25 bp, Homo sapien
agccttcttttcataaggctccttg

SEQ ID NO: 3274952 - DNA, 25 bp, Homo sapien
ctccttgtcatctgcagcagtgtta

SEQ ID NO: 3274953 - DNA, 25 bp, Homo sapien
catctgcagcagtgttattccacat

SEQ ID NO: 3274954 - DNA, 25 bp, Homo sapien
cacatctaaatgtaatttgaacttt

SEQ ID NO: 3274955 - DNA, 25 bp, Homo sapien
ttgccctttgagatacaccaagcat

SEQ ID NO: 3274956 - DNA, 25 bp, Homo sapien
cgaggcttctctacagagcgatcac

SEQ ID NO: 3274957 - DNA, 25 bp, Homo sapien
tacagagcgatcacagttttcagca

SEQ ID NO: 3274958 - DNA, 25 bp, Homo sapien
tcagctgaatgtgggacaagacaaa

SEQ ID NO: 3274959 - DNA, 25 bp, Homo sapien
ggtagtattgaaagatgaccccata

SEQ ID NO: 3274960 - DNA, 25 bp, Homo sapien
ctccatagtttgacacaatcagctg

SEQ ID NO: 3274961 - DNA, 25 bp, Homo sapien
tacagggctaagagttatggatgca

SEQ ID NO: 3274962 - DNA, 25 bp, Homo sapien
ttatgtcgcgccagactcctccggt

SEQ ID NO: 3274963 - DNA, 25 bp, Homo sapien
ggcctgagtggcaccgcgtgcccct

SEQ ID NO: 3274964 - DNA, 25 bp, Homo sapien
ctcctccggtgaggagcccgcagag

SEQ ID NO: 3274965 - DNA, 25 bp, Homo sapien
cgcgccagactcctccggtgaggag

SEQ ID NO: 3274966 - DNA, 25 bp, Homo sapien
taaagacacctcctaaaccatggga

SEQ ID NO: 3274967 - DNA, 25 bp, Homo sapien
gggaaaaaggtcaggctactattga

SEQ ID NO: 3274968 - DNA, 25 bp, Homo sapien
caggctactattgacaagtatgtaa

SEQ ID NO: 3274969 - DNA, 25 bp, Homo sapien
tactattgacaagtatgtaaagaca

SEQ ID NO: 3274970 - DNA, 25 bp, Homo sapien
cgcaataccagtgtatgaagacaat

SEQ ID NO: 3274971 - DNA, 25 bp, Homo sapien
cataatggcgatgtttatgaaggcc

SEQ ID NO: 3274972 - DNA, 25 bp, Homo sapien
cacaatggcgtccttataaaccata

SEQ ID NO: 3274973 - DNA, 25 bp, Homo sapien
ggcgtccttataaaccataatggcg

SEQ ID NO: 3274974 - DNA, 25 bp, Homo sapien
aagacgtgatctcttgcaccccggt

SEQ ID NO: 3274975 - DNA, 25 bp, Homo sapien
gcagactcgggttgataaagcaata

SEQ ID NO: 3274976 - DNA, 25 bp, Homo sapien
ccaaagccctgagtgaagacgtgat

SEQ ID NO: 3274977 - DNA, 25 bp, Homo sapien
gactattttaatgaacccttggcaa

SEQ ID NO: 3274978 - DNA, 25 bp, Homo sapien
gagggtcgtggattcggagctgaat

SEQ ID NO: 3274979 - DNA, 25 bp, Homo sapien
gtctaaatccacactccccaacttg

SEQ ID NO: 3274980 - DNA, 25 bp, Homo sapien
ttgtaaggacatcagctcacacccg

SEQ ID NO: 3274981 - DNA, 25 bp, Homo sapien
tcacacccgttgttatgtctaaatc

SEQ ID NO: 3274982 - DNA, 25 bp, Homo sapien
cttggggcagcagtttgggggctga

SEQ ID NO: 3274983 - DNA, 25 bp, Homo sapien
gcagcagtttgggggctgagctgga

SEQ ID NO: 3274984 - DNA, 25 bp, Homo sapien
ggggcagcagtttgggggctgagct

SEQ ID NO: 3274985 - DNA, 25 bp, Homo sapien
agcagtttgggggctgagctggaac

SEQ ID NO: 3274986 - DNA, 25 bp, Homo sapien
tgagagtatcacaagcccgccctac

SEQ ID NO: 3274987 - DNA, 25 bp, Homo sapien
tgtgagagtatcacaagcccgccct

SEQ ID NO: 3274988 - DNA, 25 bp, Homo sapien
ggtgtgagagtatcacaagcccgcc

SEQ ID NO: 3274989 - DNA, 25 bp, Homo sapien
gggtgtgagagtatcacaagcccgc

SEQ ID NO: 3274990 - DNA, 25 bp, Homo sapien
ggcccaaagccagactctactcccg

SEQ ID NO: 3274991 - DNA, 25 bp, Homo sapien
tctactcccgcgcagatgcgggaag

SEQ ID NO: 3274992 - DNA, 25 bp, Homo sapien
cgaactggtccccgacgactgcggg

SEQ ID NO: 3274993 - DNA, 25 bp, Homo sapien
tgatcacgcggagaggattccttct

SEQ ID NO: 3274994 - DNA, 25 bp, Homo sapien
tcctttactaataacctgtcaagac

SEQ ID NO: 3274995 - DNA, 25 bp, Homo sapien
cgaggaataagcgagcctcagcatg

SEQ ID NO: 3274996 - DNA, 25 bp, Homo sapien
gggccagagcgagaagcatcttcat

SEQ ID NO: 3274997 - DNA, 25 bp, Homo sapien
taacctgtcaagactttaaagaaca

SEQ ID NO: 3274998 - DNA, 25 bp, Homo sapien
ggccacagcgcaggctgcctcggcc

SEQ ID NO: 3274999 - DNA, 25 bp, Homo sapien
ccacagcgcaggctgcctcggcctc

SEQ ID NO: 3275000 - DNA, 25 bp, Homo sapien
caaacttggccatgcccggaaagga

SEQ ID NO: 3275001 - DNA, 25 bp, Homo sapien
gacaggtgtcgaactgcacttccct

SEQ ID NO: 3275002 - DNA, 25 bp, Homo sapien
gatctccaagcggagcagctggaca

SEQ ID NO: 3275003 - DNA, 25 bp, Homo sapien
gctttccttgggtgcgaactcgagt

SEQ ID NO: 3275004 - DNA, 25 bp, Homo sapien
tgtggcttggcaatcctattcgttc

SEQ ID NO: 3275005 - DNA, 25 bp, Homo sapien
taagcgggctccaaaaagtggtgtg

SEQ ID NO: 3275006 - DNA, 25 bp, Homo sapien
tcagtgcgaataatctccaaatacc

SEQ ID NO: 3275007 - DNA, 25 bp, Homo sapien
cttggcgggcagaaaattcagtgcg

SEQ ID NO: 3275008 - DNA, 25 bp, Homo sapien
cccatttagcgcctttgactggtca

SEQ ID NO: 3275009 - DNA, 25 bp, Homo sapien
tggatccgtattcccagttagggcg

SEQ ID NO: 3275010 - DNA, 25 bp, Homo sapien
tagggcgccttttgatgtccccatt

SEQ ID NO: 3275011 - DNA, 25 bp, Homo sapien
tctcttgcgattggatccgtattcc

SEQ ID NO: 3275012 - DNA, 25 bp, Homo sapien
acggcagtgccggaggccgcgtctc

SEQ ID NO: 3275013 - DNA, 25 bp, Homo sapien
ccgctgatggatccgttttcaaacg

SEQ ID NO: 3275014 - DNA, 25 bp, Homo sapien
gctgatggatccgttttcaaacggc

SEQ ID NO: 3275015 - DNA, 25 bp, Homo sapien
atggatccgttttcaaacggcgcgg

SEQ ID NO: 3275016 - DNA, 25 bp, Homo sapien
cagggctcggcaaggggtcgctgca

SEQ ID NO: 3275017 - DNA, 25 bp, Homo sapien
cttagtaatcgcgcgggcagggctc

SEQ ID NO: 3275018 - DNA, 25 bp, Homo sapien
tcgctgcaagggtcgcgctcacccg

SEQ ID NO: 3275019 - DNA, 25 bp, Homo sapien
gcaaggggtcgctgcaagggtcgcg

SEQ ID NO: 3275020 - DNA, 25 bp, Homo sapien
gagagaaggttcgaacagttttgtc

SEQ ID NO: 3275021 - DNA, 25 bp, Homo sapien
gaaggttcgaacagttttgtctctc

SEQ ID NO: 3275022 - DNA, 25 bp, Homo sapien
ggtctcgcgcccacggtgccgcagc

SEQ ID NO: 3275023 - DNA, 25 bp, Homo sapien
tccgcaggggtctcgcgcccacggt

SEQ ID NO: 3275024 - DNA, 25 bp, Homo sapien
ccgccccctgggcgccctgccccat

SEQ ID NO: 3275025 - DNA, 25 bp, Homo sapien
tgaaggtgcgcgcattccagacggc

SEQ ID NO: 3275026 - DNA, 25 bp, Homo sapien
tccgccggtctcgattattttatac

SEQ ID NO: 3275027 - DNA, 25 bp, Homo sapien
gcgcattccagacggctctgacctg

SEQ ID NO: 3275028 - DNA, 25 bp, Homo sapien
ctgcctccgccggtctcgattattt

SEQ ID NO: 3275029 - DNA, 25 bp, Homo sapien
acagacttcagtgccgtgccaaaaa

SEQ ID NO: 3275030 - DNA, 25 bp, Homo sapien
ggttttgacagaaaggcccatcgcc

SEQ ID NO: 3275031 - DNA, 25 bp, Homo sapien
taccagcgattttacgggcgacatg

SEQ ID NO: 3275032 - DNA, 25 bp, Homo sapien
tcgtgacagccttaagcatctcggt

SEQ ID NO: 3275033 - DNA, 25 bp, Homo sapien
aggagcggaaccaggtttccaaatg

SEQ ID NO: 3275034 - DNA, 25 bp, Homo sapien
tgcctagaggtaaacgtgtccccga

SEQ ID NO: 3275035 - DNA, 25 bp, Homo sapien
tgcgctcctgctctttgcctagagg

SEQ ID NO: 3275036 - DNA, 25 bp, Homo sapien
ccagatgttcttctattgtgcacag

SEQ ID NO: 3275037 - DNA, 25 bp, Homo sapien
tgacttggagccttgctttagggat

SEQ ID NO: 3275038 - DNA, 25 bp, Homo sapien
taggatctccgttttactcagaagg

SEQ ID NO: 3275039 - DNA, 25 bp, Homo sapien
tggagccttgctttagggataggat

SEQ ID NO: 3275040 - DNA, 25 bp, Homo sapien
tagggataggatctccgttttactc

SEQ ID NO: 3275041 - DNA, 25 bp, Homo sapien
gcttgccactctaatcctctgatct

SEQ ID NO: 3275042 - DNA, 25 bp, Homo sapien
gaaaacttcactgttctgaccagag

SEQ ID NO: 3275043 - DNA, 25 bp, Homo sapien
gacaaaacttgagaacttgctgcca

SEQ ID NO: 3275044 - DNA, 25 bp, Homo sapien
ccaatatcagccctgaaaagaagtg

SEQ ID NO: 3275045 - DNA, 25 bp, Homo sapien
tggtagactgtcattggaagatcat

SEQ ID NO: 3275046 - DNA, 25 bp, Homo sapien
cttggtagactgtcattggaagatc

SEQ ID NO: 3275047 - DNA, 25 bp, Homo sapien
ttggtagactgtcattggaagatca

SEQ ID NO: 3275048 - DNA, 25 bp, Homo sapien
ggtagactgtcattggaagatcatg

SEQ ID NO: 3275049 - DNA, 25 bp, Homo sapien
cccttttgataggaagagccacttc

SEQ ID NO: 3275050 - DNA, 25 bp, Homo sapien
catctttgcaagaggcaaacgctcc

SEQ ID NO: 3275051 - DNA, 25 bp, Homo sapien
gactctcccatctgactgccaaggt

SEQ ID NO: 3275052 - DNA, 25 bp, Homo sapien
gactgccaaggttaattcatcatct

SEQ ID NO: 3275053 - DNA, 25 bp, Homo sapien
gaaacatggactgttgacattgccc

SEQ ID NO: 3275054 - DNA, 25 bp, Homo sapien
ggtttctgtggcacactggtcagca

SEQ ID NO: 3275055 - DNA, 25 bp, Homo sapien
gtacctgggaatacaccatgagcca

SEQ ID NO: 3275056 - DNA, 25 bp, Homo sapien
cactatggctgacactgtgtgggtt

SEQ ID NO: 3275057 - DNA, 25 bp, Homo sapien
tcctgtctccatagtaacgtagtta

SEQ ID NO: 3275058 - DNA, 25 bp, Homo sapien
cctcatctgttgaagtacttgtact

SEQ ID NO: 3275059 - DNA, 25 bp, Homo sapien
taaccttcagatcgtcctcatctgt

SEQ ID NO: 3275060 - DNA, 25 bp, Homo sapien
catccccaggtttggataaatatat

SEQ ID NO: 3275061 - DNA, 25 bp, Homo sapien
tccactgagattgggtgtatataga

SEQ ID NO: 3275062 - DNA, 25 bp, Homo sapien
aggaactactgccatttccactgag

SEQ ID NO: 3275063 - DNA, 25 bp, Homo sapien
ttgggtgtatatagaaaccacagca

SEQ ID NO: 3275064 - DNA, 25 bp, Homo sapien
gaactactgccatttccactgagat

SEQ ID NO: 3275065 - DNA, 25 bp, Homo sapien
gaaagtaacagcagagtgccatgga

SEQ ID NO: 3275066 - DNA, 25 bp, Homo sapien
aaagtaacagcagagtgccatggaa

SEQ ID NO: 3275067 - DNA, 25 bp, Homo sapien
agtaacagcagagtgccatggaagc

SEQ ID NO: 3275068 - DNA, 25 bp, Homo sapien
aagtaacagcagagtgccatggaag

SEQ ID NO: 3275069 - DNA, 25 bp, Homo sapien
tgcgttggaatccccttccctggtc

SEQ ID NO: 3275070 - DNA, 25 bp, Homo sapien
attgcgttggaatccccttccctgg

SEQ ID NO: 3275071 - DNA, 25 bp, Homo sapien
cattgcgttggaatccccttccctg

SEQ ID NO: 3275072 - DNA, 25 bp, Homo sapien
tgctggacaacctgatcgtcattac

SEQ ID NO: 3275073 - DNA, 25 bp, Homo sapien
caaaggctgcatgggtcagtttgag

SEQ ID NO: 3275074 - DNA, 25 bp, Homo sapien
taggtctttgtgagtatcaccttcc

SEQ ID NO: 3275075 - DNA, 25 bp, Homo sapien
ctttggcatctttctggcctggaac

SEQ ID NO: 3275076 - DNA, 25 bp, Homo sapien
tggcatctttctggcctggaacctc

SEQ ID NO: 3275077 - DNA, 25 bp, Homo sapien
ctaggtctttgtgagtatcaccttc

SEQ ID NO: 3275078 - DNA, 25 bp, Homo sapien
tttataagcagattggcaccaacag

SEQ ID NO: 3275079 - DNA, 25 bp, Homo sapien
tacataaatgcatctcggtggaaaa

SEQ ID NO: 3275080 - DNA, 25 bp, Homo sapien
taataatgaaacctgcttgcccact

SEQ ID NO: 3275081 - DNA, 25 bp, Homo sapien
gaaaattttactgcgctgtgttgct

SEQ ID NO: 3275082 - DNA, 25 bp, Homo sapien
gagcaataaaatgactataatgtta

SEQ ID NO: 3275083 - DNA, 25 bp, Homo sapien
cactatgtaagtaatccaatggttt

SEQ ID NO: 3275084 - DNA, 25 bp, Homo sapien
ggctagtcttattgtcactatgtaa

SEQ ID NO: 3275085 - DNA, 25 bp, Homo sapien
tgtgtatgtggctagtcttattgtc

SEQ ID NO: 3275086 - DNA, 25 bp, Homo sapien
cattttagcagaattataatatttc

SEQ ID NO: 3275087 - DNA, 25 bp, Homo sapien
caataatccatgttggttttaacaa

SEQ ID NO: 3275088 - DNA, 25 bp, Homo sapien
tactgttggtcaagataattggtca

SEQ ID NO: 3275089 - DNA, 25 bp, Homo sapien
taaaataacactctgtgctttaaat

SEQ ID NO: 3275090 - DNA, 25 bp, Homo sapien
gcctggctgagacaactagtttccc

SEQ ID NO: 3275091 - DNA, 25 bp, Homo sapien
ggcatacccgtgtaaatctaggagt

SEQ ID NO: 3275092 - DNA, 25 bp, Homo sapien
ggagaattccacagagcctatatga

SEQ ID NO: 3275093 - DNA, 25 bp, Homo sapien
cattggaattctctaggattaggag

SEQ ID NO: 3275094 - DNA, 25 bp, Homo sapien
cctgtgaaagtaagccctgggatcc

SEQ ID NO: 3275095 - DNA, 25 bp, Homo sapien
gcagtgatttactggtccctactga

SEQ ID NO: 3275096 - DNA, 25 bp, Homo sapien
taatcatagcctgctgacactaagg

SEQ ID NO: 3275097 - DNA, 25 bp, Homo sapien
taaatgctaatgtagggctcagagg

SEQ ID NO: 3275098 - DNA, 25 bp, Homo sapien
catattccataggtacatacggcta

SEQ ID NO: 3275099 - DNA, 25 bp, Homo sapien
tactggacggtacaaatattgaggg

SEQ ID NO: 3275100 - DNA, 25 bp, Homo sapien
gattctctggtaaccatggtgtcat

SEQ ID NO: 3275101 - DNA, 25 bp, Homo sapien
cagagtctaggacaaacaccctgtg

SEQ ID NO: 3275102 - DNA, 25 bp, Homo sapien
caggcttgcctaaaacgagttgaaa

SEQ ID NO: 3275103 - DNA, 25 bp, Homo sapien
ttggcaaatcaagggtactggaggt

SEQ ID NO: 3275104 - DNA, 25 bp, Homo sapien
aatattgagcctacatttatgggac

SEQ ID NO: 3275105 - DNA, 25 bp, Homo sapien
tagtgtctaagtcaagttacacccc

SEQ ID NO: 3275106 - DNA, 25 bp, Homo sapien
tttacgtgatttccaaccaagcgca

SEQ ID NO: 3275107 - DNA, 25 bp, Homo sapien
taacaaggagaacgatgtacgtggc

SEQ ID NO: 3275108 - DNA, 25 bp, Homo sapien
tagagaggctcagaaaacctgcgtc

SEQ ID NO: 3275109 - DNA, 25 bp, Homo sapien
gaaaagtatataggacagccgggta

SEQ ID NO: 3275110 - DNA, 25 bp, Homo sapien
cgtttccgggtcacccaggcagctt

SEQ ID NO: 3275111 - DNA, 25 bp, Homo sapien
ccacggcaggcgtcgctaaatgacg

SEQ ID NO: 3275112 - DNA, 25 bp, Homo sapien
gccatcggtgttcgctgatgtccag

SEQ ID NO: 3275113 - DNA, 25 bp, Homo sapien
cgctaaatgacgttgccgtttccgg

SEQ ID NO: 3275114 - DNA, 25 bp, Homo sapien
ccacagatgtagctggtcctccctg

SEQ ID NO: 3275115 - DNA, 25 bp, Homo sapien
gtctgcgatgcagggcggcggcctg

SEQ ID NO: 3275116 - DNA, 25 bp, Homo sapien
tccctgtgccggctccgtctgcgat

SEQ ID NO: 3275117 - DNA, 25 bp, Homo sapien
cagcgaccgccagggtgagtgtccc

SEQ ID NO: 3275118 - DNA, 25 bp, Homo sapien
gttccagggtctttggagctttcca

SEQ ID NO: 3275119 - DNA, 25 bp, Homo sapien
tgcggactccgcaaagttccagggt

SEQ ID NO: 3275120 - DNA, 25 bp, Homo sapien
ttggagctttccagcgcaccttcat

SEQ ID NO: 3275121 - DNA, 25 bp, Homo sapien
ctccgcggttggaaattgcggactc

SEQ ID NO: 3275122 - DNA, 25 bp, Homo sapien
gtttttgccgtagcttgacacacat

SEQ ID NO: 3275123 - DNA, 25 bp, Homo sapien
tcgtttttgccgtagcttgacacac

SEQ ID NO: 3275124 - DNA, 25 bp, Homo sapien
cttcgtttttgccgtagcttgacac

SEQ ID NO: 3275125 - DNA, 25 bp, Homo sapien
cgtttttgccgtagcttgacacaca

SEQ ID NO: 3275126 - DNA, 25 bp, Homo sapien
ttgacactgagaactgataggatct

SEQ ID NO: 3275127 - DNA, 25 bp, Homo sapien
tatcttggcagaacctagtcttatt

SEQ ID NO: 3275128 - DNA, 25 bp, Homo sapien
tcagtgtcccctgttagactcctta

SEQ ID NO: 3275129 - DNA, 25 bp, Homo sapien
ttccatgcccgttgtagctctggag

SEQ ID NO: 3275130 - DNA, 25 bp, Homo sapien
tagtcttattctctggtcttccatg

SEQ ID NO: 3275131 - DNA, 25 bp, Homo sapien
tccattaaatagtgcagttgagcag

SEQ ID NO: 3275132 - DNA, 25 bp, Homo sapien
tcagatttccatgcaagtgcagagg

SEQ ID NO: 3275133 - DNA, 25 bp, Homo sapien
agtccatgttctaataattgccagg

SEQ ID NO: 3275134 - DNA, 25 bp, Homo sapien
gttttctactatgcaaagtccatgt

SEQ ID NO: 3275135 - DNA, 25 bp, Homo sapien
gaagcacctcagttggctcctaagt

SEQ ID NO: 3275136 - DNA, 25 bp, Homo sapien
aactggaaggatgtaactagaagcc

SEQ ID NO: 3275137 - DNA, 25 bp, Homo sapien
cctaatgttggtcaatggaagcacc

SEQ ID NO: 3275138 - DNA, 25 bp, Homo sapien
gacaattatggtcaataacccagga

SEQ ID NO: 3275139 - DNA, 25 bp, Homo sapien
agatatatgaaatcacagtgttctg

SEQ ID NO: 3275140 - DNA, 25 bp, Homo sapien
catgagaactccaataatgagatat

SEQ ID NO: 3275141 - DNA, 25 bp, Homo sapien
ataatgagatatatgaaatcacagt

SEQ ID NO: 3275142 - DNA, 25 bp, Homo sapien
tgagatatatgaaatcacagtgttc

SEQ ID NO: 3275143 - DNA, 25 bp, Homo sapien
ccggcctctgtatccgttactgaaa

SEQ ID NO: 3275144 - DNA, 25 bp, Homo sapien
aagagctataaactgaaagactggc

SEQ ID NO: 3275145 - DNA, 25 bp, Homo sapien
tggtgctctgttgttgctacataca

SEQ ID NO: 3275146 - DNA, 25 bp, Homo sapien
tgttgttgtattagctcttcctccc

SEQ ID NO: 3275147 - DNA, 25 bp, Homo sapien
aagataataaagcatggccgggcgc

SEQ ID NO: 3275148 - DNA, 25 bp, Homo sapien
tgaattatgtaagtctttcaaacca

SEQ ID NO: 3275149 - DNA, 25 bp, Homo sapien
caggaaggtaagtataatccataca

SEQ ID NO: 3275150 - DNA, 25 bp, Homo sapien
ggaaacgtctttggctaagataata

SEQ ID NO: 3275151 - DNA, 25 bp, Homo sapien
tactgaccctaagttatcaaggtgg

SEQ ID NO: 3275152 - DNA, 25 bp, Homo sapien
aatggcggctgggtgatctctttgc

SEQ ID NO: 3275153 - DNA, 25 bp, Homo sapien
cattgttcatatgagaatggcggct

SEQ ID NO: 3275154 - DNA, 25 bp, Homo sapien
acatgtggacccaactgcctgtgtg

SEQ ID NO: 3275155 - DNA, 25 bp, Homo sapien
aaaaggacaagcaattcaggctggg

SEQ ID NO: 3275156 - DNA, 25 bp, Homo sapien
aaggacaagcaattcaggctgggcg

SEQ ID NO: 3275157 - DNA, 25 bp, Homo sapien
aaaggacaagcaattcaggctgggc

SEQ ID NO: 3275158 - DNA, 25 bp, Homo sapien
taaaaggacaagcaattcaggctgg

SEQ ID NO: 3275159 - DNA, 25 bp, Homo sapien
ttgtagttccccgtagattcatgag

SEQ ID NO: 3275160 - DNA, 25 bp, Homo sapien
gttccccgtagattcatgaggattt

SEQ ID NO: 3275161 - DNA, 25 bp, Homo sapien
atgtttgtagttccccgtagattca

SEQ ID NO: 3275162 - DNA, 25 bp, Homo sapien
caaatgtttgtagttccccgtagat

SEQ ID NO: 3275163 - DNA, 25 bp, Homo sapien
gtacgatctcggctcacggcaacct

SEQ ID NO: 3275164 - DNA, 25 bp, Homo sapien
tttttgagacgtagtctgtcaccca

SEQ ID NO: 3275165 - DNA, 25 bp, Homo sapien
ggctggagtgcagtagtacgatctc

SEQ ID NO: 3275166 - DNA, 25 bp, Homo sapien
cctccgcctcccgggctcatgccgt

SEQ ID NO: 3275167 - DNA, 25 bp, Homo sapien
tgcagtcgtaccattgcggctcact

SEQ ID NO: 3275168 - DNA, 25 bp, Homo sapien
ggagtgcagtcgtaccattgcggct

SEQ ID NO: 3275169 - DNA, 25 bp, Homo sapien
cagtcgtaccattgcggctcactgc

SEQ ID NO: 3275170 - DNA, 25 bp, Homo sapien
agtgcagtcgtaccattgcggctca

SEQ ID NO: 3275171 - DNA, 25 bp, Homo sapien
gtgggaagccacaaccatgtcccct

SEQ ID NO: 3275172 - DNA, 25 bp, Homo sapien
tctgcctttgtacgcagaacgctgc

SEQ ID NO: 3275173 - DNA, 25 bp, Homo sapien
taaaaaagtttgcatcttctagggc

SEQ ID NO: 3275174 - DNA, 25 bp, Homo sapien
gaacgctgctcaaaaaccataaata

SEQ ID NO: 3275175 - DNA, 25 bp, Homo sapien
ttacaatgaattagaaagatgcaaa

SEQ ID NO: 3275176 - DNA, 25 bp, Homo sapien
tatttacaatgaattagaaagatgc

SEQ ID NO: 3275177 - DNA, 25 bp, Homo sapien
tttacaatgaattagaaagatgcaa

SEQ ID NO: 3275178 - DNA, 25 bp, Homo sapien
aagtatttacaatgaattagaaaga

SEQ ID NO: 3275179 - DNA, 25 bp, Homo sapien
tatccccaacagaacacgtggcatt

SEQ ID NO: 3275180 - DNA, 25 bp, Homo sapien
catttattgtgcaattttatcccca

SEQ ID NO: 3275181 - DNA, 25 bp, Homo sapien
aacagagacttgacatttattgtgc

SEQ ID NO: 3275182 - DNA, 25 bp, Homo sapien
attttatccccaacagaacacgtgg

SEQ ID NO: 3275183 - DNA, 25 bp, Homo sapien
cataggatcttacgtaggtcaagcc

SEQ ID NO: 3275184 - DNA, 25 bp, Homo sapien
gaattgaacgttggctacctgatgc

SEQ ID NO: 3275185 - DNA, 25 bp, Homo sapien
tagcatgccctgttcccaagaagtg

SEQ ID NO: 3275186 - DNA, 25 bp, Homo sapien
aatgcctaaattgcgcagggtcggg

SEQ ID NO: 3275187 - DNA, 25 bp, Homo sapien
ggtccccattactgcaaatacttgg

SEQ ID NO: 3275188 - DNA, 25 bp, Homo sapien
gatacatctggccacttgtactggc

SEQ ID NO: 3275189 - DNA, 25 bp, Homo sapien
catcagatgagggaagtctcaacct

SEQ ID NO: 3275190 - DNA, 25 bp, Homo sapien
gcagttaagtggttctgaacgggcc

SEQ ID NO: 3275191 - DNA, 25 bp, Homo sapien
gctgggtgacgttttcctacattac

SEQ ID NO: 3275192 - DNA, 25 bp, Homo sapien
ggcacgtgttgccacattaaacata

SEQ ID NO: 3275193 - DNA, 25 bp, Homo sapien
taaataaaagaaccagtgccactgg

SEQ ID NO: 3275194 - DNA, 25 bp, Homo sapien
cagtgtaactttgcagaggactacc

SEQ ID NO: 3275195 - DNA, 25 bp, Homo sapien
tcaactcactgcgaaaagccggcat

SEQ ID NO: 3275196 - DNA, 25 bp, Homo sapien
gacagcatccgatcctagtgagtga

SEQ ID NO: 3275197 - DNA, 25 bp, Homo sapien
ccaaaaaagtgatgcgcgggttcaa

SEQ ID NO: 3275198 - DNA, 25 bp, Homo sapien
tatcatttgagggtcatcctgagcc

SEQ ID NO: 3275199 - DNA, 25 bp, Homo sapien
tgagaagcctggtgatcgatccctt

SEQ ID NO: 3275200 - DNA, 25 bp, Homo sapien
tcttccgagggcatccaccaatcgg

SEQ ID NO: 3275201 - DNA, 25 bp, Homo sapien
gggttggaggtacaatgcatcctaa

SEQ ID NO: 3275202 - DNA, 25 bp, Homo sapien
tccatcctgggaacttttattgaag

SEQ ID NO: 3275203 - DNA, 25 bp, Homo sapien
catgtgtgcatacgcccctaaggtt

SEQ ID NO: 3275204 - DNA, 25 bp, Homo sapien
caacaacgctaaggcaaacggaggt

SEQ ID NO: 3275205 - DNA, 25 bp, Homo sapien
gaaaatgatacagcgatgagacccc

SEQ ID NO: 3275206 - DNA, 25 bp, Homo sapien
tcaagactgagtagatgggccacat

SEQ ID NO: 3275207 - DNA, 25 bp, Homo sapien
agaaggctgaacacttgtacgggga

SEQ ID NO: 3275208 - DNA, 25 bp, Homo sapien
tgaacacttgtacggggagagccac

SEQ ID NO: 3275209 - DNA, 25 bp, Homo sapien
cagccaatgcggtgaaatgagatca

SEQ ID NO: 3275210 - DNA, 25 bp, Homo sapien
tggtgacactgagcggaaggatgca

SEQ ID NO: 3275211 - DNA, 25 bp, Homo sapien
tcccaaggccgcatgagtacttaag

SEQ ID NO: 3275212 - DNA, 25 bp, Homo sapien
cccactgtttgctcgttatgtagac

SEQ ID NO: 3275213 - DNA, 25 bp, Homo sapien
tctgatgaggtatcgaaggagccgt

SEQ ID NO: 3275214 - DNA, 25 bp, Homo sapien
tccagagggcgtctttcgggacctg

SEQ ID NO: 3275215 - DNA, 25 bp, Homo sapien
gtaagcgatgctttgctgtgcccct

SEQ ID NO: 3275216 - DNA, 25 bp, Homo sapien
gctgcggatgccatcctcaagttca

SEQ ID NO: 3275217 - DNA, 25 bp, Homo sapien
tcacaactcaaagggacggggctgc

SEQ ID NO: 3275218 - DNA, 25 bp, Homo sapien
tcaagttcagagttcaccctgtaag

SEQ ID NO: 3275219 - DNA, 25 bp, Homo sapien
tgtggtatcaggagttggttgtggt

SEQ ID NO: 3275220 - DNA, 25 bp, Homo sapien
tggtatcaggagttggttgtggtgc

SEQ ID NO: 3275221 - DNA, 25 bp, Homo sapien
ggtatcaggagttggttgtggtgct

SEQ ID NO: 3275222 - DNA, 25 bp, Homo sapien
gtatcaggagttggttgtggtgctg

SEQ ID NO: 3275223 - DNA, 25 bp, Homo sapien
tcaagtaatctaaaacggtctggca

SEQ ID NO: 3275224 - DNA, 25 bp, Homo sapien
caagtaatctaaaacggtctggcag

SEQ ID NO: 3275225 - DNA, 25 bp, Homo sapien
taatctaaaacggtctggcagggca

SEQ ID NO: 3275226 - DNA, 25 bp, Homo sapien
agtaatctaaaacggtctggcaggg

SEQ ID NO: 3275227 - DNA, 25 bp, Homo sapien
gctctctggatagatgcctagattt

SEQ ID NO: 3275228 - DNA, 25 bp, Homo sapien
gggctctctggatagatgcctagat

SEQ ID NO: 3275229 - DNA, 25 bp, Homo sapien
gcctagatttacacagggaagctgt

SEQ ID NO: 3275230 - DNA, 25 bp, Homo sapien
ctagatttacacagggaagctgtgg

SEQ ID NO: 3275231 - DNA, 25 bp, Homo sapien
gccaccttggcagctgtactgtcta

SEQ ID NO: 3275232 - DNA, 25 bp, Homo sapien
ctgtctaagcagcaatagacaatat

SEQ ID NO: 3275233 - DNA, 25 bp, Homo sapien
tctgttgactgtgccaccttggcag

SEQ ID NO: 3275234 - DNA, 25 bp, Homo sapien
tctaagcagcaatagacaatattgt

SEQ ID NO: 3275235 - DNA, 25 bp, Homo sapien
cagtaataggactgatgattagcct

SEQ ID NO: 3275236 - DNA, 25 bp, Homo sapien
tgtccctaggtcatgaacacgtaat

SEQ ID NO: 3275237 - DNA, 25 bp, Homo sapien
aaggtgtccctaggtcatgaacaca

SEQ ID NO: 3275238 - DNA, 25 bp, Homo sapien
tgattagcctaatttcaaccagtgt

SEQ ID NO: 3275239 - DNA, 25 bp, Homo sapien
gatctctacgacacgattttctgcc

SEQ ID NO: 3275240 - DNA, 25 bp, Homo sapien
tctgagtggctgatgaaagtctctg

SEQ ID NO: 3275241 - DNA, 25 bp, Homo sapien
tttggttatggttctgagtggctga

SEQ ID NO: 3275242 - DNA, 25 bp, Homo sapien
ctggatgatctctacgacacgattt

SEQ ID NO: 3275243 - DNA, 25 bp, Homo sapien
agggcagtgggggtgacaacagaaa

SEQ ID NO: 3275244 - DNA, 25 bp, Homo sapien
cagtgggggtgacaacagaaatacc

SEQ ID NO: 3275245 - DNA, 25 bp, Homo sapien
gcagtgggggtgacaacagaaatac

SEQ ID NO: 3275246 - DNA, 25 bp, Homo sapien
ctaaagagggcagtgggggtgacaa

SEQ ID NO: 3275247 - DNA, 25 bp, Homo sapien
aaggagaaaacggatttgctgcacc

SEQ ID NO: 3275248 - DNA, 25 bp, Homo sapien
cccagggctccaatgtaaaaggaga

SEQ ID NO: 3275249 - DNA, 25 bp, Homo sapien
tgctagctgcaaccatgtctcggac

SEQ ID NO: 3275250 - DNA, 25 bp, Homo sapien
tgcctggcgtgggaaaacactactc

SEQ ID NO: 3275251 - DNA, 25 bp, Homo sapien
ttcttgttgcagtgaaataacctcc

SEQ ID NO: 3275252 - DNA, 25 bp, Homo sapien
agctcttggcatcgaggacaatagc

SEQ ID NO: 3275253 - DNA, 25 bp, Homo sapien
cttgttgcagtgaaataacctcctg

SEQ ID NO: 3275254 - DNA, 25 bp, Homo sapien
ccagctcttggcatcgaggacaata

SEQ ID NO: 3275255 - DNA, 25 bp, Homo sapien
tggccatgggattcggacgttgctg

SEQ ID NO: 3275256 - DNA, 25 bp, Homo sapien
cctcctcttctggcagtgtagatga

SEQ ID NO: 3275257 - DNA, 25 bp, Homo sapien
cagtgtagatgaagatgggtggcca

SEQ ID NO: 3275258 - DNA, 25 bp, Homo sapien
aagatgggtggccatgggattcgga

SEQ ID NO: 3275259 - DNA, 25 bp, Homo sapien
tgtggacccctttcccaatgtgaca

SEQ ID NO: 3275260 - DNA, 25 bp, Homo sapien
ctaagaactcgactgcactgctggg

SEQ ID NO: 3275261 - DNA, 25 bp, Homo sapien
gctttacgcaagaaatcatggactg

SEQ ID NO: 3275262 - DNA, 25 bp, Homo sapien
gggcaaaggcatccaagatcattcg

SEQ ID NO: 3275263 - DNA, 25 bp, Homo sapien
tcattgataggagggcttaaagcaa

SEQ ID NO: 3275264 - DNA, 25 bp, Homo sapien
gccactgcagactcaattcctcatt

SEQ ID NO: 3275265 - DNA, 25 bp, Homo sapien
aattcctcattgataggagggctta

SEQ ID NO: 3275266 - DNA, 25 bp, Homo sapien
agccagccactgcagactcaattcc

SEQ ID NO: 3275267 - DNA, 25 bp, Homo sapien
cttaggagcagtattaccctcagac

SEQ ID NO: 3275268 - DNA, 25 bp, Homo sapien
aagatccaagaattccccactcaaa

SEQ ID NO: 3275269 - DNA, 25 bp, Homo sapien
ctctgagccatcaatccaaagacag

SEQ ID NO: 3275270 - DNA, 25 bp, Homo sapien
ttaccctcagaccttggcagcagga

SEQ ID NO: 3275271 - DNA, 25 bp, Homo sapien
gactgggacctccacatatgtgtat

SEQ ID NO: 3275272 - DNA, 25 bp, Homo sapien
atatgtgtatgtgaggtccctccta

SEQ ID NO: 3275273 - DNA, 25 bp, Homo sapien
tgtgaggtccctcctagtggaagat

SEQ ID NO: 3275274 - DNA, 25 bp, Homo sapien
tcctggaagtgtggactgggacctc

SEQ ID NO: 3275275 - DNA, 25 bp, Homo sapien
atattttctggaccatcggtatata

SEQ ID NO: 3275276 - DNA, 25 bp, Homo sapien
tctggaccatcggtatataaaatag

SEQ ID NO: 3275277 - DNA, 25 bp, Homo sapien
accatcggtatataaaataggatgc

SEQ ID NO: 3275278 - DNA, 25 bp, Homo sapien
ttttctggaccatcggtatataaaa

SEQ ID NO: 3275279 - DNA, 25 bp, Homo sapien
ctacccgtgccgccggtgccggcgg

SEQ ID NO: 3275280 - DNA, 25 bp, Homo sapien
ccgtgccgccggtgccggcggccgc

SEQ ID NO: 3275281 - DNA, 25 bp, Homo sapien
tacccgtgccgccggtgccggcggc

SEQ ID NO: 3275282 - DNA, 25 bp, Homo sapien
cccgtgccgccggtgccggcggccg

SEQ ID NO: 3275283 - DNA, 25 bp, Homo sapien
gctgcgccggagtcctcaagtggcc

SEQ ID NO: 3275284 - DNA, 25 bp, Homo sapien
gacgacagcggcgaacgaagacgac

SEQ ID NO: 3275285 - DNA, 25 bp, Homo sapien
cgacagcggcgaacgaagacgacga

SEQ ID NO: 3275286 - DNA, 25 bp, Homo sapien
gcggctgcgccggagtcctcaagtg

SEQ ID NO: 3275287 - DNA, 25 bp, Homo sapien
tgtggcgggcgtgcaggacggcgac

SEQ ID NO: 3275288 - DNA, 25 bp, Homo sapien
ggatgtggcgggcgtgcaggacggc

SEQ ID NO: 3275289 - DNA, 25 bp, Homo sapien
ctgggatgtggcgggcgtgcaggac

SEQ ID NO: 3275290 - DNA, 25 bp, Homo sapien
atgtggcgggcgtgcaggacggcga

SEQ ID NO: 3275291 - DNA, 25 bp, Homo sapien
agctctgcgcctggaactgctgcgg

SEQ ID NO: 3275292 - DNA, 25 bp, Homo sapien
ggtaggagctctgcgcctggaactg

SEQ ID NO: 3275293 - DNA, 25 bp, Homo sapien
gcccgggggggtaggagctctgcgc

SEQ ID NO: 3275294 - DNA, 25 bp, Homo sapien
ccgggggggtaggagctctgcgcct

SEQ ID NO: 3275295 - DNA, 25 bp, Homo sapien
gtctgccctggtgcgcgcgtgtggg

SEQ ID NO: 3275296 - DNA, 25 bp, Homo sapien
gctccaccagggtgggtcgctcgta

SEQ ID NO: 3275297 - DNA, 25 bp, Homo sapien
gcttggccagcgccggtctcttgct

SEQ ID NO: 3275298 - DNA, 25 bp, Homo sapien
tcttgctggggaacgtcttgaggac

SEQ ID NO: 3275299 - DNA, 25 bp, Homo sapien
aaagagcaagtgtttagggtaatat

SEQ ID NO: 3275300 - DNA, 25 bp, Homo sapien
taaagagcaagtgtttagggtaata

SEQ ID NO: 3275301 - DNA, 25 bp, Homo sapien
cggcttccgaaacgagctcgtggcg

SEQ ID NO: 3275302 - DNA, 25 bp, Homo sapien
gtccggcttccgaaacgagctcgtg

SEQ ID NO: 3275303 - DNA, 25 bp, Homo sapien
gcttccgaaacgagctcgtggcgcc

SEQ ID NO: 3275304 - DNA, 25 bp, Homo sapien
tccggcttccgaaacgagctcgtgg

SEQ ID NO: 3275305 - DNA, 25 bp, Homo sapien
cacagaggaggggctagtcgttggg

SEQ ID NO: 3275306 - DNA, 25 bp, Homo sapien
agtcgttggggcggggtcgtcagag

SEQ ID NO: 3275307 - DNA, 25 bp, Homo sapien
accccaaactctcggggttgcacag

SEQ ID NO: 3275308 - DNA, 25 bp, Homo sapien
gaccccaaactctcggggttgcaca

SEQ ID NO: 3275309 - DNA, 25 bp, Homo sapien
cggaacataaaagctcgcaaggcgt

SEQ ID NO: 3275310 - DNA, 25 bp, Homo sapien
tcttgaagatcttggcccgggtggt

SEQ ID NO: 3275311 - DNA, 25 bp, Homo sapien
tctaccaatcgggaattgctctccg

SEQ ID NO: 3275312 - DNA, 25 bp, Homo sapien
gcctctgagctcatgcggaacataa

SEQ ID NO: 3275313 - DNA, 25 bp, Homo sapien
gacaagataatgaccttccactttg

SEQ ID NO: 3275314 - DNA, 25 bp, Homo sapien
tgagcttctgattgactgtttgatc

SEQ ID NO: 3275315 - DNA, 25 bp, Homo sapien
gagtatgcatactatcatttggtac

SEQ ID NO: 3275316 - DNA, 25 bp, Homo sapien
tctcccaatgttttgtgctactttt

SEQ ID NO: 3275317 - DNA, 25 bp, Homo sapien
gattcccctctcactcgggctaaag

SEQ ID NO: 3275318 - DNA, 25 bp, Homo sapien
ggtagtgctaccaccagagtgatcc

SEQ ID NO: 3275319 - DNA, 25 bp, Homo sapien
tcaaaggttgccttctcagtgagac

SEQ ID NO: 3275320 - DNA, 25 bp, Homo sapien
cacacaccgcagaggcccttatgat

SEQ ID NO: 3275321 - DNA, 25 bp, Homo sapien
tgtcttcagtgtgttctctttgcct

SEQ ID NO: 3275322 - DNA, 25 bp, Homo sapien
ttgtcttcagtgtgttctctttgcc

SEQ ID NO: 3275323 - DNA, 25 bp, Homo sapien
gagtcgttgtcaaaccctgctctca

SEQ ID NO: 3275324 - DNA, 25 bp, Homo sapien
tcatttgtgcgtcacatttccaagt

SEQ ID NO: 3275325 - DNA, 25 bp, Homo sapien
caggttactagggagtcgttgtcaa

SEQ ID NO: 3275326 - DNA, 25 bp, Homo sapien
tatgggaaggcatgttagaaatctc

SEQ ID NO: 3275327 - DNA, 25 bp, Homo sapien
gagtttccaggttgaagcagttgca

SEQ ID NO: 3275328 - DNA, 25 bp, Homo sapien
tcaatttgatccagagtttccaggt

SEQ ID NO: 3275329 - DNA, 25 bp, Homo sapien
ttccaggttgaagcagttgcatttg

SEQ ID NO: 3275330 - DNA, 25 bp, Homo sapien
aatttgatccagagtttccaggttg

SEQ ID NO: 3275331 - DNA, 25 bp, Homo sapien
caagtaggctaacaaggtcttggca

SEQ ID NO: 3275332 - DNA, 25 bp, Homo sapien
gaactccattggtaagctttcagga

SEQ ID NO: 3275333 - DNA, 25 bp, Homo sapien
cagttttctgtgaaggtgaaccgaa

SEQ ID NO: 3275334 - DNA, 25 bp, Homo sapien
tgtgtctttatcaaaccacttggct

SEQ ID NO: 3275335 - DNA, 25 bp, Homo sapien
cttcttttctgtacctctagggaag

SEQ ID NO: 3275336 - DNA, 25 bp, Homo sapien
ttcttttctgtacctctagggaagc

SEQ ID NO: 3275337 - DNA, 25 bp, Homo sapien
tcttttctgtacctctagggaagcc

SEQ ID NO: 3275338 - DNA, 25 bp, Homo sapien
atctaaatatcctgttgctgtggtg

SEQ ID NO: 3275339 - DNA, 25 bp, Homo sapien
tttttgttcaaggtacacacagtga

SEQ ID NO: 3275340 - DNA, 25 bp, Homo sapien
tgctttttgttcaaggtacacacag

SEQ ID NO: 3275341 - DNA, 25 bp, Homo sapien
tacacacagtgatctaaatatcctg

SEQ ID NO: 3275342 - DNA, 25 bp, Homo sapien
tccttgctattacagtttgatacat

SEQ ID NO: 3275343 - DNA, 25 bp, Homo sapien
ttcaagggcctttctgggaatcctg

SEQ ID NO: 3275344 - DNA, 25 bp, Homo sapien
tcagtgccctttgggtcttcaaggg

SEQ ID NO: 3275345 - DNA, 25 bp, Homo sapien
tctgtccttgctattacagtttgat

SEQ ID NO: 3275346 - DNA, 25 bp, Homo sapien
tgaacaccaaggcagacattgaaaa

SEQ ID NO: 3275347 - DNA, 25 bp, Homo sapien
ctctgtcgttgggtagtgttgacac

SEQ ID NO: 3275348 - DNA, 25 bp, Homo sapien
ttgaggttccaagtccaccaccgtg

SEQ ID NO: 3275349 - DNA, 25 bp, Homo sapien
tctgttagaaccttcatggcctctg

SEQ ID NO: 3275350 - DNA, 25 bp, Homo sapien
cttgaaatggctgcatgaaattcct

SEQ ID NO: 3275351 - DNA, 25 bp, Homo sapien
aatggctgcatgaaattcctgatcc

SEQ ID NO: 3275352 - DNA, 25 bp, Homo sapien
cctgatccagacttgttaatgaaga

SEQ ID NO: 3275353 - DNA, 25 bp, Homo sapien
aattcctgatccagacttgttaatg

SEQ ID NO: 3275354 - DNA, 25 bp, Homo sapien
tgtgtagataatgatcacaagcact

SEQ ID NO: 3275355 - DNA, 25 bp, Homo sapien
gataatgatcacaagcactttctgt

SEQ ID NO: 3275356 - DNA, 25 bp, Homo sapien
tgtctctgtttgcaaggcttagaag

SEQ ID NO: 3275357 - DNA, 25 bp, Homo sapien
cagctgtagcttatgactttgtgtg

SEQ ID NO: 3275358 - DNA, 25 bp, Homo sapien
cagaggatgagtcgctggcagctgt

SEQ ID NO: 3275359 - DNA, 25 bp, Homo sapien
aggatgagtcgctggcagctgttcc

SEQ ID NO: 3275360 - DNA, 25 bp, Homo sapien
cccagaggatgagtcgctggcagct

SEQ ID NO: 3275361 - DNA, 25 bp, Homo sapien
ccccagaggatgagtcgctggcagc

SEQ ID NO: 3275362 - DNA, 25 bp, Homo sapien
ttaattggcatcaagtgtccctggt

SEQ ID NO: 3275363 - DNA, 25 bp, Homo sapien
aagtgtccctggtagatggcaaaca

SEQ ID NO: 3275364 - DNA, 25 bp, Homo sapien
ttggcatcaagtgtccctggtagat

SEQ ID NO: 3275365 - DNA, 25 bp, Homo sapien
catcaagtgtccctggtagatggca

SEQ ID NO: 3275366 - DNA, 25 bp, Homo sapien
aagttatgttgggaatagacttggc

SEQ ID NO: 3275367 - DNA, 25 bp, Homo sapien
tgctccgctttgttcacagtaacat

SEQ ID NO: 3275368 - DNA, 25 bp, Homo sapien
aaatagcattgattccaaagtgaac

SEQ ID NO: 3275369 - DNA, 25 bp, Homo sapien
tgaactcatagcttcctataacatc

SEQ ID NO: 3275370 - DNA, 25 bp, Homo sapien
tctacattgtgtctccggaagaggg

SEQ ID NO: 3275371 - DNA, 25 bp, Homo sapien
gagcttgaggctgaaagaatctagt

SEQ ID NO: 3275372 - DNA, 25 bp, Homo sapien
aggtagtaagaggaaggacagccca

SEQ ID NO: 3275373 - DNA, 25 bp, Homo sapien
gaagatagcttcctcttagcatggg

SEQ ID NO: 3275374 - DNA, 25 bp, Homo sapien
aaacagcatctacggaaaagcccat

SEQ ID NO: 3275375 - DNA, 25 bp, Homo sapien
caaacagcatctacggaaaagccca

SEQ ID NO: 3275376 - DNA, 25 bp, Homo sapien
tgccacatcggtgttcaaataaaac

SEQ ID NO: 3275377 - DNA, 25 bp, Homo sapien
cacacttgagtagaggagagattat

SEQ ID NO: 3275378 - DNA, 25 bp, Homo sapien
acataatcacgggagtgacacccca

SEQ ID NO: 3275379 - DNA, 25 bp, Homo sapien
tacagagtgtctataccaggccatg

SEQ ID NO: 3275380 - DNA, 25 bp, Homo sapien
tagtgatactggaattggaacatcc

SEQ ID NO: 3275381 - DNA, 25 bp, Homo sapien
ctgtgcatgcgaacagaaggaggct

SEQ ID NO: 3275382 - DNA, 25 bp, Homo sapien
tgtcatgagggagacagcaaagtca

SEQ ID NO: 3275383 - DNA, 25 bp, Homo sapien
cagtggaacagatacctagtgatac

SEQ ID NO: 3275384 - DNA, 25 bp, Homo sapien
gcggagccatgatctgtcttctaaa

SEQ ID NO: 3275385 - DNA, 25 bp, Homo sapien
gcagatggcagaagcgaaggttcca

SEQ ID NO: 3275386 - DNA, 25 bp, Homo sapien
ttccagatcaggtgcgtgggcctgc

SEQ ID NO: 3275387 - DNA, 25 bp, Homo sapien
tcaattggaccagcgtagaacatca

SEQ ID NO: 3275388 - DNA, 25 bp, Homo sapien
ggttctcactagcacagaactgtcg

SEQ ID NO: 3275389 - DNA, 25 bp, Homo sapien
ttccagggtgactgagctgtcgtct

SEQ ID NO: 3275390 - DNA, 25 bp, Homo sapien
cagagattcaccttcccggcaataa

SEQ ID NO: 3275391 - DNA, 25 bp, Homo sapien
aatggtactgactggacttttgctg

SEQ ID NO: 3275392 - DNA, 25 bp, Homo sapien
ccagggaatgtgtgcagggtatcca

SEQ ID NO: 3275393 - DNA, 25 bp, Homo sapien
gggccacaccatactcaagataacc

SEQ ID NO: 3275394 - DNA, 25 bp, Homo sapien
taaccaggtgggaccagctatacct

SEQ ID NO: 3275395 - DNA, 25 bp, Homo sapien
ccataagttcttagatgctgctgta

SEQ ID NO: 3275396 - DNA, 25 bp, Homo sapien
tccatccattggactagccagagga

SEQ ID NO: 3275397 - DNA, 25 bp, Homo sapien
ctctccatccattggactagccaga

SEQ ID NO: 3275398 - DNA, 25 bp, Homo sapien
tccattggactagccagaggaagta

SEQ ID NO: 3275399 - DNA, 25 bp, Homo sapien
catccattggactagccagaggaag

SEQ ID NO: 3275400 - DNA, 25 bp, Homo sapien
gagctcatagttctgtgtttcaaga

SEQ ID NO: 3275401 - DNA, 25 bp, Homo sapien
ctggattgggatatgagatgagctc

SEQ ID NO: 3275402 - DNA, 25 bp, Homo sapien
tcttgggccttgcagtctgaggttt

SEQ ID NO: 3275403 - DNA, 25 bp, Homo sapien
tgttcaggatgttttgcctaaaagg

SEQ ID NO: 3275404 - DNA, 25 bp, Homo sapien
tttggtgatcgagactcacagagat

SEQ ID NO: 3275405 - DNA, 25 bp, Homo sapien
tcctaattggataaaaagatgaggc

SEQ ID NO: 3275406 - DNA, 25 bp, Homo sapien
tcacaatgcatttcaacaaaaccaa

SEQ ID NO: 3275407 - DNA, 25 bp, Homo sapien
caaacagtttggtgatcgagactca

SEQ ID NO: 3275408 - DNA, 25 bp, Homo sapien
cagtgctgttggaaccagctcagga

SEQ ID NO: 3275409 - DNA, 25 bp, Homo sapien
ttcagtgctgttggaaccagctcag

SEQ ID NO: 3275410 - DNA, 25 bp, Homo sapien
agactctaaactccacagcagagca

SEQ ID NO: 3275411 - DNA, 25 bp, Homo sapien
agctcaggacccacagactctaaac

SEQ ID NO: 3275412 - DNA, 25 bp, Homo sapien
cagatgtcagaaacctagttgtgcc

SEQ ID NO: 3275413 - DNA, 25 bp, Homo sapien
tggcgctgggtgaccccatgaactt

SEQ ID NO: 3275414 - DNA, 25 bp, Homo sapien
gatgttgtcattaaaagtccgcagc

SEQ ID NO: 3275415 - DNA, 25 bp, Homo sapien
gcctctgtgagctggtgactggtta

SEQ ID NO: 3275416 - DNA, 25 bp, Homo sapien
gataacttagtctgagcttcacctt

SEQ ID NO: 3275417 - DNA, 25 bp, Homo sapien
tgtaatcggtcaagtctgcttgctg

SEQ ID NO: 3275418 - DNA, 25 bp, Homo sapien
tcgtcagtgactgtaatcggtcaag

SEQ ID NO: 3275419 - DNA, 25 bp, Homo sapien
gaaaaagtccgataacttagtctga

SEQ ID NO: 3275420 - DNA, 25 bp, Homo sapien
aaaaatgtggtgtggaccgagtgca

SEQ ID NO: 3275421 - DNA, 25 bp, Homo sapien
ctgttgatgttaaaaatgtggtgtg

SEQ ID NO: 3275422 - DNA, 25 bp, Homo sapien
ttgatgttaaaaatgtggtgtggac

SEQ ID NO: 3275423 - DNA, 25 bp, Homo sapien
tgttaaaaatgtggtgtggaccgag

SEQ ID NO: 3275424 - DNA, 25 bp, Homo sapien
aagtccccggtgaacatggtcaagt

SEQ ID NO: 3275425 - DNA, 25 bp, Homo sapien
caagtccccggtgaacatggtcaag

SEQ ID NO: 3275426 - DNA, 25 bp, Homo sapien
ccaagtccccggtgaacatggtcaa

SEQ ID NO: 3275427 - DNA, 25 bp, Homo sapien
gtccccggtgaacatggtcaagttg

SEQ ID NO: 3275428 - DNA, 25 bp, Homo sapien
ggatcatggtcacatctgcagttat

SEQ ID NO: 3275429 - DNA, 25 bp, Homo sapien
tggaagcgagtctcttcggaacccc

SEQ ID NO: 3275430 - DNA, 25 bp, Homo sapien
agttattccccgcagtggccaaaag

SEQ ID NO: 3275431 - DNA, 25 bp, Homo sapien
cacatgtcgtattctccattgagac

SEQ ID NO: 3275432 - DNA, 25 bp, Homo sapien
tcagctatcgggtacaacttatctt

SEQ ID NO: 3275433 - DNA, 25 bp, Homo sapien
ggtacaacttatctttatgctggac

SEQ ID NO: 3275434 - DNA, 25 bp, Homo sapien
ttatctttatgctggactaagaatc

SEQ ID NO: 3275435 - DNA, 25 bp, Homo sapien
ctaccctgtgtgtcagctatcgggt

SEQ ID NO: 3275436 - DNA, 25 bp, Homo sapien
taccgtgtcttaataaggccaccag

SEQ ID NO: 3275437 - DNA, 25 bp, Homo sapien
tagaattggccagtgagtgcaagca

SEQ ID NO: 3275438 - DNA, 25 bp, Homo sapien
tgatgcatgcaccaagcctctgggt

SEQ ID NO: 3275439 - DNA, 25 bp, Homo sapien
catggtaatagaacactgggcagca

SEQ ID NO: 3275440 - DNA, 25 bp, Homo sapien
gaagaacctctgacatgaactagaa

SEQ ID NO: 3275441 - DNA, 25 bp, Homo sapien
gaaagctgaggccatctagactagg

SEQ ID NO: 3275442 - DNA, 25 bp, Homo sapien
taatagctggatatcaagaagaacc

SEQ ID NO: 3275443 - DNA, 25 bp, Homo sapien
cagcagcagcctcataaataatagc

SEQ ID NO: 3275444 - DNA, 25 bp, Homo sapien
tagcggaaacttcatggtaaggtca

SEQ ID NO: 3275445 - DNA, 25 bp, Homo sapien
cctgcttgctgccaagtgaggaaac

SEQ ID NO: 3275446 - DNA, 25 bp, Homo sapien
tctcgcgggagtcagccatgatgtg

SEQ ID NO: 3275447 - DNA, 25 bp, Homo sapien
gagattcaactagcactttggaacc

SEQ ID NO: 3275448 - DNA, 25 bp, Homo sapien
tccagggtcagttcacttttcgtgc

SEQ ID NO: 3275449 - DNA, 25 bp, Homo sapien
cttttcgtgctgctctaaaccctgc

SEQ ID NO: 3275450 - DNA, 25 bp, Homo sapien
gggtcagttcacttttcgtgctgct

SEQ ID NO: 3275451 - DNA, 25 bp, Homo sapien
cagttcacttttcgtgctgctctaa

SEQ ID NO: 3275452 - DNA, 25 bp, Homo sapien
gataaatgcgtttgaccgcgcacct

SEQ ID NO: 3275453 - DNA, 25 bp, Homo sapien
tcgactcggttcatcaggaagctgc

SEQ ID NO: 3275454 - DNA, 25 bp, Homo sapien
caacttgccgacatctaactcaggg

SEQ ID NO: 3275455 - DNA, 25 bp, Homo sapien
taaatgcttgcgtttggcccaggtt

SEQ ID NO: 3275456 - DNA, 25 bp, Homo sapien
tggaaacgtaggtggaaagctcagc

SEQ ID NO: 3275457 - DNA, 25 bp, Homo sapien
tgttggcgacacctaaaaaccatgt

SEQ ID NO: 3275458 - DNA, 25 bp, Homo sapien
ttcagccggcggaaaaagtgcgagt

SEQ ID NO: 3275459 - DNA, 25 bp, Homo sapien
tagaagcggtatcccaggaacgagt

SEQ ID NO: 3275460 - DNA, 25 bp, Homo sapien
tatgagccgggcgaagggcggcagc

SEQ ID NO: 3275461 - DNA, 25 bp, Homo sapien
ggacccggcgatcgccacaggttgg

SEQ ID NO: 3275462 - DNA, 25 bp, Homo sapien
gggagcgctatgagccgggcgaagg

SEQ ID NO: 3275463 - DNA, 25 bp, Homo sapien
gttgggactctgtgcggcgctggag

SEQ ID NO: 3275464 - DNA, 25 bp, Homo sapien
cagtgcccctgaattttatgtttga

SEQ ID NO: 3275465 - DNA, 25 bp, Homo sapien
tattgcagactttttgttcagcaac

SEQ ID NO: 3275466 - DNA, 25 bp, Homo sapien
taataactggagttcaaagtctagc

SEQ ID NO: 3275467 - DNA, 25 bp, Homo sapien
cagagtgtatgtaaaatcatttccc

SEQ ID NO: 3275468 - DNA, 25 bp, Homo sapien
aaaggccaatgacacataacactgc

SEQ ID NO: 3275469 - DNA, 25 bp, Homo sapien
aggccaatgacacataacactgcat

SEQ ID NO: 3275470 - DNA, 25 bp, Homo sapien
aaggccaatgacacataacactgca

SEQ ID NO: 3275471 - DNA, 25 bp, Homo sapien
caggcatgcagatcttacagcggaa

SEQ ID NO: 3275472 - DNA, 25 bp, Homo sapien
ccaggtaggccgtgatagaacttta

SEQ ID NO: 3275473 - DNA, 25 bp, Homo sapien
cactggacaggtaaagactgggact

SEQ ID NO: 3275474 - DNA, 25 bp, Homo sapien
gttaccggcctgagtaaaatccgca

SEQ ID NO: 3275475 - DNA, 25 bp, Homo sapien
aaagccctctggcaagataccaggt

SEQ ID NO: 3275476 - DNA, 25 bp, Homo sapien
tgtccatcagcgagatgagctcaga

SEQ ID NO: 3275477 - DNA, 25 bp, Homo sapien
tagcagactgcggtgacaacctggt

SEQ ID NO: 3275478 - DNA, 25 bp, Homo sapien
tccttagagaggtaacagagcctgc

SEQ ID NO: 3275479 - DNA, 25 bp, Homo sapien
tatgctcttatcacttcagactgtg

SEQ ID NO: 3275480 - DNA, 25 bp, Homo sapien
cattcgtcgggcctctgtttcgtgg

SEQ ID NO: 3275481 - DNA, 25 bp, Homo sapien
tctgtttcgtggtatcatatgctct

SEQ ID NO: 3275482 - DNA, 25 bp, Homo sapien
tcagactgtgaaacgattccatttt

SEQ ID NO: 3275483 - DNA, 25 bp, Homo sapien
tgtcccgtaagtcaactccaactct

SEQ ID NO: 3275484 - DNA, 25 bp, Homo sapien
cctaaatcctctgtcccgtaagtca

SEQ ID NO: 3275485 - DNA, 25 bp, Homo sapien
tctctctagaagactgagtaggcac

SEQ ID NO: 3275486 - DNA, 25 bp, Homo sapien
gagtaggcaccctcaattcccctaa

SEQ ID NO: 3275487 - DNA, 25 bp, Homo sapien
gttgcaaggattcagagcggtacaa

SEQ ID NO: 3275488 - DNA, 25 bp, Homo sapien
ttcttgagcagttgcgccctctcgg

SEQ ID NO: 3275489 - DNA, 25 bp, Homo sapien
tcagagcggtacaagttcacgtggt

SEQ ID NO: 3275490 - DNA, 25 bp, Homo sapien
tcttcttaaagacgttcttgagcag

SEQ ID NO: 3275491 - DNA, 25 bp, Homo sapien
tctaggtcagttcctaataactact

SEQ ID NO: 3275492 - DNA, 25 bp, Homo sapien
tagtggatttgattagctttctaac

SEQ ID NO: 3275493 - DNA, 25 bp, Homo sapien
tactgaaccacaaatgcaattatac

SEQ ID NO: 3275494 - DNA, 25 bp, Homo sapien
aacttgggataggtaattcacttca

SEQ ID NO: 3275495 - DNA, 25 bp, Homo sapien
gctcctgaacttcatcgaccaatgt

SEQ ID NO: 3275496 - DNA, 25 bp, Homo sapien
gaacttcatcgaccaatgttttaaa

SEQ ID NO: 3275497 - DNA, 25 bp, Homo sapien
cagctcctgaacttcatcgaccaat

SEQ ID NO: 3275498 - DNA, 25 bp, Homo sapien
cctgaacttcatcgaccaatgtttt

SEQ ID NO: 3275499 - DNA, 25 bp, Homo sapien
gccacagggatgaataacaagccca

SEQ ID NO: 3275500 - DNA, 25 bp, Homo sapien
accttgtacaccacatcaaggagca

SEQ ID NO: 3275501 - DNA, 25 bp, Homo sapien
agatgccacagggatgaataacaag

SEQ ID NO: 3275502 - DNA, 25 bp, Homo sapien
gaataacaagcccatccaaaagact

SEQ ID NO: 3275503 - DNA, 25 bp, Homo sapien
ggttccctccgagagcggtttgcaa

SEQ ID NO: 3275504 - DNA, 25 bp, Homo sapien
tcctaatgtgggagactggtgcacc

SEQ ID NO: 3275505 - DNA, 25 bp, Homo sapien
gattgctccgaacaggagcagcctg

SEQ ID NO: 3275506 - DNA, 25 bp, Homo sapien
tcctgagacaatggtggattgctcc

SEQ ID NO: 3275507 - DNA, 25 bp, Homo sapien
atttgccacgaaagtggctcccggg

SEQ ID NO: 3275508 - DNA, 25 bp, Homo sapien
tggaatttgccacgaaagtggctcc

SEQ ID NO: 3275509 - DNA, 25 bp, Homo sapien
gaatttgccacgaaagtggctcccg

SEQ ID NO: 3275510 - DNA, 25 bp, Homo sapien
aatggaatttgccacgaaagtggct

SEQ ID NO: 3275511 - DNA, 25 bp, Homo sapien
gcaatgctaccactgatgtatggga

SEQ ID NO: 3275512 - DNA, 25 bp, Homo sapien
gaactgggtggtacgcaagcatccc

SEQ ID NO: 3275513 - DNA, 25 bp, Homo sapien
catccctggatgagcagtaagtggt

SEQ ID NO: 3275514 - DNA, 25 bp, Homo sapien
aatgctagagtcctctctgctggca

SEQ ID NO: 3275515 - DNA, 25 bp, Homo sapien
tctgccttggtaacaccacacttgc

SEQ ID NO: 3275516 - DNA, 25 bp, Homo sapien
tcaggtaactttttgtgacctggtc

SEQ ID NO: 3275517 - DNA, 25 bp, Homo sapien
ccttgcttgggctgttctgtacctg

SEQ ID NO: 3275518 - DNA, 25 bp, Homo sapien
tctggttctagctccaatcattttc

SEQ ID NO: 3275519 - DNA, 25 bp, Homo sapien
cttggggaacagtagtaccaagaca

SEQ ID NO: 3275520 - DNA, 25 bp, Homo sapien
cagcttgggcgtccagcgctctctt

SEQ ID NO: 3275521 - DNA, 25 bp, Homo sapien
ccaaacaacagcttgggcgtccagc

SEQ ID NO: 3275522 - DNA, 25 bp, Homo sapien
aacagcttgggcgtccagcgctctc

SEQ ID NO: 3275523 - DNA, 25 bp, Homo sapien
aaacaacagcttgggcgtccagcgc

SEQ ID NO: 3275524 - DNA, 25 bp, Homo sapien
aattctgtaaaacacatgctcgttc

SEQ ID NO: 3275525 - DNA, 25 bp, Homo sapien
tgctcgttccttaacttcaatttcc

SEQ ID NO: 3275526 - DNA, 25 bp, Homo sapien
acacatgctcgttccttaacttcaa

SEQ ID NO: 3275527 - DNA, 25 bp, Homo sapien
tgtaaaacacatgctcgttccttaa

SEQ ID NO: 3275528 - DNA, 25 bp, Homo sapien
cataaattgttgtactggtgtgaaa

SEQ ID NO: 3275529 - DNA, 25 bp, Homo sapien
caacttatttaaagcgacagccaag

SEQ ID NO: 3275530 - DNA, 25 bp, Homo sapien
tagacgagtcggaaaagcaggccaa

SEQ ID NO: 3275531 - DNA, 25 bp, Homo sapien
tataacatagcacttttccccaggg

SEQ ID NO: 3275532 - DNA, 25 bp, Homo sapien
cgctcgagaagcagtttaagcattc

SEQ ID NO: 3275533 - DNA, 25 bp, Homo sapien
tgaggaagaacaagaccgctgcaat

SEQ ID NO: 3275534 - DNA, 25 bp, Homo sapien
aatgaagatacagtcatcgctcgag

SEQ ID NO: 3275535 - DNA, 25 bp, Homo sapien
tgaaatggttactgtggcactgatg

SEQ ID NO: 3275536 - DNA, 25 bp, Homo sapien
cagtcaacgtccctttagaaccaca

SEQ ID NO: 3275537 - DNA, 25 bp, Homo sapien
ctacctgggataaagtaagcgttca

SEQ ID NO: 3275538 - DNA, 25 bp, Homo sapien
cagtgcctagaatagcgtcagacac

SEQ ID NO: 3275539 - DNA, 25 bp, Homo sapien
aaatacctcctgaaccagcacagag

SEQ ID NO: 3275540 - DNA, 25 bp, Homo sapien
taactcaattcctacccgtgtaaca

SEQ ID NO: 3275541 - DNA, 25 bp, Homo sapien
gaaaggagatcttttgacactcccc

SEQ ID NO: 3275542 - DNA, 25 bp, Homo sapien
tgcaattgaaatcataaaccctcct

SEQ ID NO: 3275543 - DNA, 25 bp, Homo sapien
cctcctactgctggaatctcttcag

SEQ ID NO: 3275544 - DNA, 25 bp, Homo sapien
gctgaaatgtcagatgccctaattc

SEQ ID NO: 3275545 - DNA, 25 bp, Homo sapien
tctctggaataagagataacagaag

SEQ ID NO: 3275546 - DNA, 25 bp, Homo sapien
caaactgatgtcattaggacaactc

SEQ ID NO: 3275547 - DNA, 25 bp, Homo sapien
aattgaaaatggactatgataaggc

SEQ ID NO: 3275548 - DNA, 25 bp, Homo sapien
tcttaacgagattcaagctcccgac

SEQ ID NO: 3275549 - DNA, 25 bp, Homo sapien
caagattaatcactcgaaactgtgg

SEQ ID NO: 3275550 - DNA, 25 bp, Homo sapien
agctcccgacaaccatattttattg

SEQ ID NO: 3275551 - DNA, 25 bp, Homo sapien
tggaaaattatgctaaacgattaag

SEQ ID NO: 3275552 - DNA, 25 bp, Homo sapien
gatgctcccccatatcgctatgtgg

SEQ ID NO: 3275553 - DNA, 25 bp, Homo sapien
ccatcggaatggcaggccacagaga

SEQ ID NO: 3275554 - DNA, 25 bp, Homo sapien
cctgacatatcaggggccatcggaa

SEQ ID NO: 3275555 - DNA, 25 bp, Homo sapien
tccaaaaaacaccacccagagtgcg

SEQ ID NO: 3275556 - DNA, 25 bp, Homo sapien
gaccgagtacacaaatactaatgaa

SEQ ID NO: 3275557 - DNA, 25 bp, Homo sapien
aggagtttctacctaattgtgtgtg

SEQ ID NO: 3275558 - DNA, 25 bp, Homo sapien
tggtagttttctcctcttacgctta

SEQ ID NO: 3275559 - DNA, 25 bp, Homo sapien
tactggaatttcgaactgttcctcc

SEQ ID NO: 3275560 - DNA, 25 bp, Homo sapien
cccctgaacatttggaagcctgcct

SEQ ID NO: 3275561 - DNA, 25 bp, Homo sapien
cctgaacatttggaagcctgcctta

SEQ ID NO: 3275562 - DNA, 25 bp, Homo sapien
gaacatttggaagcctgccttactc

SEQ ID NO: 3275563 - DNA, 25 bp, Homo sapien
ttacccctgaacatttggaagcctg

SEQ ID NO: 3275564 - DNA, 25 bp, Homo sapien
ccaatatgatgtctccaatccagct

SEQ ID NO: 3275565 - DNA, 25 bp, Homo sapien
caatatgatgtctccaatccagctt

SEQ ID NO: 3275566 - DNA, 25 bp, Homo sapien
acactcatatcacgtttaaatttaa

SEQ ID NO: 3275567 - DNA, 25 bp, Homo sapien
tgaggacagatgaaaggttttgatt

SEQ ID NO: 3275568 - DNA, 25 bp, Homo sapien
caacccttaaatccagaaacactca

SEQ ID NO: 3275569 - DNA, 25 bp, Homo sapien
aaatccagaaacactcatatcacgt

SEQ ID NO: 3275570 - DNA, 25 bp, Homo sapien
acgcaaacgagaccgacatcccgca

SEQ ID NO: 3275571 - DNA, 25 bp, Homo sapien
aaacgagaccgacatcccgcactca

SEQ ID NO: 3275572 - DNA, 25 bp, Homo sapien
aacgagaccgacatcccgcactcac

SEQ ID NO: 3275573 - DNA, 25 bp, Homo sapien
gcaaacgagaccgacatcccgcact

SEQ ID NO: 3275574 - DNA, 25 bp, Homo sapien
cccagtagcagataatccgaggttt

SEQ ID NO: 3275575 - DNA, 25 bp, Homo sapien
gtttcccagtagcagataatccgag

SEQ ID NO: 3275576 - DNA, 25 bp, Homo sapien
tgtacacaaagtttcccagtagcag

SEQ ID NO: 3275577 - DNA, 25 bp, Homo sapien
cacaaagtttcccagtagcagataa

SEQ ID NO: 3275578 - DNA, 25 bp, Homo sapien
ccttgagacaatcactgcactttgg

SEQ ID NO: 3275579 - DNA, 25 bp, Homo sapien
taaatgaaacctagtgcatgacggt

SEQ ID NO: 3275580 - DNA, 25 bp, Homo sapien
taatgactactagcacagtggtacc

SEQ ID NO: 3275581 - DNA, 25 bp, Homo sapien
gcactttggtatgcagaactgcttt

SEQ ID NO: 3275582 - DNA, 25 bp, Homo sapien
catactgaagggcttttagtggaaa

SEQ ID NO: 3275583 - DNA, 25 bp, Homo sapien
gttaaaggaggcattgctgtaaaca

SEQ ID NO: 3275584 - DNA, 25 bp, Homo sapien
tataattcagggtacttcaacatgt

SEQ ID NO: 3275585 - DNA, 25 bp, Homo sapien
tgaagtccagggcattctgagatgt

SEQ ID NO: 3275586 - DNA, 25 bp, Homo sapien
gcatgatctctcaaatattccaaga

SEQ ID NO: 3275587 - DNA, 25 bp, Homo sapien
tcaaagaggatctgtccagaaaagc

SEQ ID NO: 3275588 - DNA, 25 bp, Homo sapien
caaagaggatctgtccagaaaagcc

SEQ ID NO: 3275589 - DNA, 25 bp, Homo sapien
cacgttatagagacctatacaccat

SEQ ID NO: 3275590 - DNA, 25 bp, Homo sapien
gacctatacaccatctttcaaagag

SEQ ID NO: 3275591 - DNA, 25 bp, Homo sapien
tttttataagcagatttattgctgg

SEQ ID NO: 3275592 - DNA, 25 bp, Homo sapien
gctttaaattcctggtatcttgata

SEQ ID NO: 3275593 - DNA, 25 bp, Homo sapien
tggcagtggctttaaattcctggta

SEQ ID NO: 3275594 - DNA, 25 bp, Homo sapien
gatttaaaaagcgacaagttggaca

SEQ ID NO: 3275595 - DNA, 25 bp, Homo sapien
cattgtatttctgttggcaagtgat

SEQ ID NO: 3275596 - DNA, 25 bp, Homo sapien
ttgcattgtatttctgttggcaagt

SEQ ID NO: 3275597 - DNA, 25 bp, Homo sapien
tgtatttctgttggcaagtgatatg

SEQ ID NO: 3275598 - DNA, 25 bp, Homo sapien
tatttctgttggcaagtgatatggt

SEQ ID NO: 3275599 - DNA, 25 bp, Homo sapien
caacatagagttcgggcagtggctt

SEQ ID NO: 3275600 - DNA, 25 bp, Homo sapien
gactgcattgtgcacctgatgccag

SEQ ID NO: 3275601 - DNA, 25 bp, Homo sapien
tgaagaacttgctggtaactggagc

SEQ ID NO: 3275602 - DNA, 25 bp, Homo sapien
aagagacttggtgctctgcatccca

SEQ ID NO: 3275603 - DNA, 25 bp, Homo sapien
ctgggctcagtaggtgctacaaaat

SEQ ID NO: 3275604 - DNA, 25 bp, Homo sapien
gaacagtaatacagcaagttcctgg

SEQ ID NO: 3275605 - DNA, 25 bp, Homo sapien
taaaagtggtattcctgactcaggt

SEQ ID NO: 3275606 - DNA, 25 bp, Homo sapien
tagttgttggactaagcctggtgtc

SEQ ID NO: 3275607 - DNA, 25 bp, Homo sapien
catctctaattcaacacttcttatc

SEQ ID NO: 3275608 - DNA, 25 bp, Homo sapien
agcatctctaattcaacacttctta

SEQ ID NO: 3275609 - DNA, 25 bp, Homo sapien
gcatctctaattcaacacttcttat

SEQ ID NO: 3275610 - DNA, 25 bp, Homo sapien
tctctaattcaacacttcttatcaa

SEQ ID NO: 3275611 - DNA, 25 bp, Homo sapien
tagagcactatattcttgtagaagc

SEQ ID NO: 3275612 - DNA, 25 bp, Homo sapien
tctgttatagttccaggcaccatga

SEQ ID NO: 3275613 - DNA, 25 bp, Homo sapien
agcagtataagatgcacttggagac

SEQ ID NO: 3275614 - DNA, 25 bp, Homo sapien
ctcgataatatagagcactatattc

SEQ ID NO: 3275615 - DNA, 25 bp, Homo sapien
gagtagtcagaggaattagctgcct

SEQ ID NO: 3275616 - DNA, 25 bp, Homo sapien
gctatggagtagtcagaggaattag

SEQ ID NO: 3275617 - DNA, 25 bp, Homo sapien
tggagtagtcagaggaattagctgc

SEQ ID NO: 3275618 - DNA, 25 bp, Homo sapien
tatggagtagtcagaggaattagct

SEQ ID NO: 3275619 - DNA, 25 bp, Homo sapien
cgctgtctgtatcatgctgacatca

SEQ ID NO: 3275620 - DNA, 25 bp, Homo sapien
gcaagcgttacgactttgacttgtt

SEQ ID NO: 3275621 - DNA, 25 bp, Homo sapien
accaacgtgcgctgtctgtatcatg

SEQ ID NO: 3275622 - DNA, 25 bp, Homo sapien
tttgctccatcaccgattgcaagcg

SEQ ID NO: 3275623 - DNA, 25 bp, Homo sapien
caacaacttcagatttttgaagagg

SEQ ID NO: 3275624 - DNA, 25 bp, Homo sapien
ctcaacaacttcagatttttgaaga

SEQ ID NO: 3275625 - DNA, 25 bp, Homo sapien
caacttcagatttttgaagaggaga

SEQ ID NO: 3275626 - DNA, 25 bp, Homo sapien
ttcagatttttgaagaggagaaacc

SEQ ID NO: 3275627 - DNA, 25 bp, Homo sapien
tttgcataggggtctgctgtttgaa

SEQ ID NO: 3275628 - DNA, 25 bp, Homo sapien
gaccttcctatgttgtgtggataag

SEQ ID NO: 3275629 - DNA, 25 bp, Homo sapien
agcccagagcttgtttaggctggaa

SEQ ID NO: 3275630 - DNA, 25 bp, Homo sapien
tggaacaattggtcgcacagactat

SEQ ID NO: 3275631 - DNA, 25 bp, Homo sapien
ctctcaccttaaaactacctagtgg

SEQ ID NO: 3275632 - DNA, 25 bp, Homo sapien
tagcatgtcctctagcaccttgctg

SEQ ID NO: 3275633 - DNA, 25 bp, Homo sapien
tgctagcatgtcctctagcaccttg

SEQ ID NO: 3275634 - DNA, 25 bp, Homo sapien
gcatgtcctctagcaccttgctggg

SEQ ID NO: 3275635 - DNA, 25 bp, Homo sapien
ttttgctagcatgtcctctagcacc

SEQ ID NO: 3275636 - DNA, 25 bp, Homo sapien
caaatattcagtgtccctttagact

SEQ ID NO: 3275637 - DNA, 25 bp, Homo sapien
taatgcactcatgctatgacagcaa

SEQ ID NO: 3275638 - DNA, 25 bp, Homo sapien
tctgcttggcatccaatggtgttca

SEQ ID NO: 3275639 - DNA, 25 bp, Homo sapien
tgcaggaccccttgataggagtaag

SEQ ID NO: 3275640 - DNA, 25 bp, Homo sapien
gaaagaatgatacacagaatggccc

SEQ ID NO: 3275641 - DNA, 25 bp, Homo sapien
gaaggtgcacagacataaatccggc

SEQ ID NO: 3275642 - DNA, 25 bp, Homo sapien
gaaccacagtccttatgggaaaaga

SEQ ID NO: 3275643 - DNA, 25 bp, Homo sapien
caaacatgccagaagctgaaccaca

SEQ ID NO: 3275644 - DNA, 25 bp, Homo sapien
gacgactgagagtttcccttgttcc

SEQ ID NO: 3275645 - DNA, 25 bp, Homo sapien
tttgcatgacaaagctaagtccagg

SEQ ID NO: 3275646 - DNA, 25 bp, Homo sapien
ccaagggtagtacagtgacgactga

SEQ ID NO: 3275647 - DNA, 25 bp, Homo sapien
ctgtcgtactccaaaggttaaggca

SEQ ID NO: 3275648 - DNA, 25 bp, Homo sapien
aaatgccatcaacatttactcccat

SEQ ID NO: 3275649 - DNA, 25 bp, Homo sapien
gaggacttcgaatttcttgaaagct

SEQ ID NO: 3275650 - DNA, 25 bp, Homo sapien
aggaggacttcgaatttcttgaaag

SEQ ID NO: 3275651 - DNA, 25 bp, Homo sapien
ggaggacttcgaatttcttgaaagc

SEQ ID NO: 3275652 - DNA, 25 bp, Homo sapien
ggacttcgaatttcttgaaagctca

SEQ ID NO: 3275653 - DNA, 25 bp, Homo sapien
aagtcaagtaaaccccagaactgtg

SEQ ID NO: 3275654 - DNA, 25 bp, Homo sapien
ctgcaaaacaagaccgaaagtcaag

SEQ ID NO: 3275655 - DNA, 25 bp, Homo sapien
gtcaagtaaaccccagaactgtgaa

SEQ ID NO: 3275656 - DNA, 25 bp, Homo sapien
gcaaaacaagaccgaaagtcaagta

SEQ ID NO: 3275657 - DNA, 25 bp, Homo sapien
aacatagggtatgcagtcctgtggt

SEQ ID NO: 3275658 - DNA, 25 bp, Homo sapien
ccaacatagggtatgcagtcctgtg

SEQ ID NO: 3275659 - DNA, 25 bp, Homo sapien
gaaccaacatagggtatgcagtcct

SEQ ID NO: 3275660 - DNA, 25 bp, Homo sapien
aaccaacatagggtatgcagtcctg

SEQ ID NO: 3275661 - DNA, 25 bp, Homo sapien
ctttcacttctctttgcatcttcat

SEQ ID NO: 3275662 - DNA, 25 bp, Homo sapien
ttctttcacttctctttgcatcttc

SEQ ID NO: 3275663 - DNA, 25 bp, Homo sapien
gtttctttcacttctctttgcatct

SEQ ID NO: 3275664 - DNA, 25 bp, Homo sapien
ttgtttctttcacttctctttgcat

SEQ ID NO: 3275665 - DNA, 25 bp, Homo sapien
gaaattgttacccagaaccacagag

SEQ ID NO: 3275666 - DNA, 25 bp, Homo sapien
gcagcagtgaatgcagaagcaaagc

SEQ ID NO: 3275667 - DNA, 25 bp, Homo sapien
gaaggtaacaactagggcctgtgag

SEQ ID NO: 3275668 - DNA, 25 bp, Homo sapien
gaagaggctgctcagaatacacaac

SEQ ID NO: 3275669 - DNA, 25 bp, Homo sapien
ggtctgtccgcataatacatgtaag

SEQ ID NO: 3275670 - DNA, 25 bp, Homo sapien
cagtggcccgttcccaaaacagtga

SEQ ID NO: 3275671 - DNA, 25 bp, Homo sapien
ctttcagaagccattcaacagtggc

SEQ ID NO: 3275672 - DNA, 25 bp, Homo sapien
tcagaagccattcaacagtggcccg

SEQ ID NO: 3275673 - DNA, 25 bp, Homo sapien
tcatttataacaatcattcccatgt

SEQ ID NO: 3275674 - DNA, 25 bp, Homo sapien
tatgctgaactcctaaccgccagtg

SEQ ID NO: 3275675 - DNA, 25 bp, Homo sapien
gccagtgacactacatttggacata

SEQ ID NO: 3275676 - DNA, 25 bp, Homo sapien
tcaatgagaccataagggtgaggcc

SEQ ID NO: 3275677 - DNA, 25 bp, Homo sapien
tgtaagatctctgttagggactcaa

SEQ ID NO: 3275678 - DNA, 25 bp, Homo sapien
cattagcgtttctatggtttcaggc

SEQ ID NO: 3275679 - DNA, 25 bp, Homo sapien
cctcaatggctgttgctccaagtag

SEQ ID NO: 3275680 - DNA, 25 bp, Homo sapien
gtcccctgtaaggatccagattttg

SEQ ID NO: 3275681 - DNA, 25 bp, Homo sapien
ggtttcaggcacttgatcttgtaat

SEQ ID NO: 3275682 - DNA, 25 bp, Homo sapien
tgggagccaagatacgaacacattc

SEQ ID NO: 3275683 - DNA, 25 bp, Homo sapien
caaggtatgctgagaaaagtcacac

SEQ ID NO: 3275684 - DNA, 25 bp, Homo sapien
gacttcactggagagatcacattga

SEQ ID NO: 3275685 - DNA, 25 bp, Homo sapien
aaaggatcaaagatgtagggccagc

SEQ ID NO: 3275686 - DNA, 25 bp, Homo sapien
cagcaagtgttgaaatgcgataaaa

SEQ ID NO: 3275687 - DNA, 25 bp, Homo sapien
gaaatgcgataaaattcccatggca

SEQ ID NO: 3275688 - DNA, 25 bp, Homo sapien
acacagatggccactaatgggcact

SEQ ID NO: 3275689 - DNA, 25 bp, Homo sapien
ggcactaggggaattacatattcag

SEQ ID NO: 3275690 - DNA, 25 bp, Homo sapien
tgtgttatgctgacaatcccaaagg

SEQ ID NO: 3275691 - DNA, 25 bp, Homo sapien
cgttaactctggaattgggatgtgc

SEQ ID NO: 3275692 - DNA, 25 bp, Homo sapien
tagtctcgatggctcaaagaaaatc

SEQ ID NO: 3275693 - DNA, 25 bp, Homo sapien
gaaaatctatccaacatgagctgac

SEQ ID NO: 3275694 - DNA, 25 bp, Homo sapien
tagtggatcctcagagtcacaacaa

SEQ ID NO: 3275695 - DNA, 25 bp, Homo sapien
gtggatcctcagagtcacaacaagc

SEQ ID NO: 3275696 - DNA, 25 bp, Homo sapien
atcctcagagtcacaacaagccctg

SEQ ID NO: 3275697 - DNA, 25 bp, Homo sapien
tggatcctcagagtcacaacaagcc

SEQ ID NO: 3275698 - DNA, 25 bp, Homo sapien
ttaatgtagctcatgatcgccatct

SEQ ID NO: 3275699 - DNA, 25 bp, Homo sapien
tttaatgtagctcatgatcgccatc

SEQ ID NO: 3275700 - DNA, 25 bp, Homo sapien
attttaatgtagctcatgatcgcca

SEQ ID NO: 3275701 - DNA, 25 bp, Homo sapien
taatgtagctcatgatcgccatctg

SEQ ID NO: 3275702 - DNA, 25 bp, Homo sapien
tcttcgagtttgagtagcctgttct

SEQ ID NO: 3275703 - DNA, 25 bp, Homo sapien
tagactgctcgccactcctgaaagt

SEQ ID NO: 3275704 - DNA, 25 bp, Homo sapien
cacagatgtagatgctcgctgatag

SEQ ID NO: 3275705 - DNA, 25 bp, Homo sapien
caatcaactcataactctcttcgag

SEQ ID NO: 3275706 - DNA, 25 bp, Homo sapien
gacgtctctgccagtcgatcataaa

SEQ ID NO: 3275707 - DNA, 25 bp, Homo sapien
ttctgtagcaaactgctctaaatgt

SEQ ID NO: 3275708 - DNA, 25 bp, Homo sapien
ccagtcgatcataaattacagtgtc

SEQ ID NO: 3275709 - DNA, 25 bp, Homo sapien
tctttgtattttgacgtctctgcca

SEQ ID NO: 3275710 - DNA, 25 bp, Homo sapien
tatttggaagcagactaatggagta

SEQ ID NO: 3275711 - DNA, 25 bp, Homo sapien
tctcagtggtattacccattttggg

SEQ ID NO: 3275712 - DNA, 25 bp, Homo sapien
tctcagggctgatatttggaagcag

SEQ ID NO: 3275713 - DNA, 25 bp, Homo sapien
gactaatggagtatgatttagaacc

SEQ ID NO: 3275714 - DNA, 25 bp, Homo sapien
tcagaacagatggagtattccaagc

SEQ ID NO: 3275715 - DNA, 25 bp, Homo sapien
tcatttttcagtgatggaatgggaa

SEQ ID NO: 3275716 - DNA, 25 bp, Homo sapien
tccaagccgcaattctgaatttctt

SEQ ID NO: 3275717 - DNA, 25 bp, Homo sapien
gggcaaagcgaaaggaaatgatagt

SEQ ID NO: 3275718 - DNA, 25 bp, Homo sapien
tatcaaccatttaaagtggaaggtc

SEQ ID NO: 3275719 - DNA, 25 bp, Homo sapien
caccctgcaacggtgtgtaatgttc

SEQ ID NO: 3275720 - DNA, 25 bp, Homo sapien
gatgattccaaactatacaagaaag

SEQ ID NO: 3275721 - DNA, 25 bp, Homo sapien
tgtgattcgggttttgtaaactgga

SEQ ID NO: 3275722 - DNA, 25 bp, Homo sapien
ttcaatttccgagtttctatgagac

SEQ ID NO: 3275723 - DNA, 25 bp, Homo sapien
cttgagcttcttaagttcaatttcc

SEQ ID NO: 3275724 - DNA, 25 bp, Homo sapien
ggttgttgactctattcaaaatagg

SEQ ID NO: 3275725 - DNA, 25 bp, Homo sapien
agacaaagcaaggttgttgactcta

SEQ ID NO: 3275726 - DNA, 25 bp, Homo sapien
ttccagatggagtgcgaacaatcac

SEQ ID NO: 3275727 - DNA, 25 bp, Homo sapien
tagagtcgtaactttccagatggag

SEQ ID NO: 3275728 - DNA, 25 bp, Homo sapien
tttgcagtagagtcgtaactttcca

SEQ ID NO: 3275729 - DNA, 25 bp, Homo sapien
tggagtgcgaacaatcactgacatt

SEQ ID NO: 3275730 - DNA, 25 bp, Homo sapien
cacgtgggagtaagaggctgaaaac

SEQ ID NO: 3275731 - DNA, 25 bp, Homo sapien
gaagtgtcctgtgaatggtcacgca

SEQ ID NO: 3275732 - DNA, 25 bp, Homo sapien
taagcaggttacattgtcacgtggg

SEQ ID NO: 3275733 - DNA, 25 bp, Homo sapien
tcctcatggccttaattctgtgaag

SEQ ID NO: 3275734 - DNA, 25 bp, Homo sapien
tgtgtgttcatacccattaaccaac

SEQ ID NO: 3275735 - DNA, 25 bp, Homo sapien
gtttgggatatgcaagatcttgatt

SEQ ID NO: 3275736 - DNA, 25 bp, Homo sapien
caaattggggtgtttgggatatgca

SEQ ID NO: 3275737 - DNA, 25 bp, Homo sapien
ttatttaatacttgtatgtctggga

SEQ ID NO: 3275738 - DNA, 25 bp, Homo sapien
tccatacaaatcactgagcagatgt

SEQ ID NO: 3275739 - DNA, 25 bp, Homo sapien
taaatttatcttatccatacaaatc

SEQ ID NO: 3275740 - DNA, 25 bp, Homo sapien
tatccatacaaatcactgagcagat

SEQ ID NO: 3275741 - DNA, 25 bp, Homo sapien
catacaaatcactgagcagatgttt

SEQ ID NO: 3275742 - DNA, 25 bp, Homo sapien
tccaagacattgagcaattcatatc

SEQ ID NO: 3275743 - DNA, 25 bp, Homo sapien
agacattgagcaattcatatctttc

SEQ ID NO: 3275744 - DNA, 25 bp, Homo sapien
taaactccaagacattgagcaattc

SEQ ID NO: 3275745 - DNA, 25 bp, Homo sapien
ctggtaaactccaagacattgagca

SEQ ID NO: 3275746 - DNA, 25 bp, Homo sapien
taatcaccgagtcgggtgttcttcc

SEQ ID NO: 3275747 - DNA, 25 bp, Homo sapien
tggctgctctgaccaatgctccctc

SEQ ID NO: 3275748 - DNA, 25 bp, Homo sapien
caccgagtcgggtgttcttccagtg

SEQ ID NO: 3275749 - DNA, 25 bp, Homo sapien
tgaatctataatcaccgagtcgggt

SEQ ID NO: 3275750 - DNA, 25 bp, Homo sapien
ccttctcgctctggcactgctgtgt

SEQ ID NO: 3275751 - DNA, 25 bp, Homo sapien
tgcttgataaataatcttgtcacct

SEQ ID NO: 3275752 - DNA, 25 bp, Homo sapien
taaataatcttgtcaccttctcgct

SEQ ID NO: 3275753 - DNA, 25 bp, Homo sapien
ctgctgtgtgacagactgccatcat

SEQ ID NO: 3275754 - DNA, 25 bp, Homo sapien
attcacatattataggtgcagttgg

SEQ ID NO: 3275755 - DNA, 25 bp, Homo sapien
tgattattttggagattttccagca

SEQ ID NO: 3275756 - DNA, 25 bp, Homo sapien
ttttcatctccaaactgtgagttct

SEQ ID NO: 3275757 - DNA, 25 bp, Homo sapien
ttcatctccaaactgtgagttctgc

SEQ ID NO: 3275758 - DNA, 25 bp, Homo sapien
gattttccagcaatgatgaatcact

SEQ ID NO: 3275759 - DNA, 25 bp, Homo sapien
tgtaatttggcctgcatttctaagt

SEQ ID NO: 3275760 - DNA, 25 bp, Homo sapien
taaagtgttatgtctccaaaccctc

SEQ ID NO: 3275761 - DNA, 25 bp, Homo sapien
aacccagttcatttataccagccca

SEQ ID NO: 3275762 - DNA, 25 bp, Homo sapien
ccagcccactgatctatttgttaat

SEQ ID NO: 3275763 - DNA, 25 bp, Homo sapien
aaggcagcagcttgacaggacggaa

SEQ ID NO: 3275764 - DNA, 25 bp, Homo sapien
catttgaggtttagtgcacagaaga

SEQ ID NO: 3275765 - DNA, 25 bp, Homo sapien
gcttttgatcacaacattaacaggt

SEQ ID NO: 3275766 - DNA, 25 bp, Homo sapien
gctctattaagtctccaaatcgtaa

SEQ ID NO: 3275767 - DNA, 25 bp, Homo sapien
tctattttggaggtcgggtgaacac

SEQ ID NO: 3275768 - DNA, 25 bp, Homo sapien
aagaactgatggaacaccacctgtt

SEQ ID NO: 3275769 - DNA, 25 bp, Homo sapien
tgttcgacagtcatgccatcggcag

SEQ ID NO: 3275770 - DNA, 25 bp, Homo sapien
gaaacacgctgatgatatctcctat

SEQ ID NO: 3275771 - DNA, 25 bp, Homo sapien
tctgcagtgggcaccctgtgtgacc

SEQ ID NO: 3275772 - DNA, 25 bp, Homo sapien
ggacctggctaagaaagcattgttt

SEQ ID NO: 3275773 - DNA, 25 bp, Homo sapien
cttttcaatggtacaactggctgca

SEQ ID NO: 3275774 - DNA, 25 bp, Homo sapien
tgtgtgaccttagaggctctcctgg

SEQ ID NO: 3275775 - DNA, 25 bp, Homo sapien
tcatcaggagagcagccataatcct

SEQ ID NO: 3275776 - DNA, 25 bp, Homo sapien
ttcatcaggagagcagccataatcc

SEQ ID NO: 3275777 - DNA, 25 bp, Homo sapien
cccataaaaagatctaatgaaataa

SEQ ID NO: 3275778 - DNA, 25 bp, Homo sapien
caaatgatatcacaattcacttaca

SEQ ID NO: 3275779 - DNA, 25 bp, Homo sapien
cattttactgtaattgtcccataaa

SEQ ID NO: 3275780 - DNA, 25 bp, Homo sapien
tacaagaagcaattagctgaaatga

SEQ ID NO: 3275781 - DNA, 25 bp, Homo sapien
tgaaattttgtgttactctctggtt

SEQ ID NO: 3275782 - DNA, 25 bp, Homo sapien
aaagtgctcatacataatagttccc

SEQ ID NO: 3275783 - DNA, 25 bp, Homo sapien
tatctggggtgaaactgagctgtac

SEQ ID NO: 3275784 - DNA, 25 bp, Homo sapien
tctgcacttgtaacaccaaaggctt

SEQ ID NO: 3275785 - DNA, 25 bp, Homo sapien
caggtgagcctcttacatctaagga

SEQ ID NO: 3275786 - DNA, 25 bp, Homo sapien
tccagcccgggaagcagtaagtatg

SEQ ID NO: 3275787 - DNA, 25 bp, Homo sapien
tgcttcttaaatcaacaggctgtct

SEQ ID NO: 3275788 - DNA, 25 bp, Homo sapien
gctctcgtaacgcaaagaacaagga

SEQ ID NO: 3275789 - DNA, 25 bp, Homo sapien
ttacattgcatgtcagagtaccagt

SEQ ID NO: 3275790 - DNA, 25 bp, Homo sapien
gctatggtgcacttcttaaactgca

SEQ ID NO: 3275791 - DNA, 25 bp, Homo sapien
ccataagcaactcccgctatggtgc

SEQ ID NO: 3275792 - DNA, 25 bp, Homo sapien
accagttttgtcagaaaatatgtat

SEQ ID NO: 3275793 - DNA, 25 bp, Homo sapien
tcgagccatagcagcagtgtctgtg

SEQ ID NO: 3275794 - DNA, 25 bp, Homo sapien
tcagattagatgttcgagccatagc

SEQ ID NO: 3275795 - DNA, 25 bp, Homo sapien
gatgttcgagccatagcagcagtgt

SEQ ID NO: 3275796 - DNA, 25 bp, Homo sapien
gccaagttcctcattcagattagat

SEQ ID NO: 3275797 - DNA, 25 bp, Homo sapien
aaattaagtaaatcattgaacacaa

SEQ ID NO: 3275798 - DNA, 25 bp, Homo sapien
ttattttgtagggtgataacaatca

SEQ ID NO: 3275799 - DNA, 25 bp, Homo sapien
ttttgtagggtgataacaatcataa

SEQ ID NO: 3275800 - DNA, 25 bp, Homo sapien
gggtgataacaatcataattcatat

SEQ ID NO: 3275801 - DNA, 25 bp, Homo sapien
tgtagggtgataacaatcataattc

SEQ ID NO: 3275802 - DNA, 25 bp, Homo sapien
tcagtccaaaattactagcgccacc

SEQ ID NO: 3275803 - DNA, 25 bp, Homo sapien
ctaatgtaaccaataagctgatagg

SEQ ID NO: 3275804 - DNA, 25 bp, Homo sapien
tgaaggtcaagaaattcagtccaaa

SEQ ID NO: 3275805 - DNA, 25 bp, Homo sapien
caatttatgaagtatgcctgggtaa

SEQ ID NO: 3275806 - DNA, 25 bp, Homo sapien
gtaatccgttccacatttgagagct

SEQ ID NO: 3275807 - DNA, 25 bp, Homo sapien
gagcttaagtggtggacttgttgaa

SEQ ID NO: 3275808 - DNA, 25 bp, Homo sapien
tgagataccagtcttttccagaatg

SEQ ID NO: 3275809 - DNA, 25 bp, Homo sapien
gaatgccttcgattccaaatggctg

SEQ ID NO: 3275810 - DNA, 25 bp, Homo sapien
cttaggtccaaaaggtttcatagag

SEQ ID NO: 3275811 - DNA, 25 bp, Homo sapien
taggtccaaaaggtttcatagagaa

SEQ ID NO: 3275812 - DNA, 25 bp, Homo sapien
ttaggtccaaaaggtttcatagaga

SEQ ID NO: 3275813 - DNA, 25 bp, Homo sapien
acaactattccatgaacccactgtg

SEQ ID NO: 3275814 - DNA, 25 bp, Homo sapien
gtcatgtccagtgtagacaactatt

SEQ ID NO: 3275815 - DNA, 25 bp, Homo sapien
agctcctcgaagaagaatctgatct

SEQ ID NO: 3275816 - DNA, 25 bp, Homo sapien
ctgatctgctcccagtggaacggtg

SEQ ID NO: 3275817 - DNA, 25 bp, Homo sapien
aaatcgtagagatgtctgtttggac

SEQ ID NO: 3275818 - DNA, 25 bp, Homo sapien
ttcacactcaattctgccagaaatc

SEQ ID NO: 3275819 - DNA, 25 bp, Homo sapien
aagccttatgtttccaacaaaatcg

SEQ ID NO: 3275820 - DNA, 25 bp, Homo sapien
tgatatctgatgttgctggtaagcc

SEQ ID NO: 3275821 - DNA, 25 bp, Homo sapien
tttcaccatctaagttggatgtttc

SEQ ID NO: 3275822 - DNA, 25 bp, Homo sapien
tcaccatctaagttggatgtttcaa

SEQ ID NO: 3275823 - DNA, 25 bp, Homo sapien
ttcaccatctaagttggatgtttca

SEQ ID NO: 3275824 - DNA, 25 bp, Homo sapien
ataaaagtcgatcccaaagcatgcg

SEQ ID NO: 3275825 - DNA, 25 bp, Homo sapien
tctcaacaatcacttaggacagcag

SEQ ID NO: 3275826 - DNA, 25 bp, Homo sapien
cacaaactagtcaagagaggcaaag

SEQ ID NO: 3275827 - DNA, 25 bp, Homo sapien
tgtgcaacatccagctttgtgcagg

SEQ ID NO: 3275828 - DNA, 25 bp, Homo sapien
ctgggagatgttccccattggtcac

SEQ ID NO: 3275829 - DNA, 25 bp, Homo sapien
tctgctgggagatgttccccattgg

SEQ ID NO: 3275830 - DNA, 25 bp, Homo sapien
cactttcactatctcccctactgcc

SEQ ID NO: 3275831 - DNA, 25 bp, Homo sapien
gacagactgatgagatctgctggga

SEQ ID NO: 3275832 - DNA, 25 bp, Homo sapien
aaacctataggtacatggcacaaaa

SEQ ID NO: 3275833 - DNA, 25 bp, Homo sapien
tccctcaagctaattctgaagacgc

SEQ ID NO: 3275834 - DNA, 25 bp, Homo sapien
gaatggacggttagcttcactcagt

SEQ ID NO: 3275835 - DNA, 25 bp, Homo sapien
ctttaaagagtaacagtgccatatg

SEQ ID NO: 3275836 - DNA, 25 bp, Homo sapien
taagccagaagaatacgttgattcc

SEQ ID NO: 3275837 - DNA, 25 bp, Homo sapien
gattctttggctaaattctccacct

SEQ ID NO: 3275838 - DNA, 25 bp, Homo sapien
caccatgcttccttaataagccaga

SEQ ID NO: 3275839 - DNA, 25 bp, Homo sapien
ttacacatgcatacagcccaccatg

SEQ ID NO: 3275840 - DNA, 25 bp, Homo sapien
tattaccttggcatgtagacgacac

SEQ ID NO: 3275841 - DNA, 25 bp, Homo sapien
gcctgttcgcttgttcaataaacga

SEQ ID NO: 3275842 - DNA, 25 bp, Homo sapien
tgttatcccaacaagtaaggctgct

SEQ ID NO: 3275843 - DNA, 25 bp, Homo sapien
gatacaggaacccttacttgtcttg

SEQ ID NO: 3275844 - DNA, 25 bp, Homo sapien
ccagtggacaatttcccaagcacca

SEQ ID NO: 3275845 - DNA, 25 bp, Homo sapien
cagtggacaatttcccaagcaccat

SEQ ID NO: 3275846 - DNA, 25 bp, Homo sapien
tttcccagtggacaatttcccaagc

SEQ ID NO: 3275847 - DNA, 25 bp, Homo sapien
tcccagtggacaatttcccaagcac

SEQ ID NO: 3275848 - DNA, 25 bp, Homo sapien
atggaaaaccgcctccaaatctgct

SEQ ID NO: 3275849 - DNA, 25 bp, Homo sapien
tctgccgtcctccttcaaatctgct

SEQ ID NO: 3275850 - DNA, 25 bp, Homo sapien
ggaaaaccgcctccaaatctgctgc

SEQ ID NO: 3275851 - DNA, 25 bp, Homo sapien
cttcaaatctgcttgacgcctccat

SEQ ID NO: 3275852 - DNA, 25 bp, Homo sapien
tcagaaaaggctgattgatgtagct

SEQ ID NO: 3275853 - DNA, 25 bp, Homo sapien
ttcagaaaaggctgattgatgtagc

SEQ ID NO: 3275854 - DNA, 25 bp, Homo sapien
cactgcattatcagctttatgtcgt

SEQ ID NO: 3275855 - DNA, 25 bp, Homo sapien
tgtttcttgttcactgcattatcag

SEQ ID NO: 3275856 - DNA, 25 bp, Homo sapien
cttgttcactgcattatcagcttta

SEQ ID NO: 3275857 - DNA, 25 bp, Homo sapien
ctgcattatcagctttatgtcgttt

SEQ ID NO: 3275858 - DNA, 25 bp, Homo sapien
ctgatgtattagtggcagccatgac

SEQ ID NO: 3275859 - DNA, 25 bp, Homo sapien
ctgttttataacgaatggagtctcc

SEQ ID NO: 3275860 - DNA, 25 bp, Homo sapien
tattgagctataaagagatgcgtgc

SEQ ID NO: 3275861 - DNA, 25 bp, Homo sapien
tccatggaccctgagataacacctt

SEQ ID NO: 3275862 - DNA, 25 bp, Homo sapien
tatcttctattatctctttgatagc

SEQ ID NO: 3275863 - DNA, 25 bp, Homo sapien
ttctattatctctttgatagctgcc

SEQ ID NO: 3275864 - DNA, 25 bp, Homo sapien
tattatctctttgatagctgccaca

SEQ ID NO: 3275865 - DNA, 25 bp, Homo sapien
attatctctttgatagctgccacag

SEQ ID NO: 3275866 - DNA, 25 bp, Homo sapien
taaataagagaggaaccagtgttgt

SEQ ID NO: 3275867 - DNA, 25 bp, Homo sapien
tgttgtataacgacctgttggtgac

SEQ ID NO: 3275868 - DNA, 25 bp, Homo sapien
ggaaccagtgttgtataacgacctg

SEQ ID NO: 3275869 - DNA, 25 bp, Homo sapien
tataacgacctgttggtgacacatc

SEQ ID NO: 3275870 - DNA, 25 bp, Homo sapien
taccacccaaaatgaacagtccttg

SEQ ID NO: 3275871 - DNA, 25 bp, Homo sapien
tggtcacgggcttaacatttattag

SEQ ID NO: 3275872 - DNA, 25 bp, Homo sapien
tccaacactgcttgcagcaggagcc

SEQ ID NO: 3275873 - DNA, 25 bp, Homo sapien
cagaaatgtccaccaaaaccagctt

SEQ ID NO: 3275874 - DNA, 25 bp, Homo sapien
ctgagagtagagaaatcttggaagg

SEQ ID NO: 3275875 - DNA, 25 bp, Homo sapien
tattaacaggtttaggacagaggca

SEQ ID NO: 3275876 - DNA, 25 bp, Homo sapien
cataagacagagtacaacgtgtgac

SEQ ID NO: 3275877 - DNA, 25 bp, Homo sapien
tgaaggtgtttatgtggtcccagaa

SEQ ID NO: 3275878 - DNA, 25 bp, Homo sapien
tcccagaagccgcataagtggccag

SEQ ID NO: 3275879 - DNA, 25 bp, Homo sapien
cagccagtgaggtcttctctgaaac

SEQ ID NO: 3275880 - DNA, 25 bp, Homo sapien
aatagtccttacttcctcctggtca

SEQ ID NO: 3275881 - DNA, 25 bp, Homo sapien
gggctggttgatgaaaatagtcctt

SEQ ID NO: 3275882 - DNA, 25 bp, Homo sapien
agccagtgaggtcttctctgaaaca

SEQ ID NO: 3275883 - DNA, 25 bp, Homo sapien
cccttccttgaccatctccataccc

SEQ ID NO: 3275884 - DNA, 25 bp, Homo sapien
ccttccttgaccatctccataccca

SEQ ID NO: 3275885 - DNA, 25 bp, Homo sapien
cttccttgaccatctccatacccat

SEQ ID NO: 3275886 - DNA, 25 bp, Homo sapien
caactgtgatgctagctcattacct

SEQ ID NO: 3275887 - DNA, 25 bp, Homo sapien
catcaccctcttgttcatgcaactg

SEQ ID NO: 3275888 - DNA, 25 bp, Homo sapien
tgttcatgcaactgtgatgctagct

SEQ ID NO: 3275889 - DNA, 25 bp, Homo sapien
gctagctcattacctccaagtccat

SEQ ID NO: 3275890 - DNA, 25 bp, Homo sapien
tttctaatccccagagcgtcaagtg

SEQ ID NO: 3275891 - DNA, 25 bp, Homo sapien
gaatgctggacacaatgcacttgat

SEQ ID NO: 3275892 - DNA, 25 bp, Homo sapien
tcatctcagcaattagggaaggcag

SEQ ID NO: 3275893 - DNA, 25 bp, Homo sapien
tgataatcttcccacccggcagtgg

SEQ ID NO: 3275894 - DNA, 25 bp, Homo sapien
gaactcatctccatactcatctcca

SEQ ID NO: 3275895 - DNA, 25 bp, Homo sapien
tcacacagtgccacttcaggtaaaa

SEQ ID NO: 3275896 - DNA, 25 bp, Homo sapien
ttctcacacagtgccacttcaggta

SEQ ID NO: 3275897 - DNA, 25 bp, Homo sapien
agtgccacttcaggtaaaactgaac

SEQ ID NO: 3275898 - DNA, 25 bp, Homo sapien
ctgggtaatgtgtccagctggaaat

SEQ ID NO: 3275899 - DNA, 25 bp, Homo sapien
caacactgggtaatgtgtccagctg

SEQ ID NO: 3275900 - DNA, 25 bp, Homo sapien
cttttccgtttgtaacacaacactg

SEQ ID NO: 3275901 - DNA, 25 bp, Homo sapien
acacaacactgggtaatgtgtccag

SEQ ID NO: 3275902 - DNA, 25 bp, Homo sapien
cattcgagggtactggagcctggaa

SEQ ID NO: 3275903 - DNA, 25 bp, Homo sapien
actgcggtgcaaagcacgcctcggg

SEQ ID NO: 3275904 - DNA, 25 bp, Homo sapien
gcggagaacacccattcgagggtac

SEQ ID NO: 3275905 - DNA, 25 bp, Homo sapien
agcctggaaagggtctgcgagtaca

SEQ ID NO: 3275906 - DNA, 25 bp, Homo sapien
gcgcgcgagcggatctccgacacgg

SEQ ID NO: 3275907 - DNA, 25 bp, Homo sapien
gcgagcggatctccgacacggtcct

SEQ ID NO: 3275908 - DNA, 25 bp, Homo sapien
ttcggcgcgcgagcggatctccgac

SEQ ID NO: 3275909 - DNA, 25 bp, Homo sapien
cttcggcgcgcgagcggatctccga

SEQ ID NO: 3275910 - DNA, 25 bp, Homo sapien
gtgggtcctcagcccggactctgca

SEQ ID NO: 3275911 - DNA, 25 bp, Homo sapien
acctgtcacggcgtggtacacgcgg

SEQ ID NO: 3275912 - DNA, 25 bp, Homo sapien
cggcgtggtacacgcgggagacccg

SEQ ID NO: 3275913 - DNA, 25 bp, Homo sapien
cggactctgcacctgtcacggcgtg

SEQ ID NO: 3275914 - DNA, 25 bp, Homo sapien
gcgccgcgcagagcgctcagctgca

SEQ ID NO: 3275915 - DNA, 25 bp, Homo sapien
ctgcgccgcgcagagcgctcagctg

SEQ ID NO: 3275916 - DNA, 25 bp, Homo sapien
gcgccgccgcccacctagggcagag

SEQ ID NO: 3275917 - DNA, 25 bp, Homo sapien
cccgcacgccgacaggaggaggaga

SEQ ID NO: 3275918 - DNA, 25 bp, Homo sapien
ggttaagggctaagcttacagcctg

SEQ ID NO: 3275919 - DNA, 25 bp, Homo sapien
gctaagcttacagcctgaatgaggg

SEQ ID NO: 3275920 - DNA, 25 bp, Homo sapien
gcttacagcctgaatgagggtgaca

SEQ ID NO: 3275921 - DNA, 25 bp, Homo sapien
tacagcctgaatgagggtgacagca

SEQ ID NO: 3275922 - DNA, 25 bp, Homo sapien
ttgttggcccaagcctgcaaccctg

SEQ ID NO: 3275923 - DNA, 25 bp, Homo sapien
ctggcaactgcccatactagcagag

SEQ ID NO: 3275924 - DNA, 25 bp, Homo sapien
catactagcagagtgttgatggcag

SEQ ID NO: 3275925 - DNA, 25 bp, Homo sapien
tctttgttggcccaagcctgcaacc

SEQ ID NO: 3275926 - DNA, 25 bp, Homo sapien
gctgcttcttgatgagaaacagtca

SEQ ID NO: 3275927 - DNA, 25 bp, Homo sapien
ttttatggcaggttgagcacatgct

SEQ ID NO: 3275928 - DNA, 25 bp, Homo sapien
aaagcaggcgaatctgagctctgaa

SEQ ID NO: 3275929 - DNA, 25 bp, Homo sapien
gaagaactctgtgtaaaaccttcat

SEQ ID NO: 3275930 - DNA, 25 bp, Homo sapien
gacacttgatgccagcttcttggtg

SEQ ID NO: 3275931 - DNA, 25 bp, Homo sapien
ctgacacttgatgccagcttcttgg

SEQ ID NO: 3275932 - DNA, 25 bp, Homo sapien
tgacacttgatgccagcttcttggt

SEQ ID NO: 3275933 - DNA, 25 bp, Homo sapien
gccagatagaccagatgattgtttc

SEQ ID NO: 3275934 - DNA, 25 bp, Homo sapien
tgccagatagaccagatgattgttt

SEQ ID NO: 3275935 - DNA, 25 bp, Homo sapien
cagatagaccagatgattgtttcat

SEQ ID NO: 3275936 - DNA, 25 bp, Homo sapien
catgccagatagaccagatgattgt

SEQ ID NO: 3275937 - DNA, 25 bp, Homo sapien
atagaagggattttgcctcaaaatg

SEQ ID NO: 3275938 - DNA, 25 bp, Homo sapien
tgacactcttggttggtggcccagg

SEQ ID NO: 3275939 - DNA, 25 bp, Homo sapien
cccaggagctatacccaatagccat

SEQ ID NO: 3275940 - DNA, 25 bp, Homo sapien
tctggaaaggtgtatctgacactct

SEQ ID NO: 3275941 - DNA, 25 bp, Homo sapien
aactggtgaatcagtatggaactaa

SEQ ID NO: 3275942 - DNA, 25 bp, Homo sapien
tagaaacacgatggtttcttgccaa

SEQ ID NO: 3275943 - DNA, 25 bp, Homo sapien
tggaactaaacctgggattgggcca

SEQ ID NO: 3275944 - DNA, 25 bp, Homo sapien
tgaatcagtatggaactaaacctgg

SEQ ID NO: 3275945 - DNA, 25 bp, Homo sapien
agtgagcacggatctcaccagagtt

SEQ ID NO: 3275946 - DNA, 25 bp, Homo sapien
ccagagttcctaagatcttactaac

SEQ ID NO: 3275947 - DNA, 25 bp, Homo sapien
ctatttaaaagatgaagtccactct

SEQ ID NO: 3275948 - DNA, 25 bp, Homo sapien
gtccactcttccaattatactttga

SEQ ID NO: 3275949 - DNA, 25 bp, Homo sapien
caatgtcttgcccaccaagttgcac

SEQ ID NO: 3275950 - DNA, 25 bp, Homo sapien
tgcccaccaagttgcacatacttag

SEQ ID NO: 3275951 - DNA, 25 bp, Homo sapien
tcacaaactgctaaagtcatcctct

SEQ ID NO: 3275952 - DNA, 25 bp, Homo sapien
tgcacatacttagtctgatatgtcc

SEQ ID NO: 3275953 - DNA, 25 bp, Homo sapien
cgacaacatttgatacactgagaag

SEQ ID NO: 3275954 - DNA, 25 bp, Homo sapien
tgcacattgacttgaaatagcttga

SEQ ID NO: 3275955 - DNA, 25 bp, Homo sapien
cagggaatactgctgtatatcatat

SEQ ID NO: 3275956 - DNA, 25 bp, Homo sapien
tagcttgatcatgatatcctgcaaa

SEQ ID NO: 3275957 - DNA, 25 bp, Homo sapien
gcagtttgcccactcaatgcccata

SEQ ID NO: 3275958 - DNA, 25 bp, Homo sapien
gagtgtggcaaatacagcagtttgc

SEQ ID NO: 3275959 - DNA, 25 bp, Homo sapien
gccttctccctacataacgtggtac

SEQ ID NO: 3275960 - DNA, 25 bp, Homo sapien
ttaaagggtgactgcaggtgaggct

SEQ ID NO: 3275961 - DNA, 25 bp, Homo sapien
gaaccatgaggcgatgatgaggaaa

SEQ ID NO: 3275962 - DNA, 25 bp, Homo sapien
cactgagatgtaagcaagagtcagc

SEQ ID NO: 3275963 - DNA, 25 bp, Homo sapien
gcttcccagaaagccatagctttct

SEQ ID NO: 3275964 - DNA, 25 bp, Homo sapien
ccagaaagccatagctttcttgatg

SEQ ID NO: 3275965 - DNA, 25 bp, Homo sapien
ttagagatcctcatggcctggtggg

SEQ ID NO: 3275966 - DNA, 25 bp, Homo sapien
tcctcatggcctggtgggaatgtag

SEQ ID NO: 3275967 - DNA, 25 bp, Homo sapien
tgggaatgtagcctgagtgtattca

SEQ ID NO: 3275968 - DNA, 25 bp, Homo sapien
gggaatgtagcctgagtgtattcat

SEQ ID NO: 3275969 - DNA, 25 bp, Homo sapien
gctaaaaagcactatacggactctc

SEQ ID NO: 3275970 - DNA, 25 bp, Homo sapien
cagcatctagtgagccacctttatg

SEQ ID NO: 3275971 - DNA, 25 bp, Homo sapien
taattgattggtagtgatgcccttc

SEQ ID NO: 3275972 - DNA, 25 bp, Homo sapien
aatgccctctctatggttgatgacc

SEQ ID NO: 3275973 - DNA, 25 bp, Homo sapien
acgaatgacactgccctttactgcc

SEQ ID NO: 3275974 - DNA, 25 bp, Homo sapien
tcaacgaatgacactgccctttact

SEQ ID NO: 3275975 - DNA, 25 bp, Homo sapien
tgccatctgtacttcagagtttctc

SEQ ID NO: 3275976 - DNA, 25 bp, Homo sapien
catctgtacttcagagtttctctgc

SEQ ID NO: 3275977 - DNA, 25 bp, Homo sapien
atgtgaatttcaggcagatcagaaa

SEQ ID NO: 3275978 - DNA, 25 bp, Homo sapien
gcctctctaaagtgttcaccattta

SEQ ID NO: 3275979 - DNA, 25 bp, Homo sapien
agaggcctctctaaagtgttcacca

SEQ ID NO: 3275980 - DNA, 25 bp, Homo sapien
gggaacactgtggaggaataatttg

SEQ ID NO: 3275981 - DNA, 25 bp, Homo sapien
cagctgattttattgacatctaatt

SEQ ID NO: 3275982 - DNA, 25 bp, Homo sapien
tcagctgattttattgacatctaat

SEQ ID NO: 3275983 - DNA, 25 bp, Homo sapien
agctgattttattgacatctaattc

SEQ ID NO: 3275984 - DNA, 25 bp, Homo sapien
ggttctcactagtagtggttctcac

SEQ ID NO: 3275985 - DNA, 25 bp, Homo sapien
tcactagtagtggttctcactaatc

SEQ ID NO: 3275986 - DNA, 25 bp, Homo sapien
tctcactagtagtggttctcactaa

SEQ ID NO: 3275987 - DNA, 25 bp, Homo sapien
ggctggttctcactagtagtggttc

SEQ ID NO: 3275988 - DNA, 25 bp, Homo sapien
ctatttcaattaagagaaggtatat

SEQ ID NO: 3275989 - DNA, 25 bp, Homo sapien
gagaaggtatattgattcctgcttg

SEQ ID NO: 3275990 - DNA, 25 bp, Homo sapien
tggggtcgtatttctgtttctggct

SEQ ID NO: 3275991 - DNA, 25 bp, Homo sapien
tgattcctgcttggggtcgtatttc

SEQ ID NO: 3275992 - DNA, 25 bp, Homo sapien
ccatgaagctagactttggtgcctg

SEQ ID NO: 3275993 - DNA, 25 bp, Homo sapien
gatcagggcgtgctggatactgcaa

SEQ ID NO: 3275994 - DNA, 25 bp, Homo sapien
gactgcttggtcctgcaaacgttag

SEQ ID NO: 3275995 - DNA, 25 bp, Homo sapien
tgtattttccaagcatggactgctt

SEQ ID NO: 3275996 - DNA, 25 bp, Homo sapien
acttctggagactgatcacgcctct

SEQ ID NO: 3275997 - DNA, 25 bp, Homo sapien
tcattggatataggcgtcgttgaat

SEQ ID NO: 3275998 - DNA, 25 bp, Homo sapien
ggagactgatcacgcctcttgatct

SEQ ID NO: 3275999 - DNA, 25 bp, Homo sapien
gcgtcgttgaatgtcagatgaattt

SEQ ID NO: 3276000 - DNA, 25 bp, Homo sapien
tcctcctcttcatcaccataaagca

SEQ ID NO: 3276001 - DNA, 25 bp, Homo sapien
tcctcctcctcttcatcaccataaa

SEQ ID NO: 3276002 - DNA, 25 bp, Homo sapien
cctcctcttcatcaccataaagcac

SEQ ID NO: 3276003 - DNA, 25 bp, Homo sapien
ctagcagtttggctcctcctcctcc

SEQ ID NO: 3276004 - DNA, 25 bp, Homo sapien
taaggaagaaggaacgctgacagaa

SEQ ID NO: 3276005 - DNA, 25 bp, Homo sapien
aagcaataaggaagaaggaacgctg

SEQ ID NO: 3276006 - DNA, 25 bp, Homo sapien
aagaacaggaactgcctgcttggca

SEQ ID NO: 3276007 - DNA, 25 bp, Homo sapien
tagaactgaattaaagaacaggaac

SEQ ID NO: 3276008 - DNA, 25 bp, Homo sapien
ctttgggaggttaaaatattcatgt

SEQ ID NO: 3276009 - DNA, 25 bp, Homo sapien
agttctgtgttggtatttgaactgc

SEQ ID NO: 3276010 - DNA, 25 bp, Homo sapien
gttggtatttgaactgcacggtaac

SEQ ID NO: 3276011 - DNA, 25 bp, Homo sapien
atattcatgttcaaatagttctgtg

SEQ ID NO: 3276012 - DNA, 25 bp, Homo sapien
gccccttgcaaagctacaatatcca

SEQ ID NO: 3276013 - DNA, 25 bp, Homo sapien
agatgacttatggatgtcaactgct

SEQ ID NO: 3276014 - DNA, 25 bp, Homo sapien
tagagatgacttatggatgtcaact

SEQ ID NO: 3276015 - DNA, 25 bp, Homo sapien
ctgccccttgcaaagctacaatatc

SEQ ID NO: 3276016 - DNA, 25 bp, Homo sapien
taactcatgtaggtataggtattcc

SEQ ID NO: 3276017 - DNA, 25 bp, Homo sapien
ccagctgatctatatctttttagta

SEQ ID NO: 3276018 - DNA, 25 bp, Homo sapien
gtaactgttatattctcttagtgaa

SEQ ID NO: 3276019 - DNA, 25 bp, Homo sapien
gagtttcttgtaggatcatgtgttt

SEQ ID NO: 3276020 - DNA, 25 bp, Homo sapien
gagttctgtctcaaggacaataact

SEQ ID NO: 3276021 - DNA, 25 bp, Homo sapien
acttttatcttgatcctgcaaatct

SEQ ID NO: 3276022 - DNA, 25 bp, Homo sapien
caataactgaaggctcatctgtata

SEQ ID NO: 3276023 - DNA, 25 bp, Homo sapien
gacttttatcttgatcctgcaaatc

SEQ ID NO: 3276024 - DNA, 25 bp, Homo sapien
gccttgtgtctgagtattccttggt

SEQ ID NO: 3276025 - DNA, 25 bp, Homo sapien
agttggctctatacctgtgaactca

SEQ ID NO: 3276026 - DNA, 25 bp, Homo sapien
tccttaatattaacttccgtgtcta

SEQ ID NO: 3276027 - DNA, 25 bp, Homo sapien
tgtgaactcagccagccacccacat

SEQ ID NO: 3276028 - DNA, 25 bp, Homo sapien
tactgacaggtagttgtaacggtct

SEQ ID NO: 3276029 - DNA, 25 bp, Homo sapien
tgagtttctaccagggccgaggtca

SEQ ID NO: 3276030 - DNA, 25 bp, Homo sapien
tctggtagggtagatgctgagtttc

SEQ ID NO: 3276031 - DNA, 25 bp, Homo sapien
ggtcatgccagaagctgcttttaaa

SEQ ID NO: 3276032 - DNA, 25 bp, Homo sapien
tgcttattcttgtgaacatccactt

SEQ ID NO: 3276033 - DNA, 25 bp, Homo sapien
tctatgttccagttccattttttgc

SEQ ID NO: 3276034 - DNA, 25 bp, Homo sapien
ctgtggctgatgcttattcttgtga

SEQ ID NO: 3276035 - DNA, 25 bp, Homo sapien
ttctgctgaacatgagtgctccctc

SEQ ID NO: 3276036 - DNA, 25 bp, Homo sapien
taaaaagcgagtggagtctagagtt

SEQ ID NO: 3276037 - DNA, 25 bp, Homo sapien
gctcctttgatcttcctgtttggaa

SEQ ID NO: 3276038 - DNA, 25 bp, Homo sapien
tatcctgtagatagaagagctcctt

SEQ ID NO: 3276039 - DNA, 25 bp, Homo sapien
tcaagctggacaggataaattcact

SEQ ID NO: 3276040 - DNA, 25 bp, Homo sapien
ttcttcattgttctcactggatgcc

SEQ ID NO: 3276041 - DNA, 25 bp, Homo sapien
tccactgggtcaggggaaacaaggc

SEQ ID NO: 3276042 - DNA, 25 bp, Homo sapien
gaacacacagtatcttccactgggt

SEQ ID NO: 3276043 - DNA, 25 bp, Homo sapien
cattgttctcactggatgccttaga

SEQ ID NO: 3276044 - DNA, 25 bp, Homo sapien
ggctggaagaactaggagagacgag

SEQ ID NO: 3276045 - DNA, 25 bp, Homo sapien
ttctctgataccattcgatcttttc

SEQ ID NO: 3276046 - DNA, 25 bp, Homo sapien
gctgacttgacttagggctggaaga

SEQ ID NO: 3276047 - DNA, 25 bp, Homo sapien
tgtgccctactcctggaacatgctg

SEQ ID NO: 3276048 - DNA, 25 bp, Homo sapien
tttcctcatcctcctccccttcctg

SEQ ID NO: 3276049 - DNA, 25 bp, Homo sapien
ctcatcctcctccccttcctgtgtc

SEQ ID NO: 3276050 - DNA, 25 bp, Homo sapien
ttcctcatcctcctccccttcctgt

SEQ ID NO: 3276051 - DNA, 25 bp, Homo sapien
cctcatcctcctccccttcctgtgt

SEQ ID NO: 3276052 - DNA, 25 bp, Homo sapien
gctggaattttctcacctagagacc

SEQ ID NO: 3276053 - DNA, 25 bp, Homo sapien
tcatatggtgccagcaagatgcctc

SEQ ID NO: 3276054 - DNA, 25 bp, Homo sapien
tgctagataccccttcatggccttt

SEQ ID NO: 3276055 - DNA, 25 bp, Homo sapien
cagtaatggtggtatcagtgagatc

SEQ ID NO: 3276056 - DNA, 25 bp, Homo sapien
ctgccaggcctgtgcggattccttc

SEQ ID NO: 3276057 - DNA, 25 bp, Homo sapien
tgccaggcctgtgcggattccttcc

SEQ ID NO: 3276058 - DNA, 25 bp, Homo sapien
aggcctgtgcggattccttccttgg

SEQ ID NO: 3276059 - DNA, 25 bp, Homo sapien
tttttgctcaagatttatttagcta

SEQ ID NO: 3276060 - DNA, 25 bp, Homo sapien
tttgctcaagatttatttagctatt

SEQ ID NO: 3276061 - DNA, 25 bp, Homo sapien
ttttgctcaagatttatttagctat

SEQ ID NO: 3276062 - DNA, 25 bp, Homo sapien
tttggggtactttgtcattccatat

SEQ ID NO: 3276063 - DNA, 25 bp, Homo sapien
tctttatttcctatacaacagtgag

SEQ ID NO: 3276064 - DNA, 25 bp, Homo sapien
tatacaacagtgaggccattctcct

SEQ ID NO: 3276065 - DNA, 25 bp, Homo sapien
ctcaagatatcccaagatcaggcca

SEQ ID NO: 3276066 - DNA, 25 bp, Homo sapien
tcaagatatcccaagatcaggccat

SEQ ID NO: 3276067 - DNA, 25 bp, Homo sapien
gcgttgtgctttggagaatactgtc

SEQ ID NO: 3276068 - DNA, 25 bp, Homo sapien
caggaatctggaatagcaagtgtaa

SEQ ID NO: 3276069 - DNA, 25 bp, Homo sapien
cactggtatagcgttgtgctttgga

SEQ ID NO: 3276070 - DNA, 25 bp, Homo sapien
ttaaacactggtatagcgttgtgct

SEQ ID NO: 3276071 - DNA, 25 bp, Homo sapien
ctcatatgtggccttgctgtgcaaa

SEQ ID NO: 3276072 - DNA, 25 bp, Homo sapien
tatgtggccttgctgtgcaaataac

SEQ ID NO: 3276073 - DNA, 25 bp, Homo sapien
ggccttgctgtgcaaataactatat

SEQ ID NO: 3276074 - DNA, 25 bp, Homo sapien
tgtggccttgctgtgcaaataacta

SEQ ID NO: 3276075 - DNA, 25 bp, Homo sapien
aatgccccagtggttcaatggctga

SEQ ID NO: 3276076 - DNA, 25 bp, Homo sapien
ttatctcaggctcaatgaagggcaa

SEQ ID NO: 3276077 - DNA, 25 bp, Homo sapien
tcctgaggtcgatgcattctccaag

SEQ ID NO: 3276078 - DNA, 25 bp, Homo sapien
cagcatggcagtaaagtaggtacaa

SEQ ID NO: 3276079 - DNA, 25 bp, Homo sapien
cacagtccgactagacctcatgact

SEQ ID NO: 3276080 - DNA, 25 bp, Homo sapien
cgactagacctcatgactgtttcct

SEQ ID NO: 3276081 - DNA, 25 bp, Homo sapien
agtccgactagacctcatgactgtt

SEQ ID NO: 3276082 - DNA, 25 bp, Homo sapien
ctacacagtccgactagacctcatg

SEQ ID NO: 3276083 - DNA, 25 bp, Homo sapien
tctcagcagtagaacagtgactaac

SEQ ID NO: 3276084 - DNA, 25 bp, Homo sapien
tgagtcgtgtcaataaatggcatct

SEQ ID NO: 3276085 - DNA, 25 bp, Homo sapien
agcagttttattggattgggcattt

SEQ ID NO: 3276086 - DNA, 25 bp, Homo sapien
caccacacactgtttgtccatatgt

SEQ ID NO: 3276087 - DNA, 25 bp, Homo sapien
tctgatacatgacgcgtattatagg

SEQ ID NO: 3276088 - DNA, 25 bp, Homo sapien
acatgacgcgtattataggcaataa

SEQ ID NO: 3276089 - DNA, 25 bp, Homo sapien
tgttctttagtgtctgatacatgac

SEQ ID NO: 3276090 - DNA, 25 bp, Homo sapien
tagtgtctgatacatgacgcgtatt

SEQ ID NO: 3276091 - DNA, 25 bp, Homo sapien
tgtcgtgaaaccatacagctgttcc

SEQ ID NO: 3276092 - DNA, 25 bp, Homo sapien
tagcgttgcatagaaaatgtcgtga

SEQ ID NO: 3276093 - DNA, 25 bp, Homo sapien
ctatagcaagggatagcgttgcata

SEQ ID NO: 3276094 - DNA, 25 bp, Homo sapien
gttccattgtggatgctttctccat

SEQ ID NO: 3276095 - DNA, 25 bp, Homo sapien
acatagaagttctgccagatgttcc

SEQ ID NO: 3276096 - DNA, 25 bp, Homo sapien
ttttcctaccacatagaagttctgc

SEQ ID NO: 3276097 - DNA, 25 bp, Homo sapien
tcctaccacatagaagttctgccag

SEQ ID NO: 3276098 - DNA, 25 bp, Homo sapien
aagaatagggggatacaaagaccat

SEQ ID NO: 3276099 - DNA, 25 bp, Homo sapien
tgtagtggacctggtttgctaggca

SEQ ID NO: 3276100 - DNA, 25 bp, Homo sapien
tcagggagggtgtagtggacctggt

SEQ ID NO: 3276101 - DNA, 25 bp, Homo sapien
ggcaagtgaaccttcctctccagtt

SEQ ID NO: 3276102 - DNA, 25 bp, Homo sapien
cctggtttgctaggcaagtgaacct

SEQ ID NO: 3276103 - DNA, 25 bp, Homo sapien
tgaagatcatagaacagttgtagaa

SEQ ID NO: 3276104 - DNA, 25 bp, Homo sapien
cagttgtagaaaacgttctttcgct

SEQ ID NO: 3276105 - DNA, 25 bp, Homo sapien
gctgaagatcatagaacagttgtag

SEQ ID NO: 3276106 - DNA, 25 bp, Homo sapien
cagctgaagatcatagaacagttgt

SEQ ID NO: 3276107 - DNA, 25 bp, Homo sapien
gtgatttttgcatgaggtagctcat

SEQ ID NO: 3276108 - DNA, 25 bp, Homo sapien
tccatttttggaagtgatttttgca

SEQ ID NO: 3276109 - DNA, 25 bp, Homo sapien
cttgtcatatctgacattttctcct

SEQ ID NO: 3276110 - DNA, 25 bp, Homo sapien
gaagtgatttttgcatgaggtagct

SEQ ID NO: 3276111 - DNA, 25 bp, Homo sapien
catttgatttgtgatcactggtcta

SEQ ID NO: 3276112 - DNA, 25 bp, Homo sapien
tgatttgtgatcactggtctaaaat

SEQ ID NO: 3276113 - DNA, 25 bp, Homo sapien
ctgatagcagccatttgatttgtga

SEQ ID NO: 3276114 - DNA, 25 bp, Homo sapien
tttgatttgtgatcactggtctaaa

SEQ ID NO: 3276115 - DNA, 25 bp, Homo sapien
caagctccagataacctccagatgc

SEQ ID NO: 3276116 - DNA, 25 bp, Homo sapien
cctccagatgctccgtgtttggttt

SEQ ID NO: 3276117 - DNA, 25 bp, Homo sapien
agatgctccgtgtttggtttcatag

SEQ ID NO: 3276118 - DNA, 25 bp, Homo sapien
agtcctgctcctttgacaacatcac

SEQ ID NO: 3276119 - DNA, 25 bp, Homo sapien
aaatgaccgctcagtttttgcacca

SEQ ID NO: 3276120 - DNA, 25 bp, Homo sapien
tgcagtgccaaatgaccgctcagtt

SEQ ID NO: 3276121 - DNA, 25 bp, Homo sapien
ggtgaaatccttagtgacagtgcag

SEQ ID NO: 3276122 - DNA, 25 bp, Homo sapien
ccttagtgacagtgcagtgccaaat

SEQ ID NO: 3276123 - DNA, 25 bp, Homo sapien
tggtttagcttctactgtggcacat

SEQ ID NO: 3276124 - DNA, 25 bp, Homo sapien
tgaaaactttaaaatggactctcca

SEQ ID NO: 3276125 - DNA, 25 bp, Homo sapien
ttgggaaccactggtttagcttcta

SEQ ID NO: 3276126 - DNA, 25 bp, Homo sapien
gactctccaaagtccacagaaaagc

SEQ ID NO: 3276127 - DNA, 25 bp, Homo sapien
gaatcagagttaaggttgagcctca

SEQ ID NO: 3276128 - DNA, 25 bp, Homo sapien
aaaggaatcactcactcagggcacc

SEQ ID NO: 3276129 - DNA, 25 bp, Homo sapien
cctcagaagttgaaaagtggagttc

SEQ ID NO: 3276130 - DNA, 25 bp, Homo sapien
ggcacccgttgaatggctataggaa

SEQ ID NO: 3276131 - DNA, 25 bp, Homo sapien
gagtacagttaattcacactcatgc

SEQ ID NO: 3276132 - DNA, 25 bp, Homo sapien
tcaacagcaagtacgttatatgaga

SEQ ID NO: 3276133 - DNA, 25 bp, Homo sapien
agtacgttatatgagataccatggg

SEQ ID NO: 3276134 - DNA, 25 bp, Homo sapien
tcagagtacagttaattcacactca

SEQ ID NO: 3276135 - DNA, 25 bp, Homo sapien
tttgctggcaactataatcttcctt

SEQ ID NO: 3276136 - DNA, 25 bp, Homo sapien
tgtctagtagactttgcctatttat

SEQ ID NO: 3276137 - DNA, 25 bp, Homo sapien
aaatgtagatgtattgtctagtaga

SEQ ID NO: 3276138 - DNA, 25 bp, Homo sapien
ttgtctagtagactttgcctattta

SEQ ID NO: 3276139 - DNA, 25 bp, Homo sapien
atgtagatgtattgtctagtagact

SEQ ID NO: 3276140 - DNA, 25 bp, Homo sapien
catctgcattgcttaccatgcctta

SEQ ID NO: 3276141 - DNA, 25 bp, Homo sapien
ccatgccttagtagatcaggagaaa

SEQ ID NO: 3276142 - DNA, 25 bp, Homo sapien
gcattttggttcagagccctcatgg

SEQ ID NO: 3276143 - DNA, 25 bp, Homo sapien
ctcatggttgtatccagatgaacat

SEQ ID NO: 3276144 - DNA, 25 bp, Homo sapien
agtttgggattgaccacggctcctc

SEQ ID NO: 3276145 - DNA, 25 bp, Homo sapien
gattgaccacggctcctctctcttt

SEQ ID NO: 3276146 - DNA, 25 bp, Homo sapien
tcacagtttgggattgaccacggct

SEQ ID NO: 3276147 - DNA, 25 bp, Homo sapien
ggcaggcacagtgttcttgctttcc

SEQ ID NO: 3276148 - DNA, 25 bp, Homo sapien
tgggtagagtgatctttcctttcct

SEQ ID NO: 3276149 - DNA, 25 bp, Homo sapien
ccctcttgctattcccatatgctgt

SEQ ID NO: 3276150 - DNA, 25 bp, Homo sapien
tccctcttgctattcccatatgctg

SEQ ID NO: 3276151 - DNA, 25 bp, Homo sapien
ttccctcttgctattcccatatgct

SEQ ID NO: 3276152 - DNA, 25 bp, Homo sapien
catctggtactgttactcaagcaca

SEQ ID NO: 3276153 - DNA, 25 bp, Homo sapien
tttctctcctgattgagcttcgttg

SEQ ID NO: 3276154 - DNA, 25 bp, Homo sapien
tgagcttcgttggagaaattatgct

SEQ ID NO: 3276155 - DNA, 25 bp, Homo sapien
taatcactttttgttcataaacctc

SEQ ID NO: 3276156 - DNA, 25 bp, Homo sapien
ctgaattgtgtccttggttcaactc

SEQ ID NO: 3276157 - DNA, 25 bp, Homo sapien
gtttgggctgaaaaacactgtgcct

SEQ ID NO: 3276158 - DNA, 25 bp, Homo sapien
ggttcaactcatacagatgctcttc

SEQ ID NO: 3276159 - DNA, 25 bp, Homo sapien
gctgaaaaacactgtgcctgaattg

SEQ ID NO: 3276160 - DNA, 25 bp, Homo sapien
tctttatagacttcagaccagggtc

SEQ ID NO: 3276161 - DNA, 25 bp, Homo sapien
tccagtaggagccacgttgctttct

SEQ ID NO: 3276162 - DNA, 25 bp, Homo sapien
agggtctgttccagtaggagccacg

SEQ ID NO: 3276163 - DNA, 25 bp, Homo sapien
ccagtattcatcttacttagccaga

SEQ ID NO: 3276164 - DNA, 25 bp, Homo sapien
ctctgcctgccaatccttccatttt

SEQ ID NO: 3276165 - DNA, 25 bp, Homo sapien
tgtggggatgagagtccagctctgc

SEQ ID NO: 3276166 - DNA, 25 bp, Homo sapien
tcatttcttggttccatttgtgggg

SEQ ID NO: 3276167 - DNA, 25 bp, Homo sapien
tctgcctgccaatccttccattttt

SEQ ID NO: 3276168 - DNA, 25 bp, Homo sapien
ttcaatttggcatgatccaccatcc

SEQ ID NO: 3276169 - DNA, 25 bp, Homo sapien
tgtcttcaatttggcatgatccacc

SEQ ID NO: 3276170 - DNA, 25 bp, Homo sapien
tttggcatgatccaccatccacttc

SEQ ID NO: 3276171 - DNA, 25 bp, Homo sapien
tttgtcttcaatttggcatgatcca

SEQ ID NO: 3276172 - DNA, 25 bp, Homo sapien
catgttcatgataaagctcttgttg

SEQ ID NO: 3276173 - DNA, 25 bp, Homo sapien
cagctggtgatgatctagctctaaa

SEQ ID NO: 3276174 - DNA, 25 bp, Homo sapien
gatgatctagctctaaactctcatt

SEQ ID NO: 3276175 - DNA, 25 bp, Homo sapien
acccatgttcatgataaagctcttg

SEQ ID NO: 3276176 - DNA, 25 bp, Homo sapien
gcagctcctggtatgtggtcgttct

SEQ ID NO: 3276177 - DNA, 25 bp, Homo sapien
tcttctaacatcaatgcagctcctg

SEQ ID NO: 3276178 - DNA, 25 bp, Homo sapien
acagagaccaagtgcctgcagggag

SEQ ID NO: 3276179 - DNA, 25 bp, Homo sapien
tgtttggggcagtatctgctaaggt

SEQ ID NO: 3276180 - DNA, 25 bp, Homo sapien
ccatggatgcagagaatatgtctgg

SEQ ID NO: 3276181 - DNA, 25 bp, Homo sapien
tcaagtacaaagtgttctccatgga

SEQ ID NO: 3276182 - DNA, 25 bp, Homo sapien
ctcaagtacaaagtgttctccatgg

SEQ ID NO: 3276183 - DNA, 25 bp, Homo sapien
tgggttgtactcagtgatggcagat

SEQ ID NO: 3276184 - DNA, 25 bp, Homo sapien
aatgcttgtaccataatgatgttgc

SEQ ID NO: 3276185 - DNA, 25 bp, Homo sapien
tggcagcagccttttagtactgagg

SEQ ID NO: 3276186 - DNA, 25 bp, Homo sapien
gaaaacctatggctgtagtactggg

SEQ ID NO: 3276187 - DNA, 25 bp, Homo sapien
gaaattttgccggagaagaatgcac

SEQ ID NO: 3276188 - DNA, 25 bp, Homo sapien
tcaaattgacttcgttttattctgg

SEQ ID NO: 3276189 - DNA, 25 bp, Homo sapien
gccagttgtagcagcagtctttcct

SEQ ID NO: 3276190 - DNA, 25 bp, Homo sapien
tcgttttattctggatcttattgta

SEQ ID NO: 3276191 - DNA, 25 bp, Homo sapien
cagttgtagcagcagtctttcctac

SEQ ID NO: 3276192 - DNA, 25 bp, Homo sapien
tcagtttctagcacatcctttgtaa

SEQ ID NO: 3276193 - DNA, 25 bp, Homo sapien
ctctttcagtttctagcacatcctt

SEQ ID NO: 3276194 - DNA, 25 bp, Homo sapien
tgtaatttctccaggatttggcttc

SEQ ID NO: 3276195 - DNA, 25 bp, Homo sapien
tctctccacgtgttattttcattca

SEQ ID NO: 3276196 - DNA, 25 bp, Homo sapien
gggtatcaagaacaggccaattcat

SEQ ID NO: 3276197 - DNA, 25 bp, Homo sapien
ggagagtctacttcaggcatcttag

SEQ ID NO: 3276198 - DNA, 25 bp, Homo sapien
catcttaggacagaatgatgggata

SEQ ID NO: 3276199 - DNA, 25 bp, Homo sapien
tcacattggagagtctacttcaggc

SEQ ID NO: 3276200 - DNA, 25 bp, Homo sapien
cacgtgacagatttctatccaggca

SEQ ID NO: 3276201 - DNA, 25 bp, Homo sapien
ccacaacctgtttgtctgccacgtg

SEQ ID NO: 3276202 - DNA, 25 bp, Homo sapien
tgccacgtgacagatttctatccag

SEQ ID NO: 3276203 - DNA, 25 bp, Homo sapien
ctctgaagcaccacaacctgtttgt

SEQ ID NO: 3276204 - DNA, 25 bp, Homo sapien
catgattcataatgagactagacct

SEQ ID NO: 3276205 - DNA, 25 bp, Homo sapien
gggttgtgtccaccaacatgattca

SEQ ID NO: 3276206 - DNA, 25 bp, Homo sapien
tgagactagaccttccagatcccag

SEQ ID NO: 3276207 - DNA, 25 bp, Homo sapien
tagctggggttgtgtccaccaacat

SEQ ID NO: 3276208 - DNA, 25 bp, Homo sapien
ggctctggggtccactcatcttgtc

SEQ ID NO: 3276209 - DNA, 25 bp, Homo sapien
gtggtttcaacctggggcagtggag

SEQ ID NO: 3276210 - DNA, 25 bp, Homo sapien
gttcctgagagtggtttcaacctgg

SEQ ID NO: 3276211 - DNA, 25 bp, Homo sapien
cagttcctgagagtggtttcaacct

SEQ ID NO: 3276212 - DNA, 25 bp, Homo sapien
accagttcctgagagtggtttcaac

SEQ ID NO: 3276213 - DNA, 25 bp, Homo sapien
ttcactgagtgtgacagggagtagt

SEQ ID NO: 3276214 - DNA, 25 bp, Homo sapien
cttcactgagtgtgacagggagtag

SEQ ID NO: 3276215 - DNA, 25 bp, Homo sapien
caatagcttcatgatatattcacat

SEQ ID NO: 3276216 - DNA, 25 bp, Homo sapien
ttcaatagcttcatgatatattcac

SEQ ID NO: 3276217 - DNA, 25 bp, Homo sapien
gagacttggtaaatacaggtctcct

SEQ ID NO: 3276218 - DNA, 25 bp, Homo sapien
ctgggtccgctgtacggagactctg

SEQ ID NO: 3276219 - DNA, 25 bp, Homo sapien
ctggagcctgggtccgctgtacgga

SEQ ID NO: 3276220 - DNA, 25 bp, Homo sapien
atagggagacttggtaaatacaggt

SEQ ID NO: 3276221 - DNA, 25 bp, Homo sapien
tccagacagaagtggccattgtagt

SEQ ID NO: 3276222 - DNA, 25 bp, Homo sapien
caggcaggggactgcttctgcaccg

SEQ ID NO: 3276223 - DNA, 25 bp, Homo sapien
ctcgggctgaggtatagcagtcatt

SEQ ID NO: 3276224 - DNA, 25 bp, Homo sapien
tggagcacttaacatccagacagaa

SEQ ID NO: 3276225 - DNA, 25 bp, Homo sapien
aaaaagtcaataagtcaatgatctc

SEQ ID NO: 3276226 - DNA, 25 bp, Homo sapien
aaaagtcaataagtcaatgatctct

SEQ ID NO: 3276227 - DNA, 25 bp, Homo sapien
ttatcctcagctttgcctccatgag

SEQ ID NO: 3276228 - DNA, 25 bp, Homo sapien
gctttgcctccatgagctccacggc

SEQ ID NO: 3276229 - DNA, 25 bp, Homo sapien
cagctttgcctccatgagctccacg

SEQ ID NO: 3276230 - DNA, 25 bp, Homo sapien
ctcagctttgcctccatgagctcca

SEQ ID NO: 3276231 - DNA, 25 bp, Homo sapien
ctcggccctggccccatccatggcc

SEQ ID NO: 3276232 - DNA, 25 bp, Homo sapien
cggccctggccccatccatggccgc

SEQ ID NO: 3276233 - DNA, 25 bp, Homo sapien
gccctggccccatccatggccgcta

SEQ ID NO: 3276234 - DNA, 25 bp, Homo sapien
ccctggccccatccatggccgctac

SEQ ID NO: 3276235 - DNA, 25 bp, Homo sapien
cgaaacctccaccgaagccaccgtg

SEQ ID NO: 3276236 - DNA, 25 bp, Homo sapien
caccgaagccaccgtggttccccat

SEQ ID NO: 3276237 - DNA, 25 bp, Homo sapien
actgccgaaacctccaccgaagcca

SEQ ID NO: 3276238 - DNA, 25 bp, Homo sapien
gccactgccgaaacctccaccgaag

SEQ ID NO: 3276239 - DNA, 25 bp, Homo sapien
cccactcccccgctgcaccagcgtc

SEQ ID NO: 3276240 - DNA, 25 bp, Homo sapien
cactcccccgctgcaccagcgtcat

SEQ ID NO: 3276241 - DNA, 25 bp, Homo sapien
cccccactcccccgctgcaccagcg

SEQ ID NO: 3276242 - DNA, 25 bp, Homo sapien
gccccccactcccccgctgcaccag

SEQ ID NO: 3276243 - DNA, 25 bp, Homo sapien
taaaatagtaagtgagtgtagagct

SEQ ID NO: 3276244 - DNA, 25 bp, Homo sapien
aattcactaatgaggtgctctatat

SEQ ID NO: 3276245 - DNA, 25 bp, Homo sapien
aatgaggtgctctatatctgttgta

SEQ ID NO: 3276246 - DNA, 25 bp, Homo sapien
tgagtgtagagctaaacttggcaaa

SEQ ID NO: 3276247 - DNA, 25 bp, Homo sapien
ttgttacccgttccaccaatatctg

SEQ ID NO: 3276248 - DNA, 25 bp, Homo sapien
tgttacccgttccaccaatatctgg

SEQ ID NO: 3276249 - DNA, 25 bp, Homo sapien
tgagacccggctcaataatgatttt

SEQ ID NO: 3276250 - DNA, 25 bp, Homo sapien
tgtctacaagcagattaggatactg

SEQ ID NO: 3276251 - DNA, 25 bp, Homo sapien
tgttttctatgcgagcccttgggat

SEQ ID NO: 3276252 - DNA, 25 bp, Homo sapien
tattttcggacaccagtatgtggaa

SEQ ID NO: 3276253 - DNA, 25 bp, Homo sapien
tgggcagctcatagtgtccacaacg

SEQ ID NO: 3276254 - DNA, 25 bp, Homo sapien
gctgagatttaaatgccacctgcca

SEQ ID NO: 3276255 - DNA, 25 bp, Homo sapien
tctctgcagttcaggtaaaccctga

SEQ ID NO: 3276256 - DNA, 25 bp, Homo sapien
tctgtcagtcatccctcctgggctg

SEQ ID NO: 3276257 - DNA, 25 bp, Homo sapien
tttgccctttggattcatgcagctg

SEQ ID NO: 3276258 - DNA, 25 bp, Homo sapien
ctgtttctcttatagcatatgaaac

SEQ ID NO: 3276259 - DNA, 25 bp, Homo sapien
ctggatgttaggagggccaaggcct

SEQ ID NO: 3276260 - DNA, 25 bp, Homo sapien
aaactggggcataggaaagtactct

SEQ ID NO: 3276261 - DNA, 25 bp, Homo sapien
caggatgtagcacagttgggttcta

SEQ ID NO: 3276262 - DNA, 25 bp, Homo sapien
gatgtagcacagttgggttctagtg

SEQ ID NO: 3276263 - DNA, 25 bp, Homo sapien
cagttgggttctagtgagtgtcctc

SEQ ID NO: 3276264 - DNA, 25 bp, Homo sapien
tagcacagttgggttctagtgagtg

SEQ ID NO: 3276265 - DNA, 25 bp, Homo sapien
tatgaaacctataaggcttgcagga

SEQ ID NO: 3276266 - DNA, 25 bp, Homo sapien
tgaaacctataaggcttgcaggaga

SEQ ID NO: 3276267 - DNA, 25 bp, Homo sapien
atgaaacctataaggcttgcaggag

SEQ ID NO: 3276268 - DNA, 25 bp, Homo sapien
taatttcttgccgttcattcctcag

SEQ ID NO: 3276269 - DNA, 25 bp, Homo sapien
ccttcttgacagcattctctattga

SEQ ID NO: 3276270 - DNA, 25 bp, Homo sapien
cagcattctctattgatagtcccat

SEQ ID NO: 3276271 - DNA, 25 bp, Homo sapien
tttcttgccgttcattcctcagttc

SEQ ID NO: 3276272 - DNA, 25 bp, Homo sapien
gagatgaggttctctctaggttgcc

SEQ ID NO: 3276273 - DNA, 25 bp, Homo sapien
ggtgatcccagctcccgagaagtca

SEQ ID NO: 3276274 - DNA, 25 bp, Homo sapien
agagatgaggttctctctaggttgc

SEQ ID NO: 3276275 - DNA, 25 bp, Homo sapien
tcagctgatgcacccttcagtgaat

SEQ ID NO: 3276276 - DNA, 25 bp, Homo sapien
cagctgatgcacccttcagtgaatc

SEQ ID NO: 3276277 - DNA, 25 bp, Homo sapien
gccagtttctgcctgataatgagac

SEQ ID NO: 3276278 - DNA, 25 bp, Homo sapien
ttcagctgatgcacccttcagtgaa

SEQ ID NO: 3276279 - DNA, 25 bp, Homo sapien
tatttgacatatcgaataatgatag

SEQ ID NO: 3276280 - DNA, 25 bp, Homo sapien
tgattcagtatctgttcccaaatga

SEQ ID NO: 3276281 - DNA, 25 bp, Homo sapien
atttctgattcagtatctgttccca

SEQ ID NO: 3276282 - DNA, 25 bp, Homo sapien
aaatatttgacatatcgaataatga

SEQ ID NO: 3276283 - DNA, 25 bp, Homo sapien
ccgataaggcacactccgacaaatt

SEQ ID NO: 3276284 - DNA, 25 bp, Homo sapien
cactctttcaatgatagctgtagat

SEQ ID NO: 3276285 - DNA, 25 bp, Homo sapien
caatatttgcttcaaacttctcatg

SEQ ID NO: 3276286 - DNA, 25 bp, Homo sapien
tgtagatttgatttaagatgtgccg

SEQ ID NO: 3276287 - DNA, 25 bp, Homo sapien
catccgttttgcagagatggttgca

SEQ ID NO: 3276288 - DNA, 25 bp, Homo sapien
aggctgtggaggcatccgttttgca

SEQ ID NO: 3276289 - DNA, 25 bp, Homo sapien
cagatatggataacagcaaaggagg

SEQ ID NO: 3276290 - DNA, 25 bp, Homo sapien
gctggtagctaaaacttctgattct

SEQ ID NO: 3276291 - DNA, 25 bp, Homo sapien
agcttgcttagtcagttgcttcagg

SEQ ID NO: 3276292 - DNA, 25 bp, Homo sapien
gcttgcttagtcagttgcttcaggc

SEQ ID NO: 3276293 - DNA, 25 bp, Homo sapien
cagcttgcttagtcagttgcttcag

SEQ ID NO: 3276294 - DNA, 25 bp, Homo sapien
agaaactgcatcaactaacgagcaa

SEQ ID NO: 3276295 - DNA, 25 bp, Homo sapien
aacagccatagcaaaaacatgccaa

SEQ ID NO: 3276296 - DNA, 25 bp, Homo sapien
aaggaacaactggtaacagccatag

SEQ ID NO: 3276297 - DNA, 25 bp, Homo sapien
attgtaaagaccatcgaggctagga

SEQ ID NO: 3276298 - DNA, 25 bp, Homo sapien
ccttagaccacatagacaaaggtaa

SEQ ID NO: 3276299 - DNA, 25 bp, Homo sapien
gcttgtttgttctggacttgattat

SEQ ID NO: 3276300 - DNA, 25 bp, Homo sapien
cttgtttgttctggacttgattata

SEQ ID NO: 3276301 - DNA, 25 bp, Homo sapien
tagaccacatagacaaaggtaatac

SEQ ID NO: 3276302 - DNA, 25 bp, Homo sapien
cagactttttaaaagttgactgcta

SEQ ID NO: 3276303 - DNA, 25 bp, Homo sapien
tcagactttttaaaagttgactgct

SEQ ID NO: 3276304 - DNA, 25 bp, Homo sapien
ctcagactttttaaaagttgactgc

SEQ ID NO: 3276305 - DNA, 25 bp, Homo sapien
tctcagactttttaaaagttgactg

SEQ ID NO: 3276306 - DNA, 25 bp, Homo sapien
tcatggtccttgaactgataggaca

SEQ ID NO: 3276307 - DNA, 25 bp, Homo sapien
attatcatggtccttgaactgatag

SEQ ID NO: 3276308 - DNA, 25 bp, Homo sapien
ccttgaactgataggacatagtcat

SEQ ID NO: 3276309 - DNA, 25 bp, Homo sapien
ctagatttgccattatcatggtcct

SEQ ID NO: 3276310 - DNA, 25 bp, Homo sapien
ggctttccagagagtaactgtccac

SEQ ID NO: 3276311 - DNA, 25 bp, Homo sapien
gggctttccagagagtaactgtcca

SEQ ID NO: 3276312 - DNA, 25 bp, Homo sapien
agggctttccagagagtaactgtcc

SEQ ID NO: 3276313 - DNA, 25 bp, Homo sapien
gaaacaaatggagtccgtagagtgg

SEQ ID NO: 3276314 - DNA, 25 bp, Homo sapien
ttggcccaactgcagaaacaaatgg

SEQ ID NO: 3276315 - DNA, 25 bp, Homo sapien
tatttcgtatctggatgaccaagca

SEQ ID NO: 3276316 - DNA, 25 bp, Homo sapien
ccgtagagtggacagttatttcgta

SEQ ID NO: 3276317 - DNA, 25 bp, Homo sapien
gatagaaactttgtctcaattgtga

SEQ ID NO: 3276318 - DNA, 25 bp, Homo sapien
tatttggatactctagatagaaact

SEQ ID NO: 3276319 - DNA, 25 bp, Homo sapien
tattgtatttggatactctagatag

SEQ ID NO: 3276320 - DNA, 25 bp, Homo sapien
gagaaactgcagctggtaatcaata

SEQ ID NO: 3276321 - DNA, 25 bp, Homo sapien
tgtcttcttttaatattaatatgtc

SEQ ID NO: 3276322 - DNA, 25 bp, Homo sapien
aatattaatatgtcatttttcttca

SEQ ID NO: 3276323 - DNA, 25 bp, Homo sapien
ttctggtagttgtcttcttttaata

SEQ ID NO: 3276324 - DNA, 25 bp, Homo sapien
taatattaatatgtcatttttcttc

SEQ ID NO: 3276325 - DNA, 25 bp, Homo sapien
ctctgatgcatgtccaaggagttcc

SEQ ID NO: 3276326 - DNA, 25 bp, Homo sapien
taaacaactctgatctcaaatggcc

SEQ ID NO: 3276327 - DNA, 25 bp, Homo sapien
tagttctgcatgtaaacctgttcag

SEQ ID NO: 3276328 - DNA, 25 bp, Homo sapien
tatgtttaacctattccacccatgg

SEQ ID NO: 3276329 - DNA, 25 bp, Homo sapien
tttgatcaagtcctttcggctcttt

SEQ ID NO: 3276330 - DNA, 25 bp, Homo sapien
attttgatcaagtcctttcggctct

SEQ ID NO: 3276331 - DNA, 25 bp, Homo sapien
ttttgatcaagtcctttcggctctt

SEQ ID NO: 3276332 - DNA, 25 bp, Homo sapien
catctgatgattgttgtcccagggc

SEQ ID NO: 3276333 - DNA, 25 bp, Homo sapien
tcccagggcattaagcaaacatagg

SEQ ID NO: 3276334 - DNA, 25 bp, Homo sapien
tccaggacctgacccttggatggca

SEQ ID NO: 3276335 - DNA, 25 bp, Homo sapien
cagtaccctgaaaggtgagtcccag

SEQ ID NO: 3276336 - DNA, 25 bp, Homo sapien
gtctctggcttgtccactagctcaa

SEQ ID NO: 3276337 - DNA, 25 bp, Homo sapien
acctcctacattcagctggagcaag

SEQ ID NO: 3276338 - DNA, 25 bp, Homo sapien
ttgtccactagctcaaattgtagat

SEQ ID NO: 3276339 - DNA, 25 bp, Homo sapien
ggaagagcaactggtgccattggtc

SEQ ID NO: 3276340 - DNA, 25 bp, Homo sapien
gattattggtgtattgcatgtctca

SEQ ID NO: 3276341 - DNA, 25 bp, Homo sapien
ttggtgtattgcatgtctcagggtg

SEQ ID NO: 3276342 - DNA, 25 bp, Homo sapien
tattggtgtattgcatgtctcaggg

SEQ ID NO: 3276343 - DNA, 25 bp, Homo sapien
tgagattattggtgtattgcatgtc

SEQ ID NO: 3276344 - DNA, 25 bp, Homo sapien
ccttctttcctcatatcctccttgt

SEQ ID NO: 3276345 - DNA, 25 bp, Homo sapien
catatcctccttgtccagttcccat

SEQ ID NO: 3276346 - DNA, 25 bp, Homo sapien
cttccttctttcctcatatcctcct

SEQ ID NO: 3276347 - DNA, 25 bp, Homo sapien
tttcctcatatcctccttgtccagt

SEQ ID NO: 3276348 - DNA, 25 bp, Homo sapien
tcatctagtgtgatgatatctgtca

SEQ ID NO: 3276349 - DNA, 25 bp, Homo sapien
atctagtgtgatgatatctgtcatt

SEQ ID NO: 3276350 - DNA, 25 bp, Homo sapien
catctagtgtgatgatatctgtcat

SEQ ID NO: 3276351 - DNA, 25 bp, Homo sapien
tctagtgtgatgatatctgtcattt

SEQ ID NO: 3276352 - DNA, 25 bp, Homo sapien
tggatttcatccttccggtttgaac

SEQ ID NO: 3276353 - DNA, 25 bp, Homo sapien
tctcctgcattaaactttctgtagt

SEQ ID NO: 3276354 - DNA, 25 bp, Homo sapien
ctggatttcatccttccggtttgaa

SEQ ID NO: 3276355 - DNA, 25 bp, Homo sapien
caactttaatctgtgataaaacagg

SEQ ID NO: 3276356 - DNA, 25 bp, Homo sapien
gaaagggtacctggattcaatcaca

SEQ ID NO: 3276357 - DNA, 25 bp, Homo sapien
cacattaggttgtaccagggacagg

SEQ ID NO: 3276358 - DNA, 25 bp, Homo sapien
tttctctgacaactttaatctgtga

SEQ ID NO: 3276359 - DNA, 25 bp, Homo sapien
tttacgccagtcatggccgggcatg

SEQ ID NO: 3276360 - DNA, 25 bp, Homo sapien
ggcaggtgcttgtgttcacagctac

SEQ ID NO: 3276361 - DNA, 25 bp, Homo sapien
tacacatgaccaaaaatcataagaa

SEQ ID NO: 3276362 - DNA, 25 bp, Homo sapien
tacactgtgagatcaccattttacg

SEQ ID NO: 3276363 - DNA, 25 bp, Homo sapien
tctattatagatggcatgacaggaa

SEQ ID NO: 3276364 - DNA, 25 bp, Homo sapien
cagtgaaacagtgacgaaaacagta

SEQ ID NO: 3276365 - DNA, 25 bp, Homo sapien
tatctttaaactcctgaggccgact

SEQ ID NO: 3276366 - DNA, 25 bp, Homo sapien
gattgaattccacaaaggtgtcctg

SEQ ID NO: 3276367 - DNA, 25 bp, Homo sapien
caaaggtagtttcttagtgctgtaa

SEQ ID NO: 3276368 - DNA, 25 bp, Homo sapien
gaaataggcaggtgtgatcaaaaca

SEQ ID NO: 3276369 - DNA, 25 bp, Homo sapien
gatgagatgtctgcagactacatca

SEQ ID NO: 3276370 - DNA, 25 bp, Homo sapien
tcaaaacactaagtaggattctatc

SEQ ID NO: 3276371 - DNA, 25 bp, Homo sapien
gatggtggtgctagggtgtggctca

SEQ ID NO: 3276372 - DNA, 25 bp, Homo sapien
tcactttagatggtggtgctagggt

SEQ ID NO: 3276373 - DNA, 25 bp, Homo sapien
ggaattattctatactcatatagct

SEQ ID NO: 3276374 - DNA, 25 bp, Homo sapien
catgggaattattctatactcatat

SEQ ID NO: 3276375 - DNA, 25 bp, Homo sapien
tctagaagcattggaacaaacctct

SEQ ID NO: 3276376 - DNA, 25 bp, Homo sapien
ttgtaatttacttccagaggaggga

SEQ ID NO: 3276377 - DNA, 25 bp, Homo sapien
tactctagtcaataagcaccttgtg

SEQ ID NO: 3276378 - DNA, 25 bp, Homo sapien
taaaagctcttacccatcctaaatg

SEQ ID NO: 3276379 - DNA, 25 bp, Homo sapien
ggagggactgcaactgccatgcagc

SEQ ID NO: 3276380 - DNA, 25 bp, Homo sapien
gccacacagaagaaggagggactgc

SEQ ID NO: 3276381 - DNA, 25 bp, Homo sapien
gagggactgcaactgccatgcagca

SEQ ID NO: 3276382 - DNA, 25 bp, Homo sapien
cacacagaagaaggagggactgcaa

SEQ ID NO: 3276383 - DNA, 25 bp, Homo sapien
cagattatgtgctgaatctgccggc

SEQ ID NO: 3276384 - DNA, 25 bp, Homo sapien
agattatgtgctgaatctgccggca

SEQ ID NO: 3276385 - DNA, 25 bp, Homo sapien
gattatgtgctgaatctgccggcat

SEQ ID NO: 3276386 - DNA, 25 bp, Homo sapien
cagaggacctccagattatgtgctg

SEQ ID NO: 3276387 - DNA, 25 bp, Homo sapien
tcagcctttcagattagaatatgat

SEQ ID NO: 3276388 - DNA, 25 bp, Homo sapien
cagcctttcagattagaatatgatt

SEQ ID NO: 3276389 - DNA, 25 bp, Homo sapien
gcctttcagattagaatatgattca

SEQ ID NO: 3276390 - DNA, 25 bp, Homo sapien
cctttcagattagaatatgattcat

SEQ ID NO: 3276391 - DNA, 25 bp, Homo sapien
caagtgcttggtcctcaaagtccct

SEQ ID NO: 3276392 - DNA, 25 bp, Homo sapien
ccaagtgcttggtcctcaaagtccc

SEQ ID NO: 3276393 - DNA, 25 bp, Homo sapien
ctgccaagtgcttggtcctcaaagt

SEQ ID NO: 3276394 - DNA, 25 bp, Homo sapien
ttactgccaagtgcttggtcctcaa

SEQ ID NO: 3276395 - DNA, 25 bp, Homo sapien
ttatgggaagtcattaatgccagcc

SEQ ID NO: 3276396 - DNA, 25 bp, Homo sapien
gaagtcattaatgccagccccagga

SEQ ID NO: 3276397 - DNA, 25 bp, Homo sapien
atgggaagtcattaatgccagcccc

SEQ ID NO: 3276398 - DNA, 25 bp, Homo sapien
tcattaatgccagccccaggaggtt

SEQ ID NO: 3276399 - DNA, 25 bp, Homo sapien
ttaagaacccgtgcaaacaccagga

SEQ ID NO: 3276400 - DNA, 25 bp, Homo sapien
cccgtgcaaacaccaggaaggcaag

SEQ ID NO: 3276401 - DNA, 25 bp, Homo sapien
cgtgcaaacaccaggaaggcaagat

SEQ ID NO: 3276402 - DNA, 25 bp, Homo sapien
aacccgtgcaaacaccaggaaggca

SEQ ID NO: 3276403 - DNA, 25 bp, Homo sapien
acctgtgggactgtcagaaaacatt

SEQ ID NO: 3276404 - DNA, 25 bp, Homo sapien
gagatgtgggcctttctgcacatca

SEQ ID NO: 3276405 - DNA, 25 bp, Homo sapien
aaaacatttcctcatggagatgtgg

SEQ ID NO: 3276406 - DNA, 25 bp, Homo sapien
ttctgcaagggagagggccacctgt

SEQ ID NO: 3276407 - DNA, 25 bp, Homo sapien
ttccattttccctgaagggctggtg

SEQ ID NO: 3276408 - DNA, 25 bp, Homo sapien
ttccctgaagggctggtggtcttct

SEQ ID NO: 3276409 - DNA, 25 bp, Homo sapien
gaagggctggtggtcttctcagaca

SEQ ID NO: 3276410 - DNA, 25 bp, Homo sapien
cattttccctgaagggctggtggtc

SEQ ID NO: 3276411 - DNA, 25 bp, Homo sapien
aaaagatggaatacaaaaggtatgg

SEQ ID NO: 3276412 - DNA, 25 bp, Homo sapien
gaaaagatggaatacaaaaggtatg

SEQ ID NO: 3276413 - DNA, 25 bp, Homo sapien
aaagatggaatacaaaaggtatggt

SEQ ID NO: 3276414 - DNA, 25 bp, Homo sapien
agaaaagatggaatacaaaaggtat

SEQ ID NO: 3276415 - DNA, 25 bp, Homo sapien
ctcagcactgcccttccgccagcac

SEQ ID NO: 3276416 - DNA, 25 bp, Homo sapien
ctctcagcactgcccttccgccagc

SEQ ID NO: 3276417 - DNA, 25 bp, Homo sapien
tcagcactgcccttccgccagcacc

SEQ ID NO: 3276418 - DNA, 25 bp, Homo sapien
agcactgcccttccgccagcacctc

SEQ ID NO: 3276419 - DNA, 25 bp, Homo sapien
agagctattttgacagattttgctt

SEQ ID NO: 3276420 - DNA, 25 bp, Homo sapien
gattttgcttttattctttgtacag

SEQ ID NO: 3276421 - DNA, 25 bp, Homo sapien
ttgcttttattctttgtacagtcat

SEQ ID NO: 3276422 - DNA, 25 bp, Homo sapien
tctagagctattttgacagattttg

SEQ ID NO: 3276423 - DNA, 25 bp, Homo sapien
tagaaaattccaatttagtaatcat

SEQ ID NO: 3276424 - DNA, 25 bp, Homo sapien
tgccttcttctatgttaactttctt

SEQ ID NO: 3276425 - DNA, 25 bp, Homo sapien
cttcttctatgttaactttcttaga

SEQ ID NO: 3276426 - DNA, 25 bp, Homo sapien
ttagaaaattccaatttagtaatca

SEQ ID NO: 3276427 - DNA, 25 bp, Homo sapien
tgccgccaccctgtctgggaggtgt

SEQ ID NO: 3276428 - DNA, 25 bp, Homo sapien
atgacgatggcggttttgtccaata

SEQ ID NO: 3276429 - DNA, 25 bp, Homo sapien
gccctgccgccaccctgtctgggag

SEQ ID NO: 3276430 - DNA, 25 bp, Homo sapien
acgatggcggttttgtccaatagaa

SEQ ID NO: 3276431 - DNA, 25 bp, Homo sapien
tcacagcccgatgtaagactcattt

SEQ ID NO: 3276432 - DNA, 25 bp, Homo sapien
gatttgggtcctatagccatcgtct

SEQ ID NO: 3276433 - DNA, 25 bp, Homo sapien
tcacaacaaggaagagcagcaagaa

SEQ ID NO: 3276434 - DNA, 25 bp, Homo sapien
gaccattgttaggacatcagtcagg

SEQ ID NO: 3276435 - DNA, 25 bp, Homo sapien
tttgtttcccgggacttgctgatga

SEQ ID NO: 3276436 - DNA, 25 bp, Homo sapien
ctgatgagggtctgaaagagttcac

SEQ ID NO: 3276437 - DNA, 25 bp, Homo sapien
tggagagctcattacaggaagtccc

SEQ ID NO: 3276438 - DNA, 25 bp, Homo sapien
caacagttcagattgccattggcgt

SEQ ID NO: 3276439 - DNA, 25 bp, Homo sapien
ttactggcctagactgagctcctca

SEQ ID NO: 3276440 - DNA, 25 bp, Homo sapien
actgagctcctcatccactcgtatg

SEQ ID NO: 3276441 - DNA, 25 bp, Homo sapien
ctgagctcctcatccactcgtatgt

SEQ ID NO: 3276442 - DNA, 25 bp, Homo sapien
tgagctcctcatccactcgtatgtc

SEQ ID NO: 3276443 - DNA, 25 bp, Homo sapien
atgaacaattatagacccccttcca

SEQ ID NO: 3276444 - DNA, 25 bp, Homo sapien
gtcgtaggtagaaatgaacaattat

SEQ ID NO: 3276445 - DNA, 25 bp, Homo sapien
tgaacaattatagacccccttccac

SEQ ID NO: 3276446 - DNA, 25 bp, Homo sapien
tctggccctggttctgcatcttgat

SEQ ID NO: 3276447 - DNA, 25 bp, Homo sapien
ggccctggttctgcatcttgattca

SEQ ID NO: 3276448 - DNA, 25 bp, Homo sapien
ctgctgccaagcatctggccctggt

SEQ ID NO: 3276449 - DNA, 25 bp, Homo sapien
tgctgccaagcatctggccctggtt

SEQ ID NO: 3276450 - DNA, 25 bp, Homo sapien
gtcagcaggtaatcttcttatagtt

SEQ ID NO: 3276451 - DNA, 25 bp, Homo sapien
gaatatcaatcgcaatttctataga

SEQ ID NO: 3276452 - DNA, 25 bp, Homo sapien
tagatgattactcccttaaattgga

SEQ ID NO: 3276453 - DNA, 25 bp, Homo sapien
tactatgttaacaagtgtgccgagc

SEQ ID NO: 3276454 - DNA, 25 bp, Homo sapien
taaacacttactacacgatcctctg

SEQ ID NO: 3276455 - DNA, 25 bp, Homo sapien
tggttgatttacactggtctttgca

SEQ ID NO: 3276456 - DNA, 25 bp, Homo sapien
gccaactcttgatgaaagctaccct

SEQ ID NO: 3276457 - DNA, 25 bp, Homo sapien
ggatgtcaaaaactccaattgctag

SEQ ID NO: 3276458 - DNA, 25 bp, Homo sapien
ctagatgttgatgggtgcagactga

SEQ ID NO: 3276459 - DNA, 25 bp, Homo sapien
ggtttgagaccatagcaataaaatg

SEQ ID NO: 3276460 - DNA, 25 bp, Homo sapien
caatagcactatgtctaaacaatat

SEQ ID NO: 3276461 - DNA, 25 bp, Homo sapien
tggtggaggatccttgcctagatgt

SEQ ID NO: 3276462 - DNA, 25 bp, Homo sapien
tgcaattgtccaacatcgggcagga

SEQ ID NO: 3276463 - DNA, 25 bp, Homo sapien
tctgtcttggtagagagctgtccca

SEQ ID NO: 3276464 - DNA, 25 bp, Homo sapien
aagcctcagctaatccaatgggaag

SEQ ID NO: 3276465 - DNA, 25 bp, Homo sapien
tgtggttcaaaagctaatgtcatcc

SEQ ID NO: 3276466 - DNA, 25 bp, Homo sapien
tttcacaccagggaaactggatgac

SEQ ID NO: 3276467 - DNA, 25 bp, Homo sapien
gctctaaactttggctcaggtcatt

SEQ ID NO: 3276468 - DNA, 25 bp, Homo sapien
gtccagatcacatccgtacggtcca

SEQ ID NO: 3276469 - DNA, 25 bp, Homo sapien
tggatgactcttccctaaatatagc

SEQ ID NO: 3276470 - DNA, 25 bp, Homo sapien
aatttatccagttctataggttgcc

SEQ ID NO: 3276471 - DNA, 25 bp, Homo sapien
tataggaaatatcagcagaacttgt

SEQ ID NO: 3276472 - DNA, 25 bp, Homo sapien
taaatataccttagcgacagagaag

SEQ ID NO: 3276473 - DNA, 25 bp, Homo sapien
aaatcatccgttatttgtagactgg

SEQ ID NO: 3276474 - DNA, 25 bp, Homo sapien
gatggtaatttaaccaaggagctgg

SEQ ID NO: 3276475 - DNA, 25 bp, Homo sapien
taaaattagggccaaaataagcatg

SEQ ID NO: 3276476 - DNA, 25 bp, Homo sapien
tattagaagagaatcagtaactgaa

SEQ ID NO: 3276477 - DNA, 25 bp, Homo sapien
tataagtacgtttttgatccctgtc

SEQ ID NO: 3276478 - DNA, 25 bp, Homo sapien
aataagctaacaagccaagaaatga

SEQ ID NO: 3276479 - DNA, 25 bp, Homo sapien
tatcatatgatccagaaactgtact

SEQ ID NO: 3276480 - DNA, 25 bp, Homo sapien
taagctgtggcttggaattattcag

SEQ ID NO: 3276481 - DNA, 25 bp, Homo sapien
acctgcccacaaatgtctagcaatc

SEQ ID NO: 3276482 - DNA, 25 bp, Homo sapien
ggcacatttcggtgtctgcactgaa

SEQ ID NO: 3276483 - DNA, 25 bp, Homo sapien
catttcggtgtctgcactgaactac

SEQ ID NO: 3276484 - DNA, 25 bp, Homo sapien
tttggcacatttcggtgtctgcact

SEQ ID NO: 3276485 - DNA, 25 bp, Homo sapien
cttttggcacatttcggtgtctgca

SEQ ID NO: 3276486 - DNA, 25 bp, Homo sapien
aactgctgcagtccactaaatcagg

SEQ ID NO: 3276487 - DNA, 25 bp, Homo sapien
taatgcaatcgactcactgcacagt

SEQ ID NO: 3276488 - DNA, 25 bp, Homo sapien
tcagggatgcaaggaatgatgccca

SEQ ID NO: 3276489 - DNA, 25 bp, Homo sapien
ctggaatttatatagctcaaggcct

SEQ ID NO: 3276490 - DNA, 25 bp, Homo sapien
tatatatccagagaaagaccctagg

SEQ ID NO: 3276491 - DNA, 25 bp, Homo sapien
gcttgggagatacctgtggcttaca

SEQ ID NO: 3276492 - DNA, 25 bp, Homo sapien
cagccccagactcgagtgtttgagc

SEQ ID NO: 3276493 - DNA, 25 bp, Homo sapien
gccaggttggcccttatttggagaa

SEQ ID NO: 3276494 - DNA, 25 bp, Homo sapien
caactgaacagccctcatcttcagg

SEQ ID NO: 3276495 - DNA, 25 bp, Homo sapien
aaacaactgaacagccctcatcttc

SEQ ID NO: 3276496 - DNA, 25 bp, Homo sapien
aactgaacagccctcatcttcaggt

SEQ ID NO: 3276497 - DNA, 25 bp, Homo sapien
aacaactgaacagccctcatcttca

SEQ ID NO: 3276498 - DNA, 25 bp, Homo sapien
gcttcaggggtatcactttatcagt

SEQ ID NO: 3276499 - DNA, 25 bp, Homo sapien
aaaaaagattcaaagtacagcatac

SEQ ID NO: 3276500 - DNA, 25 bp, Homo sapien
agcatactggggcttttattgcaag

SEQ ID NO: 3276501 - DNA, 25 bp, Homo sapien
aaatgactagtatcattaatgagga

SEQ ID NO: 3276502 - DNA, 25 bp, Homo sapien
gaataggtattaagcaaccactgac

SEQ ID NO: 3276503 - DNA, 25 bp, Homo sapien
ctattttagagcagttcacagcaaa

SEQ ID NO: 3276504 - DNA, 25 bp, Homo sapien
gcagactctacgattaattacacag

SEQ ID NO: 3276505 - DNA, 25 bp, Homo sapien
taggagaacctatgaacttattaga

SEQ ID NO: 3276506 - DNA, 25 bp, Homo sapien
taccatgtgcagtctaaagtcaggc

SEQ ID NO: 3276507 - DNA, 25 bp, Homo sapien
tcatcgtcccagtcatgaaaggtag

SEQ ID NO: 3276508 - DNA, 25 bp, Homo sapien
gacagcctgacaccctaaagtaagg

SEQ ID NO: 3276509 - DNA, 25 bp, Homo sapien
gagagtatacactgcccaatgtgcc

SEQ ID NO: 3276510 - DNA, 25 bp, Homo sapien
tgattaagaagtgccttgccccaga

SEQ ID NO: 3276511 - DNA, 25 bp, Homo sapien
gaaattttggccaaatgcctagact

SEQ ID NO: 3276512 - DNA, 25 bp, Homo sapien
ccagcactggacctggaagagtaca

SEQ ID NO: 3276513 - DNA, 25 bp, Homo sapien
aaatacctggactttgagcaactag

SEQ ID NO: 3276514 - DNA, 25 bp, Homo sapien
cataatcaaagtaatgatcattttc

SEQ ID NO: 3276515 - DNA, 25 bp, Homo sapien
agagataacctgtattatctcttca

SEQ ID NO: 3276516 - DNA, 25 bp, Homo sapien
gataacctgtattatctcttcataa

SEQ ID NO: 3276517 - DNA, 25 bp, Homo sapien
cttcataatcaaagtaatgatcatt

SEQ ID NO: 3276518 - DNA, 25 bp, Homo sapien
accactgagggccacatgaaatgac

SEQ ID NO: 3276519 - DNA, 25 bp, Homo sapien
agctgcaccaacagcaggtgatcca

SEQ ID NO: 3276520 - DNA, 25 bp, Homo sapien
cgtaactggaggctcccgcgcggca

SEQ ID NO: 3276521 - DNA, 25 bp, Homo sapien
gccttgttatggcatcctgccctct

SEQ ID NO: 3276522 - DNA, 25 bp, Homo sapien
cctgccctgtgccccagtctctccc

SEQ ID NO: 3276523 - DNA, 25 bp, Homo sapien
ctgccctgtgccccagtctctccca

SEQ ID NO: 3276524 - DNA, 25 bp, Homo sapien
tgccctgtgccccagtctctcccac

SEQ ID NO: 3276525 - DNA, 25 bp, Homo sapien
ttcagcaagtagacagctgggagct

SEQ ID NO: 3276526 - DNA, 25 bp, Homo sapien
tgtcctccgcaaccgaggagaccct

SEQ ID NO: 3276527 - DNA, 25 bp, Homo sapien
ggcaagatcaataaagttcagcaag

SEQ ID NO: 3276528 - DNA, 25 bp, Homo sapien
cgggctgggccgagaaggcaagatc

SEQ ID NO: 3276529 - DNA, 25 bp, Homo sapien
tataaggagttaaccagcgcctgcc

SEQ ID NO: 3276530 - DNA, 25 bp, Homo sapien
ctccagcggggctcaaactggcggc

SEQ ID NO: 3276531 - DNA, 25 bp, Homo sapien
cagggagagccgctctctataagga

SEQ ID NO: 3276532 - DNA, 25 bp, Homo sapien
tactgcataagggaatcgtgcaggg

SEQ ID NO: 3276533 - DNA, 25 bp, Homo sapien
ctctcgttgagcgtgtccccgaaga

SEQ ID NO: 3276534 - DNA, 25 bp, Homo sapien
gctgctccagatcttgtcgtcgcgg

SEQ ID NO: 3276535 - DNA, 25 bp, Homo sapien
agaagcgggacgtgtacttctccgg

SEQ ID NO: 3276536 - DNA, 25 bp, Homo sapien
aaaggcctgctccaagtaggtgaac

SEQ ID NO: 3276537 - DNA, 25 bp, Homo sapien
cgtgcgctcccgggcccgagggcac

SEQ ID NO: 3276538 - DNA, 25 bp, Homo sapien
tgcgctcccgggcccgagggcacgg

SEQ ID NO: 3276539 - DNA, 25 bp, Homo sapien
gcgcgtcgctgctaccctgcgagac

SEQ ID NO: 3276540 - DNA, 25 bp, Homo sapien
cagcgcgtcgctgctaccctgcgag

SEQ ID NO: 3276541 - DNA, 25 bp, Homo sapien
tggcagccctcgtcgttgagagagt

SEQ ID NO: 3276542 - DNA, 25 bp, Homo sapien
tcgtcgttgagagagttctgcttgg

SEQ ID NO: 3276543 - DNA, 25 bp, Homo sapien
gctctggcagccctcgtcgttgaga

SEQ ID NO: 3276544 - DNA, 25 bp, Homo sapien
ccctcgtcgttgagagagttctgct

SEQ ID NO: 3276545 - DNA, 25 bp, Homo sapien
aagtgctccggcagcgcgagttgct

SEQ ID NO: 3276546 - DNA, 25 bp, Homo sapien
tgtcccgcagataatccagcacgta

SEQ ID NO: 3276547 - DNA, 25 bp, Homo sapien
gcttgaccaagtcggtgagctggaa

SEQ ID NO: 3276548 - DNA, 25 bp, Homo sapien
tgagctggaaatactcggcctcgcg

SEQ ID NO: 3276549 - DNA, 25 bp, Homo sapien
gaagccgtcccggtcgatgaagaag

SEQ ID NO: 3276550 - DNA, 25 bp, Homo sapien
actagagggcgagaacatgctggcc

SEQ ID NO: 3276551 - DNA, 25 bp, Homo sapien
gagcagcgtcgagtgcttggtcaca

SEQ ID NO: 3276552 - DNA, 25 bp, Homo sapien
catgctggccaaagtactgtccggg

SEQ ID NO: 3276553 - DNA, 25 bp, Homo sapien
tcacataaacctggccgcctacgtt

SEQ ID NO: 3276554 - DNA, 25 bp, Homo sapien
agggaagggcgagggtgcgcagggc

SEQ ID NO: 3276555 - DNA, 25 bp, Homo sapien
cttcagggaagggcgagggtgcgca

SEQ ID NO: 3276556 - DNA, 25 bp, Homo sapien
cggccgacgcgccgggcgagctgga

SEQ ID NO: 3276557 - DNA, 25 bp, Homo sapien
ggcggccgacgcgccgggcgagctg

SEQ ID NO: 3276558 - DNA, 25 bp, Homo sapien
accatctcgctaatgggcaggatgg

SEQ ID NO: 3276559 - DNA, 25 bp, Homo sapien
aggaaaccatctcgctaatgggcag

SEQ ID NO: 3276560 - DNA, 25 bp, Homo sapien
gaaaccatctcgctaatgggcagga

SEQ ID NO: 3276561 - DNA, 25 bp, Homo sapien
gaggaaaccatctcgctaatgggca

SEQ ID NO: 3276562 - DNA, 25 bp, Homo sapien
gccgccggcccagtgacccgagaga

SEQ ID NO: 3276563 - DNA, 25 bp, Homo sapien
cctcggactgggcggcgcgttcctc

SEQ ID NO: 3276564 - DNA, 25 bp, Homo sapien
gagctgcactttctcgttcccggag

SEQ ID NO: 3276565 - DNA, 25 bp, Homo sapien
gccctccgcgtgctcctggcgctct

SEQ ID NO: 3276566 - DNA, 25 bp, Homo sapien
ggcgtcggcggcgcccgagctccat

SEQ ID NO: 3276567 - DNA, 25 bp, Homo sapien
ggagagacgcgcgagagaggagctc

SEQ ID NO: 3276568 - DNA, 25 bp, Homo sapien
agacgcgcgagagaggagctccgcc

SEQ ID NO: 3276569 - DNA, 25 bp, Homo sapien
cggaggagagacgcgcgagagagga

SEQ ID NO: 3276570 - DNA, 25 bp, Homo sapien
gcgagagaggagctccgccggtgcg

SEQ ID NO: 3276571 - DNA, 25 bp, Homo sapien
ggccgaagcaaagaaaactcgccgc

SEQ ID NO: 3276572 - DNA, 25 bp, Homo sapien
cgcgaggccggagcgccgacggtgg

SEQ ID NO: 3276573 - DNA, 25 bp, Homo sapien
cagcttgcaagcgtgccgcgaggcc

SEQ ID NO: 3276574 - DNA, 25 bp, Homo sapien
acttgcgagaggctctagggctgct

SEQ ID NO: 3276575 - DNA, 25 bp, Homo sapien
gtacatagtacaggtacagtctgca

SEQ ID NO: 3276576 - DNA, 25 bp, Homo sapien
catagtacaggtacagtctgcaaaa

SEQ ID NO: 3276577 - DNA, 25 bp, Homo sapien
gtgtacatagtacaggtacagtctg

SEQ ID NO: 3276578 - DNA, 25 bp, Homo sapien
tacatagtacaggtacagtctgcaa

SEQ ID NO: 3276579 - DNA, 25 bp, Homo sapien
cttctttctcaaagggcaccataag

SEQ ID NO: 3276580 - DNA, 25 bp, Homo sapien
ttctttctcaaagggcaccataagc

SEQ ID NO: 3276581 - DNA, 25 bp, Homo sapien
ctttctcaaagggcaccataagcat

SEQ ID NO: 3276582 - DNA, 25 bp, Homo sapien
atcttctttctcaaagggcaccata

SEQ ID NO: 3276583 - DNA, 25 bp, Homo sapien
ctctccatcacagaagccatttcgt

SEQ ID NO: 3276584 - DNA, 25 bp, Homo sapien
tttcgtttgaagttgatgctgtatc

SEQ ID NO: 3276585 - DNA, 25 bp, Homo sapien
tttgttgttgctttagtgccctttc

SEQ ID NO: 3276586 - DNA, 25 bp, Homo sapien
agaagccatttcgtttgaagttgat

SEQ ID NO: 3276587 - DNA, 25 bp, Homo sapien
tgttctttctttggagactgttgac

SEQ ID NO: 3276588 - DNA, 25 bp, Homo sapien
ttgttctttctttggagactgttga

SEQ ID NO: 3276589 - DNA, 25 bp, Homo sapien
gaatgatgccagcttgtgccctagg

SEQ ID NO: 3276590 - DNA, 25 bp, Homo sapien
ctggaaacccgaaaatgaccgagtg

SEQ ID NO: 3276591 - DNA, 25 bp, Homo sapien
tgaccgagtgttggcaataactgac

SEQ ID NO: 3276592 - DNA, 25 bp, Homo sapien
ttgctccgggcttgtcctgcatgaa

SEQ ID NO: 3276593 - DNA, 25 bp, Homo sapien
cagagtcagtaggaagctatgtgca

SEQ ID NO: 3276594 - DNA, 25 bp, Homo sapien
tgtcctcgatagcaacaagcaaggt

SEQ ID NO: 3276595 - DNA, 25 bp, Homo sapien
taggtacatctggtaattaatgccg

SEQ ID NO: 3276596 - DNA, 25 bp, Homo sapien
aatcagtgtcgtgactaggtacatc

SEQ ID NO: 3276597 - DNA, 25 bp, Homo sapien
gatttggtaataattgtggcaccac

SEQ ID NO: 3276598 - DNA, 25 bp, Homo sapien
tggtaataattgtggcaccacgtct

SEQ ID NO: 3276599 - DNA, 25 bp, Homo sapien
taattgtggcaccacgtcttctacc

SEQ ID NO: 3276600 - DNA, 25 bp, Homo sapien
cctatcaagatttggtaataattgt

SEQ ID NO: 3276601 - DNA, 25 bp, Homo sapien
ggcaacactgcttctggatacttca

SEQ ID NO: 3276602 - DNA, 25 bp, Homo sapien
caattgctagcaggacattatcccg

SEQ ID NO: 3276603 - DNA, 25 bp, Homo sapien
tggtgctagagtttgcccactgagg

SEQ ID NO: 3276604 - DNA, 25 bp, Homo sapien
gatacttcactggaacaattgctag

SEQ ID NO: 3276605 - DNA, 25 bp, Homo sapien
cttgttctgctttcaaattggttca

SEQ ID NO: 3276606 - DNA, 25 bp, Homo sapien
ttgttctgctttcaaattggttcat

SEQ ID NO: 3276607 - DNA, 25 bp, Homo sapien
agtttttgcacacgtagtgcttgtc

SEQ ID NO: 3276608 - DNA, 25 bp, Homo sapien
tgattaagcccaaactcttcggcca

SEQ ID NO: 3276609 - DNA, 25 bp, Homo sapien
tctctccctcctctatttgatattt

SEQ ID NO: 3276610 - DNA, 25 bp, Homo sapien
gataaaatcctccaataacttccga

SEQ ID NO: 3276611 - DNA, 25 bp, Homo sapien
aaaacctcacatttgccttcggcca

SEQ ID NO: 3276612 - DNA, 25 bp, Homo sapien
caaagccgatatgtgtggccactgc

SEQ ID NO: 3276613 - DNA, 25 bp, Homo sapien
tgctgcttatgaggaatgatggttt

SEQ ID NO: 3276614 - DNA, 25 bp, Homo sapien
gccttcggccaaagccgatatgtgt

SEQ ID NO: 3276615 - DNA, 25 bp, Homo sapien
tctattgagaaaagcagggttgatc

SEQ ID NO: 3276616 - DNA, 25 bp, Homo sapien
aaaacatcattcaaaccaacaggct

SEQ ID NO: 3276617 - DNA, 25 bp, Homo sapien
aataatctggacagcaaacagagtc

SEQ ID NO: 3276618 - DNA, 25 bp, Homo sapien
caacaggctattagagcaccaccct

SEQ ID NO: 3276619 - DNA, 25 bp, Homo sapien
agtatggcacaagggtaggcaacaa

SEQ ID NO: 3276620 - DNA, 25 bp, Homo sapien
ccatgtgcaaggctgcaatgaagat

SEQ ID NO: 3276621 - DNA, 25 bp, Homo sapien
ctgcaatgaagatcttggaagctga

SEQ ID NO: 3276622 - DNA, 25 bp, Homo sapien
tgagagactacaccagccaatgatg

SEQ ID NO: 3276623 - DNA, 25 bp, Homo sapien
ccttggctatgattgtgcatgtggg

SEQ ID NO: 3276624 - DNA, 25 bp, Homo sapien
gaagggctcaactttttcatggctg

SEQ ID NO: 3276625 - DNA, 25 bp, Homo sapien
tcccagttccactaccaaaacaatc

SEQ ID NO: 3276626 - DNA, 25 bp, Homo sapien
tagcttttaatagccatggttttcc

SEQ ID NO: 3276627 - DNA, 25 bp, Homo sapien
aggcagtaacccagcacgctggcca

SEQ ID NO: 3276628 - DNA, 25 bp, Homo sapien
gacacccctgaagagctcatcaggt

SEQ ID NO: 3276629 - DNA, 25 bp, Homo sapien
cagtgaaaagaacatggcgcaacca

SEQ ID NO: 3276630 - DNA, 25 bp, Homo sapien
ggcactcatgccatacacataacca

SEQ ID NO: 3276631 - DNA, 25 bp, Homo sapien
tcagtgtcacaatagaactctcaca

SEQ ID NO: 3276632 - DNA, 25 bp, Homo sapien
ggagatctgtctcgtacctcataag

SEQ ID NO: 3276633 - DNA, 25 bp, Homo sapien
catagtagcctaacccaaaacaagg

SEQ ID NO: 3276634 - DNA, 25 bp, Homo sapien
aaatagtctggagatatatcacagc

SEQ ID NO: 3276635 - DNA, 25 bp, Homo sapien
cactatgtaaggtgacacagtttct

SEQ ID NO: 3276636 - DNA, 25 bp, Homo sapien
tatttatacagattgcttcaaagcc

SEQ ID NO: 3276637 - DNA, 25 bp, Homo sapien
gaaaggacaagcattaaaatctggt

SEQ ID NO: 3276638 - DNA, 25 bp, Homo sapien
agcattaaaatctggtgcttcctgt

SEQ ID NO: 3276639 - DNA, 25 bp, Homo sapien
aaaagaatgggtccagtgaggtccg

SEQ ID NO: 3276640 - DNA, 25 bp, Homo sapien
ggctcccagggctacgcaaaaaaga

SEQ ID NO: 3276641 - DNA, 25 bp, Homo sapien
tacgcaaaaaagaatgggtccagtg

SEQ ID NO: 3276642 - DNA, 25 bp, Homo sapien
ggtccagtgaggtccgtttcattca

SEQ ID NO: 3276643 - DNA, 25 bp, Homo sapien
cactgtcaaagttttttgccatatg

SEQ ID NO: 3276644 - DNA, 25 bp, Homo sapien
aaagttttttgccatatgtgatcaa

SEQ ID NO: 3276645 - DNA, 25 bp, Homo sapien
tgtcaaagttttttgccatatgtga

SEQ ID NO: 3276646 - DNA, 25 bp, Homo sapien
ttaacactgtcaaagttttttgcca

SEQ ID NO: 3276647 - DNA, 25 bp, Homo sapien
cgcttctgtagagatgaactaagat

SEQ ID NO: 3276648 - DNA, 25 bp, Homo sapien
cttctgtagagatgaactaagatgt

SEQ ID NO: 3276649 - DNA, 25 bp, Homo sapien
gcttctgtagagatgaactaagatg

SEQ ID NO: 3276650 - DNA, 25 bp, Homo sapien
tctgtagagatgaactaagatgtat

SEQ ID NO: 3276651 - DNA, 25 bp, Homo sapien
gcaaaggaggctcttcatcaaaact

SEQ ID NO: 3276652 - DNA, 25 bp, Homo sapien
caaaactgtcaatgtaaggagattg

SEQ ID NO: 3276653 - DNA, 25 bp, Homo sapien
gatgctggctgaaaaaattgtcctg

SEQ ID NO: 3276654 - DNA, 25 bp, Homo sapien
gaataataatctgagttggatgctg

SEQ ID NO: 3276655 - DNA, 25 bp, Homo sapien
tgatggaacaaaggaggcaggctga

SEQ ID NO: 3276656 - DNA, 25 bp, Homo sapien
aggctgaggctgctcaccagcttgt

SEQ ID NO: 3276657 - DNA, 25 bp, Homo sapien
ctgatggaacaaaggaggcaggctg

SEQ ID NO: 3276658 - DNA, 25 bp, Homo sapien
ctgaggctgctcaccagcttgttgt

SEQ ID NO: 3276659 - DNA, 25 bp, Homo sapien
gcattagagtcattaccactctgct

SEQ ID NO: 3276660 - DNA, 25 bp, Homo sapien
aaatcagagtcaaattgtgccaagt

SEQ ID NO: 3276661 - DNA, 25 bp, Homo sapien
ccactctgctcctggttatcaatag

SEQ ID NO: 3276662 - DNA, 25 bp, Homo sapien
cctggttatcaatagtaaaattaga

SEQ ID NO: 3276663 - DNA, 25 bp, Homo sapien
tagctttgtgtgagaaattttaagc

SEQ ID NO: 3276664 - DNA, 25 bp, Homo sapien
cagtaaatgtagctttgtgtgagaa

SEQ ID NO: 3276665 - DNA, 25 bp, Homo sapien
cctccagtaaatgtagctttgtgtg

SEQ ID NO: 3276666 - DNA, 25 bp, Homo sapien
gctttgtgtgagaaattttaagcaa

SEQ ID NO: 3276667 - DNA, 25 bp, Homo sapien
aatggaccattaatgcataggcaag

SEQ ID NO: 3276668 - DNA, 25 bp, Homo sapien
tctttagaagtgcattaatggacca

SEQ ID NO: 3276669 - DNA, 25 bp, Homo sapien
aaaagccgtgtgttctactcataga

SEQ ID NO: 3276670 - DNA, 25 bp, Homo sapien
ttctcacctgatgtaaaaaagccgt

SEQ ID NO: 3276671 - DNA, 25 bp, Homo sapien
gagtcatcccagttgaggccacaga

SEQ ID NO: 3276672 - DNA, 25 bp, Homo sapien
aagagatgcccgattttcaagtccc

SEQ ID NO: 3276673 - DNA, 25 bp, Homo sapien
cagaaacaagtcattcctgcctgac

SEQ ID NO: 3276674 - DNA, 25 bp, Homo sapien
ctgagattgtgatgctgaagaggct

SEQ ID NO: 3276675 - DNA, 25 bp, Homo sapien
gctttctggataggactaccagtcc

SEQ ID NO: 3276676 - DNA, 25 bp, Homo sapien
ctaccagtccgtaagtccgtacaag

SEQ ID NO: 3276677 - DNA, 25 bp, Homo sapien
cagagtttattgatttgccaggcaa

SEQ ID NO: 3276678 - DNA, 25 bp, Homo sapien
cactgttcacctgttaagaaagagt

SEQ ID NO: 3276679 - DNA, 25 bp, Homo sapien
atggaatctgccacgtgaggcctgc

SEQ ID NO: 3276680 - DNA, 25 bp, Homo sapien
agccatggcaggagaggtatggaat

SEQ ID NO: 3276681 - DNA, 25 bp, Homo sapien
ggtatggaatctgccacgtgaggcc

SEQ ID NO: 3276682 - DNA, 25 bp, Homo sapien
gccatggcaggagaggtatggaatc

SEQ ID NO: 3276683 - DNA, 25 bp, Homo sapien
ttcgcacctaaagggtagagcctgg

SEQ ID NO: 3276684 - DNA, 25 bp, Homo sapien
agaaccaggcgtccttggaggcagc

SEQ ID NO: 3276685 - DNA, 25 bp, Homo sapien
ccccaaactgtcatggaaagagtgg

SEQ ID NO: 3276686 - DNA, 25 bp, Homo sapien
gagggcgactgtgtaatgtcaccca

SEQ ID NO: 3276687 - DNA, 25 bp, Homo sapien
gggttgtgggatctgctcggagttt

SEQ ID NO: 3276688 - DNA, 25 bp, Homo sapien
tctgctcggagttttctgccccaca

SEQ ID NO: 3276689 - DNA, 25 bp, Homo sapien
cgtgaatgtgcagcatggaacccgg

SEQ ID NO: 3276690 - DNA, 25 bp, Homo sapien
tgtgggatctgctcggagttttctg

SEQ ID NO: 3276691 - DNA, 25 bp, Homo sapien
tctcgtttctgagaagagtacaccg

SEQ ID NO: 3276692 - DNA, 25 bp, Homo sapien
agagtaatccctgtgactcagtatt

SEQ ID NO: 3276693 - DNA, 25 bp, Homo sapien
ccgcgcgccctttgatttctcgttt

SEQ ID NO: 3276694 - DNA, 25 bp, Homo sapien
gagtaatccctgtgactcagtatta

SEQ ID NO: 3276695 - DNA, 25 bp, Homo sapien
caagacaaacctgtagccattctaa

SEQ ID NO: 3276696 - DNA, 25 bp, Homo sapien
ctgacaagacaaacctgtagccatt

SEQ ID NO: 3276697 - DNA, 25 bp, Homo sapien
ccattctaatgtcttctcttgatgt

SEQ ID NO: 3276698 - DNA, 25 bp, Homo sapien
cattctaatgtcttctcttgatgta

SEQ ID NO: 3276699 - DNA, 25 bp, Homo sapien
caaatttttccactaagatagccat

SEQ ID NO: 3276700 - DNA, 25 bp, Homo sapien
tcaaatttttccactaagatagcca

SEQ ID NO: 3276701 - DNA, 25 bp, Homo sapien
gtatgagtgaatatgtgtgttccca

SEQ ID NO: 3276702 - DNA, 25 bp, Homo sapien
tgtatgagtgaatatgtgtgttccc

SEQ ID NO: 3276703 - DNA, 25 bp, Homo sapien
aaatatatgacagtacaaaggccac

SEQ ID NO: 3276704 - DNA, 25 bp, Homo sapien
tatgagtgaatatgtgtgttcccaa

SEQ ID NO: 3276705 - DNA, 25 bp, Homo sapien
ttgagtcctgtccaccggatcctac

SEQ ID NO: 3276706 - DNA, 25 bp, Homo sapien
ccaagacgcgctgatgtcacgacag

SEQ ID NO: 3276707 - DNA, 25 bp, Homo sapien
gggttgcttccggatctggtacttg

SEQ ID NO: 3276708 - DNA, 25 bp, Homo sapien
cacaggatctgtttgagtcctgtcc

SEQ ID NO: 3276709 - DNA, 25 bp, Homo sapien
tggtcttaaattacaagttttgtga

SEQ ID NO: 3276710 - DNA, 25 bp, Homo sapien
ttattagcataacgcaaaatctctt

SEQ ID NO: 3276711 - DNA, 25 bp, Homo sapien
ttcagggaattcaagcccaaactgt

SEQ ID NO: 3276712 - DNA, 25 bp, Homo sapien
tataatagaatggtcatctcagtat

SEQ ID NO: 3276713 - DNA, 25 bp, Homo sapien
gagacaacagtgttgctatttcact

SEQ ID NO: 3276714 - DNA, 25 bp, Homo sapien
ttcattatatgagggatcaccagct

SEQ ID NO: 3276715 - DNA, 25 bp, Homo sapien
taaatatattggtgggatttatctc

SEQ ID NO: 3276716 - DNA, 25 bp, Homo sapien
taaggtaattacaatgagacaacag

SEQ ID NO: 3276717 - DNA, 25 bp, Homo sapien
aaggtagttctcctgaattaacttg

SEQ ID NO: 3276718 - DNA, 25 bp, Homo sapien
taacttgtggtagctgagggccatt

SEQ ID NO: 3276719 - DNA, 25 bp, Homo sapien
cttgcacagaattgagaaggtagtt

SEQ ID NO: 3276720 - DNA, 25 bp, Homo sapien
tgaattaacttgtggtagctgaggg

SEQ ID NO: 3276721 - DNA, 25 bp, Homo sapien
ttaatgaagtaggagtcttgaatcc

SEQ ID NO: 3276722 - DNA, 25 bp, Homo sapien
catttgtatgtggttctatttctgc

SEQ ID NO: 3276723 - DNA, 25 bp, Homo sapien
gaatgatcctcatttggtaacttaa

SEQ ID NO: 3276724 - DNA, 25 bp, Homo sapien
gaatcctaatgagcagccaactcat

SEQ ID NO: 3276725 - DNA, 25 bp, Homo sapien
gagacaatgaaagagttagttccct

SEQ ID NO: 3276726 - DNA, 25 bp, Homo sapien
caagggtagattggatcctatatcg

SEQ ID NO: 3276727 - DNA, 25 bp, Homo sapien
cctatatcgatgtatttgatgagac

SEQ ID NO: 3276728 - DNA, 25 bp, Homo sapien
ggacaatagaaacgtcagttgatac

SEQ ID NO: 3276729 - DNA, 25 bp, Homo sapien
tttagatccattcacaagaaactgt

SEQ ID NO: 3276730 - DNA, 25 bp, Homo sapien
cattttctttgtcaggttcaccagc

SEQ ID NO: 3276731 - DNA, 25 bp, Homo sapien
gagtgtaatgcggtagaaagtagac

SEQ ID NO: 3276732 - DNA, 25 bp, Homo sapien
tatatagtattgtccgaagcctccc

SEQ ID NO: 3276733 - DNA, 25 bp, Homo sapien
taagagagatttataagtaagttcc

SEQ ID NO: 3276734 - DNA, 25 bp, Homo sapien
gaatatatcgtaaacactgatcata

SEQ ID NO: 3276735 - DNA, 25 bp, Homo sapien
ttttcagccattaaaacttgtggag

SEQ ID NO: 3276736 - DNA, 25 bp, Homo sapien
cagagaagttgttcatgattcagag

SEQ ID NO: 3276737 - DNA, 25 bp, Homo sapien
catctaaattaagggcaggagctgt

SEQ ID NO: 3276738 - DNA, 25 bp, Homo sapien
cagacatctgctctagttaatgata

SEQ ID NO: 3276739 - DNA, 25 bp, Homo sapien
ccttaagtggtttgtaacatcgatg

SEQ ID NO: 3276740 - DNA, 25 bp, Homo sapien
aaaggccccatacttaagattccat

SEQ ID NO: 3276741 - DNA, 25 bp, Homo sapien
tatcttctaccttgaatgaattgaa

SEQ ID NO: 3276742 - DNA, 25 bp, Homo sapien
tcttctaccttgaatgaattgaatg

SEQ ID NO: 3276743 - DNA, 25 bp, Homo sapien
ttatcttctaccttgaatgaattga

SEQ ID NO: 3276744 - DNA, 25 bp, Homo sapien
tttatcttctaccttgaatgaattg

SEQ ID NO: 3276745 - DNA, 25 bp, Homo sapien
tgcatgatggtaacaaacccaaaat

SEQ ID NO: 3276746 - DNA, 25 bp, Homo sapien
tagacaagcagataagtaaggcttc

SEQ ID NO: 3276747 - DNA, 25 bp, Homo sapien
acctaactctcctaatgcatgatgg

SEQ ID NO: 3276748 - DNA, 25 bp, Homo sapien
caaaatgaatgcaggttcacatgta

SEQ ID NO: 3276749 - DNA, 25 bp, Homo sapien
gccagtcaatcttgagagccagcta

SEQ ID NO: 3276750 - DNA, 25 bp, Homo sapien
gaagatgactaaggcaaccacgtgc

SEQ ID NO: 3276751 - DNA, 25 bp, Homo sapien
aaatgaaatatacgccactggagtc

SEQ ID NO: 3276752 - DNA, 25 bp, Homo sapien
ccaaaagtgaaggtctgcaatgata

SEQ ID NO: 3276753 - DNA, 25 bp, Homo sapien
cagtttccatctttcatactgaata

SEQ ID NO: 3276754 - DNA, 25 bp, Homo sapien
caagtttattgtgcacatgcattag

SEQ ID NO: 3276755 - DNA, 25 bp, Homo sapien
agtttattgtgcacatgcattagac

SEQ ID NO: 3276756 - DNA, 25 bp, Homo sapien
tactgaatagtggatccacaagttt

SEQ ID NO: 3276757 - DNA, 25 bp, Homo sapien
gaactatctcatttactttagacaa

SEQ ID NO: 3276758 - DNA, 25 bp, Homo sapien
gtattttttataagacacagtaagc

SEQ ID NO: 3276759 - DNA, 25 bp, Homo sapien
tctcatttactttagacaacaaagt

SEQ ID NO: 3276760 - DNA, 25 bp, Homo sapien
taattttgaactatctcatttactt

SEQ ID NO: 3276761 - DNA, 25 bp, Homo sapien
agttcccatcttgatatagtcaagt

SEQ ID NO: 3276762 - DNA, 25 bp, Homo sapien
ttagttcccatcttgatatagtcaa

SEQ ID NO: 3276763 - DNA, 25 bp, Homo sapien
tagttcccatcttgatatagtcaag

SEQ ID NO: 3276764 - DNA, 25 bp, Homo sapien
tttagttcccatcttgatatagtca

SEQ ID NO: 3276765 - DNA, 25 bp, Homo sapien
agtgcagatctagaatgtgtacagg

SEQ ID NO: 3276766 - DNA, 25 bp, Homo sapien
tctggcagttcctctactagactcc

SEQ ID NO: 3276767 - DNA, 25 bp, Homo sapien
tactttgggagtaaccagaagagca

SEQ ID NO: 3276768 - DNA, 25 bp, Homo sapien
taccctatccattcgtctggtaaat

SEQ ID NO: 3276769 - DNA, 25 bp, Homo sapien
gtcagaaaggctgcaaaaaggactc

SEQ ID NO: 3276770 - DNA, 25 bp, Homo sapien
gactgacccagttaatgaaccagag

SEQ ID NO: 3276771 - DNA, 25 bp, Homo sapien
tggtacatatacttgcagactgctc

SEQ ID NO: 3276772 - DNA, 25 bp, Homo sapien
taagggacaagcaaagagtactggg

SEQ ID NO: 3276773 - DNA, 25 bp, Homo sapien
aaacttcatgtccagtaggagaggg

SEQ ID NO: 3276774 - DNA, 25 bp, Homo sapien
cacctgaaacttcatgtccagtagg

SEQ ID NO: 3276775 - DNA, 25 bp, Homo sapien
cagcctacttgaaggtcacctgaaa

SEQ ID NO: 3276776 - DNA, 25 bp, Homo sapien
tcaacagcctacttgaaggtcacct

SEQ ID NO: 3276777 - DNA, 25 bp, Homo sapien
ctgtatgatttagaagatgcaacat

SEQ ID NO: 3276778 - DNA, 25 bp, Homo sapien
gatttagaagatgcaacattttcca

SEQ ID NO: 3276779 - DNA, 25 bp, Homo sapien
tatgatttagaagatgcaacatttt

SEQ ID NO: 3276780 - DNA, 25 bp, Homo sapien
tttagaagatgcaacattttccaga

SEQ ID NO: 3276781 - DNA, 25 bp, Homo sapien
tatacatcaaataggactgcttcca

SEQ ID NO: 3276782 - DNA, 25 bp, Homo sapien
tttgtcaaactactgaggtggagcc

SEQ ID NO: 3276783 - DNA, 25 bp, Homo sapien
cagacttcctgaaacgttaccagaa

SEQ ID NO: 3276784 - DNA, 25 bp, Homo sapien
ggtggagcctaaatacaaagtaaga

SEQ ID NO: 3276785 - DNA, 25 bp, Homo sapien
taggttctacattgggtataggcaa

SEQ ID NO: 3276786 - DNA, 25 bp, Homo sapien
caagatcaacgtgtattagagccaa

SEQ ID NO: 3276787 - DNA, 25 bp, Homo sapien
agtaagctatgatctgacaccagtt

SEQ ID NO: 3276788 - DNA, 25 bp, Homo sapien
taagacacagtccaacatcagcaag

SEQ ID NO: 3276789 - DNA, 25 bp, Homo sapien
gaaagaactagctatgtgttgccac

SEQ ID NO: 3276790 - DNA, 25 bp, Homo sapien
actattatctgaggtgagaactttc

SEQ ID NO: 3276791 - DNA, 25 bp, Homo sapien
cagattatctcagtcggcttttgaa

SEQ ID NO: 3276792 - DNA, 25 bp, Homo sapien
cacttttcaataggtcacagtgtga

SEQ ID NO: 3276793 - DNA, 25 bp, Homo sapien
tacagggcaaatgccttgtgtgccc

SEQ ID NO: 3276794 - DNA, 25 bp, Homo sapien
gtgcccctgttataaggatcattac

SEQ ID NO: 3276795 - DNA, 25 bp, Homo sapien
tcatcgcatacaaaaatagtccggg

SEQ ID NO: 3276796 - DNA, 25 bp, Homo sapien
tctaaagtagcatcttcatcgcata

SEQ ID NO: 3276797 - DNA, 25 bp, Homo sapien
atgaaaagaaagacagcaaagaata

SEQ ID NO: 3276798 - DNA, 25 bp, Homo sapien
ttaacatgaaaagaaagacagcaaa

SEQ ID NO: 3276799 - DNA, 25 bp, Homo sapien
gaaaagaaagacagcaaagaatatt

SEQ ID NO: 3276800 - DNA, 25 bp, Homo sapien
agaaagacagcaaagaatatttaat

SEQ ID NO: 3276801 - DNA, 25 bp, Homo sapien
gctagagtctttaatcttgtccttg

SEQ ID NO: 3276802 - DNA, 25 bp, Homo sapien
aacagttagagccatagttggcact

SEQ ID NO: 3276803 - DNA, 25 bp, Homo sapien
actggatccaggctcattgaaagcg

SEQ ID NO: 3276804 - DNA, 25 bp, Homo sapien
caagatggtatccattgctagagtc

SEQ ID NO: 3276805 - DNA, 25 bp, Homo sapien
ggaaaatgttgcacgtgactggcta

SEQ ID NO: 3276806 - DNA, 25 bp, Homo sapien
gatgggatcaggaaaatacaagctt

SEQ ID NO: 3276807 - DNA, 25 bp, Homo sapien
gacctcactgatgatttgggcctta

SEQ ID NO: 3276808 - DNA, 25 bp, Homo sapien
tgctttaaagagacctagtgccaac

SEQ ID NO: 3276809 - DNA, 25 bp, Homo sapien
ttttgatcccatttggcacagttct

SEQ ID NO: 3276810 - DNA, 25 bp, Homo sapien
gtagttgtaagacccagatgccaat

SEQ ID NO: 3276811 - DNA, 25 bp, Homo sapien
agggtagttgtaagacccagatgcc

SEQ ID NO: 3276812 - DNA, 25 bp, Homo sapien
catttggcacagttcttagagtttt

SEQ ID NO: 3276813 - DNA, 25 bp, Homo sapien
tgcagcattcccgtcaaggatatgt

SEQ ID NO: 3276814 - DNA, 25 bp, Homo sapien
tcccgtcaaggatatgtgcattatt

SEQ ID NO: 3276815 - DNA, 25 bp, Homo sapien
tgtgcattattaggatctatatcga

SEQ ID NO: 3276816 - DNA, 25 bp, Homo sapien
aaaagatctattcctccagcttctt

SEQ ID NO: 3276817 - DNA, 25 bp, Homo sapien
tattccacatataagaatggtagct

SEQ ID NO: 3276818 - DNA, 25 bp, Homo sapien
ttccacatataagaatggtagcttt

SEQ ID NO: 3276819 - DNA, 25 bp, Homo sapien
ttattccacatataagaatggtagc

SEQ ID NO: 3276820 - DNA, 25 bp, Homo sapien
ccacatataagaatggtagctttca

SEQ ID NO: 3276821 - DNA, 25 bp, Homo sapien
tttatagcatcctaaaggtgtactc

SEQ ID NO: 3276822 - DNA, 25 bp, Homo sapien
tttttatagcatcctaaaggtgtac

SEQ ID NO: 3276823 - DNA, 25 bp, Homo sapien
ttttatagcatcctaaaggtgtact

SEQ ID NO: 3276824 - DNA, 25 bp, Homo sapien
ttatagcatcctaaaggtgtactcc

SEQ ID NO: 3276825 - DNA, 25 bp, Homo sapien
tatctgtcctgtccaggtttgaact

SEQ ID NO: 3276826 - DNA, 25 bp, Homo sapien
agtgtaaaatatctgtcctgtccag

SEQ ID NO: 3276827 - DNA, 25 bp, Homo sapien
tgcccattcactagccaagtcatag

SEQ ID NO: 3276828 - DNA, 25 bp, Homo sapien
cctgtccaggtttgaactgaatgat

SEQ ID NO: 3276829 - DNA, 25 bp, Homo sapien
cggtgacgcacagcttccagaacaa

SEQ ID NO: 3276830 - DNA, 25 bp, Homo sapien
tacggtgacgcacagcttccagaac

SEQ ID NO: 3276831 - DNA, 25 bp, Homo sapien
acggtgacgcacagcttccagaaca

SEQ ID NO: 3276832 - DNA, 25 bp, Homo sapien
tttataacatggtttcagcattcct

SEQ ID NO: 3276833 - DNA, 25 bp, Homo sapien
acatagagtaataagtcaaattttc

SEQ ID NO: 3276834 - DNA, 25 bp, Homo sapien
ttcctgagttttgtacccacacact

SEQ ID NO: 3276835 - DNA, 25 bp, Homo sapien
caataccaagctttttataacatgg

SEQ ID NO: 3276836 - DNA, 25 bp, Homo sapien
tcgaggttcctgagcacccattccg

SEQ ID NO: 3276837 - DNA, 25 bp, Homo sapien
aaaggccgcacagggcgaagttgcc

SEQ ID NO: 3276838 - DNA, 25 bp, Homo sapien
caaatccggagaggacaaccaggtc

SEQ ID NO: 3276839 - DNA, 25 bp, Homo sapien
accaggtccgcgagtggcaatacgg

SEQ ID NO: 3276840 - DNA, 25 bp, Homo sapien
ctggaacagcgggaacaagcaacac

SEQ ID NO: 3276841 - DNA, 25 bp, Homo sapien
ccagctgaccagtggagcgcgaatc

SEQ ID NO: 3276842 - DNA, 25 bp, Homo sapien
aatggttcttcgatgctggaacagc

SEQ ID NO: 3276843 - DNA, 25 bp, Homo sapien
cggcagacccaatggttcttcgatg

SEQ ID NO: 3276844 - DNA, 25 bp, Homo sapien
ccggatgcagataaaggcgcaggaa

SEQ ID NO: 3276845 - DNA, 25 bp, Homo sapien
agataaaggcgcaggaaggaaccgc

SEQ ID NO: 3276846 - DNA, 25 bp, Homo sapien
tgcagataaaggcgcaggaaggaac

SEQ ID NO: 3276847 - DNA, 25 bp, Homo sapien
aggaaccgcggcgtggctggcgggc

SEQ ID NO: 3276848 - DNA, 25 bp, Homo sapien
tgcggtgcggctgggcgctcttctt

SEQ ID NO: 3276849 - DNA, 25 bp, Homo sapien
gagttcggtccgagtgcggtgcggc

SEQ ID NO: 3276850 - DNA, 25 bp, Homo sapien
gaggtgagacgcgaggagttcggtc

SEQ ID NO: 3276851 - DNA, 25 bp, Homo sapien
gacgcgaggagttcggtccgagtgc

SEQ ID NO: 3276852 - DNA, 25 bp, Homo sapien
tcaggaatgatgacaaggctctcag

SEQ ID NO: 3276853 - DNA, 25 bp, Homo sapien
gaatgatgacaaggctctcagagat

SEQ ID NO: 3276854 - DNA, 25 bp, Homo sapien
gatatatgttccaagatgggtttca

SEQ ID NO: 3276855 - DNA, 25 bp, Homo sapien
gctctcagagatgttggatatatgt

SEQ ID NO: 3276856 - DNA, 25 bp, Homo sapien
gagacaaattgttcccagtctgaaa

SEQ ID NO: 3276857 - DNA, 25 bp, Homo sapien
catctgaagcagaaggagacaaatt

SEQ ID NO: 3276858 - DNA, 25 bp, Homo sapien
aaggagacaaattgttcccagtctg

SEQ ID NO: 3276859 - DNA, 25 bp, Homo sapien
aattgttcccagtctgaaactatac

SEQ ID NO: 3276860 - DNA, 25 bp, Homo sapien
ctgctgagtaaatgcaggcttgtgc

SEQ ID NO: 3276861 - DNA, 25 bp, Homo sapien
tgagtaaatgcaggcttgtgctcct

SEQ ID NO: 3276862 - DNA, 25 bp, Homo sapien
caatagtggaagttattttggtgct

SEQ ID NO: 3276863 - DNA, 25 bp, Homo sapien
gaaaagaatacaatagtggaagtta

SEQ ID NO: 3276864 - DNA, 25 bp, Homo sapien
tgactggaagtatggatttatatga

SEQ ID NO: 3276865 - DNA, 25 bp, Homo sapien
agtgactggaagtatggatttatat

SEQ ID NO: 3276866 - DNA, 25 bp, Homo sapien
gaagtatggatttatatgaggaaac

SEQ ID NO: 3276867 - DNA, 25 bp, Homo sapien
actggaagtatggatttatatgagg

SEQ ID NO: 3276868 - DNA, 25 bp, Homo sapien
ctgaatactgcctgaaattacaact

SEQ ID NO: 3276869 - DNA, 25 bp, Homo sapien
gatcctcaagagtttgccactgaga

SEQ ID NO: 3276870 - DNA, 25 bp, Homo sapien
ggcaccatgtcttaacttctggctg

SEQ ID NO: 3276871 - DNA, 25 bp, Homo sapien
gaaattacaacttccaggcaccatg

SEQ ID NO: 3276872 - DNA, 25 bp, Homo sapien
gtcaaaggtctcagctttaggcgtt

SEQ ID NO: 3276873 - DNA, 25 bp, Homo sapien
agctttaggcgttcctataaccttg

SEQ ID NO: 3276874 - DNA, 25 bp, Homo sapien
ggtctcagctttaggcgttcctata

SEQ ID NO: 3276875 - DNA, 25 bp, Homo sapien
caaaggtctcagctttaggcgttcc

SEQ ID NO: 3276876 - DNA, 25 bp, Homo sapien
ttaactatatttacaacagttattg

SEQ ID NO: 3276877 - DNA, 25 bp, Homo sapien
aactatatttacaacagttattgag

SEQ ID NO: 3276878 - DNA, 25 bp, Homo sapien
tatatttacaacagttattgagtac

SEQ ID NO: 3276879 - DNA, 25 bp, Homo sapien
tatttaactatatttacaacagtta

SEQ ID NO: 3276880 - DNA, 25 bp, Homo sapien
tagaagaataatctgtctggttccc

SEQ ID NO: 3276881 - DNA, 25 bp, Homo sapien
gctagaagaataatctgtctggttc

SEQ ID NO: 3276882 - DNA, 25 bp, Homo sapien
gagctagaagaataatctgtctggt

SEQ ID NO: 3276883 - DNA, 25 bp, Homo sapien
gaagaataatctgtctggttccctg

SEQ ID NO: 3276884 - DNA, 25 bp, Homo sapien
cttttctcagataactccgtcttcc

SEQ ID NO: 3276885 - DNA, 25 bp, Homo sapien
tctcagataactccgtcttcctgtt

SEQ ID NO: 3276886 - DNA, 25 bp, Homo sapien
tcctgtttccctcttcatggcatct

SEQ ID NO: 3276887 - DNA, 25 bp, Homo sapien
cctgtttccctcttcatggcatctt

SEQ ID NO: 3276888 - DNA, 25 bp, Homo sapien
aaatgcaagtggcttgcgatgtgtt

SEQ ID NO: 3276889 - DNA, 25 bp, Homo sapien
tctgtgatgaagaacttaaaagatg

SEQ ID NO: 3276890 - DNA, 25 bp, Homo sapien
tggcttgcgatgtgttgcaaaagac

SEQ ID NO: 3276891 - DNA, 25 bp, Homo sapien
tgtgatgaagaacttaaaagatgat

SEQ ID NO: 3276892 - DNA, 25 bp, Homo sapien
gactgaccctgcttgaacgtgaaga

SEQ ID NO: 3276893 - DNA, 25 bp, Homo sapien
gaggcacaccgaaattcaaaatagt

SEQ ID NO: 3276894 - DNA, 25 bp, Homo sapien
tgctagaacttgcattaaagtgagc

SEQ ID NO: 3276895 - DNA, 25 bp, Homo sapien
gaaaatccttcttaagaggcacacc

SEQ ID NO: 3276896 - DNA, 25 bp, Homo sapien
ataggtcgctgtggtctgctcctgc

SEQ ID NO: 3276897 - DNA, 25 bp, Homo sapien
tcttttacaatcaccataggtcgct

SEQ ID NO: 3276898 - DNA, 25 bp, Homo sapien
caccataggtcgctgtggtctgctc

SEQ ID NO: 3276899 - DNA, 25 bp, Homo sapien
ttacaatcaccataggtcgctgtgg

SEQ ID NO: 3276900 - DNA, 25 bp, Homo sapien
tggaaccggttactcaattcattta

SEQ ID NO: 3276901 - DNA, 25 bp, Homo sapien
tcattctgtgttccttcggcttacg

SEQ ID NO: 3276902 - DNA, 25 bp, Homo sapien
ggcaatacttcgagtaatacttgag

SEQ ID NO: 3276903 - DNA, 25 bp, Homo sapien
tataaccatcagagcctagagcttg

SEQ ID NO: 3276904 - DNA, 25 bp, Homo sapien
cacactttaatgtgcgttctttcat

SEQ ID NO: 3276905 - DNA, 25 bp, Homo sapien
cactttaatgtgcgttctttcattt

SEQ ID NO: 3276906 - DNA, 25 bp, Homo sapien
acactttaatgtgcgttctttcatt

SEQ ID NO: 3276907 - DNA, 25 bp, Homo sapien
actttaatgtgcgttctttcatttc

SEQ ID NO: 3276908 - DNA, 25 bp, Homo sapien
tgcttgctgtccataagcatacagc

SEQ ID NO: 3276909 - DNA, 25 bp, Homo sapien
ctgtccataagcatacagcattttg

SEQ ID NO: 3276910 - DNA, 25 bp, Homo sapien
cataagcatacagcattttggcctt

SEQ ID NO: 3276911 - DNA, 25 bp, Homo sapien
atcctgcttgctgtccataagcata

SEQ ID NO: 3276912 - DNA, 25 bp, Homo sapien
cgtgctctttaagtgttttgggata

SEQ ID NO: 3276913 - DNA, 25 bp, Homo sapien
tcaagcacttccaaaatttgcaaag

SEQ ID NO: 3276914 - DNA, 25 bp, Homo sapien
tttcaggacccgtgctctttaagtg

SEQ ID NO: 3276915 - DNA, 25 bp, Homo sapien
cactgtcattttcaggacccgtgct

SEQ ID NO: 3276916 - DNA, 25 bp, Homo sapien
ctggatcgtgcatatcttatgctga

SEQ ID NO: 3276917 - DNA, 25 bp, Homo sapien
gctcttcctgtatatggatatggat

SEQ ID NO: 3276918 - DNA, 25 bp, Homo sapien
gttgctgtagtccttcatccccttc

SEQ ID NO: 3276919 - DNA, 25 bp, Homo sapien
gtgcttgtatccaagctggcactgg

SEQ ID NO: 3276920 - DNA, 25 bp, Homo sapien
cactgctttgactgtgtgctccagt

SEQ ID NO: 3276921 - DNA, 25 bp, Homo sapien
gggacctgtcttttactatctgcat

SEQ ID NO: 3276922 - DNA, 25 bp, Homo sapien
gctgttgaactgtaagtgtaaccaa

SEQ ID NO: 3276923 - DNA, 25 bp, Homo sapien
ctgcatactgcagggatgagcggct

SEQ ID NO: 3276924 - DNA, 25 bp, Homo sapien
tccggttgtgggaaatatgactcag

SEQ ID NO: 3276925 - DNA, 25 bp, Homo sapien
tcacaagcgcattgccagtggcaaa

SEQ ID NO: 3276926 - DNA, 25 bp, Homo sapien
agtggcaaaagcacacttgctgggg

SEQ ID NO: 3276927 - DNA, 25 bp, Homo sapien
ttgagcttcacaagcgcattgccag

SEQ ID NO: 3276928 - DNA, 25 bp, Homo sapien
gaccttaggtataaagctacttgga

SEQ ID NO: 3276929 - DNA, 25 bp, Homo sapien
tagtgagcatagtgatacatgtccc

SEQ ID NO: 3276930 - DNA, 25 bp, Homo sapien
ggtatcctgctgtacagaattctag

SEQ ID NO: 3276931 - DNA, 25 bp, Homo sapien
ccaattgtcattcttgagggtatcc

SEQ ID NO: 3276932 - DNA, 25 bp, Homo sapien
ttactgagcacgggaaattcccagg

SEQ ID NO: 3276933 - DNA, 25 bp, Homo sapien
ggtatcatagctgcagtggctcttg

SEQ ID NO: 3276934 - DNA, 25 bp, Homo sapien
cgggaaattcccaggtatcatagct

SEQ ID NO: 3276935 - DNA, 25 bp, Homo sapien
catagctgcagtggctcttgcattc

SEQ ID NO: 3276936 - DNA, 25 bp, Homo sapien
tgttgtgattcagtgcttttaccct

SEQ ID NO: 3276937 - DNA, 25 bp, Homo sapien
aaattgttgtgattcagtgctttta

SEQ ID NO: 3276938 - DNA, 25 bp, Homo sapien
ttgttgtgattcagtgcttttaccc

SEQ ID NO: 3276939 - DNA, 25 bp, Homo sapien
tgtgattcagtgcttttacccttat

SEQ ID NO: 3276940 - DNA, 25 bp, Homo sapien
caactgagagttgaatttcattcaa

SEQ ID NO: 3276941 - DNA, 25 bp, Homo sapien
tcaagaaaataaaatccagtgactg

SEQ ID NO: 3276942 - DNA, 25 bp, Homo sapien
aaatccagtgactggaactttccca

SEQ ID NO: 3276943 - DNA, 25 bp, Homo sapien
aactgagagttgaatttcattcaag

SEQ ID NO: 3276944 - DNA, 25 bp, Homo sapien
cagttggttgagcttacatgtggga

SEQ ID NO: 3276945 - DNA, 25 bp, Homo sapien
gcttacatgtgggaattctttcaac

SEQ ID NO: 3276946 - DNA, 25 bp, Homo sapien
tggttgagcttacatgtgggaattc

SEQ ID NO: 3276947 - DNA, 25 bp, Homo sapien
tcatggatccagttggttgagctta

SEQ ID NO: 3276948 - DNA, 25 bp, Homo sapien
ttcccctggttgtttgccttgtaga

SEQ ID NO: 3276949 - DNA, 25 bp, Homo sapien
tcccctggttgtttgccttgtagaa

SEQ ID NO: 3276950 - DNA, 25 bp, Homo sapien
cccctggttgtttgccttgtagaat

SEQ ID NO: 3276951 - DNA, 25 bp, Homo sapien
cttcccctggttgtttgccttgtag

SEQ ID NO: 3276952 - DNA, 25 bp, Homo sapien
ctccttggaggcaaatttaagattc

SEQ ID NO: 3276953 - DNA, 25 bp, Homo sapien
ctaagtctccttggaggcaaattta

SEQ ID NO: 3276954 - DNA, 25 bp, Homo sapien
tccttggaggcaaatttaagattcc

SEQ ID NO: 3276955 - DNA, 25 bp, Homo sapien
agtctccttggaggcaaatttaaga

SEQ ID NO: 3276956 - DNA, 25 bp, Homo sapien
tttgaaatctgctagcattagctta

SEQ ID NO: 3276957 - DNA, 25 bp, Homo sapien
ctttgaaatctgctagcattagctt

SEQ ID NO: 3276958 - DNA, 25 bp, Homo sapien
ccaaccagaccacattgctgctcag

SEQ ID NO: 3276959 - DNA, 25 bp, Homo sapien
gtctccagcattaggccagaattct

SEQ ID NO: 3276960 - DNA, 25 bp, Homo sapien
cagcattaggccagaattctttcca

SEQ ID NO: 3276961 - DNA, 25 bp, Homo sapien
tctccagcattaggccagaattctt

SEQ ID NO: 3276962 - DNA, 25 bp, Homo sapien
taaaacctttgaaactcactgacat

SEQ ID NO: 3276963 - DNA, 25 bp, Homo sapien
tatgtggcactttatgtattggaag

SEQ ID NO: 3276964 - DNA, 25 bp, Homo sapien
tgacaggtgcataataaagtatagt

SEQ ID NO: 3276965 - DNA, 25 bp, Homo sapien
tgaggttgttcttcaaattgactgc

SEQ ID NO: 3276966 - DNA, 25 bp, Homo sapien
agatgtgtcgtttccaacaatatag

SEQ ID NO: 3276967 - DNA, 25 bp, Homo sapien
tgtatgaatgtgaggatagatgcag

SEQ ID NO: 3276968 - DNA, 25 bp, Homo sapien
atgtatgaatgtgaggatagatgca

SEQ ID NO: 3276969 - DNA, 25 bp, Homo sapien
agaaagaaaactgggccacagtgct

SEQ ID NO: 3276970 - DNA, 25 bp, Homo sapien
aaagaaaactgggccacagtgctta

SEQ ID NO: 3276971 - DNA, 25 bp, Homo sapien
ggagaaagaaaactgggccacagtg

SEQ ID NO: 3276972 - DNA, 25 bp, Homo sapien
gaaaactgggccacagtgcttaagc

SEQ ID NO: 3276973 - DNA, 25 bp, Homo sapien
tttcttctctccagttttcttgtat

SEQ ID NO: 3276974 - DNA, 25 bp, Homo sapien
cttctgaaacaaatatttcttctct

SEQ ID NO: 3276975 - DNA, 25 bp, Homo sapien
tctctccagttttcttgtatttctt

SEQ ID NO: 3276976 - DNA, 25 bp, Homo sapien
cttctctccagttttcttgtatttc

SEQ ID NO: 3276977 - DNA, 25 bp, Homo sapien
cagctgagaacatgtctggactgag

SEQ ID NO: 3276978 - DNA, 25 bp, Homo sapien
tgtcctatgactgaaggtaccagaa

SEQ ID NO: 3276979 - DNA, 25 bp, Homo sapien
gaaaaatgtgctccacagttggaac

SEQ ID NO: 3276980 - DNA, 25 bp, Homo sapien
ctctcagaggtcagttgaggtgcca

SEQ ID NO: 3276981 - DNA, 25 bp, Homo sapien
tttagtccccatttctcagttatgg

SEQ ID NO: 3276982 - DNA, 25 bp, Homo sapien
caaacctctccaacacaagtgggca

SEQ ID NO: 3276983 - DNA, 25 bp, Homo sapien
tatgcgattcataaacaaacctctc

SEQ ID NO: 3276984 - DNA, 25 bp, Homo sapien
gcgggtagataccttgaggatattt

SEQ ID NO: 3276985 - DNA, 25 bp, Homo sapien
tcttagagtttcttccctaatacag

SEQ ID NO: 3276986 - DNA, 25 bp, Homo sapien
tagagtttcttccctaatacagctc

SEQ ID NO: 3276987 - DNA, 25 bp, Homo sapien
ttctcttagagtttcttccctaata

SEQ ID NO: 3276988 - DNA, 25 bp, Homo sapien
ttagagtttcttccctaatacagct

SEQ ID NO: 3276989 - DNA, 25 bp, Homo sapien
gaacgtatctcggaaataacacagg

SEQ ID NO: 3276990 - DNA, 25 bp, Homo sapien
aggaacgtatctcggaaataacaca

SEQ ID NO: 3276991 - DNA, 25 bp, Homo sapien
cagcttttctgtcctagtaaaagat

SEQ ID NO: 3276992 - DNA, 25 bp, Homo sapien
gtatctcggaaataacacaggccac

SEQ ID NO: 3276993 - DNA, 25 bp, Homo sapien
tgggacagataataaaagatacatt

SEQ ID NO: 3276994 - DNA, 25 bp, Homo sapien
gggacagataataaaagatacatta

SEQ ID NO: 3276995 - DNA, 25 bp, Homo sapien
ccatctgtttgggtattgcagctgt

SEQ ID NO: 3276996 - DNA, 25 bp, Homo sapien
ttactgtccgttgggattacaagac

SEQ ID NO: 3276997 - DNA, 25 bp, Homo sapien
tgggattacaagacctggtgatgtg

SEQ ID NO: 3276998 - DNA, 25 bp, Homo sapien
tgcaacatggccatctgtttgggta

SEQ ID NO: 3276999 - DNA, 25 bp, Homo sapien
tttcttccctagcacaaacttcttg

SEQ ID NO: 3277000 - DNA, 25 bp, Homo sapien
caagtgctggtttattggtagctgc

SEQ ID NO: 3277001 - DNA, 25 bp, Homo sapien
catgattcctggtcgggtaaagaat

SEQ ID NO: 3277002 - DNA, 25 bp, Homo sapien
ggcggccaccttatccacgcaaagt

SEQ ID NO: 3277003 - DNA, 25 bp, Homo sapien
gaattttgctcctcaatgccatttc

SEQ ID NO: 3277004 - DNA, 25 bp, Homo sapien
ttacagtggcttcacgggataaaaa

SEQ ID NO: 3277005 - DNA, 25 bp, Homo sapien
catctagaaatcctatcaccattgc

SEQ ID NO: 3277006 - DNA, 25 bp, Homo sapien
gtggcttcacgggataaaaagccac

SEQ ID NO: 3277007 - DNA, 25 bp, Homo sapien
cttggcatcctgaattcttctccat

SEQ ID NO: 3277008 - DNA, 25 bp, Homo sapien
attggtgttaccaggccatcttcat

SEQ ID NO: 3277009 - DNA, 25 bp, Homo sapien
atattggtgttaccaggccatcttc

SEQ ID NO: 3277010 - DNA, 25 bp, Homo sapien
gtaatattggtgttaccaggccatc

SEQ ID NO: 3277011 - DNA, 25 bp, Homo sapien
taatattggtgttaccaggccatct

SEQ ID NO: 3277012 - DNA, 25 bp, Homo sapien
gagtgtttggatagaggccatgaat

SEQ ID NO: 3277013 - DNA, 25 bp, Homo sapien
ctagagtgtttggatagaggccatg

SEQ ID NO: 3277014 - DNA, 25 bp, Homo sapien
tgtttggatagaggccatgaatgaa

SEQ ID NO: 3277015 - DNA, 25 bp, Homo sapien
tagagtgtttggatagaggccatga

SEQ ID NO: 3277016 - DNA, 25 bp, Homo sapien
caatccatgtcatttggctccgtgt

SEQ ID NO: 3277017 - DNA, 25 bp, Homo sapien
tgtcatttggctccgtgtgccccat

SEQ ID NO: 3277018 - DNA, 25 bp, Homo sapien
gggagccaatccatgtcatttggct

SEQ ID NO: 3277019 - DNA, 25 bp, Homo sapien
tttcttcggggagccaatccatgtc

SEQ ID NO: 3277020 - DNA, 25 bp, Homo sapien
tgatactccagattgtaatgagcac

SEQ ID NO: 3277021 - DNA, 25 bp, Homo sapien
ttcacgtagattatccagaatcatc

SEQ ID NO: 3277022 - DNA, 25 bp, Homo sapien
ctgattcacatttgaataagctaac

SEQ ID NO: 3277023 - DNA, 25 bp, Homo sapien
taatgagcacgtttggcactttcac

SEQ ID NO: 3277024 - DNA, 25 bp, Homo sapien
aagggtcctccacaaagcacttgct

SEQ ID NO: 3277025 - DNA, 25 bp, Homo sapien
gcaaagagaaagacgtaggattcca

SEQ ID NO: 3277026 - DNA, 25 bp, Homo sapien
aagtcatcagaagagcaagggtcct

SEQ ID NO: 3277027 - DNA, 25 bp, Homo sapien
gatttaacggatccacagtagcccc

SEQ ID NO: 3277028 - DNA, 25 bp, Homo sapien
tcaggaactgtgcaccttatctgcc

SEQ ID NO: 3277029 - DNA, 25 bp, Homo sapien
caggaactgtgcaccttatctgcct

SEQ ID NO: 3277030 - DNA, 25 bp, Homo sapien
catacaatagaagaaggtgataaaa

SEQ ID NO: 3277031 - DNA, 25 bp, Homo sapien
acaatagaagaaggtgataaaatag

SEQ ID NO: 3277032 - DNA, 25 bp, Homo sapien
tttcatacaatagaagaaggtgata

SEQ ID NO: 3277033 - DNA, 25 bp, Homo sapien
tcatacaatagaagaaggtgataaa

SEQ ID NO: 3277034 - DNA, 25 bp, Homo sapien
ctgacaccatttcaggattttccat

SEQ ID NO: 3277035 - DNA, 25 bp, Homo sapien
gcctgacaccatttcaggattttcc

SEQ ID NO: 3277036 - DNA, 25 bp, Homo sapien
cctgacaccatttcaggattttcca

SEQ ID NO: 3277037 - DNA, 25 bp, Homo sapien
gaaagagacagtatgaaaccaaaat

SEQ ID NO: 3277038 - DNA, 25 bp, Homo sapien
taatgagaggaagcttagtagaatg

SEQ ID NO: 3277039 - DNA, 25 bp, Homo sapien
cagcattaattctattggagagtaa

SEQ ID NO: 3277040 - DNA, 25 bp, Homo sapien
tgactgtgactatacttaagatttg

SEQ ID NO: 3277041 - DNA, 25 bp, Homo sapien
gtctccagcacgacacactggacag

SEQ ID NO: 3277042 - DNA, 25 bp, Homo sapien
aagtctccagcacgacacactggac

SEQ ID NO: 3277043 - DNA, 25 bp, Homo sapien
tattcttcagctgtagtggcaggca

SEQ ID NO: 3277044 - DNA, 25 bp, Homo sapien
ctattcttcagctgtagtggcaggc

SEQ ID NO: 3277045 - DNA, 25 bp, Homo sapien
cagaagaacatacagatctaatgac

SEQ ID NO: 3277046 - DNA, 25 bp, Homo sapien
tgatcaagtgttagaatgccacaga

SEQ ID NO: 3277047 - DNA, 25 bp, Homo sapien
cacagatggttcgataggtaatcaa

SEQ ID NO: 3277048 - DNA, 25 bp, Homo sapien
tctaatgactagatccaggacttga

SEQ ID NO: 3277049 - DNA, 25 bp, Homo sapien
ttacttaggacaatgcctgacacag

SEQ ID NO: 3277050 - DNA, 25 bp, Homo sapien
gtgactcatacatctttcctacgga

SEQ ID NO: 3277051 - DNA, 25 bp, Homo sapien
gactggcccgacaactttttatctg

SEQ ID NO: 3277052 - DNA, 25 bp, Homo sapien
cctacggagcacttacttcggtgaa

SEQ ID NO: 3277053 - DNA, 25 bp, Homo sapien
caagcctccttaagtctgcctcaaa

SEQ ID NO: 3277054 - DNA, 25 bp, Homo sapien
gatacttgtttgaatggtgcacaat

SEQ ID NO: 3277055 - DNA, 25 bp, Homo sapien
acatctacaagcctccttaagtctg

SEQ ID NO: 3277056 - DNA, 25 bp, Homo sapien
ggtgcacaatagctcaacatctaca

SEQ ID NO: 3277057 - DNA, 25 bp, Homo sapien
gggaaattcagcattggctgtcctc

SEQ ID NO: 3277058 - DNA, 25 bp, Homo sapien
atggtaggaggtgttgttatagact

SEQ ID NO: 3277059 - DNA, 25 bp, Homo sapien
gagaggcaccatcacaagtgggaaa

SEQ ID NO: 3277060 - DNA, 25 bp, Homo sapien
tcatacgaaggccaaaaagttaaga

SEQ ID NO: 3277061 - DNA, 25 bp, Homo sapien
caagatggtggcagttaaccatcag

SEQ ID NO: 3277062 - DNA, 25 bp, Homo sapien
gcaagatggtggcagttaaccatca

SEQ ID NO: 3277063 - DNA, 25 bp, Homo sapien
ctgatagttatgaggatgacaggat

SEQ ID NO: 3277064 - DNA, 25 bp, Homo sapien
aagatggtggcagttaaccatcaga

SEQ ID NO: 3277065 - DNA, 25 bp, Homo sapien
tactgttaagaatacccggcagcct

SEQ ID NO: 3277066 - DNA, 25 bp, Homo sapien
tttgggcaatggtaaacactactac

SEQ ID NO: 3277067 - DNA, 25 bp, Homo sapien
tgaacataatccatgtgtccatccg

SEQ ID NO: 3277068 - DNA, 25 bp, Homo sapien
gggatgcctctacccacaacagtta

SEQ ID NO: 3277069 - DNA, 25 bp, Homo sapien
taatttttccacgagcacctcttcc

SEQ ID NO: 3277070 - DNA, 25 bp, Homo sapien
tcacctgtcacaagaattttaccat

SEQ ID NO: 3277071 - DNA, 25 bp, Homo sapien
ctgaaaccacaagtgcttcacctgt

SEQ ID NO: 3277072 - DNA, 25 bp, Homo sapien
ccataatttttccacgagcacctct

SEQ ID NO: 3277073 - DNA, 25 bp, Homo sapien
tctaaagtagggtaaccttatcaca

SEQ ID NO: 3277074 - DNA, 25 bp, Homo sapien
aaagtagggtaaccttatcacacat

SEQ ID NO: 3277075 - DNA, 25 bp, Homo sapien
taaagtagggtaaccttatcacaca

SEQ ID NO: 3277076 - DNA, 25 bp, Homo sapien
aagtagggtaaccttatcacacatc

SEQ ID NO: 3277077 - DNA, 25 bp, Homo sapien
aatattgtactagattgttttggat

SEQ ID NO: 3277078 - DNA, 25 bp, Homo sapien
ttgtactagattgttttggatcaaa

SEQ ID NO: 3277079 - DNA, 25 bp, Homo sapien
gaaaatattgtactagattgttttg

SEQ ID NO: 3277080 - DNA, 25 bp, Homo sapien
ctgaaaatattgtactagattgttt

SEQ ID NO: 3277081 - DNA, 25 bp, Homo sapien
atgtgagataaagttattcacatct

SEQ ID NO: 3277082 - DNA, 25 bp, Homo sapien
ataaagttattcacatctgaacaaa

SEQ ID NO: 3277083 - DNA, 25 bp, Homo sapien
gataaagttattcacatctgaacaa

SEQ ID NO: 3277084 - DNA, 25 bp, Homo sapien
gagataaagttattcacatctgaac

SEQ ID NO: 3277085 - DNA, 25 bp, Homo sapien
gggttttgaatcaagatctaactcc

SEQ ID NO: 3277086 - DNA, 25 bp, Homo sapien
cttccagtggaagattgggttttga

SEQ ID NO: 3277087 - DNA, 25 bp, Homo sapien
tccagtggaagattgggttttgaat

SEQ ID NO: 3277088 - DNA, 25 bp, Homo sapien
cagtggaagattgggttttgaatca

SEQ ID NO: 3277089 - DNA, 25 bp, Homo sapien
tctcattattgtcagccacggtggg

SEQ ID NO: 3277090 - DNA, 25 bp, Homo sapien
tactctcattattgtcagccacggt

SEQ ID NO: 3277091 - DNA, 25 bp, Homo sapien
tcagatactctcattattgtcagcc

SEQ ID NO: 3277092 - DNA, 25 bp, Homo sapien
gatactctcattattgtcagccacg

SEQ ID NO: 3277093 - DNA, 25 bp, Homo sapien
tctagcttcacagtaattcatagag

SEQ ID NO: 3277094 - DNA, 25 bp, Homo sapien
tcatctagcttcacagtaattcata

SEQ ID NO: 3277095 - DNA, 25 bp, Homo sapien
catctagcttcacagtaattcatag

SEQ ID NO: 3277096 - DNA, 25 bp, Homo sapien
ctagcttcacagtaattcatagagc

SEQ ID NO: 3277097 - DNA, 25 bp, Homo sapien
tgcgagtttggaagtcgaatgcgaa

SEQ ID NO: 3277098 - DNA, 25 bp, Homo sapien
gaagtcgaatgcgaatgagaaaagc

SEQ ID NO: 3277099 - DNA, 25 bp, Homo sapien
gaagtactgcgagtttggaagtcga

SEQ ID NO: 3277100 - DNA, 25 bp, Homo sapien
gtttggaagtcgaatgcgaatgaga

SEQ ID NO: 3277101 - DNA, 25 bp, Homo sapien
tactattggttcacattctaggcca

SEQ ID NO: 3277102 - DNA, 25 bp, Homo sapien
ttggttcacattctaggccattgaa

SEQ ID NO: 3277103 - DNA, 25 bp, Homo sapien
ggttcacattctaggccattgaagt

SEQ ID NO: 3277104 - DNA, 25 bp, Homo sapien
tattggttcacattctaggccattg

SEQ ID NO: 3277105 - DNA, 25 bp, Homo sapien
aaaagactggctatccatgttttgg

SEQ ID NO: 3277106 - DNA, 25 bp, Homo sapien
tccatgttttggcttgtgctgctta

SEQ ID NO: 3277107 - DNA, 25 bp, Homo sapien
gaggtgttaaaagactggctatcca

SEQ ID NO: 3277108 - DNA, 25 bp, Homo sapien
gctgcttaagtcagtgtagttagac

SEQ ID NO: 3277109 - DNA, 25 bp, Homo sapien
cgtatctatcatgtatggtgtttcc

SEQ ID NO: 3277110 - DNA, 25 bp, Homo sapien
tctagcatatttcttagattgttca

SEQ ID NO: 3277111 - DNA, 25 bp, Homo sapien
agattgttcatccacgtatctatca

SEQ ID NO: 3277112 - DNA, 25 bp, Homo sapien
tggtgtttcctgtagctctgtcttc

SEQ ID NO: 3277113 - DNA, 25 bp, Homo sapien
ctaaggaaaaagcgccctgccaggt

SEQ ID NO: 3277114 - DNA, 25 bp, Homo sapien
tctaaggaaaaagcgccctgccagg

SEQ ID NO: 3277115 - DNA, 25 bp, Homo sapien
aatctaaggaaaaagcgccctgcca

SEQ ID NO: 3277116 - DNA, 25 bp, Homo sapien
atctaaggaaaaagcgccctgccag

SEQ ID NO: 3277117 - DNA, 25 bp, Homo sapien
actgaagggttgtcctctatcagct

SEQ ID NO: 3277118 - DNA, 25 bp, Homo sapien
ctgactgaagggttgtcctctatca

SEQ ID NO: 3277119 - DNA, 25 bp, Homo sapien
agggttgtcctctatcagctgtatc

SEQ ID NO: 3277120 - DNA, 25 bp, Homo sapien
tcactgactgaagggttgtcctcta

SEQ ID NO: 3277121 - DNA, 25 bp, Homo sapien
ctgtaaaacgtggaaattgagctca

SEQ ID NO: 3277122 - DNA, 25 bp, Homo sapien
aaaacgtggaaattgagctcattta

SEQ ID NO: 3277123 - DNA, 25 bp, Homo sapien
gtaaaacgtggaaattgagctcatt

SEQ ID NO: 3277124 - DNA, 25 bp, Homo sapien
aacgtggaaattgagctcatttatc

SEQ ID NO: 3277125 - DNA, 25 bp, Homo sapien
aggaaactaaacttggtgtcatctg

SEQ ID NO: 3277126 - DNA, 25 bp, Homo sapien
aaactaaacttggtgtcatctgaat

SEQ ID NO: 3277127 - DNA, 25 bp, Homo sapien
caaggaaactaaacttggtgtcatc

SEQ ID NO: 3277128 - DNA, 25 bp, Homo sapien
gaaactaaacttggtgtcatctgaa

SEQ ID NO: 3277129 - DNA, 25 bp, Homo sapien
cagcctttgcctttggatgtgccac

SEQ ID NO: 3277130 - DNA, 25 bp, Homo sapien
gcctttgcctttggatgtgccacac

SEQ ID NO: 3277131 - DNA, 25 bp, Homo sapien
tttgcctttggatgtgccacactgc

SEQ ID NO: 3277132 - DNA, 25 bp, Homo sapien
gcctttggatgtgccacactgcttc

SEQ ID NO: 3277133 - DNA, 25 bp, Homo sapien
ttgtgatgaacctccaatattgcat

SEQ ID NO: 3277134 - DNA, 25 bp, Homo sapien
gtttgtgatgaacctccaatattgc

SEQ ID NO: 3277135 - DNA, 25 bp, Homo sapien
tttgtgatgaacctccaatattgca

SEQ ID NO: 3277136 - DNA, 25 bp, Homo sapien
tttactgataaactatcagtggcat

SEQ ID NO: 3277137 - DNA, 25 bp, Homo sapien
tgataaactatcagtggcatctaca

SEQ ID NO: 3277138 - DNA, 25 bp, Homo sapien
tactgataaactatcagtggcatct

SEQ ID NO: 3277139 - DNA, 25 bp, Homo sapien
taaactatcagtggcatctacatga

SEQ ID NO: 3277140 - DNA, 25 bp, Homo sapien
gtgtatcgagcattgccattattta

SEQ ID NO: 3277141 - DNA, 25 bp, Homo sapien
ctggaattaaatgaaatcgtgtatc

SEQ ID NO: 3277142 - DNA, 25 bp, Homo sapien
taaatgaaatcgtgtatcgagcatt

SEQ ID NO: 3277143 - DNA, 25 bp, Homo sapien
tgtatcgagcattgccattatttaa

SEQ ID NO: 3277144 - DNA, 25 bp, Homo sapien
ctgttctatttctccggcttcagtg

SEQ ID NO: 3277145 - DNA, 25 bp, Homo sapien
tgttctatttctccggcttcagtgc

SEQ ID NO: 3277146 - DNA, 25 bp, Homo sapien
tctatttctccggcttcagtgcctt

SEQ ID NO: 3277147 - DNA, 25 bp, Homo sapien
gttctatttctccggcttcagtgcc

SEQ ID NO: 3277148 - DNA, 25 bp, Homo sapien
taaggatcatgagagtaaagaacac

SEQ ID NO: 3277149 - DNA, 25 bp, Homo sapien
tgagacacctttgccacaaaattac

SEQ ID NO: 3277150 - DNA, 25 bp, Homo sapien
tcaaaacaatgaggcagtagcagaa

SEQ ID NO: 3277151 - DNA, 25 bp, Homo sapien
gaacactgaaaaattgagacacctt

SEQ ID NO: 3277152 - DNA, 25 bp, Homo sapien
tcatacggtacagcactgagaagct

SEQ ID NO: 3277153 - DNA, 25 bp, Homo sapien
ccttggtgtgagagaactgtagcct

SEQ ID NO: 3277154 - DNA, 25 bp, Homo sapien
gacattcactaaccacgcagcggaa

SEQ ID NO: 3277155 - DNA, 25 bp, Homo sapien
tttaacatgattttgaggctgcccc

SEQ ID NO: 3277156 - DNA, 25 bp, Homo sapien
aataagagtcaattttggcaatgcg

SEQ ID NO: 3277157 - DNA, 25 bp, Homo sapien
cataatcatcttcttgcggcacaga

SEQ ID NO: 3277158 - DNA, 25 bp, Homo sapien
caataaaccaagttgaacagggcaa

SEQ ID NO: 3277159 - DNA, 25 bp, Homo sapien
tgttctgcagtcttcaaagcaacag

SEQ ID NO: 3277160 - DNA, 25 bp, Homo sapien
gtactcagggttgtcatagtcagaa

SEQ ID NO: 3277161 - DNA, 25 bp, Homo sapien
gttccatattccatcaaggctgcaa

SEQ ID NO: 3277162 - DNA, 25 bp, Homo sapien
gacttcctggcaattgtactcaggg

SEQ ID NO: 3277163 - DNA, 25 bp, Homo sapien
gagatccatcgcagtcacataagaa

SEQ ID NO: 3277164 - DNA, 25 bp, Homo sapien
ttcaagtatagacccatgtgcctca

SEQ ID NO: 3277165 - DNA, 25 bp, Homo sapien
tatgcaaaaacgacttcacagttgg

SEQ ID NO: 3277166 - DNA, 25 bp, Homo sapien
tcaatatccctgtttagatggccaa

SEQ ID NO: 3277167 - DNA, 25 bp, Homo sapien
caagttacatctggctgtgcttacc

SEQ ID NO: 3277168 - DNA, 25 bp, Homo sapien
catggaatgtaggtctgaatagtga

SEQ ID NO: 3277169 - DNA, 25 bp, Homo sapien
gaaagaacaactgtcagaatgcatg

SEQ ID NO: 3277170 - DNA, 25 bp, Homo sapien
ggcactgcatctttattgatccaaa

SEQ ID NO: 3277171 - DNA, 25 bp, Homo sapien
aatagtgaaatatcccattcttctg

SEQ ID NO: 3277172 - DNA, 25 bp, Homo sapien
catttcactatttgagtattctttt

SEQ ID NO: 3277173 - DNA, 25 bp, Homo sapien
tcatttcactatttgagtattcttt

SEQ ID NO: 3277174 - DNA, 25 bp, Homo sapien
ttcactatttgagtattctttttac

SEQ ID NO: 3277175 - DNA, 25 bp, Homo sapien
tttcactatttgagtattcttttta

SEQ ID NO: 3277176 - DNA, 25 bp, Homo sapien
tataatctccagtatttaggatcag

SEQ ID NO: 3277177 - DNA, 25 bp, Homo sapien
cgtaaccctacaaatgcaaactgat

SEQ ID NO: 3277178 - DNA, 25 bp, Homo sapien
cagagatcgtgtgagtgatttcagt

SEQ ID NO: 3277179 - DNA, 25 bp, Homo sapien
tgatttcagttgagttccgtaaccc

SEQ ID NO: 3277180 - DNA, 25 bp, Homo sapien
atccatgggaaagttatgaagctga

SEQ ID NO: 3277181 - DNA, 25 bp, Homo sapien
ggacaggaatgttcatccatgggaa

SEQ ID NO: 3277182 - DNA, 25 bp, Homo sapien
tccagtggacaggaatgttcatcca

SEQ ID NO: 3277183 - DNA, 25 bp, Homo sapien
agcttgaaaattccagtggacagga

SEQ ID NO: 3277184 - DNA, 25 bp, Homo sapien
gagttgttatccagtgagcatcaga

SEQ ID NO: 3277185 - DNA, 25 bp, Homo sapien
taagcataagcactttcatggtact

SEQ ID NO: 3277186 - DNA, 25 bp, Homo sapien
tccaaattcgaagcagacgattagg

SEQ ID NO: 3277187 - DNA, 25 bp, Homo sapien
tagagtatacagaactcgtccatca

SEQ ID NO: 3277188 - DNA, 25 bp, Homo sapien
aaattttataggtatcagctccagt

SEQ ID NO: 3277189 - DNA, 25 bp, Homo sapien
attttataggtatcagctccagttt

SEQ ID NO: 3277190 - DNA, 25 bp, Homo sapien
gtttgcttaattattgtaaaagcac

SEQ ID NO: 3277191 - DNA, 25 bp, Homo sapien
ttgcttaattattgtaaaagcacca

SEQ ID NO: 3277192 - DNA, 25 bp, Homo sapien
tcagtttcaattactgtgggcctca

SEQ ID NO: 3277193 - DNA, 25 bp, Homo sapien
attggatcaactggtccaatgctgt

SEQ ID NO: 3277194 - DNA, 25 bp, Homo sapien
caactggtccaatgctgtttacata

SEQ ID NO: 3277195 - DNA, 25 bp, Homo sapien
aaacatcagtttcaattactgtggg

SEQ ID NO: 3277196 - DNA, 25 bp, Homo sapien
catacccgcaagtggagttgcagag

SEQ ID NO: 3277197 - DNA, 25 bp, Homo sapien
aatacaggccgagaatttcaaaagc

SEQ ID NO: 3277198 - DNA, 25 bp, Homo sapien
tactaccagtgagaaacattgaacg

SEQ ID NO: 3277199 - DNA, 25 bp, Homo sapien
gacatagcagaggtcaaacataccc

SEQ ID NO: 3277200 - DNA, 25 bp, Homo sapien
ttcagaatttgtgtgatatctcctt

SEQ ID NO: 3277201 - DNA, 25 bp, Homo sapien
tgttcaccgttaaatcctcatcatc

SEQ ID NO: 3277202 - DNA, 25 bp, Homo sapien
tcatgaatttttggggccaagaccc

SEQ ID NO: 3277203 - DNA, 25 bp, Homo sapien
aatttgtgtgatatctccttcatga

SEQ ID NO: 3277204 - DNA, 25 bp, Homo sapien
agaagaccaacctcacccctctact

SEQ ID NO: 3277205 - DNA, 25 bp, Homo sapien
actttgactccgcagaagaaaaggg

SEQ ID NO: 3277206 - DNA, 25 bp, Homo sapien
tgcagggtcagtaacaagaagacca

SEQ ID NO: 3277207 - DNA, 25 bp, Homo sapien
cagtttcccaaatgcagggtcagta

SEQ ID NO: 3277208 - DNA, 25 bp, Homo sapien
caaacaggtaggatgcgactcccag

SEQ ID NO: 3277209 - DNA, 25 bp, Homo sapien
tagctcaattctcccagccaggact

SEQ ID NO: 3277210 - DNA, 25 bp, Homo sapien
gaatcgcttttttacgtgtgctgca

SEQ ID NO: 3277211 - DNA, 25 bp, Homo sapien
agagtgtggaaaggcagtgcacctc

SEQ ID NO: 3277212 - DNA, 25 bp, Homo sapien
tggaacaactgtacaggcgaagacg

SEQ ID NO: 3277213 - DNA, 25 bp, Homo sapien
agcagagcccgacggttgccatggt

SEQ ID NO: 3277214 - DNA, 25 bp, Homo sapien
aggctctgctttgagttcctagcag

SEQ ID NO: 3277215 - DNA, 25 bp, Homo sapien
gttcctagcagagcccgacggttgc

SEQ ID NO: 3277216 - DNA, 25 bp, Homo sapien
ttttggcatagaaactttcttgcat

SEQ ID NO: 3277217 - DNA, 25 bp, Homo sapien
gaaagacactaaaaaagcgaacaga

SEQ ID NO: 3277218 - DNA, 25 bp, Homo sapien
tttttggcatagaaactttcttgca

SEQ ID NO: 3277219 - DNA, 25 bp, Homo sapien
agtccttcccatccaatcgccatag

SEQ ID NO: 3277220 - DNA, 25 bp, Homo sapien
acaagcatgggccattgaattctat

SEQ ID NO: 3277221 - DNA, 25 bp, Homo sapien
caatcgccatagaacatgaataata

SEQ ID NO: 3277222 - DNA, 25 bp, Homo sapien
tttgtaacttcattcagtccttccc

SEQ ID NO: 3277223 - DNA, 25 bp, Homo sapien
cgttggggttgaactcaacattcac

SEQ ID NO: 3277224 - DNA, 25 bp, Homo sapien
gttggggttgaactcaacattcaca

SEQ ID NO: 3277225 - DNA, 25 bp, Homo sapien
aattcgttggggttgaactcaacat

SEQ ID NO: 3277226 - DNA, 25 bp, Homo sapien
ttcgttggggttgaactcaacattc

SEQ ID NO: 3277227 - DNA, 25 bp, Homo sapien
atttcatgacataacgaccaatgaa

SEQ ID NO: 3277228 - DNA, 25 bp, Homo sapien
catgacataacgaccaatgaaaagc

SEQ ID NO: 3277229 - DNA, 25 bp, Homo sapien
atgacataacgaccaatgaaaagct

SEQ ID NO: 3277230 - DNA, 25 bp, Homo sapien
ttcatgacataacgaccaatgaaaa

SEQ ID NO: 3277231 - DNA, 25 bp, Homo sapien
gccaaaatgtatgagaaatctgttc

SEQ ID NO: 3277232 - DNA, 25 bp, Homo sapien
gccttggaatgaaagcctgtggaca

SEQ ID NO: 3277233 - DNA, 25 bp, Homo sapien
tcccaaaccagagccttggaatgaa

SEQ ID NO: 3277234 - DNA, 25 bp, Homo sapien
tgtatgagaaatctgttcccaaacc

SEQ ID NO: 3277235 - DNA, 25 bp, Homo sapien
aaatacctccaaacatgtagatgag

SEQ ID NO: 3277236 - DNA, 25 bp, Homo sapien
gagtaacctggtaaaggatcatggc

SEQ ID NO: 3277237 - DNA, 25 bp, Homo sapien
aaggatcatggcacattgagtcagc

SEQ ID NO: 3277238 - DNA, 25 bp, Homo sapien
catggcacattgagtcagcttcacc

SEQ ID NO: 3277239 - DNA, 25 bp, Homo sapien
tgcaaggtttgattatcacccaaac

SEQ ID NO: 3277240 - DNA, 25 bp, Homo sapien
ttgcaaggtttgattatcacccaaa

SEQ ID NO: 3277241 - DNA, 25 bp, Homo sapien
gcaaggtttgattatcacccaaacc

SEQ ID NO: 3277242 - DNA, 25 bp, Homo sapien
taaggacttaactgtggatggtaaa

SEQ ID NO: 3277243 - DNA, 25 bp, Homo sapien
ccaataagtatactgtcacccagaa

SEQ ID NO: 3277244 - DNA, 25 bp, Homo sapien
tatgatcaactagtggcctttccca

SEQ ID NO: 3277245 - DNA, 25 bp, Homo sapien
taaaatcaagtgtagtgcaggcacc

SEQ ID NO: 3277246 - DNA, 25 bp, Homo sapien
cgttgactagtatgtgatgggctct

SEQ ID NO: 3277247 - DNA, 25 bp, Homo sapien
catacctaggaattacacacataca

SEQ ID NO: 3277248 - DNA, 25 bp, Homo sapien
ccagagcttcaagaatcacacagtg

SEQ ID NO: 3277249 - DNA, 25 bp, Homo sapien
acaagcctccgttgagaaacctggc

SEQ ID NO: 3277250 - DNA, 25 bp, Homo sapien
ataatttatctactttctcggaagt

SEQ ID NO: 3277251 - DNA, 25 bp, Homo sapien
tggtttaattaacaacagtctcctg

SEQ ID NO: 3277252 - DNA, 25 bp, Homo sapien
cttactatgatagaataacgactct

SEQ ID NO: 3277253 - DNA, 25 bp, Homo sapien
tactttagtattttagttatgatgc

SEQ ID NO: 3277254 - DNA, 25 bp, Homo sapien
gattatggattacctcttgtgaggg

SEQ ID NO: 3277255 - DNA, 25 bp, Homo sapien
gaatctaggcataatacacaatctt

SEQ ID NO: 3277256 - DNA, 25 bp, Homo sapien
aaaacaccatcgtaaaggtgcatgt

SEQ ID NO: 3277257 - DNA, 25 bp, Homo sapien
ggttttatacaagcatgcaaagcat

SEQ ID NO: 3277258 - DNA, 25 bp, Homo sapien
tctgtctgcagttccatgagttagc

SEQ ID NO: 3277259 - DNA, 25 bp, Homo sapien
taattaacatcctttcgggctgact

SEQ ID NO: 3277260 - DNA, 25 bp, Homo sapien
cacaaagggttgtacaggatcccca

SEQ ID NO: 3277261 - DNA, 25 bp, Homo sapien
caatggctgttttcgcatggagtgc

SEQ ID NO: 3277262 - DNA, 25 bp, Homo sapien
taaatatgtagcccagtaaactaaa

SEQ ID NO: 3277263 - DNA, 25 bp, Homo sapien
aaatatgtagcccagtaaactaaat

SEQ ID NO: 3277264 - DNA, 25 bp, Homo sapien
caacagccactgcataagcgttgtt

SEQ ID NO: 3277265 - DNA, 25 bp, Homo sapien
tctgtatcataacggaagccttttc

SEQ ID NO: 3277266 - DNA, 25 bp, Homo sapien
gattcggggcataattggcaacagc

SEQ ID NO: 3277267 - DNA, 25 bp, Homo sapien
tctggcgtggttgcactcttggaga

SEQ ID NO: 3277268 - DNA, 25 bp, Homo sapien
tttcttgctttggtgccacgctttt

SEQ ID NO: 3277269 - DNA, 25 bp, Homo sapien
gctttggtgccacgcttttagccat

SEQ ID NO: 3277270 - DNA, 25 bp, Homo sapien
ttgctttggtgccacgcttttagcc

SEQ ID NO: 3277271 - DNA, 25 bp, Homo sapien
tcccctgaaataacctcagttttca

SEQ ID NO: 3277272 - DNA, 25 bp, Homo sapien
catgagaaagctatatacttggacc

SEQ ID NO: 3277273 - DNA, 25 bp, Homo sapien
ggaccatattagcttagctccttga

SEQ ID NO: 3277274 - DNA, 25 bp, Homo sapien
tgaaggttaaacagtccatccactt

SEQ ID NO: 3277275 - DNA, 25 bp, Homo sapien
tcttggaataaactgggccatgaga

SEQ ID NO: 3277276 - DNA, 25 bp, Homo sapien
aatttctatggcttacaaaattaag

SEQ ID NO: 3277277 - DNA, 25 bp, Homo sapien
tttctatggcttacaaaattaagga

SEQ ID NO: 3277278 - DNA, 25 bp, Homo sapien
atatttatttgttggctccgttagt

SEQ ID NO: 3277279 - DNA, 25 bp, Homo sapien
tatttgttggctccgttagtaggga

SEQ ID NO: 3277280 - DNA, 25 bp, Homo sapien
aaaattcctaagcattccagcaccg

SEQ ID NO: 3277281 - DNA, 25 bp, Homo sapien
tacagctcaacagatgctacggagt

SEQ ID NO: 3277282 - DNA, 25 bp, Homo sapien
tcagacaggtagatcggagttcaag

SEQ ID NO: 3277283 - DNA, 25 bp, Homo sapien
cctaaaggatttcaggcaagaacac

SEQ ID NO: 3277284 - DNA, 25 bp, Homo sapien
aatgataacacggaagctctcactt

SEQ ID NO: 3277285 - DNA, 25 bp, Homo sapien
ataatgataacacggaagctctcac

SEQ ID NO: 3277286 - DNA, 25 bp, Homo sapien
tgataacacggaagctctcacttac

SEQ ID NO: 3277287 - DNA, 25 bp, Homo sapien
taataatgataacacggaagctctc

SEQ ID NO: 3277288 - DNA, 25 bp, Homo sapien
cagtccatggcagttgcataagcca

SEQ ID NO: 3277289 - DNA, 25 bp, Homo sapien
ttttggtgaagtaattaacagttgc

SEQ ID NO: 3277290 - DNA, 25 bp, Homo sapien
cactttggggagagaattccgagca

SEQ ID NO: 3277291 - DNA, 25 bp, Homo sapien
ttccgagcactgatgcttagagttg

SEQ ID NO: 3277292 - DNA, 25 bp, Homo sapien
aaagataggaatcgaaaacatcaat

SEQ ID NO: 3277293 - DNA, 25 bp, Homo sapien
taggaatcgaaaacatcaataggta

SEQ ID NO: 3277294 - DNA, 25 bp, Homo sapien
gcaaaagaaaagataggaatcgaaa

SEQ ID NO: 3277295 - DNA, 25 bp, Homo sapien
gataggaatcgaaaacatcaatagg

SEQ ID NO: 3277296 - DNA, 25 bp, Homo sapien
tgtacctctctaccaacaatgtgca

SEQ ID NO: 3277297 - DNA, 25 bp, Homo sapien
gtacctctctaccaacaatgtgcat

SEQ ID NO: 3277298 - DNA, 25 bp, Homo sapien
catgtacctctctaccaacaatgtg

SEQ ID NO: 3277299 - DNA, 25 bp, Homo sapien
tccatgtacctctctaccaacaatg

SEQ ID NO: 3277300 - DNA, 25 bp, Homo sapien
ttgcttcagacactttcctaattgg

SEQ ID NO: 3277301 - DNA, 25 bp, Homo sapien
ttcctaattggcagtgagctaactg

SEQ ID NO: 3277302 - DNA, 25 bp, Homo sapien
gcagtgagctaactgggatgagact

SEQ ID NO: 3277303 - DNA, 25 bp, Homo sapien
tttgcttcagacactttcctaattg

SEQ ID NO: 3277304 - DNA, 25 bp, Homo sapien
gcagctttgtgcgccgtgtttccca

SEQ ID NO: 3277305 - DNA, 25 bp, Homo sapien
ttgtgcgccgtgtttcccataaact

SEQ ID NO: 3277306 - DNA, 25 bp, Homo sapien
agcagctttgtgcgccgtgtttccc

SEQ ID NO: 3277307 - DNA, 25 bp, Homo sapien
gctttgtgcgccgtgtttcccataa

SEQ ID NO: 3277308 - DNA, 25 bp, Homo sapien
ctttttgttcactgagcttcaaata

SEQ ID NO: 3277309 - DNA, 25 bp, Homo sapien
ttttgttcactgagcttcaaatatt

SEQ ID NO: 3277310 - DNA, 25 bp, Homo sapien
tttttgttcactgagcttcaaatat

SEQ ID NO: 3277311 - DNA, 25 bp, Homo sapien
aattcatcctctgcaaatatgtcat

SEQ ID NO: 3277312 - DNA, 25 bp, Homo sapien
attcatcctctgcaaatatgtcata

SEQ ID NO: 3277313 - DNA, 25 bp, Homo sapien
ttcatcctctgcaaatatgtcatat

SEQ ID NO: 3277314 - DNA, 25 bp, Homo sapien
aatgacagtcatgatgcaaggcaga

SEQ ID NO: 3277315 - DNA, 25 bp, Homo sapien
gttaagccagaatgaaacttgggag

SEQ ID NO: 3277316 - DNA, 25 bp, Homo sapien
tgaatcacaaaatacccaatttttc

SEQ ID NO: 3277317 - DNA, 25 bp, Homo sapien
tgcaaggcagataggtttgaatcac

SEQ ID NO: 3277318 - DNA, 25 bp, Homo sapien
gatttaacctagagccatcaggagc

SEQ ID NO: 3277319 - DNA, 25 bp, Homo sapien
caggagcaacctgtactgaatcaga

SEQ ID NO: 3277320 - DNA, 25 bp, Homo sapien
ggcccagcaggtcatattgatttaa

SEQ ID NO: 3277321 - DNA, 25 bp, Homo sapien
cctttccgattgattggcccagcag

SEQ ID NO: 3277322 - DNA, 25 bp, Homo sapien
gccaaaggtagcatatgaagacact

SEQ ID NO: 3277323 - DNA, 25 bp, Homo sapien
gagtctgttagaatcactgggccct

SEQ ID NO: 3277324 - DNA, 25 bp, Homo sapien
catcaatctagtgctacacgaacgg

SEQ ID NO: 3277325 - DNA, 25 bp, Homo sapien
cacgaacggttgtgtatttcataca

SEQ ID NO: 3277326 - DNA, 25 bp, Homo sapien
ctccaaggaactcctggtctaattt

SEQ ID NO: 3277327 - DNA, 25 bp, Homo sapien
ggaactcctggtctaattttacaca

SEQ ID NO: 3277328 - DNA, 25 bp, Homo sapien
gaactcctggtctaattttacacat

SEQ ID NO: 3277329 - DNA, 25 bp, Homo sapien
ttgggaaatcctccaagtgcattgg

SEQ ID NO: 3277330 - DNA, 25 bp, Homo sapien
ttcagaggacatgaatgagcatcca

SEQ ID NO: 3277331 - DNA, 25 bp, Homo sapien
ggaaatcctccaagtgcattgggca

SEQ ID NO: 3277332 - DNA, 25 bp, Homo sapien
gccaaatttcagaggacatgaatga

SEQ ID NO: 3277333 - DNA, 25 bp, Homo sapien
tactctcaacagactcgatagaggt

SEQ ID NO: 3277334 - DNA, 25 bp, Homo sapien
aatcacagcagtaggctcattcata

SEQ ID NO: 3277335 - DNA, 25 bp, Homo sapien
tagaggtagagcattaatcacagca

SEQ ID NO: 3277336 - DNA, 25 bp, Homo sapien
gaaaaatcactcgtcattactctca

SEQ ID NO: 3277337 - DNA, 25 bp, Homo sapien
taaagacaaagtggatatagcaggt

SEQ ID NO: 3277338 - DNA, 25 bp, Homo sapien
gaggagctcccttcaacatatgtga

SEQ ID NO: 3277339 - DNA, 25 bp, Homo sapien
agaggcagaaagactagctagcact

SEQ ID NO: 3277340 - DNA, 25 bp, Homo sapien
tagcataggactgtattgttgtccc

SEQ ID NO: 3277341 - DNA, 25 bp, Homo sapien
ttagtcgaaggatattcataggacc

SEQ ID NO: 3277342 - DNA, 25 bp, Homo sapien
tcccattgtgaaaaaaggtatctgg

SEQ ID NO: 3277343 - DNA, 25 bp, Homo sapien
catggtatacagcagagtcccatca

SEQ ID NO: 3277344 - DNA, 25 bp, Homo sapien
gtcccatcatcctgaattcgaagca

SEQ ID NO: 3277345 - DNA, 25 bp, Homo sapien
gtaaatgttgtagacacaagacacg

SEQ ID NO: 3277346 - DNA, 25 bp, Homo sapien
tgtagacacaagacacggtaaaatt

SEQ ID NO: 3277347 - DNA, 25 bp, Homo sapien
aaatagtaaatgttgtagacacaag

SEQ ID NO: 3277348 - DNA, 25 bp, Homo sapien
tgttgtagacacaagacacggtaaa

SEQ ID NO: 3277349 - DNA, 25 bp, Homo sapien
tgagatttgaaattcagaaactgtc

SEQ ID NO: 3277350 - DNA, 25 bp, Homo sapien
ctgagatttgaaattcagaaactgt

SEQ ID NO: 3277351 - DNA, 25 bp, Homo sapien
agaagaggaagagtagatcttggcc

SEQ ID NO: 3277352 - DNA, 25 bp, Homo sapien
gcctgtctccacagtatatccctta

SEQ ID NO: 3277353 - DNA, 25 bp, Homo sapien
gaagagtagatcttggcctgtctcc

SEQ ID NO: 3277354 - DNA, 25 bp, Homo sapien
gaggaagagtagatcttggcctgtc

SEQ ID NO: 3277355 - DNA, 25 bp, Homo sapien
ggtatgcactgaagcattgccgtaa

SEQ ID NO: 3277356 - DNA, 25 bp, Homo sapien
gctgaaattagtctggactggactc

SEQ ID NO: 3277357 - DNA, 25 bp, Homo sapien
tgctgatttcagtcacctgaatctc

SEQ ID NO: 3277358 - DNA, 25 bp, Homo sapien
ctagatggcctaagagactgatgct

SEQ ID NO: 3277359 - DNA, 25 bp, Homo sapien
cagaatcccattttggcagagggct

SEQ ID NO: 3277360 - DNA, 25 bp, Homo sapien
agaatcccattttggcagagggctg

SEQ ID NO: 3277361 - DNA, 25 bp, Homo sapien
cagagggctgtagcacagatatctg

SEQ ID NO: 3277362 - DNA, 25 bp, Homo sapien
tggcagagggctgtagcacagatat

SEQ ID NO: 3277363 - DNA, 25 bp, Homo sapien
cactgtggccctagaagtagatatt

SEQ ID NO: 3277364 - DNA, 25 bp, Homo sapien
cagcagtatccctccagtgaggtca

SEQ ID NO: 3277365 - DNA, 25 bp, Homo sapien
cagaattcacaggtcttagagggaa

SEQ ID NO: 3277366 - DNA, 25 bp, Homo sapien
gtagctgcacgttcctgtagcagca

SEQ ID NO: 3277367 - DNA, 25 bp, Homo sapien
tctgtatctgagacagggccaaaac

SEQ ID NO: 3277368 - DNA, 25 bp, Homo sapien
tatctgtatctgagacagggccaaa

SEQ ID NO: 3277369 - DNA, 25 bp, Homo sapien
tgtatctgagacagggccaaaactg

SEQ ID NO: 3277370 - DNA, 25 bp, Homo sapien
catatctgtatctgagacagggcca

SEQ ID NO: 3277371 - DNA, 25 bp, Homo sapien
aagtgtcacatcaatgccatatcgt

SEQ ID NO: 3277372 - DNA, 25 bp, Homo sapien
tatgaatgtaccaataatgcgcttt

SEQ ID NO: 3277373 - DNA, 25 bp, Homo sapien
caagccttggaatcaaagagatcta

SEQ ID NO: 3277374 - DNA, 25 bp, Homo sapien
gggcatgtaagatcccaagccttgg

SEQ ID NO: 3277375 - DNA, 25 bp, Homo sapien
tcctgggagctttggaaaaagggca

SEQ ID NO: 3277376 - DNA, 25 bp, Homo sapien
gagaaatgggttctacttgccaagt

SEQ ID NO: 3277377 - DNA, 25 bp, Homo sapien
gaagatgacttgcaccctgagaaat

SEQ ID NO: 3277378 - DNA, 25 bp, Homo sapien
gatatgacctgtgtcaccaaacagt

SEQ ID NO: 3277379 - DNA, 25 bp, Homo sapien
gccaaaaatacctcctagagtcctg

SEQ ID NO: 3277380 - DNA, 25 bp, Homo sapien
tgagtcagcaactgtattccatgga

SEQ ID NO: 3277381 - DNA, 25 bp, Homo sapien
tgtaaatcctaaatgaccctccctg

SEQ ID NO: 3277382 - DNA, 25 bp, Homo sapien
tggcaaacgcggtgaacatctgtgt

SEQ ID NO: 3277383 - DNA, 25 bp, Homo sapien
gattatcgtaaccatccagaagtct

SEQ ID NO: 3277384 - DNA, 25 bp, Homo sapien
gaagtctgtcaagaattctcgtaaa

SEQ ID NO: 3277385 - DNA, 25 bp, Homo sapien
taagccgattatcgtaaccatccag

SEQ ID NO: 3277386 - DNA, 25 bp, Homo sapien
ctcccagtcctggtctaagccgatt

SEQ ID NO: 3277387 - DNA, 25 bp, Homo sapien
gggtatacctccacccaatggccaa

SEQ ID NO: 3277388 - DNA, 25 bp, Homo sapien
caagtgcaatataagcatcagggaa

SEQ ID NO: 3277389 - DNA, 25 bp, Homo sapien
gggaaactccactggctatgtgcca

SEQ ID NO: 3277390 - DNA, 25 bp, Homo sapien
cacagctgcagagatccttagagcc

SEQ ID NO: 3277391 - DNA, 25 bp, Homo sapien
ctggcagggtcccacaccaagaaaa

SEQ ID NO: 3277392 - DNA, 25 bp, Homo sapien
aagaaaacaaaaagcaggaactgca

SEQ ID NO: 3277393 - DNA, 25 bp, Homo sapien
gcagggtcccacaccaagaaaacaa

SEQ ID NO: 3277394 - DNA, 25 bp, Homo sapien
agaaaacaaaaagcaggaactgcat

SEQ ID NO: 3277395 - DNA, 25 bp, Homo sapien
tgtagatgttcaattttgtcttcat

SEQ ID NO: 3277396 - DNA, 25 bp, Homo sapien
ttgtagatgttcaattttgtcttca

SEQ ID NO: 3277397 - DNA, 25 bp, Homo sapien
gttgtagatgttcaattttgtcttc

SEQ ID NO: 3277398 - DNA, 25 bp, Homo sapien
gtcttagaggcagccgggttccgat

SEQ ID NO: 3277399 - DNA, 25 bp, Homo sapien
caaacactgttttgcgcacacgtaa

SEQ ID NO: 3277400 - DNA, 25 bp, Homo sapien
gagagatgggtacttcacgccacaa

SEQ ID NO: 3277401 - DNA, 25 bp, Homo sapien
taacaccctggactttaaactggca

SEQ ID NO: 3277402 - DNA, 25 bp, Homo sapien
tccttttgccctgatcttgacgaga

SEQ ID NO: 3277403 - DNA, 25 bp, Homo sapien
gaccgagactgcagcagccaagaga

SEQ ID NO: 3277404 - DNA, 25 bp, Homo sapien
ccaagagagcgtggagcgatgggct

SEQ ID NO: 3277405 - DNA, 25 bp, Homo sapien
tgaaacggcaagcagaattcggtgt

SEQ ID NO: 3277406 - DNA, 25 bp, Homo sapien
gcgcagacccgggcggcgtcgggcg

SEQ ID NO: 3277407 - DNA, 25 bp, Homo sapien
cctggcactagcagcggcgcagacc

SEQ ID NO: 3277408 - DNA, 25 bp, Homo sapien
gcctgggtgcgctcggagcgccgct

SEQ ID NO: 3277409 - DNA, 25 bp, Homo sapien
cccacacctcgccggaggagcggag

SEQ ID NO: 3277410 - DNA, 25 bp, Homo sapien
tccccaccgtttgagacaaaggcat

SEQ ID NO: 3277411 - DNA, 25 bp, Homo sapien
cagggtccttgccatggtagagttc

SEQ ID NO: 3277412 - DNA, 25 bp, Homo sapien
ggagtgccccttcttattggaagca

SEQ ID NO: 3277413 - DNA, 25 bp, Homo sapien
cctgtctgcgataggcacattggtc

SEQ ID NO: 3277414 - DNA, 25 bp, Homo sapien
atttctcagaatattggaagcactc

SEQ ID NO: 3277415 - DNA, 25 bp, Homo sapien
cccaatgcccctttggcattttgca

SEQ ID NO: 3277416 - DNA, 25 bp, Homo sapien
gcccaatgcccctttggcattttgc

SEQ ID NO: 3277417 - DNA, 25 bp, Homo sapien
ttctcagaatattggaagcactctg

SEQ ID NO: 3277418 - DNA, 25 bp, Homo sapien
taaaggcacattggattccaagtct

SEQ ID NO: 3277419 - DNA, 25 bp, Homo sapien
gctgctgtgacttctatacataaag

SEQ ID NO: 3277420 - DNA, 25 bp, Homo sapien
ctgctgtgacttctatacataaagg

SEQ ID NO: 3277421 - DNA, 25 bp, Homo sapien
ataaaggcacattggattccaagtc

SEQ ID NO: 3277422 - DNA, 25 bp, Homo sapien
tgatgcattcctttctctaactctg

SEQ ID NO: 3277423 - DNA, 25 bp, Homo sapien
ctctaactctgcagacccacttctc

SEQ ID NO: 3277424 - DNA, 25 bp, Homo sapien
ttccatttccctttgatgcattcct

SEQ ID NO: 3277425 - DNA, 25 bp, Homo sapien
tctaactctgcagacccacttctcc

SEQ ID NO: 3277426 - DNA, 25 bp, Homo sapien
taagctgattctgtacacctttgta

SEQ ID NO: 3277427 - DNA, 25 bp, Homo sapien
gtgaaatacatgaactagaaagcat

SEQ ID NO: 3277428 - DNA, 25 bp, Homo sapien
cacctttgtactgatatggtatcag

SEQ ID NO: 3277429 - DNA, 25 bp, Homo sapien
tccttgcagttgatggatataagct

SEQ ID NO: 3277430 - DNA, 25 bp, Homo sapien
tagtaatggtaacaagaggtctttc

SEQ ID NO: 3277431 - DNA, 25 bp, Homo sapien
gcttctagtaatggtaacaagaggt

SEQ ID NO: 3277432 - DNA, 25 bp, Homo sapien
caagaggtctttctaaaatctccat

SEQ ID NO: 3277433 - DNA, 25 bp, Homo sapien
acaagaggtctttctaaaatctcca

SEQ ID NO: 3277434 - DNA, 25 bp, Homo sapien
ccctgtattatccaattatagtata

SEQ ID NO: 3277435 - DNA, 25 bp, Homo sapien
tccctgtattatccaattatagtat

SEQ ID NO: 3277436 - DNA, 25 bp, Homo sapien
cttccctgtattatccaattatagt

SEQ ID NO: 3277437 - DNA, 25 bp, Homo sapien
atccacatagaccaattgcaatcag

SEQ ID NO: 3277438 - DNA, 25 bp, Homo sapien
gaccaattgcaatcagtattgctct

SEQ ID NO: 3277439 - DNA, 25 bp, Homo sapien
tgccattgtaaaagtgctgttattt

SEQ ID NO: 3277440 - DNA, 25 bp, Homo sapien
catagaccaattgcaatcagtattg

SEQ ID NO: 3277441 - DNA, 25 bp, Homo sapien
ttctgatcaatagcctttttataat

SEQ ID NO: 3277442 - DNA, 25 bp, Homo sapien
gatcaatagcctttttataatcatc

SEQ ID NO: 3277443 - DNA, 25 bp, Homo sapien
ttggaaacttacttcccagtctgtc

SEQ ID NO: 3277444 - DNA, 25 bp, Homo sapien
tggaaacttacttcccagtctgtct

SEQ ID NO: 3277445 - DNA, 25 bp, Homo sapien
gcactccatatgtttgatttcgaat

SEQ ID NO: 3277446 - DNA, 25 bp, Homo sapien
agtatccagcactccatatgtttga

SEQ ID NO: 3277447 - DNA, 25 bp, Homo sapien
tttggctgcagtatccagcactcca

SEQ ID NO: 3277448 - DNA, 25 bp, Homo sapien
ctcaataacagtttggtagggacgg

SEQ ID NO: 3277449 - DNA, 25 bp, Homo sapien
tccataggtattttgtagccttccc

SEQ ID NO: 3277450 - DNA, 25 bp, Homo sapien
tcataaagaaaccttcatcactgct

SEQ ID NO: 3277451 - DNA, 25 bp, Homo sapien
aaagctttaacccagtgtcgttcat

SEQ ID NO: 3277452 - DNA, 25 bp, Homo sapien
cagtgtccatggaccaacttccata

SEQ ID NO: 3277453 - DNA, 25 bp, Homo sapien
tgagtgcgaaggctccaccgttttt

SEQ ID NO: 3277454 - DNA, 25 bp, Homo sapien
tgagcaaagcgtacaaaggttccaa

SEQ ID NO: 3277455 - DNA, 25 bp, Homo sapien
tttgagcaaagcgtacaaaggttcc

SEQ ID NO: 3277456 - DNA, 25 bp, Homo sapien
caaaaagttggcattgagtgcgaag

SEQ ID NO: 3277457 - DNA, 25 bp, Homo sapien
cttgatgcctcgctgtgtgagcgcc

SEQ ID NO: 3277458 - DNA, 25 bp, Homo sapien
caaacactgtcttgatgcctcgctg

SEQ ID NO: 3277459 - DNA, 25 bp, Homo sapien
ggactgctcggatcgcttcgtcaaa

SEQ ID NO: 3277460 - DNA, 25 bp, Homo sapien
ctgtcttgatgcctcgctgtgtgag

SEQ ID NO: 3277461 - DNA, 25 bp, Homo sapien
ccttagccatggctagaccctgcgg

SEQ ID NO: 3277462 - DNA, 25 bp, Homo sapien
ttagccatggctagaccctgcggat

SEQ ID NO: 3277463 - DNA, 25 bp, Homo sapien
gccatggctagaccctgcggatagg

SEQ ID NO: 3277464 - DNA, 25 bp, Homo sapien
agccatggctagaccctgcggatag

SEQ ID NO: 3277465 - DNA, 25 bp, Homo sapien
ggaaatgcattggttgtgtaactga

SEQ ID NO: 3277466 - DNA, 25 bp, Homo sapien
tagggatatattctccaggaaatgc

SEQ ID NO: 3277467 - DNA, 25 bp, Homo sapien
ggttgtgtaactgatcagtaggcaa

SEQ ID NO: 3277468 - DNA, 25 bp, Homo sapien
aactgatcagtaggcaagttttacc

SEQ ID NO: 3277469 - DNA, 25 bp, Homo sapien
gcatcagggccgctcgctgggccgc

SEQ ID NO: 3277470 - DNA, 25 bp, Homo sapien
atcagggccgctcgctgggccgcgg

SEQ ID NO: 3277471 - DNA, 25 bp, Homo sapien
ctgcatcagggccgctcgctgggcc

SEQ ID NO: 3277472 - DNA, 25 bp, Homo sapien
gggccgcggcggcggcggcagggcg

SEQ ID NO: 3277473 - DNA, 25 bp, Homo sapien
ctgggtgccggggccgctgtccacg

SEQ ID NO: 3277474 - DNA, 25 bp, Homo sapien
ctggaagccgatgcccggcagcggc

SEQ ID NO: 3277475 - DNA, 25 bp, Homo sapien
ccgcctcgccctccgcggactggaa

SEQ ID NO: 3277476 - DNA, 25 bp, Homo sapien
gccctccgcggactggaagccgatg

SEQ ID NO: 3277477 - DNA, 25 bp, Homo sapien
attttaataagcagtagagtgctta

SEQ ID NO: 3277478 - DNA, 25 bp, Homo sapien
ttttaataagcagtagagtgcttac

SEQ ID NO: 3277479 - DNA, 25 bp, Homo sapien
tattttaataagcagtagagtgctt

SEQ ID NO: 3277480 - DNA, 25 bp, Homo sapien
tctgtcattacagcaactgtgatgg

SEQ ID NO: 3277481 - DNA, 25 bp, Homo sapien
ttttaaacaattctgtcattacagc

SEQ ID NO: 3277482 - DNA, 25 bp, Homo sapien
attctgtcattacagcaactgtgat

SEQ ID NO: 3277483 - DNA, 25 bp, Homo sapien
ttaaacaattctgtcattacagcaa

SEQ ID NO: 3277484 - DNA, 25 bp, Homo sapien
caacaggggataggttccattctat

SEQ ID NO: 3277485 - DNA, 25 bp, Homo sapien
cactcttttggggtaactctgccaa

SEQ ID NO: 3277486 - DNA, 25 bp, Homo sapien
ctctgccaacaggggataggttcca

SEQ ID NO: 3277487 - DNA, 25 bp, Homo sapien
ccactcttttggggtaactctgcca

SEQ ID NO: 3277488 - DNA, 25 bp, Homo sapien
gaaagcagttccactggctagcaca

SEQ ID NO: 3277489 - DNA, 25 bp, Homo sapien
gaatgctttgaatcttgagactgct

SEQ ID NO: 3277490 - DNA, 25 bp, Homo sapien
gctatgtcttgccatgctttgcaga

SEQ ID NO: 3277491 - DNA, 25 bp, Homo sapien
cactggctagcacagcattaccata

SEQ ID NO: 3277492 - DNA, 25 bp, Homo sapien
catgaaggattgcagttgccttcag

SEQ ID NO: 3277493 - DNA, 25 bp, Homo sapien
gaaggattgcagttgccttcagcta

SEQ ID NO: 3277494 - DNA, 25 bp, Homo sapien
gttgccttcagctactggtctattt

SEQ ID NO: 3277495 - DNA, 25 bp, Homo sapien
gattgcagttgccttcagctactgg

SEQ ID NO: 3277496 - DNA, 25 bp, Homo sapien
tcctgtttctgttacggtaacattc

SEQ ID NO: 3277497 - DNA, 25 bp, Homo sapien
aatttgtcagtcattcccactgttt

SEQ ID NO: 3277498 - DNA, 25 bp, Homo sapien
cttcactaaacacacagtctccttt

SEQ ID NO: 3277499 - DNA, 25 bp, Homo sapien
ccacatatagattatatcgctttaa

SEQ ID NO: 3277500 - DNA, 25 bp, Homo sapien
ttctcttctagaactgctactagaa

SEQ ID NO: 3277501 - DNA, 25 bp, Homo sapien
actgctactagaagattctttagca

SEQ ID NO: 3277502 - DNA, 25 bp, Homo sapien
ttctagaactgctactagaagattc

SEQ ID NO: 3277503 - DNA, 25 bp, Homo sapien
ctgctactagaagattctttagcat

SEQ ID NO: 3277504 - DNA, 25 bp, Homo sapien
gattttccagaatccatggacagct

SEQ ID NO: 3277505 - DNA, 25 bp, Homo sapien
taggctgacctgaatatttcctctc

SEQ ID NO: 3277506 - DNA, 25 bp, Homo sapien
ctagaggtatgttttagccaaacaa

SEQ ID NO: 3277507 - DNA, 25 bp, Homo sapien
caataactggaaatatgtgccctcc

SEQ ID NO: 3277508 - DNA, 25 bp, Homo sapien
cacgtggcataaaagagagagttcc

SEQ ID NO: 3277509 - DNA, 25 bp, Homo sapien
gcactgcaaattctccttgtgtgat

SEQ ID NO: 3277510 - DNA, 25 bp, Homo sapien
gacagagagaacagtcagtagcttt

SEQ ID NO: 3277511 - DNA, 25 bp, Homo sapien
ccatcttctgagcactgcaaattct

SEQ ID NO: 3277512 - DNA, 25 bp, Homo sapien
gagagaacagtcagtagctttcttc

SEQ ID NO: 3277513 - DNA, 25 bp, Homo sapien
tgaggtaaaatactactggataaac

SEQ ID NO: 3277514 - DNA, 25 bp, Homo sapien
taaacccgattcacatggccaacca

SEQ ID NO: 3277515 - DNA, 25 bp, Homo sapien
tactactggataaacccgattcaca

SEQ ID NO: 3277516 - DNA, 25 bp, Homo sapien
tgatgaggtaaaatactactggata

SEQ ID NO: 3277517 - DNA, 25 bp, Homo sapien
tgaagctttctagagcaatcttctc

SEQ ID NO: 3277518 - DNA, 25 bp, Homo sapien
taatgcagtttatccgtccccaacc

SEQ ID NO: 3277519 - DNA, 25 bp, Homo sapien
cattccatgagattaaagttgtcca

SEQ ID NO: 3277520 - DNA, 25 bp, Homo sapien
gctactttcgaggtctcttaggaaa

SEQ ID NO: 3277521 - DNA, 25 bp, Homo sapien
atctgaagctcaaatgctctcctca

SEQ ID NO: 3277522 - DNA, 25 bp, Homo sapien
aatctgaagctcaaatgctctcctc

SEQ ID NO: 3277523 - DNA, 25 bp, Homo sapien
agatggctgaaaatgtcgtgtctca

SEQ ID NO: 3277524 - DNA, 25 bp, Homo sapien
tagtgtcctcctcctattgaagtca

SEQ ID NO: 3277525 - DNA, 25 bp, Homo sapien
gctgaaaatgtcgtgtctcacaagg

SEQ ID NO: 3277526 - DNA, 25 bp, Homo sapien
caaggaatgtagtgtcctcctccta

SEQ ID NO: 3277527 - DNA, 25 bp, Homo sapien
caaggacgtcacaggtaacaggcaa

SEQ ID NO: 3277528 - DNA, 25 bp, Homo sapien
aaaaaagacggcgcagaggcaaatt

SEQ ID NO: 3277529 - DNA, 25 bp, Homo sapien
gcaaaaaaagacggcgcagaggcaa

SEQ ID NO: 3277530 - DNA, 25 bp, Homo sapien
aaagacggcgcagaggcaaattccg

SEQ ID NO: 3277531 - DNA, 25 bp, Homo sapien
tgtttatacctagtcatgcctggag

SEQ ID NO: 3277532 - DNA, 25 bp, Homo sapien
cataggagggcatgcaaggttgtcc

SEQ ID NO: 3277533 - DNA, 25 bp, Homo sapien
tgtgaactacataggccgcccaaat

SEQ ID NO: 3277534 - DNA, 25 bp, Homo sapien
caattctggttaagggtagtgccac

SEQ ID NO: 3277535 - DNA, 25 bp, Homo sapien
tgttaaatgccccaaatgtgactgg

SEQ ID NO: 3277536 - DNA, 25 bp, Homo sapien
tctgcagtcttgatccaaacacgtg

SEQ ID NO: 3277537 - DNA, 25 bp, Homo sapien
gaagctaagtaagaccgaggtgtgc

SEQ ID NO: 3277538 - DNA, 25 bp, Homo sapien
cacgtgacgagtagaagcagatcca

SEQ ID NO: 3277539 - DNA, 25 bp, Homo sapien
ttatgcagatttgtacaaaatttaa

SEQ ID NO: 3277540 - DNA, 25 bp, Homo sapien
ttggttatgtaactttatgcagatt

SEQ ID NO: 3277541 - DNA, 25 bp, Homo sapien
attggttatgtaactttatgcagat

SEQ ID NO: 3277542 - DNA, 25 bp, Homo sapien
tgcagatttgtacaaaatttaaagg

SEQ ID NO: 3277543 - DNA, 25 bp, Homo sapien
caagatgacacaacatagattgcca

SEQ ID NO: 3277544 - DNA, 25 bp, Homo sapien
ttctttgcctgaactgaattctgat

SEQ ID NO: 3277545 - DNA, 25 bp, Homo sapien
gccaaattgcatgccaccctgcagt

SEQ ID NO: 3277546 - DNA, 25 bp, Homo sapien
acatgttgctcatgccttcatttcc

SEQ ID NO: 3277547 - DNA, 25 bp, Homo sapien
gactttctgctttttgaatacagag

SEQ ID NO: 3277548 - DNA, 25 bp, Homo sapien
tctttggagatgtcaatcccaatct

SEQ ID NO: 3277549 - DNA, 25 bp, Homo sapien
tcatagcttgttacgctggagatag

SEQ ID NO: 3277550 - DNA, 25 bp, Homo sapien
gagatagtaatattcccactttgta

SEQ ID NO: 3277551 - DNA, 25 bp, Homo sapien
taaagttgtacttgatactgaaggc

SEQ ID NO: 3277552 - DNA, 25 bp, Homo sapien
tttaaagttgtacttgatactgaag

SEQ ID NO: 3277553 - DNA, 25 bp, Homo sapien
tgtaaaaccagctgcactctggcag

SEQ ID NO: 3277554 - DNA, 25 bp, Homo sapien
ttaaagttgtacttgatactgaagg

SEQ ID NO: 3277555 - DNA, 25 bp, Homo sapien
cggtagcataggacactttgggcaa

SEQ ID NO: 3277556 - DNA, 25 bp, Homo sapien
ctttgggcaaagaatgtcgtgcact

SEQ ID NO: 3277557 - DNA, 25 bp, Homo sapien
gataagggccgaaaatacaaaagca

SEQ ID NO: 3277558 - DNA, 25 bp, Homo sapien
tgacagcagcaaactcgataagggc

SEQ ID NO: 3277559 - DNA, 25 bp, Homo sapien
cgtctgaggtggaagtaaaccgtca

SEQ ID NO: 3277560 - DNA, 25 bp, Homo sapien
ggtctgaatcataaaataacccatc

SEQ ID NO: 3277561 - DNA, 25 bp, Homo sapien
cataatgcacggaatataggtctga

SEQ ID NO: 3277562 - DNA, 25 bp, Homo sapien
caaatacagtcctagcgggaactga

SEQ ID NO: 3277563 - DNA, 25 bp, Homo sapien
acaggaggaaaatgtgttatcggtt

SEQ ID NO: 3277564 - DNA, 25 bp, Homo sapien
gaaaacaggaggaaaatgtgttatc

SEQ ID NO: 3277565 - DNA, 25 bp, Homo sapien
ctgccaagaaaacaggaggaaaatg

SEQ ID NO: 3277566 - DNA, 25 bp, Homo sapien
aaacaggaggaaaatgtgttatcgg

SEQ ID NO: 3277567 - DNA, 25 bp, Homo sapien
ttgatacggtttgcccaatcaaatc

SEQ ID NO: 3277568 - DNA, 25 bp, Homo sapien
gactccttcggaacttcaactgatt

SEQ ID NO: 3277569 - DNA, 25 bp, Homo sapien
tgaactaagctggaagactccttcg

SEQ ID NO: 3277570 - DNA, 25 bp, Homo sapien
ggaccttttgtccaggtatagatca

SEQ ID NO: 3277571 - DNA, 25 bp, Homo sapien
agggcatgcatgaccatccatggga

SEQ ID NO: 3277572 - DNA, 25 bp, Homo sapien
aagggcatgcatgaccatccatggg

SEQ ID NO: 3277573 - DNA, 25 bp, Homo sapien
aaagggcatgcatgaccatccatgg

SEQ ID NO: 3277574 - DNA, 25 bp, Homo sapien
gggacactccgcacttatggtgagt

SEQ ID NO: 3277575 - DNA, 25 bp, Homo sapien
cttttgtcaatccatgtctgcctga

SEQ ID NO: 3277576 - DNA, 25 bp, Homo sapien
ggtccacactttcgttaccatcata

SEQ ID NO: 3277577 - DNA, 25 bp, Homo sapien
tctcaaaatttcaatggggccgtca

SEQ ID NO: 3277578 - DNA, 25 bp, Homo sapien
aagcttatttggagctgtcatatta

SEQ ID NO: 3277579 - DNA, 25 bp, Homo sapien
aaacaggtccaaagctggtgacata

SEQ ID NO: 3277580 - DNA, 25 bp, Homo sapien
atcctctcagaagtcggaaaccagc

SEQ ID NO: 3277581 - DNA, 25 bp, Homo sapien
aagtcggaaaccagcttctgtcacc

SEQ ID NO: 3277582 - DNA, 25 bp, Homo sapien
ttagaggttgagaggactacatcct

SEQ ID NO: 3277583 - DNA, 25 bp, Homo sapien
tctcagaagtcggaaaccagcttct

SEQ ID NO: 3277584 - DNA, 25 bp, Homo sapien
catttataatcaaacaatatagttt

SEQ ID NO: 3277585 - DNA, 25 bp, Homo sapien
atttataatcaaacaatatagtttc

SEQ ID NO: 3277586 - DNA, 25 bp, Homo sapien
acatttataatcaaacaatatagtt

SEQ ID NO: 3277587 - DNA, 25 bp, Homo sapien
atattgccttaaatggtatcacatc

SEQ ID NO: 3277588 - DNA, 25 bp, Homo sapien
cacatcatctgaacgattctccaca

SEQ ID NO: 3277589 - DNA, 25 bp, Homo sapien
aacatttatgggcagataaatcctc

SEQ ID NO: 3277590 - DNA, 25 bp, Homo sapien
tttaaactacataggactggatact

SEQ ID NO: 3277591 - DNA, 25 bp, Homo sapien
gcaacctatccctggagaggcaaca

SEQ ID NO: 3277592 - DNA, 25 bp, Homo sapien
gaggcaacatgaaaagaagcaggag

SEQ ID NO: 3277593 - DNA, 25 bp, Homo sapien
gcaggagaaagtttcatccttctca

SEQ ID NO: 3277594 - DNA, 25 bp, Homo sapien
gcaaatgcagtgtaggcaacctatc

SEQ ID NO: 3277595 - DNA, 25 bp, Homo sapien
tacttcacatcacaggcagtcctgc

SEQ ID NO: 3277596 - DNA, 25 bp, Homo sapien
agaaagagtttctagccccaggcca

SEQ ID NO: 3277597 - DNA, 25 bp, Homo sapien
cattgatgtactatgtgcccttata

SEQ ID NO: 3277598 - DNA, 25 bp, Homo sapien
gaattcagaagacctgatctcatcc

SEQ ID NO: 3277599 - DNA, 25 bp, Homo sapien
tgccccagatttatgtcccaggtag

SEQ ID NO: 3277600 - DNA, 25 bp, Homo sapien
tattctcagcgaagagcgtccaggc

SEQ ID NO: 3277601 - DNA, 25 bp, Homo sapien
gatgagggacttcggttcagctgcc

SEQ ID NO: 3277602 - DNA, 25 bp, Homo sapien
gacctgggccaaacctatgaatggg

SEQ ID NO: 3277603 - DNA, 25 bp, Homo sapien
gcagcctgttgtcataaccatcgag

SEQ ID NO: 3277604 - DNA, 25 bp, Homo sapien
ccaggatgcgggtgaaattttctgt

SEQ ID NO: 3277605 - DNA, 25 bp, Homo sapien
agcaaactgtccaggatgcgggtga

SEQ ID NO: 3277606 - DNA, 25 bp, Homo sapien
cataaccatcgagcaaactgtccag

SEQ ID NO: 3277607 - DNA, 25 bp, Homo sapien
aggaagcgcaggagggcgaaactga

SEQ ID NO: 3277608 - DNA, 25 bp, Homo sapien
cgaaactgaccccggcggacagagc

SEQ ID NO: 3277609 - DNA, 25 bp, Homo sapien
ccggcggacagagcgatcgcgggta

SEQ ID NO: 3277610 - DNA, 25 bp, Homo sapien
ggaagcgcaggagggcgaaactgac

SEQ ID NO: 3277611 - DNA, 25 bp, Homo sapien
tgcgctgcaagactcggcaagtttg

SEQ ID NO: 3277612 - DNA, 25 bp, Homo sapien
tgtgcgaggacctgtttgtacccag

SEQ ID NO: 3277613 - DNA, 25 bp, Homo sapien
aactattgggaagtggactcgagcc

SEQ ID NO: 3277614 - DNA, 25 bp, Homo sapien
tcgctcagcgctcaatgtgtatgta

SEQ ID NO: 3277615 - DNA, 25 bp, Homo sapien
gctcagagagacgacatgattttcc

SEQ ID NO: 3277616 - DNA, 25 bp, Homo sapien
gacagacactgagacaagggacaaa

SEQ ID NO: 3277617 - DNA, 25 bp, Homo sapien
cacttccatgacagaattgcagagc

SEQ ID NO: 3277618 - DNA, 25 bp, Homo sapien
ttttaagtatgggaatgaggctcag

SEQ ID NO: 3277619 - DNA, 25 bp, Homo sapien
caggtatgagctggacccagacctg

SEQ ID NO: 3277620 - DNA, 25 bp, Homo sapien
agggagctgcagtaggtattaaacc

SEQ ID NO: 3277621 - DNA, 25 bp, Homo sapien
ctgtgatcccactcaggactgaggg

SEQ ID NO: 3277622 - DNA, 25 bp, Homo sapien
tcattgttgctgcaaaaataaggcc

SEQ ID NO: 3277623 - DNA, 25 bp, Homo sapien
ggcaataacaaacgctgataaggat

SEQ ID NO: 3277624 - DNA, 25 bp, Homo sapien
tatgactaattaatgctgtttaaca

SEQ ID NO: 3277625 - DNA, 25 bp, Homo sapien
tatctccactgctatgtttgctgca

SEQ ID NO: 3277626 - DNA, 25 bp, Homo sapien
ctccactgctatgtttgctgcagca

SEQ ID NO: 3277627 - DNA, 25 bp, Homo sapien
aataccaccttaaatgctgtcaatt

SEQ ID NO: 3277628 - DNA, 25 bp, Homo sapien
ttcagagttctgctaggggtcacaa

SEQ ID NO: 3277629 - DNA, 25 bp, Homo sapien
tggcgaacagaggttaaactgtctg

SEQ ID NO: 3277630 - DNA, 25 bp, Homo sapien
gctgtcaatttaagaaggagatttt

SEQ ID NO: 3277631 - DNA, 25 bp, Homo sapien
gaagtgaatatggtgagtggcctcc

SEQ ID NO: 3277632 - DNA, 25 bp, Homo sapien
ccccgtcgacgttgggatgcggatc

SEQ ID NO: 3277633 - DNA, 25 bp, Homo sapien
cggttcggcttacgcagatgggaaa

SEQ ID NO: 3277634 - DNA, 25 bp, Homo sapien
tgcggatcgatgtcgccagcataga

SEQ ID NO: 3277635 - DNA, 25 bp, Homo sapien
tttcctccccgactgtagcattatg

SEQ ID NO: 3277636 - DNA, 25 bp, Homo sapien
ctgaagcatccaatggatctaaaaa

SEQ ID NO: 3277637 - DNA, 25 bp, Homo sapien
catcgctttgcggatcagcttctga

SEQ ID NO: 3277638 - DNA, 25 bp, Homo sapien
cttcctgtcaatgtatccatcgctt

SEQ ID NO: 3277639 - DNA, 25 bp, Homo sapien
ggtagcccaggtacccatagtgttc

SEQ ID NO: 3277640 - DNA, 25 bp, Homo sapien
tacccatagtgttcctcatcagagc

SEQ ID NO: 3277641 - DNA, 25 bp, Homo sapien
ccatctctcaggttgtatttgtaag

SEQ ID NO: 3277642 - DNA, 25 bp, Homo sapien
gtaagtcataaacagggtagcccag

SEQ ID NO: 3277643 - DNA, 25 bp, Homo sapien
tgtgtcagagaatggcttggagccc

SEQ ID NO: 3277644 - DNA, 25 bp, Homo sapien
tgctggagcgtggtacctcagtact

SEQ ID NO: 3277645 - DNA, 25 bp, Homo sapien
tttccacttgggctccacctgggta

SEQ ID NO: 3277646 - DNA, 25 bp, Homo sapien
ggtataaccaacgtctcacaaaatg

SEQ ID NO: 3277647 - DNA, 25 bp, Homo sapien
caggagatacaggaggcctctctaa

SEQ ID NO: 3277648 - DNA, 25 bp, Homo sapien
tggcatgtttgcacagtcaggctta

SEQ ID NO: 3277649 - DNA, 25 bp, Homo sapien
aagataaagactgtgggtgctaggc

SEQ ID NO: 3277650 - DNA, 25 bp, Homo sapien
cacataggagactgagatacaagca

SEQ ID NO: 3277651 - DNA, 25 bp, Homo sapien
ccagaatgtggcatattgcaaagtt

SEQ ID NO: 3277652 - DNA, 25 bp, Homo sapien
gttttgactccttgatacttccatt

SEQ ID NO: 3277653 - DNA, 25 bp, Homo sapien
tagtcagtaattatttgtaccacca

SEQ ID NO: 3277654 - DNA, 25 bp, Homo sapien
caaaaccataagcttgtccattagt

SEQ ID NO: 3277655 - DNA, 25 bp, Homo sapien
cctgctaggactcaacttgaaagag

SEQ ID NO: 3277656 - DNA, 25 bp, Homo sapien
gaactggtaaagtatacctgctagg

SEQ ID NO: 3277657 - DNA, 25 bp, Homo sapien
gattgaatcttcttgagtgggcctg

SEQ ID NO: 3277658 - DNA, 25 bp, Homo sapien
tatacaagagttgaggtgtccaagc

SEQ ID NO: 3277659 - DNA, 25 bp, Homo sapien
cagatggggaccaagagtggctgga

SEQ ID NO: 3277660 - DNA, 25 bp, Homo sapien
tgcagatggggaccaagagtggctg

SEQ ID NO: 3277661 - DNA, 25 bp, Homo sapien
atggggaccaagagtggctggaaca

SEQ ID NO: 3277662 - DNA, 25 bp, Homo sapien
catgcagatggggaccaagagtggc

SEQ ID NO: 3277663 - DNA, 25 bp, Homo sapien
aattaattcttgattcatacgatct

SEQ ID NO: 3277664 - DNA, 25 bp, Homo sapien
gatggcaactctaccatttgtacct

SEQ ID NO: 3277665 - DNA, 25 bp, Homo sapien
cactaggggcacttatgactcatga

SEQ ID NO: 3277666 - DNA, 25 bp, Homo sapien
tttgtacctacagccttggtgaggc

SEQ ID NO: 3277667 - DNA, 25 bp, Homo sapien
tggatggacaaaagtgaggctcgaa

SEQ ID NO: 3277668 - DNA, 25 bp, Homo sapien
taaggttggtcttagtcctgcacac

SEQ ID NO: 3277669 - DNA, 25 bp, Homo sapien
acaatggaagttttacgtgggctca

SEQ ID NO: 3277670 - DNA, 25 bp, Homo sapien
ttttcgaactagactccatgcccag

SEQ ID NO: 3277671 - DNA, 25 bp, Homo sapien
tcagtctgtatcacaccaccctgag

SEQ ID NO: 3277672 - DNA, 25 bp, Homo sapien
tgtatcacaccaccctgagcttgat

SEQ ID NO: 3277673 - DNA, 25 bp, Homo sapien
cacaccaccctgagcttgattatat

SEQ ID NO: 3277674 - DNA, 25 bp, Homo sapien
ccctgagcttgattatattgactta

SEQ ID NO: 3277675 - DNA, 25 bp, Homo sapien
tctgaatgcactggaaagcctttgg

SEQ ID NO: 3277676 - DNA, 25 bp, Homo sapien
cagctcatagtcatcatgaacgggt

SEQ ID NO: 3277677 - DNA, 25 bp, Homo sapien
agcaggttttagcaatcatgggatc

SEQ ID NO: 3277678 - DNA, 25 bp, Homo sapien
tgaacgggtccatatattaatgagc

SEQ ID NO: 3277679 - DNA, 25 bp, Homo sapien
ttttttctaaggctaatctctccat

SEQ ID NO: 3277680 - DNA, 25 bp, Homo sapien
tacacattactcctctatctccaac

SEQ ID NO: 3277681 - DNA, 25 bp, Homo sapien
tggtttcttctactgcctcactaca

SEQ ID NO: 3277682 - DNA, 25 bp, Homo sapien
ttctactgcctcactacacattact

SEQ ID NO: 3277683 - DNA, 25 bp, Homo sapien
ttactcctctatctccaacaacatg

SEQ ID NO: 3277684 - DNA, 25 bp, Homo sapien
gttgcatacacttattctctccaag

SEQ ID NO: 3277685 - DNA, 25 bp, Homo sapien
acatggtccagatggttgcatacac

SEQ ID NO: 3277686 - DNA, 25 bp, Homo sapien
ccatgtgcgcgctgaaacactgtgt

SEQ ID NO: 3277687 - DNA, 25 bp, Homo sapien
ttaatgaccagatgtattctgcctc

SEQ ID NO: 3277688 - DNA, 25 bp, Homo sapien
gttgtatcctacatatcgttagctg

SEQ ID NO: 3277689 - DNA, 25 bp, Homo sapien
gccctgctcagaaacagattgattc

SEQ ID NO: 3277690 - DNA, 25 bp, Homo sapien
tctacctgttcttgtgcccctgttc

SEQ ID NO: 3277691 - DNA, 25 bp, Homo sapien
tcatgcttcgtttatttgagttttc

SEQ ID NO: 3277692 - DNA, 25 bp, Homo sapien
tataagttgagcacaaggtcaggtc

SEQ ID NO: 3277693 - DNA, 25 bp, Homo sapien
taaggttcttcaacagcccatgagt

SEQ ID NO: 3277694 - DNA, 25 bp, Homo sapien
tcatctagaatggttaaggcaagca

SEQ ID NO: 3277695 - DNA, 25 bp, Homo sapien
aataccattagcaaagggagcacac

SEQ ID NO: 3277696 - DNA, 25 bp, Homo sapien
gagaaaatacagtataatgagtcgc

SEQ ID NO: 3277697 - DNA, 25 bp, Homo sapien
ttaggaacgatggttgaatgtagca

SEQ ID NO: 3277698 - DNA, 25 bp, Homo sapien
cagtataatgagtcgctttgttcca

SEQ ID NO: 3277699 - DNA, 25 bp, Homo sapien
gcatttatggttgaatgtagagaaa

SEQ ID NO: 3277700 - DNA, 25 bp, Homo sapien
gagatccagcactggatagatccaa

SEQ ID NO: 3277701 - DNA, 25 bp, Homo sapien
cagggcagatcaggtacagcatgga

SEQ ID NO: 3277702 - DNA, 25 bp, Homo sapien
ttcaatgctgccacagggcagatca

SEQ ID NO: 3277703 - DNA, 25 bp, Homo sapien
cagactctagttgtcttgctgttac

SEQ ID NO: 3277704 - DNA, 25 bp, Homo sapien
ttgttttaacacagaggtgtcctgc

SEQ ID NO: 3277705 - DNA, 25 bp, Homo sapien
tgttttaacacagaggtgtcctgct

SEQ ID NO: 3277706 - DNA, 25 bp, Homo sapien
aacacagaggtgtcctgcttgctgg

SEQ ID NO: 3277707 - DNA, 25 bp, Homo sapien
tttaacacagaggtgtcctgcttgc

SEQ ID NO: 3277708 - DNA, 25 bp, Homo sapien
tcatcccatcgagacatcacagctg

SEQ ID NO: 3277709 - DNA, 25 bp, Homo sapien
caccagattgccatgcatattgatt

SEQ ID NO: 3277710 - DNA, 25 bp, Homo sapien
cgtaggtggaggcaaaacctcactc

SEQ ID NO: 3277711 - DNA, 25 bp, Homo sapien
cccctcagagcgtaggtggaggcaa

SEQ ID NO: 3277712 - DNA, 25 bp, Homo sapien
tctatcacatcgagtctgggttctc

SEQ ID NO: 3277713 - DNA, 25 bp, Homo sapien
atgattcgtgttctatcacatcgag

SEQ ID NO: 3277714 - DNA, 25 bp, Homo sapien
tcgtgttctatcacatcgagtctgg

SEQ ID NO: 3277715 - DNA, 25 bp, Homo sapien
gtctgggttctctggttacatgcat

SEQ ID NO: 3277716 - DNA, 25 bp, Homo sapien
tgagctaatacgtcaaaatcttggc

SEQ ID NO: 3277717 - DNA, 25 bp, Homo sapien
aaatcttggctgatcacaaaatgcc

SEQ ID NO: 3277718 - DNA, 25 bp, Homo sapien
ttctgagctagttttttgagaggaa

SEQ ID NO: 3277719 - DNA, 25 bp, Homo sapien
cagctacttgtagaccattttcaga

SEQ ID NO: 3277720 - DNA, 25 bp, Homo sapien
ctgcctttattattttaactgttat

SEQ ID NO: 3277721 - DNA, 25 bp, Homo sapien
tatttttctcatcccattctctttc

SEQ ID NO: 3277722 - DNA, 25 bp, Homo sapien
tgttatttttctcatcccattctct

SEQ ID NO: 3277723 - DNA, 25 bp, Homo sapien
actgttatttttctcatcccattct

SEQ ID NO: 3277724 - DNA, 25 bp, Homo sapien
gcattcctacttctccagaaagagg

SEQ ID NO: 3277725 - DNA, 25 bp, Homo sapien
ctcatctgcgcatttggcattccta

SEQ ID NO: 3277726 - DNA, 25 bp, Homo sapien
ctgcgcatttggcattcctacttct

SEQ ID NO: 3277727 - DNA, 25 bp, Homo sapien
ttggccaccatccaatatggggcat

SEQ ID NO: 3277728 - DNA, 25 bp, Homo sapien
gcaacttccaattaagccaatgggt

SEQ ID NO: 3277729 - DNA, 25 bp, Homo sapien
caatgggtagttcccagtcagcttc

SEQ ID NO: 3277730 - DNA, 25 bp, Homo sapien
taaagcctttgcaaagttcaagagc

SEQ ID NO: 3277731 - DNA, 25 bp, Homo sapien
ttttctctggattttggcaacttcc

SEQ ID NO: 3277732 - DNA, 25 bp, Homo sapien
gagaggcatgtcttacacatgtgtg

SEQ ID NO: 3277733 - DNA, 25 bp, Homo sapien
catggtccagatcctgaatgtctac

SEQ ID NO: 3277734 - DNA, 25 bp, Homo sapien
ggtccagatcctgaatgtctacctc

SEQ ID NO: 3277735 - DNA, 25 bp, Homo sapien
tccagatcctgaatgtctacctcct

SEQ ID NO: 3277736 - DNA, 25 bp, Homo sapien
tggtccagatcctgaatgtctacct

SEQ ID NO: 3277737 - DNA, 25 bp, Homo sapien
tgttgtaatactcaaggatctcggg

SEQ ID NO: 3277738 - DNA, 25 bp, Homo sapien
aagcttggaaaatctggtgaggaga

SEQ ID NO: 3277739 - DNA, 25 bp, Homo sapien
gccttggtaatttcagcctgcagca

SEQ ID NO: 3277740 - DNA, 25 bp, Homo sapien
cctgcagcacccaagcaaggaaggt

SEQ ID NO: 3277741 - DNA, 25 bp, Homo sapien
ggtactcaaatgctccccagtaagt

SEQ ID NO: 3277742 - DNA, 25 bp, Homo sapien
gaatctcacatcagcccattcatct

SEQ ID NO: 3277743 - DNA, 25 bp, Homo sapien
cagcagttgcctccaaaataatggc

SEQ ID NO: 3277744 - DNA, 25 bp, Homo sapien
tcttagtctctataacaagttggag

SEQ ID NO: 3277745 - DNA, 25 bp, Homo sapien
tgctgtcccgtgtggcagctctttg

SEQ ID NO: 3277746 - DNA, 25 bp, Homo sapien
tctccaacctttatctcctcaatgt

SEQ ID NO: 3277747 - DNA, 25 bp, Homo sapien
tcaatgttcatcttatcacattgcc

SEQ ID NO: 3277748 - DNA, 25 bp, Homo sapien
ctttccctagaactcctttgctgtc

SEQ ID NO: 3277749 - DNA, 25 bp, Homo sapien
tggattctatgatcgcaaatctggg

SEQ ID NO: 3277750 - DNA, 25 bp, Homo sapien
cttgctttaggtgtgttaggtccta

SEQ ID NO: 3277751 - DNA, 25 bp, Homo sapien
cctagatctggttggaagtaatggg

SEQ ID NO: 3277752 - DNA, 25 bp, Homo sapien
gggatacgtccaaatctgctgctgc

SEQ ID NO: 3277753 - DNA, 25 bp, Homo sapien
caggtactctccactcaacattcat

SEQ ID NO: 3277754 - DNA, 25 bp, Homo sapien
gaccaggtactctccactcaacatt

SEQ ID NO: 3277755 - DNA, 25 bp, Homo sapien
cctgtaaggaccaggtactctccac

SEQ ID NO: 3277756 - DNA, 25 bp, Homo sapien
taaggaccaggtactctccactcaa

SEQ ID NO: 3277757 - DNA, 25 bp, Homo sapien
aagatccccgacttgactgatgtga

SEQ ID NO: 3277758 - DNA, 25 bp, Homo sapien
aaaggtcctgcaacttgtgtccgag

SEQ ID NO: 3277759 - DNA, 25 bp, Homo sapien
gaaatccggaatgagacgagtggct

SEQ ID NO: 3277760 - DNA, 25 bp, Homo sapien
catgtactcctatgacagcgccagc

SEQ ID NO: 3277761 - DNA, 25 bp, Homo sapien
gcaaaggaaccactgtgcagccatt

SEQ ID NO: 3277762 - DNA, 25 bp, Homo sapien
ggttaatattccgtaatgaccgcaa

SEQ ID NO: 3277763 - DNA, 25 bp, Homo sapien
gccatatagagtggcatgtggccat

SEQ ID NO: 3277764 - DNA, 25 bp, Homo sapien
gccatgtcagtgattgtaaggttaa

SEQ ID NO: 3277765 - DNA, 25 bp, Homo sapien
ctaccccactgaaaggaacagcagc

SEQ ID NO: 3277766 - DNA, 25 bp, Homo sapien
tcaggaacagcgcaccagcagaaac

SEQ ID NO: 3277767 - DNA, 25 bp, Homo sapien
aacagcgcaccagcagaaacggaaa

SEQ ID NO: 3277768 - DNA, 25 bp, Homo sapien
gggctcaggaacagcgcaccagcag

SEQ ID NO: 3277769 - DNA, 25 bp, Homo sapien
ctttatttgcaccaacagctttagc

SEQ ID NO: 3277770 - DNA, 25 bp, Homo sapien
cattcgtggctattcatatattcag

SEQ ID NO: 3277771 - DNA, 25 bp, Homo sapien
tgaattatccatgccgttgaggggg

SEQ ID NO: 3277772 - DNA, 25 bp, Homo sapien
cagctttagcttctaacttgttctc

SEQ ID NO: 3277773 - DNA, 25 bp, Homo sapien
taaatgattggtaacaccaacaggc

SEQ ID NO: 3277774 - DNA, 25 bp, Homo sapien
tgggtttgatcagggtaaagagtca

SEQ ID NO: 3277775 - DNA, 25 bp, Homo sapien
aaaggaaggacagtaaatgattggt

SEQ ID NO: 3277776 - DNA, 25 bp, Homo sapien
aatggatgggtttgatcagggtaaa

SEQ ID NO: 3277777 - DNA, 25 bp, Homo sapien
tcctgtcttctttccttcccacact

SEQ ID NO: 3277778 - DNA, 25 bp, Homo sapien
tgtcttctttccttcccacactgta

SEQ ID NO: 3277779 - DNA, 25 bp, Homo sapien
ctttccttcccacactgtataccat

SEQ ID NO: 3277780 - DNA, 25 bp, Homo sapien
cttctttccttcccacactgtatac

SEQ ID NO: 3277781 - DNA, 25 bp, Homo sapien
tgcttacccatacataaaagccttt

SEQ ID NO: 3277782 - DNA, 25 bp, Homo sapien
cagtagacactctgtgtccagtttt

SEQ ID NO: 3277783 - DNA, 25 bp, Homo sapien
cactcccaacagataaatatcatgc

SEQ ID NO: 3277784 - DNA, 25 bp, Homo sapien
gaagagaactattcccactcccaac

SEQ ID NO: 3277785 - DNA, 25 bp, Homo sapien
tttaaaacatgcaagatttcaggca

SEQ ID NO: 3277786 - DNA, 25 bp, Homo sapien
gcttctgaaatgtagtttattgctg

SEQ ID NO: 3277787 - DNA, 25 bp, Homo sapien
catttcaggattactcaacaatcaa

SEQ ID NO: 3277788 - DNA, 25 bp, Homo sapien
tataaaagttgttgtgcagcttctg

SEQ ID NO: 3277789 - DNA, 25 bp, Homo sapien
tcatacactggcatgcaagagagtt

SEQ ID NO: 3277790 - DNA, 25 bp, Homo sapien
caaaccgatcttctcagtctcagag

SEQ ID NO: 3277791 - DNA, 25 bp, Homo sapien
caggcacctgggaacatatgtttgc

SEQ ID NO: 3277792 - DNA, 25 bp, Homo sapien
tagtaatcatgcaagggcaatggga

SEQ ID NO: 3277793 - DNA, 25 bp, Homo sapien
gatcagtctgtctgtgcggtacagc

SEQ ID NO: 3277794 - DNA, 25 bp, Homo sapien
gctagacaagctgtagatcagtctg

SEQ ID NO: 3277795 - DNA, 25 bp, Homo sapien
gattgaatcacttttgctagacaag

SEQ ID NO: 3277796 - DNA, 25 bp, Homo sapien
tgcaaggcaggtcatcacaagattg

SEQ ID NO: 3277797 - DNA, 25 bp, Homo sapien
aattaactgcccacaacatctctca

SEQ ID NO: 3277798 - DNA, 25 bp, Homo sapien
caacatctctcaggcattcagttca

SEQ ID NO: 3277799 - DNA, 25 bp, Homo sapien
ggcattcagttcacattagactaag

SEQ ID NO: 3277800 - DNA, 25 bp, Homo sapien
tcagaattaacataactacactact

SEQ ID NO: 3277801 - DNA, 25 bp, Homo sapien
gcacaccaaaacataaattgaggaa

SEQ ID NO: 3277802 - DNA, 25 bp, Homo sapien
ttgaggaagagataccctatttaat

SEQ ID NO: 3277803 - DNA, 25 bp, Homo sapien
gaacaaagcacaccaaaacataaat

SEQ ID NO: 3277804 - DNA, 25 bp, Homo sapien
tactacaaggtgatagctaccaaaa

SEQ ID NO: 3277805 - DNA, 25 bp, Homo sapien
gatacaacttggtagcctttccctg

SEQ ID NO: 3277806 - DNA, 25 bp, Homo sapien
tatggacaggacttggaatacccta

SEQ ID NO: 3277807 - DNA, 25 bp, Homo sapien
tcctgtcattccagaagacctgcag

SEQ ID NO: 3277808 - DNA, 25 bp, Homo sapien
gaataccctagatgcctagaggccg

SEQ ID NO: 3277809 - DNA, 25 bp, Homo sapien
atgcttgttgttaaagttaactgag

SEQ ID NO: 3277810 - DNA, 25 bp, Homo sapien
aatgcttgttgttaaagttaactga

SEQ ID NO: 3277811 - DNA, 25 bp, Homo sapien
tgcttgttgttaaagttaactgagg

SEQ ID NO: 3277812 - DNA, 25 bp, Homo sapien
taatgacagctattttttatcagag

SEQ ID NO: 3277813 - DNA, 25 bp, Homo sapien
tgtttcccaaacatagaagcgcaga

SEQ ID NO: 3277814 - DNA, 25 bp, Homo sapien
gaatctcctgagttatatatgcagc

SEQ ID NO: 3277815 - DNA, 25 bp, Homo sapien
tggatgtgtacatagtcttatctca

SEQ ID NO: 3277816 - DNA, 25 bp, Homo sapien
tgctttctcagcctggtgcaacagt

SEQ ID NO: 3277817 - DNA, 25 bp, Homo sapien
caaggtttctgaacacgcagtattc

SEQ ID NO: 3277818 - DNA, 25 bp, Homo sapien
gcaataaaatctgataggactggta

SEQ ID NO: 3277819 - DNA, 25 bp, Homo sapien
ttcactctgccatataagttggagc

SEQ ID NO: 3277820 - DNA, 25 bp, Homo sapien
gctcgtttggttaataggcatgtgg

SEQ ID NO: 3277821 - DNA, 25 bp, Homo sapien
tccagccaagcctgagctgctcgtt

SEQ ID NO: 3277822 - DNA, 25 bp, Homo sapien
taggcatgtggaccggtaatcaaag

SEQ ID NO: 3277823 - DNA, 25 bp, Homo sapien
catgcacccttcacacatgtagccc

SEQ ID NO: 3277824 - DNA, 25 bp, Homo sapien
aaacattcaaatcatatgacaaaat

SEQ ID NO: 3277825 - DNA, 25 bp, Homo sapien
ttaaacattcaaatcatatgacaaa

SEQ ID NO: 3277826 - DNA, 25 bp, Homo sapien
ttcaaatcatatgacaaaattatag

SEQ ID NO: 3277827 - DNA, 25 bp, Homo sapien
cattcaaatcatatgacaaaattat

SEQ ID NO: 3277828 - DNA, 25 bp, Homo sapien
cattcgtaatgcagcaatcttgtca

SEQ ID NO: 3277829 - DNA, 25 bp, Homo sapien
tcaatagaataaggttttacttcac

SEQ ID NO: 3277830 - DNA, 25 bp, Homo sapien
cttattcgctgcttccaaggactgt

SEQ ID NO: 3277831 - DNA, 25 bp, Homo sapien
catctagatgcaggcttaaaagtgg

SEQ ID NO: 3277832 - DNA, 25 bp, Homo sapien
agtaaaaagaactatattgagtata

SEQ ID NO: 3277833 - DNA, 25 bp, Homo sapien
cacgcatttcatgatagtttcttga

SEQ ID NO: 3277834 - DNA, 25 bp, Homo sapien
caaaatcctgtagctgtgcagagga

SEQ ID NO: 3277835 - DNA, 25 bp, Homo sapien
ttcctacttttcacgcatttcatga

SEQ ID NO: 3277836 - DNA, 25 bp, Homo sapien
tcttgacagagcctgtttgatttca

SEQ ID NO: 3277837 - DNA, 25 bp, Homo sapien
taaaggcagcacagcaatattgtgg

SEQ ID NO: 3277838 - DNA, 25 bp, Homo sapien
gaaaagtgagcaacctacacaagct

SEQ ID NO: 3277839 - DNA, 25 bp, Homo sapien
gaaggatatcctatgaccatgcaat

SEQ ID NO: 3277840 - DNA, 25 bp, Homo sapien
cagaaaagctggtgtgagtgtgaac

SEQ ID NO: 3277841 - DNA, 25 bp, Homo sapien
accaactatggctttgaaaaatttg

SEQ ID NO: 3277842 - DNA, 25 bp, Homo sapien
caactatggctttgaaaaatttggc

SEQ ID NO: 3277843 - DNA, 25 bp, Homo sapien
ccaactatggctttgaaaaatttgg

SEQ ID NO: 3277844 - DNA, 25 bp, Homo sapien
aactatggctttgaaaaatttggca

SEQ ID NO: 3277845 - DNA, 25 bp, Homo sapien
caaacagtgtgataatcttggtaca

SEQ ID NO: 3277846 - DNA, 25 bp, Homo sapien
gattcccaaacagtgtgataatctt

SEQ ID NO: 3277847 - DNA, 25 bp, Homo sapien
ttggtacacaggataagctcgacca

SEQ ID NO: 3277848 - DNA, 25 bp, Homo sapien
gctcgaccacaaatgccatcaatta

SEQ ID NO: 3277849 - DNA, 25 bp, Homo sapien
cttgaaccatagaggaagaaatttt

SEQ ID NO: 3277850 - DNA, 25 bp, Homo sapien
ttcttgaaccatagaggaagaaatt

SEQ ID NO: 3277851 - DNA, 25 bp, Homo sapien
gcattcttgaaccatagaggaagaa

SEQ ID NO: 3277852 - DNA, 25 bp, Homo sapien
cattcttgaaccatagaggaagaaa

SEQ ID NO: 3277853 - DNA, 25 bp, Homo sapien
agcttctgcagccgccacaagggcg

SEQ ID NO: 3277854 - DNA, 25 bp, Homo sapien
tgcagccgccacaagggcgtcccct

SEQ ID NO: 3277855 - DNA, 25 bp, Homo sapien
cgccacaagggcgtcccctcttccg

SEQ ID NO: 3277856 - DNA, 25 bp, Homo sapien
agggcgtcccctcttccggctccat

SEQ ID NO: 3277857 - DNA, 25 bp, Homo sapien
tgcgcgaagctggggcttgggtcac

SEQ ID NO: 3277858 - DNA, 25 bp, Homo sapien
ctgcgcgaagctggggcttgggtca

SEQ ID NO: 3277859 - DNA, 25 bp, Homo sapien
ggcgtggacccaagaagtccctgtg

SEQ ID NO: 3277860 - DNA, 25 bp, Homo sapien
ttgtctaaagctacgactcgcccac

SEQ ID NO: 3277861 - DNA, 25 bp, Homo sapien
caaggctggccgcttgtctaaagct

SEQ ID NO: 3277862 - DNA, 25 bp, Homo sapien
tgcgcagagaccgaactaccgcttt

SEQ ID NO: 3277863 - DNA, 25 bp, Homo sapien
tgatagtaaaacagagtgtccactt

SEQ ID NO: 3277864 - DNA, 25 bp, Homo sapien
actggctaccgcatcgacatcatca

SEQ ID NO: 3277865 - DNA, 25 bp, Homo sapien
tgttgactttctttgatagtaaaac

SEQ ID NO: 3277866 - DNA, 25 bp, Homo sapien
tcaagcactggctaccgcatcgaca

SEQ ID NO: 3277867 - DNA, 25 bp, Homo sapien
tgctggcccagtctcctcgccaacc

SEQ ID NO: 3277868 - DNA, 25 bp, Homo sapien
ctggcccagtctcctcgccaacccc

SEQ ID NO: 3277869 - DNA, 25 bp, Homo sapien
ctagagctgtgctggcccagtctcc

SEQ ID NO: 3277870 - DNA, 25 bp, Homo sapien
tgtgctggcccagtctcctcgccaa

SEQ ID NO: 3277871 - DNA, 25 bp, Homo sapien
tgaacattctctcggccacttgttg

SEQ ID NO: 3277872 - DNA, 25 bp, Homo sapien
gccacttgttgtgctcttcgagagc

SEQ ID NO: 3277873 - DNA, 25 bp, Homo sapien
tctcggccacttgttgtgctcttcg

SEQ ID NO: 3277874 - DNA, 25 bp, Homo sapien
cattctctcggccacttgttgtgct

SEQ ID NO: 3277875 - DNA, 25 bp, Homo sapien
cttcttcatcagatccatgagtttc

SEQ ID NO: 3277876 - DNA, 25 bp, Homo sapien
tcagatccatgagtttcttatccat

SEQ ID NO: 3277877 - DNA, 25 bp, Homo sapien
ttcatcagatccatgagtttcttat

SEQ ID NO: 3277878 - DNA, 25 bp, Homo sapien
ggaacacaggcttcttcatcagatc

SEQ ID NO: 3277879 - DNA, 25 bp, Homo sapien
gcagatggaggcttccctaatggag

SEQ ID NO: 3277880 - DNA, 25 bp, Homo sapien
cagatggaggcttccctaatggagc

SEQ ID NO: 3277881 - DNA, 25 bp, Homo sapien
tggcaggtgtatggacaaagccaca

SEQ ID NO: 3277882 - DNA, 25 bp, Homo sapien
ttggcaggtgtatggacaaagccac

SEQ ID NO: 3277883 - DNA, 25 bp, Homo sapien
cttggcaggtgtatggacaaagcca

SEQ ID NO: 3277884 - DNA, 25 bp, Homo sapien
ctctgatgccatgtgttcataggga

SEQ ID NO: 3277885 - DNA, 25 bp, Homo sapien
ggtggagcaggctggtgcttcagtt

SEQ ID NO: 3277886 - DNA, 25 bp, Homo sapien
gagcaggctggtgcttcagttgaac

SEQ ID NO: 3277887 - DNA, 25 bp, Homo sapien
tggagcaggctggtgcttcagttga

SEQ ID NO: 3277888 - DNA, 25 bp, Homo sapien
agcaggctggtgcttcagttgaacc

SEQ ID NO: 3277889 - DNA, 25 bp, Homo sapien
gtatctcgcctattagagtgcttaa

SEQ ID NO: 3277890 - DNA, 25 bp, Homo sapien
caggaaggtatctcgcctattagag

SEQ ID NO: 3277891 - DNA, 25 bp, Homo sapien
gcgtttcaggaaggtatctcgccta

SEQ ID NO: 3277892 - DNA, 25 bp, Homo sapien
aaggtatctcgcctattagagtgct

SEQ ID NO: 3277893 - DNA, 25 bp, Homo sapien
gaaatctccaatatcacgtctctta

SEQ ID NO: 3277894 - DNA, 25 bp, Homo sapien
tccaatatcacgtctcttatagatt

SEQ ID NO: 3277895 - DNA, 25 bp, Homo sapien
tatcacgtctcttatagattcacag

SEQ ID NO: 3277896 - DNA, 25 bp, Homo sapien
cccttgaaatctccaatatcacgtc

SEQ ID NO: 3277897 - DNA, 25 bp, Homo sapien
tcttcctttctatcctctgacctcg

SEQ ID NO: 3277898 - DNA, 25 bp, Homo sapien
ctcttcttcctttctatcctctgac

SEQ ID NO: 3277899 - DNA, 25 bp, Homo sapien
ttctgggaagcctttcctcttcttc

SEQ ID NO: 3277900 - DNA, 25 bp, Homo sapien
ttcctttctatcctctgacctcgta

SEQ ID NO: 3277901 - DNA, 25 bp, Homo sapien
ggtttccctaaattcatatactgca

SEQ ID NO: 3277902 - DNA, 25 bp, Homo sapien
tcataagactttctggtttccctaa

SEQ ID NO: 3277903 - DNA, 25 bp, Homo sapien
tttctggtttccctaaattcatata

SEQ ID NO: 3277904 - DNA, 25 bp, Homo sapien
catgctttctcataagactttctgg

SEQ ID NO: 3277905 - DNA, 25 bp, Homo sapien
tagaaattcaaatccacattatgat

SEQ ID NO: 3277906 - DNA, 25 bp, Homo sapien
taattggccttccatgattaatgtg

SEQ ID NO: 3277907 - DNA, 25 bp, Homo sapien
actcttcttgatgaagctactttgc

SEQ ID NO: 3277908 - DNA, 25 bp, Homo sapien
tgcttactggtccatttaaaagaaa

SEQ ID NO: 3277909 - DNA, 25 bp, Homo sapien
ccagagatggtctgtccgaagatca

SEQ ID NO: 3277910 - DNA, 25 bp, Homo sapien
cggtcgtaaatagagaatgggctgc

SEQ ID NO: 3277911 - DNA, 25 bp, Homo sapien
gaatgaaaccagcttcacctgtgga

SEQ ID NO: 3277912 - DNA, 25 bp, Homo sapien
caaacgcctttgtgagcagactccc

SEQ ID NO: 3277913 - DNA, 25 bp, Homo sapien
ctgctttactccactctgctttata

SEQ ID NO: 3277914 - DNA, 25 bp, Homo sapien
gctttactccactctgctttataaa

SEQ ID NO: 3277915 - DNA, 25 bp, Homo sapien
tactccactctgctttataaaaact

SEQ ID NO: 3277916 - DNA, 25 bp, Homo sapien
ctccactctgctttataaaaactga

SEQ ID NO: 3277917 - DNA, 25 bp, Homo sapien
tatgcaggagcacatgctggatcca

SEQ ID NO: 3277918 - DNA, 25 bp, Homo sapien
gatttgtccgggtggcaatactgta

SEQ ID NO: 3277919 - DNA, 25 bp, Homo sapien
tagtttgtatcctcacgacgtccat

SEQ ID NO: 3277920 - DNA, 25 bp, Homo sapien
caacccttactggattatgcaggag

SEQ ID NO: 3277921 - DNA, 25 bp, Homo sapien
gagaaagcctgtatcatcagatgca

SEQ ID NO: 3277922 - DNA, 25 bp, Homo sapien
gactataccattaaccagattaaag

SEQ ID NO: 3277923 - DNA, 25 bp, Homo sapien
tactgttggtgaggtttcagaagaa

SEQ ID NO: 3277924 - DNA, 25 bp, Homo sapien
tgaacttggatatttggcagaggag

SEQ ID NO: 3277925 - DNA, 25 bp, Homo sapien
tgaagccataggtcaggcagacatc

SEQ ID NO: 3277926 - DNA, 25 bp, Homo sapien
gacagtagcctgatcaaagtgatac

SEQ ID NO: 3277927 - DNA, 25 bp, Homo sapien
gattctagggtttcatcagggacca

SEQ ID NO: 3277928 - DNA, 25 bp, Homo sapien
gaatgcattcctctgtcaggttcca

SEQ ID NO: 3277929 - DNA, 25 bp, Homo sapien
aatatgagatataaacagaaactaa

SEQ ID NO: 3277930 - DNA, 25 bp, Homo sapien
atgagatataaacagaaactaatac

SEQ ID NO: 3277931 - DNA, 25 bp, Homo sapien
tatgagatataaacagaaactaata

SEQ ID NO: 3277932 - DNA, 25 bp, Homo sapien
tgagatataaacagaaactaataca

SEQ ID NO: 3277933 - DNA, 25 bp, Homo sapien
catggttaggcctggcaaaaggaca

SEQ ID NO: 3277934 - DNA, 25 bp, Homo sapien
tgagttgcgtaaagtggcctagagc

SEQ ID NO: 3277935 - DNA, 25 bp, Homo sapien
tgaaatttaccactatgcactgagc

SEQ ID NO: 3277936 - DNA, 25 bp, Homo sapien
tgtagctggcaaaagtctctgatca

SEQ ID NO: 3277937 - DNA, 25 bp, Homo sapien
gacacattactataaacgccaggcc

SEQ ID NO: 3277938 - DNA, 25 bp, Homo sapien
gactttggaaaagcagacggagccc

SEQ ID NO: 3277939 - DNA, 25 bp, Homo sapien
gacggagccccatgaagttaatcca

SEQ ID NO: 3277940 - DNA, 25 bp, Homo sapien
taatccaaataatgtccaccgtcct

SEQ ID NO: 3277941 - DNA, 25 bp, Homo sapien
tggcaatcaagtgagggcccagaca

SEQ ID NO: 3277942 - DNA, 25 bp, Homo sapien
tgatgacccctgagacagaggtagt

SEQ ID NO: 3277943 - DNA, 25 bp, Homo sapien
gacatttgaggacatgctggcaatc

SEQ ID NO: 3277944 - DNA, 25 bp, Homo sapien
agtagatgagacagtagaaggcacc

SEQ ID NO: 3277945 - DNA, 25 bp, Homo sapien
tgaataaagaggatgggtgtaattg

SEQ ID NO: 3277946 - DNA, 25 bp, Homo sapien
aattgtggggattgcttgtgtacca

SEQ ID NO: 3277947 - DNA, 25 bp, Homo sapien
aataaagaggatgggtgtaattgtg

SEQ ID NO: 3277948 - DNA, 25 bp, Homo sapien
tgtaattgtggggattgcttgtgta

SEQ ID NO: 3277949 - DNA, 25 bp, Homo sapien
tcatagccagcacatatcatccgag

SEQ ID NO: 3277950 - DNA, 25 bp, Homo sapien
gcatgaatcaactgtgccagactca

SEQ ID NO: 3277951 - DNA, 25 bp, Homo sapien
ggtgatggtcttcatgtcaaagtag

SEQ ID NO: 3277952 - DNA, 25 bp, Homo sapien
tgttccagagaaataatgcggacct

SEQ ID NO: 3277953 - DNA, 25 bp, Homo sapien
tatgctacaaccaaaacaatagcta

SEQ ID NO: 3277954 - DNA, 25 bp, Homo sapien
atatgctacaaccaaaacaatagct

SEQ ID NO: 3277955 - DNA, 25 bp, Homo sapien
catatgctacaaccaaaacaatagc

SEQ ID NO: 3277956 - DNA, 25 bp, Homo sapien
cagccattacttgatgtaagaacct

SEQ ID NO: 3277957 - DNA, 25 bp, Homo sapien
gccattacttgatgtaagaacctct

SEQ ID NO: 3277958 - DNA, 25 bp, Homo sapien
cagcagccattacttgatgtaagaa

SEQ ID NO: 3277959 - DNA, 25 bp, Homo sapien
gcagccattacttgatgtaagaacc

SEQ ID NO: 3277960 - DNA, 25 bp, Homo sapien
tagcagtacgtgtcaggctctagcc

SEQ ID NO: 3277961 - DNA, 25 bp, Homo sapien
gatgtcttcactcagctcaacgatg

SEQ ID NO: 3277962 - DNA, 25 bp, Homo sapien
gatggtcttcacaaagcgtgtctgc

SEQ ID NO: 3277963 - DNA, 25 bp, Homo sapien
ggccccagcctgtgatatagcagta

SEQ ID NO: 3277964 - DNA, 25 bp, Homo sapien
cactgatggatggtctagattgttg

SEQ ID NO: 3277965 - DNA, 25 bp, Homo sapien
gtctagattgttgatgccaagcacc

SEQ ID NO: 3277966 - DNA, 25 bp, Homo sapien
gatggatggtctagattgttgatgc

SEQ ID NO: 3277967 - DNA, 25 bp, Homo sapien
gatggtctagattgttgatgccaag

SEQ ID NO: 3277968 - DNA, 25 bp, Homo sapien
atggccaccttccagggcgactcgt

SEQ ID NO: 3277969 - DNA, 25 bp, Homo sapien
agcagtgggcaactgtcagaaccca

SEQ ID NO: 3277970 - DNA, 25 bp, Homo sapien
gatccttttgttcattcgggcagca

SEQ ID NO: 3277971 - DNA, 25 bp, Homo sapien
cacagatatgtccactgggttcact

SEQ ID NO: 3277972 - DNA, 25 bp, Homo sapien
ttttacttctgctctcacaagactg

SEQ ID NO: 3277973 - DNA, 25 bp, Homo sapien
tttacttctgctctcacaagactgc

SEQ ID NO: 3277974 - DNA, 25 bp, Homo sapien
tggagtgtaatgtcagccaccgcgg

SEQ ID NO: 3277975 - DNA, 25 bp, Homo sapien
gtggtcccattgaggctctcccagt

SEQ ID NO: 3277976 - DNA, 25 bp, Homo sapien
ctagaagttcatgtaaagtggtccc

SEQ ID NO: 3277977 - DNA, 25 bp, Homo sapien
taatgtcagccaccgcggctctttc

SEQ ID NO: 3277978 - DNA, 25 bp, Homo sapien
attcacttatcagcaaacactgaag

SEQ ID NO: 3277979 - DNA, 25 bp, Homo sapien
cataaaatttctattgtataaagaa

SEQ ID NO: 3277980 - DNA, 25 bp, Homo sapien
tccattcacttatcagcaaacactg

SEQ ID NO: 3277981 - DNA, 25 bp, Homo sapien
taaacccatctgcttgcaggccagc

SEQ ID NO: 3277982 - DNA, 25 bp, Homo sapien
ggcagctctgtgaaccatcagaaag

SEQ ID NO: 3277983 - DNA, 25 bp, Homo sapien
tgcacacacatggtgttctgtggca

SEQ ID NO: 3277984 - DNA, 25 bp, Homo sapien
tgcaggccagctgactcaatatctc

SEQ ID NO: 3277985 - DNA, 25 bp, Homo sapien
tcagcactatcagcttttataacag

SEQ ID NO: 3277986 - DNA, 25 bp, Homo sapien
taggatccattcagcttcagtggct

SEQ ID NO: 3277987 - DNA, 25 bp, Homo sapien
acaggcatgagagagtacaacagat

SEQ ID NO: 3277988 - DNA, 25 bp, Homo sapien
caacagatggcagaaacaagtagct

SEQ ID NO: 3277989 - DNA, 25 bp, Homo sapien
gcttcaccatcacaccacaggtcac

SEQ ID NO: 3277990 - DNA, 25 bp, Homo sapien
cacacgcatggtttgcacattccag

SEQ ID NO: 3277991 - DNA, 25 bp, Homo sapien
aactgtctgagcagtcggcttcacc

SEQ ID NO: 3277992 - DNA, 25 bp, Homo sapien
accacaggtcacgtgacacacacgc

SEQ ID NO: 3277993 - DNA, 25 bp, Homo sapien
tcaaacattgtttattggatggaca

SEQ ID NO: 3277994 - DNA, 25 bp, Homo sapien
ggaacccatcgcagatcactgtgtg

SEQ ID NO: 3277995 - DNA, 25 bp, Homo sapien
cattgtttattggatggacattccc

SEQ ID NO: 3277996 - DNA, 25 bp, Homo sapien
tgtaatcagggcagtctgggaaccc

SEQ ID NO: 3277997 - DNA, 25 bp, Homo sapien
aaaggctggaacagtctggatccag

SEQ ID NO: 3277998 - DNA, 25 bp, Homo sapien
gagtggagccgctcacaaggaggaa

SEQ ID NO: 3277999 - DNA, 25 bp, Homo sapien
gaaggagacaaggtaatactgcatt

SEQ ID NO: 3278000 - DNA, 25 bp, Homo sapien
tactgcattattgagctgacaaagg

SEQ ID NO: 3278001 - DNA, 25 bp, Homo sapien
tatttaagatcaagaggagaccaaa

SEQ ID NO: 3278002 - DNA, 25 bp, Homo sapien
cagaaagtcacttaatgacactcag

SEQ ID NO: 3278003 - DNA, 25 bp, Homo sapien
tttacttagaatagtgatcaattag

SEQ ID NO: 3278004 - DNA, 25 bp, Homo sapien
tctccatatgatgtataccatttta

SEQ ID NO: 3278005 - DNA, 25 bp, Homo sapien
gggagttgctgcttgcttgcatcac

SEQ ID NO: 3278006 - DNA, 25 bp, Homo sapien
ctcttgtagctgacccaaatcgtgg

SEQ ID NO: 3278007 - DNA, 25 bp, Homo sapien
tgcttgcatcacagcccaggtacca

SEQ ID NO: 3278008 - DNA, 25 bp, Homo sapien
cacctgctcttgtagctgacccaaa

SEQ ID NO: 3278009 - DNA, 25 bp, Homo sapien
tgcttggaaaatgttacgttgaaaa

SEQ ID NO: 3278010 - DNA, 25 bp, Homo sapien
aatgttacgttgaaaataaactcat

SEQ ID NO: 3278011 - DNA, 25 bp, Homo sapien
taacctcagcctcacacactcaaat

SEQ ID NO: 3278012 - DNA, 25 bp, Homo sapien
gaacagctgaaacatacaatccctt

SEQ ID NO: 3278013 - DNA, 25 bp, Homo sapien
tcacagtcggcctggccatcacatc

SEQ ID NO: 3278014 - DNA, 25 bp, Homo sapien
acactgtcctgagcggcacttgaaa

SEQ ID NO: 3278015 - DNA, 25 bp, Homo sapien
cacactgtcctgagcggcacttgaa

SEQ ID NO: 3278016 - DNA, 25 bp, Homo sapien
cggcctggccatcacatcttctgga

SEQ ID NO: 3278017 - DNA, 25 bp, Homo sapien
ctgtaggcccacaatcccaagaaca

SEQ ID NO: 3278018 - DNA, 25 bp, Homo sapien
gaaattgactgcaatctgtgtcttc

SEQ ID NO: 3278019 - DNA, 25 bp, Homo sapien
agaacagactcacagcgttctttag

SEQ ID NO: 3278020 - DNA, 25 bp, Homo sapien
gactcacagcgttctttagagtgtt

SEQ ID NO: 3278021 - DNA, 25 bp, Homo sapien
gtatttataacagttggtttgaaca

SEQ ID NO: 3278022 - DNA, 25 bp, Homo sapien
ctgcaaggagggatatgctcgcctg

SEQ ID NO: 3278023 - DNA, 25 bp, Homo sapien
tggtttgaacaagtgcagggaaaag

SEQ ID NO: 3278024 - DNA, 25 bp, Homo sapien
ggtaccaaaatggtgcaagaaaaga

SEQ ID NO: 3278025 - DNA, 25 bp, Homo sapien
tccaatgtaattggttcacattgac

SEQ ID NO: 3278026 - DNA, 25 bp, Homo sapien
aatttggataacttgtactgttgta

SEQ ID NO: 3278027 - DNA, 25 bp, Homo sapien
aaattcatgcagagttccaatgtaa

SEQ ID NO: 3278028 - DNA, 25 bp, Homo sapien
caaaataatttggataacttgtact

SEQ ID NO: 3278029 - DNA, 25 bp, Homo sapien
tggagctgttacactgtcaccgaaa

SEQ ID NO: 3278030 - DNA, 25 bp, Homo sapien
attagcctaatggttccgaaaccat

SEQ ID NO: 3278031 - DNA, 25 bp, Homo sapien
gtcaccgaaacaaattagcctaatg

SEQ ID NO: 3278032 - DNA, 25 bp, Homo sapien
gaaaccattacaggtcatcagagtt

SEQ ID NO: 3278033 - DNA, 25 bp, Homo sapien
tgtagaggcatctttggtctccttc

SEQ ID NO: 3278034 - DNA, 25 bp, Homo sapien
tcaaggcagggattgtagaggcatc

SEQ ID NO: 3278035 - DNA, 25 bp, Homo sapien
cagactgttgttcgggtcacagaga

SEQ ID NO: 3278036 - DNA, 25 bp, Homo sapien
gagctaccaccacatgaatcaaggc

SEQ ID NO: 3278037 - DNA, 25 bp, Homo sapien
gaattatgtttagcacaagaaagtg

SEQ ID NO: 3278038 - DNA, 25 bp, Homo sapien
attttcagtgtaagttgcttgagaa

SEQ ID NO: 3278039 - DNA, 25 bp, Homo sapien
tgagaattatgtttagcacaagaaa

SEQ ID NO: 3278040 - DNA, 25 bp, Homo sapien
gtttcctggctgactagggctgtga

SEQ ID NO: 3278041 - DNA, 25 bp, Homo sapien
tcaaatgtgttcctttgttcccaag

SEQ ID NO: 3278042 - DNA, 25 bp, Homo sapien
ggagaggaccaccagtaaaggaatg

SEQ ID NO: 3278043 - DNA, 25 bp, Homo sapien
caaatgtgttcctttgttcccaagg

SEQ ID NO: 3278044 - DNA, 25 bp, Homo sapien
agaggaccaccagtaaaggaatgtt

SEQ ID NO: 3278045 - DNA, 25 bp, Homo sapien
aacgtgctggggatacattgtccat

SEQ ID NO: 3278046 - DNA, 25 bp, Homo sapien
ctggggatacattgtccatttctgc

SEQ ID NO: 3278047 - DNA, 25 bp, Homo sapien
cctcgtcaccatcacattgaaacgt

SEQ ID NO: 3278048 - DNA, 25 bp, Homo sapien
caccatcacattgaaacgtgctggg

SEQ ID NO: 3278049 - DNA, 25 bp, Homo sapien
tgaaaacatgttagggcactcctgc

SEQ ID NO: 3278050 - DNA, 25 bp, Homo sapien
gactcagtgatctttacaggctaga

SEQ ID NO: 3278051 - DNA, 25 bp, Homo sapien
tgtgggcagagcatcacctttgaca

SEQ ID NO: 3278052 - DNA, 25 bp, Homo sapien
tttgcagaagaaaggttccccattc

SEQ ID NO: 3278053 - DNA, 25 bp, Homo sapien
gttgacctcgtcagacttatccaca

SEQ ID NO: 3278054 - DNA, 25 bp, Homo sapien
cagttgacctcgtcagacttatcca

SEQ ID NO: 3278055 - DNA, 25 bp, Homo sapien
agcagttgacctcgtcagacttatc

SEQ ID NO: 3278056 - DNA, 25 bp, Homo sapien
gacctcgtcagacttatccacacag

SEQ ID NO: 3278057 - DNA, 25 bp, Homo sapien
cgtccccgcagcgatgctctgttgt

SEQ ID NO: 3278058 - DNA, 25 bp, Homo sapien
cccgcagcgatgctctgttgtggga

SEQ ID NO: 3278059 - DNA, 25 bp, Homo sapien
cagcgatgctctgttgtgggattgc

SEQ ID NO: 3278060 - DNA, 25 bp, Homo sapien
cgatgctctgttgtgggattgcaat

SEQ ID NO: 3278061 - DNA, 25 bp, Homo sapien
tgtgtttcacaatgcggctagcgga

SEQ ID NO: 3278062 - DNA, 25 bp, Homo sapien
gacagacttccggagtgaccatgga

SEQ ID NO: 3278063 - DNA, 25 bp, Homo sapien
gataagttcgctctcacaaagggca

SEQ ID NO: 3278064 - DNA, 25 bp, Homo sapien
taacaggcaggattctatggctccc

SEQ ID NO: 3278065 - DNA, 25 bp, Homo sapien
tttgtccagggtgtatcctcatccc

SEQ ID NO: 3278066 - DNA, 25 bp, Homo sapien
cattgtctgatatcatttgtccagg

SEQ ID NO: 3278067 - DNA, 25 bp, Homo sapien
aaaccaccaggtttcccagcatggg

SEQ ID NO: 3278068 - DNA, 25 bp, Homo sapien
gatgttatctaatgcaggacattgt

SEQ ID NO: 3278069 - DNA, 25 bp, Homo sapien
caaatctaacgtaagccactggctc

SEQ ID NO: 3278070 - DNA, 25 bp, Homo sapien
gaaacagaacacatttgaggagagg

SEQ ID NO: 3278071 - DNA, 25 bp, Homo sapien
cagtcacatgtaccaagggaatcag

SEQ ID NO: 3278072 - DNA, 25 bp, Homo sapien
gacagtgactgaacaaacttcctcc

SEQ ID NO: 3278073 - DNA, 25 bp, Homo sapien
cacacaaggctgtaattaaggcact

SEQ ID NO: 3278074 - DNA, 25 bp, Homo sapien
tcatcatatccatcacacacaaggc

SEQ ID NO: 3278075 - DNA, 25 bp, Homo sapien
cagtgaaacagattctcgctgcagt

SEQ ID NO: 3278076 - DNA, 25 bp, Homo sapien
gttttgctcatcactcaaatcccca

SEQ ID NO: 3278077 - DNA, 25 bp, Homo sapien
ataaaagaagccaccagtgtgtcat

SEQ ID NO: 3278078 - DNA, 25 bp, Homo sapien
tatcagctgtccccacgacttccag

SEQ ID NO: 3278079 - DNA, 25 bp, Homo sapien
tcagctgtccccacgacttccagtg

SEQ ID NO: 3278080 - DNA, 25 bp, Homo sapien
gacttccagtggtcattctctgcac

SEQ ID NO: 3278081 - DNA, 25 bp, Homo sapien
cacgacttccagtggtcattctctg

SEQ ID NO: 3278082 - DNA, 25 bp, Homo sapien
agccattacattgcagtttcccggg

SEQ ID NO: 3278083 - DNA, 25 bp, Homo sapien
cgtcacagtcgttgtagccattaca

SEQ ID NO: 3278084 - DNA, 25 bp, Homo sapien
tttcccggggatgcagattccactg

SEQ ID NO: 3278085 - DNA, 25 bp, Homo sapien
tgcaatgagcctcgtcactccagtc

SEQ ID NO: 3278086 - DNA, 25 bp, Homo sapien
ccaaaggatgatcagctcttttcag

SEQ ID NO: 3278087 - DNA, 25 bp, Homo sapien
aaaggatgatcagctcttttcagca

SEQ ID NO: 3278088 - DNA, 25 bp, Homo sapien
aaggatgatcagctcttttcagcat

SEQ ID NO: 3278089 - DNA, 25 bp, Homo sapien
caaaggatgatcagctcttttcagc

SEQ ID NO: 3278090 - DNA, 25 bp, Homo sapien
tttatactggtaaacaggaatgatg

SEQ ID NO: 3278091 - DNA, 25 bp, Homo sapien
ttatactggtaaacaggaatgatgg

SEQ ID NO: 3278092 - DNA, 25 bp, Homo sapien
ggcagccatactcagcacgtagtcg

SEQ ID NO: 3278093 - DNA, 25 bp, Homo sapien
tccgaaatttgttggtatcataagc

SEQ ID NO: 3278094 - DNA, 25 bp, Homo sapien
ccaacttttgcctttccgtctggcg

SEQ ID NO: 3278095 - DNA, 25 bp, Homo sapien
gctctaaactgctctactctatgga

SEQ ID NO: 3278096 - DNA, 25 bp, Homo sapien
tcacagctgtagaaaagttcttccg

SEQ ID NO: 3278097 - DNA, 25 bp, Homo sapien
ggagaaagaagcagtctgatgtcac

SEQ ID NO: 3278098 - DNA, 25 bp, Homo sapien
aaagaagcagtctgatgtcacgcgc

SEQ ID NO: 3278099 - DNA, 25 bp, Homo sapien
agaaagaagcagtctgatgtcacgc

SEQ ID NO: 3278100 - DNA, 25 bp, Homo sapien
aagaagcagtctgatgtcacgcgct

SEQ ID NO: 3278101 - DNA, 25 bp, Homo sapien
ccgccccacccggcctgataaagcg

SEQ ID NO: 3278102 - DNA, 25 bp, Homo sapien
gccccacccggcctgataaagcgcg

SEQ ID NO: 3278103 - DNA, 25 bp, Homo sapien
cccacccggcctgataaagcgcgcc

SEQ ID NO: 3278104 - DNA, 25 bp, Homo sapien
cacccggcctgataaagcgcgccaa

SEQ ID NO: 3278105 - DNA, 25 bp, Homo sapien
cataggatttgtgttagccgtggtg

SEQ ID NO: 3278106 - DNA, 25 bp, Homo sapien
tttgctcgaagccttcagtccgttg

SEQ ID NO: 3278107 - DNA, 25 bp, Homo sapien
ttgctcgaagccttcagtccgttgc

SEQ ID NO: 3278108 - DNA, 25 bp, Homo sapien
gaaatcctgacaccccatggatcac

SEQ ID NO: 3278109 - DNA, 25 bp, Homo sapien
tctgcaggccgaaagagccgtggcc

SEQ ID NO: 3278110 - DNA, 25 bp, Homo sapien
aagttccaccacactatttgtggtt

SEQ ID NO: 3278111 - DNA, 25 bp, Homo sapien
catggatcaccaaaccagtccacaa

SEQ ID NO: 3278112 - DNA, 25 bp, Homo sapien
ctggaatctttctctagtcgaaatc

SEQ ID NO: 3278113 - DNA, 25 bp, Homo sapien
ttccctcctattgcctttgtcagaa

SEQ ID NO: 3278114 - DNA, 25 bp, Homo sapien
ttggctctggtcttatttcgctcat

SEQ ID NO: 3278115 - DNA, 25 bp, Homo sapien
aatggctgactcaagcaagtgtgcc

SEQ ID NO: 3278116 - DNA, 25 bp, Homo sapien
gaaatccggccaggagtaattcacc

SEQ ID NO: 3278117 - DNA, 25 bp, Homo sapien
ccaggactgattcacagccttcttt

SEQ ID NO: 3278118 - DNA, 25 bp, Homo sapien
tcacagaaggacctacagggcagga

SEQ ID NO: 3278119 - DNA, 25 bp, Homo sapien
agcctcacagaaggacctacagggc

SEQ ID NO: 3278120 - DNA, 25 bp, Homo sapien
actgaataatctgggttccgaaata

SEQ ID NO: 3278121 - DNA, 25 bp, Homo sapien
ctgaataatctgggttccgaaatac

SEQ ID NO: 3278122 - DNA, 25 bp, Homo sapien
tcaatgatgcactcagggaaggcga

SEQ ID NO: 3278123 - DNA, 25 bp, Homo sapien
tacagccaaacagcatgatatgttg

SEQ ID NO: 3278124 - DNA, 25 bp, Homo sapien
catgtttctgacaactgagaggaga

SEQ ID NO: 3278125 - DNA, 25 bp, Homo sapien
caactgaggcgatggagatatgtga

SEQ ID NO: 3278126 - DNA, 25 bp, Homo sapien
tgctctttctgggaggaacccaata

SEQ ID NO: 3278127 - DNA, 25 bp, Homo sapien
tcagaagcctagttctgcagatgac

SEQ ID NO: 3278128 - DNA, 25 bp, Homo sapien
atgactgagtttgctctttctggga

SEQ ID NO: 3278129 - DNA, 25 bp, Homo sapien
gtttgctctttctgggaggaaccca

SEQ ID NO: 3278130 - DNA, 25 bp, Homo sapien
caaactctcctctaagatagttgcc

SEQ ID NO: 3278131 - DNA, 25 bp, Homo sapien
taagagatttaccagatttcagata

SEQ ID NO: 3278132 - DNA, 25 bp, Homo sapien
cagatatctaattagactccctttc

SEQ ID NO: 3278133 - DNA, 25 bp, Homo sapien
tagttgcctgatgagtagtaatcca

SEQ ID NO: 3278134 - DNA, 25 bp, Homo sapien
catttaaggtgaaggctaagctaag

SEQ ID NO: 3278135 - DNA, 25 bp, Homo sapien
gtacaataaaatacacgagctgtcc

SEQ ID NO: 3278136 - DNA, 25 bp, Homo sapien
gagaatcagtatccacaaaataggc

SEQ ID NO: 3278137 - DNA, 25 bp, Homo sapien
ttaaatcaacaacggtggctgggcg

SEQ ID NO: 3278138 - DNA, 25 bp, Homo sapien
tacccaaaagatcttggttggcaaa

SEQ ID NO: 3278139 - DNA, 25 bp, Homo sapien
gaagattcaggatccggttatcaaa

SEQ ID NO: 3278140 - DNA, 25 bp, Homo sapien
aagtccttgctgaaacatagtatga

SEQ ID NO: 3278141 - DNA, 25 bp, Homo sapien
tgaacattaactatgggccttttcc

SEQ ID NO: 3278142 - DNA, 25 bp, Homo sapien
tgaccggcaagtgattgtgaactaa

SEQ ID NO: 3278143 - DNA, 25 bp, Homo sapien
gaactaaaagcattggttgccaaac

SEQ ID NO: 3278144 - DNA, 25 bp, Homo sapien
gcaagtgattgtgaactaaaagcat

SEQ ID NO: 3278145 - DNA, 25 bp, Homo sapien
tttcctgtgtgaccggcaagtgatt

SEQ ID NO: 3278146 - DNA, 25 bp, Homo sapien
gaccaaaggttcactcccatttgat

SEQ ID NO: 3278147 - DNA, 25 bp, Homo sapien
gagaagcatccgtagtccaggctgg

SEQ ID NO: 3278148 - DNA, 25 bp, Homo sapien
tgtgcagtagacaccacagtgctct

SEQ ID NO: 3278149 - DNA, 25 bp, Homo sapien
tgtaagaataacatcggacccttgg

SEQ ID NO: 3278150 - DNA, 25 bp, Homo sapien
tagcagtcgccagcttctgagagca

SEQ ID NO: 3278151 - DNA, 25 bp, Homo sapien
tcaggaccagcaataggaaccggag

SEQ ID NO: 3278152 - DNA, 25 bp, Homo sapien
cagccattgcccatgttattgtcat

SEQ ID NO: 3278153 - DNA, 25 bp, Homo sapien
caagagaacgagagcacagatacat

SEQ ID NO: 3278154 - DNA, 25 bp, Homo sapien
tgcatttagtgacaagttgaaatat

SEQ ID NO: 3278155 - DNA, 25 bp, Homo sapien
taaacgctaacaactctgaggacat

SEQ ID NO: 3278156 - DNA, 25 bp, Homo sapien
gttgaaatataaggaggagcctgcc

SEQ ID NO: 3278157 - DNA, 25 bp, Homo sapien
tgattgccaattaaacgctaacaac

SEQ ID NO: 3278158 - DNA, 25 bp, Homo sapien
ggtgcacctacttgaatacccctga

SEQ ID NO: 3278159 - DNA, 25 bp, Homo sapien
tctagctggggggtgcacctacttg

SEQ ID NO: 3278160 - DNA, 25 bp, Homo sapien
accaaaggtgagtcctcatctatca

SEQ ID NO: 3278161 - DNA, 25 bp, Homo sapien
acttgaatacccctgaccaaaggtg

SEQ ID NO: 3278162 - DNA, 25 bp, Homo sapien
agccctgataccaatgactgtctct

SEQ ID NO: 3278163 - DNA, 25 bp, Homo sapien
cctgggccatctggtggaagagccc

SEQ ID NO: 3278164 - DNA, 25 bp, Homo sapien
gactgtctctcctcgttctgttcac

SEQ ID NO: 3278165 - DNA, 25 bp, Homo sapien
ctggcacccagcttgatcctgggcc

SEQ ID NO: 3278166 - DNA, 25 bp, Homo sapien
cagggttatgccaaaattaatttca

SEQ ID NO: 3278167 - DNA, 25 bp, Homo sapien
taatcaccagtaagtcctgacttca

SEQ ID NO: 3278168 - DNA, 25 bp, Homo sapien
ttcaaaactatctgcttaaatgtgt

SEQ ID NO: 3278169 - DNA, 25 bp, Homo sapien
tgtgtccttggacaataatcaccag

SEQ ID NO: 3278170 - DNA, 25 bp, Homo sapien
cccctttctggtagcggtctgacgt

SEQ ID NO: 3278171 - DNA, 25 bp, Homo sapien
caattgtgcctatgtcagtcatcga

SEQ ID NO: 3278172 - DNA, 25 bp, Homo sapien
catcgaagtcttgtacaggagtccg

SEQ ID NO: 3278173 - DNA, 25 bp, Homo sapien
tgcagagtttcgcttccatcgataa

SEQ ID NO: 3278174 - DNA, 25 bp, Homo sapien
tgaaggaaaccctgcccatgaccct

SEQ ID NO: 3278175 - DNA, 25 bp, Homo sapien
tggtggtcgggaccagggccgtgcg

SEQ ID NO: 3278176 - DNA, 25 bp, Homo sapien
gagccgactcgaacactgaaggaaa

SEQ ID NO: 3278177 - DNA, 25 bp, Homo sapien
accgtgcggaggagggactctgcag

SEQ ID NO: 3278178 - DNA, 25 bp, Homo sapien
ctcttccggagcgagggcaggagac

SEQ ID NO: 3278179 - DNA, 25 bp, Homo sapien
gcgctcttccggagcgagggcagga

SEQ ID NO: 3278180 - DNA, 25 bp, Homo sapien
gcagcgctcttccggagcgagggca

SEQ ID NO: 3278181 - DNA, 25 bp, Homo sapien
cttccggagcgagggcaggagactg

SEQ ID NO: 3278182 - DNA, 25 bp, Homo sapien
aaagtctcgcttattcttctgtcca

SEQ ID NO: 3278183 - DNA, 25 bp, Homo sapien
ctttaagcgccaggggccccatatt

SEQ ID NO: 3278184 - DNA, 25 bp, Homo sapien
tatcttggtcgcttttctctcctct

SEQ ID NO: 3278185 - DNA, 25 bp, Homo sapien
ggcactacggatgattttctccaag

SEQ ID NO: 3278186 - DNA, 25 bp, Homo sapien
catcccaggatgataacaggcaagc

SEQ ID NO: 3278187 - DNA, 25 bp, Homo sapien
gatatgctaccccatggctcatcta

SEQ ID NO: 3278188 - DNA, 25 bp, Homo sapien
ccagatgaacaacctagacagagtt

SEQ ID NO: 3278189 - DNA, 25 bp, Homo sapien
aagagatcacggagaagcaagcagc

SEQ ID NO: 3278190 - DNA, 25 bp, Homo sapien
tgacatggagctccctcaataacag

SEQ ID NO: 3278191 - DNA, 25 bp, Homo sapien
taaatatgcccctacctttggccag

SEQ ID NO: 3278192 - DNA, 25 bp, Homo sapien
cgtggagctccctcaatgacatgga

SEQ ID NO: 3278193 - DNA, 25 bp, Homo sapien
gaattggagcctaaaaaatctggga

SEQ ID NO: 3278194 - DNA, 25 bp, Homo sapien
cgctcagattgaacctaaaaggaca

SEQ ID NO: 3278195 - DNA, 25 bp, Homo sapien
ggtcattcaggtcacggctctaata

SEQ ID NO: 3278196 - DNA, 25 bp, Homo sapien
cataaactggcctagacacatcctc

SEQ ID NO: 3278197 - DNA, 25 bp, Homo sapien
tttctctatatcgtagccagcggtc

SEQ ID NO: 3278198 - DNA, 25 bp, Homo sapien
attttgaattagatccagcataatt

SEQ ID NO: 3278199 - DNA, 25 bp, Homo sapien
aaattttgaattagatccagcataa

SEQ ID NO: 3278200 - DNA, 25 bp, Homo sapien
aattttgaattagatccagcataat

SEQ ID NO: 3278201 - DNA, 25 bp, Homo sapien
attataggctcctgaatattttagc

SEQ ID NO: 3278202 - DNA, 25 bp, Homo sapien
gtcttccacatgaagtatcagaatt

SEQ ID NO: 3278203 - DNA, 25 bp, Homo sapien
cattgacactaatgcctaacttaaa

SEQ ID NO: 3278204 - DNA, 25 bp, Homo sapien
ggtatccatcaatgactgtcttcca

SEQ ID NO: 3278205 - DNA, 25 bp, Homo sapien
tctaacaacagctgagagaatacag

SEQ ID NO: 3278206 - DNA, 25 bp, Homo sapien
ggtacatagacctcataagccctgt

SEQ ID NO: 3278207 - DNA, 25 bp, Homo sapien
gttttacgaaacatgccaacttcag

SEQ ID NO: 3278208 - DNA, 25 bp, Homo sapien
ttctgaagaacacgccccatgacat

SEQ ID NO: 3278209 - DNA, 25 bp, Homo sapien
ttaattgacatcatgggtgatgtac

SEQ ID NO: 3278210 - DNA, 25 bp, Homo sapien
ggcaaacactacaaccacaactcca

SEQ ID NO: 3278211 - DNA, 25 bp, Homo sapien
caggcaaacactacaaccacaactc

SEQ ID NO: 3278212 - DNA, 25 bp, Homo sapien
aacactacaaccacaactccacaca

SEQ ID NO: 3278213 - DNA, 25 bp, Homo sapien
atgagataatatttatgtttttgcc

SEQ ID NO: 3278214 - DNA, 25 bp, Homo sapien
cttccgacgacccttcagtctgttt

SEQ ID NO: 3278215 - DNA, 25 bp, Homo sapien
tcttcttccgacgacccttcagtct

SEQ ID NO: 3278216 - DNA, 25 bp, Homo sapien
tgttcttcttccgacgacccttcag

SEQ ID NO: 3278217 - DNA, 25 bp, Homo sapien
ctgttcttcttccgacgacccttca

SEQ ID NO: 3278218 - DNA, 25 bp, Homo sapien
cttcaagagcagctttggcttctgc

SEQ ID NO: 3278219 - DNA, 25 bp, Homo sapien
ttcaagagcagctttggcttctgct

SEQ ID NO: 3278220 - DNA, 25 bp, Homo sapien
tcacgtactttgttgcactgcaatt

SEQ ID NO: 3278221 - DNA, 25 bp, Homo sapien
cacgttgtgtcacattctattgaaa

SEQ ID NO: 3278222 - DNA, 25 bp, Homo sapien
ttttcacgtactttgttgcactgca

SEQ ID NO: 3278223 - DNA, 25 bp, Homo sapien
cttgcacgttgtgtcacattctatt

SEQ ID NO: 3278224 - DNA, 25 bp, Homo sapien
aaatgatttttccctcaaagacctg

SEQ ID NO: 3278225 - DNA, 25 bp, Homo sapien
tttttccctcaaagacctgtctgcc

SEQ ID NO: 3278226 - DNA, 25 bp, Homo sapien
gatttttccctcaaagacctgtctg

SEQ ID NO: 3278227 - DNA, 25 bp, Homo sapien
atgatttttccctcaaagacctgtc

SEQ ID NO: 3278228 - DNA, 25 bp, Homo sapien
ttcaaatagtgattacttgcttatt

SEQ ID NO: 3278229 - DNA, 25 bp, Homo sapien
tcaaatagtgattacttgcttattt

SEQ ID NO: 3278230 - DNA, 25 bp, Homo sapien
tttaatgatgatatagttgcaagca

SEQ ID NO: 3278231 - DNA, 25 bp, Homo sapien
taatgatgatatagttgcaagcatt

SEQ ID NO: 3278232 - DNA, 25 bp, Homo sapien
gaacagctaagccttcccaagggaa

SEQ ID NO: 3278233 - DNA, 25 bp, Homo sapien
tcacgaagttgtggccaaagcccag

SEQ ID NO: 3278234 - DNA, 25 bp, Homo sapien
tagcctccctggtatgccgagtctg

SEQ ID NO: 3278235 - DNA, 25 bp, Homo sapien
tgccacagcctaagctaagcgaggg

SEQ ID NO: 3278236 - DNA, 25 bp, Homo sapien
caatactgatggtaaaaagaatttc

SEQ ID NO: 3278237 - DNA, 25 bp, Homo sapien
gcaatgaaacattctacccgttaca

SEQ ID NO: 3278238 - DNA, 25 bp, Homo sapien
caagccatttcttaagcaatgaaac

SEQ ID NO: 3278239 - DNA, 25 bp, Homo sapien
tctaaagcacattgaccaaaacagg

SEQ ID NO: 3278240 - DNA, 25 bp, Homo sapien
acattcaccaggatgacacatctct

SEQ ID NO: 3278241 - DNA, 25 bp, Homo sapien
cattcaccaggatgacacatctctt

SEQ ID NO: 3278242 - DNA, 25 bp, Homo sapien
cttctggttgcagttaaagggacat

SEQ ID NO: 3278243 - DNA, 25 bp, Homo sapien
tctggttgcagttaaagggacattc

SEQ ID NO: 3278244 - DNA, 25 bp, Homo sapien
caatttcattgacgacttcaaagtc

SEQ ID NO: 3278245 - DNA, 25 bp, Homo sapien
ctggctaggtcttctgccttcaata

SEQ ID NO: 3278246 - DNA, 25 bp, Homo sapien
tctgcctcctaaaagacctcatact

SEQ ID NO: 3278247 - DNA, 25 bp, Homo sapien
tttgaccctgccacatactggtaaa

SEQ ID NO: 3278248 - DNA, 25 bp, Homo sapien
cacagccatggctatgctacctgtt

SEQ ID NO: 3278249 - DNA, 25 bp, Homo sapien
gtggctgcctgtgccaaaaggagcc

SEQ ID NO: 3278250 - DNA, 25 bp, Homo sapien
gcccttggatccatggtgagtctat

SEQ ID NO: 3278251 - DNA, 25 bp, Homo sapien
catggtgagtctattaggttttctc

SEQ ID NO: 3278252 - DNA, 25 bp, Homo sapien
tgtctaactgctatgacccacatca

SEQ ID NO: 3278253 - DNA, 25 bp, Homo sapien
gaacttgaaaggctcaatgatctga

SEQ ID NO: 3278254 - DNA, 25 bp, Homo sapien
caaaatgctgtggatatgaatagcc

SEQ ID NO: 3278255 - DNA, 25 bp, Homo sapien
gatctgaatggtaccaacacaaaag

SEQ ID NO: 3278256 - DNA, 25 bp, Homo sapien
ctttagggcactgatttttgcaaca

SEQ ID NO: 3278257 - DNA, 25 bp, Homo sapien
agggcactgatttttgcaacaactg

SEQ ID NO: 3278258 - DNA, 25 bp, Homo sapien
tagggcactgatttttgcaacaact

SEQ ID NO: 3278259 - DNA, 25 bp, Homo sapien
ttagggcactgatttttgcaacaac

SEQ ID NO: 3278260 - DNA, 25 bp, Homo sapien
caaaaatgaccccataagagagaga

SEQ ID NO: 3278261 - DNA, 25 bp, Homo sapien
ggaattccataaaaccctcaatgac

SEQ ID NO: 3278262 - DNA, 25 bp, Homo sapien
cccagatggtttcatagaggaattc

SEQ ID NO: 3278263 - DNA, 25 bp, Homo sapien
caatgaccagttaatcccaatgata

SEQ ID NO: 3278264 - DNA, 25 bp, Homo sapien
tatgcaaaggacgtcaacagccaat

SEQ ID NO: 3278265 - DNA, 25 bp, Homo sapien
catcaaaatgatggcgaaggaccaa

SEQ ID NO: 3278266 - DNA, 25 bp, Homo sapien
cagtttaaagacactcccatgggcc

SEQ ID NO: 3278267 - DNA, 25 bp, Homo sapien
caaggcagggccaatactatttaac

SEQ ID NO: 3278268 - DNA, 25 bp, Homo sapien
catacaggcttgtgatcttacagtg

SEQ ID NO: 3278269 - DNA, 25 bp, Homo sapien
tcctcacaatgaaggcattctgggc

SEQ ID NO: 3278270 - DNA, 25 bp, Homo sapien
ggtgacatcgcaaaatacatgggtg

SEQ ID NO: 3278271 - DNA, 25 bp, Homo sapien
aacctagtggccgtgacttggagca

SEQ ID NO: 3278272 - DNA, 25 bp, Homo sapien
cctatgtggtacacctacaaaaatc

SEQ ID NO: 3278273 - DNA, 25 bp, Homo sapien
catttgctcttcctatgtggtacac

SEQ ID NO: 3278274 - DNA, 25 bp, Homo sapien
tcttcctatgtggtacacctacaaa

SEQ ID NO: 3278275 - DNA, 25 bp, Homo sapien
tggtacacctacaaaaatcttctat

SEQ ID NO: 3278276 - DNA, 25 bp, Homo sapien
gctgggagttaaaagatcaggcaca

SEQ ID NO: 3278277 - DNA, 25 bp, Homo sapien
ttaaataacatgagtagaagagcac

SEQ ID NO: 3278278 - DNA, 25 bp, Homo sapien
gaagagcacattgggctgggagtta

SEQ ID NO: 3278279 - DNA, 25 bp, Homo sapien
taaaagatcaggcacagtactttct

SEQ ID NO: 3278280 - DNA, 25 bp, Homo sapien
tttggttactttgtggcattctttc

SEQ ID NO: 3278281 - DNA, 25 bp, Homo sapien
ttggttactttgtggcattctttca

SEQ ID NO: 3278282 - DNA, 25 bp, Homo sapien
tggttactttgtggcattctttcat

SEQ ID NO: 3278283 - DNA, 25 bp, Homo sapien
agttttggttactttgtggcattct

SEQ ID NO: 3278284 - DNA, 25 bp, Homo sapien
tgacaatccaagattcttccacaaa

SEQ ID NO: 3278285 - DNA, 25 bp, Homo sapien
tcttttacaagagtagggtcctaca

SEQ ID NO: 3278286 - DNA, 25 bp, Homo sapien
catgtgtgattctgacaatccaaga

SEQ ID NO: 3278287 - DNA, 25 bp, Homo sapien
cagcatggcatggtagtggactcac

SEQ ID NO: 3278288 - DNA, 25 bp, Homo sapien
aaataaaggaaatcagcacagcaca

SEQ ID NO: 3278289 - DNA, 25 bp, Homo sapien
aggaaatcagcacagcacacattac

SEQ ID NO: 3278290 - DNA, 25 bp, Homo sapien
taaaggaaatcagcacagcacacat

SEQ ID NO: 3278291 - DNA, 25 bp, Homo sapien
aaaaataaaggaaatcagcacagca

SEQ ID NO: 3278292 - DNA, 25 bp, Homo sapien
gtaatgcagtctgaataaatgctgg

SEQ ID NO: 3278293 - DNA, 25 bp, Homo sapien
acatggaggacacggtaatgcagtc

SEQ ID NO: 3278294 - DNA, 25 bp, Homo sapien
ggctgttcccaagggcctgtaggct

SEQ ID NO: 3278295 - DNA, 25 bp, Homo sapien
ataggaataggaacttgacatggag

SEQ ID NO: 3278296 - DNA, 25 bp, Homo sapien
tctgctcaagcaggttgaaattttt

SEQ ID NO: 3278297 - DNA, 25 bp, Homo sapien
ctgagacagaatccagtttataaat

SEQ ID NO: 3278298 - DNA, 25 bp, Homo sapien
tagttccatgtatcctctgctcaag

SEQ ID NO: 3278299 - DNA, 25 bp, Homo sapien
ggcagtgtagcctcctttacttcca

SEQ ID NO: 3278300 - DNA, 25 bp, Homo sapien
tattaatgcttgatcatgacacgga

SEQ ID NO: 3278301 - DNA, 25 bp, Homo sapien
aagtgacagcgatgtttttcttgac

SEQ ID NO: 3278302 - DNA, 25 bp, Homo sapien
gttgatgacatggtggacaagaacc

SEQ ID NO: 3278303 - DNA, 25 bp, Homo sapien
cggagcaggacacaagtgaccacat

SEQ ID NO: 3278304 - DNA, 25 bp, Homo sapien
cacctttgtattgccacaattacac

SEQ ID NO: 3278305 - DNA, 25 bp, Homo sapien
gtggtacgttctcggccacagggca

SEQ ID NO: 3278306 - DNA, 25 bp, Homo sapien
gtggtcttgtggtacgttctcggcc

SEQ ID NO: 3278307 - DNA, 25 bp, Homo sapien
ggcactgtcacctttgtattgccac

SEQ ID NO: 3278308 - DNA, 25 bp, Homo sapien
tatcaggttaaggatatgtctattt

SEQ ID NO: 3278309 - DNA, 25 bp, Homo sapien
ggttaagaatccatcttttagagac

SEQ ID NO: 3278310 - DNA, 25 bp, Homo sapien
caacacttctccagtaagtatgata

SEQ ID NO: 3278311 - DNA, 25 bp, Homo sapien
actacatttaggttaagaatccatc

SEQ ID NO: 3278312 - DNA, 25 bp, Homo sapien
cagatggacacttatggtttctaca

SEQ ID NO: 3278313 - DNA, 25 bp, Homo sapien
cagacagatggacacttatggtttc

SEQ ID NO: 3278314 - DNA, 25 bp, Homo sapien
gatggacacttatggtttctacatc

SEQ ID NO: 3278315 - DNA, 25 bp, Homo sapien
gacagatggacacttatggtttcta

SEQ ID NO: 3278316 - DNA, 25 bp, Homo sapien
taaagtccgtccacagttttgatca

SEQ ID NO: 3278317 - DNA, 25 bp, Homo sapien
ctaaagtccgtccacagttttgatc

SEQ ID NO: 3278318 - DNA, 25 bp, Homo sapien
aaagtccgtccacagttttgatcac

SEQ ID NO: 3278319 - DNA, 25 bp, Homo sapien
acagttttgatcacaaggtggacag

SEQ ID NO: 3278320 - DNA, 25 bp, Homo sapien
actgctcctggcttcgtttggcagt

SEQ ID NO: 3278321 - DNA, 25 bp, Homo sapien
ctggcttcgtttggcagttattttc

SEQ ID NO: 3278322 - DNA, 25 bp, Homo sapien
gagtacctagttctacatgctctcc

SEQ ID NO: 3278323 - DNA, 25 bp, Homo sapien
ccaccacacctcagtagtttgtgta

SEQ ID NO: 3278324 - DNA, 25 bp, Homo sapien
cagtcacgcatcttaacacacttag

SEQ ID NO: 3278325 - DNA, 25 bp, Homo sapien
gctttccacagcgacaatgcttttc

SEQ ID NO: 3278326 - DNA, 25 bp, Homo sapien
gataaggtttatgacaaggcattcg

SEQ ID NO: 3278327 - DNA, 25 bp, Homo sapien
cattgatgcttctgacagtcacgca

SEQ ID NO: 3278328 - DNA, 25 bp, Homo sapien
caagtactttgtcacaactgtctcc

SEQ ID NO: 3278329 - DNA, 25 bp, Homo sapien
tcggtgacaacgctgtgaacatcta

SEQ ID NO: 3278330 - DNA, 25 bp, Homo sapien
gctgtgaacatctatggattccgca

SEQ ID NO: 3278331 - DNA, 25 bp, Homo sapien
tctccacaagttggtacatcttctg

SEQ ID NO: 3278332 - DNA, 25 bp, Homo sapien
ggacagaaccttttcccagatcgag

SEQ ID NO: 3278333 - DNA, 25 bp, Homo sapien
aacatggcaaacttgctcacatgtg

SEQ ID NO: 3278334 - DNA, 25 bp, Homo sapien
tcacatgtgtgattaccacatggca

SEQ ID NO: 3278335 - DNA, 25 bp, Homo sapien
ccagatcgaggacattctccacaag

SEQ ID NO: 3278336 - DNA, 25 bp, Homo sapien
tgatcacagtgccatagtggacttg

SEQ ID NO: 3278337 - DNA, 25 bp, Homo sapien
ggacttgcacaacttctttcagcta

SEQ ID NO: 3278338 - DNA, 25 bp, Homo sapien
tctttcagctacttttttgccacag

SEQ ID NO: 3278339 - DNA, 25 bp, Homo sapien
gccacagacacacttttgtctacta

SEQ ID NO: 3278340 - DNA, 25 bp, Homo sapien
gttgcccacaaagcaacttctgtcc

SEQ ID NO: 3278341 - DNA, 25 bp, Homo sapien
ttccttggcactgcacctacgaggg

SEQ ID NO: 3278342 - DNA, 25 bp, Homo sapien
agaccattccttggcactgcaccta

SEQ ID NO: 3278343 - DNA, 25 bp, Homo sapien
cagctgacaagaccattccttggca

SEQ ID NO: 3278344 - DNA, 25 bp, Homo sapien
cctactaggtgtttcagatcgtttg

SEQ ID NO: 3278345 - DNA, 25 bp, Homo sapien
taaattcacgctcacatacttggcc

SEQ ID NO: 3278346 - DNA, 25 bp, Homo sapien
gagtaaacatttatggccacaagga

SEQ ID NO: 3278347 - DNA, 25 bp, Homo sapien
tgaatgaggcacaagccacggatct

SEQ ID NO: 3278348 - DNA, 25 bp, Homo sapien
gatacagggcatgtgaaatatacag

SEQ ID NO: 3278349 - DNA, 25 bp, Homo sapien
agaagatacaagaaactggctgtct

SEQ ID NO: 3278350 - DNA, 25 bp, Homo sapien
agaaacatcccgaacagctccaaac

SEQ ID NO: 3278351 - DNA, 25 bp, Homo sapien
agaaactggctgtctttagcccact

SEQ ID NO: 3278352 - DNA, 25 bp, Homo sapien
tgtcatagcccctgcttgaaaagct

SEQ ID NO: 3278353 - DNA, 25 bp, Homo sapien
tgttttgttcgctctaattcacgtg

SEQ ID NO: 3278354 - DNA, 25 bp, Homo sapien
atacaaattaggcatgtcatagccc

SEQ ID NO: 3278355 - DNA, 25 bp, Homo sapien
gcttggtttctcttcaccgaagcaa

SEQ ID NO: 3278356 - DNA, 25 bp, Homo sapien
gcaataacgtggttcaagccaaaat

SEQ ID NO: 3278357 - DNA, 25 bp, Homo sapien
ttctaaaatcatctgagtaaacacg

SEQ ID NO: 3278358 - DNA, 25 bp, Homo sapien
gagtaaacacggcacttacaaaagc

SEQ ID NO: 3278359 - DNA, 25 bp, Homo sapien
catggcaataacgtggttcaagcca

SEQ ID NO: 3278360 - DNA, 25 bp, Homo sapien
agatgaagagctaaactgttcttca

SEQ ID NO: 3278361 - DNA, 25 bp, Homo sapien
ctgtctgagtagtgtatgttataaa

SEQ ID NO: 3278362 - DNA, 25 bp, Homo sapien
tggagaagtgggcccgataacaaac

SEQ ID NO: 3278363 - DNA, 25 bp, Homo sapien
tgaaagaaagaaggcgagggcggag

SEQ ID NO: 3278364 - DNA, 25 bp, Homo sapien
gcggaggcggtcctgactagtaact

SEQ ID NO: 3278365 - DNA, 25 bp, Homo sapien
aactgccttaggaggcatccaggtg

SEQ ID NO: 3278366 - DNA, 25 bp, Homo sapien
ccgtggtcgcgactcctccgggact

SEQ ID NO: 3278367 - DNA, 25 bp, Homo sapien
gactggtgccagaaggaactgcgcc

SEQ ID NO: 3278368 - DNA, 25 bp, Homo sapien
cgctggctgcggtagtctgcagggc

SEQ ID NO: 3278369 - DNA, 25 bp, Homo sapien
ggcgccgcggagatggactccattt

SEQ ID NO: 3278370 - DNA, 25 bp, Homo sapien
gccgcttccttatccggtaaagtgc

SEQ ID NO: 3278371 - DNA, 25 bp, Homo sapien
gctggcccgaacaggcctttgggaa

SEQ ID NO: 3278372 - DNA, 25 bp, Homo sapien
gggaaaccccaagcgcctgcgctgg

SEQ ID NO: 3278373 - DNA, 25 bp, Homo sapien
cgttccggcgactgcgtggcagcac

SEQ ID NO: 3278374 - DNA, 25 bp, Homo sapien
tatgaggattacatggctctgtccc

SEQ ID NO: 3278375 - DNA, 25 bp, Homo sapien
tctgtccctaattggctctctgcca

SEQ ID NO: 3278376 - DNA, 25 bp, Homo sapien
ctgggtatgaggattacatggctct

SEQ ID NO: 3278377 - DNA, 25 bp, Homo sapien
atggctctgtccctaattggctctc

SEQ ID NO: 3278378 - DNA, 25 bp, Homo sapien
aaacgctttgaggttggccactgtg

SEQ ID NO: 3278379 - DNA, 25 bp, Homo sapien
aaataaatctaaagcctgttattgt

SEQ ID NO: 3278380 - DNA, 25 bp, Homo sapien
ttgcaggaaagtggcttgagtagta

SEQ ID NO: 3278381 - DNA, 25 bp, Homo sapien
agtacccttctaaaatgctagagcc

SEQ ID NO: 3278382 - DNA, 25 bp, Homo sapien
cccaagcaaggtctgtttaagtatc

SEQ ID NO: 3278383 - DNA, 25 bp, Homo sapien
tattatatacaacgcacccactcca

SEQ ID NO: 3278384 - DNA, 25 bp, Homo sapien
tgaaatgtcaaattaacaagaagcc

SEQ ID NO: 3278385 - DNA, 25 bp, Homo sapien
tcatgtcattatagatagggataga

SEQ ID NO: 3278386 - DNA, 25 bp, Homo sapien
gccttgtaccttgcaccaaagcaca

SEQ ID NO: 3278387 - DNA, 25 bp, Homo sapien
gaaatggcatgaaagtgagggctac

SEQ ID NO: 3278388 - DNA, 25 bp, Homo sapien
tgtcagtcataggatcaaaaggatc

SEQ ID NO: 3278389 - DNA, 25 bp, Homo sapien
tacgcttcactcaacaatggaaatg

SEQ ID NO: 3278390 - DNA, 25 bp, Homo sapien
gatcattaatatcagggtagaccca

SEQ ID NO: 3278391 - DNA, 25 bp, Homo sapien
tacgtattttctagccaaacggcca

SEQ ID NO: 3278392 - DNA, 25 bp, Homo sapien
taatattggccgttcttcgattgcc

SEQ ID NO: 3278393 - DNA, 25 bp, Homo sapien
taatctccaggactgtagacttggg

SEQ ID NO: 3278394 - DNA, 25 bp, Homo sapien
tatcgattaaatagactatgtctga

SEQ ID NO: 3278395 - DNA, 25 bp, Homo sapien
ctaggtaatcagattgaagttcatc

SEQ ID NO: 3278396 - DNA, 25 bp, Homo sapien
gatacgtaatccaaaatgagccaat

SEQ ID NO: 3278397 - DNA, 25 bp, Homo sapien
tgtccttgttcgtacaaacatatcg

SEQ ID NO: 3278398 - DNA, 25 bp, Homo sapien
tcccgagggatcaataaccacaact

SEQ ID NO: 3278399 - DNA, 25 bp, Homo sapien
gtccagttgtacataacaggtaatg

SEQ ID NO: 3278400 - DNA, 25 bp, Homo sapien
caggtaatgtgatgcaaaacagcca

SEQ ID NO: 3278401 - DNA, 25 bp, Homo sapien
cagccagttgtaatatgtgtttccc

SEQ ID NO: 3278402 - DNA, 25 bp, Homo sapien
ttcttgagagaattaagaataatgc

SEQ ID NO: 3278403 - DNA, 25 bp, Homo sapien
tacacagggctctttactataaagt

SEQ ID NO: 3278404 - DNA, 25 bp, Homo sapien
aaagacatttagtctttacacaggg

SEQ ID NO: 3278405 - DNA, 25 bp, Homo sapien
taaaacccatcacaatttccttcta

SEQ ID NO: 3278406 - DNA, 25 bp, Homo sapien
ctcctctttctttttcttctctttg

SEQ ID NO: 3278407 - DNA, 25 bp, Homo sapien
tcttctttcttatctttgcttttct

SEQ ID NO: 3278408 - DNA, 25 bp, Homo sapien
ctttcttatctttgcttttctcctc

SEQ ID NO: 3278409 - DNA, 25 bp, Homo sapien
ttttattttcgtttttatcatctga

SEQ ID NO: 3278410 - DNA, 25 bp, Homo sapien
tgttccaccagctaagtcatctaga

SEQ ID NO: 3278411 - DNA, 25 bp, Homo sapien
cagggatgagtgtctgtactgttcc

SEQ ID NO: 3278412 - DNA, 25 bp, Homo sapien
gcaagtactgtagccatgactcaag

SEQ ID NO: 3278413 - DNA, 25 bp, Homo sapien
atgactcaagaagggcatggtgacc

SEQ ID NO: 3278414 - DNA, 25 bp, Homo sapien
tgctgctgttgttcacattaaaaag

SEQ ID NO: 3278415 - DNA, 25 bp, Homo sapien
ggtccttattgctgctgttgttcac

SEQ ID NO: 3278416 - DNA, 25 bp, Homo sapien
gcaatggcaccaggcaggtactgct

SEQ ID NO: 3278417 - DNA, 25 bp, Homo sapien
agtgcaatggcaccaggcaggtact

SEQ ID NO: 3278418 - DNA, 25 bp, Homo sapien
tgatggtcctccctttctgagtgac

SEQ ID NO: 3278419 - DNA, 25 bp, Homo sapien
ggaaccccttgcatgagggttttca

SEQ ID NO: 3278420 - DNA, 25 bp, Homo sapien
tataactaaaggaaccccttgcatg

SEQ ID NO: 3278421 - DNA, 25 bp, Homo sapien
accccttgcatgagggttttcattc

SEQ ID NO: 3278422 - DNA, 25 bp, Homo sapien
aagactgctgtgtattgataatatt

SEQ ID NO: 3278423 - DNA, 25 bp, Homo sapien
cattgggcatggttacaaaagactg

SEQ ID NO: 3278424 - DNA, 25 bp, Homo sapien
atattgttcttcatggatagtttca

SEQ ID NO: 3278425 - DNA, 25 bp, Homo sapien
ccttttcaatatctggtacaatcac

SEQ ID NO: 3278426 - DNA, 25 bp, Homo sapien
ggagaaagaagtcttattagtggaa

SEQ ID NO: 3278427 - DNA, 25 bp, Homo sapien
tataatcaaaagtttcaccctatgt

SEQ ID NO: 3278428 - DNA, 25 bp, Homo sapien
acatatataatcaaaagtttcaccc

SEQ ID NO: 3278429 - DNA, 25 bp, Homo sapien
atcaaaagtttcaccctatgtatta

SEQ ID NO: 3278430 - DNA, 25 bp, Homo sapien
gactatataataccatctgtttgca

SEQ ID NO: 3278431 - DNA, 25 bp, Homo sapien
tctttaatagaatgcaggcatggcc

SEQ ID NO: 3278432 - DNA, 25 bp, Homo sapien
tatcaaccctaccatttttctaaga

SEQ ID NO: 3278433 - DNA, 25 bp, Homo sapien
tatgggagccgcactttaagatgaa

SEQ ID NO: 3278434 - DNA, 25 bp, Homo sapien
aattagctggaaatcgcttgaatct

SEQ ID NO: 3278435 - DNA, 25 bp, Homo sapien
accaaagagatcattgttatcataa

SEQ ID NO: 3278436 - DNA, 25 bp, Homo sapien
taccaaagagatcattgttatcata

SEQ ID NO: 3278437 - DNA, 25 bp, Homo sapien
ttaccaaagagatcattgttatcat

SEQ ID NO: 3278438 - DNA, 25 bp, Homo sapien
acaaacagggatatacggtaaatct

SEQ ID NO: 3278439 - DNA, 25 bp, Homo sapien
taactttgtcttctagaagtggacg

SEQ ID NO: 3278440 - DNA, 25 bp, Homo sapien
gtcactggtgtatccaaacaaacag

SEQ ID NO: 3278441 - DNA, 25 bp, Homo sapien
cagggatatacggtaaatcttgaca

SEQ ID NO: 3278442 - DNA, 25 bp, Homo sapien
cagagcaccacactacttttgacat

SEQ ID NO: 3278443 - DNA, 25 bp, Homo sapien
tcagagcaccacactacttttgaca

SEQ ID NO: 3278444 - DNA, 25 bp, Homo sapien
cttcagccagagtggtcaatgatgc

SEQ ID NO: 3278445 - DNA, 25 bp, Homo sapien
tcagccagagtggtcaatgatgcct

SEQ ID NO: 3278446 - DNA, 25 bp, Homo sapien
ttcagccagagtggtcaatgatgcc

SEQ ID NO: 3278447 - DNA, 25 bp, Homo sapien
catatgtctgggaacagtagctcac

SEQ ID NO: 3278448 - DNA, 25 bp, Homo sapien
gaaaatgtgacccataatcaggaaa

SEQ ID NO: 3278449 - DNA, 25 bp, Homo sapien
tcaggtgttaatctctttccatgcc

SEQ ID NO: 3278450 - DNA, 25 bp, Homo sapien
caatatggactaataatgtctggca

SEQ ID NO: 3278451 - DNA, 25 bp, Homo sapien
tggaccgtggtctagtggtagcatt

SEQ ID NO: 3278452 - DNA, 25 bp, Homo sapien
ccaagtggaccgtggtctagtggta

SEQ ID NO: 3278453 - DNA, 25 bp, Homo sapien
gaggagacattgggagaagtgacca

SEQ ID NO: 3278454 - DNA, 25 bp, Homo sapien
aggagacattgggagaagtgaccag

SEQ ID NO: 3278455 - DNA, 25 bp, Homo sapien
gaatcagcaccattttaggcaaaaa

SEQ ID NO: 3278456 - DNA, 25 bp, Homo sapien
tacttactcaattgttagaatctgt

SEQ ID NO: 3278457 - DNA, 25 bp, Homo sapien
ctattagtttaatccatgaagttaa

SEQ ID NO: 3278458 - DNA, 25 bp, Homo sapien
taaacagattacttcagacttctat

SEQ ID NO: 3278459 - DNA, 25 bp, Homo sapien
accgcttccacaatagtccctggaa

SEQ ID NO: 3278460 - DNA, 25 bp, Homo sapien
cggtgttttaagacttagcaggact

SEQ ID NO: 3278461 - DNA, 25 bp, Homo sapien
tattctgatgccaatcaagagggcc

SEQ ID NO: 3278462 - DNA, 25 bp, Homo sapien
aatttgaggcgttgaatggctttaa

SEQ ID NO: 3278463 - DNA, 25 bp, Homo sapien
tgtccttgcttattcccaaacttta

SEQ ID NO: 3278464 - DNA, 25 bp, Homo sapien
cctgtggattacactgcctaatgcc

SEQ ID NO: 3278465 - DNA, 25 bp, Homo sapien
tccttgcttattcccaaactttaga

SEQ ID NO: 3278466 - DNA, 25 bp, Homo sapien
ctgcctgtggattacactgcctaat

SEQ ID NO: 3278467 - DNA, 25 bp, Homo sapien
gagattgatgatggatgccaaatca

SEQ ID NO: 3278468 - DNA, 25 bp, Homo sapien
actgctagagggagattgatgatgg

SEQ ID NO: 3278469 - DNA, 25 bp, Homo sapien
gatgatggatgccaaatcaaacata

SEQ ID NO: 3278470 - DNA, 25 bp, Homo sapien
agggagattgatgatggatgccaaa

SEQ ID NO: 3278471 - DNA, 25 bp, Homo sapien
ggttagaccacatgatgcttttaca

SEQ ID NO: 3278472 - DNA, 25 bp, Homo sapien
attttttaactggatctctaagctc

SEQ ID NO: 3278473 - DNA, 25 bp, Homo sapien
aatcgggactggcaatgggcacctt

SEQ ID NO: 3278474 - DNA, 25 bp, Homo sapien
agaagcctcggttgtgttaccaggg

SEQ ID NO: 3278475 - DNA, 25 bp, Homo sapien
gcagcaaacgacagtggtgggcagt

SEQ ID NO: 3278476 - DNA, 25 bp, Homo sapien
ggcagcaaacgacagtggtgggcag

SEQ ID NO: 3278477 - DNA, 25 bp, Homo sapien
tggcagcaaacgacagtggtgggca

SEQ ID NO: 3278478 - DNA, 25 bp, Homo sapien
cagcaaacgacagtggtgggcagtg

SEQ ID NO: 3278479 - DNA, 25 bp, Homo sapien
caaaggcacaaccttagctatcggg

SEQ ID NO: 3278480 - DNA, 25 bp, Homo sapien
ccttagcagtgtgggaggacagcca

SEQ ID NO: 3278481 - DNA, 25 bp, Homo sapien
tagaatttagccacttctcaggcct

SEQ ID NO: 3278482 - DNA, 25 bp, Homo sapien
tacttacctagggacgagtctctgg

SEQ ID NO: 3278483 - DNA, 25 bp, Homo sapien
gaagctgataacagcacagaagggc

SEQ ID NO: 3278484 - DNA, 25 bp, Homo sapien
taaacttgagcctggcaatcggcgc

SEQ ID NO: 3278485 - DNA, 25 bp, Homo sapien
cagaagggcaaagtctgctcagcag

SEQ ID NO: 3278486 - DNA, 25 bp, Homo sapien
gcagcttcggtgcaaagcaactaac

SEQ ID NO: 3278487 - DNA, 25 bp, Homo sapien
tgccagatacaccagttatcacagg

SEQ ID NO: 3278488 - DNA, 25 bp, Homo sapien
gctccacgctccgagagacgctgtt

SEQ ID NO: 3278489 - DNA, 25 bp, Homo sapien
ctagttcgcggctccagcagtcgcg

SEQ ID NO: 3278490 - DNA, 25 bp, Homo sapien
tctatgaggcgtgtctgtgtttctc

SEQ ID NO: 3278491 - DNA, 25 bp, Homo sapien
gacctgtgaaccgtaggcctatatg

SEQ ID NO: 3278492 - DNA, 25 bp, Homo sapien
tgaaacctacaatctatgggacagt

SEQ ID NO: 3278493 - DNA, 25 bp, Homo sapien
gaatattgggtaccagggacagaca

SEQ ID NO: 3278494 - DNA, 25 bp, Homo sapien
cctatatgactggtgggaaacccac

SEQ ID NO: 3278495 - DNA, 25 bp, Homo sapien
tcctcaccgtaacaggagtcatagg

SEQ ID NO: 3278496 - DNA, 25 bp, Homo sapien
gaaacagcctagcatctcatacaaa

SEQ ID NO: 3278497 - DNA, 25 bp, Homo sapien
cagaaacagcctagcatctcataca

SEQ ID NO: 3278498 - DNA, 25 bp, Homo sapien
ttctgtctttcctcaccgtaacagg

SEQ ID NO: 3278499 - DNA, 25 bp, Homo sapien
gacagtacgcaaataatgggctcct

SEQ ID NO: 3278500 - DNA, 25 bp, Homo sapien
catgatacagggtgggacagtacgc

SEQ ID NO: 3278501 - DNA, 25 bp, Homo sapien
ggaagcactctcagccttgtgaaga

SEQ ID NO: 3278502 - DNA, 25 bp, Homo sapien
aatgtcaccgggatctgttcaaagg

SEQ ID NO: 3278503 - DNA, 25 bp, Homo sapien
gcagcagctcggcaaatgtagggcg

SEQ ID NO: 3278504 - DNA, 25 bp, Homo sapien
cgcagcagctcggcaaatgtagggc

SEQ ID NO: 3278505 - DNA, 25 bp, Homo sapien
ttccgcaatctctgtgacagcccgc

SEQ ID NO: 3278506 - DNA, 25 bp, Homo sapien
aatctctgtgacagcccgcagcagc

SEQ ID NO: 3278507 - DNA, 25 bp, Homo sapien
ccttcagaaatagcttccacgactt

SEQ ID NO: 3278508 - DNA, 25 bp, Homo sapien
gacttcatatatggacattggtgcc

SEQ ID NO: 3278509 - DNA, 25 bp, Homo sapien
ccaggtgagggcgatatagcctgaa

SEQ ID NO: 3278510 - DNA, 25 bp, Homo sapien
gcttccacgacttgcaaatttgact

SEQ ID NO: 3278511 - DNA, 25 bp, Homo sapien
tgacacccttctgaggacccagaac

SEQ ID NO: 3278512 - DNA, 25 bp, Homo sapien
atcaaccccgaaacttcattggacg

SEQ ID NO: 3278513 - DNA, 25 bp, Homo sapien
gacgtgggtctatggtgtctctttc

SEQ ID NO: 3278514 - DNA, 25 bp, Homo sapien
tgtagacaataaaactgacaccctt

SEQ ID NO: 3278515 - DNA, 25 bp, Homo sapien
gggaccacttgattgggaacttggc

SEQ ID NO: 3278516 - DNA, 25 bp, Homo sapien
tactgctgtacttattgaaaagaaa

SEQ ID NO: 3278517 - DNA, 25 bp, Homo sapien
cacttgattgggaacttggctccaa

SEQ ID NO: 3278518 - DNA, 25 bp, Homo sapien
cagatttactgctgtacttattgaa

SEQ ID NO: 3278519 - DNA, 25 bp, Homo sapien
tactcccacattaggttggtgggat

SEQ ID NO: 3278520 - DNA, 25 bp, Homo sapien
ctaaagggctgcccaagtactttag

SEQ ID NO: 3278521 - DNA, 25 bp, Homo sapien
taggaaagaagctcctactcccaca

SEQ ID NO: 3278522 - DNA, 25 bp, Homo sapien
ttaaaagtgacacagaaccagtgct

SEQ ID NO: 3278523 - DNA, 25 bp, Homo sapien
gaactgaccaaacaattccttgccg

SEQ ID NO: 3278524 - DNA, 25 bp, Homo sapien
catgttgaactgaccaaacaattcc

SEQ ID NO: 3278525 - DNA, 25 bp, Homo sapien
tatgcatgttgaactgaccaaacaa

SEQ ID NO: 3278526 - DNA, 25 bp, Homo sapien
tactatgcatgttgaactgaccaaa

SEQ ID NO: 3278527 - DNA, 25 bp, Homo sapien
tattctccctgagatagttaagcag

SEQ ID NO: 3278528 - DNA, 25 bp, Homo sapien
tatatcctggcatacactcagtagc

SEQ ID NO: 3278529 - DNA, 25 bp, Homo sapien
gggcttccgctgtatacagactcca

SEQ ID NO: 3278530 - DNA, 25 bp, Homo sapien
acagactccataaagttgcactagc

SEQ ID NO: 3278531 - DNA, 25 bp, Homo sapien
aagaaaaacatacaccagtgagcag

SEQ ID NO: 3278532 - DNA, 25 bp, Homo sapien
ctggtgaagaaaaacatacaccagt

SEQ ID NO: 3278533 - DNA, 25 bp, Homo sapien
acagacaagagggaggaaagagtga

SEQ ID NO: 3278534 - DNA, 25 bp, Homo sapien
ctggacagacaagagggaggaaaga

SEQ ID NO: 3278535 - DNA, 25 bp, Homo sapien
tggacagacaagagggaggaaagag

SEQ ID NO: 3278536 - DNA, 25 bp, Homo sapien
ggacagacaagagggaggaaagagt

SEQ ID NO: 3278537 - DNA, 25 bp, Homo sapien
ccctcagggtatgggttgagagccc

SEQ ID NO: 3278538 - DNA, 25 bp, Homo sapien
gaatgggtccagttaatcacctctg

SEQ ID NO: 3278539 - DNA, 25 bp, Homo sapien
ggatattttgataggaccctcaggg

SEQ ID NO: 3278540 - DNA, 25 bp, Homo sapien
tctgccttcgaaagagaatgggtcc

SEQ ID NO: 3278541 - DNA, 25 bp, Homo sapien
gatagctacctggatatgtgaccgc

SEQ ID NO: 3278542 - DNA, 25 bp, Homo sapien
ttcattgatggccttgatagctacc

SEQ ID NO: 3278543 - DNA, 25 bp, Homo sapien
tgtgaccgccattcacctaaatgga

SEQ ID NO: 3278544 - DNA, 25 bp, Homo sapien
gaccgcttccaatctcctttataaa

SEQ ID NO: 3278545 - DNA, 25 bp, Homo sapien
aataccacatttgctagaaagtggt

SEQ ID NO: 3278546 - DNA, 25 bp, Homo sapien
attctcacagatttacaaataccac

SEQ ID NO: 3278547 - DNA, 25 bp, Homo sapien
tgctagaaagtggttcaaattgaac

SEQ ID NO: 3278548 - DNA, 25 bp, Homo sapien
agtggttcaaattgaactttgtgca

SEQ ID NO: 3278549 - DNA, 25 bp, Homo sapien
taaacccagctgtggctggtaaaca

SEQ ID NO: 3278550 - DNA, 25 bp, Homo sapien
ggatatcggagacgagtcatgagac

SEQ ID NO: 3278551 - DNA, 25 bp, Homo sapien
tcagcccaactggatatcggagacg

SEQ ID NO: 3278552 - DNA, 25 bp, Homo sapien
gctggtaaacaactgcccatcagcc

SEQ ID NO: 3278553 - DNA, 25 bp, Homo sapien
tgcaagtgcctttgtctaccagaca

SEQ ID NO: 3278554 - DNA, 25 bp, Homo sapien
catcgaaggagcaacaagtgacact

SEQ ID NO: 3278555 - DNA, 25 bp, Homo sapien
gaggctactgcagttgtccaagtga

SEQ ID NO: 3278556 - DNA, 25 bp, Homo sapien
gaggacctgaacacatgagaactag

SEQ ID NO: 3278557 - DNA, 25 bp, Homo sapien
cagattaactcagggattgattgaa

SEQ ID NO: 3278558 - DNA, 25 bp, Homo sapien
gattgaaaggcgtgtctttcagcca

SEQ ID NO: 3278559 - DNA, 25 bp, Homo sapien
cagggattgattgaaaggcgtgtct

SEQ ID NO: 3278560 - DNA, 25 bp, Homo sapien
tgtctttcagccacataccactgtc

SEQ ID NO: 3278561 - DNA, 25 bp, Homo sapien
cttctagctcccataaatacggaaa

SEQ ID NO: 3278562 - DNA, 25 bp, Homo sapien
tctagctcccataaatacggaaatt

SEQ ID NO: 3278563 - DNA, 25 bp, Homo sapien
tgtaggatcctaaatgtcttgaatc

SEQ ID NO: 3278564 - DNA, 25 bp, Homo sapien
acggaaattgtgtaggatcctaaat

SEQ ID NO: 3278565 - DNA, 25 bp, Homo sapien
taaagttgcatatgtagtgatagct

SEQ ID NO: 3278566 - DNA, 25 bp, Homo sapien
tagaaagggtacaagcaagatttcc

SEQ ID NO: 3278567 - DNA, 25 bp, Homo sapien
taaaaaagctcctatcacctaaaga

SEQ ID NO: 3278568 - DNA, 25 bp, Homo sapien
gcaagatttcctgactacaaagcaa

SEQ ID NO: 3278569 - DNA, 25 bp, Homo sapien
caatagatgttctgcctgatttctg

SEQ ID NO: 3278570 - DNA, 25 bp, Homo sapien
tgtctcaatagatgttctgcctgat

SEQ ID NO: 3278571 - DNA, 25 bp, Homo sapien
tcaatagatgttctgcctgatttct

SEQ ID NO: 3278572 - DNA, 25 bp, Homo sapien
ctcttgtctcaatagatgttctgcc

SEQ ID NO: 3278573 - DNA, 25 bp, Homo sapien
ctgtattgttccaatttttagtata

SEQ ID NO: 3278574 - DNA, 25 bp, Homo sapien
gtatatgtgctgccgaagcaagcac

SEQ ID NO: 3278575 - DNA, 25 bp, Homo sapien
tgtgtgtcatccttgcacagggaac

SEQ ID NO: 3278576 - DNA, 25 bp, Homo sapien
aaaaaattttaatgcttcatgaatt

SEQ ID NO: 3278577 - DNA, 25 bp, Homo sapien
aattttagtatatgctctgccgaag

SEQ ID NO: 3278578 - DNA, 25 bp, Homo sapien
tagtatatgctctgccgaagtgagc

SEQ ID NO: 3278579 - DNA, 25 bp, Homo sapien
ttttagtatatgctctgccgaagtg

SEQ ID NO: 3278580 - DNA, 25 bp, Homo sapien
ttagtatatgctctgccgaagtgag

SEQ ID NO: 3278581 - DNA, 25 bp, Homo sapien
atagttgcttgggattaagccttca

SEQ ID NO: 3278582 - DNA, 25 bp, Homo sapien
tagttgcttgggattaagccttcat

SEQ ID NO: 3278583 - DNA, 25 bp, Homo sapien
agttgcttgggattaagccttcatt

SEQ ID NO: 3278584 - DNA, 25 bp, Homo sapien
gttgcttgggattaagccttcattc

SEQ ID NO: 3278585 - DNA, 25 bp, Homo sapien
ctgctctccttaaggctaaattaca

SEQ ID NO: 3278586 - DNA, 25 bp, Homo sapien
tatttctccagtatcaggtattctt

SEQ ID NO: 3278587 - DNA, 25 bp, Homo sapien
tcataaagtgccttgacttggatct

SEQ ID NO: 3278588 - DNA, 25 bp, Homo sapien
taaggctaaattacagggttctctg

SEQ ID NO: 3278589 - DNA, 25 bp, Homo sapien
ctttcgttttgacggctgcacacgg

SEQ ID NO: 3278590 - DNA, 25 bp, Homo sapien
gttttgacggctgcacacggcccgt

SEQ ID NO: 3278591 - DNA, 25 bp, Homo sapien
ttgacggctgcacacggcccgtgtt

SEQ ID NO: 3278592 - DNA, 25 bp, Homo sapien
tggctttcgttttgacggctgcaca

SEQ ID NO: 3278593 - DNA, 25 bp, Homo sapien
gcttcttatttgacaattggctgag

SEQ ID NO: 3278594 - DNA, 25 bp, Homo sapien
tttgacaattggctgagccacggcc

SEQ ID NO: 3278595 - DNA, 25 bp, Homo sapien
cgacgctgggtgtatttttctggaa

SEQ ID NO: 3278596 - DNA, 25 bp, Homo sapien
ccacggcctgcgacgctgggtgtat

SEQ ID NO: 3278597 - DNA, 25 bp, Homo sapien
agcaacagaaaaccgactggatggt

SEQ ID NO: 3278598 - DNA, 25 bp, Homo sapien
caacagaaaaccgactggatggtgt

SEQ ID NO: 3278599 - DNA, 25 bp, Homo sapien
acagaaaaccgactggatggtgtta

SEQ ID NO: 3278600 - DNA, 25 bp, Homo sapien
cagcaacagaaaaccgactggatgg

SEQ ID NO: 3278601 - DNA, 25 bp, Homo sapien
gaaagccatgagtacgtgatattga

SEQ ID NO: 3278602 - DNA, 25 bp, Homo sapien
ccatgagtacgtgatattgagggag

SEQ ID NO: 3278603 - DNA, 25 bp, Homo sapien
ttagaaagccatgagtacgtgatat

SEQ ID NO: 3278604 - DNA, 25 bp, Homo sapien
aagccatgagtacgtgatattgagg

SEQ ID NO: 3278605 - DNA, 25 bp, Homo sapien
cttctggatctgctagggcccattt

SEQ ID NO: 3278606 - DNA, 25 bp, Homo sapien
tatcaggctacctctgaatgaggct

SEQ ID NO: 3278607 - DNA, 25 bp, Homo sapien
tgcccatgaatcgaggtagatcggt

SEQ ID NO: 3278608 - DNA, 25 bp, Homo sapien
gaatcagataacacccagctcacga

SEQ ID NO: 3278609 - DNA, 25 bp, Homo sapien
ttggacgtcaccattgctcagttgt

SEQ ID NO: 3278610 - DNA, 25 bp, Homo sapien
gatttggacgtcaccattgctcagt

SEQ ID NO: 3278611 - DNA, 25 bp, Homo sapien
tctctgatttggacgtcaccattgc

SEQ ID NO: 3278612 - DNA, 25 bp, Homo sapien
ctttctctgatttggacgtcaccat

SEQ ID NO: 3278613 - DNA, 25 bp, Homo sapien
gcagcattggtaccatatcccttgg

SEQ ID NO: 3278614 - DNA, 25 bp, Homo sapien
gctgctttgttctctacctccctga

SEQ ID NO: 3278615 - DNA, 25 bp, Homo sapien
taaatccaacggtcaactctaagtc

SEQ ID NO: 3278616 - DNA, 25 bp, Homo sapien
aataatgctagatttcccgcaaagc

SEQ ID NO: 3278617 - DNA, 25 bp, Homo sapien
tcactatccttagtaagaaaaccat

SEQ ID NO: 3278618 - DNA, 25 bp, Homo sapien
cactatccttagtaagaaaaccatt

SEQ ID NO: 3278619 - DNA, 25 bp, Homo sapien
ctcactatccttagtaagaaaacca

SEQ ID NO: 3278620 - DNA, 25 bp, Homo sapien
ctatccttagtaagaaaaccattct

SEQ ID NO: 3278621 - DNA, 25 bp, Homo sapien
gaccttttgactgagtggaacggca

SEQ ID NO: 3278622 - DNA, 25 bp, Homo sapien
cgtgaccttttgactgagtggaacg

SEQ ID NO: 3278623 - DNA, 25 bp, Homo sapien
tttgactgagtggaacggcaaaggt

SEQ ID NO: 3278624 - DNA, 25 bp, Homo sapien
ccttttgactgagtggaacggcaaa

SEQ ID NO: 3278625 - DNA, 25 bp, Homo sapien
aggtaaccaaataggagcaggtgtg

SEQ ID NO: 3278626 - DNA, 25 bp, Homo sapien
catttaaggtaaccaaataggagca

SEQ ID NO: 3278627 - DNA, 25 bp, Homo sapien
taaccaaataggagcaggtgtggtt

SEQ ID NO: 3278628 - DNA, 25 bp, Homo sapien
taaggtaaccaaataggagcaggtg

SEQ ID NO: 3278629 - DNA, 25 bp, Homo sapien
gagaggctcctattgacattccttc

SEQ ID NO: 3278630 - DNA, 25 bp, Homo sapien
ttccttggaaggatttgcgcccctc

SEQ ID NO: 3278631 - DNA, 25 bp, Homo sapien
tagaaaccggcacatctgtcatggg

SEQ ID NO: 3278632 - DNA, 25 bp, Homo sapien
tcatgggataggcagttggccctcc

SEQ ID NO: 3278633 - DNA, 25 bp, Homo sapien
ccccttctcagaatagctcctaagg

SEQ ID NO: 3278634 - DNA, 25 bp, Homo sapien
tctcagaatagctcctaaggtcatc

SEQ ID NO: 3278635 - DNA, 25 bp, Homo sapien
cttctcagaatagctcctaaggtca

SEQ ID NO: 3278636 - DNA, 25 bp, Homo sapien
ccttctcagaatagctcctaaggtc

SEQ ID NO: 3278637 - DNA, 25 bp, Homo sapien
ccagcttgtgatgtgaagaagtgct

SEQ ID NO: 3278638 - DNA, 25 bp, Homo sapien
ggccagaagccgtactgctcactga

SEQ ID NO: 3278639 - DNA, 25 bp, Homo sapien
ttggccacaaggcacacgggcgtgg

SEQ ID NO: 3278640 - DNA, 25 bp, Homo sapien
tgctcactgaccctcggtgggcagg

SEQ ID NO: 3278641 - DNA, 25 bp, Homo sapien
gcttaagcaatcttcttcgctggac

SEQ ID NO: 3278642 - DNA, 25 bp, Homo sapien
aatatcccgccaataggtagtccct

SEQ ID NO: 3278643 - DNA, 25 bp, Homo sapien
cactcattgttttacccagcagaaa

SEQ ID NO: 3278644 - DNA, 25 bp, Homo sapien
taacagtaatacatcttgaggcatc

SEQ ID NO: 3278645 - DNA, 25 bp, Homo sapien
gaagcttggttccatcgtcacctag

SEQ ID NO: 3278646 - DNA, 25 bp, Homo sapien
tggcctgggctaaagttctagttct

SEQ ID NO: 3278647 - DNA, 25 bp, Homo sapien
taaagttcttaaagcacctctcagg

SEQ ID NO: 3278648 - DNA, 25 bp, Homo sapien
tctgatttcgtccagcatttgtgga

SEQ ID NO: 3278649 - DNA, 25 bp, Homo sapien
ttttaatgtccccaagctctatgcc

SEQ ID NO: 3278650 - DNA, 25 bp, Homo sapien
gctgttcaagaataacaggccccag

SEQ ID NO: 3278651 - DNA, 25 bp, Homo sapien
tattagaattacatcatcactgtgg

SEQ ID NO: 3278652 - DNA, 25 bp, Homo sapien
ttcagcccagagctcattacagtct

SEQ ID NO: 3278653 - DNA, 25 bp, Homo sapien
cttcagttcttctgcggtgctctac

SEQ ID NO: 3278654 - DNA, 25 bp, Homo sapien
ccttctgcggggagcacacaacagt

SEQ ID NO: 3278655 - DNA, 25 bp, Homo sapien
gagcacacaacagtcttcagttctt

SEQ ID NO: 3278656 - DNA, 25 bp, Homo sapien
ggtgctctactcacaaaaacacatc

SEQ ID NO: 3278657 - DNA, 25 bp, Homo sapien
tgtgtgttcacccaatgctccagag

SEQ ID NO: 3278658 - DNA, 25 bp, Homo sapien
taaggcaacatttccacactctggg

SEQ ID NO: 3278659 - DNA, 25 bp, Homo sapien
tgattctgattagctgcggccacca

SEQ ID NO: 3278660 - DNA, 25 bp, Homo sapien
cacgtggttaagctggacaggcatc

SEQ ID NO: 3278661 - DNA, 25 bp, Homo sapien
caactagttcatctattgtgcgcag

SEQ ID NO: 3278662 - DNA, 25 bp, Homo sapien
agcagatcttcgaaagaaggccttc

SEQ ID NO: 3278663 - DNA, 25 bp, Homo sapien
tctattgtgcgcagcagatcttcga

SEQ ID NO: 3278664 - DNA, 25 bp, Homo sapien
tcttcacattcaactagttcatcta

SEQ ID NO: 3278665 - DNA, 25 bp, Homo sapien
gagctaatgttactgtctttcagaa

SEQ ID NO: 3278666 - DNA, 25 bp, Homo sapien
gcagcctgaatgtatcgaggtagtt

SEQ ID NO: 3278667 - DNA, 25 bp, Homo sapien
tgaaaaaagagctacttatccaggc

SEQ ID NO: 3278668 - DNA, 25 bp, Homo sapien
ggcaaccatggaaggagtcccactt

SEQ ID NO: 3278669 - DNA, 25 bp, Homo sapien
ctcatacacatagttggacgccaac

SEQ ID NO: 3278670 - DNA, 25 bp, Homo sapien
ccaacttcggctggtagagtcggtg

SEQ ID NO: 3278671 - DNA, 25 bp, Homo sapien
ttctgccttccgtgaatacttccca

SEQ ID NO: 3278672 - DNA, 25 bp, Homo sapien
gagtcggtggcctcgagtaaccatg

SEQ ID NO: 3278673 - DNA, 25 bp, Homo sapien
actttctcctcagggcggacggaca

SEQ ID NO: 3278674 - DNA, 25 bp, Homo sapien
cagggcggacggacatgaggaaaca

SEQ ID NO: 3278675 - DNA, 25 bp, Homo sapien
aaatggatgtatccactttctcctc

SEQ ID NO: 3278676 - DNA, 25 bp, Homo sapien
ccactttctcctcagggcggacgga

SEQ ID NO: 3278677 - DNA, 25 bp, Homo sapien
ggacaccacttcacaggaaacttag

SEQ ID NO: 3278678 - DNA, 25 bp, Homo sapien
aggaaacttagcaccagaagaactt

SEQ ID NO: 3278679 - DNA, 25 bp, Homo sapien
tcaggtggacaccacttcacaggaa

SEQ ID NO: 3278680 - DNA, 25 bp, Homo sapien
gaaacttagcaccagaagaacttgt

SEQ ID NO: 3278681 - DNA, 25 bp, Homo sapien
caaaggccccatatgtaaaaaatct

SEQ ID NO: 3278682 - DNA, 25 bp, Homo sapien
tccagaggaagtggtataaagcatc

SEQ ID NO: 3278683 - DNA, 25 bp, Homo sapien
cacaaaatgccacatgtaaatggtg

SEQ ID NO: 3278684 - DNA, 25 bp, Homo sapien
gctttcaggcctccaattccacaga

SEQ ID NO: 3278685 - DNA, 25 bp, Homo sapien
gacatggacatactaagaacctcac

SEQ ID NO: 3278686 - DNA, 25 bp, Homo sapien
tcctcaatgtaagctgcatgcgggc

SEQ ID NO: 3278687 - DNA, 25 bp, Homo sapien
catgcgggcaaggacttgtaggtct

SEQ ID NO: 3278688 - DNA, 25 bp, Homo sapien
tctagaaatctaatccacaccagga

SEQ ID NO: 3278689 - DNA, 25 bp, Homo sapien
agatacttttacaactcccgcctca

SEQ ID NO: 3278690 - DNA, 25 bp, Homo sapien
gatacttttacaactcccgcctcac

SEQ ID NO: 3278691 - DNA, 25 bp, Homo sapien
tcagatacttttacaactcccgcct

SEQ ID NO: 3278692 - DNA, 25 bp, Homo sapien
atacttttacaactcccgcctcact

SEQ ID NO: 3278693 - DNA, 25 bp, Homo sapien
aaaaaatgaataggcaggtcagaaa

SEQ ID NO: 3278694 - DNA, 25 bp, Homo sapien
tacccctatggaagtatttccattg

SEQ ID NO: 3278695 - DNA, 25 bp, Homo sapien
aagttgtatttgcaataaggcatta

SEQ ID NO: 3278696 - DNA, 25 bp, Homo sapien
tttgcagagagtggaaacacccttt

SEQ ID NO: 3278697 - DNA, 25 bp, Homo sapien
tctcatcccagtcaaagaacaggct

SEQ ID NO: 3278698 - DNA, 25 bp, Homo sapien
ttaatccggttctcactaggtgagc

SEQ ID NO: 3278699 - DNA, 25 bp, Homo sapien
caagggctaatagaagggtcaactc

SEQ ID NO: 3278700 - DNA, 25 bp, Homo sapien
ttatagtcacgagcaacctcaccgg

SEQ ID NO: 3278701 - DNA, 25 bp, Homo sapien
tgctaccgatatgctgaaaacagac

SEQ ID NO: 3278702 - DNA, 25 bp, Homo sapien
tatttatcacagtaggcgagccttt

SEQ ID NO: 3278703 - DNA, 25 bp, Homo sapien
catgggattcttatggagatcgaaa

SEQ ID NO: 3278704 - DNA, 25 bp, Homo sapien
cactgtgagtagctatctcatggga

SEQ ID NO: 3278705 - DNA, 25 bp, Homo sapien
aatgaccttgtctctgtcggaggaa

SEQ ID NO: 3278706 - DNA, 25 bp, Homo sapien
accataaagctgcactaacttcggg

SEQ ID NO: 3278707 - DNA, 25 bp, Homo sapien
cactaacttcgggtgtgtcagtttc

SEQ ID NO: 3278708 - DNA, 25 bp, Homo sapien
catgctcagcagtacgtctctactg

SEQ ID NO: 3278709 - DNA, 25 bp, Homo sapien
gggaaggaagacatatatatagtta

SEQ ID NO: 3278710 - DNA, 25 bp, Homo sapien
tgggaaggaagacatatatatagtt

SEQ ID NO: 3278711 - DNA, 25 bp, Homo sapien
ctgggaaggaagacatatatatagt

SEQ ID NO: 3278712 - DNA, 25 bp, Homo sapien
tcccaattccctcataaaggtcagt

SEQ ID NO: 3278713 - DNA, 25 bp, Homo sapien
ccttcccgaatagctttgattgcga

SEQ ID NO: 3278714 - DNA, 25 bp, Homo sapien
tgattgcgactttgtactgggctcg

SEQ ID NO: 3278715 - DNA, 25 bp, Homo sapien
gtcagttctgaagggttaatctccc

SEQ ID NO: 3278716 - DNA, 25 bp, Homo sapien
gggtaccgaagcctggtgacaagtc

SEQ ID NO: 3278717 - DNA, 25 bp, Homo sapien
cagtggtgggtgcattcttcccttt

SEQ ID NO: 3278718 - DNA, 25 bp, Homo sapien
ttcacactaactgggtaccgaagcc

SEQ ID NO: 3278719 - DNA, 25 bp, Homo sapien
tgggtaccgaagcctggtgacaagt

SEQ ID NO: 3278720 - DNA, 25 bp, Homo sapien
gttgtttcctttatatgataatgcc

SEQ ID NO: 3278721 - DNA, 25 bp, Homo sapien
tgataatgcctaaaacccgatgaac

SEQ ID NO: 3278722 - DNA, 25 bp, Homo sapien
ctgcattgtgcttatgatattcaat

SEQ ID NO: 3278723 - DNA, 25 bp, Homo sapien
cagctaggtaatacttctttggaga

SEQ ID NO: 3278724 - DNA, 25 bp, Homo sapien
agaaccaagttgaaataatagaact

SEQ ID NO: 3278725 - DNA, 25 bp, Homo sapien
tattcctggcacaaattttactttc

SEQ ID NO: 3278726 - DNA, 25 bp, Homo sapien
atcaaaatgtgtcagaaccaagttg

SEQ ID NO: 3278727 - DNA, 25 bp, Homo sapien
tccatatgatcccatctattcctgg

SEQ ID NO: 3278728 - DNA, 25 bp, Homo sapien
tatacactttagaaatcaagttcag

SEQ ID NO: 3278729 - DNA, 25 bp, Homo sapien
taaactacataggaagttcatacaa

SEQ ID NO: 3278730 - DNA, 25 bp, Homo sapien
acataggaagttcatacaaaaactc

SEQ ID NO: 3278731 - DNA, 25 bp, Homo sapien
ggtgaaatgctgcatatttttatga

SEQ ID NO: 3278732 - DNA, 25 bp, Homo sapien
tgtacaagcctggttgactggaatc

SEQ ID NO: 3278733 - DNA, 25 bp, Homo sapien
gagactgtgtacaagcctggttgac

SEQ ID NO: 3278734 - DNA, 25 bp, Homo sapien
tataaagggagactgtgtacaagcc

SEQ ID NO: 3278735 - DNA, 25 bp, Homo sapien
caaacttggtataaagggagactgt

SEQ ID NO: 3278736 - DNA, 25 bp, Homo sapien
cattgccatggagaagactaaagaa

SEQ ID NO: 3278737 - DNA, 25 bp, Homo sapien
catggagaagactaaagaacctaat

SEQ ID NO: 3278738 - DNA, 25 bp, Homo sapien
ctctaattactaatagcattgccat

SEQ ID NO: 3278739 - DNA, 25 bp, Homo sapien
ttgccatggagaagactaaagaacc

SEQ ID NO: 3278740 - DNA, 25 bp, Homo sapien
actttgtacttcaaattactgcgct

SEQ ID NO: 3278741 - DNA, 25 bp, Homo sapien
tttgtacttcaaattactgcgctag

SEQ ID NO: 3278742 - DNA, 25 bp, Homo sapien
gactttgtacttcaaattactgcgc

SEQ ID NO: 3278743 - DNA, 25 bp, Homo sapien
ctttgtacttcaaattactgcgcta

SEQ ID NO: 3278744 - DNA, 25 bp, Homo sapien
cagttccaaggtgaatggacaacat

SEQ ID NO: 3278745 - DNA, 25 bp, Homo sapien
ctaccaagagttgctaggtttgtgg

SEQ ID NO: 3278746 - DNA, 25 bp, Homo sapien
ccaagagttgctaggtttgtggatg

SEQ ID NO: 3278747 - DNA, 25 bp, Homo sapien
ttccaaggtgaatggacaacatcct

SEQ ID NO: 3278748 - DNA, 25 bp, Homo sapien
ttcactgcggaggagttgctctgcc

SEQ ID NO: 3278749 - DNA, 25 bp, Homo sapien
cggaggagttgctctgccttgcttc

SEQ ID NO: 3278750 - DNA, 25 bp, Homo sapien
actgcggaggagttgctctgccttg

SEQ ID NO: 3278751 - DNA, 25 bp, Homo sapien
gttgctctgccttgcttctattcat

SEQ ID NO: 3278752 - DNA, 25 bp, Homo sapien
gacagaatagggtctctgcctgccc

SEQ ID NO: 3278753 - DNA, 25 bp, Homo sapien
taaggattatctggcttccaagcat

SEQ ID NO: 3278754 - DNA, 25 bp, Homo sapien
tccacgctatcgctttaaaaccagg

SEQ ID NO: 3278755 - DNA, 25 bp, Homo sapien
tacatttgaaacactcgaggccatg

SEQ ID NO: 3278756 - DNA, 25 bp, Homo sapien
cgttacgtaattacttgggatatat

SEQ ID NO: 3278757 - DNA, 25 bp, Homo sapien
gttacgtaattacttgggatatatc

SEQ ID NO: 3278758 - DNA, 25 bp, Homo sapien
aatcttatacagcatccgataaaga

SEQ ID NO: 3278759 - DNA, 25 bp, Homo sapien
tacagcatccgataaagagaagcag

SEQ ID NO: 3278760 - DNA, 25 bp, Homo sapien
ccgataaagagaagcagtgacaacc

SEQ ID NO: 3278761 - DNA, 25 bp, Homo sapien
catccgataaagagaagcagtgaca

SEQ ID NO: 3278762 - DNA, 25 bp, Homo sapien
tgagatcatgtccttctgctgcttg

SEQ ID NO: 3278763 - DNA, 25 bp, Homo sapien
tcatacatggctacaacgatttctt

SEQ ID NO: 3278764 - DNA, 25 bp, Homo sapien
ttcttcttctagtggaattggtggg

SEQ ID NO: 3278765 - DNA, 25 bp, Homo sapien
tttctaaaatgagatactcttggcc

SEQ ID NO: 3278766 - DNA, 25 bp, Homo sapien
tctggtgctggaggtagtgcttttc

SEQ ID NO: 3278767 - DNA, 25 bp, Homo sapien
gctggaggtagtgcttttcttatac

SEQ ID NO: 3278768 - DNA, 25 bp, Homo sapien
ggtgctggaggtagtgcttttctta

SEQ ID NO: 3278769 - DNA, 25 bp, Homo sapien
ctggtgctggaggtagtgcttttct

SEQ ID NO: 3278770 - DNA, 25 bp, Homo sapien
catctgtccagaatttaggatgata

SEQ ID NO: 3278771 - DNA, 25 bp, Homo sapien
ttcacatccgggtgctaatttttca

SEQ ID NO: 3278772 - DNA, 25 bp, Homo sapien
ctgtccagaatttaggatgatattt

SEQ ID NO: 3278773 - DNA, 25 bp, Homo sapien
attgtatttttcacatccgggtgct

SEQ ID NO: 3278774 - DNA, 25 bp, Homo sapien
gactaggtgcaaaaatgtaaagtgt

SEQ ID NO: 3278775 - DNA, 25 bp, Homo sapien
cacaggtccctgctttgtggactag

SEQ ID NO: 3278776 - DNA, 25 bp, Homo sapien
taaagtgtgttagcatcatgaacaa

SEQ ID NO: 3278777 - DNA, 25 bp, Homo sapien
ggtccctgctttgtggactaggtgc

SEQ ID NO: 3278778 - DNA, 25 bp, Homo sapien
gatacttattttgacagggaatgac

SEQ ID NO: 3278779 - DNA, 25 bp, Homo sapien
aacatcaataaacccctttctgtat

SEQ ID NO: 3278780 - DNA, 25 bp, Homo sapien
aatggatacttattttgacagggaa

SEQ ID NO: 3278781 - DNA, 25 bp, Homo sapien
tattttgacagggaatgacaccatc

SEQ ID NO: 3278782 - DNA, 25 bp, Homo sapien
cctgccagatacacaatttgttcaa

SEQ ID NO: 3278783 - DNA, 25 bp, Homo sapien
gccagatacacaatttgttcaactt

SEQ ID NO: 3278784 - DNA, 25 bp, Homo sapien
gcccctgccagatacacaatttgtt

SEQ ID NO: 3278785 - DNA, 25 bp, Homo sapien
tgcccctgccagatacacaatttgt

SEQ ID NO: 3278786 - DNA, 25 bp, Homo sapien
atcagcacctcccatctgactaaag

SEQ ID NO: 3278787 - DNA, 25 bp, Homo sapien
catctgactaaaggactggctgcca

SEQ ID NO: 3278788 - DNA, 25 bp, Homo sapien
tcccatctgactaaaggactggctg

SEQ ID NO: 3278789 - DNA, 25 bp, Homo sapien
gcacctcccatctgactaaaggact

SEQ ID NO: 3278790 - DNA, 25 bp, Homo sapien
agtttctcctccatttagactattc

SEQ ID NO: 3278791 - DNA, 25 bp, Homo sapien
aaactcagtgttggcatttgggatc

SEQ ID NO: 3278792 - DNA, 25 bp, Homo sapien
cagtgttggcatttgggatctgaat

SEQ ID NO: 3278793 - DNA, 25 bp, Homo sapien
gtgaaactcagtgttggcatttggg

SEQ ID NO: 3278794 - DNA, 25 bp, Homo sapien
actcagtgttggcatttgggatctg

SEQ ID NO: 3278795 - DNA, 25 bp, Homo sapien
gcaagagcaaaaacacctgtgggaa

SEQ ID NO: 3278796 - DNA, 25 bp, Homo sapien
tctggaaaggtgcatcgaaaggctc

SEQ ID NO: 3278797 - DNA, 25 bp, Homo sapien
tacgcaatggccaaatctgtggaac

SEQ ID NO: 3278798 - DNA, 25 bp, Homo sapien
gattgatgaagtgataacccagagc

SEQ ID NO: 3278799 - DNA, 25 bp, Homo sapien
tggtatcccaaccatgaccaatgga

SEQ ID NO: 3278800 - DNA, 25 bp, Homo sapien
taacagtcagacgtagcagagtata

SEQ ID NO: 3278801 - DNA, 25 bp, Homo sapien
catggtagcaaacgcctgtatccca

SEQ ID NO: 3278802 - DNA, 25 bp, Homo sapien
aactatgtctctatgtaacagtcag

SEQ ID NO: 3278803 - DNA, 25 bp, Homo sapien
cagagtataatggttggttacaaaa

SEQ ID NO: 3278804 - DNA, 25 bp, Homo sapien
tttacagtggaaatgtttgagagta

SEQ ID NO: 3278805 - DNA, 25 bp, Homo sapien
gcagaaattgtcagatattagaaca

SEQ ID NO: 3278806 - DNA, 25 bp, Homo sapien
gctctacagaggcagatccagattt

SEQ ID NO: 3278807 - DNA, 25 bp, Homo sapien
caactgtttaactctattcagggaa

SEQ ID NO: 3278808 - DNA, 25 bp, Homo sapien
ctaacatttgatgcagatacttcca

SEQ ID NO: 3278809 - DNA, 25 bp, Homo sapien
tgcccggtagtacaagaaattattc

SEQ ID NO: 3278810 - DNA, 25 bp, Homo sapien
cagatacttccaattgcccggtagt

SEQ ID NO: 3278811 - DNA, 25 bp, Homo sapien
tccaattgcccggtagtacaagaaa

SEQ ID NO: 3278812 - DNA, 25 bp, Homo sapien
ccaataaacctacagtttccacttg

SEQ ID NO: 3278813 - DNA, 25 bp, Homo sapien
caggtaaagattagaaggacccaat

SEQ ID NO: 3278814 - DNA, 25 bp, Homo sapien
ttcaggtaaagattagaaggaccca

SEQ ID NO: 3278815 - DNA, 25 bp, Homo sapien
tgaaagatacaaaccttcaggtaaa

SEQ ID NO: 3278816 - DNA, 25 bp, Homo sapien
aatgcaccttacaaattccatgagg

SEQ ID NO: 3278817 - DNA, 25 bp, Homo sapien
gaagactttgatacataataagcgg

SEQ ID NO: 3278818 - DNA, 25 bp, Homo sapien
aataagcggtttacaggagagagcc

SEQ ID NO: 3278819 - DNA, 25 bp, Homo sapien
gagagagccatatgtacaatgcacc

SEQ ID NO: 3278820 - DNA, 25 bp, Homo sapien
ctgctgtgaccttttaataagaatc

SEQ ID NO: 3278821 - DNA, 25 bp, Homo sapien
ctctgctcgaccctcatagtaggtt

SEQ ID NO: 3278822 - DNA, 25 bp, Homo sapien
gctcgaccctcatagtaggttagca

SEQ ID NO: 3278823 - DNA, 25 bp, Homo sapien
cgaccctcatagtaggttagcatgg

SEQ ID NO: 3278824 - DNA, 25 bp, Homo sapien
ttactcctcctgccactgaagatcc

SEQ ID NO: 3278825 - DNA, 25 bp, Homo sapien
acagccaactcatgaacaaaatgaa

SEQ ID NO: 3278826 - DNA, 25 bp, Homo sapien
gcccaccctgctaaaaataatgcct

SEQ ID NO: 3278827 - DNA, 25 bp, Homo sapien
cttgaccctggaaggtcgagaggct

SEQ ID NO: 3278828 - DNA, 25 bp, Homo sapien
aaaaataatgcctctgtggccgggc

SEQ ID NO: 3278829 - DNA, 25 bp, Homo sapien
caatccaccgcccaccctgctaaaa

SEQ ID NO: 3278830 - DNA, 25 bp, Homo sapien
taggtatatctatctcgacactgcc

SEQ ID NO: 3278831 - DNA, 25 bp, Homo sapien
atttcaatcaagatcgcgccgccgc

SEQ ID NO: 3278832 - DNA, 25 bp, Homo sapien
gcccaacccgaaaggaggcatcagc

SEQ ID NO: 3278833 - DNA, 25 bp, Homo sapien
ggacgtgaccccaacgctgaacttg

SEQ ID NO: 3278834 - DNA, 25 bp, Homo sapien
gcgccgcggagtccggagcctagcg

SEQ ID NO: 3278835 - DNA, 25 bp, Homo sapien
tgcgccgcggagtccggagcctagc

SEQ ID NO: 3278836 - DNA, 25 bp, Homo sapien
agtccggagcctagcgccccagagt

SEQ ID NO: 3278837 - DNA, 25 bp, Homo sapien
gcggagtccggagcctagcgcccca

SEQ ID NO: 3278838 - DNA, 25 bp, Homo sapien
ctggaattgggacactgagagactg

SEQ ID NO: 3278839 - DNA, 25 bp, Homo sapien
gaacacagaacatgagtaagcaggg

SEQ ID NO: 3278840 - DNA, 25 bp, Homo sapien
tattatgtcacccaagaatctggaa

SEQ ID NO: 3278841 - DNA, 25 bp, Homo sapien
tcagcatgctgtaccatggtgggct

SEQ ID NO: 3278842 - DNA, 25 bp, Homo sapien
tatgctacagctagaacccgacatc

SEQ ID NO: 3278843 - DNA, 25 bp, Homo sapien
cagcgatcaaggtcaagtgcattta

SEQ ID NO: 3278844 - DNA, 25 bp, Homo sapien
cctggaagagatactggagatcctc

SEQ ID NO: 3278845 - DNA, 25 bp, Homo sapien
ggttcgccttatagaaactgactag

SEQ ID NO: 3278846 - DNA, 25 bp, Homo sapien
ccagcggcgctttggaacccgaggt

SEQ ID NO: 3278847 - DNA, 25 bp, Homo sapien
ttccctgtcgctgcgagagcgagcg

SEQ ID NO: 3278848 - DNA, 25 bp, Homo sapien
ccggcgcagatgaggcagttcggct

SEQ ID NO: 3278849 - DNA, 25 bp, Homo sapien
tatgccggcgcctcggctagagtga

SEQ ID NO: 3278850 - DNA, 25 bp, Homo sapien
taagctgtaaatgtttgctggtagc

SEQ ID NO: 3278851 - DNA, 25 bp, Homo sapien
gctttggcacccaaagggtggctaa

SEQ ID NO: 3278852 - DNA, 25 bp, Homo sapien
tagtcgtgtacgttaatggaagaag

SEQ ID NO: 3278853 - DNA, 25 bp, Homo sapien
ggtggctaaggttttcagttgaata

SEQ ID NO: 3278854 - DNA, 25 bp, Homo sapien
gcatttgcctagatcataactatgt

SEQ ID NO: 3278855 - DNA, 25 bp, Homo sapien
tacctgctgtgaattgatacctagt

SEQ ID NO: 3278856 - DNA, 25 bp, Homo sapien
gctattatgagtttccaagagggac

SEQ ID NO: 3278857 - DNA, 25 bp, Homo sapien
tgcgaatatttaggtgatcacgtgc

SEQ ID NO: 3278858 - DNA, 25 bp, Homo sapien
aacccatatggaggttcaaccactg

SEQ ID NO: 3278859 - DNA, 25 bp, Homo sapien
taagtcttgggtggctaaatggccc

SEQ ID NO: 3278860 - DNA, 25 bp, Homo sapien
tactcatcggccttatttactgtaa

SEQ ID NO: 3278861 - DNA, 25 bp, Homo sapien
tggccctctgcttaccagtctgaaa

SEQ ID NO: 3278862 - DNA, 25 bp, Homo sapien
tcaaatccaaaacacgctgtcccta

SEQ ID NO: 3278863 - DNA, 25 bp, Homo sapien
tgtccctagactcattgctctcttc

SEQ ID NO: 3278864 - DNA, 25 bp, Homo sapien
atccaaaacacgctgtccctagact

SEQ ID NO: 3278865 - DNA, 25 bp, Homo sapien
caaaacacgctgtccctagactcat

SEQ ID NO: 3278866 - DNA, 25 bp, Homo sapien
aagtggctccactccacttctttag

SEQ ID NO: 3278867 - DNA, 25 bp, Homo sapien
aatccatttgttcctccctccaagt

SEQ ID NO: 3278868 - DNA, 25 bp, Homo sapien
tcccgcctctagaatccatttgttc

SEQ ID NO: 3278869 - DNA, 25 bp, Homo sapien
ccctccaagtggctccactccactt

SEQ ID NO: 3278870 - DNA, 25 bp, Homo sapien
ttgtccagggtggtgtcaagttcct

SEQ ID NO: 3278871 - DNA, 25 bp, Homo sapien
ttgacacggtttgctgtcacccatg

SEQ ID NO: 3278872 - DNA, 25 bp, Homo sapien
cactgtgccacaaagctctaaattt

SEQ ID NO: 3278873 - DNA, 25 bp, Homo sapien
aattagctttggtatacactgtgcc

SEQ ID NO: 3278874 - DNA, 25 bp, Homo sapien
tcagatggagtctcagtctgtcatc

SEQ ID NO: 3278875 - DNA, 25 bp, Homo sapien
ttttcagatggagtctcagtctgtc

SEQ ID NO: 3278876 - DNA, 25 bp, Homo sapien
ttttttcagatggagtctcagtctg

SEQ ID NO: 3278877 - DNA, 25 bp, Homo sapien
ttcagatggagtctcagtctgtcat

SEQ ID NO: 3278878 - DNA, 25 bp, Homo sapien
tgtgcggtagatgcaaaggcaaacg

SEQ ID NO: 3278879 - DNA, 25 bp, Homo sapien
gccccaccgtcaagatttgtgcggt

SEQ ID NO: 3278880 - DNA, 25 bp, Homo sapien
ttgtaaacaaacgagatgttcctgc

SEQ ID NO: 3278881 - DNA, 25 bp, Homo sapien
gcccagtaaaacttcgccacgtgga

SEQ ID NO: 3278882 - DNA, 25 bp, Homo sapien
aactgccggattgctgcttttgctg

SEQ ID NO: 3278883 - DNA, 25 bp, Homo sapien
cttttgctgttgtcttataagcgta

SEQ ID NO: 3278884 - DNA, 25 bp, Homo sapien
atgaagaaactgccggattgctgct

SEQ ID NO: 3278885 - DNA, 25 bp, Homo sapien
aagaaactgccggattgctgctttt

SEQ ID NO: 3278886 - DNA, 25 bp, Homo sapien
tattaatagacttagttacatataa

SEQ ID NO: 3278887 - DNA, 25 bp, Homo sapien
tttctagggcaattcaagaaggtaa

SEQ ID NO: 3278888 - DNA, 25 bp, Homo sapien
agcaaatatcaactgaaaggtttgg

SEQ ID NO: 3278889 - DNA, 25 bp, Homo sapien
tgttcttttctagggcaattcaaga

SEQ ID NO: 3278890 - DNA, 25 bp, Homo sapien
tatgaatgagctgtgaccagttacg

SEQ ID NO: 3278891 - DNA, 25 bp, Homo sapien
taattacatttctggcagggtccac

SEQ ID NO: 3278892 - DNA, 25 bp, Homo sapien
tctttagggtaaagcatgtgagtcc

SEQ ID NO: 3278893 - DNA, 25 bp, Homo sapien
tcaaatcaggagttgtgggactaca

SEQ ID NO: 3278894 - DNA, 25 bp, Homo sapien
tgaatgcaagggtccataaaaggtg

SEQ ID NO: 3278895 - DNA, 25 bp, Homo sapien
gcatgctctgagacgttatcaccaa

SEQ ID NO: 3278896 - DNA, 25 bp, Homo sapien
gatgctgccagaaagttatcagtga

SEQ ID NO: 3278897 - DNA, 25 bp, Homo sapien
gtcttgatgcgtatagctgactgca

SEQ ID NO: 3278898 - DNA, 25 bp, Homo sapien
tcccattggtttggcctgtgctaga

SEQ ID NO: 3278899 - DNA, 25 bp, Homo sapien
ttgcaccatgcgtagagactctctt

SEQ ID NO: 3278900 - DNA, 25 bp, Homo sapien
tgctagaagttggtatgattgcacc

SEQ ID NO: 3278901 - DNA, 25 bp, Homo sapien
tctgacatgtccaggttagagccta

SEQ ID NO: 3278902 - DNA, 25 bp, Homo sapien
tgtcaatttcttcgttttcggaagc

SEQ ID NO: 3278903 - DNA, 25 bp, Homo sapien
tgaaagctttgacttgtgctacagc

SEQ ID NO: 3278904 - DNA, 25 bp, Homo sapien
tgtgctacagctgatataaattctt

SEQ ID NO: 3278905 - DNA, 25 bp, Homo sapien
gcggactcagcttctttgaggatac

SEQ ID NO: 3278906 - DNA, 25 bp, Homo sapien
tacctgatggcagtagcattgttgc

SEQ ID NO: 3278907 - DNA, 25 bp, Homo sapien
gcagtagcattgttgctcttaaaga

SEQ ID NO: 3278908 - DNA, 25 bp, Homo sapien
ggatctattcgtatgtttggtaaca

SEQ ID NO: 3278909 - DNA, 25 bp, Homo sapien
ttagttggctacaagaatatacctg

SEQ ID NO: 3278910 - DNA, 25 bp, Homo sapien
aatttgtataatcttcggcagagct

SEQ ID NO: 3278911 - DNA, 25 bp, Homo sapien
tacttggttgataagtttacagtag

SEQ ID NO: 3278912 - DNA, 25 bp, Homo sapien
tataatcttcggcagagctccaatt

SEQ ID NO: 3278913 - DNA, 25 bp, Homo sapien
tggttgataagtttacagtaggcct

SEQ ID NO: 3278914 - DNA, 25 bp, Homo sapien
cacaaatggacaaatggcagatgaa

SEQ ID NO: 3278915 - DNA, 25 bp, Homo sapien
gtagtccacgagaaaacattgctgg

SEQ ID NO: 3278916 - DNA, 25 bp, Homo sapien
acatttcatggattagggctttgca

SEQ ID NO: 3278917 - DNA, 25 bp, Homo sapien
tctggcaagggtgagtagtctataa

SEQ ID NO: 3278918 - DNA, 25 bp, Homo sapien
caaaagattatctctagggtggctc

SEQ ID NO: 3278919 - DNA, 25 bp, Homo sapien
ttagacatttactgcaacgattcag

SEQ ID NO: 3278920 - DNA, 25 bp, Homo sapien
taagcaagaaggtgatcaggtcaca

SEQ ID NO: 3278921 - DNA, 25 bp, Homo sapien
atcttggtaaatctggctatccagg

SEQ ID NO: 3278922 - DNA, 25 bp, Homo sapien
tttcattgagcttttacaaagattg

SEQ ID NO: 3278923 - DNA, 25 bp, Homo sapien
tgcattgttttacctgatacagaaa

SEQ ID NO: 3278924 - DNA, 25 bp, Homo sapien
aataaggatatttgaacacatgcat

SEQ ID NO: 3278925 - DNA, 25 bp, Homo sapien
acatgcattgttttacctgatacag

SEQ ID NO: 3278926 - DNA, 25 bp, Homo sapien
atgtcctcttacaatcatctagcca

SEQ ID NO: 3278927 - DNA, 25 bp, Homo sapien
ctgtgtttatcctatacatgtcttc

SEQ ID NO: 3278928 - DNA, 25 bp, Homo sapien
gtgtttatcctatacatgtcttctt

SEQ ID NO: 3278929 - DNA, 25 bp, Homo sapien
aaatgtcctcttacaatcatctagc

SEQ ID NO: 3278930 - DNA, 25 bp, Homo sapien
tttgtgaaccggcaatcaagatcca

SEQ ID NO: 3278931 - DNA, 25 bp, Homo sapien
gaaaagaaagaacgctggactcaca

SEQ ID NO: 3278932 - DNA, 25 bp, Homo sapien
cctgacctttgtgtaacgtaagacg

SEQ ID NO: 3278933 - DNA, 25 bp, Homo sapien
aaatgggtagtgtaacagcctgtcc

SEQ ID NO: 3278934 - DNA, 25 bp, Homo sapien
tcacattgtatgtatccaggtgttc

SEQ ID NO: 3278935 - DNA, 25 bp, Homo sapien
aacttgagtgtttccagcaaaccac

SEQ ID NO: 3278936 - DNA, 25 bp, Homo sapien
caactccaaaacaccaaacttgagt

SEQ ID NO: 3278937 - DNA, 25 bp, Homo sapien
acattgtatgtatccaggtgttctt

SEQ ID NO: 3278938 - DNA, 25 bp, Homo sapien
atccacaaagactgttgggcattct

SEQ ID NO: 3278939 - DNA, 25 bp, Homo sapien
ttgggcattctgaacacagcatcat

SEQ ID NO: 3278940 - DNA, 25 bp, Homo sapien
tccacaaagactgttgggcattctg

SEQ ID NO: 3278941 - DNA, 25 bp, Homo sapien
caatgcgttgcagactatcaccaag

SEQ ID NO: 3278942 - DNA, 25 bp, Homo sapien
aatgcgttgcagactatcaccaaga

SEQ ID NO: 3278943 - DNA, 25 bp, Homo sapien
tgcgttgcagactatcaccaagaaa

SEQ ID NO: 3278944 - DNA, 25 bp, Homo sapien
aagctgactgcctcattagttattt

SEQ ID NO: 3278945 - DNA, 25 bp, Homo sapien
tgcagaggacccgtcggtgtcagac

SEQ ID NO: 3278946 - DNA, 25 bp, Homo sapien
catcatatgccacgggctgaaaggc

SEQ ID NO: 3278947 - DNA, 25 bp, Homo sapien
gcatctgattgacgtggcagcgcca

SEQ ID NO: 3278948 - DNA, 25 bp, Homo sapien
gaggcgacgtctgtacttctggaaa

SEQ ID NO: 3278949 - DNA, 25 bp, Homo sapien
agagctaaggtaacatcctcttcac

SEQ ID NO: 3278950 - DNA, 25 bp, Homo sapien
tctagctctttcagagctaaggtaa

SEQ ID NO: 3278951 - DNA, 25 bp, Homo sapien
gactgactcggggtaactttcagga

SEQ ID NO: 3278952 - DNA, 25 bp, Homo sapien
ctagacagtccggagaaatccgctt

SEQ ID NO: 3278953 - DNA, 25 bp, Homo sapien
gttcttgaattatataggatccttc

SEQ ID NO: 3278954 - DNA, 25 bp, Homo sapien
gaattatataggatccttcatcttc

SEQ ID NO: 3278955 - DNA, 25 bp, Homo sapien
taaatcaagaattccttgacacaca

SEQ ID NO: 3278956 - DNA, 25 bp, Homo sapien
tcaaaggttgtaacatgttcctcct

SEQ ID NO: 3278957 - DNA, 25 bp, Homo sapien
tataaagcatactagtggtgtgccc

SEQ ID NO: 3278958 - DNA, 25 bp, Homo sapien
gacaactagggtggccttactacaa

SEQ ID NO: 3278959 - DNA, 25 bp, Homo sapien
cacacagcaggagtaggtactgacc

SEQ ID NO: 3278960 - DNA, 25 bp, Homo sapien
cagaaggatgctgaacctagacaac

SEQ ID NO: 3278961 - DNA, 25 bp, Homo sapien
tccactggtgttacggtgtatggtg

SEQ ID NO: 3278962 - DNA, 25 bp, Homo sapien
ggatagccattcttttggtgacagt

SEQ ID NO: 3278963 - DNA, 25 bp, Homo sapien
tatggtgtgatccaaactaggcact

SEQ ID NO: 3278964 - DNA, 25 bp, Homo sapien
tagtcaggccctgctaaattcttgc

SEQ ID NO: 3278965 - DNA, 25 bp, Homo sapien
aaacataatactagtggttccaaag

SEQ ID NO: 3278966 - DNA, 25 bp, Homo sapien
catttaacaactgctaaaaaccaca

SEQ ID NO: 3278967 - DNA, 25 bp, Homo sapien
cttcaaatctggcttacttctcaca

SEQ ID NO: 3278968 - DNA, 25 bp, Homo sapien
aatctggcttacttctcacaggcct

SEQ ID NO: 3278969 - DNA, 25 bp, Homo sapien
tggtctggtattgtttcatcagtgg

SEQ ID NO: 3278970 - DNA, 25 bp, Homo sapien
caggcagccggctgttagcattatc

SEQ ID NO: 3278971 - DNA, 25 bp, Homo sapien
tcttcagactggagaagtaagtcag

SEQ ID NO: 3278972 - DNA, 25 bp, Homo sapien
gggtctcatccctgatttgaagcac

SEQ ID NO: 3278973 - DNA, 25 bp, Homo sapien
tcatctgtatcctcctgattggtga

SEQ ID NO: 3278974 - DNA, 25 bp, Homo sapien
tctggcttgctgtaagtgccgcttc

SEQ ID NO: 3278975 - DNA, 25 bp, Homo sapien
ggtgctactagagcactggtactcc

SEQ ID NO: 3278976 - DNA, 25 bp, Homo sapien
aatactgtccagtgagcgcctgcga

SEQ ID NO: 3278977 - DNA, 25 bp, Homo sapien
tcctatgaacctgtacaattgtgtc

SEQ ID NO: 3278978 - DNA, 25 bp, Homo sapien
tggagtattccataggagcctacac

SEQ ID NO: 3278979 - DNA, 25 bp, Homo sapien
gagtttggatgcatattcttgcaac

SEQ ID NO: 3278980 - DNA, 25 bp, Homo sapien
taaaagctactgctctgaaaggtgc

SEQ ID NO: 3278981 - DNA, 25 bp, Homo sapien
ttctgttgtagaaattaggctagtc

SEQ ID NO: 3278982 - DNA, 25 bp, Homo sapien
caccaaactgttgttcactgctatt

SEQ ID NO: 3278983 - DNA, 25 bp, Homo sapien
cactgctattatcttccacagctac

SEQ ID NO: 3278984 - DNA, 25 bp, Homo sapien
tggtcaccgacttccaaatcctcat

SEQ ID NO: 3278985 - DNA, 25 bp, Homo sapien
gaggccagattctggaccacagaga

SEQ ID NO: 3278986 - DNA, 25 bp, Homo sapien
ggccagattctggaccacagagaga

SEQ ID NO: 3278987 - DNA, 25 bp, Homo sapien
ttgggaggccagattctggaccaca

SEQ ID NO: 3278988 - DNA, 25 bp, Homo sapien
gggaggccagattctggaccacaga

SEQ ID NO: 3278989 - DNA, 25 bp, Homo sapien
gccgcactgtgctgatcaccatatt

SEQ ID NO: 3278990 - DNA, 25 bp, Homo sapien
cgcactgtgctgatcaccatatttg

SEQ ID NO: 3278991 - DNA, 25 bp, Homo sapien
cttccagccgcactgtgctgatcac

SEQ ID NO: 3278992 - DNA, 25 bp, Homo sapien
cagccgcactgtgctgatcaccata

SEQ ID NO: 3278993 - DNA, 25 bp, Homo sapien
tatcactgggtacgacaagactcgc

SEQ ID NO: 3278994 - DNA, 25 bp, Homo sapien
ccaccagctttaatatgttaagggc

SEQ ID NO: 3278995 - DNA, 25 bp, Homo sapien
tgaaggatatttcaggagaacctgt

SEQ ID NO: 3278996 - DNA, 25 bp, Homo sapien
acaagactcgcagagcgtgacacca

SEQ ID NO: 3278997 - DNA, 25 bp, Homo sapien
tctagtgaatgcaaacgtaactgga

SEQ ID NO: 3278998 - DNA, 25 bp, Homo sapien
taaatagggccaccagaaaatctcc

SEQ ID NO: 3278999 - DNA, 25 bp, Homo sapien
tccttgccagctaagtatttcccat

SEQ ID NO: 3279000 - DNA, 25 bp, Homo sapien
cctcactcactgaaggataagacac

SEQ ID NO: 3279001 - DNA, 25 bp, Homo sapien
gactgctgcaatgtgtatatgcatt

SEQ ID NO: 3279002 - DNA, 25 bp, Homo sapien
tttccagagttttgactgctgcaat

SEQ ID NO: 3279003 - DNA, 25 bp, Homo sapien
tttgactgctgcaatgtgtatatgc

SEQ ID NO: 3279004 - DNA, 25 bp, Homo sapien
gagttttgactgctgcaatgtgtat

SEQ ID NO: 3279005 - DNA, 25 bp, Homo sapien
ggctgcagacaggtcaatatgactc

SEQ ID NO: 3279006 - DNA, 25 bp, Homo sapien
taaataatctgtagtaatgattgct

SEQ ID NO: 3279007 - DNA, 25 bp, Homo sapien
tgatctccagattaaactgcttggc

SEQ ID NO: 3279008 - DNA, 25 bp, Homo sapien
tgtagtaatgattgctgcatactgg

SEQ ID NO: 3279009 - DNA, 25 bp, Homo sapien
taaggatataaacactggacatgga

SEQ ID NO: 3279010 - DNA, 25 bp, Homo sapien
cttaaggacagtaaataaggatata

SEQ ID NO: 3279011 - DNA, 25 bp, Homo sapien
ttgagtttcatgtcacttaaggaca

SEQ ID NO: 3279012 - DNA, 25 bp, Homo sapien
tctaggatcaggaccactaaaaacc

SEQ ID NO: 3279013 - DNA, 25 bp, Homo sapien
tactgtacaaactcatcatgtgtgc

SEQ ID NO: 3279014 - DNA, 25 bp, Homo sapien
cacgacattgatccagttagaacag

SEQ ID NO: 3279015 - DNA, 25 bp, Homo sapien
gagtcatgcaggtatctgcacacga

SEQ ID NO: 3279016 - DNA, 25 bp, Homo sapien
tcatgtgtgccagattgacaagtgt

SEQ ID NO: 3279017 - DNA, 25 bp, Homo sapien
tgtgaactcgggacatcattttgga

SEQ ID NO: 3279018 - DNA, 25 bp, Homo sapien
gagcagtcagttgcaaacagcctca

SEQ ID NO: 3279019 - DNA, 25 bp, Homo sapien
tataactagggaattctcagggagg

SEQ ID NO: 3279020 - DNA, 25 bp, Homo sapien
caggatggatcagtgcacaagtgac

SEQ ID NO: 3279021 - DNA, 25 bp, Homo sapien
ctttgctattcgactagctgtttct

SEQ ID NO: 3279022 - DNA, 25 bp, Homo sapien
tgctattcgactagctgtttctttg

SEQ ID NO: 3279023 - DNA, 25 bp, Homo sapien
aaaactgagttgggctgtcaaaatg

SEQ ID NO: 3279024 - DNA, 25 bp, Homo sapien
attcgactagctgtttctttgcaaa

SEQ ID NO: 3279025 - DNA, 25 bp, Homo sapien
gattaagtgaggcaataagcaaagg

SEQ ID NO: 3279026 - DNA, 25 bp, Homo sapien
aagcaaaggatgttaagaggaaagc

SEQ ID NO: 3279027 - DNA, 25 bp, Homo sapien
tgaggcaataagcaaaggatgttaa

SEQ ID NO: 3279028 - DNA, 25 bp, Homo sapien
caataagcaaaggatgttaagagga

SEQ ID NO: 3279029 - DNA, 25 bp, Homo sapien
gatgctgctatccaaaaaatggtgg

SEQ ID NO: 3279030 - DNA, 25 bp, Homo sapien
tagtggactgcacgtcatacattcc

SEQ ID NO: 3279031 - DNA, 25 bp, Homo sapien
tactgaggaggtgcacggtcatttc

SEQ ID NO: 3279032 - DNA, 25 bp, Homo sapien
caagttggtaggctcagtagtggac

SEQ ID NO: 3279033 - DNA, 25 bp, Homo sapien
tttcagccaaagtatcaattgcaga

SEQ ID NO: 3279034 - DNA, 25 bp, Homo sapien
gaaagaagatcataatgcttcatgg

SEQ ID NO: 3279035 - DNA, 25 bp, Homo sapien
tgcagattccaatgtgagaagaagc

SEQ ID NO: 3279036 - DNA, 25 bp, Homo sapien
tgagaagaagctcaatcacaaatcc

SEQ ID NO: 3279037 - DNA, 25 bp, Homo sapien
tgtgagtgggcgagtgtaaagcttt

SEQ ID NO: 3279038 - DNA, 25 bp, Homo sapien
gatcatcccaggttaagatcttggg

SEQ ID NO: 3279039 - DNA, 25 bp, Homo sapien
ttgtgatcatcccaggttaagatct

SEQ ID NO: 3279040 - DNA, 25 bp, Homo sapien
tgagtgggcgagtgtaaagcttttt

SEQ ID NO: 3279041 - DNA, 25 bp, Homo sapien
tgtgcatcttctcctggatccccta

SEQ ID NO: 3279042 - DNA, 25 bp, Homo sapien
tggatcccctacagtttctacaagt

SEQ ID NO: 3279043 - DNA, 25 bp, Homo sapien
tcttctcctggatcccctacagttt

SEQ ID NO: 3279044 - DNA, 25 bp, Homo sapien
tcctggatcccctacagtttctaca

SEQ ID NO: 3279045 - DNA, 25 bp, Homo sapien
gctttagggccctgaaaatctgaaa

SEQ ID NO: 3279046 - DNA, 25 bp, Homo sapien
gagaacatcagaaagtgtagttgca

SEQ ID NO: 3279047 - DNA, 25 bp, Homo sapien
gcatagtgtcgagaagaacaggaaa

SEQ ID NO: 3279048 - DNA, 25 bp, Homo sapien
tctcccagcatagtgtcgagaagaa

SEQ ID NO: 3279049 - DNA, 25 bp, Homo sapien
tatgctaggattcttggcagaaaca

SEQ ID NO: 3279050 - DNA, 25 bp, Homo sapien
ctcatggttccaaaggggccctctt

SEQ ID NO: 3279051 - DNA, 25 bp, Homo sapien
tcagcactctttatgctaggattct

SEQ ID NO: 3279052 - DNA, 25 bp, Homo sapien
aaatgtagttaactgttcagcactc

SEQ ID NO: 3279053 - DNA, 25 bp, Homo sapien
tgctccactgagatgtcaacctcat

SEQ ID NO: 3279054 - DNA, 25 bp, Homo sapien
tcattgaggatagtggtgtgcagat

SEQ ID NO: 3279055 - DNA, 25 bp, Homo sapien
tgaattccatgagggttttgacttt

SEQ ID NO: 3279056 - DNA, 25 bp, Homo sapien
gcagcactgttatttcctaagctga

SEQ ID NO: 3279057 - DNA, 25 bp, Homo sapien
aggtagaacttgagctaagccctga

SEQ ID NO: 3279058 - DNA, 25 bp, Homo sapien
ctagaagaggtagaacttgagctaa

SEQ ID NO: 3279059 - DNA, 25 bp, Homo sapien
ctggtaatcaggtataaaatcgtta

SEQ ID NO: 3279060 - DNA, 25 bp, Homo sapien
taatcaggtataaaatcgttaatgc

SEQ ID NO: 3279061 - DNA, 25 bp, Homo sapien
gaaagagaaagatcgtcatgaatac

SEQ ID NO: 3279062 - DNA, 25 bp, Homo sapien
ctgaaagagaaagatcgtcatgaat

SEQ ID NO: 3279063 - DNA, 25 bp, Homo sapien
tgaaagagaaagatcgtcatgaata

SEQ ID NO: 3279064 - DNA, 25 bp, Homo sapien
ccttagactctatgggacacatgag

SEQ ID NO: 3279065 - DNA, 25 bp, Homo sapien
cacatgaggcaatctgtcagtgcaa

SEQ ID NO: 3279066 - DNA, 25 bp, Homo sapien
tggatgtactatgcagtcctctgcc

SEQ ID NO: 3279067 - DNA, 25 bp, Homo sapien
gcaaggtgatgtgaatcagtgctcc

SEQ ID NO: 3279068 - DNA, 25 bp, Homo sapien
tcaacatctttttcgtaattcgtcc

SEQ ID NO: 3279069 - DNA, 25 bp, Homo sapien
taacattgacagtgaaataaaccat

SEQ ID NO: 3279070 - DNA, 25 bp, Homo sapien
cattaacttggacttcactacttca

SEQ ID NO: 3279071 - DNA, 25 bp, Homo sapien
taaagatcgttcgaggtaatgcaga

SEQ ID NO: 3279072 - DNA, 25 bp, Homo sapien
tttgactgtaagcaccctgggctca

SEQ ID NO: 3279073 - DNA, 25 bp, Homo sapien
ttaaactccttgttcctgagaagga

SEQ ID NO: 3279074 - DNA, 25 bp, Homo sapien
aacttgtttgactgtaagcaccctg

SEQ ID NO: 3279075 - DNA, 25 bp, Homo sapien
aaactccttgttcctgagaaggaca

SEQ ID NO: 3279076 - DNA, 25 bp, Homo sapien
acctcagggtggcagtggtcaaacc

SEQ ID NO: 3279077 - DNA, 25 bp, Homo sapien
tactattaataagtgcagaagcagg

SEQ ID NO: 3279078 - DNA, 25 bp, Homo sapien
tgggtcccattactattaataagtg

SEQ ID NO: 3279079 - DNA, 25 bp, Homo sapien
cagaagcaggcgtttacaatgttca

SEQ ID NO: 3279080 - DNA, 25 bp, Homo sapien
gaagatggaggtagcttccccattc

SEQ ID NO: 3279081 - DNA, 25 bp, Homo sapien
tccaccttcacactatgatcaatga

SEQ ID NO: 3279082 - DNA, 25 bp, Homo sapien
tatgatcaatgatgagatcagtcaa

SEQ ID NO: 3279083 - DNA, 25 bp, Homo sapien
tggaggtagcttccccattccacct

SEQ ID NO: 3279084 - DNA, 25 bp, Homo sapien
tcagtcgccaattagaataaagtgg

SEQ ID NO: 3279085 - DNA, 25 bp, Homo sapien
gtttcaggcacgtaatccaccagtg

SEQ ID NO: 3279086 - DNA, 25 bp, Homo sapien
aggtaatccaggtgatgacgtttca

SEQ ID NO: 3279087 - DNA, 25 bp, Homo sapien
tctccttggttatgctccatcactt

SEQ ID NO: 3279088 - DNA, 25 bp, Homo sapien
tccagagctgctactgtatcgggat

SEQ ID NO: 3279089 - DNA, 25 bp, Homo sapien
actgtatcgggattctagtctgtga

SEQ ID NO: 3279090 - DNA, 25 bp, Homo sapien
tgtgatgttgccgattcaaatgact

SEQ ID NO: 3279091 - DNA, 25 bp, Homo sapien
agtccactgtaaatgtccaggtgca

SEQ ID NO: 3279092 - DNA, 25 bp, Homo sapien
gctaccattgtattgctactggaag

SEQ ID NO: 3279093 - DNA, 25 bp, Homo sapien
tgggagctaccattgtattgctact

SEQ ID NO: 3279094 - DNA, 25 bp, Homo sapien
ctgtgggagctaccattgtattgct

SEQ ID NO: 3279095 - DNA, 25 bp, Homo sapien
ccattgtattgctactggaagtagt

SEQ ID NO: 3279096 - DNA, 25 bp, Homo sapien
acagtccaactatgaaacatgaata

SEQ ID NO: 3279097 - DNA, 25 bp, Homo sapien
tgtattggatacgaaacaacagtcc

SEQ ID NO: 3279098 - DNA, 25 bp, Homo sapien
cattctagccgatatgaaaaattca

SEQ ID NO: 3279099 - DNA, 25 bp, Homo sapien
gacagatctagaattggtaggcttt

SEQ ID NO: 3279100 - DNA, 25 bp, Homo sapien
aagatgtctatcatctcacacagca

SEQ ID NO: 3279101 - DNA, 25 bp, Homo sapien
agaccctaaaatggttaccatagtg

SEQ ID NO: 3279102 - DNA, 25 bp, Homo sapien
tcataacatgttatgggacatagag

SEQ ID NO: 3279103 - DNA, 25 bp, Homo sapien
tatgggacatagagaccctaaaatg

SEQ ID NO: 3279104 - DNA, 25 bp, Homo sapien
tagctggaagtgatgcgataatacg

SEQ ID NO: 3279105 - DNA, 25 bp, Homo sapien
acgggggattatccatgtgagtgac

SEQ ID NO: 3279106 - DNA, 25 bp, Homo sapien
gaggtgacagaagggattttatagc

SEQ ID NO: 3279107 - DNA, 25 bp, Homo sapien
gaactgacaggatcggtcagctgaa

SEQ ID NO: 3279108 - DNA, 25 bp, Homo sapien
aagcaaagtttttatctcattaatt

SEQ ID NO: 3279109 - DNA, 25 bp, Homo sapien
tctatcattggaaagttgctctcag

SEQ ID NO: 3279110 - DNA, 25 bp, Homo sapien
ttagaactccaactacattgcctgg

SEQ ID NO: 3279111 - DNA, 25 bp, Homo sapien
gcacctacttcatatagctattagg

SEQ ID NO: 3279112 - DNA, 25 bp, Homo sapien
gaaataacttcataactgatcagcc

SEQ ID NO: 3279113 - DNA, 25 bp, Homo sapien
tctaggtatggctctttactccatc

SEQ ID NO: 3279114 - DNA, 25 bp, Homo sapien
catccaatgggcactacttgctaat

SEQ ID NO: 3279115 - DNA, 25 bp, Homo sapien
aaactcttatcatggttacccagtg

SEQ ID NO: 3279116 - DNA, 25 bp, Homo sapien
tgagcatgctgtgtgcattcctgcc

SEQ ID NO: 3279117 - DNA, 25 bp, Homo sapien
taggactagtcttccgtggaccaca

SEQ ID NO: 3279118 - DNA, 25 bp, Homo sapien
cagtcagagaggtaacgtgcggtaa

SEQ ID NO: 3279119 - DNA, 25 bp, Homo sapien
tgggagcaccagacagaatatagga

SEQ ID NO: 3279120 - DNA, 25 bp, Homo sapien
ggcactatgcctgtggtacaccttg

SEQ ID NO: 3279121 - DNA, 25 bp, Homo sapien
cagcctgaaggacaatcctacgtgc

SEQ ID NO: 3279122 - DNA, 25 bp, Homo sapien
ttcccttgcttccagcagcctgaag

SEQ ID NO: 3279123 - DNA, 25 bp, Homo sapien
cctgttctcatatctaaatgccagc

SEQ ID NO: 3279124 - DNA, 25 bp, Homo sapien
caatcctacgtgcactgagctcaca

SEQ ID NO: 3279125 - DNA, 25 bp, Homo sapien
gggccagccatctgcaagtgtggtc

SEQ ID NO: 3279126 - DNA, 25 bp, Homo sapien
taaggcaagaggcttggttcgctat

SEQ ID NO: 3279127 - DNA, 25 bp, Homo sapien
caccccacaaatgctgatcaaaaag

SEQ ID NO: 3279128 - DNA, 25 bp, Homo sapien
aagtgtggtccacacattctccacc

SEQ ID NO: 3279129 - DNA, 25 bp, Homo sapien
tcttcatcatgtcgccttgctgtgg

SEQ ID NO: 3279130 - DNA, 25 bp, Homo sapien
gcctactagtcaccataagttctcg

SEQ ID NO: 3279131 - DNA, 25 bp, Homo sapien
cattgcagtggcttgtggagatccc

SEQ ID NO: 3279132 - DNA, 25 bp, Homo sapien
tcatccatggtagcaggtagtgcag

SEQ ID NO: 3279133 - DNA, 25 bp, Homo sapien
ctctgacccgtaattaattccaaca

SEQ ID NO: 3279134 - DNA, 25 bp, Homo sapien
agcttcctctgacccgtaattaatt

SEQ ID NO: 3279135 - DNA, 25 bp, Homo sapien
gcttcctctgacccgtaattaattc

SEQ ID NO: 3279136 - DNA, 25 bp, Homo sapien
tgacccgtaattaattccaacagat

SEQ ID NO: 3279137 - DNA, 25 bp, Homo sapien
gatcactcatattcatcttggaagg

SEQ ID NO: 3279138 - DNA, 25 bp, Homo sapien
cggccgctattttgtgttgatgatc

SEQ ID NO: 3279139 - DNA, 25 bp, Homo sapien
caaaatctgtgttcacggcggccgc

SEQ ID NO: 3279140 - DNA, 25 bp, Homo sapien
gatgatcactcatattcatcttgga

SEQ ID NO: 3279141 - DNA, 25 bp, Homo sapien
aaccctataaggacgccgttgatag

SEQ ID NO: 3279142 - DNA, 25 bp, Homo sapien
tatttcctatgtaaagacatgtctg

SEQ ID NO: 3279143 - DNA, 25 bp, Homo sapien
cagaattaagagttcttattgaaga

SEQ ID NO: 3279144 - DNA, 25 bp, Homo sapien
tattgtgactgatcagaattaagag

SEQ ID NO: 3279145 - DNA, 25 bp, Homo sapien
tccaatttgtgagcatagcgaaaca

SEQ ID NO: 3279146 - DNA, 25 bp, Homo sapien
cgagagttagctcaggatacgccct

SEQ ID NO: 3279147 - DNA, 25 bp, Homo sapien
gatacgcccttgctagttcctcgga

SEQ ID NO: 3279148 - DNA, 25 bp, Homo sapien
gacagctggctgagtactccatctg

SEQ ID NO: 3279149 - DNA, 25 bp, Homo sapien
gttgcatagcaacttcatagatact

SEQ ID NO: 3279150 - DNA, 25 bp, Homo sapien
gcaacttcatagatacttctagaag

SEQ ID NO: 3279151 - DNA, 25 bp, Homo sapien
ttcatagatacttctagaagaatca

SEQ ID NO: 3279152 - DNA, 25 bp, Homo sapien
gctgctttaaacagtatcagattta

SEQ ID NO: 3279153 - DNA, 25 bp, Homo sapien
gagcccgtgtagcagcggtccacag

SEQ ID NO: 3279154 - DNA, 25 bp, Homo sapien
attagcaatggctttaaagcagccg

SEQ ID NO: 3279155 - DNA, 25 bp, Homo sapien
aatggctttaaagcagccggccgcc

SEQ ID NO: 3279156 - DNA, 25 bp, Homo sapien
ggtccacagcccagtacatcaggtt

SEQ ID NO: 3279157 - DNA, 25 bp, Homo sapien
tcagctccagtaacaacgtaactgc

SEQ ID NO: 3279158 - DNA, 25 bp, Homo sapien
agctccagtaacaacgtaactgctt

SEQ ID NO: 3279159 - DNA, 25 bp, Homo sapien
gctctgatcagggttcagctccagt

SEQ ID NO: 3279160 - DNA, 25 bp, Homo sapien
ctgatcagggttcagctccagtaac

SEQ ID NO: 3279161 - DNA, 25 bp, Homo sapien
gccatctgatgaaagtcctacatta

SEQ ID NO: 3279162 - DNA, 25 bp, Homo sapien
tatccaaccatttgtacaaatagcc

SEQ ID NO: 3279163 - DNA, 25 bp, Homo sapien
ctttttgtccagagaatccaaaatg

SEQ ID NO: 3279164 - DNA, 25 bp, Homo sapien
gtccagagaatccaaaatgttatcc

SEQ ID NO: 3279165 - DNA, 25 bp, Homo sapien
cacaacacagtacagcagacatagc

SEQ ID NO: 3279166 - DNA, 25 bp, Homo sapien
cataaatagactgtgacgaaggctc

SEQ ID NO: 3279167 - DNA, 25 bp, Homo sapien
ctttaacgcacagtattgatgtcta

SEQ ID NO: 3279168 - DNA, 25 bp, Homo sapien
tgctaaaaggacctgcccagtgact

SEQ ID NO: 3279169 - DNA, 25 bp, Homo sapien
cactgtatctgtccaagggcgtaaa

SEQ ID NO: 3279170 - DNA, 25 bp, Homo sapien
tctgaataatattcgccactaaggc

SEQ ID NO: 3279171 - DNA, 25 bp, Homo sapien
ctgcttccaggagttgtctagttaa

SEQ ID NO: 3279172 - DNA, 25 bp, Homo sapien
tatccttcagtgtgtcagagtcttt

SEQ ID NO: 3279173 - DNA, 25 bp, Homo sapien
cactaaggcactaaaatggcatcgt

SEQ ID NO: 3279174 - DNA, 25 bp, Homo sapien
tatgtgtcaggcacatgaaatccac

SEQ ID NO: 3279175 - DNA, 25 bp, Homo sapien
tttagtggactacaacctgtaccag

SEQ ID NO: 3279176 - DNA, 25 bp, Homo sapien
caagctctggatcatgacctactag

SEQ ID NO: 3279177 - DNA, 25 bp, Homo sapien
caagagttaggagtggcaatggtac

SEQ ID NO: 3279178 - DNA, 25 bp, Homo sapien
tatttctccttcaacggtcaggtaa

SEQ ID NO: 3279179 - DNA, 25 bp, Homo sapien
cattatcctcctaaggaaatagtta

SEQ ID NO: 3279180 - DNA, 25 bp, Homo sapien
cactattcctggctgattgtttgcg

SEQ ID NO: 3279181 - DNA, 25 bp, Homo sapien
caacggtcaggtaacaccattatcc

SEQ ID NO: 3279182 - DNA, 25 bp, Homo sapien
gcagttcaaatattcgtaccagttg

SEQ ID NO: 3279183 - DNA, 25 bp, Homo sapien
ccagcatctgccagcagttcaaata

SEQ ID NO: 3279184 - DNA, 25 bp, Homo sapien
aaaatgtctcgacgcctgcgccgtt

SEQ ID NO: 3279185 - DNA, 25 bp, Homo sapien
taccagttgtactcgtaaaatgtct

SEQ ID NO: 3279186 - DNA, 25 bp, Homo sapien
gcttttgcagtttggttggcctgtt

SEQ ID NO: 3279187 - DNA, 25 bp, Homo sapien
caactataactcacattcaaggcac

SEQ ID NO: 3279188 - DNA, 25 bp, Homo sapien
ttggctctttctaaagttgacagca

SEQ ID NO: 3279189 - DNA, 25 bp, Homo sapien
caggatgatttcttatcagtctttg

SEQ ID NO: 3279190 - DNA, 25 bp, Homo sapien
ctttaattatgggatgtaattcctc

SEQ ID NO: 3279191 - DNA, 25 bp, Homo sapien
gggatgtaattcctctattagttcc

SEQ ID NO: 3279192 - DNA, 25 bp, Homo sapien
cgagtgcttctttaattatgggatg

SEQ ID NO: 3279193 - DNA, 25 bp, Homo sapien
ctctggccttctttcgagtgcttct

SEQ ID NO: 3279194 - DNA, 25 bp, Homo sapien
atacaatctgaagcgaaaccagagt

SEQ ID NO: 3279195 - DNA, 25 bp, Homo sapien
tcctctctatggaaatctttagcaa

SEQ ID NO: 3279196 - DNA, 25 bp, Homo sapien
aaagatttatacaatctgaagcgaa

SEQ ID NO: 3279197 - DNA, 25 bp, Homo sapien
tctatggaaatctttagcaaaaggc

SEQ ID NO: 3279198 - DNA, 25 bp, Homo sapien
cagaacgcatcattggaactatgtg

SEQ ID NO: 3279199 - DNA, 25 bp, Homo sapien
tgatttccatgctctcagaacgcat

SEQ ID NO: 3279200 - DNA, 25 bp, Homo sapien
aaagctcctgggttggtcctgccaa

SEQ ID NO: 3279201 - DNA, 25 bp, Homo sapien
tcctgccaagacctagaacaaggga

SEQ ID NO: 3279202 - DNA, 25 bp, Homo sapien
gatgaaggggatgggatgccaataa

SEQ ID NO: 3279203 - DNA, 25 bp, Homo sapien
ttaaacaaggatgaaggggatggga

SEQ ID NO: 3279204 - DNA, 25 bp, Homo sapien
cttaaacaaggatgaaggggatggg

SEQ ID NO: 3279205 - DNA, 25 bp, Homo sapien
aaggatgaaggggatgggatgccaa

SEQ ID NO: 3279206 - DNA, 25 bp, Homo sapien
tccacaggccaatgtatgagtcact

SEQ ID NO: 3279207 - DNA, 25 bp, Homo sapien
cagatgtggaagatgacgatgttgc

SEQ ID NO: 3279208 - DNA, 25 bp, Homo sapien
gaatcaatgctatagccgctatctg

SEQ ID NO: 3279209 - DNA, 25 bp, Homo sapien
ggatcagatagtttctccacaggcc

SEQ ID NO: 3279210 - DNA, 25 bp, Homo sapien
cattttaacattattactcctgtga

SEQ ID NO: 3279211 - DNA, 25 bp, Homo sapien
taattagagagatggttagcataag

SEQ ID NO: 3279212 - DNA, 25 bp, Homo sapien
tcaatgaataaagtaatggattaaa

SEQ ID NO: 3279213 - DNA, 25 bp, Homo sapien
atgcctggcctaatgctaattagag

SEQ ID NO: 3279214 - DNA, 25 bp, Homo sapien
actgaagtcttgtgtatgcaaacat

SEQ ID NO: 3279215 - DNA, 25 bp, Homo sapien
catagctcacagctgtagagcagtg

SEQ ID NO: 3279216 - DNA, 25 bp, Homo sapien
cctgaggggacaacaactgaagtct

SEQ ID NO: 3279217 - DNA, 25 bp, Homo sapien
tatgcaaacatccaagcatagctca

SEQ ID NO: 3279218 - DNA, 25 bp, Homo sapien
tcacatgtgcaaatatccatatatg

SEQ ID NO: 3279219 - DNA, 25 bp, Homo sapien
gtttgtaaatctatcgagctagggc

SEQ ID NO: 3279220 - DNA, 25 bp, Homo sapien
tcgagctagggcaatagagcaaagt

SEQ ID NO: 3279221 - DNA, 25 bp, Homo sapien
gacttataatccatgggtcttggcc

SEQ ID NO: 3279222 - DNA, 25 bp, Homo sapien
aatggatgggcttagcctgtccatc

SEQ ID NO: 3279223 - DNA, 25 bp, Homo sapien
catctatggctaattcatcatcacc

SEQ ID NO: 3279224 - DNA, 25 bp, Homo sapien
gccccagtgagatgtatgaagctct

SEQ ID NO: 3279225 - DNA, 25 bp, Homo sapien
gatgtatgaagctctcaagaatgga

SEQ ID NO: 3279226 - DNA, 25 bp, Homo sapien
gctagtctcctagtggcaggtcgac

SEQ ID NO: 3279227 - DNA, 25 bp, Homo sapien
cagagaatgacaagcgcaaagcctt

SEQ ID NO: 3279228 - DNA, 25 bp, Homo sapien
gcaggtcgactgctacagagaatga

SEQ ID NO: 3279229 - DNA, 25 bp, Homo sapien
taaagcccgtatttctctaaggaca

SEQ ID NO: 3279230 - DNA, 25 bp, Homo sapien
gagcacgcagttcttcatccatatg

SEQ ID NO: 3279231 - DNA, 25 bp, Homo sapien
tagtgcctgcagagtattgaaagcc

SEQ ID NO: 3279232 - DNA, 25 bp, Homo sapien
gggatggacatcagtcacttcacga

SEQ ID NO: 3279233 - DNA, 25 bp, Homo sapien
tacggcattatcaagaagtgtggga

SEQ ID NO: 3279234 - DNA, 25 bp, Homo sapien
ggaatcaaccttggaatcgcagcaa

SEQ ID NO: 3279235 - DNA, 25 bp, Homo sapien
attcaatcaggtcagttctgctcat

SEQ ID NO: 3279236 - DNA, 25 bp, Homo sapien
tgctcataccgtcaggaatcaacct

SEQ ID NO: 3279237 - DNA, 25 bp, Homo sapien
ggaatcgcagcaatacaagttctaa

SEQ ID NO: 3279238 - DNA, 25 bp, Homo sapien
gaggatgctatctaatgcttttctt

SEQ ID NO: 3279239 - DNA, 25 bp, Homo sapien
tgtccaaatgtctgaggatgctatc

SEQ ID NO: 3279240 - DNA, 25 bp, Homo sapien
tctgcacactggtcatacacattgg

SEQ ID NO: 3279241 - DNA, 25 bp, Homo sapien
acttgaggatagtaaactgacattc

SEQ ID NO: 3279242 - DNA, 25 bp, Homo sapien
tgttggcatgggtggttcaccatct

SEQ ID NO: 3279243 - DNA, 25 bp, Homo sapien
gggaagaataactcctgttgttggc

SEQ ID NO: 3279244 - DNA, 25 bp, Homo sapien
tctgctgcaaactgtctgctattac

SEQ ID NO: 3279245 - DNA, 25 bp, Homo sapien
cacgaagagtatttcctgagggaag

SEQ ID NO: 3279246 - DNA, 25 bp, Homo sapien
ctctggattaatggtgaaagtttta

SEQ ID NO: 3279247 - DNA, 25 bp, Homo sapien
tggattaatggtgaaagttttagta

SEQ ID NO: 3279248 - DNA, 25 bp, Homo sapien
tctggattaatggtgaaagttttag

SEQ ID NO: 3279249 - DNA, 25 bp, Homo sapien
ctggattaatggtgaaagttttagt

SEQ ID NO: 3279250 - DNA, 25 bp, Homo sapien
aagtgctgacactatgctcataaga

SEQ ID NO: 3279251 - DNA, 25 bp, Homo sapien
tgagaggtgtgtcacgaggaaccac

SEQ ID NO: 3279252 - DNA, 25 bp, Homo sapien
gaggaaccacacttcgtgagccttt

SEQ ID NO: 3279253 - DNA, 25 bp, Homo sapien
aatatattgagaggtgtgtcacgag

SEQ ID NO: 3279254 - DNA, 25 bp, Homo sapien
taaacccacaataatctatacaaag

SEQ ID NO: 3279255 - DNA, 25 bp, Homo sapien
ccagtgcaactcgagacattttcgg

SEQ ID NO: 3279256 - DNA, 25 bp, Homo sapien
acaataatctatacaaagattccag

SEQ ID NO: 3279257 - DNA, 25 bp, Homo sapien
ctcgagacattttcggatctttatt

SEQ ID NO: 3279258 - DNA, 25 bp, Homo sapien
agttcacactccaatactgacataa

SEQ ID NO: 3279259 - DNA, 25 bp, Homo sapien
ttgatgatgaacagttcacactcca

SEQ ID NO: 3279260 - DNA, 25 bp, Homo sapien
cacactccaatactgacataatgac

SEQ ID NO: 3279261 - DNA, 25 bp, Homo sapien
gatgaacagttcacactccaatact

SEQ ID NO: 3279262 - DNA, 25 bp, Homo sapien
catgaaataacactttcatattgtt

SEQ ID NO: 3279263 - DNA, 25 bp, Homo sapien
tcccattagtttttaggtacacatg

SEQ ID NO: 3279264 - DNA, 25 bp, Homo sapien
ggaaatctcggtaccctcctctcaa

SEQ ID NO: 3279265 - DNA, 25 bp, Homo sapien
tatgagtgtgggtagggaaatttac

SEQ ID NO: 3279266 - DNA, 25 bp, Homo sapien
tttctgatactgttgttagatggca

SEQ ID NO: 3279267 - DNA, 25 bp, Homo sapien
ttctgatactgttgttagatggcat

SEQ ID NO: 3279268 - DNA, 25 bp, Homo sapien
ttttctgatactgttgttagatggc

SEQ ID NO: 3279269 - DNA, 25 bp, Homo sapien
tgtgacaaacagttctgtaggaaaa

SEQ ID NO: 3279270 - DNA, 25 bp, Homo sapien
ggcaggtaattagtggatataaagc

SEQ ID NO: 3279271 - DNA, 25 bp, Homo sapien
aatgtgacaaacagttctgtaggaa

SEQ ID NO: 3279272 - DNA, 25 bp, Homo sapien
taaaaggcaggtaattagtggatat

SEQ ID NO: 3279273 - DNA, 25 bp, Homo sapien
ttcaaaagtagtctgataaagcatc

SEQ ID NO: 3279274 - DNA, 25 bp, Homo sapien
tctcgagctcagttcaaaagtagtc

SEQ ID NO: 3279275 - DNA, 25 bp, Homo sapien
gaatgcttctttctcgagctcagtt

SEQ ID NO: 3279276 - DNA, 25 bp, Homo sapien
agtctgataaagcatctccacaaaa

SEQ ID NO: 3279277 - DNA, 25 bp, Homo sapien
cagctacagggataagaatctccac

SEQ ID NO: 3279278 - DNA, 25 bp, Homo sapien
ccagcaagtgcatgttttatatctt

SEQ ID NO: 3279279 - DNA, 25 bp, Homo sapien
tacagggataagaatctccacaaat

SEQ ID NO: 3279280 - DNA, 25 bp, Homo sapien
aaaccagcaagtgcatgttttatat

SEQ ID NO: 3279281 - DNA, 25 bp, Homo sapien
gctttgttccttttgtcgcagttct

SEQ ID NO: 3279282 - DNA, 25 bp, Homo sapien
taaattgaaatgatgcttcaaaatc

SEQ ID NO: 3279283 - DNA, 25 bp, Homo sapien
ctacaggatacatttttactcgaaa

SEQ ID NO: 3279284 - DNA, 25 bp, Homo sapien
gatgacactttgtaccacatgtggg

SEQ ID NO: 3279285 - DNA, 25 bp, Homo sapien
tagagttaacgtagccatgatggag

SEQ ID NO: 3279286 - DNA, 25 bp, Homo sapien
gtgctatcagcctaactcaaagtgg

SEQ ID NO: 3279287 - DNA, 25 bp, Homo sapien
tctcctacaactagcaggtgaggct

SEQ ID NO: 3279288 - DNA, 25 bp, Homo sapien
catgcatgagcagaaaacatcttag

SEQ ID NO: 3279289 - DNA, 25 bp, Homo sapien
caagtggtgaaattgaggtatgagt

SEQ ID NO: 3279290 - DNA, 25 bp, Homo sapien
ggtggatttcgaactatcagtatct

SEQ ID NO: 3279291 - DNA, 25 bp, Homo sapien
gatagtgtcctaaatatggttggca

SEQ ID NO: 3279292 - DNA, 25 bp, Homo sapien
taaaaggtggagctgacttagtgct

SEQ ID NO: 3279293 - DNA, 25 bp, Homo sapien
aacccctatcacctctgcatataaa

SEQ ID NO: 3279294 - DNA, 25 bp, Homo sapien
aataatatgcacattcccagtgttg

SEQ ID NO: 3279295 - DNA, 25 bp, Homo sapien
tataaatcagcaataatatgcacat

SEQ ID NO: 3279296 - DNA, 25 bp, Homo sapien
cattcccagtgttggttcctgaata

SEQ ID NO: 3279297 - DNA, 25 bp, Homo sapien
tccttatcagagtattgtataattt

SEQ ID NO: 3279298 - DNA, 25 bp, Homo sapien
ccttatcagagtattgtataatttt

SEQ ID NO: 3279299 - DNA, 25 bp, Homo sapien
catgaactaagggatcgggtacagg

SEQ ID NO: 3279300 - DNA, 25 bp, Homo sapien
taaaagctaagtttagaacttcatg

SEQ ID NO: 3279301 - DNA, 25 bp, Homo sapien
taagggatcgggtacaggatgaaca

SEQ ID NO: 3279302 - DNA, 25 bp, Homo sapien
agaacttcatgaactaagggatcgg

SEQ ID NO: 3279303 - DNA, 25 bp, Homo sapien
ctttaggatgaggagcgagactgac

SEQ ID NO: 3279304 - DNA, 25 bp, Homo sapien
gaatgctaatgtagggagtctgcca

SEQ ID NO: 3279305 - DNA, 25 bp, Homo sapien
gaaatgaacgaaggaggaaggcaca

SEQ ID NO: 3279306 - DNA, 25 bp, Homo sapien
gaaaaatgcctccacagggttgcct

SEQ ID NO: 3279307 - DNA, 25 bp, Homo sapien
aatctctttcacgttgctgttcatc

SEQ ID NO: 3279308 - DNA, 25 bp, Homo sapien
ctgctttagaacttcaactaaaact

SEQ ID NO: 3279309 - DNA, 25 bp, Homo sapien
gtctactgctaagtccctcctttca

SEQ ID NO: 3279310 - DNA, 25 bp, Homo sapien
aaaatgaagtctactgctaagtccc

SEQ ID NO: 3279311 - DNA, 25 bp, Homo sapien
cacacgtggctcttacatgcatgac

SEQ ID NO: 3279312 - DNA, 25 bp, Homo sapien
cccagtatgagtactgtagggctac

SEQ ID NO: 3279313 - DNA, 25 bp, Homo sapien
tcacaagtggcatctactgaagtcc

SEQ ID NO: 3279314 - DNA, 25 bp, Homo sapien
tcaacgcagtttgcttaggaatcaa

SEQ ID NO: 3279315 - DNA, 25 bp, Homo sapien
gggagacagtgctctgctactgagc

SEQ ID NO: 3279316 - DNA, 25 bp, Homo sapien
caaacaaggtgcgaagtaaggaagg

SEQ ID NO: 3279317 - DNA, 25 bp, Homo sapien
actttgtgctagaccgaggcctata

SEQ ID NO: 3279318 - DNA, 25 bp, Homo sapien
tccattttggcgtctgtaccagtca

SEQ ID NO: 3279319 - DNA, 25 bp, Homo sapien
tctgaagagatctggacaatagctt

SEQ ID NO: 3279320 - DNA, 25 bp, Homo sapien
aactgaagatcttcacccctctgaa

SEQ ID NO: 3279321 - DNA, 25 bp, Homo sapien
gaagagatctggacaatagcttctc

SEQ ID NO: 3279322 - DNA, 25 bp, Homo sapien
aaactgaagatcttcacccctctga

SEQ ID NO: 3279323 - DNA, 25 bp, Homo sapien
gcttcagcacagaacaatctctcct

SEQ ID NO: 3279324 - DNA, 25 bp, Homo sapien
caggaggtaaccttccagtatgact

SEQ ID NO: 3279325 - DNA, 25 bp, Homo sapien
taactgatatcaggagagggttctg

SEQ ID NO: 3279326 - DNA, 25 bp, Homo sapien
cctgaggatggaaagttgttactgc

SEQ ID NO: 3279327 - DNA, 25 bp, Homo sapien
gaggctcttgatgacatattcacca

SEQ ID NO: 3279328 - DNA, 25 bp, Homo sapien
ttcagcttgaacagcaaattctgca

SEQ ID NO: 3279329 - DNA, 25 bp, Homo sapien
caagggttcggccattacaacttca

SEQ ID NO: 3279330 - DNA, 25 bp, Homo sapien
catctgggtcaatcgtaatgtttga

SEQ ID NO: 3279331 - DNA, 25 bp, Homo sapien
tttatttactttgctgactggcgct

SEQ ID NO: 3279332 - DNA, 25 bp, Homo sapien
aatcaactcaagaggtctaccataa

SEQ ID NO: 3279333 - DNA, 25 bp, Homo sapien
agaactctactttaataaatcaact

SEQ ID NO: 3279334 - DNA, 25 bp, Homo sapien
tcaagaggtctaccataactaccct

SEQ ID NO: 3279335 - DNA, 25 bp, Homo sapien
agaggtctaccataactaccctatt

SEQ ID NO: 3279336 - DNA, 25 bp, Homo sapien
caacattgtgtattatcaaagaggg

SEQ ID NO: 3279337 - DNA, 25 bp, Homo sapien
tcaaagagggaatctgttaacaaat

SEQ ID NO: 3279338 - DNA, 25 bp, Homo sapien
aaaaacttgctctaccacacatagg

SEQ ID NO: 3279339 - DNA, 25 bp, Homo sapien
tctaaagagtatcacaaacgtaata

SEQ ID NO: 3279340 - DNA, 25 bp, Homo sapien
tgaaatcgactagaaaaacacccac

SEQ ID NO: 3279341 - DNA, 25 bp, Homo sapien
aaatctttgggctactacctcacag

SEQ ID NO: 3279342 - DNA, 25 bp, Homo sapien
gagctcattacagcagcagatctca

SEQ ID NO: 3279343 - DNA, 25 bp, Homo sapien
tacacactagttctcaacaattggg

SEQ ID NO: 3279344 - DNA, 25 bp, Homo sapien
agttaaatgtaagaaccctgtcaca

SEQ ID NO: 3279345 - DNA, 25 bp, Homo sapien
tgtgatgtatccatccaatggaaca

SEQ ID NO: 3279346 - DNA, 25 bp, Homo sapien
tatcacttgatcagggaagccttca

SEQ ID NO: 3279347 - DNA, 25 bp, Homo sapien
ccctgtcacaaaagaacacccattg

SEQ ID NO: 3279348 - DNA, 25 bp, Homo sapien
cagcaatgtggaagatgcaaacagg

SEQ ID NO: 3279349 - DNA, 25 bp, Homo sapien
gaagctgtggcaatattccaggtga

SEQ ID NO: 3279350 - DNA, 25 bp, Homo sapien
aagagaggcctgaactaggatagtg

SEQ ID NO: 3279351 - DNA, 25 bp, Homo sapien
gatgcaaacaggaccaatatggaag

SEQ ID NO: 3279352 - DNA, 25 bp, Homo sapien
acacagaatcctgtagactcaacat

SEQ ID NO: 3279353 - DNA, 25 bp, Homo sapien
tcaaaaaacacagaatcctgtagac

SEQ ID NO: 3279354 - DNA, 25 bp, Homo sapien
tgctgctccaggactttaacaagga

SEQ ID NO: 3279355 - DNA, 25 bp, Homo sapien
caaggactttatgctaatttcaaaa

SEQ ID NO: 3279356 - DNA, 25 bp, Homo sapien
cagagtcaacagaggtacattccaa

SEQ ID NO: 3279357 - DNA, 25 bp, Homo sapien
tattgaataaggtcctcctggcatg

SEQ ID NO: 3279358 - DNA, 25 bp, Homo sapien
gccaccgcctagagcttactgcaag

SEQ ID NO: 3279359 - DNA, 25 bp, Homo sapien
tattcacagaaactaagtcacggcc

SEQ ID NO: 3279360 - DNA, 25 bp, Homo sapien
tgtcaaataccacatcaatcctaga

SEQ ID NO: 3279361 - DNA, 25 bp, Homo sapien
taccacatcaatcctagaaccttct

SEQ ID NO: 3279362 - DNA, 25 bp, Homo sapien
caaatgtcaaataccacatcaatcc

SEQ ID NO: 3279363 - DNA, 25 bp, Homo sapien
catcaatcctagaaccttctacagc

SEQ ID NO: 3279364 - DNA, 25 bp, Homo sapien
tgaggaataagcagctgtgatcatc

SEQ ID NO: 3279365 - DNA, 25 bp, Homo sapien
actatatgcaagctgatgtttatcc

SEQ ID NO: 3279366 - DNA, 25 bp, Homo sapien
tacctttgcaggattacacataaca

SEQ ID NO: 3279367 - DNA, 25 bp, Homo sapien
tccttgttctattcaaagatttaac

SEQ ID NO: 3279368 - DNA, 25 bp, Homo sapien
tcctaaaacatattaaccattatcc

SEQ ID NO: 3279369 - DNA, 25 bp, Homo sapien
tactatgacagaaattggttccacc

SEQ ID NO: 3279370 - DNA, 25 bp, Homo sapien
gaatgggaggaacaactctctttaa

SEQ ID NO: 3279371 - DNA, 25 bp, Homo sapien
catccaccgtcttctcagatgaaag

SEQ ID NO: 3279372 - DNA, 25 bp, Homo sapien
cagatgaaagtgagctaagacgttt

SEQ ID NO: 3279373 - DNA, 25 bp, Homo sapien
ttaaggttcttctacattactaggc

SEQ ID NO: 3279374 - DNA, 25 bp, Homo sapien
aagacataaatttgttgccctgaag

SEQ ID NO: 3279375 - DNA, 25 bp, Homo sapien
aaaagcattcaagatcctttccatg

SEQ ID NO: 3279376 - DNA, 25 bp, Homo sapien
atagtattaaggttcagagaaagtt

SEQ ID NO: 3279377 - DNA, 25 bp, Homo sapien
acttattaagtcaactagtcttcat

SEQ ID NO: 3279378 - DNA, 25 bp, Homo sapien
gatgttaaccatccaagataccaat

SEQ ID NO: 3279379 - DNA, 25 bp, Homo sapien
cacttgagacagtaatttcttggtg

SEQ ID NO: 3279380 - DNA, 25 bp, Homo sapien
tcttggtgacttggatcatctaatc

SEQ ID NO: 3279381 - DNA, 25 bp, Homo sapien
tctaatcctatgactcttgagtggt

SEQ ID NO: 3279382 - DNA, 25 bp, Homo sapien
ggaccatgaactactgtaccatatc

SEQ ID NO: 3279383 - DNA, 25 bp, Homo sapien
ctctgagggcgtcatggaccatgaa

SEQ ID NO: 3279384 - DNA, 25 bp, Homo sapien
taaagattccacgttatcaggcaca

SEQ ID NO: 3279385 - DNA, 25 bp, Homo sapien
tagttcatgtatctgctaggcctga

SEQ ID NO: 3279386 - DNA, 25 bp, Homo sapien
tgagcagaatattgcagtagaggca

SEQ ID NO: 3279387 - DNA, 25 bp, Homo sapien
tgaaagcacaaattcccacagatga

SEQ ID NO: 3279388 - DNA, 25 bp, Homo sapien
cactgcctccagcaagcttagagaa

SEQ ID NO: 3279389 - DNA, 25 bp, Homo sapien
tgtcacctgcaatctcacaacttgt

SEQ ID NO: 3279390 - DNA, 25 bp, Homo sapien
cacacctggcctgtatttcttttta

SEQ ID NO: 3279391 - DNA, 25 bp, Homo sapien
tttaagagacagggtggtaggcacc

SEQ ID NO: 3279392 - DNA, 25 bp, Homo sapien
ttttaagagacagggtggtaggcac

SEQ ID NO: 3279393 - DNA, 25 bp, Homo sapien
ctggcctgtatttctttttaagaga

SEQ ID NO: 3279394 - DNA, 25 bp, Homo sapien
ggagcttgtactttacaggcactcg

SEQ ID NO: 3279395 - DNA, 25 bp, Homo sapien
tgagtcaccgtgtgtgaagcagaat

SEQ ID NO: 3279396 - DNA, 25 bp, Homo sapien
gacaccaagtttggaaaggatccat

SEQ ID NO: 3279397 - DNA, 25 bp, Homo sapien
tcgagtgggcacactggtacaaagc

SEQ ID NO: 3279398 - DNA, 25 bp, Homo sapien
caacttgatctatagggtcaacgca

SEQ ID NO: 3279399 - DNA, 25 bp, Homo sapien
tggaggactaacactgcccaaccca

SEQ ID NO: 3279400 - DNA, 25 bp, Homo sapien
tattctgtgagtattgacaaactga

SEQ ID NO: 3279401 - DNA, 25 bp, Homo sapien
tagccaacacaatatggaaggaaag

SEQ ID NO: 3279402 - DNA, 25 bp, Homo sapien
gacgcgatttctgctcaccgcaact

SEQ ID NO: 3279403 - DNA, 25 bp, Homo sapien
gcagtgacgcgatttctgctcaccg

SEQ ID NO: 3279404 - DNA, 25 bp, Homo sapien
acgcgatttctgctcaccgcaactt

SEQ ID NO: 3279405 - DNA, 25 bp, Homo sapien
agtgacgcgatttctgctcaccgca

SEQ ID NO: 3279406 - DNA, 25 bp, Homo sapien
ttcctagaaaaccacgtcacaccta

SEQ ID NO: 3279407 - DNA, 25 bp, Homo sapien
taatctattatgtaatcaaaggcag

SEQ ID NO: 3279408 - DNA, 25 bp, Homo sapien
caccacactcagacaatctgagatg

SEQ ID NO: 3279409 - DNA, 25 bp, Homo sapien
gagaattgaattagggcaatgctaa

SEQ ID NO: 3279410 - DNA, 25 bp, Homo sapien
taaaggcctgtcataggacagtgac

SEQ ID NO: 3279411 - DNA, 25 bp, Homo sapien
gtcactgtggttaggagtcggcaca

SEQ ID NO: 3279412 - DNA, 25 bp, Homo sapien
ttccatgagtcctgaatttgagtcc

SEQ ID NO: 3279413 - DNA, 25 bp, Homo sapien
gcacctccgtgcgtgaacagcaaag

SEQ ID NO: 3279414 - DNA, 25 bp, Homo sapien
caatattgatactgaggacaggcca

SEQ ID NO: 3279415 - DNA, 25 bp, Homo sapien
gctttgcaagacaacccacgtgaga

SEQ ID NO: 3279416 - DNA, 25 bp, Homo sapien
tagacatgtgaatgaagaccccagc

SEQ ID NO: 3279417 - DNA, 25 bp, Homo sapien
cacgtgagaaatgcctggtggagcc

SEQ ID NO: 3279418 - DNA, 25 bp, Homo sapien
gataagcaacatcataacagatgag

SEQ ID NO: 3279419 - DNA, 25 bp, Homo sapien
cagcaacagcaaggcgataagcaac

SEQ ID NO: 3279420 - DNA, 25 bp, Homo sapien
aggcctgtagacaactgcactccga

SEQ ID NO: 3279421 - DNA, 25 bp, Homo sapien
gccagctcaggtaaggcctgtagac

SEQ ID NO: 3279422 - DNA, 25 bp, Homo sapien
tttgccataaagaacgttattgggc

SEQ ID NO: 3279423 - DNA, 25 bp, Homo sapien
gaagtaatcctgaaaatcccattct

SEQ ID NO: 3279424 - DNA, 25 bp, Homo sapien
tgtggaggtgcaccactcacatcca

SEQ ID NO: 3279425 - DNA, 25 bp, Homo sapien
gatgaatcccacaggtctgaagtaa

SEQ ID NO: 3279426 - DNA, 25 bp, Homo sapien
tctgtaagtctctcaaaagattcac

SEQ ID NO: 3279427 - DNA, 25 bp, Homo sapien
tacatccagttatataggcaaagat

SEQ ID NO: 3279428 - DNA, 25 bp, Homo sapien
catcgttccatgaatgatcacattg

SEQ ID NO: 3279429 - DNA, 25 bp, Homo sapien
tctctggtgatatgtgctgaagtat

SEQ ID NO: 3279430 - DNA, 25 bp, Homo sapien
gctaacgtaaataagggttgctata

SEQ ID NO: 3279431 - DNA, 25 bp, Homo sapien
cagttatctgggagtatatacctag

SEQ ID NO: 3279432 - DNA, 25 bp, Homo sapien
ttcacattcaactgagaagccaccc

SEQ ID NO: 3279433 - DNA, 25 bp, Homo sapien
tacctagggtagaatatttgagtca

SEQ ID NO: 3279434 - DNA, 25 bp, Homo sapien
cactctgacactaagccatctgttg

SEQ ID NO: 3279435 - DNA, 25 bp, Homo sapien
taaggttgtctagttcatctgggtg

SEQ ID NO: 3279436 - DNA, 25 bp, Homo sapien
ttaaaattgacaggagaagtagctc

SEQ ID NO: 3279437 - DNA, 25 bp, Homo sapien
tctgatacctccgaagacatttaag

SEQ ID NO: 3279438 - DNA, 25 bp, Homo sapien
cattaactctaaggcaggaaaaggt

SEQ ID NO: 3279439 - DNA, 25 bp, Homo sapien
tattttacaagcaatctcatagtgc

SEQ ID NO: 3279440 - DNA, 25 bp, Homo sapien
tcctaaggacattctagctccaaaa

SEQ ID NO: 3279441 - DNA, 25 bp, Homo sapien
cttacaagaagtagactagcaagtc

SEQ ID NO: 3279442 - DNA, 25 bp, Homo sapien
aagaggagactactatgggcaggca

SEQ ID NO: 3279443 - DNA, 25 bp, Homo sapien
tgggcaggcataatgagagcaaaca

SEQ ID NO: 3279444 - DNA, 25 bp, Homo sapien
gcacgagtcctctaagcagtaaaaa

SEQ ID NO: 3279445 - DNA, 25 bp, Homo sapien
tgctggctgaggacactaattggct

SEQ ID NO: 3279446 - DNA, 25 bp, Homo sapien
agtggcagctttgtatcctaagaaa

SEQ ID NO: 3279447 - DNA, 25 bp, Homo sapien
gaacacaaacatactagtggcagct

SEQ ID NO: 3279448 - DNA, 25 bp, Homo sapien
gccagaattactaggcctggagaaa

SEQ ID NO: 3279449 - DNA, 25 bp, Homo sapien
ctactatgaggagtgcccgctggga

SEQ ID NO: 3279450 - DNA, 25 bp, Homo sapien
tcgatgaacgctttaaaaagttgga

SEQ ID NO: 3279451 - DNA, 25 bp, Homo sapien
attaatcgatgaacgctttaaaaag

SEQ ID NO: 3279452 - DNA, 25 bp, Homo sapien
aatcgatgaacgctttaaaaagttg

SEQ ID NO: 3279453 - DNA, 25 bp, Homo sapien
taaattaatcgatgaacgctttaaa

SEQ ID NO: 3279454 - DNA, 25 bp, Homo sapien
tcagcgcccaggcaccctgcccggt

SEQ ID NO: 3279455 - DNA, 25 bp, Homo sapien
gagagcagcaggcaatctacaggcc

SEQ ID NO: 3279456 - DNA, 25 bp, Homo sapien
agcagcaggcaatctacaggccgag

SEQ ID NO: 3279457 - DNA, 25 bp, Homo sapien
accctgcccggtgccgaggctgaga

SEQ ID NO: 3279458 - DNA, 25 bp, Homo sapien
gcgggcggtggccgcggtgtccgca

SEQ ID NO: 3279459 - DNA, 25 bp, Homo sapien
gcggtggccgcggtgtccgcagggc

SEQ ID NO: 3279460 - DNA, 25 bp, Homo sapien
tggccgcggtgtccgcagggctggc

SEQ ID NO: 3279461 - DNA, 25 bp, Homo sapien
tcagctcgcgggcggtggccgcggt

SEQ ID NO: 3279462 - DNA, 25 bp, Homo sapien
tggcgagggccgacgacctcgtctc

SEQ ID NO: 3279463 - DNA, 25 bp, Homo sapien
agctggcgagggccgacgacctcgt

SEQ ID NO: 3279464 - DNA, 25 bp, Homo sapien
gctggcgagggccgacgacctcgtc

SEQ ID NO: 3279465 - DNA, 25 bp, Homo sapien
ctggcgagggccgacgacctcgtct

SEQ ID NO: 3279466 - DNA, 25 bp, Homo sapien
gacaatggcgcgtcccctttaagga

SEQ ID NO: 3279467 - DNA, 25 bp, Homo sapien
ggaataatccgatcggaaccgatct

SEQ ID NO: 3279468 - DNA, 25 bp, Homo sapien
gattttaaccggatttctctctcgc

SEQ ID NO: 3279469 - DNA, 25 bp, Homo sapien
gatctgtggttaaacctccctccga

SEQ ID NO: 3279470 - DNA, 25 bp, Homo sapien
gcaaaggagtatgccatatgactga

SEQ ID NO: 3279471 - DNA, 25 bp, Homo sapien
ttacatgagcataccgctggcaaag

SEQ ID NO: 3279472 - DNA, 25 bp, Homo sapien
tgagcataccgctggcaaaggagta

SEQ ID NO: 3279473 - DNA, 25 bp, Homo sapien
taccgctggcaaaggagtatgccat

SEQ ID NO: 3279474 - DNA, 25 bp, Homo sapien
ctagcaccaacggtttctcatggtc

SEQ ID NO: 3279475 - DNA, 25 bp, Homo sapien
tagcaccaacggtttctcatggtcc

SEQ ID NO: 3279476 - DNA, 25 bp, Homo sapien
tcatggtcctctgccataacctctg

SEQ ID NO: 3279477 - DNA, 25 bp, Homo sapien
tctgccataacctctgggtcatgct

SEQ ID NO: 3279478 - DNA, 25 bp, Homo sapien
tgacaatgtcactcccttcctaaaa

SEQ ID NO: 3279479 - DNA, 25 bp, Homo sapien
ggctgccaaaatcaacttcctctgt

SEQ ID NO: 3279480 - DNA, 25 bp, Homo sapien
gacaatgtcactcccttcctaaaat

SEQ ID NO: 3279481 - DNA, 25 bp, Homo sapien
tccaaagcggctgccaaaatcaact

SEQ ID NO: 3279482 - DNA, 25 bp, Homo sapien
tattgatgcttctcttcatcttctg

SEQ ID NO: 3279483 - DNA, 25 bp, Homo sapien
ttattgatgcttctcttcatcttct

SEQ ID NO: 3279484 - DNA, 25 bp, Homo sapien
gggtatctaacacatgaatccaggt

SEQ ID NO: 3279485 - DNA, 25 bp, Homo sapien
cagcagcgtgccctttggctgaatt

SEQ ID NO: 3279486 - DNA, 25 bp, Homo sapien
tgaatatctaggtatgcatccaggg

SEQ ID NO: 3279487 - DNA, 25 bp, Homo sapien
taacacatgaatatcttcagcagcc

SEQ ID NO: 3279488 - DNA, 25 bp, Homo sapien
cacaacagcccaaagtcaagcctac

SEQ ID NO: 3279489 - DNA, 25 bp, Homo sapien
cagtgcggctcgtggccgcagctgc

SEQ ID NO: 3279490 - DNA, 25 bp, Homo sapien
agggttcttggtccgccgctgtcgc

SEQ ID NO: 3279491 - DNA, 25 bp, Homo sapien
tcgcctgcgcagtcgcagtgcggct

SEQ ID NO: 3279492 - DNA, 25 bp, Homo sapien
gggcagggttcttggtccgccgctg

SEQ ID NO: 3279493 - DNA, 25 bp, Homo sapien
gccttctgcccctgatcgcttggtt

SEQ ID NO: 3279494 - DNA, 25 bp, Homo sapien
tgctgtcgtcgggaggtgggtgagg

SEQ ID NO: 3279495 - DNA, 25 bp, Homo sapien
gaggtgacgcaaacagccccgttgt

SEQ ID NO: 3279496 - DNA, 25 bp, Homo sapien
tcgcttggttttccttgcagtcgcc

SEQ ID NO: 3279497 - DNA, 25 bp, Homo sapien
taaaatggtattgtcttaagcgccg

SEQ ID NO: 3279498 - DNA, 25 bp, Homo sapien
ggttgctgctcagtctgtaacggca

SEQ ID NO: 3279499 - DNA, 25 bp, Homo sapien
taaaggtagtttattcagcaggctc

SEQ ID NO: 3279500 - DNA, 25 bp, Homo sapien
ttaagcgccgtgtcagccctgacag

SEQ ID NO: 3279501 - DNA, 25 bp, Homo sapien
cagactcttaatagtgggacatgtg

SEQ ID NO: 3279502 - DNA, 25 bp, Homo sapien
ttgaaaagacaaaaagcggctgggc

SEQ ID NO: 3279503 - DNA, 25 bp, Homo sapien
tagtgaacaatgtcaggatgcccgt

SEQ ID NO: 3279504 - DNA, 25 bp, Homo sapien
gatgcccgtgtataccagactctta

SEQ ID NO: 3279505 - DNA, 25 bp, Homo sapien
tgaggaccagtaggtgtcaaggact

SEQ ID NO: 3279506 - DNA, 25 bp, Homo sapien
ggatatcacctgtgtgttctaccat

SEQ ID NO: 3279507 - DNA, 25 bp, Homo sapien
tatggtccaacgtatgtataaactt

SEQ ID NO: 3279508 - DNA, 25 bp, Homo sapien
aaggactctgctagacgtggaagaa

SEQ ID NO: 3279509 - DNA, 25 bp, Homo sapien
ggataagttcgaagacccctgtgga

SEQ ID NO: 3279510 - DNA, 25 bp, Homo sapien
tgatctagatggctactaagttact

SEQ ID NO: 3279511 - DNA, 25 bp, Homo sapien
aaagtcactatcttatctccaaagg

SEQ ID NO: 3279512 - DNA, 25 bp, Homo sapien
ttaggagagaatggctaaagtcact

SEQ ID NO: 3279513 - DNA, 25 bp, Homo sapien
tgtaaaatgtagtagtattttcttc

SEQ ID NO: 3279514 - DNA, 25 bp, Homo sapien
ctgtaaaatgtagtagtattttctt

SEQ ID NO: 3279515 - DNA, 25 bp, Homo sapien
ttaagtgtgaagctttgcatcaaga

SEQ ID NO: 3279516 - DNA, 25 bp, Homo sapien
aaattgttgcaagggcaaagataac

SEQ ID NO: 3279517 - DNA, 25 bp, Homo sapien
ttgtgtaaatgtactcaccttaggg

SEQ ID NO: 3279518 - DNA, 25 bp, Homo sapien
taaaaaaccgtcgagattacaatgc

SEQ ID NO: 3279519 - DNA, 25 bp, Homo sapien
tatggctataatatggctataaatc

SEQ ID NO: 3279520 - DNA, 25 bp, Homo sapien
tatgtacaatagataggcagctggg

SEQ ID NO: 3279521 - DNA, 25 bp, Homo sapien
gatcgtcatgataaactgcttcaat

SEQ ID NO: 3279522 - DNA, 25 bp, Homo sapien
gcagaataatcaaagcctcttggat

SEQ ID NO: 3279523 - DNA, 25 bp, Homo sapien
tctctacgtaggaaatgtagaaagc

SEQ ID NO: 3279524 - DNA, 25 bp, Homo sapien
taaaaaacttcgaaagtcacagaca

SEQ ID NO: 3279525 - DNA, 25 bp, Homo sapien
gacacagaatttaggaagctgaagg

SEQ ID NO: 3279526 - DNA, 25 bp, Homo sapien
aatgtgtacaaattcagaggtttaa

SEQ ID NO: 3279527 - DNA, 25 bp, Homo sapien
aaaaacttcgaaagtcacagacaca

SEQ ID NO: 3279528 - DNA, 25 bp, Homo sapien
ttttgcattcctcacaggtaaggag

SEQ ID NO: 3279529 - DNA, 25 bp, Homo sapien
gcattcctcacaggtaaggaggcag

SEQ ID NO: 3279530 - DNA, 25 bp, Homo sapien
tttgcattcctcacaggtaaggagg

SEQ ID NO: 3279531 - DNA, 25 bp, Homo sapien
ttattttgcattcctcacaggtaag

SEQ ID NO: 3279532 - DNA, 25 bp, Homo sapien
aaatagacagcggtttgtactttga

SEQ ID NO: 3279533 - DNA, 25 bp, Homo sapien
tgtactttgacactggaagccctag

SEQ ID NO: 3279534 - DNA, 25 bp, Homo sapien
tagtctatgctaaagttcactagcc

SEQ ID NO: 3279535 - DNA, 25 bp, Homo sapien
agttcactagccttgttttttcaga

SEQ ID NO: 3279536 - DNA, 25 bp, Homo sapien
cctgttattagtctactgaagggat

SEQ ID NO: 3279537 - DNA, 25 bp, Homo sapien
ctgttattagtctactgaagggatt

SEQ ID NO: 3279538 - DNA, 25 bp, Homo sapien
ttcttcaaccctgctatagctccta

SEQ ID NO: 3279539 - DNA, 25 bp, Homo sapien
gctcctactatagccatagctcctg

SEQ ID NO: 3279540 - DNA, 25 bp, Homo sapien
tagctcctgctatatctcctcttgt

SEQ ID NO: 3279541 - DNA, 25 bp, Homo sapien
cctcttgtcatagcttctgctgtag

SEQ ID NO: 3279542 - DNA, 25 bp, Homo sapien
atccaaagtgggttaattgcaaaag

SEQ ID NO: 3279543 - DNA, 25 bp, Homo sapien
tggaatccaaagtgggttaattgca

SEQ ID NO: 3279544 - DNA, 25 bp, Homo sapien
gaatccaaagtgggttaattgcaaa

SEQ ID NO: 3279545 - DNA, 25 bp, Homo sapien
tccaaagtgggttaattgcaaaaga

SEQ ID NO: 3279546 - DNA, 25 bp, Homo sapien
gcttcttgtaatgggaagagtaagg

SEQ ID NO: 3279547 - DNA, 25 bp, Homo sapien
ggactgaagttggtgttgtctgtaa

SEQ ID NO: 3279548 - DNA, 25 bp, Homo sapien
tggaattatagattctttggtggcc

SEQ ID NO: 3279549 - DNA, 25 bp, Homo sapien
gtggccttgcttcttgtaatgggaa

SEQ ID NO: 3279550 - DNA, 25 bp, Homo sapien
tactctggcatactcctatgtatga

SEQ ID NO: 3279551 - DNA, 25 bp, Homo sapien
tatgtatgatacctttccaaggcca

SEQ ID NO: 3279552 - DNA, 25 bp, Homo sapien
gccccacggagctgatcttcaaaaa

SEQ ID NO: 3279553 - DNA, 25 bp, Homo sapien
aaaaaatggaatttactctggcata

SEQ ID NO: 3279554 - DNA, 25 bp, Homo sapien
ggattgggaactggagacttcccca

SEQ ID NO: 3279555 - DNA, 25 bp, Homo sapien
aggaccacgctaaatcaatgaatga

SEQ ID NO: 3279556 - DNA, 25 bp, Homo sapien
gagagattagttgagaatcttctcc

SEQ ID NO: 3279557 - DNA, 25 bp, Homo sapien
ctgtaaaagcaggttgggagagatt

SEQ ID NO: 3279558 - DNA, 25 bp, Homo sapien
tggtggaagggccaggacagagcaa

SEQ ID NO: 3279559 - DNA, 25 bp, Homo sapien
caggacagagcaagccacagtgctg

SEQ ID NO: 3279560 - DNA, 25 bp, Homo sapien
agacagatggccagagagggcccac

SEQ ID NO: 3279561 - DNA, 25 bp, Homo sapien
tcaactttgcactggtggtggaagg

SEQ ID NO: 3279562 - DNA, 25 bp, Homo sapien
tggagtagtggagagcttcagtcca

SEQ ID NO: 3279563 - DNA, 25 bp, Homo sapien
ttccttatggccttggagtagtgga

SEQ ID NO: 3279564 - DNA, 25 bp, Homo sapien
tcaagcaaacggttgaggccacggg

SEQ ID NO: 3279565 - DNA, 25 bp, Homo sapien
cactgggtagaaatgcccctaatct

SEQ ID NO: 3279566 - DNA, 25 bp, Homo sapien
gaagaagtcccaactgctaagctgt

SEQ ID NO: 3279567 - DNA, 25 bp, Homo sapien
taaatgatctatcatgcagaggctc

SEQ ID NO: 3279568 - DNA, 25 bp, Homo sapien
ttccaaaagtcaatacaggcagttt

SEQ ID NO: 3279569 - DNA, 25 bp, Homo sapien
tagttaggctggacattcgtatctc

SEQ ID NO: 3279570 - DNA, 25 bp, Homo sapien
gggcaatgatccaaatctagaatta

SEQ ID NO: 3279571 - DNA, 25 bp, Homo sapien
tgggcaatgatccaaatctagaatt

SEQ ID NO: 3279572 - DNA, 25 bp, Homo sapien
atgtggtagcacaggcctgcaatcc

SEQ ID NO: 3279573 - DNA, 25 bp, Homo sapien
ttataaaacataatcctggctgggt

SEQ ID NO: 3279574 - DNA, 25 bp, Homo sapien
ggatgtggtagcacaggcctgcaat

SEQ ID NO: 3279575 - DNA, 25 bp, Homo sapien
acttataaaacataatcctggctgg

SEQ ID NO: 3279576 - DNA, 25 bp, Homo sapien
atatacagaggccttgggagacaca

SEQ ID NO: 3279577 - DNA, 25 bp, Homo sapien
tatacagaggccttgggagacacag

SEQ ID NO: 3279578 - DNA, 25 bp, Homo sapien
catatacagaggccttgggagacac

SEQ ID NO: 3279579 - DNA, 25 bp, Homo sapien
atacagaggccttgggagacacagg

SEQ ID NO: 3279580 - DNA, 25 bp, Homo sapien
cttggtagactagtccctgggtgac

SEQ ID NO: 3279581 - DNA, 25 bp, Homo sapien
tggtagactagtccctgggtgacaa

SEQ ID NO: 3279582 - DNA, 25 bp, Homo sapien
gtagactagtccctgggtgacaagc

SEQ ID NO: 3279583 - DNA, 25 bp, Homo sapien
tagactagtccctgggtgacaagca

SEQ ID NO: 3279584 - DNA, 25 bp, Homo sapien
tccacttgtactgaatgccaacatg

SEQ ID NO: 3279585 - DNA, 25 bp, Homo sapien
catgtctgacatccacttgtactga

SEQ ID NO: 3279586 - DNA, 25 bp, Homo sapien
tacttcatgtctgacatccacttgt

SEQ ID NO: 3279587 - DNA, 25 bp, Homo sapien
tgccaacatgcaccagattctaagc

SEQ ID NO: 3279588 - DNA, 25 bp, Homo sapien
tgacattctcgcataatctttgaga

SEQ ID NO: 3279589 - DNA, 25 bp, Homo sapien
tcctgacattctcgcataatctttg

SEQ ID NO: 3279590 - DNA, 25 bp, Homo sapien
gaaactttcttcctgacattctcgc

SEQ ID NO: 3279591 - DNA, 25 bp, Homo sapien
cgcataatctttgagatctctgctc

SEQ ID NO: 3279592 - DNA, 25 bp, Homo sapien
catatgctttaatcactcgctcttg

SEQ ID NO: 3279593 - DNA, 25 bp, Homo sapien
aaccattctgagtgtttaatgtggt

SEQ ID NO: 3279594 - DNA, 25 bp, Homo sapien
tacatatgctttaatcactcgctct

SEQ ID NO: 3279595 - DNA, 25 bp, Homo sapien
cattctgagtgtttaatgtggttct

SEQ ID NO: 3279596 - DNA, 25 bp, Homo sapien
gagacctcatgtctaaccacaaaaa

SEQ ID NO: 3279597 - DNA, 25 bp, Homo sapien
tgagacctcatgtctaaccacaaaa

SEQ ID NO: 3279598 - DNA, 25 bp, Homo sapien
agtgagacctcatgtctaaccacaa

SEQ ID NO: 3279599 - DNA, 25 bp, Homo sapien
atagtgagacctcatgtctaaccac

SEQ ID NO: 3279600 - DNA, 25 bp, Homo sapien
tggtttccacgagcagacgctgaag

SEQ ID NO: 3279601 - DNA, 25 bp, Homo sapien
tatcttggtttccacgagcagacgc

SEQ ID NO: 3279602 - DNA, 25 bp, Homo sapien
cttggtttccacgagcagacgctga

SEQ ID NO: 3279603 - DNA, 25 bp, Homo sapien
ttccacgagcagacgctgaagccat

SEQ ID NO: 3279604 - DNA, 25 bp, Homo sapien
tccttccagttgtttatcctctgct

SEQ ID NO: 3279605 - DNA, 25 bp, Homo sapien
tttatcctctgcttactccttgacc

SEQ ID NO: 3279606 - DNA, 25 bp, Homo sapien
gttgtttatcctctgcttactcctt

SEQ ID NO: 3279607 - DNA, 25 bp, Homo sapien
ctctgcttactccttgacccagtgt

SEQ ID NO: 3279608 - DNA, 25 bp, Homo sapien
ctggcacccacttagtcctcagtct

SEQ ID NO: 3279609 - DNA, 25 bp, Homo sapien
tggcacccacttagtcctcagtctg

SEQ ID NO: 3279610 - DNA, 25 bp, Homo sapien
ccctggcacccacttagtcctcagt

SEQ ID NO: 3279611 - DNA, 25 bp, Homo sapien
tcccctggcacccacttagtcctca

SEQ ID NO: 3279612 - DNA, 25 bp, Homo sapien
ctaaaagcaagccttccgagggtct

SEQ ID NO: 3279613 - DNA, 25 bp, Homo sapien
ggtgcttcttaggatggcttggagg

SEQ ID NO: 3279614 - DNA, 25 bp, Homo sapien
tcttgccttgcaggtgtagctccca

SEQ ID NO: 3279615 - DNA, 25 bp, Homo sapien
ttcgtgggtgctgaccgacgaatgt

SEQ ID NO: 3279616 - DNA, 25 bp, Homo sapien
gggacactgcactttctgatgcggt

SEQ ID NO: 3279617 - DNA, 25 bp, Homo sapien
cactgcactttctgatgcggtcggg

SEQ ID NO: 3279618 - DNA, 25 bp, Homo sapien
aagccgggagtcagcctactggagt

SEQ ID NO: 3279619 - DNA, 25 bp, Homo sapien
tcagcctactggagtccgctgccat

SEQ ID NO: 3279620 - DNA, 25 bp, Homo sapien
agcttcccgagtaccccacctgtct

SEQ ID NO: 3279621 - DNA, 25 bp, Homo sapien
tgtgtggtctgggtcgcctccgagg

SEQ ID NO: 3279622 - DNA, 25 bp, Homo sapien
gaggccgagtccctcgttgccaagc

SEQ ID NO: 3279623 - DNA, 25 bp, Homo sapien
agcaggcctcgctcccccgtgactg

SEQ ID NO: 3279624 - DNA, 25 bp, Homo sapien
tgtgttttcttctcttgctccgccc

SEQ ID NO: 3279625 - DNA, 25 bp, Homo sapien
cgccccctcgcctgcccgctaagca

SEQ ID NO: 3279626 - DNA, 25 bp, Homo sapien
ttttcttctcttgctccgccccctc

SEQ ID NO: 3279627 - DNA, 25 bp, Homo sapien
ttcttctcttgctccgccccctcgc

SEQ ID NO: 3279628 - DNA, 25 bp, Homo sapien
ccacctggcagtcactttcgctgtt

SEQ ID NO: 3279629 - DNA, 25 bp, Homo sapien
agctggtgaagtcaccctactgcca

SEQ ID NO: 3279630 - DNA, 25 bp, Homo sapien
ctggcagtcactttcgctgttggtg

SEQ ID NO: 3279631 - DNA, 25 bp, Homo sapien
gtgaagtcaccctactgccacctgg

SEQ ID NO: 3279632 - DNA, 25 bp, Homo sapien
ctgtggatctccactgaaggccctc

SEQ ID NO: 3279633 - DNA, 25 bp, Homo sapien
gctgtggatctccactgaaggccct

SEQ ID NO: 3279634 - DNA, 25 bp, Homo sapien
attcaggtacatgatcctagcaggg

SEQ ID NO: 3279635 - DNA, 25 bp, Homo sapien
ggtacatgatcctagcagggttggc

SEQ ID NO: 3279636 - DNA, 25 bp, Homo sapien
tagcagggttggcataaactgatac

SEQ ID NO: 3279637 - DNA, 25 bp, Homo sapien
cagggttggcataaactgatacaat

SEQ ID NO: 3279638 - DNA, 25 bp, Homo sapien
ttacactacattgggaactgttcca

SEQ ID NO: 3279639 - DNA, 25 bp, Homo sapien
tgtaatggggcttttggcttagtgc

SEQ ID NO: 3279640 - DNA, 25 bp, Homo sapien
catctgctcttattggttgtaatgg

SEQ ID NO: 3279641 - DNA, 25 bp, Homo sapien
aactgttccactccatgttttaggg

SEQ ID NO: 3279642 - DNA, 25 bp, Homo sapien
ttaatgagtccatctggctatattc

SEQ ID NO: 3279643 - DNA, 25 bp, Homo sapien
aatgagtccatctggctatattcca

SEQ ID NO: 3279644 - DNA, 25 bp, Homo sapien
tcttagccatgatgagggctggagt

SEQ ID NO: 3279645 - DNA, 25 bp, Homo sapien
tccaggaacagaatcttagccatga

SEQ ID NO: 3279646 - DNA, 25 bp, Homo sapien
tccacagtcctcagcaattcaggtt

SEQ ID NO: 3279647 - DNA, 25 bp, Homo sapien
tcctcagcaattcaggtttagctcc

SEQ ID NO: 3279648 - DNA, 25 bp, Homo sapien
ctcagcaattcaggtttagctccaa

SEQ ID NO: 3279649 - DNA, 25 bp, Homo sapien
cagtcctcagcaattcaggtttagc

SEQ ID NO: 3279650 - DNA, 25 bp, Homo sapien
cccatccggaggccatgctaatgtt

SEQ ID NO: 3279651 - DNA, 25 bp, Homo sapien
tcggtagtatgtgcaccgtgttgct

SEQ ID NO: 3279652 - DNA, 25 bp, Homo sapien
ccatggctgcgaacagcagccttct

SEQ ID NO: 3279653 - DNA, 25 bp, Homo sapien
atgttcctttccttgtaagggccag

SEQ ID NO: 3279654 - DNA, 25 bp, Homo sapien
agtcaattaagccaatcatgttcct

SEQ ID NO: 3279655 - DNA, 25 bp, Homo sapien
caatggacattcatgtccctgacct

SEQ ID NO: 3279656 - DNA, 25 bp, Homo sapien
tccaatggacattcatgtccctgac

SEQ ID NO: 3279657 - DNA, 25 bp, Homo sapien
tttccaatggacattcatgtccctg

SEQ ID NO: 3279658 - DNA, 25 bp, Homo sapien
ccaatggacattcatgtccctgacc

SEQ ID NO: 3279659 - DNA, 25 bp, Homo sapien
ggtacgcagggtgcctttgaaagcc

SEQ ID NO: 3279660 - DNA, 25 bp, Homo sapien
caaggagtatgtgattaagacccca

SEQ ID NO: 3279661 - DNA, 25 bp, Homo sapien
ggaaagatccacattggccaagtca

SEQ ID NO: 3279662 - DNA, 25 bp, Homo sapien
agttcaagttccctagctgctagaa

SEQ ID NO: 3279663 - DNA, 25 bp, Homo sapien
ggccactgttcgtcagctgcaagaa

SEQ ID NO: 3279664 - DNA, 25 bp, Homo sapien
caatatctgggccactgttcgtcag

SEQ ID NO: 3279665 - DNA, 25 bp, Homo sapien
tcagctgcaagaactgttgatgttg

SEQ ID NO: 3279666 - DNA, 25 bp, Homo sapien
ccatgacaatatctgggccactgtt

SEQ ID NO: 3279667 - DNA, 25 bp, Homo sapien
tgggtgttgtgatcgttttgcataa

SEQ ID NO: 3279668 - DNA, 25 bp, Homo sapien
tatggagcattgatgttaagtgggt

SEQ ID NO: 3279669 - DNA, 25 bp, Homo sapien
gatcgttttgcataatgtgtgttta

SEQ ID NO: 3279670 - DNA, 25 bp, Homo sapien
cattgatgttaagtgggtgttgtga

SEQ ID NO: 3279671 - DNA, 25 bp, Homo sapien
gttggataggagggtaaagccacag

SEQ ID NO: 3279672 - DNA, 25 bp, Homo sapien
ctgttggataggagggtaaagccac

SEQ ID NO: 3279673 - DNA, 25 bp, Homo sapien
tgttggataggagggtaaagccaca

SEQ ID NO: 3279674 - DNA, 25 bp, Homo sapien
gcccttatacaaattgacaccatcc

SEQ ID NO: 3279675 - DNA, 25 bp, Homo sapien
cttatacaaattgacaccatccctc

SEQ ID NO: 3279676 - DNA, 25 bp, Homo sapien
aggcccttatacaaattgacaccat

SEQ ID NO: 3279677 - DNA, 25 bp, Homo sapien
ccttatacaaattgacaccatccct

SEQ ID NO: 3279678 - DNA, 25 bp, Homo sapien
ttcttttgtacaccctttatcatcc

SEQ ID NO: 3279679 - DNA, 25 bp, Homo sapien
attcttttgtacaccctttatcatc

SEQ ID NO: 3279680 - DNA, 25 bp, Homo sapien
caagaagatgtgctgcagcttccat

SEQ ID NO: 3279681 - DNA, 25 bp, Homo sapien
gacaagaagatgtgctgcagcttcc

SEQ ID NO: 3279682 - DNA, 25 bp, Homo sapien
ctgggacaagaagatgtgctgcagc

SEQ ID NO: 3279683 - DNA, 25 bp, Homo sapien
gggacaagaagatgtgctgcagctt

SEQ ID NO: 3279684 - DNA, 25 bp, Homo sapien
gagaggagaccagctggaataactg

SEQ ID NO: 3279685 - DNA, 25 bp, Homo sapien
tggccttagtaagttccccattaca

SEQ ID NO: 3279686 - DNA, 25 bp, Homo sapien
aggagaccagctggaataactgaac

SEQ ID NO: 3279687 - DNA, 25 bp, Homo sapien
cccattacatagacaaccaagcaga

SEQ ID NO: 3279688 - DNA, 25 bp, Homo sapien
tccctcaggaggtactggtggtttg

SEQ ID NO: 3279689 - DNA, 25 bp, Homo sapien
aagttgctggcctgcttcattcagg

SEQ ID NO: 3279690 - DNA, 25 bp, Homo sapien
caactggcttaagtctccctcagga

SEQ ID NO: 3279691 - DNA, 25 bp, Homo sapien
cctttctgtttttgggattggcctg

SEQ ID NO: 3279692 - DNA, 25 bp, Homo sapien
gggtgcattatctcatcagcctggt

SEQ ID NO: 3279693 - DNA, 25 bp, Homo sapien
tgcccttggtttcaaggtcccttca

SEQ ID NO: 3279694 - DNA, 25 bp, Homo sapien
tgtgctaaatggcaggtgcatttca

SEQ ID NO: 3279695 - DNA, 25 bp, Homo sapien
cagcaaactccatttgagcatgtgc

SEQ ID NO: 3279696 - DNA, 25 bp, Homo sapien
tcctctgacgaaatttttcctggca

SEQ ID NO: 3279697 - DNA, 25 bp, Homo sapien
actcagtgccattcttgtctccgca

SEQ ID NO: 3279698 - DNA, 25 bp, Homo sapien
cttgattcctttgtagaagggtgga

SEQ ID NO: 3279699 - DNA, 25 bp, Homo sapien
ttgtctccgcagttggaaaaaagcc

SEQ ID NO: 3279700 - DNA, 25 bp, Homo sapien
cctcggttcggcaagtgggtcagtt

SEQ ID NO: 3279701 - DNA, 25 bp, Homo sapien
cactggtccggagttgcacttgttc

SEQ ID NO: 3279702 - DNA, 25 bp, Homo sapien
tgaagatcgccacagtcgggttcgc

SEQ ID NO: 3279703 - DNA, 25 bp, Homo sapien
tagtctaaacgagggcaccactggt

SEQ ID NO: 3279704 - DNA, 25 bp, Homo sapien
gggggcgcagggctagggcagcggg

SEQ ID NO: 3279705 - DNA, 25 bp, Homo sapien
ctgggggcgcagggctagggcagcg

SEQ ID NO: 3279706 - DNA, 25 bp, Homo sapien
gcagggctagggcagcgggcccgac

SEQ ID NO: 3279707 - DNA, 25 bp, Homo sapien
ggcgcagggctagggcagcgggccc

SEQ ID NO: 3279708 - DNA, 25 bp, Homo sapien
tcgccgcgagttcgcgggtgccagc

SEQ ID NO: 3279709 - DNA, 25 bp, Homo sapien
gagagaaatcctcttggagtcgctg

SEQ ID NO: 3279710 - DNA, 25 bp, Homo sapien
ggctttcctggaaagcgctgcccct

SEQ ID NO: 3279711 - DNA, 25 bp, Homo sapien
agtcgctgctgggtaagccgaagcc

SEQ ID NO: 3279712 - DNA, 25 bp, Homo sapien
ctggcaccttggtcacgttcagtgt

SEQ ID NO: 3279713 - DNA, 25 bp, Homo sapien
gggctgcttagtccattcaccttat

SEQ ID NO: 3279714 - DNA, 25 bp, Homo sapien
gggagagcaaaccacctcagcgtcg

SEQ ID NO: 3279715 - DNA, 25 bp, Homo sapien
cttatctgtgatgacctttgcctgc

SEQ ID NO: 3279716 - DNA, 25 bp, Homo sapien
ccatttcattcctctcgggttgatt

SEQ ID NO: 3279717 - DNA, 25 bp, Homo sapien
tttcattcctctcgggttgattcct

SEQ ID NO: 3279718 - DNA, 25 bp, Homo sapien
attccatttcattcctctcgggttg

SEQ ID NO: 3279719 - DNA, 25 bp, Homo sapien
tacattccatttcattcctctcggg

SEQ ID NO: 3279720 - DNA, 25 bp, Homo sapien
ttgaatcccttgcattccattccaa

SEQ ID NO: 3279721 - DNA, 25 bp, Homo sapien
gaatcccttgcattccattccaatc

SEQ ID NO: 3279722 - DNA, 25 bp, Homo sapien
ccattccaatccattcctctccagt

SEQ ID NO: 3279723 - DNA, 25 bp, Homo sapien
ttccattccaatccattcctctcca

SEQ ID NO: 3279724 - DNA, 25 bp, Homo sapien
tccattccattccactcgtgttgat

SEQ ID NO: 3279725 - DNA, 25 bp, Homo sapien
cattccattccactcgtgttgattc

SEQ ID NO: 3279726 - DNA, 25 bp, Homo sapien
attccattccactcgtgttgattcc

SEQ ID NO: 3279727 - DNA, 25 bp, Homo sapien
ttccattccattccactcgtgttga

SEQ ID NO: 3279728 - DNA, 25 bp, Homo sapien
tccattccgttcctttccatttcat

SEQ ID NO: 3279729 - DNA, 25 bp, Homo sapien
tgattccattccgttcctttccatt

SEQ ID NO: 3279730 - DNA, 25 bp, Homo sapien
ccattccgttcctttccatttcatt

SEQ ID NO: 3279731 - DNA, 25 bp, Homo sapien
attcctttccattccattcgggttg

SEQ ID NO: 3279732 - DNA, 25 bp, Homo sapien
ttcctttccattccattcgggttga

SEQ ID NO: 3279733 - DNA, 25 bp, Homo sapien
gttgattccattcctttccattcca

SEQ ID NO: 3279734 - DNA, 25 bp, Homo sapien
ttgattccattcctttccattccat

SEQ ID NO: 3279735 - DNA, 25 bp, Homo sapien
tccactcgggttgattccactccat

SEQ ID NO: 3279736 - DNA, 25 bp, Homo sapien
gttgattccactccattcaattccg

SEQ ID NO: 3279737 - DNA, 25 bp, Homo sapien
gattccactccattcaattccgttc

SEQ ID NO: 3279738 - DNA, 25 bp, Homo sapien
tccattcctttccactcgggttgat

SEQ ID NO: 3279739 - DNA, 25 bp, Homo sapien
ttgattccattcctttccattccat

SEQ ID NO: 3279740 - DNA, 25 bp, Homo sapien
gttgattccattcctttccattcca

SEQ ID NO: 3279741 - DNA, 25 bp, Homo sapien
tcgggttgattccattcctttccat

SEQ ID NO: 3279742 - DNA, 25 bp, Homo sapien
gggttgattccattcctttccattc

SEQ ID NO: 3279743 - DNA, 25 bp, Homo sapien
accatcaaggaccttgggaaccagc

SEQ ID NO: 3279744 - DNA, 25 bp, Homo sapien
ccatcaaggaccttgggaaccagct

SEQ ID NO: 3279745 - DNA, 25 bp, Homo sapien
ctagttgtgggaacagacgcgtggg

SEQ ID NO: 3279746 - DNA, 25 bp, Homo sapien
tgaagagcaggtgcgggctgcggac

SEQ ID NO: 3279747 - DNA, 25 bp, Homo sapien
gttgtgggaacagacgcgtgggcgc

SEQ ID NO: 3279748 - DNA, 25 bp, Homo sapien
tgggcgcatcgcgggagggcagggc

SEQ ID NO: 3279749 - DNA, 25 bp, Homo sapien
cgtggggtcccagcagtgacgcggg

SEQ ID NO: 3279750 - DNA, 25 bp, Homo sapien
gaggacaggcgtggggtcccagcag

SEQ ID NO: 3279751 - DNA, 25 bp, Homo sapien
gggaggacaggcgtggggtcccagc

SEQ ID NO: 3279752 - DNA, 25 bp, Homo sapien
tggggtcccagcagtgacgcgggtt

SEQ ID NO: 3279753 - DNA, 25 bp, Homo sapien
cccagaggagtagtgtgaaacgcgt

SEQ ID NO: 3279754 - DNA, 25 bp, Homo sapien
tgatggtcgtcagccttaagggtac

SEQ ID NO: 3279755 - DNA, 25 bp, Homo sapien
agtcctcctgggtcgcatttacaga

SEQ ID NO: 3279756 - DNA, 25 bp, Homo sapien
gaagaactcactgattccgcgaggg

SEQ ID NO: 3279757 - DNA, 25 bp, Homo sapien
gtaattggaatggaacccgagaaga

SEQ ID NO: 3279758 - DNA, 25 bp, Homo sapien
accaagtccgaaccaccaccttcat

SEQ ID NO: 3279759 - DNA, 25 bp, Homo sapien
gagcatgctgtgttcttgtgggaca

SEQ ID NO: 3279760 - DNA, 25 bp, Homo sapien
tggaacccgagaagagagcatgctg

SEQ ID NO: 3279761 - DNA, 25 bp, Homo sapien
cagcttccatcgtaaggtgtgctca

SEQ ID NO: 3279762 - DNA, 25 bp, Homo sapien
agcttccatcgtaaggtgtgctcat

SEQ ID NO: 3279763 - DNA, 25 bp, Homo sapien
tttatgtgcataatgtgccagttag

SEQ ID NO: 3279764 - DNA, 25 bp, Homo sapien
ttagggtttatgtgcataatgtgcc

SEQ ID NO: 3279765 - DNA, 25 bp, Homo sapien
gggtttatgtgcataatgtgccagt

SEQ ID NO: 3279766 - DNA, 25 bp, Homo sapien
tatgtgcataatgtgccagttagtt

SEQ ID NO: 3279767 - DNA, 25 bp, Homo sapien
ctgcaaaatcgtggattttcgtgat

SEQ ID NO: 3279768 - DNA, 25 bp, Homo sapien
gtttgatggtccgaagccctcttct

SEQ ID NO: 3279769 - DNA, 25 bp, Homo sapien
gcaaaatcgtggattttcgtgatcc

SEQ ID NO: 3279770 - DNA, 25 bp, Homo sapien
ggagtagtttgatggtccgaagccc

SEQ ID NO: 3279771 - DNA, 25 bp, Homo sapien
aagggcacaagtgttacagaatcct

SEQ ID NO: 3279772 - DNA, 25 bp, Homo sapien
aaagggcacaagtgttacagaatcc

SEQ ID NO: 3279773 - DNA, 25 bp, Homo sapien
caaagggcacaagtgttacagaatc

SEQ ID NO: 3279774 - DNA, 25 bp, Homo sapien
agggcacaagtgttacagaatcctg

SEQ ID NO: 3279775 - DNA, 25 bp, Homo sapien
tccagaagcaactgggtcccttacc

SEQ ID NO: 3279776 - DNA, 25 bp, Homo sapien
ctaacaagcacggaagcttcgttac

SEQ ID NO: 3279777 - DNA, 25 bp, Homo sapien
cggaagcttcgttacatttacagtg

SEQ ID NO: 3279778 - DNA, 25 bp, Homo sapien
caagcacggaagcttcgttacattt

SEQ ID NO: 3279779 - DNA, 25 bp, Homo sapien
cacggaagcttcgttacatttacag

SEQ ID NO: 3279780 - DNA, 25 bp, Homo sapien
taacgtaaaatattaactatgctcc

SEQ ID NO: 3279781 - DNA, 25 bp, Homo sapien
gatcaaggttctacttgtgatctct

SEQ ID NO: 3279782 - DNA, 25 bp, Homo sapien
cagttctaactgtttatggactaaa

SEQ ID NO: 3279783 - DNA, 25 bp, Homo sapien
gtgatctctcatgagtttttcaagg

SEQ ID NO: 3279784 - DNA, 25 bp, Homo sapien
aacagtcggcatttccctttagaag

SEQ ID NO: 3279785 - DNA, 25 bp, Homo sapien
actggtgtgaaaacagtcggcattt

SEQ ID NO: 3279786 - DNA, 25 bp, Homo sapien
tatgacctatcatctgagcccacaa

SEQ ID NO: 3279787 - DNA, 25 bp, Homo sapien
gagcccacaaactcagccgcagtga

SEQ ID NO: 3279788 - DNA, 25 bp, Homo sapien
ccctgagatggtgcagtgccctttc

SEQ ID NO: 3279789 - DNA, 25 bp, Homo sapien
cccagatgtctccttaggcagatcc

SEQ ID NO: 3279790 - DNA, 25 bp, Homo sapien
agtttccaatgacattttctcaccg

SEQ ID NO: 3279791 - DNA, 25 bp, Homo sapien
gcagatccctgagatggtgcagtgc

SEQ ID NO: 3279792 - DNA, 25 bp, Homo sapien
cagctcatctcacacacagttgcag

SEQ ID NO: 3279793 - DNA, 25 bp, Homo sapien
ctcactagttgttgggagtcggtgt

SEQ ID NO: 3279794 - DNA, 25 bp, Homo sapien
ggatgtcaatgcatgtagctagtca

SEQ ID NO: 3279795 - DNA, 25 bp, Homo sapien
tagtcatggactggccgtgtggttt

SEQ ID NO: 3279796 - DNA, 25 bp, Homo sapien
ggagagataggaggtgccctagtgt

SEQ ID NO: 3279797 - DNA, 25 bp, Homo sapien
gaggtgccctagtgtgaaaatgtgt

SEQ ID NO: 3279798 - DNA, 25 bp, Homo sapien
tgttcacttcttatgagatacatga

SEQ ID NO: 3279799 - DNA, 25 bp, Homo sapien
ctacagtttgccttttaccctgttg

SEQ ID NO: 3279800 - DNA, 25 bp, Homo sapien
gatttgcctattcatgggccctgga

SEQ ID NO: 3279801 - DNA, 25 bp, Homo sapien
gagtagtgttgacatcattccaaga

SEQ ID NO: 3279802 - DNA, 25 bp, Homo sapien
aaatcatctaatctgcaaacccagc

SEQ ID NO: 3279803 - DNA, 25 bp, Homo sapien
tgtattgaatctaggtcacttcgag

SEQ ID NO: 3279804 - DNA, 25 bp, Homo sapien
gagccttcagaaagctgcaatcttt

SEQ ID NO: 3279805 - DNA, 25 bp, Homo sapien
ttgtgttcgtgacagggttttactc

SEQ ID NO: 3279806 - DNA, 25 bp, Homo sapien
tattgttaacaagtgctaacagtca

SEQ ID NO: 3279807 - DNA, 25 bp, Homo sapien
cacctggccaagtttcagtcttctt

SEQ ID NO: 3279808 - DNA, 25 bp, Homo sapien
ggtctagctactggcctgtcttgct

SEQ ID NO: 3279809 - DNA, 25 bp, Homo sapien
tgcatgaggtctagctactggcctg

SEQ ID NO: 3279810 - DNA, 25 bp, Homo sapien
agctactggcctgtcttgcttacag

SEQ ID NO: 3279811 - DNA, 25 bp, Homo sapien
taagtgtttgttgcatgaggtctag

SEQ ID NO: 3279812 - DNA, 25 bp, Homo sapien
acattgttcgggaaacctgtgtgag

SEQ ID NO: 3279813 - DNA, 25 bp, Homo sapien
cattgttcgggaaacctgtgtgagg

SEQ ID NO: 3279814 - DNA, 25 bp, Homo sapien
taacattgttcgggaaacctgtgtg

SEQ ID NO: 3279815 - DNA, 25 bp, Homo sapien
cgtaacattgttcgggaaacctgtg

SEQ ID NO: 3279816 - DNA, 25 bp, Homo sapien
tggcttatccaagcagtgctcagca

SEQ ID NO: 3279817 - DNA, 25 bp, Homo sapien
ccacagggccttcaataatgcacat

SEQ ID NO: 3279818 - DNA, 25 bp, Homo sapien
taatgcacattgcacctggcttatc

SEQ ID NO: 3279819 - DNA, 25 bp, Homo sapien
cacttttgactaggcccttgggcat

SEQ ID NO: 3279820 - DNA, 25 bp, Homo sapien
cagggtctgctgactaggtcccatg

SEQ ID NO: 3279821 - DNA, 25 bp, Homo sapien
ggtctgctgactaggtcccatgtgc

SEQ ID NO: 3279822 - DNA, 25 bp, Homo sapien
cccatgtgcccagtcctccactgaa

SEQ ID NO: 3279823 - DNA, 25 bp, Homo sapien
agtcctccactgaatagcacccctt

SEQ ID NO: 3279824 - DNA, 25 bp, Homo sapien
caggccagcactaagtcccagctga

SEQ ID NO: 3279825 - DNA, 25 bp, Homo sapien
tgctgaccaggccagcactaagtcc

SEQ ID NO: 3279826 - DNA, 25 bp, Homo sapien
tgaccaggccagcactaagtcccag

SEQ ID NO: 3279827 - DNA, 25 bp, Homo sapien
cttgtcaccggtgccccagcccatg

SEQ ID NO: 3279828 - DNA, 25 bp, Homo sapien
cactggaaatccaagcggcaatgac

SEQ ID NO: 3279829 - DNA, 25 bp, Homo sapien
taaatagtcctcactgacctaggtc

SEQ ID NO: 3279830 - DNA, 25 bp, Homo sapien
tgctgaccacgatcccactaaatag

SEQ ID NO: 3279831 - DNA, 25 bp, Homo sapien
tcactatcaggaggatggcattaag

SEQ ID NO: 3279832 - DNA, 25 bp, Homo sapien
ataatgatgccatcagcctctgtac

SEQ ID NO: 3279833 - DNA, 25 bp, Homo sapien
gtgataatgatgccatcagcctctg

SEQ ID NO: 3279834 - DNA, 25 bp, Homo sapien
cctgttcctgtgataatgatgccat

SEQ ID NO: 3279835 - DNA, 25 bp, Homo sapien
tcctgttcctgtgataatgatgcca

SEQ ID NO: 3279836 - DNA, 25 bp, Homo sapien
ccttcctggacggattggcaaggag

SEQ ID NO: 3279837 - DNA, 25 bp, Homo sapien
ggtccttcctggacggattggcaag

SEQ ID NO: 3279838 - DNA, 25 bp, Homo sapien
ggagctcactgatgttcttgaaggc

SEQ ID NO: 3279839 - DNA, 25 bp, Homo sapien
tcctggacggattggcaaggagctc

SEQ ID NO: 3279840 - DNA, 25 bp, Homo sapien
gtggtgttgggatatatcagaaagt

SEQ ID NO: 3279841 - DNA, 25 bp, Homo sapien
cagtggtgttgggatatatcagaaa

SEQ ID NO: 3279842 - DNA, 25 bp, Homo sapien
agtggtgttgggatatatcagaaag

SEQ ID NO: 3279843 - DNA, 25 bp, Homo sapien
tcagtggtgttgggatatatcagaa

SEQ ID NO: 3279844 - DNA, 25 bp, Homo sapien
tcaaaaaggaaccagccacgtttgc

SEQ ID NO: 3279845 - DNA, 25 bp, Homo sapien
gaaccagccacgtttgcaagggtgt

SEQ ID NO: 3279846 - DNA, 25 bp, Homo sapien
cactgacttgtgcatgccgggcaaa

SEQ ID NO: 3279847 - DNA, 25 bp, Homo sapien
tgacttgtgcatgccgggcaaagcc

SEQ ID NO: 3279848 - DNA, 25 bp, Homo sapien
tgcctctccctgaaacccagctgcc

SEQ ID NO: 3279849 - DNA, 25 bp, Homo sapien
ctgcctctccctgaaacccagctgc

SEQ ID NO: 3279850 - DNA, 25 bp, Homo sapien
ctctccctgaaacccagctgcccac

SEQ ID NO: 3279851 - DNA, 25 bp, Homo sapien
gcctctccctgaaacccagctgccc

SEQ ID NO: 3279852 - DNA, 25 bp, Homo sapien
ctgttccttggcgcaagaactccca

SEQ ID NO: 3279853 - DNA, 25 bp, Homo sapien
gcctgttccttggcgcaagaactcc

SEQ ID NO: 3279854 - DNA, 25 bp, Homo sapien
gttccttggcgcaagaactcccagg

SEQ ID NO: 3279855 - DNA, 25 bp, Homo sapien
tgcctgttccttggcgcaagaactc

SEQ ID NO: 3279856 - DNA, 25 bp, Homo sapien
ttcaattaccttactccaggatcca

SEQ ID NO: 3279857 - DNA, 25 bp, Homo sapien
atctttatagggtttgaggtctaga

SEQ ID NO: 3279858 - DNA, 25 bp, Homo sapien
aattaccttactccaggatccacct

SEQ ID NO: 3279859 - DNA, 25 bp, Homo sapien
gagaatctttatagggtttgaggtc

SEQ ID NO: 3279860 - DNA, 25 bp, Homo sapien
tgtatctggatgatgtccaagatgt

SEQ ID NO: 3279861 - DNA, 25 bp, Homo sapien
ccaagatgttggtcttgtgtccctg

SEQ ID NO: 3279862 - DNA, 25 bp, Homo sapien
tgtgtatctggatgatgtccaagat

SEQ ID NO: 3279863 - DNA, 25 bp, Homo sapien
tatctggatgatgtccaagatgttg

SEQ ID NO: 3279864 - DNA, 25 bp, Homo sapien
tgtggaagatgctctttcttaaagc

SEQ ID NO: 3279865 - DNA, 25 bp, Homo sapien
ctcactgacaatgtggaagatgctc

SEQ ID NO: 3279866 - DNA, 25 bp, Homo sapien
tgacaatgtggaagatgctctttct

SEQ ID NO: 3279867 - DNA, 25 bp, Homo sapien
cactgacaatgtggaagatgctctt

SEQ ID NO: 3279868 - DNA, 25 bp, Homo sapien
tcagccttcctcttgccctgtctcc

SEQ ID NO: 3279869 - DNA, 25 bp, Homo sapien
catctcatccttctcagccttcctc

SEQ ID NO: 3279870 - DNA, 25 bp, Homo sapien
ttgccctgtctccaggctgtctctt

SEQ ID NO: 3279871 - DNA, 25 bp, Homo sapien
ctgtctccaggctgtctcttcagtg

SEQ ID NO: 3279872 - DNA, 25 bp, Homo sapien
gacaggatgctttaggtatgggact

SEQ ID NO: 3279873 - DNA, 25 bp, Homo sapien
tgctttaggtatgggacttgtgccc

SEQ ID NO: 3279874 - DNA, 25 bp, Homo sapien
ctcaggatgaggtccgactgggaca

SEQ ID NO: 3279875 - DNA, 25 bp, Homo sapien
gatgctttaggtatgggacttgtgc

SEQ ID NO: 3279876 - DNA, 25 bp, Homo sapien
cacacaggttgggtgagaagatgta

SEQ ID NO: 3279877 - DNA, 25 bp, Homo sapien
acacaggttgggtgagaagatgtat

SEQ ID NO: 3279878 - DNA, 25 bp, Homo sapien
ggtgacagggccctgatggggttgt

SEQ ID NO: 3279879 - DNA, 25 bp, Homo sapien
ctggtgacagggccctgatggggtt

SEQ ID NO: 3279880 - DNA, 25 bp, Homo sapien
tggtgacagggccctgatggggttg

SEQ ID NO: 3279881 - DNA, 25 bp, Homo sapien
gtgacagggccctgatggggttgtc

SEQ ID NO: 3279882 - DNA, 25 bp, Homo sapien
gtggtcaggggggtgatgagaaaaa

SEQ ID NO: 3279883 - DNA, 25 bp, Homo sapien
gggtggtcaggggggtgatgagaaa

SEQ ID NO: 3279884 - DNA, 25 bp, Homo sapien
gatgagaaaaatgcagaatggaatt

SEQ ID NO: 3279885 - DNA, 25 bp, Homo sapien
ctgggtggtcaggggggtgatgaga

SEQ ID NO: 3279886 - DNA, 25 bp, Homo sapien
gatgtgtctgtcatctagaaaatgg

SEQ ID NO: 3279887 - DNA, 25 bp, Homo sapien
tcatgcagagctactcacagacact

SEQ ID NO: 3279888 - DNA, 25 bp, Homo sapien
tcaggaagagtgatgttgtgggttg

SEQ ID NO: 3279889 - DNA, 25 bp, Homo sapien
tgtgggttgacaacccaccacaacg

SEQ ID NO: 3279890 - DNA, 25 bp, Homo sapien
tctttccagccaccctctagggtgc

SEQ ID NO: 3279891 - DNA, 25 bp, Homo sapien
ctctttccagccaccctctagggtg

SEQ ID NO: 3279892 - DNA, 25 bp, Homo sapien
agccaccctctagggtgccctgact

SEQ ID NO: 3279893 - DNA, 25 bp, Homo sapien
tccagccaccctctagggtgccctg

SEQ ID NO: 3279894 - DNA, 25 bp, Homo sapien
aggtcccactgatcaagtccccgct

SEQ ID NO: 3279895 - DNA, 25 bp, Homo sapien
gatgagtgatgaggcccctaatgac

SEQ ID NO: 3279896 - DNA, 25 bp, Homo sapien
gtgatgagtgatgaggcccctaatg

SEQ ID NO: 3279897 - DNA, 25 bp, Homo sapien
tgatgaggcccctaatgaccactcc

SEQ ID NO: 3279898 - DNA, 25 bp, Homo sapien
ttggggaccagtgagtacacactgg

SEQ ID NO: 3279899 - DNA, 25 bp, Homo sapien
tgcttcctcattggctccacctctg

SEQ ID NO: 3279900 - DNA, 25 bp, Homo sapien
tacacactggggagggctcacctgt

SEQ ID NO: 3279901 - DNA, 25 bp, Homo sapien
ctcagtggatgtggcagcggttctt

SEQ ID NO: 3279902 - DNA, 25 bp, Homo sapien
aaagtagatgggagcaagtgtccga

SEQ ID NO: 3279903 - DNA, 25 bp, Homo sapien
tgggagcaagtgtccgacacagcag

SEQ ID NO: 3279904 - DNA, 25 bp, Homo sapien
tagatgggagcaagtgtccgacaca

SEQ ID NO: 3279905 - DNA, 25 bp, Homo sapien
gagcaagtgtccgacacagcagcag

SEQ ID NO: 3279906 - DNA, 25 bp, Homo sapien
gttggccttcaatctctaccgaaac

SEQ ID NO: 3279907 - DNA, 25 bp, Homo sapien
ctgttggccttcaatctctaccgaa

SEQ ID NO: 3279908 - DNA, 25 bp, Homo sapien
gccttcaatctctaccgaaaccctg

SEQ ID NO: 3279909 - DNA, 25 bp, Homo sapien
tggccttcaatctctaccgaaaccc

SEQ ID NO: 3279910 - DNA, 25 bp, Homo sapien
tctaattatttgttctacacagtcc

SEQ ID NO: 3279911 - DNA, 25 bp, Homo sapien
ttctctaattatttgttctacacag

SEQ ID NO: 3279912 - DNA, 25 bp, Homo sapien
attatttgttctacacagtccggct

SEQ ID NO: 3279913 - DNA, 25 bp, Homo sapien
taattatttgttctacacagtccgg

SEQ ID NO: 3279914 - DNA, 25 bp, Homo sapien
ctaaagagaaacggtcatataacta

SEQ ID NO: 3279915 - DNA, 25 bp, Homo sapien
taaagagaaacggtcatataactaa

SEQ ID NO: 3279916 - DNA, 25 bp, Homo sapien
ggtgactctcgaccttgccttgtag

SEQ ID NO: 3279917 - DNA, 25 bp, Homo sapien
tgactctcgaccttgccttgtagga

SEQ ID NO: 3279918 - DNA, 25 bp, Homo sapien
acacaaggtgactctcgaccttgcc

SEQ ID NO: 3279919 - DNA, 25 bp, Homo sapien
caaggtgactctcgaccttgccttg

SEQ ID NO: 3279920 - DNA, 25 bp, Homo sapien
tgaagccgtattatccttgtttaac

SEQ ID NO: 3279921 - DNA, 25 bp, Homo sapien
gagttccttcttatttagtgaagcc

SEQ ID NO: 3279922 - DNA, 25 bp, Homo sapien
aattgttttttatattgtgcttgta

SEQ ID NO: 3279923 - DNA, 25 bp, Homo sapien
attttgtagaattcacattccacat

SEQ ID NO: 3279924 - DNA, 25 bp, Homo sapien
tgtagttcactaagttctacgataa

SEQ ID NO: 3279925 - DNA, 25 bp, Homo sapien
tagttcactaagttctacgataatg

SEQ ID NO: 3279926 - DNA, 25 bp, Homo sapien
tcctcctctgccgtaagatcatcaa

SEQ ID NO: 3279927 - DNA, 25 bp, Homo sapien
gttcactaagttctacgataatgtt

SEQ ID NO: 3279928 - DNA, 25 bp, Homo sapien
gcttttgatgaatactggccgttat

SEQ ID NO: 3279929 - DNA, 25 bp, Homo sapien
tcacttggctaagttgacatctcca

SEQ ID NO: 3279930 - DNA, 25 bp, Homo sapien
catctctggttcatgatacaatgca

SEQ ID NO: 3279931 - DNA, 25 bp, Homo sapien
tttattcaaagtggatctgtttccc

SEQ ID NO: 3279932 - DNA, 25 bp, Homo sapien
gcgaactatgcctccctatctcaag

SEQ ID NO: 3279933 - DNA, 25 bp, Homo sapien
taagagaacatagccagatatgctg

SEQ ID NO: 3279934 - DNA, 25 bp, Homo sapien
gagcacttaagcgatgctcccgcct

SEQ ID NO: 3279935 - DNA, 25 bp, Homo sapien
gctagaactatagataactgtgcct

SEQ ID NO: 3279936 - DNA, 25 bp, Homo sapien
tgggcagggtggaaactgcaacttg

SEQ ID NO: 3279937 - DNA, 25 bp, Homo sapien
tgacaggaatgtcaccatcatcctg

SEQ ID NO: 3279938 - DNA, 25 bp, Homo sapien
catggagtcgagagctgacaggaat

SEQ ID NO: 3279939 - DNA, 25 bp, Homo sapien
atcttcaacagactcctcatcttca

SEQ ID NO: 3279940 - DNA, 25 bp, Homo sapien
atccggagctgtgagagttttttac

SEQ ID NO: 3279941 - DNA, 25 bp, Homo sapien
tttttactggctggataattcacag

SEQ ID NO: 3279942 - DNA, 25 bp, Homo sapien
tactggctggataattcacagtttt

SEQ ID NO: 3279943 - DNA, 25 bp, Homo sapien
ccggagctgtgagagttttttactg

SEQ ID NO: 3279944 - DNA, 25 bp, Homo sapien
ttatatcatattagaacagaaggtc

SEQ ID NO: 3279945 - DNA, 25 bp, Homo sapien
aaatcaaccttatctaccacccagt

SEQ ID NO: 3279946 - DNA, 25 bp, Homo sapien
gttagaagtgtttgaccataactac

SEQ ID NO: 3279947 - DNA, 25 bp, Homo sapien
ggtatttgtacacccgattaacagc

SEQ ID NO: 3279948 - DNA, 25 bp, Homo sapien
tggacttgagagctgatacgagaaa

SEQ ID NO: 3279949 - DNA, 25 bp, Homo sapien
cttgagagctgatacgagaaatgtc

SEQ ID NO: 3279950 - DNA, 25 bp, Homo sapien
tctccacggaatcatcttcaacaga

SEQ ID NO: 3279951 - DNA, 25 bp, Homo sapien
tgagagctgatacgagaaatgtcac

SEQ ID NO: 3279952 - DNA, 25 bp, Homo sapien
cctgcttccgagatgtggggagtgt

SEQ ID NO: 3279953 - DNA, 25 bp, Homo sapien
gggagtgtgggcgagctcgggagtt

SEQ ID NO: 3279954 - DNA, 25 bp, Homo sapien
tgtgggcgagctcgggagttgcctg

SEQ ID NO: 3279955 - DNA, 25 bp, Homo sapien
acagggacatttggccctgcttccg

SEQ ID NO: 3279956 - DNA, 25 bp, Homo sapien
agatcggagccgtttgtatgggcac

SEQ ID NO: 3279957 - DNA, 25 bp, Homo sapien
agctgctgccgcagggcagaatgcc

SEQ ID NO: 3279958 - DNA, 25 bp, Homo sapien
actgggacacgtggccctgcttctg

SEQ ID NO: 3279959 - DNA, 25 bp, Homo sapien
cttctgtgatgctaggagcgcgagc

SEQ ID NO: 3279960 - DNA, 25 bp, Homo sapien
cacagagggcgacggcagcttgggc

SEQ ID NO: 3279961 - DNA, 25 bp, Homo sapien
cacacagagggcgacggcagcttgg

SEQ ID NO: 3279962 - DNA, 25 bp, Homo sapien
agcttgggcgcccagatggcggagc

SEQ ID NO: 3279963 - DNA, 25 bp, Homo sapien
ctgcacacagagggcgacggcagct

SEQ ID NO: 3279964 - DNA, 25 bp, Homo sapien
gaactggaacaagacgaggagccta

SEQ ID NO: 3279965 - DNA, 25 bp, Homo sapien
tggaacaagacgaggagcctactct

SEQ ID NO: 3279966 - DNA, 25 bp, Homo sapien
acaagacgaggagcctactctcacc

SEQ ID NO: 3279967 - DNA, 25 bp, Homo sapien
gaaacggtgaaagcattccctttga

SEQ ID NO: 3279968 - DNA, 25 bp, Homo sapien
cagtgtgtcccacagggacgccgac

SEQ ID NO: 3279969 - DNA, 25 bp, Homo sapien
aaggagggtgatgctagccatgtca

SEQ ID NO: 3279970 - DNA, 25 bp, Homo sapien
gcagtgtgtcccacagggacgccga

SEQ ID NO: 3279971 - DNA, 25 bp, Homo sapien
ctagccatgtcacgggcagtgtgtc

SEQ ID NO: 3279972 - DNA, 25 bp, Homo sapien
ccctcacgggaaccgtggagtaatg

SEQ ID NO: 3279973 - DNA, 25 bp, Homo sapien
ctgctggagcgtcttgccagcatgg

SEQ ID NO: 3279974 - DNA, 25 bp, Homo sapien
cacgggaaccgtggagtaatggcca

SEQ ID NO: 3279975 - DNA, 25 bp, Homo sapien
accgtggagtaatggccaggtaact

SEQ ID NO: 3279976 - DNA, 25 bp, Homo sapien
tgggctagtagattggccaggactt

SEQ ID NO: 3279977 - DNA, 25 bp, Homo sapien
ctagtagattggccaggacttcgaa

SEQ ID NO: 3279978 - DNA, 25 bp, Homo sapien
ggctagtagattggccaggacttcg

SEQ ID NO: 3279979 - DNA, 25 bp, Homo sapien
gtgggctagtagattggccaggact

SEQ ID NO: 3279980 - DNA, 25 bp, Homo sapien
gtacttccacatccctggtgaggag

SEQ ID NO: 3279981 - DNA, 25 bp, Homo sapien
gtaaagctgtggaattctgttgatg

SEQ ID NO: 3279982 - DNA, 25 bp, Homo sapien
gccctgcgggatgatgtagagtact

SEQ ID NO: 3279983 - DNA, 25 bp, Homo sapien
aaagctgtggaattctgttgatgat

SEQ ID NO: 3279984 - DNA, 25 bp, Homo sapien
cgccgtgagctccaagtcgacgcag

SEQ ID NO: 3279985 - DNA, 25 bp, Homo sapien
agacgccgtgagctccaagtcgacg

SEQ ID NO: 3279986 - DNA, 25 bp, Homo sapien
aagacgccgtgagctccaagtcgac

SEQ ID NO: 3279987 - DNA, 25 bp, Homo sapien
gcaagacgccgtgagctccaagtcg

SEQ ID NO: 3279988 - DNA, 25 bp, Homo sapien
tgggtttaaatagcctcctgcgcag

SEQ ID NO: 3279989 - DNA, 25 bp, Homo sapien
gccagccagggtgggtttaaatagc

SEQ ID NO: 3279990 - DNA, 25 bp, Homo sapien
cagggtgggtttaaatagcctcctg

SEQ ID NO: 3279991 - DNA, 25 bp, Homo sapien
cagccagggtgggtttaaatagcct

SEQ ID NO: 3279992 - DNA, 25 bp, Homo sapien
tacactgggtttatgagtatgcgac

SEQ ID NO: 3279993 - DNA, 25 bp, Homo sapien
gcacctgtcgaggatttccccaaaa

SEQ ID NO: 3279994 - DNA, 25 bp, Homo sapien
tatgcgaccctatactccagaaaca

SEQ ID NO: 3279995 - DNA, 25 bp, Homo sapien
tgttcacaactgatggagagccgtg

SEQ ID NO: 3279996 - DNA, 25 bp, Homo sapien
aaggagggtgatgctagccatgtca

SEQ ID NO: 3279997 - DNA, 25 bp, Homo sapien
aggaaggagggtgatgctagccatg

SEQ ID NO: 3279998 - DNA, 25 bp, Homo sapien
agtgtcactgccaggaaggagggtg

SEQ ID NO: 3279999 - DNA, 25 bp, Homo sapien
atcaacagtgtcactgccaggaagg

SEQ ID NO: 3280000 - DNA, 25 bp, Homo sapien
ggtagtgtgtcccgcagggacgccg

SEQ ID NO: 3280001 - DNA, 25 bp, Homo sapien
cggtagtgtgtcccgcagggacgcc

SEQ ID NO: 3280002 - DNA, 25 bp, Homo sapien
tagtgtgtcccgcagggacgccgac

SEQ ID NO: 3280003 - DNA, 25 bp, Homo sapien
gtagtgtgtcccgcagggacgccga

SEQ ID NO: 3280004 - DNA, 25 bp, Homo sapien
cacgggaaccgtggagtaatggcca

SEQ ID NO: 3280005 - DNA, 25 bp, Homo sapien
atcggaaatgacaggggcctcttct

SEQ ID NO: 3280006 - DNA, 25 bp, Homo sapien
cggaatgcaggagcgggtcttgtgc

SEQ ID NO: 3280007 - DNA, 25 bp, Homo sapien
atagactgggtggtgatatcggaaa

SEQ ID NO: 3280008 - DNA, 25 bp, Homo sapien
ctactagactggccagggcttcgta

SEQ ID NO: 3280009 - DNA, 25 bp, Homo sapien
ggctactagactggccagggcttcg

SEQ ID NO: 3280010 - DNA, 25 bp, Homo sapien
gtgggctactagactggccagggct

SEQ ID NO: 3280011 - DNA, 25 bp, Homo sapien
tgggctactagactggccagggctt

SEQ ID NO: 3280012 - DNA, 25 bp, Homo sapien
tgaaggacaataacggggagtagct

SEQ ID NO: 3280013 - DNA, 25 bp, Homo sapien
aataacggggagtagctgtcaggcc

SEQ ID NO: 3280014 - DNA, 25 bp, Homo sapien
gctgtcaggccctcggagtgtctga

SEQ ID NO: 3280015 - DNA, 25 bp, Homo sapien
tgtctgagtgtaagtggagatgggt

SEQ ID NO: 3280016 - DNA, 25 bp, Homo sapien
cgggatgatgtagagtacttccaca

SEQ ID NO: 3280017 - DNA, 25 bp, Homo sapien
aggagctgctccttgggtctgagtt

SEQ ID NO: 3280018 - DNA, 25 bp, Homo sapien
gccctgcgggatgatgtagagtact

SEQ ID NO: 3280019 - DNA, 25 bp, Homo sapien
aaagctgtggaattctgttgatgat

SEQ ID NO: 3280020 - DNA, 25 bp, Homo sapien
gtccacgcagagtccgccaaaggct

SEQ ID NO: 3280021 - DNA, 25 bp, Homo sapien
ggccgctgatccgctccacgaagat

SEQ ID NO: 3280022 - DNA, 25 bp, Homo sapien
gctccggccgctgatccgctccacg

SEQ ID NO: 3280023 - DNA, 25 bp, Homo sapien
tccaagtcgcaagacgccgtgagct

SEQ ID NO: 3280024 - DNA, 25 bp, Homo sapien
tgggtttaaatagcctcgggcgcaa

SEQ ID NO: 3280025 - DNA, 25 bp, Homo sapien
ctgagtacaggccagccagggtggg

SEQ ID NO: 3280026 - DNA, 25 bp, Homo sapien
cagccagggtgggtttaaatagcct

SEQ ID NO: 3280027 - DNA, 25 bp, Homo sapien
caggccagccagggtgggtttaaat

SEQ ID NO: 3280028 - DNA, 25 bp, Homo sapien
tacactgggtttatgagtatgcgac

SEQ ID NO: 3280029 - DNA, 25 bp, Homo sapien
tgttcacaactgatggagagccgtg

SEQ ID NO: 3280030 - DNA, 25 bp, Homo sapien
tatgcgaccctatactccagaaaca

SEQ ID NO: 3280031 - DNA, 25 bp, Homo sapien
gcacctgtcgaggatttccccaaaa

SEQ ID NO: 3280032 - DNA, 25 bp, Homo sapien
ttcacatcaacagtgtcactgccag

SEQ ID NO: 3280033 - DNA, 25 bp, Homo sapien
aaggagggtgatgctagccatgtca

SEQ ID NO: 3280034 - DNA, 25 bp, Homo sapien
ttacaaatgacagatgtgaaactgg

SEQ ID NO: 3280035 - DNA, 25 bp, Homo sapien
aggaaggagggtgatgctagccatg

SEQ ID NO: 3280036 - DNA, 25 bp, Homo sapien
gcagtgtgtcccgcagggacgccga

SEQ ID NO: 3280037 - DNA, 25 bp, Homo sapien
ggcagtgtgtcccgcagggacgccg

SEQ ID NO: 3280038 - DNA, 25 bp, Homo sapien
cagtgtgtcccgcagggacgccgac

SEQ ID NO: 3280039 - DNA, 25 bp, Homo sapien
cggcagtgtgtcccgcagggacgcc

SEQ ID NO: 3280040 - DNA, 25 bp, Homo sapien
ccctcacgggaaccgtggagtaatg

SEQ ID NO: 3280041 - DNA, 25 bp, Homo sapien
accgtggagtaatggccaggtaact

SEQ ID NO: 3280042 - DNA, 25 bp, Homo sapien
cacgggaaccgtggagtaatggcca

SEQ ID NO: 3280043 - DNA, 25 bp, Homo sapien
ctgctggagcgtcttgccagcatgg

SEQ ID NO: 3280044 - DNA, 25 bp, Homo sapien
gtgggctagtagattggccagggct

SEQ ID NO: 3280045 - DNA, 25 bp, Homo sapien
ggctagtagattggccagggcttcg

SEQ ID NO: 3280046 - DNA, 25 bp, Homo sapien
ctagtagattggccagggcttcgaa

SEQ ID NO: 3280047 - DNA, 25 bp, Homo sapien
tgggctagtagattggccagggctt

SEQ ID NO: 3280048 - DNA, 25 bp, Homo sapien
agagaagttttgagagtagctgaaa

SEQ ID NO: 3280049 - DNA, 25 bp, Homo sapien
tcagtgaagtctgtgagtccgtagg

SEQ ID NO: 3280050 - DNA, 25 bp, Homo sapien
tttgagagtagctgaaagagacaca

SEQ ID NO: 3280051 - DNA, 25 bp, Homo sapien
tctgtgagtccgtaggtgattctgg

SEQ ID NO: 3280052 - DNA, 25 bp, Homo sapien
taaagctgtggaattctgttgatga

SEQ ID NO: 3280053 - DNA, 25 bp, Homo sapien
atggatgtgagactggtgaagccct

SEQ ID NO: 3280054 - DNA, 25 bp, Homo sapien
gccctgcgggatgatgtagagttct

SEQ ID NO: 3280055 - DNA, 25 bp, Homo sapien
gcgggatgatgtagagttcttccac

SEQ ID NO: 3280056 - DNA, 25 bp, Homo sapien
aagtccacgcagagtccgccaaacg

SEQ ID NO: 3280057 - DNA, 25 bp, Homo sapien
ggccgctgatccgctccgcgaagat

SEQ ID NO: 3280058 - DNA, 25 bp, Homo sapien
caagtcgcaagacgccgtgagctcc

SEQ ID NO: 3280059 - DNA, 25 bp, Homo sapien
gaatccgcctccaagtcgcaagacg

SEQ ID NO: 3280060 - DNA, 25 bp, Homo sapien
tgtttttcttaacgctctgcctccc

SEQ ID NO: 3280061 - DNA, 25 bp, Homo sapien
tcttaacgctctgcctcccgaaagg

SEQ ID NO: 3280062 - DNA, 25 bp, Homo sapien
atgcagtagctgtttttcttaacgc

SEQ ID NO: 3280063 - DNA, 25 bp, Homo sapien
tagctgtttttcttaacgctctgcc

SEQ ID NO: 3280064 - DNA, 25 bp, Homo sapien
ccgtgaaagagagatagcggtaaat

SEQ ID NO: 3280065 - DNA, 25 bp, Homo sapien
caatagatgttcacaactgatggag

SEQ ID NO: 3280066 - DNA, 25 bp, Homo sapien
tatgcgaccctatactccagaaaca

SEQ ID NO: 3280067 - DNA, 25 bp, Homo sapien
tacactgggtttatgagtatgcgac

SEQ ID NO: 3280068 - DNA, 25 bp, Homo sapien
cagctcacctattgtgcaattccgt

SEQ ID NO: 3280069 - DNA, 25 bp, Homo sapien
agctcacctattgtgcaattccgtt

SEQ ID NO: 3280070 - DNA, 25 bp, Homo sapien
ctcacctattgtgcaattccgttta

SEQ ID NO: 3280071 - DNA, 25 bp, Homo sapien
gctcacctattgtgcaattccgttt

SEQ ID NO: 3280072 - DNA, 25 bp, Homo sapien
tccaaatgacagatgtgaaactggg

SEQ ID NO: 3280073 - DNA, 25 bp, Homo sapien
ccggtagtgtgtcccgcagggacgc

SEQ ID NO: 3280074 - DNA, 25 bp, Homo sapien
aaggagggtgatgctagccatgtca

SEQ ID NO: 3280075 - DNA, 25 bp, Homo sapien
tagtgtgtcccgcagggacgccgac

SEQ ID NO: 3280076 - DNA, 25 bp, Homo sapien
accgtggagtaatggccaggtaact

SEQ ID NO: 3280077 - DNA, 25 bp, Homo sapien
ccctcacgggaaccgtggagtaatg

SEQ ID NO: 3280078 - DNA, 25 bp, Homo sapien
cggaatgcaggagcggctcttgtgc

SEQ ID NO: 3280079 - DNA, 25 bp, Homo sapien
tatcggccatgacgggggcctcttc

SEQ ID NO: 3280080 - DNA, 25 bp, Homo sapien
tgggctagtagattggccagggctt

SEQ ID NO: 3280081 - DNA, 25 bp, Homo sapien
ggctagtagattggccagggcttcg

SEQ ID NO: 3280082 - DNA, 25 bp, Homo sapien
gtgggctagtagattggccagggct

SEQ ID NO: 3280083 - DNA, 25 bp, Homo sapien
ctagtagattggccagggcttcgaa

SEQ ID NO: 3280084 - DNA, 25 bp, Homo sapien
tgagtttgtaggtgatacctgggtg

SEQ ID NO: 3280085 - DNA, 25 bp, Homo sapien
gtaggtgatacctgggtgcctggaa

SEQ ID NO: 3280086 - DNA, 25 bp, Homo sapien
agtttgtaggtgatacctgggtgcc

SEQ ID NO: 3280087 - DNA, 25 bp, Homo sapien
tttgtaggtgatacctgggtgcctg

SEQ ID NO: 3280088 - DNA, 25 bp, Homo sapien
aagctgtggaattctgttgatggtg

SEQ ID NO: 3280089 - DNA, 25 bp, Homo sapien
cgggatgatgtagagtacttccaca

SEQ ID NO: 3280090 - DNA, 25 bp, Homo sapien
gtaaagctgtggaattctgttgatg

SEQ ID NO: 3280091 - DNA, 25 bp, Homo sapien
gccctgcgggatgatgtagagtact

SEQ ID NO: 3280092 - DNA, 25 bp, Homo sapien
caagtccacgcagagtccgccaaag

SEQ ID NO: 3280093 - DNA, 25 bp, Homo sapien
ggctccggccgctgatccgctccgc

SEQ ID NO: 3280094 - DNA, 25 bp, Homo sapien
gagtccgccaaaggctccggccgct

SEQ ID NO: 3280095 - DNA, 25 bp, Homo sapien
tccaagtcgcaagacgccgtgagct

SEQ ID NO: 3280096 - DNA, 25 bp, Homo sapien
aaggagggtgatgctagccatgtca

SEQ ID NO: 3280097 - DNA, 25 bp, Homo sapien
ggaaggagggtgatgctagccatgt

SEQ ID NO: 3280098 - DNA, 25 bp, Homo sapien
tgtcaccggtagtgtgtctcgcagg

SEQ ID NO: 3280099 - DNA, 25 bp, Homo sapien
tagtgtgtctcgcagggacgccgac

SEQ ID NO: 3280100 - DNA, 25 bp, Homo sapien
ccctcacgggaaccgtggagtaatg

SEQ ID NO: 3280101 - DNA, 25 bp, Homo sapien
accgtggagtaatggccaggtaact

SEQ ID NO: 3280102 - DNA, 25 bp, Homo sapien
tatcggccatgacgggggcctcttc

SEQ ID NO: 3280103 - DNA, 25 bp, Homo sapien
cggaatgcaggagcggctcttgtgc

SEQ ID NO: 3280104 - DNA, 25 bp, Homo sapien
tgagtttgtaggtgatacctgggtg

SEQ ID NO: 3280105 - DNA, 25 bp, Homo sapien
gtaggtgatacctgggtgcctggaa

SEQ ID NO: 3280106 - DNA, 25 bp, Homo sapien
agtttgtaggtgatacctgggtgcc

SEQ ID NO: 3280107 - DNA, 25 bp, Homo sapien
tttgtaggtgatacctgggtgcctg

SEQ ID NO: 3280108 - DNA, 25 bp, Homo sapien
tccgttgcaggcacccagaaatcac

SEQ ID NO: 3280109 - DNA, 25 bp, Homo sapien
accaatttcactgcgttactcccca

SEQ ID NO: 3280110 - DNA, 25 bp, Homo sapien
gtcagttccaggcaccccggaaaca

SEQ ID NO: 3280111 - DNA, 25 bp, Homo sapien
tctagcacgtctttatctccaaccc

SEQ ID NO: 3280112 - DNA, 25 bp, Homo sapien
ctttcctaaccaagcaggacagtca

SEQ ID NO: 3280113 - DNA, 25 bp, Homo sapien
ctaaccaagcaggacagtcactcat

SEQ ID NO: 3280114 - DNA, 25 bp, Homo sapien
ccctttcctaaccaagcaggacagt

SEQ ID NO: 3280115 - DNA, 25 bp, Homo sapien
tcctaaccaagcaggacagtcactc

SEQ ID NO: 3280116 - DNA, 25 bp, Homo sapien
cagctggagtcagttccaggcaacc

SEQ ID NO: 3280117 - DNA, 25 bp, Homo sapien
gctggagtcagttccaggcaacccg

SEQ ID NO: 3280118 - DNA, 25 bp, Homo sapien
agctggagtcagttccaggcaaccc

SEQ ID NO: 3280119 - DNA, 25 bp, Homo sapien
tggagtcagttccaggcaacccgga

SEQ ID NO: 3280120 - DNA, 25 bp, Homo sapien
tactctccagtctctctcatgtctt

SEQ ID NO: 3280121 - DNA, 25 bp, Homo sapien
ccaatttcactcaattactctccag

SEQ ID NO: 3280122 - DNA, 25 bp, Homo sapien
tccagtctctctcatgtcttcacca

SEQ ID NO: 3280123 - DNA, 25 bp, Homo sapien
agtctctctcatgtcttcaccagcc

SEQ ID NO: 3280124 - DNA, 25 bp, Homo sapien
aaccacgcccacattgcagctggag

SEQ ID NO: 3280125 - DNA, 25 bp, Homo sapien
acgcccacattgcagctggagtcag

SEQ ID NO: 3280126 - DNA, 25 bp, Homo sapien
ctactctccaaccacgcccacattg

SEQ ID NO: 3280127 - DNA, 25 bp, Homo sapien
gtcccagctactctccaaccacgcc

SEQ ID NO: 3280128 - DNA, 25 bp, Homo sapien
atggccgatatcaccacccagtcta

SEQ ID NO: 3280129 - DNA, 25 bp, Homo sapien
gacacactgcccgtgacatggctag

SEQ ID NO: 3280130 - DNA, 25 bp, Homo sapien
tcggcgtccctgtgggacacactgc

SEQ ID NO: 3280131 - DNA, 25 bp, Homo sapien
gaggcccctgtcatggccgatatca

SEQ ID NO: 3280132 - DNA, 25 bp, Homo sapien
cacctctccgcggtgcgggtttctt

SEQ ID NO: 3280133 - DNA, 25 bp, Homo sapien
caggcctagaaccagggtcgcctgg

SEQ ID NO: 3280134 - DNA, 25 bp, Homo sapien
ctagtggcccgagactctccctgag

SEQ ID NO: 3280135 - DNA, 25 bp, Homo sapien
tcatgggctttccaccgtgttgggg

SEQ ID NO: 3280136 - DNA, 25 bp, Homo sapien
tgggccttctgcctctctgcgcctg

SEQ ID NO: 3280137 - DNA, 25 bp, Homo sapien
gctgtgggcctctctgcgcctttcg

SEQ ID NO: 3280138 - DNA, 25 bp, Homo sapien
cggcgctgtgggcctctctgcgcct

SEQ ID NO: 3280139 - DNA, 25 bp, Homo sapien
gcgctgtgggcctctctgcgccttt

SEQ ID NO: 3280140 - DNA, 25 bp, Homo sapien
ctgtgggcctctctgcgcctttcgc

SEQ ID NO: 3280141 - DNA, 25 bp, Homo sapien
tttgacatggaactgttagctttca

SEQ ID NO: 3280142 - DNA, 25 bp, Homo sapien
aactgttagctttcaatgctgctgc

SEQ ID NO: 3280143 - DNA, 25 bp, Homo sapien
tttgtagaatttacgttccacatct

SEQ ID NO: 3280144 - DNA, 25 bp, Homo sapien
tattcttctaactcagttgtaacgt

SEQ ID NO: 3280145 - DNA, 25 bp, Homo sapien
ttagtgaagctgtattatatccttg

SEQ ID NO: 3280146 - DNA, 25 bp, Homo sapien
attgttttttatattgtgcttgttc

SEQ ID NO: 3280147 - DNA, 25 bp, Homo sapien
agtgaagctgtattatatccttgtt

SEQ ID NO: 3280148 - DNA, 25 bp, Homo sapien
ccttgtttaactgctctaattgttt

SEQ ID NO: 3280149 - DNA, 25 bp, Homo sapien
tgtagtttactaagttctaccatac

SEQ ID NO: 3280150 - DNA, 25 bp, Homo sapien
gccagcattgccctttcatctagct

SEQ ID NO: 3280151 - DNA, 25 bp, Homo sapien
cagcattgccctttcatctagctct

SEQ ID NO: 3280152 - DNA, 25 bp, Homo sapien
tactaagttctaccatactgttttc

SEQ ID NO: 3280153 - DNA, 25 bp, Homo sapien
tgacacattttgaagatactgcttc

SEQ ID NO: 3280154 - DNA, 25 bp, Homo sapien
ctgttgaaaaacttgattctcttta

SEQ ID NO: 3280155 - DNA, 25 bp, Homo sapien
ttgaaaaacttgattctctttaggc

SEQ ID NO: 3280156 - DNA, 25 bp, Homo sapien
gaaaaacttgattctctttaggcaa

SEQ ID NO: 3280157 - DNA, 25 bp, Homo sapien
ccgccataagatcatcaaattgcat

SEQ ID NO: 3280158 - DNA, 25 bp, Homo sapien
tccgccataagatcatcaaattgca

SEQ ID NO: 3280159 - DNA, 25 bp, Homo sapien
tctccgccataagatcatcaaattg

SEQ ID NO: 3280160 - DNA, 25 bp, Homo sapien
cttctccgccataagatcatcaaat

SEQ ID NO: 3280161 - DNA, 25 bp, Homo sapien
aatagtatagcttgataatgaagta

SEQ ID NO: 3280162 - DNA, 25 bp, Homo sapien
tagtatagcttgataatgaagtagg

SEQ ID NO: 3280163 - DNA, 25 bp, Homo sapien
gaataaaatagtatagcttgataat

SEQ ID NO: 3280164 - DNA, 25 bp, Homo sapien
aaaatagtatagcttgataatgaag

SEQ ID NO: 3280165 - DNA, 25 bp, Homo sapien
gcttactgcaaataccacctcctgg

SEQ ID NO: 3280166 - DNA, 25 bp, Homo sapien
ctcggcttactgcaaataccacctc

SEQ ID NO: 3280167 - DNA, 25 bp, Homo sapien
agccctctttttcttttatgatgaa

SEQ ID NO: 3280168 - DNA, 25 bp, Homo sapien
cacggcacccagccctctttttctt

SEQ ID NO: 3280169 - DNA, 25 bp, Homo sapien
gacaagctgcacccagaactgttca

SEQ ID NO: 3280170 - DNA, 25 bp, Homo sapien
acaagctgcacccagaactgttcag

SEQ ID NO: 3280171 - DNA, 25 bp, Homo sapien
agctgcacccagaactgttcagctg

SEQ ID NO: 3280172 - DNA, 25 bp, Homo sapien
caagctgcacccagaactgttcagc

SEQ ID NO: 3280173 - DNA, 25 bp, Homo sapien
aaatatgtgatttaacaagtctcct

SEQ ID NO: 3280174 - DNA, 25 bp, Homo sapien
ctgtattaaactaattggtttagat

SEQ ID NO: 3280175 - DNA, 25 bp, Homo sapien
tgatatataattgctaaaaacacac

SEQ ID NO: 3280176 - DNA, 25 bp, Homo sapien
acacacttagaatataaaccttact

SEQ ID NO: 3280177 - DNA, 25 bp, Homo sapien
taaggtcaatgagagaacagtcaga

SEQ ID NO: 3280178 - DNA, 25 bp, Homo sapien
ctaacacataaggtcaatgagagaa

SEQ ID NO: 3280179 - DNA, 25 bp, Homo sapien
cacataaggtcaatgagagaacagt

SEQ ID NO: 3280180 - DNA, 25 bp, Homo sapien
cataaggtcaatgagagaacagtca

SEQ ID NO: 3280181 - DNA, 25 bp, Homo sapien
tttttaggctgtcagccgcttcttg

SEQ ID NO: 3280182 - DNA, 25 bp, Homo sapien
tgacatgctaagttccatacatact

SEQ ID NO: 3280183 - DNA, 25 bp, Homo sapien
atgtgataatgtgatatacttccag

SEQ ID NO: 3280184 - DNA, 25 bp, Homo sapien
ttctttgggacctgtgtctcatcca

SEQ ID NO: 3280185 - DNA, 25 bp, Homo sapien
gaaaatatttatcttccttgatact

SEQ ID NO: 3280186 - DNA, 25 bp, Homo sapien
agtttgaaaatatttatcttccttg

SEQ ID NO: 3280187 - DNA, 25 bp, Homo sapien
aatatttatcttccttgatacttac

SEQ ID NO: 3280188 - DNA, 25 bp, Homo sapien
gtttgaaaatatttatcttccttga

SEQ ID NO: 3280189 - DNA, 25 bp, Homo sapien
catctagttgctgttcaatgcacgg

SEQ ID NO: 3280190 - DNA, 25 bp, Homo sapien
tctagttgctgttcaatgcacggat

SEQ ID NO: 3280191 - DNA, 25 bp, Homo sapien
ttcaatgcacggattttcatgttgg

SEQ ID NO: 3280192 - DNA, 25 bp, Homo sapien
cactttagcttctgcattttcatac

SEQ ID NO: 3280193 - DNA, 25 bp, Homo sapien
ttgctgctgtgtttggcttaggtcg

SEQ ID NO: 3280194 - DNA, 25 bp, Homo sapien
ttcctttatttgctgctgtgtttgg

SEQ ID NO: 3280195 - DNA, 25 bp, Homo sapien
cctttatttgctgctgtgtttggct

SEQ ID NO: 3280196 - DNA, 25 bp, Homo sapien
ttatttgctgctgtgtttggcttag

SEQ ID NO: 3280197 - DNA, 25 bp, Homo sapien
cagcagtcagtctagactgatgatt

SEQ ID NO: 3280198 - DNA, 25 bp, Homo sapien
attgctgaggatacgttttcccaac

SEQ ID NO: 3280199 - DNA, 25 bp, Homo sapien
tgctgaggatacgttttcccaacct

SEQ ID NO: 3280200 - DNA, 25 bp, Homo sapien
gaaattgctgaggatacgttttccc

SEQ ID NO: 3280201 - DNA, 25 bp, Homo sapien
tgggaaattgctgaggatacgtttt

SEQ ID NO: 3280202 - DNA, 25 bp, Homo sapien
ggcggactctgcgtggacttggagc

SEQ ID NO: 3280203 - DNA, 25 bp, Homo sapien
tttggcggactctgcgtggacttgg

SEQ ID NO: 3280204 - DNA, 25 bp, Homo sapien
gactctgcgtggacttggagctcac

SEQ ID NO: 3280205 - DNA, 25 bp, Homo sapien
cggactctgcgtggacttggagctc

SEQ ID NO: 3280206 - DNA, 25 bp, Homo sapien
tctgaggattcctcagagtccccac

SEQ ID NO: 3280207 - DNA, 25 bp, Homo sapien
aatgaagccatcgggctctcccgtg

SEQ ID NO: 3280208 - DNA, 25 bp, Homo sapien
gattcctcagagtccccacgttcat

SEQ ID NO: 3280209 - DNA, 25 bp, Homo sapien
ctcagagtccccacgttcatcaata

SEQ ID NO: 3280210 - DNA, 25 bp, Homo sapien
ctaaccaagcaggacagtcactcat

SEQ ID NO: 3280211 - DNA, 25 bp, Homo sapien
ccctttcctaaccaagcaggacagt

SEQ ID NO: 3280212 - DNA, 25 bp, Homo sapien
tcctaaccaagcaggacagtcactc

SEQ ID NO: 3280213 - DNA, 25 bp, Homo sapien
ctttcctaaccaagcaggacagtca

SEQ ID NO: 3280214 - DNA, 25 bp, Homo sapien
cggcgctgtgggcctctctgcgcct

SEQ ID NO: 3280215 - DNA, 25 bp, Homo sapien
acttcagatatacagcgaaggcgga

SEQ ID NO: 3280216 - DNA, 25 bp, Homo sapien
cacagacccgggggacaccgctaag

SEQ ID NO: 3280217 - DNA, 25 bp, Homo sapien
atatacagcgaaggcggagcagtgt

SEQ ID NO: 3280218 - DNA, 25 bp, Homo sapien
cagatatacagcgaaggcggagcag

SEQ ID NO: 3280219 - DNA, 25 bp, Homo sapien
tcattctgtgaggaacaaccaaatt

SEQ ID NO: 3280220 - DNA, 25 bp, Homo sapien
tttccgcagcaagggcatcattttc

SEQ ID NO: 3280221 - DNA, 25 bp, Homo sapien
caaccaaattgttttccgcagcaag

SEQ ID NO: 3280222 - DNA, 25 bp, Homo sapien
caaactttgctcttagcagtgcctt

SEQ ID NO: 3280223 - DNA, 25 bp, Homo sapien
gcgccgggcgactcccaagctggct

SEQ ID NO: 3280224 - DNA, 25 bp, Homo sapien
cggctgcaccgggacaggaaccgac

SEQ ID NO: 3280225 - DNA, 25 bp, Homo sapien
gtggctgcgaccaaaccaggcggtc

SEQ ID NO: 3280226 - DNA, 25 bp, Homo sapien
cagcctcgcagaactggggctagat

SEQ ID NO: 3280227 - DNA, 25 bp, Homo sapien
gacactgcatttctaccattcaatt

SEQ ID NO: 3280228 - DNA, 25 bp, Homo sapien
taggacactgcatttctaccattca

SEQ ID NO: 3280229 - DNA, 25 bp, Homo sapien
ttaggacactgcatttctaccattc

SEQ ID NO: 3280230 - DNA, 25 bp, Homo sapien
ggacactgcatttctaccattcaat

SEQ ID NO: 3280231 - DNA, 25 bp, Homo sapien
tctgttgaagatgattccgtggaga

SEQ ID NO: 3280232 - DNA, 25 bp, Homo sapien
gtctgttgaagatgattccgtggag

SEQ ID NO: 3280233 - DNA, 25 bp, Homo sapien
tcgagtccacggtgagaccttctgt

SEQ ID NO: 3280234 - DNA, 25 bp, Homo sapien
gtgacatttctcatatcagctctcg

SEQ ID NO: 3280235 - DNA, 25 bp, Homo sapien
cattcctgtcagctctcgactccat

SEQ ID NO: 3280236 - DNA, 25 bp, Homo sapien
atggtggtgacattcctgtcagctc

SEQ ID NO: 3280237 - DNA, 25 bp, Homo sapien
tacttttcttgtgcaaggatcatgg

SEQ ID NO: 3280238 - DNA, 25 bp, Homo sapien
gaagatgaggagtccttggagagca

SEQ ID NO: 3280239 - DNA, 25 bp, Homo sapien
aagatgctaagagggaactccgtgg

SEQ ID NO: 3280240 - DNA, 25 bp, Homo sapien
ctggccaaggtactgagggaagagc

SEQ ID NO: 3280241 - DNA, 25 bp, Homo sapien
taagagggaactccgtggtgtgtct

SEQ ID NO: 3280242 - DNA, 25 bp, Homo sapien
cagaataaagatgctaagagggaac

SEQ ID NO: 3280243 - DNA, 25 bp, Homo sapien
tcagaccacttgctattttaggcac

SEQ ID NO: 3280244 - DNA, 25 bp, Homo sapien
tttttcagatactactcagctggcc

SEQ ID NO: 3280245 - DNA, 25 bp, Homo sapien
tcagctggccactgaacctaaccag

SEQ ID NO: 3280246 - DNA, 25 bp, Homo sapien
aaagaccatgggtgtttgtactgga

SEQ ID NO: 3280247 - DNA, 25 bp, Homo sapien
taagtgcacctagtacactgcaatg

SEQ ID NO: 3280248 - DNA, 25 bp, Homo sapien
taagtagaggactcgtaagtgcacc

SEQ ID NO: 3280249 - DNA, 25 bp, Homo sapien
tatgtctgaacctttgcctggagtt

SEQ ID NO: 3280250 - DNA, 25 bp, Homo sapien
caatggcacagacacggcagatagt

SEQ ID NO: 3280251 - DNA, 25 bp, Homo sapien
ttcaattaatccaggccgagtgcag

SEQ ID NO: 3280252 - DNA, 25 bp, Homo sapien
gaacaccattctccaattaaaggaa

SEQ ID NO: 3280253 - DNA, 25 bp, Homo sapien
gctccttggggacatatttgatatc

SEQ ID NO: 3280254 - DNA, 25 bp, Homo sapien
tcccagtaacaatgagaacaccatt

SEQ ID NO: 3280255 - DNA, 25 bp, Homo sapien
catggaggcatgttatctaagtgca

SEQ ID NO: 3280256 - DNA, 25 bp, Homo sapien
tgcaatggagaacatgcattgtatc

SEQ ID NO: 3280257 - DNA, 25 bp, Homo sapien
ggatatgtacaataacaccccaaca

SEQ ID NO: 3280258 - DNA, 25 bp, Homo sapien
gcattgtatcatgaaccagagatgg

SEQ ID NO: 3280259 - DNA, 25 bp, Homo sapien
ctgctgtgttggacacttgctccca

SEQ ID NO: 3280260 - DNA, 25 bp, Homo sapien
gggtaagccacatctaacgaagaga

SEQ ID NO: 3280261 - DNA, 25 bp, Homo sapien
cgaagagaatatttaaccataacgt

SEQ ID NO: 3280262 - DNA, 25 bp, Homo sapien
taaacgcacacttagtcaactgaag

SEQ ID NO: 3280263 - DNA, 25 bp, Homo sapien
tgtagttcaaccgtattttgtatgg

SEQ ID NO: 3280264 - DNA, 25 bp, Homo sapien
ttagcatttcatggatgacttgtgt

SEQ ID NO: 3280265 - DNA, 25 bp, Homo sapien
ttcatggatgacttgtgtttgaaca

SEQ ID NO: 3280266 - DNA, 25 bp, Homo sapien
gttcaaccgtattttgtatggagat

SEQ ID NO: 3280267 - DNA, 25 bp, Homo sapien
gttctggattagtcttcctgtagcc

SEQ ID NO: 3280268 - DNA, 25 bp, Homo sapien
gcctctgtgttgtgtctttagatcg

SEQ ID NO: 3280269 - DNA, 25 bp, Homo sapien
cctctgtgttgtgtctttagatcgg

SEQ ID NO: 3280270 - DNA, 25 bp, Homo sapien
ctctgtgttgtgtctttagatcggg

SEQ ID NO: 3280271 - DNA, 25 bp, Homo sapien
tgcctgttttgtgctgacagtcgtc

SEQ ID NO: 3280272 - DNA, 25 bp, Homo sapien
cctgttttgtgctgacagtcgtctc

SEQ ID NO: 3280273 - DNA, 25 bp, Homo sapien
ggtgcctgttttgtgctgacagtcg

SEQ ID NO: 3280274 - DNA, 25 bp, Homo sapien
cgggtgcctgttttgtgctgacagt

SEQ ID NO: 3280275 - DNA, 25 bp, Homo sapien
aaagagctcactgacagtgtggaat

SEQ ID NO: 3280276 - DNA, 25 bp, Homo sapien
agctcactgacagtgtggaatgcat

SEQ ID NO: 3280277 - DNA, 25 bp, Homo sapien
gagctcactgacagtgtggaatgca

SEQ ID NO: 3280278 - DNA, 25 bp, Homo sapien
tggcaaagagctcactgacagtgtg

SEQ ID NO: 3280279 - DNA, 25 bp, Homo sapien
tcagagacctttgtagcagtccttg

SEQ ID NO: 3280280 - DNA, 25 bp, Homo sapien
tactgcctacatcgaacagcctgtg

SEQ ID NO: 3280281 - DNA, 25 bp, Homo sapien
aagagttgtactgcctacatcgaac

SEQ ID NO: 3280282 - DNA, 25 bp, Homo sapien
tgcagcctcaggacactactgcctg

SEQ ID NO: 3280283 - DNA, 25 bp, Homo sapien
ctgttggtgggcttattaatctgga

SEQ ID NO: 3280284 - DNA, 25 bp, Homo sapien
tctggaggatcgtggcctcttgtgt

SEQ ID NO: 3280285 - DNA, 25 bp, Homo sapien
tgtgagctgttggtgggcttattaa

SEQ ID NO: 3280286 - DNA, 25 bp, Homo sapien
tgggcttattaatctggagtctgga

SEQ ID NO: 3280287 - DNA, 25 bp, Homo sapien
gtcctcgtcagtggagtcctggtca

SEQ ID NO: 3280288 - DNA, 25 bp, Homo sapien
aatggagtcatgataggtggaacct

SEQ ID NO: 3280289 - DNA, 25 bp, Homo sapien
cagcgggaatctagttagtgaggcc

SEQ ID NO: 3280290 - DNA, 25 bp, Homo sapien
tcgtctgtgggaccagacaatggag

SEQ ID NO: 3280291 - DNA, 25 bp, Homo sapien
tttcagtacagtggacagcttagca

SEQ ID NO: 3280292 - DNA, 25 bp, Homo sapien
tatgtcattatagactggctactgc

SEQ ID NO: 3280293 - DNA, 25 bp, Homo sapien
ccaaagtcagatagttgaaagagat

SEQ ID NO: 3280294 - DNA, 25 bp, Homo sapien
tgctctacatgactgtgaccaaagt

SEQ ID NO: 3280295 - DNA, 25 bp, Homo sapien
ctcagctaagcatggccacactaca

SEQ ID NO: 3280296 - DNA, 25 bp, Homo sapien
tcagctaagcatggccacactacaa

SEQ ID NO: 3280297 - DNA, 25 bp, Homo sapien
tttgtgttctggtgatgaagtctct

SEQ ID NO: 3280298 - DNA, 25 bp, Homo sapien
tgtgttctggtgatgaagtctctgc

SEQ ID NO: 3280299 - DNA, 25 bp, Homo sapien
ttgtgttctggtgatgaagtctctg

SEQ ID NO: 3280300 - DNA, 25 bp, Homo sapien
gagttgacagtacaacacatgccac

SEQ ID NO: 3280301 - DNA, 25 bp, Homo sapien
gtccatgtgttaggctcagtccgca

SEQ ID NO: 3280302 - DNA, 25 bp, Homo sapien
tacagatgtgtgtgacggacaatgc

SEQ ID NO: 3280303 - DNA, 25 bp, Homo sapien
tattgaaaaatcagggcaggactca

SEQ ID NO: 3280304 - DNA, 25 bp, Homo sapien
agcgcggccctgtatttctgtctga

SEQ ID NO: 3280305 - DNA, 25 bp, Homo sapien
tgcgctgctctattctttgggaaac

SEQ ID NO: 3280306 - DNA, 25 bp, Homo sapien
tttgggaaacacttcgcgtgctttg

SEQ ID NO: 3280307 - DNA, 25 bp, Homo sapien
ttccagcagctggtacgagccgccc

SEQ ID NO: 3280308 - DNA, 25 bp, Homo sapien
tgctttgtttcagacgccgacccat

SEQ ID NO: 3280309 - DNA, 25 bp, Homo sapien
tcttcacgcttaggttcttggtccc

SEQ ID NO: 3280310 - DNA, 25 bp, Homo sapien
aactcgtgctttattccccggccag

SEQ ID NO: 3280311 - DNA, 25 bp, Homo sapien
ctgtggaaacgggtcccggcatgca

SEQ ID NO: 3280312 - DNA, 25 bp, Homo sapien
tgagttcccagggacggagcgactc

SEQ ID NO: 3280313 - DNA, 25 bp, Homo sapien
gaataaatgcttggtcttgtaccat

SEQ ID NO: 3280314 - DNA, 25 bp, Homo sapien
aggatctgggatttctgagtctctt

SEQ ID NO: 3280315 - DNA, 25 bp, Homo sapien
ggatctgggatttctgagtctcttc

SEQ ID NO: 3280316 - DNA, 25 bp, Homo sapien
tgagtcccagcaggatcaggatctg

SEQ ID NO: 3280317 - DNA, 25 bp, Homo sapien
cttcttggaatgagtcccagcagga

SEQ ID NO: 3280318 - DNA, 25 bp, Homo sapien
gctctgcaatctttttcctggacct

SEQ ID NO: 3280319 - DNA, 25 bp, Homo sapien
tgcaatctttttcctggaccttggc

SEQ ID NO: 3280320 - DNA, 25 bp, Homo sapien
tctgcaatctttttcctggaccttg

SEQ ID NO: 3280321 - DNA, 25 bp, Homo sapien
gcaatctttttcctggaccttggcc

SEQ ID NO: 3280322 - DNA, 25 bp, Homo sapien
cttcctttatgataccacctcctac

SEQ ID NO: 3280323 - DNA, 25 bp, Homo sapien
ttcctttatgataccacctcctaca

SEQ ID NO: 3280324 - DNA, 25 bp, Homo sapien
tcctttatgataccacctcctacat

SEQ ID NO: 3280325 - DNA, 25 bp, Homo sapien
cttgcctggatctgagtttgcctca

SEQ ID NO: 3280326 - DNA, 25 bp, Homo sapien
cagtgcctgaactaggatggctgtt

SEQ ID NO: 3280327 - DNA, 25 bp, Homo sapien
tgctgtgtggtcctaagtcaattcc

SEQ ID NO: 3280328 - DNA, 25 bp, Homo sapien
gccagccatgtgagagtcagtgagt

SEQ ID NO: 3280329 - DNA, 25 bp, Homo sapien
tgagctaacccagtacatgctagga

SEQ ID NO: 3280330 - DNA, 25 bp, Homo sapien
gctggctgtttataactgcatcgca

SEQ ID NO: 3280331 - DNA, 25 bp, Homo sapien
cagcatgtccattgcaggcagtgga

SEQ ID NO: 3280332 - DNA, 25 bp, Homo sapien
tggacaagaaaccaccagcattgag

SEQ ID NO: 3280333 - DNA, 25 bp, Homo sapien
caagtaaatgctgtcgtggtcagca

SEQ ID NO: 3280334 - DNA, 25 bp, Homo sapien
taaaacttctttcgggtgacatgtg

SEQ ID NO: 3280335 - DNA, 25 bp, Homo sapien
caagatccgtgatttgaacatgtga

SEQ ID NO: 3280336 - DNA, 25 bp, Homo sapien
tagagatgacatgttttcaccccaa

SEQ ID NO: 3280337 - DNA, 25 bp, Homo sapien
tggactcctctgacctggaggattt

SEQ ID NO: 3280338 - DNA, 25 bp, Homo sapien
cacaactccactttggatatgcctt

SEQ ID NO: 3280339 - DNA, 25 bp, Homo sapien
tgttttgtgtcaccccacaaaatgg

SEQ ID NO: 3280340 - DNA, 25 bp, Homo sapien
tgacacaactccactttggatatgc

SEQ ID NO: 3280341 - DNA, 25 bp, Homo sapien
cttgtggcagagatggaacaggtcc

SEQ ID NO: 3280342 - DNA, 25 bp, Homo sapien
ggcagcagctccatgaatgggccca

SEQ ID NO: 3280343 - DNA, 25 bp, Homo sapien
tgggcccaggagcacgtggctaggg

SEQ ID NO: 3280344 - DNA, 25 bp, Homo sapien
ctagcttgtggcagagatggaacag

SEQ ID NO: 3280345 - DNA, 25 bp, Homo sapien
agcctgctgcctagagtctgcatag

SEQ ID NO: 3280346 - DNA, 25 bp, Homo sapien
tatgtacttgggacccaaggtcctg

SEQ ID NO: 3280347 - DNA, 25 bp, Homo sapien
cctaaagaagcaatctggccaagat

SEQ ID NO: 3280348 - DNA, 25 bp, Homo sapien
caagatctgccatagccgctgtgct

SEQ ID NO: 3280349 - DNA, 25 bp, Homo sapien
ctctttatccggattttgccacaga

SEQ ID NO: 3280350 - DNA, 25 bp, Homo sapien
agcttgtctctttatccggattttg

SEQ ID NO: 3280351 - DNA, 25 bp, Homo sapien
ttgtctctttatccggattttgcca

SEQ ID NO: 3280352 - DNA, 25 bp, Homo sapien
cccacagcttgtctctttatccgga

SEQ ID NO: 3280353 - DNA, 25 bp, Homo sapien
gactttcttgttggctttaatcatt

SEQ ID NO: 3280354 - DNA, 25 bp, Homo sapien
tagtgggtcccatatttattgataa

SEQ ID NO: 3280355 - DNA, 25 bp, Homo sapien
gggaggcaccatagtgggtcccata

SEQ ID NO: 3280356 - DNA, 25 bp, Homo sapien
gctttaatcatttcaccaccaactg

SEQ ID NO: 3280357 - DNA, 25 bp, Homo sapien
gaagagacgcccactgaatgtgcac

SEQ ID NO: 3280358 - DNA, 25 bp, Homo sapien
ttctagaatcatcgccctcaagtgg

SEQ ID NO: 3280359 - DNA, 25 bp, Homo sapien
tatggaacctcgctgtagtgggctg

SEQ ID NO: 3280360 - DNA, 25 bp, Homo sapien
cattggaatcataacggcttgagcc

SEQ ID NO: 3280361 - DNA, 25 bp, Homo sapien
tccatgtcatcgtagaagccctcgt

SEQ ID NO: 3280362 - DNA, 25 bp, Homo sapien
tccccagagtagaaatgcccgtgtg

SEQ ID NO: 3280363 - DNA, 25 bp, Homo sapien
tttgaatacgcgttgtccaggccag

SEQ ID NO: 3280364 - DNA, 25 bp, Homo sapien
ggagcgtcctcttttttgccggcag

SEQ ID NO: 3280365 - DNA, 25 bp, Homo sapien
tcacactgccagttattatcagcca

SEQ ID NO: 3280366 - DNA, 25 bp, Homo sapien
tcagccaagtcaaccactagatggg

SEQ ID NO: 3280367 - DNA, 25 bp, Homo sapien
agactgccacactatcatcacactg

SEQ ID NO: 3280368 - DNA, 25 bp, Homo sapien
gatggggaaattctagagctatgat

SEQ ID NO: 3280369 - DNA, 25 bp, Homo sapien
taatcagagcattgttgctaaggtc

SEQ ID NO: 3280370 - DNA, 25 bp, Homo sapien
gagcattgttgctaaggtctatgac

SEQ ID NO: 3280371 - DNA, 25 bp, Homo sapien
tcagagcattgttgctaaggtctat

SEQ ID NO: 3280372 - DNA, 25 bp, Homo sapien
tggtaatcagagcattgttgctaag

SEQ ID NO: 3280373 - DNA, 25 bp, Homo sapien
tcttggtgcctgagcccctgctaca

SEQ ID NO: 3280374 - DNA, 25 bp, Homo sapien
ctcttggtgcctgagcccctgctac

SEQ ID NO: 3280375 - DNA, 25 bp, Homo sapien
cctcttggtgcctgagcccctgcta

SEQ ID NO: 3280376 - DNA, 25 bp, Homo sapien
gattaactgcaacgcgccagagaca

SEQ ID NO: 3280377 - DNA, 25 bp, Homo sapien
aattggcaccttgggagattaactg

SEQ ID NO: 3280378 - DNA, 25 bp, Homo sapien
caccttgggagattaactgcaacgc

SEQ ID NO: 3280379 - DNA, 25 bp, Homo sapien
ggagattaactgcaacgcgccagag

SEQ ID NO: 3280380 - DNA, 25 bp, Homo sapien
gacatcttagcatcagccagggtgg

SEQ ID NO: 3280381 - DNA, 25 bp, Homo sapien
catattgcataagacccctgggacc

SEQ ID NO: 3280382 - DNA, 25 bp, Homo sapien
tcagaggcccatctagtccacggtt

SEQ ID NO: 3280383 - DNA, 25 bp, Homo sapien
tcttgtagcttagggagacagcctc

SEQ ID NO: 3280384 - DNA, 25 bp, Homo sapien
gaaaatcagaccaccctatttgcaa

SEQ ID NO: 3280385 - DNA, 25 bp, Homo sapien
tccagttgcaggcagttgtgaaaat

SEQ ID NO: 3280386 - DNA, 25 bp, Homo sapien
ttaaacagagattctccagttgcag

SEQ ID NO: 3280387 - DNA, 25 bp, Homo sapien
ccattgaatgacagatccaaactct

SEQ ID NO: 3280388 - DNA, 25 bp, Homo sapien
atggcttcccaactctggtctgcag

SEQ ID NO: 3280389 - DNA, 25 bp, Homo sapien
gcttcccaactctggtctgcagaaa

SEQ ID NO: 3280390 - DNA, 25 bp, Homo sapien
cagaagctgtttgataggctagatg

SEQ ID NO: 3280391 - DNA, 25 bp, Homo sapien
ttgataggctagatggcttcccaac

SEQ ID NO: 3280392 - DNA, 25 bp, Homo sapien
attcacacagaaagtaggctccacg

SEQ ID NO: 3280393 - DNA, 25 bp, Homo sapien
cacacagaaagtaggctccacgttc

SEQ ID NO: 3280394 - DNA, 25 bp, Homo sapien
cacagaaagtaggctccacgttcat

SEQ ID NO: 3280395 - DNA, 25 bp, Homo sapien
ttcacacagaaagtaggctccacgt

SEQ ID NO: 3280396 - DNA, 25 bp, Homo sapien
gagcaccttcagcaatggaaacctg

SEQ ID NO: 3280397 - DNA, 25 bp, Homo sapien
tgaggtttaacacttccaaagcatg

SEQ ID NO: 3280398 - DNA, 25 bp, Homo sapien
cccatgaggacttaggactgagtag

SEQ ID NO: 3280399 - DNA, 25 bp, Homo sapien
gactgagtagatccaatgagaggga

SEQ ID NO: 3280400 - DNA, 25 bp, Homo sapien
agaaattgaaacttacatccacagt

SEQ ID NO: 3280401 - DNA, 25 bp, Homo sapien
tggctgctgtctgtgatatgtccac

SEQ ID NO: 3280402 - DNA, 25 bp, Homo sapien
gatatgtccacaggtatatcacact

SEQ ID NO: 3280403 - DNA, 25 bp, Homo sapien
tatatcacactttccggtaaaagaa

SEQ ID NO: 3280404 - DNA, 25 bp, Homo sapien
aaagacctataactatggtaatgac

SEQ ID NO: 3280405 - DNA, 25 bp, Homo sapien
taactatggtaatgactctgaaata

SEQ ID NO: 3280406 - DNA, 25 bp, Homo sapien
aataaagacctataactatggtaat

SEQ ID NO: 3280407 - DNA, 25 bp, Homo sapien
cctataactatggtaatgactctga

SEQ ID NO: 3280408 - DNA, 25 bp, Homo sapien
tgagttcaaaacagctagacaagga

SEQ ID NO: 3280409 - DNA, 25 bp, Homo sapien
gaaattgaattgatttgcccaggaa

SEQ ID NO: 3280410 - DNA, 25 bp, Homo sapien
tatgtattaggtaaggaaccactca

SEQ ID NO: 3280411 - DNA, 25 bp, Homo sapien
caatggtgcaccaagctaatgtaac

SEQ ID NO: 3280412 - DNA, 25 bp, Homo sapien
aactcaagttagcaatgtgaaacac

SEQ ID NO: 3280413 - DNA, 25 bp, Homo sapien
tagcaccatgacattctcattccct

SEQ ID NO: 3280414 - DNA, 25 bp, Homo sapien
ttcaaatctaggtagaacttccacc

SEQ ID NO: 3280415 - DNA, 25 bp, Homo sapien
ttgtaaacagaagctcattactagt

SEQ ID NO: 3280416 - DNA, 25 bp, Homo sapien
tactgtggataaaaataagccggcc

SEQ ID NO: 3280417 - DNA, 25 bp, Homo sapien
tgaaactagcatgtacctgcgcccc

SEQ ID NO: 3280418 - DNA, 25 bp, Homo sapien
taagtaaaatggagagtttgccctg

SEQ ID NO: 3280419 - DNA, 25 bp, Homo sapien
gcaacccgtctctagaatactgtgg

SEQ ID NO: 3280420 - DNA, 25 bp, Homo sapien
caacatagcttacaatcggacagtg

SEQ ID NO: 3280421 - DNA, 25 bp, Homo sapien
tcgaggcatggtgtacttactaggc

SEQ ID NO: 3280422 - DNA, 25 bp, Homo sapien
gtattgttactccagtgtgccaagg

SEQ ID NO: 3280423 - DNA, 25 bp, Homo sapien
gctaaaaggcagagcatgaaacgct

SEQ ID NO: 3280424 - DNA, 25 bp, Homo sapien
caagatataaacatgttggtgacct

SEQ ID NO: 3280425 - DNA, 25 bp, Homo sapien
gatacagcagtgctctgccattaaa

SEQ ID NO: 3280426 - DNA, 25 bp, Homo sapien
tgtattagaatttaggctctctgag

SEQ ID NO: 3280427 - DNA, 25 bp, Homo sapien
taactatgtagaccataaaacagat

SEQ ID NO: 3280428 - DNA, 25 bp, Homo sapien
ccatgttctggctggttacttgcac

SEQ ID NO: 3280429 - DNA, 25 bp, Homo sapien
gatttggcagcccatgttctggctg

SEQ ID NO: 3280430 - DNA, 25 bp, Homo sapien
gggttgtctgagatttggcagccca

SEQ ID NO: 3280431 - DNA, 25 bp, Homo sapien
tccacaggggttgtctgagatttgg

SEQ ID NO: 3280432 - DNA, 25 bp, Homo sapien
cttgaagagcgtcccatcagcacac

SEQ ID NO: 3280433 - DNA, 25 bp, Homo sapien
cactacccaactggtctccactgga

SEQ ID NO: 3280434 - DNA, 25 bp, Homo sapien
cacatgcagagcttgtagcgtaccc

SEQ ID NO: 3280435 - DNA, 25 bp, Homo sapien
ggtggtgctgaccatcacagatcca

SEQ ID NO: 3280436 - DNA, 25 bp, Homo sapien
aatctgcaacataattcctctattg

SEQ ID NO: 3280437 - DNA, 25 bp, Homo sapien
aaaatatcaggattcaatgagtgac

SEQ ID NO: 3280438 - DNA, 25 bp, Homo sapien
tgtgatcatgagtacaaaaagactt

SEQ ID NO: 3280439 - DNA, 25 bp, Homo sapien
gtgacttcttcacttcatatatcca

SEQ ID NO: 3280440 - DNA, 25 bp, Homo sapien
catgtgaaattcaatggttttgccc

SEQ ID NO: 3280441 - DNA, 25 bp, Homo sapien
tttaaatcactggtagcattgctgg

SEQ ID NO: 3280442 - DNA, 25 bp, Homo sapien
ggttttgcccataatgaatacacct

SEQ ID NO: 3280443 - DNA, 25 bp, Homo sapien
ttcatttccacgcacaatagcacgc

SEQ ID NO: 3280444 - DNA, 25 bp, Homo sapien
tagatgccttttgaacattcaaact

SEQ ID NO: 3280445 - DNA, 25 bp, Homo sapien
tgcatgccgatgtcacttgtaatag

SEQ ID NO: 3280446 - DNA, 25 bp, Homo sapien
tgagtcctcgggtcaaaaaactgca

SEQ ID NO: 3280447 - DNA, 25 bp, Homo sapien
tgttttctacactgagctttgttgt

SEQ ID NO: 3280448 - DNA, 25 bp, Homo sapien
atttggtccaatgcgaatcacggcc

SEQ ID NO: 3280449 - DNA, 25 bp, Homo sapien
catactatcacagccatttggtcca

SEQ ID NO: 3280450 - DNA, 25 bp, Homo sapien
gctggttgttgccagtgatgaccaa

SEQ ID NO: 3280451 - DNA, 25 bp, Homo sapien
taaatcgaagcaggccactttcatg

SEQ ID NO: 3280452 - DNA, 25 bp, Homo sapien
tcaaaagtctattgatccctggctc

SEQ ID NO: 3280453 - DNA, 25 bp, Homo sapien
tatatgcatcaggaatcccagagaa

SEQ ID NO: 3280454 - DNA, 25 bp, Homo sapien
tacatggctttttcaccgggacttg

SEQ ID NO: 3280455 - DNA, 25 bp, Homo sapien
ccgggacttgccaaatgacagtatc

SEQ ID NO: 3280456 - DNA, 25 bp, Homo sapien
tcaaccctgttttgtggagacgatc

SEQ ID NO: 3280457 - DNA, 25 bp, Homo sapien
aatcacacagatggctaaattgccc

SEQ ID NO: 3280458 - DNA, 25 bp, Homo sapien
ttcatcaatcggaatgtatccagct

SEQ ID NO: 3280459 - DNA, 25 bp, Homo sapien
tctcaacagccttctcacgcatgga

SEQ ID NO: 3280460 - DNA, 25 bp, Homo sapien
cgcccgccgccgccgagctccccgc

SEQ ID NO: 3280461 - DNA, 25 bp, Homo sapien
gcgcccgccgccgccgagctccccg

SEQ ID NO: 3280462 - DNA, 25 bp, Homo sapien
cagaaggggcctatggggattccgc

SEQ ID NO: 3280463 - DNA, 25 bp, Homo sapien
gcggcccctgcacctaggaccttgg

SEQ ID NO: 3280464 - DNA, 25 bp, Homo sapien
ggcctggggcgcgttgtattgcaca

SEQ ID NO: 3280465 - DNA, 25 bp, Homo sapien
cgcgttgtattgcacaggggccaga

SEQ ID NO: 3280466 - DNA, 25 bp, Homo sapien
ggctctctttgtttctcggaccaag

SEQ ID NO: 3280467 - DNA, 25 bp, Homo sapien
cctttgttccccatcgctgaaagat

SEQ ID NO: 3280468 - DNA, 25 bp, Homo sapien
agatcggtgccatccggagctgtga

SEQ ID NO: 3280469 - DNA, 25 bp, Homo sapien
tcaaaaatcgaggacgcttctcccc

SEQ ID NO: 3280470 - DNA, 25 bp, Homo sapien
tatcgagaccacaagtggacgcgga

SEQ ID NO: 3280471 - DNA, 25 bp, Homo sapien
ggaggggccgatatcgagaccacaa

SEQ ID NO: 3280472 - DNA, 25 bp, Homo sapien
gggccgatatcgagaccacaagtgg

SEQ ID NO: 3280473 - DNA, 25 bp, Homo sapien
ccgatatcgagaccacaagtggacg

SEQ ID NO: 3280474 - DNA, 25 bp, Homo sapien
tgaacgagtggtcacttaggtggct

SEQ ID NO: 3280475 - DNA, 25 bp, Homo sapien
gagtcttgaagactgagagtcctca

SEQ ID NO: 3280476 - DNA, 25 bp, Homo sapien
cgttgaatccttcgggctgcttgac

SEQ ID NO: 3280477 - DNA, 25 bp, Homo sapien
gctgcttgacttcggaggcctatga

SEQ ID NO: 3280478 - DNA, 25 bp, Homo sapien
ggattctttcctcatcgctgatgtc

SEQ ID NO: 3280479 - DNA, 25 bp, Homo sapien
tggattctttcctcatcgctgatgt

SEQ ID NO: 3280480 - DNA, 25 bp, Homo sapien
cagagactgagcttaattctgtcca

SEQ ID NO: 3280481 - DNA, 25 bp, Homo sapien
tcattgtttccgcagaacgtttatc

SEQ ID NO: 3280482 - DNA, 25 bp, Homo sapien
tctactctaactgacaacattgaag

SEQ ID NO: 3280483 - DNA, 25 bp, Homo sapien
gattatgagattctagggaacagag

SEQ ID NO: 3280484 - DNA, 25 bp, Homo sapien
gtgcgtggaaacagctgctttctcc

SEQ ID NO: 3280485 - DNA, 25 bp, Homo sapien
gacccagtgcgtggaaacagctgct

SEQ ID NO: 3280486 - DNA, 25 bp, Homo sapien
gctcctttgacccagtgcgtggaaa

SEQ ID NO: 3280487 - DNA, 25 bp, Homo sapien
cctttgacccagtgcgtggaaacag

SEQ ID NO: 3280488 - DNA, 25 bp, Homo sapien
tttcctaccagaggtggaaattctc

SEQ ID NO: 3280489 - DNA, 25 bp, Homo sapien
ccagactttcctaccagaggtggaa

SEQ ID NO: 3280490 - DNA, 25 bp, Homo sapien
tcctaccagaggtggaaattctctc

SEQ ID NO: 3280491 - DNA, 25 bp, Homo sapien
actgcaaccagactttcctaccaga

SEQ ID NO: 3280492 - DNA, 25 bp, Homo sapien
tgtagactgtagcaggacttttacc

SEQ ID NO: 3280493 - DNA, 25 bp, Homo sapien
tctcctccaaacaattgttaagtac

SEQ ID NO: 3280494 - DNA, 25 bp, Homo sapien
caattgttaagtacacggctgtaga

SEQ ID NO: 3280495 - DNA, 25 bp, Homo sapien
tacacggctgtagactgtagcagga

SEQ ID NO: 3280496 - DNA, 25 bp, Homo sapien
agataaaggacactacccagttgcc

SEQ ID NO: 3280497 - DNA, 25 bp, Homo sapien
taaaagcggatgatcttcaacctgg

SEQ ID NO: 3280498 - DNA, 25 bp, Homo sapien
taagccagagccaagtgccctaatt

SEQ ID NO: 3280499 - DNA, 25 bp, Homo sapien
gacagtgtaactctgggatgcaaca

SEQ ID NO: 3280500 - DNA, 25 bp, Homo sapien
ggtcgtggtggcagatccctaatga

SEQ ID NO: 3280501 - DNA, 25 bp, Homo sapien
taaccagaggagctagatttgacac

SEQ ID NO: 3280502 - DNA, 25 bp, Homo sapien
agaacacagcttggtatttgtaacc

SEQ ID NO: 3280503 - DNA, 25 bp, Homo sapien
tgaaatatcaggcttcacagctgag

SEQ ID NO: 3280504 - DNA, 25 bp, Homo sapien
gagtctggctttgctgcatgtaaaa

SEQ ID NO: 3280505 - DNA, 25 bp, Homo sapien
gctttgctgcatgtaaaaccttccc

SEQ ID NO: 3280506 - DNA, 25 bp, Homo sapien
gacagggcctgagtctggctttgct

SEQ ID NO: 3280507 - DNA, 25 bp, Homo sapien
cgatgcagcgttcacagcaggacag

SEQ ID NO: 3280508 - DNA, 25 bp, Homo sapien
gcatattcaaccctccaagcagttt

SEQ ID NO: 3280509 - DNA, 25 bp, Homo sapien
tgaggaagcatattcaaccctccaa

SEQ ID NO: 3280510 - DNA, 25 bp, Homo sapien
gaagcatattcaaccctccaagcag

SEQ ID NO: 3280511 - DNA, 25 bp, Homo sapien
ggaagcatattcaaccctccaagca

SEQ ID NO: 3280512 - DNA, 25 bp, Homo sapien
gtgtagagataaggagtcgctcaca

SEQ ID NO: 3280513 - DNA, 25 bp, Homo sapien
tgtagagataaggagtcgctcacat

SEQ ID NO: 3280514 - DNA, 25 bp, Homo sapien
gagctcagagtttgccgatctggtg

SEQ ID NO: 3280515 - DNA, 25 bp, Homo sapien
ttgccgatctggtgtagagataagg

SEQ ID NO: 3280516 - DNA, 25 bp, Homo sapien
tgagaccttgaccactacagagttt

SEQ ID NO: 3280517 - DNA, 25 bp, Homo sapien
tgttgtgttaccttggcctctcgga

SEQ ID NO: 3280518 - DNA, 25 bp, Homo sapien
tcaacaagtaggagatcaaagagct

SEQ ID NO: 3280519 - DNA, 25 bp, Homo sapien
caggcagagttattcagcagtcctc

SEQ ID NO: 3280520 - DNA, 25 bp, Homo sapien
tcttctccatgaaagatagggacac

SEQ ID NO: 3280521 - DNA, 25 bp, Homo sapien
ttctctttaggttctaatcttgctt

SEQ ID NO: 3280522 - DNA, 25 bp, Homo sapien
tatttatatcttcccttgttatttg

SEQ ID NO: 3280523 - DNA, 25 bp, Homo sapien
cattcaccgttgaggatcttctctt

SEQ ID NO: 3280524 - DNA, 25 bp, Homo sapien
gatacaaacatgtagactgggcagg

SEQ ID NO: 3280525 - DNA, 25 bp, Homo sapien
tccccttggattgtctgggatgaaa

SEQ ID NO: 3280526 - DNA, 25 bp, Homo sapien
ggattgtctgggatgaaacagccca

SEQ ID NO: 3280527 - DNA, 25 bp, Homo sapien
attccccttggattgtctgggatga

SEQ ID NO: 3280528 - DNA, 25 bp, Homo sapien
ccccttggattgtctgggatgaaac

SEQ ID NO: 3280529 - DNA, 25 bp, Homo sapien
tagtcccgtatggttgatgacaaag

SEQ ID NO: 3280530 - DNA, 25 bp, Homo sapien
ggaacccagatatagtagtcccgta

SEQ ID NO: 3280531 - DNA, 25 bp, Homo sapien
gatattgagtgtacttcctccagcc

SEQ ID NO: 3280532 - DNA, 25 bp, Homo sapien
ggcccttggacttgtagcacagcaa

SEQ ID NO: 3280533 - DNA, 25 bp, Homo sapien
cagtataccacctgactgactgatc

SEQ ID NO: 3280534 - DNA, 25 bp, Homo sapien
tcttcagtataccacctgactgact

SEQ ID NO: 3280535 - DNA, 25 bp, Homo sapien
tgaggtataacatcttcagtatacc

SEQ ID NO: 3280536 - DNA, 25 bp, Homo sapien
taccacctgactgactgatcttcac

SEQ ID NO: 3280537 - DNA, 25 bp, Homo sapien
ctattcctttctctgcttgctgctt

SEQ ID NO: 3280538 - DNA, 25 bp, Homo sapien
tctttgcttgcacaccttgtttttc

SEQ ID NO: 3280539 - DNA, 25 bp, Homo sapien
ttcaggggacctgccatatggttct

SEQ ID NO: 3280540 - DNA, 25 bp, Homo sapien
tgtttttctttcaggggacctgcca

SEQ ID NO: 3280541 - DNA, 25 bp, Homo sapien
ttaaaatgaaggctccccaatccta

SEQ ID NO: 3280542 - DNA, 25 bp, Homo sapien
taaaatgaaggctccccaatcctac

SEQ ID NO: 3280543 - DNA, 25 bp, Homo sapien
ccctggcagaagcttaaagctgagt

SEQ ID NO: 3280544 - DNA, 25 bp, Homo sapien
tcctggtacccatgaaatctggtgt

SEQ ID NO: 3280545 - DNA, 25 bp, Homo sapien
gcttgggtctgcacgatggtttcac

SEQ ID NO: 3280546 - DNA, 25 bp, Homo sapien
ccctgattctctttgggtggagaac

SEQ ID NO: 3280547 - DNA, 25 bp, Homo sapien
gcttgacagtgttgactaagcttgg

SEQ ID NO: 3280548 - DNA, 25 bp, Homo sapien
actaagcttggttcatggggagatt

SEQ ID NO: 3280549 - DNA, 25 bp, Homo sapien
tcagtttccatgtctatgtgcttga

SEQ ID NO: 3280550 - DNA, 25 bp, Homo sapien
tgtctatgtgcttgacagtgttgac

SEQ ID NO: 3280551 - DNA, 25 bp, Homo sapien
tcttcatcaagattcttcgtggcca

SEQ ID NO: 3280552 - DNA, 25 bp, Homo sapien
cttcatcaagattcttcgtggccat

SEQ ID NO: 3280553 - DNA, 25 bp, Homo sapien
cctcttcatcaagattcttcgtggc

SEQ ID NO: 3280554 - DNA, 25 bp, Homo sapien
ctcttcatcaagattcttcgtggcc

SEQ ID NO: 3280555 - DNA, 25 bp, Homo sapien
cagcagacttgatgtacatctttac

SEQ ID NO: 3280556 - DNA, 25 bp, Homo sapien
cagacttgatgtacatctttacagc

SEQ ID NO: 3280557 - DNA, 25 bp, Homo sapien
catcagcagacttgatgtacatctt

SEQ ID NO: 3280558 - DNA, 25 bp, Homo sapien
ccatcagcagacttgatgtacatct

SEQ ID NO: 3280559 - DNA, 25 bp, Homo sapien
aatctggctgtctttgacgatgtcc

SEQ ID NO: 3280560 - DNA, 25 bp, Homo sapien
gaaggccgcccagcagatatttaaa

SEQ ID NO: 3280561 - DNA, 25 bp, Homo sapien
tgtccacgaactcagtaacatacat

SEQ ID NO: 3280562 - DNA, 25 bp, Homo sapien
aagaaggccgcccagcagatattta

SEQ ID NO: 3280563 - DNA, 25 bp, Homo sapien
agcaaggattgttttggaaatctgg

SEQ ID NO: 3280564 - DNA, 25 bp, Homo sapien
gaaatctggcataatcaacaaccac

SEQ ID NO: 3280565 - DNA, 25 bp, Homo sapien
tctggcataatcaacaaccacaaat

SEQ ID NO: 3280566 - DNA, 25 bp, Homo sapien
cagtgctggctgtagcaaggattgt

SEQ ID NO: 3280567 - DNA, 25 bp, Homo sapien
ttcagaacgtgacccacaggcatca

SEQ ID NO: 3280568 - DNA, 25 bp, Homo sapien
cagagttggaaacacttgacgcctc

SEQ ID NO: 3280569 - DNA, 25 bp, Homo sapien
tcacttgctgctccctggtaagtct

SEQ ID NO: 3280570 - DNA, 25 bp, Homo sapien
acaggcatcaaagcctccaaaccaa

SEQ ID NO: 3280571 - DNA, 25 bp, Homo sapien
caaatggactcggattataattggc

SEQ ID NO: 3280572 - DNA, 25 bp, Homo sapien
ttagcaaatggactcggattataat

SEQ ID NO: 3280573 - DNA, 25 bp, Homo sapien
ctggctaccagagccagaactcgat

SEQ ID NO: 3280574 - DNA, 25 bp, Homo sapien
gaactcgattcattcttagcaaatg

SEQ ID NO: 3280575 - DNA, 25 bp, Homo sapien
tccaacagggcaagtctgtgccatg

SEQ ID NO: 3280576 - DNA, 25 bp, Homo sapien
gaagcaaggaggtggtgcaaggtgg

SEQ ID NO: 3280577 - DNA, 25 bp, Homo sapien
gatgctgccttaagttggactcata

SEQ ID NO: 3280578 - DNA, 25 bp, Homo sapien
taagttggactcatagactagacaa

SEQ ID NO: 3280579 - DNA, 25 bp, Homo sapien
gccttaagttggactcatagactag

SEQ ID NO: 3280580 - DNA, 25 bp, Homo sapien
ctttgacattcgctacaaatgctga

SEQ ID NO: 3280581 - DNA, 25 bp, Homo sapien
ctaacaggtactctgcctgaagttc

SEQ ID NO: 3280582 - DNA, 25 bp, Homo sapien
cacattgcctcgtgctctctgagga

SEQ ID NO: 3280583 - DNA, 25 bp, Homo sapien
tcattctatcggctctaacaggtac

SEQ ID NO: 3280584 - DNA, 25 bp, Homo sapien
tttgcacctcttcctctgatagtgg

SEQ ID NO: 3280585 - DNA, 25 bp, Homo sapien
aagccagtgtcatggctgccagcag

SEQ ID NO: 3280586 - DNA, 25 bp, Homo sapien
ctcttcctctgatagtggaagccag

SEQ ID NO: 3280587 - DNA, 25 bp, Homo sapien
tcctctgatagtggaagccagtgtc

SEQ ID NO: 3280588 - DNA, 25 bp, Homo sapien
ctgcacatgcggtggatggtcgaac

SEQ ID NO: 3280589 - DNA, 25 bp, Homo sapien
catccacagcgtctcatggagtaaa

SEQ ID NO: 3280590 - DNA, 25 bp, Homo sapien
tgtgccacatcttctgtcaacccgg

SEQ ID NO: 3280591 - DNA, 25 bp, Homo sapien
gcagcaatcatcaatggtgtggaag

SEQ ID NO: 3280592 - DNA, 25 bp, Homo sapien
cacatatgcactggaaaagactgtg

SEQ ID NO: 3280593 - DNA, 25 bp, Homo sapien
cagttatatcttctaatgttatccc

SEQ ID NO: 3280594 - DNA, 25 bp, Homo sapien
tgtcaaatactttacgattttcagt

SEQ ID NO: 3280595 - DNA, 25 bp, Homo sapien
tccaattgtcaaatactttacgatt

SEQ ID NO: 3280596 - DNA, 25 bp, Homo sapien
atgtaggatggaaaatgagctggcc

SEQ ID NO: 3280597 - DNA, 25 bp, Homo sapien
tatcgaaagtttgctagagcagaac

SEQ ID NO: 3280598 - DNA, 25 bp, Homo sapien
gagcttataatgcttgcctgggact

SEQ ID NO: 3280599 - DNA, 25 bp, Homo sapien
tgagctggccattattaaagggaaa

SEQ ID NO: 3280600 - DNA, 25 bp, Homo sapien
aattatgccgtgaggaaagccagac

SEQ ID NO: 3280601 - DNA, 25 bp, Homo sapien
caggcaaaaccatgggtgaatctca

SEQ ID NO: 3280602 - DNA, 25 bp, Homo sapien
aatgaatgagcttttgatacaggca

SEQ ID NO: 3280603 - DNA, 25 bp, Homo sapien
tagaaatcaaggagtcaggaagcgg

SEQ ID NO: 3280604 - DNA, 25 bp, Homo sapien
tgtaaccctggataaactgaggaga

SEQ ID NO: 3280605 - DNA, 25 bp, Homo sapien
cctccaggtacagcgacaatgggac

SEQ ID NO: 3280606 - DNA, 25 bp, Homo sapien
taaactgaggagacctccaggtaca

SEQ ID NO: 3280607 - DNA, 25 bp, Homo sapien
tctcttcatcactgagttgccccag

SEQ ID NO: 3280608 - DNA, 25 bp, Homo sapien
ccaggatataaactcaagcagacca

SEQ ID NO: 3280609 - DNA, 25 bp, Homo sapien
gaagcgaatactgaggcaccaagaa

SEQ ID NO: 3280610 - DNA, 25 bp, Homo sapien
gccactaagaaatggacaggccagg

SEQ ID NO: 3280611 - DNA, 25 bp, Homo sapien
tgggtaaaattctgccagtcactac

SEQ ID NO: 3280612 - DNA, 25 bp, Homo sapien
gttgcggcaagacccaaggctagaa

SEQ ID NO: 3280613 - DNA, 25 bp, Homo sapien
aaaattccatgggagagcgaggtca

SEQ ID NO: 3280614 - DNA, 25 bp, Homo sapien
tgtcagttgtaccagggcatgccca

SEQ ID NO: 3280615 - DNA, 25 bp, Homo sapien
cccagtgatgaacgccaggatgcct

SEQ ID NO: 3280616 - DNA, 25 bp, Homo sapien
caaagctcccttatgctgagaggaa

SEQ ID NO: 3280617 - DNA, 25 bp, Homo sapien
taatcccctcagagtggaaaacagg

SEQ ID NO: 3280618 - DNA, 25 bp, Homo sapien
gcatccgtgtaattgacaacctgag

SEQ ID NO: 3280619 - DNA, 25 bp, Homo sapien
tgcttctggtcaagtcggatacaag

SEQ ID NO: 3280620 - DNA, 25 bp, Homo sapien
tcagaaatgacccacgctcaggtat

SEQ ID NO: 3280621 - DNA, 25 bp, Homo sapien
caatgcctagaatgcaataggtgcc

SEQ ID NO: 3280622 - DNA, 25 bp, Homo sapien
gtgtgtaaccccagccgagcaaggt

SEQ ID NO: 3280623 - DNA, 25 bp, Homo sapien
tcataggtggttaagcaccatcccc

SEQ ID NO: 3280624 - DNA, 25 bp, Homo sapien
gaacccacgtgagtatttctgaagc

SEQ ID NO: 3280625 - DNA, 25 bp, Homo sapien
agttactgtaggcttcactgaggcc

SEQ ID NO: 3280626 - DNA, 25 bp, Homo sapien
gattgacagggaaaagcagccctac

SEQ ID NO: 3280627 - DNA, 25 bp, Homo sapien
ggacataagacctgccactgactca

SEQ ID NO: 3280628 - DNA, 25 bp, Homo sapien
gaggcagggtgttaaactgattaaa

SEQ ID NO: 3280629 - DNA, 25 bp, Homo sapien
gcttaaagtgcttgaattggttaca

SEQ ID NO: 3280630 - DNA, 25 bp, Homo sapien
ttttagcaacaaaataataggaatg

SEQ ID NO: 3280631 - DNA, 25 bp, Homo sapien
agattgacattattgcttaaagtgc

SEQ ID NO: 3280632 - DNA, 25 bp, Homo sapien
aatgccctgcttgtgttgtgcctca

SEQ ID NO: 3280633 - DNA, 25 bp, Homo sapien
ccattggagggaatactgcagagcc

SEQ ID NO: 3280634 - DNA, 25 bp, Homo sapien
cctttgggctatcgctgacctcaga

SEQ ID NO: 3280635 - DNA, 25 bp, Homo sapien
tgcagatgacacacggaatccttgg

SEQ ID NO: 3280636 - DNA, 25 bp, Homo sapien
cattgtaagaagaccctggaagcca

SEQ ID NO: 3280637 - DNA, 25 bp, Homo sapien
cacgtgaatcagtcccgcaggtctt

SEQ ID NO: 3280638 - DNA, 25 bp, Homo sapien
taccttgaaaagcttagcagtgccg

SEQ ID NO: 3280639 - DNA, 25 bp, Homo sapien
caagcattctaggagtctgagccaa

SEQ ID NO: 3280640 - DNA, 25 bp, Homo sapien
ttttgatatatctgacgtcaggcca

SEQ ID NO: 3280641 - DNA, 25 bp, Homo sapien
gacgtcaggccatagaattcttcaa

SEQ ID NO: 3280642 - DNA, 25 bp, Homo sapien
tatctgacgtcaggccatagaattc

SEQ ID NO: 3280643 - DNA, 25 bp, Homo sapien
tgatatatctgacgtcaggccatag

SEQ ID NO: 3280644 - DNA, 25 bp, Homo sapien
gaagccgtgacttttcacaatagtg

SEQ ID NO: 3280645 - DNA, 25 bp, Homo sapien
tcacaatagtgatataatgcccacg

SEQ ID NO: 3280646 - DNA, 25 bp, Homo sapien
aaacaaaagccagaagccgtgactt

SEQ ID NO: 3280647 - DNA, 25 bp, Homo sapien
gatataatgcccacgattaggacca

SEQ ID NO: 3280648 - DNA, 25 bp, Homo sapien
gaaccgctttaggtgcagggccaag

SEQ ID NO: 3280649 - DNA, 25 bp, Homo sapien
gaagaccacacggtaagacagcttg

SEQ ID NO: 3280650 - DNA, 25 bp, Homo sapien
ccaagtcatacatgcggtccaggtt

SEQ ID NO: 3280651 - DNA, 25 bp, Homo sapien
tgtgcagctgctccatgtacttgaa

SEQ ID NO: 3280652 - DNA, 25 bp, Homo sapien
tttgttcactacacagtgtttctgt

SEQ ID NO: 3280653 - DNA, 25 bp, Homo sapien
taatatttttgttcactacacagtg

SEQ ID NO: 3280654 - DNA, 25 bp, Homo sapien
ataatatttttgttcactacacagt

SEQ ID NO: 3280655 - DNA, 25 bp, Homo sapien
tatttttgttcactacacagtgttt

SEQ ID NO: 3280656 - DNA, 25 bp, Homo sapien
gatgtattctgctccacatcaacag

SEQ ID NO: 3280657 - DNA, 25 bp, Homo sapien
tggatgtattctgctccacatcaac

SEQ ID NO: 3280658 - DNA, 25 bp, Homo sapien
gggtaatggatgtattctgctccac

SEQ ID NO: 3280659 - DNA, 25 bp, Homo sapien
taatggatgtattctgctccacatc

SEQ ID NO: 3280660 - DNA, 25 bp, Homo sapien
tgggtccaaccaagataagtgcctg

SEQ ID NO: 3280661 - DNA, 25 bp, Homo sapien
gagagctgtacacaacgagttcatg

SEQ ID NO: 3280662 - DNA, 25 bp, Homo sapien
gctattaacaaaatggctgccaccc

SEQ ID NO: 3280663 - DNA, 25 bp, Homo sapien
cagtctttccggtctgcaagccaga

SEQ ID NO: 3280664 - DNA, 25 bp, Homo sapien
aaatctcatggacccaggtgagttc

SEQ ID NO: 3280665 - DNA, 25 bp, Homo sapien
tcctcctgaaggatgtccgcaatag

SEQ ID NO: 3280666 - DNA, 25 bp, Homo sapien
cagttcaagcatcgagtttcattgg

SEQ ID NO: 3280667 - DNA, 25 bp, Homo sapien
tcattggtaagcgttccctgaaaaa

SEQ ID NO: 3280668 - DNA, 25 bp, Homo sapien
ggagaaggtggttatttcagtctct

SEQ ID NO: 3280669 - DNA, 25 bp, Homo sapien
gagaaggtggttatttcagtctctg

SEQ ID NO: 3280670 - DNA, 25 bp, Homo sapien
gctgggccttgtatgccaacacatt

SEQ ID NO: 3280671 - DNA, 25 bp, Homo sapien
gaacttctttggtgggatgacgcca

SEQ ID NO: 3280672 - DNA, 25 bp, Homo sapien
ttctcccggaatggacggcagaagt

SEQ ID NO: 3280673 - DNA, 25 bp, Homo sapien
tgctgtggaaaaggtccgccaggca

SEQ ID NO: 3280674 - DNA, 25 bp, Homo sapien
agttacagtagcatgtgtttccaaa

SEQ ID NO: 3280675 - DNA, 25 bp, Homo sapien
gcacggagttacagtagcatgtgtt

SEQ ID NO: 3280676 - DNA, 25 bp, Homo sapien
cggagttacagtagcatgtgtttcc

SEQ ID NO: 3280677 - DNA, 25 bp, Homo sapien
ctgaagcacggagttacagtagcat

SEQ ID NO: 3280678 - DNA, 25 bp, Homo sapien
tccccagacacccttcagtaacgct

SEQ ID NO: 3280679 - DNA, 25 bp, Homo sapien
agacacccttcagtaacgcttggcc

SEQ ID NO: 3280680 - DNA, 25 bp, Homo sapien
tcagtaacgcttggccccaattcag

SEQ ID NO: 3280681 - DNA, 25 bp, Homo sapien
ccttcagtaacgcttggccccaatt

SEQ ID NO: 3280682 - DNA, 25 bp, Homo sapien
tgttcattgattggaaactgctctg

SEQ ID NO: 3280683 - DNA, 25 bp, Homo sapien
attgaccaatccgaaatagtgttca

SEQ ID NO: 3280684 - DNA, 25 bp, Homo sapien
tctttttccagagcagaggcattgg

SEQ ID NO: 3280685 - DNA, 25 bp, Homo sapien
tggaaactgctctggaccaatgtct

SEQ ID NO: 3280686 - DNA, 25 bp, Homo sapien
tccctgcttcttcagacgcctgtgt

SEQ ID NO: 3280687 - DNA, 25 bp, Homo sapien
ccttccctgcttcttcagacgcctg

SEQ ID NO: 3280688 - DNA, 25 bp, Homo sapien
ttcttcagacgcctgtgtcccagca

SEQ ID NO: 3280689 - DNA, 25 bp, Homo sapien
tgcttcttcagacgcctgtgtccca

SEQ ID NO: 3280690 - DNA, 25 bp, Homo sapien
ctcccaggagaattctacactggca

SEQ ID NO: 3280691 - DNA, 25 bp, Homo sapien
cttaaaggtcagctcccaggagaat

SEQ ID NO: 3280692 - DNA, 25 bp, Homo sapien
ccagcttaaaggtcagctcccagga

SEQ ID NO: 3280693 - DNA, 25 bp, Homo sapien
cccaggagaattctacactggcacc

SEQ ID NO: 3280694 - DNA, 25 bp, Homo sapien
ggtactgctatgaaaatttgcctaa

SEQ ID NO: 3280695 - DNA, 25 bp, Homo sapien
tcagtagtcatatccctgcagcaag

SEQ ID NO: 3280696 - DNA, 25 bp, Homo sapien
taacgtgttgcataggacaatactg

SEQ ID NO: 3280697 - DNA, 25 bp, Homo sapien
taaatgtggttcattccatcaacag

SEQ ID NO: 3280698 - DNA, 25 bp, Homo sapien
catcagggagtaggcctagaagaag

SEQ ID NO: 3280699 - DNA, 25 bp, Homo sapien
taggcctagaagaagaggaggtcaa

SEQ ID NO: 3280700 - DNA, 25 bp, Homo sapien
gcctagaagaagaggaggtcaagaa

SEQ ID NO: 3280701 - DNA, 25 bp, Homo sapien
tcagcatcagggagtaggcctagaa

SEQ ID NO: 3280702 - DNA, 25 bp, Homo sapien
aatccatccctacctttcatgactt

SEQ ID NO: 3280703 - DNA, 25 bp, Homo sapien
ccctccacagtgattatcttgtcat

SEQ ID NO: 3280704 - DNA, 25 bp, Homo sapien
cccttcttcattgtccctgttttca

SEQ ID NO: 3280705 - DNA, 25 bp, Homo sapien
gacaaaaccaaaactacaatcctga

SEQ ID NO: 3280706 - DNA, 25 bp, Homo sapien
gttaatatttacgtctgatccagtg

SEQ ID NO: 3280707 - DNA, 25 bp, Homo sapien
aagaatctaaagagaggtccagtta

SEQ ID NO: 3280708 - DNA, 25 bp, Homo sapien
tcattattgagcaaagaatctaaag

SEQ ID NO: 3280709 - DNA, 25 bp, Homo sapien
ctgatccagtgaaaagacagcagtt

SEQ ID NO: 3280710 - DNA, 25 bp, Homo sapien
tcctatacatgggaggtgtttatat

SEQ ID NO: 3280711 - DNA, 25 bp, Homo sapien
cactccagccttcctatacatggga

SEQ ID NO: 3280712 - DNA, 25 bp, Homo sapien
gtttatattagtggttgcttccacc

SEQ ID NO: 3280713 - DNA, 25 bp, Homo sapien
ttagtggttgcttccaccaggtctg

SEQ ID NO: 3280714 - DNA, 25 bp, Homo sapien
agggacagcaatgccttactccaat

SEQ ID NO: 3280715 - DNA, 25 bp, Homo sapien
ttactccaatctgagctccccaaag

SEQ ID NO: 3280716 - DNA, 25 bp, Homo sapien
caagggacagcaatgccttactcca

SEQ ID NO: 3280717 - DNA, 25 bp, Homo sapien
gacagcaatgccttactccaatctg

SEQ ID NO: 3280718 - DNA, 25 bp, Homo sapien
ttcggacagtcattagtctaaaggt

SEQ ID NO: 3280719 - DNA, 25 bp, Homo sapien
gaggcgatgtttcggacagtcatta

SEQ ID NO: 3280720 - DNA, 25 bp, Homo sapien
cattagtctaaaggttgcagcgatc

SEQ ID NO: 3280721 - DNA, 25 bp, Homo sapien
attacagatggaggcgatgtttcgg

SEQ ID NO: 3280722 - DNA, 25 bp, Homo sapien
ggaaaccgggactgcccatggtggc

SEQ ID NO: 3280723 - DNA, 25 bp, Homo sapien
gggactgcccatggtggcgcgctgg

SEQ ID NO: 3280724 - DNA, 25 bp, Homo sapien
cggcggcctggggtccggctttcag

SEQ ID NO: 3280725 - DNA, 25 bp, Homo sapien
actgcccatggtggcgcgctggcgg

SEQ ID NO: 3280726 - DNA, 25 bp, Homo sapien
gcgcgagtctgtgcaccacttagca

SEQ ID NO: 3280727 - DNA, 25 bp, Homo sapien
cacttagcagataggtccacgcgaa

SEQ ID NO: 3280728 - DNA, 25 bp, Homo sapien
attaaaggtcgtggctgcgggctca

SEQ ID NO: 3280729 - DNA, 25 bp, Homo sapien
ggcgctgtatgggatcatgcacatt

SEQ ID NO: 3280730 - DNA, 25 bp, Homo sapien
tcttcccgggattggctgagctacc

SEQ ID NO: 3280731 - DNA, 25 bp, Homo sapien
taattcagagaaggatgctccgcgc

SEQ ID NO: 3280732 - DNA, 25 bp, Homo sapien
gacatggcttatccccgtgctactg

SEQ ID NO: 3280733 - DNA, 25 bp, Homo sapien
ccatccgggattggctgtgcgtgcc

SEQ ID NO: 3280734 - DNA, 25 bp, Homo sapien
ttaaagtgtttgagcaaaaccatca

SEQ ID NO: 3280735 - DNA, 25 bp, Homo sapien
cgtgggctcacgaatattcaagtaa

SEQ ID NO: 3280736 - DNA, 25 bp, Homo sapien
catgatgtacttgaggctattcgtg

SEQ ID NO: 3280737 - DNA, 25 bp, Homo sapien
aaccatcatttgactggaccatgat

SEQ ID NO: 3280738 - DNA, 25 bp, Homo sapien
tgtgtccgtacagaataacaattgc

SEQ ID NO: 3280739 - DNA, 25 bp, Homo sapien
ccaagtatggccagtctcagactac

SEQ ID NO: 3280740 - DNA, 25 bp, Homo sapien
gctagctccctgttgaaggtttaac

SEQ ID NO: 3280741 - DNA, 25 bp, Homo sapien
gttaaatatttctgcccaagtatgg

SEQ ID NO: 3280742 - DNA, 25 bp, Homo sapien
gcaggtaacctgatgagctcacttt

SEQ ID NO: 3280743 - DNA, 25 bp, Homo sapien
tgttcctcctaataaactggttcca

SEQ ID NO: 3280744 - DNA, 25 bp, Homo sapien
cctcttcttttggtcatatccagct

SEQ ID NO: 3280745 - DNA, 25 bp, Homo sapien
cagttagttccttactgtgagataa

SEQ ID NO: 3280746 - DNA, 25 bp, Homo sapien
gagaagctctcgttccattggccat

SEQ ID NO: 3280747 - DNA, 25 bp, Homo sapien
aagagtcctagaccttcacccgtgg

SEQ ID NO: 3280748 - DNA, 25 bp, Homo sapien
cctcgcgggagttctgagagcctta

SEQ ID NO: 3280749 - DNA, 25 bp, Homo sapien
gacgtgtctgccaatcaccggatgg

SEQ ID NO: 3280750 - DNA, 25 bp, Homo sapien
tggctcctgtaagggattcctcaag

SEQ ID NO: 3280751 - DNA, 25 bp, Homo sapien
gggctgtcactagctgtatttgaga

SEQ ID NO: 3280752 - DNA, 25 bp, Homo sapien
aagccatatggtcctagtctatcca

SEQ ID NO: 3280753 - DNA, 25 bp, Homo sapien
gagagcttgccttcagacttgcaat

SEQ ID NO: 3280754 - DNA, 25 bp, Homo sapien
ataatattttcttaacagcaaatgc

SEQ ID NO: 3280755 - DNA, 25 bp, Homo sapien
ttttcttaacagcaaatgcacattt

SEQ ID NO: 3280756 - DNA, 25 bp, Homo sapien
tattttcttaacagcaaatgcacat

SEQ ID NO: 3280757 - DNA, 25 bp, Homo sapien
taatattttcttaacagcaaatgca

SEQ ID NO: 3280758 - DNA, 25 bp, Homo sapien
gacccatgctgcaggattatcacag

SEQ ID NO: 3280759 - DNA, 25 bp, Homo sapien
actgattgctggttaagatggctac

SEQ ID NO: 3280760 - DNA, 25 bp, Homo sapien
ttttgaaagcaaatcgacccatgct

SEQ ID NO: 3280761 - DNA, 25 bp, Homo sapien
tgttgccacccctgaaatattcctt

SEQ ID NO: 3280762 - DNA, 25 bp, Homo sapien
catctataagggttctattgttcca

SEQ ID NO: 3280763 - DNA, 25 bp, Homo sapien
tatgaacaacaaacccatctataag

SEQ ID NO: 3280764 - DNA, 25 bp, Homo sapien
ttttgagacagaagctcaccccatc

SEQ ID NO: 3280765 - DNA, 25 bp, Homo sapien
ctattgttccagagtatgagttttc

SEQ ID NO: 3280766 - DNA, 25 bp, Homo sapien
aataaaaagtaacatacgaggctgg

SEQ ID NO: 3280767 - DNA, 25 bp, Homo sapien
ataaaaagtaacatacgaggctggg

SEQ ID NO: 3280768 - DNA, 25 bp, Homo sapien
aaaaagtaacatacgaggctgggtg

SEQ ID NO: 3280769 - DNA, 25 bp, Homo sapien
tctttggtctatccagaagcctaca

SEQ ID NO: 3280770 - DNA, 25 bp, Homo sapien
cacctgcggcccatttcataagatg

SEQ ID NO: 3280771 - DNA, 25 bp, Homo sapien
gctgttgggagaaactatcctgccc

SEQ ID NO: 3280772 - DNA, 25 bp, Homo sapien
taaggaactcaccagaggactgggc

SEQ ID NO: 3280773 - DNA, 25 bp, Homo sapien
taccttgggaggtcctagtgctaag

SEQ ID NO: 3280774 - DNA, 25 bp, Homo sapien
ttggcagctgaattctcggtaagac

SEQ ID NO: 3280775 - DNA, 25 bp, Homo sapien
gtaagacctgctttactcatcaaag

SEQ ID NO: 3280776 - DNA, 25 bp, Homo sapien
aacactcagaggagggttttggcag

SEQ ID NO: 3280777 - DNA, 25 bp, Homo sapien
tgcgaaatagctggtacagaaggcc

SEQ ID NO: 3280778 - DNA, 25 bp, Homo sapien
catcgcccagaccatttaggtggaa

SEQ ID NO: 3280779 - DNA, 25 bp, Homo sapien
tgcgagatttgcgaaagacacgaac

SEQ ID NO: 3280780 - DNA, 25 bp, Homo sapien
ccaatcaagggaacagctgagctgt

SEQ ID NO: 3280781 - DNA, 25 bp, Homo sapien
tagtgtccggaaaactggagcaagc

SEQ ID NO: 3280782 - DNA, 25 bp, Homo sapien
ttgtccagaataggtccaccaggtg

SEQ ID NO: 3280783 - DNA, 25 bp, Homo sapien
tgagcttccatggaggcttcccagt

SEQ ID NO: 3280784 - DNA, 25 bp, Homo sapien
tgccaagtcactttacgataggagg

SEQ ID NO: 3280785 - DNA, 25 bp, Homo sapien
ggttagcagtacttcataaggtctc

SEQ ID NO: 3280786 - DNA, 25 bp, Homo sapien
tgatctcaatctagcttcctgtggc

SEQ ID NO: 3280787 - DNA, 25 bp, Homo sapien
ttttccagggaggttacaacacatc

SEQ ID NO: 3280788 - DNA, 25 bp, Homo sapien
ctcatggagcctgtgagtaggtgcc

SEQ ID NO: 3280789 - DNA, 25 bp, Homo sapien
caacaggcagaagatcatcgtgagg

SEQ ID NO: 3280790 - DNA, 25 bp, Homo sapien
taaagacaggaaccatgccaaccat

SEQ ID NO: 3280791 - DNA, 25 bp, Homo sapien
tgccaaccatacagggccacatggg

SEQ ID NO: 3280792 - DNA, 25 bp, Homo sapien
tcgtgagggaaaggttcagagcaca

SEQ ID NO: 3280793 - DNA, 25 bp, Homo sapien
cgctacaaagtagcggcgtgtctgc

SEQ ID NO: 3280794 - DNA, 25 bp, Homo sapien
gcgcttaaaactgaggctgccgcac

SEQ ID NO: 3280795 - DNA, 25 bp, Homo sapien
tccgcagacgtagacaacgaattcc

SEQ ID NO: 3280796 - DNA, 25 bp, Homo sapien
cgtagacaacgaattcctggagccc

SEQ ID NO: 3280797 - DNA, 25 bp, Homo sapien
ctccccgccggagaccaaagggcag

SEQ ID NO: 3280798 - DNA, 25 bp, Homo sapien
tgggagccctccccgccggagacca

SEQ ID NO: 3280799 - DNA, 25 bp, Homo sapien
gaccaaagggcagaaacgcactcac

SEQ ID NO: 3280800 - DNA, 25 bp, Homo sapien
tccccgccggagaccaaagggcaga

SEQ ID NO: 3280801 - DNA, 25 bp, Homo sapien
gagggataaactggccgacgatcgc

SEQ ID NO: 3280802 - DNA, 25 bp, Homo sapien
aaactggccgacgatcgccgccagg

SEQ ID NO: 3280803 - DNA, 25 bp, Homo sapien
tccgagggataaactggccgacgat

SEQ ID NO: 3280804 - DNA, 25 bp, Homo sapien
agtgcaactccgagggataaactgg

SEQ ID NO: 3280805 - DNA, 25 bp, Homo sapien
gaagatcctgggttggggcggagcg

SEQ ID NO: 3280806 - DNA, 25 bp, Homo sapien
ggacagccggattcaggcaccagga

SEQ ID NO: 3280807 - DNA, 25 bp, Homo sapien
gcagagcggacagccggattcaggc

SEQ ID NO: 3280808 - DNA, 25 bp, Homo sapien
aagtgagcggggacacacgagggct

SEQ ID NO: 3280809 - DNA, 25 bp, Homo sapien
ttttctcccgctcaagactaggaac

SEQ ID NO: 3280810 - DNA, 25 bp, Homo sapien
gattttctcccgctcaagactagga

SEQ ID NO: 3280811 - DNA, 25 bp, Homo sapien
tctcccgctcaagactaggaacata

SEQ ID NO: 3280812 - DNA, 25 bp, Homo sapien
tgattttctcccgctcaagactagg

SEQ ID NO: 3280813 - DNA, 25 bp, Homo sapien
ctgcgctttcggcgcagggaagact

SEQ ID NO: 3280814 - DNA, 25 bp, Homo sapien
gcctgaggagcaccctttttgtgtc

SEQ ID NO: 3280815 - DNA, 25 bp, Homo sapien
ttggcggcgcctgtacgcctgagga

SEQ ID NO: 3280816 - DNA, 25 bp, Homo sapien
gaagcagtggctggttggcggcgcc

SEQ ID NO: 3280817 - DNA, 25 bp, Homo sapien
gcctgtacgcctgaggagcaccctt

SEQ ID NO: 3280818 - DNA, 25 bp, Homo sapien
taaaactccatgtcttgcctgctgt

SEQ ID NO: 3280819 - DNA, 25 bp, Homo sapien
ctgaggtatggaccccaggaatggc

SEQ ID NO: 3280820 - DNA, 25 bp, Homo sapien
tatcagtccccgtactgggctgggc

SEQ ID NO: 3280821 - DNA, 25 bp, Homo sapien
caagtcatacaaggaagcgaaggcc

SEQ ID NO: 3280822 - DNA, 25 bp, Homo sapien
gattacacagatttccagctagtca

SEQ ID NO: 3280823 - DNA, 25 bp, Homo sapien
gacagagtccaggtcggaatcacag

SEQ ID NO: 3280824 - DNA, 25 bp, Homo sapien
tactactgtaggagagctcagtcct

SEQ ID NO: 3280825 - DNA, 25 bp, Homo sapien
tatccatcctaggtgactcttactg

SEQ ID NO: 3280826 - DNA, 25 bp, Homo sapien
ttgtacaataagtgataaggtcaag

SEQ ID NO: 3280827 - DNA, 25 bp, Homo sapien
gatgattgtacaataagtgataagg

SEQ ID NO: 3280828 - DNA, 25 bp, Homo sapien
gattgtacaataagtgataaggtca

SEQ ID NO: 3280829 - DNA, 25 bp, Homo sapien
gtgatgattgtacaataagtgataa

SEQ ID NO: 3280830 - DNA, 25 bp, Homo sapien
ttttcctgattgatatagaaggctg

SEQ ID NO: 3280831 - DNA, 25 bp, Homo sapien
cctcctggtatgatattggcttctg

SEQ ID NO: 3280832 - DNA, 25 bp, Homo sapien
tagaatgtgactcatcgaagtgcat

SEQ ID NO: 3280833 - DNA, 25 bp, Homo sapien
aaggctgaaggtgctagaatgtgac

SEQ ID NO: 3280834 - DNA, 25 bp, Homo sapien
aacaatgactggagacctgaattcc

SEQ ID NO: 3280835 - DNA, 25 bp, Homo sapien
atcaacatcgaaaccagaaacaatg

SEQ ID NO: 3280836 - DNA, 25 bp, Homo sapien
gggccagctatcgaagaaagaatgt

SEQ ID NO: 3280837 - DNA, 25 bp, Homo sapien
tcgaagaaagaatgtaggagccatc

SEQ ID NO: 3280838 - DNA, 25 bp, Homo sapien
ctgggaataagaggagaagaataat

SEQ ID NO: 3280839 - DNA, 25 bp, Homo sapien
taattaacatgtatgaaatccagaa

SEQ ID NO: 3280840 - DNA, 25 bp, Homo sapien
cagagaatcccagagctgaaacact

SEQ ID NO: 3280841 - DNA, 25 bp, Homo sapien
gaatggagaagcacattgttttcag

SEQ ID NO: 3280842 - DNA, 25 bp, Homo sapien
tcacactgatggaccaaaaggtcat

SEQ ID NO: 3280843 - DNA, 25 bp, Homo sapien
tgaccggagttacgttcataaacaa

SEQ ID NO: 3280844 - DNA, 25 bp, Homo sapien
caatggtgaccggagttacgttcat

SEQ ID NO: 3280845 - DNA, 25 bp, Homo sapien
taaacaaattaggaggatcagtcac

SEQ ID NO: 3280846 - DNA, 25 bp, Homo sapien
tggatatgaagcacatatgctgttc

SEQ ID NO: 3280847 - DNA, 25 bp, Homo sapien
gatatgaagcacatatgctgttcat

SEQ ID NO: 3280848 - DNA, 25 bp, Homo sapien
tgtggatatgaagcacatatgctgt

SEQ ID NO: 3280849 - DNA, 25 bp, Homo sapien
ggatatgaagcacatatgctgttca

SEQ ID NO: 3280850 - DNA, 25 bp, Homo sapien
agtggatccctcatgacaggctgca

SEQ ID NO: 3280851 - DNA, 25 bp, Homo sapien
ttgcgggaacactatagaactcagg

SEQ ID NO: 3280852 - DNA, 25 bp, Homo sapien
tcaggactcttgacaatgagaccag

SEQ ID NO: 3280853 - DNA, 25 bp, Homo sapien
taatcggctctggtgataatggcat

SEQ ID NO: 3280854 - DNA, 25 bp, Homo sapien
aactgagggtgcatcatgggagata

SEQ ID NO: 3280855 - DNA, 25 bp, Homo sapien
taatccttgcaagactagaccaaga

SEQ ID NO: 3280856 - DNA, 25 bp, Homo sapien
gcaagactagaccaagaagaagaca

SEQ ID NO: 3280857 - DNA, 25 bp, Homo sapien
tctgcaagagtaggtctgggaactg

SEQ ID NO: 3280858 - DNA, 25 bp, Homo sapien
gcatcttctaatgcaatgcaaggaa

SEQ ID NO: 3280859 - DNA, 25 bp, Homo sapien
atcaacagctgaatcaatcaagtga

SEQ ID NO: 3280860 - DNA, 25 bp, Homo sapien
gcacaaaaactttgtgaaacataca

SEQ ID NO: 3280861 - DNA, 25 bp, Homo sapien
cttgacaaaaggttacatgaactgc

SEQ ID NO: 3280862 - DNA, 25 bp, Homo sapien
gccctttgtgacttgcatcagctga

SEQ ID NO: 3280863 - DNA, 25 bp, Homo sapien
aacttctctaatcctgggcagacct

SEQ ID NO: 3280864 - DNA, 25 bp, Homo sapien
gatgcattcagatagctgccaaagg

SEQ ID NO: 3280865 - DNA, 25 bp, Homo sapien
tcttggactgtcaaggcctggcctc

SEQ ID NO: 3280866 - DNA, 25 bp, Homo sapien
acacctactcccagtttcatctggc

SEQ ID NO: 3280867 - DNA, 25 bp, Homo sapien
ggccaccatgcagaaattatttgtc

SEQ ID NO: 3280868 - DNA, 25 bp, Homo sapien
tgcccgagcccatgggatcattcca

SEQ ID NO: 3280869 - DNA, 25 bp, Homo sapien
cttccaccctgaaagtactgaggtt

SEQ ID NO: 3280870 - DNA, 25 bp, Homo sapien
tttgacttctgcgagctttcttgcc

SEQ ID NO: 3280871 - DNA, 25 bp, Homo sapien
tggttttcatatcaccaggcttgtt

SEQ ID NO: 3280872 - DNA, 25 bp, Homo sapien
aggcttgttttgacttctgcgagct

SEQ ID NO: 3280873 - DNA, 25 bp, Homo sapien
tgcgagctttcttgccacaatccct

SEQ ID NO: 3280874 - DNA, 25 bp, Homo sapien
ctagaagcaaggaagtgcaggtgat

SEQ ID NO: 3280875 - DNA, 25 bp, Homo sapien
gcaaccaacggtacaaagacagaaa

SEQ ID NO: 3280876 - DNA, 25 bp, Homo sapien
cctgcgcagaggcaaccaacggtac

SEQ ID NO: 3280877 - DNA, 25 bp, Homo sapien
tgcaggtgatatgaagcaaggctgc

SEQ ID NO: 3280878 - DNA, 25 bp, Homo sapien
tagaattggcagacgaacaaaagcc

SEQ ID NO: 3280879 - DNA, 25 bp, Homo sapien
gcatgcgtcggcctctgaaggactc

SEQ ID NO: 3280880 - DNA, 25 bp, Homo sapien
caaaagccattagcagcgtctggtc

SEQ ID NO: 3280881 - DNA, 25 bp, Homo sapien
tgccttttgacaattgcaccccagg

SEQ ID NO: 3280882 - DNA, 25 bp, Homo sapien
agctttcacttccgcctcaaactgg

SEQ ID NO: 3280883 - DNA, 25 bp, Homo sapien
acagctttcacttccgcctcaaact

SEQ ID NO: 3280884 - DNA, 25 bp, Homo sapien
cagctttcacttccgcctcaaactg

SEQ ID NO: 3280885 - DNA, 25 bp, Homo sapien
ccccaaggccctgtcttgcttctct

SEQ ID NO: 3280886 - DNA, 25 bp, Homo sapien
gctgctgagttcctcttgaacatgg

SEQ ID NO: 3280887 - DNA, 25 bp, Homo sapien
cccaaggccctgtcttgcttctctg

SEQ ID NO: 3280888 - DNA, 25 bp, Homo sapien
tcttgaacatggctccagcttggag

SEQ ID NO: 3280889 - DNA, 25 bp, Homo sapien
tccccatagagaatgctgctgccca

SEQ ID NO: 3280890 - DNA, 25 bp, Homo sapien
tgcccaaatcacaccctccaaactc

SEQ ID NO: 3280891 - DNA, 25 bp, Homo sapien
ccttccccatagagaatgctgctgc

SEQ ID NO: 3280892 - DNA, 25 bp, Homo sapien
tgctgcccaaatcacaccctccaaa

SEQ ID NO: 3280893 - DNA, 25 bp, Homo sapien
caccagcctgccattcctagtcttg

SEQ ID NO: 3280894 - DNA, 25 bp, Homo sapien
tctgggccaatgacctaaattctac

SEQ ID NO: 3280895 - DNA, 25 bp, Homo sapien
tagtcttgcctctcactctgttctg

SEQ ID NO: 3280896 - DNA, 25 bp, Homo sapien
tgcctctcactctgttctgggccaa

SEQ ID NO: 3280897 - DNA, 25 bp, Homo sapien
agccaagattaagcctacatctgga

SEQ ID NO: 3280898 - DNA, 25 bp, Homo sapien
aagtgagccaagattaagcctacat

SEQ ID NO: 3280899 - DNA, 25 bp, Homo sapien
tgagccaagattaagcctacatctg

SEQ ID NO: 3280900 - DNA, 25 bp, Homo sapien
agtgagccaagattaagcctacatc

SEQ ID NO: 3280901 - DNA, 25 bp, Homo sapien
tcccagtcctttctaagctgcagtg

SEQ ID NO: 3280902 - DNA, 25 bp, Homo sapien
tatttggaaagctggtgagcatgcc

SEQ ID NO: 3280903 - DNA, 25 bp, Homo sapien
cgaaggagcaatgaaccaggtattt

SEQ ID NO: 3280904 - DNA, 25 bp, Homo sapien
ctttctaagctgcagtggaaggcga

SEQ ID NO: 3280905 - DNA, 25 bp, Homo sapien
ttagcctttaatgtgggtgggtaca

SEQ ID NO: 3280906 - DNA, 25 bp, Homo sapien
tcacattttagcctttaatgtgggt

SEQ ID NO: 3280907 - DNA, 25 bp, Homo sapien
acaaagccacagagtttgttgccat

SEQ ID NO: 3280908 - DNA, 25 bp, Homo sapien
gcctttaatgtgggtgggtacacaa

SEQ ID NO: 3280909 - DNA, 25 bp, Homo sapien
gaggaatttggcctgccgttgaaga

SEQ ID NO: 3280910 - DNA, 25 bp, Homo sapien
cccgcgactctggtgacattttgcc

SEQ ID NO: 3280911 - DNA, 25 bp, Homo sapien
cagccgctggtgacatcttgccatc

SEQ ID NO: 3280912 - DNA, 25 bp, Homo sapien
tacagaatgttgctcgcaggaggaa

SEQ ID NO: 3280913 - DNA, 25 bp, Homo sapien
gtgcaatcgctccaaatcagggcgg

SEQ ID NO: 3280914 - DNA, 25 bp, Homo sapien
aaatcagggcgggcggcactaagcc

SEQ ID NO: 3280915 - DNA, 25 bp, Homo sapien
actaagccggggagcaaacaccgct

SEQ ID NO: 3280916 - DNA, 25 bp, Homo sapien
ccaagccagtgcaatcgctccaaat

SEQ ID NO: 3280917 - DNA, 25 bp, Homo sapien
gcggaggcagcggtccggaatggct

SEQ ID NO: 3280918 - DNA, 25 bp, Homo sapien
ggcggaggcagcggtccggaatggc

SEQ ID NO: 3280919 - DNA, 25 bp, Homo sapien
gaggcagcggtccggaatggctctg

SEQ ID NO: 3280920 - DNA, 25 bp, Homo sapien
ggaggcagcggtccggaatggctct

SEQ ID NO: 3280921 - DNA, 25 bp, Homo sapien
gctctcatggtttacaggaaggctc

SEQ ID NO: 3280922 - DNA, 25 bp, Homo sapien
aatgacgttgggttgcttcctaggc

SEQ ID NO: 3280923 - DNA, 25 bp, Homo sapien
tccccaagaggaagaattgcttttc

SEQ ID NO: 3280924 - DNA, 25 bp, Homo sapien
aacaggttgagtttatgggccagaa

SEQ ID NO: 3280925 - DNA, 25 bp, Homo sapien
cctggattctgccgggctccaggcc

SEQ ID NO: 3280926 - DNA, 25 bp, Homo sapien
ctcctggattctgccgggctccagg

SEQ ID NO: 3280927 - DNA, 25 bp, Homo sapien
cccctttgctactgtgggctcctgg

SEQ ID NO: 3280928 - DNA, 25 bp, Homo sapien
gctactgtgggctcctggattctgc

SEQ ID NO: 3280929 - DNA, 25 bp, Homo sapien
aggcgccgcagatccgggtttgcct

SEQ ID NO: 3280930 - DNA, 25 bp, Homo sapien
gcagatccgggtttgcctgcccagc

SEQ ID NO: 3280931 - DNA, 25 bp, Homo sapien
agatccgggtttgcctgcccagcca

SEQ ID NO: 3280932 - DNA, 25 bp, Homo sapien
ccgcagatccgggtttgcctgccca

SEQ ID NO: 3280933 - DNA, 25 bp, Homo sapien
ccacaaaaatcctgctttgattaca

SEQ ID NO: 3280934 - DNA, 25 bp, Homo sapien
gattagtagaatgaaaaaggcacct

SEQ ID NO: 3280935 - DNA, 25 bp, Homo sapien
taacatttcttacggatggctacca

SEQ ID NO: 3280936 - DNA, 25 bp, Homo sapien
tgcggtctcctctatttcatgaaag

SEQ ID NO: 3280937 - DNA, 25 bp, Homo sapien
tacaatttagactccctgggaccag

SEQ ID NO: 3280938 - DNA, 25 bp, Homo sapien
tacagttccaagtagcctggcagac

SEQ ID NO: 3280939 - DNA, 25 bp, Homo sapien
gaccatacacctacaaacatgtggg

SEQ ID NO: 3280940 - DNA, 25 bp, Homo sapien
caagtggttcgtttttgccctggag

SEQ ID NO: 3280941 - DNA, 25 bp, Homo sapien
gagtaggtcttatcttcttagcgga

SEQ ID NO: 3280942 - DNA, 25 bp, Homo sapien
catcattctcgcaattagtgacagg

SEQ ID NO: 3280943 - DNA, 25 bp, Homo sapien
ttggactcgccaaaagacagactgt

SEQ ID NO: 3280944 - DNA, 25 bp, Homo sapien
taggtatcaagacccttcaggcaga

SEQ ID NO: 3280945 - DNA, 25 bp, Homo sapien
tctggatgcagtcggtcagttgcaa

SEQ ID NO: 3280946 - DNA, 25 bp, Homo sapien
tgttaagtggcttcaggagtcgtgt

SEQ ID NO: 3280947 - DNA, 25 bp, Homo sapien
ggaatgttaagtggcttcaggagtc

SEQ ID NO: 3280948 - DNA, 25 bp, Homo sapien
gtcggtcagttgcaaataacagctc

SEQ ID NO: 3280949 - DNA, 25 bp, Homo sapien
ccaatctcagggtattggatgatga

SEQ ID NO: 3280950 - DNA, 25 bp, Homo sapien
aggaaaagtagaaggcagccagctg

SEQ ID NO: 3280951 - DNA, 25 bp, Homo sapien
gcaaacacaccgcagggaattaggg

SEQ ID NO: 3280952 - DNA, 25 bp, Homo sapien
gctgaatggcacctggcgctagtgc

SEQ ID NO: 3280953 - DNA, 25 bp, Homo sapien
gacagatttatctctgcaaaggtgg

SEQ ID NO: 3280954 - DNA, 25 bp, Homo sapien
gggagagcctattccctgggtctgg

SEQ ID NO: 3280955 - DNA, 25 bp, Homo sapien
ttgcacaagcagtattgtatgcacc

SEQ ID NO: 3280956 - DNA, 25 bp, Homo sapien
gatgtgctttgcaagggcctggtta

SEQ ID NO: 3280957 - DNA, 25 bp, Homo sapien
aagaatctgtcactctcgggtagtg

SEQ ID NO: 3280958 - DNA, 25 bp, Homo sapien
aagtgttgacttccagagcagcaat

SEQ ID NO: 3280959 - DNA, 25 bp, Homo sapien
tctcgggtagtgtgctgggcttcca

SEQ ID NO: 3280960 - DNA, 25 bp, Homo sapien
taactgagcccaaagaatctgtcac

SEQ ID NO: 3280961 - DNA, 25 bp, Homo sapien
gtcaaagcagataacttgacatcaa

SEQ ID NO: 3280962 - DNA, 25 bp, Homo sapien
tggaggacatcagccagggaaccaa

SEQ ID NO: 3280963 - DNA, 25 bp, Homo sapien
aaaaatatatcgactgactgtgaga

SEQ ID NO: 3280964 - DNA, 25 bp, Homo sapien
tcaccaacagcaagcctctgtgtca

SEQ ID NO: 3280965 - DNA, 25 bp, Homo sapien
ggatgttcggtctttgttctcaggc

SEQ ID NO: 3280966 - DNA, 25 bp, Homo sapien
gccctctgggctttccgttgctcca

SEQ ID NO: 3280967 - DNA, 25 bp, Homo sapien
ccagaccatggctgtaatttgtagg

SEQ ID NO: 3280968 - DNA, 25 bp, Homo sapien
agcccttaggagtgacccagccctc

SEQ ID NO: 3280969 - DNA, 25 bp, Homo sapien
taacactcagtatcaaaaggagcaa

SEQ ID NO: 3280970 - DNA, 25 bp, Homo sapien
aaagtgacccacatatgcacaggca

SEQ ID NO: 3280971 - DNA, 25 bp, Homo sapien
catattcattcgataggcagctttt

SEQ ID NO: 3280972 - DNA, 25 bp, Homo sapien
ttgggagattcttccccaaagtgac

SEQ ID NO: 3280973 - DNA, 25 bp, Homo sapien
ggcaagggttttacatcttactgat

SEQ ID NO: 3280974 - DNA, 25 bp, Homo sapien
tactgatttaacaggctgtgcatcc

SEQ ID NO: 3280975 - DNA, 25 bp, Homo sapien
cttcttgggatcatctgccaagtaa

SEQ ID NO: 3280976 - DNA, 25 bp, Homo sapien
aagtaaactacctgctctctcatcc

SEQ ID NO: 3280977 - DNA, 25 bp, Homo sapien
tcattggcttggtgtcatagcattt

SEQ ID NO: 3280978 - DNA, 25 bp, Homo sapien
attggcttggtgtcatagcatttaa

SEQ ID NO: 3280979 - DNA, 25 bp, Homo sapien
ttggcttggtgtcatagcatttaac

SEQ ID NO: 3280980 - DNA, 25 bp, Homo sapien
cattggcttggtgtcatagcattta

SEQ ID NO: 3280981 - DNA, 25 bp, Homo sapien
ctccagggcatgtcgggctggttct

SEQ ID NO: 3280982 - DNA, 25 bp, Homo sapien
caaaatgacccagtcctccaccact

SEQ ID NO: 3280983 - DNA, 25 bp, Homo sapien
ctgagaacaaaggaactccagggca

SEQ ID NO: 3280984 - DNA, 25 bp, Homo sapien
cactgagaacaaaggaactccaggg

SEQ ID NO: 3280985 - DNA, 25 bp, Homo sapien
acccctacttctgagctcttgttca

SEQ ID NO: 3280986 - DNA, 25 bp, Homo sapien
gagctcttgttcaaagcatggagga

SEQ ID NO: 3280987 - DNA, 25 bp, Homo sapien
cttctgagctcttgttcaaagcatg

SEQ ID NO: 3280988 - DNA, 25 bp, Homo sapien
tgttcaaagcatggaggactcagta

SEQ ID NO: 3280989 - DNA, 25 bp, Homo sapien
ggttcctggcttcaacgatgccaca

SEQ ID NO: 3280990 - DNA, 25 bp, Homo sapien
tcctggcttcaacgatgccacaaga

SEQ ID NO: 3280991 - DNA, 25 bp, Homo sapien
ggcttcaacgatgccacaagatctt

SEQ ID NO: 3280992 - DNA, 25 bp, Homo sapien
ctgggttcctggcttcaacgatgcc

SEQ ID NO: 3280993 - DNA, 25 bp, Homo sapien
gatcaggagggggtagtcactagga

SEQ ID NO: 3280994 - DNA, 25 bp, Homo sapien
agtcactaggatgaggccggctcac

SEQ ID NO: 3280995 - DNA, 25 bp, Homo sapien
gtagtcactaggatgaggccggctc

SEQ ID NO: 3280996 - DNA, 25 bp, Homo sapien
gggtagtcactaggatgaggccggc

SEQ ID NO: 3280997 - DNA, 25 bp, Homo sapien
acaccagcaatatcagatggatggc

SEQ ID NO: 3280998 - DNA, 25 bp, Homo sapien
aaacaccagcaatatcagatggatg

SEQ ID NO: 3280999 - DNA, 25 bp, Homo sapien
cagcaatatcagatggatggcagtg

SEQ ID NO: 3281000 - DNA, 25 bp, Homo sapien
caccagcaatatcagatggatggca

SEQ ID NO: 3281001 - DNA, 25 bp, Homo sapien
gccagaatggagcatgcatggagtc

SEQ ID NO: 3281002 - DNA, 25 bp, Homo sapien
cagaatggagcatgcatggagtcct

SEQ ID NO: 3281003 - DNA, 25 bp, Homo sapien
cagccagaatggagcatgcatggag

SEQ ID NO: 3281004 - DNA, 25 bp, Homo sapien
cccagccagaatggagcatgcatgg

SEQ ID NO: 3281005 - DNA, 25 bp, Homo sapien
tgggtcacaggcagtcccgaggagt

SEQ ID NO: 3281006 - DNA, 25 bp, Homo sapien
gtaagtgttcttgcccaacacaacg

SEQ ID NO: 3281007 - DNA, 25 bp, Homo sapien
aacacaacgcatctgtgggtcacag

SEQ ID NO: 3281008 - DNA, 25 bp, Homo sapien
aatgaaggtagtaagtgttcttgcc

SEQ ID NO: 3281009 - DNA, 25 bp, Homo sapien
tgcaggtatctgtccaatccacaag

SEQ ID NO: 3281010 - DNA, 25 bp, Homo sapien
ccctgctgtatattcctctgcaggt

SEQ ID NO: 3281011 - DNA, 25 bp, Homo sapien
tgtccaatccacaagccaacaatct

SEQ ID NO: 3281012 - DNA, 25 bp, Homo sapien
ctgctgtatattcctctgcaggtat

SEQ ID NO: 3281013 - DNA, 25 bp, Homo sapien
gtcagctgcaggtctattggagctt

SEQ ID NO: 3281014 - DNA, 25 bp, Homo sapien
ccttcatttgtacccttggccagac

SEQ ID NO: 3281015 - DNA, 25 bp, Homo sapien
gaccttactaaccaggctctgaaag

SEQ ID NO: 3281016 - DNA, 25 bp, Homo sapien
ccctgtacagggtctgactgcacca

SEQ ID NO: 3281017 - DNA, 25 bp, Homo sapien
tctgggagagggcatattggcattt

SEQ ID NO: 3281018 - DNA, 25 bp, Homo sapien
ggcctgaagacatgtgttcaatatc

SEQ ID NO: 3281019 - DNA, 25 bp, Homo sapien
cacaacttgcttcaacaatggctta

SEQ ID NO: 3281020 - DNA, 25 bp, Homo sapien
acggaatctggcctctcgggatgaa

SEQ ID NO: 3281021 - DNA, 25 bp, Homo sapien
cagttttaaggagatcagtgaggcc

SEQ ID NO: 3281022 - DNA, 25 bp, Homo sapien
attgtttggtttgtctggagagagg

SEQ ID NO: 3281023 - DNA, 25 bp, Homo sapien
ttgtttggtttgtctggagagagga

SEQ ID NO: 3281024 - DNA, 25 bp, Homo sapien
gattgtttggtttgtctggagagag

SEQ ID NO: 3281025 - DNA, 25 bp, Homo sapien
tgtttggtttgtctggagagaggac

SEQ ID NO: 3281026 - DNA, 25 bp, Homo sapien
tgcgctttctgagctgtttttcacc

SEQ ID NO: 3281027 - DNA, 25 bp, Homo sapien
cctgcgctttctgagctgtttttca

SEQ ID NO: 3281028 - DNA, 25 bp, Homo sapien
cgctttctgagctgtttttcaccac

SEQ ID NO: 3281029 - DNA, 25 bp, Homo sapien
gcgctttctgagctgtttttcacca

SEQ ID NO: 3281030 - DNA, 25 bp, Homo sapien
aatcctccagtcagatatggcacga

SEQ ID NO: 3281031 - DNA, 25 bp, Homo sapien
cctccagtcagatatggcacgaagt

SEQ ID NO: 3281032 - DNA, 25 bp, Homo sapien
ttcttttctcgcttggtggaccacc

SEQ ID NO: 3281033 - DNA, 25 bp, Homo sapien
ttttctcgcttggtggaccaccttc

SEQ ID NO: 3281034 - DNA, 25 bp, Homo sapien
gtgcaaggcacagtgtatctggggt

SEQ ID NO: 3281035 - DNA, 25 bp, Homo sapien
cacagtgtatctggggtgataggat

SEQ ID NO: 3281036 - DNA, 25 bp, Homo sapien
caggggtcctgtgacccagtgtaga

SEQ ID NO: 3281037 - DNA, 25 bp, Homo sapien
tcaggggtcctgtgacccagtgtag

SEQ ID NO: 3281038 - DNA, 25 bp, Homo sapien
tagctgcgtggactgcttcaagctt

SEQ ID NO: 3281039 - DNA, 25 bp, Homo sapien
aaccagtccaagtagctcctcagta

SEQ ID NO: 3281040 - DNA, 25 bp, Homo sapien
gctgcgtggactgcttcaagcttca

SEQ ID NO: 3281041 - DNA, 25 bp, Homo sapien
cttgaaaccagtccaagtagctcct

SEQ ID NO: 3281042 - DNA, 25 bp, Homo sapien
ttttgctgttactgttggcatagct

SEQ ID NO: 3281043 - DNA, 25 bp, Homo sapien
catagctgggggctcagttctgata

SEQ ID NO: 3281044 - DNA, 25 bp, Homo sapien
caaaattgactctgaacaaccagcc

SEQ ID NO: 3281045 - DNA, 25 bp, Homo sapien
ggggctcagttctgatagtgaagat

SEQ ID NO: 3281046 - DNA, 25 bp, Homo sapien
gaagtaaagagttcatccacggcaa

SEQ ID NO: 3281047 - DNA, 25 bp, Homo sapien
gagctccagcaatatcccgaagtga

SEQ ID NO: 3281048 - DNA, 25 bp, Homo sapien
ccacggcaattttggatttgtgaaa

SEQ ID NO: 3281049 - DNA, 25 bp, Homo sapien
ccaggaacatatacagacttaaact

SEQ ID NO: 3281050 - DNA, 25 bp, Homo sapien
cactgcacctgttgttgtaaatctc

SEQ ID NO: 3281051 - DNA, 25 bp, Homo sapien
taaatctccattgaaccgagccagc

SEQ ID NO: 3281052 - DNA, 25 bp, Homo sapien
gcatcactatgcctgaaatttaagc

SEQ ID NO: 3281053 - DNA, 25 bp, Homo sapien
gaaggcaaggtggttaataatatgg

SEQ ID NO: 3281054 - DNA, 25 bp, Homo sapien
caaagcacattcaagtagcattgca

SEQ ID NO: 3281055 - DNA, 25 bp, Homo sapien
gcacattcaagtagcattgcaagca

SEQ ID NO: 3281056 - DNA, 25 bp, Homo sapien
aagcacattcaagtagcattgcaag

SEQ ID NO: 3281057 - DNA, 25 bp, Homo sapien
acattcaagtagcattgcaagcagg

SEQ ID NO: 3281058 - DNA, 25 bp, Homo sapien
taaagaactggtgaactacagccgg

SEQ ID NO: 3281059 - DNA, 25 bp, Homo sapien
tccaccatgttcatgtaggatgggt

SEQ ID NO: 3281060 - DNA, 25 bp, Homo sapien
gaaggcagaatatgcactggacagc

SEQ ID NO: 3281061 - DNA, 25 bp, Homo sapien
ggacagctgagaaggtcttagcttc

SEQ ID NO: 3281062 - DNA, 25 bp, Homo sapien
tgcaatggctctgtatcacccatct

SEQ ID NO: 3281063 - DNA, 25 bp, Homo sapien
gcaatggctctgtatcacccatctt

SEQ ID NO: 3281064 - DNA, 25 bp, Homo sapien
catgcaatggctctgtatcacccat

SEQ ID NO: 3281065 - DNA, 25 bp, Homo sapien
aatggctctgtatcacccatcttgg

SEQ ID NO: 3281066 - DNA, 25 bp, Homo sapien
gaaggatggccattcggaaagggct

SEQ ID NO: 3281067 - DNA, 25 bp, Homo sapien
tcaagatttgttgaaggatggccat

SEQ ID NO: 3281068 - DNA, 25 bp, Homo sapien
ggatggccattcggaaagggctttc

SEQ ID NO: 3281069 - DNA, 25 bp, Homo sapien
caagatttgttgaaggatggccatt

SEQ ID NO: 3281070 - DNA, 25 bp, Homo sapien
tctcttgtgaccacgctgaagtctc

SEQ ID NO: 3281071 - DNA, 25 bp, Homo sapien
gaccacgctgaagtctcaacgtttc

SEQ ID NO: 3281072 - DNA, 25 bp, Homo sapien
gcactgcagtctcttgtgaccacgc

SEQ ID NO: 3281073 - DNA, 25 bp, Homo sapien
tggctccgctctcagcactgcagtc

SEQ ID NO: 3281074 - DNA, 25 bp, Homo sapien
ggggtggaccgatggcaccaacaaa

SEQ ID NO: 3281075 - DNA, 25 bp, Homo sapien
agaaggggtggaccgatggcaccaa

SEQ ID NO: 3281076 - DNA, 25 bp, Homo sapien
ctgcaggtctactctaggcagaagg

SEQ ID NO: 3281077 - DNA, 25 bp, Homo sapien
tgcaggtctactctaggcagaaggg

SEQ ID NO: 3281078 - DNA, 25 bp, Homo sapien
tatgagacaagctgtagatgccctc

SEQ ID NO: 3281079 - DNA, 25 bp, Homo sapien
gggtatgagacaagctgtagatgcc

SEQ ID NO: 3281080 - DNA, 25 bp, Homo sapien
atggggtatgagacaagctgtagat

SEQ ID NO: 3281081 - DNA, 25 bp, Homo sapien
acacttgtggatggggtatgagaca

SEQ ID NO: 3281082 - DNA, 25 bp, Homo sapien
aatagaaatcttcatgtgactgaac

SEQ ID NO: 3281083 - DNA, 25 bp, Homo sapien
tagaaatcttcatgtgactgaacca

SEQ ID NO: 3281084 - DNA, 25 bp, Homo sapien
aatcttcatgtgactgaaccattcc

SEQ ID NO: 3281085 - DNA, 25 bp, Homo sapien
aaaatagaaatcttcatgtgactga

SEQ ID NO: 3281086 - DNA, 25 bp, Homo sapien
gccagtctgagtgcctgtattcttc

SEQ ID NO: 3281087 - DNA, 25 bp, Homo sapien
ctgcctgtggaggaccgggcttgat

SEQ ID NO: 3281088 - DNA, 25 bp, Homo sapien
ggccccataccaggccagtctgagt

SEQ ID NO: 3281089 - DNA, 25 bp, Homo sapien
gcctgtattcttctatcaagtatgt

SEQ ID NO: 3281090 - DNA, 25 bp, Homo sapien
ttcgagcttcacctttgtcctctct

SEQ ID NO: 3281091 - DNA, 25 bp, Homo sapien
cttcgagcttcacctttgtcctctc

SEQ ID NO: 3281092 - DNA, 25 bp, Homo sapien
acctttgtcctctctcccacaaggg

SEQ ID NO: 3281093 - DNA, 25 bp, Homo sapien
tttgtcctctctcccacaagggcag

SEQ ID NO: 3281094 - DNA, 25 bp, Homo sapien
gaaagctgcaacatctggagaactg

SEQ ID NO: 3281095 - DNA, 25 bp, Homo sapien
gtctacaaagcatgcacctgggtct

SEQ ID NO: 3281096 - DNA, 25 bp, Homo sapien
tgggtgtgtgcttctatttaataaa

SEQ ID NO: 3281097 - DNA, 25 bp, Homo sapien
aaccctggcacactgtataaacatc

SEQ ID NO: 3281098 - DNA, 25 bp, Homo sapien
gtctacagatctcacagccaccata

SEQ ID NO: 3281099 - DNA, 25 bp, Homo sapien
gaggagcgactctaacttgggagta

SEQ ID NO: 3281100 - DNA, 25 bp, Homo sapien
aaaggaacagctctcggaggagcga

SEQ ID NO: 3281101 - DNA, 25 bp, Homo sapien
taacttgggagtagttgagtcccac

SEQ ID NO: 3281102 - DNA, 25 bp, Homo sapien
catggccagaaatacgggaggaaac

SEQ ID NO: 3281103 - DNA, 25 bp, Homo sapien
gccacccatggccagaaatacggga

SEQ ID NO: 3281104 - DNA, 25 bp, Homo sapien
cagccacccatggccagaaatacgg

SEQ ID NO: 3281105 - DNA, 25 bp, Homo sapien
acccatggccagaaatacgggagga

SEQ ID NO: 3281106 - DNA, 25 bp, Homo sapien
ctttcccatatcttggagtcgggtt

SEQ ID NO: 3281107 - DNA, 25 bp, Homo sapien
tgtaaggtccttggactgtcttctc

SEQ ID NO: 3281108 - DNA, 25 bp, Homo sapien
gagtcgggttcgaaaaggcaatgta

SEQ ID NO: 3281109 - DNA, 25 bp, Homo sapien
cattaagaatttgctgtaaggtcct

SEQ ID NO: 3281110 - DNA, 25 bp, Homo sapien
cttgaggtggcaaattctactttga

SEQ ID NO: 3281111 - DNA, 25 bp, Homo sapien
ggagagttgactccttgtactgtca

SEQ ID NO: 3281112 - DNA, 25 bp, Homo sapien
cactctaacttccttgaggtggcaa

SEQ ID NO: 3281113 - DNA, 25 bp, Homo sapien
ctttgaacaattgctcccacgggag

SEQ ID NO: 3281114 - DNA, 25 bp, Homo sapien
ggcatgggattcttaaagtacctaa

SEQ ID NO: 3281115 - DNA, 25 bp, Homo sapien
tgcgctcggcatgggattcttaaag

SEQ ID NO: 3281116 - DNA, 25 bp, Homo sapien
cactgcgctcggcatgggattctta

SEQ ID NO: 3281117 - DNA, 25 bp, Homo sapien
taaatttctagactacaagaaagaa

SEQ ID NO: 3281118 - DNA, 25 bp, Homo sapien
aaaggtacactgtagagtcactccc

SEQ ID NO: 3281119 - DNA, 25 bp, Homo sapien
ccagatatgttgatttcgaagtcca

SEQ ID NO: 3281120 - DNA, 25 bp, Homo sapien
attcctcctatctaaagaaaattga

SEQ ID NO: 3281121 - DNA, 25 bp, Homo sapien
agaaaattgaagtaagttgtcaaag

SEQ ID NO: 3281122 - DNA, 25 bp, Homo sapien
aagggaaacaaagcgcagaccgcat

SEQ ID NO: 3281123 - DNA, 25 bp, Homo sapien
tactgcaggtcttggcagtgccacg

SEQ ID NO: 3281124 - DNA, 25 bp, Homo sapien
ccgctctagacagctgggtttggag

SEQ ID NO: 3281125 - DNA, 25 bp, Homo sapien
ttggcagtgccacggcaagggaaac

SEQ ID NO: 3281126 - DNA, 25 bp, Homo sapien
tgcacaaggtcatgcctttccaagt

SEQ ID NO: 3281127 - DNA, 25 bp, Homo sapien
atcctccagctggagtggagtcgcc

SEQ ID NO: 3281128 - DNA, 25 bp, Homo sapien
gcaaggaggtcttggcgactgtaat

SEQ ID NO: 3281129 - DNA, 25 bp, Homo sapien
tgtaatgtgcagacgataacagagc

SEQ ID NO: 3281130 - DNA, 25 bp, Homo sapien
tccttagaactaagtttgctgaagg

SEQ ID NO: 3281131 - DNA, 25 bp, Homo sapien
actaagtttgctgaagggctgttta

SEQ ID NO: 3281132 - DNA, 25 bp, Homo sapien
cttagaactaagtttgctgaagggc

SEQ ID NO: 3281133 - DNA, 25 bp, Homo sapien
tttgctgaagggctgtttagtgctc

SEQ ID NO: 3281134 - DNA, 25 bp, Homo sapien
tggttcctctgttgcactagccaca

SEQ ID NO: 3281135 - DNA, 25 bp, Homo sapien
cacagaatgttctacgagataccac

SEQ ID NO: 3281136 - DNA, 25 bp, Homo sapien
gataaacaaaagacacggatctctg

SEQ ID NO: 3281137 - DNA, 25 bp, Homo sapien
gccatctatgggtagcagctatcat

SEQ ID NO: 3281138 - DNA, 25 bp, Homo sapien
taggacagatgtgccgctgaacata

SEQ ID NO: 3281139 - DNA, 25 bp, Homo sapien
acagatgtgccgctgaacatattct

SEQ ID NO: 3281140 - DNA, 25 bp, Homo sapien
cagatgtgccgctgaacatattctg

SEQ ID NO: 3281141 - DNA, 25 bp, Homo sapien
ggacagatgtgccgctgaacatatt

SEQ ID NO: 3281142 - DNA, 25 bp, Homo sapien
catcaccttctaagtcaagggcttg

SEQ ID NO: 3281143 - DNA, 25 bp, Homo sapien
ttggagcacatcaccttctaagtca

SEQ ID NO: 3281144 - DNA, 25 bp, Homo sapien
gcacatcaccttctaagtcaagggc

SEQ ID NO: 3281145 - DNA, 25 bp, Homo sapien
agagcttggagcacatcaccttcta

SEQ ID NO: 3281146 - DNA, 25 bp, Homo sapien
tgtgcttttagaggcagacacgcta

SEQ ID NO: 3281147 - DNA, 25 bp, Homo sapien
acagttctgggctcacagtagatac

SEQ ID NO: 3281148 - DNA, 25 bp, Homo sapien
gacagaacattcttggcggaaatcc

SEQ ID NO: 3281149 - DNA, 25 bp, Homo sapien
tcttacactatagcaatgaggacag

SEQ ID NO: 3281150 - DNA, 25 bp, Homo sapien
tctgatgctgctgctatctgtttta

SEQ ID NO: 3281151 - DNA, 25 bp, Homo sapien
ccaaagttctgatgctgctgctatc

SEQ ID NO: 3281152 - DNA, 25 bp, Homo sapien
aaagttctgatgctgctgctatctg

SEQ ID NO: 3281153 - DNA, 25 bp, Homo sapien
gatgctgctgctatctgttttatat

SEQ ID NO: 3281154 - DNA, 25 bp, Homo sapien
cagatgaaatagtaggtgcaataca

SEQ ID NO: 3281155 - DNA, 25 bp, Homo sapien
gatgaaatagtaggtgcaatacagg

SEQ ID NO: 3281156 - DNA, 25 bp, Homo sapien
tgacagatgaaatagtaggtgcaat

SEQ ID NO: 3281157 - DNA, 25 bp, Homo sapien
gaaatagtaggtgcaatacaggttt

SEQ ID NO: 3281158 - DNA, 25 bp, Homo sapien
tttgccctggtattatcactgtttt

SEQ ID NO: 3281159 - DNA, 25 bp, Homo sapien
gtagtctgtttctctgcaaactgct

SEQ ID NO: 3281160 - DNA, 25 bp, Homo sapien
tcttttgccctggtattatcactgt

SEQ ID NO: 3281161 - DNA, 25 bp, Homo sapien
ctttagcttcacgttttctattctc

SEQ ID NO: 3281162 - DNA, 25 bp, Homo sapien
taagaaaaatatatgtgggcgggca

SEQ ID NO: 3281163 - DNA, 25 bp, Homo sapien
aaaatatatgtgggcgggcatggtg

SEQ ID NO: 3281164 - DNA, 25 bp, Homo sapien
agaaaaatatatgtgggcgggcatg

SEQ ID NO: 3281165 - DNA, 25 bp, Homo sapien
aaaaatatatgtgggcgggcatggt

SEQ ID NO: 3281166 - DNA, 25 bp, Homo sapien
ataaacagttaagacaagattagag

SEQ ID NO: 3281167 - DNA, 25 bp, Homo sapien
aaataaacagttaagacaagattag

SEQ ID NO: 3281168 - DNA, 25 bp, Homo sapien
taagaactatgggactaggtgaaaa

SEQ ID NO: 3281169 - DNA, 25 bp, Homo sapien
aagcctctaagaactatgggactag

SEQ ID NO: 3281170 - DNA, 25 bp, Homo sapien
tctccaaccatacctcaatttcata

SEQ ID NO: 3281171 - DNA, 25 bp, Homo sapien
tcataagatggggttcatttgaatc

SEQ ID NO: 3281172 - DNA, 25 bp, Homo sapien
ccatacctcaatttcataagatggg

SEQ ID NO: 3281173 - DNA, 25 bp, Homo sapien
tccaaccatacctcaatttcataag

SEQ ID NO: 3281174 - DNA, 25 bp, Homo sapien
ttggaacacagtgatgaaagaggaa

SEQ ID NO: 3281175 - DNA, 25 bp, Homo sapien
gtaaagcaccacttttagccaccaa

SEQ ID NO: 3281176 - DNA, 25 bp, Homo sapien
caataacttatgtttcgacatcccc

SEQ ID NO: 3281177 - DNA, 25 bp, Homo sapien
agatccttgtataaattggaacaca

SEQ ID NO: 3281178 - DNA, 25 bp, Homo sapien
gttagcagccaaaatgtaacgttac

SEQ ID NO: 3281179 - DNA, 25 bp, Homo sapien
ttagcagccaaaatgtaacgttacc

SEQ ID NO: 3281180 - DNA, 25 bp, Homo sapien
gaacttgatgccagcttacaagagg

SEQ ID NO: 3281181 - DNA, 25 bp, Homo sapien
agcaggaacttgatgccagcttaca

SEQ ID NO: 3281182 - DNA, 25 bp, Homo sapien
gagaggaaaattcagacctagtctt

SEQ ID NO: 3281183 - DNA, 25 bp, Homo sapien
tagataagcattagcaccagttaac

SEQ ID NO: 3281184 - DNA, 25 bp, Homo sapien
ccatataatagaatatcctggccat

SEQ ID NO: 3281185 - DNA, 25 bp, Homo sapien
ctacaaaaatgtgttggtgcatacc

SEQ ID NO: 3281186 - DNA, 25 bp, Homo sapien
taaataccacctgaatgtggctagc

SEQ ID NO: 3281187 - DNA, 25 bp, Homo sapien
ttttgcccccagcagtaaataccac

SEQ ID NO: 3281188 - DNA, 25 bp, Homo sapien
ttgaccctctcaacactgcatttgg

SEQ ID NO: 3281189 - DNA, 25 bp, Homo sapien
tgtggctagcataccaaacattcca

SEQ ID NO: 3281190 - DNA, 25 bp, Homo sapien
tcaaaagacagaatggcaggcaaga

SEQ ID NO: 3281191 - DNA, 25 bp, Homo sapien
acttttcacttggacatctgggctg

SEQ ID NO: 3281192 - DNA, 25 bp, Homo sapien
tagaaaggattgttctcctcagtcc

SEQ ID NO: 3281193 - DNA, 25 bp, Homo sapien
taaagtaggtgttctctacagcatc

SEQ ID NO: 3281194 - DNA, 25 bp, Homo sapien
aatgcgctgatatctagttggcctt

SEQ ID NO: 3281195 - DNA, 25 bp, Homo sapien
ccctggctcttgtcagactcattcc

SEQ ID NO: 3281196 - DNA, 25 bp, Homo sapien
cactccggggctaagcaaatgcgct

SEQ ID NO: 3281197 - DNA, 25 bp, Homo sapien
tctagttggccttgtgtcctcgtaa

SEQ ID NO: 3281198 - DNA, 25 bp, Homo sapien
ccactggaaccatcataagactttg

SEQ ID NO: 3281199 - DNA, 25 bp, Homo sapien
taggccaaaattctacgtgagagct

SEQ ID NO: 3281200 - DNA, 25 bp, Homo sapien
ttttggagcactgtaagatcaagac

SEQ ID NO: 3281201 - DNA, 25 bp, Homo sapien
gttgatttttcgaaatcctctggca

SEQ ID NO: 3281202 - DNA, 25 bp, Homo sapien
cgctagtggctaatgaatctgagca

SEQ ID NO: 3281203 - DNA, 25 bp, Homo sapien
ctttaaagtgtgcaactcagtggat

SEQ ID NO: 3281204 - DNA, 25 bp, Homo sapien
ggatgcccagagagttagtaaaaca

SEQ ID NO: 3281205 - DNA, 25 bp, Homo sapien
tcaactacactaggctaagggatgc

SEQ ID NO: 3281206 - DNA, 25 bp, Homo sapien
cagaagaggaccaaatttgcaggtc

SEQ ID NO: 3281207 - DNA, 25 bp, Homo sapien
accaaatttgcaggtctcagagagc

SEQ ID NO: 3281208 - DNA, 25 bp, Homo sapien
aatttgagatatccatcttctctgg

SEQ ID NO: 3281209 - DNA, 25 bp, Homo sapien
gagagcaaatttgagatatccatct

SEQ ID NO: 3281210 - DNA, 25 bp, Homo sapien
ataataaatatctgtctctctttct

SEQ ID NO: 3281211 - DNA, 25 bp, Homo sapien
tttcatgggcctccagtttaagaca

SEQ ID NO: 3281212 - DNA, 25 bp, Homo sapien
caatagattatgatatttctcagcc

SEQ ID NO: 3281213 - DNA, 25 bp, Homo sapien
taccactagctttcatgggcctcca

SEQ ID NO: 3281214 - DNA, 25 bp, Homo sapien
agaagccaggtatgatcctctaaga

SEQ ID NO: 3281215 - DNA, 25 bp, Homo sapien
ggcttggctccttccgactgcttat

SEQ ID NO: 3281216 - DNA, 25 bp, Homo sapien
aaggaagcagaacgtaaagatttag

SEQ ID NO: 3281217 - DNA, 25 bp, Homo sapien
gatgtgaccaagcaaccatttgcta

SEQ ID NO: 3281218 - DNA, 25 bp, Homo sapien
gaaatactaatctccaatgtgctgg

SEQ ID NO: 3281219 - DNA, 25 bp, Homo sapien
cacagctagggagcaatttgcctca

SEQ ID NO: 3281220 - DNA, 25 bp, Homo sapien
taaaagagactctggatagcacccc

SEQ ID NO: 3281221 - DNA, 25 bp, Homo sapien
gatataggaattcccagtctccaga

SEQ ID NO: 3281222 - DNA, 25 bp, Homo sapien
tactaggaagcaagagtccaaaggc

SEQ ID NO: 3281223 - DNA, 25 bp, Homo sapien
ggtgcttggaaaccactccatctag

SEQ ID NO: 3281224 - DNA, 25 bp, Homo sapien
tggtaacaacagtcccatactagga

SEQ ID NO: 3281225 - DNA, 25 bp, Homo sapien
tgagctaggacatcccacagggtgg

SEQ ID NO: 3281226 - DNA, 25 bp, Homo sapien
ctaggcactggtggccttaatacac

SEQ ID NO: 3281227 - DNA, 25 bp, Homo sapien
tgcaataatgtctcctagaatgtgg

SEQ ID NO: 3281228 - DNA, 25 bp, Homo sapien
tcaacaacttcctttccaatgttag

SEQ ID NO: 3281229 - DNA, 25 bp, Homo sapien
taaattcagcaccaacattgtcaac

SEQ ID NO: 3281230 - DNA, 25 bp, Homo sapien
ggggaagcatccagcgcatgaccat

SEQ ID NO: 3281231 - DNA, 25 bp, Homo sapien
cgcatgaccatgatgataaaaacca

SEQ ID NO: 3281232 - DNA, 25 bp, Homo sapien
aaagcatggacacttctccctggag

SEQ ID NO: 3281233 - DNA, 25 bp, Homo sapien
ttctttcccaaagcatggacacttc

SEQ ID NO: 3281234 - DNA, 25 bp, Homo sapien
tgaaacctgtttcgtgtatcagtga

SEQ ID NO: 3281235 - DNA, 25 bp, Homo sapien
tcctgtatctttgttagacactcac

SEQ ID NO: 3281236 - DNA, 25 bp, Homo sapien
ttgaaacctgtttcgtgtatcagtg

SEQ ID NO: 3281237 - DNA, 25 bp, Homo sapien
attttgaaacctgtttcgtgtatca

SEQ ID NO: 3281238 - DNA, 25 bp, Homo sapien
ttttttgcagcaaaggtgacaatcc

SEQ ID NO: 3281239 - DNA, 25 bp, Homo sapien
gattcctcacagaagacctgagcca

SEQ ID NO: 3281240 - DNA, 25 bp, Homo sapien
gacaatccagattcctcacagaaga

SEQ ID NO: 3281241 - DNA, 25 bp, Homo sapien
agacctgagccaatgctttcttgac

SEQ ID NO: 3281242 - DNA, 25 bp, Homo sapien
tctctgggttacaggcttaatcatg

SEQ ID NO: 3281243 - DNA, 25 bp, Homo sapien
tctaccgtgagctctccagtgacag

SEQ ID NO: 3281244 - DNA, 25 bp, Homo sapien
ttcacacaggtctttgtctaccgtg

SEQ ID NO: 3281245 - DNA, 25 bp, Homo sapien
tcagggctgtagtcctcgttggttc

SEQ ID NO: 3281246 - DNA, 25 bp, Homo sapien
caacagagatatcaacctattattc

SEQ ID NO: 3281247 - DNA, 25 bp, Homo sapien
tgcctttcttgtgttgaggtaccct

SEQ ID NO: 3281248 - DNA, 25 bp, Homo sapien
gctactactgcattttgttaagaat

SEQ ID NO: 3281249 - DNA, 25 bp, Homo sapien
gctttggtaccaagatacgagtttg

SEQ ID NO: 3281250 - DNA, 25 bp, Homo sapien
aaacactctgcaggatattatccag

SEQ ID NO: 3281251 - DNA, 25 bp, Homo sapien
actctgcaggatattatccaggaga

SEQ ID NO: 3281252 - DNA, 25 bp, Homo sapien
tgaaagtgatggggagaatggaacc

SEQ ID NO: 3281253 - DNA, 25 bp, Homo sapien
aacactctgcaggatattatccagg

SEQ ID NO: 3281254 - DNA, 25 bp, Homo sapien
taagattaccactacctccaaggag

SEQ ID NO: 3281255 - DNA, 25 bp, Homo sapien
ggattccagacagtcaaggttgctg

SEQ ID NO: 3281256 - DNA, 25 bp, Homo sapien
ggttagtcagctttaggattccaga

SEQ ID NO: 3281257 - DNA, 25 bp, Homo sapien
taagaagtacttgaggcatcgtgtc

SEQ ID NO: 3281258 - DNA, 25 bp, Homo sapien
ggttactctggcgatcagcatcaag

SEQ ID NO: 3281259 - DNA, 25 bp, Homo sapien
tgtgtaaacatactaacgaatgcag

SEQ ID NO: 3281260 - DNA, 25 bp, Homo sapien
aagtctgcgcctacttctcagagaa

SEQ ID NO: 3281261 - DNA, 25 bp, Homo sapien
cactatgttagcttatacctctgag

SEQ ID NO: 3281262 - DNA, 25 bp, Homo sapien
gctaggtcctatccaagttccccat

SEQ ID NO: 3281263 - DNA, 25 bp, Homo sapien
caaagctggtgtgcatacccaatct

SEQ ID NO: 3281264 - DNA, 25 bp, Homo sapien
tcatagttcagcaaagctaggtcct

SEQ ID NO: 3281265 - DNA, 25 bp, Homo sapien
tatatagagagacagcgtttgccat

SEQ ID NO: 3281266 - DNA, 25 bp, Homo sapien
tcacggatacatgccctcactgtgt

SEQ ID NO: 3281267 - DNA, 25 bp, Homo sapien
tattcaactaaaaagccactcaggg

SEQ ID NO: 3281268 - DNA, 25 bp, Homo sapien
gaataccaactattgctagacactg

SEQ ID NO: 3281269 - DNA, 25 bp, Homo sapien
caaagaccaagtggaagttcagcac

SEQ ID NO: 3281270 - DNA, 25 bp, Homo sapien
cccagtttcagtttcgaggccactt

SEQ ID NO: 3281271 - DNA, 25 bp, Homo sapien
ctgtcaaacagggacattaagtctg

SEQ ID NO: 3281272 - DNA, 25 bp, Homo sapien
agtttcagtttcgaggccactttgt

SEQ ID NO: 3281273 - DNA, 25 bp, Homo sapien
tgtcaaacagggacattaagtctgc

SEQ ID NO: 3281274 - DNA, 25 bp, Homo sapien
caggcataggcagtagcagattcta

SEQ ID NO: 3281275 - DNA, 25 bp, Homo sapien
tggaacccatatggcacacaaacac

SEQ ID NO: 3281276 - DNA, 25 bp, Homo sapien
cagattctacagaaacgtatttctg

SEQ ID NO: 3281277 - DNA, 25 bp, Homo sapien
aaaagagcacggactggtcaccaga

SEQ ID NO: 3281278 - DNA, 25 bp, Homo sapien
gcaaactccttgctgttgaggatgt

SEQ ID NO: 3281279 - DNA, 25 bp, Homo sapien
caaactccttgctgttgaggatgtc

SEQ ID NO: 3281280 - DNA, 25 bp, Homo sapien
aaactccttgctgttgaggatgtcc

SEQ ID NO: 3281281 - DNA, 25 bp, Homo sapien
accagtatgtaattgcccagctgtg

SEQ ID NO: 3281282 - DNA, 25 bp, Homo sapien
ccacgtggaagggtgataatctatc

SEQ ID NO: 3281283 - DNA, 25 bp, Homo sapien
taacaatagaaagctccacgtggaa

SEQ ID NO: 3281284 - DNA, 25 bp, Homo sapien
tgcaagtcataagctagttctgctc

SEQ ID NO: 3281285 - DNA, 25 bp, Homo sapien
ctagaaaactctatagtcgtggccc

SEQ ID NO: 3281286 - DNA, 25 bp, Homo sapien
taaggaccatctatgccaaatcaca

SEQ ID NO: 3281287 - DNA, 25 bp, Homo sapien
atagccaagcggagagccaaatcag

SEQ ID NO: 3281288 - DNA, 25 bp, Homo sapien
cacacaaactaggtattgcaggaat

SEQ ID NO: 3281289 - DNA, 25 bp, Homo sapien
catgctaatcttttctgtatcattc

SEQ ID NO: 3281290 - DNA, 25 bp, Homo sapien
caattttagtatatgtgctgccaaa

SEQ ID NO: 3281291 - DNA, 25 bp, Homo sapien
taaaaatgtgaaatgcttcacgaat

SEQ ID NO: 3281292 - DNA, 25 bp, Homo sapien
ttgcatgtcatctttgtgcaggggc

SEQ ID NO: 3281293 - DNA, 25 bp, Homo sapien
tccacgtggaaggtggtggaagtga

SEQ ID NO: 3281294 - DNA, 25 bp, Homo sapien
ggtgggacagtctcgcaggggttgt

SEQ ID NO: 3281295 - DNA, 25 bp, Homo sapien
accgggtgaggagggcatttgtgca

SEQ ID NO: 3281296 - DNA, 25 bp, Homo sapien
gaaagggcatccacgtggaaggtgg

SEQ ID NO: 3281297 - DNA, 25 bp, Homo sapien
taaggatggtgtccatacgactacc

SEQ ID NO: 3281298 - DNA, 25 bp, Homo sapien
cctgagcaagataaggatggtgtcc

SEQ ID NO: 3281299 - DNA, 25 bp, Homo sapien
atacgactaccaggacccaagtggg

SEQ ID NO: 3281300 - DNA, 25 bp, Homo sapien
tcacaacctgagcaagataaggatg

SEQ ID NO: 3281301 - DNA, 25 bp, Homo sapien
caggtgacaaaaggtatccaggtgg

SEQ ID NO: 3281302 - DNA, 25 bp, Homo sapien
cccaggatgcggtgtaggactctga

SEQ ID NO: 3281303 - DNA, 25 bp, Homo sapien
tgacaacaacatcccaggatgcggt

SEQ ID NO: 3281304 - DNA, 25 bp, Homo sapien
caggtggaggttgagtgacaacaac

SEQ ID NO: 3281305 - DNA, 25 bp, Homo sapien
tatgatttattactaaggctataat

SEQ ID NO: 3281306 - DNA, 25 bp, Homo sapien
gcacatgtcaacaatatgatttatt

SEQ ID NO: 3281307 - DNA, 25 bp, Homo sapien
cttagagaatatgaagcagggcaca

SEQ ID NO: 3281308 - DNA, 25 bp, Homo sapien
ctaaggctataataaatgtcaaggt

SEQ ID NO: 3281309 - DNA, 25 bp, Homo sapien
ttaagatcccacgaggttcccatag

SEQ ID NO: 3281310 - DNA, 25 bp, Homo sapien
aagatcccacgaggttcccatagca

SEQ ID NO: 3281311 - DNA, 25 bp, Homo sapien
gatcccacgaggttcccatagcaac

SEQ ID NO: 3281312 - DNA, 25 bp, Homo sapien
taagatcccacgaggttcccatagc

SEQ ID NO: 3281313 - DNA, 25 bp, Homo sapien
tgtgggtgtttcaacgtttgagctg

SEQ ID NO: 3281314 - DNA, 25 bp, Homo sapien
gacatgagctgtcccggtgtgactc

SEQ ID NO: 3281315 - DNA, 25 bp, Homo sapien
tgagctgtggccagtccaagctgga

SEQ ID NO: 3281316 - DNA, 25 bp, Homo sapien
aaagccagaaagttgtcccacttgg

SEQ ID NO: 3281317 - DNA, 25 bp, Homo sapien
gtaacgtcaccttctcatataaggc

SEQ ID NO: 3281318 - DNA, 25 bp, Homo sapien
tcatgacactactccttcgttaggt

SEQ ID NO: 3281319 - DNA, 25 bp, Homo sapien
cctaagaggctaactggaatttaag

SEQ ID NO: 3281320 - DNA, 25 bp, Homo sapien
gttaggtataaatcacgacagcaga

SEQ ID NO: 3281321 - DNA, 25 bp, Homo sapien
ttggatactatcctgagggacccac

SEQ ID NO: 3281322 - DNA, 25 bp, Homo sapien
cataaggctagaaggcagaaccatc

SEQ ID NO: 3281323 - DNA, 25 bp, Homo sapien
aaagtcctggatctgcaaaagttca

SEQ ID NO: 3281324 - DNA, 25 bp, Homo sapien
cggagagtgatctggaggaacaacc

SEQ ID NO: 3281325 - DNA, 25 bp, Homo sapien
actaatgtgtacctagggctatgga

SEQ ID NO: 3281326 - DNA, 25 bp, Homo sapien
cttaagaataagacactcaatgagg

SEQ ID NO: 3281327 - DNA, 25 bp, Homo sapien
tcaatgaggtaaatacacttgttac

SEQ ID NO: 3281328 - DNA, 25 bp, Homo sapien
gcgtccggccgattcacaatattaa

SEQ ID NO: 3281329 - DNA, 25 bp, Homo sapien
caggtttaaataagcttcctcagag

SEQ ID NO: 3281330 - DNA, 25 bp, Homo sapien
gaacaggtttaaataagcttcctca

SEQ ID NO: 3281331 - DNA, 25 bp, Homo sapien
ggtttaaataagcttcctcagaggc

SEQ ID NO: 3281332 - DNA, 25 bp, Homo sapien
tttaaataagcttcctcagaggctg

SEQ ID NO: 3281333 - DNA, 25 bp, Homo sapien
ttgccgcttccactagatgtctccg

SEQ ID NO: 3281334 - DNA, 25 bp, Homo sapien
tccactagatgtctccgaacttcca

SEQ ID NO: 3281335 - DNA, 25 bp, Homo sapien
gcttccactagatgtctccgaactt

SEQ ID NO: 3281336 - DNA, 25 bp, Homo sapien
ctgcttgccgcttccactagatgtc

SEQ ID NO: 3281337 - DNA, 25 bp, Homo sapien
ctttgtgcttagtgttcagtaaagc

SEQ ID NO: 3281338 - DNA, 25 bp, Homo sapien
gcctctttgtgcttagtgttcagta

SEQ ID NO: 3281339 - DNA, 25 bp, Homo sapien
tgttcagtaaagcttcccatagggc

SEQ ID NO: 3281340 - DNA, 25 bp, Homo sapien
cactgcctctttgtgcttagtgttc

SEQ ID NO: 3281341 - DNA, 25 bp, Homo sapien
gaatacaaggtgttgggatccaagc

SEQ ID NO: 3281342 - DNA, 25 bp, Homo sapien
gttggtagccgaatacaaggtgttg

SEQ ID NO: 3281343 - DNA, 25 bp, Homo sapien
tagcacagagtgtcggagcctgaga

SEQ ID NO: 3281344 - DNA, 25 bp, Homo sapien
ttagcacagagtgtcggagcctgag

SEQ ID NO: 3281345 - DNA, 25 bp, Homo sapien
catcagattgcaaccagattgaggg

SEQ ID NO: 3281346 - DNA, 25 bp, Homo sapien
tcaaaggccaagtggagtgagaagg

SEQ ID NO: 3281347 - DNA, 25 bp, Homo sapien
agattgaggggacatccacatggga

SEQ ID NO: 3281348 - DNA, 25 bp, Homo sapien
agtgagaaggatacccacaccaaga

SEQ ID NO: 3281349 - DNA, 25 bp, Homo sapien
gaaatatgggactatgtgaaaagac

SEQ ID NO: 3281350 - DNA, 25 bp, Homo sapien
aaaaaagagtgagaagaaatgaaca

SEQ ID NO: 3281351 - DNA, 25 bp, Homo sapien
aaagagtgagaagaaatgaacaaag

SEQ ID NO: 3281352 - DNA, 25 bp, Homo sapien
cctccaagaaatatgggactatgtg

SEQ ID NO: 3281353 - DNA, 25 bp, Homo sapien
cttttttcctatgggaatactcagt

SEQ ID NO: 3281354 - DNA, 25 bp, Homo sapien
tgcttttttcctatgggaatactca

SEQ ID NO: 3281355 - DNA, 25 bp, Homo sapien
gcttttttcctatgggaatactcag

SEQ ID NO: 3281356 - DNA, 25 bp, Homo sapien
gagcgctatcatgttaaccatcaca

SEQ ID NO: 3281357 - DNA, 25 bp, Homo sapien
tctactaagttgtctccatgatgtc

SEQ ID NO: 3281358 - DNA, 25 bp, Homo sapien
ttttcctcctcagtatggagtgcag

SEQ ID NO: 3281359 - DNA, 25 bp, Homo sapien
gcctggtgcaaccacattataattt

SEQ ID NO: 3281360 - DNA, 25 bp, Homo sapien
ggcagaactcatgtctgctgtggct

SEQ ID NO: 3281361 - DNA, 25 bp, Homo sapien
tctgctgtggctagtactgtatccc

SEQ ID NO: 3281362 - DNA, 25 bp, Homo sapien
aaggcatgcacggacccaaacagtg

SEQ ID NO: 3281363 - DNA, 25 bp, Homo sapien
ctcacaggttgtaattaaggctcca

SEQ ID NO: 3281364 - DNA, 25 bp, Homo sapien
gctgggtcatctattaacacttctc

SEQ ID NO: 3281365 - DNA, 25 bp, Homo sapien
gtgcagtagttttccttccgctggg

SEQ ID NO: 3281366 - DNA, 25 bp, Homo sapien
tgtgaatactggcattcgtaaattt

SEQ ID NO: 3281367 - DNA, 25 bp, Homo sapien
ggactgttgtgaatactggcattcg

SEQ ID NO: 3281368 - DNA, 25 bp, Homo sapien
cataattggccagatccgcagcgat

SEQ ID NO: 3281369 - DNA, 25 bp, Homo sapien
tgctgggtaaaggacagtacgcccg

SEQ ID NO: 3281370 - DNA, 25 bp, Homo sapien
gatgatgtcccgtaggatctccacg

SEQ ID NO: 3281371 - DNA, 25 bp, Homo sapien
tcgggcgctattaaggaggtgcaca

SEQ ID NO: 3281372 - DNA, 25 bp, Homo sapien
ggttggggattcgcagacttgggaa

SEQ ID NO: 3281373 - DNA, 25 bp, Homo sapien
gttggggattcgcagacttgggaaa

SEQ ID NO: 3281374 - DNA, 25 bp, Homo sapien
cggtgcaggaacttctttcagaact

SEQ ID NO: 3281375 - DNA, 25 bp, Homo sapien
gtgcaggaacttctttcagaactca

SEQ ID NO: 3281376 - DNA, 25 bp, Homo sapien
ctacggtgcaggaacttctttcaga

SEQ ID NO: 3281377 - DNA, 25 bp, Homo sapien
tacggtgcaggaacttctttcagaa

SEQ ID NO: 3281378 - DNA, 25 bp, Homo sapien
agtacacgtggtcggcctctgacac

SEQ ID NO: 3281379 - DNA, 25 bp, Homo sapien
gatggcgctcggtgatgacgttaaa

SEQ ID NO: 3281380 - DNA, 25 bp, Homo sapien
tgacgttaaactgagcggtgattgg

SEQ ID NO: 3281381 - DNA, 25 bp, Homo sapien
tgggctccgggagactttgacagtc

SEQ ID NO: 3281382 - DNA, 25 bp, Homo sapien
acaagcctcataacaaaccctgttg

SEQ ID NO: 3281383 - DNA, 25 bp, Homo sapien
aagcctcataacaaaccctgttgtt

SEQ ID NO: 3281384 - DNA, 25 bp, Homo sapien
cctcataacaaaccctgttgttctc

SEQ ID NO: 3281385 - DNA, 25 bp, Homo sapien
gcctcataacaaaccctgttgttct

SEQ ID NO: 3281386 - DNA, 25 bp, Homo sapien
tcctgacttcaagcaatcctccggc

SEQ ID NO: 3281387 - DNA, 25 bp, Homo sapien
tgacttcaagcaatcctccggccgc

SEQ ID NO: 3281388 - DNA, 25 bp, Homo sapien
tcacagcagactcaaactcctgact

SEQ ID NO: 3281389 - DNA, 25 bp, Homo sapien
gctcacagcagactcaaactcctga

SEQ ID NO: 3281390 - DNA, 25 bp, Homo sapien
ggcacaatttcactgctcactgcaa

SEQ ID NO: 3281391 - DNA, 25 bp, Homo sapien
cacaatttcactgctcactgcaagc

SEQ ID NO: 3281392 - DNA, 25 bp, Homo sapien
gcacaatttcactgctcactgcaag

SEQ ID NO: 3281393 - DNA, 25 bp, Homo sapien
ggtataaccctgaatgtgccctaag

SEQ ID NO: 3281394 - DNA, 25 bp, Homo sapien
gactgtggacttcaaccgcagatat

SEQ ID NO: 3281395 - DNA, 25 bp, Homo sapien
cagcaaaatgggaaccgtaatggcc

SEQ ID NO: 3281396 - DNA, 25 bp, Homo sapien
tgaagaccattagactccagaaggt

SEQ ID NO: 3281397 - DNA, 25 bp, Homo sapien
ccagagagtttagaaggatgcaaga

SEQ ID NO: 3281398 - DNA, 25 bp, Homo sapien
cactgttgaatctacatagctggaa

SEQ ID NO: 3281399 - DNA, 25 bp, Homo sapien
aaaagataagggagctgggaatagc

SEQ ID NO: 3281400 - DNA, 25 bp, Homo sapien
gataaaatgggattcaggaaagatt

SEQ ID NO: 3281401 - DNA, 25 bp, Homo sapien
gagctttcttcgttcgttcgtcggc

SEQ ID NO: 3281402 - DNA, 25 bp, Homo sapien
ggaggcttcatctttgccgccgctg

SEQ ID NO: 3281403 - DNA, 25 bp, Homo sapien
tctatggcggtacgaaacttcctgt

SEQ ID NO: 3281404 - DNA, 25 bp, Homo sapien
tgccgtcgccttcctgggattggag

SEQ ID NO: 3281405 - DNA, 25 bp, Homo sapien
aatgaggtgttgtttaccacaagga

SEQ ID NO: 3281406 - DNA, 25 bp, Homo sapien
gtggcagcattataagcttgtaact

SEQ ID NO: 3281407 - DNA, 25 bp, Homo sapien
tcttgtaggtatcttagtaagttgc

SEQ ID NO: 3281408 - DNA, 25 bp, Homo sapien
aattatgagttgaaataggtggcag

SEQ ID NO: 3281409 - DNA, 25 bp, Homo sapien
ttcctaatatcttctctgaccccac

SEQ ID NO: 3281410 - DNA, 25 bp, Homo sapien
tttcctaatatcttctctgacccca

SEQ ID NO: 3281411 - DNA, 25 bp, Homo sapien
tttttaattgagcattgactgtgcc

SEQ ID NO: 3281412 - DNA, 25 bp, Homo sapien
ttgagcattgactgtgccaggaagt

SEQ ID NO: 3281413 - DNA, 25 bp, Homo sapien
cttcccggtttttaattgagcattg

SEQ ID NO: 3281414 - DNA, 25 bp, Homo sapien
ccggtttttaattgagcattgactg

SEQ ID NO: 3281415 - DNA, 25 bp, Homo sapien
gagggttactgatcgcagattggaa

SEQ ID NO: 3281416 - DNA, 25 bp, Homo sapien
ctgatcgcagattggaatttggcat

SEQ ID NO: 3281417 - DNA, 25 bp, Homo sapien
taaagttgacatattgggtgttcat

SEQ ID NO: 3281418 - DNA, 25 bp, Homo sapien
atttggcatatattgtaaagttgac

SEQ ID NO: 3281419 - DNA, 25 bp, Homo sapien
tgttcccattgccttagtgccgatt

SEQ ID NO: 3281420 - DNA, 25 bp, Homo sapien
tcccattgccttagtgccgattctc

SEQ ID NO: 3281421 - DNA, 25 bp, Homo sapien
ccattgccttagtgccgattctcat

SEQ ID NO: 3281422 - DNA, 25 bp, Homo sapien
gttcccattgccttagtgccgattc

SEQ ID NO: 3281423 - DNA, 25 bp, Homo sapien
acaggcccttgtacagtgaatgtct

SEQ ID NO: 3281424 - DNA, 25 bp, Homo sapien
tgcaacctggtgatgacaggccctt

SEQ ID NO: 3281425 - DNA, 25 bp, Homo sapien
tgcttgcagtctgttgacacatgcc

SEQ ID NO: 3281426 - DNA, 25 bp, Homo sapien
atatcttgctgcctattgcttgcag

SEQ ID NO: 3281427 - DNA, 25 bp, Homo sapien
gattttcggatttatacctggtaca

SEQ ID NO: 3281428 - DNA, 25 bp, Homo sapien
tggtacattcaatcaggatgggcac

SEQ ID NO: 3281429 - DNA, 25 bp, Homo sapien
caagtggtcttgtacgtacttggca

SEQ ID NO: 3281430 - DNA, 25 bp, Homo sapien
tccctacagttttagtcaagtggtc

SEQ ID NO: 3281431 - DNA, 25 bp, Homo sapien
gaaccacaacatattgagctttaca

SEQ ID NO: 3281432 - DNA, 25 bp, Homo sapien
gagctttacaaaagtcagtaatatc

SEQ ID NO: 3281433 - DNA, 25 bp, Homo sapien
tagaacagtcaacacttgaatgaac

SEQ ID NO: 3281434 - DNA, 25 bp, Homo sapien
tttacaaaagtcagtaatatccatc

SEQ ID NO: 3281435 - DNA, 25 bp, Homo sapien
cctttgagaaggattcagagaactg

SEQ ID NO: 3281436 - DNA, 25 bp, Homo sapien
gcttgcaagggtgggtctaaattca

SEQ ID NO: 3281437 - DNA, 25 bp, Homo sapien
caatgtggttgtgaggctgtatgaa

SEQ ID NO: 3281438 - DNA, 25 bp, Homo sapien
cacagaattactaaaacggaggctt

SEQ ID NO: 3281439 - DNA, 25 bp, Homo sapien
gtgctgaaaataagaccggtgtcct

SEQ ID NO: 3281440 - DNA, 25 bp, Homo sapien
tattacaacatagagaagcacattc

SEQ ID NO: 3281441 - DNA, 25 bp, Homo sapien
gaatgcagaccccacgatatagagg

SEQ ID NO: 3281442 - DNA, 25 bp, Homo sapien
aatctgttcataagtttgagctcca

SEQ ID NO: 3281443 - DNA, 25 bp, Homo sapien
cagtggtctctacagcatttctata

SEQ ID NO: 3281444 - DNA, 25 bp, Homo sapien
tatataacttacataccatctgtta

SEQ ID NO: 3281445 - DNA, 25 bp, Homo sapien
atggaaagcctctttagtaataaca

SEQ ID NO: 3281446 - DNA, 25 bp, Homo sapien
tgtttttagttctttcagtggtctc

SEQ ID NO: 3281447 - DNA, 25 bp, Homo sapien
ctcatcttttttccgtcctttggct

SEQ ID NO: 3281448 - DNA, 25 bp, Homo sapien
taagtaaacactatgacacatgcgt

SEQ ID NO: 3281449 - DNA, 25 bp, Homo sapien
aatatgacttatacattgtaggcac

SEQ ID NO: 3281450 - DNA, 25 bp, Homo sapien
ggctcctgctaatatgacttataca

SEQ ID NO: 3281451 - DNA, 25 bp, Homo sapien
tgcaaaacttgataggaaataagag

SEQ ID NO: 3281452 - DNA, 25 bp, Homo sapien
gaaatgtgctgttgactttagccaa

SEQ ID NO: 3281453 - DNA, 25 bp, Homo sapien
agttcaagggcattactttccagaa

SEQ ID NO: 3281454 - DNA, 25 bp, Homo sapien
tagccaattaagtgcatgattcttc

SEQ ID NO: 3281455 - DNA, 25 bp, Homo sapien
gatacagggaatatgcagaaagagg

SEQ ID NO: 3281456 - DNA, 25 bp, Homo sapien
gatgaagaacgatacagatacaggg

SEQ ID NO: 3281457 - DNA, 25 bp, Homo sapien
tggatttggactgcagatcacatct

SEQ ID NO: 3281458 - DNA, 25 bp, Homo sapien
tatgagcgtcacagagcaagtcgag

SEQ ID NO: 3281459 - DNA, 25 bp, Homo sapien
tcaagggttccacttgggccacagt

SEQ ID NO: 3281460 - DNA, 25 bp, Homo sapien
caaagggcccctctaaggcttgaga

SEQ ID NO: 3281461 - DNA, 25 bp, Homo sapien
cgaagctacacctgcagaataggca

SEQ ID NO: 3281462 - DNA, 25 bp, Homo sapien
tagacgtcgccatgaaagtgaagaa

SEQ ID NO: 3281463 - DNA, 25 bp, Homo sapien
actgacaagataaatatagtgtttc

SEQ ID NO: 3281464 - DNA, 25 bp, Homo sapien
cttggcagacttcagcatataccaa

SEQ ID NO: 3281465 - DNA, 25 bp, Homo sapien
aatggccataatgtacccttggcag

SEQ ID NO: 3281466 - DNA, 25 bp, Homo sapien
taaacaatgttgtagagtaatgaga

SEQ ID NO: 3281467 - DNA, 25 bp, Homo sapien
ccaggccaagaaacaatagttagag

SEQ ID NO: 3281468 - DNA, 25 bp, Homo sapien
caagcatgtatcattcctgatgtac

SEQ ID NO: 3281469 - DNA, 25 bp, Homo sapien
tctttcagcagtcttgccaagcaag

SEQ ID NO: 3281470 - DNA, 25 bp, Homo sapien
tgtacttctaccattgacagcaaga

SEQ ID NO: 3281471 - DNA, 25 bp, Homo sapien
taacctcctacaatgcagaagccca

SEQ ID NO: 3281472 - DNA, 25 bp, Homo sapien
cattgtatgctggtgttccttcaac

SEQ ID NO: 3281473 - DNA, 25 bp, Homo sapien
caatggatttgatgaaaaaaggttt

SEQ ID NO: 3281474 - DNA, 25 bp, Homo sapien
ccattgtattcttcataacctccta

SEQ ID NO: 3281475 - DNA, 25 bp, Homo sapien
cacatttgtagctgtagtccgggaa

SEQ ID NO: 3281476 - DNA, 25 bp, Homo sapien
cacccagtgctacgtttgataagtc

SEQ ID NO: 3281477 - DNA, 25 bp, Homo sapien
cagtgttcatataggtacaggccaa

SEQ ID NO: 3281478 - DNA, 25 bp, Homo sapien
ggatgacgttgttgaccacatttgt

SEQ ID NO: 3281479 - DNA, 25 bp, Homo sapien
tatgagagaaatgccgagtccccat

SEQ ID NO: 3281480 - DNA, 25 bp, Homo sapien
aatttaggcctatcgaagatttggc

SEQ ID NO: 3281481 - DNA, 25 bp, Homo sapien
cctcagatactaggtggctttaaac

SEQ ID NO: 3281482 - DNA, 25 bp, Homo sapien
caggtacctctcagtctgtggtgaa

SEQ ID NO: 3281483 - DNA, 25 bp, Homo sapien
aacctgaagacagccgaataggaac

SEQ ID NO: 3281484 - DNA, 25 bp, Homo sapien
gctagcacagcagtaaagtgcaagg

SEQ ID NO: 3281485 - DNA, 25 bp, Homo sapien
cacagcagtaaagtgcaaggtggca

SEQ ID NO: 3281486 - DNA, 25 bp, Homo sapien
aaagaaacctgaagacagccgaata

SEQ ID NO: 3281487 - DNA, 25 bp, Homo sapien
tgagcaagctaaccagcaaacatca

SEQ ID NO: 3281488 - DNA, 25 bp, Homo sapien
taatgagcaagctaaccagcaaaca

SEQ ID NO: 3281489 - DNA, 25 bp, Homo sapien
ctaatgagcaagctaaccagcaaac

SEQ ID NO: 3281490 - DNA, 25 bp, Homo sapien
caagctaaccagcaaacatcataat

SEQ ID NO: 3281491 - DNA, 25 bp, Homo sapien
gaattttctaccatgtttattctgt

SEQ ID NO: 3281492 - DNA, 25 bp, Homo sapien
tttgttctctttacattctttggtg

SEQ ID NO: 3281493 - DNA, 25 bp, Homo sapien
ctgaattttctaccatgtttattct

SEQ ID NO: 3281494 - DNA, 25 bp, Homo sapien
ctttacattctttggtgcattctga

SEQ ID NO: 3281495 - DNA, 25 bp, Homo sapien
gggctcatactctttgacttccaaa

SEQ ID NO: 3281496 - DNA, 25 bp, Homo sapien
tccaaagctttgagtactatcgagg

SEQ ID NO: 3281497 - DNA, 25 bp, Homo sapien
ggtaattccagccacatgacccagg

SEQ ID NO: 3281498 - DNA, 25 bp, Homo sapien
tcagttcgaccccatccacattcaa

SEQ ID NO: 3281499 - DNA, 25 bp, Homo sapien
actcctccgggctcaacactgatga

SEQ ID NO: 3281500 - DNA, 25 bp, Homo sapien
ccttctcatgacaagtaattgtagg

SEQ ID NO: 3281501 - DNA, 25 bp, Homo sapien
cctgcgacggtcatgccgagagatt

SEQ ID NO: 3281502 - DNA, 25 bp, Homo sapien
gatgacatagataggcaaatcccat

SEQ ID NO: 3281503 - DNA, 25 bp, Homo sapien
cgggacacgacgaggtgaacacgtc

SEQ ID NO: 3281504 - DNA, 25 bp, Homo sapien
ctgaaagatgtcagggctccgctgc

SEQ ID NO: 3281505 - DNA, 25 bp, Homo sapien
tgttccagccggcttcctgaaagat

SEQ ID NO: 3281506 - DNA, 25 bp, Homo sapien
cgctgccgaacctggcgggacacga

SEQ ID NO: 3281507 - DNA, 25 bp, Homo sapien
gaaacttggtggtcctccgctcctg

SEQ ID NO: 3281508 - DNA, 25 bp, Homo sapien
ttagtgaagccacccaatcggcaga

SEQ ID NO: 3281509 - DNA, 25 bp, Homo sapien
tcttttccgccctgcgccagttcac

SEQ ID NO: 3281510 - DNA, 25 bp, Homo sapien
atcggcagagcgcactacagcccca

SEQ ID NO: 3281511 - DNA, 25 bp, Homo sapien
tctgactgggatcctggaatgacct

SEQ ID NO: 3281512 - DNA, 25 bp, Homo sapien
gggtttctgactgggatcctggaat

SEQ ID NO: 3281513 - DNA, 25 bp, Homo sapien
tcatgtccggggtttctgactggga

SEQ ID NO: 3281514 - DNA, 25 bp, Homo sapien
ctgggatcctggaatgacctctgac

SEQ ID NO: 3281515 - DNA, 25 bp, Homo sapien
tgaatcagatgagccgcactttctg

SEQ ID NO: 3281516 - DNA, 25 bp, Homo sapien
tttctgggctgccatatcgaagatc

SEQ ID NO: 3281517 - DNA, 25 bp, Homo sapien
tcatgtccattgatggctaacacac

SEQ ID NO: 3281518 - DNA, 25 bp, Homo sapien
gctgccatatcgaagatcatgtcca

SEQ ID NO: 3281519 - DNA, 25 bp, Homo sapien
tgttgagaatcacatgaaagctgtc

SEQ ID NO: 3281520 - DNA, 25 bp, Homo sapien
tgttcacgcatcacagtcagccaca

SEQ ID NO: 3281521 - DNA, 25 bp, Homo sapien
tgaccatgtcgatatgccacaccgc

SEQ ID NO: 3281522 - DNA, 25 bp, Homo sapien
cgcacagcgtagttgtgagggacat

SEQ ID NO: 3281523 - DNA, 25 bp, Homo sapien
tgctgcagccccacagccacagtct

SEQ ID NO: 3281524 - DNA, 25 bp, Homo sapien
gcagccccacagccacagtctctac

SEQ ID NO: 3281525 - DNA, 25 bp, Homo sapien
tcaagccccttgctgcagccccaca

SEQ ID NO: 3281526 - DNA, 25 bp, Homo sapien
ctgcagccccacagccacagtctct

SEQ ID NO: 3281527 - DNA, 25 bp, Homo sapien
tggcgatcaccccatcacgataaat

SEQ ID NO: 3281528 - DNA, 25 bp, Homo sapien
agtagccggccgtctctggcgatca

SEQ ID NO: 3281529 - DNA, 25 bp, Homo sapien
ctttagaatgatgtctcctggcagt

SEQ ID NO: 3281530 - DNA, 25 bp, Homo sapien
aatgtgttggataatgatatggacc

SEQ ID NO: 3281531 - DNA, 25 bp, Homo sapien
attgatcttgatgctggtaatttca

SEQ ID NO: 3281532 - DNA, 25 bp, Homo sapien
ttgatcttgatgctggtaatttcac

SEQ ID NO: 3281533 - DNA, 25 bp, Homo sapien
gattgatcttgatgctggtaatttc

SEQ ID NO: 3281534 - DNA, 25 bp, Homo sapien
tgctgtttaacgatcatctgaggct

SEQ ID NO: 3281535 - DNA, 25 bp, Homo sapien
gctcatccgtaagaaatgcctctac

SEQ ID NO: 3281536 - DNA, 25 bp, Homo sapien
gtttgccacatgaactgactctcgt

SEQ ID NO: 3281537 - DNA, 25 bp, Homo sapien
cagcctcccggaatttggtcatatc

SEQ ID NO: 3281538 - DNA, 25 bp, Homo sapien
aatagtggatctctcaaagggccgt

SEQ ID NO: 3281539 - DNA, 25 bp, Homo sapien
atagtggatctctcaaagggccgtg

SEQ ID NO: 3281540 - DNA, 25 bp, Homo sapien
gtcggcatggttggcaactgcactc

SEQ ID NO: 3281541 - DNA, 25 bp, Homo sapien
ttccctgccctggtcggcatggttg

SEQ ID NO: 3281542 - DNA, 25 bp, Homo sapien
tcgtctgtcattaaggagatggtgg

SEQ ID NO: 3281543 - DNA, 25 bp, Homo sapien
ggttgtctaggccaggctcgtctgt

SEQ ID NO: 3281544 - DNA, 25 bp, Homo sapien
tagttcggttgctccggccagagtc

SEQ ID NO: 3281545 - DNA, 25 bp, Homo sapien
tctgccgaggacacgtaggcagggt

SEQ ID NO: 3281546 - DNA, 25 bp, Homo sapien
tcttcctatctttggtcaggccgta

SEQ ID NO: 3281547 - DNA, 25 bp, Homo sapien
gagcgcctcttcctatctttggtca

SEQ ID NO: 3281548 - DNA, 25 bp, Homo sapien
tatctttggtcaggccgtagtggga

SEQ ID NO: 3281549 - DNA, 25 bp, Homo sapien
ggccgtagtgggaggcacctttaca

SEQ ID NO: 3281550 - DNA, 25 bp, Homo sapien
cgtaaatataaagctcctcccagat

SEQ ID NO: 3281551 - DNA, 25 bp, Homo sapien
atgaaagcccttagtcacaccctca

SEQ ID NO: 3281552 - DNA, 25 bp, Homo sapien
gattttgttcccagagcactgaacg

SEQ ID NO: 3281553 - DNA, 25 bp, Homo sapien
gattccatatttaactgttcatgca

SEQ ID NO: 3281554 - DNA, 25 bp, Homo sapien
gctatcctctagtggcagcttggtg

SEQ ID NO: 3281555 - DNA, 25 bp, Homo sapien
cagcattgctatcctctagtggcag

SEQ ID NO: 3281556 - DNA, 25 bp, Homo sapien
agttcagcattgctatcctctagtg

SEQ ID NO: 3281557 - DNA, 25 bp, Homo sapien
ttgctatcctctagtggcagcttgg

SEQ ID NO: 3281558 - DNA, 25 bp, Homo sapien
tctcgaggctcagaagaccaaggtt

SEQ ID NO: 3281559 - DNA, 25 bp, Homo sapien
ggctcccatgatctgagaagtgtca

SEQ ID NO: 3281560 - DNA, 25 bp, Homo sapien
cattgccatgttgtctaccattaag

SEQ ID NO: 3281561 - DNA, 25 bp, Homo sapien
aagttgaaaaagaacattctcgagg

SEQ ID NO: 3281562 - DNA, 25 bp, Homo sapien
agagttgttcacaaagtgaacctca

SEQ ID NO: 3281563 - DNA, 25 bp, Homo sapien
gagttgttcacaaagtgaacctcaa

SEQ ID NO: 3281564 - DNA, 25 bp, Homo sapien
tgttcacaaagtgaacctcaatact

SEQ ID NO: 3281565 - DNA, 25 bp, Homo sapien
cacaaagtgaacctcaatactcacc

SEQ ID NO: 3281566 - DNA, 25 bp, Homo sapien
tgttaataggccatgcaccctggtg

SEQ ID NO: 3281567 - DNA, 25 bp, Homo sapien
catatcatccctatgaggagggtcc

SEQ ID NO: 3281568 - DNA, 25 bp, Homo sapien
gaagtgtgcacctcaggactgttaa

SEQ ID NO: 3281569 - DNA, 25 bp, Homo sapien
caactgtaacatgggacgtagggaa

SEQ ID NO: 3281570 - DNA, 25 bp, Homo sapien
tcgtagaagcagaggcctaaaagga

SEQ ID NO: 3281571 - DNA, 25 bp, Homo sapien
gagaaagcaccttagtccaggcact

SEQ ID NO: 3281572 - DNA, 25 bp, Homo sapien
aaggatcttgtctaagtgtgcgggc

SEQ ID NO: 3281573 - DNA, 25 bp, Homo sapien
acaggcagcaagcatcgtagaagca

SEQ ID NO: 3281574 - DNA, 25 bp, Homo sapien
ccctgcgggtccaaaccttatgcag

SEQ ID NO: 3281575 - DNA, 25 bp, Homo sapien
ggtccaaaccttatgcagttgcagg

SEQ ID NO: 3281576 - DNA, 25 bp, Homo sapien
cagtgtgcgctcatctggtactaag

SEQ ID NO: 3281577 - DNA, 25 bp, Homo sapien
catctggtactaagatgggtgtcca

SEQ ID NO: 3281578 - DNA, 25 bp, Homo sapien
gatggtcgagggcttgggcacagtc

SEQ ID NO: 3281579 - DNA, 25 bp, Homo sapien
acagtagttaatgagggatggtcga

SEQ ID NO: 3281580 - DNA, 25 bp, Homo sapien
cagatgtggagttgacagtagttaa

SEQ ID NO: 3281581 - DNA, 25 bp, Homo sapien
tgctccctggagtgacaactcagaa

SEQ ID NO: 3281582 - DNA, 25 bp, Homo sapien
cacagcctactttacgagtgtatcc

SEQ ID NO: 3281583 - DNA, 25 bp, Homo sapien
actgacagtcacagcctactttacg

SEQ ID NO: 3281584 - DNA, 25 bp, Homo sapien
cagtcacagcctactttacgagtgt

SEQ ID NO: 3281585 - DNA, 25 bp, Homo sapien
gcctactttacgagtgtatccaagt

SEQ ID NO: 3281586 - DNA, 25 bp, Homo sapien
tgtgaatcctcttctcaagggcata

SEQ ID NO: 3281587 - DNA, 25 bp, Homo sapien
accattgccttcacggctttgttgg

SEQ ID NO: 3281588 - DNA, 25 bp, Homo sapien
gcagggcaggctgaacaagtgcacc

SEQ ID NO: 3281589 - DNA, 25 bp, Homo sapien
cataaattgatataaggagagcagg

SEQ ID NO: 3281590 - DNA, 25 bp, Homo sapien
tgtcttaacagccttgttgtaaaaa

SEQ ID NO: 3281591 - DNA, 25 bp, Homo sapien
tcttaacagccttgttgtaaaaatc

SEQ ID NO: 3281592 - DNA, 25 bp, Homo sapien
gccttgttgtaaaaatcgttgagtg

SEQ ID NO: 3281593 - DNA, 25 bp, Homo sapien
gttgtaaaaatcgttgagtgaggac

SEQ ID NO: 3281594 - DNA, 25 bp, Homo sapien
agctggattcagtcttcctcttcaa

SEQ ID NO: 3281595 - DNA, 25 bp, Homo sapien
ccaagcaacaagctggattcagtct

SEQ ID NO: 3281596 - DNA, 25 bp, Homo sapien
cagccaagcaacaagctggattcag

SEQ ID NO: 3281597 - DNA, 25 bp, Homo sapien
gctggattcagtcttcctcttcaaa

SEQ ID NO: 3281598 - DNA, 25 bp, Homo sapien
tcaagagctcctttgtatcggcgga

SEQ ID NO: 3281599 - DNA, 25 bp, Homo sapien
taagtcaaccaacatgaagcggtca

SEQ ID NO: 3281600 - DNA, 25 bp, Homo sapien
taaaggagatatcgataagatggcc

SEQ ID NO: 3281601 - DNA, 25 bp, Homo sapien
caattgctgaagatgggtataggcc

SEQ ID NO: 3281602 - DNA, 25 bp, Homo sapien
gtcaatgtagttagcaggactgagc

SEQ ID NO: 3281603 - DNA, 25 bp, Homo sapien
tctgaatacaggaagtgcaggttgc

SEQ ID NO: 3281604 - DNA, 25 bp, Homo sapien
agaccagcaacagaagcgccttcat

SEQ ID NO: 3281605 - DNA, 25 bp, Homo sapien
tgagccaaggcaagaccagcaacag

SEQ ID NO: 3281606 - DNA, 25 bp, Homo sapien
tctccgagcagtgtgctgccttctc

SEQ ID NO: 3281607 - DNA, 25 bp, Homo sapien
ctccgagcagtgtgctgccttctcc

SEQ ID NO: 3281608 - DNA, 25 bp, Homo sapien
taagccacgttaataaatcacgggc

SEQ ID NO: 3281609 - DNA, 25 bp, Homo sapien
tggccaccttctgtcagctacaagg

SEQ ID NO: 3281610 - DNA, 25 bp, Homo sapien
tgagaaccttcagattaagccacgt

SEQ ID NO: 3281611 - DNA, 25 bp, Homo sapien
tcctttaagcaaaccttgccatgcc

SEQ ID NO: 3281612 - DNA, 25 bp, Homo sapien
gatgcggactggttcttgggaagca

SEQ ID NO: 3281613 - DNA, 25 bp, Homo sapien
gccaccacggttggcgagagagctt

SEQ ID NO: 3281614 - DNA, 25 bp, Homo sapien
gggaagcagctggtacatttacatc

SEQ ID NO: 3281615 - DNA, 25 bp, Homo sapien
tcagatgagaggatgtaggaacgca

SEQ ID NO: 3281616 - DNA, 25 bp, Homo sapien
tgacagcttcctcgctaattttgaa

SEQ ID NO: 3281617 - DNA, 25 bp, Homo sapien
cactgacatatgaaagagatgtgac

SEQ ID NO: 3281618 - DNA, 25 bp, Homo sapien
aataggctgtgccattctctgtcag

SEQ ID NO: 3281619 - DNA, 25 bp, Homo sapien
ctggctctcgagaagaataggctgt

SEQ ID NO: 3281620 - DNA, 25 bp, Homo sapien
gtgctgtgtcacaattatacctcac

SEQ ID NO: 3281621 - DNA, 25 bp, Homo sapien
tatacctcactgcagtggtgaactc

SEQ ID NO: 3281622 - DNA, 25 bp, Homo sapien
tgtagtgctgtgtcacaattatacc

SEQ ID NO: 3281623 - DNA, 25 bp, Homo sapien
ggctgtagtgctgtgtcacaattat

SEQ ID NO: 3281624 - DNA, 25 bp, Homo sapien
tccagttaggaaggctgccattcaa

SEQ ID NO: 3281625 - DNA, 25 bp, Homo sapien
cccatgtgatgggagtctgtaagca

SEQ ID NO: 3281626 - DNA, 25 bp, Homo sapien
ccctgggaattctctacagtagacc

SEQ ID NO: 3281627 - DNA, 25 bp, Homo sapien
gaagtttccaactgctagctccaaa

SEQ ID NO: 3281628 - DNA, 25 bp, Homo sapien
aaacactctgcaggatattatccag

SEQ ID NO: 3281629 - DNA, 25 bp, Homo sapien
caaatctacgtctgattggtgtacc

SEQ ID NO: 3281630 - DNA, 25 bp, Homo sapien
aacactctgcaggatattatccagg

SEQ ID NO: 3281631 - DNA, 25 bp, Homo sapien
actctgcaggatattatccaggaga

SEQ ID NO: 3281632 - DNA, 25 bp, Homo sapien
aaccacatctatttctggggaatga

SEQ ID NO: 3281633 - DNA, 25 bp, Homo sapien
taaccacatctatttctggggaatg

SEQ ID NO: 3281634 - DNA, 25 bp, Homo sapien
accacatctatttctggggaatgag

SEQ ID NO: 3281635 - DNA, 25 bp, Homo sapien
aaagtgatgctcgaggtcacagcgc

SEQ ID NO: 3281636 - DNA, 25 bp, Homo sapien
taggtgtgtccacacggagtgtcca

SEQ ID NO: 3281637 - DNA, 25 bp, Homo sapien
gggttcaggatcgttggcagactct

SEQ ID NO: 3281638 - DNA, 25 bp, Homo sapien
cctgaatgggcaggtcaccagtagc

SEQ ID NO: 3281639 - DNA, 25 bp, Homo sapien
tcaagatctaggagacatccacaca

SEQ ID NO: 3281640 - DNA, 25 bp, Homo sapien
gagcaagtcaagatctaggagacat

SEQ ID NO: 3281641 - DNA, 25 bp, Homo sapien
agtcacacaatatttcctcaggagc

SEQ ID NO: 3281642 - DNA, 25 bp, Homo sapien
ggattggagagcagtataacaggaa

SEQ ID NO: 3281643 - DNA, 25 bp, Homo sapien
cttgtgggtgaaccgagcagctcct

SEQ ID NO: 3281644 - DNA, 25 bp, Homo sapien
tcttcaagcgactgtctggggctct

SEQ ID NO: 3281645 - DNA, 25 bp, Homo sapien
ggagttgtgaccagcctcaacttcg

SEQ ID NO: 3281646 - DNA, 25 bp, Homo sapien
cagcctcaacttcggtgaacaggtg

SEQ ID NO: 3281647 - DNA, 25 bp, Homo sapien
ggcattggtcgctccagaccaggaa

SEQ ID NO: 3281648 - DNA, 25 bp, Homo sapien
gccccgacagataaagcattgctga

SEQ ID NO: 3281649 - DNA, 25 bp, Homo sapien
cacggaagccccgacagataaagca

SEQ ID NO: 3281650 - DNA, 25 bp, Homo sapien
aaggaggacggcattggtcgctcca

SEQ ID NO: 3281651 - DNA, 25 bp, Homo sapien
caagcaggtaggtggcgtctctttg

SEQ ID NO: 3281652 - DNA, 25 bp, Homo sapien
aaatcagttagagcaatttgccagg

SEQ ID NO: 3281653 - DNA, 25 bp, Homo sapien
gtgtccagccccgtgttcagatctg

SEQ ID NO: 3281654 - DNA, 25 bp, Homo sapien
gaagtcaaatgcctggttgtttccc

SEQ ID NO: 3281655 - DNA, 25 bp, Homo sapien
tgtggattccccgtcccggaagatg

SEQ ID NO: 3281656 - DNA, 25 bp, Homo sapien
tggattccccgtcccggaagatggc

SEQ ID NO: 3281657 - DNA, 25 bp, Homo sapien
ctgtggattccccgtcccggaagat

SEQ ID NO: 3281658 - DNA, 25 bp, Homo sapien
ccctcttcacgcggacagggtgtcc

SEQ ID NO: 3281659 - DNA, 25 bp, Homo sapien
aggcccccctcttcacgcggacagg

SEQ ID NO: 3281660 - DNA, 25 bp, Homo sapien
aaggcccccctcttcacgcggacag

SEQ ID NO: 3281661 - DNA, 25 bp, Homo sapien
cccccctcttcacgcggacagggtg

SEQ ID NO: 3281662 - DNA, 25 bp, Homo sapien
ctaaatttagatgggctgagactgt

SEQ ID NO: 3281663 - DNA, 25 bp, Homo sapien
cttgctagggtgaagaggatccact

SEQ ID NO: 3281664 - DNA, 25 bp, Homo sapien
ctcgggaacctcaagggctaactgc

SEQ ID NO: 3281665 - DNA, 25 bp, Homo sapien
tgagactgtaaagagcctcgggaac

SEQ ID NO: 3281666 - DNA, 25 bp, Homo sapien
tcctggcaatgaacctacagcgaag

SEQ ID NO: 3281667 - DNA, 25 bp, Homo sapien
gaagcttggcgttctcaaggactcc

SEQ ID NO: 3281668 - DNA, 25 bp, Homo sapien
tggcaatgaacctacagcgaagacc

SEQ ID NO: 3281669 - DNA, 25 bp, Homo sapien
tcttttcttgtagatccccccatga

SEQ ID NO: 3281670 - DNA, 25 bp, Homo sapien
taagtgattaggctgcacctggacc

SEQ ID NO: 3281671 - DNA, 25 bp, Homo sapien
cactaagtgtcttgccacgatggcc

SEQ ID NO: 3281672 - DNA, 25 bp, Homo sapien
aacactgttcgcgttctggccacct

SEQ ID NO: 3281673 - DNA, 25 bp, Homo sapien
cagctttgacaagttctgccatggg

SEQ ID NO: 3281674 - DNA, 25 bp, Homo sapien
cacccctgctcacgtgactgacttc

SEQ ID NO: 3281675 - DNA, 25 bp, Homo sapien
ccctgctcacgtgactgacttctcc

SEQ ID NO: 3281676 - DNA, 25 bp, Homo sapien
ctgtagaatctataccaccaaccct

SEQ ID NO: 3281677 - DNA, 25 bp, Homo sapien
caccccattctgtagaatctatacc

SEQ ID NO: 3281678 - DNA, 25 bp, Homo sapien
tgccttagcactgacagtagatgtg

SEQ ID NO: 3281679 - DNA, 25 bp, Homo sapien
atgtgaagctctgagaccacttttg

SEQ ID NO: 3281680 - DNA, 25 bp, Homo sapien
tttcaagtttgccttagcactgaca

SEQ ID NO: 3281681 - DNA, 25 bp, Homo sapien
tgaagctctgagaccacttttgaag

SEQ ID NO: 3281682 - DNA, 25 bp, Homo sapien
caactgaatgcttgctagttttaca

SEQ ID NO: 3281683 - DNA, 25 bp, Homo sapien
gaatgcttgctagttttacattcca

SEQ ID NO: 3281684 - DNA, 25 bp, Homo sapien
cctccttgatgtcaactgaatgctt

SEQ ID NO: 3281685 - DNA, 25 bp, Homo sapien
tgatgtcaactgaatgcttgctagt

SEQ ID NO: 3281686 - DNA, 25 bp, Homo sapien
tctcacttttccacgtagatagttt

SEQ ID NO: 3281687 - DNA, 25 bp, Homo sapien
tgttctctcacttttccacgtagat

SEQ ID NO: 3281688 - DNA, 25 bp, Homo sapien
tctctcacttttccacgtagatagt

SEQ ID NO: 3281689 - DNA, 25 bp, Homo sapien
cacttttccacgtagatagttttca

SEQ ID NO: 3281690 - DNA, 25 bp, Homo sapien
tcttctcagggcaaaaccacagctt

SEQ ID NO: 3281691 - DNA, 25 bp, Homo sapien
ctgagtcatatttcaaatctccttt

SEQ ID NO: 3281692 - DNA, 25 bp, Homo sapien
agatggttcaataggccagactaac

SEQ ID NO: 3281693 - DNA, 25 bp, Homo sapien
tcttcttctcagggcaaaaccacag

SEQ ID NO: 3281694 - DNA, 25 bp, Homo sapien
ggccctgccaaagcttgggttcatc

SEQ ID NO: 3281695 - DNA, 25 bp, Homo sapien
ccaggccctgccaaagcttgggttc

SEQ ID NO: 3281696 - DNA, 25 bp, Homo sapien
cctgccaaagcttgggttcatccca

SEQ ID NO: 3281697 - DNA, 25 bp, Homo sapien
ccaaagcttgggttcatcccaggac

SEQ ID NO: 3281698 - DNA, 25 bp, Homo sapien
taagaggcgctcttcagagaaagtg

SEQ ID NO: 3281699 - DNA, 25 bp, Homo sapien
gctttcacccaccaataagctgatg

SEQ ID NO: 3281700 - DNA, 25 bp, Homo sapien
ccagataagaggcgctcttcagaga

SEQ ID NO: 3281701 - DNA, 25 bp, Homo sapien
ttcacccaccaataagctgatgaat

SEQ ID NO: 3281702 - DNA, 25 bp, Homo sapien
ctgaagaactagctgcccaagacct

SEQ ID NO: 3281703 - DNA, 25 bp, Homo sapien
gggcctagcacatgggaagaattca

SEQ ID NO: 3281704 - DNA, 25 bp, Homo sapien
gcatgacctgacacaaagcaccttg

SEQ ID NO: 3281705 - DNA, 25 bp, Homo sapien
gagctttggagtgtaacagacctgt

SEQ ID NO: 3281706 - DNA, 25 bp, Homo sapien
tcgtttgaagctcacctctttaggg

SEQ ID NO: 3281707 - DNA, 25 bp, Homo sapien
tgtgtatctgaatgctctccctcaa

SEQ ID NO: 3281708 - DNA, 25 bp, Homo sapien
tctgcactgcgtcagcattccttgg

SEQ ID NO: 3281709 - DNA, 25 bp, Homo sapien
attccttgggcaccggacttgcacc

SEQ ID NO: 3281710 - DNA, 25 bp, Homo sapien
ttttcatttgtgaaagtaaagaagc

SEQ ID NO: 3281711 - DNA, 25 bp, Homo sapien
ttcatttgtgaaagtaaagaagctt

SEQ ID NO: 3281712 - DNA, 25 bp, Homo sapien
tgtctggcaagtcattttcatttgt

SEQ ID NO: 3281713 - DNA, 25 bp, Homo sapien
catttgtgaaagtaaagaagctttt

SEQ ID NO: 3281714 - DNA, 25 bp, Homo sapien
ccagctgtgtgacgtctcaggagat

SEQ ID NO: 3281715 - DNA, 25 bp, Homo sapien
tctggcttagcagtagctcggaaaa

SEQ ID NO: 3281716 - DNA, 25 bp, Homo sapien
tgttcttcgtcccagctatgcatga

SEQ ID NO: 3281717 - DNA, 25 bp, Homo sapien
gagatagtccgtttgagagctgagc

SEQ ID NO: 3281718 - DNA, 25 bp, Homo sapien
tggctgcggtgccttcagctctcca

SEQ ID NO: 3281719 - DNA, 25 bp, Homo sapien
tgtatatgcaacatgcaagaaagac

SEQ ID NO: 3281720 - DNA, 25 bp, Homo sapien
gtccaggtacttgtggctgcctaat

SEQ ID NO: 3281721 - DNA, 25 bp, Homo sapien
ggctgcctaatcacaggtggtgccg

SEQ ID NO: 3281722 - DNA, 25 bp, Homo sapien
taattgctagcagttagctctcttg

SEQ ID NO: 3281723 - DNA, 25 bp, Homo sapien
gctagcagttagctctcttgtgtca

SEQ ID NO: 3281724 - DNA, 25 bp, Homo sapien
gctctcttgtgtcatggcggttacc

SEQ ID NO: 3281725 - DNA, 25 bp, Homo sapien
tcatggcggttacccagggcagctg

SEQ ID NO: 3281726 - DNA, 25 bp, Homo sapien
gaggacgggatacacctttgagtca

SEQ ID NO: 3281727 - DNA, 25 bp, Homo sapien
tccccgtcactcttttgattggtgt

SEQ ID NO: 3281728 - DNA, 25 bp, Homo sapien
taccatagttcagagaggacgggat

SEQ ID NO: 3281729 - DNA, 25 bp, Homo sapien
tggtgtagtcggactcttgcatacc

SEQ ID NO: 3281730 - DNA, 25 bp, Homo sapien
taagtgcctttgcaccacacacttc

SEQ ID NO: 3281731 - DNA, 25 bp, Homo sapien
ttcatgttgagggccaaacctgtcc

SEQ ID NO: 3281732 - DNA, 25 bp, Homo sapien
gggccaaacctgtccacctaagtgc

SEQ ID NO: 3281733 - DNA, 25 bp, Homo sapien
agtgcctttgcaccacacacttcta

SEQ ID NO: 3281734 - DNA, 25 bp, Homo sapien
cagggatctctgcatttgcttattt

SEQ ID NO: 3281735 - DNA, 25 bp, Homo sapien
tttgctatttcactgcatctggccc

SEQ ID NO: 3281736 - DNA, 25 bp, Homo sapien
tccaaagtcctcttcagaaccaggg

SEQ ID NO: 3281737 - DNA, 25 bp, Homo sapien
agactttgtgcatgatttgtcttcc

SEQ ID NO: 3281738 - DNA, 25 bp, Homo sapien
ggtggttctgaagcggcatttgctt

SEQ ID NO: 3281739 - DNA, 25 bp, Homo sapien
ccagctggccagtgagtagaaggat

SEQ ID NO: 3281740 - DNA, 25 bp, Homo sapien
gctggccagtgagtagaaggatact

SEQ ID NO: 3281741 - DNA, 25 bp, Homo sapien
gtagagaggtggttctgaagcggca

SEQ ID NO: 3281742 - DNA, 25 bp, Homo sapien
gtcaagattgacatccttgaacttc

SEQ ID NO: 3281743 - DNA, 25 bp, Homo sapien
tgtcaagattgacatccttgaactt

SEQ ID NO: 3281744 - DNA, 25 bp, Homo sapien
tcccaagattgataggttttccgtc

SEQ ID NO: 3281745 - DNA, 25 bp, Homo sapien
actgtgatgccccttgtctgcaagt

SEQ ID NO: 3281746 - DNA, 25 bp, Homo sapien
caagccaagggcaaaattatcatgt

SEQ ID NO: 3281747 - DNA, 25 bp, Homo sapien
gaagacctaagactgcacctcatga

SEQ ID NO: 3281748 - DNA, 25 bp, Homo sapien
ttcaatcccttccagaggacaataa

SEQ ID NO: 3281749 - DNA, 25 bp, Homo sapien
tgtgggaagttttactcgtccctca

SEQ ID NO: 3281750 - DNA, 25 bp, Homo sapien
caaggaagggatattgcttctgtgg

SEQ ID NO: 3281751 - DNA, 25 bp, Homo sapien
tccctcaaatgggttttcctggctc

SEQ ID NO: 3281752 - DNA, 25 bp, Homo sapien
tcaaaactcggctatttccccagtg

SEQ ID NO: 3281753 - DNA, 25 bp, Homo sapien
ctgacattcttcaaaactcggctat

SEQ ID NO: 3281754 - DNA, 25 bp, Homo sapien
cattcttcaaaactcggctatttcc

SEQ ID NO: 3281755 - DNA, 25 bp, Homo sapien
gacattcttcaaaactcggctattt

SEQ ID NO: 3281756 - DNA, 25 bp, Homo sapien
actgacagcaaagccgctcagctaa

SEQ ID NO: 3281757 - DNA, 25 bp, Homo sapien
tccgaggaacggctctgcctgcact

SEQ ID NO: 3281758 - DNA, 25 bp, Homo sapien
gggcacagtgctcgagtcacctctc

SEQ ID NO: 3281759 - DNA, 25 bp, Homo sapien
tgcttcttgtactttgtttacccgc

SEQ ID NO: 3281760 - DNA, 25 bp, Homo sapien
gatctccactagaggaaactggcca

SEQ ID NO: 3281761 - DNA, 25 bp, Homo sapien
aagagattgctggtggatgcttact

SEQ ID NO: 3281762 - DNA, 25 bp, Homo sapien
ctccactagaggaaactggccactg

SEQ ID NO: 3281763 - DNA, 25 bp, Homo sapien
gctggtggatgcttacttccttctc

SEQ ID NO: 3281764 - DNA, 25 bp, Homo sapien
tccccaggagatgaggaatggctta

SEQ ID NO: 3281765 - DNA, 25 bp, Homo sapien
ctccccaggagatgaggaatggctt

SEQ ID NO: 3281766 - DNA, 25 bp, Homo sapien
ccccaggagatgaggaatggcttat

SEQ ID NO: 3281767 - DNA, 25 bp, Homo sapien
catactggtgtgctgcagcttacag

SEQ ID NO: 3281768 - DNA, 25 bp, Homo sapien
tggtaacctgtttgcaacatactgg

SEQ ID NO: 3281769 - DNA, 25 bp, Homo sapien
aaggctgaggatcttatggcatttg

SEQ ID NO: 3281770 - DNA, 25 bp, Homo sapien
ttaagatgtccagggttaatggctg

SEQ ID NO: 3281771 - DNA, 25 bp, Homo sapien
tcttgccactgcaccttccattgtt

SEQ ID NO: 3281772 - DNA, 25 bp, Homo sapien
gcctttgtcgttgttgcctcttgcc

SEQ ID NO: 3281773 - DNA, 25 bp, Homo sapien
gcctcttgccactgcaccttccatt

SEQ ID NO: 3281774 - DNA, 25 bp, Homo sapien
agtgttggcctttgtcgttgttgcc

SEQ ID NO: 3281775 - DNA, 25 bp, Homo sapien
gtactctccaatgggacttagttga

SEQ ID NO: 3281776 - DNA, 25 bp, Homo sapien
ccaatgggacttagttgagagtgaa

SEQ ID NO: 3281777 - DNA, 25 bp, Homo sapien
cttagttgagagtgaaggtagtaca

SEQ ID NO: 3281778 - DNA, 25 bp, Homo sapien
gacttagttgagagtgaaggtagta

SEQ ID NO: 3281779 - DNA, 25 bp, Homo sapien
caaagcaatttcagcctagttctta

SEQ ID NO: 3281780 - DNA, 25 bp, Homo sapien
gcctagttcttaagcctggttgtag

SEQ ID NO: 3281781 - DNA, 25 bp, Homo sapien
gttcttaagcctggttgtagacaat

SEQ ID NO: 3281782 - DNA, 25 bp, Homo sapien
gcaatttcagcctagttcttaagcc

SEQ ID NO: 3281783 - DNA, 25 bp, Homo sapien
gcagcttcagtgctcagactcatgg

SEQ ID NO: 3281784 - DNA, 25 bp, Homo sapien
tccatttgcaaggacagctggtgaa

SEQ ID NO: 3281785 - DNA, 25 bp, Homo sapien
caacgtggtgcttcattttctcggg

SEQ ID NO: 3281786 - DNA, 25 bp, Homo sapien
tgtgcctctccacgtaagggccttt

SEQ ID NO: 3281787 - DNA, 25 bp, Homo sapien
tctttcattctctgtccccaccatc

SEQ ID NO: 3281788 - DNA, 25 bp, Homo sapien
cagtttcttccattaagtttgaatc

SEQ ID NO: 3281789 - DNA, 25 bp, Homo sapien
taagactcaatgatgtcatttgccc

SEQ ID NO: 3281790 - DNA, 25 bp, Homo sapien
ttctctggcatttgagcctcagttt

SEQ ID NO: 3281791 - DNA, 25 bp, Homo sapien
catttcgacgatatttgactcttct

SEQ ID NO: 3281792 - DNA, 25 bp, Homo sapien
tgactcttctcttttcttgcttcat

SEQ ID NO: 3281793 - DNA, 25 bp, Homo sapien
tatttgactcttctcttttcttgct

SEQ ID NO: 3281794 - DNA, 25 bp, Homo sapien
tttgactcttctcttttcttgcttc

SEQ ID NO: 3281795 - DNA, 25 bp, Homo sapien
tagccttaaaattgactaataaata

SEQ ID NO: 3281796 - DNA, 25 bp, Homo sapien
tattccaatccatagaaccttgttt

SEQ ID NO: 3281797 - DNA, 25 bp, Homo sapien
tttcctattccaatccatagaacct

SEQ ID NO: 3281798 - DNA, 25 bp, Homo sapien
caatccatagaaccttgtttgaaat

SEQ ID NO: 3281799 - DNA, 25 bp, Homo sapien
caggcatgtgccatcacactcggtt

SEQ ID NO: 3281800 - DNA, 25 bp, Homo sapien
aggcatgtgccatcacactcggtta

SEQ ID NO: 3281801 - DNA, 25 bp, Homo sapien
catgtgccatcacactcggttaatt

SEQ ID NO: 3281802 - DNA, 25 bp, Homo sapien
ggcatgtgccatcacactcggttaa

SEQ ID NO: 3281803 - DNA, 25 bp, Homo sapien
ggatccctgtttcctttgggagagc

SEQ ID NO: 3281804 - DNA, 25 bp, Homo sapien
ttatgacaagtccagtgaagccgcc

SEQ ID NO: 3281805 - DNA, 25 bp, Homo sapien
tgaagccgccaaatatacactgatg

SEQ ID NO: 3281806 - DNA, 25 bp, Homo sapien
tcaatgctcagattcatttggatcc

SEQ ID NO: 3281807 - DNA, 25 bp, Homo sapien
ggctgtgtcctccagatggttacaa

SEQ ID NO: 3281808 - DNA, 25 bp, Homo sapien
aggcatttcagagcaaagaggatct

SEQ ID NO: 3281809 - DNA, 25 bp, Homo sapien
ttagatttctaaactcggaggcatt

SEQ ID NO: 3281810 - DNA, 25 bp, Homo sapien
aactcggaggcatttcagagcaaag

SEQ ID NO: 3281811 - DNA, 25 bp, Homo sapien
ttactctcctgtgtttggttggctt

SEQ ID NO: 3281812 - DNA, 25 bp, Homo sapien
tctcctgtgtttggttggcttgcag

SEQ ID NO: 3281813 - DNA, 25 bp, Homo sapien
tggcttgcagctgccacaggaatac

SEQ ID NO: 3281814 - DNA, 25 bp, Homo sapien
cacaggaatacagctgtttacagag

SEQ ID NO: 3281815 - DNA, 25 bp, Homo sapien
gaatgtcaatgtcatcggcctgctt

SEQ ID NO: 3281816 - DNA, 25 bp, Homo sapien
aatgtcaatgtcatcggcctgcttc

SEQ ID NO: 3281817 - DNA, 25 bp, Homo sapien
tgtcaatgtcatcggcctgcttctt

SEQ ID NO: 3281818 - DNA, 25 bp, Homo sapien
caatgtcatcggcctgcttctttct

SEQ ID NO: 3281819 - DNA, 25 bp, Homo sapien
tgggactgtttacaagcatcaggct

SEQ ID NO: 3281820 - DNA, 25 bp, Homo sapien
cctggacttagaagcagtgagacca

SEQ ID NO: 3281821 - DNA, 25 bp, Homo sapien
ttgtgggactgtttacaagcatcag

SEQ ID NO: 3281822 - DNA, 25 bp, Homo sapien
ggacttagaagcagtgagaccacac

SEQ ID NO: 3281823 - DNA, 25 bp, Homo sapien
ggaaatgatgaagccgtgcccagta

SEQ ID NO: 3281824 - DNA, 25 bp, Homo sapien
tttcctgaactttaccaagtgactg

SEQ ID NO: 3281825 - DNA, 25 bp, Homo sapien
taccctgtacaacatctttgttctc

SEQ ID NO: 3281826 - DNA, 25 bp, Homo sapien
gccgtgcccagtataccctgtacaa

SEQ ID NO: 3281827 - DNA, 25 bp, Homo sapien
tcttggaagtacagtagaaccctgt

SEQ ID NO: 3281828 - DNA, 25 bp, Homo sapien
ctcttggaagtacagtagaaccctg

SEQ ID NO: 3281829 - DNA, 25 bp, Homo sapien
cttggaagtacagtagaaccctgtt

SEQ ID NO: 3281830 - DNA, 25 bp, Homo sapien
tagtcctgattcaaccctactgagg

SEQ ID NO: 3281831 - DNA, 25 bp, Homo sapien
gattcaggaagttgcaaaggcccac

SEQ ID NO: 3281832 - DNA, 25 bp, Homo sapien
gagtatgttagtacctgagtgtgtg

SEQ ID NO: 3281833 - DNA, 25 bp, Homo sapien
tcagcgagtctcagggattcaggaa

SEQ ID NO: 3281834 - DNA, 25 bp, Homo sapien
aacctagcaaggcaggtgaacattc

SEQ ID NO: 3281835 - DNA, 25 bp, Homo sapien
cccaacctagcaaggcaggtgaaca

SEQ ID NO: 3281836 - DNA, 25 bp, Homo sapien
gtgaacattcaaattcaggaaatac

SEQ ID NO: 3281837 - DNA, 25 bp, Homo sapien
caggaaatacagagaccaccacaaa

SEQ ID NO: 3281838 - DNA, 25 bp, Homo sapien
ttgcaggccagtgctcttttttcca

SEQ ID NO: 3281839 - DNA, 25 bp, Homo sapien
gccagtgctcttttttccagacacc

SEQ ID NO: 3281840 - DNA, 25 bp, Homo sapien
caggccagtgctcttttttccagac

SEQ ID NO: 3281841 - DNA, 25 bp, Homo sapien
cttgcaggccagtgctcttttttcc

SEQ ID NO: 3281842 - DNA, 25 bp, Homo sapien
tggttggcctggcttcgaggggttc

SEQ ID NO: 3281843 - DNA, 25 bp, Homo sapien
tactaacagggctgaagggtcaggt

SEQ ID NO: 3281844 - DNA, 25 bp, Homo sapien
gcctggcttcgaggggttctggtac

SEQ ID NO: 3281845 - DNA, 25 bp, Homo sapien
ctactttgccgttactaacagggct

SEQ ID NO: 3281846 - DNA, 25 bp, Homo sapien
gtgggttactagatccattcccatt

SEQ ID NO: 3281847 - DNA, 25 bp, Homo sapien
cagggggacgagtggtaggctggga

SEQ ID NO: 3281848 - DNA, 25 bp, Homo sapien
agcagcagggggacgagtggtaggc

SEQ ID NO: 3281849 - DNA, 25 bp, Homo sapien
cagcagggggacgagtggtaggctg

SEQ ID NO: 3281850 - DNA, 25 bp, Homo sapien
gaagcagcagggggacgagtggtag

SEQ ID NO: 3281851 - DNA, 25 bp, Homo sapien
ttgttgggcgcctgctggttgctat

SEQ ID NO: 3281852 - DNA, 25 bp, Homo sapien
ttgggcgcctgctggttgctatact

SEQ ID NO: 3281853 - DNA, 25 bp, Homo sapien
caccttgttgggcgcctgctggttg

SEQ ID NO: 3281854 - DNA, 25 bp, Homo sapien
accttgttgggcgcctgctggttgc

SEQ ID NO: 3281855 - DNA, 25 bp, Homo sapien
ctcattgaagttaggaaatcagaat

SEQ ID NO: 3281856 - DNA, 25 bp, Homo sapien
tacagaattctccagtcttctgtag

SEQ ID NO: 3281857 - DNA, 25 bp, Homo sapien
atacagaattctccagtcttctgta

SEQ ID NO: 3281858 - DNA, 25 bp, Homo sapien
tggctcattgaagttaggaaatcag

SEQ ID NO: 3281859 - DNA, 25 bp, Homo sapien
ccatggccagtatactgtgtcagac

SEQ ID NO: 3281860 - DNA, 25 bp, Homo sapien
atggccagtatactgtgtcagacaa

SEQ ID NO: 3281861 - DNA, 25 bp, Homo sapien
ccccatggccagtatactgtgtcag

SEQ ID NO: 3281862 - DNA, 25 bp, Homo sapien
catggccagtatactgtgtcagaca

SEQ ID NO: 3281863 - DNA, 25 bp, Homo sapien
tttgttgagccagacaacgtcccca

SEQ ID NO: 3281864 - DNA, 25 bp, Homo sapien
ctggatcagattgccgatgtcatca

SEQ ID NO: 3281865 - DNA, 25 bp, Homo sapien
attgccgatgtcatcacagacggag

SEQ ID NO: 3281866 - DNA, 25 bp, Homo sapien
gagccagacaacgtccccaggctgg

SEQ ID NO: 3281867 - DNA, 25 bp, Homo sapien
ctgccactttgcaggtctgaacctt

SEQ ID NO: 3281868 - DNA, 25 bp, Homo sapien
tctgaaccttgtgcccctcctttgt

SEQ ID NO: 3281869 - DNA, 25 bp, Homo sapien
actttgcaggtctgaaccttgtgcc

SEQ ID NO: 3281870 - DNA, 25 bp, Homo sapien
tgcaggtctgaaccttgtgcccctc

SEQ ID NO: 3281871 - DNA, 25 bp, Homo sapien
ataacgataagcttcagactcctga

SEQ ID NO: 3281872 - DNA, 25 bp, Homo sapien
aataacgataagcttcagactcctg

SEQ ID NO: 3281873 - DNA, 25 bp, Homo sapien
aaagtgtaatctcaaagtgcttaga

SEQ ID NO: 3281874 - DNA, 25 bp, Homo sapien
cctcccaaagtgtaatctcaaagtg

SEQ ID NO: 3281875 - DNA, 25 bp, Homo sapien
cccaaagtgtaatctcaaagtgctt

SEQ ID NO: 3281876 - DNA, 25 bp, Homo sapien
ctcccaaagtgtaatctcaaagtgc

SEQ ID NO: 3281877 - DNA, 25 bp, Homo sapien
ctagatggcgctcacatccacacat

SEQ ID NO: 3281878 - DNA, 25 bp, Homo sapien
agcatcctggcgctgattgactggc

SEQ ID NO: 3281879 - DNA, 25 bp, Homo sapien
acaaagcatcctggcgctgattgac

SEQ ID NO: 3281880 - DNA, 25 bp, Homo sapien
ttgtgacaaagcatcctggcgctga

SEQ ID NO: 3281881 - DNA, 25 bp, Homo sapien
catcctggcgctgattgactggctc

SEQ ID NO: 3281882 - DNA, 25 bp, Homo sapien
gccagaacttgagtgtgaataagct

SEQ ID NO: 3281883 - DNA, 25 bp, Homo sapien
aacgcagagggggagacatgctaac

SEQ ID NO: 3281884 - DNA, 25 bp, Homo sapien
ctgactccaatggtatgagtgggcg

SEQ ID NO: 3281885 - DNA, 25 bp, Homo sapien
ctgagagagcggaggaaacagagcc

SEQ ID NO: 3281886 - DNA, 25 bp, Homo sapien
cttttcgctgtggtcacagacatcc

SEQ ID NO: 3281887 - DNA, 25 bp, Homo sapien
gacatccaggcagcctcgcttcttt

SEQ ID NO: 3281888 - DNA, 25 bp, Homo sapien
tccaggcagcctcgcttctttcctg

SEQ ID NO: 3281889 - DNA, 25 bp, Homo sapien
cgcttctttcctgaaagtcggacgt

SEQ ID NO: 3281890 - DNA, 25 bp, Homo sapien
ccctcctcttcaaggaatcagccat

SEQ ID NO: 3281891 - DNA, 25 bp, Homo sapien
ccactcagattcagctaactcagca

SEQ ID NO: 3281892 - DNA, 25 bp, Homo sapien
tcaggcctcattagtgaggacacag

SEQ ID NO: 3281893 - DNA, 25 bp, Homo sapien
cagcactggggccataggtttttgc

SEQ ID NO: 3281894 - DNA, 25 bp, Homo sapien
ttcacagtgcagtttaccaggtaag

SEQ ID NO: 3281895 - DNA, 25 bp, Homo sapien
cgactgctcgggcagtctgcccatt

SEQ ID NO: 3281896 - DNA, 25 bp, Homo sapien
tgagaagtcacatttgccccgttgc

SEQ ID NO: 3281897 - DNA, 25 bp, Homo sapien
ttctaagagttctgtctgagaagtc

SEQ ID NO: 3281898 - DNA, 25 bp, Homo sapien
ttgtacttcccagtacaagctgaaa

SEQ ID NO: 3281899 - DNA, 25 bp, Homo sapien
tctttgcaccttgtacttcccagta

SEQ ID NO: 3281900 - DNA, 25 bp, Homo sapien
cagtacaagctgaaagagcctctga

SEQ ID NO: 3281901 - DNA, 25 bp, Homo sapien
ttcccagtacaagctgaaagagcct

SEQ ID NO: 3281902 - DNA, 25 bp, Homo sapien
ccggatattgttgctcttactgcag

SEQ ID NO: 3281903 - DNA, 25 bp, Homo sapien
aaggtccacaacggttgtcttctat

SEQ ID NO: 3281904 - DNA, 25 bp, Homo sapien
ctttttcaagacttgccggatattg

SEQ ID NO: 3281905 - DNA, 25 bp, Homo sapien
cactgccccaagctctcagggttga

SEQ ID NO: 3281906 - DNA, 25 bp, Homo sapien
tccagtaaggaacctgacgagagaa

SEQ ID NO: 3281907 - DNA, 25 bp, Homo sapien
gatggcagggctcctaaatggcttt

SEQ ID NO: 3281908 - DNA, 25 bp, Homo sapien
tccctcgtgccaaactccagtaagg

SEQ ID NO: 3281909 - DNA, 25 bp, Homo sapien
gaaatcttaactcccaatgctatgg

SEQ ID NO: 3281910 - DNA, 25 bp, Homo sapien
caaaccagacatatgaggcaagtga

SEQ ID NO: 3281911 - DNA, 25 bp, Homo sapien
cctatttgcaagctaactgtggaca

SEQ ID NO: 3281912 - DNA, 25 bp, Homo sapien
cctccttgaggaagagagactttac

SEQ ID NO: 3281913 - DNA, 25 bp, Homo sapien
caagtgaagctatgtgggaccaacc

SEQ ID NO: 3281914 - DNA, 25 bp, Homo sapien
gagacccaagactaaacacaaagtg

SEQ ID NO: 3281915 - DNA, 25 bp, Homo sapien
gtatataccttattcacacagcctg

SEQ ID NO: 3281916 - DNA, 25 bp, Homo sapien
gaatcgtcagatggcaaaggtgtca

SEQ ID NO: 3281917 - DNA, 25 bp, Homo sapien
caaagttgtgtacactgaatcgtca

SEQ ID NO: 3281918 - DNA, 25 bp, Homo sapien
cgatcagcagaagttttatcaccac

SEQ ID NO: 3281919 - DNA, 25 bp, Homo sapien
taaaaagatttgtagcaattgggtc

SEQ ID NO: 3281920 - DNA, 25 bp, Homo sapien
gcaattgggtcaccctattttgccc

SEQ ID NO: 3281921 - DNA, 25 bp, Homo sapien
ccagctgatgctggcaaactcatca

SEQ ID NO: 3281922 - DNA, 25 bp, Homo sapien
tgctagggcctccattccagtggaa

SEQ ID NO: 3281923 - DNA, 25 bp, Homo sapien
gagggcctggcacattaatgtacca

SEQ ID NO: 3281924 - DNA, 25 bp, Homo sapien
gaggacaatgttaccaccagctatt

SEQ ID NO: 3281925 - DNA, 25 bp, Homo sapien
caccgacatgctgagggtatcctgt

SEQ ID NO: 3281926 - DNA, 25 bp, Homo sapien
tcaggctccttcccacaagctttca

SEQ ID NO: 3281927 - DNA, 25 bp, Homo sapien
caggctccttcccacaagctttcac

SEQ ID NO: 3281928 - DNA, 25 bp, Homo sapien
tgtttacaacaatgccaacagcatg

SEQ ID NO: 3281929 - DNA, 25 bp, Homo sapien
gcaagaatcttacccttgtttacaa

SEQ ID NO: 3281930 - DNA, 25 bp, Homo sapien
ttgtttacaacaatgccaacagcat

SEQ ID NO: 3281931 - DNA, 25 bp, Homo sapien
ctcttggcaagaatcttacccttgt

SEQ ID NO: 3281932 - DNA, 25 bp, Homo sapien
tggggaacactgtagactttcagtt

SEQ ID NO: 3281933 - DNA, 25 bp, Homo sapien
cactgtagactttcagttttgccat

SEQ ID NO: 3281934 - DNA, 25 bp, Homo sapien
gaacactgtagactttcagttttgc

SEQ ID NO: 3281935 - DNA, 25 bp, Homo sapien
ctggggaacactgtagactttcagt

SEQ ID NO: 3281936 - DNA, 25 bp, Homo sapien
cattccgttgatgtgtaccatatca

SEQ ID NO: 3281937 - DNA, 25 bp, Homo sapien
agtatccattccgttgatgtgtacc

SEQ ID NO: 3281938 - DNA, 25 bp, Homo sapien
tatccattccgttgatgtgtaccat

SEQ ID NO: 3281939 - DNA, 25 bp, Homo sapien
tccattccgttgatgtgtaccatat

SEQ ID NO: 3281940 - DNA, 25 bp, Homo sapien
taagtggcccttgtacccgtgaaga

SEQ ID NO: 3281941 - DNA, 25 bp, Homo sapien
gcctagagaatgtataccggtgcct

SEQ ID NO: 3281942 - DNA, 25 bp, Homo sapien
tttggccgaaaggaaggactgcttc

SEQ ID NO: 3281943 - DNA, 25 bp, Homo sapien
ggaaaagcatcccagcctaagtggc

SEQ ID NO: 3281944 - DNA, 25 bp, Homo sapien
tattgcagtacaaagaagtaaaatg

SEQ ID NO: 3281945 - DNA, 25 bp, Homo sapien
tttattattgcagtacaaagaagta

SEQ ID NO: 3281946 - DNA, 25 bp, Homo sapien
ggcctcttccttccattctatctgt

SEQ ID NO: 3281947 - DNA, 25 bp, Homo sapien
tggcctcttccttccattctatctg

SEQ ID NO: 3281948 - DNA, 25 bp, Homo sapien
gcagactgaagagcataggaactag

SEQ ID NO: 3281949 - DNA, 25 bp, Homo sapien
ccagcaatgtaagttcaataggtct

SEQ ID NO: 3281950 - DNA, 25 bp, Homo sapien
ggccactggttatacatgattaggg

SEQ ID NO: 3281951 - DNA, 25 bp, Homo sapien
gtctttgggttacagcagtgtcaac

SEQ ID NO: 3281952 - DNA, 25 bp, Homo sapien
tgaatcactgcagccagctctttaa

SEQ ID NO: 3281953 - DNA, 25 bp, Homo sapien
cagtaaataggttttaacaatgtca

SEQ ID NO: 3281954 - DNA, 25 bp, Homo sapien
tcactgcagccagctctttaaacaa

SEQ ID NO: 3281955 - DNA, 25 bp, Homo sapien
gtaaataggttttaacaatgtcagc

SEQ ID NO: 3281956 - DNA, 25 bp, Homo sapien
aaaggctatattcgtcattgatggc

SEQ ID NO: 3281957 - DNA, 25 bp, Homo sapien
aactgctccaggcattcaataaagc

SEQ ID NO: 3281958 - DNA, 25 bp, Homo sapien
aaagacaactgtcagagtgcggtac

SEQ ID NO: 3281959 - DNA, 25 bp, Homo sapien
taattatagggacaccatagtggtg

SEQ ID NO: 3281960 - DNA, 25 bp, Homo sapien
catgtagctgcagaattagaaaggc

SEQ ID NO: 3281961 - DNA, 25 bp, Homo sapien
tcaattcattacactagtcagccac

SEQ ID NO: 3281962 - DNA, 25 bp, Homo sapien
tagaaaggcaagtctctgtagagct

SEQ ID NO: 3281963 - DNA, 25 bp, Homo sapien
ctgaggaatgatgctcgaagtaccc

SEQ ID NO: 3281964 - DNA, 25 bp, Homo sapien
caaaggatacagttagcacattatt

SEQ ID NO: 3281965 - DNA, 25 bp, Homo sapien
caaatcggtatttgtagacctgcct

SEQ ID NO: 3281966 - DNA, 25 bp, Homo sapien
tatctatagagaacgtaaagtaggt

SEQ ID NO: 3281967 - DNA, 25 bp, Homo sapien
aattcatgactgttcatccctaggc

SEQ ID NO: 3281968 - DNA, 25 bp, Homo sapien
ggagctgaccctgttaaaacctaga

SEQ ID NO: 3281969 - DNA, 25 bp, Homo sapien
gccagcaaaggactcacgcaggtaa

SEQ ID NO: 3281970 - DNA, 25 bp, Homo sapien
tggaatgcatttgtatcaagatcaa

SEQ ID NO: 3281971 - DNA, 25 bp, Homo sapien
ttacaatttgtttaaagggccagca

SEQ ID NO: 3281972 - DNA, 25 bp, Homo sapien
tcttgcaaagactatcagatcatcc

SEQ ID NO: 3281973 - DNA, 25 bp, Homo sapien
agatttctatttcccagtgattgca

SEQ ID NO: 3281974 - DNA, 25 bp, Homo sapien
tccaacattagactgacagacttct

SEQ ID NO: 3281975 - DNA, 25 bp, Homo sapien
cctgagatgcttcccttatgatcga

SEQ ID NO: 3281976 - DNA, 25 bp, Homo sapien
caacttcaggtcataaggcacagga

SEQ ID NO: 3281977 - DNA, 25 bp, Homo sapien
aacttcaggtcataaggcacaggaa

SEQ ID NO: 3281978 - DNA, 25 bp, Homo sapien
tacaacttcaggtcataaggcacag

SEQ ID NO: 3281979 - DNA, 25 bp, Homo sapien
ttacaacttcaggtcataaggcaca

SEQ ID NO: 3281980 - DNA, 25 bp, Homo sapien
ccaaaagtgggtggtctttgcagag

SEQ ID NO: 3281981 - DNA, 25 bp, Homo sapien
ctcagaaattttcaagccctgtatt

SEQ ID NO: 3281982 - DNA, 25 bp, Homo sapien
taatctttggtgtgccagcctaggc

SEQ ID NO: 3281983 - DNA, 25 bp, Homo sapien
tttcaagccctgtattaatcaatga

SEQ ID NO: 3281984 - DNA, 25 bp, Homo sapien
tatatcggcttcattacaccaccgc

SEQ ID NO: 3281985 - DNA, 25 bp, Homo sapien
cacttgagtgcccttctttagtctc

SEQ ID NO: 3281986 - DNA, 25 bp, Homo sapien
ccgctccatttgtaatgtaaattgg

SEQ ID NO: 3281987 - DNA, 25 bp, Homo sapien
tttagtctcctttcaactgcccact

SEQ ID NO: 3281988 - DNA, 25 bp, Homo sapien
gagaggtattcaaaacgtattaaca

SEQ ID NO: 3281989 - DNA, 25 bp, Homo sapien
cagtggcccacatggaatacgcatt

SEQ ID NO: 3281990 - DNA, 25 bp, Homo sapien
tgattgcaaaaggagaactgagagc

SEQ ID NO: 3281991 - DNA, 25 bp, Homo sapien
cgtattaacacaaatcaatggcagc

SEQ ID NO: 3281992 - DNA, 25 bp, Homo sapien
accctgcatgcttcacatgagttag

SEQ ID NO: 3281993 - DNA, 25 bp, Homo sapien
aaaagtacacaattggctacattaa

SEQ ID NO: 3281994 - DNA, 25 bp, Homo sapien
tgtatcacaccgctttgcaaactga

SEQ ID NO: 3281995 - DNA, 25 bp, Homo sapien
aatctatcgtgtgcttttggctcag

SEQ ID NO: 3281996 - DNA, 25 bp, Homo sapien
ttcagaaggaaacatcaattgcacc

SEQ ID NO: 3281997 - DNA, 25 bp, Homo sapien
aagtaccaccttagcagaactgagg

SEQ ID NO: 3281998 - DNA, 25 bp, Homo sapien
taaataaacacaaacggctatggga

SEQ ID NO: 3281999 - DNA, 25 bp, Homo sapien
attgttccctccctagaaagcgtgg

SEQ ID NO: 3282000 - DNA, 25 bp, Homo sapien
tgaactcatgcaactgtgggtccaa

SEQ ID NO: 3282001 - DNA, 25 bp, Homo sapien
taccacaaaagttgaaacagtctga

SEQ ID NO: 3282002 - DNA, 25 bp, Homo sapien
caaagatttttatggttggcctgcg

SEQ ID NO: 3282003 - DNA, 25 bp, Homo sapien
aaccagaagctctctaacactgaaa

SEQ ID NO: 3282004 - DNA, 25 bp, Homo sapien
tctctactatccagtaatgtgggca

SEQ ID NO: 3282005 - DNA, 25 bp, Homo sapien
tccatgtaagggagggccaacatct

SEQ ID NO: 3282006 - DNA, 25 bp, Homo sapien
ggaatctttaagcaaatggcacatg

SEQ ID NO: 3282007 - DNA, 25 bp, Homo sapien
aaagctctacagtttatgtcccaca

SEQ ID NO: 3282008 - DNA, 25 bp, Homo sapien
ggacacaccctagatacaagttaaa

SEQ ID NO: 3282009 - DNA, 25 bp, Homo sapien
ccaagacaggatataggacatgaga

SEQ ID NO: 3282010 - DNA, 25 bp, Homo sapien
taattgcactactttaaggtggtag

SEQ ID NO: 3282011 - DNA, 25 bp, Homo sapien
gatagctcctaatatccaagacagg

SEQ ID NO: 3282012 - DNA, 25 bp, Homo sapien
tatcaacgggatattaaataccagc

SEQ ID NO: 3282013 - DNA, 25 bp, Homo sapien
cattattgctcgataccacagttgt

SEQ ID NO: 3282014 - DNA, 25 bp, Homo sapien
tattgtatagtggtaccaattctca

SEQ ID NO: 3282015 - DNA, 25 bp, Homo sapien
cacataggtcattcacaaatctaaa

SEQ ID NO: 3282016 - DNA, 25 bp, Homo sapien
aggcaccattggaaagacaacatac

SEQ ID NO: 3282017 - DNA, 25 bp, Homo sapien
tctgtagaaccaatgttatgtcacc

SEQ ID NO: 3282018 - DNA, 25 bp, Homo sapien
atgtcaccaccaggagagcaccaag

SEQ ID NO: 3282019 - DNA, 25 bp, Homo sapien
aaaaatgcacacttagaacatgcgg

SEQ ID NO: 3282020 - DNA, 25 bp, Homo sapien
ttggaaagtctctataaataaagta

SEQ ID NO: 3282021 - DNA, 25 bp, Homo sapien
tggaaagtctctataaataaagtaa

SEQ ID NO: 3282022 - DNA, 25 bp, Homo sapien
aaagtctctataaataaagtaaatg

SEQ ID NO: 3282023 - DNA, 25 bp, Homo sapien
ctggtcgaaaaatcggtgtctttgg

SEQ ID NO: 3282024 - DNA, 25 bp, Homo sapien
ctaatctggtcgaaaaatcggtgtc

SEQ ID NO: 3282025 - DNA, 25 bp, Homo sapien
aatctggtcgaaaaatcggtgtctt

SEQ ID NO: 3282026 - DNA, 25 bp, Homo sapien
tctggtcgaaaaatcggtgtctttg

SEQ ID NO: 3282027 - DNA, 25 bp, Homo sapien
gaattacacaaagtgaccagagcta

SEQ ID NO: 3282028 - DNA, 25 bp, Homo sapien
gatagtgcccctgatacactggagg

SEQ ID NO: 3282029 - DNA, 25 bp, Homo sapien
tataccaccctacgtgactgcagct

SEQ ID NO: 3282030 - DNA, 25 bp, Homo sapien
caggtgttccatactacattgggtc

SEQ ID NO: 3282031 - DNA, 25 bp, Homo sapien
ttcagaagccacacatagagactgg

SEQ ID NO: 3282032 - DNA, 25 bp, Homo sapien
tatatactctaagaaaatccagcag

SEQ ID NO: 3282033 - DNA, 25 bp, Homo sapien
caaagaaaagttagtgccaaggtgg

SEQ ID NO: 3282034 - DNA, 25 bp, Homo sapien
gaagaaaagagggacacatggttaa

SEQ ID NO: 3282035 - DNA, 25 bp, Homo sapien
aaaggtttcttaagctccaatggct

SEQ ID NO: 3282036 - DNA, 25 bp, Homo sapien
tttaaagggcactgaggtacgggca

SEQ ID NO: 3282037 - DNA, 25 bp, Homo sapien
tatctgacttgctgcgtaaccaaag

SEQ ID NO: 3282038 - DNA, 25 bp, Homo sapien
gaaaccatgcatctgtgaaccgtag

SEQ ID NO: 3282039 - DNA, 25 bp, Homo sapien
catcatgttattcgtttcacatttc

SEQ ID NO: 3282040 - DNA, 25 bp, Homo sapien
atattccatcatgttattcgtttca

SEQ ID NO: 3282041 - DNA, 25 bp, Homo sapien
tccatcatgttattcgtttcacatt

SEQ ID NO: 3282042 - DNA, 25 bp, Homo sapien
catgttattcgtttcacatttcctt

SEQ ID NO: 3282043 - DNA, 25 bp, Homo sapien
ttcagaccccaacagtacgaagctg

SEQ ID NO: 3282044 - DNA, 25 bp, Homo sapien
agaccccaacagtacgaagctgctc

SEQ ID NO: 3282045 - DNA, 25 bp, Homo sapien
tgtgcaattcagaccccaacagtac

SEQ ID NO: 3282046 - DNA, 25 bp, Homo sapien
caattcagaccccaacagtacgaag

SEQ ID NO: 3282047 - DNA, 25 bp, Homo sapien
ataacttctcaatcgatcttcgtgt

SEQ ID NO: 3282048 - DNA, 25 bp, Homo sapien
taataacttctcaatcgatcttcgt

SEQ ID NO: 3282049 - DNA, 25 bp, Homo sapien
attctaataacttctcaatcgatct

SEQ ID NO: 3282050 - DNA, 25 bp, Homo sapien
tctaataacttctcaatcgatcttc

SEQ ID NO: 3282051 - DNA, 25 bp, Homo sapien
ctttaccaatgtaattctccgtctt

SEQ ID NO: 3282052 - DNA, 25 bp, Homo sapien
acaggttagcggttctttaccaatg

SEQ ID NO: 3282053 - DNA, 25 bp, Homo sapien
caggttagcggttctttaccaatgt

SEQ ID NO: 3282054 - DNA, 25 bp, Homo sapien
agctccaagcatctggatcccaccc

SEQ ID NO: 3282055 - DNA, 25 bp, Homo sapien
ctggtctggaagtagacagctccaa

SEQ ID NO: 3282056 - DNA, 25 bp, Homo sapien
ctccaagcatctggatcccacccat

SEQ ID NO: 3282057 - DNA, 25 bp, Homo sapien
tcttgcaaaaggactacgcatcaat

SEQ ID NO: 3282058 - DNA, 25 bp, Homo sapien
tcactgcaagcaagggccatcaaaa

SEQ ID NO: 3282059 - DNA, 25 bp, Homo sapien
gcaaggcgaactcatgccttaacct

SEQ ID NO: 3282060 - DNA, 25 bp, Homo sapien
tctatactgactcgaaatatgcctt

SEQ ID NO: 3282061 - DNA, 25 bp, Homo sapien
tcttgcctccctcttggagtggata

SEQ ID NO: 3282062 - DNA, 25 bp, Homo sapien
ttcttgttcccgttcttatgccacc

SEQ ID NO: 3282063 - DNA, 25 bp, Homo sapien
tctcctagccatttctaatccttct

SEQ ID NO: 3282064 - DNA, 25 bp, Homo sapien
tatcacactatcaatcgcactcact

SEQ ID NO: 3282065 - DNA, 25 bp, Homo sapien
tcagacgattacacatttttggaac

SEQ ID NO: 3282066 - DNA, 25 bp, Homo sapien
tacaaagctcaattttcagacgatt

SEQ ID NO: 3282067 - DNA, 25 bp, Homo sapien
gaaatagtttatagacctacaaagc

SEQ ID NO: 3282068 - DNA, 25 bp, Homo sapien
cgctgagagaggttttaagcaactc

SEQ ID NO: 3282069 - DNA, 25 bp, Homo sapien
tagtgagaacatactcttggcttgt

SEQ ID NO: 3282070 - DNA, 25 bp, Homo sapien
tgttggacttgataggctaaacgtc

SEQ ID NO: 3282071 - DNA, 25 bp, Homo sapien
cctcagggtaacgatggcctcataa

SEQ ID NO: 3282072 - DNA, 25 bp, Homo sapien
cagctttctctgtaagtacctagca

SEQ ID NO: 3282073 - DNA, 25 bp, Homo sapien
cataggtttcagtctgaccattatt

SEQ ID NO: 3282074 - DNA, 25 bp, Homo sapien
cactgctttagtagtatgacacaaa

SEQ ID NO: 3282075 - DNA, 25 bp, Homo sapien
tctagtgtagactttcagtggtata

SEQ ID NO: 3282076 - DNA, 25 bp, Homo sapien
gaggtcatggatttgaggctttcta

SEQ ID NO: 3282077 - DNA, 25 bp, Homo sapien
gcagcaggcatctcatatggcagag

SEQ ID NO: 3282078 - DNA, 25 bp, Homo sapien
gggagcttataataatggtggaaga

SEQ ID NO: 3282079 - DNA, 25 bp, Homo sapien
tcttgagagaactcagcaccaacct

SEQ ID NO: 3282080 - DNA, 25 bp, Homo sapien
caccaacctgtgaagttatctgccc

SEQ ID NO: 3282081 - DNA, 25 bp, Homo sapien
aagggaatgaactactgatgcaaca

SEQ ID NO: 3282082 - DNA, 25 bp, Homo sapien
gggctggccaagcacggaggctcac

SEQ ID NO: 3282083 - DNA, 25 bp, Homo sapien
gcagctttatttatacagaccaaaa

SEQ ID NO: 3282084 - DNA, 25 bp, Homo sapien
acaacattgttgaatctcaaaatca

SEQ ID NO: 3282085 - DNA, 25 bp, Homo sapien
actaaccatatcaagtcctgcaagg

SEQ ID NO: 3282086 - DNA, 25 bp, Homo sapien
cacctaaaagtaaagagatcacagg

SEQ ID NO: 3282087 - DNA, 25 bp, Homo sapien
gcaaaagcttttgttccgccgaaga

SEQ ID NO: 3282088 - DNA, 25 bp, Homo sapien
cattgttggagaatgaaaagacagc

SEQ ID NO: 3282089 - DNA, 25 bp, Homo sapien
agacaatgccatacactactccttg

SEQ ID NO: 3282090 - DNA, 25 bp, Homo sapien
gattacagaatcactttgtgctcac

SEQ ID NO: 3282091 - DNA, 25 bp, Homo sapien
gctgaagccagcatccttgatcact

SEQ ID NO: 3282092 - DNA, 25 bp, Homo sapien
ttgatcactataccacaccactgtc

SEQ ID NO: 3282093 - DNA, 25 bp, Homo sapien
caggatagtgtgattcattcaatac

SEQ ID NO: 3282094 - DNA, 25 bp, Homo sapien
gataaatgcaagacttgcttgtcca

SEQ ID NO: 3282095 - DNA, 25 bp, Homo sapien
aatgcaagacttgcttgtccacttc

SEQ ID NO: 3282096 - DNA, 25 bp, Homo sapien
gacttgcttgtccacttctaaattt

SEQ ID NO: 3282097 - DNA, 25 bp, Homo sapien
ggcagccacaaagtagccaacgtac

SEQ ID NO: 3282098 - DNA, 25 bp, Homo sapien
taactggccacatactgcaacctaa

SEQ ID NO: 3282099 - DNA, 25 bp, Homo sapien
aggcagccacaaagtagccaacgta

SEQ ID NO: 3282100 - DNA, 25 bp, Homo sapien
aataactggccacatactgcaacct

SEQ ID NO: 3282101 - DNA, 25 bp, Homo sapien
aactgttaactctgttgatgctggc

SEQ ID NO: 3282102 - DNA, 25 bp, Homo sapien
caggaaggttcttcttaagacaact

SEQ ID NO: 3282103 - DNA, 25 bp, Homo sapien
agacaactgttaactctgttgatgc

SEQ ID NO: 3282104 - DNA, 25 bp, Homo sapien
tcttcttaagacaactgttaactct

SEQ ID NO: 3282105 - DNA, 25 bp, Homo sapien
gattcaaatttgttgctcagtccaa

SEQ ID NO: 3282106 - DNA, 25 bp, Homo sapien
tcagattcaaatttgttgctcagtc

SEQ ID NO: 3282107 - DNA, 25 bp, Homo sapien
tgaagaagggaattcagattcaaat

SEQ ID NO: 3282108 - DNA, 25 bp, Homo sapien
tccagttaatgaagaagggaattca

SEQ ID NO: 3282109 - DNA, 25 bp, Homo sapien
ggaggctccctgtcaatacacgtac

SEQ ID NO: 3282110 - DNA, 25 bp, Homo sapien
gagccatgtcactgggtgcaaaggc

SEQ ID NO: 3282111 - DNA, 25 bp, Homo sapien
aaaacaaggaggctccctgtcaata

SEQ ID NO: 3282112 - DNA, 25 bp, Homo sapien
gacaaccacagggtaactgggcgag

SEQ ID NO: 3282113 - DNA, 25 bp, Homo sapien
catagatttcgtcgaaatccgccat

SEQ ID NO: 3282114 - DNA, 25 bp, Homo sapien
ttcctcatagatttcgtcgaaatcc

SEQ ID NO: 3282115 - DNA, 25 bp, Homo sapien
accgggtccggcgagtacttgagca

SEQ ID NO: 3282116 - DNA, 25 bp, Homo sapien
ccaccgggtccggcgagtacttgag

SEQ ID NO: 3282117 - DNA, 25 bp, Homo sapien
atggggtctggaccgtcgccgccac

SEQ ID NO: 3282118 - DNA, 25 bp, Homo sapien
ccgcggagttcgctgtcggctgtct

SEQ ID NO: 3282119 - DNA, 25 bp, Homo sapien
gctgtctcggctccggctacagagg

SEQ ID NO: 3282120 - DNA, 25 bp, Homo sapien
acaatgtcaacatccgcccagaggc

SEQ ID NO: 3282121 - DNA, 25 bp, Homo sapien
catgaaaagtcacccctgtggcatt

SEQ ID NO: 3282122 - DNA, 25 bp, Homo sapien
gaggactttcttgaagactaagcgg

SEQ ID NO: 3282123 - DNA, 25 bp, Homo sapien
gaaagggttgcctggttacagagaa

SEQ ID NO: 3282124 - DNA, 25 bp, Homo sapien
gagaaaattaatattgcagctgttc

SEQ ID NO: 3282125 - DNA, 25 bp, Homo sapien
tagctcaataaccagcctcagctgc

SEQ ID NO: 3282126 - DNA, 25 bp, Homo sapien
attgccatccataaatcctgggctc

SEQ ID NO: 3282127 - DNA, 25 bp, Homo sapien
attcaaatagctcaataaccagcct

SEQ ID NO: 3282128 - DNA, 25 bp, Homo sapien
aaatagctcaataaccagcctcagc

SEQ ID NO: 3282129 - DNA, 25 bp, Homo sapien
gacagtcctgaactaaccacctgaa

SEQ ID NO: 3282130 - DNA, 25 bp, Homo sapien
gaggtgccgatcagaaagggaaaca

SEQ ID NO: 3282131 - DNA, 25 bp, Homo sapien
tcagaccttgtcgaacatcagcatg

SEQ ID NO: 3282132 - DNA, 25 bp, Homo sapien
cctctgccaagtccaaaagctgtgg

SEQ ID NO: 3282133 - DNA, 25 bp, Homo sapien
tgcgtgtgccctctctgcgtcactt

SEQ ID NO: 3282134 - DNA, 25 bp, Homo sapien
ggatttcttcatcccgcttggcatg

SEQ ID NO: 3282135 - DNA, 25 bp, Homo sapien
cattggtgatgtccgtgtccggccc

SEQ ID NO: 3282136 - DNA, 25 bp, Homo sapien
gcggcgcgttctgcgtgtgccctct

SEQ ID NO: 3282137 - DNA, 25 bp, Homo sapien
aagggccagttctcttcggctcctg

SEQ ID NO: 3282138 - DNA, 25 bp, Homo sapien
ctgcttaagggccagttctcttcgg

SEQ ID NO: 3282139 - DNA, 25 bp, Homo sapien
gcctctgcttaagggccagttctct

SEQ ID NO: 3282140 - DNA, 25 bp, Homo sapien
cctggggacgcgcagttttgcccgc

SEQ ID NO: 3282141 - DNA, 25 bp, Homo sapien
cgtcacggcggataaaccagaggtt

SEQ ID NO: 3282142 - DNA, 25 bp, Homo sapien
gattccactgcctcaccatgggtag

SEQ ID NO: 3282143 - DNA, 25 bp, Homo sapien
tttagtgtaaccgtagagtcagcca

SEQ ID NO: 3282144 - DNA, 25 bp, Homo sapien
tccgcttggctcaaagggaggcgat

SEQ ID NO: 3282145 - DNA, 25 bp, Homo sapien
aatggccctttgtaaccttctatag

SEQ ID NO: 3282146 - DNA, 25 bp, Homo sapien
gcttcggcacagctacctgggtctg

SEQ ID NO: 3282147 - DNA, 25 bp, Homo sapien
caggcgcagaggtgccgtatgcaaa

SEQ ID NO: 3282148 - DNA, 25 bp, Homo sapien
ggttcactattaggcgagaaagaaa

SEQ ID NO: 3282149 - DNA, 25 bp, Homo sapien
catcagatggataacgtactgacat

SEQ ID NO: 3282150 - DNA, 25 bp, Homo sapien
ggataacgtactgacatcataacaa

SEQ ID NO: 3282151 - DNA, 25 bp, Homo sapien
tcagatggataacgtactgacatca

SEQ ID NO: 3282152 - DNA, 25 bp, Homo sapien
gatggataacgtactgacatcataa

SEQ ID NO: 3282153 - DNA, 25 bp, Homo sapien
ttcccctttatagacttctatctca

SEQ ID NO: 3282154 - DNA, 25 bp, Homo sapien
tctctttcccctttatagacttcta

SEQ ID NO: 3282155 - DNA, 25 bp, Homo sapien
ctttatagacttctatctcacccac

SEQ ID NO: 3282156 - DNA, 25 bp, Homo sapien
cctttatagacttctatctcaccca

SEQ ID NO: 3282157 - DNA, 25 bp, Homo sapien
gaaattgctgcagtacatggtctac

SEQ ID NO: 3282158 - DNA, 25 bp, Homo sapien
cttgaagacggtgttccaggagtca

SEQ ID NO: 3282159 - DNA, 25 bp, Homo sapien
caggagtcaggaaattgctgcagta

SEQ ID NO: 3282160 - DNA, 25 bp, Homo sapien
ttgaagacggtgttccaggagtcag

SEQ ID NO: 3282161 - DNA, 25 bp, Homo sapien
tggatgattggtgaagaatggatgt

SEQ ID NO: 3282162 - DNA, 25 bp, Homo sapien
ctggatgattggtgaagaatggatg

SEQ ID NO: 3282163 - DNA, 25 bp, Homo sapien
tcctgaactcagtggcctgagggat

SEQ ID NO: 3282164 - DNA, 25 bp, Homo sapien
cctgaactcagtggcctgagggatg

SEQ ID NO: 3282165 - DNA, 25 bp, Homo sapien
tactgactgaaaccctgctccaaat

SEQ ID NO: 3282166 - DNA, 25 bp, Homo sapien
ctccaaatccctgcctagaattgag

SEQ ID NO: 3282167 - DNA, 25 bp, Homo sapien
aaatccctgcctagaattgagctcc

SEQ ID NO: 3282168 - DNA, 25 bp, Homo sapien
ctggttcaggccctactgactgaaa

SEQ ID NO: 3282169 - DNA, 25 bp, Homo sapien
tcatttagcctacctggattgcaag

SEQ ID NO: 3282170 - DNA, 25 bp, Homo sapien
tagtgtctgcggctggattccctct

SEQ ID NO: 3282171 - DNA, 25 bp, Homo sapien
tttccgaacaaaaccctgagagcca

SEQ ID NO: 3282172 - DNA, 25 bp, Homo sapien
gattgcaagtcacaggagctgacca

SEQ ID NO: 3282173 - DNA, 25 bp, Homo sapien
ccagtccagtcagtacctctatttg

SEQ ID NO: 3282174 - DNA, 25 bp, Homo sapien
cagtcagtacctctatttggcagct

SEQ ID NO: 3282175 - DNA, 25 bp, Homo sapien
tctatttggcagctctatcgtgcca

SEQ ID NO: 3282176 - DNA, 25 bp, Homo sapien
cagtacctctatttggcagctctat

SEQ ID NO: 3282177 - DNA, 25 bp, Homo sapien
tggagattctgcagtccccattgtt

SEQ ID NO: 3282178 - DNA, 25 bp, Homo sapien
tgtgtggagattctgcagtccccat

SEQ ID NO: 3282179 - DNA, 25 bp, Homo sapien
tgtggagattctgcagtccccattg

SEQ ID NO: 3282180 - DNA, 25 bp, Homo sapien
gtggagattctgcagtccccattgt

SEQ ID NO: 3282181 - DNA, 25 bp, Homo sapien
tgatcctttcttctgtgttcatcat

SEQ ID NO: 3282182 - DNA, 25 bp, Homo sapien
ctgaagatgcacgagagcgggtcgc

SEQ ID NO: 3282183 - DNA, 25 bp, Homo sapien
cctgaagggacatgtggaagtaata

SEQ ID NO: 3282184 - DNA, 25 bp, Homo sapien
gaagtaatagcgagcggtgcagtca

SEQ ID NO: 3282185 - DNA, 25 bp, Homo sapien
caaacattacggtatcctgttagca

SEQ ID NO: 3282186 - DNA, 25 bp, Homo sapien
tcattcctcgcctgcggtttggcgg

SEQ ID NO: 3282187 - DNA, 25 bp, Homo sapien
tcggtgttggcctacagcacaggga

SEQ ID NO: 3282188 - DNA, 25 bp, Homo sapien
ttcgtgaatactgggccgaacacca

SEQ ID NO: 3282189 - DNA, 25 bp, Homo sapien
cgcgtgattactggacggcgctgct

SEQ ID NO: 3282190 - DNA, 25 bp, Homo sapien
catttggccctgagtgaagaagtcg

SEQ ID NO: 3282191 - DNA, 25 bp, Homo sapien
tttggccctgagtgaagaagtcgtc

SEQ ID NO: 3282192 - DNA, 25 bp, Homo sapien
acatttggccctgagtgaagaagtc

SEQ ID NO: 3282193 - DNA, 25 bp, Homo sapien
ttggccctgagtgaagaagtcgtcg

SEQ ID NO: 3282194 - DNA, 25 bp, Homo sapien
cttgccaaagaaatacgggatctaa

SEQ ID NO: 3282195 - DNA, 25 bp, Homo sapien
tttgctgagtggattgtcagtggga

SEQ ID NO: 3282196 - DNA, 25 bp, Homo sapien
gaaatacgggatctaaatgtgataa

SEQ ID NO: 3282197 - DNA, 25 bp, Homo sapien
gccacgacgacatcaagctggctct

SEQ ID NO: 3282198 - DNA, 25 bp, Homo sapien
cccctgcacaggaatttagtcacac

SEQ ID NO: 3282199 - DNA, 25 bp, Homo sapien
cctgcacaggaatttagtcacactt

SEQ ID NO: 3282200 - DNA, 25 bp, Homo sapien
tagtcacacttatctctcccacttt

SEQ ID NO: 3282201 - DNA, 25 bp, Homo sapien
atttagtcacacttatctctcccac

SEQ ID NO: 3282202 - DNA, 25 bp, Homo sapien
cacctgcctctcaatttttccccga

SEQ ID NO: 3282203 - DNA, 25 bp, Homo sapien
acctgcctctcaatttttccccgag

SEQ ID NO: 3282204 - DNA, 25 bp, Homo sapien
cctgcctctcaatttttccccgagt

SEQ ID NO: 3282205 - DNA, 25 bp, Homo sapien
tgcctctcaatttttccccgagtcc

SEQ ID NO: 3282206 - DNA, 25 bp, Homo sapien
ggtacttggacttgaccaacctgga

SEQ ID NO: 3282207 - DNA, 25 bp, Homo sapien
tcttgagtaaagagaaaggagtcct

SEQ ID NO: 3282208 - DNA, 25 bp, Homo sapien
gagatgagacttacacacttaggga

SEQ ID NO: 3282209 - DNA, 25 bp, Homo sapien
gaacttaacttgacctggccttggc

SEQ ID NO: 3282210 - DNA, 25 bp, Homo sapien
gacacaatttatactgcgacagaac

SEQ ID NO: 3282211 - DNA, 25 bp, Homo sapien
gtaaataactctaaccaaggctgtg

SEQ ID NO: 3282212 - DNA, 25 bp, Homo sapien
tgtaacatgatttccctccagagaa

SEQ ID NO: 3282213 - DNA, 25 bp, Homo sapien
caaggacattggtgagagtccaaca

SEQ ID NO: 3282214 - DNA, 25 bp, Homo sapien
gttggcattcaaccacgcaggaagc

SEQ ID NO: 3282215 - DNA, 25 bp, Homo sapien
tgatcggccagttttcggaaacact

SEQ ID NO: 3282216 - DNA, 25 bp, Homo sapien
taatgccatctagctagcaattgcg

SEQ ID NO: 3282217 - DNA, 25 bp, Homo sapien
aagatgctacttcccactgtatggg

SEQ ID NO: 3282218 - DNA, 25 bp, Homo sapien
catctatccacactgtcaaacaggt

SEQ ID NO: 3282219 - DNA, 25 bp, Homo sapien
aacatgggctgtgattactgcaatc

SEQ ID NO: 3282220 - DNA, 25 bp, Homo sapien
caatactgcttaattgctgatacca

SEQ ID NO: 3282221 - DNA, 25 bp, Homo sapien
aatcactgtgctatcggcagatgat

SEQ ID NO: 3282222 - DNA, 25 bp, Homo sapien
gaggccggatgaaacttctcagtcc

SEQ ID NO: 3282223 - DNA, 25 bp, Homo sapien
ggtgtaatctcaatgcaagccccaa

SEQ ID NO: 3282224 - DNA, 25 bp, Homo sapien
catagtaagtgcgaagactgagcca

SEQ ID NO: 3282225 - DNA, 25 bp, Homo sapien
cctgactaggttctgtagagccaat

SEQ ID NO: 3282226 - DNA, 25 bp, Homo sapien
caaaatgtattacgaatgcccctgt

SEQ ID NO: 3282227 - DNA, 25 bp, Homo sapien
tgtgataatccccacaggcacatta

SEQ ID NO: 3282228 - DNA, 25 bp, Homo sapien
tggtctgccaatctgtacaaaatgg

SEQ ID NO: 3282229 - DNA, 25 bp, Homo sapien
tcaaagccggcctgagaaacactat

SEQ ID NO: 3282230 - DNA, 25 bp, Homo sapien
agaaaactgtggtaggtggaggcca

SEQ ID NO: 3282231 - DNA, 25 bp, Homo sapien
aaaaagtagaaagccgatggagtag

SEQ ID NO: 3282232 - DNA, 25 bp, Homo sapien
gccgatggagtaggataaagaataa

SEQ ID NO: 3282233 - DNA, 25 bp, Homo sapien
gagtaggataaagaataaagcttac

SEQ ID NO: 3282234 - DNA, 25 bp, Homo sapien
ggagccttctgataaaactgaagca

SEQ ID NO: 3282235 - DNA, 25 bp, Homo sapien
gagccttctgataaaactgaagcat

SEQ ID NO: 3282236 - DNA, 25 bp, Homo sapien
tggagccttctgataaaactgaagc

SEQ ID NO: 3282237 - DNA, 25 bp, Homo sapien
gccttctgataaaactgaagcattc

SEQ ID NO: 3282238 - DNA, 25 bp, Homo sapien
ctggtagctttacttctgcagtccc

SEQ ID NO: 3282239 - DNA, 25 bp, Homo sapien
tagctttacttctgcagtccctgtc

SEQ ID NO: 3282240 - DNA, 25 bp, Homo sapien
ggtagctttacttctgcagtccctg

SEQ ID NO: 3282241 - DNA, 25 bp, Homo sapien
tccagatactttcatggccaccttc

SEQ ID NO: 3282242 - DNA, 25 bp, Homo sapien
tgccttgtccacgaaggagtagaga

SEQ ID NO: 3282243 - DNA, 25 bp, Homo sapien
taatcttcaaacacccagatttctt

SEQ ID NO: 3282244 - DNA, 25 bp, Homo sapien
tttcttgtgggccaatctgtcctcc

SEQ ID NO: 3282245 - DNA, 25 bp, Homo sapien
aagaagccggattcttcacgtgaaa

SEQ ID NO: 3282246 - DNA, 25 bp, Homo sapien
tcctgtccaaagtggcaagttggcc

SEQ ID NO: 3282247 - DNA, 25 bp, Homo sapien
ctttgctctgactttcctattgtta

SEQ ID NO: 3282248 - DNA, 25 bp, Homo sapien
tgcctaagtggtaatccctgaacag

SEQ ID NO: 3282249 - DNA, 25 bp, Homo sapien
caaagatagtgctctggccgacctg

SEQ ID NO: 3282250 - DNA, 25 bp, Homo sapien
cccactgccgaaggctgtggttcag

SEQ ID NO: 3282251 - DNA, 25 bp, Homo sapien
tgaggagggcccactgccgaaggct

SEQ ID NO: 3282252 - DNA, 25 bp, Homo sapien
ccactgccgaaggctgtggttcagc

SEQ ID NO: 3282253 - DNA, 25 bp, Homo sapien
cactgccgaaggctgtggttcagct

SEQ ID NO: 3282254 - DNA, 25 bp, Homo sapien
gaacactcgatgaatagtaatcgac

SEQ ID NO: 3282255 - DNA, 25 bp, Homo sapien
gaagccaatgaacactcgatgaata

SEQ ID NO: 3282256 - DNA, 25 bp, Homo sapien
gatgtcttgaatatggccatgaagc

SEQ ID NO: 3282257 - DNA, 25 bp, Homo sapien
ctgatgtcttgaatatggccatgaa

SEQ ID NO: 3282258 - DNA, 25 bp, Homo sapien
taatttattaatgaaattaagcaga

SEQ ID NO: 3282259 - DNA, 25 bp, Homo sapien
gatgaatattcaggatttaatttat

SEQ ID NO: 3282260 - DNA, 25 bp, Homo sapien
gtgatgaatattcaggatttaattt

SEQ ID NO: 3282261 - DNA, 25 bp, Homo sapien
tttattaatgaaattaagcagagcc

SEQ ID NO: 3282262 - DNA, 25 bp, Homo sapien
ttcccagtcatctgctcgccatggg

SEQ ID NO: 3282263 - DNA, 25 bp, Homo sapien
agctggaagtgctgcctttgactca

SEQ ID NO: 3282264 - DNA, 25 bp, Homo sapien
catggggaggacttgagcagctgga

SEQ ID NO: 3282265 - DNA, 25 bp, Homo sapien
tgcctttgactcatttgatcatcca

SEQ ID NO: 3282266 - DNA, 25 bp, Homo sapien
tgctgtggcagacaagggcttttcc

SEQ ID NO: 3282267 - DNA, 25 bp, Homo sapien
ttgtcccattacaagctgctgtggc

SEQ ID NO: 3282268 - DNA, 25 bp, Homo sapien
gcactagcaacatgtctccagcctt

SEQ ID NO: 3282269 - DNA, 25 bp, Homo sapien
tccccagaatgactcggaacacgag

SEQ ID NO: 3282270 - DNA, 25 bp, Homo sapien
gaagcatctgttgtaactcaaggat

SEQ ID NO: 3282271 - DNA, 25 bp, Homo sapien
tgtaactcaaggatcccggcttgag

SEQ ID NO: 3282272 - DNA, 25 bp, Homo sapien
ctcatcaacaaagctgatcgatggg

SEQ ID NO: 3282273 - DNA, 25 bp, Homo sapien
cttcctcatcaacaaagctgatcga

SEQ ID NO: 3282274 - DNA, 25 bp, Homo sapien
gagtgccagactctgaccatggtgg

SEQ ID NO: 3282275 - DNA, 25 bp, Homo sapien
ggccctcctggtacttgtttcagtg

SEQ ID NO: 3282276 - DNA, 25 bp, Homo sapien
tgagtgcgtctggttctagatttgg

SEQ ID NO: 3282277 - DNA, 25 bp, Homo sapien
tgcaggcagtttggccctcctggta

SEQ ID NO: 3282278 - DNA, 25 bp, Homo sapien
aggtgtctcagacccctggtcagct

SEQ ID NO: 3282279 - DNA, 25 bp, Homo sapien
ttccaaattcctctgggactcccag

SEQ ID NO: 3282280 - DNA, 25 bp, Homo sapien
gtcagctggcgccttgaccttctca

SEQ ID NO: 3282281 - DNA, 25 bp, Homo sapien
caggtgtctcagacccctggtcagc

SEQ ID NO: 3282282 - DNA, 25 bp, Homo sapien
ggagaggcacagactgcctccctga

SEQ ID NO: 3282283 - DNA, 25 bp, Homo sapien
ggcacagactgcctccctgaaggaa

SEQ ID NO: 3282284 - DNA, 25 bp, Homo sapien
gaggcacagactgcctccctgaagg

SEQ ID NO: 3282285 - DNA, 25 bp, Homo sapien
gcacagactgcctccctgaaggaag

SEQ ID NO: 3282286 - DNA, 25 bp, Homo sapien
tcattctaccattgtgtggcaggag

SEQ ID NO: 3282287 - DNA, 25 bp, Homo sapien
cagcagcaaatcctgaaaaggatca

SEQ ID NO: 3282288 - DNA, 25 bp, Homo sapien
agcaaatcctgaaaaggatcattct

SEQ ID NO: 3282289 - DNA, 25 bp, Homo sapien
gcagcaaatcctgaaaaggatcatt

SEQ ID NO: 3282290 - DNA, 25 bp, Homo sapien
ctgtgatgtttatgtgacccgagga

SEQ ID NO: 3282291 - DNA, 25 bp, Homo sapien
tctgagattgccaggatttcaattt

SEQ ID NO: 3282292 - DNA, 25 bp, Homo sapien
atgtttatgtgacccgaggaaggga

SEQ ID NO: 3282293 - DNA, 25 bp, Homo sapien
gagattgccaggatttcaatttaaa

SEQ ID NO: 3282294 - DNA, 25 bp, Homo sapien
taaaccctaggtctacagaggtgac

SEQ ID NO: 3282295 - DNA, 25 bp, Homo sapien
ggcatgaatcccctagtccaagtcc

SEQ ID NO: 3282296 - DNA, 25 bp, Homo sapien
cagaatcattggttcttgaggatat

SEQ ID NO: 3282297 - DNA, 25 bp, Homo sapien
cagaggtcatctggttaaaccctag

SEQ ID NO: 3282298 - DNA, 25 bp, Homo sapien
gaggatactgtgtgccccatcacta

SEQ ID NO: 3282299 - DNA, 25 bp, Homo sapien
tgaattcaaggaagcagagtccact

SEQ ID NO: 3282300 - DNA, 25 bp, Homo sapien
aagcaagtcctgtccatgcagagga

SEQ ID NO: 3282301 - DNA, 25 bp, Homo sapien
tatgtatgcacagccacaggtaagt

SEQ ID NO: 3282302 - DNA, 25 bp, Homo sapien
gagaccacacccatcccttctgttt

SEQ ID NO: 3282303 - DNA, 25 bp, Homo sapien
ttggttgaccctgccacattgtata

SEQ ID NO: 3282304 - DNA, 25 bp, Homo sapien
cagaaattcttctttggttgaccct

SEQ ID NO: 3282305 - DNA, 25 bp, Homo sapien
tcttctttggttgaccctgccacat

SEQ ID NO: 3282306 - DNA, 25 bp, Homo sapien
tgctgtctgctgaagggtctacagg

SEQ ID NO: 3282307 - DNA, 25 bp, Homo sapien
ccacagagaccgaaacaggattttt

SEQ ID NO: 3282308 - DNA, 25 bp, Homo sapien
gagaccgaaacaggatttttgcact

SEQ ID NO: 3282309 - DNA, 25 bp, Homo sapien
tgctgaagggtctacaggcttctga

SEQ ID NO: 3282310 - DNA, 25 bp, Homo sapien
gagcctctgagatgtaagtaaatgc

SEQ ID NO: 3282311 - DNA, 25 bp, Homo sapien
cagctctgccttcaatatttagaga

SEQ ID NO: 3282312 - DNA, 25 bp, Homo sapien
aataaaagcaaagcgatttttgtgt

SEQ ID NO: 3282313 - DNA, 25 bp, Homo sapien
taagtaaatgcaaacgatccccgcc

SEQ ID NO: 3282314 - DNA, 25 bp, Homo sapien
cacccaggcccaaggaatctggcag

SEQ ID NO: 3282315 - DNA, 25 bp, Homo sapien
ggcatatttgaactaccatggcaac

SEQ ID NO: 3282316 - DNA, 25 bp, Homo sapien
atctggcagtgcaattccaggaagg

SEQ ID NO: 3282317 - DNA, 25 bp, Homo sapien
tgaccacacttgtcgcctgccccac

SEQ ID NO: 3282318 - DNA, 25 bp, Homo sapien
ataaggacagcagatggtagaacac

SEQ ID NO: 3282319 - DNA, 25 bp, Homo sapien
gcagatgtgatttctgggcttccag

SEQ ID NO: 3282320 - DNA, 25 bp, Homo sapien
tatctggctggagagataaggacag

SEQ ID NO: 3282321 - DNA, 25 bp, Homo sapien
ggcttccagcaggattccttagagt

SEQ ID NO: 3282322 - DNA, 25 bp, Homo sapien
cctaagtgagtgatttggacacgtc

SEQ ID NO: 3282323 - DNA, 25 bp, Homo sapien
cctacagcagctacagaggaaaagc

SEQ ID NO: 3282324 - DNA, 25 bp, Homo sapien
gaaaagcaagctcccctggtaagag

SEQ ID NO: 3282325 - DNA, 25 bp, Homo sapien
gacagagatgcagggaaaatatcac

SEQ ID NO: 3282326 - DNA, 25 bp, Homo sapien
ccctggcgacagtaaaagactccgt

SEQ ID NO: 3282327 - DNA, 25 bp, Homo sapien
catttaagggccaatgttagacacc

SEQ ID NO: 3282328 - DNA, 25 bp, Homo sapien
gagcctttgaaaggatgcaaacatt

SEQ ID NO: 3282329 - DNA, 25 bp, Homo sapien
gaaacaaagattggtgggaaacaca

SEQ ID NO: 3282330 - DNA, 25 bp, Homo sapien
cacggttatcttccttggctcggca

SEQ ID NO: 3282331 - DNA, 25 bp, Homo sapien
tgggcttgcccatttgaacagtgca

SEQ ID NO: 3282332 - DNA, 25 bp, Homo sapien
cacctgcacatccatggtcgggaga

SEQ ID NO: 3282333 - DNA, 25 bp, Homo sapien
gcatgggattttcgggcttccagaa

SEQ ID NO: 3282334 - DNA, 25 bp, Homo sapien
cttcttaaagtcttcattccgtaat

SEQ ID NO: 3282335 - DNA, 25 bp, Homo sapien
agtggcctggcaaggataagaatga

SEQ ID NO: 3282336 - DNA, 25 bp, Homo sapien
ctcctcagcgttcccctccccacca

SEQ ID NO: 3282337 - DNA, 25 bp, Homo sapien
gggaagtggcctggcaaggataaga

SEQ ID NO: 3282338 - DNA, 25 bp, Homo sapien
gaatgaggttctgagtcaggggagg

SEQ ID NO: 3282339 - DNA, 25 bp, Homo sapien
ttccccagagttattgtcacccaga

SEQ ID NO: 3282340 - DNA, 25 bp, Homo sapien
caagtatatctgtcaagtgctgcca

SEQ ID NO: 3282341 - DNA, 25 bp, Homo sapien
tatgtcctggagctgacagatcttg

SEQ ID NO: 3282342 - DNA, 25 bp, Homo sapien
tctgacttgcctacagggccataag

SEQ ID NO: 3282343 - DNA, 25 bp, Homo sapien
tcgattcaggattttctcatagtgc

SEQ ID NO: 3282344 - DNA, 25 bp, Homo sapien
ttttcgattcaggattttctcatag

SEQ ID NO: 3282345 - DNA, 25 bp, Homo sapien
ttcgattcaggattttctcatagtg

SEQ ID NO: 3282346 - DNA, 25 bp, Homo sapien
ttcttttcgattcaggattttctca

SEQ ID NO: 3282347 - DNA, 25 bp, Homo sapien
tcttccaggtactaggcaccttggg

SEQ ID NO: 3282348 - DNA, 25 bp, Homo sapien
ccttgggcccacactaacctgtaat

SEQ ID NO: 3282349 - DNA, 25 bp, Homo sapien
agagatttgtgattgcttcttccag

SEQ ID NO: 3282350 - DNA, 25 bp, Homo sapien
tctcaggttgtgtttttcaggctat

SEQ ID NO: 3282351 - DNA, 25 bp, Homo sapien
tagttttggcaacagacgttgttct

SEQ ID NO: 3282352 - DNA, 25 bp, Homo sapien
ctagtagttttggcaacagacgttg

SEQ ID NO: 3282353 - DNA, 25 bp, Homo sapien
tttggcaacagacgttgttctttac

SEQ ID NO: 3282354 - DNA, 25 bp, Homo sapien
tggcaacagacgttgttctttactt

SEQ ID NO: 3282355 - DNA, 25 bp, Homo sapien
cgccaaatatgggataggcccttgt

SEQ ID NO: 3282356 - DNA, 25 bp, Homo sapien
aaatatgggataggcccttgtcttc

SEQ ID NO: 3282357 - DNA, 25 bp, Homo sapien
gggataggcccttgtcttcgattct

SEQ ID NO: 3282358 - DNA, 25 bp, Homo sapien
tcacgccaaatatgggataggccct

SEQ ID NO: 3282359 - DNA, 25 bp, Homo sapien
tctggtgcttttactttgagctgtt

SEQ ID NO: 3282360 - DNA, 25 bp, Homo sapien
ccttgatagcttggttgttgtttat

SEQ ID NO: 3282361 - DNA, 25 bp, Homo sapien
atttatctgattccttgatagcttg

SEQ ID NO: 3282362 - DNA, 25 bp, Homo sapien
gttgttgtttatgtcttctggtgct

SEQ ID NO: 3282363 - DNA, 25 bp, Homo sapien
tttgggttaagctgtctagtgacac

SEQ ID NO: 3282364 - DNA, 25 bp, Homo sapien
ttctttgggttaagctgtctagtga

SEQ ID NO: 3282365 - DNA, 25 bp, Homo sapien
aagctgtctagtgacaccttgttac

SEQ ID NO: 3282366 - DNA, 25 bp, Homo sapien
ggttaagctgtctagtgacaccttg

SEQ ID NO: 3282367 - DNA, 25 bp, Homo sapien
ctggatttgtagctggagatggtgg

SEQ ID NO: 3282368 - DNA, 25 bp, Homo sapien
gacctggcagggggctctccctttc

SEQ ID NO: 3282369 - DNA, 25 bp, Homo sapien
ttttataccccaggacctgcaggga

SEQ ID NO: 3282370 - DNA, 25 bp, Homo sapien
ttgtttttataccccaggacctgca

SEQ ID NO: 3282371 - DNA, 25 bp, Homo sapien
cttggcagttgcaaggaagtgtagc

SEQ ID NO: 3282372 - DNA, 25 bp, Homo sapien
aagtttgagtctgacgacgataaga

SEQ ID NO: 3282373 - DNA, 25 bp, Homo sapien
gacgacgataagacagtggtgctgc

SEQ ID NO: 3282374 - DNA, 25 bp, Homo sapien
tagcatactggaacgagcaaagagt

SEQ ID NO: 3282375 - DNA, 25 bp, Homo sapien
tgaatttaatctcaggccaaccaga

SEQ ID NO: 3282376 - DNA, 25 bp, Homo sapien
aatgatacataaatggtacactatg

SEQ ID NO: 3282377 - DNA, 25 bp, Homo sapien
ggccaaccagaacaaagatttaata

SEQ ID NO: 3282378 - DNA, 25 bp, Homo sapien
cactatgtatttgtcagattaggta

SEQ ID NO: 3282379 - DNA, 25 bp, Homo sapien
tcccctggaactgtctactgtttgc

SEQ ID NO: 3282380 - DNA, 25 bp, Homo sapien
gaaaatggctcaattgtgctctagg

SEQ ID NO: 3282381 - DNA, 25 bp, Homo sapien
catgttgggctggtaagattacaga

SEQ ID NO: 3282382 - DNA, 25 bp, Homo sapien
gctctaggtctagggtttgattgat

SEQ ID NO: 3282383 - DNA, 25 bp, Homo sapien
gtaggtgtgagtaccccagaaagct

SEQ ID NO: 3282384 - DNA, 25 bp, Homo sapien
gtgtgagtaccccagaaagctgtaa

SEQ ID NO: 3282385 - DNA, 25 bp, Homo sapien
aagtaggtgtgagtaccccagaaag

SEQ ID NO: 3282386 - DNA, 25 bp, Homo sapien
taaaagtaggtgtgagtaccccaga

SEQ ID NO: 3282387 - DNA, 25 bp, Homo sapien
tgtttgttgaaaagaacagaagtct

SEQ ID NO: 3282388 - DNA, 25 bp, Homo sapien
tcagtcatttagaataaagctggcc

SEQ ID NO: 3282389 - DNA, 25 bp, Homo sapien
tcattttcgagcactcagatgagga

SEQ ID NO: 3282390 - DNA, 25 bp, Homo sapien
tatttgcagctcctaattggaggac

SEQ ID NO: 3282391 - DNA, 25 bp, Homo sapien
ctggactcggccttatacaactggg

SEQ ID NO: 3282392 - DNA, 25 bp, Homo sapien
tgtttcattgtctaacattagggtc

SEQ ID NO: 3282393 - DNA, 25 bp, Homo sapien
caaaattccatgtgctgtggaggag

SEQ ID NO: 3282394 - DNA, 25 bp, Homo sapien
tttcattattctgtacgacctggac

SEQ ID NO: 3282395 - DNA, 25 bp, Homo sapien
aaagagaatgaggaatatttcctcc

SEQ ID NO: 3282396 - DNA, 25 bp, Homo sapien
gatttattgtgaaaactccaggatt

SEQ ID NO: 3282397 - DNA, 25 bp, Homo sapien
gaaaatggtctagaactgagccagt

SEQ ID NO: 3282398 - DNA, 25 bp, Homo sapien
agcttctctgggtattgctacagtt

SEQ ID NO: 3282399 - DNA, 25 bp, Homo sapien
aagggctctcctcatgttccctgaa

SEQ ID NO: 3282400 - DNA, 25 bp, Homo sapien
cccacaacattaccccaagggctct

SEQ ID NO: 3282401 - DNA, 25 bp, Homo sapien
atagtaatctagccctggccccaca

SEQ ID NO: 3282402 - DNA, 25 bp, Homo sapien
tcatgttccctgaatggatcagaag

SEQ ID NO: 3282403 - DNA, 25 bp, Homo sapien
actgacatttggagccactcacctt

SEQ ID NO: 3282404 - DNA, 25 bp, Homo sapien
gagccactcacctttatactgcaaa

SEQ ID NO: 3282405 - DNA, 25 bp, Homo sapien
ctgaagatctagctgacaaccactg

SEQ ID NO: 3282406 - DNA, 25 bp, Homo sapien
gaagatctagctgacaaccactgac

SEQ ID NO: 3282407 - DNA, 25 bp, Homo sapien
caggaaattctgtggcttctataat

SEQ ID NO: 3282408 - DNA, 25 bp, Homo sapien
ttctgtggcttctataattaatctc

SEQ ID NO: 3282409 - DNA, 25 bp, Homo sapien
gaaattctgtggcttctataattaa

SEQ ID NO: 3282410 - DNA, 25 bp, Homo sapien
cattttcaggaaattctgtggcttc

SEQ ID NO: 3282411 - DNA, 25 bp, Homo sapien
catgtactttggtgagttctctccc

SEQ ID NO: 3282412 - DNA, 25 bp, Homo sapien
tttcaggagcaacattcggtgccct

SEQ ID NO: 3282413 - DNA, 25 bp, Homo sapien
catataacaggagatgggctcccta

SEQ ID NO: 3282414 - DNA, 25 bp, Homo sapien
ctaatgttgactgggaagctgggct

SEQ ID NO: 3282415 - DNA, 25 bp, Homo sapien
tatgtcctctgcatgaaacggcagc

SEQ ID NO: 3282416 - DNA, 25 bp, Homo sapien
cagccaaagtcaagatgtttgttat

SEQ ID NO: 3282417 - DNA, 25 bp, Homo sapien
tctgaaaaggcaattctattataac

SEQ ID NO: 3282418 - DNA, 25 bp, Homo sapien
tgcatgaaacggcagctgggaaatg

SEQ ID NO: 3282419 - DNA, 25 bp, Homo sapien
tgcaaaccctcctagagcagagtgg

SEQ ID NO: 3282420 - DNA, 25 bp, Homo sapien
caggtgttttctcgcaggtccgcaa

SEQ ID NO: 3282421 - DNA, 25 bp, Homo sapien
ttttcccctcgccatgattagcaga

SEQ ID NO: 3282422 - DNA, 25 bp, Homo sapien
caaccacagagtcaagtgtgcaccg

SEQ ID NO: 3282423 - DNA, 25 bp, Homo sapien
tctcagcactcactgcaaggggctt

SEQ ID NO: 3282424 - DNA, 25 bp, Homo sapien
taccctctcagcactcactgcaagg

SEQ ID NO: 3282425 - DNA, 25 bp, Homo sapien
ctcctaccctctcagcactcactgc

SEQ ID NO: 3282426 - DNA, 25 bp, Homo sapien
cactcctaccctctcagcactcact

SEQ ID NO: 3282427 - DNA, 25 bp, Homo sapien
tggcgaagttgtcaaatcaaaaaca

SEQ ID NO: 3282428 - DNA, 25 bp, Homo sapien
tctcctagaatcacgatgattatta

SEQ ID NO: 3282429 - DNA, 25 bp, Homo sapien
aaaacaatttctcctagaatcacga

SEQ ID NO: 3282430 - DNA, 25 bp, Homo sapien
taattctacgatatcatgtaatggc

SEQ ID NO: 3282431 - DNA, 25 bp, Homo sapien
tgtcctacaagttttcccatcgact

SEQ ID NO: 3282432 - DNA, 25 bp, Homo sapien
tcagttcatgtcctacaagttttcc

SEQ ID NO: 3282433 - DNA, 25 bp, Homo sapien
tcatgtcctacaagttttcccatcg

SEQ ID NO: 3282434 - DNA, 25 bp, Homo sapien
cctacaagttttcccatcgacttca

SEQ ID NO: 3282435 - DNA, 25 bp, Homo sapien
cttgaagtacccagtcagatctgct

SEQ ID NO: 3282436 - DNA, 25 bp, Homo sapien
cagcatctctttgttcaacttgaag

SEQ ID NO: 3282437 - DNA, 25 bp, Homo sapien
tttacagctctaactgccttcagca

SEQ ID NO: 3282438 - DNA, 25 bp, Homo sapien
ctatttcaactctgaagccctctgg

SEQ ID NO: 3282439 - DNA, 25 bp, Homo sapien
agacccgaacagcaagagaagccaa

SEQ ID NO: 3282440 - DNA, 25 bp, Homo sapien
gcttctcacaagacgagtacagtgg

SEQ ID NO: 3282441 - DNA, 25 bp, Homo sapien
actgccgccaaaaccacacgtattt

SEQ ID NO: 3282442 - DNA, 25 bp, Homo sapien
gtggttcagacactgccgccaaaac

SEQ ID NO: 3282443 - DNA, 25 bp, Homo sapien
actggggaatgctgtgcagcctctt

SEQ ID NO: 3282444 - DNA, 25 bp, Homo sapien
cactggggaatgctgtgcagcctct

SEQ ID NO: 3282445 - DNA, 25 bp, Homo sapien
tgttgtatcttatggcagtaaggct

SEQ ID NO: 3282446 - DNA, 25 bp, Homo sapien
gagtcattcacccttattcccttat

SEQ ID NO: 3282447 - DNA, 25 bp, Homo sapien
tctgagcgaattcccatagagtcat

SEQ ID NO: 3282448 - DNA, 25 bp, Homo sapien
gttgtatcttatggcagtaaggctg

SEQ ID NO: 3282449 - DNA, 25 bp, Homo sapien
tattccccgtaggagccagcagcaa

SEQ ID NO: 3282450 - DNA, 25 bp, Homo sapien
gaatccactattccccgtaggagcc

SEQ ID NO: 3282451 - DNA, 25 bp, Homo sapien
gagctggaatccactattccccgta

SEQ ID NO: 3282452 - DNA, 25 bp, Homo sapien
cactattccccgtaggagccagcag

SEQ ID NO: 3282453 - DNA, 25 bp, Homo sapien
tattttccaagtgtattcctccctc

SEQ ID NO: 3282454 - DNA, 25 bp, Homo sapien
tatccctcgcctaatcctgctgcta

SEQ ID NO: 3282455 - DNA, 25 bp, Homo sapien
caacatcaccaaccttgtcagtggg

SEQ ID NO: 3282456 - DNA, 25 bp, Homo sapien
aaccttgtcagtgggtatccctcgc

SEQ ID NO: 3282457 - DNA, 25 bp, Homo sapien
gattttgagcccaatttcattacta

SEQ ID NO: 3282458 - DNA, 25 bp, Homo sapien
tggcaaggatgtagatgttatcatc

SEQ ID NO: 3282459 - DNA, 25 bp, Homo sapien
gttatcatcaactccacagcagaga

SEQ ID NO: 3282460 - DNA, 25 bp, Homo sapien
ttggtgattttgagcccaatttcat

SEQ ID NO: 3282461 - DNA, 25 bp, Homo sapien
ggtcggcaggcatgtggtccacatt

SEQ ID NO: 3282462 - DNA, 25 bp, Homo sapien
cttccagcaatgtccgtccactggg

SEQ ID NO: 3282463 - DNA, 25 bp, Homo sapien
cccacccccttcaactcttcacaag

SEQ ID NO: 3282464 - DNA, 25 bp, Homo sapien
gtcttccagcaatgtccgtccactg

SEQ ID NO: 3282465 - DNA, 25 bp, Homo sapien
ctgtcttccagcaatgtccgtccac

SEQ ID NO: 3282466 - DNA, 25 bp, Homo sapien
tatcaccctagagtgatgctcggca

SEQ ID NO: 3282467 - DNA, 25 bp, Homo sapien
tagagtgatgctcggcatagagtgt

SEQ ID NO: 3282468 - DNA, 25 bp, Homo sapien
cctctccttgtatcaccctagagtg

SEQ ID NO: 3282469 - DNA, 25 bp, Homo sapien
ccttgtatcaccctagagtgatgct

SEQ ID NO: 3282470 - DNA, 25 bp, Homo sapien
caaacaagcattcatggagtgcctg

SEQ ID NO: 3282471 - DNA, 25 bp, Homo sapien
caattccacaaacaagcattcatgg

SEQ ID NO: 3282472 - DNA, 25 bp, Homo sapien
tccacaaacaagcattcatggagtg

SEQ ID NO: 3282473 - DNA, 25 bp, Homo sapien
aacaagcattcatggagtgcctgtc

SEQ ID NO: 3282474 - DNA, 25 bp, Homo sapien
cttaaagctaaggaaaggatttctg

SEQ ID NO: 3282475 - DNA, 25 bp, Homo sapien
ttaaagctaaggaaaggatttctgc

SEQ ID NO: 3282476 - DNA, 25 bp, Homo sapien
ctgagacctgcaccttccgaccagc

SEQ ID NO: 3282477 - DNA, 25 bp, Homo sapien
tgcaccttccgaccagcgagtgctc

SEQ ID NO: 3282478 - DNA, 25 bp, Homo sapien
gacctgcaccttccgaccagcgagt

SEQ ID NO: 3282479 - DNA, 25 bp, Homo sapien
ttccgaccagcgagtgctctgcctc

SEQ ID NO: 3282480 - DNA, 25 bp, Homo sapien
tgcacctggaagggtttatgagcac

SEQ ID NO: 3282481 - DNA, 25 bp, Homo sapien
ctgcacctggaagggtttatgagca

SEQ ID NO: 3282482 - DNA, 25 bp, Homo sapien
agccctggcatggaaacgccgcctc

SEQ ID NO: 3282483 - DNA, 25 bp, Homo sapien
ccctggcatggaaacgccgcctccg

SEQ ID NO: 3282484 - DNA, 25 bp, Homo sapien
gagccctggcatggaaacgccgcct

SEQ ID NO: 3282485 - DNA, 25 bp, Homo sapien
ctggcatggaaacgccgcctccgcc

SEQ ID NO: 3282486 - DNA, 25 bp, Homo sapien
tcgctgcactgagctcagctgagag

SEQ ID NO: 3282487 - DNA, 25 bp, Homo sapien
tgagcggctgacagctaagagctct

SEQ ID NO: 3282488 - DNA, 25 bp, Homo sapien
gagagattgcttagctcagctttga

SEQ ID NO: 3282489 - DNA, 25 bp, Homo sapien
catgctcattgcacagggtcgctgc

SEQ ID NO: 3282490 - DNA, 25 bp, Homo sapien
agcactggcgtatttcctattcaga

SEQ ID NO: 3282491 - DNA, 25 bp, Homo sapien
cagagtctgtcagcaacgataagag

SEQ ID NO: 3282492 - DNA, 25 bp, Homo sapien
ggagaagagcctcccccaactggaa

SEQ ID NO: 3282493 - DNA, 25 bp, Homo sapien
caactggaagctgtgttactgacac

SEQ ID NO: 3282494 - DNA, 25 bp, Homo sapien
tgtttgttcaataataccaagatat

SEQ ID NO: 3282495 - DNA, 25 bp, Homo sapien
aataataccaagatatgtcacagaa

SEQ ID NO: 3282496 - DNA, 25 bp, Homo sapien
actgagacaggaacctaactgatgt

SEQ ID NO: 3282497 - DNA, 25 bp, Homo sapien
tgttcaataataccaagatatgtca

SEQ ID NO: 3282498 - DNA, 25 bp, Homo sapien
ctcacatgactctgaacaagagcca

SEQ ID NO: 3282499 - DNA, 25 bp, Homo sapien
aacttgtgattctcacatgactctg

SEQ ID NO: 3282500 - DNA, 25 bp, Homo sapien
aagctgaacttgggccatgtatcat

SEQ ID NO: 3282501 - DNA, 25 bp, Homo sapien
ggtaattggtggttgattcatggat

SEQ ID NO: 3282502 - DNA, 25 bp, Homo sapien
ggtaattgagcatgggacaaacctg

SEQ ID NO: 3282503 - DNA, 25 bp, Homo sapien
taattgagcatgggacaaacctgat

SEQ ID NO: 3282504 - DNA, 25 bp, Homo sapien
gtaattgagcatgggacaaacctga

SEQ ID NO: 3282505 - DNA, 25 bp, Homo sapien
ctggtaattgagcatgggacaaacc

SEQ ID NO: 3282506 - DNA, 25 bp, Homo sapien
cccagaaagtatgcattggggtagt

SEQ ID NO: 3282507 - DNA, 25 bp, Homo sapien
gaagggggagcctgctatgcacaca

SEQ ID NO: 3282508 - DNA, 25 bp, Homo sapien
gtctgggttccaagttgtgcaagaa

SEQ ID NO: 3282509 - DNA, 25 bp, Homo sapien
gagcctgctatgcacacagtgaaca

SEQ ID NO: 3282510 - DNA, 25 bp, Homo sapien
aatagcaggcacaagcagattcttc

SEQ ID NO: 3282511 - DNA, 25 bp, Homo sapien
tgttgcgcaagcaggattctctctc

SEQ ID NO: 3282512 - DNA, 25 bp, Homo sapien
tctctcccttaccaaactgcttgga

SEQ ID NO: 3282513 - DNA, 25 bp, Homo sapien
cagcttttatcagccctgaatcctc

SEQ ID NO: 3282514 - DNA, 25 bp, Homo sapien
gggacgagctttccactctcggcag

SEQ ID NO: 3282515 - DNA, 25 bp, Homo sapien
cctgatgttggcaatgggacgagct

SEQ ID NO: 3282516 - DNA, 25 bp, Homo sapien
gacgcaggaagtaacctgcacctga

SEQ ID NO: 3282517 - DNA, 25 bp, Homo sapien
tggccaccaggacgcaggaagtaac

SEQ ID NO: 3282518 - DNA, 25 bp, Homo sapien
agaggtgagagtatggaggcccaga

SEQ ID NO: 3282519 - DNA, 25 bp, Homo sapien
ggagaggtgagagtatggaggccca

SEQ ID NO: 3282520 - DNA, 25 bp, Homo sapien
acgccagagccactcagcaggtgct

SEQ ID NO: 3282521 - DNA, 25 bp, Homo sapien
aggccagggaacacacgccagagcc

SEQ ID NO: 3282522 - DNA, 25 bp, Homo sapien
gcttttcatgttcacatccaggagc

SEQ ID NO: 3282523 - DNA, 25 bp, Homo sapien
ttgtccacctctctggacccctttc

SEQ ID NO: 3282524 - DNA, 25 bp, Homo sapien
ctcccactttgtagctctgccccac

SEQ ID NO: 3282525 - DNA, 25 bp, Homo sapien
cagggttcagccatccctgcatgtg

SEQ ID NO: 3282526 - DNA, 25 bp, Homo sapien
cagagggccttgtgttcatagaagg

SEQ ID NO: 3282527 - DNA, 25 bp, Homo sapien
ataggccagagcccattcagctttc

SEQ ID NO: 3282528 - DNA, 25 bp, Homo sapien
tcagagggccttgtgttcatagaag

SEQ ID NO: 3282529 - DNA, 25 bp, Homo sapien
aggccagagcccattcagctttcca

SEQ ID NO: 3282530 - DNA, 25 bp, Homo sapien
ttccagcttcattaccgagcttggg

SEQ ID NO: 3282531 - DNA, 25 bp, Homo sapien
ccagcttcattaccgagcttgggtt

SEQ ID NO: 3282532 - DNA, 25 bp, Homo sapien
gcttcattaccgagcttgggtttca

SEQ ID NO: 3282533 - DNA, 25 bp, Homo sapien
aattccagcttcattaccgagcttg

SEQ ID NO: 3282534 - DNA, 25 bp, Homo sapien
gtcctcgttcatatctctggacagt

SEQ ID NO: 3282535 - DNA, 25 bp, Homo sapien
tcctcgttcatatctctggacagtc

SEQ ID NO: 3282536 - DNA, 25 bp, Homo sapien
gtgtcgacggtctctaaatgtgtta

SEQ ID NO: 3282537 - DNA, 25 bp, Homo sapien
ctacagcgtgtattgtgtcgacggt

SEQ ID NO: 3282538 - DNA, 25 bp, Homo sapien
cgtgtattgtgtcgacggtctctaa

SEQ ID NO: 3282539 - DNA, 25 bp, Homo sapien
gtcgacggtctctaaatgtgttaaa

SEQ ID NO: 3282540 - DNA, 25 bp, Homo sapien
caattgacatgctggagtgccaaac

SEQ ID NO: 3282541 - DNA, 25 bp, Homo sapien
aacgcaacttacttcataggcaggg

SEQ ID NO: 3282542 - DNA, 25 bp, Homo sapien
aaatctgagacaagtgggtcctgca

SEQ ID NO: 3282543 - DNA, 25 bp, Homo sapien
tgttaatccaacctccgaccaggag

SEQ ID NO: 3282544 - DNA, 25 bp, Homo sapien
ctttgacattcatcagaactgtggg

SEQ ID NO: 3282545 - DNA, 25 bp, Homo sapien
ggagtgtaaaggactaatcatttcc

SEQ ID NO: 3282546 - DNA, 25 bp, Homo sapien
gatcaaaacgctggagggtgagatt

SEQ ID NO: 3282547 - DNA, 25 bp, Homo sapien
gaaaatccggctgatcatttggaga

SEQ ID NO: 3282548 - DNA, 25 bp, Homo sapien
tggtactttatgagcaatacaagga

SEQ ID NO: 3282549 - DNA, 25 bp, Homo sapien
cactgaatcagtaatgggagtttga

SEQ ID NO: 3282550 - DNA, 25 bp, Homo sapien
gagcaatacaaggaagtttggccac

SEQ ID NO: 3282551 - DNA, 25 bp, Homo sapien
cactgtagtctaagcaattttttgg

SEQ ID NO: 3282552 - DNA, 25 bp, Homo sapien
taccctcttggaatatgggcaggaa

SEQ ID NO: 3282553 - DNA, 25 bp, Homo sapien
ccatcaattcttgggcactggagta

SEQ ID NO: 3282554 - DNA, 25 bp, Homo sapien
gcatccctagtgaccatagccttgg

SEQ ID NO: 3282555 - DNA, 25 bp, Homo sapien
cactggagtaggactcttgctgcag

SEQ ID NO: 3282556 - DNA, 25 bp, Homo sapien
cactggattagtatgggctgtggat

SEQ ID NO: 3282557 - DNA, 25 bp, Homo sapien
ctccgggctctcagatgtagtgcac

SEQ ID NO: 3282558 - DNA, 25 bp, Homo sapien
ggcagctcagaggatctcactggat

SEQ ID NO: 3282559 - DNA, 25 bp, Homo sapien
actgtccagggaggatatttgctgt

SEQ ID NO: 3282560 - DNA, 25 bp, Homo sapien
ggcagcacgacaaagctcccttctt

SEQ ID NO: 3282561 - DNA, 25 bp, Homo sapien
ccccggcagcacgacaaagctccct

SEQ ID NO: 3282562 - DNA, 25 bp, Homo sapien
ccggcagcacgacaaagctcccttc

SEQ ID NO: 3282563 - DNA, 25 bp, Homo sapien
tgctcccccggcagcacgacaaagc

SEQ ID NO: 3282564 - DNA, 25 bp, Homo sapien
gacacctagtttctgggcatggacc

SEQ ID NO: 3282565 - DNA, 25 bp, Homo sapien
cctgcataacacgtcttggaagctc

SEQ ID NO: 3282566 - DNA, 25 bp, Homo sapien
tacatggacatgaaacctggagttt

SEQ ID NO: 3282567 - DNA, 25 bp, Homo sapien
tcccagcagcgatagtactaatgag

SEQ ID NO: 3282568 - DNA, 25 bp, Homo sapien
gactgtctttattgacgtgacatct

SEQ ID NO: 3282569 - DNA, 25 bp, Homo sapien
gacgtgacatctacacctgcagaaa

SEQ ID NO: 3282570 - DNA, 25 bp, Homo sapien
ttaagaatgaggcacccacacaccc

SEQ ID NO: 3282571 - DNA, 25 bp, Homo sapien
acatctacacctgcagaaatgtctc

SEQ ID NO: 3282572 - DNA, 25 bp, Homo sapien
cttccccatgtccttcagggatatt

SEQ ID NO: 3282573 - DNA, 25 bp, Homo sapien
tcagggatatttatccccctctgtt

SEQ ID NO: 3282574 - DNA, 25 bp, Homo sapien
tatctgttgatgtcacaggtttgtg

SEQ ID NO: 3282575 - DNA, 25 bp, Homo sapien
gcccacttcctggtgtgccatgaga

SEQ ID NO: 3282576 - DNA, 25 bp, Homo sapien
cagttttcagggtttaaatggcagt

SEQ ID NO: 3282577 - DNA, 25 bp, Homo sapien
cattgatatgaacagaaccacccct

SEQ ID NO: 3282578 - DNA, 25 bp, Homo sapien
ttcagggtttaaatggcagtcattg

SEQ ID NO: 3282579 - DNA, 25 bp, Homo sapien
aatggcagtcattgatatgaacaga

SEQ ID NO: 3282580 - DNA, 25 bp, Homo sapien
catttcaaggcccaaatccatttca

SEQ ID NO: 3282581 - DNA, 25 bp, Homo sapien
gataagacacgctgaaagctgccag

SEQ ID NO: 3282582 - DNA, 25 bp, Homo sapien
gttttgaggacccaagtccattgcc

SEQ ID NO: 3282583 - DNA, 25 bp, Homo sapien
gacaagtatttcattaacgtagacc

SEQ ID NO: 3282584 - DNA, 25 bp, Homo sapien
tcaaggtagatctcagaagcagcaa

SEQ ID NO: 3282585 - DNA, 25 bp, Homo sapien
ttttgcattcaaggtagatctcaga

SEQ ID NO: 3282586 - DNA, 25 bp, Homo sapien
tgcattcaaggtagatctcagaagc

SEQ ID NO: 3282587 - DNA, 25 bp, Homo sapien
cattcaaggtagatctcagaagcag

SEQ ID NO: 3282588 - DNA, 25 bp, Homo sapien
atgtgtggaccaccaacctgagctg

SEQ ID NO: 3282589 - DNA, 25 bp, Homo sapien
tgtgtgagcctcagcactttcttct

SEQ ID NO: 3282590 - DNA, 25 bp, Homo sapien
agctgtgtgagcctcagcactttct

SEQ ID NO: 3282591 - DNA, 25 bp, Homo sapien
ttcagttccaagtatctgttcccag

SEQ ID NO: 3282592 - DNA, 25 bp, Homo sapien
caacactacctcttttctcttcttt

SEQ ID NO: 3282593 - DNA, 25 bp, Homo sapien
ccagtatttagattaacttgccctt

SEQ ID NO: 3282594 - DNA, 25 bp, Homo sapien
tgtaacctgaacctgtgatttttct

SEQ ID NO: 3282595 - DNA, 25 bp, Homo sapien
tatttagattaacttgccctttctc

SEQ ID NO: 3282596 - DNA, 25 bp, Homo sapien
tgccttcttttctgtaacctgaacc

SEQ ID NO: 3282597 - DNA, 25 bp, Homo sapien
tgtgaactgctctatacagtgctgg

SEQ ID NO: 3282598 - DNA, 25 bp, Homo sapien
tcccagtttggacacaatccccaag

SEQ ID NO: 3282599 - DNA, 25 bp, Homo sapien
tgggacttggatcatcgggttcctc

SEQ ID NO: 3282600 - DNA, 25 bp, Homo sapien
aatctggctgtgttgatactgatgc

SEQ ID NO: 3282601 - DNA, 25 bp, Homo sapien
gaggtctgatttaacctcatggaat

SEQ ID NO: 3282602 - DNA, 25 bp, Homo sapien
tgagaggtctgatttaacctcatgg

SEQ ID NO: 3282603 - DNA, 25 bp, Homo sapien
ggctgagaggtctgatttaacctca

SEQ ID NO: 3282604 - DNA, 25 bp, Homo sapien
aggaactcctgcctcgtccgtacat

SEQ ID NO: 3282605 - DNA, 25 bp, Homo sapien
taatttccagattctcagcagacac

SEQ ID NO: 3282606 - DNA, 25 bp, Homo sapien
cagattctcagcagacacaatgcac

SEQ ID NO: 3282607 - DNA, 25 bp, Homo sapien
ttccagattctcagcagacacaatg

SEQ ID NO: 3282608 - DNA, 25 bp, Homo sapien
aatttccagattctcagcagacaca

SEQ ID NO: 3282609 - DNA, 25 bp, Homo sapien
tggggtaaccctggaagcttgcagt

SEQ ID NO: 3282610 - DNA, 25 bp, Homo sapien
caaaccccaagactcgaatctcttt

SEQ ID NO: 3282611 - DNA, 25 bp, Homo sapien
gactcgaatctctttttcaactcca

SEQ ID NO: 3282612 - DNA, 25 bp, Homo sapien
catcattgatgggaggcagagtgtc

SEQ ID NO: 3282613 - DNA, 25 bp, Homo sapien
gccattgctccctttcctgatcttg

SEQ ID NO: 3282614 - DNA, 25 bp, Homo sapien
atggaccctgggtgctgcccgatgc

SEQ ID NO: 3282615 - DNA, 25 bp, Homo sapien
ttcctgatcttgtattgttccctac

SEQ ID NO: 3282616 - DNA, 25 bp, Homo sapien
tgggtgctgcccgatgccattgctc

SEQ ID NO: 3282617 - DNA, 25 bp, Homo sapien
tggagcacaagtctctttggcatcc

SEQ ID NO: 3282618 - DNA, 25 bp, Homo sapien
gcacaagtctctttggcatccctgt

SEQ ID NO: 3282619 - DNA, 25 bp, Homo sapien
agcacaagtctctttggcatccctg

SEQ ID NO: 3282620 - DNA, 25 bp, Homo sapien
ggagcacaagtctctttggcatccc

SEQ ID NO: 3282621 - DNA, 25 bp, Homo sapien
ttcctctggtcagggttgtcttcct

SEQ ID NO: 3282622 - DNA, 25 bp, Homo sapien
aataagctgacagtgggagaaagtg

SEQ ID NO: 3282623 - DNA, 25 bp, Homo sapien
ataaaaataagctgacagtgggaga

SEQ ID NO: 3282624 - DNA, 25 bp, Homo sapien
gcacccccaggatttgaaaatggag

SEQ ID NO: 3282625 - DNA, 25 bp, Homo sapien
gaaagtggcatattcattttctctg

SEQ ID NO: 3282626 - DNA, 25 bp, Homo sapien
cacgtgagttcatgggatgcgggaa

SEQ ID NO: 3282627 - DNA, 25 bp, Homo sapien
ggtttttccgcagctctctcaggaa

SEQ ID NO: 3282628 - DNA, 25 bp, Homo sapien
tgagcaggtgtcaggtttttccgca

SEQ ID NO: 3282629 - DNA, 25 bp, Homo sapien
catgggatgcgggaagatgtaggca

SEQ ID NO: 3282630 - DNA, 25 bp, Homo sapien
taaagatcattgacatgatgaagaa

SEQ ID NO: 3282631 - DNA, 25 bp, Homo sapien
aaagggagctcattagactaacagc

SEQ ID NO: 3282632 - DNA, 25 bp, Homo sapien
gttaaatggcacaattaaaaggcac

SEQ ID NO: 3282633 - DNA, 25 bp, Homo sapien
taatgggcaaagcatcatagttggc

SEQ ID NO: 3282634 - DNA, 25 bp, Homo sapien
gattttacctgccattctactgaca

SEQ ID NO: 3282635 - DNA, 25 bp, Homo sapien
tcagcgtgggcccaagaatgaagtg

SEQ ID NO: 3282636 - DNA, 25 bp, Homo sapien
tcagagcagagtttgtcagggccat

SEQ ID NO: 3282637 - DNA, 25 bp, Homo sapien
ggccaagtgactcatttagccaagg

SEQ ID NO: 3282638 - DNA, 25 bp, Homo sapien
ggagtcataaatcaggatatactga

SEQ ID NO: 3282639 - DNA, 25 bp, Homo sapien
gagtcataaatcaggatatactgaa

SEQ ID NO: 3282640 - DNA, 25 bp, Homo sapien
ttccagcagaataagggtccccctc

SEQ ID NO: 3282641 - DNA, 25 bp, Homo sapien
cagcagaataagggtccccctcact

SEQ ID NO: 3282642 - DNA, 25 bp, Homo sapien
tccagcagaataagggtccccctca

SEQ ID NO: 3282643 - DNA, 25 bp, Homo sapien
gcagaataagggtccccctcacttc

SEQ ID NO: 3282644 - DNA, 25 bp, Homo sapien
cagtgggtagcatcttctcaggacc

SEQ ID NO: 3282645 - DNA, 25 bp, Homo sapien
taatatttgtccctgaggcattttc

SEQ ID NO: 3282646 - DNA, 25 bp, Homo sapien
gatatgtgagcctaatatttgtccc

SEQ ID NO: 3282647 - DNA, 25 bp, Homo sapien
gctggagcagagttctctagagcag

SEQ ID NO: 3282648 - DNA, 25 bp, Homo sapien
gcctctagatgccatcatcccggat

SEQ ID NO: 3282649 - DNA, 25 bp, Homo sapien
tagatgccatcatcccggatgcctc

SEQ ID NO: 3282650 - DNA, 25 bp, Homo sapien
catcccggatgcctcttctgaccta

SEQ ID NO: 3282651 - DNA, 25 bp, Homo sapien
tgaggcctctagatgccatcatccc

SEQ ID NO: 3282652 - DNA, 25 bp, Homo sapien
tggaagcaatacaggttgtctaatt

SEQ ID NO: 3282653 - DNA, 25 bp, Homo sapien
tgcctgagctcattgctggaagcaa

SEQ ID NO: 3282654 - DNA, 25 bp, Homo sapien
gcttttaattttgtagccggcacca

SEQ ID NO: 3282655 - DNA, 25 bp, Homo sapien
gccggcaccaaatctcctactagag

SEQ ID NO: 3282656 - DNA, 25 bp, Homo sapien
ttcctcttttgttgtggcctaagta

SEQ ID NO: 3282657 - DNA, 25 bp, Homo sapien
ttgttgtggcctaagtacttatttg

SEQ ID NO: 3282658 - DNA, 25 bp, Homo sapien
tgggtgctggctagctctcttcctc

SEQ ID NO: 3282659 - DNA, 25 bp, Homo sapien
ttgtcttcattcttggggctgctgc

SEQ ID NO: 3282660 - DNA, 25 bp, Homo sapien
taggttgtgggtacccattttgtga

SEQ ID NO: 3282661 - DNA, 25 bp, Homo sapien
tgtgggtacccattttgtgacctgc

SEQ ID NO: 3282662 - DNA, 25 bp, Homo sapien
cccattttgtgacctgcattttgtg

SEQ ID NO: 3282663 - DNA, 25 bp, Homo sapien
tttgtgacctgcattttgtgtccat

SEQ ID NO: 3282664 - DNA, 25 bp, Homo sapien
tgagtaggtcccaactcgaatcacc

SEQ ID NO: 3282665 - DNA, 25 bp, Homo sapien
cagggcagtttcaagtggacagacc

SEQ ID NO: 3282666 - DNA, 25 bp, Homo sapien
gcatgcccacccagcttagtgcaag

SEQ ID NO: 3282667 - DNA, 25 bp, Homo sapien
tgagaaattatccacccatatcggg

SEQ ID NO: 3282668 - DNA, 25 bp, Homo sapien
tccacaggactgctgagcttcaagt

SEQ ID NO: 3282669 - DNA, 25 bp, Homo sapien
ggtctcacagtacacttccctagga

SEQ ID NO: 3282670 - DNA, 25 bp, Homo sapien
tcctgtaagactctccttggtgaca

SEQ ID NO: 3282671 - DNA, 25 bp, Homo sapien
aagtagtttctactgggtctcacag

SEQ ID NO: 3282672 - DNA, 25 bp, Homo sapien
gccaagggtattgtgtaccggcctc

SEQ ID NO: 3282673 - DNA, 25 bp, Homo sapien
cacgatggcaagaccaaagggaaca

SEQ ID NO: 3282674 - DNA, 25 bp, Homo sapien
tctcttctcaggcacgatggcaaga

SEQ ID NO: 3282675 - DNA, 25 bp, Homo sapien
ctgggagtcctgtgccaagggtatt

SEQ ID NO: 3282676 - DNA, 25 bp, Homo sapien
gaagcaacagcagcatgggcaaagg

SEQ ID NO: 3282677 - DNA, 25 bp, Homo sapien
gagagagagaagcaacagcagcatg

SEQ ID NO: 3282678 - DNA, 25 bp, Homo sapien
agagagaagcaacagcagcatgggc

SEQ ID NO: 3282679 - DNA, 25 bp, Homo sapien
agagaagcaacagcagcatgggcaa

SEQ ID NO: 3282680 - DNA, 25 bp, Homo sapien
tttcaaatgatactgagagagagtc

SEQ ID NO: 3282681 - DNA, 25 bp, Homo sapien
ttttcaaatgatactgagagagagt

SEQ ID NO: 3282682 - DNA, 25 bp, Homo sapien
ttcaaatgatactgagagagagtca

SEQ ID NO: 3282683 - DNA, 25 bp, Homo sapien
tcaaatgatactgagagagagtcac

SEQ ID NO: 3282684 - DNA, 25 bp, Homo sapien
agatatctcatagcccatgcagggc

SEQ ID NO: 3282685 - DNA, 25 bp, Homo sapien
tcagatatctcatagcccatgcagg

SEQ ID NO: 3282686 - DNA, 25 bp, Homo sapien
cacacaggagggtagcattcagata

SEQ ID NO: 3282687 - DNA, 25 bp, Homo sapien
ctatttgatgagtgagttgcacaca

SEQ ID NO: 3282688 - DNA, 25 bp, Homo sapien
cagccacctcgaaaggtatctgtgt

SEQ ID NO: 3282689 - DNA, 25 bp, Homo sapien
tatgcagatcaggataacaggtaga

SEQ ID NO: 3282690 - DNA, 25 bp, Homo sapien
cattccagccacctcgaaaggtatc

SEQ ID NO: 3282691 - DNA, 25 bp, Homo sapien
tgtgtttgtgttgtgatccttcata

SEQ ID NO: 3282692 - DNA, 25 bp, Homo sapien
tctggtggatgttatagatcatctc

SEQ ID NO: 3282693 - DNA, 25 bp, Homo sapien
actgctccactaaaacagccatcta

SEQ ID NO: 3282694 - DNA, 25 bp, Homo sapien
taaaacagccatctagaatagctgt

SEQ ID NO: 3282695 - DNA, 25 bp, Homo sapien
cctttgggaatctggtggatgttat

SEQ ID NO: 3282696 - DNA, 25 bp, Homo sapien
cacatcataagcaaccagtggctgg

SEQ ID NO: 3282697 - DNA, 25 bp, Homo sapien
gatccttagcatgttttccgcctcc

SEQ ID NO: 3282698 - DNA, 25 bp, Homo sapien
cagtggctggcatcccttgtatctt

SEQ ID NO: 3282699 - DNA, 25 bp, Homo sapien
tgcggcatctcttcttggctagagt

SEQ ID NO: 3282700 - DNA, 25 bp, Homo sapien
catccatggctagtggcaatataaa

SEQ ID NO: 3282701 - DNA, 25 bp, Homo sapien
gacattcttcaaatcatccctatga

SEQ ID NO: 3282702 - DNA, 25 bp, Homo sapien
tgataacaagtgttgaagatctgga

SEQ ID NO: 3282703 - DNA, 25 bp, Homo sapien
gcaatataaaggtgtagccactttg

SEQ ID NO: 3282704 - DNA, 25 bp, Homo sapien
aactgcatgtgatgaggtaatccac

SEQ ID NO: 3282705 - DNA, 25 bp, Homo sapien
tgtgaggactacttccagtgtaacc

SEQ ID NO: 3282706 - DNA, 25 bp, Homo sapien
gagttccagccaatctaactgcatg

SEQ ID NO: 3282707 - DNA, 25 bp, Homo sapien
tgtcgtagtcccctctccggtagtc

SEQ ID NO: 3282708 - DNA, 25 bp, Homo sapien
caaggcttcataaccctcttggaga

SEQ ID NO: 3282709 - DNA, 25 bp, Homo sapien
gaagaccacagctctcgcatcatca

SEQ ID NO: 3282710 - DNA, 25 bp, Homo sapien
cattctgccccgtagagtctggaca

SEQ ID NO: 3282711 - DNA, 25 bp, Homo sapien
gaaaggcattgctaattgatcacag

SEQ ID NO: 3282712 - DNA, 25 bp, Homo sapien
catggaactggaggatgccggttcc

SEQ ID NO: 3282713 - DNA, 25 bp, Homo sapien
atgacctctgggtccctcacttgcc

SEQ ID NO: 3282714 - DNA, 25 bp, Homo sapien
gtgtttgaaatgacaagctgctgtt

SEQ ID NO: 3282715 - DNA, 25 bp, Homo sapien
tggcttctatactcctgcttcctgc

SEQ ID NO: 3282716 - DNA, 25 bp, Homo sapien
ttatcattattaaccttctgtgtct

SEQ ID NO: 3282717 - DNA, 25 bp, Homo sapien
tattatcattattaaccttctgtgt

SEQ ID NO: 3282718 - DNA, 25 bp, Homo sapien
attatcattattaaccttctgtgtc

SEQ ID NO: 3282719 - DNA, 25 bp, Homo sapien
tgtcatccccatattcaagagccat

SEQ ID NO: 3282720 - DNA, 25 bp, Homo sapien
agtgcctgaagccaccttctcttct

SEQ ID NO: 3282721 - DNA, 25 bp, Homo sapien
cttctcctagttcacattccccagc

SEQ ID NO: 3282722 - DNA, 25 bp, Homo sapien
agtgaaatccagtgcctgaagccac

SEQ ID NO: 3282723 - DNA, 25 bp, Homo sapien
cctagttcacattccccagctgtgg

SEQ ID NO: 3282724 - DNA, 25 bp, Homo sapien
gtgccatgccttttcaccgattcca

SEQ ID NO: 3282725 - DNA, 25 bp, Homo sapien
tgagaagttcctgcactctctagcc

SEQ ID NO: 3282726 - DNA, 25 bp, Homo sapien
acccatctggtctttcacggtgcca

SEQ ID NO: 3282727 - DNA, 25 bp, Homo sapien
gccttttcaccgattccacttgaga

SEQ ID NO: 3282728 - DNA, 25 bp, Homo sapien
tattttgaaactttatgctcagacc

SEQ ID NO: 3282729 - DNA, 25 bp, Homo sapien
tgtgttcattccacattcgtattta

SEQ ID NO: 3282730 - DNA, 25 bp, Homo sapien
ttatgctcagacctccatgcctcat

SEQ ID NO: 3282731 - DNA, 25 bp, Homo sapien
cattccacattcgtatttattttga

SEQ ID NO: 3282732 - DNA, 25 bp, Homo sapien
taccccagtgttgcttctctctctt

SEQ ID NO: 3282733 - DNA, 25 bp, Homo sapien
tctctctctttgtaatgctccttct

SEQ ID NO: 3282734 - DNA, 25 bp, Homo sapien
ccgtggaaaggtcattaccccagtg

SEQ ID NO: 3282735 - DNA, 25 bp, Homo sapien
ctctttgtaatgctccttctgggga

SEQ ID NO: 3282736 - DNA, 25 bp, Homo sapien
caggccataggagaactggctaaac

SEQ ID NO: 3282737 - DNA, 25 bp, Homo sapien
aaaattgcccacattgaacttttat

SEQ ID NO: 3282738 - DNA, 25 bp, Homo sapien
actggctaaacactggaggttctgg

SEQ ID NO: 3282739 - DNA, 25 bp, Homo sapien
tgtgtccaggccataggagaactgg

SEQ ID NO: 3282740 - DNA, 25 bp, Homo sapien
cattcaactgtattgatcaagcagc

SEQ ID NO: 3282741 - DNA, 25 bp, Homo sapien
cacaggtcttgaaacctggtacata

SEQ ID NO: 3282742 - DNA, 25 bp, Homo sapien
caactgtattgatcaagcagctcca

SEQ ID NO: 3282743 - DNA, 25 bp, Homo sapien
ccatgtgctaggttcaggatacacc

SEQ ID NO: 3282744 - DNA, 25 bp, Homo sapien
gtgttcccaattgcatgagaaacag

SEQ ID NO: 3282745 - DNA, 25 bp, Homo sapien
tgagaaacagtgaggagccaattat

SEQ ID NO: 3282746 - DNA, 25 bp, Homo sapien
caagggcgatgatgtctatgcatag

SEQ ID NO: 3282747 - DNA, 25 bp, Homo sapien
tagttcagagtagcaagggcgatga

SEQ ID NO: 3282748 - DNA, 25 bp, Homo sapien
tggacatggtgaaatccgagaccta

SEQ ID NO: 3282749 - DNA, 25 bp, Homo sapien
gaaatccgagacctaattcatcaat

SEQ ID NO: 3282750 - DNA, 25 bp, Homo sapien
aaacggaaagatggggctactgcca

SEQ ID NO: 3282751 - DNA, 25 bp, Homo sapien
gggctactgccatacagcagaaaat

SEQ ID NO: 3282752 - DNA, 25 bp, Homo sapien
gagtcagcttaagggatctatggag

SEQ ID NO: 3282753 - DNA, 25 bp, Homo sapien
gccagctggttatgttgcttttcaa

SEQ ID NO: 3282754 - DNA, 25 bp, Homo sapien
ttccaaagcatccctgtagaggcat

SEQ ID NO: 3282755 - DNA, 25 bp, Homo sapien
catttctggactcttgggatcattg

SEQ ID NO: 3282756 - DNA, 25 bp, Homo sapien
tgaggcccatgcatagtttccgtat

SEQ ID NO: 3282757 - DNA, 25 bp, Homo sapien
tttattattttgaacccagggtgca

SEQ ID NO: 3282758 - DNA, 25 bp, Homo sapien
cattcacctttaaccttgaggccca

SEQ ID NO: 3282759 - DNA, 25 bp, Homo sapien
gacaaggccctgacctcatagaacc

SEQ ID NO: 3282760 - DNA, 25 bp, Homo sapien
gttgtaccaaacactcagagaacag

SEQ ID NO: 3282761 - DNA, 25 bp, Homo sapien
gaaaactaattcaggaagacagaaa

SEQ ID NO: 3282762 - DNA, 25 bp, Homo sapien
gcagaagagtgacaggataacaagt

SEQ ID NO: 3282763 - DNA, 25 bp, Homo sapien
gaacagataccggttgagtatccct

SEQ ID NO: 3282764 - DNA, 25 bp, Homo sapien
atacagcaagatagctgtgcatctt

SEQ ID NO: 3282765 - DNA, 25 bp, Homo sapien
ttttaggatatacgctgccaaaatg

SEQ ID NO: 3282766 - DNA, 25 bp, Homo sapien
gatacagcaagatagctgtgcatct

SEQ ID NO: 3282767 - DNA, 25 bp, Homo sapien
taggatatacgctgccaaaatgagc

SEQ ID NO: 3282768 - DNA, 25 bp, Homo sapien
tgaagttgtaggagatttccttgcc

SEQ ID NO: 3282769 - DNA, 25 bp, Homo sapien
aacactcagatcaagagacctattg

SEQ ID NO: 3282770 - DNA, 25 bp, Homo sapien
catggtgtgttcatggactgtggtc

SEQ ID NO: 3282771 - DNA, 25 bp, Homo sapien
cagaatatgtcggaaatgcccaggt

SEQ ID NO: 3282772 - DNA, 25 bp, Homo sapien
tgtcaggtaggaagacctgggctcc

SEQ ID NO: 3282773 - DNA, 25 bp, Homo sapien
atgtcaggtaggaagacctgggctc

SEQ ID NO: 3282774 - DNA, 25 bp, Homo sapien
gatgaggaactctctacaaggccag

SEQ ID NO: 3282775 - DNA, 25 bp, Homo sapien
aatacatggacttgcccagtgcccc

SEQ ID NO: 3282776 - DNA, 25 bp, Homo sapien
cacaaagctgtgcagaacgtctcag

SEQ ID NO: 3282777 - DNA, 25 bp, Homo sapien
ttgaaaataagaccctgcaggaagc

SEQ ID NO: 3282778 - DNA, 25 bp, Homo sapien
ggtttttaggtgtcggccactgtgc

SEQ ID NO: 3282779 - DNA, 25 bp, Homo sapien
tgggtacagtaatgcaaccttgcaa

SEQ ID NO: 3282780 - DNA, 25 bp, Homo sapien
taatgcaaccttgcaaagggattcc

SEQ ID NO: 3282781 - DNA, 25 bp, Homo sapien
ctgggtttttaggtgtcggccactg

SEQ ID NO: 3282782 - DNA, 25 bp, Homo sapien
gagagtgaacaaacccaatcaggtt

SEQ ID NO: 3282783 - DNA, 25 bp, Homo sapien
taactaaaatactgatgggttgcgg

SEQ ID NO: 3282784 - DNA, 25 bp, Homo sapien
tcagaactcttcaacacggcaggga

SEQ ID NO: 3282785 - DNA, 25 bp, Homo sapien
tcagtctcagacatatcacatcagg

SEQ ID NO: 3282786 - DNA, 25 bp, Homo sapien
cgtaacggtctggaaggaactctca

SEQ ID NO: 3282787 - DNA, 25 bp, Homo sapien
cttggccaggagacacgtaacggtc

SEQ ID NO: 3282788 - DNA, 25 bp, Homo sapien
tgttctaaacccatggtgagacccg

SEQ ID NO: 3282789 - DNA, 25 bp, Homo sapien
tcctgctggtggaaagaacaacact

SEQ ID NO: 3282790 - DNA, 25 bp, Homo sapien
tctgggctgtgctaccggtttgcac

SEQ ID NO: 3282791 - DNA, 25 bp, Homo sapien
gctcagtgtggtccccgagtcaggc

SEQ ID NO: 3282792 - DNA, 25 bp, Homo sapien
gagagctcagtgtggtccccgagtc

SEQ ID NO: 3282793 - DNA, 25 bp, Homo sapien
taccggtttgcactccaatctctat

SEQ ID NO: 3282794 - DNA, 25 bp, Homo sapien
gccgcttgtctggtttgagccttca

SEQ ID NO: 3282795 - DNA, 25 bp, Homo sapien
cttcctcactggagtacacggtggt

SEQ ID NO: 3282796 - DNA, 25 bp, Homo sapien
tatccggactggtagccgcttgtct

SEQ ID NO: 3282797 - DNA, 25 bp, Homo sapien
tgtgtcatcggagtgatatccggac

SEQ ID NO: 3282798 - DNA, 25 bp, Homo sapien
ggcaagaaccataccactgtccgtc

SEQ ID NO: 3282799 - DNA, 25 bp, Homo sapien
aaccataccactgtccgtctggttg

SEQ ID NO: 3282800 - DNA, 25 bp, Homo sapien
tgaggcaagaaccataccactgtcc

SEQ ID NO: 3282801 - DNA, 25 bp, Homo sapien
aagaaccataccactgtccgtctgg

SEQ ID NO: 3282802 - DNA, 25 bp, Homo sapien
atgtttttacactcacaggccggct

SEQ ID NO: 3282803 - DNA, 25 bp, Homo sapien
tcttctaacgggatatcttcaaatg

SEQ ID NO: 3282804 - DNA, 25 bp, Homo sapien
tctggttcttctaacgggatatctt

SEQ ID NO: 3282805 - DNA, 25 bp, Homo sapien
cacaggccggctctttcgcttactg

SEQ ID NO: 3282806 - DNA, 25 bp, Homo sapien
gaagaacaatgtagtctttgccatc

SEQ ID NO: 3282807 - DNA, 25 bp, Homo sapien
catacaggaaacaggtgaggtaggc

SEQ ID NO: 3282808 - DNA, 25 bp, Homo sapien
ggcagagagagtccagaatcctctt

SEQ ID NO: 3282809 - DNA, 25 bp, Homo sapien
tcaaagtctctgatatcggaagaac

SEQ ID NO: 3282810 - DNA, 25 bp, Homo sapien
ccaactctgaaaacgtgggtctctg

SEQ ID NO: 3282811 - DNA, 25 bp, Homo sapien
ctgaaaacgtgggtctctgactggg

SEQ ID NO: 3282812 - DNA, 25 bp, Homo sapien
tgctgagcattagcttgcaagagat

SEQ ID NO: 3282813 - DNA, 25 bp, Homo sapien
cattagcttgcaagagatttcccaa

SEQ ID NO: 3282814 - DNA, 25 bp, Homo sapien
tctggtgtagtataatcaggggccc

SEQ ID NO: 3282815 - DNA, 25 bp, Homo sapien
tcaggggccctcattctagttcctt

SEQ ID NO: 3282816 - DNA, 25 bp, Homo sapien
caatctttaccccaggatatggaga

SEQ ID NO: 3282817 - DNA, 25 bp, Homo sapien
tagttccttctttcaatcgcctaca

SEQ ID NO: 3282818 - DNA, 25 bp, Homo sapien
cactctggattgtgtacactctgtc

SEQ ID NO: 3282819 - DNA, 25 bp, Homo sapien
tggattgtgtacactctgtcaaaaa

SEQ ID NO: 3282820 - DNA, 25 bp, Homo sapien
cgtcactctggattgtgtacactct

SEQ ID NO: 3282821 - DNA, 25 bp, Homo sapien
tctggattgtgtacactctgtcaaa

SEQ ID NO: 3282822 - DNA, 25 bp, Homo sapien
ctggggccatccatttcaaagggag

SEQ ID NO: 3282823 - DNA, 25 bp, Homo sapien
ccatccatttcaaagggaggcgagc

SEQ ID NO: 3282824 - DNA, 25 bp, Homo sapien
ggggccatccatttcaaagggaggc

SEQ ID NO: 3282825 - DNA, 25 bp, Homo sapien
ggccatccatttcaaagggaggcga

SEQ ID NO: 3282826 - DNA, 25 bp, Homo sapien
cactgggttcatatttgaaacttac

SEQ ID NO: 3282827 - DNA, 25 bp, Homo sapien
accaagcactgggttcatatttgaa

SEQ ID NO: 3282828 - DNA, 25 bp, Homo sapien
caagcactgggttcatatttgaaac

SEQ ID NO: 3282829 - DNA, 25 bp, Homo sapien
ttaaccaagcactgggttcatattt

SEQ ID NO: 3282830 - DNA, 25 bp, Homo sapien
cgttcttctccgataagaggatatt

SEQ ID NO: 3282831 - DNA, 25 bp, Homo sapien
ataaatatcccgggccaagccaaag

SEQ ID NO: 3282832 - DNA, 25 bp, Homo sapien
cacagattttaaccacgttcttctc

SEQ ID NO: 3282833 - DNA, 25 bp, Homo sapien
cttttctgacataatctggatcttt

SEQ ID NO: 3282834 - DNA, 25 bp, Homo sapien
aactccatgcccttagccacttgga

SEQ ID NO: 3282835 - DNA, 25 bp, Homo sapien
ctccatgcccttagccacttggaag

SEQ ID NO: 3282836 - DNA, 25 bp, Homo sapien
ctttcgcgatgccaagaactccatg

SEQ ID NO: 3282837 - DNA, 25 bp, Homo sapien
ttcgcgatgccaagaactccatgcc

SEQ ID NO: 3282838 - DNA, 25 bp, Homo sapien
ctgtaacagatgagatgctccaagg

SEQ ID NO: 3282839 - DNA, 25 bp, Homo sapien
taacagatgagatgctccaaggtca

SEQ ID NO: 3282840 - DNA, 25 bp, Homo sapien
cagatgagatgctccaaggtcagga

SEQ ID NO: 3282841 - DNA, 25 bp, Homo sapien
gatgagatgctccaaggtcaggaag

SEQ ID NO: 3282842 - DNA, 25 bp, Homo sapien
gatgctgtccaagcgccgtttcaga

SEQ ID NO: 3282843 - DNA, 25 bp, Homo sapien
cacagggattgctccaacgtagtct

SEQ ID NO: 3282844 - DNA, 25 bp, Homo sapien
gctctggctactggtgatgctgtcc

SEQ ID NO: 3282845 - DNA, 25 bp, Homo sapien
ccttgacggaatcgtgcccctttgg

SEQ ID NO: 3282846 - DNA, 25 bp, Homo sapien
tcttgctcctcaggtaagtggacag

SEQ ID NO: 3282847 - DNA, 25 bp, Homo sapien
ttgctcctcaggtaagtggacaggt

SEQ ID NO: 3282848 - DNA, 25 bp, Homo sapien
tggacaggtttccaaatttgcagaa

SEQ ID NO: 3282849 - DNA, 25 bp, Homo sapien
gacaggtttccaaatttgcagaatt

SEQ ID NO: 3282850 - DNA, 25 bp, Homo sapien
ctgcaggcagcatgtccaggaagga

SEQ ID NO: 3282851 - DNA, 25 bp, Homo sapien
ggaaaatgggttttcactcatattc

SEQ ID NO: 3282852 - DNA, 25 bp, Homo sapien
gaaggaaaatgggttttcactcata

SEQ ID NO: 3282853 - DNA, 25 bp, Homo sapien
gaaaatgggttttcactcatattcc

SEQ ID NO: 3282854 - DNA, 25 bp, Homo sapien
taatatagtgatgaacccaaaaaca

SEQ ID NO: 3282855 - DNA, 25 bp, Homo sapien
cgtttaatatagtgatgaacccaaa

SEQ ID NO: 3282856 - DNA, 25 bp, Homo sapien
tatagtgatgaacccaaaaacacct

SEQ ID NO: 3282857 - DNA, 25 bp, Homo sapien
ctaagcgtttaatatagtgatgaac

SEQ ID NO: 3282858 - DNA, 25 bp, Homo sapien
gaaggttgaccacattgagatggtg

SEQ ID NO: 3282859 - DNA, 25 bp, Homo sapien
tcctggcttggtacaggcacctaga

SEQ ID NO: 3282860 - DNA, 25 bp, Homo sapien
tcagacatgagagctcgatgctcac

SEQ ID NO: 3282861 - DNA, 25 bp, Homo sapien
gagatggtgaccaatatgaatgagg

SEQ ID NO: 3282862 - DNA, 25 bp, Homo sapien
ttggccaaaggcaccacggccaaga

SEQ ID NO: 3282863 - DNA, 25 bp, Homo sapien
ccaaaggcaccacggccaagaggct

SEQ ID NO: 3282864 - DNA, 25 bp, Homo sapien
gcaagttgctgtcttgtcaattcca

SEQ ID NO: 3282865 - DNA, 25 bp, Homo sapien
tccaaaggcatctgcttcaatcact

SEQ ID NO: 3282866 - DNA, 25 bp, Homo sapien
gctggcatcataaggcagtcgttca

SEQ ID NO: 3282867 - DNA, 25 bp, Homo sapien
tccaatgggagttcatctggatcca

SEQ ID NO: 3282868 - DNA, 25 bp, Homo sapien
ccatgacgatggacaagtagcctgt

SEQ ID NO: 3282869 - DNA, 25 bp, Homo sapien
cgttcacaatgttcatccaatggga

SEQ ID NO: 3282870 - DNA, 25 bp, Homo sapien
taacggtccgtaggatgatgacaag

SEQ ID NO: 3282871 - DNA, 25 bp, Homo sapien
aagtagccagaagaacatggcaatc

SEQ ID NO: 3282872 - DNA, 25 bp, Homo sapien
tcaccgccgtgcctactagaataat

SEQ ID NO: 3282873 - DNA, 25 bp, Homo sapien
ccgcttaacggtccgtaggatgatg

SEQ ID NO: 3282874 - DNA, 25 bp, Homo sapien
cctggcaggtgtagaggccttcgtc

SEQ ID NO: 3282875 - DNA, 25 bp, Homo sapien
gatagtgaggttccggttcccatcc

SEQ ID NO: 3282876 - DNA, 25 bp, Homo sapien
tttgcacagccaagaacactgcatg

SEQ ID NO: 3282877 - DNA, 25 bp, Homo sapien
ccttcctcactctgcggatagtgag

SEQ ID NO: 3282878 - DNA, 25 bp, Homo sapien
gatcattctcatttatgatgatgta

SEQ ID NO: 3282879 - DNA, 25 bp, Homo sapien
ggaagaaaacgatcattctcattta

SEQ ID NO: 3282880 - DNA, 25 bp, Homo sapien
gaaaacgatcattctcatttatgat

SEQ ID NO: 3282881 - DNA, 25 bp, Homo sapien
cagaggaagaaaacgatcattctca

SEQ ID NO: 3282882 - DNA, 25 bp, Homo sapien
gggattcccagatgccgtgcatgag

SEQ ID NO: 3282883 - DNA, 25 bp, Homo sapien
gagacttcgatgctttccccaatac

SEQ ID NO: 3282884 - DNA, 25 bp, Homo sapien
tttaaaccacatgatctgtggaggg

SEQ ID NO: 3282885 - DNA, 25 bp, Homo sapien
aatacttgtcgtctgattctccagg

SEQ ID NO: 3282886 - DNA, 25 bp, Homo sapien
tcctcaaggactttcggtgaagaag

SEQ ID NO: 3282887 - DNA, 25 bp, Homo sapien
cacctgaattgcactacatttaagg

SEQ ID NO: 3282888 - DNA, 25 bp, Homo sapien
tagtgaattactccatcatcaggtt

SEQ ID NO: 3282889 - DNA, 25 bp, Homo sapien
gaggacagtaatctttgcatagcac

SEQ ID NO: 3282890 - DNA, 25 bp, Homo sapien
gctgtgggccaagcttgtaccatgt

SEQ ID NO: 3282891 - DNA, 25 bp, Homo sapien
tgtgagctgcctgaccacgcaatgt

SEQ ID NO: 3282892 - DNA, 25 bp, Homo sapien
aagacacgctctcctgctcagtggg

SEQ ID NO: 3282893 - DNA, 25 bp, Homo sapien
tcccacatggattggcagaggctgt

SEQ ID NO: 3282894 - DNA, 25 bp, Homo sapien
caaagctgacacatttgccgcttgg

SEQ ID NO: 3282895 - DNA, 25 bp, Homo sapien
cgcttggataacaagggtacttaca

SEQ ID NO: 3282896 - DNA, 25 bp, Homo sapien
tggtcacgtggaaggagatcaccct

SEQ ID NO: 3282897 - DNA, 25 bp, Homo sapien
tctcccgactttgttgaccgcttca

SEQ ID NO: 3282898 - DNA, 25 bp, Homo sapien
ttcaaagtgacttaatacgctctat

SEQ ID NO: 3282899 - DNA, 25 bp, Homo sapien
taagttaatggtactgctaaaagtc

SEQ ID NO: 3282900 - DNA, 25 bp, Homo sapien
tattgtaccatccttccattaaaga

SEQ ID NO: 3282901 - DNA, 25 bp, Homo sapien
tgattattaatctccaatatgcctc

SEQ ID NO: 3282902 - DNA, 25 bp, Homo sapien
tgggtttgtcactgagacagcttgg

SEQ ID NO: 3282903 - DNA, 25 bp, Homo sapien
ctccattcttcacaagggtatgggt

SEQ ID NO: 3282904 - DNA, 25 bp, Homo sapien
ttttccttcaattagagcaaattga

SEQ ID NO: 3282905 - DNA, 25 bp, Homo sapien
aagggtatgggtttgtcactgagac

SEQ ID NO: 3282906 - DNA, 25 bp, Homo sapien
ttcattcaggatacaggagggaagc

SEQ ID NO: 3282907 - DNA, 25 bp, Homo sapien
cctaccatggtacaagacttggcgc

SEQ ID NO: 3282908 - DNA, 25 bp, Homo sapien
tggagaagtgtacctcacggctaac

SEQ ID NO: 3282909 - DNA, 25 bp, Homo sapien
tgtcagagcatgataagctgggcct

SEQ ID NO: 3282910 - DNA, 25 bp, Homo sapien
gaaatgcaagatggcaggaaagcaa

SEQ ID NO: 3282911 - DNA, 25 bp, Homo sapien
gcaaagagcatgtggccttactcac

SEQ ID NO: 3282912 - DNA, 25 bp, Homo sapien
tggtttaggcttctccatttaggat

SEQ ID NO: 3282913 - DNA, 25 bp, Homo sapien
gagtcatatcatagctcagctgtaa

SEQ ID NO: 3282914 - DNA, 25 bp, Homo sapien
caactgccaataccagtggatgtga

SEQ ID NO: 3282915 - DNA, 25 bp, Homo sapien
tgccgtactggtaggaatccacagg

SEQ ID NO: 3282916 - DNA, 25 bp, Homo sapien
tcagcgtttgagtggtgccgtactg

SEQ ID NO: 3282917 - DNA, 25 bp, Homo sapien
gggaggaatggcatagaccgtacat

SEQ ID NO: 3282918 - DNA, 25 bp, Homo sapien
tctttaagcatatgattttgcttcc

SEQ ID NO: 3282919 - DNA, 25 bp, Homo sapien
tcctctcaagtttaggagatcaggg

SEQ ID NO: 3282920 - DNA, 25 bp, Homo sapien
cctggaacaaacctagacactctga

SEQ ID NO: 3282921 - DNA, 25 bp, Homo sapien
tactgtccacagctttatacgtgag

SEQ ID NO: 3282922 - DNA, 25 bp, Homo sapien
ggtcactcagttaacgaacggcaaa

SEQ ID NO: 3282923 - DNA, 25 bp, Homo sapien
taatcgtcagtacatgccccgcttt

SEQ ID NO: 3282924 - DNA, 25 bp, Homo sapien
tgtgattggactcaaggggtattcc

SEQ ID NO: 3282925 - DNA, 25 bp, Homo sapien
catgccccgctttaattgtgtgatt

SEQ ID NO: 3282926 - DNA, 25 bp, Homo sapien
actcacttccataatcgtcagtaca

SEQ ID NO: 3282927 - DNA, 25 bp, Homo sapien
taaccaaggtacttcgcagggattc

SEQ ID NO: 3282928 - DNA, 25 bp, Homo sapien
caaggtacttcgcagggattctgac

SEQ ID NO: 3282929 - DNA, 25 bp, Homo sapien
ttcgcagggattctgacacgctccc

SEQ ID NO: 3282930 - DNA, 25 bp, Homo sapien
tacttcgcagggattctgacacgct

SEQ ID NO: 3282931 - DNA, 25 bp, Homo sapien
gctgcacaggtgtacaatccttggt

SEQ ID NO: 3282932 - DNA, 25 bp, Homo sapien
acaaatgtgctgttcttcttggtca

SEQ ID NO: 3282933 - DNA, 25 bp, Homo sapien
ctggatgctgcacaggtgtacaatc

SEQ ID NO: 3282934 - DNA, 25 bp, Homo sapien
tggtcactccgggttacaccatcta

SEQ ID NO: 3282935 - DNA, 25 bp, Homo sapien
caagcttttctccaacagatagttc

SEQ ID NO: 3282936 - DNA, 25 bp, Homo sapien
cttcgaagaagggtattcccagttg

SEQ ID NO: 3282937 - DNA, 25 bp, Homo sapien
tccccacatttagttcagttcttgc

SEQ ID NO: 3282938 - DNA, 25 bp, Homo sapien
gatagttcaattccatgagacggac

SEQ ID NO: 3282939 - DNA, 25 bp, Homo sapien
aaattctgttaccatcaggaacaaa

SEQ ID NO: 3282940 - DNA, 25 bp, Homo sapien
tgtacataatagactggtaactttc

SEQ ID NO: 3282941 - DNA, 25 bp, Homo sapien
gcatagctgatcatgtagctgggaa

SEQ ID NO: 3282942 - DNA, 25 bp, Homo sapien
gggaatagtaaagcccttcttgctg

SEQ ID NO: 3282943 - DNA, 25 bp, Homo sapien
tgcacaaagtgacacgttgagattt

SEQ ID NO: 3282944 - DNA, 25 bp, Homo sapien
gacccgagacatggaatcaccacag

SEQ ID NO: 3282945 - DNA, 25 bp, Homo sapien
gatttgaaatggacccgagacatgg

SEQ ID NO: 3282946 - DNA, 25 bp, Homo sapien
taatgtacacgactccatgttggtc

SEQ ID NO: 3282947 - DNA, 25 bp, Homo sapien
gagccagaaattctccaagatgtga

SEQ ID NO: 3282948 - DNA, 25 bp, Homo sapien
tctctcaagactgccaggtcaaaag

SEQ ID NO: 3282949 - DNA, 25 bp, Homo sapien
cagtgcttactctgggcaaagatat

SEQ ID NO: 3282950 - DNA, 25 bp, Homo sapien
aaatccttgcaatcttctgaccgag

SEQ ID NO: 3282951 - DNA, 25 bp, Homo sapien
gaaacaaagatcagacccaaactaa

SEQ ID NO: 3282952 - DNA, 25 bp, Homo sapien
tcactgccactctgattattgggcc

SEQ ID NO: 3282953 - DNA, 25 bp, Homo sapien
tagacataaatgaccgaggccaagt

SEQ ID NO: 3282954 - DNA, 25 bp, Homo sapien
aagaggccatcgctgcactcagtca

SEQ ID NO: 3282955 - DNA, 25 bp, Homo sapien
ccaagtcagtttcccggtagaagca

SEQ ID NO: 3282956 - DNA, 25 bp, Homo sapien
tatgctgagcctgggcagatcaaga

SEQ ID NO: 3282957 - DNA, 25 bp, Homo sapien
attgtaagtatgtctttttgtatgc

SEQ ID NO: 3282958 - DNA, 25 bp, Homo sapien
attagccttaattgtaagtatgtct

SEQ ID NO: 3282959 - DNA, 25 bp, Homo sapien
tttttgtatgctgagcctgggcaga

SEQ ID NO: 3282960 - DNA, 25 bp, Homo sapien
tgcgcttcccctggtaaccaaactg

SEQ ID NO: 3282961 - DNA, 25 bp, Homo sapien
tatcaattttctagtgcgcttcccc

SEQ ID NO: 3282962 - DNA, 25 bp, Homo sapien
tctagtgcgcttcccctggtaacca

SEQ ID NO: 3282963 - DNA, 25 bp, Homo sapien
caattttctagtgcgcttcccctgg

SEQ ID NO: 3282964 - DNA, 25 bp, Homo sapien
tcctcctccagagtgggctccttac

SEQ ID NO: 3282965 - DNA, 25 bp, Homo sapien
tgtctgccttcctcctccagagtgg

SEQ ID NO: 3282966 - DNA, 25 bp, Homo sapien
ccgacctgtctgccttcctcctcca

SEQ ID NO: 3282967 - DNA, 25 bp, Homo sapien
gccttcctcctccagagtgggctcc

SEQ ID NO: 3282968 - DNA, 25 bp, Homo sapien
cgggtctccacgcagagccacaggg

SEQ ID NO: 3282969 - DNA, 25 bp, Homo sapien
gcagagccacagggcgacggccagc

SEQ ID NO: 3282970 - DNA, 25 bp, Homo sapien
cagagccacagggcgacggccagca

SEQ ID NO: 3282971 - DNA, 25 bp, Homo sapien
cccgggtctccacgcagagccacag

SEQ ID NO: 3282972 - DNA, 25 bp, Homo sapien
cgagccgggcgaaatgcccagaact

SEQ ID NO: 3282973 - DNA, 25 bp, Homo sapien
aaatgcccagaactcgggagccggt

SEQ ID NO: 3282974 - DNA, 25 bp, Homo sapien
cagaactcgggagccggttctttct

SEQ ID NO: 3282975 - DNA, 25 bp, Homo sapien
cctgcacctcgagccgggcgaaatg

SEQ ID NO: 3282976 - DNA, 25 bp, Homo sapien
aggtggaactcgcggcaccccgcag

SEQ ID NO: 3282977 - DNA, 25 bp, Homo sapien
ggaggcgcggaggtggaactcgcgg

SEQ ID NO: 3282978 - DNA, 25 bp, Homo sapien
cagcgcaggacagttgagcgcacag

SEQ ID NO: 3282979 - DNA, 25 bp, Homo sapien
caccccgcagcgcaggacagttgag

SEQ ID NO: 3282980 - DNA, 25 bp, Homo sapien
agaggaaacgcagcgaccacacatt

SEQ ID NO: 3282981 - DNA, 25 bp, Homo sapien
ggtaggagaggatatccaggctgcc

SEQ ID NO: 3282982 - DNA, 25 bp, Homo sapien
gcgtctgcgggtgccggtaggagag

SEQ ID NO: 3282983 - DNA, 25 bp, Homo sapien
gacggactttctgcggcgcgcaagt

SEQ ID NO: 3282984 - DNA, 25 bp, Homo sapien
gcgctgcgaagagcagcgctccctc

SEQ ID NO: 3282985 - DNA, 25 bp, Homo sapien
agcgctgcgaagagcagcgctccct

SEQ ID NO: 3282986 - DNA, 25 bp, Homo sapien
cgctgcgaagagcagcgctccctca

SEQ ID NO: 3282987 - DNA, 25 bp, Homo sapien
gctgcgaagagcagcgctccctcac

SEQ ID NO: 3282988 - DNA, 25 bp, Homo sapien
caggcgcgtcaaagtgcaggaccct

SEQ ID NO: 3282989 - DNA, 25 bp, Homo sapien
caaagtgcaggaccctcttcgccat

SEQ ID NO: 3282990 - DNA, 25 bp, Homo sapien
gcgtcaaagtgcaggaccctcttcg

SEQ ID NO: 3282991 - DNA, 25 bp, Homo sapien
gcgcgtcaaagtgcaggaccctctt

SEQ ID NO: 3282992 - DNA, 25 bp, Homo sapien
gcagccagatgaccatgaactctgt

SEQ ID NO: 3282993 - DNA, 25 bp, Homo sapien
tagttgacgcaaccctttgccttcc

SEQ ID NO: 3282994 - DNA, 25 bp, Homo sapien
cctgctgatgcaccagttcagggaa

SEQ ID NO: 3282995 - DNA, 25 bp, Homo sapien
atctggagataagtgggagaggctc

SEQ ID NO: 3282996 - DNA, 25 bp, Homo sapien
catgagcttagctgacaatgacatc

SEQ ID NO: 3282997 - DNA, 25 bp, Homo sapien
cccatccttgtggttcactgggctg

SEQ ID NO: 3282998 - DNA, 25 bp, Homo sapien
gtcttctgcagacaactcgcttcat

SEQ ID NO: 3282999 - DNA, 25 bp, Homo sapien
tctcaatgtcctgtacccatccttg

SEQ ID NO: 3283000 - DNA, 25 bp, Homo sapien
aagaaatttctaatagtacccacat

SEQ ID NO: 3283001 - DNA, 25 bp, Homo sapien
tcaatcacacgtgcatgcagcttaa

SEQ ID NO: 3283002 - DNA, 25 bp, Homo sapien
gagccccagtatgaacactgccttg

SEQ ID NO: 3283003 - DNA, 25 bp, Homo sapien
tattgactttacaccaatgacccat

SEQ ID NO: 3283004 - DNA, 25 bp, Homo sapien
tgtgatgtacattgcagggtgattt

SEQ ID NO: 3283005 - DNA, 25 bp, Homo sapien
gtctaggagaattatctcatttgtg

SEQ ID NO: 3283006 - DNA, 25 bp, Homo sapien
tagtctaggagaattatctcatttg

SEQ ID NO: 3283007 - DNA, 25 bp, Homo sapien
ctcatttgtgatgtacattgcaggg

SEQ ID NO: 3283008 - DNA, 25 bp, Homo sapien
gatgcgaatcatactctgtagaaag

SEQ ID NO: 3283009 - DNA, 25 bp, Homo sapien
tacgcaaggcttcatctaactcagt

SEQ ID NO: 3283010 - DNA, 25 bp, Homo sapien
ggtacacagtatgttctccagatag

SEQ ID NO: 3283011 - DNA, 25 bp, Homo sapien
aatgaatggcccctctttaacacaa

SEQ ID NO: 3283012 - DNA, 25 bp, Homo sapien
gggcgcaacctcaaaagaatatcat

SEQ ID NO: 3283013 - DNA, 25 bp, Homo sapien
aaaagaatatcatcctggtggtgaa

SEQ ID NO: 3283014 - DNA, 25 bp, Homo sapien
cctggtggtgaagaaatgggtcaca

SEQ ID NO: 3283015 - DNA, 25 bp, Homo sapien
tcaagggcgcaacctcaaaagaata

SEQ ID NO: 3283016 - DNA, 25 bp, Homo sapien
tccagagtcttctaacttttgccct

SEQ ID NO: 3283017 - DNA, 25 bp, Homo sapien
cagagtcttctaacttttgccctgc

SEQ ID NO: 3283018 - DNA, 25 bp, Homo sapien
gtcttctaacttttgccctgcttcc

SEQ ID NO: 3283019 - DNA, 25 bp, Homo sapien
agatccagagtcttctaacttttgc

SEQ ID NO: 3283020 - DNA, 25 bp, Homo sapien
actatattaggcacccctgctttac

SEQ ID NO: 3283021 - DNA, 25 bp, Homo sapien
tgctttacattctatgagttgtcca

SEQ ID NO: 3283022 - DNA, 25 bp, Homo sapien
gttgtccactcccaataattacttc

SEQ ID NO: 3283023 - DNA, 25 bp, Homo sapien
ttccactatattaggcacccctgct

SEQ ID NO: 3283024 - DNA, 25 bp, Homo sapien
cttaggcaactaggtgatcccccac

SEQ ID NO: 3283025 - DNA, 25 bp, Homo sapien
caccagtagaccgaaaaggccagaa

SEQ ID NO: 3283026 - DNA, 25 bp, Homo sapien
taaattatagggaacagatccacac

SEQ ID NO: 3283027 - DNA, 25 bp, Homo sapien
cagcgatctctccaatatgggtgga

SEQ ID NO: 3283028 - DNA, 25 bp, Homo sapien
tttgagcatcaaggtgaaaagctgc

SEQ ID NO: 3283029 - DNA, 25 bp, Homo sapien
tagacttaagagactccaggaggtc

SEQ ID NO: 3283030 - DNA, 25 bp, Homo sapien
cagtcccatccagtatttaatcata

SEQ ID NO: 3283031 - DNA, 25 bp, Homo sapien
ccaagcccaactggaatctccaggg

SEQ ID NO: 3283032 - DNA, 25 bp, Homo sapien
gggactcagtgtccagtctctcctc

SEQ ID NO: 3283033 - DNA, 25 bp, Homo sapien
cttggagggtttgtggccgtgagct

SEQ ID NO: 3283034 - DNA, 25 bp, Homo sapien
cacagtctctgataacattgttttg

SEQ ID NO: 3283035 - DNA, 25 bp, Homo sapien
agcaatgaagacagataaatggctt

SEQ ID NO: 3283036 - DNA, 25 bp, Homo sapien
tggagggtttgtggccgtgagctct

SEQ ID NO: 3283037 - DNA, 25 bp, Homo sapien
ctctagaggcaaaaagagctgccca

SEQ ID NO: 3283038 - DNA, 25 bp, Homo sapien
ggtgacctcgaacatgtatcatgat

SEQ ID NO: 3283039 - DNA, 25 bp, Homo sapien
tggaattgaattgggctctagaggc

SEQ ID NO: 3283040 - DNA, 25 bp, Homo sapien
aactctgaataaacaggtgacctcg

SEQ ID NO: 3283041 - DNA, 25 bp, Homo sapien
cattcaatgttgtatctatggttag

SEQ ID NO: 3283042 - DNA, 25 bp, Homo sapien
tccaggaatcttagggattcttctt

SEQ ID NO: 3283043 - DNA, 25 bp, Homo sapien
tcattcaatgttgtatctatggtta

SEQ ID NO: 3283044 - DNA, 25 bp, Homo sapien
gaaatgtacatgacaggaactccag

SEQ ID NO: 3283045 - DNA, 25 bp, Homo sapien
taaaggttggtatcaatgaggatgt

SEQ ID NO: 3283046 - DNA, 25 bp, Homo sapien
caaatcttggatccttggtgatcct

SEQ ID NO: 3283047 - DNA, 25 bp, Homo sapien
ccttcaaatcttggatccttggtga

SEQ ID NO: 3283048 - DNA, 25 bp, Homo sapien
tatacaaggaatacacttggtatac

SEQ ID NO: 3283049 - DNA, 25 bp, Homo sapien
ctgatccctgagactaagcattcac

SEQ ID NO: 3283050 - DNA, 25 bp, Homo sapien
tccttttctgtaagcctctgatccc

SEQ ID NO: 3283051 - DNA, 25 bp, Homo sapien
cctttaacacgctgggatccttctt

SEQ ID NO: 3283052 - DNA, 25 bp, Homo sapien
aatttctctttcctttaacacgctg

SEQ ID NO: 3283053 - DNA, 25 bp, Homo sapien
cgcatacttccttgttttcttttgc

SEQ ID NO: 3283054 - DNA, 25 bp, Homo sapien
gcatacttccttgttttcttttgct

SEQ ID NO: 3283055 - DNA, 25 bp, Homo sapien
tcgcatacttccttgttttcttttg

SEQ ID NO: 3283056 - DNA, 25 bp, Homo sapien
tctatctcccaggctgattgcagtg

SEQ ID NO: 3283057 - DNA, 25 bp, Homo sapien
tagctggttctacaggcgcacacca

SEQ ID NO: 3283058 - DNA, 25 bp, Homo sapien
attgcagtggcccaatcttggctca

SEQ ID NO: 3283059 - DNA, 25 bp, Homo sapien
aagcagttctactacctcagcctgc

SEQ ID NO: 3283060 - DNA, 25 bp, Homo sapien
caggaatggtgagtggatccagccc

SEQ ID NO: 3283061 - DNA, 25 bp, Homo sapien
gaagagaaatgctgaccctgttgcc

SEQ ID NO: 3283062 - DNA, 25 bp, Homo sapien
caccccagggtgtatgatgcgctct

SEQ ID NO: 3283063 - DNA, 25 bp, Homo sapien
acatgcagaagtaagagacaggccc

SEQ ID NO: 3283064 - DNA, 25 bp, Homo sapien
tggctgcgtctcaacttctgccttc

SEQ ID NO: 3283065 - DNA, 25 bp, Homo sapien
ggagtttcctctactggctgcgtct

SEQ ID NO: 3283066 - DNA, 25 bp, Homo sapien
tctcccggagtttcctctactggct

SEQ ID NO: 3283067 - DNA, 25 bp, Homo sapien
tctactggctgcgtctcaacttctg

SEQ ID NO: 3283068 - DNA, 25 bp, Homo sapien
catcagtcctttactatcattaacg

SEQ ID NO: 3283069 - DNA, 25 bp, Homo sapien
caggtagaccggtggattttcatca

SEQ ID NO: 3283070 - DNA, 25 bp, Homo sapien
ttcctgcttcgaggtggccatgtgg

SEQ ID NO: 3283071 - DNA, 25 bp, Homo sapien
gcctcaggctcttgcccattatcag

SEQ ID NO: 3283072 - DNA, 25 bp, Homo sapien
gccagtggtttgctccgcaggtcct

SEQ ID NO: 3283073 - DNA, 25 bp, Homo sapien
ttcctgctgcgcagagggaagtccc

SEQ ID NO: 3283074 - DNA, 25 bp, Homo sapien
caagcctccgactaggctaactgct

SEQ ID NO: 3283075 - DNA, 25 bp, Homo sapien
tgtttcttcagtcaagcctccgact

SEQ ID NO: 3283076 - DNA, 25 bp, Homo sapien
gctttcaggctctccctagcaggat

SEQ ID NO: 3283077 - DNA, 25 bp, Homo sapien
gagctagtcaagtcagcattctgct

SEQ ID NO: 3283078 - DNA, 25 bp, Homo sapien
ctggtagcctttccactggtgattt

SEQ ID NO: 3283079 - DNA, 25 bp, Homo sapien
tgttctttctcatccagacctggat

SEQ ID NO: 3283080 - DNA, 25 bp, Homo sapien
taggggagctgaactttgtgcttga

SEQ ID NO: 3283081 - DNA, 25 bp, Homo sapien
agtaggggagctgaactttgtgctt

SEQ ID NO: 3283082 - DNA, 25 bp, Homo sapien
cattcgaaagtagatcacagtaggg

SEQ ID NO: 3283083 - DNA, 25 bp, Homo sapien
gaaagtagatcacagtaggggagct

SEQ ID NO: 3283084 - DNA, 25 bp, Homo sapien
ctgcccatagctgaggaacgtatct

SEQ ID NO: 3283085 - DNA, 25 bp, Homo sapien
tgtggaattctcttgccaggggaac

SEQ ID NO: 3283086 - DNA, 25 bp, Homo sapien
gaacgtatctcctttgtccagagag

SEQ ID NO: 3283087 - DNA, 25 bp, Homo sapien
gctgaggaacgtatctcctttgtcc

SEQ ID NO: 3283088 - DNA, 25 bp, Homo sapien
tcccacccctgtttcctgctgtctc

SEQ ID NO: 3283089 - DNA, 25 bp, Homo sapien
gttgtgagaaagctgcagtgtccag

SEQ ID NO: 3283090 - DNA, 25 bp, Homo sapien
ctgtcaggggttgtgagaaagctgc

SEQ ID NO: 3283091 - DNA, 25 bp, Homo sapien
aagctgcagtgtccagtttcccacc

SEQ ID NO: 3283092 - DNA, 25 bp, Homo sapien
tgggaagtagaaaaggcatgaccca

SEQ ID NO: 3283093 - DNA, 25 bp, Homo sapien
aggcatgacccaaggaacagcccca

SEQ ID NO: 3283094 - DNA, 25 bp, Homo sapien
aaggcatgacccaaggaacagcccc

SEQ ID NO: 3283095 - DNA, 25 bp, Homo sapien
agtagaaaaggcatgacccaaggaa

SEQ ID NO: 3283096 - DNA, 25 bp, Homo sapien
tcccttgtgttattattgttgaagt

SEQ ID NO: 3283097 - DNA, 25 bp, Homo sapien
ttgtgttattattgttgaagttgaa

SEQ ID NO: 3283098 - DNA, 25 bp, Homo sapien
cttcccttgtgttattattgttgaa

SEQ ID NO: 3283099 - DNA, 25 bp, Homo sapien
ccttgtgttattattgttgaagttg

SEQ ID NO: 3283100 - DNA, 25 bp, Homo sapien
tagatgatcatgtatatgatgctcc

SEQ ID NO: 3283101 - DNA, 25 bp, Homo sapien
attctcctcagtggactgtagatga

SEQ ID NO: 3283102 - DNA, 25 bp, Homo sapien
tgcacttctccaagatatctgcatg

SEQ ID NO: 3283103 - DNA, 25 bp, Homo sapien
ggaatgcacttctccaagatatctg

SEQ ID NO: 3283104 - DNA, 25 bp, Homo sapien
aattcacaccttgcttgacaatgga

SEQ ID NO: 3283105 - DNA, 25 bp, Homo sapien
gcttgacaatggagagaagatttcg

SEQ ID NO: 3283106 - DNA, 25 bp, Homo sapien
caatggagagaagatttcgcctaac

SEQ ID NO: 3283107 - DNA, 25 bp, Homo sapien
attcacaccttgcttgacaatggag

SEQ ID NO: 3283108 - DNA, 25 bp, Homo sapien
acgcacccagccgagctcacattaa

SEQ ID NO: 3283109 - DNA, 25 bp, Homo sapien
cagccgagctcacattaaactttca

SEQ ID NO: 3283110 - DNA, 25 bp, Homo sapien
gcacccagccgagctcacattaaac

SEQ ID NO: 3283111 - DNA, 25 bp, Homo sapien
acccagccgagctcacattaaactt

SEQ ID NO: 3283112 - DNA, 25 bp, Homo sapien
caatgaggactagaaggatgatggc

SEQ ID NO: 3283113 - DNA, 25 bp, Homo sapien
aagggagttagtcaccaatgaggac

SEQ ID NO: 3283114 - DNA, 25 bp, Homo sapien
gctctaaaccctcaaggtggtgaaa

SEQ ID NO: 3283115 - DNA, 25 bp, Homo sapien
ggatgatggctctaaaccctcaagg

SEQ ID NO: 3283116 - DNA, 25 bp, Homo sapien
cttctgccaaatagctttgctgcct

SEQ ID NO: 3283117 - DNA, 25 bp, Homo sapien
acatcttctgccaaatagctttgct

SEQ ID NO: 3283118 - DNA, 25 bp, Homo sapien
gccaaatagctttgctgccttgccc

SEQ ID NO: 3283119 - DNA, 25 bp, Homo sapien
caaatagctttgctgccttgcccct

SEQ ID NO: 3283120 - DNA, 25 bp, Homo sapien
gtcctcactgcctcatatgttgaga

SEQ ID NO: 3283121 - DNA, 25 bp, Homo sapien
actgaatttggccaggagtccttcc

SEQ ID NO: 3283122 - DNA, 25 bp, Homo sapien
atttggccaggagtccttcctgtga

SEQ ID NO: 3283123 - DNA, 25 bp, Homo sapien
agaagtcctcactgcctcatatgtt

SEQ ID NO: 3283124 - DNA, 25 bp, Homo sapien
ctgagagtggaagcttgaataggtt

SEQ ID NO: 3283125 - DNA, 25 bp, Homo sapien
tggaggcatcctacttacacagtaa

SEQ ID NO: 3283126 - DNA, 25 bp, Homo sapien
caaattctgtaacgccatgtgttgg

SEQ ID NO: 3283127 - DNA, 25 bp, Homo sapien
gacagaataacatggacggaggccg

SEQ ID NO: 3283128 - DNA, 25 bp, Homo sapien
cgtttttggcggtaggtggccacat

SEQ ID NO: 3283129 - DNA, 25 bp, Homo sapien
agtcagcgccacgtaaccagaggcg

SEQ ID NO: 3283130 - DNA, 25 bp, Homo sapien
gtgcctgcgagtcagcgccacgtaa

SEQ ID NO: 3283131 - DNA, 25 bp, Homo sapien
aaaatagcattttgagctcctaaga

SEQ ID NO: 3283132 - DNA, 25 bp, Homo sapien
agggaacagcgggtgcggacattac

SEQ ID NO: 3283133 - DNA, 25 bp, Homo sapien
ggaagcagaagtgaaggacctcgca

SEQ ID NO: 3283134 - DNA, 25 bp, Homo sapien
tgcggacattacggcggaaggctct

SEQ ID NO: 3283135 - DNA, 25 bp, Homo sapien
taagagagactaagcgcagggaaca

SEQ ID NO: 3283136 - DNA, 25 bp, Homo sapien
ccaatgggaggagggcccgcgccgc

SEQ ID NO: 3283137 - DNA, 25 bp, Homo sapien
gcgcggcgcggtgaggatgcgagca

SEQ ID NO: 3283138 - DNA, 25 bp, Homo sapien
agaggaaggacacgcggcgccgggt

SEQ ID NO: 3283139 - DNA, 25 bp, Homo sapien
gtacctgccgggagcgccggatcca

SEQ ID NO: 3283140 - DNA, 25 bp, Homo sapien
ctcaacctggcagaggacgtcacga

SEQ ID NO: 3283141 - DNA, 25 bp, Homo sapien
atgggaggccgtcgcgggcagggac

SEQ ID NO: 3283142 - DNA, 25 bp, Homo sapien
acgccaaggcggtcgccgggccaat

SEQ ID NO: 3283143 - DNA, 25 bp, Homo sapien
gccgccggagaggacgggcgccgag

SEQ ID NO: 3283144 - DNA, 25 bp, Homo sapien
ggcacttcctcttgcggcgcccgtg

SEQ ID NO: 3283145 - DNA, 25 bp, Homo sapien
gggtcgaggcttcccgtcgccggca

SEQ ID NO: 3283146 - DNA, 25 bp, Homo sapien
gtgctgactgctccctaagcggcgg

SEQ ID NO: 3283147 - DNA, 25 bp, Homo sapien
ggcggcggcgagtcgtgaggacgcg

SEQ ID NO: 3283148 - DNA, 25 bp, Homo sapien
atgaagaccttagccaccggaacaa

SEQ ID NO: 3283149 - DNA, 25 bp, Homo sapien
agatgaagaccttagccaccggaac

SEQ ID NO: 3283150 - DNA, 25 bp, Homo sapien
ttctggttccgctgctgtgggcccc

SEQ ID NO: 3283151 - DNA, 25 bp, Homo sapien
gcccagatgaagaccttagccaccg

SEQ ID NO: 3283152 - DNA, 25 bp, Homo sapien
cagcgatgtgggatgccaaaactac

SEQ ID NO: 3283153 - DNA, 25 bp, Homo sapien
tagtctccggcagtacagcgtgctg

SEQ ID NO: 3283154 - DNA, 25 bp, Homo sapien
tataaacgttgatctccggagggcc

SEQ ID NO: 3283155 - DNA, 25 bp, Homo sapien
gaagtagcctttaggaacgcagagg

SEQ ID NO: 3283156 - DNA, 25 bp, Homo sapien
tgcgtgttttatctgcccctactag

SEQ ID NO: 3283157 - DNA, 25 bp, Homo sapien
ggtttaatatcacagagctagaagc

SEQ ID NO: 3283158 - DNA, 25 bp, Homo sapien
ggtgtcttgagagcatgactctggc

SEQ ID NO: 3283159 - DNA, 25 bp, Homo sapien
gaatctggacttctgtgccttacta

SEQ ID NO: 3283160 - DNA, 25 bp, Homo sapien
ggtagcaagctgtagattttgtttc

SEQ ID NO: 3283161 - DNA, 25 bp, Homo sapien
ttgtttcaaggaaagcatcttcatc

SEQ ID NO: 3283162 - DNA, 25 bp, Homo sapien
tttgtttcaaggaaagcatcttcat

SEQ ID NO: 3283163 - DNA, 25 bp, Homo sapien
ttttcttggtagcaagctgtagatt

SEQ ID NO: 3283164 - DNA, 25 bp, Homo sapien
tcatgtatagatggagattccgatg

SEQ ID NO: 3283165 - DNA, 25 bp, Homo sapien
tatagatggagattccgatgcaggt

SEQ ID NO: 3283166 - DNA, 25 bp, Homo sapien
tagatggagattccgatgcaggtat

SEQ ID NO: 3283167 - DNA, 25 bp, Homo sapien
tgtatagatggagattccgatgcag

SEQ ID NO: 3283168 - DNA, 25 bp, Homo sapien
ctgtatcaatttcaatacagtcaca

SEQ ID NO: 3283169 - DNA, 25 bp, Homo sapien
acagtcacatttgtgtttatttgaa

SEQ ID NO: 3283170 - DNA, 25 bp, Homo sapien
tatcaatttcaatacagtcacattt

SEQ ID NO: 3283171 - DNA, 25 bp, Homo sapien
cagtcacatttgtgtttatttgaac

SEQ ID NO: 3283172 - DNA, 25 bp, Homo sapien
aaatcttaagttgttaatcctgctc

SEQ ID NO: 3283173 - DNA, 25 bp, Homo sapien
tgctctcaagatgtaagtaaggtgt

SEQ ID NO: 3283174 - DNA, 25 bp, Homo sapien
tttgtaccaaaacactagtatctca

SEQ ID NO: 3283175 - DNA, 25 bp, Homo sapien
aaggtgtgtttcagacattattaaa

SEQ ID NO: 3283176 - DNA, 25 bp, Homo sapien
catctaatcctgtatgcatccaagt

SEQ ID NO: 3283177 - DNA, 25 bp, Homo sapien
taccaaaattgaaattgcacactgc

SEQ ID NO: 3283178 - DNA, 25 bp, Homo sapien
atcctttgtgtacctcctctctgtg

SEQ ID NO: 3283179 - DNA, 25 bp, Homo sapien
gcatccaagtatattcttctgtgcc

SEQ ID NO: 3283180 - DNA, 25 bp, Homo sapien
tgcttcctttgtatctgcttacaca

SEQ ID NO: 3283181 - DNA, 25 bp, Homo sapien
cttcctttgtatctgcttacacatg

SEQ ID NO: 3283182 - DNA, 25 bp, Homo sapien
ctttgtatctgcttacacatgttca

SEQ ID NO: 3283183 - DNA, 25 bp, Homo sapien
tcctttgtatctgcttacacatgtt

SEQ ID NO: 3283184 - DNA, 25 bp, Homo sapien
atctggcttcagtccttgccttttc

SEQ ID NO: 3283185 - DNA, 25 bp, Homo sapien
ttatctggcttcagtccttgccttt

SEQ ID NO: 3283186 - DNA, 25 bp, Homo sapien
actttagtatgttgttatctggctt

SEQ ID NO: 3283187 - DNA, 25 bp, Homo sapien
ttactttagtatgttgttatctggc

SEQ ID NO: 3283188 - DNA, 25 bp, Homo sapien
tgctgcctggctcgaaatatctaag

SEQ ID NO: 3283189 - DNA, 25 bp, Homo sapien
cctattgaggacacgaaggctgtca

SEQ ID NO: 3283190 - DNA, 25 bp, Homo sapien
tgggctgccagcaaccagatagagt

SEQ ID NO: 3283191 - DNA, 25 bp, Homo sapien
gcatctagttagtagcgcaccccaa

SEQ ID NO: 3283192 - DNA, 25 bp, Homo sapien
gcatttgtcgctgccatatcagtta

SEQ ID NO: 3283193 - DNA, 25 bp, Homo sapien
gatcctgctacccaaactaatttgg

SEQ ID NO: 3283194 - DNA, 25 bp, Homo sapien
aatgcgctataaccgcctgaccgtg

SEQ ID NO: 3283195 - DNA, 25 bp, Homo sapien
gcagctccagttcataccaataaag

SEQ ID NO: 3283196 - DNA, 25 bp, Homo sapien
aggcgtgtgtcaccccgtcaggcta

SEQ ID NO: 3283197 - DNA, 25 bp, Homo sapien
cgtgtgtcaccccgtcaggctaatt

SEQ ID NO: 3283198 - DNA, 25 bp, Homo sapien
gcgtgtgtcaccccgtcaggctaat

SEQ ID NO: 3283199 - DNA, 25 bp, Homo sapien
caaggcgtgtgtcaccccgtcaggc

SEQ ID NO: 3283200 - DNA, 25 bp, Homo sapien
catgggtagcagtttataatacaca

SEQ ID NO: 3283201 - DNA, 25 bp, Homo sapien
catcttcatgggtagcagtttataa

SEQ ID NO: 3283202 - DNA, 25 bp, Homo sapien
tacacaagtagaatttgggaaatgt

SEQ ID NO: 3283203 - DNA, 25 bp, Homo sapien
caagtagaatttgggaaatgtagtc

SEQ ID NO: 3283204 - DNA, 25 bp, Homo sapien
atcatggaggtatgttaattttgcc

SEQ ID NO: 3283205 - DNA, 25 bp, Homo sapien
ttcccagggctgttgccatagcatc

SEQ ID NO: 3283206 - DNA, 25 bp, Homo sapien
cccaggatggaatttgtagcatagt

SEQ ID NO: 3283207 - DNA, 25 bp, Homo sapien
ctacagtcatctgccccgatctggg

SEQ ID NO: 3283208 - DNA, 25 bp, Homo sapien
tgtacattacaactaaaagtgatgg

SEQ ID NO: 3283209 - DNA, 25 bp, Homo sapien
cctgagccagtaaacagtagtttaa

SEQ ID NO: 3283210 - DNA, 25 bp, Homo sapien
tcttttggtgcagaaccgttgtgca

SEQ ID NO: 3283211 - DNA, 25 bp, Homo sapien
gaactgtctgccaggtcattcttcc

SEQ ID NO: 3283212 - DNA, 25 bp, Homo sapien
tttgagaaatgcaggtgataactga

SEQ ID NO: 3283213 - DNA, 25 bp, Homo sapien
attcttacaagttatgtgccacatg

SEQ ID NO: 3283214 - DNA, 25 bp, Homo sapien
gttatgtgccacatgaagcaggtgt

SEQ ID NO: 3283215 - DNA, 25 bp, Homo sapien
tacaagttatgtgccacatgaagca

SEQ ID NO: 3283216 - DNA, 25 bp, Homo sapien
tcagagaacctaatatagcaccgtt

SEQ ID NO: 3283217 - DNA, 25 bp, Homo sapien
ggaggtaggctaacaacacattttg

SEQ ID NO: 3283218 - DNA, 25 bp, Homo sapien
tgattacacagcaagaggcctgagt

SEQ ID NO: 3283219 - DNA, 25 bp, Homo sapien
caagaaccaagcagtaaggacagca

SEQ ID NO: 3283220 - DNA, 25 bp, Homo sapien
aaatcagagccagttccctaagaag

SEQ ID NO: 3283221 - DNA, 25 bp, Homo sapien
cactgccgtcctgaagtaaagtaga

SEQ ID NO: 3283222 - DNA, 25 bp, Homo sapien
gctatacctagcctgtgggactcca

SEQ ID NO: 3283223 - DNA, 25 bp, Homo sapien
gcttctctgagtcctaaagtggagg

SEQ ID NO: 3283224 - DNA, 25 bp, Homo sapien
tttgggatgctcgaaggctagaccg

SEQ ID NO: 3283225 - DNA, 25 bp, Homo sapien
gataactgcaagtccaaagcacggt

SEQ ID NO: 3283226 - DNA, 25 bp, Homo sapien
tgtgccccggaaaagtgaacagaac

SEQ ID NO: 3283227 - DNA, 25 bp, Homo sapien
taaaggatccccaggcatgagagtt

SEQ ID NO: 3283228 - DNA, 25 bp, Homo sapien
tcctgtgccggctgagttgctgctg

SEQ ID NO: 3283229 - DNA, 25 bp, Homo sapien
aaccttggaagggtcgggcaagctg

SEQ ID NO: 3283230 - DNA, 25 bp, Homo sapien
caagctgtcagtcctgtgccggctg

SEQ ID NO: 3283231 - DNA, 25 bp, Homo sapien
gaagggtcgggcaagctgtcagtcc

SEQ ID NO: 3283232 - DNA, 25 bp, Homo sapien
gagggattcccatggagcaacctag

SEQ ID NO: 3283233 - DNA, 25 bp, Homo sapien
agttgagggattcccatggagcaac

SEQ ID NO: 3283234 - DNA, 25 bp, Homo sapien
gattcccatggagcaacctagaagt

SEQ ID NO: 3283235 - DNA, 25 bp, Homo sapien
agaatgagttgagttgagggattcc

SEQ ID NO: 3283236 - DNA, 25 bp, Homo sapien
gcagcattgctttactccctttatg

SEQ ID NO: 3283237 - DNA, 25 bp, Homo sapien
ggcacccacataatagttactcaca

SEQ ID NO: 3283238 - DNA, 25 bp, Homo sapien
aaacaaatggattatgcagcattgc

SEQ ID NO: 3283239 - DNA, 25 bp, Homo sapien
cccctgtccatagggacaaaatcct

SEQ ID NO: 3283240 - DNA, 25 bp, Homo sapien
tgcccaatggcacgtctaaagtctt

SEQ ID NO: 3283241 - DNA, 25 bp, Homo sapien
ccaatggcacgtctaaagtcttcca

SEQ ID NO: 3283242 - DNA, 25 bp, Homo sapien
actgggtatgcccaatggcacgtct

SEQ ID NO: 3283243 - DNA, 25 bp, Homo sapien
ggtatgcccaatggcacgtctaaag

SEQ ID NO: 3283244 - DNA, 25 bp, Homo sapien
aaattgttgcggtggctgggtcagc

SEQ ID NO: 3283245 - DNA, 25 bp, Homo sapien
aaaattgttgcggtggctgggtcag

SEQ ID NO: 3283246 - DNA, 25 bp, Homo sapien
aaaaattgttgcggtggctgggtca

SEQ ID NO: 3283247 - DNA, 25 bp, Homo sapien
ctgtaaaaattgttgcggtggctgg

SEQ ID NO: 3283248 - DNA, 25 bp, Homo sapien
gttgtgtagcaaaagtaggatatgc

SEQ ID NO: 3283249 - DNA, 25 bp, Homo sapien
ttgtgtagcaaaagtaggatatgca

SEQ ID NO: 3283250 - DNA, 25 bp, Homo sapien
ctgttgtgtagcaaaagtaggatat

SEQ ID NO: 3283251 - DNA, 25 bp, Homo sapien
tgttgtgtagcaaaagtaggatatg

SEQ ID NO: 3283252 - DNA, 25 bp, Homo sapien
ctggcccataagcatagtactaggt

SEQ ID NO: 3283253 - DNA, 25 bp, Homo sapien
gactgccccacaagctacaggagca

SEQ ID NO: 3283254 - DNA, 25 bp, Homo sapien
catagtactaggtaccatgactgcc

SEQ ID NO: 3283255 - DNA, 25 bp, Homo sapien
tacaggagcagtcactaatttggtc

SEQ ID NO: 3283256 - DNA, 25 bp, Homo sapien
ttggctgcagtgagcatctcattaa

SEQ ID NO: 3283257 - DNA, 25 bp, Homo sapien
aaattattgttttctaatcaatcgg

SEQ ID NO: 3283258 - DNA, 25 bp, Homo sapien
tctaatcaatcggtttacaatttta

SEQ ID NO: 3283259 - DNA, 25 bp, Homo sapien
attggctgcagtgagcatctcatta

SEQ ID NO: 3283260 - DNA, 25 bp, Homo sapien
gatggaatctggaccatgcttccgg

SEQ ID NO: 3283261 - DNA, 25 bp, Homo sapien
gcaggctgagaaatcaccatagtgt

SEQ ID NO: 3283262 - DNA, 25 bp, Homo sapien
gctgtaagagtgctctgtgtctgac

SEQ ID NO: 3283263 - DNA, 25 bp, Homo sapien
tgaatgtagttactgcagcactctg

SEQ ID NO: 3283264 - DNA, 25 bp, Homo sapien
cactttgaatctggttagtaggaac

SEQ ID NO: 3283265 - DNA, 25 bp, Homo sapien
tgtgctgagttgtgccaatgtgtcc

SEQ ID NO: 3283266 - DNA, 25 bp, Homo sapien
tagtaggaacaacttggccttgcat

SEQ ID NO: 3283267 - DNA, 25 bp, Homo sapien
caacccaggatttgattgttgcaaa

SEQ ID NO: 3283268 - DNA, 25 bp, Homo sapien
tcttgttgccgatgaatatttgctt

SEQ ID NO: 3283269 - DNA, 25 bp, Homo sapien
tatttgcttctatcatgcgtgtccg

SEQ ID NO: 3283270 - DNA, 25 bp, Homo sapien
agcccctgaccatggaccatctgaa

SEQ ID NO: 3283271 - DNA, 25 bp, Homo sapien
ttccaattggtctttcagatgttgc

SEQ ID NO: 3283272 - DNA, 25 bp, Homo sapien
agttatccacatcagtaggtggtgc

SEQ ID NO: 3283273 - DNA, 25 bp, Homo sapien
ttcttgctcttatgtcagggtgcca

SEQ ID NO: 3283274 - DNA, 25 bp, Homo sapien
tgctttgtaatattggacctggacc

SEQ ID NO: 3283275 - DNA, 25 bp, Homo sapien
tgccagcaggcacaaagttatccac

SEQ ID NO: 3283276 - DNA, 25 bp, Homo sapien
gcctagtctgttgtagaactcctga

SEQ ID NO: 3283277 - DNA, 25 bp, Homo sapien
cctcagataagtatagaacatgggc

SEQ ID NO: 3283278 - DNA, 25 bp, Homo sapien
ggaaaaagtagtctgcacctggagt

SEQ ID NO: 3283279 - DNA, 25 bp, Homo sapien
gaacatgggcttttaaagactaggc

SEQ ID NO: 3283280 - DNA, 25 bp, Homo sapien
aaggattcacacaatctgcttacat

SEQ ID NO: 3283281 - DNA, 25 bp, Homo sapien
taaggattcacacaatctgcttaca

SEQ ID NO: 3283282 - DNA, 25 bp, Homo sapien
tggtattgtaggcatctgtcattcc

SEQ ID NO: 3283283 - DNA, 25 bp, Homo sapien
gtattgtaggcatctgtcattccct

SEQ ID NO: 3283284 - DNA, 25 bp, Homo sapien
caatatagcatggtattgtaggcat

SEQ ID NO: 3283285 - DNA, 25 bp, Homo sapien
tatagcatggtattgtaggcatctg

SEQ ID NO: 3283286 - DNA, 25 bp, Homo sapien
ctagatgtaatggttttttagttca

SEQ ID NO: 3283287 - DNA, 25 bp, Homo sapien
catatatttgtactgtcggcatctg

SEQ ID NO: 3283288 - DNA, 25 bp, Homo sapien
tatttgtactgtcggcatctgcaat

SEQ ID NO: 3283289 - DNA, 25 bp, Homo sapien
tatatttgtactgtcggcatctgca

SEQ ID NO: 3283290 - DNA, 25 bp, Homo sapien
taagggccagtgataccccacaatc

SEQ ID NO: 3283291 - DNA, 25 bp, Homo sapien
gcaagactcttatgcatcctgaaag

SEQ ID NO: 3283292 - DNA, 25 bp, Homo sapien
tatggcatattaggcaggacaattc

SEQ ID NO: 3283293 - DNA, 25 bp, Homo sapien
tattcctggaccatgctcactaagg

SEQ ID NO: 3283294 - DNA, 25 bp, Homo sapien
catattcaaatacgcaactgaaaca

SEQ ID NO: 3283295 - DNA, 25 bp, Homo sapien
tattcaaatacgcaactgaaacaaa

SEQ ID NO: 3283296 - DNA, 25 bp, Homo sapien
tcaaatacgcaactgaaacaaaaac

SEQ ID NO: 3283297 - DNA, 25 bp, Homo sapien
tatcatattcaaatacgcaactgaa

SEQ ID NO: 3283298 - DNA, 25 bp, Homo sapien
ggtaaatttgtagcttgagacatca

SEQ ID NO: 3283299 - DNA, 25 bp, Homo sapien
tgagacatcactggctgtgttaatg

SEQ ID NO: 3283300 - DNA, 25 bp, Homo sapien
gacatgccttgtggaattggtaaat

SEQ ID NO: 3283301 - DNA, 25 bp, Homo sapien
gaaccaacagactgggaatttatgg

SEQ ID NO: 3283302 - DNA, 25 bp, Homo sapien
tatccgtcgggatcttggttggtgt

SEQ ID NO: 3283303 - DNA, 25 bp, Homo sapien
cctgggtggagtgctcgtatccgtc

SEQ ID NO: 3283304 - DNA, 25 bp, Homo sapien
catgagctggtaaatgctgcctggg

SEQ ID NO: 3283305 - DNA, 25 bp, Homo sapien
gactactaaatgatgaccttctttg

SEQ ID NO: 3283306 - DNA, 25 bp, Homo sapien
taatgacaattatacaagtcttcaa

SEQ ID NO: 3283307 - DNA, 25 bp, Homo sapien
gtagttacttctatctttttatgag

SEQ ID NO: 3283308 - DNA, 25 bp, Homo sapien
taagaacacttactggccctacagt

SEQ ID NO: 3283309 - DNA, 25 bp, Homo sapien
gacagatgattcaatgtagttactt

SEQ ID NO: 3283310 - DNA, 25 bp, Homo sapien
aaaggaagtctgctttgaagcaagg

SEQ ID NO: 3283311 - DNA, 25 bp, Homo sapien
gtctgctttgaagcaagggtactca

SEQ ID NO: 3283312 - DNA, 25 bp, Homo sapien
tctgctttgaagcaagggtactcac

SEQ ID NO: 3283313 - DNA, 25 bp, Homo sapien
gaagtctgctttgaagcaagggtac

SEQ ID NO: 3283314 - DNA, 25 bp, Homo sapien
tgtttatacgattatctgacccaga

SEQ ID NO: 3283315 - DNA, 25 bp, Homo sapien
ggttgggctgtgatcaaacctttcc

SEQ ID NO: 3283316 - DNA, 25 bp, Homo sapien
tctgagacggccgtgtgagatgatt

SEQ ID NO: 3283317 - DNA, 25 bp, Homo sapien
tccaatgcttccttgagactgactg

SEQ ID NO: 3283318 - DNA, 25 bp, Homo sapien
tcaatgccaagttctcgtcgtcttt

SEQ ID NO: 3283319 - DNA, 25 bp, Homo sapien
gttgccccttagtcaggaacctata

SEQ ID NO: 3283320 - DNA, 25 bp, Homo sapien
gaattccactgatggtaagtgatat

SEQ ID NO: 3283321 - DNA, 25 bp, Homo sapien
catgatttgcctttcccatattgca

SEQ ID NO: 3283322 - DNA, 25 bp, Homo sapien
taataatgagtctgaagccaaatcc

SEQ ID NO: 3283323 - DNA, 25 bp, Homo sapien
tgccaaattttctaggtcatccaca

SEQ ID NO: 3283324 - DNA, 25 bp, Homo sapien
taggtcatccacatgatagtaatca

SEQ ID NO: 3283325 - DNA, 25 bp, Homo sapien
cagaacttcaaatggcaaataccct

SEQ ID NO: 3283326 - DNA, 25 bp, Homo sapien
gtaatcatagcctgatgttcccaga

SEQ ID NO: 3283327 - DNA, 25 bp, Homo sapien
cattgggttcttcaacagtgcacat

SEQ ID NO: 3283328 - DNA, 25 bp, Homo sapien
tgtaaactcttcattgggttcttca

SEQ ID NO: 3283329 - DNA, 25 bp, Homo sapien
taaactatgtctagatgtaaactct

SEQ ID NO: 3283330 - DNA, 25 bp, Homo sapien
cattctaaactatgtctagatgtaa

SEQ ID NO: 3283331 - DNA, 25 bp, Homo sapien
cttgatgaactgaggtgtagctaac

SEQ ID NO: 3283332 - DNA, 25 bp, Homo sapien
tgtgtgcgttgtatagttccttcaa

SEQ ID NO: 3283333 - DNA, 25 bp, Homo sapien
tctatcttcataagatggcctatgt

SEQ ID NO: 3283334 - DNA, 25 bp, Homo sapien
gatggcctatgtgtgcgttgtatag

SEQ ID NO: 3283335 - DNA, 25 bp, Homo sapien
gtatagttccttcaaaaccattgtg

SEQ ID NO: 3283336 - DNA, 25 bp, Homo sapien
cagcatgtgacaacagaattctaac

SEQ ID NO: 3283337 - DNA, 25 bp, Homo sapien
tacatattcataggtagatggctcc

SEQ ID NO: 3283338 - DNA, 25 bp, Homo sapien
tttgggtctattgttcctcgcagca

SEQ ID NO: 3283339 - DNA, 25 bp, Homo sapien
tcataggtagatggctcctttgggt

SEQ ID NO: 3283340 - DNA, 25 bp, Homo sapien
ttcacattctaaagctaatccttcc

SEQ ID NO: 3283341 - DNA, 25 bp, Homo sapien
cacattctaaagctaatccttccat

SEQ ID NO: 3283342 - DNA, 25 bp, Homo sapien
gcttcacattctaaagctaatcctt

SEQ ID NO: 3283343 - DNA, 25 bp, Homo sapien
ttgcttcacattctaaagctaatcc

SEQ ID NO: 3283344 - DNA, 25 bp, Homo sapien
ttcccaccttactgactattcctat

SEQ ID NO: 3283345 - DNA, 25 bp, Homo sapien
tactgactattcctatctcttctgc

SEQ ID NO: 3283346 - DNA, 25 bp, Homo sapien
tatctcttctgctaatccattttca

SEQ ID NO: 3283347 - DNA, 25 bp, Homo sapien
tattcctatctcttctgctaatcca

SEQ ID NO: 3283348 - DNA, 25 bp, Homo sapien
tctctttattgtatagacggtgttt

SEQ ID NO: 3283349 - DNA, 25 bp, Homo sapien
ttaaatatactttgatccacaagat

SEQ ID NO: 3283350 - DNA, 25 bp, Homo sapien
aaatatactttgatccacaagatca

SEQ ID NO: 3283351 - DNA, 25 bp, Homo sapien
aattaaatatactttgatccacaag

SEQ ID NO: 3283352 - DNA, 25 bp, Homo sapien
taaatatactttgatccacaagatc

SEQ ID NO: 3283353 - DNA, 25 bp, Homo sapien
tacctccatgctgatgttctcgtga

SEQ ID NO: 3283354 - DNA, 25 bp, Homo sapien
cagactaatacatcatcttaataga

SEQ ID NO: 3283355 - DNA, 25 bp, Homo sapien
caagagtagtatgatcacaagcaat

SEQ ID NO: 3283356 - DNA, 25 bp, Homo sapien
tggtaaattatgatgtgacctatct

SEQ ID NO: 3283357 - DNA, 25 bp, Homo sapien
tcaagtaatgaagttacactctcag

SEQ ID NO: 3283358 - DNA, 25 bp, Homo sapien
atattatgcttccatctgtcatgat

SEQ ID NO: 3283359 - DNA, 25 bp, Homo sapien
tgttcaagtaatgaagttacactct

SEQ ID NO: 3283360 - DNA, 25 bp, Homo sapien
tccatctgtcatgattgctaaaaaa

SEQ ID NO: 3283361 - DNA, 25 bp, Homo sapien
aaaagaagacaagtgttcctcaatt

SEQ ID NO: 3283362 - DNA, 25 bp, Homo sapien
aagaagacaagtgttcctcaatttc

SEQ ID NO: 3283363 - DNA, 25 bp, Homo sapien
aaaaagaagacaagtgttcctcaat

SEQ ID NO: 3283364 - DNA, 25 bp, Homo sapien
gaagacaagtgttcctcaatttccc

SEQ ID NO: 3283365 - DNA, 25 bp, Homo sapien
ccagtcctgtcgaatttcactagca

SEQ ID NO: 3283366 - DNA, 25 bp, Homo sapien
cactagcatctgactgtgcagtgat

SEQ ID NO: 3283367 - DNA, 25 bp, Homo sapien
gtaaactcttcattactaaggaatg

SEQ ID NO: 3283368 - DNA, 25 bp, Homo sapien
ctaacattaattgtgtaaactcttc

SEQ ID NO: 3283369 - DNA, 25 bp, Homo sapien
tatgttttcgtaaaaaatcaatgct

SEQ ID NO: 3283370 - DNA, 25 bp, Homo sapien
ttatgttttcgtaaaaaatcaatgc

SEQ ID NO: 3283371 - DNA, 25 bp, Homo sapien
tctgcagaacagtagatttgtccat

SEQ ID NO: 3283372 - DNA, 25 bp, Homo sapien
aatcaatgcttttctgcagaacagt

SEQ ID NO: 3283373 - DNA, 25 bp, Homo sapien
atcccagttctttaatgagaacatt

SEQ ID NO: 3283374 - DNA, 25 bp, Homo sapien
gatcccagttctttaatgagaacat

SEQ ID NO: 3283375 - DNA, 25 bp, Homo sapien
tcccagttctttaatgagaacatta

SEQ ID NO: 3283376 - DNA, 25 bp, Homo sapien
caagtagtttaatacaatgttaatt

SEQ ID NO: 3283377 - DNA, 25 bp, Homo sapien
acaagtagtttaatacaatgttaat

SEQ ID NO: 3283378 - DNA, 25 bp, Homo sapien
ccaacccatcaaaaatactactgtc

SEQ ID NO: 3283379 - DNA, 25 bp, Homo sapien
tttcgctttgtccttgtcatcttct

SEQ ID NO: 3283380 - DNA, 25 bp, Homo sapien
ttccaccaacccatcaaaaatacta

SEQ ID NO: 3283381 - DNA, 25 bp, Homo sapien
ttcttccaccaacccatcaaaaata

SEQ ID NO: 3283382 - DNA, 25 bp, Homo sapien
caaatgtcatccctaggtgtcatac

SEQ ID NO: 3283383 - DNA, 25 bp, Homo sapien
catgacattcagagataaggaaccc

SEQ ID NO: 3283384 - DNA, 25 bp, Homo sapien
tctgtgtacaagtctagctgcaaaa

SEQ ID NO: 3283385 - DNA, 25 bp, Homo sapien
caatggatggagcacaccgaacagt

SEQ ID NO: 3283386 - DNA, 25 bp, Homo sapien
tcattttactacagcttacggtaaa

SEQ ID NO: 3283387 - DNA, 25 bp, Homo sapien
tactacgttttcgtcttgtagtaga

SEQ ID NO: 3283388 - DNA, 25 bp, Homo sapien
catactacgttttcgtcttgtagta

SEQ ID NO: 3283389 - DNA, 25 bp, Homo sapien
aacatactacgttttcgtcttgtag

SEQ ID NO: 3283390 - DNA, 25 bp, Homo sapien
tacgttttcgtcttgtagtagacat

SEQ ID NO: 3283391 - DNA, 25 bp, Homo sapien
aaagaaaatgagtgacagagtcaaa

SEQ ID NO: 3283392 - DNA, 25 bp, Homo sapien
catacccagggctaagagttcttaa

SEQ ID NO: 3283393 - DNA, 25 bp, Homo sapien
gctaccatacccagggctaagagtt

SEQ ID NO: 3283394 - DNA, 25 bp, Homo sapien
aggtgctcgctaccatacccagggc

SEQ ID NO: 3283395 - DNA, 25 bp, Homo sapien
acctaagtacatttctctggtccaa

SEQ ID NO: 3283396 - DNA, 25 bp, Homo sapien
gaagaggaagaacagtataaaagta

SEQ ID NO: 3283397 - DNA, 25 bp, Homo sapien
ggctgattctatcactagaagagga

SEQ ID NO: 3283398 - DNA, 25 bp, Homo sapien
ctctggtccaacagacatatttatc

SEQ ID NO: 3283399 - DNA, 25 bp, Homo sapien
cctggtgattccctgggtctctagt

SEQ ID NO: 3283400 - DNA, 25 bp, Homo sapien
gttacttgtatcctatgccttcatc

SEQ ID NO: 3283401 - DNA, 25 bp, Homo sapien
tcttcttgtgatcattattcatcat

SEQ ID NO: 3283402 - DNA, 25 bp, Homo sapien
tattccctgttacttgtatcctatg

SEQ ID NO: 3283403 - DNA, 25 bp, Homo sapien
gtactccttggatcttttaaactga

SEQ ID NO: 3283404 - DNA, 25 bp, Homo sapien
tatgaccaaccataagtctcagaat

SEQ ID NO: 3283405 - DNA, 25 bp, Homo sapien
tcaaggtactcttctatatgaccaa

SEQ ID NO: 3283406 - DNA, 25 bp, Homo sapien
ttctatatgaccaaccataagtctc

SEQ ID NO: 3283407 - DNA, 25 bp, Homo sapien
caaagatgcatctaaacttttatat

SEQ ID NO: 3283408 - DNA, 25 bp, Homo sapien
tcaaagatgcatctaaacttttata

SEQ ID NO: 3283409 - DNA, 25 bp, Homo sapien
gatcttgcccacagagtataggagc

SEQ ID NO: 3283410 - DNA, 25 bp, Homo sapien
tacagttctcttagtgggacaatac

SEQ ID NO: 3283411 - DNA, 25 bp, Homo sapien
tttcagagataagactaaggcctac

SEQ ID NO: 3283412 - DNA, 25 bp, Homo sapien
gacactataactctagcctgctgaa

SEQ ID NO: 3283413 - DNA, 25 bp, Homo sapien
atcaaatgaaataacccattacctt

SEQ ID NO: 3283414 - DNA, 25 bp, Homo sapien
caaaatgatgattgaaggtatctag

SEQ ID NO: 3283415 - DNA, 25 bp, Homo sapien
tgaaggtatctagtgagacttgcca

SEQ ID NO: 3283416 - DNA, 25 bp, Homo sapien
gactgtagaattatccaaaggcatc

SEQ ID NO: 3283417 - DNA, 25 bp, Homo sapien
tctaaagattcatttaagaggactg

SEQ ID NO: 3283418 - DNA, 25 bp, Homo sapien
ttttgggagatattaatgtaatggt

SEQ ID NO: 3283419 - DNA, 25 bp, Homo sapien
tgacaccttgttaatatagtcttcc

SEQ ID NO: 3283420 - DNA, 25 bp, Homo sapien
tacaacaaactgcaattttgactag

SEQ ID NO: 3283421 - DNA, 25 bp, Homo sapien
taaacttattggaatcagtttgtta

SEQ ID NO: 3283422 - DNA, 25 bp, Homo sapien
ctaggttatcaaattcgtgggcaca

SEQ ID NO: 3283423 - DNA, 25 bp, Homo sapien
atattagcgtatcctttttccttag

SEQ ID NO: 3283424 - DNA, 25 bp, Homo sapien
gcctagctggaagcacatcaatttt

SEQ ID NO: 3283425 - DNA, 25 bp, Homo sapien
ggttatcaaattcgtgggcacagag

SEQ ID NO: 3283426 - DNA, 25 bp, Homo sapien
ccagttacttcaacatggagggtaa

SEQ ID NO: 3283427 - DNA, 25 bp, Homo sapien
aaaagactttactgcggtaatcata

SEQ ID NO: 3283428 - DNA, 25 bp, Homo sapien
aagctctaaaaactccgtaatgagg

SEQ ID NO: 3283429 - DNA, 25 bp, Homo sapien
tgcagaatgtgaaacgttataaaga

SEQ ID NO: 3283430 - DNA, 25 bp, Homo sapien
taatctagcttgtactaccctatga

SEQ ID NO: 3283431 - DNA, 25 bp, Homo sapien
caagtggagcatcagtgcaacaata

SEQ ID NO: 3283432 - DNA, 25 bp, Homo sapien
taccctatgattaacagcactgaag

SEQ ID NO: 3283433 - DNA, 25 bp, Homo sapien
ttacagttgtaatatgcagcgagtc

SEQ ID NO: 3283434 - DNA, 25 bp, Homo sapien
ttccccagcagacagaatagtagct

SEQ ID NO: 3283435 - DNA, 25 bp, Homo sapien
tttaactcactagtttctcatctgg

SEQ ID NO: 3283436 - DNA, 25 bp, Homo sapien
ggtatactgtgttcaaggatcaaag

SEQ ID NO: 3283437 - DNA, 25 bp, Homo sapien
gatgaagaccaccattaaaggtata

SEQ ID NO: 3283438 - DNA, 25 bp, Homo sapien
caaaggcctcgctatattgccacta

SEQ ID NO: 3283439 - DNA, 25 bp, Homo sapien
tcaagctgcatacttaaattgggca

SEQ ID NO: 3283440 - DNA, 25 bp, Homo sapien
cctggtcaatacagaaagacctctt

SEQ ID NO: 3283441 - DNA, 25 bp, Homo sapien
caaagtcacatcctatctctgcaaa

SEQ ID NO: 3283442 - DNA, 25 bp, Homo sapien
aatgcatgatatagggaagtgacag

SEQ ID NO: 3283443 - DNA, 25 bp, Homo sapien
aaaaatcactgatactaggtaggcc

SEQ ID NO: 3283444 - DNA, 25 bp, Homo sapien
ccaacagaagattgataagtaaatt

SEQ ID NO: 3283445 - DNA, 25 bp, Homo sapien
caaaaaaggtgaaactgccgtgcat

SEQ ID NO: 3283446 - DNA, 25 bp, Homo sapien
accaagcacgcagcttcagcttcag

SEQ ID NO: 3283447 - DNA, 25 bp, Homo sapien
caaccaagcacgcagcttcagcttc

SEQ ID NO: 3283448 - DNA, 25 bp, Homo sapien
ccaagcacgcagcttcagcttcagg

SEQ ID NO: 3283449 - DNA, 25 bp, Homo sapien
aaccaagcacgcagcttcagcttca

SEQ ID NO: 3283450 - DNA, 25 bp, Homo sapien
tttgcaaactccatcagctaaaaag

SEQ ID NO: 3283451 - DNA, 25 bp, Homo sapien
aatagtcttgatcaatactctgaac

SEQ ID NO: 3283452 - DNA, 25 bp, Homo sapien
actgaaggcagggtcaattatactg

SEQ ID NO: 3283453 - DNA, 25 bp, Homo sapien
gcatctttctaggtatctcccatag

SEQ ID NO: 3283454 - DNA, 25 bp, Homo sapien
aatcagatttgaggtgtcccaaggg

SEQ ID NO: 3283455 - DNA, 25 bp, Homo sapien
ggctaacctttcaagacattctgtt

SEQ ID NO: 3283456 - DNA, 25 bp, Homo sapien
gttcagccaaccacttatcacagga

SEQ ID NO: 3283457 - DNA, 25 bp, Homo sapien
tctcctaatgctacaggctaacctt

SEQ ID NO: 3283458 - DNA, 25 bp, Homo sapien
tggagtcagacgctaatagccgcgc

SEQ ID NO: 3283459 - DNA, 25 bp, Homo sapien
gaaatctacaaacgccagcggcggt

SEQ ID NO: 3283460 - DNA, 25 bp, Homo sapien
gcttcactggcggaaagaaatctac

SEQ ID NO: 3283461 - DNA, 25 bp, Homo sapien
gaatataaactctgcggcgctgcgt

SEQ ID NO: 3283462 - DNA, 25 bp, Homo sapien
taccccgcctgtgtccaggaggcgc

SEQ ID NO: 3283463 - DNA, 25 bp, Homo sapien
cccaaaaattcgccgctcctgtggc

SEQ ID NO: 3283464 - DNA, 25 bp, Homo sapien
ccgctgcggtgactcggaaccacta

SEQ ID NO: 3283465 - DNA, 25 bp, Homo sapien
cactaccccgcctgtgtccaggagg

SEQ ID NO: 3283466 - DNA, 25 bp, Homo sapien
ttttaaaccggcagccgcaagccga

SEQ ID NO: 3283467 - DNA, 25 bp, Homo sapien
cctcccggcgcatgcgtcgtcagcg

SEQ ID NO: 3283468 - DNA, 25 bp, Homo sapien
cgcaagccgagtccgtgattgcgcc

SEQ ID NO: 3283469 - DNA, 25 bp, Homo sapien
cggccagatttccttcgcgctctcg

SEQ ID NO: 3283470 - DNA, 25 bp, Homo sapien
cattgtaactttagaagatggctct

SEQ ID NO: 3283471 - DNA, 25 bp, Homo sapien
tctgcatttggtttcaattggaggg

SEQ ID NO: 3283472 - DNA, 25 bp, Homo sapien
cacctggtggatctgagttaagaca

SEQ ID NO: 3283473 - DNA, 25 bp, Homo sapien
ctagataattacctgaagtgtgtgt

SEQ ID NO: 3283474 - DNA, 25 bp, Homo sapien
tttttgtccaacatgtgttagaaaa

SEQ ID NO: 3283475 - DNA, 25 bp, Homo sapien
tgtccaacatgtgttagaaaaagga

SEQ ID NO: 3283476 - DNA, 25 bp, Homo sapien
gtccaacatgtgttagaaaaaggat

SEQ ID NO: 3283477 - DNA, 25 bp, Homo sapien
tttgtccaacatgtgttagaaaaag

SEQ ID NO: 3283478 - DNA, 25 bp, Homo sapien
ctgatccctaatataaaagcagtca

SEQ ID NO: 3283479 - DNA, 25 bp, Homo sapien
tgacttttctgatccctaatataaa

SEQ ID NO: 3283480 - DNA, 25 bp, Homo sapien
taaaatgacatatatgccataattc

SEQ ID NO: 3283481 - DNA, 25 bp, Homo sapien
gacatatatgccataattctaatat

SEQ ID NO: 3283482 - DNA, 25 bp, Homo sapien
aaagctatttattgaatatttctct

SEQ ID NO: 3283483 - DNA, 25 bp, Homo sapien
aaaagctatttattgaatatttctc

SEQ ID NO: 3283484 - DNA, 25 bp, Homo sapien
taaaagctatttattgaatatttct

SEQ ID NO: 3283485 - DNA, 25 bp, Homo sapien
ctaaaagctatttattgaatatttc

SEQ ID NO: 3283486 - DNA, 25 bp, Homo sapien
tatcactgttggagctatcactgtc

SEQ ID NO: 3283487 - DNA, 25 bp, Homo sapien
gaagtgtttctaattgaagatacca

SEQ ID NO: 3283488 - DNA, 25 bp, Homo sapien
tcatatctaccatgtcttttctggg

SEQ ID NO: 3283489 - DNA, 25 bp, Homo sapien
caaatcagtctgtattgctccaact

SEQ ID NO: 3283490 - DNA, 25 bp, Homo sapien
ccagcttgagatttatccctccaca

SEQ ID NO: 3283491 - DNA, 25 bp, Homo sapien
aagactaagatgctggttaaccaac

SEQ ID NO: 3283492 - DNA, 25 bp, Homo sapien
caattgtcatggtagtgttgaatac

SEQ ID NO: 3283493 - DNA, 25 bp, Homo sapien
cagctattcacgatggctttaacaa

SEQ ID NO: 3283494 - DNA, 25 bp, Homo sapien
gcttaacaatatattgccagtcact

SEQ ID NO: 3283495 - DNA, 25 bp, Homo sapien
caacccaataatacttcagacactg

SEQ ID NO: 3283496 - DNA, 25 bp, Homo sapien
gcattgagctacaattgtcactgta

SEQ ID NO: 3283497 - DNA, 25 bp, Homo sapien
ttgcaagtagctatgaatcaaccca

SEQ ID NO: 3283498 - DNA, 25 bp, Homo sapien
gaattataacccacacatcttcttc

SEQ ID NO: 3283499 - DNA, 25 bp, Homo sapien
tgtgacttcattcacatactgattt

SEQ ID NO: 3283500 - DNA, 25 bp, Homo sapien
ctttccattcctgtaaccgcttctt

SEQ ID NO: 3283501 - DNA, 25 bp, Homo sapien
cttgatctgtatagatgaattataa

SEQ ID NO: 3283502 - DNA, 25 bp, Homo sapien
gatcaagcagttcgctaaggagcac

SEQ ID NO: 3283503 - DNA, 25 bp, Homo sapien
tatactttcctaacacacaccgtgg

SEQ ID NO: 3283504 - DNA, 25 bp, Homo sapien
gagatctgtccatttgactcctggg

SEQ ID NO: 3283505 - DNA, 25 bp, Homo sapien
taagtacttccttacctactggcaa

SEQ ID NO: 3283506 - DNA, 25 bp, Homo sapien
gcattcctgcaatcaatactacttg

SEQ ID NO: 3283507 - DNA, 25 bp, Homo sapien
cagtcatgagggatatttgtagtac

SEQ ID NO: 3283508 - DNA, 25 bp, Homo sapien
cagacatcatgctagaaggaaaatc

SEQ ID NO: 3283509 - DNA, 25 bp, Homo sapien
gaaatgatagtcacctttgacagac

SEQ ID NO: 3283510 - DNA, 25 bp, Homo sapien
ttcaacagcctgcatatcttcttca

SEQ ID NO: 3283511 - DNA, 25 bp, Homo sapien
catccagcccaccaaatctacgacc

SEQ ID NO: 3283512 - DNA, 25 bp, Homo sapien
cagcccaccaaatctacgaccatac

SEQ ID NO: 3283513 - DNA, 25 bp, Homo sapien
ttaactgtattattcccatcatcca

SEQ ID NO: 3283514 - DNA, 25 bp, Homo sapien
aactgtattattcccatcatccagc

SEQ ID NO: 3283515 - DNA, 25 bp, Homo sapien
ggaagaatgccgaaatctcttaaaa

SEQ ID NO: 3283516 - DNA, 25 bp, Homo sapien
ctttaggaggaagaatgccgaaatc

SEQ ID NO: 3283517 - DNA, 25 bp, Homo sapien
gaatgccgaaatctcttaaaatgtc

SEQ ID NO: 3283518 - DNA, 25 bp, Homo sapien
taggaggaagaatgccgaaatctct

SEQ ID NO: 3283519 - DNA, 25 bp, Homo sapien
cctccccatttgtgtcccttggctt

SEQ ID NO: 3283520 - DNA, 25 bp, Homo sapien
tgtgtccgccctccccatttgtgtc

SEQ ID NO: 3283521 - DNA, 25 bp, Homo sapien
ccgccctccccatttgtgtcccttg

SEQ ID NO: 3283522 - DNA, 25 bp, Homo sapien
cctgtgtccgccctccccatttgtg

SEQ ID NO: 3283523 - DNA, 25 bp, Homo sapien
gatgcgctgctctgcccctcaagag

SEQ ID NO: 3283524 - DNA, 25 bp, Homo sapien
gccacggatggagacccgcagcctt

SEQ ID NO: 3283525 - DNA, 25 bp, Homo sapien
ctggcgaggcgccacggatggagac

SEQ ID NO: 3283526 - DNA, 25 bp, Homo sapien
cctgcagctggcgaggcgccacgga

SEQ ID NO: 3283527 - DNA, 25 bp, Homo sapien
tggaagagcgcccgcttcaggcccg

SEQ ID NO: 3283528 - DNA, 25 bp, Homo sapien
gcccggcggtttcgagtgaccgcca

SEQ ID NO: 3283529 - DNA, 25 bp, Homo sapien
cgcttcaggcccggcggtttcgagt

SEQ ID NO: 3283530 - DNA, 25 bp, Homo sapien
cggtttcgagtgaccgccagaagag

SEQ ID NO: 3283531 - DNA, 25 bp, Homo sapien
ttccatagcattgctctgtggaaaa

SEQ ID NO: 3283532 - DNA, 25 bp, Homo sapien
caacacagggattttcaacagagta

SEQ ID NO: 3283533 - DNA, 25 bp, Homo sapien
cacagggattttcaacagagtacat

SEQ ID NO: 3283534 - DNA, 25 bp, Homo sapien
catagcattgctctgtggaaaatta

SEQ ID NO: 3283535 - DNA, 25 bp, Homo sapien
aaaaaatatcctcgactttgacttg

SEQ ID NO: 3283536 - DNA, 25 bp, Homo sapien
cctcgactttgacttgcaaagggac

SEQ ID NO: 3283537 - DNA, 25 bp, Homo sapien
cgactttgacttgcaaagggacttt

SEQ ID NO: 3283538 - DNA, 25 bp, Homo sapien
aatatcctcgactttgacttgcaaa

SEQ ID NO: 3283539 - DNA, 25 bp, Homo sapien
gggctgccccacacggaatggcaaa

SEQ ID NO: 3283540 - DNA, 25 bp, Homo sapien
tagtgtgggcttatcctgaagagca

SEQ ID NO: 3283541 - DNA, 25 bp, Homo sapien
acagctgggaattaacagaaagggc

SEQ ID NO: 3283542 - DNA, 25 bp, Homo sapien
atttgatgaactaccacagctggga

SEQ ID NO: 3283543 - DNA, 25 bp, Homo sapien
gcagcaacggatgcacaactgacga

SEQ ID NO: 3283544 - DNA, 25 bp, Homo sapien
tgtgtcttcgaataatgaaataaga

SEQ ID NO: 3283545 - DNA, 25 bp, Homo sapien
cacaacatttgacttgcccaacttc

SEQ ID NO: 3283546 - DNA, 25 bp, Homo sapien
gacttgcccaacttctgtgtcttcg

SEQ ID NO: 3283547 - DNA, 25 bp, Homo sapien
gcccaacttctgtgtcttcgaataa

SEQ ID NO: 3283548 - DNA, 25 bp, Homo sapien
tagtattatctttttcatcttgttc

SEQ ID NO: 3283549 - DNA, 25 bp, Homo sapien
ccttttagtattatctttttcatct

SEQ ID NO: 3283550 - DNA, 25 bp, Homo sapien
ttttagtattatctttttcatcttg

SEQ ID NO: 3283551 - DNA, 25 bp, Homo sapien
tttagtattatctttttcatcttgt

SEQ ID NO: 3283552 - DNA, 25 bp, Homo sapien
ctgaggctttggtagcattcccata

SEQ ID NO: 3283553 - DNA, 25 bp, Homo sapien
tgaggctttggtagcattcccataa

SEQ ID NO: 3283554 - DNA, 25 bp, Homo sapien
aggctttggtagcattcccataatc

SEQ ID NO: 3283555 - DNA, 25 bp, Homo sapien
gaggctttggtagcattcccataat

SEQ ID NO: 3283556 - DNA, 25 bp, Homo sapien
cctttgaacaacagtacatgcttga

SEQ ID NO: 3283557 - DNA, 25 bp, Homo sapien
ttgaacaacagtacatgcttgacat

SEQ ID NO: 3283558 - DNA, 25 bp, Homo sapien
tccctttgaacaacagtacatgctt

SEQ ID NO: 3283559 - DNA, 25 bp, Homo sapien
ctctccctttgaacaacagtacatg

SEQ ID NO: 3283560 - DNA, 25 bp, Homo sapien
tggacagaaaagacgaacaagtatc

SEQ ID NO: 3283561 - DNA, 25 bp, Homo sapien
gacagaaaagacgaacaagtatcat

SEQ ID NO: 3283562 - DNA, 25 bp, Homo sapien
tcaatggacagaaaagacgaacaag

SEQ ID NO: 3283563 - DNA, 25 bp, Homo sapien
gaaaagacgaacaagtatcatctat

SEQ ID NO: 3283564 - DNA, 25 bp, Homo sapien
aattgtggcaataatcaatagttta

SEQ ID NO: 3283565 - DNA, 25 bp, Homo sapien
gatctgaaattgtggcaataatcaa

SEQ ID NO: 3283566 - DNA, 25 bp, Homo sapien
gtggcaataatcaatagtttaccaa

SEQ ID NO: 3283567 - DNA, 25 bp, Homo sapien
ggatctgaaattgtggcaataatca

SEQ ID NO: 3283568 - DNA, 25 bp, Homo sapien
gatttggtgtagtttcttgtatatt

SEQ ID NO: 3283569 - DNA, 25 bp, Homo sapien
taaactgttcttatcctttgactat

SEQ ID NO: 3283570 - DNA, 25 bp, Homo sapien
ttctgtaaactgttcttatcctttg

SEQ ID NO: 3283571 - DNA, 25 bp, Homo sapien
tctttatccaattgatttggtgtag

SEQ ID NO: 3283572 - DNA, 25 bp, Homo sapien
taatccttgaggtaatattggagca

SEQ ID NO: 3283573 - DNA, 25 bp, Homo sapien
aatccttgaggtaatattggagcac

SEQ ID NO: 3283574 - DNA, 25 bp, Homo sapien
caggcgcccgcgcaccaggcgagca

SEQ ID NO: 3283575 - DNA, 25 bp, Homo sapien
tggggcggcagctctctgttcgcag

SEQ ID NO: 3283576 - DNA, 25 bp, Homo sapien
tgtccggcgggcgacctggggcggc

SEQ ID NO: 3283577 - DNA, 25 bp, Homo sapien
ggcggcagctctctgttcgcagcat

SEQ ID NO: 3283578 - DNA, 25 bp, Homo sapien
cggcgggcgacctggggcggcagct

SEQ ID NO: 3283579 - DNA, 25 bp, Homo sapien
cgggaggctcggtgctagggacgct

SEQ ID NO: 3283580 - DNA, 25 bp, Homo sapien
cacgcgtagctggtgctccacctgg

SEQ ID NO: 3283581 - DNA, 25 bp, Homo sapien
gtagctggtgctccacctggtgccc

SEQ ID NO: 3283582 - DNA, 25 bp, Homo sapien
ctgcgctgcgccacgcgtagctggt

SEQ ID NO: 3283583 - DNA, 25 bp, Homo sapien
caggccgtctgagtttttaaacttg

SEQ ID NO: 3283584 - DNA, 25 bp, Homo sapien
ggaacagggtgtggatggcaaacca

SEQ ID NO: 3283585 - DNA, 25 bp, Homo sapien
tgtcctgggtctacgtgggacaccc

SEQ ID NO: 3283586 - DNA, 25 bp, Homo sapien
taaacttggtagtggcgacgctctc

SEQ ID NO: 3283587 - DNA, 25 bp, Homo sapien
ccctttgtccaagcattgcaaagaa

SEQ ID NO: 3283588 - DNA, 25 bp, Homo sapien
cccttgataatttagttacagacat

SEQ ID NO: 3283589 - DNA, 25 bp, Homo sapien
aagaagtgaaatcccagatcactga

SEQ ID NO: 3283590 - DNA, 25 bp, Homo sapien
tacagacattccaatctgtacttct

SEQ ID NO: 3283591 - DNA, 25 bp, Homo sapien
attcatagcaagctacatctgtgca

SEQ ID NO: 3283592 - DNA, 25 bp, Homo sapien
agtgagcaaaatgcaagttttataa

SEQ ID NO: 3283593 - DNA, 25 bp, Homo sapien
gcaagctacatctgtgcaggcagca

SEQ ID NO: 3283594 - DNA, 25 bp, Homo sapien
aaataacttcttgcatggagctctc

SEQ ID NO: 3283595 - DNA, 25 bp, Homo sapien
cagaggtttgcatgacctcctgctg

SEQ ID NO: 3283596 - DNA, 25 bp, Homo sapien
cctgctgggttcagtcatttgctaa

SEQ ID NO: 3283597 - DNA, 25 bp, Homo sapien
tctgaccaccaattgtgtagggatc

SEQ ID NO: 3283598 - DNA, 25 bp, Homo sapien
gcttgtcacctgcatttctggctga

SEQ ID NO: 3283599 - DNA, 25 bp, Homo sapien
aaatgcatttcgttccttcactaat

SEQ ID NO: 3283600 - DNA, 25 bp, Homo sapien
gcttctgctagaaacaacttcttgg

SEQ ID NO: 3283601 - DNA, 25 bp, Homo sapien
gtgctggcttctgctagaaacaact

SEQ ID NO: 3283602 - DNA, 25 bp, Homo sapien
tagaaacaacttcttgggaatgaaa

SEQ ID NO: 3283603 - DNA, 25 bp, Homo sapien
tcttgggcagattttactatctgga

SEQ ID NO: 3283604 - DNA, 25 bp, Homo sapien
cagattttactatctggaaaacaga

SEQ ID NO: 3283605 - DNA, 25 bp, Homo sapien
aaaggacctgtttctcggaagcagc

SEQ ID NO: 3283606 - DNA, 25 bp, Homo sapien
agaaaggacctgtttctcggaagca

SEQ ID NO: 3283607 - DNA, 25 bp, Homo sapien
tttctaaacttctcccaggtacatc

SEQ ID NO: 3283608 - DNA, 25 bp, Homo sapien
ttctaaacttctcccaggtacatca

SEQ ID NO: 3283609 - DNA, 25 bp, Homo sapien
tccaggtcaagctgggggaaagata

SEQ ID NO: 3283610 - DNA, 25 bp, Homo sapien
ttgtggtttaacccagcaatgatga

SEQ ID NO: 3283611 - DNA, 25 bp, Homo sapien
gtcaagctgggggaaagatagtgcc

SEQ ID NO: 3283612 - DNA, 25 bp, Homo sapien
gcaatgatgaatactggtaattcca

SEQ ID NO: 3283613 - DNA, 25 bp, Homo sapien
ccttggatccgtccccttggacagt

SEQ ID NO: 3283614 - DNA, 25 bp, Homo sapien
cttggacagtatggctggcccatat

SEQ ID NO: 3283615 - DNA, 25 bp, Homo sapien
gaatggagttttccacactccatgg

SEQ ID NO: 3283616 - DNA, 25 bp, Homo sapien
tatggctggcccatatcagaatgga

SEQ ID NO: 3283617 - DNA, 25 bp, Homo sapien
tggtgaccgagtaatccctgtagaa

SEQ ID NO: 3283618 - DNA, 25 bp, Homo sapien
ggtttaaccatataactgaagggca

SEQ ID NO: 3283619 - DNA, 25 bp, Homo sapien
tgcccttcacagtccaaggctctgg

SEQ ID NO: 3283620 - DNA, 25 bp, Homo sapien
caatcagtgtgagttgatcatcaag

SEQ ID NO: 3283621 - DNA, 25 bp, Homo sapien
ccaaaagaccaccatgtagaactga

SEQ ID NO: 3283622 - DNA, 25 bp, Homo sapien
ggagaagtctactctatcccgcaac

SEQ ID NO: 3283623 - DNA, 25 bp, Homo sapien
gaactgacattgttcccggaggcat

SEQ ID NO: 3283624 - DNA, 25 bp, Homo sapien
tatcccgcaacagaccaaaagacca

SEQ ID NO: 3283625 - DNA, 25 bp, Homo sapien
ctggcttgactcttcagcctcactt

SEQ ID NO: 3283626 - DNA, 25 bp, Homo sapien
ccagctctatgtccagttgctgcat

SEQ ID NO: 3283627 - DNA, 25 bp, Homo sapien
tccagctctatgtccagttgctgca

SEQ ID NO: 3283628 - DNA, 25 bp, Homo sapien
ttcttgccctggcttgactcttcag

SEQ ID NO: 3283629 - DNA, 25 bp, Homo sapien
cctatttcaatccacccagctgcag

SEQ ID NO: 3283630 - DNA, 25 bp, Homo sapien
gccagctggccctatttcaatccac

SEQ ID NO: 3283631 - DNA, 25 bp, Homo sapien
tgttctcggttgttgctctgccagc

SEQ ID NO: 3283632 - DNA, 25 bp, Homo sapien
aagtctaccaggaaattggctaggg

SEQ ID NO: 3283633 - DNA, 25 bp, Homo sapien
tcagctctcagcagatatttttgga

SEQ ID NO: 3283634 - DNA, 25 bp, Homo sapien
ctttcaaacacttcagctctcagca

SEQ ID NO: 3283635 - DNA, 25 bp, Homo sapien
tctttcctccactttcaaacacttc

SEQ ID NO: 3283636 - DNA, 25 bp, Homo sapien
tccactttcaaacacttcagctctc

SEQ ID NO: 3283637 - DNA, 25 bp, Homo sapien
gggactccacaagtagatctatgag

SEQ ID NO: 3283638 - DNA, 25 bp, Homo sapien
taatggcatcaagctgaaatcgtgg

SEQ ID NO: 3283639 - DNA, 25 bp, Homo sapien
cagtcggtggtcgtaaatatgtttc

SEQ ID NO: 3283640 - DNA, 25 bp, Homo sapien
gctaccaagactggaatagccaggg

SEQ ID NO: 3283641 - DNA, 25 bp, Homo sapien
cgcgctgagtgctctcgggaatctg

SEQ ID NO: 3283642 - DNA, 25 bp, Homo sapien
gctggtcgcggaagactgacggtgg

SEQ ID NO: 3283643 - DNA, 25 bp, Homo sapien
cctgcttgaggctggtcgcggaaga

SEQ ID NO: 3283644 - DNA, 25 bp, Homo sapien
tgccactgggcagataccgcagtga

SEQ ID NO: 3283645 - DNA, 25 bp, Homo sapien
caaggagctgcaaacccaaacgaga

SEQ ID NO: 3283646 - DNA, 25 bp, Homo sapien
aaggagctgcaaacccaaacgagaa

SEQ ID NO: 3283647 - DNA, 25 bp, Homo sapien
ggagctgcaaacccaaacgagaaat

SEQ ID NO: 3283648 - DNA, 25 bp, Homo sapien
aggagctgcaaacccaaacgagaaa

SEQ ID NO: 3283649 - DNA, 25 bp, Homo sapien
tctggtaattgacttagaaggcctt

SEQ ID NO: 3283650 - DNA, 25 bp, Homo sapien
ttctggtaattgacttagaaggcct

SEQ ID NO: 3283651 - DNA, 25 bp, Homo sapien
ggtaattgacttagaaggcctttca

SEQ ID NO: 3283652 - DNA, 25 bp, Homo sapien
aattgacttagaaggcctttcaaag

SEQ ID NO: 3283653 - DNA, 25 bp, Homo sapien
aatctagcgcttctaaatttgtgag

SEQ ID NO: 3283654 - DNA, 25 bp, Homo sapien
gagacttgcgagtccagtgtagtca

SEQ ID NO: 3283655 - DNA, 25 bp, Homo sapien
aatttgtgagacttgcgagtccagt

SEQ ID NO: 3283656 - DNA, 25 bp, Homo sapien
cgagtccagtgtagtcaaattccat

SEQ ID NO: 3283657 - DNA, 25 bp, Homo sapien
ttggattttccacgtctttatccat

SEQ ID NO: 3283658 - DNA, 25 bp, Homo sapien
ccaattaaaagacacagactggcaa

SEQ ID NO: 3283659 - DNA, 25 bp, Homo sapien
ttgcaatcctggtctctgataaaac

SEQ ID NO: 3283660 - DNA, 25 bp, Homo sapien
taaaacgatggaggaagatctacca

SEQ ID NO: 3283661 - DNA, 25 bp, Homo sapien
tttaaatgtcaatggactaaatgct

SEQ ID NO: 3283662 - DNA, 25 bp, Homo sapien
acgaagtttggtcagagcattctcc

SEQ ID NO: 3283663 - DNA, 25 bp, Homo sapien
acaggcaccagggtctaaggcggct

SEQ ID NO: 3283664 - DNA, 25 bp, Homo sapien
gcggacagacgagctgacaggcacc

SEQ ID NO: 3283665 - DNA, 25 bp, Homo sapien
tcagtccggccttgcggtaagcctt

SEQ ID NO: 3283666 - DNA, 25 bp, Homo sapien
tattaccaccccagtttaagagctc

SEQ ID NO: 3283667 - DNA, 25 bp, Homo sapien
aatggtagcagtggcaacttggtag

SEQ ID NO: 3283668 - DNA, 25 bp, Homo sapien
ttttatggaccttgaaattacagcc

SEQ ID NO: 3283669 - DNA, 25 bp, Homo sapien
ctcctcagcagaataaggtttgtaa

SEQ ID NO: 3283670 - DNA, 25 bp, Homo sapien
agggatggctggaagattaactcaa

SEQ ID NO: 3283671 - DNA, 25 bp, Homo sapien
tcacttgctgataagggatataggc

SEQ ID NO: 3283672 - DNA, 25 bp, Homo sapien
tcactgttataagtactgggaatgc

SEQ ID NO: 3283673 - DNA, 25 bp, Homo sapien
ccttgttgattccaaagagtcgtga

SEQ ID NO: 3283674 - DNA, 25 bp, Homo sapien
gaagtataacaaagtcatgctggct

SEQ ID NO: 3283675 - DNA, 25 bp, Homo sapien
tttagtctagcgatatcaccaggcg

SEQ ID NO: 3283676 - DNA, 25 bp, Homo sapien
caccaggcgactttatgaaatgggc

SEQ ID NO: 3283677 - DNA, 25 bp, Homo sapien
gctggctaatatgctaacgtggtcc

SEQ ID NO: 3283678 - DNA, 25 bp, Homo sapien
ttggatatgggaaacatgtctgcct

SEQ ID NO: 3283679 - DNA, 25 bp, Homo sapien
gcattaaccatgtctttccaactga

SEQ ID NO: 3283680 - DNA, 25 bp, Homo sapien
gatctcgatgttgctgacaggacca

SEQ ID NO: 3283681 - DNA, 25 bp, Homo sapien
gacaggaccaaatttgataaggtaa

SEQ ID NO: 3283682 - DNA, 25 bp, Homo sapien
ggagcccctatgtctggcagaacag

SEQ ID NO: 3283683 - DNA, 25 bp, Homo sapien
ggtactaagtgaactggagccccta

SEQ ID NO: 3283684 - DNA, 25 bp, Homo sapien
gcctggaactatggtatggctcaca

SEQ ID NO: 3283685 - DNA, 25 bp, Homo sapien
tacagcaacatcaaagtatgcctgg

SEQ ID NO: 3283686 - DNA, 25 bp, Homo sapien
aaggtgttgaagctcgcgtggcaca

SEQ ID NO: 3283687 - DNA, 25 bp, Homo sapien
caagaacttcgtaaagtcattaagg

SEQ ID NO: 3283688 - DNA, 25 bp, Homo sapien
taaatgcaggtcttagccattgttt

SEQ ID NO: 3283689 - DNA, 25 bp, Homo sapien
ggaggaagtaagttaccaacttgca

SEQ ID NO: 3283690 - DNA, 25 bp, Homo sapien
ttgttccagcattgcacagtcccac

SEQ ID NO: 3283691 - DNA, 25 bp, Homo sapien
caaatgtgtatatggagaagagggc

SEQ ID NO: 3283692 - DNA, 25 bp, Homo sapien
gagtggttgtcctatgagcaatgca

SEQ ID NO: 3283693 - DNA, 25 bp, Homo sapien
caagcaactgttttgagaacccaga

SEQ ID NO: 3283694 - DNA, 25 bp, Homo sapien
gccaggtattaacagagctgatatt

SEQ ID NO: 3283695 - DNA, 25 bp, Homo sapien
tagataagatctaggaccaaaggag

SEQ ID NO: 3283696 - DNA, 25 bp, Homo sapien
gtgccttgatcaaggtccaagccag

SEQ ID NO: 3283697 - DNA, 25 bp, Homo sapien
caaattccctctcaaagtgccaaac

SEQ ID NO: 3283698 - DNA, 25 bp, Homo sapien
tttgtcttgtaataaccctgcgagg

SEQ ID NO: 3283699 - DNA, 25 bp, Homo sapien
attatccacgaagcctttaatagtg

SEQ ID NO: 3283700 - DNA, 25 bp, Homo sapien
gaggatacgatgtcttcacccaggc

SEQ ID NO: 3283701 - DNA, 25 bp, Homo sapien
ttcttatcactgttacacacagagg

SEQ ID NO: 3283702 - DNA, 25 bp, Homo sapien
atcagtggaagtgctggagggccag

SEQ ID NO: 3283703 - DNA, 25 bp, Homo sapien
tggagggccagaagtcaaagggcca

SEQ ID NO: 3283704 - DNA, 25 bp, Homo sapien
aagtgctggagggccagaagtcaaa

SEQ ID NO: 3283705 - DNA, 25 bp, Homo sapien
gtggaagtgctggagggccagaagt

SEQ ID NO: 3283706 - DNA, 25 bp, Homo sapien
cactactgctacaatccatggcttc

SEQ ID NO: 3283707 - DNA, 25 bp, Homo sapien
actgtagctgccacaccatagtctc

SEQ ID NO: 3283708 - DNA, 25 bp, Homo sapien
tggcttcaagatgccatcactactg

SEQ ID NO: 3283709 - DNA, 25 bp, Homo sapien
tgccacaccatagtctccctgctcc

SEQ ID NO: 3283710 - DNA, 25 bp, Homo sapien
acgacagctggtttagattttttga

SEQ ID NO: 3283711 - DNA, 25 bp, Homo sapien
aaaggacgacagctggtttagattt

SEQ ID NO: 3283712 - DNA, 25 bp, Homo sapien
aggacgacagctggtttagattttt

SEQ ID NO: 3283713 - DNA, 25 bp, Homo sapien
gacgacagctggtttagattttttg

SEQ ID NO: 3283714 - DNA, 25 bp, Homo sapien
gcaggaagtgaagacgtgctccttc

SEQ ID NO: 3283715 - DNA, 25 bp, Homo sapien
tcccatatgtagcaacccaaacata

SEQ ID NO: 3283716 - DNA, 25 bp, Homo sapien
ttagatgaccgtggatgtggaagca

SEQ ID NO: 3283717 - DNA, 25 bp, Homo sapien
aagacgtgctccttcccatatgtag

SEQ ID NO: 3283718 - DNA, 25 bp, Homo sapien
tcaaagttaagtgaggggccgagca

SEQ ID NO: 3283719 - DNA, 25 bp, Homo sapien
aagttaagtgaggggccgagcatgg

SEQ ID NO: 3283720 - DNA, 25 bp, Homo sapien
gttaagtgaggggccgagcatggtg

SEQ ID NO: 3283721 - DNA, 25 bp, Homo sapien
caaagttaagtgaggggccgagcat

SEQ ID NO: 3283722 - DNA, 25 bp, Homo sapien
cattagtgagggtggatcttgtcta

SEQ ID NO: 3283723 - DNA, 25 bp, Homo sapien
cctcaacggattgggtgatgccacc

SEQ ID NO: 3283724 - DNA, 25 bp, Homo sapien
ccatatgcaagctagagaaccagga

SEQ ID NO: 3283725 - DNA, 25 bp, Homo sapien
cacttcagtgtgaagggcagaagaa

SEQ ID NO: 3283726 - DNA, 25 bp, Homo sapien
tatgggatgacttcctaacattgcc

SEQ ID NO: 3283727 - DNA, 25 bp, Homo sapien
tgtgacttagaatacccagcctcct

SEQ ID NO: 3283728 - DNA, 25 bp, Homo sapien
cagtaaaggtgatcagaggtcattc

SEQ ID NO: 3283729 - DNA, 25 bp, Homo sapien
ctactccatagcagagcagcgccat

SEQ ID NO: 3283730 - DNA, 25 bp, Homo sapien
tcattggacttgtttaggtggcagc

SEQ ID NO: 3283731 - DNA, 25 bp, Homo sapien
tatttggtcattgtccttcggagct

SEQ ID NO: 3283732 - DNA, 25 bp, Homo sapien
tgaagagttatcacatgcatgagac

SEQ ID NO: 3283733 - DNA, 25 bp, Homo sapien
aactagactgtttctactccagagg

SEQ ID NO: 3283734 - DNA, 25 bp, Homo sapien
caagtaatcaggttgccagtcaaac

SEQ ID NO: 3283735 - DNA, 25 bp, Homo sapien
ctgccaagtaatcaggttgccagtc

SEQ ID NO: 3283736 - DNA, 25 bp, Homo sapien
taatcaggttgccagtcaaaccgta

SEQ ID NO: 3283737 - DNA, 25 bp, Homo sapien
tcaggttgccagtcaaaccgtacac

SEQ ID NO: 3283738 - DNA, 25 bp, Homo sapien
tagtttcatagttctaggagttaga

SEQ ID NO: 3283739 - DNA, 25 bp, Homo sapien
caaatatagtgtacgagggtccctt

SEQ ID NO: 3283740 - DNA, 25 bp, Homo sapien
tttaacttgatgtgaacctatttta

SEQ ID NO: 3283741 - DNA, 25 bp, Homo sapien
ttattattgtctcacttttggatag

SEQ ID NO: 3283742 - DNA, 25 bp, Homo sapien
gaatgggtacaaccaatagagcagt

SEQ ID NO: 3283743 - DNA, 25 bp, Homo sapien
ccataaaacagctcattaaggcatg

SEQ ID NO: 3283744 - DNA, 25 bp, Homo sapien
tggatggccgttgcacagccatttt

SEQ ID NO: 3283745 - DNA, 25 bp, Homo sapien
aagagtaatcttgactggatggccg

SEQ ID NO: 3283746 - DNA, 25 bp, Homo sapien
ttctctctcagtgcgcctgcatgtg

SEQ ID NO: 3283747 - DNA, 25 bp, Homo sapien
tgtttactgcagaaagcattggttc

SEQ ID NO: 3283748 - DNA, 25 bp, Homo sapien
tccccataaatcataataggttgct

SEQ ID NO: 3283749 - DNA, 25 bp, Homo sapien
tccttatcagatggtgccttatgct

SEQ ID NO: 3283750 - DNA, 25 bp, Homo sapien
cctgctctatccagggggaaattaa

SEQ ID NO: 3283751 - DNA, 25 bp, Homo sapien
ctgctctatccagggggaaattaag

SEQ ID NO: 3283752 - DNA, 25 bp, Homo sapien
actgggtggcaacagtgactctggc

SEQ ID NO: 3283753 - DNA, 25 bp, Homo sapien
ggcattgaccttgactatatcttct

SEQ ID NO: 3283754 - DNA, 25 bp, Homo sapien
gatatgtaacttctgactgggtggc

SEQ ID NO: 3283755 - DNA, 25 bp, Homo sapien
ggtaaaacttcagctgatagtgatc

SEQ ID NO: 3283756 - DNA, 25 bp, Homo sapien
ggttccaggtctggagctttaggta

SEQ ID NO: 3283757 - DNA, 25 bp, Homo sapien
cagggtagcgactgatgggagcttt

SEQ ID NO: 3283758 - DNA, 25 bp, Homo sapien
ccacaggttcacagggtagcgactg

SEQ ID NO: 3283759 - DNA, 25 bp, Homo sapien
ccaggtctggagctttaggtattgc

SEQ ID NO: 3283760 - DNA, 25 bp, Homo sapien
gggcagtcaactggccagtgccaac

SEQ ID NO: 3283761 - DNA, 25 bp, Homo sapien
cagtcaactggccagtgccaacggt

SEQ ID NO: 3283762 - DNA, 25 bp, Homo sapien
gtcaactggccagtgccaacggtca

SEQ ID NO: 3283763 - DNA, 25 bp, Homo sapien
tcaactggccagtgccaacggtcat

SEQ ID NO: 3283764 - DNA, 25 bp, Homo sapien
aaagaattggatgagacacacaaat

SEQ ID NO: 3283765 - DNA, 25 bp, Homo sapien
tattaagcaaagaatataccagaga

SEQ ID NO: 3283766 - DNA, 25 bp, Homo sapien
ccaccccacaagatttattaagcaa

SEQ ID NO: 3283767 - DNA, 25 bp, Homo sapien
tatgttaccagattggaagttggga

SEQ ID NO: 3283768 - DNA, 25 bp, Homo sapien
gggcggcgtttgttccccgcacgca

SEQ ID NO: 3283769 - DNA, 25 bp, Homo sapien
ctcccgccgacaggaggaagaggat

SEQ ID NO: 3283770 - DNA, 25 bp, Homo sapien
gcacgcagtaggtgatccacacctc

SEQ ID NO: 3283771 - DNA, 25 bp, Homo sapien
tccgggccgttgcatttccgggcac

SEQ ID NO: 3283772 - DNA, 25 bp, Homo sapien
gtcaacacccgacggtaaagttgca

SEQ ID NO: 3283773 - DNA, 25 bp, Homo sapien
cggtaaagttgcaaaccggagattg

SEQ ID NO: 3283774 - DNA, 25 bp, Homo sapien
agagcttgggccgactcgtcaagga

SEQ ID NO: 3283775 - DNA, 25 bp, Homo sapien
ccggagattgggtggaggagagctt

SEQ ID NO: 3283776 - DNA, 25 bp, Homo sapien
ctgttgaccaatggatagatttaaa

SEQ ID NO: 3283777 - DNA, 25 bp, Homo sapien
ttgaccaatggatagatttaaacat

SEQ ID NO: 3283778 - DNA, 25 bp, Homo sapien
tgttgaccaatggatagatttaaac

SEQ ID NO: 3283779 - DNA, 25 bp, Homo sapien
gttgaccaatggatagatttaaaca

SEQ ID NO: 3283780 - DNA, 25 bp, Homo sapien
cagctaacgggtttctttgttgtcg

SEQ ID NO: 3283781 - DNA, 25 bp, Homo sapien
gtttatcttcttaagccctgtgcac

SEQ ID NO: 3283782 - DNA, 25 bp, Homo sapien
cacagctaacgggtttctttgttgt

SEQ ID NO: 3283783 - DNA, 25 bp, Homo sapien
tcttcttaagccctgtgcacacata

SEQ ID NO: 3283784 - DNA, 25 bp, Homo sapien
gttaatctcttgcatacattggtac

SEQ ID NO: 3283785 - DNA, 25 bp, Homo sapien
gaacgagagatagaacgactgtcag

SEQ ID NO: 3283786 - DNA, 25 bp, Homo sapien
cagattgagctaagagaacgagaga

SEQ ID NO: 3283787 - DNA, 25 bp, Homo sapien
ctttggatggtggtcggtcccctga

SEQ ID NO: 3283788 - DNA, 25 bp, Homo sapien
ttttggtatgacagagttgcctggg

SEQ ID NO: 3283789 - DNA, 25 bp, Homo sapien
tgacctaaggctgaaagagcaggag

SEQ ID NO: 3283790 - DNA, 25 bp, Homo sapien
aattttggtatgacagagttgcctg

SEQ ID NO: 3283791 - DNA, 25 bp, Homo sapien
tcctttgccatgcatttgacctaag

SEQ ID NO: 3283792 - DNA, 25 bp, Homo sapien
ggtggacatgttggataccatggaa

SEQ ID NO: 3283793 - DNA, 25 bp, Homo sapien
catgttggataccatggaaagtact

SEQ ID NO: 3283794 - DNA, 25 bp, Homo sapien
cgtggtggacatgttggataccatg

SEQ ID NO: 3283795 - DNA, 25 bp, Homo sapien
gttggataccatggaaagtacttca

SEQ ID NO: 3283796 - DNA, 25 bp, Homo sapien
tcagatgcttcataaccgtgctgaa

SEQ ID NO: 3283797 - DNA, 25 bp, Homo sapien
ctgggaggtcaaagcccatcaagct

SEQ ID NO: 3283798 - DNA, 25 bp, Homo sapien
gaaagcagctcagttcgactggaac

SEQ ID NO: 3283799 - DNA, 25 bp, Homo sapien
caagatttgttagatagatttcaga

SEQ ID NO: 3283800 - DNA, 25 bp, Homo sapien
tcaaccagaagggtctcattgccct

SEQ ID NO: 3283801 - DNA, 25 bp, Homo sapien
tagtcagagtaagcatattcaacca

SEQ ID NO: 3283802 - DNA, 25 bp, Homo sapien
gaccgtctcttgataaggtaccatg

SEQ ID NO: 3283803 - DNA, 25 bp, Homo sapien
gtagatcctatagccaaataagccc

SEQ ID NO: 3283804 - DNA, 25 bp, Homo sapien
gatgcgtcgacatggtcttgctaca

SEQ ID NO: 3283805 - DNA, 25 bp, Homo sapien
taacagagaacgagcaatccaagag

SEQ ID NO: 3283806 - DNA, 25 bp, Homo sapien
tggtcttgctacaccaccccttagt

SEQ ID NO: 3283807 - DNA, 25 bp, Homo sapien
gcaatccaagagatgcgtcgacatg

SEQ ID NO: 3283808 - DNA, 25 bp, Homo sapien
gatctacttttctggtctctatgaa

SEQ ID NO: 3283809 - DNA, 25 bp, Homo sapien
ccagaccttaaccttcccagctcct

SEQ ID NO: 3283810 - DNA, 25 bp, Homo sapien
taacttcagatctacttttctggtc

SEQ ID NO: 3283811 - DNA, 25 bp, Homo sapien
ttcccagctcctagtaacttcagat

SEQ ID NO: 3283812 - DNA, 25 bp, Homo sapien
gggcagagacccaatatatacagtc

SEQ ID NO: 3283813 - DNA, 25 bp, Homo sapien
cctcttgctcctaggcgataaatct

SEQ ID NO: 3283814 - DNA, 25 bp, Homo sapien
gcctactgcatacccaggctatatg

SEQ ID NO: 3283815 - DNA, 25 bp, Homo sapien
caaatggtacacctatataggagac

SEQ ID NO: 3283816 - DNA, 25 bp, Homo sapien
ttttccccaaaagcaacagcaagac

SEQ ID NO: 3283817 - DNA, 25 bp, Homo sapien
tgtctccaccttttccccaaaagca

SEQ ID NO: 3283818 - DNA, 25 bp, Homo sapien
ccttttccccaaaagcaacagcaag

SEQ ID NO: 3283819 - DNA, 25 bp, Homo sapien
tccccaaaagcaacagcaagacata

SEQ ID NO: 3283820 - DNA, 25 bp, Homo sapien
tatggagcttgacctagatttgcca

SEQ ID NO: 3283821 - DNA, 25 bp, Homo sapien
gacaaatccctgaacataggtgcca

SEQ ID NO: 3283822 - DNA, 25 bp, Homo sapien
tcatggtgggatatggacaaatccc

SEQ ID NO: 3283823 - DNA, 25 bp, Homo sapien
tgccaggcacctttcttaactgact

SEQ ID NO: 3283824 - DNA, 25 bp, Homo sapien
ctgaaaatcaaaggcccgcagcact

SEQ ID NO: 3283825 - DNA, 25 bp, Homo sapien
tagacatcattgtccttgcacatcc

SEQ ID NO: 3283826 - DNA, 25 bp, Homo sapien
tctagttgtgatcagtagccatctc

SEQ ID NO: 3283827 - DNA, 25 bp, Homo sapien
gacatgaaccatctctaccctttag

SEQ ID NO: 3283828 - DNA, 25 bp, Homo sapien
gccacggccgactgagaggcgggtg

SEQ ID NO: 3283829 - DNA, 25 bp, Homo sapien
ggccgactgagaggcgggtgcgctg

SEQ ID NO: 3283830 - DNA, 25 bp, Homo sapien
caatggaggccacggccgactgaga

SEQ ID NO: 3283831 - DNA, 25 bp, Homo sapien
agcaatggaggccacggccgactga

SEQ ID NO: 3283832 - DNA, 25 bp, Homo sapien
tagtttctgagctaacataagatct

SEQ ID NO: 3283833 - DNA, 25 bp, Homo sapien
gaagctagagtggtagactgtagtt

SEQ ID NO: 3283834 - DNA, 25 bp, Homo sapien
gagctaacataagatctgatctctg

SEQ ID NO: 3283835 - DNA, 25 bp, Homo sapien
ttaaactgatttcctgcaaattctg

SEQ ID NO: 3283836 - DNA, 25 bp, Homo sapien
gccagtgaaactagccctgactgaa

SEQ ID NO: 3283837 - DNA, 25 bp, Homo sapien
agaaccgaatgccttacaaatttgg

SEQ ID NO: 3283838 - DNA, 25 bp, Homo sapien
cttctgctgacgtggaatccaggtt

SEQ ID NO: 3283839 - DNA, 25 bp, Homo sapien
ccttgaagacggttgcaaggagttt

SEQ ID NO: 3283840 - DNA, 25 bp, Homo sapien
tctgccagtccctgtcgtaatgtga

SEQ ID NO: 3283841 - DNA, 25 bp, Homo sapien
ccagtccctgtcgtaatgtgattta

SEQ ID NO: 3283842 - DNA, 25 bp, Homo sapien
gatagaaacacctcctgggtctttg

SEQ ID NO: 3283843 - DNA, 25 bp, Homo sapien
tcccttttgctgaagatagaaacac

SEQ ID NO: 3283844 - DNA, 25 bp, Homo sapien
tatatggataaagggtgtctcttag

SEQ ID NO: 3283845 - DNA, 25 bp, Homo sapien
tttattcataaacagactccaagtt

SEQ ID NO: 3283846 - DNA, 25 bp, Homo sapien
tgaccagttctcatctgggagatca

SEQ ID NO: 3283847 - DNA, 25 bp, Homo sapien
gagtctccattgaccagttctcatc

SEQ ID NO: 3283848 - DNA, 25 bp, Homo sapien
cacttggctggtggtggaaggtgcc

SEQ ID NO: 3283849 - DNA, 25 bp, Homo sapien
gcactgcaggtccagagaacggagc

SEQ ID NO: 3283850 - DNA, 25 bp, Homo sapien
agaacggagcaagaagtgctgagca

SEQ ID NO: 3283851 - DNA, 25 bp, Homo sapien
tcaggaaacgaagtctgcagacact

SEQ ID NO: 3283852 - DNA, 25 bp, Homo sapien
aaacttcaatgaaaaccgtgcagta

SEQ ID NO: 3283853 - DNA, 25 bp, Homo sapien
gaacatgagcattagaagaatggct

SEQ ID NO: 3283854 - DNA, 25 bp, Homo sapien
gcgttcaaatcgttctcgtgtctca

SEQ ID NO: 3283855 - DNA, 25 bp, Homo sapien
tccaacgacggaaggcaagtgtagg

SEQ ID NO: 3283856 - DNA, 25 bp, Homo sapien
cagtggcaaagcaaggtgacgagac

SEQ ID NO: 3283857 - DNA, 25 bp, Homo sapien
tgccaactcattaggaaggtcagct

SEQ ID NO: 3283858 - DNA, 25 bp, Homo sapien
gatcagatgtcacgtctgccaggaa

SEQ ID NO: 3283859 - DNA, 25 bp, Homo sapien
taagggtgttttatgacgcaagtcc

SEQ ID NO: 3283860 - DNA, 25 bp, Homo sapien
gactcttcactctcttccattctaa

SEQ ID NO: 3283861 - DNA, 25 bp, Homo sapien
acagactcttcactctcttccattc

SEQ ID NO: 3283862 - DNA, 25 bp, Homo sapien
actcttcactctcttccattctaac

SEQ ID NO: 3283863 - DNA, 25 bp, Homo sapien
agactcttcactctcttccattcta

SEQ ID NO: 3283864 - DNA, 25 bp, Homo sapien
aaatctccagtgtgactaatgactc

SEQ ID NO: 3283865 - DNA, 25 bp, Homo sapien
tccagtgtgactaatgactctatga

SEQ ID NO: 3283866 - DNA, 25 bp, Homo sapien
cccaaatctccagtgtgactaatga

SEQ ID NO: 3283867 - DNA, 25 bp, Homo sapien
gtgtgactaatgactctatgatcag

SEQ ID NO: 3283868 - DNA, 25 bp, Homo sapien
cacgttcccagtgggttgtgctcca

SEQ ID NO: 3283869 - DNA, 25 bp, Homo sapien
gaactgcacgttcccagtgggttgt

SEQ ID NO: 3283870 - DNA, 25 bp, Homo sapien
caccttgggaactgcacgttcccag

SEQ ID NO: 3283871 - DNA, 25 bp, Homo sapien
ggttgtgctccacgagctctgtgct

SEQ ID NO: 3283872 - DNA, 25 bp, Homo sapien
tttgaactgctcctttttgctcctg

SEQ ID NO: 3283873 - DNA, 25 bp, Homo sapien
tatatctctgtgatgtcactggtca

SEQ ID NO: 3283874 - DNA, 25 bp, Homo sapien
ttatatatctctgtgatgtcactgg

SEQ ID NO: 3283875 - DNA, 25 bp, Homo sapien
tttgctcctgtagccttttttatat

SEQ ID NO: 3283876 - DNA, 25 bp, Homo sapien
ccagagtctgggtcatgcaccaaca

SEQ ID NO: 3283877 - DNA, 25 bp, Homo sapien
tcatgtgtctacaccattggaggca

SEQ ID NO: 3283878 - DNA, 25 bp, Homo sapien
tgagctccagaacggatgtgctctg

SEQ ID NO: 3283879 - DNA, 25 bp, Homo sapien
cttctccccaagcattgtttatatc

SEQ ID NO: 3283880 - DNA, 25 bp, Homo sapien
ctaagagtgatttgcctgtcaccat

SEQ ID NO: 3283881 - DNA, 25 bp, Homo sapien
tgatctaagagtgatttgcctgtca

SEQ ID NO: 3283882 - DNA, 25 bp, Homo sapien
gatctaagagtgatttgcctgtcac

SEQ ID NO: 3283883 - DNA, 25 bp, Homo sapien
tctaagagtgatttgcctgtcacca

SEQ ID NO: 3283884 - DNA, 25 bp, Homo sapien
cagagatgaggcattcaacatccca

SEQ ID NO: 3283885 - DNA, 25 bp, Homo sapien
taggacataattactgaagcctgcc

SEQ ID NO: 3283886 - DNA, 25 bp, Homo sapien
gataaatccttaacttggagcccac

SEQ ID NO: 3283887 - DNA, 25 bp, Homo sapien
caagtaagtagttaagagccaaggc

SEQ ID NO: 3283888 - DNA, 25 bp, Homo sapien
ggagtaatcctggtagaatccacgt

SEQ ID NO: 3283889 - DNA, 25 bp, Homo sapien
gtagaatccacgtagctctgaagag

SEQ ID NO: 3283890 - DNA, 25 bp, Homo sapien
gggtattctgaagagcgcaggttct

SEQ ID NO: 3283891 - DNA, 25 bp, Homo sapien
cacatgccttctggtttgactggag

SEQ ID NO: 3283892 - DNA, 25 bp, Homo sapien
tgtgaatagttatcagtggaggagc

SEQ ID NO: 3283893 - DNA, 25 bp, Homo sapien
atagttatcagtggaggagcaaaag

SEQ ID NO: 3283894 - DNA, 25 bp, Homo sapien
ccaggaagacacagtatcgaagaaa

SEQ ID NO: 3283895 - DNA, 25 bp, Homo sapien
gagtatgtaaaaacaaccaggaaga

SEQ ID NO: 3283896 - DNA, 25 bp, Homo sapien
tcatctcttggggaggctgatcaca

SEQ ID NO: 3283897 - DNA, 25 bp, Homo sapien
taacccaagatgagttgcacagatg

SEQ ID NO: 3283898 - DNA, 25 bp, Homo sapien
tccatctgccagacgtaacccaaga

SEQ ID NO: 3283899 - DNA, 25 bp, Homo sapien
cagcagcgacttgaaatgagattcc

SEQ ID NO: 3283900 - DNA, 25 bp, Homo sapien
cttctgtccttggtgaaatagaggc

SEQ ID NO: 3283901 - DNA, 25 bp, Homo sapien
aacagagaactgtaagtagttgtat

SEQ ID NO: 3283902 - DNA, 25 bp, Homo sapien
gaactgtaagtagttgtatcttgtc

SEQ ID NO: 3283903 - DNA, 25 bp, Homo sapien
gtaagtagttgtatcttgtctgtcc

SEQ ID NO: 3283904 - DNA, 25 bp, Homo sapien
gtagttgtatcttgtctgtcctcca

SEQ ID NO: 3283905 - DNA, 25 bp, Homo sapien
tctcttccagcaaacgatcatctta

SEQ ID NO: 3283906 - DNA, 25 bp, Homo sapien
gatcaagcctatagactgtacaggc

SEQ ID NO: 3283907 - DNA, 25 bp, Homo sapien
aacgatcatcttagtacttctaggg

SEQ ID NO: 3283908 - DNA, 25 bp, Homo sapien
gcttgatttaccagcagctttggat

SEQ ID NO: 3283909 - DNA, 25 bp, Homo sapien
tccaaggaacgatgaagaaggctat

SEQ ID NO: 3283910 - DNA, 25 bp, Homo sapien
gacaaggacatagtttaccaaggct

SEQ ID NO: 3283911 - DNA, 25 bp, Homo sapien
tgaactgcagttcagaggtccaagg

SEQ ID NO: 3283912 - DNA, 25 bp, Homo sapien
ttactgtcatagaactggaacccca

SEQ ID NO: 3283913 - DNA, 25 bp, Homo sapien
caaatgcccatcttctcttctccat

SEQ ID NO: 3283914 - DNA, 25 bp, Homo sapien
attccaaatgcccatcttctcttct

SEQ ID NO: 3283915 - DNA, 25 bp, Homo sapien
cctgatgctgccaattccaaatgcc

SEQ ID NO: 3283916 - DNA, 25 bp, Homo sapien
tccaaatgcccatcttctcttctcc

SEQ ID NO: 3283917 - DNA, 25 bp, Homo sapien
tttgacagctctgtaatttaattgt

SEQ ID NO: 3283918 - DNA, 25 bp, Homo sapien
tatgtctggccttgtaaatatggtg

SEQ ID NO: 3283919 - DNA, 25 bp, Homo sapien
tctggccttgtaaatatggtgaata

SEQ ID NO: 3283920 - DNA, 25 bp, Homo sapien
ctttttgacagctctgtaatttaat

SEQ ID NO: 3283921 - DNA, 25 bp, Homo sapien
gacaggcatcggttggaatcatagt

SEQ ID NO: 3283922 - DNA, 25 bp, Homo sapien
catctgctaaactgacaggcatcgg

SEQ ID NO: 3283923 - DNA, 25 bp, Homo sapien
gaatcatagtcccagtaactgtagg

SEQ ID NO: 3283924 - DNA, 25 bp, Homo sapien
tcaagaccaaatagagggatacact

SEQ ID NO: 3283925 - DNA, 25 bp, Homo sapien
agttacactagctccttcactgcag

SEQ ID NO: 3283926 - DNA, 25 bp, Homo sapien
acctgtattcttattactgatcaag

SEQ ID NO: 3283927 - DNA, 25 bp, Homo sapien
tggagggccagttacactagctcct

SEQ ID NO: 3283928 - DNA, 25 bp, Homo sapien
gctttgatcagcaaccatacctgta

SEQ ID NO: 3283929 - DNA, 25 bp, Homo sapien
aaggttggagtcatattcattaagg

SEQ ID NO: 3283930 - DNA, 25 bp, Homo sapien
ggttggagtcatattcattaagggc

SEQ ID NO: 3283931 - DNA, 25 bp, Homo sapien
gtcatattcattaagggcaggaatc

SEQ ID NO: 3283932 - DNA, 25 bp, Homo sapien
tggagtcatattcattaagggcagg

SEQ ID NO: 3283933 - DNA, 25 bp, Homo sapien
caaactcagccagggataaggtgta

SEQ ID NO: 3283934 - DNA, 25 bp, Homo sapien
taagtccattacatgccccagctgc

SEQ ID NO: 3283935 - DNA, 25 bp, Homo sapien
caccacattaattgccctgggcagg

SEQ ID NO: 3283936 - DNA, 25 bp, Homo sapien
gattcttggcacttaggacctgtca

SEQ ID NO: 3283937 - DNA, 25 bp, Homo sapien
gggatgcatgcacagtcacagggcg

SEQ ID NO: 3283938 - DNA, 25 bp, Homo sapien
catgcacagtcacagggcgggcagt

SEQ ID NO: 3283939 - DNA, 25 bp, Homo sapien
atgcatgcacagtcacagggcgggc

SEQ ID NO: 3283940 - DNA, 25 bp, Homo sapien
tgtctgtaactgcagggtcgggagg

SEQ ID NO: 3283941 - DNA, 25 bp, Homo sapien
ggaccatgataatctccatatcgtt

SEQ ID NO: 3283942 - DNA, 25 bp, Homo sapien
catgataatctccatatcgttccag

SEQ ID NO: 3283943 - DNA, 25 bp, Homo sapien
aatctccatatcgttccagttgtag

SEQ ID NO: 3283944 - DNA, 25 bp, Homo sapien
tgataatctccatatcgttccagtt

SEQ ID NO: 3283945 - DNA, 25 bp, Homo sapien
gaaatgcccaagcaagcacttctct

SEQ ID NO: 3283946 - DNA, 25 bp, Homo sapien
atgcccaagcaagcacttctctgag

SEQ ID NO: 3283947 - DNA, 25 bp, Homo sapien
aagagaaatgcccaagcaagcactt

SEQ ID NO: 3283948 - DNA, 25 bp, Homo sapien
gagaaatgcccaagcaagcacttct

SEQ ID NO: 3283949 - DNA, 25 bp, Homo sapien
ctgaggactgagcaccatgcgtcgg

SEQ ID NO: 3283950 - DNA, 25 bp, Homo sapien
tcgaggacagtgcttcgtctggaca

SEQ ID NO: 3283951 - DNA, 25 bp, Homo sapien
tgtagggcatgtcttcgaggacagt

SEQ ID NO: 3283952 - DNA, 25 bp, Homo sapien
gaaactgtagccctcctcttcgtca

SEQ ID NO: 3283953 - DNA, 25 bp, Homo sapien
tatgctcgctcaatatgcaatgtgc

SEQ ID NO: 3283954 - DNA, 25 bp, Homo sapien
gctctgtgcagagggaattacatcc

SEQ ID NO: 3283955 - DNA, 25 bp, Homo sapien
gattcttactccgaaatataggtac

SEQ ID NO: 3283956 - DNA, 25 bp, Homo sapien
tatttagagtcacatgtccagtagc

SEQ ID NO: 3283957 - DNA, 25 bp, Homo sapien
taacctctgttcatagacttatata

SEQ ID NO: 3283958 - DNA, 25 bp, Homo sapien
caaggttatagatgattaacctctg

SEQ ID NO: 3283959 - DNA, 25 bp, Homo sapien
tgattaacctctgttcatagactta

SEQ ID NO: 3283960 - DNA, 25 bp, Homo sapien
tagatgattaacctctgttcataga

SEQ ID NO: 3283961 - DNA, 25 bp, Homo sapien
ggaatttgatttcgatgaccaactg

SEQ ID NO: 3283962 - DNA, 25 bp, Homo sapien
aattatcatttagccagttatctgc

SEQ ID NO: 3283963 - DNA, 25 bp, Homo sapien
ccaacagtaaagtagagacttaatg

SEQ ID NO: 3283964 - DNA, 25 bp, Homo sapien
gatcttcggcactgatggaatttga

SEQ ID NO: 3283965 - DNA, 25 bp, Homo sapien
aaaacccattgcaagatgagcaaaa

SEQ ID NO: 3283966 - DNA, 25 bp, Homo sapien
aacccattgcaagatgagcaaaaga

SEQ ID NO: 3283967 - DNA, 25 bp, Homo sapien
aaaagtgagttaggcatgtgagcac

SEQ ID NO: 3283968 - DNA, 25 bp, Homo sapien
agggccagaccctggtgaaatgaaa

SEQ ID NO: 3283969 - DNA, 25 bp, Homo sapien
taaacctacggcacttagtattcca

SEQ ID NO: 3283970 - DNA, 25 bp, Homo sapien
agtattccaaggaggtctcccatct

SEQ ID NO: 3283971 - DNA, 25 bp, Homo sapien
gcacttagtattccaaggaggtctc

SEQ ID NO: 3283972 - DNA, 25 bp, Homo sapien
cttagtattccaaggaggtctccca

SEQ ID NO: 3283973 - DNA, 25 bp, Homo sapien
cagctatcaatcatctgagcatccc

SEQ ID NO: 3283974 - DNA, 25 bp, Homo sapien
taaccatcacacctaattaaacaaa

SEQ ID NO: 3283975 - DNA, 25 bp, Homo sapien
tgtcgttcctatgggaagtaaaata

SEQ ID NO: 3283976 - DNA, 25 bp, Homo sapien
taactccttgtaaaagcttctgtcg

SEQ ID NO: 3283977 - DNA, 25 bp, Homo sapien
taagtccacatgatgtataatggta

SEQ ID NO: 3283978 - DNA, 25 bp, Homo sapien
aataagtccacatgatgtataatgg

SEQ ID NO: 3283979 - DNA, 25 bp, Homo sapien
ccacatgatgtataatggtaaaata

SEQ ID NO: 3283980 - DNA, 25 bp, Homo sapien
gtccacatgatgtataatggtaaaa

SEQ ID NO: 3283981 - DNA, 25 bp, Homo sapien
gacaataaacataattatctctaca

SEQ ID NO: 3283982 - DNA, 25 bp, Homo sapien
ttatttttgattgccacccaataaa

SEQ ID NO: 3283983 - DNA, 25 bp, Homo sapien
tctctacacccaataatgagcattg

SEQ ID NO: 3283984 - DNA, 25 bp, Homo sapien
ttttgattgccacccaataaatcca

SEQ ID NO: 3283985 - DNA, 25 bp, Homo sapien
cactttgcaattgtccactctgaga

SEQ ID NO: 3283986 - DNA, 25 bp, Homo sapien
tagataaagcaatcatgggaaccaa

SEQ ID NO: 3283987 - DNA, 25 bp, Homo sapien
ggtccactggtagagaactgccaaa

SEQ ID NO: 3283988 - DNA, 25 bp, Homo sapien
caaacggtgttgcatagacccttga

SEQ ID NO: 3283989 - DNA, 25 bp, Homo sapien
tcaggacactggtctaagcaaagct

SEQ ID NO: 3283990 - DNA, 25 bp, Homo sapien
taaatccacgtagttacagccaatg

SEQ ID NO: 3283991 - DNA, 25 bp, Homo sapien
gaagaataaaccagacccctctctc

SEQ ID NO: 3283992 - DNA, 25 bp, Homo sapien
acataagggaatcacttcaggacac

SEQ ID NO: 3283993 - DNA, 25 bp, Homo sapien
gaagagtggttttccacaggaatgt

SEQ ID NO: 3283994 - DNA, 25 bp, Homo sapien
caatacaaatatactgtgagcaaca

SEQ ID NO: 3283995 - DNA, 25 bp, Homo sapien
tctccaaagtgagtaaagcagagta

SEQ ID NO: 3283996 - DNA, 25 bp, Homo sapien
taaagcagagtaaattcccatctac

SEQ ID NO: 3283997 - DNA, 25 bp, Homo sapien
ggaatcaggttcaaacacggagagg

SEQ ID NO: 3283998 - DNA, 25 bp, Homo sapien
gagaggaaaagacagttcctccaca

SEQ ID NO: 3283999 - DNA, 25 bp, Homo sapien
caaaatacaaatgatgtggaatcag

SEQ ID NO: 3284000 - DNA, 25 bp, Homo sapien
ccagtaaaagtcctcccaatgtagc

SEQ ID NO: 3284001 - DNA, 25 bp, Homo sapien
ccagctaatttgaggtcaatcctta

SEQ ID NO: 3284002 - DNA, 25 bp, Homo sapien
cagctaatttgaggtcaatccttac

SEQ ID NO: 3284003 - DNA, 25 bp, Homo sapien
cccagctaatttgaggtcaatcctt

SEQ ID NO: 3284004 - DNA, 25 bp, Homo sapien
gcccagctaatttgaggtcaatcct

SEQ ID NO: 3284005 - DNA, 25 bp, Homo sapien
cgtgctggtcatgagatccaatgta

SEQ ID NO: 3284006 - DNA, 25 bp, Homo sapien
gacagcatcttcagtagtaaacatc

SEQ ID NO: 3284007 - DNA, 25 bp, Homo sapien
catggttgccgagcttttgacagca

SEQ ID NO: 3284008 - DNA, 25 bp, Homo sapien
tatctaaagcatatgcgtgctggtc

SEQ ID NO: 3284009 - DNA, 25 bp, Homo sapien
taggctctatgataagctcatctgg

SEQ ID NO: 3284010 - DNA, 25 bp, Homo sapien
gatttcatcacgactgtcactgggc

SEQ ID NO: 3284011 - DNA, 25 bp, Homo sapien
taaatcacccagtgttgctaagccc

SEQ ID NO: 3284012 - DNA, 25 bp, Homo sapien
taagaagcgcttcactactgaaaaa

SEQ ID NO: 3284013 - DNA, 25 bp, Homo sapien
tacatagtagagcaccccagaactc

SEQ ID NO: 3284014 - DNA, 25 bp, Homo sapien
tttagtagcaagagagtagtggcca

SEQ ID NO: 3284015 - DNA, 25 bp, Homo sapien
caggagtccttgaccttggtgtagc

SEQ ID NO: 3284016 - DNA, 25 bp, Homo sapien
tctagacagctctgcctatggccgc

SEQ ID NO: 3284017 - DNA, 25 bp, Homo sapien
aaatccagggactcttgaccccaag

SEQ ID NO: 3284018 - DNA, 25 bp, Homo sapien
tcataatagctatacaggtaggttc

SEQ ID NO: 3284019 - DNA, 25 bp, Homo sapien
caatattaatcagcacagggttaac

SEQ ID NO: 3284020 - DNA, 25 bp, Homo sapien
gccaaaggtcacagagttcataata

SEQ ID NO: 3284021 - DNA, 25 bp, Homo sapien
tcccagagtaaaagtcaactgcctt

SEQ ID NO: 3284022 - DNA, 25 bp, Homo sapien
caaaagtgggtattacaaccagcgg

SEQ ID NO: 3284023 - DNA, 25 bp, Homo sapien
gctgaggattcaattcgatctccca

SEQ ID NO: 3284024 - DNA, 25 bp, Homo sapien
caaccagcggtgaagcatctacaca

SEQ ID NO: 3284025 - DNA, 25 bp, Homo sapien
gatggatcttttgacttcccaataa

SEQ ID NO: 3284026 - DNA, 25 bp, Homo sapien
aacacaggatggatcttttgacttc

SEQ ID NO: 3284027 - DNA, 25 bp, Homo sapien
tttctgagtccctatcgcaggtttc

SEQ ID NO: 3284028 - DNA, 25 bp, Homo sapien
tatcgcaggtttcccctcttcagaa

SEQ ID NO: 3284029 - DNA, 25 bp, Homo sapien
tctggaaccactgtttgaaggatgt

SEQ ID NO: 3284030 - DNA, 25 bp, Homo sapien
gatgtaaagatgttccactggcttc

SEQ ID NO: 3284031 - DNA, 25 bp, Homo sapien
cagaagcccaggtactgatgtacca

SEQ ID NO: 3284032 - DNA, 25 bp, Homo sapien
taaaaacctagtggaattcagagac

SEQ ID NO: 3284033 - DNA, 25 bp, Homo sapien
tgaggagccggatggactttaagga

SEQ ID NO: 3284034 - DNA, 25 bp, Homo sapien
ttaaggaatctccaccactatttaa

SEQ ID NO: 3284035 - DNA, 25 bp, Homo sapien
aaggaatctccaccactatttaaga

SEQ ID NO: 3284036 - DNA, 25 bp, Homo sapien
gaggagccggatggactttaaggaa

SEQ ID NO: 3284037 - DNA, 25 bp, Homo sapien
tcttgtttaactcagaaacatcaat

SEQ ID NO: 3284038 - DNA, 25 bp, Homo sapien
cttgtttaactcagaaacatcaatt

SEQ ID NO: 3284039 - DNA, 25 bp, Homo sapien
tggtagagagtcgatcaatacaagc

SEQ ID NO: 3284040 - DNA, 25 bp, Homo sapien
ttttactgaagcatctttagacacc

SEQ ID NO: 3284041 - DNA, 25 bp, Homo sapien
aagctcatccgggactgcatgactt

SEQ ID NO: 3284042 - DNA, 25 bp, Homo sapien
taccatgtaactgcacaagactcca

SEQ ID NO: 3284043 - DNA, 25 bp, Homo sapien
cacaaaaatgtcaggtgtaaataat

SEQ ID NO: 3284044 - DNA, 25 bp, Homo sapien
tactattacttgcacatagggttca

SEQ ID NO: 3284045 - DNA, 25 bp, Homo sapien
agattatcctaatttgccaatgagg

SEQ ID NO: 3284046 - DNA, 25 bp, Homo sapien
gtggtggctgcttctactacttaca

SEQ ID NO: 3284047 - DNA, 25 bp, Homo sapien
aatgttaagacgtttgccatgacgt

SEQ ID NO: 3284048 - DNA, 25 bp, Homo sapien
gccatgacgtttgatctgactgtct

SEQ ID NO: 3284049 - DNA, 25 bp, Homo sapien
aagtctcctgtagctcgcattgtgc

SEQ ID NO: 3284050 - DNA, 25 bp, Homo sapien
gccaagtggtactgtcacttcatca

SEQ ID NO: 3284051 - DNA, 25 bp, Homo sapien
ttcccaagatataaacaccaatgtc

SEQ ID NO: 3284052 - DNA, 25 bp, Homo sapien
atattaaaagatgggctcattttaa

SEQ ID NO: 3284053 - DNA, 25 bp, Homo sapien
gttatctgataaaatcagacacaat

SEQ ID NO: 3284054 - DNA, 25 bp, Homo sapien
aatcagacacaataagttcagtaaa

SEQ ID NO: 3284055 - DNA, 25 bp, Homo sapien
attcttagactactgattaaatata

SEQ ID NO: 3284056 - DNA, 25 bp, Homo sapien
aaattcttagactactgattaaata

SEQ ID NO: 3284057 - DNA, 25 bp, Homo sapien
aattaacacatcagatcatttttct

SEQ ID NO: 3284058 - DNA, 25 bp, Homo sapien
taacacatcagatcatttttcttga

SEQ ID NO: 3284059 - DNA, 25 bp, Homo sapien
tgacttcaactactgttccaagaag

SEQ ID NO: 3284060 - DNA, 25 bp, Homo sapien
gaaatcccagttgtacaggcaattc

SEQ ID NO: 3284061 - DNA, 25 bp, Homo sapien
aagtggaaatcccagttgtacaggc

SEQ ID NO: 3284062 - DNA, 25 bp, Homo sapien
ctctgacttcaactactgttccaag

SEQ ID NO: 3284063 - DNA, 25 bp, Homo sapien
tatttagtacaaaaagttgcagcag

SEQ ID NO: 3284064 - DNA, 25 bp, Homo sapien
tcttggcaccagctatagtaaggaa

SEQ ID NO: 3284065 - DNA, 25 bp, Homo sapien
caaagactgacaagaggaaaaggtt

SEQ ID NO: 3284066 - DNA, 25 bp, Homo sapien
tgttacgctctaattcaaagactga

SEQ ID NO: 3284067 - DNA, 25 bp, Homo sapien
ttgagagtagagttaagagtcttct

SEQ ID NO: 3284068 - DNA, 25 bp, Homo sapien
gcccaacttgatacctctgtgatac

SEQ ID NO: 3284069 - DNA, 25 bp, Homo sapien
tctggaatcctataaatggtcgccc

SEQ ID NO: 3284070 - DNA, 25 bp, Homo sapien
gagtagagttaagagtcttctctgg

SEQ ID NO: 3284071 - DNA, 25 bp, Homo sapien
tcaatgatggaaacgcttcaccacc

SEQ ID NO: 3284072 - DNA, 25 bp, Homo sapien
caccaccaagggctaatactcgaag

SEQ ID NO: 3284073 - DNA, 25 bp, Homo sapien
tagtggctgacaaaacagttgactt

SEQ ID NO: 3284074 - DNA, 25 bp, Homo sapien
ttgacttgataagctgagatccaaa

SEQ ID NO: 3284075 - DNA, 25 bp, Homo sapien
ccatccctcaataagcggctgaaag

SEQ ID NO: 3284076 - DNA, 25 bp, Homo sapien
agctttgtgaaatagccctgctcta

SEQ ID NO: 3284077 - DNA, 25 bp, Homo sapien
ggcagagagccatccctcaataagc

SEQ ID NO: 3284078 - DNA, 25 bp, Homo sapien
agccctgctctatcaggttgcagcg

SEQ ID NO: 3284079 - DNA, 25 bp, Homo sapien
tacgatgagatccaccgtcactggg

SEQ ID NO: 3284080 - DNA, 25 bp, Homo sapien
ggctaagctagtggaagctattagg

SEQ ID NO: 3284081 - DNA, 25 bp, Homo sapien
taagctagtggaagctattaggacc

SEQ ID NO: 3284082 - DNA, 25 bp, Homo sapien
tagtggaagctattaggaccaatta

SEQ ID NO: 3284083 - DNA, 25 bp, Homo sapien
aatgtagtgctgacggttctggaga

SEQ ID NO: 3284084 - DNA, 25 bp, Homo sapien
tgttctcgcatggtagaaggaacca

SEQ ID NO: 3284085 - DNA, 25 bp, Homo sapien
tcaaggtatgggcagacttagtgtc

SEQ ID NO: 3284086 - DNA, 25 bp, Homo sapien
acttagtgtctggtgagtactctac

SEQ ID NO: 3284087 - DNA, 25 bp, Homo sapien
tgcagctggtcatgggcattactga

SEQ ID NO: 3284088 - DNA, 25 bp, Homo sapien
gcctacttcaagatcatcatttcca

SEQ ID NO: 3284089 - DNA, 25 bp, Homo sapien
acttcaagatcatcatttccacaga

SEQ ID NO: 3284090 - DNA, 25 bp, Homo sapien
caagatcatcatttccacagatgct

SEQ ID NO: 3284091 - DNA, 25 bp, Homo sapien
ataaacaaaacgttcattgctacta

SEQ ID NO: 3284092 - DNA, 25 bp, Homo sapien
aatgataaacaaaacgttcattgct

SEQ ID NO: 3284093 - DNA, 25 bp, Homo sapien
tgataaacaaaacgttcattgctac

SEQ ID NO: 3284094 - DNA, 25 bp, Homo sapien
gataaacaaaacgttcattgctact

SEQ ID NO: 3284095 - DNA, 25 bp, Homo sapien
tatgatgggaaaagagaacgctggc

SEQ ID NO: 3284096 - DNA, 25 bp, Homo sapien
tccacaacagaaggatcgaaggtca

SEQ ID NO: 3284097 - DNA, 25 bp, Homo sapien
ttggtacaataagcagagaggcacc

SEQ ID NO: 3284098 - DNA, 25 bp, Homo sapien
gagaggcaccacttgatagagcaag

SEQ ID NO: 3284099 - DNA, 25 bp, Homo sapien
tgtagtccctgatgtatgtagaaca

SEQ ID NO: 3284100 - DNA, 25 bp, Homo sapien
gacaatcttcggtatccctgtagtc

SEQ ID NO: 3284101 - DNA, 25 bp, Homo sapien
ggatatttggtactatacacttatg

SEQ ID NO: 3284102 - DNA, 25 bp, Homo sapien
cttatgaggcactctgacaatcttc

SEQ ID NO: 3284103 - DNA, 25 bp, Homo sapien
tatcatagttcaataatgtttcatg

SEQ ID NO: 3284104 - DNA, 25 bp, Homo sapien
cactaggtcattatgttccactgta

SEQ ID NO: 3284105 - DNA, 25 bp, Homo sapien
tcattgacatgctcagaacttatgc

SEQ ID NO: 3284106 - DNA, 25 bp, Homo sapien
catttagcatcaagttcacctcagt

SEQ ID NO: 3284107 - DNA, 25 bp, Homo sapien
gttcatactacagaatagtggctca

SEQ ID NO: 3284108 - DNA, 25 bp, Homo sapien
tcctataatatacggaacactcctc

SEQ ID NO: 3284109 - DNA, 25 bp, Homo sapien
tgctgaccaatgtaattgccataaa

SEQ ID NO: 3284110 - DNA, 25 bp, Homo sapien
ggtctagcgagtggaggtcaaatat

SEQ ID NO: 3284111 - DNA, 25 bp, Homo sapien
aaacaattgaaacatccagacttac

SEQ ID NO: 3284112 - DNA, 25 bp, Homo sapien
gcaaaaaacaattgaaacatccaga

SEQ ID NO: 3284113 - DNA, 25 bp, Homo sapien
aaaacaattgaaacatccagactta

SEQ ID NO: 3284114 - DNA, 25 bp, Homo sapien
aaaaaacaattgaaacatccagact

SEQ ID NO: 3284115 - DNA, 25 bp, Homo sapien
tttttcaacaaggatatactttaga

SEQ ID NO: 3284116 - DNA, 25 bp, Homo sapien
caacaaggatatactttagattaca

SEQ ID NO: 3284117 - DNA, 25 bp, Homo sapien
caaggatatactttagattacattt

SEQ ID NO: 3284118 - DNA, 25 bp, Homo sapien
tttcaacaaggatatactttagatt

SEQ ID NO: 3284119 - DNA, 25 bp, Homo sapien
ggtgaatctggctcgataggtacat

SEQ ID NO: 3284120 - DNA, 25 bp, Homo sapien
ataagcagccgggacttggagaatt

SEQ ID NO: 3284121 - DNA, 25 bp, Homo sapien
aaaatgagttgataatgacggtggt

SEQ ID NO: 3284122 - DNA, 25 bp, Homo sapien
ctcgataggtacataagcagccggg

SEQ ID NO: 3284123 - DNA, 25 bp, Homo sapien
tagtgcctcaaatttcagttgcgga

SEQ ID NO: 3284124 - DNA, 25 bp, Homo sapien
atttattgaataccttagtgcctca

SEQ ID NO: 3284125 - DNA, 25 bp, Homo sapien
gagatacttatacgttctattagtg

SEQ ID NO: 3284126 - DNA, 25 bp, Homo sapien
taatgaagcccttacattttggaga

SEQ ID NO: 3284127 - DNA, 25 bp, Homo sapien
aaatttacattagcttggagtaaca

SEQ ID NO: 3284128 - DNA, 25 bp, Homo sapien
tacattagcttggagtaacatcaaa

SEQ ID NO: 3284129 - DNA, 25 bp, Homo sapien
ttagcttggagtaacatcaaattta

SEQ ID NO: 3284130 - DNA, 25 bp, Homo sapien
tttacattagcttggagtaacatca

SEQ ID NO: 3284131 - DNA, 25 bp, Homo sapien
ggcagtagagaccaatttcccgaat

SEQ ID NO: 3284132 - DNA, 25 bp, Homo sapien
gggtaagtctatcccaggttggcag

SEQ ID NO: 3284133 - DNA, 25 bp, Homo sapien
caggaggcagccttatgcaccaatt

SEQ ID NO: 3284134 - DNA, 25 bp, Homo sapien
gaagcagcattaaccacagtcttgt

SEQ ID NO: 3284135 - DNA, 25 bp, Homo sapien
gtttatctaaacatcaatttgtagc

SEQ ID NO: 3284136 - DNA, 25 bp, Homo sapien
ctgaagtttatctaaacatcaattt

SEQ ID NO: 3284137 - DNA, 25 bp, Homo sapien
atctaaacatcaatttgtagcacag

SEQ ID NO: 3284138 - DNA, 25 bp, Homo sapien
gaagtttatctaaacatcaatttgt

SEQ ID NO: 3284139 - DNA, 25 bp, Homo sapien
caagtctcgcggattaggtttgatc

SEQ ID NO: 3284140 - DNA, 25 bp, Homo sapien
tcccggatagctcgtcgcggatact

SEQ ID NO: 3284141 - DNA, 25 bp, Homo sapien
gcggatacttctcacagcgaagcag

SEQ ID NO: 3284142 - DNA, 25 bp, Homo sapien
tcgcattcggccctttcccggatag

SEQ ID NO: 3284143 - DNA, 25 bp, Homo sapien
caaaaagtttactgaggatgttgcc

SEQ ID NO: 3284144 - DNA, 25 bp, Homo sapien
tattacttagcattccatgactggc

SEQ ID NO: 3284145 - DNA, 25 bp, Homo sapien
agtcagattctgtcaagtcacccac

SEQ ID NO: 3284146 - DNA, 25 bp, Homo sapien
tccaggtacagcatgtagtatgagc

SEQ ID NO: 3284147 - DNA, 25 bp, Homo sapien
gacaagaggctacgcatgttgaggt

SEQ ID NO: 3284148 - DNA, 25 bp, Homo sapien
ttgtgaagtaaaaggccatgatgga

SEQ ID NO: 3284149 - DNA, 25 bp, Homo sapien
caaagtaaggccagttcaaaattga

SEQ ID NO: 3284150 - DNA, 25 bp, Homo sapien
caaaattgacccacaggtcttgcct

SEQ ID NO: 3284151 - DNA, 25 bp, Homo sapien
tcagggcactaaatactatggatca

SEQ ID NO: 3284152 - DNA, 25 bp, Homo sapien
aaactggcccctattgtgtctgtac

SEQ ID NO: 3284153 - DNA, 25 bp, Homo sapien
aaatgccaatttgcccgtgtcactg

SEQ ID NO: 3284154 - DNA, 25 bp, Homo sapien
gaactgtagaggctagacacctatg

SEQ ID NO: 3284155 - DNA, 25 bp, Homo sapien
cagtccttctactgacagatacaca

SEQ ID NO: 3284156 - DNA, 25 bp, Homo sapien
tgacagatacacaacactgtttgct

SEQ ID NO: 3284157 - DNA, 25 bp, Homo sapien
tgtacaatgaccactcttttcaaaa

SEQ ID NO: 3284158 - DNA, 25 bp, Homo sapien
ttttcttggatcataatatcgtgct

SEQ ID NO: 3284159 - DNA, 25 bp, Homo sapien
tctgatctcaccttggcttagctct

SEQ ID NO: 3284160 - DNA, 25 bp, Homo sapien
catgcccactactctcactgttgag

SEQ ID NO: 3284161 - DNA, 25 bp, Homo sapien
aggtgtaaagactgtcaagctttgg

SEQ ID NO: 3284162 - DNA, 25 bp, Homo sapien
ttagctctccaacacaagactctgt

SEQ ID NO: 3284163 - DNA, 25 bp, Homo sapien
cccatgaagcatggatatttaattg

SEQ ID NO: 3284164 - DNA, 25 bp, Homo sapien
tctgcaaggtgatcaaattctggtt

SEQ ID NO: 3284165 - DNA, 25 bp, Homo sapien
ggatatttaattggtggtgaagcta

SEQ ID NO: 3284166 - DNA, 25 bp, Homo sapien
ttctggtttattggcaatgagctct

SEQ ID NO: 3284167 - DNA, 25 bp, Homo sapien
tacataccggtttttacacagcacc

SEQ ID NO: 3284168 - DNA, 25 bp, Homo sapien
cataccggtttttacacagcacctc

SEQ ID NO: 3284169 - DNA, 25 bp, Homo sapien
cctacataccggtttttacacagca

SEQ ID NO: 3284170 - DNA, 25 bp, Homo sapien
ctacataccggtttttacacagcac

SEQ ID NO: 3284171 - DNA, 25 bp, Homo sapien
tacatgagtctacttataggtgggt

SEQ ID NO: 3284172 - DNA, 25 bp, Homo sapien
aaccaattcattttgtgaggactca

SEQ ID NO: 3284173 - DNA, 25 bp, Homo sapien
gaatattggatgttataccccagga

SEQ ID NO: 3284174 - DNA, 25 bp, Homo sapien
tccagtgacttgtgaagataattca

SEQ ID NO: 3284175 - DNA, 25 bp, Homo sapien
ctttcctgcgtaagcaagagcagca

SEQ ID NO: 3284176 - DNA, 25 bp, Homo sapien
aaggagagagagtatttttacttag

SEQ ID NO: 3284177 - DNA, 25 bp, Homo sapien
gagagagagtatttttacttagcat

SEQ ID NO: 3284178 - DNA, 25 bp, Homo sapien
ggagagagagtatttttacttagca

SEQ ID NO: 3284179 - DNA, 25 bp, Homo sapien
gagagagtatttttacttagcatga

SEQ ID NO: 3284180 - DNA, 25 bp, Homo sapien
gccaggtaagcctttgaggcaagaa

SEQ ID NO: 3284181 - DNA, 25 bp, Homo sapien
acttgtgggctcagtcctatatcca

SEQ ID NO: 3284182 - DNA, 25 bp, Homo sapien
tagtgatcttatgacttgtgggctc

SEQ ID NO: 3284183 - DNA, 25 bp, Homo sapien
taactatatgccttcaaagagccag

SEQ ID NO: 3284184 - DNA, 25 bp, Homo sapien
tatcaagagtttggacattgtgtct

SEQ ID NO: 3284185 - DNA, 25 bp, Homo sapien
aagagtttggacattgtgtctggat

SEQ ID NO: 3284186 - DNA, 25 bp, Homo sapien
tcaagagtttggacattgtgtctgg

SEQ ID NO: 3284187 - DNA, 25 bp, Homo sapien
caagagtttggacattgtgtctgga

SEQ ID NO: 3284188 - DNA, 25 bp, Homo sapien
accaatagataagaagctacaagat

SEQ ID NO: 3284189 - DNA, 25 bp, Homo sapien
atttccataaggatctcgtactgca

SEQ ID NO: 3284190 - DNA, 25 bp, Homo sapien
aaggatctcgtactgcataaataac

SEQ ID NO: 3284191 - DNA, 25 bp, Homo sapien
tccataaggatctcgtactgcataa

SEQ ID NO: 3284192 - DNA, 25 bp, Homo sapien
ccataaggatctcgtactgcataaa

SEQ ID NO: 3284193 - DNA, 25 bp, Homo sapien
tgggtaatcatttcactatcagaac

SEQ ID NO: 3284194 - DNA, 25 bp, Homo sapien
gaacttgtagacagaccaataccat

SEQ ID NO: 3284195 - DNA, 25 bp, Homo sapien
tcctgaggaggggtatacgccagta

SEQ ID NO: 3284196 - DNA, 25 bp, Homo sapien
gacagaccaataccatgacgcagaa

SEQ ID NO: 3284197 - DNA, 25 bp, Homo sapien
cccagtagccaaccataatgaaaat

SEQ ID NO: 3284198 - DNA, 25 bp, Homo sapien
aaataaggcattctgtggatgtcca

SEQ ID NO: 3284199 - DNA, 25 bp, Homo sapien
aaacccagtagccaaccataatgaa

SEQ ID NO: 3284200 - DNA, 25 bp, Homo sapien
ggatgtccagttacaaaaatcctgc

SEQ ID NO: 3284201 - DNA, 25 bp, Homo sapien
atgaagtgtttcaacaacgaagggc

SEQ ID NO: 3284202 - DNA, 25 bp, Homo sapien
gaagtgtttcaacaacgaagggctg

SEQ ID NO: 3284203 - DNA, 25 bp, Homo sapien
tgaagtgtttcaacaacgaagggct

SEQ ID NO: 3284204 - DNA, 25 bp, Homo sapien
cgaactcccatcactagtcacaata

SEQ ID NO: 3284205 - DNA, 25 bp, Homo sapien
catcactagtcacaataccagcact

SEQ ID NO: 3284206 - DNA, 25 bp, Homo sapien
tgaatgttggcaccgaactcccatc

SEQ ID NO: 3284207 - DNA, 25 bp, Homo sapien
ttggcaccgaactcccatcactagt

SEQ ID NO: 3284208 - DNA, 25 bp, Homo sapien
gacatcagagacagccgggtacggt

SEQ ID NO: 3284209 - DNA, 25 bp, Homo sapien
attaaaagacatcagagacagccgg

SEQ ID NO: 3284210 - DNA, 25 bp, Homo sapien
tgttctatacaatgactagagagaa

SEQ ID NO: 3284211 - DNA, 25 bp, Homo sapien
tacaatgactagagagaattaaaag

SEQ ID NO: 3284212 - DNA, 25 bp, Homo sapien
tacccaagattaatcatggtctaaa

SEQ ID NO: 3284213 - DNA, 25 bp, Homo sapien
gtactgattcaggaggatataatta

SEQ ID NO: 3284214 - DNA, 25 bp, Homo sapien
actttaagacacaaagtactgattc

SEQ ID NO: 3284215 - DNA, 25 bp, Homo sapien
caataccactagttgttctttacat

SEQ ID NO: 3284216 - DNA, 25 bp, Homo sapien
cgggccctcgggcgctcatgagaac

SEQ ID NO: 3284217 - DNA, 25 bp, Homo sapien
cacaggcaggtactggcttaggtcg

SEQ ID NO: 3284218 - DNA, 25 bp, Homo sapien
gcttaggtcggagaggtcggtcctc

SEQ ID NO: 3284219 - DNA, 25 bp, Homo sapien
taggcaacccggtcgacgccacagg

SEQ ID NO: 3284220 - DNA, 25 bp, Homo sapien
agccccacgagtcccagagtgatca

SEQ ID NO: 3284221 - DNA, 25 bp, Homo sapien
cagccccacgagtcccagagtgatc

SEQ ID NO: 3284222 - DNA, 25 bp, Homo sapien
cgccgccgaaagcacgtggaaggac

SEQ ID NO: 3284223 - DNA, 25 bp, Homo sapien
gtcgccgccgaaagcacgtggaagg

SEQ ID NO: 3284224 - DNA, 25 bp, Homo sapien
tcgccgccgaaagcacgtggaagga

SEQ ID NO: 3284225 - DNA, 25 bp, Homo sapien
cagctcggcccgtcgagctcagaag

SEQ ID NO: 3284226 - DNA, 25 bp, Homo sapien
caggctcttccttcccgagggtggc

SEQ ID NO: 3284227 - DNA, 25 bp, Homo sapien
gcgctgtccctaggtggcgtggcca

SEQ ID NO: 3284228 - DNA, 25 bp, Homo sapien
gaagctcgcgctcgcgacaggctct

SEQ ID NO: 3284229 - DNA, 25 bp, Homo sapien
ctggccagacgtttcttgttcaagt

SEQ ID NO: 3284230 - DNA, 25 bp, Homo sapien
tcttgttcaagttactgcaacagca

SEQ ID NO: 3284231 - DNA, 25 bp, Homo sapien
taactggtcttccaagctctagttt

SEQ ID NO: 3284232 - DNA, 25 bp, Homo sapien
cctggccagacgtttcttgttcaag

SEQ ID NO: 3284233 - DNA, 25 bp, Homo sapien
agagtgcagtggcgctctctcagct

SEQ ID NO: 3284234 - DNA, 25 bp, Homo sapien
tctccctctgttgcttaggctagag

SEQ ID NO: 3284235 - DNA, 25 bp, Homo sapien
cgctctctcagctcactgcaacctc

SEQ ID NO: 3284236 - DNA, 25 bp, Homo sapien
gtagacagggtttcactgtgttggc

SEQ ID NO: 3284237 - DNA, 25 bp, Homo sapien
ctggttgatatgaaggtacagataa

SEQ ID NO: 3284238 - DNA, 25 bp, Homo sapien
aggttatagttgagagatgctttca

SEQ ID NO: 3284239 - DNA, 25 bp, Homo sapien
gtaaaggttatagttgagagatgct

SEQ ID NO: 3284240 - DNA, 25 bp, Homo sapien
aagtaaaggttatagttgagagatg

SEQ ID NO: 3284241 - DNA, 25 bp, Homo sapien
gaaagacaaacaggtagataatgct

SEQ ID NO: 3284242 - DNA, 25 bp, Homo sapien
caaacaggtagataatgcttcaggt

SEQ ID NO: 3284243 - DNA, 25 bp, Homo sapien
acaggtagataatgcttcaggtttt

SEQ ID NO: 3284244 - DNA, 25 bp, Homo sapien
agacaaacaggtagataatgcttca

SEQ ID NO: 3284245 - DNA, 25 bp, Homo sapien
aaagacacgtgcacaggagcagcac

SEQ ID NO: 3284246 - DNA, 25 bp, Homo sapien
gaacttcgagtaacatctgcgcata

SEQ ID NO: 3284247 - DNA, 25 bp, Homo sapien
gagctttgtcagttttctaagggaa

SEQ ID NO: 3284248 - DNA, 25 bp, Homo sapien
acttctgatcttggtcactgtgaaa

SEQ ID NO: 3284249 - DNA, 25 bp, Homo sapien
tttggcattccatgtgaacttcgag

SEQ ID NO: 3284250 - DNA, 25 bp, Homo sapien
cttctgtagagagaatacaatttta

SEQ ID NO: 3284251 - DNA, 25 bp, Homo sapien
tggcttcttacatttctaggtggtg

SEQ ID NO: 3284252 - DNA, 25 bp, Homo sapien
taggtggtggtaaacatgctcttcc

SEQ ID NO: 3284253 - DNA, 25 bp, Homo sapien
ctataaactgatggtgagatctgta

SEQ ID NO: 3284254 - DNA, 25 bp, Homo sapien
cttcagctgtctggtaatccttggc

SEQ ID NO: 3284255 - DNA, 25 bp, Homo sapien
aatccttggctgtttgcgcttttaa

SEQ ID NO: 3284256 - DNA, 25 bp, Homo sapien
tcttaagtgttgaccagaattactc

SEQ ID NO: 3284257 - DNA, 25 bp, Homo sapien
caattggaaacttcaagtgggtggt

SEQ ID NO: 3284258 - DNA, 25 bp, Homo sapien
taacagggactataatcttgcagca

SEQ ID NO: 3284259 - DNA, 25 bp, Homo sapien
gggttctcccgaagcctatccatgg

SEQ ID NO: 3284260 - DNA, 25 bp, Homo sapien
cataactggcttgaaacctgtgaca

SEQ ID NO: 3284261 - DNA, 25 bp, Homo sapien
tgtgtaaaatcctgaagaccgccca

SEQ ID NO: 3284262 - DNA, 25 bp, Homo sapien
tattgtcagacatctagtgagtcgc

SEQ ID NO: 3284263 - DNA, 25 bp, Homo sapien
tcaccaaaccctttgtaatgggaga

SEQ ID NO: 3284264 - DNA, 25 bp, Homo sapien
ctcccgaagggagcgaaaaggacag

SEQ ID NO: 3284265 - DNA, 25 bp, Homo sapien
ccagggaactgaccacgggcatttt

SEQ ID NO: 3284266 - DNA, 25 bp, Homo sapien
tgaagtgaaccggtatggccagaac

SEQ ID NO: 3284267 - DNA, 25 bp, Homo sapien
gaccatggcggtctcctggaaacag

SEQ ID NO: 3284268 - DNA, 25 bp, Homo sapien
tgctttgagccgaaactggtgaccg

SEQ ID NO: 3284269 - DNA, 25 bp, Homo sapien
tatatcccataaatgatcgtccggc

SEQ ID NO: 3284270 - DNA, 25 bp, Homo sapien
tgttctgaggtcacatgggtttgga

SEQ ID NO: 3284271 - DNA, 25 bp, Homo sapien
tcttcactaaatggatggccacaag

SEQ ID NO: 3284272 - DNA, 25 bp, Homo sapien
tatcatgtgataaagagggaccttc

SEQ ID NO: 3284273 - DNA, 25 bp, Homo sapien
agaagttcactcttagacccagtgt

SEQ ID NO: 3284274 - DNA, 25 bp, Homo sapien
catcattgaaaattttgacccaagg

SEQ ID NO: 3284275 - DNA, 25 bp, Homo sapien
cagtcttttggtaatagtggcaggt

SEQ ID NO: 3284276 - DNA, 25 bp, Homo sapien
tataccccattataggaataactgt

SEQ ID NO: 3284277 - DNA, 25 bp, Homo sapien
ggataggtctttaaccagttcatat

SEQ ID NO: 3284278 - DNA, 25 bp, Homo sapien
gagcagttccagacccgcttgtgga

SEQ ID NO: 3284279 - DNA, 25 bp, Homo sapien
cagttcgagttgctgggctccgcta

SEQ ID NO: 3284280 - DNA, 25 bp, Homo sapien
caccagttaagacctcatccgagag

SEQ ID NO: 3284281 - DNA, 25 bp, Homo sapien
tgaccagaaagctcagcaacggcag

SEQ ID NO: 3284282 - DNA, 25 bp, Homo sapien
aagctttctgctaagttagctctct

SEQ ID NO: 3284283 - DNA, 25 bp, Homo sapien
taagctttctgctaagttagctctc

SEQ ID NO: 3284284 - DNA, 25 bp, Homo sapien
ctacattgacagcgctgtgagactt

SEQ ID NO: 3284285 - DNA, 25 bp, Homo sapien
acagcgctgtgagacttggatgtgt

SEQ ID NO: 3284286 - DNA, 25 bp, Homo sapien
ttgacagcgctgtgagacttggatg

SEQ ID NO: 3284287 - DNA, 25 bp, Homo sapien
cattgacagcgctgtgagacttgga

SEQ ID NO: 3284288 - DNA, 25 bp, Homo sapien
tttcccctcggctctattctccaag

SEQ ID NO: 3284289 - DNA, 25 bp, Homo sapien
cattggctgcgtaatcaccttcttc

SEQ ID NO: 3284290 - DNA, 25 bp, Homo sapien
cttttgcctgagtctaaggtctcca

SEQ ID NO: 3284291 - DNA, 25 bp, Homo sapien
catcttgcctttgtgccgctcattg

SEQ ID NO: 3284292 - DNA, 25 bp, Homo sapien
acgacgacttcgctcggaggcacat

SEQ ID NO: 3284293 - DNA, 25 bp, Homo sapien
tggagcgccttctgcccagacacga

SEQ ID NO: 3284294 - DNA, 25 bp, Homo sapien
ttcgctcggaggcacatcggccctg

SEQ ID NO: 3284295 - DNA, 25 bp, Homo sapien
ccagacacgacgacttcgctcggag

SEQ ID NO: 3284296 - DNA, 25 bp, Homo sapien
ccttgcaactctgcatgccatttca

SEQ ID NO: 3284297 - DNA, 25 bp, Homo sapien
gaaatccttgcaactctgcatgcca

SEQ ID NO: 3284298 - DNA, 25 bp, Homo sapien
tgaaatccttgcaactctgcatgcc

SEQ ID NO: 3284299 - DNA, 25 bp, Homo sapien
gcaactctgcatgccatttcaagca

SEQ ID NO: 3284300 - DNA, 25 bp, Homo sapien
ccagaccatggtgtgtgacatcaca

SEQ ID NO: 3284301 - DNA, 25 bp, Homo sapien
tcaggatggatcacccagtatactc

SEQ ID NO: 3284302 - DNA, 25 bp, Homo sapien
catcacaggcctggacatggccagt

SEQ ID NO: 3284303 - DNA, 25 bp, Homo sapien
tttgcggaacttactggagaactca

SEQ ID NO: 3284304 - DNA, 25 bp, Homo sapien
agttaccctgtgaaatggacttcag

SEQ ID NO: 3284305 - DNA, 25 bp, Homo sapien
ctgaagttaccctgtgaaatggact

SEQ ID NO: 3284306 - DNA, 25 bp, Homo sapien
aagttaccctgtgaaatggacttca

SEQ ID NO: 3284307 - DNA, 25 bp, Homo sapien
tgaagttaccctgtgaaatggactt

SEQ ID NO: 3284308 - DNA, 25 bp, Homo sapien
tacggaactcgtggagagagctcat

SEQ ID NO: 3284309 - DNA, 25 bp, Homo sapien
gattttgccagaaggtctcaagcga

SEQ ID NO: 3284310 - DNA, 25 bp, Homo sapien
cgctcagcggcagatcaattttcgg

SEQ ID NO: 3284311 - DNA, 25 bp, Homo sapien
tttgccgtccgagaaagcttggtga

SEQ ID NO: 3284312 - DNA, 25 bp, Homo sapien
tttgtacctgcccacccatggaagt

SEQ ID NO: 3284313 - DNA, 25 bp, Homo sapien
tgggaccggccttatattccagaga

SEQ ID NO: 3284314 - DNA, 25 bp, Homo sapien
tgcttacatgtgtgccagttgcctg

SEQ ID NO: 3284315 - DNA, 25 bp, Homo sapien
gggtcaatccgctgaagatgtctcc

SEQ ID NO: 3284316 - DNA, 25 bp, Homo sapien
caaattgtatggcaatgccagttgt

SEQ ID NO: 3284317 - DNA, 25 bp, Homo sapien
gagcaaacatctcataactgtaggg

SEQ ID NO: 3284318 - DNA, 25 bp, Homo sapien
tatgttgaagagctagaacttgagc

SEQ ID NO: 3284319 - DNA, 25 bp, Homo sapien
tagttcacaagaatcaaattgtatg

SEQ ID NO: 3284320 - DNA, 25 bp, Homo sapien
tggtccacacgggttactgctagga

SEQ ID NO: 3284321 - DNA, 25 bp, Homo sapien
ctctgggccctggtccacacgggtt

SEQ ID NO: 3284322 - DNA, 25 bp, Homo sapien
actgctaggatgtgttcttttcctc

SEQ ID NO: 3284323 - DNA, 25 bp, Homo sapien
cacgggttactgctaggatgtgttc

SEQ ID NO: 3284324 - DNA, 25 bp, Homo sapien
ctcttggattccctaagggtgtaag

SEQ ID NO: 3284325 - DNA, 25 bp, Homo sapien
cagtctggggatgacacagcttctt

SEQ ID NO: 3284326 - DNA, 25 bp, Homo sapien
cacctcttggattccctaagggtgt

SEQ ID NO: 3284327 - DNA, 25 bp, Homo sapien
ctcctccacaatgccccacctcttg

SEQ ID NO: 3284328 - DNA, 25 bp, Homo sapien
tctccaagaagctttcaagaaagcc

SEQ ID NO: 3284329 - DNA, 25 bp, Homo sapien
agcttccagatagccggagttattt

SEQ ID NO: 3284330 - DNA, 25 bp, Homo sapien
tatctcccctagtaaaatttcagct

SEQ ID NO: 3284331 - DNA, 25 bp, Homo sapien
tccagatagccggagttatttctca

SEQ ID NO: 3284332 - DNA, 25 bp, Homo sapien
gacattggatacctctcaacacagt

SEQ ID NO: 3284333 - DNA, 25 bp, Homo sapien
tgtggtcacctttggagacattgga

SEQ ID NO: 3284334 - DNA, 25 bp, Homo sapien
ctcaacacagttcagctgagaggaa

SEQ ID NO: 3284335 - DNA, 25 bp, Homo sapien
cactggtccctgctgctaagtggta

SEQ ID NO: 3284336 - DNA, 25 bp, Homo sapien
aaaaccacagcagtccgaattaaat

SEQ ID NO: 3284337 - DNA, 25 bp, Homo sapien
caaaaccacagcagtccgaattaaa

SEQ ID NO: 3284338 - DNA, 25 bp, Homo sapien
gtgaatacaaaggatcagttttggt

SEQ ID NO: 3284339 - DNA, 25 bp, Homo sapien
agggggtgaatacaaaggatcagtt

SEQ ID NO: 3284340 - DNA, 25 bp, Homo sapien
gggtgaatacaaaggatcagttttg

SEQ ID NO: 3284341 - DNA, 25 bp, Homo sapien
aagggggtgaatacaaaggatcagt

SEQ ID NO: 3284342 - DNA, 25 bp, Homo sapien
agtgcccatggatcctaaacgtcat

SEQ ID NO: 3284343 - DNA, 25 bp, Homo sapien
caagtgcccatggatcctaaacgtc

SEQ ID NO: 3284344 - DNA, 25 bp, Homo sapien
tctccaagtgcccatggatcctaaa

SEQ ID NO: 3284345 - DNA, 25 bp, Homo sapien
cattctccaagtgcccatggatcct

SEQ ID NO: 3284346 - DNA, 25 bp, Homo sapien
cacaacagcttggttaagcggagga

SEQ ID NO: 3284347 - DNA, 25 bp, Homo sapien
tattatcttttcaacagaggcctgg

SEQ ID NO: 3284348 - DNA, 25 bp, Homo sapien
aaagcaaattgctactgggaggtga

SEQ ID NO: 3284349 - DNA, 25 bp, Homo sapien
tgtgttaaacagcaggacagctagc

SEQ ID NO: 3284350 - DNA, 25 bp, Homo sapien
tctgagggcaggccttctgagcgcc

SEQ ID NO: 3284351 - DNA, 25 bp, Homo sapien
aggccttctgagcgccgccactttg

SEQ ID NO: 3284352 - DNA, 25 bp, Homo sapien
tagtctgtgacggatctgcactctg

SEQ ID NO: 3284353 - DNA, 25 bp, Homo sapien
gtgacggatctgcactctgagggca

SEQ ID NO: 3284354 - DNA, 25 bp, Homo sapien
ggctccccacatagcatggcttgat

SEQ ID NO: 3284355 - DNA, 25 bp, Homo sapien
ctcagaatgaacaggatgggctcta

SEQ ID NO: 3284356 - DNA, 25 bp, Homo sapien
atgggatggtgagaaacctctagag

SEQ ID NO: 3284357 - DNA, 25 bp, Homo sapien
ggcttgatgcctatacagatactca

SEQ ID NO: 3284358 - DNA, 25 bp, Homo sapien
gccaagcacggcagactatcatggg

SEQ ID NO: 3284359 - DNA, 25 bp, Homo sapien
aaagtaatcgaaagccaagcacggc

SEQ ID NO: 3284360 - DNA, 25 bp, Homo sapien
ggcggcagtagagaaaagtaatcga

SEQ ID NO: 3284361 - DNA, 25 bp, Homo sapien
gggctactttctgggtgccatattt

SEQ ID NO: 3284362 - DNA, 25 bp, Homo sapien
ctaagggtgggcccattttcttctg

SEQ ID NO: 3284363 - DNA, 25 bp, Homo sapien
tagttaactctggattctggtatga

SEQ ID NO: 3284364 - DNA, 25 bp, Homo sapien
tgagagcagcaaggttccagtttca

SEQ ID NO: 3284365 - DNA, 25 bp, Homo sapien
ctgtgtgcgtgtgtttagttaactc

SEQ ID NO: 3284366 - DNA, 25 bp, Homo sapien
tctggattctggtatgagagcagca

SEQ ID NO: 3284367 - DNA, 25 bp, Homo sapien
gaaggtttcgcagacagaccagagg

SEQ ID NO: 3284368 - DNA, 25 bp, Homo sapien
cagagggagaaagcgtgtatcccgg

SEQ ID NO: 3284369 - DNA, 25 bp, Homo sapien
ctagaatagatcttcccgaaggttt

SEQ ID NO: 3284370 - DNA, 25 bp, Homo sapien
gacgctgctcccaactcgcagaggg

SEQ ID NO: 3284371 - DNA, 25 bp, Homo sapien
gttgaagttgtactccaggatttcc

SEQ ID NO: 3284372 - DNA, 25 bp, Homo sapien
cacagcgtggtggaatccgggtgct

SEQ ID NO: 3284373 - DNA, 25 bp, Homo sapien
tgcctcggccgcgatgaggcacagc

SEQ ID NO: 3284374 - DNA, 25 bp, Homo sapien
gcttgtcgaccttgttgaagttgta

SEQ ID NO: 3284375 - DNA, 25 bp, Homo sapien
tgacggcagagcctagcgtcctgcg

SEQ ID NO: 3284376 - DNA, 25 bp, Homo sapien
ccgggaccccttgcaggaactgtat

SEQ ID NO: 3284377 - DNA, 25 bp, Homo sapien
cgcagcgaaggaaggcggtcgcggc

SEQ ID NO: 3284378 - DNA, 25 bp, Homo sapien
ctccctggactgagcgctgttgcgg

SEQ ID NO: 3284379 - DNA, 25 bp, Homo sapien
gcgagatagatgattccgcgggccc

SEQ ID NO: 3284380 - DNA, 25 bp, Homo sapien
agatagatgattccgcgggccctca

SEQ ID NO: 3284381 - DNA, 25 bp, Homo sapien
cgagatagatgattccgcgggccct

SEQ ID NO: 3284382 - DNA, 25 bp, Homo sapien
gggcgagatagatgattccgcgggc

SEQ ID NO: 3284383 - DNA, 25 bp, Homo sapien
gaagcgcgggggtgattttgagaaa

SEQ ID NO: 3284384 - DNA, 25 bp, Homo sapien
gcgcgggggtgattttgagaaatcc

SEQ ID NO: 3284385 - DNA, 25 bp, Homo sapien
agcgcgggggtgattttgagaaatc

SEQ ID NO: 3284386 - DNA, 25 bp, Homo sapien
aagcgcgggggtgattttgagaaat

SEQ ID NO: 3284387 - DNA, 25 bp, Homo sapien
tgacagatcgcgagggtgggttcgc

SEQ ID NO: 3284388 - DNA, 25 bp, Homo sapien
gcccgagtccgcgactagccggcct

SEQ ID NO: 3284389 - DNA, 25 bp, Homo sapien
gagtccgcgactagccggcctccgg

SEQ ID NO: 3284390 - DNA, 25 bp, Homo sapien
cagatcgcgagggtgggttcgcccg

SEQ ID NO: 3284391 - DNA, 25 bp, Homo sapien
tgtgggcttgcatgtgccactctgc

SEQ ID NO: 3284392 - DNA, 25 bp, Homo sapien
tccgcagagaagtgatttaaggcag

SEQ ID NO: 3284393 - DNA, 25 bp, Homo sapien
ttgagacacgggagaaacttccacc

SEQ ID NO: 3284394 - DNA, 25 bp, Homo sapien
tttacagagatggagataggtccgc

SEQ ID NO: 3284395 - DNA, 25 bp, Homo sapien
cacttcttcttctgtgtgcacccat

SEQ ID NO: 3284396 - DNA, 25 bp, Homo sapien
ggtcagaaacacttcttcttctgtg

SEQ ID NO: 3284397 - DNA, 25 bp, Homo sapien
aacacttcttcttctgtgtgcaccc

SEQ ID NO: 3284398 - DNA, 25 bp, Homo sapien
caggtcagaaacacttcttcttctg

SEQ ID NO: 3284399 - DNA, 25 bp, Homo sapien
ttgacacacaacttcagagctggga

SEQ ID NO: 3284400 - DNA, 25 bp, Homo sapien
ctttgacacacaacttcagagctgg

SEQ ID NO: 3284401 - DNA, 25 bp, Homo sapien
gagctgggaagaaccttggaaatta

SEQ ID NO: 3284402 - DNA, 25 bp, Homo sapien
acacaacttcagagctgggaagaac

SEQ ID NO: 3284403 - DNA, 25 bp, Homo sapien
tggtgacctgtgctccgctagaccc

SEQ ID NO: 3284404 - DNA, 25 bp, Homo sapien
gcataggaagactaactttctgaat

SEQ ID NO: 3284405 - DNA, 25 bp, Homo sapien
tgctccgctagacccttctcagtgg

SEQ ID NO: 3284406 - DNA, 25 bp, Homo sapien
gaagactaactttctgaatgttgcc

SEQ ID NO: 3284407 - DNA, 25 bp, Homo sapien
caaggtacaccaagcaaacctgatt

SEQ ID NO: 3284408 - DNA, 25 bp, Homo sapien
tgaaagcgcctacttctccaaggta

SEQ ID NO: 3284409 - DNA, 25 bp, Homo sapien
caaactgcctgggtaaccttggcct

SEQ ID NO: 3284410 - DNA, 25 bp, Homo sapien
cactcaagggctgctactggtctta

SEQ ID NO: 3284411 - DNA, 25 bp, Homo sapien
aacactcttgtatatgccttctgca

SEQ ID NO: 3284412 - DNA, 25 bp, Homo sapien
aatccacattctgcgtatagagaag

SEQ ID NO: 3284413 - DNA, 25 bp, Homo sapien
ttaccaccagtgtatagcatttcct

SEQ ID NO: 3284414 - DNA, 25 bp, Homo sapien
gatttctctagggtatacagtaggg

SEQ ID NO: 3284415 - DNA, 25 bp, Homo sapien
caagttttgtcgagtcaaggtgtca

SEQ ID NO: 3284416 - DNA, 25 bp, Homo sapien
cacgctgcacttgacttgatgaggc

SEQ ID NO: 3284417 - DNA, 25 bp, Homo sapien
taaatctccccagtgttcattagga

SEQ ID NO: 3284418 - DNA, 25 bp, Homo sapien
cacttctcaagaatggcatggcagg

SEQ ID NO: 3284419 - DNA, 25 bp, Homo sapien
cgaactcctgagctcgggttgtctg

SEQ ID NO: 3284420 - DNA, 25 bp, Homo sapien
gagctcgggttgtctgcctgcctca

SEQ ID NO: 3284421 - DNA, 25 bp, Homo sapien
gaactcctgagctcgggttgtctgc

SEQ ID NO: 3284422 - DNA, 25 bp, Homo sapien
tcctgagctcgggttgtctgcctgc

SEQ ID NO: 3284423 - DNA, 25 bp, Homo sapien
tttatcagtcttgcaaacttgtcat

SEQ ID NO: 3284424 - DNA, 25 bp, Homo sapien
tatcagtcttgcaaacttgtcattt

SEQ ID NO: 3284425 - DNA, 25 bp, Homo sapien
tgttttatcagtcttgcaaacttgt

SEQ ID NO: 3284426 - DNA, 25 bp, Homo sapien
atcagtcttgcaaacttgtcatttg

SEQ ID NO: 3284427 - DNA, 25 bp, Homo sapien
ccccagaagggatgttaattacaca

SEQ ID NO: 3284428 - DNA, 25 bp, Homo sapien
tgtcacaatgtgtcctctggctgca

SEQ ID NO: 3284429 - DNA, 25 bp, Homo sapien
tcccagggactcaagatggagctcg

SEQ ID NO: 3284430 - DNA, 25 bp, Homo sapien
attaaactggtgttgactgctgccc

SEQ ID NO: 3284431 - DNA, 25 bp, Homo sapien
aaaagtgcccgaatgggcccatggc

SEQ ID NO: 3284432 - DNA, 25 bp, Homo sapien
tcaagaactgccacaatctggtttt

SEQ ID NO: 3284433 - DNA, 25 bp, Homo sapien
aaactgggcaaaagtgcccgaatgg

SEQ ID NO: 3284434 - DNA, 25 bp, Homo sapien
ttttcaagaactgccacaatctggt

SEQ ID NO: 3284435 - DNA, 25 bp, Homo sapien
caagctactctgctggtgccagcct

SEQ ID NO: 3284436 - DNA, 25 bp, Homo sapien
agctgcacaactgggtccccaaaga

SEQ ID NO: 3284437 - DNA, 25 bp, Homo sapien
ggtccccaaagaatgaggctcctgg

SEQ ID NO: 3284438 - DNA, 25 bp, Homo sapien
ggctcctggccactaatactaggca

SEQ ID NO: 3284439 - DNA, 25 bp, Homo sapien
taactaaacacactacagggccctg

SEQ ID NO: 3284440 - DNA, 25 bp, Homo sapien
tatgagcttcatttaggtccgtgga

SEQ ID NO: 3284441 - DNA, 25 bp, Homo sapien
gagaggttcctcagtcggcagcttc

SEQ ID NO: 3284442 - DNA, 25 bp, Homo sapien
gactgatgtcttacacccagcagca

SEQ ID NO: 3284443 - DNA, 25 bp, Homo sapien
tgacgcaggctgctgatagcacgtt

SEQ ID NO: 3284444 - DNA, 25 bp, Homo sapien
aagaggcaaaggcaagcgcaagccc

SEQ ID NO: 3284445 - DNA, 25 bp, Homo sapien
tgtgtttgctgatgccagcctgctt

SEQ ID NO: 3284446 - DNA, 25 bp, Homo sapien
gtttatttacgcctatgagcacaca

SEQ ID NO: 3284447 - DNA, 25 bp, Homo sapien
ccactgaaagtatgccgaggttacg

SEQ ID NO: 3284448 - DNA, 25 bp, Homo sapien
ggttacgtctctcctggttattcag

SEQ ID NO: 3284449 - DNA, 25 bp, Homo sapien
agaaaagggaccctgagtcttctca

SEQ ID NO: 3284450 - DNA, 25 bp, Homo sapien
caagataggataagagagatgtggc

SEQ ID NO: 3284451 - DNA, 25 bp, Homo sapien
gatgttgcctcatttcaaagcgtag

SEQ ID NO: 3284452 - DNA, 25 bp, Homo sapien
cgtagatctggtgcggttgatttca

SEQ ID NO: 3284453 - DNA, 25 bp, Homo sapien
gctggatgccaagctaagagcctgg

SEQ ID NO: 3284454 - DNA, 25 bp, Homo sapien
cagttaaaagggagagattcgggct

SEQ ID NO: 3284455 - DNA, 25 bp, Homo sapien
agctggattttcctatccttggtca

SEQ ID NO: 3284456 - DNA, 25 bp, Homo sapien
aatatgaatagggagcatgcggacc

SEQ ID NO: 3284457 - DNA, 25 bp, Homo sapien
ggtagctactgctaatagttacaag

SEQ ID NO: 3284458 - DNA, 25 bp, Homo sapien
cacaagttcgttgtaaggactaaag

SEQ ID NO: 3284459 - DNA, 25 bp, Homo sapien
aaagatgttgcagactggggccacc

SEQ ID NO: 3284460 - DNA, 25 bp, Homo sapien
ggccacctggcctgattgtaatccc

SEQ ID NO: 3284461 - DNA, 25 bp, Homo sapien
gaggtggcctcttccatgactgata

SEQ ID NO: 3284462 - DNA, 25 bp, Homo sapien
tcccctaacacatagggtgaggaca

SEQ ID NO: 3284463 - DNA, 25 bp, Homo sapien
actgtgcttggccacctgtgattct

SEQ ID NO: 3284464 - DNA, 25 bp, Homo sapien
tgtaatataagtctcctagggctgc

SEQ ID NO: 3284465 - DNA, 25 bp, Homo sapien
cacctgtgattctttagactagaac

SEQ ID NO: 3284466 - DNA, 25 bp, Homo sapien
gactagaacaactggatgtaatata

SEQ ID NO: 3284467 - DNA, 25 bp, Homo sapien
cactggctgcctcaaattaagatgt

SEQ ID NO: 3284468 - DNA, 25 bp, Homo sapien
taactgcctaaaacagggatcagcc

SEQ ID NO: 3284469 - DNA, 25 bp, Homo sapien
gaacactcagttttggcatggtact

SEQ ID NO: 3284470 - DNA, 25 bp, Homo sapien
gctgctgtggatcaagattgctatc

SEQ ID NO: 3284471 - DNA, 25 bp, Homo sapien
gctgacacaactgataataccctgg

SEQ ID NO: 3284472 - DNA, 25 bp, Homo sapien
agcacttctctttggcggccatgaa

SEQ ID NO: 3284473 - DNA, 25 bp, Homo sapien
ccagctgtgtagaccttaagcccag

SEQ ID NO: 3284474 - DNA, 25 bp, Homo sapien
ccattcctgtcagtctggtgctaga

SEQ ID NO: 3284475 - DNA, 25 bp, Homo sapien
tgactgtcttatgagaattccttct

SEQ ID NO: 3284476 - DNA, 25 bp, Homo sapien
cactggatgtgatcttgttaccatg

SEQ ID NO: 3284477 - DNA, 25 bp, Homo sapien
tgatgcctggaactgccgcagccac

SEQ ID NO: 3284478 - DNA, 25 bp, Homo sapien
caccttgtaagtgtgagggagacat

SEQ ID NO: 3284479 - DNA, 25 bp, Homo sapien
tctcctcttgagacacccgttttct

SEQ ID NO: 3284480 - DNA, 25 bp, Homo sapien
cccagtattgtacatgccttgtctg

SEQ ID NO: 3284481 - DNA, 25 bp, Homo sapien
tgactttaatacctgcagtttctcc

SEQ ID NO: 3284482 - DNA, 25 bp, Homo sapien
tctgacatcactattacttttgact

SEQ ID NO: 3284483 - DNA, 25 bp, Homo sapien
ccttgacgtaactctggtggacaga

SEQ ID NO: 3284484 - DNA, 25 bp, Homo sapien
ccccttgacgtaactctggtggaca

SEQ ID NO: 3284485 - DNA, 25 bp, Homo sapien
ctgcccccttgacgtaactctggtg

SEQ ID NO: 3284486 - DNA, 25 bp, Homo sapien
gcccccttgacgtaactctggtgga

SEQ ID NO: 3284487 - DNA, 25 bp, Homo sapien
ttgccacgcatgctacattcttctg

SEQ ID NO: 3284488 - DNA, 25 bp, Homo sapien
tgaaaccttccgattcccttggctc

SEQ ID NO: 3284489 - DNA, 25 bp, Homo sapien
gatccatctaaaatcgatgatgtcg

SEQ ID NO: 3284490 - DNA, 25 bp, Homo sapien
ttctgcttccatgatcctgtcattc

SEQ ID NO: 3284491 - DNA, 25 bp, Homo sapien
ggtggggatggtgcaagacacactc

SEQ ID NO: 3284492 - DNA, 25 bp, Homo sapien
cctggaacaggtggggatggtgcaa

SEQ ID NO: 3284493 - DNA, 25 bp, Homo sapien
catttcacgtctcttcctggaacag

SEQ ID NO: 3284494 - DNA, 25 bp, Homo sapien
tcatttcacgtctcttcctggaaca

SEQ ID NO: 3284495 - DNA, 25 bp, Homo sapien
ggcggtcatggccacgtacattcca

SEQ ID NO: 3284496 - DNA, 25 bp, Homo sapien
ctgggcggtcatggccacgtacatt

SEQ ID NO: 3284497 - DNA, 25 bp, Homo sapien
tcatggccacgtacattccatagct

SEQ ID NO: 3284498 - DNA, 25 bp, Homo sapien
ggtcatggccacgtacattccatag

SEQ ID NO: 3284499 - DNA, 25 bp, Homo sapien
gctcttgattgtgaaggcatgtaac

SEQ ID NO: 3284500 - DNA, 25 bp, Homo sapien
aactgatgctcttgattgtgaaggc

SEQ ID NO: 3284501 - DNA, 25 bp, Homo sapien
ttgtgaaggcatgtaacatcctcat

SEQ ID NO: 3284502 - DNA, 25 bp, Homo sapien
tgaactgatgctcttgattgtgaag

SEQ ID NO: 3284503 - DNA, 25 bp, Homo sapien
ttccttccccacttcagtggtgctc

SEQ ID NO: 3284504 - DNA, 25 bp, Homo sapien
tcagtggtgctctggaagctggaac

SEQ ID NO: 3284505 - DNA, 25 bp, Homo sapien
gcttaggataaagatactggatgcc

SEQ ID NO: 3284506 - DNA, 25 bp, Homo sapien
ttaggttgatctttgatccccatgc

SEQ ID NO: 3284507 - DNA, 25 bp, Homo sapien
tttcacaggagttaacagtgacagc

SEQ ID NO: 3284508 - DNA, 25 bp, Homo sapien
ctttcacaggagttaacagtgacag

SEQ ID NO: 3284509 - DNA, 25 bp, Homo sapien
ttcacaggagttaacagtgacagca

SEQ ID NO: 3284510 - DNA, 25 bp, Homo sapien
gggcctttcatatggcttccctgcc

SEQ ID NO: 3284511 - DNA, 25 bp, Homo sapien
gtgggcctttcatatggcttccctg

SEQ ID NO: 3284512 - DNA, 25 bp, Homo sapien
tctgcaccaatccctctatgcaatc

SEQ ID NO: 3284513 - DNA, 25 bp, Homo sapien
tgcaccaatccctctatgcaatcct

SEQ ID NO: 3284514 - DNA, 25 bp, Homo sapien
tggaggtttactaaatctggttgct

SEQ ID NO: 3284515 - DNA, 25 bp, Homo sapien
catttggaggtttactaaatctggt

SEQ ID NO: 3284516 - DNA, 25 bp, Homo sapien
gcatttggaggtttactaaatctgg

SEQ ID NO: 3284517 - DNA, 25 bp, Homo sapien
ttggaggtttactaaatctggttgc

SEQ ID NO: 3284518 - DNA, 25 bp, Homo sapien
aagatctccacgtgagtttttcggg

SEQ ID NO: 3284519 - DNA, 25 bp, Homo sapien
tctgaagtctactccaggagggcct

SEQ ID NO: 3284520 - DNA, 25 bp, Homo sapien
tcggggtggcccatctgaagtctac

SEQ ID NO: 3284521 - DNA, 25 bp, Homo sapien
ccccggcattaagatctccacgtga

SEQ ID NO: 3284522 - DNA, 25 bp, Homo sapien
tctgggtggtactttccaggcccag

SEQ ID NO: 3284523 - DNA, 25 bp, Homo sapien
tgggtggtactttccaggcccagcc

SEQ ID NO: 3284524 - DNA, 25 bp, Homo sapien
gatctgggtggtactttccaggccc

SEQ ID NO: 3284525 - DNA, 25 bp, Homo sapien
ctggatctgggtggtactttccagg

SEQ ID NO: 3284526 - DNA, 25 bp, Homo sapien
taatattacacgcttcaaaaaacat

SEQ ID NO: 3284527 - DNA, 25 bp, Homo sapien
taatctggcttaaattagggaacag

SEQ ID NO: 3284528 - DNA, 25 bp, Homo sapien
gtaatctggcttaaattagggaaca

SEQ ID NO: 3284529 - DNA, 25 bp, Homo sapien
atattacacgcttcaaaaaacatgc

SEQ ID NO: 3284530 - DNA, 25 bp, Homo sapien
taagaatgtcagaacaactgagccc

SEQ ID NO: 3284531 - DNA, 25 bp, Homo sapien
ttctcggacaatatcgccagaaatc

SEQ ID NO: 3284532 - DNA, 25 bp, Homo sapien
tatcgccagaaatctgtctagtatt

SEQ ID NO: 3284533 - DNA, 25 bp, Homo sapien
caatatcgccagaaatctgtctagt

SEQ ID NO: 3284534 - DNA, 25 bp, Homo sapien
ggacaatatcgccagaaatctgtct

SEQ ID NO: 3284535 - DNA, 25 bp, Homo sapien
ttcttccaccagtttggtagtctga

SEQ ID NO: 3284536 - DNA, 25 bp, Homo sapien
tgttcttccaccagtttggtagtct

SEQ ID NO: 3284537 - DNA, 25 bp, Homo sapien
gttcttccaccagtttggtagtctg

SEQ ID NO: 3284538 - DNA, 25 bp, Homo sapien
aatgttcttccaccagtttggtagt

SEQ ID NO: 3284539 - DNA, 25 bp, Homo sapien
gaatggtacagagttcagcctgggt

SEQ ID NO: 3284540 - DNA, 25 bp, Homo sapien
tgaatggtacagagttcagcctggg

SEQ ID NO: 3284541 - DNA, 25 bp, Homo sapien
tctgaatggtacagagttcagcctg

SEQ ID NO: 3284542 - DNA, 25 bp, Homo sapien
tcttctgaatggtacagagttcagc

SEQ ID NO: 3284543 - DNA, 25 bp, Homo sapien
ctgagaagtgaaagagcagcagttt

SEQ ID NO: 3284544 - DNA, 25 bp, Homo sapien
gcagtttcaaaaaacaggtccactc

SEQ ID NO: 3284545 - DNA, 25 bp, Homo sapien
agcagcagtttcaaaaaacaggtcc

SEQ ID NO: 3284546 - DNA, 25 bp, Homo sapien
cagcagtttcaaaaaacaggtccac

SEQ ID NO: 3284547 - DNA, 25 bp, Homo sapien
gctttagatcctgtgcacagttaag

SEQ ID NO: 3284548 - DNA, 25 bp, Homo sapien
actcggagaataacgcaaccctgcc

SEQ ID NO: 3284549 - DNA, 25 bp, Homo sapien
ttccactcggagaataacgcaaccc

SEQ ID NO: 3284550 - DNA, 25 bp, Homo sapien
tagatcctgtgcacagttaagggca

SEQ ID NO: 3284551 - DNA, 25 bp, Homo sapien
tgtcttctgccagttagctgcttct

SEQ ID NO: 3284552 - DNA, 25 bp, Homo sapien
caagtgcagtagcaacgggatatcg

SEQ ID NO: 3284553 - DNA, 25 bp, Homo sapien
tcttggtcttcataatgggcttcta

SEQ ID NO: 3284554 - DNA, 25 bp, Homo sapien
gcttctcattatcattagatgcatc

SEQ ID NO: 3284555 - DNA, 25 bp, Homo sapien
tcctttctagttcctgagtacttcc

SEQ ID NO: 3284556 - DNA, 25 bp, Homo sapien
ttcctttctagttcctgagtacttc

SEQ ID NO: 3284557 - DNA, 25 bp, Homo sapien
ttctagttcctgagtacttcccgga

SEQ ID NO: 3284558 - DNA, 25 bp, Homo sapien
ctttctagttcctgagtacttcccg

SEQ ID NO: 3284559 - DNA, 25 bp, Homo sapien
taatggaggttgttttcatagtaga

SEQ ID NO: 3284560 - DNA, 25 bp, Homo sapien
aatggaggttgttttcatagtagaa

SEQ ID NO: 3284561 - DNA, 25 bp, Homo sapien
cataatggaggttgttttcatagta

SEQ ID NO: 3284562 - DNA, 25 bp, Homo sapien
atggaggttgttttcatagtagaag

SEQ ID NO: 3284563 - DNA, 25 bp, Homo sapien
ggctagttcaccccaggtgaacctg

SEQ ID NO: 3284564 - DNA, 25 bp, Homo sapien
tggacgcctgatcgacatagcacag

SEQ ID NO: 3284565 - DNA, 25 bp, Homo sapien
cgcctgatcgacatagcacagtaca

SEQ ID NO: 3284566 - DNA, 25 bp, Homo sapien
caccccaggtgaacctggtggtctc

SEQ ID NO: 3284567 - DNA, 25 bp, Homo sapien
caaagcataagagccttcggaagca

SEQ ID NO: 3284568 - DNA, 25 bp, Homo sapien
actttcccgagtttggtgacgatga

SEQ ID NO: 3284569 - DNA, 25 bp, Homo sapien
ttcggaagcagcatgtaagtgcaac

SEQ ID NO: 3284570 - DNA, 25 bp, Homo sapien
gatgaatcgtagactgcaggctgag

SEQ ID NO: 3284571 - DNA, 25 bp, Homo sapien
cacgccccgccgagtgtttatttct

SEQ ID NO: 3284572 - DNA, 25 bp, Homo sapien
ggctcccatgccaagtgaaacttgt

SEQ ID NO: 3284573 - DNA, 25 bp, Homo sapien
tatttctttatgaaggctcccatgc

SEQ ID NO: 3284574 - DNA, 25 bp, Homo sapien
tgaaggatagaggtaaaactctgcc

SEQ ID NO: 3284575 - DNA, 25 bp, Homo sapien
caactaaataaagcaatgcacaagt

SEQ ID NO: 3284576 - DNA, 25 bp, Homo sapien
tcaactaaataaagcaatgcacaag

SEQ ID NO: 3284577 - DNA, 25 bp, Homo sapien
tttcaactaaataaagcaatgcaca

SEQ ID NO: 3284578 - DNA, 25 bp, Homo sapien
atttcaactaaataaagcaatgcac

SEQ ID NO: 3284579 - DNA, 25 bp, Homo sapien
aggagcaaaagccaagaaacaagga

SEQ ID NO: 3284580 - DNA, 25 bp, Homo sapien
gcttaactccaggagcaaaagccaa

SEQ ID NO: 3284581 - DNA, 25 bp, Homo sapien
ttaactccaggagcaaaagccaaga

SEQ ID NO: 3284582 - DNA, 25 bp, Homo sapien
gcaaaagccaagaaacaaggattct

SEQ ID NO: 3284583 - DNA, 25 bp, Homo sapien
ggaaatgcaatttatctagtctgcc

SEQ ID NO: 3284584 - DNA, 25 bp, Homo sapien
gggaaatgcaatttatctagtctgc

SEQ ID NO: 3284585 - DNA, 25 bp, Homo sapien
cagaaaatgtgtgttaacaaatctc

SEQ ID NO: 3284586 - DNA, 25 bp, Homo sapien
caaatctcatgtaaagaaacacagg

SEQ ID NO: 3284587 - DNA, 25 bp, Homo sapien
gattttaatattatgaccaccttcc

SEQ ID NO: 3284588 - DNA, 25 bp, Homo sapien
tcagcagggtccatttcgaatgatt

SEQ ID NO: 3284589 - DNA, 25 bp, Homo sapien
gcagggtccatttcgaatgatttta

SEQ ID NO: 3284590 - DNA, 25 bp, Homo sapien
gggtccatttcgaatgattttaata

SEQ ID NO: 3284591 - DNA, 25 bp, Homo sapien
tcattggcataagtggacatgtcac

SEQ ID NO: 3284592 - DNA, 25 bp, Homo sapien
tggacatgtcactgccacacacagg

SEQ ID NO: 3284593 - DNA, 25 bp, Homo sapien
cctggtaatctatactgagagcagt

SEQ ID NO: 3284594 - DNA, 25 bp, Homo sapien
catgcacagagtacattcattggca

SEQ ID NO: 3284595 - DNA, 25 bp, Homo sapien
tatactctagagcaggggtttccaa

SEQ ID NO: 3284596 - DNA, 25 bp, Homo sapien
tactctagagcaggggtttccaacc

SEQ ID NO: 3284597 - DNA, 25 bp, Homo sapien
tttatactctagagcaggggtttcc

SEQ ID NO: 3284598 - DNA, 25 bp, Homo sapien
ctttatactctagagcaggggtttc

SEQ ID NO: 3284599 - DNA, 25 bp, Homo sapien
taaacaccactgcacaaaaaccagc

SEQ ID NO: 3284600 - DNA, 25 bp, Homo sapien
gaacagagaaatctgtggttgtgat

SEQ ID NO: 3284601 - DNA, 25 bp, Homo sapien
caagcgaagcagtggaatagaaaag

SEQ ID NO: 3284602 - DNA, 25 bp, Homo sapien
gactggtcaagcgaagcagtggaat

SEQ ID NO: 3284603 - DNA, 25 bp, Homo sapien
gaaaacagaccaaattgagggatca

SEQ ID NO: 3284604 - DNA, 25 bp, Homo sapien
cagaccaaattgagggatcagagag

SEQ ID NO: 3284605 - DNA, 25 bp, Homo sapien
tattttgaaaacagaccaaattgag

SEQ ID NO: 3284606 - DNA, 25 bp, Homo sapien
aacagaccaaattgagggatcagag

SEQ ID NO: 3284607 - DNA, 25 bp, Homo sapien
cttagagctgggagcgaagcccaag

SEQ ID NO: 3284608 - DNA, 25 bp, Homo sapien
gctgggagcgaagcccaagcaagaa

SEQ ID NO: 3284609 - DNA, 25 bp, Homo sapien
agcgctctagatggcaggtgtcctt

SEQ ID NO: 3284610 - DNA, 25 bp, Homo sapien
ctttaacagagaaagcgctctagat

SEQ ID NO: 3284611 - DNA, 25 bp, Homo sapien
gcaggtcctctggggaaccgccagt

SEQ ID NO: 3284612 - DNA, 25 bp, Homo sapien
caggtcctctggggaaccgccagta

SEQ ID NO: 3284613 - DNA, 25 bp, Homo sapien
tggcaggtcctctggggaaccgcca

SEQ ID NO: 3284614 - DNA, 25 bp, Homo sapien
ctggcaggtcctctggggaaccgcc

SEQ ID NO: 3284615 - DNA, 25 bp, Homo sapien
gcagggtccgccgccggtctgactc

SEQ ID NO: 3284616 - DNA, 25 bp, Homo sapien
gtcgccgaggccgcccggagcaggg

SEQ ID NO: 3284617 - DNA, 25 bp, Homo sapien
tctgactcccaaacccgcttttctc

SEQ ID NO: 3284618 - DNA, 25 bp, Homo sapien
tcgccaggaccgctccgagcgctac

SEQ ID NO: 3284619 - DNA, 25 bp, Homo sapien
ctgcgaaggtaactgccaggagcag

SEQ ID NO: 3284620 - DNA, 25 bp, Homo sapien
ggtctgttacctgcgccactcgcag

SEQ ID NO: 3284621 - DNA, 25 bp, Homo sapien
tgttacctgcgccactcgcagggag

SEQ ID NO: 3284622 - DNA, 25 bp, Homo sapien
cccctgcggtctgttacctgcgcca

SEQ ID NO: 3284623 - DNA, 25 bp, Homo sapien
tcccgcgccggctgtcttgcccctg

SEQ ID NO: 3284624 - DNA, 25 bp, Homo sapien
ggcttcagtgcggtaccgcaacatc

SEQ ID NO: 3284625 - DNA, 25 bp, Homo sapien
gtcaacaggcttcagtgcggtaccg

SEQ ID NO: 3284626 - DNA, 25 bp, Homo sapien
aacaggcttcagtgcggtaccgcaa

SEQ ID NO: 3284627 - DNA, 25 bp, Homo sapien
ttcagtgcggtaccgcaacatctgc

SEQ ID NO: 3284628 - DNA, 25 bp, Homo sapien
ttttcatatcagctgaagcaatgct

SEQ ID NO: 3284629 - DNA, 25 bp, Homo sapien
aagctggcagaaaagaatgtatgaa

SEQ ID NO: 3284630 - DNA, 25 bp, Homo sapien
gtaatcagtgtttgaggtactggag

SEQ ID NO: 3284631 - DNA, 25 bp, Homo sapien
tagatgctgcgtaactacttgatgc

SEQ ID NO: 3284632 - DNA, 25 bp, Homo sapien
tcggtctcgggaatttatctccaaa

SEQ ID NO: 3284633 - DNA, 25 bp, Homo sapien
ttaatcggtctcgggaatttatctc

SEQ ID NO: 3284634 - DNA, 25 bp, Homo sapien
aatcggtctcgggaatttatctcca

SEQ ID NO: 3284635 - DNA, 25 bp, Homo sapien
atcggtctcgggaatttatctccaa

SEQ ID NO: 3284636 - DNA, 25 bp, Homo sapien
tcctttctactatgtatgaccactg

SEQ ID NO: 3284637 - DNA, 25 bp, Homo sapien
tcagtatcagcggtgccaagtggct

SEQ ID NO: 3284638 - DNA, 25 bp, Homo sapien
agtaacagccgcctaggccctcagt

SEQ ID NO: 3284639 - DNA, 25 bp, Homo sapien
cactgacccacgattttatgtgaca

SEQ ID NO: 3284640 - DNA, 25 bp, Homo sapien
gaggctttgtttgctgatccttgct

SEQ ID NO: 3284641 - DNA, 25 bp, Homo sapien
gctttgtttgctgatccttgctctc

SEQ ID NO: 3284642 - DNA, 25 bp, Homo sapien
ggctttgtttgctgatccttgctct

SEQ ID NO: 3284643 - DNA, 25 bp, Homo sapien
ctttgtttgctgatccttgctctcc

SEQ ID NO: 3284644 - DNA, 25 bp, Homo sapien
gtattcttttgctccaactccggct

SEQ ID NO: 3284645 - DNA, 25 bp, Homo sapien
tcttttgctccaactccggctggtg

SEQ ID NO: 3284646 - DNA, 25 bp, Homo sapien
tttgctccaactccggctggtgtgc

SEQ ID NO: 3284647 - DNA, 25 bp, Homo sapien
gatcctgtgcacttcatcttcagta

SEQ ID NO: 3284648 - DNA, 25 bp, Homo sapien
ctttccaaagctgaactggccgcac

SEQ ID NO: 3284649 - DNA, 25 bp, Homo sapien
tctgctgatataaaaggtgaacctc

SEQ ID NO: 3284650 - DNA, 25 bp, Homo sapien
taacgacatgtatgacttgcatgac

SEQ ID NO: 3284651 - DNA, 25 bp, Homo sapien
agcttattatgctggcaaatgtggc

SEQ ID NO: 3284652 - DNA, 25 bp, Homo sapien
ccctgaaacacctggagcggaggac

SEQ ID NO: 3284653 - DNA, 25 bp, Homo sapien
aagatcttccccctgaaacacctgg

SEQ ID NO: 3284654 - DNA, 25 bp, Homo sapien
tcaggtgctccagatatttacagtt

SEQ ID NO: 3284655 - DNA, 25 bp, Homo sapien
ggcatcaggtgctccagatatttac

SEQ ID NO: 3284656 - DNA, 25 bp, Homo sapien
ccgcgcctggctggaactattattt

SEQ ID NO: 3284657 - DNA, 25 bp, Homo sapien
accgcgcctggctggaactattatt

SEQ ID NO: 3284658 - DNA, 25 bp, Homo sapien
tcaccgcgcctggctggaactatta

SEQ ID NO: 3284659 - DNA, 25 bp, Homo sapien
gcgcctggctggaactattattttt

SEQ ID NO: 3284660 - DNA, 25 bp, Homo sapien
tagtcaggaagtgccaaagggtgac

SEQ ID NO: 3284661 - DNA, 25 bp, Homo sapien
gaaaagcagtaagcctcctcagaag

SEQ ID NO: 3284662 - DNA, 25 bp, Homo sapien
aggtgactaccagaactcgaaaatc

SEQ ID NO: 3284663 - DNA, 25 bp, Homo sapien
tgctcccacagaggcggttcagaag

SEQ ID NO: 3284664 - DNA, 25 bp, Homo sapien
aaaccactaggttgcatgtcgaaca

SEQ ID NO: 3284665 - DNA, 25 bp, Homo sapien
caaatgaattgcagctatcctggtg

SEQ ID NO: 3284666 - DNA, 25 bp, Homo sapien
tatcctggtgttcctatgagggcac

SEQ ID NO: 3284667 - DNA, 25 bp, Homo sapien
tattacgcggcaaacctaggataag

SEQ ID NO: 3284668 - DNA, 25 bp, Homo sapien
cattgtcaacagaagatcaagctgc

SEQ ID NO: 3284669 - DNA, 25 bp, Homo sapien
cattaataacgtgtgggtggaaagc

SEQ ID NO: 3284670 - DNA, 25 bp, Homo sapien
tgaacatggcattgactgggaggcc

SEQ ID NO: 3284671 - DNA, 25 bp, Homo sapien
gaattctaggctccgacaatcattg

SEQ ID NO: 3284672 - DNA, 25 bp, Homo sapien
tgacctcagcagatgaagtgaacag

SEQ ID NO: 3284673 - DNA, 25 bp, Homo sapien
cagaaaaacttacagctggtgttcc

SEQ ID NO: 3284674 - DNA, 25 bp, Homo sapien
catgtgtacataggttccctcccgg

SEQ ID NO: 3284675 - DNA, 25 bp, Homo sapien
cacttctggattgataagctgagga

SEQ ID NO: 3284676 - DNA, 25 bp, Homo sapien
ctttagcagcatttgatggaagatc

SEQ ID NO: 3284677 - DNA, 25 bp, Homo sapien
taaatttctcaaggttcttgctgcc

SEQ ID NO: 3284678 - DNA, 25 bp, Homo sapien
taagcagtgcaatacgtgttacttt

SEQ ID NO: 3284679 - DNA, 25 bp, Homo sapien
aaataaaccagattgcaaatccttt

SEQ ID NO: 3284680 - DNA, 25 bp, Homo sapien
tgcattctattaaccaatatgagtg

SEQ ID NO: 3284681 - DNA, 25 bp, Homo sapien
tggtccaaattatgtaggataagtt

SEQ ID NO: 3284682 - DNA, 25 bp, Homo sapien
catgtaccaagtttttggtccaaat

SEQ ID NO: 3284683 - DNA, 25 bp, Homo sapien
ttctgtaagcatagttatgttgaaa

SEQ ID NO: 3284684 - DNA, 25 bp, Homo sapien
gagtcaggagaatggtatttcatat

SEQ ID NO: 3284685 - DNA, 25 bp, Homo sapien
tggtgagttattcaccctcttccca

SEQ ID NO: 3284686 - DNA, 25 bp, Homo sapien
gcctcctctcaaaagcgttcgtatt

SEQ ID NO: 3284687 - DNA, 25 bp, Homo sapien
tttgatgcagtgtcagatctggaag

SEQ ID NO: 3284688 - DNA, 25 bp, Homo sapien
gtccgcagtgaaagccaagtttatt

SEQ ID NO: 3284689 - DNA, 25 bp, Homo sapien
gcaagtccgcagtgaaagccaagtt

SEQ ID NO: 3284690 - DNA, 25 bp, Homo sapien
agggcaagtccgcagtgaaagccaa

SEQ ID NO: 3284691 - DNA, 25 bp, Homo sapien
aagtccgcagtgaaagccaagttta

SEQ ID NO: 3284692 - DNA, 25 bp, Homo sapien
cagcaatgtgaaagattcccagcca

SEQ ID NO: 3284693 - DNA, 25 bp, Homo sapien
catgctgtgatctgtccgtggtact

SEQ ID NO: 3284694 - DNA, 25 bp, Homo sapien
gcaagctcatcagcaatgtgaaaga

SEQ ID NO: 3284695 - DNA, 25 bp, Homo sapien
tgtccgtggtacttggcaagctcat

SEQ ID NO: 3284696 - DNA, 25 bp, Homo sapien
ctgaggtggtgagagagcatggaaa

SEQ ID NO: 3284697 - DNA, 25 bp, Homo sapien
tgaggtggtgagagagcatggaaat

SEQ ID NO: 3284698 - DNA, 25 bp, Homo sapien
aggtggtgagagagcatggaaatca

SEQ ID NO: 3284699 - DNA, 25 bp, Homo sapien
gaggtggtgagagagcatggaaatc

SEQ ID NO: 3284700 - DNA, 25 bp, Homo sapien
tacaaaagaggtgacatgctcaaca

SEQ ID NO: 3284701 - DNA, 25 bp, Homo sapien
gccacatatacagccgtagtctggt

SEQ ID NO: 3284702 - DNA, 25 bp, Homo sapien
gcagagccaggtaaacaatctagaa

SEQ ID NO: 3284703 - DNA, 25 bp, Homo sapien
aagtgaggagttggtactttgccct

SEQ ID NO: 3284704 - DNA, 25 bp, Homo sapien
gacagaacatggtcctctcaggaat

SEQ ID NO: 3284705 - DNA, 25 bp, Homo sapien
taggatctgggacttgacttgccaa

SEQ ID NO: 3284706 - DNA, 25 bp, Homo sapien
tgtggtactacttactcagctagga

SEQ ID NO: 3284707 - DNA, 25 bp, Homo sapien
ttcatggctctaactgcgtttcagc

SEQ ID NO: 3284708 - DNA, 25 bp, Homo sapien
cagttgctagaaatacatagctttt

SEQ ID NO: 3284709 - DNA, 25 bp, Homo sapien
taaagacttctgattgatgtaatgt

SEQ ID NO: 3284710 - DNA, 25 bp, Homo sapien
tctcagttgcagaatagacctcagt

SEQ ID NO: 3284711 - DNA, 25 bp, Homo sapien
aaatggttaaagtgtcctctcagtt

SEQ ID NO: 3284712 - DNA, 25 bp, Homo sapien
aagctgaatacattatgaacataag

SEQ ID NO: 3284713 - DNA, 25 bp, Homo sapien
gaatacattatgaacataagtcttg

SEQ ID NO: 3284714 - DNA, 25 bp, Homo sapien
gctgaatacattatgaacataagtc

SEQ ID NO: 3284715 - DNA, 25 bp, Homo sapien
taagctgaatacattatgaacataa

SEQ ID NO: 3284716 - DNA, 25 bp, Homo sapien
tacagttaatatctggagtgaacaa

SEQ ID NO: 3284717 - DNA, 25 bp, Homo sapien
tgttcaatacagttaatatctggag

SEQ ID NO: 3284718 - DNA, 25 bp, Homo sapien
tgttgtgttcaatacagttaatatc

SEQ ID NO: 3284719 - DNA, 25 bp, Homo sapien
tatgcgttatatgtttaatacaaat

SEQ ID NO: 3284720 - DNA, 25 bp, Homo sapien
tttatctttcctttcttcttcctca

SEQ ID NO: 3284721 - DNA, 25 bp, Homo sapien
catttatctttcctttcttcttcct

SEQ ID NO: 3284722 - DNA, 25 bp, Homo sapien
tcatacatttatctttcctttcttc

SEQ ID NO: 3284723 - DNA, 25 bp, Homo sapien
ttatctttcctttcttcttcctcac

SEQ ID NO: 3284724 - DNA, 25 bp, Homo sapien
tccttcaggtgtatagcctcggaga

SEQ ID NO: 3284725 - DNA, 25 bp, Homo sapien
cggacggtcaaaactgttccttcag

SEQ ID NO: 3284726 - DNA, 25 bp, Homo sapien
gatgcgctgtcctttgatgttaaca

SEQ ID NO: 3284727 - DNA, 25 bp, Homo sapien
tcggagatgcagtctgtccttaaaa

SEQ ID NO: 3284728 - DNA, 25 bp, Homo sapien
acacaaaaggctgttagcaatcatc

SEQ ID NO: 3284729 - DNA, 25 bp, Homo sapien
gcaggcatgtgacacaacacaaaag

SEQ ID NO: 3284730 - DNA, 25 bp, Homo sapien
gaaaatggactatcagagaacgctg

SEQ ID NO: 3284731 - DNA, 25 bp, Homo sapien
gagaacgctgtcactctctttcact

SEQ ID NO: 3284732 - DNA, 25 bp, Homo sapien
ggaaatcctgccattcgttcttttc

SEQ ID NO: 3284733 - DNA, 25 bp, Homo sapien
aaatcctgccattcgttcttttcca

SEQ ID NO: 3284734 - DNA, 25 bp, Homo sapien
aatcctgccattcgttcttttccac

SEQ ID NO: 3284735 - DNA, 25 bp, Homo sapien
cctgccattcgttcttttccaccca

SEQ ID NO: 3284736 - DNA, 25 bp, Homo sapien
tgggctaatggctaccaaattggac

SEQ ID NO: 3284737 - DNA, 25 bp, Homo sapien
tattctaggatcagtctatatagag

SEQ ID NO: 3284738 - DNA, 25 bp, Homo sapien
taccaaattggacagtgtagtctag

SEQ ID NO: 3284739 - DNA, 25 bp, Homo sapien
gtgcagtagcgcagtagcgcgatct

SEQ ID NO: 3284740 - DNA, 25 bp, Homo sapien
gatacagagcgtctgccctgtccaa

SEQ ID NO: 3284741 - DNA, 25 bp, Homo sapien
cgactgtaaaccaagctgactgatt

SEQ ID NO: 3284742 - DNA, 25 bp, Homo sapien
gtccaaggaggtgatatgcacaggg

SEQ ID NO: 3284743 - DNA, 25 bp, Homo sapien
gaggatgttggaagccacgactgta

SEQ ID NO: 3284744 - DNA, 25 bp, Homo sapien
ctgcaggaaatctatgcggcctata

SEQ ID NO: 3284745 - DNA, 25 bp, Homo sapien
tatgcggcctatagcacccaaaaac

SEQ ID NO: 3284746 - DNA, 25 bp, Homo sapien
ggaacaatggactgtgttggcaaaa

SEQ ID NO: 3284747 - DNA, 25 bp, Homo sapien
cctggtttaagcacaaaagttcttg

SEQ ID NO: 3284748 - DNA, 25 bp, Homo sapien
ccttggaaggtgacatgacagtttc

SEQ ID NO: 3284749 - DNA, 25 bp, Homo sapien
tttcagttcaagatggaggacccct

SEQ ID NO: 3284750 - DNA, 25 bp, Homo sapien
catgttacagggagactattcagct

SEQ ID NO: 3284751 - DNA, 25 bp, Homo sapien
gaccccttgatggatatgttacaga

SEQ ID NO: 3284752 - DNA, 25 bp, Homo sapien
gtgtgtacccataacagggtcattt

SEQ ID NO: 3284753 - DNA, 25 bp, Homo sapien
caaactcaaagggaatgttatcctt

SEQ ID NO: 3284754 - DNA, 25 bp, Homo sapien
tcacatcttgtgcagtcaattctac

SEQ ID NO: 3284755 - DNA, 25 bp, Homo sapien
ggcaagtgaatcagcatcaaactca

SEQ ID NO: 3284756 - DNA, 25 bp, Homo sapien
taaggagttgggttgcaaataggaa

SEQ ID NO: 3284757 - DNA, 25 bp, Homo sapien
tttttgaggacattaagctgatttt

SEQ ID NO: 3284758 - DNA, 25 bp, Homo sapien
gctcactaagatcttcttcagcttg

SEQ ID NO: 3284759 - DNA, 25 bp, Homo sapien
gacattaagctgattttgttcttgc

SEQ ID NO: 3284760 - DNA, 25 bp, Homo sapien
tggtggcgcccactaagtagacgtc

SEQ ID NO: 3284761 - DNA, 25 bp, Homo sapien
gcagtgcagtaatcggactccagga

SEQ ID NO: 3284762 - DNA, 25 bp, Homo sapien
gattcggattctccccgtcctgtgg

SEQ ID NO: 3284763 - DNA, 25 bp, Homo sapien
tgttaaagagagtggatttgccggc

SEQ ID NO: 3284764 - DNA, 25 bp, Homo sapien
ggcaatgccgggtccgggtgcccca

SEQ ID NO: 3284765 - DNA, 25 bp, Homo sapien
cccacagcccgagcagttcacgccg

SEQ ID NO: 3284766 - DNA, 25 bp, Homo sapien
cacgccgctgggcggcaatgccggg

SEQ ID NO: 3284767 - DNA, 25 bp, Homo sapien
gccccacagcccgagcagttcacgc

SEQ ID NO: 3284768 - DNA, 25 bp, Homo sapien
ctggcccgtaggttttgctgtcgcc

SEQ ID NO: 3284769 - DNA, 25 bp, Homo sapien
gtaggttttgctgtcgccgctcctc

SEQ ID NO: 3284770 - DNA, 25 bp, Homo sapien
ccgtaggttttgctgtcgccgctcc

SEQ ID NO: 3284771 - DNA, 25 bp, Homo sapien
gcccgtaggttttgctgtcgccgct

SEQ ID NO: 3284772 - DNA, 25 bp, Homo sapien
ctgcttttcgcgggtgggttgcggc

SEQ ID NO: 3284773 - DNA, 25 bp, Homo sapien
agctgcttttcgcgggtgggttgcg

SEQ ID NO: 3284774 - DNA, 25 bp, Homo sapien
gcagctgcttttcgcgggtgggttg

SEQ ID NO: 3284775 - DNA, 25 bp, Homo sapien
gcttttcgcgggtgggttgcggctc

SEQ ID NO: 3284776 - DNA, 25 bp, Homo sapien
agaaaacgctcctgcatgtcaccac

SEQ ID NO: 3284777 - DNA, 25 bp, Homo sapien
gaacagaaaacgctcctgcatgtca

SEQ ID NO: 3284778 - DNA, 25 bp, Homo sapien
gctcgcgtcccagactcgatgagtg

SEQ ID NO: 3284779 - DNA, 25 bp, Homo sapien
tgtccacggggtcataaggaagctc

SEQ ID NO: 3284780 - DNA, 25 bp, Homo sapien
ctggaaggaggaggcggcagcgcac

SEQ ID NO: 3284781 - DNA, 25 bp, Homo sapien
aggccatggcgcgctgccgtgggag

SEQ ID NO: 3284782 - DNA, 25 bp, Homo sapien
gcggatccacgaaggaaaaggctca

SEQ ID NO: 3284783 - DNA, 25 bp, Homo sapien
cagcagcctgaacggtaggcgagcg

SEQ ID NO: 3284784 - DNA, 25 bp, Homo sapien
gccgtgggagcggatccacgaagga

SEQ ID NO: 3284785 - DNA, 25 bp, Homo sapien
acattgacggaacggatacgaccgc

SEQ ID NO: 3284786 - DNA, 25 bp, Homo sapien
tttgacccgagacgaaagcgcgtgg

SEQ ID NO: 3284787 - DNA, 25 bp, Homo sapien
tgacctacaatttgcgcaggcgcag

SEQ ID NO: 3284788 - DNA, 25 bp, Homo sapien
caatgttgcggattcacaggacgaa

SEQ ID NO: 3284789 - DNA, 25 bp, Homo sapien
aaattagggtacttagcatacctgt

SEQ ID NO: 3284790 - DNA, 25 bp, Homo sapien
atttaataattatgcatgtgtggga

SEQ ID NO: 3284791 - DNA, 25 bp, Homo sapien
tttaataattatgcatgtgtgggat

SEQ ID NO: 3284792 - DNA, 25 bp, Homo sapien
ttagggtacttagcatacctgtcac

SEQ ID NO: 3284793 - DNA, 25 bp, Homo sapien
taacgatgtctttaatgggtctagg

SEQ ID NO: 3284794 - DNA, 25 bp, Homo sapien
tattgtattcaaacctaacgatgtc

SEQ ID NO: 3284795 - DNA, 25 bp, Homo sapien
cattgtgtctcaatttaggtttgac

SEQ ID NO: 3284796 - DNA, 25 bp, Homo sapien
gctaatccaggattgtgcattgcat

SEQ ID NO: 3284797 - DNA, 25 bp, Homo sapien
tgagccagggtactttgtaaaaagc

SEQ ID NO: 3284798 - DNA, 25 bp, Homo sapien
tcccctctcgtatgactattggtca

SEQ ID NO: 3284799 - DNA, 25 bp, Homo sapien
catacagtaattcagttgggagaac

SEQ ID NO: 3284800 - DNA, 25 bp, Homo sapien
cctgtgaaggtatcacccctgatat

SEQ ID NO: 3284801 - DNA, 25 bp, Homo sapien
tgcaggtcctgtacaatgggttcac

SEQ ID NO: 3284802 - DNA, 25 bp, Homo sapien
cagatcctcaatagacagcccatgg

SEQ ID NO: 3284803 - DNA, 25 bp, Homo sapien
tattggccccacttattaccagcgt

SEQ ID NO: 3284804 - DNA, 25 bp, Homo sapien
gataagattcactctcgtgctaggg

SEQ ID NO: 3284805 - DNA, 25 bp, Homo sapien
cacttgaatggagaatatgactgct

SEQ ID NO: 3284806 - DNA, 25 bp, Homo sapien
cctgagttctgctaaggtgtcagca

SEQ ID NO: 3284807 - DNA, 25 bp, Homo sapien
aaaaatagctttgactctcaggcgg

SEQ ID NO: 3284808 - DNA, 25 bp, Homo sapien
aggcggtccatgaaccacactctga

SEQ ID NO: 3284809 - DNA, 25 bp, Homo sapien
gatccagatcagtggtccaaagtcg

SEQ ID NO: 3284810 - DNA, 25 bp, Homo sapien
taaatgatagcatgatgaacctcca

SEQ ID NO: 3284811 - DNA, 25 bp, Homo sapien
taagtatgttaaggaagccatcacc

SEQ ID NO: 3284812 - DNA, 25 bp, Homo sapien
gattgcctgggacagtcattccatt

SEQ ID NO: 3284813 - DNA, 25 bp, Homo sapien
gagaaagaaccaccataagctgagg

SEQ ID NO: 3284814 - DNA, 25 bp, Homo sapien
taaaataccaaagcctactaggaga

SEQ ID NO: 3284815 - DNA, 25 bp, Homo sapien
caggcagaattagtgtggcagaaca

SEQ ID NO: 3284816 - DNA, 25 bp, Homo sapien
ctgtgttggtctgattatccaggca

SEQ ID NO: 3284817 - DNA, 25 bp, Homo sapien
gatttctttggtgcgaatgccttac

SEQ ID NO: 3284818 - DNA, 25 bp, Homo sapien
ccgcgaatgatgagtgtttagctat

SEQ ID NO: 3284819 - DNA, 25 bp, Homo sapien
tatgtctatgagtattgcaccgcga

SEQ ID NO: 3284820 - DNA, 25 bp, Homo sapien
gccttacgcatgcaaactattgttt

SEQ ID NO: 3284821 - DNA, 25 bp, Homo sapien
ttttatttgtttaatgatatgcatg

SEQ ID NO: 3284822 - DNA, 25 bp, Homo sapien
ttatttgtttaatgatatgcatgct

SEQ ID NO: 3284823 - DNA, 25 bp, Homo sapien
tgtttaatgatatgcatgcttttct

SEQ ID NO: 3284824 - DNA, 25 bp, Homo sapien
cttttcttctgtaaatatataataa

SEQ ID NO: 3284825 - DNA, 25 bp, Homo sapien
aagaaacttattaggcaagaacagg

SEQ ID NO: 3284826 - DNA, 25 bp, Homo sapien
aacaggtaatgtagttatccatgac

SEQ ID NO: 3284827 - DNA, 25 bp, Homo sapien
ccatgcagactaataatattctgga

SEQ ID NO: 3284828 - DNA, 25 bp, Homo sapien
tatccatgactacttttaaccatgc

SEQ ID NO: 3284829 - DNA, 25 bp, Homo sapien
cagctgagtgatctgcacagtggaa

SEQ ID NO: 3284830 - DNA, 25 bp, Homo sapien
tgcccttatgggttgctaactacag

SEQ ID NO: 3284831 - DNA, 25 bp, Homo sapien
taacgatgttcagtcacccatccag

SEQ ID NO: 3284832 - DNA, 25 bp, Homo sapien
tagtccggatctccttcaaaaggta

SEQ ID NO: 3284833 - DNA, 25 bp, Homo sapien
ggcactcatattctccagcatcttc

SEQ ID NO: 3284834 - DNA, 25 bp, Homo sapien
tggatgcatggcactcatattctcc

SEQ ID NO: 3284835 - DNA, 25 bp, Homo sapien
tgatgctgaagcctgtccttgggaa

SEQ ID NO: 3284836 - DNA, 25 bp, Homo sapien
tgtccttgggaattggatgcatggc

SEQ ID NO: 3284837 - DNA, 25 bp, Homo sapien
aagatctagtattcctctgtggtgg

SEQ ID NO: 3284838 - DNA, 25 bp, Homo sapien
tagtattcctctgtggtggtcttct

SEQ ID NO: 3284839 - DNA, 25 bp, Homo sapien
atctagtattcctctgtggtggtct

SEQ ID NO: 3284840 - DNA, 25 bp, Homo sapien
aaaaagatctagtattcctctgtgg

SEQ ID NO: 3284841 - DNA, 25 bp, Homo sapien
aggttgtcccggtcaccaggcagga

SEQ ID NO: 3284842 - DNA, 25 bp, Homo sapien
ccgggtctgaatggccaggttgtcc

SEQ ID NO: 3284843 - DNA, 25 bp, Homo sapien
tctgtcctttgaactccatagtgac

SEQ ID NO: 3284844 - DNA, 25 bp, Homo sapien
gcacccagccagttacttcatgctt

SEQ ID NO: 3284845 - DNA, 25 bp, Homo sapien
tcctttaagagccaacctgacattt

SEQ ID NO: 3284846 - DNA, 25 bp, Homo sapien
accacatgtgatctaggccaattcc

SEQ ID NO: 3284847 - DNA, 25 bp, Homo sapien
tcagctttatgatgccaggactggg

SEQ ID NO: 3284848 - DNA, 25 bp, Homo sapien
cagaaacggtttatgctaatacagc

SEQ ID NO: 3284849 - DNA, 25 bp, Homo sapien
tgggagtgtgaattactacaatcta

SEQ ID NO: 3284850 - DNA, 25 bp, Homo sapien
gaattactacaatctatttagaaag

SEQ ID NO: 3284851 - DNA, 25 bp, Homo sapien
gtgtgaattactacaatctatttag

SEQ ID NO: 3284852 - DNA, 25 bp, Homo sapien
ttcagtgctagtaaagatgcagaga

SEQ ID NO: 3284853 - DNA, 25 bp, Homo sapien
catctcgttgactgacatagtgggt

SEQ ID NO: 3284854 - DNA, 25 bp, Homo sapien
gatctgccctgtacagtcctaaaag

SEQ ID NO: 3284855 - DNA, 25 bp, Homo sapien
ggtgtttctgactagccctgaggac

SEQ ID NO: 3284856 - DNA, 25 bp, Homo sapien
gaaaaccggcagagcatcacagttg

SEQ ID NO: 3284857 - DNA, 25 bp, Homo sapien
ccgcagtcaacaaagcaggctgagg

SEQ ID NO: 3284858 - DNA, 25 bp, Homo sapien
caagagaagcttgtcagcctaggat

SEQ ID NO: 3284859 - DNA, 25 bp, Homo sapien
taaggcttcaccttgcgggagccgc

SEQ ID NO: 3284860 - DNA, 25 bp, Homo sapien
tggtacttaggagaatagatcccac

SEQ ID NO: 3284861 - DNA, 25 bp, Homo sapien
ccagatgaggacaggtgtcgggatt

SEQ ID NO: 3284862 - DNA, 25 bp, Homo sapien
tcgggattccgatgacctcacagct

SEQ ID NO: 3284863 - DNA, 25 bp, Homo sapien
ttggggggcgtcactatggaaggac

SEQ ID NO: 3284864 - DNA, 25 bp, Homo sapien
gacctcacagctcaagtacacctgg

SEQ ID NO: 3284865 - DNA, 25 bp, Homo sapien
agggcacaaagccaaagtcatcttt

SEQ ID NO: 3284866 - DNA, 25 bp, Homo sapien
agagggcacaaagccaaagtcatct

SEQ ID NO: 3284867 - DNA, 25 bp, Homo sapien
gagagggcacaaagccaaagtcatc

SEQ ID NO: 3284868 - DNA, 25 bp, Homo sapien
ggagagggcacaaagccaaagtcat

SEQ ID NO: 3284869 - DNA, 25 bp, Homo sapien
ttttgtttatgaggccatccccttg

SEQ ID NO: 3284870 - DNA, 25 bp, Homo sapien
taattttgtttatgaggccatcccc

SEQ ID NO: 3284871 - DNA, 25 bp, Homo sapien
gaggccatccccttgatggattatc

SEQ ID NO: 3284872 - DNA, 25 bp, Homo sapien
tttatgaggccatccccttgatgga

SEQ ID NO: 3284873 - DNA, 25 bp, Homo sapien
cagcctccccaactgctgggattac

SEQ ID NO: 3284874 - DNA, 25 bp, Homo sapien
gcgtgcaccaccatgtcagttaatt

SEQ ID NO: 3284875 - DNA, 25 bp, Homo sapien
gcttcaagtaattctcctgcctcag

SEQ ID NO: 3284876 - DNA, 25 bp, Homo sapien
ggtcccgaattcctggcttcaagta

SEQ ID NO: 3284877 - DNA, 25 bp, Homo sapien
tctccctattgccaatacaggtagc

SEQ ID NO: 3284878 - DNA, 25 bp, Homo sapien
ccctattgccaatacaggtagcagg

SEQ ID NO: 3284879 - DNA, 25 bp, Homo sapien
ctgtgtccatctccctattgccaat

SEQ ID NO: 3284880 - DNA, 25 bp, Homo sapien
gtccatctccctattgccaatacag

SEQ ID NO: 3284881 - DNA, 25 bp, Homo sapien
tagcccaaggctatgaagatctcct

SEQ ID NO: 3284882 - DNA, 25 bp, Homo sapien
taatttttgtgtgtgctatgaggca

SEQ ID NO: 3284883 - DNA, 25 bp, Homo sapien
agttgaagcactaaatagagggcag

SEQ ID NO: 3284884 - DNA, 25 bp, Homo sapien
taagacccactgtatatgtgtgcgt

SEQ ID NO: 3284885 - DNA, 25 bp, Homo sapien
cactgcacgcgaccaaaatctcttg

SEQ ID NO: 3284886 - DNA, 25 bp, Homo sapien
ttttcggtggatacaatgccagccc

SEQ ID NO: 3284887 - DNA, 25 bp, Homo sapien
ccacagggacaccaagaggacaagt

SEQ ID NO: 3284888 - DNA, 25 bp, Homo sapien
taagcaagcgacttaatggtgaccc

SEQ ID NO: 3284889 - DNA, 25 bp, Homo sapien
gaatttaagaaaggcagttctcaca

SEQ ID NO: 3284890 - DNA, 25 bp, Homo sapien
caaaggactcacagactaccagatt

SEQ ID NO: 3284891 - DNA, 25 bp, Homo sapien
aaaagtactactgatacagaaaagg

SEQ ID NO: 3284892 - DNA, 25 bp, Homo sapien
ggagtattatgagttggttcagaag

SEQ ID NO: 3284893 - DNA, 25 bp, Homo sapien
caattagtatatgaccaggagatgc

SEQ ID NO: 3284894 - DNA, 25 bp, Homo sapien
tgaagcaaatcccaccgagatgggt

SEQ ID NO: 3284895 - DNA, 25 bp, Homo sapien
gaaaatgcaccagtgtacacatggc

SEQ ID NO: 3284896 - DNA, 25 bp, Homo sapien
tacacatggccaaaagcgtacacct

SEQ ID NO: 3284897 - DNA, 25 bp, Homo sapien
tccctagattgagatgagattctga

SEQ ID NO: 3284898 - DNA, 25 bp, Homo sapien
tcttgctgagtacatgctaacatgg

SEQ ID NO: 3284899 - DNA, 25 bp, Homo sapien
gaaaatagtgtgtgcattaatacca

SEQ ID NO: 3284900 - DNA, 25 bp, Homo sapien
gatagagagttcagacaacttggca

SEQ ID NO: 3284901 - DNA, 25 bp, Homo sapien
gtactcaaatatctcactacgatga

SEQ ID NO: 3284902 - DNA, 25 bp, Homo sapien
tctcaagtggacatagtactcaaat

SEQ ID NO: 3284903 - DNA, 25 bp, Homo sapien
ctgagaatcttcgtagggagcatga

SEQ ID NO: 3284904 - DNA, 25 bp, Homo sapien
gactgtcaatcttgtgatatctcac

SEQ ID NO: 3284905 - DNA, 25 bp, Homo sapien
gaccaggagctaccaagcagaggtt

SEQ ID NO: 3284906 - DNA, 25 bp, Homo sapien
tgtacactcggacaaccaaggagga

SEQ ID NO: 3284907 - DNA, 25 bp, Homo sapien
tagggtgaccctcttagaccaggag

SEQ ID NO: 3284908 - DNA, 25 bp, Homo sapien
gctgcacactggactcatctgggtg

SEQ ID NO: 3284909 - DNA, 25 bp, Homo sapien
tcactgcagcttcgtcctttagggc

SEQ ID NO: 3284910 - DNA, 25 bp, Homo sapien
cagatttggcgcctcttcagagcaa

SEQ ID NO: 3284911 - DNA, 25 bp, Homo sapien
catgcaaagtatcctaacggtcacg

SEQ ID NO: 3284912 - DNA, 25 bp, Homo sapien
tcagtactcccgaaattggccttgg

SEQ ID NO: 3284913 - DNA, 25 bp, Homo sapien
cccatatccatgggagcttggcctc

SEQ ID NO: 3284914 - DNA, 25 bp, Homo sapien
ccccatatccatgggagcttggcct

SEQ ID NO: 3284915 - DNA, 25 bp, Homo sapien
gatgctaccgtgatacctgtctaca

SEQ ID NO: 3284916 - DNA, 25 bp, Homo sapien
tggttggatcccttcagcctagtga

SEQ ID NO: 3284917 - DNA, 25 bp, Homo sapien
ggtgttgacagcgtggatacccaca

SEQ ID NO: 3284918 - DNA, 25 bp, Homo sapien
tgataaccccatcgtggccaaatgg

SEQ ID NO: 3284919 - DNA, 25 bp, Homo sapien
aacatggacaaataagataaggctg

SEQ ID NO: 3284920 - DNA, 25 bp, Homo sapien
ccctgagccttggatctggaaaact

SEQ ID NO: 3284921 - DNA, 25 bp, Homo sapien
tgggagtatttccaatttgcatgaa

SEQ ID NO: 3284922 - DNA, 25 bp, Homo sapien
tagttgtgggagtatttccaatttg

SEQ ID NO: 3284923 - DNA, 25 bp, Homo sapien
gtgccggctcgcccacaagctatgg

SEQ ID NO: 3284924 - DNA, 25 bp, Homo sapien
atgtggcctcggcccacgccaggag

SEQ ID NO: 3284925 - DNA, 25 bp, Homo sapien
cccatgtggcctcggcccacgccag

SEQ ID NO: 3284926 - DNA, 25 bp, Homo sapien
aaggtcccaggtgccggctcgccca

SEQ ID NO: 3284927 - DNA, 25 bp, Homo sapien
gatgacatcccaggaatttaacttc

SEQ ID NO: 3284928 - DNA, 25 bp, Homo sapien
gagactctgattcatccatcaagac

SEQ ID NO: 3284929 - DNA, 25 bp, Homo sapien
acataagcaaaacccatcttcctgt

SEQ ID NO: 3284930 - DNA, 25 bp, Homo sapien
cagtctatggaggttagcagggcaa

SEQ ID NO: 3284931 - DNA, 25 bp, Homo sapien
gaagctctgattggtataatgcact

SEQ ID NO: 3284932 - DNA, 25 bp, Homo sapien
tcttgacgcgtggagtactgaaaat

SEQ ID NO: 3284933 - DNA, 25 bp, Homo sapien
gagttccgagctagcgtcctgctga

SEQ ID NO: 3284934 - DNA, 25 bp, Homo sapien
tcccaatccgcaaaaacgtgcagtc

SEQ ID NO: 3284935 - DNA, 25 bp, Homo sapien
cttgctctttggtcaaaaccactgt

SEQ ID NO: 3284936 - DNA, 25 bp, Homo sapien
cacccttgctctttggtcaaaacca

SEQ ID NO: 3284937 - DNA, 25 bp, Homo sapien
cccttgctctttggtcaaaaccact

SEQ ID NO: 3284938 - DNA, 25 bp, Homo sapien
ccttgctctttggtcaaaaccactg

SEQ ID NO: 3284939 - DNA, 25 bp, Homo sapien
gacttactctggtgacgcacttgaa

SEQ ID NO: 3284940 - DNA, 25 bp, Homo sapien
cccttctggtggcatgggtcttcca

SEQ ID NO: 3284941 - DNA, 25 bp, Homo sapien
catgtgagtgagtcaatccaaagcc

SEQ ID NO: 3284942 - DNA, 25 bp, Homo sapien
ggtcctcctgacaacggccatgtga

SEQ ID NO: 3284943 - DNA, 25 bp, Homo sapien
tgttctttgtacctgccatcctaga

SEQ ID NO: 3284944 - DNA, 25 bp, Homo sapien
tagtcataaagtcctctctccaaga

SEQ ID NO: 3284945 - DNA, 25 bp, Homo sapien
tcaagggctgttcttaacatgttct

SEQ ID NO: 3284946 - DNA, 25 bp, Homo sapien
ggaacattatgagttgaccccaaga

SEQ ID NO: 3284947 - DNA, 25 bp, Homo sapien
tccatggccacttttggatgcaggc

SEQ ID NO: 3284948 - DNA, 25 bp, Homo sapien
ggccacttttggatgcaggcccctt

SEQ ID NO: 3284949 - DNA, 25 bp, Homo sapien
aaaagctaattctgtgaagctttcc

SEQ ID NO: 3284950 - DNA, 25 bp, Homo sapien
actgatagctggagcatgctttctc

SEQ ID NO: 3284951 - DNA, 25 bp, Homo sapien
ccagctcacccataagcctagaggg

SEQ ID NO: 3284952 - DNA, 25 bp, Homo sapien
tgaatcaccagtttgaaccgccagg

SEQ ID NO: 3284953 - DNA, 25 bp, Homo sapien
caagattggagaaattctctgagcc

SEQ ID NO: 3284954 - DNA, 25 bp, Homo sapien
tcttatgtgggtggttgaatcacca

SEQ ID NO: 3284955 - DNA, 25 bp, Homo sapien
acttagtggggaagcttgactgccc

SEQ ID NO: 3284956 - DNA, 25 bp, Homo sapien
ggaagcttgactgcccatttggggt

SEQ ID NO: 3284957 - DNA, 25 bp, Homo sapien
cagtaaagaaactcaacttagtggg

SEQ ID NO: 3284958 - DNA, 25 bp, Homo sapien
gagttgtccagtaaagaaactcaac

SEQ ID NO: 3284959 - DNA, 25 bp, Homo sapien
gaatcaagacagcaaataggcctgg

SEQ ID NO: 3284960 - DNA, 25 bp, Homo sapien
agaatcaagacagcaaataggcctg

SEQ ID NO: 3284961 - DNA, 25 bp, Homo sapien
aatcaagacagcaaataggcctggg

SEQ ID NO: 3284962 - DNA, 25 bp, Homo sapien
atcaagacagcaaataggcctgggg

SEQ ID NO: 3284963 - DNA, 25 bp, Homo sapien
tctgtccttctgtggtggcacctgc

SEQ ID NO: 3284964 - DNA, 25 bp, Homo sapien
ctcattattgagatttctatctttc

SEQ ID NO: 3284965 - DNA, 25 bp, Homo sapien
ggcaggagccacacattacagaaac

SEQ ID NO: 3284966 - DNA, 25 bp, Homo sapien
attgttggggccagatgttcgagac

SEQ ID NO: 3284967 - DNA, 25 bp, Homo sapien
tccattatggctaacaaataaaaaa

SEQ ID NO: 3284968 - DNA, 25 bp, Homo sapien
tgattgtcttattatgttaacacag

SEQ ID NO: 3284969 - DNA, 25 bp, Homo sapien
aacacagattcagtttatctatgca

SEQ ID NO: 3284970 - DNA, 25 bp, Homo sapien
tattcagcttatgtttgagggagct

SEQ ID NO: 3284971 - DNA, 25 bp, Homo sapien
tgatgggaaagcggtaaaactcgat

SEQ ID NO: 3284972 - DNA, 25 bp, Homo sapien
gaaaaatgaccttgctgtctatgca

SEQ ID NO: 3284973 - DNA, 25 bp, Homo sapien
cagagctgatgattaatgccttcca

SEQ ID NO: 3284974 - DNA, 25 bp, Homo sapien
tgttagggctcaagaggaccagctc

SEQ ID NO: 3284975 - DNA, 25 bp, Homo sapien
acatggatggtaactaggagatttc

SEQ ID NO: 3284976 - DNA, 25 bp, Homo sapien
caggtgtgagtttcagcccaaggaa

SEQ ID NO: 3284977 - DNA, 25 bp, Homo sapien
tcccaaatcgcggtctcagagagct

SEQ ID NO: 3284978 - DNA, 25 bp, Homo sapien
tttgtctctacatcagaagtggagg

SEQ ID NO: 3284979 - DNA, 25 bp, Homo sapien
gttgaagcaatgatctaggaggtcc

SEQ ID NO: 3284980 - DNA, 25 bp, Homo sapien
gacgtgctttcattgcaggtaggga

SEQ ID NO: 3284981 - DNA, 25 bp, Homo sapien
tatccgtatgctagatctgctctgc

SEQ ID NO: 3284982 - DNA, 25 bp, Homo sapien
caggtatactgtctggtcttccaaa

SEQ ID NO: 3284983 - DNA, 25 bp, Homo sapien
ggctcagtttgtcctaccacctcag

SEQ ID NO: 3284984 - DNA, 25 bp, Homo sapien
taaaagttgccattggtacctggac

SEQ ID NO: 3284985 - DNA, 25 bp, Homo sapien
gaccgacacactgttgctgcttcag

SEQ ID NO: 3284986 - DNA, 25 bp, Homo sapien
gagattgaatacaggagaccgacac

SEQ ID NO: 3284987 - DNA, 25 bp, Homo sapien
ctgcttcagccccatttaacggtaa

SEQ ID NO: 3284988 - DNA, 25 bp, Homo sapien
ttaaccacgcatataggaacctggg

SEQ ID NO: 3284989 - DNA, 25 bp, Homo sapien
tattctttgggagttggatcacctg

SEQ ID NO: 3284990 - DNA, 25 bp, Homo sapien
taatgaccagagtaactggagactg

SEQ ID NO: 3284991 - DNA, 25 bp, Homo sapien
cacacacggttgaacaaaacaggca

SEQ ID NO: 3284992 - DNA, 25 bp, Homo sapien
agaaagattggatcatgtggcttta

SEQ ID NO: 3284993 - DNA, 25 bp, Homo sapien
gattggatcatgtggctttaggtga

SEQ ID NO: 3284994 - DNA, 25 bp, Homo sapien
acatatttccgttctgtctgattca

SEQ ID NO: 3284995 - DNA, 25 bp, Homo sapien
aactgacatatttccgttctgtctg

SEQ ID NO: 3284996 - DNA, 25 bp, Homo sapien
tcaaccacttgaacacttgcacact

SEQ ID NO: 3284997 - DNA, 25 bp, Homo sapien
gaagagagcagaacagatgtcagat

SEQ ID NO: 3284998 - DNA, 25 bp, Homo sapien
gaaagttctgaaagctcccatggag

SEQ ID NO: 3284999 - DNA, 25 bp, Homo sapien
ccttctgaatgttccaggagatcta

SEQ ID NO: 3285000 - DNA, 25 bp, Homo sapien
ccttgatgactgtgctagagcgacc

SEQ ID NO: 3285001 - DNA, 25 bp, Homo sapien
ggactaatgttagccacctcagaga

SEQ ID NO: 3285002 - DNA, 25 bp, Homo sapien
tgaccaggctctaagattgctaatc

SEQ ID NO: 3285003 - DNA, 25 bp, Homo sapien
gctaatctggctatagaaggactaa

SEQ ID NO: 3285004 - DNA, 25 bp, Homo sapien
ctctggcctgcttttgggaccagag

SEQ ID NO: 3285005 - DNA, 25 bp, Homo sapien
aactctggcctgcttttgggaccag

SEQ ID NO: 3285006 - DNA, 25 bp, Homo sapien
actctggcctgcttttgggaccaga

SEQ ID NO: 3285007 - DNA, 25 bp, Homo sapien
cctaaaatgcagtgattgaaactgg

SEQ ID NO: 3285008 - DNA, 25 bp, Homo sapien
tctaaggccccactttgtccttcag

SEQ ID NO: 3285009 - DNA, 25 bp, Homo sapien
caaaatgattataaagaaccagtga

SEQ ID NO: 3285010 - DNA, 25 bp, Homo sapien
tcctctgaaagaatcctaagtcctc

SEQ ID NO: 3285011 - DNA, 25 bp, Homo sapien
tttctactggactggagcagactct

SEQ ID NO: 3285012 - DNA, 25 bp, Homo sapien
tactggactggagcagactcttagg

SEQ ID NO: 3285013 - DNA, 25 bp, Homo sapien
aagcatttctactggactggagcag

SEQ ID NO: 3285014 - DNA, 25 bp, Homo sapien
actggagcagactcttagggaaggt

SEQ ID NO: 3285015 - DNA, 25 bp, Homo sapien
taaggcaagcgaggtgaaggcactt

SEQ ID NO: 3285016 - DNA, 25 bp, Homo sapien
aagggcttttcactcccaagtagca

SEQ ID NO: 3285017 - DNA, 25 bp, Homo sapien
cagtcaccgaataagaaaaagctcc

SEQ ID NO: 3285018 - DNA, 25 bp, Homo sapien
tatcactgggctctgtcacgcagcc

SEQ ID NO: 3285019 - DNA, 25 bp, Homo sapien
taactctaccacaacctctatgcta

SEQ ID NO: 3285020 - DNA, 25 bp, Homo sapien
gtggcaatgacaaagtttccttctt

SEQ ID NO: 3285021 - DNA, 25 bp, Homo sapien
caggtcccctcatgttgtggcaatg

SEQ ID NO: 3285022 - DNA, 25 bp, Homo sapien
atctcttgagcttatgtctcctctc

SEQ ID NO: 3285023 - DNA, 25 bp, Homo sapien
gaagtattacactgacttgcactcc

SEQ ID NO: 3285024 - DNA, 25 bp, Homo sapien
cccaagataaaccagacaattaaca

SEQ ID NO: 3285025 - DNA, 25 bp, Homo sapien
tactgaaggatagtagaacatggac

SEQ ID NO: 3285026 - DNA, 25 bp, Homo sapien
agtcctcatggtactactgtgttag

SEQ ID NO: 3285027 - DNA, 25 bp, Homo sapien
tgagccatggcgcctggctgcccat

SEQ ID NO: 3285028 - DNA, 25 bp, Homo sapien
gagccatggcgcctggctgcccatt

SEQ ID NO: 3285029 - DNA, 25 bp, Homo sapien
gccatggcgcctggctgcccatttt

SEQ ID NO: 3285030 - DNA, 25 bp, Homo sapien
cgtgagccatggcgcctggctgccc

SEQ ID NO: 3285031 - DNA, 25 bp, Homo sapien
ggtttgggggcgacatacctcacac

SEQ ID NO: 3285032 - DNA, 25 bp, Homo sapien
gggcgacatacctcacacatgtgta

SEQ ID NO: 3285033 - DNA, 25 bp, Homo sapien
ttgggggcgacatacctcacacatg

SEQ ID NO: 3285034 - DNA, 25 bp, Homo sapien
gacatacctcacacatgtgtatgaa

SEQ ID NO: 3285035 - DNA, 25 bp, Homo sapien
gcaggcagaaggcacaacttctaca

SEQ ID NO: 3285036 - DNA, 25 bp, Homo sapien
ggaagtgaaggagggtgcaattgtg

SEQ ID NO: 3285037 - DNA, 25 bp, Homo sapien
gaaggagggtgcaattgtggtgagt

SEQ ID NO: 3285038 - DNA, 25 bp, Homo sapien
gaggtgagaggcgttgcaggcagaa

SEQ ID NO: 3285039 - DNA, 25 bp, Homo sapien
caatctaatggcagtaaattcataa

SEQ ID NO: 3285040 - DNA, 25 bp, Homo sapien
catattttcaagcagatcgctttgc

SEQ ID NO: 3285041 - DNA, 25 bp, Homo sapien
tctggttatccatgacttcagggac

SEQ ID NO: 3285042 - DNA, 25 bp, Homo sapien
ttcagggacctcaatacaatctaat

SEQ ID NO: 3285043 - DNA, 25 bp, Homo sapien
tgtgcaaagccccagtatgaaatgg

SEQ ID NO: 3285044 - DNA, 25 bp, Homo sapien
tgtctctgctgtggaaagtttctgc

SEQ ID NO: 3285045 - DNA, 25 bp, Homo sapien
caaaacccatccaggtgtcagaaga

SEQ ID NO: 3285046 - DNA, 25 bp, Homo sapien
gaccagagggcagattgaatcacac

SEQ ID NO: 3285047 - DNA, 25 bp, Homo sapien
gtatgtgcgtgtatttgcaagtcca

SEQ ID NO: 3285048 - DNA, 25 bp, Homo sapien
tgtgcgtgtatttgcaagtccagac

SEQ ID NO: 3285049 - DNA, 25 bp, Homo sapien
tccttatttcatttacagcaagctt

SEQ ID NO: 3285050 - DNA, 25 bp, Homo sapien
gcttggacttgtttggaataaaata

SEQ ID NO: 3285051 - DNA, 25 bp, Homo sapien
gttggagagggaagcgctcgtgccc

SEQ ID NO: 3285052 - DNA, 25 bp, Homo sapien
cccgtcggatgtgcccttcgctggg

SEQ ID NO: 3285053 - DNA, 25 bp, Homo sapien
ttcgctgggccgagcggcgcagggt

SEQ ID NO: 3285054 - DNA, 25 bp, Homo sapien
ccgcgggggaatcgcagtgagcagc

SEQ ID NO: 3285055 - DNA, 25 bp, Homo sapien
tctcggccctctggctggcggcgcg

SEQ ID NO: 3285056 - DNA, 25 bp, Homo sapien
agctggcagccgctcgggtaggtgg

SEQ ID NO: 3285057 - DNA, 25 bp, Homo sapien
ctcgggtaggtggtgccgtcgctgc

SEQ ID NO: 3285058 - DNA, 25 bp, Homo sapien
gcacaccgggtagcggctcttgcac

SEQ ID NO: 3285059 - DNA, 25 bp, Homo sapien
cttccgcctcttgcggctcttcacg

SEQ ID NO: 3285060 - DNA, 25 bp, Homo sapien
ctgctgccccggctttacccttccg

SEQ ID NO: 3285061 - DNA, 25 bp, Homo sapien
ttcacgcactccatgcccggcgcgc

SEQ ID NO: 3285062 - DNA, 25 bp, Homo sapien
gccgcgggcgcacatagggcagcag

SEQ ID NO: 3285063 - DNA, 25 bp, Homo sapien
gggcgcgcagcgacggccgctccat

SEQ ID NO: 3285064 - DNA, 25 bp, Homo sapien
gggccgcaggtgtccgaagaggagg

SEQ ID NO: 3285065 - DNA, 25 bp, Homo sapien
gcagggcgcgcagcgacggccgctc

SEQ ID NO: 3285066 - DNA, 25 bp, Homo sapien
cgcaggtgtccgaagaggaggaaga

SEQ ID NO: 3285067 - DNA, 25 bp, Homo sapien
ggtgagcgggcacccggcgtgaccg

SEQ ID NO: 3285068 - DNA, 25 bp, Homo sapien
gtctcacgcccgcttcgcagagctc

SEQ ID NO: 3285069 - DNA, 25 bp, Homo sapien
tgaccggcccatgggcgctcggtct

SEQ ID NO: 3285070 - DNA, 25 bp, Homo sapien
gcaagggcgcgagtgagccgtgtcg

SEQ ID NO: 3285071 - DNA, 25 bp, Homo sapien
ccagcaagcctctcgggagaacaga

SEQ ID NO: 3285072 - DNA, 25 bp, Homo sapien
gaatgtgtaacattgcagcgtgcat

SEQ ID NO: 3285073 - DNA, 25 bp, Homo sapien
cttcctcgttggagctgccacggag

SEQ ID NO: 3285074 - DNA, 25 bp, Homo sapien
tactggaatccgtgtgagagctgtg

SEQ ID NO: 3285075 - DNA, 25 bp, Homo sapien
tctggtcactgaaaggggaacccga

SEQ ID NO: 3285076 - DNA, 25 bp, Homo sapien
tgtgctacagcggagtccctttgag

SEQ ID NO: 3285077 - DNA, 25 bp, Homo sapien
cagtgagaatgcaagcatgtgctac

SEQ ID NO: 3285078 - DNA, 25 bp, Homo sapien
gaacccgagctctgtgatagtgcca

SEQ ID NO: 3285079 - DNA, 25 bp, Homo sapien
aggtttatggcaagtctgcctttgc

SEQ ID NO: 3285080 - DNA, 25 bp, Homo sapien
gaagtgatggcagttatcaatatcc

SEQ ID NO: 3285081 - DNA, 25 bp, Homo sapien
caccccatttgaagcaggtttatgg

SEQ ID NO: 3285082 - DNA, 25 bp, Homo sapien
tatccagtctgcatttaatcacccc

SEQ ID NO: 3285083 - DNA, 25 bp, Homo sapien
aattcctgatactctccaaagctga

SEQ ID NO: 3285084 - DNA, 25 bp, Homo sapien
aatggtgttttcctccccggcagag

SEQ ID NO: 3285085 - DNA, 25 bp, Homo sapien
caaagctgaagacgtcagataatgc

SEQ ID NO: 3285086 - DNA, 25 bp, Homo sapien
gtgtctctgatctaaaagtgcaaag

SEQ ID NO: 3285087 - DNA, 25 bp, Homo sapien
cataattagcttggcctcttctaga

SEQ ID NO: 3285088 - DNA, 25 bp, Homo sapien
gcttcttctcttgataatggctcta

SEQ ID NO: 3285089 - DNA, 25 bp, Homo sapien
ggctctaatgtcataattagcttgg

SEQ ID NO: 3285090 - DNA, 25 bp, Homo sapien
gcattttggctgtaggaacttgtga

SEQ ID NO: 3285091 - DNA, 25 bp, Homo sapien
cttttttctttggtgatcactgtac

SEQ ID NO: 3285092 - DNA, 25 bp, Homo sapien
tcttttttctttggtgatcactgta

SEQ ID NO: 3285093 - DNA, 25 bp, Homo sapien
tggcatttctgaaaacctagttccc

SEQ ID NO: 3285094 - DNA, 25 bp, Homo sapien
caggaatttcttggcatttctgaaa

SEQ ID NO: 3285095 - DNA, 25 bp, Homo sapien
gagagttgctcttgacttccaggaa

SEQ ID NO: 3285096 - DNA, 25 bp, Homo sapien
gtccatttctggagagttgctcttg

SEQ ID NO: 3285097 - DNA, 25 bp, Homo sapien
tcttccttaatctataactctcagt

SEQ ID NO: 3285098 - DNA, 25 bp, Homo sapien
ctctaaagtgtgcagaagattccac

SEQ ID NO: 3285099 - DNA, 25 bp, Homo sapien
tcaccaacatttgtatagttctcta

SEQ ID NO: 3285100 - DNA, 25 bp, Homo sapien
tcagatcgtggtaatgatattcacc

SEQ ID NO: 3285101 - DNA, 25 bp, Homo sapien
agtggtgcgtgcctttgctactctc

SEQ ID NO: 3285102 - DNA, 25 bp, Homo sapien
gtgcctttgctactctctctgccag

SEQ ID NO: 3285103 - DNA, 25 bp, Homo sapien
tgcgtgcctttgctactctctctgc

SEQ ID NO: 3285104 - DNA, 25 bp, Homo sapien
ggtgcgtgcctttgctactctctct

SEQ ID NO: 3285105 - DNA, 25 bp, Homo sapien
ctgcagcaggaagcatccgacacat

SEQ ID NO: 3285106 - DNA, 25 bp, Homo sapien
catcattccacgcagacgccaggta

SEQ ID NO: 3285107 - DNA, 25 bp, Homo sapien
cagacgccaggtaggtgtccctgtc

SEQ ID NO: 3285108 - DNA, 25 bp, Homo sapien
attccacgcagacgccaggtaggtg

SEQ ID NO: 3285109 - DNA, 25 bp, Homo sapien
aatgtgatggatcctggcatcattc

SEQ ID NO: 3285110 - DNA, 25 bp, Homo sapien
caggcgtaaccgttgctttggataa

SEQ ID NO: 3285111 - DNA, 25 bp, Homo sapien
gctgactcggactcaggagtttttg

SEQ ID NO: 3285112 - DNA, 25 bp, Homo sapien
gagtttttgtggctccaggcgtaac

SEQ ID NO: 3285113 - DNA, 25 bp, Homo sapien
cgttgctttggataaaattggtcca

SEQ ID NO: 3285114 - DNA, 25 bp, Homo sapien
tatttttagagactcccgcgcctgc

SEQ ID NO: 3285115 - DNA, 25 bp, Homo sapien
ggctccgcgtgcagtgtgatgccca

SEQ ID NO: 3285116 - DNA, 25 bp, Homo sapien
gaggataaacgtccccatcccagtg

SEQ ID NO: 3285117 - DNA, 25 bp, Homo sapien
tcccgactcctttcgtgtagtgagc

SEQ ID NO: 3285118 - DNA, 25 bp, Homo sapien
cgccggcagagggcaccgtcgtcac

SEQ ID NO: 3285119 - DNA, 25 bp, Homo sapien
ccggcagagggcaccgtcgtcacac

SEQ ID NO: 3285120 - DNA, 25 bp, Homo sapien
gccggcagagggcaccgtcgtcaca

SEQ ID NO: 3285121 - DNA, 25 bp, Homo sapien
cggcagagggcaccgtcgtcacaca

SEQ ID NO: 3285122 - DNA, 25 bp, Homo sapien
agcgtcctacgcgtgaccttgggac

SEQ ID NO: 3285123 - DNA, 25 bp, Homo sapien
cttgggacccgcaaatgtctgcgcc

SEQ ID NO: 3285124 - DNA, 25 bp, Homo sapien
ttcccggtcagcgtcctacgcgtga

SEQ ID NO: 3285125 - DNA, 25 bp, Homo sapien
ccgcaaatgtctgcgccggaggcat

SEQ ID NO: 3285126 - DNA, 25 bp, Homo sapien
gagattttgggactggaatgttgaa

SEQ ID NO: 3285127 - DNA, 25 bp, Homo sapien
caatcagagtcttttgagattttgg

SEQ ID NO: 3285128 - DNA, 25 bp, Homo sapien
tctggtgaaaatatggagagctctg

SEQ ID NO: 3285129 - DNA, 25 bp, Homo sapien
cttaaggcgacaaaaatgcgtggga

SEQ ID NO: 3285130 - DNA, 25 bp, Homo sapien
cactgaactgagtcattgatctcct

SEQ ID NO: 3285131 - DNA, 25 bp, Homo sapien
ccactgaactgagtcattgatctcc

SEQ ID NO: 3285132 - DNA, 25 bp, Homo sapien
aggctgggtagccaacagctttcac

SEQ ID NO: 3285133 - DNA, 25 bp, Homo sapien
gcccaaggctgggtagccaacagct

SEQ ID NO: 3285134 - DNA, 25 bp, Homo sapien
gacagcgcagacaggaatggcccaa

SEQ ID NO: 3285135 - DNA, 25 bp, Homo sapien
cagctgtgacagcgcagacaggaat

SEQ ID NO: 3285136 - DNA, 25 bp, Homo sapien
tcagcattaacatgctcgtttctct

SEQ ID NO: 3285137 - DNA, 25 bp, Homo sapien
catgcatagatttatcagcattaac

SEQ ID NO: 3285138 - DNA, 25 bp, Homo sapien
ttaacatgctcgtttctctttccca

SEQ ID NO: 3285139 - DNA, 25 bp, Homo sapien
atggtagcatgcatagatttatcag

SEQ ID NO: 3285140 - DNA, 25 bp, Homo sapien
cagtccctggttggcattacaggtt

SEQ ID NO: 3285141 - DNA, 25 bp, Homo sapien
tccctggttggcattacaggttttc

SEQ ID NO: 3285142 - DNA, 25 bp, Homo sapien
cctggttggcattacaggttttcct

SEQ ID NO: 3285143 - DNA, 25 bp, Homo sapien
ctggttggcattacaggttttcctt

SEQ ID NO: 3285144 - DNA, 25 bp, Homo sapien
tctgagcgtcgcatttagcagggca

SEQ ID NO: 3285145 - DNA, 25 bp, Homo sapien
gatcacgcaatccagttgggcagat

SEQ ID NO: 3285146 - DNA, 25 bp, Homo sapien
ggagccagacctccactggtacatg

SEQ ID NO: 3285147 - DNA, 25 bp, Homo sapien
caaagcttcaaggtctggagccaga

SEQ ID NO: 3285148 - DNA, 25 bp, Homo sapien
ccagcttatttaccagggcgtgctt

SEQ ID NO: 3285149 - DNA, 25 bp, Homo sapien
cagtgggccagcttatttaccaggg

SEQ ID NO: 3285150 - DNA, 25 bp, Homo sapien
tgggccagcttatttaccagggcgt

SEQ ID NO: 3285151 - DNA, 25 bp, Homo sapien
agcttatttaccagggcgtgcttgc

SEQ ID NO: 3285152 - DNA, 25 bp, Homo sapien
tgtccttccgtcacatgtccagtgg

SEQ ID NO: 3285153 - DNA, 25 bp, Homo sapien
ctttatgtaaagcatggtgcccggg

SEQ ID NO: 3285154 - DNA, 25 bp, Homo sapien
tggccctttgtcagcgttcattaga

SEQ ID NO: 3285155 - DNA, 25 bp, Homo sapien
caagaaccttgatcagacccacatg

SEQ ID NO: 3285156 - DNA, 25 bp, Homo sapien
gaactgaggtgccagaaccaagtta

SEQ ID NO: 3285157 - DNA, 25 bp, Homo sapien
tgccagaaccaagttatagagattg

SEQ ID NO: 3285158 - DNA, 25 bp, Homo sapien
caaattactgttgaactgaggtgcc

SEQ ID NO: 3285159 - DNA, 25 bp, Homo sapien
tactgttgaactgaggtgccagaac

SEQ ID NO: 3285160 - DNA, 25 bp, Homo sapien
tagtcctgacggctactacatgccc

SEQ ID NO: 3285161 - DNA, 25 bp, Homo sapien
tggcgttgaaacacaatgatgctgt

SEQ ID NO: 3285162 - DNA, 25 bp, Homo sapien
gtctgaaatacaccattgtgcttcc

SEQ ID NO: 3285163 - DNA, 25 bp, Homo sapien
ctgcatcttgttgtggtctgaaata

SEQ ID NO: 3285164 - DNA, 25 bp, Homo sapien
tgaacacttttggtatcgagttagg

SEQ ID NO: 3285165 - DNA, 25 bp, Homo sapien
tggtatcgagttagggtaattgtga

SEQ ID NO: 3285166 - DNA, 25 bp, Homo sapien
ttggtatcgagttagggtaattgtg

SEQ ID NO: 3285167 - DNA, 25 bp, Homo sapien
caaccatcctaaagcatatgatgtg

SEQ ID NO: 3285168 - DNA, 25 bp, Homo sapien
tatgagttcttgtaaaacatgtact

SEQ ID NO: 3285169 - DNA, 25 bp, Homo sapien
ctatttgtatgagttcttgtaaaac

SEQ ID NO: 3285170 - DNA, 25 bp, Homo sapien
taagcaaccatcctaaagcatatga

SEQ ID NO: 3285171 - DNA, 25 bp, Homo sapien
atacctctccaagaacagtcttggg

SEQ ID NO: 3285172 - DNA, 25 bp, Homo sapien
gcttgagaaatacctctccaagaac

SEQ ID NO: 3285173 - DNA, 25 bp, Homo sapien
gtcttggggcataagatcatcctaa

SEQ ID NO: 3285174 - DNA, 25 bp, Homo sapien
gaaaagaataacacacgcaggcagc

SEQ ID NO: 3285175 - DNA, 25 bp, Homo sapien
aggccaaaggctcttccagtaatct

SEQ ID NO: 3285176 - DNA, 25 bp, Homo sapien
ggctcttccagtaatcttctgcaca

SEQ ID NO: 3285177 - DNA, 25 bp, Homo sapien
caaaggctcttccagtaatcttctg

SEQ ID NO: 3285178 - DNA, 25 bp, Homo sapien
aaggctcttccagtaatcttctgca

SEQ ID NO: 3285179 - DNA, 25 bp, Homo sapien
ctctggcaaactgtgagacacatca

SEQ ID NO: 3285180 - DNA, 25 bp, Homo sapien
tggggagcttgtgccccacacacat

SEQ ID NO: 3285181 - DNA, 25 bp, Homo sapien
tcctggggagcttgtgccccacaca

SEQ ID NO: 3285182 - DNA, 25 bp, Homo sapien
cacctctggcaaactgtgagacaca

SEQ ID NO: 3285183 - DNA, 25 bp, Homo sapien
tattcctccgacttctactgtgaca

SEQ ID NO: 3285184 - DNA, 25 bp, Homo sapien
gaaaatgtgtgtcttatcctcagca

SEQ ID NO: 3285185 - DNA, 25 bp, Homo sapien
cacaccagttgctaataatattcct

SEQ ID NO: 3285186 - DNA, 25 bp, Homo sapien
tatgcatcatggaatagttagcaac

SEQ ID NO: 3285187 - DNA, 25 bp, Homo sapien
ggtggctgtactcaaacctattctg

SEQ ID NO: 3285188 - DNA, 25 bp, Homo sapien
tcagagaggagtagattccaggtac

SEQ ID NO: 3285189 - DNA, 25 bp, Homo sapien
gccagagtctggcttgactagaaga

SEQ ID NO: 3285190 - DNA, 25 bp, Homo sapien
tattctgtctggctattgtggcagg

SEQ ID NO: 3285191 - DNA, 25 bp, Homo sapien
ggcactgagggctgaggggctggtt

SEQ ID NO: 3285192 - DNA, 25 bp, Homo sapien
actgagggctgaggggctggtttcc

SEQ ID NO: 3285193 - DNA, 25 bp, Homo sapien
cactgagggctgaggggctggtttc

SEQ ID NO: 3285194 - DNA, 25 bp, Homo sapien
agggcactgagggctgaggggctgg

SEQ ID NO: 3285195 - DNA, 25 bp, Homo sapien
tccaattgctatggttgcacaagac

SEQ ID NO: 3285196 - DNA, 25 bp, Homo sapien
tcaagaaacgcgcttaaatccaatt

SEQ ID NO: 3285197 - DNA, 25 bp, Homo sapien
tgcagagaactcatgaataatagaa

SEQ ID NO: 3285198 - DNA, 25 bp, Homo sapien
ttaacactggcacgaaacagaattt

SEQ ID NO: 3285199 - DNA, 25 bp, Homo sapien
tttgggggcataaggaaggccctga

SEQ ID NO: 3285200 - DNA, 25 bp, Homo sapien
tgggaagatgcatttcatctgcaga

SEQ ID NO: 3285201 - DNA, 25 bp, Homo sapien
tctgcagatttggaatgaagaaagt

SEQ ID NO: 3285202 - DNA, 25 bp, Homo sapien
aactgggaagatgcatttcatctgc

SEQ ID NO: 3285203 - DNA, 25 bp, Homo sapien
tattcactggatagatccctttggg

SEQ ID NO: 3285204 - DNA, 25 bp, Homo sapien
tccctgtgaagagtgaacactacta

SEQ ID NO: 3285205 - DNA, 25 bp, Homo sapien
gagtaatgactacagtaaaatctcc

SEQ ID NO: 3285206 - DNA, 25 bp, Homo sapien
tattcataagataaaccacatagct

SEQ ID NO: 3285207 - DNA, 25 bp, Homo sapien
tccacaaggtaagaagcagccattc

SEQ ID NO: 3285208 - DNA, 25 bp, Homo sapien
tctgagggagggtctcatctactcc

SEQ ID NO: 3285209 - DNA, 25 bp, Homo sapien
ccacaaggtaagaagcagccattct

SEQ ID NO: 3285210 - DNA, 25 bp, Homo sapien
cctgttttcctgtggcagcctgaat

SEQ ID NO: 3285211 - DNA, 25 bp, Homo sapien
tgcaaggaccgttgacagctgaaac

SEQ ID NO: 3285212 - DNA, 25 bp, Homo sapien
tctatattgggactcttcaggcaga

SEQ ID NO: 3285213 - DNA, 25 bp, Homo sapien
tgttgacttaatgccggcagatccg

SEQ ID NO: 3285214 - DNA, 25 bp, Homo sapien
actttataacaatatcgaatgaaat

SEQ ID NO: 3285215 - DNA, 25 bp, Homo sapien
ctctggctcaacatttggttgggaa

SEQ ID NO: 3285216 - DNA, 25 bp, Homo sapien
tgaagttgccattgtttgagctgat

SEQ ID NO: 3285217 - DNA, 25 bp, Homo sapien
aagattaaatggactgcctctgaat

SEQ ID NO: 3285218 - DNA, 25 bp, Homo sapien
tgttcttggcttaaaagatgttcat

SEQ ID NO: 3285219 - DNA, 25 bp, Homo sapien
aaataatcattagcagatagatcag

SEQ ID NO: 3285220 - DNA, 25 bp, Homo sapien
gaaaaaggattctctgcatcattgt

SEQ ID NO: 3285221 - DNA, 25 bp, Homo sapien
tgagaaaaaggattctctgcatcat

SEQ ID NO: 3285222 - DNA, 25 bp, Homo sapien
tgctattgactctgtaggctgctgg

SEQ ID NO: 3285223 - DNA, 25 bp, Homo sapien
gctgctggagatttcaatggacctg

SEQ ID NO: 3285224 - DNA, 25 bp, Homo sapien
tataaatcaaagttgactcgtatgc

SEQ ID NO: 3285225 - DNA, 25 bp, Homo sapien
caaagttgactcgtatgctattgac

SEQ ID NO: 3285226 - DNA, 25 bp, Homo sapien
tccaggttgtagaggcaaagatgca

SEQ ID NO: 3285227 - DNA, 25 bp, Homo sapien
cagggttggccatgagatgcatttc

SEQ ID NO: 3285228 - DNA, 25 bp, Homo sapien
ccggtggccctcaggcttgtttact

SEQ ID NO: 3285229 - DNA, 25 bp, Homo sapien
ctatgaagaaacacagccggtggcc

SEQ ID NO: 3285230 - DNA, 25 bp, Homo sapien
agtgccctttaggattgtagaaaag

SEQ ID NO: 3285231 - DNA, 25 bp, Homo sapien
cccatttactagtgccctttaggat

SEQ ID NO: 3285232 - DNA, 25 bp, Homo sapien
gattgtagaaaagaacgcttggccc

SEQ ID NO: 3285233 - DNA, 25 bp, Homo sapien
gaaaagaacgcttggccctcaatga

SEQ ID NO: 3285234 - DNA, 25 bp, Homo sapien
tatgttatccatgctaacaggtgtg

SEQ ID NO: 3285235 - DNA, 25 bp, Homo sapien
gtctactgggttgacggcattctcc

SEQ ID NO: 3285236 - DNA, 25 bp, Homo sapien
caaactccgtctactgggttgacgg

SEQ ID NO: 3285237 - DNA, 25 bp, Homo sapien
cactgtgccttgcctcaacattttt

SEQ ID NO: 3285238 - DNA, 25 bp, Homo sapien
tttcctagctccttgaagtacaata

SEQ ID NO: 3285239 - DNA, 25 bp, Homo sapien
tatctatttcttgtaagttatctca

SEQ ID NO: 3285240 - DNA, 25 bp, Homo sapien
tctcagcctagctaaaaggtttgtt

SEQ ID NO: 3285241 - DNA, 25 bp, Homo sapien
gtcttggtagtttgtatgcatcaaa

SEQ ID NO: 3285242 - DNA, 25 bp, Homo sapien
tcactatgtgtcaagggctatgcta

SEQ ID NO: 3285243 - DNA, 25 bp, Homo sapien
tatttgagctcggatgtcactgagt

SEQ ID NO: 3285244 - DNA, 25 bp, Homo sapien
cctttaagagggaggtgacaaatga

SEQ ID NO: 3285245 - DNA, 25 bp, Homo sapien
ggctatgctaggtatgtcccatgct

SEQ ID NO: 3285246 - DNA, 25 bp, Homo sapien
tgtttctgagtaggcttgatccttc

SEQ ID NO: 3285247 - DNA, 25 bp, Homo sapien
ttctgagtaggcttgatccttcctt

SEQ ID NO: 3285248 - DNA, 25 bp, Homo sapien
gtgtttctgagtaggcttgatcctt

SEQ ID NO: 3285249 - DNA, 25 bp, Homo sapien
tttctgagtaggcttgatccttcct

SEQ ID NO: 3285250 - DNA, 25 bp, Homo sapien
agtaatcccgatgggcccttctttg

SEQ ID NO: 3285251 - DNA, 25 bp, Homo sapien
tcatctgtggaagcatatgactggt

SEQ ID NO: 3285252 - DNA, 25 bp, Homo sapien
tcaatcatctgtggaagcatatgac

SEQ ID NO: 3285253 - DNA, 25 bp, Homo sapien
tgacctgggatccttgagagtctct

SEQ ID NO: 3285254 - DNA, 25 bp, Homo sapien
tgttcaccaaatgcttcacggcaag

SEQ ID NO: 3285255 - DNA, 25 bp, Homo sapien
gtgttgtgttcttggcaatgtaggg

SEQ ID NO: 3285256 - DNA, 25 bp, Homo sapien
tcacggcaagccctgtgttgtgttc

SEQ ID NO: 3285257 - DNA, 25 bp, Homo sapien
tattgaccggtgttcaccaaatgct

SEQ ID NO: 3285258 - DNA, 25 bp, Homo sapien
tgtgcttatattgtaacatggtttg

SEQ ID NO: 3285259 - DNA, 25 bp, Homo sapien
ggtaatgtgcttatattgtaacatg

SEQ ID NO: 3285260 - DNA, 25 bp, Homo sapien
aatgtgcttatattgtaacatggtt

SEQ ID NO: 3285261 - DNA, 25 bp, Homo sapien
aacccaatcattacattttatacat

SEQ ID NO: 3285262 - DNA, 25 bp, Homo sapien
gagctgtgccatccattgatgtaag

SEQ ID NO: 3285263 - DNA, 25 bp, Homo sapien
catccattgatgtaagacttgcact

SEQ ID NO: 3285264 - DNA, 25 bp, Homo sapien
ccttctccctactcatgccagtctt

SEQ ID NO: 3285265 - DNA, 25 bp, Homo sapien
gacttgcactgcgacttttgcagag

SEQ ID NO: 3285266 - DNA, 25 bp, Homo sapien
ccatttttcatatgacttgctccat

SEQ ID NO: 3285267 - DNA, 25 bp, Homo sapien
cttctgaccatttttcatatgactt

SEQ ID NO: 3285268 - DNA, 25 bp, Homo sapien
gaccatttttcatatgacttgctcc

SEQ ID NO: 3285269 - DNA, 25 bp, Homo sapien
ctgaccatttttcatatgacttgct

SEQ ID NO: 3285270 - DNA, 25 bp, Homo sapien
ccatacatgagaataggccacatca

SEQ ID NO: 3285271 - DNA, 25 bp, Homo sapien
caaaatgcaatattggtctcacgag

SEQ ID NO: 3285272 - DNA, 25 bp, Homo sapien
tagctaaagtccattagaagtccag

SEQ ID NO: 3285273 - DNA, 25 bp, Homo sapien
taaactgcattcgaaagagatttgg

SEQ ID NO: 3285274 - DNA, 25 bp, Homo sapien
tcccatcctggaacgtgaatacaca

SEQ ID NO: 3285275 - DNA, 25 bp, Homo sapien
cagggagctattgtttgaccagagt

SEQ ID NO: 3285276 - DNA, 25 bp, Homo sapien
aacaaatctggtgggttcatccgca

SEQ ID NO: 3285277 - DNA, 25 bp, Homo sapien
tcatccgcaggtctacaatgtcagg

SEQ ID NO: 3285278 - DNA, 25 bp, Homo sapien
agattttcacacaatcaaagatttc

SEQ ID NO: 3285279 - DNA, 25 bp, Homo sapien
gattttcacacaatcaaagatttct

SEQ ID NO: 3285280 - DNA, 25 bp, Homo sapien
ttggcattcaagggagtagagcagt

SEQ ID NO: 3285281 - DNA, 25 bp, Homo sapien
tctttggcattcaagggagtagagc

SEQ ID NO: 3285282 - DNA, 25 bp, Homo sapien
gagaagctcctattagctttagcca

SEQ ID NO: 3285283 - DNA, 25 bp, Homo sapien
aaaacccgttatgagagaagctcct

SEQ ID NO: 3285284 - DNA, 25 bp, Homo sapien
cacccctgtcacaaaacccgttatg

SEQ ID NO: 3285285 - DNA, 25 bp, Homo sapien
agctcctattagctttagccaagcc

SEQ ID NO: 3285286 - DNA, 25 bp, Homo sapien
tctgtctacatctgtagatcctgaa

SEQ ID NO: 3285287 - DNA, 25 bp, Homo sapien
tctccattgtctttttgattctctg

SEQ ID NO: 3285288 - DNA, 25 bp, Homo sapien
tttgattctctgtctacatctgtag

SEQ ID NO: 3285289 - DNA, 25 bp, Homo sapien
ctacatctgtagatcctgaatccat

SEQ ID NO: 3285290 - DNA, 25 bp, Homo sapien
tgtccttagtcagcttagggtgcca

SEQ ID NO: 3285291 - DNA, 25 bp, Homo sapien
gaggattctactttcacaaactgag

SEQ ID NO: 3285292 - DNA, 25 bp, Homo sapien
ccatggaggtccttggaggcttgac

SEQ ID NO: 3285293 - DNA, 25 bp, Homo sapien
gctggcccatccaagatcaggaggg

SEQ ID NO: 3285294 - DNA, 25 bp, Homo sapien
caagtaggcctcatgccatatattt

SEQ ID NO: 3285295 - DNA, 25 bp, Homo sapien
cttttcactaaagtgctctgcttca

SEQ ID NO: 3285296 - DNA, 25 bp, Homo sapien
gttgtggtttgactaagccatgccc

SEQ ID NO: 3285297 - DNA, 25 bp, Homo sapien
tcattaagttccatggagttgtggt

SEQ ID NO: 3285298 - DNA, 25 bp, Homo sapien
tatcaagtgcatgcctaactcctag

SEQ ID NO: 3285299 - DNA, 25 bp, Homo sapien
catttatgttcctgtgatacgcgga

SEQ ID NO: 3285300 - DNA, 25 bp, Homo sapien
gactgctagattgggaatgggcctt

SEQ ID NO: 3285301 - DNA, 25 bp, Homo sapien
ttttccaggatgctataaagccagt

SEQ ID NO: 3285302 - DNA, 25 bp, Homo sapien
gccatcttggaactgcctcaatagc

SEQ ID NO: 3285303 - DNA, 25 bp, Homo sapien
tcttggaactgcctcaatagctttt

SEQ ID NO: 3285304 - DNA, 25 bp, Homo sapien
ccatcttggaactgcctcaatagct

SEQ ID NO: 3285305 - DNA, 25 bp, Homo sapien
catcttggaactgcctcaatagctt

SEQ ID NO: 3285306 - DNA, 25 bp, Homo sapien
ttttatatgaaaactcattgcacac

SEQ ID NO: 3285307 - DNA, 25 bp, Homo sapien
tgaagctgcatcaagagcattgaaa

SEQ ID NO: 3285308 - DNA, 25 bp, Homo sapien
ctgaattgcgtgctgttgtcttgtg

SEQ ID NO: 3285309 - DNA, 25 bp, Homo sapien
gctttgctgaattgcgtgctgttgt

SEQ ID NO: 3285310 - DNA, 25 bp, Homo sapien
agctgcatcaagagcattgaaaaca

SEQ ID NO: 3285311 - DNA, 25 bp, Homo sapien
aagtgcttgaaaatatccagtatgt

SEQ ID NO: 3285312 - DNA, 25 bp, Homo sapien
ttctaaccagtcacaggaagtaaga

SEQ ID NO: 3285313 - DNA, 25 bp, Homo sapien
tttctaaccagtcacaggaagtaag

SEQ ID NO: 3285314 - DNA, 25 bp, Homo sapien
atgctgagtgtgacacacaggccag

SEQ ID NO: 3285315 - DNA, 25 bp, Homo sapien
tgccaaatgctgagtgtgacacaca

SEQ ID NO: 3285316 - DNA, 25 bp, Homo sapien
aatgccaaatgctgagtgtgacaca

SEQ ID NO: 3285317 - DNA, 25 bp, Homo sapien
caaatgctgagtgtgacacacaggc

SEQ ID NO: 3285318 - DNA, 25 bp, Homo sapien
ctaatttgtggttgtgcaggaagct

SEQ ID NO: 3285319 - DNA, 25 bp, Homo sapien
taaaaactgctactacctgccaagc

SEQ ID NO: 3285320 - DNA, 25 bp, Homo sapien
caggaagctcggcagacccttgctg

SEQ ID NO: 3285321 - DNA, 25 bp, Homo sapien
gttgtgcaggaagctcggcagaccc

SEQ ID NO: 3285322 - DNA, 25 bp, Homo sapien
tatacaggtcattgactgaactcat

SEQ ID NO: 3285323 - DNA, 25 bp, Homo sapien
atttttatacaggtcattgactgaa

SEQ ID NO: 3285324 - DNA, 25 bp, Homo sapien
tttatacaggtcattgactgaactc

SEQ ID NO: 3285325 - DNA, 25 bp, Homo sapien
tttttatacaggtcattgactgaac

SEQ ID NO: 3285326 - DNA, 25 bp, Homo sapien
aggatgaggccctgcagacatggca

SEQ ID NO: 3285327 - DNA, 25 bp, Homo sapien
agtactgcctcaggatgaggccctg

SEQ ID NO: 3285328 - DNA, 25 bp, Homo sapien
ttctggaagtactgcctcaggatga

SEQ ID NO: 3285329 - DNA, 25 bp, Homo sapien
ggatgaggccctgcagacatggcat

SEQ ID NO: 3285330 - DNA, 25 bp, Homo sapien
tctacagtgtaggactcagttgaca

SEQ ID NO: 3285331 - DNA, 25 bp, Homo sapien
gaataatgtcagtggacatgcatct

SEQ ID NO: 3285332 - DNA, 25 bp, Homo sapien
aaggatttcatgtttaaatggtctg

SEQ ID NO: 3285333 - DNA, 25 bp, Homo sapien
tatcttcaatattgtaaaggatttc

SEQ ID NO: 3285334 - DNA, 25 bp, Homo sapien
ccagagagaaatgctgggttaccaa

SEQ ID NO: 3285335 - DNA, 25 bp, Homo sapien
ccaacctaaaaaggcaagccaacat

SEQ ID NO: 3285336 - DNA, 25 bp, Homo sapien
gagaaatgctgggttaccaacaaag

SEQ ID NO: 3285337 - DNA, 25 bp, Homo sapien
gaggatgtccgaacccattgcaagg

SEQ ID NO: 3285338 - DNA, 25 bp, Homo sapien
aaattcacaccagacagttttgcgg

SEQ ID NO: 3285339 - DNA, 25 bp, Homo sapien
cagggtagaaagtcccatacatcac

SEQ ID NO: 3285340 - DNA, 25 bp, Homo sapien
gttttgcggtttgtagctgtaccca

SEQ ID NO: 3285341 - DNA, 25 bp, Homo sapien
cattgaggaaccaaccgtaaattca

SEQ ID NO: 3285342 - DNA, 25 bp, Homo sapien
cagctcagtgtgtgttacttctgca

SEQ ID NO: 3285343 - DNA, 25 bp, Homo sapien
agctcagtgtgtgttacttctgcag

SEQ ID NO: 3285344 - DNA, 25 bp, Homo sapien
gctcagtgtgtgttacttctgcaga

SEQ ID NO: 3285345 - DNA, 25 bp, Homo sapien
ccgcgatgccgcacagatggcaaga

SEQ ID NO: 3285346 - DNA, 25 bp, Homo sapien
ttgtcgatgcagaggcaccgcgatg

SEQ ID NO: 3285347 - DNA, 25 bp, Homo sapien
ctggtgattgtcgatgcagaggcac

SEQ ID NO: 3285348 - DNA, 25 bp, Homo sapien
catagatgcctttgctggcggctgg

SEQ ID NO: 3285349 - DNA, 25 bp, Homo sapien
tctctacagcctacttccaagtcgt

SEQ ID NO: 3285350 - DNA, 25 bp, Homo sapien
tccaagtcgtgagatgctccttcga

SEQ ID NO: 3285351 - DNA, 25 bp, Homo sapien
tggaaaaactctctacagcctactt

SEQ ID NO: 3285352 - DNA, 25 bp, Homo sapien
gatgctccttcgactctctcaacag

SEQ ID NO: 3285353 - DNA, 25 bp, Homo sapien
catgctatatgctcgtgggagaaac

SEQ ID NO: 3285354 - DNA, 25 bp, Homo sapien
gggatgtggtttgaatcacacagct

SEQ ID NO: 3285355 - DNA, 25 bp, Homo sapien
tacagagtttggactagaatccaca

SEQ ID NO: 3285356 - DNA, 25 bp, Homo sapien
gcaaagacacaattttacatgctat

SEQ ID NO: 3285357 - DNA, 25 bp, Homo sapien
ctcgtgagtaggtcctctccaagct

SEQ ID NO: 3285358 - DNA, 25 bp, Homo sapien
ttccaaagcgtgttctgctcgtgag

SEQ ID NO: 3285359 - DNA, 25 bp, Homo sapien
tgttctgctcgtgagtaggtcctct

SEQ ID NO: 3285360 - DNA, 25 bp, Homo sapien
gtgaaatgcacagaattttgcctct

SEQ ID NO: 3285361 - DNA, 25 bp, Homo sapien
gatgccaaagtatgattttggttaa

SEQ ID NO: 3285362 - DNA, 25 bp, Homo sapien
gccaaagtatgattttggttaaaga

SEQ ID NO: 3285363 - DNA, 25 bp, Homo sapien
agatgccaaagtatgattttggtta

SEQ ID NO: 3285364 - DNA, 25 bp, Homo sapien
caggagatgccaaagtatgattttg

SEQ ID NO: 3285365 - DNA, 25 bp, Homo sapien
tatgcatcagggattgtgtaaagat

SEQ ID NO: 3285366 - DNA, 25 bp, Homo sapien
catatgcatcagggattgtgtaaag

SEQ ID NO: 3285367 - DNA, 25 bp, Homo sapien
atgcatcagggattgtgtaaagatc

SEQ ID NO: 3285368 - DNA, 25 bp, Homo sapien
tgcatcagggattgtgtaaagatca

SEQ ID NO: 3285369 - DNA, 25 bp, Homo sapien
ccaagcagctgggatagggagggca

SEQ ID NO: 3285370 - DNA, 25 bp, Homo sapien
cttaaacctttctgagctgggcatg

SEQ ID NO: 3285371 - DNA, 25 bp, Homo sapien
agtgaggagggaataccaagcagct

SEQ ID NO: 3285372 - DNA, 25 bp, Homo sapien
acctttctgagctgggcatgagtga

SEQ ID NO: 3285373 - DNA, 25 bp, Homo sapien
aagacatggccaaggtgcctgcagg

SEQ ID NO: 3285374 - DNA, 25 bp, Homo sapien
gaggcagagtagctcttttgtaagt

SEQ ID NO: 3285375 - DNA, 25 bp, Homo sapien
gcagaggcagagtagctcttttgta

SEQ ID NO: 3285376 - DNA, 25 bp, Homo sapien
tgtcatacaccaaacaagacatggc

SEQ ID NO: 3285377 - DNA, 25 bp, Homo sapien
tactttctacgagccattgactgcc

SEQ ID NO: 3285378 - DNA, 25 bp, Homo sapien
catctcagggtatgcggcctttgca

SEQ ID NO: 3285379 - DNA, 25 bp, Homo sapien
caaaccagggttttcagagaacaat

SEQ ID NO: 3285380 - DNA, 25 bp, Homo sapien
tcaaggcacaatctagaaaacagct

SEQ ID NO: 3285381 - DNA, 25 bp, Homo sapien
gagaccgtcctccaacagagtttat

SEQ ID NO: 3285382 - DNA, 25 bp, Homo sapien
ttattatggaggtgcttaacagctc

SEQ ID NO: 3285383 - DNA, 25 bp, Homo sapien
ggtataaaattagcacgctgagcat

SEQ ID NO: 3285384 - DNA, 25 bp, Homo sapien
aaccacatctgacaagcacaggctg

SEQ ID NO: 3285385 - DNA, 25 bp, Homo sapien
tcttccttaacagaagggctagatg

SEQ ID NO: 3285386 - DNA, 25 bp, Homo sapien
cagaagggctagatgggccagcaaa

SEQ ID NO: 3285387 - DNA, 25 bp, Homo sapien
tgggccagcaaattctaggttagat

SEQ ID NO: 3285388 - DNA, 25 bp, Homo sapien
ctgtttcttccttaacagaagggct

SEQ ID NO: 3285389 - DNA, 25 bp, Homo sapien
gaacttctcaatgaactattgacca

SEQ ID NO: 3285390 - DNA, 25 bp, Homo sapien
tcaaggtcataatgacctgctttgg

SEQ ID NO: 3285391 - DNA, 25 bp, Homo sapien
taatgacctgctttggaacttctca

SEQ ID NO: 3285392 - DNA, 25 bp, Homo sapien
gctttggaacttctcaatgaactat

SEQ ID NO: 3285393 - DNA, 25 bp, Homo sapien
tttcagggacaaaatcatacagata

SEQ ID NO: 3285394 - DNA, 25 bp, Homo sapien
cttttcagggacaaaatcatacaga

SEQ ID NO: 3285395 - DNA, 25 bp, Homo sapien
ttttcagggacaaaatcatacagat

SEQ ID NO: 3285396 - DNA, 25 bp, Homo sapien
ggtaacttcgatacttcaataagtg

SEQ ID NO: 3285397 - DNA, 25 bp, Homo sapien
tttagacttgaaggcaagttcaact

SEQ ID NO: 3285398 - DNA, 25 bp, Homo sapien
gggctgactggtaacttcgatactt

SEQ ID NO: 3285399 - DNA, 25 bp, Homo sapien
tacaggggctgactggtaacttcga

SEQ ID NO: 3285400 - DNA, 25 bp, Homo sapien
tgaatcagtttgaccttctgaacta

SEQ ID NO: 3285401 - DNA, 25 bp, Homo sapien
taggcttaaagagtccaacttccat

SEQ ID NO: 3285402 - DNA, 25 bp, Homo sapien
gaagcagcgttttccaattaagtga

SEQ ID NO: 3285403 - DNA, 25 bp, Homo sapien
taggcacatagactaggaagcagcg

SEQ ID NO: 3285404 - DNA, 25 bp, Homo sapien
gcttttgataggagcatcctgctga

SEQ ID NO: 3285405 - DNA, 25 bp, Homo sapien
agttcccacaggcttttgataggag

SEQ ID NO: 3285406 - DNA, 25 bp, Homo sapien
gtttccgacatagatttcagttccc

SEQ ID NO: 3285407 - DNA, 25 bp, Homo sapien
ttaagtttccgacatagatttcagt

SEQ ID NO: 3285408 - DNA, 25 bp, Homo sapien
ctgcagctagatagtattccttgta

SEQ ID NO: 3285409 - DNA, 25 bp, Homo sapien
gactgcagctagatagtattccttg

SEQ ID NO: 3285410 - DNA, 25 bp, Homo sapien
actgcagctagatagtattccttgt

SEQ ID NO: 3285411 - DNA, 25 bp, Homo sapien
agactgcagctagatagtattcctt

SEQ ID NO: 3285412 - DNA, 25 bp, Homo sapien
cagaagtacacccaagcaaagctca

SEQ ID NO: 3285413 - DNA, 25 bp, Homo sapien
ttgggaccagaagtacacccaagca

SEQ ID NO: 3285414 - DNA, 25 bp, Homo sapien
ggaccagaagtacacccaagcaaag

SEQ ID NO: 3285415 - DNA, 25 bp, Homo sapien
gaagtacacccaagcaaagctcaag

SEQ ID NO: 3285416 - DNA, 25 bp, Homo sapien
tggtaacatttccaaagggcctaga

SEQ ID NO: 3285417 - DNA, 25 bp, Homo sapien
agttaggcaagcaagaatcttctgg

SEQ ID NO: 3285418 - DNA, 25 bp, Homo sapien
caccagagttgtatgagttaggcaa

SEQ ID NO: 3285419 - DNA, 25 bp, Homo sapien
gcaggtagatcagcataggaccatt

SEQ ID NO: 3285420 - DNA, 25 bp, Homo sapien
tttaaataggcacactcattcctga

SEQ ID NO: 3285421 - DNA, 25 bp, Homo sapien
gttctgatattcttttgagggtgca

SEQ ID NO: 3285422 - DNA, 25 bp, Homo sapien
tcctgttcctggatctttaaatagg

SEQ ID NO: 3285423 - DNA, 25 bp, Homo sapien
gaaggttctgatattcttttgaggg

SEQ ID NO: 3285424 - DNA, 25 bp, Homo sapien
acagtttgtcttgttgttttcgaca

SEQ ID NO: 3285425 - DNA, 25 bp, Homo sapien
tctcagtactcagtgggtctacagt

SEQ ID NO: 3285426 - DNA, 25 bp, Homo sapien
cagtgggtctacagtttgtcttgtt

SEQ ID NO: 3285427 - DNA, 25 bp, Homo sapien
ctttatctcagtactcagtgggtct

SEQ ID NO: 3285428 - DNA, 25 bp, Homo sapien
caaaagtattcagtaaaatcctgca

SEQ ID NO: 3285429 - DNA, 25 bp, Homo sapien
ctggttctctaccacctttgcaaaa

SEQ ID NO: 3285430 - DNA, 25 bp, Homo sapien
tctttctggttctctaccacctttg

SEQ ID NO: 3285431 - DNA, 25 bp, Homo sapien
ctctaccacctttgcaaaagtattc

SEQ ID NO: 3285432 - DNA, 25 bp, Homo sapien
caccccttgccatcattcttcctga

SEQ ID NO: 3285433 - DNA, 25 bp, Homo sapien
gccatcattcttcctgaaataatca

SEQ ID NO: 3285434 - DNA, 25 bp, Homo sapien
cctccacaccccttgccatcattct

SEQ ID NO: 3285435 - DNA, 25 bp, Homo sapien
ctgaaataatcacttcaatagattt

SEQ ID NO: 3285436 - DNA, 25 bp, Homo sapien
tgccttatggtccttgatcaatacc

SEQ ID NO: 3285437 - DNA, 25 bp, Homo sapien
tcatctcactagaggtactctcagg

SEQ ID NO: 3285438 - DNA, 25 bp, Homo sapien
ggtactctcaggatatgccttatgg

SEQ ID NO: 3285439 - DNA, 25 bp, Homo sapien
gatgccatgatcttcttttagtagt

SEQ ID NO: 3285440 - DNA, 25 bp, Homo sapien
aaagtacacaatatatcaaaggttc

SEQ ID NO: 3285441 - DNA, 25 bp, Homo sapien
gaattgacttgaagaaagctctgaa

SEQ ID NO: 3285442 - DNA, 25 bp, Homo sapien
caaaggttcccagaattgacttgaa

SEQ ID NO: 3285443 - DNA, 25 bp, Homo sapien
cacaatatatcaaaggttcccagaa

SEQ ID NO: 3285444 - DNA, 25 bp, Homo sapien
gtgcccagcttcacatgtatgttct

SEQ ID NO: 3285445 - DNA, 25 bp, Homo sapien
tacctggtaattgggataaccatct

SEQ ID NO: 3285446 - DNA, 25 bp, Homo sapien
cagaaggtagttttgcatcccggag

SEQ ID NO: 3285447 - DNA, 25 bp, Homo sapien
ggtactcactgaagttaagccctta

SEQ ID NO: 3285448 - DNA, 25 bp, Homo sapien
ccaatggaaagatcaccatcgatga

SEQ ID NO: 3285449 - DNA, 25 bp, Homo sapien
catcgatgaatacatcacctgctgt

SEQ ID NO: 3285450 - DNA, 25 bp, Homo sapien
tgctgtgtcaaacttagggctctga

SEQ ID NO: 3285451 - DNA, 25 bp, Homo sapien
ggctctgacagatagctttcgaaga

SEQ ID NO: 3285452 - DNA, 25 bp, Homo sapien
tccaggtattgaatgagaatacttc

SEQ ID NO: 3285453 - DNA, 25 bp, Homo sapien
cacttgcagctctgtgcttaacatg

SEQ ID NO: 3285454 - DNA, 25 bp, Homo sapien
ttcatggcatcctcttgaagataac

SEQ ID NO: 3285455 - DNA, 25 bp, Homo sapien
agataacaggcatcatccatattct

SEQ ID NO: 3285456 - DNA, 25 bp, Homo sapien
taaagattctagcactattggtgcc

SEQ ID NO: 3285457 - DNA, 25 bp, Homo sapien
tctttggtgcatccaaggagggcaa

SEQ ID NO: 3285458 - DNA, 25 bp, Homo sapien
tactgcagactaaattgagcctttt

SEQ ID NO: 3285459 - DNA, 25 bp, Homo sapien
cattatttaaagcatcggagtaggt

SEQ ID NO: 3285460 - DNA, 25 bp, Homo sapien
gcagtgtaggcacgtagtaggtaca

SEQ ID NO: 3285461 - DNA, 25 bp, Homo sapien
tccacaacgatcatttctaacagag

SEQ ID NO: 3285462 - DNA, 25 bp, Homo sapien
tcaggaaatacaggcttggtcaggg

SEQ ID NO: 3285463 - DNA, 25 bp, Homo sapien
tatctcaagctctgtggatttagca

SEQ ID NO: 3285464 - DNA, 25 bp, Homo sapien
agtcatcatttttaagcctgatttg

SEQ ID NO: 3285465 - DNA, 25 bp, Homo sapien
ctgcagtgaagtcatcatttttaag

SEQ ID NO: 3285466 - DNA, 25 bp, Homo sapien
tcatcatttttaagcctgatttgct

SEQ ID NO: 3285467 - DNA, 25 bp, Homo sapien
gaagtcatcatttttaagcctgatt

SEQ ID NO: 3285468 - DNA, 25 bp, Homo sapien
tgcaggggaccagagtgcacatcat

SEQ ID NO: 3285469 - DNA, 25 bp, Homo sapien
ggaacctggtatccagattgcaggg

SEQ ID NO: 3285470 - DNA, 25 bp, Homo sapien
aagagagaaaggaacctggtatcca

SEQ ID NO: 3285471 - DNA, 25 bp, Homo sapien
taccaacctcagaaggtcaagagag

SEQ ID NO: 3285472 - DNA, 25 bp, Homo sapien
gtccatagtctcagactttgcttcc

SEQ ID NO: 3285473 - DNA, 25 bp, Homo sapien
catccaagatggtccatagtctcag

SEQ ID NO: 3285474 - DNA, 25 bp, Homo sapien
tgtttctccaggctaggagcctttt

SEQ ID NO: 3285475 - DNA, 25 bp, Homo sapien
tccaggctaggagccttttgctcca

SEQ ID NO: 3285476 - DNA, 25 bp, Homo sapien
gcatgtgagccttctgtgcgatggc

SEQ ID NO: 3285477 - DNA, 25 bp, Homo sapien
tgcaccggtgttctgtttgcaccat

SEQ ID NO: 3285478 - DNA, 25 bp, Homo sapien
tcttccactgtgagacggaatccac

SEQ ID NO: 3285479 - DNA, 25 bp, Homo sapien
gctggtagccaagtgcaccggtgtt

SEQ ID NO: 3285480 - DNA, 25 bp, Homo sapien
cagtgttatctcctctcctaaacat

SEQ ID NO: 3285481 - DNA, 25 bp, Homo sapien
tcagtgttatctcctctcctaaaca

SEQ ID NO: 3285482 - DNA, 25 bp, Homo sapien
ctctccacattcaaaggacctccat

SEQ ID NO: 3285483 - DNA, 25 bp, Homo sapien
gacagcagccactaccattttcagt

SEQ ID NO: 3285484 - DNA, 25 bp, Homo sapien
tatgacagcagccactaccattttc

SEQ ID NO: 3285485 - DNA, 25 bp, Homo sapien
ctgcaatatgacagcagccactacc

SEQ ID NO: 3285486 - DNA, 25 bp, Homo sapien
tctccactaatattgcagccaagat

SEQ ID NO: 3285487 - DNA, 25 bp, Homo sapien
cttctctccactaatattgcagcca

SEQ ID NO: 3285488 - DNA, 25 bp, Homo sapien
tctctccactaatattgcagccaag

SEQ ID NO: 3285489 - DNA, 25 bp, Homo sapien
ctccactaatattgcagccaagata

SEQ ID NO: 3285490 - DNA, 25 bp, Homo sapien
cttcttgatgcacagcaatgggagg

SEQ ID NO: 3285491 - DNA, 25 bp, Homo sapien
cttgatgcacagcaatgggaggaac

SEQ ID NO: 3285492 - DNA, 25 bp, Homo sapien
tcttgatgcacagcaatgggaggaa

SEQ ID NO: 3285493 - DNA, 25 bp, Homo sapien
ttcttgatgcacagcaatgggagga

SEQ ID NO: 3285494 - DNA, 25 bp, Homo sapien
gttatttctggagttggcatatggc

SEQ ID NO: 3285495 - DNA, 25 bp, Homo sapien
atgaaggcaatgaccctgattctga

SEQ ID NO: 3285496 - DNA, 25 bp, Homo sapien
tctggagttggcatatggctctttc

SEQ ID NO: 3285497 - DNA, 25 bp, Homo sapien
aggcaatgaccctgattctgaagct

SEQ ID NO: 3285498 - DNA, 25 bp, Homo sapien
gtagaaaactctaaactgcagtaaa

SEQ ID NO: 3285499 - DNA, 25 bp, Homo sapien
tatgactagcatttttatctaggct

SEQ ID NO: 3285500 - DNA, 25 bp, Homo sapien
tgcccattaatagcagtagaaaact

SEQ ID NO: 3285501 - DNA, 25 bp, Homo sapien
tctcagtataccatctaatagagga

SEQ ID NO: 3285502 - DNA, 25 bp, Homo sapien
aagttagatccgaaaaggaaatgag

SEQ ID NO: 3285503 - DNA, 25 bp, Homo sapien
agttagatccgaaaaggaaatgaga

SEQ ID NO: 3285504 - DNA, 25 bp, Homo sapien
caagttagatccgaaaaggaaatga

SEQ ID NO: 3285505 - DNA, 25 bp, Homo sapien
ccaaataattcatacatgtgcccca

SEQ ID NO: 3285506 - DNA, 25 bp, Homo sapien
ttaagaccctccaaataattcatac

SEQ ID NO: 3285507 - DNA, 25 bp, Homo sapien
cccagtgagggcctgtatttggatg

SEQ ID NO: 3285508 - DNA, 25 bp, Homo sapien
tggatgcttgatacatggaggacac

SEQ ID NO: 3285509 - DNA, 25 bp, Homo sapien
tgcacagataatccgcctgttctcc

SEQ ID NO: 3285510 - DNA, 25 bp, Homo sapien
agcaggggctttggatagcctgcaa

SEQ ID NO: 3285511 - DNA, 25 bp, Homo sapien
gaagtaaaccatgcacagataatcc

SEQ ID NO: 3285512 - DNA, 25 bp, Homo sapien
cttataacccatgaagtaaaccatg

SEQ ID NO: 3285513 - DNA, 25 bp, Homo sapien
tttctgcattgacctcttgtggtgc

SEQ ID NO: 3285514 - DNA, 25 bp, Homo sapien
tgtggtgctcctttcagagtatgaa

SEQ ID NO: 3285515 - DNA, 25 bp, Homo sapien
gattttgtttctgcattgacctctt

SEQ ID NO: 3285516 - DNA, 25 bp, Homo sapien
cattgacctcttgtggtgctccttt

SEQ ID NO: 3285517 - DNA, 25 bp, Homo sapien
aggacagtgttctcatcaaaaccat

SEQ ID NO: 3285518 - DNA, 25 bp, Homo sapien
acaggacagtgttctcatcaaaacc

SEQ ID NO: 3285519 - DNA, 25 bp, Homo sapien
caggacagtgttctcatcaaaacca

SEQ ID NO: 3285520 - DNA, 25 bp, Homo sapien
tagtcatgacaaccttcggcagctc

SEQ ID NO: 3285521 - DNA, 25 bp, Homo sapien
ttcaagactacattgagcccagagc

SEQ ID NO: 3285522 - DNA, 25 bp, Homo sapien
caagtcttgtggtctcaacttcaag

SEQ ID NO: 3285523 - DNA, 25 bp, Homo sapien
catcctgaagaaccgtagtcatgac

SEQ ID NO: 3285524 - DNA, 25 bp, Homo sapien
tggagggatccttatctgtctgctc

SEQ ID NO: 3285525 - DNA, 25 bp, Homo sapien
actgctgcagcgcaaggtcatccac

SEQ ID NO: 3285526 - DNA, 25 bp, Homo sapien
tcacggagtgaacctgaagtctgag

SEQ ID NO: 3285527 - DNA, 25 bp, Homo sapien
ggttggaagagtaatgaactgctgc

SEQ ID NO: 3285528 - DNA, 25 bp, Homo sapien
ctaatcatcatagcagtcattatct

SEQ ID NO: 3285529 - DNA, 25 bp, Homo sapien
tcatcatagcagtcattatctgcaa

SEQ ID NO: 3285530 - DNA, 25 bp, Homo sapien
atcatagcagtcattatctgcaaac

SEQ ID NO: 3285531 - DNA, 25 bp, Homo sapien
taatcatcatagcagtcattatctg

SEQ ID NO: 3285532 - DNA, 25 bp, Homo sapien
ttgaatttcactccaactttcctgg

SEQ ID NO: 3285533 - DNA, 25 bp, Homo sapien
actccaactttcctggaatcagcca

SEQ ID NO: 3285534 - DNA, 25 bp, Homo sapien
aggaagggccaagcttgtcatgtaa

SEQ ID NO: 3285535 - DNA, 25 bp, Homo sapien
ttcccaaaggaaccattccagtctc

SEQ ID NO: 3285536 - DNA, 25 bp, Homo sapien
gaatctataatctagttgaggagac

SEQ ID NO: 3285537 - DNA, 25 bp, Homo sapien
ggtactgtacatgacatgaattttg

SEQ ID NO: 3285538 - DNA, 25 bp, Homo sapien
tttctctttgccacggtaggtactg

SEQ ID NO: 3285539 - DNA, 25 bp, Homo sapien
tgttgttattgaatctataatctag

SEQ ID NO: 3285540 - DNA, 25 bp, Homo sapien
tgaaagtcccatatttgcttcaagt

SEQ ID NO: 3285541 - DNA, 25 bp, Homo sapien
ttgaaagtcccatatttgcttcaag

SEQ ID NO: 3285542 - DNA, 25 bp, Homo sapien
tgtaacctttgactgccacagggta

SEQ ID NO: 3285543 - DNA, 25 bp, Homo sapien
cctttgactgccacagggtaactca

SEQ ID NO: 3285544 - DNA, 25 bp, Homo sapien
ttgactgccacagggtaactcagac

SEQ ID NO: 3285545 - DNA, 25 bp, Homo sapien
atttaatgtaacctttgactgccac

SEQ ID NO: 3285546 - DNA, 25 bp, Homo sapien
gtcagcttcgaaatgcccaatacag

SEQ ID NO: 3285547 - DNA, 25 bp, Homo sapien
gcctccataattgagaacaaatggc

SEQ ID NO: 3285548 - DNA, 25 bp, Homo sapien
gcaaagtcagcttcgaaatgcccaa

SEQ ID NO: 3285549 - DNA, 25 bp, Homo sapien
tcgaaatgcccaatacagcctccat

SEQ ID NO: 3285550 - DNA, 25 bp, Homo sapien
ttttttggaaagttcgtctgctgga

SEQ ID NO: 3285551 - DNA, 25 bp, Homo sapien
gaagggaccaccttaagctgtcacc

SEQ ID NO: 3285552 - DNA, 25 bp, Homo sapien
cgtctgctggattaacaaaatcaca

SEQ ID NO: 3285553 - DNA, 25 bp, Homo sapien
gctggtgtgggtgacgcctttggcc

SEQ ID NO: 3285554 - DNA, 25 bp, Homo sapien
gttgctgcataaacccaataagcag

SEQ ID NO: 3285555 - DNA, 25 bp, Homo sapien
gctgcataaacccaataagcagtct

SEQ ID NO: 3285556 - DNA, 25 bp, Homo sapien
tgcataaacccaataagcagtctct

SEQ ID NO: 3285557 - DNA, 25 bp, Homo sapien
cagttgctgcataaacccaataagc

SEQ ID NO: 3285558 - DNA, 25 bp, Homo sapien
tttggctggactgccaaatcctggg

SEQ ID NO: 3285559 - DNA, 25 bp, Homo sapien
gactgacgccattcaaggcagagat

SEQ ID NO: 3285560 - DNA, 25 bp, Homo sapien
gatagtggcagaaggactgacgcca

SEQ ID NO: 3285561 - DNA, 25 bp, Homo sapien
agggtatgcatttggctggactgcc

SEQ ID NO: 3285562 - DNA, 25 bp, Homo sapien
aatttgacagtattataattaagct

SEQ ID NO: 3285563 - DNA, 25 bp, Homo sapien
tttgacagtattataattaagctca

SEQ ID NO: 3285564 - DNA, 25 bp, Homo sapien
aagatctacagctgcctatttccac

SEQ ID NO: 3285565 - DNA, 25 bp, Homo sapien
gctgcctatttccacatctttcaat

SEQ ID NO: 3285566 - DNA, 25 bp, Homo sapien
tcatgcgttcaaagtaggacagttt

SEQ ID NO: 3285567 - DNA, 25 bp, Homo sapien
gcgttcaaagtaggacagtttctaa

SEQ ID NO: 3285568 - DNA, 25 bp, Homo sapien
ttcaaagtaggacagtttctaaatg

SEQ ID NO: 3285569 - DNA, 25 bp, Homo sapien
catgcgttcaaagtaggacagtttc

SEQ ID NO: 3285570 - DNA, 25 bp, Homo sapien
tgcttcataaccttgttggctgccc

SEQ ID NO: 3285571 - DNA, 25 bp, Homo sapien
tcataaccttgttggctgccctaat

SEQ ID NO: 3285572 - DNA, 25 bp, Homo sapien
gttggctgccctaattgcaatgttc

SEQ ID NO: 3285573 - DNA, 25 bp, Homo sapien
accttgttggctgccctaattgcaa

SEQ ID NO: 3285574 - DNA, 25 bp, Homo sapien
ttaagtaggactcattagtcctctg

SEQ ID NO: 3285575 - DNA, 25 bp, Homo sapien
agtcctctgtagtccagtgccccag

SEQ ID NO: 3285576 - DNA, 25 bp, Homo sapien
taggactcattagtcctctgtagtc

SEQ ID NO: 3285577 - DNA, 25 bp, Homo sapien
tcattagtcctctgtagtccagtgc

SEQ ID NO: 3285578 - DNA, 25 bp, Homo sapien
tataactgcatttcactggctcaga

SEQ ID NO: 3285579 - DNA, 25 bp, Homo sapien
gacagctaccttgggagtacacata

SEQ ID NO: 3285580 - DNA, 25 bp, Homo sapien
ggctcagactcgctgtaagatgact

SEQ ID NO: 3285581 - DNA, 25 bp, Homo sapien
tttccgagtaggagcattgacagct

SEQ ID NO: 3285582 - DNA, 25 bp, Homo sapien
tcttatctttgtgttgctaaatgca

SEQ ID NO: 3285583 - DNA, 25 bp, Homo sapien
tctctcttcatcagtacaataacca

SEQ ID NO: 3285584 - DNA, 25 bp, Homo sapien
tcagtacaataaccataatttgaca

SEQ ID NO: 3285585 - DNA, 25 bp, Homo sapien
gttgctaaatgcaataaggcttctc

SEQ ID NO: 3285586 - DNA, 25 bp, Homo sapien
gactgaagtacccaaaacatcttaa

SEQ ID NO: 3285587 - DNA, 25 bp, Homo sapien
gcagcttgttgactgaagtacccaa

SEQ ID NO: 3285588 - DNA, 25 bp, Homo sapien
gcttgttgactgaagtacccaaaac

SEQ ID NO: 3285589 - DNA, 25 bp, Homo sapien
tgttgactgaagtacccaaaacatc

SEQ ID NO: 3285590 - DNA, 25 bp, Homo sapien
gatttttggttcctgtgacagtgct

SEQ ID NO: 3285591 - DNA, 25 bp, Homo sapien
gttcctgtgacagtgcttttctgtg

SEQ ID NO: 3285592 - DNA, 25 bp, Homo sapien
tggttcctgtgacagtgcttttctg

SEQ ID NO: 3285593 - DNA, 25 bp, Homo sapien
ctgatttttggttcctgtgacagtg

SEQ ID NO: 3285594 - DNA, 25 bp, Homo sapien
cttgccaggaccatgacggggaggg

SEQ ID NO: 3285595 - DNA, 25 bp, Homo sapien
tcacaatggctacactttccttcct

SEQ ID NO: 3285596 - DNA, 25 bp, Homo sapien
ccaggaccatgacggggagggagta

SEQ ID NO: 3285597 - DNA, 25 bp, Homo sapien
ttttcacaatggctacactttcctt

SEQ ID NO: 3285598 - DNA, 25 bp, Homo sapien
ggcctaagacagcaatcttctccat

SEQ ID NO: 3285599 - DNA, 25 bp, Homo sapien
tttgaggcctaagacagcaatcttc

SEQ ID NO: 3285600 - DNA, 25 bp, Homo sapien
gaggcctaagacagcaatcttctcc

SEQ ID NO: 3285601 - DNA, 25 bp, Homo sapien
ttgaggcctaagacagcaatcttct

SEQ ID NO: 3285602 - DNA, 25 bp, Homo sapien
cacagctactggagatgtattagta

SEQ ID NO: 3285603 - DNA, 25 bp, Homo sapien
ctgtctatgttcaatttagaagagc

SEQ ID NO: 3285604 - DNA, 25 bp, Homo sapien
tacccttcgagacacgtgtaacaaa

SEQ ID NO: 3285605 - DNA, 25 bp, Homo sapien
gagatgtattagtacccttcgagac

SEQ ID NO: 3285606 - DNA, 25 bp, Homo sapien
cagtgtgtcgcagtctctgaggtga

SEQ ID NO: 3285607 - DNA, 25 bp, Homo sapien
gctgccctctccacatatgacttgg

SEQ ID NO: 3285608 - DNA, 25 bp, Homo sapien
gcatagccagtgtgtcgcagtctct

SEQ ID NO: 3285609 - DNA, 25 bp, Homo sapien
tgaggtgagttgcagtcaaggtttc

SEQ ID NO: 3285610 - DNA, 25 bp, Homo sapien
aatgggagcaggtatcatccaatca

SEQ ID NO: 3285611 - DNA, 25 bp, Homo sapien
tgggagcaggtatcatccaatcagc

SEQ ID NO: 3285612 - DNA, 25 bp, Homo sapien
gggagcaggtatcatccaatcagct

SEQ ID NO: 3285613 - DNA, 25 bp, Homo sapien
ccaatgggagcaggtatcatccaat

SEQ ID NO: 3285614 - DNA, 25 bp, Homo sapien
tatctccccagccatatatcttgat

SEQ ID NO: 3285615 - DNA, 25 bp, Homo sapien
catatatcttgatgatggcagacag

SEQ ID NO: 3285616 - DNA, 25 bp, Homo sapien
ccagccatatatcttgatgatggca

SEQ ID NO: 3285617 - DNA, 25 bp, Homo sapien
tccccagccatatatcttgatgatg

SEQ ID NO: 3285618 - DNA, 25 bp, Homo sapien
atccataagattttattagtttctc

SEQ ID NO: 3285619 - DNA, 25 bp, Homo sapien
ggatatccataagattttattagtt

SEQ ID NO: 3285620 - DNA, 25 bp, Homo sapien
aaaggatatccataagattttatta

SEQ ID NO: 3285621 - DNA, 25 bp, Homo sapien
aaggatatccataagattttattag

SEQ ID NO: 3285622 - DNA, 25 bp, Homo sapien
cgtttattgtgtaactactgtgccc

SEQ ID NO: 3285623 - DNA, 25 bp, Homo sapien
ctatgcaaaagtctggctgtgtgga

SEQ ID NO: 3285624 - DNA, 25 bp, Homo sapien
tggattgcagctcaacatttaaagg

SEQ ID NO: 3285625 - DNA, 25 bp, Homo sapien
catgcccagaggtatagtagtcaca

SEQ ID NO: 3285626 - DNA, 25 bp, Homo sapien
gtctcctttggtaagctctagcaag

SEQ ID NO: 3285627 - DNA, 25 bp, Homo sapien
catcgatggacatcagggcatgact

SEQ ID NO: 3285628 - DNA, 25 bp, Homo sapien
taacaagcaacagcagtatcacagt

SEQ ID NO: 3285629 - DNA, 25 bp, Homo sapien
caataaggggaccttgtctcctttg

SEQ ID NO: 3285630 - DNA, 25 bp, Homo sapien
tgactagcctgtccgttacatgaag

SEQ ID NO: 3285631 - DNA, 25 bp, Homo sapien
tcctctttgctacgatgctggttct

SEQ ID NO: 3285632 - DNA, 25 bp, Homo sapien
ttggacatatgcgaggacatcctct

SEQ ID NO: 3285633 - DNA, 25 bp, Homo sapien
ccgttacatgaagatcatcaatcag

SEQ ID NO: 3285634 - DNA, 25 bp, Homo sapien
tcaggctcactacatgtgctataat

SEQ ID NO: 3285635 - DNA, 25 bp, Homo sapien
tgattcaggctcactacatgtgcta

SEQ ID NO: 3285636 - DNA, 25 bp, Homo sapien
tagcgggttctgttcaggttaccta

SEQ ID NO: 3285637 - DNA, 25 bp, Homo sapien
ttgccaagtaatagcgggttctgtt

SEQ ID NO: 3285638 - DNA, 25 bp, Homo sapien
gaaatggcattatatagaaactgta

SEQ ID NO: 3285639 - DNA, 25 bp, Homo sapien
atgaaatggcattatatagaaactg

SEQ ID NO: 3285640 - DNA, 25 bp, Homo sapien
tgaaatggcattatatagaaactgt

SEQ ID NO: 3285641 - DNA, 25 bp, Homo sapien
caatgaaatggcattatatagaaac

SEQ ID NO: 3285642 - DNA, 25 bp, Homo sapien
tagttcctctgtagtgtgttttctc

SEQ ID NO: 3285643 - DNA, 25 bp, Homo sapien
ttctgattctagttcctctgtagtg

SEQ ID NO: 3285644 - DNA, 25 bp, Homo sapien
tattattctcaactagtattttcta

SEQ ID NO: 3285645 - DNA, 25 bp, Homo sapien
ttctacattgcgataattttctgat

SEQ ID NO: 3285646 - DNA, 25 bp, Homo sapien
acaataggccagtgttgaaccatcc

SEQ ID NO: 3285647 - DNA, 25 bp, Homo sapien
tattgcaccttggaatagtctcctg

SEQ ID NO: 3285648 - DNA, 25 bp, Homo sapien
tttggaggcaagagtttacagtttc

SEQ ID NO: 3285649 - DNA, 25 bp, Homo sapien
tgtggatcaggtatcagcgtaatgc

SEQ ID NO: 3285650 - DNA, 25 bp, Homo sapien
tcagagaatggtgtcatccattgac

SEQ ID NO: 3285651 - DNA, 25 bp, Homo sapien
cctcttcggtccaaatatctatatt

SEQ ID NO: 3285652 - DNA, 25 bp, Homo sapien
tcttctttaccatatggattaatcc

SEQ ID NO: 3285653 - DNA, 25 bp, Homo sapien
catatggattaatcccacttcttcc

SEQ ID NO: 3285654 - DNA, 25 bp, Homo sapien
ttctcaagcgattcatcgatcccca

SEQ ID NO: 3285655 - DNA, 25 bp, Homo sapien
tcgatccccaaaagcaactatcaga

SEQ ID NO: 3285656 - DNA, 25 bp, Homo sapien
ttatagacacttaggccttttgccc

SEQ ID NO: 3285657 - DNA, 25 bp, Homo sapien
catttggcttttggcatcctttgct

SEQ ID NO: 3285658 - DNA, 25 bp, Homo sapien
cattgcatccttaagtaaggtctta

SEQ ID NO: 3285659 - DNA, 25 bp, Homo sapien
ggcattcaatggcataaagtcttct

SEQ ID NO: 3285660 - DNA, 25 bp, Homo sapien
gacaatctttagttgatactggccc

SEQ ID NO: 3285661 - DNA, 25 bp, Homo sapien
gtcctttgttacattgaccgtctca

SEQ ID NO: 3285662 - DNA, 25 bp, Homo sapien
gagattccccaacctacactattgg

SEQ ID NO: 3285663 - DNA, 25 bp, Homo sapien
ttagcctggatgtccaatagtctgc

SEQ ID NO: 3285664 - DNA, 25 bp, Homo sapien
ggccatcaatgtgggagagattccc

SEQ ID NO: 3285665 - DNA, 25 bp, Homo sapien
gctgactccactatatggctggcaa

SEQ ID NO: 3285666 - DNA, 25 bp, Homo sapien
agcttttgcctattcagtacgatac

SEQ ID NO: 3285667 - DNA, 25 bp, Homo sapien
tgaatgctctggccagagcttccaa

SEQ ID NO: 3285668 - DNA, 25 bp, Homo sapien
cttttgcctattcagtacgatactg

SEQ ID NO: 3285669 - DNA, 25 bp, Homo sapien
gagaggtcatcgttgtcttgtgctg

SEQ ID NO: 3285670 - DNA, 25 bp, Homo sapien
ttagtctcgttccttcaccaggctg

SEQ ID NO: 3285671 - DNA, 25 bp, Homo sapien
gactttagtctcgttccttcaccag

SEQ ID NO: 3285672 - DNA, 25 bp, Homo sapien
tgtcttttagactttagtctcgttc

SEQ ID NO: 3285673 - DNA, 25 bp, Homo sapien
tttagactttagtctcgttccttca

SEQ ID NO: 3285674 - DNA, 25 bp, Homo sapien
ctcaagtatggcagtaccttggtgt

SEQ ID NO: 3285675 - DNA, 25 bp, Homo sapien
tcttctgccaaatctaaacggaatg

SEQ ID NO: 3285676 - DNA, 25 bp, Homo sapien
agagctcagtttgatgagggtcctt

SEQ ID NO: 3285677 - DNA, 25 bp, Homo sapien
aagatcagtgtgttggcagagctca

SEQ ID NO: 3285678 - DNA, 25 bp, Homo sapien
tggtttacagatgggcctcttcttt

SEQ ID NO: 3285679 - DNA, 25 bp, Homo sapien
tacagatgggcctcttctttctgtg

SEQ ID NO: 3285680 - DNA, 25 bp, Homo sapien
gacagctaaagaaggcctatataaa

SEQ ID NO: 3285681 - DNA, 25 bp, Homo sapien
cttatactagcaataagcatttgga

SEQ ID NO: 3285682 - DNA, 25 bp, Homo sapien
tatgataacatccaacacatgtagt

SEQ ID NO: 3285683 - DNA, 25 bp, Homo sapien
gccttattaaaaagattagtagcta

SEQ ID NO: 3285684 - DNA, 25 bp, Homo sapien
aatctctcctaacataattacgtga

SEQ ID NO: 3285685 - DNA, 25 bp, Homo sapien
ttagattgaactgagaatctctcct

SEQ ID NO: 3285686 - DNA, 25 bp, Homo sapien
attctgagtgactaatttctttcag

SEQ ID NO: 3285687 - DNA, 25 bp, Homo sapien
tttcagcctgtttagacaggattag

SEQ ID NO: 3285688 - DNA, 25 bp, Homo sapien
gcaatttagttgttccagccttcag

SEQ ID NO: 3285689 - DNA, 25 bp, Homo sapien
tgactagcccatgaacaaatcagtt

SEQ ID NO: 3285690 - DNA, 25 bp, Homo sapien
catgagctgaagtggtccgccagca

SEQ ID NO: 3285691 - DNA, 25 bp, Homo sapien
gatcatatgaatagctgactagccc

SEQ ID NO: 3285692 - DNA, 25 bp, Homo sapien
cagagctcctagaagacggggcaga

SEQ ID NO: 3285693 - DNA, 25 bp, Homo sapien
gagctcctagaagacggggcagact

SEQ ID NO: 3285694 - DNA, 25 bp, Homo sapien
gctcctagaagacggggcagactgc

SEQ ID NO: 3285695 - DNA, 25 bp, Homo sapien
tgtgacagagctcctagaagacggg

SEQ ID NO: 3285696 - DNA, 25 bp, Homo sapien
actaggcattgaagcggaaccccag

SEQ ID NO: 3285697 - DNA, 25 bp, Homo sapien
attgaagcggaaccccagcatacca

SEQ ID NO: 3285698 - DNA, 25 bp, Homo sapien
aggtgactaggcattgaagcggaac

SEQ ID NO: 3285699 - DNA, 25 bp, Homo sapien
atctgaggtgactaggcattgaagc

SEQ ID NO: 3285700 - DNA, 25 bp, Homo sapien
ctccaaatgactgtatcacctctcc

SEQ ID NO: 3285701 - DNA, 25 bp, Homo sapien
tcctccaaatgactgtatcacctct

SEQ ID NO: 3285702 - DNA, 25 bp, Homo sapien
ccagactaggatgatccttgttcat

SEQ ID NO: 3285703 - DNA, 25 bp, Homo sapien
taactcatccaggtctttaggtaag

SEQ ID NO: 3285704 - DNA, 25 bp, Homo sapien
gttgcttaatttcatcacataccag

SEQ ID NO: 3285705 - DNA, 25 bp, Homo sapien
gaacattagtacacaaactgactca

SEQ ID NO: 3285706 - DNA, 25 bp, Homo sapien
tgccctccaagcaagtatttacccg

SEQ ID NO: 3285707 - DNA, 25 bp, Homo sapien
gaactgtatgagatatagctgtcac

SEQ ID NO: 3285708 - DNA, 25 bp, Homo sapien
ctcattaggagcctgcttatctgtg

SEQ ID NO: 3285709 - DNA, 25 bp, Homo sapien
gcttatctgtgatggccatataaat

SEQ ID NO: 3285710 - DNA, 25 bp, Homo sapien
cagcttctttgcattagatgtctca

SEQ ID NO: 3285711 - DNA, 25 bp, Homo sapien
ttattaagtggaggtagatcatcat

SEQ ID NO: 3285712 - DNA, 25 bp, Homo sapien
tattaagtggaggtagatcatcata

SEQ ID NO: 3285713 - DNA, 25 bp, Homo sapien
tttattaagtggaggtagatcatca

SEQ ID NO: 3285714 - DNA, 25 bp, Homo sapien
tgtttattaagtggaggtagatcat

SEQ ID NO: 3285715 - DNA, 25 bp, Homo sapien
tatagccattggctcatgttttggc

SEQ ID NO: 3285716 - DNA, 25 bp, Homo sapien
atgtcttcacaaggcaatgccatca

SEQ ID NO: 3285717 - DNA, 25 bp, Homo sapien
gttttggcatgtcttcacaaggcaa

SEQ ID NO: 3285718 - DNA, 25 bp, Homo sapien
ttggattcttgttgggatatagcca

SEQ ID NO: 3285719 - DNA, 25 bp, Homo sapien
ccttttcaaagcattcagggtatgc

SEQ ID NO: 3285720 - DNA, 25 bp, Homo sapien
agttgtatagcaagcacatgtaacg

SEQ ID NO: 3285721 - DNA, 25 bp, Homo sapien
gcaagcacatgtaacggagaggagt

SEQ ID NO: 3285722 - DNA, 25 bp, Homo sapien
taagtctgaaatttcttagcaggga

SEQ ID NO: 3285723 - DNA, 25 bp, Homo sapien
cggagaggagttgataaaattgtag

SEQ ID NO: 3285724 - DNA, 25 bp, Homo sapien
tatcattttcagagcccattccatc

SEQ ID NO: 3285725 - DNA, 25 bp, Homo sapien
gcccattccatctggaccatagact

SEQ ID NO: 3285726 - DNA, 25 bp, Homo sapien
tatatcattttcagagcccattcca

SEQ ID NO: 3285727 - DNA, 25 bp, Homo sapien
ccattccatctggaccatagacttc

SEQ ID NO: 3285728 - DNA, 25 bp, Homo sapien
atgatttcttagcggcattccccat

SEQ ID NO: 3285729 - DNA, 25 bp, Homo sapien
gaatattcgcgcttctgcaggtgcc

SEQ ID NO: 3285730 - DNA, 25 bp, Homo sapien
gctgacatttgggatcgaacaagga

SEQ ID NO: 3285731 - DNA, 25 bp, Homo sapien
gaacaaggaactctggctttcggct

SEQ ID NO: 3285732 - DNA, 25 bp, Homo sapien
tacgagtggctaaatccaagacttg

SEQ ID NO: 3285733 - DNA, 25 bp, Homo sapien
caggcatctggaaacaaatttccta

SEQ ID NO: 3285734 - DNA, 25 bp, Homo sapien
tgcaggcatctggaaacaaatttcc

SEQ ID NO: 3285735 - DNA, 25 bp, Homo sapien
tatgcaggcatctggaaacaaattt

SEQ ID NO: 3285736 - DNA, 25 bp, Homo sapien
gcatctggaaacaaatttcctagtt

SEQ ID NO: 3285737 - DNA, 25 bp, Homo sapien
ggccttggtattgcatcttgttgtt

SEQ ID NO: 3285738 - DNA, 25 bp, Homo sapien
atttgttggatttatagggccttgg

SEQ ID NO: 3285739 - DNA, 25 bp, Homo sapien
cccgacaactgccaaagggtttgtg

SEQ ID NO: 3285740 - DNA, 25 bp, Homo sapien
ttgagattctcataagctgttcccc

SEQ ID NO: 3285741 - DNA, 25 bp, Homo sapien
ccatgcttaataggtcaatatttcc

SEQ ID NO: 3285742 - DNA, 25 bp, Homo sapien
aactttaccattttccatattctct

SEQ ID NO: 3285743 - DNA, 25 bp, Homo sapien
cttccatgcttaataggtcaatatt

SEQ ID NO: 3285744 - DNA, 25 bp, Homo sapien
ctcttttctgctctatgcatgccat

SEQ ID NO: 3285745 - DNA, 25 bp, Homo sapien
gctgtgaggtaacaacagtgaacaa

SEQ ID NO: 3285746 - DNA, 25 bp, Homo sapien
ttagaaagtcaattatctgctgtga

SEQ ID NO: 3285747 - DNA, 25 bp, Homo sapien
cttagaaagtcaattatctgctgtg

SEQ ID NO: 3285748 - DNA, 25 bp, Homo sapien
attatctgctgtgaggtaacaacag

SEQ ID NO: 3285749 - DNA, 25 bp, Homo sapien
gataacctcttcatgtagtcagaaa

SEQ ID NO: 3285750 - DNA, 25 bp, Homo sapien
cacggaagggtgttgccaagtctct

SEQ ID NO: 3285751 - DNA, 25 bp, Homo sapien
aactgaagcacggaagggtgttgcc

SEQ ID NO: 3285752 - DNA, 25 bp, Homo sapien
gagctgggtgtgataacctcttcat

SEQ ID NO: 3285753 - DNA, 25 bp, Homo sapien
actctggtcagatatgtagtgtagt

SEQ ID NO: 3285754 - DNA, 25 bp, Homo sapien
tattctggatatgaaactctggtca

SEQ ID NO: 3285755 - DNA, 25 bp, Homo sapien
tctgataatagttattctaactgca

SEQ ID NO: 3285756 - DNA, 25 bp, Homo sapien
tctaactgcaatgaggtgatttctc

SEQ ID NO: 3285757 - DNA, 25 bp, Homo sapien
tgagccttactcttctcaagccttc

SEQ ID NO: 3285758 - DNA, 25 bp, Homo sapien
atttttgccatgagccttactcttc

SEQ ID NO: 3285759 - DNA, 25 bp, Homo sapien
gccttccacgatggctgacagagaa

SEQ ID NO: 3285760 - DNA, 25 bp, Homo sapien
agccttccacgatggctgacagaga

SEQ ID NO: 3285761 - DNA, 25 bp, Homo sapien
gttgaaatgccacagaccctgctat

SEQ ID NO: 3285762 - DNA, 25 bp, Homo sapien
taaacagaaggtactgggaacagcc

SEQ ID NO: 3285763 - DNA, 25 bp, Homo sapien
aatcaaatagccacaacaccttggg

SEQ ID NO: 3285764 - DNA, 25 bp, Homo sapien
tcatttggccacaagactgctgatt

SEQ ID NO: 3285765 - DNA, 25 bp, Homo sapien
tgggagatggaggctgaagtgagct

SEQ ID NO: 3285766 - DNA, 25 bp, Homo sapien
tgcattccagcctgggcggcaaagc

SEQ ID NO: 3285767 - DNA, 25 bp, Homo sapien
tgagatcacaccactgcattccagc

SEQ ID NO: 3285768 - DNA, 25 bp, Homo sapien
attccagcctgggcggcaaagcaag

SEQ ID NO: 3285769 - DNA, 25 bp, Homo sapien
tttcctagttgaccatcttgccagc

SEQ ID NO: 3285770 - DNA, 25 bp, Homo sapien
tgtcaatctcgctggaagctgcaga

SEQ ID NO: 3285771 - DNA, 25 bp, Homo sapien
gcagaccagagcttttcctagttga

SEQ ID NO: 3285772 - DNA, 25 bp, Homo sapien
tgccagcaatccaagctgctatgta

SEQ ID NO: 3285773 - DNA, 25 bp, Homo sapien
caaattcatgtaactgctttccacc

SEQ ID NO: 3285774 - DNA, 25 bp, Homo sapien
atttttcaaattcatgtaactgctt

SEQ ID NO: 3285775 - DNA, 25 bp, Homo sapien
aattcatgtaactgctttccaccat

SEQ ID NO: 3285776 - DNA, 25 bp, Homo sapien
ttcaaattcatgtaactgctttcca

SEQ ID NO: 3285777 - DNA, 25 bp, Homo sapien
ctgggcgacaagagcgaaactcgag

SEQ ID NO: 3285778 - DNA, 25 bp, Homo sapien
tgactgcacagccttcgatactggc

SEQ ID NO: 3285779 - DNA, 25 bp, Homo sapien
cagccttcgatactggctttggtta

SEQ ID NO: 3285780 - DNA, 25 bp, Homo sapien
ggagaacctccagcgaacagctgac

SEQ ID NO: 3285781 - DNA, 25 bp, Homo sapien
cattgaagttgttgtaaagcagtct

SEQ ID NO: 3285782 - DNA, 25 bp, Homo sapien
gaagacccattgtaaagtggagtcc

SEQ ID NO: 3285783 - DNA, 25 bp, Homo sapien
gcagggaaaggaagacccattgtaa

SEQ ID NO: 3285784 - DNA, 25 bp, Homo sapien
gacccattgtaaagtggagtcccac

SEQ ID NO: 3285785 - DNA, 25 bp, Homo sapien
aaggaagacccattgtaaagtggag

SEQ ID NO: 3285786 - DNA, 25 bp, Homo sapien
tatgctgagtctagtagttccagag

SEQ ID NO: 3285787 - DNA, 25 bp, Homo sapien
ctgagtctagtagttccagagagtc

SEQ ID NO: 3285788 - DNA, 25 bp, Homo sapien
tttatgctgagtctagtagttccag

SEQ ID NO: 3285789 - DNA, 25 bp, Homo sapien
tgctgagtctagtagttccagagag

SEQ ID NO: 3285790 - DNA, 25 bp, Homo sapien
catttcagatacaagctcagagcct

SEQ ID NO: 3285791 - DNA, 25 bp, Homo sapien
acaagctcagagcctcatagtagca

SEQ ID NO: 3285792 - DNA, 25 bp, Homo sapien
atacaagctcagagcctcatagtag

SEQ ID NO: 3285793 - DNA, 25 bp, Homo sapien
tttcagatacaagctcagagcctca

SEQ ID NO: 3285794 - DNA, 25 bp, Homo sapien
caggcagtatctgcatacccactta

SEQ ID NO: 3285795 - DNA, 25 bp, Homo sapien
tacccacttatcatgtttctctcac

SEQ ID NO: 3285796 - DNA, 25 bp, Homo sapien
tgcatacccacttatcatgtttctc

SEQ ID NO: 3285797 - DNA, 25 bp, Homo sapien
agtatctgcatacccacttatcatg

SEQ ID NO: 3285798 - DNA, 25 bp, Homo sapien
atacactcggtaatgttttcttgga

SEQ ID NO: 3285799 - DNA, 25 bp, Homo sapien
tgtacgtccacagaatcctctatgg

SEQ ID NO: 3285800 - DNA, 25 bp, Homo sapien
cttgaaatacactcggtaatgtttt

SEQ ID NO: 3285801 - DNA, 25 bp, Homo sapien
tggacaagtctgtatgtacgtccac

SEQ ID NO: 3285802 - DNA, 25 bp, Homo sapien
ggataattcgtgatttctactgctg

SEQ ID NO: 3285803 - DNA, 25 bp, Homo sapien
atgcatttgtagcttggagaagtag

SEQ ID NO: 3285804 - DNA, 25 bp, Homo sapien
ttcgactgagtcacatttgtagcat

SEQ ID NO: 3285805 - DNA, 25 bp, Homo sapien
gactgagtcacatttgtagcatgca

SEQ ID NO: 3285806 - DNA, 25 bp, Homo sapien
ctccaaagcaacactcgacagtctt

SEQ ID NO: 3285807 - DNA, 25 bp, Homo sapien
cagtcttccagactgcttgatcgta

SEQ ID NO: 3285808 - DNA, 25 bp, Homo sapien
cctgggtagaaatctcctccaaagc

SEQ ID NO: 3285809 - DNA, 25 bp, Homo sapien
gatcgtattcaacaatgtagtaatc

SEQ ID NO: 3285810 - DNA, 25 bp, Homo sapien
tttaaaactctaatcattggatcat

SEQ ID NO: 3285811 - DNA, 25 bp, Homo sapien
tctaatcattggatcattctctatc

SEQ ID NO: 3285812 - DNA, 25 bp, Homo sapien
actctaatcattggatcattctcta

SEQ ID NO: 3285813 - DNA, 25 bp, Homo sapien
taaaactctaatcattggatcattc

SEQ ID NO: 3285814 - DNA, 25 bp, Homo sapien
gagccatacttgctacagggatttc

SEQ ID NO: 3285815 - DNA, 25 bp, Homo sapien
ggatgttcctagagccatacttgct

SEQ ID NO: 3285816 - DNA, 25 bp, Homo sapien
gttcctagagccatacttgctacag

SEQ ID NO: 3285817 - DNA, 25 bp, Homo sapien
attcaaagccacaggatgttcctag

SEQ ID NO: 3285818 - DNA, 25 bp, Homo sapien
ttataaccagaagtagaatacaaag

SEQ ID NO: 3285819 - DNA, 25 bp, Homo sapien
tgaattataaccagaagtagaatac

SEQ ID NO: 3285820 - DNA, 25 bp, Homo sapien
tataaccagaagtagaatacaaagt

SEQ ID NO: 3285821 - DNA, 25 bp, Homo sapien
atttgaattataaccagaagtagaa

SEQ ID NO: 3285822 - DNA, 25 bp, Homo sapien
tcactgagcagtacagatgaatatt

SEQ ID NO: 3285823 - DNA, 25 bp, Homo sapien
gcagtacagatgaatattccatcct

SEQ ID NO: 3285824 - DNA, 25 bp, Homo sapien
ttagtattgtattttcccagtggca

SEQ ID NO: 3285825 - DNA, 25 bp, Homo sapien
tattccatcctccttagtattgtat

SEQ ID NO: 3285826 - DNA, 25 bp, Homo sapien
ggagatattccaacacagaaaaggc

SEQ ID NO: 3285827 - DNA, 25 bp, Homo sapien
gtttcacttataatgccaattggag

SEQ ID NO: 3285828 - DNA, 25 bp, Homo sapien
gtgactgaacgcacgtaactggaca

SEQ ID NO: 3285829 - DNA, 25 bp, Homo sapien
gctctcaaaagctggatagacagga

SEQ ID NO: 3285830 - DNA, 25 bp, Homo sapien
ggagaattctattcagtgctctatc

SEQ ID NO: 3285831 - DNA, 25 bp, Homo sapien
catagcctgaaactacaaaggcctc

SEQ ID NO: 3285832 - DNA, 25 bp, Homo sapien
tgtctttaatttctcctatccgtgt

SEQ ID NO: 3285833 - DNA, 25 bp, Homo sapien
cctctggtttcctccgtaggagaat

SEQ ID NO: 3285834 - DNA, 25 bp, Homo sapien
atttaaggcagacctcaaagttttg

SEQ ID NO: 3285835 - DNA, 25 bp, Homo sapien
tattagcttgtaccgcagtttgtgg

SEQ ID NO: 3285836 - DNA, 25 bp, Homo sapien
tcttattgcctattagcttgtaccg

SEQ ID NO: 3285837 - DNA, 25 bp, Homo sapien
tgtaccgcagtttgtggaatggcct

SEQ ID NO: 3285838 - DNA, 25 bp, Homo sapien
tattgcctattagcttgtaccgcag

SEQ ID NO: 3285839 - DNA, 25 bp, Homo sapien
tctattaatgactgtggcttgtggg

SEQ ID NO: 3285840 - DNA, 25 bp, Homo sapien
ggttcttctgaaagaggtctcagtc

SEQ ID NO: 3285841 - DNA, 25 bp, Homo sapien
ggcttgtgggaaatctaacatgatg

SEQ ID NO: 3285842 - DNA, 25 bp, Homo sapien
tgaaagaggtctcagtcagcattga

SEQ ID NO: 3285843 - DNA, 25 bp, Homo sapien
cccggcccaatgtcaggattttgtg

SEQ ID NO: 3285844 - DNA, 25 bp, Homo sapien
tgtggcatagcatctatactgctgg

SEQ ID NO: 3285845 - DNA, 25 bp, Homo sapien
actacataatggcacctgccatcat

SEQ ID NO: 3285846 - DNA, 25 bp, Homo sapien
ggaatgttggaaacatcattagtta

SEQ ID NO: 3285847 - DNA, 25 bp, Homo sapien
gatgctgacgtctgctcagcttttg

SEQ ID NO: 3285848 - DNA, 25 bp, Homo sapien
ttccatcggctgttaaggaagtatg

SEQ ID NO: 3285849 - DNA, 25 bp, Homo sapien
gaagtatgatgctgacgtctgctca

SEQ ID NO: 3285850 - DNA, 25 bp, Homo sapien
gctgttaaggaagtatgatgctgac

SEQ ID NO: 3285851 - DNA, 25 bp, Homo sapien
tgtggaatgctcttgagatacacac

SEQ ID NO: 3285852 - DNA, 25 bp, Homo sapien
tgattctgaatggatagagtaatgt

SEQ ID NO: 3285853 - DNA, 25 bp, Homo sapien
tttgattctgaatggatagagtaat

SEQ ID NO: 3285854 - DNA, 25 bp, Homo sapien
caaagtttactcccttttgattctg

SEQ ID NO: 3285855 - DNA, 25 bp, Homo sapien
ttgattctgaatggatagagtaatg

SEQ ID NO: 3285856 - DNA, 25 bp, Homo sapien
tttaaactatcaattagatctttct

SEQ ID NO: 3285857 - DNA, 25 bp, Homo sapien
aaactatcaattagatctttcttac

SEQ ID NO: 3285858 - DNA, 25 bp, Homo sapien
cttcttctagatataagcctgctgc

SEQ ID NO: 3285859 - DNA, 25 bp, Homo sapien
acaccttcttctagatataagcctg

SEQ ID NO: 3285860 - DNA, 25 bp, Homo sapien
tatcacatgacttgacagcggaaat

SEQ ID NO: 3285861 - DNA, 25 bp, Homo sapien
acatgacttgacagcggaaatcccc

SEQ ID NO: 3285862 - DNA, 25 bp, Homo sapien
taactttctggcatgtccaggacat

SEQ ID NO: 3285863 - DNA, 25 bp, Homo sapien
cttgagggatgttaactttctggca

SEQ ID NO: 3285864 - DNA, 25 bp, Homo sapien
ctagtaagaggataatggagggcag

SEQ ID NO: 3285865 - DNA, 25 bp, Homo sapien
taagaggataatggagggcagaaga

SEQ ID NO: 3285866 - DNA, 25 bp, Homo sapien
agtaagaggataatggagggcagaa

SEQ ID NO: 3285867 - DNA, 25 bp, Homo sapien
agaggataatggagggcagaagatg

SEQ ID NO: 3285868 - DNA, 25 bp, Homo sapien
gtataattgattgatcattgtccat

SEQ ID NO: 3285869 - DNA, 25 bp, Homo sapien
tgtataattgattgatcattgtcca

SEQ ID NO: 3285870 - DNA, 25 bp, Homo sapien
gctacacttagcataacacgcaagg

SEQ ID NO: 3285871 - DNA, 25 bp, Homo sapien
cataacacgcaaggatgaagtcatt

SEQ ID NO: 3285872 - DNA, 25 bp, Homo sapien
gggcagcatacaggctacacttagc

SEQ ID NO: 3285873 - DNA, 25 bp, Homo sapien
gaactcggcatattttcagaatcag

SEQ ID NO: 3285874 - DNA, 25 bp, Homo sapien
tgcaggaggagctcaccctttatcc

SEQ ID NO: 3285875 - DNA, 25 bp, Homo sapien
gagagtttctttccgttattcagag

SEQ ID NO: 3285876 - DNA, 25 bp, Homo sapien
ggagaactacttctaacagcccagt

SEQ ID NO: 3285877 - DNA, 25 bp, Homo sapien
cagcccagtggtgatggagagtttc

SEQ ID NO: 3285878 - DNA, 25 bp, Homo sapien
catggacagcaaccttctgagaagt

SEQ ID NO: 3285879 - DNA, 25 bp, Homo sapien
agcttgatacttccctcaatcccag

SEQ ID NO: 3285880 - DNA, 25 bp, Homo sapien
tgaacgcctcagtcaacaccatagg

SEQ ID NO: 3285881 - DNA, 25 bp, Homo sapien
tcaatcccagggtcatgaacgcctc

SEQ ID NO: 3285882 - DNA, 25 bp, Homo sapien
gcaggaggaatgctctcctactggg

SEQ ID NO: 3285883 - DNA, 25 bp, Homo sapien
gctgatatgccaattagaaggtagt

SEQ ID NO: 3285884 - DNA, 25 bp, Homo sapien
gaggtgacaagtctcaaggtgtgca

SEQ ID NO: 3285885 - DNA, 25 bp, Homo sapien
caggaagagccgatgtttcaatatc

SEQ ID NO: 3285886 - DNA, 25 bp, Homo sapien
acatttttgctgttatcgcctagac

SEQ ID NO: 3285887 - DNA, 25 bp, Homo sapien
cttttcacttcaatacctggtatta

SEQ ID NO: 3285888 - DNA, 25 bp, Homo sapien
cacttcaatacctggtattaaatca

SEQ ID NO: 3285889 - DNA, 25 bp, Homo sapien
gctgttatcgcctagactaattttt

SEQ ID NO: 3285890 - DNA, 25 bp, Homo sapien
atgaaagtaaagatggcatgcttct

SEQ ID NO: 3285891 - DNA, 25 bp, Homo sapien
aagtaaagatggcatgcttctctga

SEQ ID NO: 3285892 - DNA, 25 bp, Homo sapien
tgaaagtaaagatggcatgcttctc

SEQ ID NO: 3285893 - DNA, 25 bp, Homo sapien
gaaagtaaagatggcatgcttctct

SEQ ID NO: 3285894 - DNA, 25 bp, Homo sapien
tatagttccataatcattccaatca

SEQ ID NO: 3285895 - DNA, 25 bp, Homo sapien
gaaggcactgagaaaggtagctgat

SEQ ID NO: 3285896 - DNA, 25 bp, Homo sapien
cataatcattccaatcatagacatt

SEQ ID NO: 3285897 - DNA, 25 bp, Homo sapien
gaaaggtagctgatatagttccata

SEQ ID NO: 3285898 - DNA, 25 bp, Homo sapien
cagacaagccaattaatgtagtcca

SEQ ID NO: 3285899 - DNA, 25 bp, Homo sapien
ccaatgtcagacaagccaattaatg

SEQ ID NO: 3285900 - DNA, 25 bp, Homo sapien
ttcccactaccaatgtcagacaagc

SEQ ID NO: 3285901 - DNA, 25 bp, Homo sapien
ggactgagaatcattcccactacca

SEQ ID NO: 3285902 - DNA, 25 bp, Homo sapien
tcctcaataccggaaactggtcatt

SEQ ID NO: 3285903 - DNA, 25 bp, Homo sapien
gaatgcctcttcacttgataaatga

SEQ ID NO: 3285904 - DNA, 25 bp, Homo sapien
taaatgacattattccttccagtcc

SEQ ID NO: 3285905 - DNA, 25 bp, Homo sapien
taccccatcttgatctatttccaat

SEQ ID NO: 3285906 - DNA, 25 bp, Homo sapien
agttcactgggaattgccctctgaa

SEQ ID NO: 3285907 - DNA, 25 bp, Homo sapien
ctgcggtcgcggtctcctggacatg

SEQ ID NO: 3285908 - DNA, 25 bp, Homo sapien
cctctgaagtctctgcggtcgcggt

SEQ ID NO: 3285909 - DNA, 25 bp, Homo sapien
gaattgccctctgaagtctctgcgg

SEQ ID NO: 3285910 - DNA, 25 bp, Homo sapien
aaatgatggtctctacaaatgacaa

SEQ ID NO: 3285911 - DNA, 25 bp, Homo sapien
tgttggccaacatcagtatcaagag

SEQ ID NO: 3285912 - DNA, 25 bp, Homo sapien
cagcaggtgctacactggtaggaga

SEQ ID NO: 3285913 - DNA, 25 bp, Homo sapien
ggtaggagatactaccccttcctca

SEQ ID NO: 3285914 - DNA, 25 bp, Homo sapien
gttaactggcggtactgtgataaag

SEQ ID NO: 3285915 - DNA, 25 bp, Homo sapien
tccttgatgttgaagtttagttaac

SEQ ID NO: 3285916 - DNA, 25 bp, Homo sapien
gatgttgaagtttagttaactggcg

SEQ ID NO: 3285917 - DNA, 25 bp, Homo sapien
agtttagttaactggcggtactgtg

SEQ ID NO: 3285918 - DNA, 25 bp, Homo sapien
caaactcctgtgcatgagaaacacc

SEQ ID NO: 3285919 - DNA, 25 bp, Homo sapien
gagtaattcactcttagcttcaaac

SEQ ID NO: 3285920 - DNA, 25 bp, Homo sapien
gagaaacaccgttatgatactagta

SEQ ID NO: 3285921 - DNA, 25 bp, Homo sapien
ggttccatcatcatgggagtaattc

SEQ ID NO: 3285922 - DNA, 25 bp, Homo sapien
cgaagagtgataatacgttgttaca

SEQ ID NO: 3285923 - DNA, 25 bp, Homo sapien
tttgaagcgaagagtgataatacgt

SEQ ID NO: 3285924 - DNA, 25 bp, Homo sapien
gatgattgtgttaatgtggggtcca

SEQ ID NO: 3285925 - DNA, 25 bp, Homo sapien
tgataatacgttgttacatgaagaa

SEQ ID NO: 3285926 - DNA, 25 bp, Homo sapien
gttacttgatagtaaaaccactaca

SEQ ID NO: 3285927 - DNA, 25 bp, Homo sapien
cattccgtaggctagtacatttggt

SEQ ID NO: 3285928 - DNA, 25 bp, Homo sapien
cctttcaatacctgctcaaatgcat

SEQ ID NO: 3285929 - DNA, 25 bp, Homo sapien
tatgttgtttccttgtcgttacttg

SEQ ID NO: 3285930 - DNA, 25 bp, Homo sapien
gagtgaaaatacttactttctatac

SEQ ID NO: 3285931 - DNA, 25 bp, Homo sapien
attacaagataacccagtatactta

SEQ ID NO: 3285932 - DNA, 25 bp, Homo sapien
agataacccagtatacttaacttgt

SEQ ID NO: 3285933 - DNA, 25 bp, Homo sapien
tactgattttggttaaatgtatagt

SEQ ID NO: 3285934 - DNA, 25 bp, Homo sapien
tatatacagactgaatgttgcaaga

SEQ ID NO: 3285935 - DNA, 25 bp, Homo sapien
agtgttcatatttgatctgctccat

SEQ ID NO: 3285936 - DNA, 25 bp, Homo sapien
gatacaatctattccagatgaccgc

SEQ ID NO: 3285937 - DNA, 25 bp, Homo sapien
gatgaccgctattactctcctgctg

SEQ ID NO: 3285938 - DNA, 25 bp, Homo sapien
gctttcgagccctcattatcttcaa

SEQ ID NO: 3285939 - DNA, 25 bp, Homo sapien
caaatagacctgagcgaagtctgaa

SEQ ID NO: 3285940 - DNA, 25 bp, Homo sapien
atatgaatttgctttcgagccctca

SEQ ID NO: 3285941 - DNA, 25 bp, Homo sapien
aaatagacctgagcgaagtctgaac

SEQ ID NO: 3285942 - DNA, 25 bp, Homo sapien
ctggagttcagggactcaaacacag

SEQ ID NO: 3285943 - DNA, 25 bp, Homo sapien
tggagttcagggactcaaacacagc

SEQ ID NO: 3285944 - DNA, 25 bp, Homo sapien
ggagttcagggactcaaacacagct

SEQ ID NO: 3285945 - DNA, 25 bp, Homo sapien
caaatcaactgtgcaataaccatgt

SEQ ID NO: 3285946 - DNA, 25 bp, Homo sapien
tagaagttgaagtgttcgtacaaac

SEQ ID NO: 3285947 - DNA, 25 bp, Homo sapien
caactgtgcaataaccatgtgtggt

SEQ ID NO: 3285948 - DNA, 25 bp, Homo sapien
gaagtgttcgtacaaacaaatcaac

SEQ ID NO: 3285949 - DNA, 25 bp, Homo sapien
aagttctcagggtacggaagaggca

SEQ ID NO: 3285950 - DNA, 25 bp, Homo sapien
ctagaagttctcagggtacggaaga

SEQ ID NO: 3285951 - DNA, 25 bp, Homo sapien
tcagggtacggaagaggcaaatctt

SEQ ID NO: 3285952 - DNA, 25 bp, Homo sapien
ggaagaggcaaatcttccaaaactg

SEQ ID NO: 3285953 - DNA, 25 bp, Homo sapien
gcatcttctacgaaggggttactca

SEQ ID NO: 3285954 - DNA, 25 bp, Homo sapien
gaagcatcttctacgaaggggttac

SEQ ID NO: 3285955 - DNA, 25 bp, Homo sapien
agaagcatcttctacgaaggggtta

SEQ ID NO: 3285956 - DNA, 25 bp, Homo sapien
atcttctacgaaggggttactcata

SEQ ID NO: 3285957 - DNA, 25 bp, Homo sapien
ggaatcagctctgtaatggtatagg

SEQ ID NO: 3285958 - DNA, 25 bp, Homo sapien
atggtatagggagaagtatttgtac

SEQ ID NO: 3285959 - DNA, 25 bp, Homo sapien
aatcagctctgtaatggtataggga

SEQ ID NO: 3285960 - DNA, 25 bp, Homo sapien
cagctctgtaatggtatagggagaa

SEQ ID NO: 3285961 - DNA, 25 bp, Homo sapien
acactgcaattctggcccaggaatg

SEQ ID NO: 3285962 - DNA, 25 bp, Homo sapien
ctggcccaggaatgagtttattgtc

SEQ ID NO: 3285963 - DNA, 25 bp, Homo sapien
tattgtcatacccaagacttgcggg

SEQ ID NO: 3285964 - DNA, 25 bp, Homo sapien
cttttcaatatcctcacactgcaat

SEQ ID NO: 3285965 - DNA, 25 bp, Homo sapien
ttgatgccggaacctcgggtgtggc

SEQ ID NO: 3285966 - DNA, 25 bp, Homo sapien
gccgttgatgccggaacctcgggtg

SEQ ID NO: 3285967 - DNA, 25 bp, Homo sapien
ccgttgatgccggaacctcgggtgt

SEQ ID NO: 3285968 - DNA, 25 bp, Homo sapien
atgccggaacctcgggtgtggcctt

SEQ ID NO: 3285969 - DNA, 25 bp, Homo sapien
ttatctctacttacttcaaagtatt

SEQ ID NO: 3285970 - DNA, 25 bp, Homo sapien
ttttatctctacttacttcaaagta

SEQ ID NO: 3285971 - DNA, 25 bp, Homo sapien
ttgttttatctctacttacttcaaa

SEQ ID NO: 3285972 - DNA, 25 bp, Homo sapien
tgttttatctctacttacttcaaag

SEQ ID NO: 3285973 - DNA, 25 bp, Homo sapien
atgaatctgggaatatgagagcaga

SEQ ID NO: 3285974 - DNA, 25 bp, Homo sapien
tctatagattccactgagaagtttt

SEQ ID NO: 3285975 - DNA, 25 bp, Homo sapien
ctctatagattccactgagaagttt

SEQ ID NO: 3285976 - DNA, 25 bp, Homo sapien
ctggatgaatctgggaatatgagag

SEQ ID NO: 3285977 - DNA, 25 bp, Homo sapien
ttgactgtctttggcttcctatttc

SEQ ID NO: 3285978 - DNA, 25 bp, Homo sapien
caagggtaaactataagaggagact

SEQ ID NO: 3285979 - DNA, 25 bp, Homo sapien
tataagtgtaatagagactctgagg

SEQ ID NO: 3285980 - DNA, 25 bp, Homo sapien
atgttactcagtaaggcttccggtc

SEQ ID NO: 3285981 - DNA, 25 bp, Homo sapien
tataaatcatcacttacccttgttg

SEQ ID NO: 3285982 - DNA, 25 bp, Homo sapien
taatttatgccagactctagttaag

SEQ ID NO: 3285983 - DNA, 25 bp, Homo sapien
gggcataatttatgccagactctag

SEQ ID NO: 3285984 - DNA, 25 bp, Homo sapien
attgagggcataatttatgccagac

SEQ ID NO: 3285985 - DNA, 25 bp, Homo sapien
gccagactctagttaagaaatggaa

SEQ ID NO: 3285986 - DNA, 25 bp, Homo sapien
tcatgcttgcaaaagaagtgtcaac

SEQ ID NO: 3285987 - DNA, 25 bp, Homo sapien
catgcttgcaaaagaagtgtcaact

SEQ ID NO: 3285988 - DNA, 25 bp, Homo sapien
catcatttgtcttgactcctaattt

SEQ ID NO: 3285989 - DNA, 25 bp, Homo sapien
tcatcatttgtcttgactcctaatt

SEQ ID NO: 3285990 - DNA, 25 bp, Homo sapien
tagactcctgattctcatcatttgt

SEQ ID NO: 3285991 - DNA, 25 bp, Homo sapien
ctttagactcctgattctcatcatt

SEQ ID NO: 3285992 - DNA, 25 bp, Homo sapien
tattgtgagggattggctgctacag

SEQ ID NO: 3285993 - DNA, 25 bp, Homo sapien
agccagtggcgtattttcattccaa

SEQ ID NO: 3285994 - DNA, 25 bp, Homo sapien
aactggtgtgcgctgagagcctatg

SEQ ID NO: 3285995 - DNA, 25 bp, Homo sapien
tccagagaaagaggttcaataggct

SEQ ID NO: 3285996 - DNA, 25 bp, Homo sapien
catgtagatctactgattgggagac

SEQ ID NO: 3285997 - DNA, 25 bp, Homo sapien
tagtttcactgagtcctaaccagag

SEQ ID NO: 3285998 - DNA, 25 bp, Homo sapien
ctcagtcatgcgaaaactgtgttcc

SEQ ID NO: 3285999 - DNA, 25 bp, Homo sapien
tggtgtttgcagactatcgggccta

SEQ ID NO: 3286000 - DNA, 25 bp, Homo sapien
taattatcaatactgagagctaaac

SEQ ID NO: 3286001 - DNA, 25 bp, Homo sapien
ttcttacctgcttacttgtttgctt

SEQ ID NO: 3286002 - DNA, 25 bp, Homo sapien
tgcatgaataccacttataccttct

SEQ ID NO: 3286003 - DNA, 25 bp, Homo sapien
taaagccatattgagagacagaagc

SEQ ID NO: 3286004 - DNA, 25 bp, Homo sapien
gcctaacttgcataacagatttctg

SEQ ID NO: 3286005 - DNA, 25 bp, Homo sapien
tgtaagtccatcaagctcaccaatg

SEQ ID NO: 3286006 - DNA, 25 bp, Homo sapien
tccacttattcgagagctgaggctg

SEQ ID NO: 3286007 - DNA, 25 bp, Homo sapien
tcaaaatgtgatccgaatgcctaac

SEQ ID NO: 3286008 - DNA, 25 bp, Homo sapien
cacttcccaactgcataaggcaccc

SEQ ID NO: 3286009 - DNA, 25 bp, Homo sapien
gcataaggcacccatcataaaccat

SEQ ID NO: 3286010 - DNA, 25 bp, Homo sapien
ccaactgcataaggcacccatcata

SEQ ID NO: 3286011 - DNA, 25 bp, Homo sapien
tcataaaccatgtcatctgacttcc

SEQ ID NO: 3286012 - DNA, 25 bp, Homo sapien
ctataaggataaattcctgactttg

SEQ ID NO: 3286013 - DNA, 25 bp, Homo sapien
tataaggataaattcctgactttgt

SEQ ID NO: 3286014 - DNA, 25 bp, Homo sapien
tcaaactctacccttttttccatga

SEQ ID NO: 3286015 - DNA, 25 bp, Homo sapien
ctgcacaatatgtctccctccaacc

SEQ ID NO: 3286016 - DNA, 25 bp, Homo sapien
atgaaaagattcaactcattctctt

SEQ ID NO: 3286017 - DNA, 25 bp, Homo sapien
tcatcaaactctacccttttttcca

SEQ ID NO: 3286018 - DNA, 25 bp, Homo sapien
gtgatggaccgaacattcatgattt

SEQ ID NO: 3286019 - DNA, 25 bp, Homo sapien
ggttaactgtgatggaccgaacatt

SEQ ID NO: 3286020 - DNA, 25 bp, Homo sapien
cctggttaactgtgatggaccgaac

SEQ ID NO: 3286021 - DNA, 25 bp, Homo sapien
aactgtgatggaccgaacattcatg

SEQ ID NO: 3286022 - DNA, 25 bp, Homo sapien
gagaaactaggttgttccttccaca

SEQ ID NO: 3286023 - DNA, 25 bp, Homo sapien
gacaagaatagccttccctccagtt

SEQ ID NO: 3286024 - DNA, 25 bp, Homo sapien
cactcagtggctgcaaaaaattcag

SEQ ID NO: 3286025 - DNA, 25 bp, Homo sapien
cattactttcggagtcctcaccaga

SEQ ID NO: 3286026 - DNA, 25 bp, Homo sapien
cctggtccctgagcatgctgaaatg

SEQ ID NO: 3286027 - DNA, 25 bp, Homo sapien
cccctggtccctgagcatgctgaaa

SEQ ID NO: 3286028 - DNA, 25 bp, Homo sapien
tccctgagcatgctgaaatgacacc

SEQ ID NO: 3286029 - DNA, 25 bp, Homo sapien
cctgagcatgctgaaatgacaccat

SEQ ID NO: 3286030 - DNA, 25 bp, Homo sapien
ctctgtcacaaattacaatctcctc

SEQ ID NO: 3286031 - DNA, 25 bp, Homo sapien
tgcctcttgcccactaatactctca

SEQ ID NO: 3286032 - DNA, 25 bp, Homo sapien
gcctcttgcccactaatactctcat

SEQ ID NO: 3286033 - DNA, 25 bp, Homo sapien
caaattacaatctcctcttgcctct

SEQ ID NO: 3286034 - DNA, 25 bp, Homo sapien
tgttccataccgatcaaaatcttcc

SEQ ID NO: 3286035 - DNA, 25 bp, Homo sapien
ttctaaagttgttccataccgatca

SEQ ID NO: 3286036 - DNA, 25 bp, Homo sapien
taaagttgttccataccgatcaaaa

SEQ ID NO: 3286037 - DNA, 25 bp, Homo sapien
aagttgttccataccgatcaaaatc

SEQ ID NO: 3286038 - DNA, 25 bp, Homo sapien
ttccatgatatggtgtgcccctccc

SEQ ID NO: 3286039 - DNA, 25 bp, Homo sapien
caggctgcacggaaagtgtattgct

SEQ ID NO: 3286040 - DNA, 25 bp, Homo sapien
cacattacatggtgagaggcagcat

SEQ ID NO: 3286041 - DNA, 25 bp, Homo sapien
cattcatgagagaaccattccgtga

SEQ ID NO: 3286042 - DNA, 25 bp, Homo sapien
ttttcctcaggactctgtgagtcat

SEQ ID NO: 3286043 - DNA, 25 bp, Homo sapien
ttttttttcctcaggactctgtgag

SEQ ID NO: 3286044 - DNA, 25 bp, Homo sapien
ttttttcctcaggactctgtgagtc

SEQ ID NO: 3286045 - DNA, 25 bp, Homo sapien
caaagctgttatccactttttaata

SEQ ID NO: 3286046 - DNA, 25 bp, Homo sapien
gatatattgcccttgtgcctgtctc

SEQ ID NO: 3286047 - DNA, 25 bp, Homo sapien
tatattgcccttgtgcctgtctcag

SEQ ID NO: 3286048 - DNA, 25 bp, Homo sapien
attgcccttgtgcctgtctcagctc

SEQ ID NO: 3286049 - DNA, 25 bp, Homo sapien
atattgcccttgtgcctgtctcagc

SEQ ID NO: 3286050 - DNA, 25 bp, Homo sapien
tgtcctgtatattgagaaatgttgc

SEQ ID NO: 3286051 - DNA, 25 bp, Homo sapien
ggtcccagacatcccttataatcag

SEQ ID NO: 3286052 - DNA, 25 bp, Homo sapien
gacttgtcgtctgcatcttcctatt

SEQ ID NO: 3286053 - DNA, 25 bp, Homo sapien
aatgttgctacatggatctggtccc

SEQ ID NO: 3286054 - DNA, 25 bp, Homo sapien
taaagctcagagtggagggcattgc

SEQ ID NO: 3286055 - DNA, 25 bp, Homo sapien
gctctgtagccggtgataaagctca

SEQ ID NO: 3286056 - DNA, 25 bp, Homo sapien
ggtctctgtgtgttgatcggccaca

SEQ ID NO: 3286057 - DNA, 25 bp, Homo sapien
tccaacaggcttgttgccaacatag

SEQ ID NO: 3286058 - DNA, 25 bp, Homo sapien
tgtgtctgagagtaccgccatctgt

SEQ ID NO: 3286059 - DNA, 25 bp, Homo sapien
cacctcagtgtagaagtaacattga

SEQ ID NO: 3286060 - DNA, 25 bp, Homo sapien
tgtctgagagtaccgccatctgtgg

SEQ ID NO: 3286061 - DNA, 25 bp, Homo sapien
cttgtgtctgagagtaccgccatct

SEQ ID NO: 3286062 - DNA, 25 bp, Homo sapien
caatgtggagatttcccatttggta

SEQ ID NO: 3286063 - DNA, 25 bp, Homo sapien
aaacatgttgcaggttttggaggat

SEQ ID NO: 3286064 - DNA, 25 bp, Homo sapien
ttaaaacatgttgcaggttttggag

SEQ ID NO: 3286065 - DNA, 25 bp, Homo sapien
gcttgagaaagtaatagcaatgtgg

SEQ ID NO: 3286066 - DNA, 25 bp, Homo sapien
tagtacaaatagaccgaggacactc

SEQ ID NO: 3286067 - DNA, 25 bp, Homo sapien
tcggtcaggtaggagacttggaaac

SEQ ID NO: 3286068 - DNA, 25 bp, Homo sapien
ttggaaactcgggtatcaagaactg

SEQ ID NO: 3286069 - DNA, 25 bp, Homo sapien
accgaggacactcggtcaggtagga

SEQ ID NO: 3286070 - DNA, 25 bp, Homo sapien
cagcagggctcccacgcagcctgca

SEQ ID NO: 3286071 - DNA, 25 bp, Homo sapien
tgagcacaggtcagcagcagggctc

SEQ ID NO: 3286072 - DNA, 25 bp, Homo sapien
ctgtgggtgacaggtgctgagcaca

SEQ ID NO: 3286073 - DNA, 25 bp, Homo sapien
acaggtgctgagcacaggtcagcag

SEQ ID NO: 3286074 - DNA, 25 bp, Homo sapien
cattaagtttttcagacaagcgcaa

SEQ ID NO: 3286075 - DNA, 25 bp, Homo sapien
aaaatattatacctgcgtgtgtctg

SEQ ID NO: 3286076 - DNA, 25 bp, Homo sapien
taggcataaaaagacaacgttcagg

SEQ ID NO: 3286077 - DNA, 25 bp, Homo sapien
caggtatgcaataggtcaccagttg

SEQ ID NO: 3286078 - DNA, 25 bp, Homo sapien
ctacgtattattgccaaaagcacag

SEQ ID NO: 3286079 - DNA, 25 bp, Homo sapien
aagcacagacttttatatgttctga

SEQ ID NO: 3286080 - DNA, 25 bp, Homo sapien
tcttcataagaaggcactgaaacca

SEQ ID NO: 3286081 - DNA, 25 bp, Homo sapien
ttcttcataagaaggcactgaaacc

SEQ ID NO: 3286082 - DNA, 25 bp, Homo sapien
cttcataagaaggcactgaaaccat

SEQ ID NO: 3286083 - DNA, 25 bp, Homo sapien
attcttcataagaaggcactgaaac

SEQ ID NO: 3286084 - DNA, 25 bp, Homo sapien
actccaggagttatggttactttca

SEQ ID NO: 3286085 - DNA, 25 bp, Homo sapien
tatgccagcgcttgttggccatatg

SEQ ID NO: 3286086 - DNA, 25 bp, Homo sapien
gaaaggtgaaagttgcctgctcagt

SEQ ID NO: 3286087 - DNA, 25 bp, Homo sapien
gattactttcagcaatatgccagcg

SEQ ID NO: 3286088 - DNA, 25 bp, Homo sapien
gtttactctgtggtggataagagat

SEQ ID NO: 3286089 - DNA, 25 bp, Homo sapien
tctgtggtggataagagataaaagt

SEQ ID NO: 3286090 - DNA, 25 bp, Homo sapien
caaaatgagagatctcatccctgct

SEQ ID NO: 3286091 - DNA, 25 bp, Homo sapien
tccctgctggagatctgtttactct

SEQ ID NO: 3286092 - DNA, 25 bp, Homo sapien
gatcccatgaatgtcagcacttgcc

SEQ ID NO: 3286093 - DNA, 25 bp, Homo sapien
tttattaaagctgtagcaaactgtt

SEQ ID NO: 3286094 - DNA, 25 bp, Homo sapien
gcaaactgtttaccctgctggttag

SEQ ID NO: 3286095 - DNA, 25 bp, Homo sapien
tcagctttcagcacagatacctttc

SEQ ID NO: 3286096 - DNA, 25 bp, Homo sapien
tctctgtttgtaattccagaatctg

SEQ ID NO: 3286097 - DNA, 25 bp, Homo sapien
cctcatctctgtttgtaattccaga

SEQ ID NO: 3286098 - DNA, 25 bp, Homo sapien
gtcagaaggttcttttgagtcctca

SEQ ID NO: 3286099 - DNA, 25 bp, Homo sapien
atctttgtttggaaccttggtcaga

SEQ ID NO: 3286100 - DNA, 25 bp, Homo sapien
tagccttactagctccctcatgaag

SEQ ID NO: 3286101 - DNA, 25 bp, Homo sapien
tccctcatggtttcctatagaaaga

SEQ ID NO: 3286102 - DNA, 25 bp, Homo sapien
agccttactagttccctcatggttt

SEQ ID NO: 3286103 - DNA, 25 bp, Homo sapien
aagaaggtatctggtagtagtagcc

SEQ ID NO: 3286104 - DNA, 25 bp, Homo sapien
gctggccaaccttgctaaaaaaaca

SEQ ID NO: 3286105 - DNA, 25 bp, Homo sapien
acagtaggtgtaatacaagtttcaa

SEQ ID NO: 3286106 - DNA, 25 bp, Homo sapien
aacaacagtaggtgtaatacaagtt

SEQ ID NO: 3286107 - DNA, 25 bp, Homo sapien
caaagatcttttcaagacgtttgac

SEQ ID NO: 3286108 - DNA, 25 bp, Homo sapien
tactctcagggctccagttaagtga

SEQ ID NO: 3286109 - DNA, 25 bp, Homo sapien
ttctgatatctggtactctcagggc

SEQ ID NO: 3286110 - DNA, 25 bp, Homo sapien
actctcagggctccagttaagtgaa

SEQ ID NO: 3286111 - DNA, 25 bp, Homo sapien
catgccaattctgatatctggtact

SEQ ID NO: 3286112 - DNA, 25 bp, Homo sapien
gtgttagactataagaatctctgtg

SEQ ID NO: 3286113 - DNA, 25 bp, Homo sapien
ggagtgtcttgtatataagaactac

SEQ ID NO: 3286114 - DNA, 25 bp, Homo sapien
ttcaaaagattatcaatggagtgtc

SEQ ID NO: 3286115 - DNA, 25 bp, Homo sapien
gaactacttctgactctcaaacata

SEQ ID NO: 3286116 - DNA, 25 bp, Homo sapien
ggtgcccctactccattcagtctcc

SEQ ID NO: 3286117 - DNA, 25 bp, Homo sapien
atgcctgctctggtgcccctactcc

SEQ ID NO: 3286118 - DNA, 25 bp, Homo sapien
cctgctctggtgcccctactccatt

SEQ ID NO: 3286119 - DNA, 25 bp, Homo sapien
tctggtgcccctactccattcagtc

SEQ ID NO: 3286120 - DNA, 25 bp, Homo sapien
tgccagttgccgaactctttgtaca

SEQ ID NO: 3286121 - DNA, 25 bp, Homo sapien
tctgaattcaatctaccaataactt

SEQ ID NO: 3286122 - DNA, 25 bp, Homo sapien
caataacttccacgcagcacatgct

SEQ ID NO: 3286123 - DNA, 25 bp, Homo sapien
ctcttgccagttgccgaactctttg

SEQ ID NO: 3286124 - DNA, 25 bp, Homo sapien
gtccataatcctcaaaggcaccagg

SEQ ID NO: 3286125 - DNA, 25 bp, Homo sapien
ccatttctgtagtctttcgcagcac

SEQ ID NO: 3286126 - DNA, 25 bp, Homo sapien
tcagagtgtatgtcccgcttcaggg

SEQ ID NO: 3286127 - DNA, 25 bp, Homo sapien
cgcagcactctgtaatgatcatcag

SEQ ID NO: 3286128 - DNA, 25 bp, Homo sapien
cagcctgtgacagtttaagtccttc

SEQ ID NO: 3286129 - DNA, 25 bp, Homo sapien
ctctcagagatctagccaaatttgt

SEQ ID NO: 3286130 - DNA, 25 bp, Homo sapien
cctgcaactttttggggtcatgatt

SEQ ID NO: 3286131 - DNA, 25 bp, Homo sapien
gccaaatttgtagctgaaccccaat

SEQ ID NO: 3286132 - DNA, 25 bp, Homo sapien
ccggaagagcttgttagatgatata

SEQ ID NO: 3286133 - DNA, 25 bp, Homo sapien
tctgaattttcatacccggaagagc

SEQ ID NO: 3286134 - DNA, 25 bp, Homo sapien
agatctgactgtcataggagacctc

SEQ ID NO: 3286135 - DNA, 25 bp, Homo sapien
caattgtatagctgatttcctgtgc

SEQ ID NO: 3286136 - DNA, 25 bp, Homo sapien
ctcagagaactcatgaaaagacctg

SEQ ID NO: 3286137 - DNA, 25 bp, Homo sapien
gagaactcatgaaaagacctgagga

SEQ ID NO: 3286138 - DNA, 25 bp, Homo sapien
catgaaaagacctgaggaaagcccc

SEQ ID NO: 3286139 - DNA, 25 bp, Homo sapien
gaactcatgaaaagacctgaggaaa

SEQ ID NO: 3286140 - DNA, 25 bp, Homo sapien
gctttgttctcttcgagcagaccca

SEQ ID NO: 3286141 - DNA, 25 bp, Homo sapien
ctctccactagacagtctacatggt

SEQ ID NO: 3286142 - DNA, 25 bp, Homo sapien
ccagaaagcctgaagaaacttggca

SEQ ID NO: 3286143 - DNA, 25 bp, Homo sapien
tagacagtctacatggttgatgatg

SEQ ID NO: 3286144 - DNA, 25 bp, Homo sapien
tttcagcaggttgtagagacttatt

SEQ ID NO: 3286145 - DNA, 25 bp, Homo sapien
ccattttcagcaggttgtagagact

SEQ ID NO: 3286146 - DNA, 25 bp, Homo sapien
cagcaggttgtagagacttattaac

SEQ ID NO: 3286147 - DNA, 25 bp, Homo sapien
ggtctgcagtctatacatattccat

SEQ ID NO: 3286148 - DNA, 25 bp, Homo sapien
catagatcattgttaatgtcccgtg

SEQ ID NO: 3286149 - DNA, 25 bp, Homo sapien
cagtgtgattaggatgaaagggacc

SEQ ID NO: 3286150 - DNA, 25 bp, Homo sapien
gctggagaagggcatagatcattgt

SEQ ID NO: 3286151 - DNA, 25 bp, Homo sapien
aatgtcccgtgcagtgtgattagga

SEQ ID NO: 3286152 - DNA, 25 bp, Homo sapien
cagacagggatactttaaaccgtgc

SEQ ID NO: 3286153 - DNA, 25 bp, Homo sapien
aaaatgagacactggcaggactttc

SEQ ID NO: 3286154 - DNA, 25 bp, Homo sapien
aacattttcagactcggtacttgca

SEQ ID NO: 3286155 - DNA, 25 bp, Homo sapien
taatccgcacctgaaaaaatgagac

SEQ ID NO: 3286156 - DNA, 25 bp, Homo sapien
aaaggaaggcgaacatttggctctc

SEQ ID NO: 3286157 - DNA, 25 bp, Homo sapien
tccgaagttgtgcaactgtggactg

SEQ ID NO: 3286158 - DNA, 25 bp, Homo sapien
tgaagcgaggaacgtaaaggaaggc

SEQ ID NO: 3286159 - DNA, 25 bp, Homo sapien
gattctcgttatttgccgcgtgtgg

SEQ ID NO: 3286160 - DNA, 25 bp, Homo sapien
aagcggacaggagggcgacttttct

SEQ ID NO: 3286161 - DNA, 25 bp, Homo sapien
ttttctccgtcaggctggaactggt

SEQ ID NO: 3286162 - DNA, 25 bp, Homo sapien
ggcgacttttctccgtcaggctgga

SEQ ID NO: 3286163 - DNA, 25 bp, Homo sapien
gggcagaaagcggacaggagggcga

SEQ ID NO: 3286164 - DNA, 25 bp, Homo sapien
ctggaggacggacagggtctgggtg

SEQ ID NO: 3286165 - DNA, 25 bp, Homo sapien
aggacggacagggtctgggtgagaa

SEQ ID NO: 3286166 - DNA, 25 bp, Homo sapien
ggaggacggacagggtctgggtgag

SEQ ID NO: 3286167 - DNA, 25 bp, Homo sapien
ggacggacagggtctgggtgagaag

SEQ ID NO: 3286168 - DNA, 25 bp, Homo sapien
caggctttgttaggcggttttggct

SEQ ID NO: 3286169 - DNA, 25 bp, Homo sapien
ccctgagtcttggagtcgcgctgcc

SEQ ID NO: 3286170 - DNA, 25 bp, Homo sapien
cagtttggtttagacctgcgtgccc

SEQ ID NO: 3286171 - DNA, 25 bp, Homo sapien
gcctgttgtgtctccttcacggcag

SEQ ID NO: 3286172 - DNA, 25 bp, Homo sapien
agcgcagcgtctgagctgccgcgac

SEQ ID NO: 3286173 - DNA, 25 bp, Homo sapien
ctgcagcgcagcgtctgagctgccg

SEQ ID NO: 3286174 - DNA, 25 bp, Homo sapien
ccggtcccacgtcggagctcagaag

SEQ ID NO: 3286175 - DNA, 25 bp, Homo sapien
agcctccggtcccacgtcggagctc

SEQ ID NO: 3286176 - DNA, 25 bp, Homo sapien
tggcgaggaaaccttgccgtgtccc

SEQ ID NO: 3286177 - DNA, 25 bp, Homo sapien
cctcatagggtagtcatctctccag

SEQ ID NO: 3286178 - DNA, 25 bp, Homo sapien
gaatggccctgatgagaacctcata

SEQ ID NO: 3286179 - DNA, 25 bp, Homo sapien
gcttgcttattgaaatcgcctggga

SEQ ID NO: 3286180 - DNA, 25 bp, Homo sapien
aacggtgtaagcactcctgccacag

SEQ ID NO: 3286181 - DNA, 25 bp, Homo sapien
tagagcacattgtaaacaacggtgt

SEQ ID NO: 3286182 - DNA, 25 bp, Homo sapien
cattgtaaacaacggtgtaagcact

SEQ ID NO: 3286183 - DNA, 25 bp, Homo sapien
tgtaaacaacggtgtaagcactcct

SEQ ID NO: 3286184 - DNA, 25 bp, Homo sapien
gctctgaagtaaataggcagtctgc

SEQ ID NO: 3286185 - DNA, 25 bp, Homo sapien
cctggttgtattactcattaggaag

SEQ ID NO: 3286186 - DNA, 25 bp, Homo sapien
ataggcagtctgctaattttagtgt

SEQ ID NO: 3286187 - DNA, 25 bp, Homo sapien
gagacgcatagactctggcaggaag

SEQ ID NO: 3286188 - DNA, 25 bp, Homo sapien
tggctgcagctactgtggctggcat

SEQ ID NO: 3286189 - DNA, 25 bp, Homo sapien
gtacctggtatcttttgtccctgag

SEQ ID NO: 3286190 - DNA, 25 bp, Homo sapien
taccagtgctaaagacaaggctgtg

SEQ ID NO: 3286191 - DNA, 25 bp, Homo sapien
tgtccctgagaaacgctgtagaaat

SEQ ID NO: 3286192 - DNA, 25 bp, Homo sapien
tgtagaaatagaggagccagcttta

SEQ ID NO: 3286193 - DNA, 25 bp, Homo sapien
ataagcagagagtgatgcaaaattg

SEQ ID NO: 3286194 - DNA, 25 bp, Homo sapien
taagcagagagtgatgcaaaattgt

SEQ ID NO: 3286195 - DNA, 25 bp, Homo sapien
aagcagagagtgatgcaaaattgtt

SEQ ID NO: 3286196 - DNA, 25 bp, Homo sapien
gacgactgcagtaggatgatgaccg

SEQ ID NO: 3286197 - DNA, 25 bp, Homo sapien
cgactgcagtaggatgatgaccgaa

SEQ ID NO: 3286198 - DNA, 25 bp, Homo sapien
ctgaaagacgactgcagtaggatga

SEQ ID NO: 3286199 - DNA, 25 bp, Homo sapien
tgcagtaggatgatgaccgaatgag

SEQ ID NO: 3286200 - DNA, 25 bp, Homo sapien
tagcctccataagtagaggtcagtg

SEQ ID NO: 3286201 - DNA, 25 bp, Homo sapien
tactccttcacagtggtagtcccaa

SEQ ID NO: 3286202 - DNA, 25 bp, Homo sapien
gatatataggctcatgttgtctgcc

SEQ ID NO: 3286203 - DNA, 25 bp, Homo sapien
tattgtaaatctgtctggacctgag

SEQ ID NO: 3286204 - DNA, 25 bp, Homo sapien
ggagacagcatcttgtgcattcttg

SEQ ID NO: 3286205 - DNA, 25 bp, Homo sapien
tgtatgctatattgctggtattgct

SEQ ID NO: 3286206 - DNA, 25 bp, Homo sapien
gctttttgtaatggaagagtgtttg

SEQ ID NO: 3286207 - DNA, 25 bp, Homo sapien
ctctgaagcacattcaattttgctg

SEQ ID NO: 3286208 - DNA, 25 bp, Homo sapien
gtgataattcttgtaatgtagattc

SEQ ID NO: 3286209 - DNA, 25 bp, Homo sapien
atatgtgataattcttgtaatgtag

SEQ ID NO: 3286210 - DNA, 25 bp, Homo sapien
tatgtgataattcttgtaatgtaga

SEQ ID NO: 3286211 - DNA, 25 bp, Homo sapien
atatatgtgataattcttgtaatgt

SEQ ID NO: 3286212 - DNA, 25 bp, Homo sapien
gtgatggtagttagacacatttcaa

SEQ ID NO: 3286213 - DNA, 25 bp, Homo sapien
aaaatcattatctgcattggttgtg

SEQ ID NO: 3286214 - DNA, 25 bp, Homo sapien
aacttatttcccatgtattgccaca

SEQ ID NO: 3286215 - DNA, 25 bp, Homo sapien
tgtttttcaacttatttcccatgta

SEQ ID NO: 3286216 - DNA, 25 bp, Homo sapien
ttatcgagctacacctcgttttcct

SEQ ID NO: 3286217 - DNA, 25 bp, Homo sapien
gctacacctcgttttcctttatctg

SEQ ID NO: 3286218 - DNA, 25 bp, Homo sapien
taataggtcgaatttcttggatggt

SEQ ID NO: 3286219 - DNA, 25 bp, Homo sapien
tatctgtcactacgtaaataatagg

SEQ ID NO: 3286220 - DNA, 25 bp, Homo sapien
ccttatagatccctcctcttgggga

SEQ ID NO: 3286221 - DNA, 25 bp, Homo sapien
tccctcactgcacggttgtacaagt

SEQ ID NO: 3286222 - DNA, 25 bp, Homo sapien
cactgcacggttgtacaagtgtgaa

SEQ ID NO: 3286223 - DNA, 25 bp, Homo sapien
ttactccctcactgcacggttgtac

SEQ ID NO: 3286224 - DNA, 25 bp, Homo sapien
gcacagattctgtacttgctgaaaa

SEQ ID NO: 3286225 - DNA, 25 bp, Homo sapien
ccttgtggcgtattttgtggcattg

SEQ ID NO: 3286226 - DNA, 25 bp, Homo sapien
gtgcccatgcacttagccatttctg

SEQ ID NO: 3286227 - DNA, 25 bp, Homo sapien
tccaccatgaatgtgcccatgcact

SEQ ID NO: 3286228 - DNA, 25 bp, Homo sapien
taaagactgccaacagtgcatatga

SEQ ID NO: 3286229 - DNA, 25 bp, Homo sapien
taacacaaataccagagcatctgtc

SEQ ID NO: 3286230 - DNA, 25 bp, Homo sapien
catccgatgcatggtcgtactagag

SEQ ID NO: 3286231 - DNA, 25 bp, Homo sapien
tatgactgtgctatgcatccgatgc

SEQ ID NO: 3286232 - DNA, 25 bp, Homo sapien
ccccaaaagggccaacagatatctc

SEQ ID NO: 3286233 - DNA, 25 bp, Homo sapien
gttcctgccagtagtaaacctttca

SEQ ID NO: 3286234 - DNA, 25 bp, Homo sapien
gaatgtgagcagctgccaatcttgt

SEQ ID NO: 3286235 - DNA, 25 bp, Homo sapien
acacttagaaccatcttaactggtg

SEQ ID NO: 3286236 - DNA, 25 bp, Homo sapien
aatttcaatttgtccatggacaagg

SEQ ID NO: 3286237 - DNA, 25 bp, Homo sapien
caaatttcaatttgtccatggacaa

SEQ ID NO: 3286238 - DNA, 25 bp, Homo sapien
gacatagcagcaatttttgtagaaa

SEQ ID NO: 3286239 - DNA, 25 bp, Homo sapien
aggtgacatagcagcaatttttgta

SEQ ID NO: 3286240 - DNA, 25 bp, Homo sapien
gtgaaagataggatttagttgttcc

SEQ ID NO: 3286241 - DNA, 25 bp, Homo sapien
gaaagataggatttagttgttccat

SEQ ID NO: 3286242 - DNA, 25 bp, Homo sapien
agataggatttagttgttccataaa

SEQ ID NO: 3286243 - DNA, 25 bp, Homo sapien
aaaagtgaaagataggatttagttg

SEQ ID NO: 3286244 - DNA, 25 bp, Homo sapien
cggataactgctataattggaaatg

SEQ ID NO: 3286245 - DNA, 25 bp, Homo sapien
gctataattggaaatggcaattcat

SEQ ID NO: 3286246 - DNA, 25 bp, Homo sapien
catttttatggttgaatctgtacat

SEQ ID NO: 3286247 - DNA, 25 bp, Homo sapien
tcatttttatggttgaatctgtaca

SEQ ID NO: 3286248 - DNA, 25 bp, Homo sapien
tctccttcttgtgtaaggcctataa

SEQ ID NO: 3286249 - DNA, 25 bp, Homo sapien
gaagattagtggacagcaaggtagc

SEQ ID NO: 3286250 - DNA, 25 bp, Homo sapien
tcaaagagtggttagagtacattca

SEQ ID NO: 3286251 - DNA, 25 bp, Homo sapien
gcaaggtagcttgttcctcgttaca

SEQ ID NO: 3286252 - DNA, 25 bp, Homo sapien
gaagagagtcattaagtgaataaaa

SEQ ID NO: 3286253 - DNA, 25 bp, Homo sapien
agagagtcattaagtgaataaaagt

SEQ ID NO: 3286254 - DNA, 25 bp, Homo sapien
tgtggaaatagagaagagagtcatt

SEQ ID NO: 3286255 - DNA, 25 bp, Homo sapien
agagaagagagtcattaagtgaata

SEQ ID NO: 3286256 - DNA, 25 bp, Homo sapien
aagtggcctgaaatttgcatgcttt

SEQ ID NO: 3286257 - DNA, 25 bp, Homo sapien
aaggactgtcaagtggcctgaaatt

SEQ ID NO: 3286258 - DNA, 25 bp, Homo sapien
caaaaagagctaaattgagcagaca

SEQ ID NO: 3286259 - DNA, 25 bp, Homo sapien
ggaattagttgctcaacaaaaagag

SEQ ID NO: 3286260 - DNA, 25 bp, Homo sapien
tcaagttgtcaggttcaaatccaaa

SEQ ID NO: 3286261 - DNA, 25 bp, Homo sapien
cataagcgatttggacctgaggaat

SEQ ID NO: 3286262 - DNA, 25 bp, Homo sapien
gaatgatttggttgttatccacact

SEQ ID NO: 3286263 - DNA, 25 bp, Homo sapien
tccacactccatatggattgcaaat

SEQ ID NO: 3286264 - DNA, 25 bp, Homo sapien
gagacggtctatctgtttgggcttt

SEQ ID NO: 3286265 - DNA, 25 bp, Homo sapien
tctgaggagtaacgtactttcttga

SEQ ID NO: 3286266 - DNA, 25 bp, Homo sapien
aaggtctgtgaagctaagtctctgc

SEQ ID NO: 3286267 - DNA, 25 bp, Homo sapien
ctctgctcctttgtaacatttgcat

SEQ ID NO: 3286268 - DNA, 25 bp, Homo sapien
ccctcttgtctgtggggccttgagg

SEQ ID NO: 3286269 - DNA, 25 bp, Homo sapien
ttgtctgatctgttttgtttattcc

SEQ ID NO: 3286270 - DNA, 25 bp, Homo sapien
ctgatctgttttgtttattccctct

SEQ ID NO: 3286271 - DNA, 25 bp, Homo sapien
gatctgttttgtttattccctcttg

SEQ ID NO: 3286272 - DNA, 25 bp, Homo sapien
caagccgtgctcttttgagactctt

SEQ ID NO: 3286273 - DNA, 25 bp, Homo sapien
catctggctctccaaccttctttcc

SEQ ID NO: 3286274 - DNA, 25 bp, Homo sapien
ctcttttttgacaagccgtgctctt

SEQ ID NO: 3286275 - DNA, 25 bp, Homo sapien
ttttgacaagccgtgctcttttgag

SEQ ID NO: 3286276 - DNA, 25 bp, Homo sapien
tgtgactgatctccttgtcattttc

SEQ ID NO: 3286277 - DNA, 25 bp, Homo sapien
ttgctgatgtgactgatctccttgt

SEQ ID NO: 3286278 - DNA, 25 bp, Homo sapien
ttattgctgatgtgactgatctcct

SEQ ID NO: 3286279 - DNA, 25 bp, Homo sapien
gctgatgtgactgatctccttgtca

SEQ ID NO: 3286280 - DNA, 25 bp, Homo sapien
ggaataaatccatgggctataaaaa

SEQ ID NO: 3286281 - DNA, 25 bp, Homo sapien
taaatccatgggctataaaaagtta

SEQ ID NO: 3286282 - DNA, 25 bp, Homo sapien
attgcaactgactttttgctgtaca

SEQ ID NO: 3286283 - DNA, 25 bp, Homo sapien
cttgctgctttccaattgcaactga

SEQ ID NO: 3286284 - DNA, 25 bp, Homo sapien
aatattcattggttagtttcttcac

SEQ ID NO: 3286285 - DNA, 25 bp, Homo sapien
tatcactatatgatggtagattcga

SEQ ID NO: 3286286 - DNA, 25 bp, Homo sapien
catgatgaaccctagaataataaaa

SEQ ID NO: 3286287 - DNA, 25 bp, Homo sapien
gattcgattttctaatcagtatttt

SEQ ID NO: 3286288 - DNA, 25 bp, Homo sapien
tcagacttttaaagcctgctgaaag

SEQ ID NO: 3286289 - DNA, 25 bp, Homo sapien
cagacttttaaagcctgctgaaagt

SEQ ID NO: 3286290 - DNA, 25 bp, Homo sapien
gacttttaaagcctgctgaaagtcc

SEQ ID NO: 3286291 - DNA, 25 bp, Homo sapien
acttttaaagcctgctgaaagtcct

SEQ ID NO: 3286292 - DNA, 25 bp, Homo sapien
tatgtggcagggcaagccgtccata

SEQ ID NO: 3286293 - DNA, 25 bp, Homo sapien
aagccgtccatagctgctgctggaa

SEQ ID NO: 3286294 - DNA, 25 bp, Homo sapien
acattccaggcatcgcccatgggac

SEQ ID NO: 3286295 - DNA, 25 bp, Homo sapien
cagttctccatagaagctaagtgta

SEQ ID NO: 3286296 - DNA, 25 bp, Homo sapien
tgcagtgccccatgtacagagtaag

SEQ ID NO: 3286297 - DNA, 25 bp, Homo sapien
tcatgtgggagggaaagcattcaac

SEQ ID NO: 3286298 - DNA, 25 bp, Homo sapien
ggcaggccctaattctcgtttcaag

SEQ ID NO: 3286299 - DNA, 25 bp, Homo sapien
gaactgggtcgagcaacatcatcct

SEQ ID NO: 3286300 - DNA, 25 bp, Homo sapien
catggctgtcctccttggatagcag

SEQ ID NO: 3286301 - DNA, 25 bp, Homo sapien
caaccaagaggtgtcagggccatct

SEQ ID NO: 3286302 - DNA, 25 bp, Homo sapien
ttaaggtgcttaaacaatccttcta

SEQ ID NO: 3286303 - DNA, 25 bp, Homo sapien
cacgaaataggatctttaaggtgct

SEQ ID NO: 3286304 - DNA, 25 bp, Homo sapien
caaattcttatgacacacattcaca

SEQ ID NO: 3286305 - DNA, 25 bp, Homo sapien
tccaaattcttatgacacacattca

SEQ ID NO: 3286306 - DNA, 25 bp, Homo sapien
agtgtccaggtgaagtcccactctc

SEQ ID NO: 3286307 - DNA, 25 bp, Homo sapien
caggtgaagtcccactctcttccac

SEQ ID NO: 3286308 - DNA, 25 bp, Homo sapien
caggggctggcaacttattttgttc

SEQ ID NO: 3286309 - DNA, 25 bp, Homo sapien
tcctcaggggctggcaacttatttt

SEQ ID NO: 3286310 - DNA, 25 bp, Homo sapien
aggggctggcaacttattttgttct

SEQ ID NO: 3286311 - DNA, 25 bp, Homo sapien
ctcaggggctggcaacttattttgt

SEQ ID NO: 3286312 - DNA, 25 bp, Homo sapien
aataattatagaggccaccatttcc

SEQ ID NO: 3286313 - DNA, 25 bp, Homo sapien
tgtatctccaaaagcctgaccagtt

SEQ ID NO: 3286314 - DNA, 25 bp, Homo sapien
ccaacagatagtggatatatccaga

SEQ ID NO: 3286315 - DNA, 25 bp, Homo sapien
tcagtcaagctagacacctgtccat

SEQ ID NO: 3286316 - DNA, 25 bp, Homo sapien
caccagattccatgagtgacttttg

SEQ ID NO: 3286317 - DNA, 25 bp, Homo sapien
tttgtcttgatatccccagccagcc

SEQ ID NO: 3286318 - DNA, 25 bp, Homo sapien
ccagattccatgagtgacttttgtc

SEQ ID NO: 3286319 - DNA, 25 bp, Homo sapien
tgtcttgatatccccagccagcccc

SEQ ID NO: 3286320 - DNA, 25 bp, Homo sapien
tgtgctttcctgaaatctgagttcc

SEQ ID NO: 3286321 - DNA, 25 bp, Homo sapien
tctatattaaaaggtagtattcctc

SEQ ID NO: 3286322 - DNA, 25 bp, Homo sapien
agcaactatgagcaaggttctgtgc

SEQ ID NO: 3286323 - DNA, 25 bp, Homo sapien
ttgcttctttatagataagtactcc

SEQ ID NO: 3286324 - DNA, 25 bp, Homo sapien
ttaataatctgccagcttggttgtt

SEQ ID NO: 3286325 - DNA, 25 bp, Homo sapien
cacaaaccttgggtctagactgctt

SEQ ID NO: 3286326 - DNA, 25 bp, Homo sapien
tgccaattaggaataagatagcccc

SEQ ID NO: 3286327 - DNA, 25 bp, Homo sapien
acatgcttgccttctgagatcctgg

SEQ ID NO: 3286328 - DNA, 25 bp, Homo sapien
gatattgaaggcctgtttacggcat

SEQ ID NO: 3286329 - DNA, 25 bp, Homo sapien
cctgtagagccataatatccttatc

SEQ ID NO: 3286330 - DNA, 25 bp, Homo sapien
cttcctgtagagccataatatcctt

SEQ ID NO: 3286331 - DNA, 25 bp, Homo sapien
agagccataatatccttatctataa

SEQ ID NO: 3286332 - DNA, 25 bp, Homo sapien
tgtagagccataatatccttatcta

SEQ ID NO: 3286333 - DNA, 25 bp, Homo sapien
agctgtttggtcagatcccaattag

SEQ ID NO: 3286334 - DNA, 25 bp, Homo sapien
tgatgcctgttagatgaagaggcac

SEQ ID NO: 3286335 - DNA, 25 bp, Homo sapien
cccaattaggatgatgcctgttaga

SEQ ID NO: 3286336 - DNA, 25 bp, Homo sapien
tcagatcccaattaggatgatgcct

SEQ ID NO: 3286337 - DNA, 25 bp, Homo sapien
gactgctcattagctctcaaacgca

SEQ ID NO: 3286338 - DNA, 25 bp, Homo sapien
cagactgctcattagctctcaaacg

SEQ ID NO: 3286339 - DNA, 25 bp, Homo sapien
ggatttccagactgctcattagctc

SEQ ID NO: 3286340 - DNA, 25 bp, Homo sapien
tttccagactgctcattagctctca

SEQ ID NO: 3286341 - DNA, 25 bp, Homo sapien
aattgcatgtcagaggaatttggta

SEQ ID NO: 3286342 - DNA, 25 bp, Homo sapien
cagaggaatttggtacacagattat

SEQ ID NO: 3286343 - DNA, 25 bp, Homo sapien
cacccttcaatctcaagtaggcacc

SEQ ID NO: 3286344 - DNA, 25 bp, Homo sapien
catgtcagaggaatttggtacacag

SEQ ID NO: 3286345 - DNA, 25 bp, Homo sapien
gcaaccttgatatcgggcttgtgaa

SEQ ID NO: 3286346 - DNA, 25 bp, Homo sapien
aaccttgatatcgggcttgtgaaat

SEQ ID NO: 3286347 - DNA, 25 bp, Homo sapien
ccttgatatcgggcttgtgaaatga

SEQ ID NO: 3286348 - DNA, 25 bp, Homo sapien
agcaaccttgatatcgggcttgtga

SEQ ID NO: 3286349 - DNA, 25 bp, Homo sapien
gtatctctcccatgactaaggagca

SEQ ID NO: 3286350 - DNA, 25 bp, Homo sapien
tctctcccatgactaaggagcacct

SEQ ID NO: 3286351 - DNA, 25 bp, Homo sapien
atgactaaggagcaccttcttcaag

SEQ ID NO: 3286352 - DNA, 25 bp, Homo sapien
tcccatgactaaggagcaccttctt

SEQ ID NO: 3286353 - DNA, 25 bp, Homo sapien
ccaggcagccgaaatagatgctttc

SEQ ID NO: 3286354 - DNA, 25 bp, Homo sapien
ttaaaacatgatcttgttgttagtg

SEQ ID NO: 3286355 - DNA, 25 bp, Homo sapien
gatgtaaccaggcagccgaaataga

SEQ ID NO: 3286356 - DNA, 25 bp, Homo sapien
aggcagccgaaatagatgctttcag

SEQ ID NO: 3286357 - DNA, 25 bp, Homo sapien
taatagcttggggatcaagaatgag

SEQ ID NO: 3286358 - DNA, 25 bp, Homo sapien
tgctcaacagcgctaatagcttggg

SEQ ID NO: 3286359 - DNA, 25 bp, Homo sapien
tacagtgctcaacagcgctaatagc

SEQ ID NO: 3286360 - DNA, 25 bp, Homo sapien
gatgctggtgaactacagtgctcaa

SEQ ID NO: 3286361 - DNA, 25 bp, Homo sapien
tacacagagtgataccacaatactg

SEQ ID NO: 3286362 - DNA, 25 bp, Homo sapien
ggattccttcagagtcgttacacag

SEQ ID NO: 3286363 - DNA, 25 bp, Homo sapien
ctgtcactcagaaatgaactagaca

SEQ ID NO: 3286364 - DNA, 25 bp, Homo sapien
aaccccacttgtaagtagagacctg

SEQ ID NO: 3286365 - DNA, 25 bp, Homo sapien
gagctcagagtagatttaatgtaac

SEQ ID NO: 3286366 - DNA, 25 bp, Homo sapien
gcgcccagtcgagtggtaatatttt

SEQ ID NO: 3286367 - DNA, 25 bp, Homo sapien
actctgaagggcactaggattttta

SEQ ID NO: 3286368 - DNA, 25 bp, Homo sapien
tgtgctgttattcgggctttgatat

SEQ ID NO: 3286369 - DNA, 25 bp, Homo sapien
cgtcttctttttgtttagtactgca

SEQ ID NO: 3286370 - DNA, 25 bp, Homo sapien
ctttttgtttagtactgcaaatatt

SEQ ID NO: 3286371 - DNA, 25 bp, Homo sapien
ttctttttgtttagtactgcaaata

SEQ ID NO: 3286372 - DNA, 25 bp, Homo sapien
tcttctttttgtttagtactgcaaa

SEQ ID NO: 3286373 - DNA, 25 bp, Homo sapien
agctgctgcctgaaggacattgctg

SEQ ID NO: 3286374 - DNA, 25 bp, Homo sapien
gcacagccaaagcttgtgaaatttg

SEQ ID NO: 3286375 - DNA, 25 bp, Homo sapien
ctgcctgaaggacattgctgctgct

SEQ ID NO: 3286376 - DNA, 25 bp, Homo sapien
ccaaagcttgtgaaatttgcaagag

SEQ ID NO: 3286377 - DNA, 25 bp, Homo sapien
tttgaagtactcttcgatgacatcc

SEQ ID NO: 3286378 - DNA, 25 bp, Homo sapien
tggcctgagactccttgccatagtc

SEQ ID NO: 3286379 - DNA, 25 bp, Homo sapien
agtactcttcgatgacatccttggc

SEQ ID NO: 3286380 - DNA, 25 bp, Homo sapien
atccttggcctgagactccttgcca

SEQ ID NO: 3286381 - DNA, 25 bp, Homo sapien
taactactgcacaactgcaaccaac

SEQ ID NO: 3286382 - DNA, 25 bp, Homo sapien
ttaactactgcacaactgcaaccaa

SEQ ID NO: 3286383 - DNA, 25 bp, Homo sapien
cttaactactgcacaactgcaacca

SEQ ID NO: 3286384 - DNA, 25 bp, Homo sapien
cactttatgaggcttcccctctctg

SEQ ID NO: 3286385 - DNA, 25 bp, Homo sapien
ggtgcttgtctaagcctttggtagc

SEQ ID NO: 3286386 - DNA, 25 bp, Homo sapien
tggtagcttcatgaattccacgtgc

SEQ ID NO: 3286387 - DNA, 25 bp, Homo sapien
taacgtccattacgcttccagcagc

SEQ ID NO: 3286388 - DNA, 25 bp, Homo sapien
aaggcttggtactgtcatgctctga

SEQ ID NO: 3286389 - DNA, 25 bp, Homo sapien
aaataaaggcttggtactgtcatgc

SEQ ID NO: 3286390 - DNA, 25 bp, Homo sapien
ccagtgataatgatgctcacgttga

SEQ ID NO: 3286391 - DNA, 25 bp, Homo sapien
cagtggctccccgatgttgattctc

SEQ ID NO: 3286392 - DNA, 25 bp, Homo sapien
gttgtgttggctgttaccaccaaag

SEQ ID NO: 3286393 - DNA, 25 bp, Homo sapien
agctgcaaggttccaaattatttgg

SEQ ID NO: 3286394 - DNA, 25 bp, Homo sapien
gccttgacctccaaatgtaacagtc

SEQ ID NO: 3286395 - DNA, 25 bp, Homo sapien
gggtgaagtaagaggtctgccttga

SEQ ID NO: 3286396 - DNA, 25 bp, Homo sapien
ttcagccggcatggcccacttttta

SEQ ID NO: 3286397 - DNA, 25 bp, Homo sapien
aatcacaggcattggaacgatgttt

SEQ ID NO: 3286398 - DNA, 25 bp, Homo sapien
taactcgagttgtttgttggcattg

SEQ ID NO: 3286399 - DNA, 25 bp, Homo sapien
cattggaacgatgtttcagccggca

SEQ ID NO: 3286400 - DNA, 25 bp, Homo sapien
tccaccaatttgaagcttgtggggg

SEQ ID NO: 3286401 - DNA, 25 bp, Homo sapien
accaatttgaagcttgtgggggtgt

SEQ ID NO: 3286402 - DNA, 25 bp, Homo sapien
tttccaccaatttgaagcttgtggg

SEQ ID NO: 3286403 - DNA, 25 bp, Homo sapien
ctttccaccaatttgaagcttgtgg

SEQ ID NO: 3286404 - DNA, 25 bp, Homo sapien
tgaatgaaacccaagaccttactgg

SEQ ID NO: 3286405 - DNA, 25 bp, Homo sapien
tatgtgctgcctgttaactgtgcct

SEQ ID NO: 3286406 - DNA, 25 bp, Homo sapien
cctcggccaatgtgtcaataatgtg

SEQ ID NO: 3286407 - DNA, 25 bp, Homo sapien
cagggatgatcactttcaagctgca

SEQ ID NO: 3286408 - DNA, 25 bp, Homo sapien
tcttcattctcagcttcatcttctc

SEQ ID NO: 3286409 - DNA, 25 bp, Homo sapien
catcttctcccttgagtttacagac

SEQ ID NO: 3286410 - DNA, 25 bp, Homo sapien
atcttctcccttgagtttacagaca

SEQ ID NO: 3286411 - DNA, 25 bp, Homo sapien
caccccatcttcattctcagcttca

SEQ ID NO: 3286412 - DNA, 25 bp, Homo sapien
attttcagagttaagtctccattca

SEQ ID NO: 3286413 - DNA, 25 bp, Homo sapien
taagtgagatgctgagtcagataat

SEQ ID NO: 3286414 - DNA, 25 bp, Homo sapien
caaaggcaaaataggctcagatttt

SEQ ID NO: 3286415 - DNA, 25 bp, Homo sapien
agagttaagtctccattcaagtggc

SEQ ID NO: 3286416 - DNA, 25 bp, Homo sapien
cacatagggtttttggtcactcaca

SEQ ID NO: 3286417 - DNA, 25 bp, Homo sapien
cagtctgatcaacaagtgggcacct

SEQ ID NO: 3286418 - DNA, 25 bp, Homo sapien
tggcaagcagttcatcaccaggaca

SEQ ID NO: 3286419 - DNA, 25 bp, Homo sapien
aattcactccctcgtaagcattgga

SEQ ID NO: 3286420 - DNA, 25 bp, Homo sapien
cacagaggtaaatacttgagctttc

SEQ ID NO: 3286421 - DNA, 25 bp, Homo sapien
taaagtgaagtttagaatgattttc

SEQ ID NO: 3286422 - DNA, 25 bp, Homo sapien
tttccattacttttcacagaggtaa

SEQ ID NO: 3286423 - DNA, 25 bp, Homo sapien
cttttcacagaggtaaatacttgag

SEQ ID NO: 3286424 - DNA, 25 bp, Homo sapien
tctctgtggagcagagtcaccaaca

SEQ ID NO: 3286425 - DNA, 25 bp, Homo sapien
gattgttctctgtggagcagagtca

SEQ ID NO: 3286426 - DNA, 25 bp, Homo sapien
tgttctctgtggagcagagtcacca

SEQ ID NO: 3286427 - DNA, 25 bp, Homo sapien
ttctctgtggagcagagtcaccaac

SEQ ID NO: 3286428 - DNA, 25 bp, Homo sapien
tgttcatagaagcaacatcttcttg

SEQ ID NO: 3286429 - DNA, 25 bp, Homo sapien
tttctgttcatagaagcaacatctt

SEQ ID NO: 3286430 - DNA, 25 bp, Homo sapien
tgttgtgtccatatgcaggtatttc

SEQ ID NO: 3286431 - DNA, 25 bp, Homo sapien
ttcttgttgtgtccatatgcaggta

SEQ ID NO: 3286432 - DNA, 25 bp, Homo sapien
ttagatgcccgttgactttattctc

SEQ ID NO: 3286433 - DNA, 25 bp, Homo sapien
catacctcctagagatgttgtacat

SEQ ID NO: 3286434 - DNA, 25 bp, Homo sapien
caggtttcacttgtagtgattgttt

SEQ ID NO: 3286435 - DNA, 25 bp, Homo sapien
caggtcatttagatgcccgttgact

SEQ ID NO: 3286436 - DNA, 25 bp, Homo sapien
tgaaatctggggctaatcactccac

SEQ ID NO: 3286437 - DNA, 25 bp, Homo sapien
tcacggtctgtgatgccagctgagg

SEQ ID NO: 3286438 - DNA, 25 bp, Homo sapien
cgtcttgcttcttcacggtctgtga

SEQ ID NO: 3286439 - DNA, 25 bp, Homo sapien
gcttcttcacggtctgtgatgccag

SEQ ID NO: 3286440 - DNA, 25 bp, Homo sapien
tagcctgtctgtgaggtacacaacc

SEQ ID NO: 3286441 - DNA, 25 bp, Homo sapien
ttttgcattgttgatccttttgaga

SEQ ID NO: 3286442 - DNA, 25 bp, Homo sapien
tctgtgaggtacacaaccattttcc

SEQ ID NO: 3286443 - DNA, 25 bp, Homo sapien
ttgcattgttgatccttttgagagc

SEQ ID NO: 3286444 - DNA, 25 bp, Homo sapien
tagactaactcatgccattagcggg

SEQ ID NO: 3286445 - DNA, 25 bp, Homo sapien
tatagagcggacatatgaggccttt

SEQ ID NO: 3286446 - DNA, 25 bp, Homo sapien
gcaatacctttatagatgagtcaaa

SEQ ID NO: 3286447 - DNA, 25 bp, Homo sapien
aagaacaactcagcatacatgcctc

SEQ ID NO: 3286448 - DNA, 25 bp, Homo sapien
gtaatcgctcctcaaaattgaaggg

SEQ ID NO: 3286449 - DNA, 25 bp, Homo sapien
agtaatcgctcctcaaaattgaagg

SEQ ID NO: 3286450 - DNA, 25 bp, Homo sapien
ggaagtaatcgctcctcaaaattga

SEQ ID NO: 3286451 - DNA, 25 bp, Homo sapien
cgctcctcaaaattgaagggggtgg

SEQ ID NO: 3286452 - DNA, 25 bp, Homo sapien
tgtcataacaggtgccttggcccag

SEQ ID NO: 3286453 - DNA, 25 bp, Homo sapien
gcaggttttgccatggaggattcca

SEQ ID NO: 3286454 - DNA, 25 bp, Homo sapien
tacacatgcctgaaaatggtcctgg

SEQ ID NO: 3286455 - DNA, 25 bp, Homo sapien
acagcctcaatggatgccctgcagg

SEQ ID NO: 3286456 - DNA, 25 bp, Homo sapien
gtagattattcagaataattgcttt

SEQ ID NO: 3286457 - DNA, 25 bp, Homo sapien
gtgtagattattcagaataattgct

SEQ ID NO: 3286458 - DNA, 25 bp, Homo sapien
tagattattcagaataattgctttt

SEQ ID NO: 3286459 - DNA, 25 bp, Homo sapien
tgtagattattcagaataattgctt

SEQ ID NO: 3286460 - DNA, 25 bp, Homo sapien
ttgggatctcaggagggataagggc

SEQ ID NO: 3286461 - DNA, 25 bp, Homo sapien
ccatttgggatctcaggagggataa

SEQ ID NO: 3286462 - DNA, 25 bp, Homo sapien
ggtacaggatcctcttgggcctgtc

SEQ ID NO: 3286463 - DNA, 25 bp, Homo sapien
gtgtgtcctgattgtttctggtgaa

SEQ ID NO: 3286464 - DNA, 25 bp, Homo sapien
ccaatcacctacaaccattcaggaa

SEQ ID NO: 3286465 - DNA, 25 bp, Homo sapien
tgcatctggccaatactctttttaa

SEQ ID NO: 3286466 - DNA, 25 bp, Homo sapien
ggagtttactccatgtgtagtagga

SEQ ID NO: 3286467 - DNA, 25 bp, Homo sapien
tactattgggtgaaaggagggtctc

SEQ ID NO: 3286468 - DNA, 25 bp, Homo sapien
gagccagcatcaacatagtccttcc

SEQ ID NO: 3286469 - DNA, 25 bp, Homo sapien
gaaggcttaaggaacaatagaagag

SEQ ID NO: 3286470 - DNA, 25 bp, Homo sapien
caatggagccgttcttagcagagcc

SEQ ID NO: 3286471 - DNA, 25 bp, Homo sapien
gagaaatataacacgacgaccttta

SEQ ID NO: 3286472 - DNA, 25 bp, Homo sapien
tgctcatttccactcagttcctgca

SEQ ID NO: 3286473 - DNA, 25 bp, Homo sapien
gctgctcatttccactcagttcctg

SEQ ID NO: 3286474 - DNA, 25 bp, Homo sapien
ttccactcagttcctgcaattcttc

SEQ ID NO: 3286475 - DNA, 25 bp, Homo sapien
catttccactcagttcctgcaattc

SEQ ID NO: 3286476 - DNA, 25 bp, Homo sapien
acaagtgtgaaaccctacaaggcca

SEQ ID NO: 3286477 - DNA, 25 bp, Homo sapien
aagagcaagggtgggacagtcaaac

SEQ ID NO: 3286478 - DNA, 25 bp, Homo sapien
gggttacaggctccacacaagtgtg

SEQ ID NO: 3286479 - DNA, 25 bp, Homo sapien
catgagctgatattgagtgcctgaa

SEQ ID NO: 3286480 - DNA, 25 bp, Homo sapien
gaggtggagattaatctgctgttga

SEQ ID NO: 3286481 - DNA, 25 bp, Homo sapien
tggtaggtagccaaagggagccata

SEQ ID NO: 3286482 - DNA, 25 bp, Homo sapien
taaacatcttttggattccatgtag

SEQ ID NO: 3286483 - DNA, 25 bp, Homo sapien
tgtgaaccgactcagaaagtcctct

SEQ ID NO: 3286484 - DNA, 25 bp, Homo sapien
ctctggattccagccaatcgagtct

SEQ ID NO: 3286485 - DNA, 25 bp, Homo sapien
tggattccagccaatcgagtctcat

SEQ ID NO: 3286486 - DNA, 25 bp, Homo sapien
ctggattccagccaatcgagtctca

SEQ ID NO: 3286487 - DNA, 25 bp, Homo sapien
tctctggattccagccaatcgagtc

SEQ ID NO: 3286488 - DNA, 25 bp, Homo sapien
gattagacaacctcccctagagacc

SEQ ID NO: 3286489 - DNA, 25 bp, Homo sapien
tatagggtccatgcaagcccgaaat

SEQ ID NO: 3286490 - DNA, 25 bp, Homo sapien
tgaagaagcacaagtggaaactcct

SEQ ID NO: 3286491 - DNA, 25 bp, Homo sapien
tgaacccctgggagattgtggtgaa

SEQ ID NO: 3286492 - DNA, 25 bp, Homo sapien
tatactcatgttactgggtacatct

SEQ ID NO: 3286493 - DNA, 25 bp, Homo sapien
taatcccagtgagttcacaaaacat

SEQ ID NO: 3286494 - DNA, 25 bp, Homo sapien
gttttatggtccaggctattgtctg

SEQ ID NO: 3286495 - DNA, 25 bp, Homo sapien
tgacgattttactatgtctcacaaa

SEQ ID NO: 3286496 - DNA, 25 bp, Homo sapien
ttcatgtctgattggttgattcgat

SEQ ID NO: 3286497 - DNA, 25 bp, Homo sapien
tgtttgtggctacaagtccgtgaga

SEQ ID NO: 3286498 - DNA, 25 bp, Homo sapien
tggttgattcgatgagaggaagtgt

SEQ ID NO: 3286499 - DNA, 25 bp, Homo sapien
gtttgtctttagagtgctctgtttc

SEQ ID NO: 3286500 - DNA, 25 bp, Homo sapien
tgggttgatttggcccagcacttcg

SEQ ID NO: 3286501 - DNA, 25 bp, Homo sapien
ggttgatttggcccagcacttcgtc

SEQ ID NO: 3286502 - DNA, 25 bp, Homo sapien
gtgggttgatttggcccagcacttc

SEQ ID NO: 3286503 - DNA, 25 bp, Homo sapien
gggttgatttggcccagcacttcgt

SEQ ID NO: 3286504 - DNA, 25 bp, Homo sapien
tgagatgccattgaagtactccttc

SEQ ID NO: 3286505 - DNA, 25 bp, Homo sapien
cttgtcattgtggacataccagttt

SEQ ID NO: 3286506 - DNA, 25 bp, Homo sapien
ttccttgtcattgtggacataccag

SEQ ID NO: 3286507 - DNA, 25 bp, Homo sapien
tccttgtcattgtggacataccagt

SEQ ID NO: 3286508 - DNA, 25 bp, Homo sapien
ccttgtcattgtggacataccagtt

SEQ ID NO: 3286509 - DNA, 25 bp, Homo sapien
agttctggagggtgacaataaggca

SEQ ID NO: 3286510 - DNA, 25 bp, Homo sapien
ttaggttccactaacaagatgcact

SEQ ID NO: 3286511 - DNA, 25 bp, Homo sapien
agatgtttaaaagccgatagatgcc

SEQ ID NO: 3286512 - DNA, 25 bp, Homo sapien
ttgtctgggcacaaattaggttcca

SEQ ID NO: 3286513 - DNA, 25 bp, Homo sapien
tttcacattggaaggctcgtttaga

SEQ ID NO: 3286514 - DNA, 25 bp, Homo sapien
gccagtggtatttcataacgttcat

SEQ ID NO: 3286515 - DNA, 25 bp, Homo sapien
aagccagtggtatttcataacgttc

SEQ ID NO: 3286516 - DNA, 25 bp, Homo sapien
cgtttagatctccaatcaaaagcca

SEQ ID NO: 3286517 - DNA, 25 bp, Homo sapien
gaggctggactgacgctcactttgg

SEQ ID NO: 3286518 - DNA, 25 bp, Homo sapien
gactgacgctcactttggtgaccat

SEQ ID NO: 3286519 - DNA, 25 bp, Homo sapien
gagagaggctggactgacgctcact

SEQ ID NO: 3286520 - DNA, 25 bp, Homo sapien
gctggactgacgctcactttggtga

SEQ ID NO: 3286521 - DNA, 25 bp, Homo sapien
caagttcagattagctgaagatagc

SEQ ID NO: 3286522 - DNA, 25 bp, Homo sapien
atctaacaagttcagattagctgaa

SEQ ID NO: 3286523 - DNA, 25 bp, Homo sapien
cagattagctgaagatagcttgatt

SEQ ID NO: 3286524 - DNA, 25 bp, Homo sapien
tatttgctgctacattatcatctaa

SEQ ID NO: 3286525 - DNA, 25 bp, Homo sapien
ttcctgattccagatgggatctcgg

SEQ ID NO: 3286526 - DNA, 25 bp, Homo sapien
tacagtatgagagccaatataattc

SEQ ID NO: 3286527 - DNA, 25 bp, Homo sapien
attccagatgggatctcggcagcca

SEQ ID NO: 3286528 - DNA, 25 bp, Homo sapien
tcaatgactagatctagaataccct

SEQ ID NO: 3286529 - DNA, 25 bp, Homo sapien
atatgatagaagtgttgtaataatc

SEQ ID NO: 3286530 - DNA, 25 bp, Homo sapien
tatatgatagaagtgttgtaataat

SEQ ID NO: 3286531 - DNA, 25 bp, Homo sapien
ctatatgatagaagtgttgtaataa

SEQ ID NO: 3286532 - DNA, 25 bp, Homo sapien
ttatgcaattgatgaagtttatctt

SEQ ID NO: 3286533 - DNA, 25 bp, Homo sapien
tggcagatcgaagcaaaattatgca

SEQ ID NO: 3286534 - DNA, 25 bp, Homo sapien
tatctttggcgtaccattccttctt

SEQ ID NO: 3286535 - DNA, 25 bp, Homo sapien
gaagtttatctttggcgtaccattc

SEQ ID NO: 3286536 - DNA, 25 bp, Homo sapien
tgagcttagaagagtagttggccct

SEQ ID NO: 3286537 - DNA, 25 bp, Homo sapien
tgtttactgtatttgatgtacctaa

SEQ ID NO: 3286538 - DNA, 25 bp, Homo sapien
tcacataaatctgggtaaatctgaa

SEQ ID NO: 3286539 - DNA, 25 bp, Homo sapien
taatgccatgatgattatatgacac

SEQ ID NO: 3286540 - DNA, 25 bp, Homo sapien
tcccaaaaggatgacatagaatttt

SEQ ID NO: 3286541 - DNA, 25 bp, Homo sapien
tatcccaaaaggatgacatagaatt

SEQ ID NO: 3286542 - DNA, 25 bp, Homo sapien
cttatatcccaaaaggatgacatag

SEQ ID NO: 3286543 - DNA, 25 bp, Homo sapien
tatatcccaaaaggatgacatagaa

SEQ ID NO: 3286544 - DNA, 25 bp, Homo sapien
ttttccctctactaccaggtttgca

SEQ ID NO: 3286545 - DNA, 25 bp, Homo sapien
gagtacacttattggaaagtatttg

SEQ ID NO: 3286546 - DNA, 25 bp, Homo sapien
tccctctactaccaggtttgcacat

SEQ ID NO: 3286547 - DNA, 25 bp, Homo sapien
tatttgtctttgtcctctggttctg

SEQ ID NO: 3286548 - DNA, 25 bp, Homo sapien
cactgaagactttgagagtatgaat

SEQ ID NO: 3286549 - DNA, 25 bp, Homo sapien
tggagtcaaactaacttgtcttttc

SEQ ID NO: 3286550 - DNA, 25 bp, Homo sapien
ttgagagtatgaattaatggagtca

SEQ ID NO: 3286551 - DNA, 25 bp, Homo sapien
tgagagtatgaattaatggagtcaa

SEQ ID NO: 3286552 - DNA, 25 bp, Homo sapien
gaattatgagctagatcctcttctc

SEQ ID NO: 3286553 - DNA, 25 bp, Homo sapien
tggcatgctccttggaattatgagc

SEQ ID NO: 3286554 - DNA, 25 bp, Homo sapien
tggaattatgagctagatcctcttc

SEQ ID NO: 3286555 - DNA, 25 bp, Homo sapien
ttggcatgctccttggaattatgag

SEQ ID NO: 3286556 - DNA, 25 bp, Homo sapien
ctaacccatgagagtgacatagatt

SEQ ID NO: 3286557 - DNA, 25 bp, Homo sapien
tgacatagattatatcagttactag

SEQ ID NO: 3286558 - DNA, 25 bp, Homo sapien
tcagttactagctttctgctaccag

SEQ ID NO: 3286559 - DNA, 25 bp, Homo sapien
ccatgagagtgacatagattatatc

SEQ ID NO: 3286560 - DNA, 25 bp, Homo sapien
agctctttccgttctaaagccccag

SEQ ID NO: 3286561 - DNA, 25 bp, Homo sapien
caggcgcttcgtgctgattccagct

SEQ ID NO: 3286562 - DNA, 25 bp, Homo sapien
aagccccaggcgcttcgtgctgatt

SEQ ID NO: 3286563 - DNA, 25 bp, Homo sapien
gttctaaagccccaggcgcttcgtg

SEQ ID NO: 3286564 - DNA, 25 bp, Homo sapien
cagctcttgagtgaataactccttt

SEQ ID NO: 3286565 - DNA, 25 bp, Homo sapien
cttgagtgaataactcctttcttcc

SEQ ID NO: 3286566 - DNA, 25 bp, Homo sapien
gagtgaataactcctttcttcccat

SEQ ID NO: 3286567 - DNA, 25 bp, Homo sapien
gctcttgagtgaataactcctttct

SEQ ID NO: 3286568 - DNA, 25 bp, Homo sapien
gtcagtctccagttttcccattggt

SEQ ID NO: 3286569 - DNA, 25 bp, Homo sapien
tagtcagtctccagttttcccattg

SEQ ID NO: 3286570 - DNA, 25 bp, Homo sapien
cagtctccagttttcccattggttc

SEQ ID NO: 3286571 - DNA, 25 bp, Homo sapien
ttagtcagtctccagttttcccatt

SEQ ID NO: 3286572 - DNA, 25 bp, Homo sapien
cattaacattgcacctgcagctatc

SEQ ID NO: 3286573 - DNA, 25 bp, Homo sapien
gcacctgcagctatcgaatcctttc

SEQ ID NO: 3286574 - DNA, 25 bp, Homo sapien
cattgcacctgcagctatcgaatcc

SEQ ID NO: 3286575 - DNA, 25 bp, Homo sapien
ctgcagctatcgaatcctttcccat

SEQ ID NO: 3286576 - DNA, 25 bp, Homo sapien
tctctctcattcacttttgcagaca

SEQ ID NO: 3286577 - DNA, 25 bp, Homo sapien
tctctcattcacttttgcagacatc

SEQ ID NO: 3286578 - DNA, 25 bp, Homo sapien
ttctctctcattcacttttgcagac

SEQ ID NO: 3286579 - DNA, 25 bp, Homo sapien
tctcattcacttttgcagacatcat

SEQ ID NO: 3286580 - DNA, 25 bp, Homo sapien
tgagtagcttcttgtcttcgcttct

SEQ ID NO: 3286581 - DNA, 25 bp, Homo sapien
agtagcttcttgtcttcgcttcttt

SEQ ID NO: 3286582 - DNA, 25 bp, Homo sapien
gagtagcttcttgtcttcgcttctt

SEQ ID NO: 3286583 - DNA, 25 bp, Homo sapien
atgagtagcttcttgtcttcgcttc

SEQ ID NO: 3286584 - DNA, 25 bp, Homo sapien
aatgataaatggcaaagtgatggtg

SEQ ID NO: 3286585 - DNA, 25 bp, Homo sapien
catacaatggcaggatgatcagtag

SEQ ID NO: 3286586 - DNA, 25 bp, Homo sapien
tcagtagcctgaagaagcgtaggaa

SEQ ID NO: 3286587 - DNA, 25 bp, Homo sapien
cctgaagaagcgtaggaatgcagta

SEQ ID NO: 3286588 - DNA, 25 bp, Homo sapien
tgaccccaaaatgttgcagcttttg

SEQ ID NO: 3286589 - DNA, 25 bp, Homo sapien
aaatgttgcagcttttgtagttcag

SEQ ID NO: 3286590 - DNA, 25 bp, Homo sapien
gaagaaatagctcccagtgactttt

SEQ ID NO: 3286591 - DNA, 25 bp, Homo sapien
tggaagaaatagctcccagtgactt

SEQ ID NO: 3286592 - DNA, 25 bp, Homo sapien
gcagtgtggagcttacaccatttaa

SEQ ID NO: 3286593 - DNA, 25 bp, Homo sapien
caaaaggattcagtcttgaagaggt

SEQ ID NO: 3286594 - DNA, 25 bp, Homo sapien
agagatttaccactagcctgagagg

SEQ ID NO: 3286595 - DNA, 25 bp, Homo sapien
ggtagttcccaaacagtattgactg

SEQ ID NO: 3286596 - DNA, 25 bp, Homo sapien
tttcctctccagcctagctcttagt

SEQ ID NO: 3286597 - DNA, 25 bp, Homo sapien
ctttgggcagcatcaccattctctt

SEQ ID NO: 3286598 - DNA, 25 bp, Homo sapien
ctagctcttagtttgtgtgtcttgg

SEQ ID NO: 3286599 - DNA, 25 bp, Homo sapien
ggcagcatcaccattctcttttgaa

SEQ ID NO: 3286600 - DNA, 25 bp, Homo sapien
ttgagtgttgtcctctctaacaaga

SEQ ID NO: 3286601 - DNA, 25 bp, Homo sapien
tcttgtagagaatcttgcagaagtt

SEQ ID NO: 3286602 - DNA, 25 bp, Homo sapien
tcttctttgctgagtaagcttagtt

SEQ ID NO: 3286603 - DNA, 25 bp, Homo sapien
tggttccctttgcatgtgaccagcc

SEQ ID NO: 3286604 - DNA, 25 bp, Homo sapien
cctgagtgggtatcagagcctgcgt

SEQ ID NO: 3286605 - DNA, 25 bp, Homo sapien
gcctgcgtggactgacaagaacatc

SEQ ID NO: 3286606 - DNA, 25 bp, Homo sapien
cattcagtccaaaagttatcaggtg

SEQ ID NO: 3286607 - DNA, 25 bp, Homo sapien
tcctggtatggactgtcagagccca

SEQ ID NO: 3286608 - DNA, 25 bp, Homo sapien
cccacattgacccaaggaagattca

SEQ ID NO: 3286609 - DNA, 25 bp, Homo sapien
cattgacccaaggaagattcatgaa

SEQ ID NO: 3286610 - DNA, 25 bp, Homo sapien
gacccaaggaagattcatgaaaagc

SEQ ID NO: 3286611 - DNA, 25 bp, Homo sapien
gggcccacattgacccaaggaagat

SEQ ID NO: 3286612 - DNA, 25 bp, Homo sapien
ccaatgacctgaatgcttaatttgc

SEQ ID NO: 3286613 - DNA, 25 bp, Homo sapien
gccaatgacctgaatgcttaatttg

SEQ ID NO: 3286614 - DNA, 25 bp, Homo sapien
gcacttgctttgcattagtcctcag

SEQ ID NO: 3286615 - DNA, 25 bp, Homo sapien
ataatttggagcacttgctttgcat

SEQ ID NO: 3286616 - DNA, 25 bp, Homo sapien
tcaagccaatatggtatggtccaga

SEQ ID NO: 3286617 - DNA, 25 bp, Homo sapien
ttatcttcaagccaatatggtatgg

SEQ ID NO: 3286618 - DNA, 25 bp, Homo sapien
tcttcaagccaatatggtatggtcc

SEQ ID NO: 3286619 - DNA, 25 bp, Homo sapien
ccaatatggtatggtccagagttta

SEQ ID NO: 3286620 - DNA, 25 bp, Homo sapien
ctgctaaacctggagacttagagta

SEQ ID NO: 3286621 - DNA, 25 bp, Homo sapien
ttctttgctgctaaacctggagact

SEQ ID NO: 3286622 - DNA, 25 bp, Homo sapien
gttgttcatttgttgtcgttcattc

SEQ ID NO: 3286623 - DNA, 25 bp, Homo sapien
catttgttgtcgttcattctttgct

SEQ ID NO: 3286624 - DNA, 25 bp, Homo sapien
gaaagggttgctccactttctgtat

SEQ ID NO: 3286625 - DNA, 25 bp, Homo sapien
agaaagggttgctccactttctgta

SEQ ID NO: 3286626 - DNA, 25 bp, Homo sapien
tttctgtattaagaggagacaggca

SEQ ID NO: 3286627 - DNA, 25 bp, Homo sapien
caaacctttctgtgctagattcttc

SEQ ID NO: 3286628 - DNA, 25 bp, Homo sapien
tccttacttccttctatgctccaac

SEQ ID NO: 3286629 - DNA, 25 bp, Homo sapien
gattcttctgctagtactccgcttc

SEQ ID NO: 3286630 - DNA, 25 bp, Homo sapien
tgccttgcacaatgactttcaaacc

SEQ ID NO: 3286631 - DNA, 25 bp, Homo sapien
gaagttactgtcaaatcctgccacc

SEQ ID NO: 3286632 - DNA, 25 bp, Homo sapien
tcttactgtccctgttaacgcttag

SEQ ID NO: 3286633 - DNA, 25 bp, Homo sapien
taacgcttagtaacccagtttcata

SEQ ID NO: 3286634 - DNA, 25 bp, Homo sapien
gcttctgctttctaaaatcttactg

SEQ ID NO: 3286635 - DNA, 25 bp, Homo sapien
cttagagatgtcatcctcatgccgg

SEQ ID NO: 3286636 - DNA, 25 bp, Homo sapien
cagggtgcctttccttagagatgtc

SEQ ID NO: 3286637 - DNA, 25 bp, Homo sapien
tcctcatgccggttggattgtatgc

SEQ ID NO: 3286638 - DNA, 25 bp, Homo sapien
ccggttggattgtatgcacagaggc

SEQ ID NO: 3286639 - DNA, 25 bp, Homo sapien
tctaagagtgctagtgtcagagtga

SEQ ID NO: 3286640 - DNA, 25 bp, Homo sapien
tcattgagtctcctgttcaccagca

SEQ ID NO: 3286641 - DNA, 25 bp, Homo sapien
cactcagtcgggcaagctgtgcttg

SEQ ID NO: 3286642 - DNA, 25 bp, Homo sapien
gctattgctaccagccgggatcctg

SEQ ID NO: 3286643 - DNA, 25 bp, Homo sapien
ttatactgcaatttaatcttacgta

SEQ ID NO: 3286644 - DNA, 25 bp, Homo sapien
ctatttatactgcaatttaatctta

SEQ ID NO: 3286645 - DNA, 25 bp, Homo sapien
tactgcaatttaatcttacgtataa

SEQ ID NO: 3286646 - DNA, 25 bp, Homo sapien
actgcaatttaatcttacgtataac

SEQ ID NO: 3286647 - DNA, 25 bp, Homo sapien
cgtaggtcaagatttctacagttac

SEQ ID NO: 3286648 - DNA, 25 bp, Homo sapien
tcagccaataatgtgggttgacttt

SEQ ID NO: 3286649 - DNA, 25 bp, Homo sapien
tgccattgcctgtttagtgtagtag

SEQ ID NO: 3286650 - DNA, 25 bp, Homo sapien
tttattctcatatacgtaggtcaag

SEQ ID NO: 3286651 - DNA, 25 bp, Homo sapien
cttccctaaatttcagctgaccagt

SEQ ID NO: 3286652 - DNA, 25 bp, Homo sapien
ttatctcttccctaaatttcagctg

SEQ ID NO: 3286653 - DNA, 25 bp, Homo sapien
tctcttccctaaatttcagctgacc

SEQ ID NO: 3286654 - DNA, 25 bp, Homo sapien
ccctaaatttcagctgaccagtcat

SEQ ID NO: 3286655 - DNA, 25 bp, Homo sapien
ctctaagtatactcttgtctgggca

SEQ ID NO: 3286656 - DNA, 25 bp, Homo sapien
agtatactcttgtctgggcattcca

SEQ ID NO: 3286657 - DNA, 25 bp, Homo sapien
taagtatactcttgtctgggcattc

SEQ ID NO: 3286658 - DNA, 25 bp, Homo sapien
tatactcttgtctgggcattccata

SEQ ID NO: 3286659 - DNA, 25 bp, Homo sapien
gaaaggctctaattcttcctgtgca

SEQ ID NO: 3286660 - DNA, 25 bp, Homo sapien
tcctgtgcagaatcttgattaactt

SEQ ID NO: 3286661 - DNA, 25 bp, Homo sapien
gcagaatcttgattaactttcacaa

SEQ ID NO: 3286662 - DNA, 25 bp, Homo sapien
cttagataagaaaggctctaattct

SEQ ID NO: 3286663 - DNA, 25 bp, Homo sapien
aaaagagatcttcatcatagatgca

SEQ ID NO: 3286664 - DNA, 25 bp, Homo sapien
caaaagagatcttcatcatagatgc

SEQ ID NO: 3286665 - DNA, 25 bp, Homo sapien
tcaaaagagatcttcatcatagatg

SEQ ID NO: 3286666 - DNA, 25 bp, Homo sapien
atgctcatgccggaaaaaaggtaga

SEQ ID NO: 3286667 - DNA, 25 bp, Homo sapien
tttgcatcataatgctcatgccgga

SEQ ID NO: 3286668 - DNA, 25 bp, Homo sapien
tatgcacgtcggctttgtcaagcac

SEQ ID NO: 3286669 - DNA, 25 bp, Homo sapien
tcttccccagtatgcacgtcggctt

SEQ ID NO: 3286670 - DNA, 25 bp, Homo sapien
ggcaaataatggcagaatgagcaga

SEQ ID NO: 3286671 - DNA, 25 bp, Homo sapien
tggcagaatgagcagatcttccaga

SEQ ID NO: 3286672 - DNA, 25 bp, Homo sapien
ttgtctttatgaaatgaaccggcca

SEQ ID NO: 3286673 - DNA, 25 bp, Homo sapien
tgtctttatgaaatgaaccggccat

SEQ ID NO: 3286674 - DNA, 25 bp, Homo sapien
caaaataatccaagacaggaaagag

SEQ ID NO: 3286675 - DNA, 25 bp, Homo sapien
catttagctaccgaaaaatcttcca

SEQ ID NO: 3286676 - DNA, 25 bp, Homo sapien
ttagctaccgaaaaatcttccactg

SEQ ID NO: 3286677 - DNA, 25 bp, Homo sapien
tcatttagctaccgaaaaatcttcc

SEQ ID NO: 3286678 - DNA, 25 bp, Homo sapien
tattgctatttgtgcagttacctca

SEQ ID NO: 3286679 - DNA, 25 bp, Homo sapien
gctgctgttacttccgttaatcaag

SEQ ID NO: 3286680 - DNA, 25 bp, Homo sapien
aagaaccgtgcttttcctattgcta

SEQ ID NO: 3286681 - DNA, 25 bp, Homo sapien
tacttccgttaatcaagaaccgtgc

SEQ ID NO: 3286682 - DNA, 25 bp, Homo sapien
tgaaagagatccattggatttagag

SEQ ID NO: 3286683 - DNA, 25 bp, Homo sapien
cactgaaagagatccattggattta

SEQ ID NO: 3286684 - DNA, 25 bp, Homo sapien
tcactgaaagagatccattggattt

SEQ ID NO: 3286685 - DNA, 25 bp, Homo sapien
actgaaagagatccattggatttag

SEQ ID NO: 3286686 - DNA, 25 bp, Homo sapien
ccaagaagagtgaagccagaatttt

SEQ ID NO: 3286687 - DNA, 25 bp, Homo sapien
gcatccaagaagagtgaagccagaa

SEQ ID NO: 3286688 - DNA, 25 bp, Homo sapien
ttaagaagcatagaagcatccaaga

SEQ ID NO: 3286689 - DNA, 25 bp, Homo sapien
tataaaatgtatgttcttaaggatc

SEQ ID NO: 3286690 - DNA, 25 bp, Homo sapien
cagaatgaggacattcctgttatcc

SEQ ID NO: 3286691 - DNA, 25 bp, Homo sapien
tatccctgattagttcaataacgtc

SEQ ID NO: 3286692 - DNA, 25 bp, Homo sapien
tagttcaataacgtcccatggcatt

SEQ ID NO: 3286693 - DNA, 25 bp, Homo sapien
gaatgaggacattcctgttatccct

SEQ ID NO: 3286694 - DNA, 25 bp, Homo sapien
aggattccccaagccggagcttgtg

SEQ ID NO: 3286695 - DNA, 25 bp, Homo sapien
agtgaagagcgccaacacttctggg

SEQ ID NO: 3286696 - DNA, 25 bp, Homo sapien
agtgaaagtgaagagcgccaacact

SEQ ID NO: 3286697 - DNA, 25 bp, Homo sapien
ggcccaacttcatcaggattcccca

SEQ ID NO: 3286698 - DNA, 25 bp, Homo sapien
gcattttaaaaacacgagacatgat

SEQ ID NO: 3286699 - DNA, 25 bp, Homo sapien
taagccttggtctatgttcctggga

SEQ ID NO: 3286700 - DNA, 25 bp, Homo sapien
gacatgatcagcataataattaacc

SEQ ID NO: 3286701 - DNA, 25 bp, Homo sapien
ccattataatcttagtcatttgaga

SEQ ID NO: 3286702 - DNA, 25 bp, Homo sapien
tctggcaacagactacgggatttca

SEQ ID NO: 3286703 - DNA, 25 bp, Homo sapien
cagactacgggatttcatttcccaa

SEQ ID NO: 3286704 - DNA, 25 bp, Homo sapien
ggcaacagactacgggatttcattt

SEQ ID NO: 3286705 - DNA, 25 bp, Homo sapien
tttatttctggcaacagactacggg

SEQ ID NO: 3286706 - DNA, 25 bp, Homo sapien
tataggatgagagtgttaactctga

SEQ ID NO: 3286707 - DNA, 25 bp, Homo sapien
taaatgtaattgagacacttacaac

SEQ ID NO: 3286708 - DNA, 25 bp, Homo sapien
aactaatctatgcagtgttgaatgc

SEQ ID NO: 3286709 - DNA, 25 bp, Homo sapien
tacttcaataagtaactgtggtagt

SEQ ID NO: 3286710 - DNA, 25 bp, Homo sapien
tgcaagtgcatacaatccatttgaa

SEQ ID NO: 3286711 - DNA, 25 bp, Homo sapien
cacataggctttcatagaagatagg

SEQ ID NO: 3286712 - DNA, 25 bp, Homo sapien
tgcatgctcacatagaaactcatac

SEQ ID NO: 3286713 - DNA, 25 bp, Homo sapien
tctgaatgtgcccaaattaccaatg

SEQ ID NO: 3286714 - DNA, 25 bp, Homo sapien
tgagctggagcaacctcgagtagct

SEQ ID NO: 3286715 - DNA, 25 bp, Homo sapien
caccacggctgtcatattttttgtc

SEQ ID NO: 3286716 - DNA, 25 bp, Homo sapien
tcccatgcaaatacattcagagctg

SEQ ID NO: 3286717 - DNA, 25 bp, Homo sapien
ttattcaaggaccaatcccatgcaa

SEQ ID NO: 3286718 - DNA, 25 bp, Homo sapien
tatgaatggaatcattgctgatttt

SEQ ID NO: 3286719 - DNA, 25 bp, Homo sapien
gaattttctcagataaatcttatgt

SEQ ID NO: 3286720 - DNA, 25 bp, Homo sapien
aatcttatgtttcttttgtgcccac

SEQ ID NO: 3286721 - DNA, 25 bp, Homo sapien
tctggatactcatcagaagtgtaaa

SEQ ID NO: 3286722 - DNA, 25 bp, Homo sapien
aaaggatccctagcatgtttagctt

SEQ ID NO: 3286723 - DNA, 25 bp, Homo sapien
ttaggaaaaggatccctagcatgtt

SEQ ID NO: 3286724 - DNA, 25 bp, Homo sapien
ggaaaaggatccctagcatgtttag

SEQ ID NO: 3286725 - DNA, 25 bp, Homo sapien
gaaaaggatccctagcatgtttagc

SEQ ID NO: 3286726 - DNA, 25 bp, Homo sapien
gtgtttgtgtcatgactgtgaaact

SEQ ID NO: 3286727 - DNA, 25 bp, Homo sapien
tgactgtgaaactaatccatgatcc

SEQ ID NO: 3286728 - DNA, 25 bp, Homo sapien
tgtgtcatgactgtgaaactaatcc

SEQ ID NO: 3286729 - DNA, 25 bp, Homo sapien
ctgtgaaactaatccatgatccaat

SEQ ID NO: 3286730 - DNA, 25 bp, Homo sapien
ctcataggtgtagttaggacatgaa

SEQ ID NO: 3286731 - DNA, 25 bp, Homo sapien
taggtgtagttaggacatgaaacca

SEQ ID NO: 3286732 - DNA, 25 bp, Homo sapien
ataggtgtagttaggacatgaaacc

SEQ ID NO: 3286733 - DNA, 25 bp, Homo sapien
cataggtgtagttaggacatgaaac

SEQ ID NO: 3286734 - DNA, 25 bp, Homo sapien
taactgtgtaccacatgaaatgtca

SEQ ID NO: 3286735 - DNA, 25 bp, Homo sapien
tgtaacactgcagagtacataagga

SEQ ID NO: 3286736 - DNA, 25 bp, Homo sapien
tcagaagagacccagctttaaatgt

SEQ ID NO: 3286737 - DNA, 25 bp, Homo sapien
caaaaatccctgtattaaattggtg

SEQ ID NO: 3286738 - DNA, 25 bp, Homo sapien
gaacttggagctgtgacatttgtaa

SEQ ID NO: 3286739 - DNA, 25 bp, Homo sapien
caggattgatagttacatctctcat

SEQ ID NO: 3286740 - DNA, 25 bp, Homo sapien
agtatgcacacctctaataaaagga

SEQ ID NO: 3286741 - DNA, 25 bp, Homo sapien
ccacgtttctgttcagcagtcagga

SEQ ID NO: 3286742 - DNA, 25 bp, Homo sapien
gaatggcccaaaaagcagatgttgg

SEQ ID NO: 3286743 - DNA, 25 bp, Homo sapien
ggagacttgttgagactatatcgct

SEQ ID NO: 3286744 - DNA, 25 bp, Homo sapien
cccagttttagaatgtcccatgcaa

SEQ ID NO: 3286745 - DNA, 25 bp, Homo sapien
catagttggcaccaggaatggccca

SEQ ID NO: 3286746 - DNA, 25 bp, Homo sapien
caaaaggcctgcaatgagtactcca

SEQ ID NO: 3286747 - DNA, 25 bp, Homo sapien
tcagacagacagctaatggtacagg

SEQ ID NO: 3286748 - DNA, 25 bp, Homo sapien
tgatggtaggttcagacagacagct

SEQ ID NO: 3286749 - DNA, 25 bp, Homo sapien
acagggtagcaatccaagtgtaaaa

SEQ ID NO: 3286750 - DNA, 25 bp, Homo sapien
tatctggtctaatattacaagtggg

SEQ ID NO: 3286751 - DNA, 25 bp, Homo sapien
aatgaatggcctgttcataggaggc

SEQ ID NO: 3286752 - DNA, 25 bp, Homo sapien
cagtacttaattgttcatgagccaa

SEQ ID NO: 3286753 - DNA, 25 bp, Homo sapien
tttggctagtagaacacaatgtctc

SEQ ID NO: 3286754 - DNA, 25 bp, Homo sapien
ttggatacccaacaatgctattgct

SEQ ID NO: 3286755 - DNA, 25 bp, Homo sapien
gacaacattacattgatgaaatgat

SEQ ID NO: 3286756 - DNA, 25 bp, Homo sapien
acaacattacattgatgaaatgatt

SEQ ID NO: 3286757 - DNA, 25 bp, Homo sapien
gatgaaatgattcccagcttcacaa

SEQ ID NO: 3286758 - DNA, 25 bp, Homo sapien
ttgatgaaatgattcccagcttcac

SEQ ID NO: 3286759 - DNA, 25 bp, Homo sapien
tccaatacagtttgcgatgctaact

SEQ ID NO: 3286760 - DNA, 25 bp, Homo sapien
acaccttcaggtgaatccaatacag

SEQ ID NO: 3286761 - DNA, 25 bp, Homo sapien
taactgaattagataaaactggtga

SEQ ID NO: 3286762 - DNA, 25 bp, Homo sapien
aagcactggcttttacaccttcagg

SEQ ID NO: 3286763 - DNA, 25 bp, Homo sapien
aaatatgccgtaataggtaccgacg

SEQ ID NO: 3286764 - DNA, 25 bp, Homo sapien
tgccgtaataggtaccgacgaagaa

SEQ ID NO: 3286765 - DNA, 25 bp, Homo sapien
gacatcaaaatatgccgtaataggt

SEQ ID NO: 3286766 - DNA, 25 bp, Homo sapien
ttcctgttatagctagacatcaaaa

SEQ ID NO: 3286767 - DNA, 25 bp, Homo sapien
taaataacgctgttacaacacgtga

SEQ ID NO: 3286768 - DNA, 25 bp, Homo sapien
gagagctccttacaaagtgtggcag

SEQ ID NO: 3286769 - DNA, 25 bp, Homo sapien
cttgaacagtatgcacaattggaaa

SEQ ID NO: 3286770 - DNA, 25 bp, Homo sapien
taatgagttcttgctaggccaaact

SEQ ID NO: 3286771 - DNA, 25 bp, Homo sapien
attgatagcagatactgtgatttgc

SEQ ID NO: 3286772 - DNA, 25 bp, Homo sapien
agaaaattgatagcagatactgtga

SEQ ID NO: 3286773 - DNA, 25 bp, Homo sapien
gatagcagatactgtgatttgcctg

SEQ ID NO: 3286774 - DNA, 25 bp, Homo sapien
gaaaattgatagcagatactgtgat

SEQ ID NO: 3286775 - DNA, 25 bp, Homo sapien
tgtcatttagaatagagtttttagg

SEQ ID NO: 3286776 - DNA, 25 bp, Homo sapien
tcttgtaggcctacataaacattta

SEQ ID NO: 3286777 - DNA, 25 bp, Homo sapien
tggtggttcgtgtagaaacaaaata

SEQ ID NO: 3286778 - DNA, 25 bp, Homo sapien
aaatatatgagtcaaattggtcttg

SEQ ID NO: 3286779 - DNA, 25 bp, Homo sapien
taatgtagtaggcaatccaagaagt

SEQ ID NO: 3286780 - DNA, 25 bp, Homo sapien
tggtgtatatagtggatgattaatg

SEQ ID NO: 3286781 - DNA, 25 bp, Homo sapien
tgtagtaggcaatccaagaagtaaa

SEQ ID NO: 3286782 - DNA, 25 bp, Homo sapien
tagtggatgattaatgtagtaggca

SEQ ID NO: 3286783 - DNA, 25 bp, Homo sapien
gcagaaactttgtgaacaaataagg

SEQ ID NO: 3286784 - DNA, 25 bp, Homo sapien
tttccaaaaggtatcggatgtagtg

SEQ ID NO: 3286785 - DNA, 25 bp, Homo sapien
cagaaactttgtgaacaaataaggt

SEQ ID NO: 3286786 - DNA, 25 bp, Homo sapien
ggatgtagtgtatacaatgacagaa

SEQ ID NO: 3286787 - DNA, 25 bp, Homo sapien
tatacatgggatcctcaaataaaag

SEQ ID NO: 3286788 - DNA, 25 bp, Homo sapien
tattagcagaggtcctgtgtattca

SEQ ID NO: 3286789 - DNA, 25 bp, Homo sapien
aagaggaggtatattagcagaggtc

SEQ ID NO: 3286790 - DNA, 25 bp, Homo sapien
cactgggtggcgtaatcttctagca

SEQ ID NO: 3286791 - DNA, 25 bp, Homo sapien
tggtccaactgacttgttgacctag

SEQ ID NO: 3286792 - DNA, 25 bp, Homo sapien
ggtccaactgacttgttgacctagg

SEQ ID NO: 3286793 - DNA, 25 bp, Homo sapien
tgtggtccaactgacttgttgacct

SEQ ID NO: 3286794 - DNA, 25 bp, Homo sapien
gtccaactgacttgttgacctaggt

SEQ ID NO: 3286795 - DNA, 25 bp, Homo sapien
caatactttgaatggtaatgtagtc

SEQ ID NO: 3286796 - DNA, 25 bp, Homo sapien
gtgacaatggaggaagctgcaatac

SEQ ID NO: 3286797 - DNA, 25 bp, Homo sapien
ctgcaatactttgaatggtaatgta

SEQ ID NO: 3286798 - DNA, 25 bp, Homo sapien
ctttgaatggtaatgtagtccttca

SEQ ID NO: 3286799 - DNA, 25 bp, Homo sapien
ctagctgcagaccaactcgagaagg

SEQ ID NO: 3286800 - DNA, 25 bp, Homo sapien
gctgcagaccaactcgagaagggta

SEQ ID NO: 3286801 - DNA, 25 bp, Homo sapien
cacattctagctgcagaccaactcg

SEQ ID NO: 3286802 - DNA, 25 bp, Homo sapien
agaccaactcgagaagggtaccact

SEQ ID NO: 3286803 - DNA, 25 bp, Homo sapien
ccacattcactgtgtttaaaatctg

SEQ ID NO: 3286804 - DNA, 25 bp, Homo sapien
ttactgcttaaccaccaaagtctgt

SEQ ID NO: 3286805 - DNA, 25 bp, Homo sapien
gtccacattcactgtgtttaaaatc

SEQ ID NO: 3286806 - DNA, 25 bp, Homo sapien
taaccaccaaagtctgtccacattc

SEQ ID NO: 3286807 - DNA, 25 bp, Homo sapien
tctcaggtaaatgatttccatgaat

SEQ ID NO: 3286808 - DNA, 25 bp, Homo sapien
gggcacatttgttaggatttcctcc

SEQ ID NO: 3286809 - DNA, 25 bp, Homo sapien
cataaccagggcatcaacactacca

SEQ ID NO: 3286810 - DNA, 25 bp, Homo sapien
cctggtagtgttaatctcaatcttg

SEQ ID NO: 3286811 - DNA, 25 bp, Homo sapien
ctccagtgggcacatttgttaggat

SEQ ID NO: 3286812 - DNA, 25 bp, Homo sapien
acttttgcttaacatcatgaatagt

SEQ ID NO: 3286813 - DNA, 25 bp, Homo sapien
gtgaaacttttgcttaacatcatga

SEQ ID NO: 3286814 - DNA, 25 bp, Homo sapien
atcatgaatagtagatgattgtgtc

SEQ ID NO: 3286815 - DNA, 25 bp, Homo sapien
catgaatagtagatgattgtgtcac

SEQ ID NO: 3286816 - DNA, 25 bp, Homo sapien
catattcttgttggttatatgtatc

SEQ ID NO: 3286817 - DNA, 25 bp, Homo sapien
ctgactattaatgtgtgatggtttc

SEQ ID NO: 3286818 - DNA, 25 bp, Homo sapien
ttaatgtgtgatggtttctcattgt

SEQ ID NO: 3286819 - DNA, 25 bp, Homo sapien
tcatattcttgttggttatatgtat

SEQ ID NO: 3286820 - DNA, 25 bp, Homo sapien
tgtttaaaggtgtgtcacatctctt

SEQ ID NO: 3286821 - DNA, 25 bp, Homo sapien
gaaatggaatctccaatactggaga

SEQ ID NO: 3286822 - DNA, 25 bp, Homo sapien
tggtactgtcctcaaaaaagtgagt

SEQ ID NO: 3286823 - DNA, 25 bp, Homo sapien
ttaaaggtgtgtcacatctcttctc

SEQ ID NO: 3286824 - DNA, 25 bp, Homo sapien
atccagaatacatatctgtttcctt

SEQ ID NO: 3286825 - DNA, 25 bp, Homo sapien
ccagaatacatatctgtttccttgt

SEQ ID NO: 3286826 - DNA, 25 bp, Homo sapien
caaagtgagtcgtttttgaatgttt

SEQ ID NO: 3286827 - DNA, 25 bp, Homo sapien
caatctcaaagtgagtcgtttttga

SEQ ID NO: 3286828 - DNA, 25 bp, Homo sapien
cgttccgaagcgagggacttgtgcc

SEQ ID NO: 3286829 - DNA, 25 bp, Homo sapien
ttagagggcccgctgagagtacaag

SEQ ID NO: 3286830 - DNA, 25 bp, Homo sapien
agtatgaaccgtgtagctctttggg

SEQ ID NO: 3286831 - DNA, 25 bp, Homo sapien
agtaatgctctcttgcgttccgaag

SEQ ID NO: 3286832 - DNA, 25 bp, Homo sapien
gagggtctgtcatgtcaaaagtaga

SEQ ID NO: 3286833 - DNA, 25 bp, Homo sapien
gctggagaacctttgaaaggtcaaa

SEQ ID NO: 3286834 - DNA, 25 bp, Homo sapien
tttgcatcagttaaatactgctgga

SEQ ID NO: 3286835 - DNA, 25 bp, Homo sapien
tgcaagtgtgttccttttgcatcag

SEQ ID NO: 3286836 - DNA, 25 bp, Homo sapien
ccgaatctgagccttgctattgcag

SEQ ID NO: 3286837 - DNA, 25 bp, Homo sapien
cactctgcccttcccgaatctgagc

SEQ ID NO: 3286838 - DNA, 25 bp, Homo sapien
tgctattgcagttgttcccctcttt

SEQ ID NO: 3286839 - DNA, 25 bp, Homo sapien
tggagagtttccagatcattccact

SEQ ID NO: 3286840 - DNA, 25 bp, Homo sapien
cctttgttttgggagctgaggccat

SEQ ID NO: 3286841 - DNA, 25 bp, Homo sapien
tgccctttgttttgggagctgaggc

SEQ ID NO: 3286842 - DNA, 25 bp, Homo sapien
gctgccctttgttttgggagctgag

SEQ ID NO: 3286843 - DNA, 25 bp, Homo sapien
gccctttgttttgggagctgaggcc

SEQ ID NO: 3286844 - DNA, 25 bp, Homo sapien
gacaatttgaaggtttcgtagccat

SEQ ID NO: 3286845 - DNA, 25 bp, Homo sapien
tcatcgcgagctgtaaccctttggt

SEQ ID NO: 3286846 - DNA, 25 bp, Homo sapien
tcgtagccatagtgaacaaggccat

SEQ ID NO: 3286847 - DNA, 25 bp, Homo sapien
aaggccatgagcgtcaagtttgagc

SEQ ID NO: 3286848 - DNA, 25 bp, Homo sapien
caggatgttcttgacttcgctggtt

SEQ ID NO: 3286849 - DNA, 25 bp, Homo sapien
tgttcttgacttcgctggttctggc

SEQ ID NO: 3286850 - DNA, 25 bp, Homo sapien
gacttcgctggttctggcatccctg

SEQ ID NO: 3286851 - DNA, 25 bp, Homo sapien
ttcgctggttctggcatccctgctg

SEQ ID NO: 3286852 - DNA, 25 bp, Homo sapien
ccccaactacgatgacctgaggtgg

SEQ ID NO: 3286853 - DNA, 25 bp, Homo sapien
ttgtttgtgaacgtactggctgtgg

SEQ ID NO: 3286854 - DNA, 25 bp, Homo sapien
tgtggcctaggccatgcagcaggat

SEQ ID NO: 3286855 - DNA, 25 bp, Homo sapien
tgcagatgggtctgaacgagctgtt

SEQ ID NO: 3286856 - DNA, 25 bp, Homo sapien
ctcttgccaacaattcaggttctcg

SEQ ID NO: 3286857 - DNA, 25 bp, Homo sapien
cagacaggaattggtagcttgcatt

SEQ ID NO: 3286858 - DNA, 25 bp, Homo sapien
tcaggttctcgattgagtgactcaa

SEQ ID NO: 3286859 - DNA, 25 bp, Homo sapien
tctggcagacaggaattggtagctt

SEQ ID NO: 3286860 - DNA, 25 bp, Homo sapien
taaatttaatctctcttcctgccaa

SEQ ID NO: 3286861 - DNA, 25 bp, Homo sapien
gggtcatttgaaccttatgatacat

SEQ ID NO: 3286862 - DNA, 25 bp, Homo sapien
aatgtgtttaccctctttatcaagg

SEQ ID NO: 3286863 - DNA, 25 bp, Homo sapien
tgaggattgtaggactgacactaaa

SEQ ID NO: 3286864 - DNA, 25 bp, Homo sapien
acctctgtccaaaattaactcccat

SEQ ID NO: 3286865 - DNA, 25 bp, Homo sapien
cctctgtccaaaattaactcccata

SEQ ID NO: 3286866 - DNA, 25 bp, Homo sapien
gacctctgtccaaaattaactccca

SEQ ID NO: 3286867 - DNA, 25 bp, Homo sapien
ttagataagagaggctctaattctt

SEQ ID NO: 3286868 - DNA, 25 bp, Homo sapien
tcctgtgcagaatcttgattcactt

SEQ ID NO: 3286869 - DNA, 25 bp, Homo sapien
gaatcttgattcactttcacaagca

SEQ ID NO: 3286870 - DNA, 25 bp, Homo sapien
cttagataagagaggctctaattct

SEQ ID NO: 3286871 - DNA, 25 bp, Homo sapien
tactgataggccactggtaatatgg

SEQ ID NO: 3286872 - DNA, 25 bp, Homo sapien
gaaacacaacactagactaacattt

SEQ ID NO: 3286873 - DNA, 25 bp, Homo sapien
gactgaagttgctacagactggtac

SEQ ID NO: 3286874 - DNA, 25 bp, Homo sapien
gggtaacttggatcacttccaccag

SEQ ID NO: 3286875 - DNA, 25 bp, Homo sapien
cctcctgtttgtctttaacatgcat

SEQ ID NO: 3286876 - DNA, 25 bp, Homo sapien
tttatcctcctgtttgtctttaaca

SEQ ID NO: 3286877 - DNA, 25 bp, Homo sapien
tatcctcctgtttgtctttaacatg

SEQ ID NO: 3286878 - DNA, 25 bp, Homo sapien
cggacttttatcctcctgtttgtct

SEQ ID NO: 3286879 - DNA, 25 bp, Homo sapien
ctacagcacggctgttttctccatc

SEQ ID NO: 3286880 - DNA, 25 bp, Homo sapien
ctggctcatcatcggcattattgac

SEQ ID NO: 3286881 - DNA, 25 bp, Homo sapien
catcggcattattgacactaggcat

SEQ ID NO: 3286882 - DNA, 25 bp, Homo sapien
gctcatcatcggcattattgacact

SEQ ID NO: 3286883 - DNA, 25 bp, Homo sapien
catcatcggcattattgacactagg

SEQ ID NO: 3286884 - DNA, 25 bp, Homo sapien
tttacaagaccagtgtattggctta

SEQ ID NO: 3286885 - DNA, 25 bp, Homo sapien
gaccagtgtattggcttatactaca

SEQ ID NO: 3286886 - DNA, 25 bp, Homo sapien
agtgtattggcttatactacaaggg

SEQ ID NO: 3286887 - DNA, 25 bp, Homo sapien
caagaccagtgtattggcttatact

SEQ ID NO: 3286888 - DNA, 25 bp, Homo sapien
tagcaggttagctagagtataattg

SEQ ID NO: 3286889 - DNA, 25 bp, Homo sapien
cattagaattatgagagtgagaagg

SEQ ID NO: 3286890 - DNA, 25 bp, Homo sapien
aggtgattttatcagagtgggagga

SEQ ID NO: 3286891 - DNA, 25 bp, Homo sapien
ttaatatgaggtggggtgtttagca

SEQ ID NO: 3286892 - DNA, 25 bp, Homo sapien
gaatgagccgtagtacaagcctcgg

SEQ ID NO: 3286893 - DNA, 25 bp, Homo sapien
catctcgggtaatgtgggcgactga

SEQ ID NO: 3286894 - DNA, 25 bp, Homo sapien
aatattgaagctccatgggcgtgga

SEQ ID NO: 3286895 - DNA, 25 bp, Homo sapien
gcagcagatgattcagccgtagttt

SEQ ID NO: 3286896 - DNA, 25 bp, Homo sapien
aggattaggcaggtgccgagaagtg

SEQ ID NO: 3286897 - DNA, 25 bp, Homo sapien
gaaggattaggcaggtgccgagaag

SEQ ID NO: 3286898 - DNA, 25 bp, Homo sapien
aaggattaggcaggtgccgagaagt

SEQ ID NO: 3286899 - DNA, 25 bp, Homo sapien
gattaggcaggtgccgagaagtgag

SEQ ID NO: 3286900 - DNA, 25 bp, Homo sapien
gtgctgcggtcattagtgttcttat

SEQ ID NO: 3286901 - DNA, 25 bp, Homo sapien
gctgcggtcattagtgttcttatag

SEQ ID NO: 3286902 - DNA, 25 bp, Homo sapien
taaaatacaatgacggtttttcata

SEQ ID NO: 3286903 - DNA, 25 bp, Homo sapien
tgcggtcattagtgttcttatagtt

SEQ ID NO: 3286904 - DNA, 25 bp, Homo sapien
caattgtgaggcttttaattgggtt

SEQ ID NO: 3286905 - DNA, 25 bp, Homo sapien
gagaaatcctccgaataggctgcca

SEQ ID NO: 3286906 - DNA, 25 bp, Homo sapien
tccgaataggctgccaattgtgagg

SEQ ID NO: 3286907 - DNA, 25 bp, Homo sapien
ttggtgatgagaaatcctccgaata

SEQ ID NO: 3286908 - DNA, 25 bp, Homo sapien
gacgcgtttgctgtttcgatgatga

SEQ ID NO: 3286909 - DNA, 25 bp, Homo sapien
tcaggcgttggtatacgacgcgttt

SEQ ID NO: 3286910 - DNA, 25 bp, Homo sapien
tatgcctgtgagtgctaggctgcca

SEQ ID NO: 3286911 - DNA, 25 bp, Homo sapien
gattagggataatagaccctgagca

SEQ ID NO: 3286912 - DNA, 25 bp, Homo sapien
gtatgactaccataatctaatgagt

SEQ ID NO: 3286913 - DNA, 25 bp, Homo sapien
gtaagtatgactaccataatctaat

SEQ ID NO: 3286914 - DNA, 25 bp, Homo sapien
agtatgactaccataatctaatgag

SEQ ID NO: 3286915 - DNA, 25 bp, Homo sapien
tttggtaagtatgactaccataatc

SEQ ID NO: 3286916 - DNA, 25 bp, Homo sapien
tctttttctaatgctgtcgaaacta

SEQ ID NO: 3286917 - DNA, 25 bp, Homo sapien
ttctaatgctgtcgaaactaattgg

SEQ ID NO: 3286918 - DNA, 25 bp, Homo sapien
tctaatgctgtcgaaactaattgga

SEQ ID NO: 3286919 - DNA, 25 bp, Homo sapien
taatgctgtcgaaactaattggaag

SEQ ID NO: 3286920 - DNA, 25 bp, Homo sapien
agtatcaagtggtggcttcgaagcc

SEQ ID NO: 3286921 - DNA, 25 bp, Homo sapien
cgatgatgacatgaaatccgtgaaa

SEQ ID NO: 3286922 - DNA, 25 bp, Homo sapien
ggtaaggaatgttgatccgatgatg

SEQ ID NO: 3286923 - DNA, 25 bp, Homo sapien
tgtgaagtgacatagcaattggcgg

SEQ ID NO: 3286924 - DNA, 25 bp, Homo sapien
tctacagtagtatgacgaacctctc

SEQ ID NO: 3286925 - DNA, 25 bp, Homo sapien
gatttgggacctggacgaatccaca

SEQ ID NO: 3286926 - DNA, 25 bp, Homo sapien
cacacctctatcaattctacagtag

SEQ ID NO: 3286927 - DNA, 25 bp, Homo sapien
tatccaggcttcactcctttcagat

SEQ ID NO: 3286928 - DNA, 25 bp, Homo sapien
gtgccgccattaattgtttactttc

SEQ ID NO: 3286929 - DNA, 25 bp, Homo sapien
tgccgccattaattgtttactttca

SEQ ID NO: 3286930 - DNA, 25 bp, Homo sapien
ctgtgccgccattaattgtttactt

SEQ ID NO: 3286931 - DNA, 25 bp, Homo sapien
tgtgccgccattaattgtttacttt

SEQ ID NO: 3286932 - DNA, 25 bp, Homo sapien
taataatagacaaaatgccaggagc

SEQ ID NO: 3286933 - DNA, 25 bp, Homo sapien
tgttgcatgacttccagatggagag

SEQ ID NO: 3286934 - DNA, 25 bp, Homo sapien
gagattcccactctatgaacaaagg

SEQ ID NO: 3286935 - DNA, 25 bp, Homo sapien
tagagtctgacttttccacctggag

SEQ ID NO: 3286936 - DNA, 25 bp, Homo sapien
caggcagtttggcttttgcataatg

SEQ ID NO: 3286937 - DNA, 25 bp, Homo sapien
cttttgcataatgtatggcatcacg

SEQ ID NO: 3286938 - DNA, 25 bp, Homo sapien
gtttggcttttgcataatgtatggc

SEQ ID NO: 3286939 - DNA, 25 bp, Homo sapien
aacaataatacattacagggatatt

SEQ ID NO: 3286940 - DNA, 25 bp, Homo sapien
ttctttgccaatcaatgggacagtt

SEQ ID NO: 3286941 - DNA, 25 bp, Homo sapien
tgtagtggtgaaaacgaagcctgaa

SEQ ID NO: 3286942 - DNA, 25 bp, Homo sapien
gtagtggtgaaaacgaagcctgaat

SEQ ID NO: 3286943 - DNA, 25 bp, Homo sapien
tgtgtagtggtgaaaacgaagcctg

SEQ ID NO: 3286944 - DNA, 25 bp, Homo sapien
aatggttttcatgatcaagtaatgt

SEQ ID NO: 3286945 - DNA, 25 bp, Homo sapien
catgatcaagtaatgtttcatcttc

SEQ ID NO: 3286946 - DNA, 25 bp, Homo sapien
gttttcatgatcaagtaatgtttca

SEQ ID NO: 3286947 - DNA, 25 bp, Homo sapien
gatcaagtaatgtttcatcttcctt

SEQ ID NO: 3286948 - DNA, 25 bp, Homo sapien
ggcatttggatcatcaaacaggcat

SEQ ID NO: 3286949 - DNA, 25 bp, Homo sapien
tgctggtactcatgggttttgtggt

SEQ ID NO: 3286950 - DNA, 25 bp, Homo sapien
aagactgtgtattcctcaaaacaag

SEQ ID NO: 3286951 - DNA, 25 bp, Homo sapien
agaaggtccaaactgttcatcgaag

SEQ ID NO: 3286952 - DNA, 25 bp, Homo sapien
taaagatgataaggtgaaagtggga

SEQ ID NO: 3286953 - DNA, 25 bp, Homo sapien
gcgtgctgttattccagatgtgcat

SEQ ID NO: 3286954 - DNA, 25 bp, Homo sapien
ggcagctgaaatgcgtgctgttatt

SEQ ID NO: 3286955 - DNA, 25 bp, Homo sapien
actgtgaggactgtatttgaagtca

SEQ ID NO: 3286956 - DNA, 25 bp, Homo sapien
tcaatggtgtggtactctggaggca

SEQ ID NO: 3286957 - DNA, 25 bp, Homo sapien
catccaatctttacggaaggtagaa

SEQ ID NO: 3286958 - DNA, 25 bp, Homo sapien
attacccactcctctgctacatata

SEQ ID NO: 3286959 - DNA, 25 bp, Homo sapien
ccactcctctgctacatatactaaa

SEQ ID NO: 3286960 - DNA, 25 bp, Homo sapien
tactaaaagctcctgggcacttcgc

SEQ ID NO: 3286961 - DNA, 25 bp, Homo sapien
aaaatggttccgttgaagatctgac

SEQ ID NO: 3286962 - DNA, 25 bp, Homo sapien
gttccgttgaagatctgacatacat

SEQ ID NO: 3286963 - DNA, 25 bp, Homo sapien
aatggttccgttgaagatctgacat

SEQ ID NO: 3286964 - DNA, 25 bp, Homo sapien
tggttccgttgaagatctgacatac

SEQ ID NO: 3286965 - DNA, 25 bp, Homo sapien
tcttatgaaaatataacccagaagg

SEQ ID NO: 3286966 - DNA, 25 bp, Homo sapien
tggatcgttacatacagctagggct

SEQ ID NO: 3286967 - DNA, 25 bp, Homo sapien
gctggcagctagacatgcaaaccgt

SEQ ID NO: 3286968 - DNA, 25 bp, Homo sapien
tcaactacagttgtgtcctacagta

SEQ ID NO: 3286969 - DNA, 25 bp, Homo sapien
taatgttttctccactacacgctgg

SEQ ID NO: 3286970 - DNA, 25 bp, Homo sapien
taggaactgcagtgaatctctccaa

SEQ ID NO: 3286971 - DNA, 25 bp, Homo sapien
attattttggctacttggagtccct

SEQ ID NO: 3286972 - DNA, 25 bp, Homo sapien
caacgtttgtccattagcattgact

SEQ ID NO: 3286973 - DNA, 25 bp, Homo sapien
gaatttttccactgtaccatttgac

SEQ ID NO: 3286974 - DNA, 25 bp, Homo sapien
tttacagattctgctaggtcttttg

SEQ ID NO: 3286975 - DNA, 25 bp, Homo sapien
ttctttgctcaaggtctttcccaca

SEQ ID NO: 3286976 - DNA, 25 bp, Homo sapien
ccacaacatattggcagacatcctc

SEQ ID NO: 3286977 - DNA, 25 bp, Homo sapien
gatgaaaaaagtttacagattctgc

SEQ ID NO: 3286978 - DNA, 25 bp, Homo sapien
agaacatgatacagtttcctgtaac

SEQ ID NO: 3286979 - DNA, 25 bp, Homo sapien
aaaccagaacatgatacagtttcct

SEQ ID NO: 3286980 - DNA, 25 bp, Homo sapien
aaccagaacatgatacagtttcctg

SEQ ID NO: 3286981 - DNA, 25 bp, Homo sapien
ccagaacatgatacagtttcctgta

SEQ ID NO: 3286982 - DNA, 25 bp, Homo sapien
actattaggccaaacatatttctgg

SEQ ID NO: 3286983 - DNA, 25 bp, Homo sapien
tattacttcggaaatgttcatctgg

SEQ ID NO: 3286984 - DNA, 25 bp, Homo sapien
tctggtaactaagccttaaactgga

SEQ ID NO: 3286985 - DNA, 25 bp, Homo sapien
tccatggactacaacctctcttgtt

SEQ ID NO: 3286986 - DNA, 25 bp, Homo sapien
aaccattccaccactcagctcaaca

SEQ ID NO: 3286987 - DNA, 25 bp, Homo sapien
cagctcaacaatgtgcatatgttca

SEQ ID NO: 3286988 - DNA, 25 bp, Homo sapien
tggtttatgattatatgccgtagtg

SEQ ID NO: 3286989 - DNA, 25 bp, Homo sapien
tgttcatcttgtttgacttggttta

SEQ ID NO: 3286990 - DNA, 25 bp, Homo sapien
taacccttgtgttctttagcaatca

SEQ ID NO: 3286991 - DNA, 25 bp, Homo sapien
ggctgcaggtgaaaactgtcccgga

SEQ ID NO: 3286992 - DNA, 25 bp, Homo sapien
tccagtcaatagctgaggagatgcc

SEQ ID NO: 3286993 - DNA, 25 bp, Homo sapien
caattctctattgactcccatggca

SEQ ID NO: 3286994 - DNA, 25 bp, Homo sapien
tttactccgttccacatctgttcca

SEQ ID NO: 3286995 - DNA, 25 bp, Homo sapien
ctggtttactccgttccacatctgt

SEQ ID NO: 3286996 - DNA, 25 bp, Homo sapien
tactccgttccacatctgttccagt

SEQ ID NO: 3286997 - DNA, 25 bp, Homo sapien
ggtttactccgttccacatctgttc

SEQ ID NO: 3286998 - DNA, 25 bp, Homo sapien
cgaacctgacttaatcttgatgaat

SEQ ID NO: 3286999 - DNA, 25 bp, Homo sapien
gaaataccattgcttaacgaacctg

SEQ ID NO: 3287000 - DNA, 25 bp, Homo sapien
acttctccatccgaaatgttctttc

SEQ ID NO: 3287001 - DNA, 25 bp, Homo sapien
tcctgttttaatttatgcaatggct

SEQ ID NO: 3287002 - DNA, 25 bp, Homo sapien
gcataactgtgacatttgcagaata

SEQ ID NO: 3287003 - DNA, 25 bp, Homo sapien
gaatatcaatgaagctaaggtcacc

SEQ ID NO: 3287004 - DNA, 25 bp, Homo sapien
ctaaggtcaccagtatatcatgcaa

SEQ ID NO: 3287005 - DNA, 25 bp, Homo sapien
gcagctgaggcgagcataactgtga

SEQ ID NO: 3287006 - DNA, 25 bp, Homo sapien
tgtttcttgcatttgaactgtcacc

SEQ ID NO: 3287007 - DNA, 25 bp, Homo sapien
tctgtttcttgcatttgaactgtca

SEQ ID NO: 3287008 - DNA, 25 bp, Homo sapien
gcttctgtttcttgcatttgaactg

SEQ ID NO: 3287009 - DNA, 25 bp, Homo sapien
tttcttgcatttgaactgtcaccat

SEQ ID NO: 3287010 - DNA, 25 bp, Homo sapien
taagtttgactagtttcttctaata

SEQ ID NO: 3287011 - DNA, 25 bp, Homo sapien
tttctcccaaatgtatgtcaaaaat

SEQ ID NO: 3287012 - DNA, 25 bp, Homo sapien
ctctctctctttgcttccattgaaa

SEQ ID NO: 3287013 - DNA, 25 bp, Homo sapien
tttgcttccattgaaactttctggg

SEQ ID NO: 3287014 - DNA, 25 bp, Homo sapien
gcttccattgaaactttctgggttg

SEQ ID NO: 3287015 - DNA, 25 bp, Homo sapien
ccattgaaactttctgggttgtcag

SEQ ID NO: 3287016 - DNA, 25 bp, Homo sapien
tggcctctatagctacaatttgtga

SEQ ID NO: 3287017 - DNA, 25 bp, Homo sapien
tagctacaatttgtgataaggtcat

SEQ ID NO: 3287018 - DNA, 25 bp, Homo sapien
tcagtgatggcctctatagctacaa

SEQ ID NO: 3287019 - DNA, 25 bp, Homo sapien
ttccatcatgtcagtgatggcctct

SEQ ID NO: 3287020 - DNA, 25 bp, Homo sapien
caggtctgctgcacgagagtcagaa

SEQ ID NO: 3287021 - DNA, 25 bp, Homo sapien
tctgctgcacgagagtcagaacatc

SEQ ID NO: 3287022 - DNA, 25 bp, Homo sapien
tcaacaggtctgctgcacgagagtc

SEQ ID NO: 3287023 - DNA, 25 bp, Homo sapien
aacaggtctgctgcacgagagtcag

SEQ ID NO: 3287024 - DNA, 25 bp, Homo sapien
gaaggaccatggtgtaactttacat

SEQ ID NO: 3287025 - DNA, 25 bp, Homo sapien
aactttacatttgtgataccatcca

SEQ ID NO: 3287026 - DNA, 25 bp, Homo sapien
ttgcaggtttgatgtgtatgatttg

SEQ ID NO: 3287027 - DNA, 25 bp, Homo sapien
tgataccatccagatgaacacttaa

SEQ ID NO: 3287028 - DNA, 25 bp, Homo sapien
ggcatattgtgaccattcacgttta

SEQ ID NO: 3287029 - DNA, 25 bp, Homo sapien
gagctggcatattgtgaccattcac

SEQ ID NO: 3287030 - DNA, 25 bp, Homo sapien
cagatagtaaatgattggcttaaaa

SEQ ID NO: 3287031 - DNA, 25 bp, Homo sapien
taaatgattggcttaaaaatctctg

SEQ ID NO: 3287032 - DNA, 25 bp, Homo sapien
ggaattattacagttcaaagtgaga

SEQ ID NO: 3287033 - DNA, 25 bp, Homo sapien
acatggctgaggaagactcaccata

SEQ ID NO: 3287034 - DNA, 25 bp, Homo sapien
ggcatgtgcagaggaactacccttt

SEQ ID NO: 3287035 - DNA, 25 bp, Homo sapien
gaagactcaccataattgcagaagg

SEQ ID NO: 3287036 - DNA, 25 bp, Homo sapien
tccacatggtcacagtgtttaattt

SEQ ID NO: 3287037 - DNA, 25 bp, Homo sapien
ttccacatggtcacagtgtttaatt

SEQ ID NO: 3287038 - DNA, 25 bp, Homo sapien
attccacatggtcacagtgtttaat

SEQ ID NO: 3287039 - DNA, 25 bp, Homo sapien
aattccacatggtcacagtgtttaa

SEQ ID NO: 3287040 - DNA, 25 bp, Homo sapien
tgaaatgtctcttcaagcattaaga

SEQ ID NO: 3287041 - DNA, 25 bp, Homo sapien
caagcattaagatgttaccatcaca

SEQ ID NO: 3287042 - DNA, 25 bp, Homo sapien
gatggttctgaatgcattatgcaaa

SEQ ID NO: 3287043 - DNA, 25 bp, Homo sapien
ccatcacagcaattacagtcaccag

SEQ ID NO: 3287044 - DNA, 25 bp, Homo sapien
ttaagcaagcagtagtggcaattct

SEQ ID NO: 3287045 - DNA, 25 bp, Homo sapien
tctccagacgttttgaagataacta

SEQ ID NO: 3287046 - DNA, 25 bp, Homo sapien
taacagtactaatgcgtccatctgg

SEQ ID NO: 3287047 - DNA, 25 bp, Homo sapien
tatacgaccataatcttccccaaga

SEQ ID NO: 3287048 - DNA, 25 bp, Homo sapien
ccctgtcagggtacataaattacca

SEQ ID NO: 3287049 - DNA, 25 bp, Homo sapien
taagaaaactttgcctagctctatg

SEQ ID NO: 3287050 - DNA, 25 bp, Homo sapien
gctatgtaaaccaaacccctgtcag

SEQ ID NO: 3287051 - DNA, 25 bp, Homo sapien
tcctagagggtgtgtaatgatatca

SEQ ID NO: 3287052 - DNA, 25 bp, Homo sapien
tactagcagctatggttgtcccaaa

SEQ ID NO: 3287053 - DNA, 25 bp, Homo sapien
gggcccaccctgaagaaagatgctt

SEQ ID NO: 3287054 - DNA, 25 bp, Homo sapien
tatacagggtttgagcaacccaggc

SEQ ID NO: 3287055 - DNA, 25 bp, Homo sapien
tatttttaccacatggacggaggtg

SEQ ID NO: 3287056 - DNA, 25 bp, Homo sapien
tccatattctgatctcattctctaa

SEQ ID NO: 3287057 - DNA, 25 bp, Homo sapien
agggctccacctcttgcaatgtatc

SEQ ID NO: 3287058 - DNA, 25 bp, Homo sapien
ctcttacttttgttccagggctcca

SEQ ID NO: 3287059 - DNA, 25 bp, Homo sapien
tattctgatctcattctctaatttt

SEQ ID NO: 3287060 - DNA, 25 bp, Homo sapien
gaggagagtgatacgcgacattttt

SEQ ID NO: 3287061 - DNA, 25 bp, Homo sapien
tgctgaggagagtgatacgcgacat

SEQ ID NO: 3287062 - DNA, 25 bp, Homo sapien
ggttttccagaaatgggtgctgagg

SEQ ID NO: 3287063 - DNA, 25 bp, Homo sapien
gatacgcgacatttttgattggact

SEQ ID NO: 3287064 - DNA, 25 bp, Homo sapien
tatgtttgcaaagcctctacatgat

SEQ ID NO: 3287065 - DNA, 25 bp, Homo sapien
tgtttgcaaagcctctacatgatgt

SEQ ID NO: 3287066 - DNA, 25 bp, Homo sapien
tttgcaaagcctctacatgatgtca

SEQ ID NO: 3287067 - DNA, 25 bp, Homo sapien
ttgcaaagcctctacatgatgtcat

SEQ ID NO: 3287068 - DNA, 25 bp, Homo sapien
ctggaatctgcattcgattaacatc

SEQ ID NO: 3287069 - DNA, 25 bp, Homo sapien
tctgcattcgattaacatcttagtg

SEQ ID NO: 3287070 - DNA, 25 bp, Homo sapien
tcatctgatattccttgtgggtggg

SEQ ID NO: 3287071 - DNA, 25 bp, Homo sapien
ggcaatgtgatgatcgctgaaccat

SEQ ID NO: 3287072 - DNA, 25 bp, Homo sapien
aatctgaagtacttggagttcgatg

SEQ ID NO: 3287073 - DNA, 25 bp, Homo sapien
aaatctgaagtacttggagttcgat

SEQ ID NO: 3287074 - DNA, 25 bp, Homo sapien
atctgaagtacttggagttcgatgg

SEQ ID NO: 3287075 - DNA, 25 bp, Homo sapien
tctgaagtacttggagttcgatggt

SEQ ID NO: 3287076 - DNA, 25 bp, Homo sapien
tatagaaatcccaagtatattttga

SEQ ID NO: 3287077 - DNA, 25 bp, Homo sapien
aatatttatagaaatcccaagtata

SEQ ID NO: 3287078 - DNA, 25 bp, Homo sapien
tcccaagtatattttgacttctggc

SEQ ID NO: 3287079 - DNA, 25 bp, Homo sapien
gaaatcccaagtatattttgacttc

SEQ ID NO: 3287080 - DNA, 25 bp, Homo sapien
tgagtcacgctgttctaagaaagca

SEQ ID NO: 3287081 - DNA, 25 bp, Homo sapien
gcgatatttttctgtccatctggga

SEQ ID NO: 3287082 - DNA, 25 bp, Homo sapien
tgatgtcagctatgctctacaacaa

SEQ ID NO: 3287083 - DNA, 25 bp, Homo sapien
tcatttcacccactaaaagcgatat

SEQ ID NO: 3287084 - DNA, 25 bp, Homo sapien
gggtatgcgtccctttaaggagtca

SEQ ID NO: 3287085 - DNA, 25 bp, Homo sapien
taaggagtcaatctcgacttgcaga

SEQ ID NO: 3287086 - DNA, 25 bp, Homo sapien
ggcctcatagccttgcctacacagt

SEQ ID NO: 3287087 - DNA, 25 bp, Homo sapien
gacttgcagaaccaataaaagccca

SEQ ID NO: 3287088 - DNA, 25 bp, Homo sapien
tcatcctcttccaagaatgacccag

SEQ ID NO: 3287089 - DNA, 25 bp, Homo sapien
ccattccaaagtaaaagactttcag

SEQ ID NO: 3287090 - DNA, 25 bp, Homo sapien
cattccaaagtaaaagactttcagc

SEQ ID NO: 3287091 - DNA, 25 bp, Homo sapien
ccaagaatgacccagcttcttgatt

SEQ ID NO: 3287092 - DNA, 25 bp, Homo sapien
caacacccatgggccaccgatataa

SEQ ID NO: 3287093 - DNA, 25 bp, Homo sapien
acccatgggccaccgatataaaaat

SEQ ID NO: 3287094 - DNA, 25 bp, Homo sapien
tatctaagtccttggattcctccaa

SEQ ID NO: 3287095 - DNA, 25 bp, Homo sapien
catgggccaccgatataaaaatcac

SEQ ID NO: 3287096 - DNA, 25 bp, Homo sapien
tatgctgtccacaatttaagtcagg

SEQ ID NO: 3287097 - DNA, 25 bp, Homo sapien
gaggctggaaaagtaacacaaacca

SEQ ID NO: 3287098 - DNA, 25 bp, Homo sapien
ggaatctaatagtgttgcccagtgt

SEQ ID NO: 3287099 - DNA, 25 bp, Homo sapien
gaatgcacaattgtccttgaggctg

SEQ ID NO: 3287100 - DNA, 25 bp, Homo sapien
tgtagttcaccaaaagtttcaagaa

SEQ ID NO: 3287101 - DNA, 25 bp, Homo sapien
tggtatacagccttggtcacagacc

SEQ ID NO: 3287102 - DNA, 25 bp, Homo sapien
tctctggtatacagccttggtcaca

SEQ ID NO: 3287103 - DNA, 25 bp, Homo sapien
ccagaaaatctgtagttcaccaaaa

SEQ ID NO: 3287104 - DNA, 25 bp, Homo sapien
gataatgactatagctctcacttcc

SEQ ID NO: 3287105 - DNA, 25 bp, Homo sapien
tagctctcacttcccaaagcaaagt

SEQ ID NO: 3287106 - DNA, 25 bp, Homo sapien
gggatgtggtgataatgactatagc

SEQ ID NO: 3287107 - DNA, 25 bp, Homo sapien
tgtggtgataatgactatagctctc

SEQ ID NO: 3287108 - DNA, 25 bp, Homo sapien
ttaacctacatcctctagattttgt

SEQ ID NO: 3287109 - DNA, 25 bp, Homo sapien
taacctacatcctctagattttgta

SEQ ID NO: 3287110 - DNA, 25 bp, Homo sapien
tcctgctggttctcttattacccaa

SEQ ID NO: 3287111 - DNA, 25 bp, Homo sapien
tcttattacccaagtgctcttgcag

SEQ ID NO: 3287112 - DNA, 25 bp, Homo sapien
aagtgctcttgcagatattgtccct

SEQ ID NO: 3287113 - DNA, 25 bp, Homo sapien
tgctcttgcagatattgtccctaat

SEQ ID NO: 3287114 - DNA, 25 bp, Homo sapien
ctgtgtgcacatggagatagtccat

SEQ ID NO: 3287115 - DNA, 25 bp, Homo sapien
ttttgccttttggctttcacaatca

SEQ ID NO: 3287116 - DNA, 25 bp, Homo sapien
cttttgccttttggctttcacaatc

SEQ ID NO: 3287117 - DNA, 25 bp, Homo sapien
tttgccttttggctttcacaatcat

SEQ ID NO: 3287118 - DNA, 25 bp, Homo sapien
ggttctgcaggctgcataacaaaca

SEQ ID NO: 3287119 - DNA, 25 bp, Homo sapien
ttctgcaggctgcataacaaacatg

SEQ ID NO: 3287120 - DNA, 25 bp, Homo sapien
tctgcaggctgcataacaaacatgg

SEQ ID NO: 3287121 - DNA, 25 bp, Homo sapien
gttctgcaggctgcataacaaacat

SEQ ID NO: 3287122 - DNA, 25 bp, Homo sapien
cagtcgctgaaacgctttgagtctt

SEQ ID NO: 3287123 - DNA, 25 bp, Homo sapien
tccgctggattctcagtccctgatg

SEQ ID NO: 3287124 - DNA, 25 bp, Homo sapien
gtccctgatggcagtcgctgaaacg

SEQ ID NO: 3287125 - DNA, 25 bp, Homo sapien
tttcactacagttccgctggattct

SEQ ID NO: 3287126 - DNA, 25 bp, Homo sapien
gttagctttgggtactgctttctct

SEQ ID NO: 3287127 - DNA, 25 bp, Homo sapien
tttccccaattggaaggctactgcc

SEQ ID NO: 3287128 - DNA, 25 bp, Homo sapien
tggaaggctactgccttcaaaagtt

SEQ ID NO: 3287129 - DNA, 25 bp, Homo sapien
agttagctttgggtactgctttctc

SEQ ID NO: 3287130 - DNA, 25 bp, Homo sapien
gccattctgatggttgtaaagtttc

SEQ ID NO: 3287131 - DNA, 25 bp, Homo sapien
ttgtaaagtttcctcttgtggcaga

SEQ ID NO: 3287132 - DNA, 25 bp, Homo sapien
aatgggttttcaccagtgagatatc

SEQ ID NO: 3287133 - DNA, 25 bp, Homo sapien
ccagtgagatatctgagcctctggt

SEQ ID NO: 3287134 - DNA, 25 bp, Homo sapien
taagtccttgcataacagtatcggt

SEQ ID NO: 3287135 - DNA, 25 bp, Homo sapien
ccatgatcttgtactgactcctgca

SEQ ID NO: 3287136 - DNA, 25 bp, Homo sapien
caagtgggtcaaaacaatgtaagtc

SEQ ID NO: 3287137 - DNA, 25 bp, Homo sapien
tgacggtgtgtgtgatcctttgcaa

SEQ ID NO: 3287138 - DNA, 25 bp, Homo sapien
tgagtcaagcctgcctataggtccc

SEQ ID NO: 3287139 - DNA, 25 bp, Homo sapien
ggcacaagcaccagtactgaaagag

SEQ ID NO: 3287140 - DNA, 25 bp, Homo sapien
gcaccacggtctctacacaggaagg

SEQ ID NO: 3287141 - DNA, 25 bp, Homo sapien
tgagctccctattcagtccctagat

SEQ ID NO: 3287142 - DNA, 25 bp, Homo sapien
caaaatcccggagactcttaacagt

SEQ ID NO: 3287143 - DNA, 25 bp, Homo sapien
taaacataaagaaggcaccagccaa

SEQ ID NO: 3287144 - DNA, 25 bp, Homo sapien
ttactgccatagatccaacatccat

SEQ ID NO: 3287145 - DNA, 25 bp, Homo sapien
ctgcattactgccatagatccaaca

SEQ ID NO: 3287146 - DNA, 25 bp, Homo sapien
gagacaagggtgaatgttcaatccc

SEQ ID NO: 3287147 - DNA, 25 bp, Homo sapien
cacattgctaaaccaaagtgttcct

SEQ ID NO: 3287148 - DNA, 25 bp, Homo sapien
gcaaaaatctgagtgataaagcagt

SEQ ID NO: 3287149 - DNA, 25 bp, Homo sapien
gcagttactgcattgcctactctcc

SEQ ID NO: 3287150 - DNA, 25 bp, Homo sapien
cacatgttgtacaactgtggaaaag

SEQ ID NO: 3287151 - DNA, 25 bp, Homo sapien
aaacacatacattaatctaggcccg

SEQ ID NO: 3287152 - DNA, 25 bp, Homo sapien
ccgcactcggtcaaaatcatcaata

SEQ ID NO: 3287153 - DNA, 25 bp, Homo sapien
cataagccatcacaaagggcaagtt

SEQ ID NO: 3287154 - DNA, 25 bp, Homo sapien
ggcagccccgaacttacaacacatt

SEQ ID NO: 3287155 - DNA, 25 bp, Homo sapien
tctttatctacaacgtcataggcaa

SEQ ID NO: 3287156 - DNA, 25 bp, Homo sapien
gatgattagaaccttgaccccaaag

SEQ ID NO: 3287157 - DNA, 25 bp, Homo sapien
agtatgcatctttcgtgagtctcaa

SEQ ID NO: 3287158 - DNA, 25 bp, Homo sapien
aggatggtcatgtttcactcagtgc

SEQ ID NO: 3287159 - DNA, 25 bp, Homo sapien
cactcagtgctaaaggatatacaga

SEQ ID NO: 3287160 - DNA, 25 bp, Homo sapien
tccaggtaggtttaatgtgcacata

SEQ ID NO: 3287161 - DNA, 25 bp, Homo sapien
taaataccaagttgaagcctgacag

SEQ ID NO: 3287162 - DNA, 25 bp, Homo sapien
gacagtcactcggtcattccaagga

SEQ ID NO: 3287163 - DNA, 25 bp, Homo sapien
ttccaaggatagacaaatgttgtcc

SEQ ID NO: 3287164 - DNA, 25 bp, Homo sapien
tagacaaatgttgtccagtgagtgt

SEQ ID NO: 3287165 - DNA, 25 bp, Homo sapien
catctgcattaccacgacagtcact

SEQ ID NO: 3287166 - DNA, 25 bp, Homo sapien
gttattgcatcatctagctcagggc

SEQ ID NO: 3287167 - DNA, 25 bp, Homo sapien
cttgagttattgcatcatctagctc

SEQ ID NO: 3287168 - DNA, 25 bp, Homo sapien
gagttattgcatcatctagctcagg

SEQ ID NO: 3287169 - DNA, 25 bp, Homo sapien
tattgcatcatctagctcagggcct

SEQ ID NO: 3287170 - DNA, 25 bp, Homo sapien
cccaagatctcttcgatatgaatac

SEQ ID NO: 3287171 - DNA, 25 bp, Homo sapien
caggcagctccaacccatgtatatt

SEQ ID NO: 3287172 - DNA, 25 bp, Homo sapien
tatgaatactgattgggcacaggca

SEQ ID NO: 3287173 - DNA, 25 bp, Homo sapien
tagctactgagaagttattgcgcct

SEQ ID NO: 3287174 - DNA, 25 bp, Homo sapien
tttatgaacaagagataatccaaca

SEQ ID NO: 3287175 - DNA, 25 bp, Homo sapien
tgtaatataccttcaaattcttgta

SEQ ID NO: 3287176 - DNA, 25 bp, Homo sapien
aattgggtaggataagattttctgc

SEQ ID NO: 3287177 - DNA, 25 bp, Homo sapien
gttggatgatataaaccagatgcat

SEQ ID NO: 3287178 - DNA, 25 bp, Homo sapien
gtcatttagatacactccacccgga

SEQ ID NO: 3287179 - DNA, 25 bp, Homo sapien
tgtgaaagactcatgccccttaaga

SEQ ID NO: 3287180 - DNA, 25 bp, Homo sapien
taaactttgccttggattatggcct

SEQ ID NO: 3287181 - DNA, 25 bp, Homo sapien
tgtgagacaggaacttgagatagcc

SEQ ID NO: 3287182 - DNA, 25 bp, Homo sapien
tccttttgaatcaataaggctttca

SEQ ID NO: 3287183 - DNA, 25 bp, Homo sapien
atgtctaagcaattgtggcaagttc

SEQ ID NO: 3287184 - DNA, 25 bp, Homo sapien
ctttatcacttagattggaatattt

SEQ ID NO: 3287185 - DNA, 25 bp, Homo sapien
gcaagttcatcagccctaaagcata

SEQ ID NO: 3287186 - DNA, 25 bp, Homo sapien
gaaaatgtgcccttcggtgtcaact

SEQ ID NO: 3287187 - DNA, 25 bp, Homo sapien
tgtgtggacccatggtatatagccc

SEQ ID NO: 3287188 - DNA, 25 bp, Homo sapien
tgatgcttcgtgctatgtgcctgga

SEQ ID NO: 3287189 - DNA, 25 bp, Homo sapien
tcaaaatgggaatggttacaacgga

SEQ ID NO: 3287190 - DNA, 25 bp, Homo sapien
gaccgacaagagtcactccaagccg

SEQ ID NO: 3287191 - DNA, 25 bp, Homo sapien
gctgcaccttcatttcttgaaggct

SEQ ID NO: 3287192 - DNA, 25 bp, Homo sapien
cttcttctggtgaccgacaagagtc

SEQ ID NO: 3287193 - DNA, 25 bp, Homo sapien
gagtcactccaagccgtctcaaatc

SEQ ID NO: 3287194 - DNA, 25 bp, Homo sapien
tagatatgatctggtggaccgtgag

SEQ ID NO: 3287195 - DNA, 25 bp, Homo sapien
caaatgggttccttgagtgtccaaa

SEQ ID NO: 3287196 - DNA, 25 bp, Homo sapien
tgataaatggtggtaccctgttacc

SEQ ID NO: 3287197 - DNA, 25 bp, Homo sapien
tacaagtaatctgacattgggtaga

SEQ ID NO: 3287198 - DNA, 25 bp, Homo sapien
tgtaggactagccacaccaattgtg

SEQ ID NO: 3287199 - DNA, 25 bp, Homo sapien
tattttgccaaggagctgttattcc

SEQ ID NO: 3287200 - DNA, 25 bp, Homo sapien
caaagaagcaaagatactggccaca

SEQ ID NO: 3287201 - DNA, 25 bp, Homo sapien
tttgagagctgccacacatccgcaa

SEQ ID NO: 3287202 - DNA, 25 bp, Homo sapien
tctgtaggccccagatcctagtggg

SEQ ID NO: 3287203 - DNA, 25 bp, Homo sapien
cctagtgggctatgttctgccaata

SEQ ID NO: 3287204 - DNA, 25 bp, Homo sapien
gaaaatctctgtataccggcccatc

SEQ ID NO: 3287205 - DNA, 25 bp, Homo sapien
gagccacagcgtccattgaactgta

SEQ ID NO: 3287206 - DNA, 25 bp, Homo sapien
cattaactgatagagagcagcagga

SEQ ID NO: 3287207 - DNA, 25 bp, Homo sapien
gcttggcagacgatagccttcctct

SEQ ID NO: 3287208 - DNA, 25 bp, Homo sapien
tgcaggatgcattaaccagcgtctt

SEQ ID NO: 3287209 - DNA, 25 bp, Homo sapien
gggttacgtatcagcttgtccaaca

SEQ ID NO: 3287210 - DNA, 25 bp, Homo sapien
aagtcctctctactagcttgttgaa

SEQ ID NO: 3287211 - DNA, 25 bp, Homo sapien
tattggtaagcatattaaccccgca

SEQ ID NO: 3287212 - DNA, 25 bp, Homo sapien
gtaatttcgtatcccttaaccagca

SEQ ID NO: 3287213 - DNA, 25 bp, Homo sapien
tcagggcaatgagcatacccattac

SEQ ID NO: 3287214 - DNA, 25 bp, Homo sapien
tgtgtcacagtctgacatctatccc

SEQ ID NO: 3287215 - DNA, 25 bp, Homo sapien
acagtctgacatctatcccggcttc

SEQ ID NO: 3287216 - DNA, 25 bp, Homo sapien
tgtcacagtctgacatctatcccgg

SEQ ID NO: 3287217 - DNA, 25 bp, Homo sapien
tcacagtctgacatctatcccggct

SEQ ID NO: 3287218 - DNA, 25 bp, Homo sapien
tcattcgtgggaaagctgatgtgtg

SEQ ID NO: 3287219 - DNA, 25 bp, Homo sapien
gactcattgtcatccggtgtgcttg

SEQ ID NO: 3287220 - DNA, 25 bp, Homo sapien
cagatatctgcaaagagaaggcact

SEQ ID NO: 3287221 - DNA, 25 bp, Homo sapien
gcactgctagtgcatccaataagaa

SEQ ID NO: 3287222 - DNA, 25 bp, Homo sapien
attgtcaagttgggaaagagtagtt

SEQ ID NO: 3287223 - DNA, 25 bp, Homo sapien
gtcaagttgggaaagagtagttcca

SEQ ID NO: 3287224 - DNA, 25 bp, Homo sapien
tgtcaagttgggaaagagtagttcc

SEQ ID NO: 3287225 - DNA, 25 bp, Homo sapien
ttgtcaagttgggaaagagtagttc

SEQ ID NO: 3287226 - DNA, 25 bp, Homo sapien
atcactggcagaagtaaactttcgg

SEQ ID NO: 3287227 - DNA, 25 bp, Homo sapien
tactattccataactccagacatca

SEQ ID NO: 3287228 - DNA, 25 bp, Homo sapien
cacattactattccataactccaga

SEQ ID NO: 3287229 - DNA, 25 bp, Homo sapien
ctttcggaaagctattgcttctggg

SEQ ID NO: 3287230 - DNA, 25 bp, Homo sapien
tctatgcacatagcccatgtcagaa

SEQ ID NO: 3287231 - DNA, 25 bp, Homo sapien
gcaagatctctatgcacatagccca

SEQ ID NO: 3287232 - DNA, 25 bp, Homo sapien
tcagaaaggtacttcattcctgcag

SEQ ID NO: 3287233 - DNA, 25 bp, Homo sapien
gatacctctcagcatgccaacaagc

SEQ ID NO: 3287234 - DNA, 25 bp, Homo sapien
ctgtaaagacaatgtagaaatatta

SEQ ID NO: 3287235 - DNA, 25 bp, Homo sapien
tgtaaagacaatgtagaaatattag

SEQ ID NO: 3287236 - DNA, 25 bp, Homo sapien
gtaaagacaatgtagaaatattagt

SEQ ID NO: 3287237 - DNA, 25 bp, Homo sapien
aatgtatctaaagagccattctcca

SEQ ID NO: 3287238 - DNA, 25 bp, Homo sapien
ttctccatatactctgtcacgatca

SEQ ID NO: 3287239 - DNA, 25 bp, Homo sapien
ctccatatactctgtcacgatcatc

SEQ ID NO: 3287240 - DNA, 25 bp, Homo sapien
cttcaaaaatgtatctaaagagcca

SEQ ID NO: 3287241 - DNA, 25 bp, Homo sapien
gcagaaactcagtcggtttaatctc

SEQ ID NO: 3287242 - DNA, 25 bp, Homo sapien
tataaaggcagaaactcagtcggtt

SEQ ID NO: 3287243 - DNA, 25 bp, Homo sapien
aactcagtcggtttaatctctgcta

SEQ ID NO: 3287244 - DNA, 25 bp, Homo sapien
ctctataaaggcagaaactcagtcg

SEQ ID NO: 3287245 - DNA, 25 bp, Homo sapien
taatagtggtgtatgcaagatctga

SEQ ID NO: 3287246 - DNA, 25 bp, Homo sapien
gacattattcccatgctagttttat

SEQ ID NO: 3287247 - DNA, 25 bp, Homo sapien
cttgtcaagcatgtacagaatgatg

SEQ ID NO: 3287248 - DNA, 25 bp, Homo sapien
gtctatagcatagcttattgtgcag

SEQ ID NO: 3287249 - DNA, 25 bp, Homo sapien
atgtataatttgccatcatacttac

SEQ ID NO: 3287250 - DNA, 25 bp, Homo sapien
cacaccttctaaatggatgatgtta

SEQ ID NO: 3287251 - DNA, 25 bp, Homo sapien
taagggttttgatagccacaggtaa

SEQ ID NO: 3287252 - DNA, 25 bp, Homo sapien
gcttttcagtatagcctactttaag

SEQ ID NO: 3287253 - DNA, 25 bp, Homo sapien
tcacctaggaaatctctgcgttgct

SEQ ID NO: 3287254 - DNA, 25 bp, Homo sapien
tgtctaccgtagtagtaataagaag

SEQ ID NO: 3287255 - DNA, 25 bp, Homo sapien
tctttttctgtctaccgtagtagta

SEQ ID NO: 3287256 - DNA, 25 bp, Homo sapien
ctaccgtagtagtaataagaagaga

SEQ ID NO: 3287257 - DNA, 25 bp, Homo sapien
ttctgtctaccgtagtagtaataag

SEQ ID NO: 3287258 - DNA, 25 bp, Homo sapien
attctggaatgcaaacaaaagttaa

SEQ ID NO: 3287259 - DNA, 25 bp, Homo sapien
taaaaatgaaagtcaaacacattgt

SEQ ID NO: 3287260 - DNA, 25 bp, Homo sapien
aaaatgaaagtcaaacacattgtcg

SEQ ID NO: 3287261 - DNA, 25 bp, Homo sapien
atgaaagtcaaacacattgtcgtac

SEQ ID NO: 3287262 - DNA, 25 bp, Homo sapien
tctcaatggtgatacatgatgcttc

SEQ ID NO: 3287263 - DNA, 25 bp, Homo sapien
tcctcataggtatgtggatcaatgt

SEQ ID NO: 3287264 - DNA, 25 bp, Homo sapien
cgtggacagcttgattgggatcctc

SEQ ID NO: 3287265 - DNA, 25 bp, Homo sapien
taagttcttactcctggcagtttaa

SEQ ID NO: 3287266 - DNA, 25 bp, Homo sapien
gctactaacactgcctcatcaagtt

SEQ ID NO: 3287267 - DNA, 25 bp, Homo sapien
tgcatgacattagacaagacttacg

SEQ ID NO: 3287268 - DNA, 25 bp, Homo sapien
tgctatggtgcaaaaaggctgacat

SEQ ID NO: 3287269 - DNA, 25 bp, Homo sapien
aataagatacgattaggaaatgaac

SEQ ID NO: 3287270 - DNA, 25 bp, Homo sapien
gacctgttcaggtaaattcccacta

SEQ ID NO: 3287271 - DNA, 25 bp, Homo sapien
caagcccgtattctttacaggaatg

SEQ ID NO: 3287272 - DNA, 25 bp, Homo sapien
tcagctattgcctaaagccttccag

SEQ ID NO: 3287273 - DNA, 25 bp, Homo sapien
tgaaccaagattgctgccacaggac

SEQ ID NO: 3287274 - DNA, 25 bp, Homo sapien
ttttgctttgctgtagccacaccgc

SEQ ID NO: 3287275 - DNA, 25 bp, Homo sapien
tcctcttctggatcttgttttgctt

SEQ ID NO: 3287276 - DNA, 25 bp, Homo sapien
cttctggatcttgttttgctttgct

SEQ ID NO: 3287277 - DNA, 25 bp, Homo sapien
tgtgcccattatgaaaatgcatctt

SEQ ID NO: 3287278 - DNA, 25 bp, Homo sapien
tggaacaaagtaagctagaattagc

SEQ ID NO: 3287279 - DNA, 25 bp, Homo sapien
ggaacaaagtaagctagaattagcc

SEQ ID NO: 3287280 - DNA, 25 bp, Homo sapien
tatggccttggtcccttaaaagcaa

SEQ ID NO: 3287281 - DNA, 25 bp, Homo sapien
ttcaaccatagtctgccttcttttc

SEQ ID NO: 3287282 - DNA, 25 bp, Homo sapien
cagtatggccttggtcccttaaaag

SEQ ID NO: 3287283 - DNA, 25 bp, Homo sapien
ttacttctttcaaccatagtctgcc

SEQ ID NO: 3287284 - DNA, 25 bp, Homo sapien
ttcacatgtactaaattttctcctg

SEQ ID NO: 3287285 - DNA, 25 bp, Homo sapien
catcacataggagtgaaagtgggag

SEQ ID NO: 3287286 - DNA, 25 bp, Homo sapien
tataggtggacatcacataggagtg

SEQ ID NO: 3287287 - DNA, 25 bp, Homo sapien
ggtaatacatataggtggacatcac

SEQ ID NO: 3287288 - DNA, 25 bp, Homo sapien
aaaaggaatgccgacggtaatacat

SEQ ID NO: 3287289 - DNA, 25 bp, Homo sapien
catattaggcttggatgggcaacag

SEQ ID NO: 3287290 - DNA, 25 bp, Homo sapien
tattaggcttggatgggcaacagcg

SEQ ID NO: 3287291 - DNA, 25 bp, Homo sapien
ttaggcttggatgggcaacagcgca

SEQ ID NO: 3287292 - DNA, 25 bp, Homo sapien
tggatgggcaacagcgcacagggaa

SEQ ID NO: 3287293 - DNA, 25 bp, Homo sapien
aataacacatcaatacagctcttgt

SEQ ID NO: 3287294 - DNA, 25 bp, Homo sapien
ttaaccgaataaacaataacacatc

SEQ ID NO: 3287295 - DNA, 25 bp, Homo sapien
acaataacacatcaatacagctctt

SEQ ID NO: 3287296 - DNA, 25 bp, Homo sapien
taaccgaataaacaataacacatca

SEQ ID NO: 3287297 - DNA, 25 bp, Homo sapien
tggctttgatcgctggatgctgcaa

SEQ ID NO: 3287298 - DNA, 25 bp, Homo sapien
aaaatgactcccactgtcacagaca

SEQ ID NO: 3287299 - DNA, 25 bp, Homo sapien
gacacagcaattacaggaatctggc

SEQ ID NO: 3287300 - DNA, 25 bp, Homo sapien
gataaccactgccaacaaaatgact

SEQ ID NO: 3287301 - DNA, 25 bp, Homo sapien
tacagaaaatggagcttgtggttaa

SEQ ID NO: 3287302 - DNA, 25 bp, Homo sapien
acagaaaatggagcttgtggttaaa

SEQ ID NO: 3287303 - DNA, 25 bp, Homo sapien
cataatagcatgacagatgcttcct

SEQ ID NO: 3287304 - DNA, 25 bp, Homo sapien
ataatagcatgacagatgcttccta

SEQ ID NO: 3287305 - DNA, 25 bp, Homo sapien
taatagcatgacagatgcttcctac

SEQ ID NO: 3287306 - DNA, 25 bp, Homo sapien
ggtttcaagccctctgcagtaatag

SEQ ID NO: 3287307 - DNA, 25 bp, Homo sapien
gctgctgtacgtgctcgaatttgga

SEQ ID NO: 3287308 - DNA, 25 bp, Homo sapien
gactgaagacaccatagcctgctgc

SEQ ID NO: 3287309 - DNA, 25 bp, Homo sapien
taatcgtgtagctggtctcttggtc

SEQ ID NO: 3287310 - DNA, 25 bp, Homo sapien
tagtaggaagactcatggtggctac

SEQ ID NO: 3287311 - DNA, 25 bp, Homo sapien
taaggtgcgtatgccattcaggtcc

SEQ ID NO: 3287312 - DNA, 25 bp, Homo sapien
tcaggtccagccagtagaaaaatca

SEQ ID NO: 3287313 - DNA, 25 bp, Homo sapien
tattacaaccttgagacctcgacag

SEQ ID NO: 3287314 - DNA, 25 bp, Homo sapien
cttgatttcatactctaggatgatt

SEQ ID NO: 3287315 - DNA, 25 bp, Homo sapien
ttccattgggacgatctggttcttg

SEQ ID NO: 3287316 - DNA, 25 bp, Homo sapien
tgattccattgggacgatctggttc

SEQ ID NO: 3287317 - DNA, 25 bp, Homo sapien
tcatactctaggatgattccattgg

SEQ ID NO: 3287318 - DNA, 25 bp, Homo sapien
taaataaggagcagtatgattaata

SEQ ID NO: 3287319 - DNA, 25 bp, Homo sapien
gtttaaataaggagcagtatgatta

SEQ ID NO: 3287320 - DNA, 25 bp, Homo sapien
tagtttaaataaggagcagtatgat

SEQ ID NO: 3287321 - DNA, 25 bp, Homo sapien
aaatagtttaaataaggagcagtat

SEQ ID NO: 3287322 - DNA, 25 bp, Homo sapien
aaaatgactgctctccgcatgctgc

SEQ ID NO: 3287323 - DNA, 25 bp, Homo sapien
caccatagataagatgaactgtgga

SEQ ID NO: 3287324 - DNA, 25 bp, Homo sapien
cgattaacggtacacacaaaatgac

SEQ ID NO: 3287325 - DNA, 25 bp, Homo sapien
tccgcatgctgcaccatagataaga

SEQ ID NO: 3287326 - DNA, 25 bp, Homo sapien
cagtccatgatttgtatccattgtt

SEQ ID NO: 3287327 - DNA, 25 bp, Homo sapien
gatcagtccatgatttgtatccatt

SEQ ID NO: 3287328 - DNA, 25 bp, Homo sapien
taggcgtcttggatcagtccatgat

SEQ ID NO: 3287329 - DNA, 25 bp, Homo sapien
tagatttgtgtaataggcgtcttgg

SEQ ID NO: 3287330 - DNA, 25 bp, Homo sapien
tggctgctggaaaccccagatctgg

SEQ ID NO: 3287331 - DNA, 25 bp, Homo sapien
tttccgcttgttatctgaaaaatca

SEQ ID NO: 3287332 - DNA, 25 bp, Homo sapien
aagcacttgtctagatgttgcactg

SEQ ID NO: 3287333 - DNA, 25 bp, Homo sapien
cagatctggagttgaggagagcttc

SEQ ID NO: 3287334 - DNA, 25 bp, Homo sapien
ctgttattttttgagagtaagaatc

SEQ ID NO: 3287335 - DNA, 25 bp, Homo sapien
tttgagagtaagaatcaattgcatt

SEQ ID NO: 3287336 - DNA, 25 bp, Homo sapien
tgagagtaagaatcaattgcatttt

SEQ ID NO: 3287337 - DNA, 25 bp, Homo sapien
ttttttgagagtaagaatcaattgc

SEQ ID NO: 3287338 - DNA, 25 bp, Homo sapien
tttctttccaatttgatttctgttg

SEQ ID NO: 3287339 - DNA, 25 bp, Homo sapien
tttccaatttgatttctgttgtaat

SEQ ID NO: 3287340 - DNA, 25 bp, Homo sapien
ctttctttccaatttgatttctgtt

SEQ ID NO: 3287341 - DNA, 25 bp, Homo sapien
tctttccaatttgatttctgttgta

SEQ ID NO: 3287342 - DNA, 25 bp, Homo sapien
tatctgattgtaagcatagactcct

SEQ ID NO: 3287343 - DNA, 25 bp, Homo sapien
ggaatatctgattgtaagcatagac

SEQ ID NO: 3287344 - DNA, 25 bp, Homo sapien
gtaagcatagactcctcatccatgt

SEQ ID NO: 3287345 - DNA, 25 bp, Homo sapien
gattgtaagcatagactcctcatcc

SEQ ID NO: 3287346 - DNA, 25 bp, Homo sapien
tttgagatccagaaacggcaatgct

SEQ ID NO: 3287347 - DNA, 25 bp, Homo sapien
gcttcagatataccaaaccaacggg

SEQ ID NO: 3287348 - DNA, 25 bp, Homo sapien
taaaagctctggtagggaagcctgt

SEQ ID NO: 3287349 - DNA, 25 bp, Homo sapien
tcatcaggccagatctgtggtagcg

SEQ ID NO: 3287350 - DNA, 25 bp, Homo sapien
gagtagatccaccatcatgacagag

SEQ ID NO: 3287351 - DNA, 25 bp, Homo sapien
tgtcagcaggcggaatccattccag

SEQ ID NO: 3287352 - DNA, 25 bp, Homo sapien
ttacagacacatactgccgggctcc

SEQ ID NO: 3287353 - DNA, 25 bp, Homo sapien
tgacagaggtgtttttcaggccgct

SEQ ID NO: 3287354 - DNA, 25 bp, Homo sapien
cttgaccatgtttgaatcctatgaa

SEQ ID NO: 3287355 - DNA, 25 bp, Homo sapien
ttgaccatgtttgaatcctatgaat

SEQ ID NO: 3287356 - DNA, 25 bp, Homo sapien
gaccatgtttgaatcctatgaattt

SEQ ID NO: 3287357 - DNA, 25 bp, Homo sapien
tgaccatgtttgaatcctatgaatt

SEQ ID NO: 3287358 - DNA, 25 bp, Homo sapien
caaattagtgctcatttgacaacac

SEQ ID NO: 3287359 - DNA, 25 bp, Homo sapien
aaagtgctaagcagtccttgccacc

SEQ ID NO: 3287360 - DNA, 25 bp, Homo sapien
cagtattagaaattcacacacctgg

SEQ ID NO: 3287361 - DNA, 25 bp, Homo sapien
gttgtctagccaacattttccctat

SEQ ID NO: 3287362 - DNA, 25 bp, Homo sapien
tagacactatgaaattcagataaaa

SEQ ID NO: 3287363 - DNA, 25 bp, Homo sapien
gacactatgaaattcagataaaatt

SEQ ID NO: 3287364 - DNA, 25 bp, Homo sapien
tgaaatttagacactatgaaattca

SEQ ID NO: 3287365 - DNA, 25 bp, Homo sapien
aatttagacactatgaaattcagat

SEQ ID NO: 3287366 - DNA, 25 bp, Homo sapien
gcttgatttgctacagagactttct

SEQ ID NO: 3287367 - DNA, 25 bp, Homo sapien
gctgcttgagaaccctagcaaaaaa

SEQ ID NO: 3287368 - DNA, 25 bp, Homo sapien
gcagctacaactttctgggacctaa

SEQ ID NO: 3287369 - DNA, 25 bp, Homo sapien
ttagaacaagatggtgaaggctcca

SEQ ID NO: 3287370 - DNA, 25 bp, Homo sapien
gaaaatggatacttctaacaatgag

SEQ ID NO: 3287371 - DNA, 25 bp, Homo sapien
actgggaagtagattatcaaagtca

SEQ ID NO: 3287372 - DNA, 25 bp, Homo sapien
catgtttagctagcatgaacactga

SEQ ID NO: 3287373 - DNA, 25 bp, Homo sapien
tactagactataacaggctccatca

SEQ ID NO: 3287374 - DNA, 25 bp, Homo sapien
tgaagcttcctcatgggtataactg

SEQ ID NO: 3287375 - DNA, 25 bp, Homo sapien
gaggtggacatttgccgcagctctg

SEQ ID NO: 3287376 - DNA, 25 bp, Homo sapien
gcatgccattgtgggtggatcagac

SEQ ID NO: 3287377 - DNA, 25 bp, Homo sapien
ggtgaggctttgaagaacccaggtc

SEQ ID NO: 3287378 - DNA, 25 bp, Homo sapien
ctgtcaaaagaaataagagactaag

SEQ ID NO: 3287379 - DNA, 25 bp, Homo sapien
tgtcaaaagaaataagagactaagc

SEQ ID NO: 3287380 - DNA, 25 bp, Homo sapien
caaaagaaataagagactaagcttt

SEQ ID NO: 3287381 - DNA, 25 bp, Homo sapien
gtcaaaagaaataagagactaagct

SEQ ID NO: 3287382 - DNA, 25 bp, Homo sapien
attctgccattcctaggaaagtggc

SEQ ID NO: 3287383 - DNA, 25 bp, Homo sapien
tgttccagttctttgaaccaactgc

SEQ ID NO: 3287384 - DNA, 25 bp, Homo sapien
tcagcattgttccagttctttgaac

SEQ ID NO: 3287385 - DNA, 25 bp, Homo sapien
gcattgttccagttctttgaaccaa

SEQ ID NO: 3287386 - DNA, 25 bp, Homo sapien
tccagttctttgaaccaactgccat

SEQ ID NO: 3287387 - DNA, 25 bp, Homo sapien
aacatgagaaagatctataccctag

SEQ ID NO: 3287388 - DNA, 25 bp, Homo sapien
taaaagaatattccgatgctgatga

SEQ ID NO: 3287389 - DNA, 25 bp, Homo sapien
gccagttctggtatggacacacatc

SEQ ID NO: 3287390 - DNA, 25 bp, Homo sapien
gcataaagccaattggatggtaagt

SEQ ID NO: 3287391 - DNA, 25 bp, Homo sapien
cctctccatgaaaataggcatgtaa

SEQ ID NO: 3287392 - DNA, 25 bp, Homo sapien
tctccaatgggatcaggttcacagt

SEQ ID NO: 3287393 - DNA, 25 bp, Homo sapien
caaagcattaagttacgtttctatg

SEQ ID NO: 3287394 - DNA, 25 bp, Homo sapien
tagtaatagcctcaacatgactgta

SEQ ID NO: 3287395 - DNA, 25 bp, Homo sapien
accagttggtggtgacaagaacggc

SEQ ID NO: 3287396 - DNA, 25 bp, Homo sapien
cagccgctaaatccaaggttgaaaa

SEQ ID NO: 3287397 - DNA, 25 bp, Homo sapien
aagaggaagtactcagccgctaaat

SEQ ID NO: 3287398 - DNA, 25 bp, Homo sapien
tgaagatgtgcctcgaaagctgttg

SEQ ID NO: 3287399 - DNA, 25 bp, Homo sapien
ttacttgtgactggacctctggtcc

SEQ ID NO: 3287400 - DNA, 25 bp, Homo sapien
cttactgatgcttacttcaagaaga

SEQ ID NO: 3287401 - DNA, 25 bp, Homo sapien
ttgccacctcaaccaaaatcgatat

SEQ ID NO: 3287402 - DNA, 25 bp, Homo sapien
cacctcaaccaaaatcgatatcagc

SEQ ID NO: 3287403 - DNA, 25 bp, Homo sapien
caaccaaaatcgatatcagcaatgt

SEQ ID NO: 3287404 - DNA, 25 bp, Homo sapien
tattgatttctttacgggtgcactt

SEQ ID NO: 3287405 - DNA, 25 bp, Homo sapien
tctttacgggtgcactttatattaa

SEQ ID NO: 3287406 - DNA, 25 bp, Homo sapien
catttaatttgctgccactatcatt

SEQ ID NO: 3287407 - DNA, 25 bp, Homo sapien
aatgtcttttctacctattgaacct

SEQ ID NO: 3287408 - DNA, 25 bp, Homo sapien
tctgtacacacttttcccatgagag

SEQ ID NO: 3287409 - DNA, 25 bp, Homo sapien
tcacgatcgaatttctctgtacaca

SEQ ID NO: 3287410 - DNA, 25 bp, Homo sapien
tgttatcagactttatgtaagttct

SEQ ID NO: 3287411 - DNA, 25 bp, Homo sapien
cacttttcccatgagagctgttctg

SEQ ID NO: 3287412 - DNA, 25 bp, Homo sapien
tcacggtaacaatatggaacatgtc

SEQ ID NO: 3287413 - DNA, 25 bp, Homo sapien
tgaccagaaagaaatcacgaggttt

SEQ ID NO: 3287414 - DNA, 25 bp, Homo sapien
tataaaacatcctagagacctgccc

SEQ ID NO: 3287415 - DNA, 25 bp, Homo sapien
gccaagtccccgtatttgtccatca

SEQ ID NO: 3287416 - DNA, 25 bp, Homo sapien
cccacactgccattagaaaatttca

SEQ ID NO: 3287417 - DNA, 25 bp, Homo sapien
tatgtccacattcctaggatacagg

SEQ ID NO: 3287418 - DNA, 25 bp, Homo sapien
gaataagtgataatgtctaacgaga

SEQ ID NO: 3287419 - DNA, 25 bp, Homo sapien
ggctggatagagtgcctactacaat

SEQ ID NO: 3287420 - DNA, 25 bp, Homo sapien
caagatttttatgagctagttagag

SEQ ID NO: 3287421 - DNA, 25 bp, Homo sapien
ttcatgtggttaaactactagggca

SEQ ID NO: 3287422 - DNA, 25 bp, Homo sapien
tgagccactgccaatatctcacaag

SEQ ID NO: 3287423 - DNA, 25 bp, Homo sapien
gcctcttacaagcagcgtatttccc

SEQ ID NO: 3287424 - DNA, 25 bp, Homo sapien
tgcaccagaagtacgaatgatcgac

SEQ ID NO: 3287425 - DNA, 25 bp, Homo sapien
taattgccttggttgtgcctcacaa

SEQ ID NO: 3287426 - DNA, 25 bp, Homo sapien
cattttcctcgctgtgcaatcatct

SEQ ID NO: 3287427 - DNA, 25 bp, Homo sapien
tcttcactctgactggttttggcag

SEQ ID NO: 3287428 - DNA, 25 bp, Homo sapien
tactcctgccatcaaggtgtatgtg

SEQ ID NO: 3287429 - DNA, 25 bp, Homo sapien
tgtaaaaggccatgtgtcaactcca

SEQ ID NO: 3287430 - DNA, 25 bp, Homo sapien
ccatatgttaatgagctgcctagca

SEQ ID NO: 3287431 - DNA, 25 bp, Homo sapien
gactcactgcttggtcacctggatt

SEQ ID NO: 3287432 - DNA, 25 bp, Homo sapien
tcttcctagagtgccatcacatacc

SEQ ID NO: 3287433 - DNA, 25 bp, Homo sapien
tcataccgactacatgtgtgaaaca

SEQ ID NO: 3287434 - DNA, 25 bp, Homo sapien
taccagcaagcgttaatcataccga

SEQ ID NO: 3287435 - DNA, 25 bp, Homo sapien
caaagcaagccctcaagatgtattt

SEQ ID NO: 3287436 - DNA, 25 bp, Homo sapien
tgcagatctggaggcaaactcttac

SEQ ID NO: 3287437 - DNA, 25 bp, Homo sapien
cattaaatctttcacggttgccaga

SEQ ID NO: 3287438 - DNA, 25 bp, Homo sapien
tgaaatattacactgcaagtcagac

SEQ ID NO: 3287439 - DNA, 25 bp, Homo sapien
ttatacaatgaaggttactagtccc

SEQ ID NO: 3287440 - DNA, 25 bp, Homo sapien
tcacagaatggttgacacaggagcc

SEQ ID NO: 3287441 - DNA, 25 bp, Homo sapien
caagtgtcgtaccacagaagggcat

SEQ ID NO: 3287442 - DNA, 25 bp, Homo sapien
tagtatacacgcacagaaaccagag

SEQ ID NO: 3287443 - DNA, 25 bp, Homo sapien
cattttgggaggttcatcggtcaca

SEQ ID NO: 3287444 - DNA, 25 bp, Homo sapien
cactttgcatacttggtatgtgtgg

SEQ ID NO: 3287445 - DNA, 25 bp, Homo sapien
gataggggcataattttcatccact

SEQ ID NO: 3287446 - DNA, 25 bp, Homo sapien
catccacttcaccaatctcttccca

SEQ ID NO: 3287447 - DNA, 25 bp, Homo sapien
tgcatacttggtatgtgtggatagg

SEQ ID NO: 3287448 - DNA, 25 bp, Homo sapien
gatccccagcctatacatcgttttt

SEQ ID NO: 3287449 - DNA, 25 bp, Homo sapien
ccagatccccagcctatacatcgtt

SEQ ID NO: 3287450 - DNA, 25 bp, Homo sapien
agatccccagcctatacatcgtttt

SEQ ID NO: 3287451 - DNA, 25 bp, Homo sapien
cagatccccagcctatacatcgttt

SEQ ID NO: 3287452 - DNA, 25 bp, Homo sapien
tcatacttaggtgatggtagcctcc

SEQ ID NO: 3287453 - DNA, 25 bp, Homo sapien
cattgtgagacattagagatggtcc

SEQ ID NO: 3287454 - DNA, 25 bp, Homo sapien
ggtaccactgtatatggagacacct

SEQ ID NO: 3287455 - DNA, 25 bp, Homo sapien
gggcacacacccacgattaagaatt

SEQ ID NO: 3287456 - DNA, 25 bp, Homo sapien
tggaaaagcaatccatcccaggtcc

SEQ ID NO: 3287457 - DNA, 25 bp, Homo sapien
ggaaaagcaatccatcccaggtccc

SEQ ID NO: 3287458 - DNA, 25 bp, Homo sapien
acagtgcgtgaatccaataaattca

SEQ ID NO: 3287459 - DNA, 25 bp, Homo sapien
gacagtgcgtgaatccaataaattc

SEQ ID NO: 3287460 - DNA, 25 bp, Homo sapien
agatatacagctgtccagcctctct

SEQ ID NO: 3287461 - DNA, 25 bp, Homo sapien
cattcagcacagatgtaatttcttg

SEQ ID NO: 3287462 - DNA, 25 bp, Homo sapien
agcctctctccatggtcccattcag

SEQ ID NO: 3287463 - DNA, 25 bp, Homo sapien
tctgtgggaacaaaccccagatata

SEQ ID NO: 3287464 - DNA, 25 bp, Homo sapien
ttttctgtggggtcctgcggattta

SEQ ID NO: 3287465 - DNA, 25 bp, Homo sapien
tctcttttcttgttcagtaatgtcc

SEQ ID NO: 3287466 - DNA, 25 bp, Homo sapien
tggtgaggaaatgattttactgtcc

SEQ ID NO: 3287467 - DNA, 25 bp, Homo sapien
ttgttcagtaatgtcctggtgagga

SEQ ID NO: 3287468 - DNA, 25 bp, Homo sapien
ttcaacaccttaggagaccggcgct

SEQ ID NO: 3287469 - DNA, 25 bp, Homo sapien
gccccatctccgtgtagtccaagtt

SEQ ID NO: 3287470 - DNA, 25 bp, Homo sapien
gcaccaggtggtaaggtacatctca

SEQ ID NO: 3287471 - DNA, 25 bp, Homo sapien
tgtgttccacaagattccagctctg

SEQ ID NO: 3287472 - DNA, 25 bp, Homo sapien
ccacctaagttctccccttccatca

SEQ ID NO: 3287473 - DNA, 25 bp, Homo sapien
tccacctaagttctccccttccatc

SEQ ID NO: 3287474 - DNA, 25 bp, Homo sapien
ttctaaccaagagcgactccctttc

SEQ ID NO: 3287475 - DNA, 25 bp, Homo sapien
caaagctgttataatcctccagacg

SEQ ID NO: 3287476 - DNA, 25 bp, Homo sapien
ctttcggtggaataagacagttaat

SEQ ID NO: 3287477 - DNA, 25 bp, Homo sapien
tcaaacgaggatgcccctttcggtg

SEQ ID NO: 3287478 - DNA, 25 bp, Homo sapien
gacagttaataaaagagcctcctcc

SEQ ID NO: 3287479 - DNA, 25 bp, Homo sapien
tgttaataaaaggtctacgactctc

SEQ ID NO: 3287480 - DNA, 25 bp, Homo sapien
caattgtttggcttaagcatgagag

SEQ ID NO: 3287481 - DNA, 25 bp, Homo sapien
gagaaagttcatgggatgagggcag

SEQ ID NO: 3287482 - DNA, 25 bp, Homo sapien
aggtctacgactctcaaaaacattt

SEQ ID NO: 3287483 - DNA, 25 bp, Homo sapien
ccggtctagtgtcccgtgcccagga

SEQ ID NO: 3287484 - DNA, 25 bp, Homo sapien
gctgcttcatctttccggtctagtg

SEQ ID NO: 3287485 - DNA, 25 bp, Homo sapien
ttttgagcctcacgcgtcgcatcca

SEQ ID NO: 3287486 - DNA, 25 bp, Homo sapien
aaggttttgagcctcacgcgtcgca

SEQ ID NO: 3287487 - DNA, 25 bp, Homo sapien
actgcgatttagtctgcagcagcag

SEQ ID NO: 3287488 - DNA, 25 bp, Homo sapien
tttgagatgagactgcgatttagtc

SEQ ID NO: 3287489 - DNA, 25 bp, Homo sapien
gatgagactgcgatttagtctgcag

SEQ ID NO: 3287490 - DNA, 25 bp, Homo sapien
gagactgcgatttagtctgcagcag

SEQ ID NO: 3287491 - DNA, 25 bp, Homo sapien
cccgtcgaggtgcagagtagcagcc

SEQ ID NO: 3287492 - DNA, 25 bp, Homo sapien
ggctggccaggagggtccggagtgc

SEQ ID NO: 3287493 - DNA, 25 bp, Homo sapien
cgcacaggagaaggcacgtccagag

SEQ ID NO: 3287494 - DNA, 25 bp, Homo sapien
agggtccggagtgcggcgcacagga

SEQ ID NO: 3287495 - DNA, 25 bp, Homo sapien
gctgcgaagtcgaggttgaaactgc

SEQ ID NO: 3287496 - DNA, 25 bp, Homo sapien
tgcagatctggactcggatcaaggg

SEQ ID NO: 3287497 - DNA, 25 bp, Homo sapien
caaatgtaggaaccacggatccggc

SEQ ID NO: 3287498 - DNA, 25 bp, Homo sapien
aatgaaaaacaggagagcagcgagc

SEQ ID NO: 3287499 - DNA, 25 bp, Homo sapien
tgtcaccatgcataagcctgcaagg

SEQ ID NO: 3287500 - DNA, 25 bp, Homo sapien
cctgcaaggctaactggagagagta

SEQ ID NO: 3287501 - DNA, 25 bp, Homo sapien
gaccctaatcccctaatcaagagtg

SEQ ID NO: 3287502 - DNA, 25 bp, Homo sapien
tgctgtccctggtaagtggctgata

SEQ ID NO: 3287503 - DNA, 25 bp, Homo sapien
tagtccatctcctagttccaaaagt

SEQ ID NO: 3287504 - DNA, 25 bp, Homo sapien
agtccatctcctagttccaaaagtc

SEQ ID NO: 3287505 - DNA, 25 bp, Homo sapien
cgcagaaaatatgatgtttgagcaa

SEQ ID NO: 3287506 - DNA, 25 bp, Homo sapien
gatgtcagtggtagcgacctctagt

SEQ ID NO: 3287507 - DNA, 25 bp, Homo sapien
cttgttcacttcaaactgttccttc

SEQ ID NO: 3287508 - DNA, 25 bp, Homo sapien
cagtttccactgatgtcagtggtag

SEQ ID NO: 3287509 - DNA, 25 bp, Homo sapien
tattctaccaggacaacttgagcaa

SEQ ID NO: 3287510 - DNA, 25 bp, Homo sapien
ttattctaccaggacaacttgagca

SEQ ID NO: 3287511 - DNA, 25 bp, Homo sapien
gcttttgaattcaccgcatcatgca

SEQ ID NO: 3287512 - DNA, 25 bp, Homo sapien
tgaatggttgccagaatgtattttt

SEQ ID NO: 3287513 - DNA, 25 bp, Homo sapien
acattgcagaaagcgttgttaattc

SEQ ID NO: 3287514 - DNA, 25 bp, Homo sapien
ttttaatgaataacgccctttggca

SEQ ID NO: 3287515 - DNA, 25 bp, Homo sapien
tttcttatagtcacaccgactggca

SEQ ID NO: 3287516 - DNA, 25 bp, Homo sapien
tcttatagtcacaccgactggcatc

SEQ ID NO: 3287517 - DNA, 25 bp, Homo sapien
ttcttatagtcacaccgactggcat

SEQ ID NO: 3287518 - DNA, 25 bp, Homo sapien
cttatagtcacaccgactggcatct

SEQ ID NO: 3287519 - DNA, 25 bp, Homo sapien
tggctcgtgcctggaattgcaaccc

SEQ ID NO: 3287520 - DNA, 25 bp, Homo sapien
tttacgcaaaccttgattgacctgc

SEQ ID NO: 3287521 - DNA, 25 bp, Homo sapien
tcatgacagttgtgttaaggagctc

SEQ ID NO: 3287522 - DNA, 25 bp, Homo sapien
tgcttaactaggaatcaccggagcc

SEQ ID NO: 3287523 - DNA, 25 bp, Homo sapien
gagaccactttacggctttcaccat

SEQ ID NO: 3287524 - DNA, 25 bp, Homo sapien
tcttggagtattttgccgcctttga

SEQ ID NO: 3287525 - DNA, 25 bp, Homo sapien
caggtaggagagaccactttacggc

SEQ ID NO: 3287526 - DNA, 25 bp, Homo sapien
ttggagtattttgccgcctttgatg

SEQ ID NO: 3287527 - DNA, 25 bp, Homo sapien
tttctgaagcattgggaagctgcca

SEQ ID NO: 3287528 - DNA, 25 bp, Homo sapien
tctgaaagtttctgaagcattggga

SEQ ID NO: 3287529 - DNA, 25 bp, Homo sapien
caggttaaatatgttatatgatgga

SEQ ID NO: 3287530 - DNA, 25 bp, Homo sapien
agctgccatctaaaatgaccagttg

SEQ ID NO: 3287531 - DNA, 25 bp, Homo sapien
cacaccagtcccgtctggtgctgac

SEQ ID NO: 3287532 - DNA, 25 bp, Homo sapien
tcccgtctggtgctgacctgctttg

SEQ ID NO: 3287533 - DNA, 25 bp, Homo sapien
gttgcttcaccagatgtgaaggttg

SEQ ID NO: 3287534 - DNA, 25 bp, Homo sapien
ttcaccagatgtgaaggttgctgcc

SEQ ID NO: 3287535 - DNA, 25 bp, Homo sapien
caagtgttgtgtcagggacccgaaa

SEQ ID NO: 3287536 - DNA, 25 bp, Homo sapien
cagggacccgaaaggacatgattga

SEQ ID NO: 3287537 - DNA, 25 bp, Homo sapien
gccaggcatggaaagatatagtttg

SEQ ID NO: 3287538 - DNA, 25 bp, Homo sapien
gataatgaatgggtctcacgagatt

SEQ ID NO: 3287539 - DNA, 25 bp, Homo sapien
gttaagtgggtctcttgaagccaac

SEQ ID NO: 3287540 - DNA, 25 bp, Homo sapien
caaagttagtattcatgtgttgagg

SEQ ID NO: 3287541 - DNA, 25 bp, Homo sapien
tctagtggtagttaatgaatctggg

SEQ ID NO: 3287542 - DNA, 25 bp, Homo sapien
aatagatactcctgcatgattttgg

SEQ ID NO: 3287543 - DNA, 25 bp, Homo sapien
gaacagacagattccacctccactt

SEQ ID NO: 3287544 - DNA, 25 bp, Homo sapien
ctcttgctctagcttggagggagaa

SEQ ID NO: 3287545 - DNA, 25 bp, Homo sapien
tgtcagaggcaactgtctcttgctc

SEQ ID NO: 3287546 - DNA, 25 bp, Homo sapien
acatatagctatcacatcttggctg

SEQ ID NO: 3287547 - DNA, 25 bp, Homo sapien
tcctcaccaatacaataggaatctg

SEQ ID NO: 3287548 - DNA, 25 bp, Homo sapien
tgttcctcctcaccaatacaatagg

SEQ ID NO: 3287549 - DNA, 25 bp, Homo sapien
ggaatctggcatactataaatatta

SEQ ID NO: 3287550 - DNA, 25 bp, Homo sapien
caatacaataggaatctggcatact

SEQ ID NO: 3287551 - DNA, 25 bp, Homo sapien
tcagcaaggcgatgaccattgagaa

SEQ ID NO: 3287552 - DNA, 25 bp, Homo sapien
caaggcgatgaccattgagaagcat

SEQ ID NO: 3287553 - DNA, 25 bp, Homo sapien
cccatcagcaaggcgatgaccattg

SEQ ID NO: 3287554 - DNA, 25 bp, Homo sapien
gcaaggcgatgaccattgagaagca

SEQ ID NO: 3287555 - DNA, 25 bp, Homo sapien
ctcataaacacgcaaagcagctctg

SEQ ID NO: 3287556 - DNA, 25 bp, Homo sapien
tagcgtcttttatttatagagttcc

SEQ ID NO: 3287557 - DNA, 25 bp, Homo sapien
caagagtggtgaaataatagcgtct

SEQ ID NO: 3287558 - DNA, 25 bp, Homo sapien
tcaaaggaagcagtagtcatgatct

SEQ ID NO: 3287559 - DNA, 25 bp, Homo sapien
atatgccttaaccaagagtttaata

SEQ ID NO: 3287560 - DNA, 25 bp, Homo sapien
ccttaaccaagagtttaatatcact

SEQ ID NO: 3287561 - DNA, 25 bp, Homo sapien
tttatatgccttaaccaagagttta

SEQ ID NO: 3287562 - DNA, 25 bp, Homo sapien
tatatgccttaaccaagagtttaat

SEQ ID NO: 3287563 - DNA, 25 bp, Homo sapien
aaattcatgttgcactgaagctcat

SEQ ID NO: 3287564 - DNA, 25 bp, Homo sapien
actcattcagcatattggcattaga

SEQ ID NO: 3287565 - DNA, 25 bp, Homo sapien
gaagctcattgtttgcaaactcatt

SEQ ID NO: 3287566 - DNA, 25 bp, Homo sapien
gctcattgtttgcaaactcattcag

SEQ ID NO: 3287567 - DNA, 25 bp, Homo sapien
aaaagaacctctccacagcaagtga

SEQ ID NO: 3287568 - DNA, 25 bp, Homo sapien
tatcaactgagtacacgacaaccta

SEQ ID NO: 3287569 - DNA, 25 bp, Homo sapien
aaataatgccatactcctacagcca

SEQ ID NO: 3287570 - DNA, 25 bp, Homo sapien
gaccgtttccttacaccagacacaa

SEQ ID NO: 3287571 - DNA, 25 bp, Homo sapien
actcttgaggacaccattaacccaa

SEQ ID NO: 3287572 - DNA, 25 bp, Homo sapien
aaaatcagcactacattccctgcct

SEQ ID NO: 3287573 - DNA, 25 bp, Homo sapien
accattaacccaaaatcagcactac

SEQ ID NO: 3287574 - DNA, 25 bp, Homo sapien
ctcttgaggacaccattaacccaaa

SEQ ID NO: 3287575 - DNA, 25 bp, Homo sapien
atttgtgcattagactcagtttgga

SEQ ID NO: 3287576 - DNA, 25 bp, Homo sapien
ttttcctacttgcatagtacctcct

SEQ ID NO: 3287577 - DNA, 25 bp, Homo sapien
tcctacttgcatagtacctcctcat

SEQ ID NO: 3287578 - DNA, 25 bp, Homo sapien
caaatctaatttgtgcattagactc

SEQ ID NO: 3287579 - DNA, 25 bp, Homo sapien
actgagagccatcccagtaacccga

SEQ ID NO: 3287580 - DNA, 25 bp, Homo sapien
gccccccaactatgagatgctcaag

SEQ ID NO: 3287581 - DNA, 25 bp, Homo sapien
gtgatccacatccgcaacgagacct

SEQ ID NO: 3287582 - DNA, 25 bp, Homo sapien
tccgtgcccgaccatgttgtctggt

SEQ ID NO: 3287583 - DNA, 25 bp, Homo sapien
ggagctctgcccatgacctgtatcc

SEQ ID NO: 3287584 - DNA, 25 bp, Homo sapien
caggagctctgcccatgacctgtat

SEQ ID NO: 3287585 - DNA, 25 bp, Homo sapien
tgaggccaggagctctgcccatgac

SEQ ID NO: 3287586 - DNA, 25 bp, Homo sapien
gctctgcccatgacctgtatcccat

SEQ ID NO: 3287587 - DNA, 25 bp, Homo sapien
catctacataaggtggcatgcttgt

SEQ ID NO: 3287588 - DNA, 25 bp, Homo sapien
ttttcccggtgttttcatctacata

SEQ ID NO: 3287589 - DNA, 25 bp, Homo sapien
tgttttctgattactcccatgatcc

SEQ ID NO: 3287590 - DNA, 25 bp, Homo sapien
gattactcccatgatcccaatgcct

SEQ ID NO: 3287591 - DNA, 25 bp, Homo sapien
gatgattttcagagtcgggattggc

SEQ ID NO: 3287592 - DNA, 25 bp, Homo sapien
tttcagagtcgggattggcttgcag

SEQ ID NO: 3287593 - DNA, 25 bp, Homo sapien
ttggcttgcaggattgctctctttt

SEQ ID NO: 3287594 - DNA, 25 bp, Homo sapien
tagtgatgattttcagagtcgggat

SEQ ID NO: 3287595 - DNA, 25 bp, Homo sapien
cccaaatccggcaactcgcttgtgt

SEQ ID NO: 3287596 - DNA, 25 bp, Homo sapien
gattcttgaccccaaatccggcaac

SEQ ID NO: 3287597 - DNA, 25 bp, Homo sapien
ccagcactgattcttgaccccaaat

SEQ ID NO: 3287598 - DNA, 25 bp, Homo sapien
caactcgcttgtgtcacttgactca

SEQ ID NO: 3287599 - DNA, 25 bp, Homo sapien
tccagactatgggagataaggacat

SEQ ID NO: 3287600 - DNA, 25 bp, Homo sapien
actatgggagataaggacatggaga

SEQ ID NO: 3287601 - DNA, 25 bp, Homo sapien
tcagtttattttggctgtccagact

SEQ ID NO: 3287602 - DNA, 25 bp, Homo sapien
ttttggctgtccagactatgggaga

SEQ ID NO: 3287603 - DNA, 25 bp, Homo sapien
catcattgctaatttcaatacagac

SEQ ID NO: 3287604 - DNA, 25 bp, Homo sapien
tacagacatcattgctgccggtgca

SEQ ID NO: 3287605 - DNA, 25 bp, Homo sapien
gccggtgcaattgttcttcctctcc

SEQ ID NO: 3287606 - DNA, 25 bp, Homo sapien
tttcaatacagacatcattgctgcc

SEQ ID NO: 3287607 - DNA, 25 bp, Homo sapien
tgatgccagggtttactgtcgcagg

SEQ ID NO: 3287608 - DNA, 25 bp, Homo sapien
gctggcttagcaattggcactagtg

SEQ ID NO: 3287609 - DNA, 25 bp, Homo sapien
gagtctatgggtatcagcctggtgc

SEQ ID NO: 3287610 - DNA, 25 bp, Homo sapien
ttataggagcaatcttggagcctgg

SEQ ID NO: 3287611 - DNA, 25 bp, Homo sapien
tcctccacgtgtataaggagatttg

SEQ ID NO: 3287612 - DNA, 25 bp, Homo sapien
tatctcctccacgtgtataaggaga

SEQ ID NO: 3287613 - DNA, 25 bp, Homo sapien
gtgtataaggagatttgcagcttcc

SEQ ID NO: 3287614 - DNA, 25 bp, Homo sapien
cacgtgtataaggagatttgcagct

SEQ ID NO: 3287615 - DNA, 25 bp, Homo sapien
gtaaggcgttttatttgcaagccat

SEQ ID NO: 3287616 - DNA, 25 bp, Homo sapien
actgcccctggaagtactgacttcc

SEQ ID NO: 3287617 - DNA, 25 bp, Homo sapien
gcataggaaatatcttccctgaata

SEQ ID NO: 3287618 - DNA, 25 bp, Homo sapien
gacttccagatgtaaggcgttttat

SEQ ID NO: 3287619 - DNA, 25 bp, Homo sapien
cagaaaagatttgatgcactattgc

SEQ ID NO: 3287620 - DNA, 25 bp, Homo sapien
acagaaaagatttgatgcactattg

SEQ ID NO: 3287621 - DNA, 25 bp, Homo sapien
gcacagaaaagatttgatgcactat

SEQ ID NO: 3287622 - DNA, 25 bp, Homo sapien
cacagaaaagatttgatgcactatt

SEQ ID NO: 3287623 - DNA, 25 bp, Homo sapien
gtgaacaataacacgtatcacccat

SEQ ID NO: 3287624 - DNA, 25 bp, Homo sapien
tgttccagtgaacaataacacgtat

SEQ ID NO: 3287625 - DNA, 25 bp, Homo sapien
tggcacattatagatcatttgttcc

SEQ ID NO: 3287626 - DNA, 25 bp, Homo sapien
tccagtgaacaataacacgtatcac

SEQ ID NO: 3287627 - DNA, 25 bp, Homo sapien
gactgaagagactgggggccaaaat

SEQ ID NO: 3287628 - DNA, 25 bp, Homo sapien
gataaggagtcaaaacctatcaatg

SEQ ID NO: 3287629 - DNA, 25 bp, Homo sapien
aggatttggctaccactaggcctgc

SEQ ID NO: 3287630 - DNA, 25 bp, Homo sapien
ccagacaagcaaatgacgaaggatt

SEQ ID NO: 3287631 - DNA, 25 bp, Homo sapien
catcttggcttgcacagtttctaga

SEQ ID NO: 3287632 - DNA, 25 bp, Homo sapien
ctagagtgaggagaccaatatggtc

SEQ ID NO: 3287633 - DNA, 25 bp, Homo sapien
ggagaccaatatggtctttggaatc

SEQ ID NO: 3287634 - DNA, 25 bp, Homo sapien
taaagctcacatcatatctctcact

SEQ ID NO: 3287635 - DNA, 25 bp, Homo sapien
cttcagcaatgggttaggaatccaa

SEQ ID NO: 3287636 - DNA, 25 bp, Homo sapien
tactggatcgctgcttgttgaaaag

SEQ ID NO: 3287637 - DNA, 25 bp, Homo sapien
gaaacttgtttaaggcctctgatga

SEQ ID NO: 3287638 - DNA, 25 bp, Homo sapien
tccatccatccacaatagaaggctt

SEQ ID NO: 3287639 - DNA, 25 bp, Homo sapien
cctcattagcctgagacaaagcttc

SEQ ID NO: 3287640 - DNA, 25 bp, Homo sapien
accttctgcactcccacatgtgtgc

SEQ ID NO: 3287641 - DNA, 25 bp, Homo sapien
cgagcctctgttggaccttctgcac

SEQ ID NO: 3287642 - DNA, 25 bp, Homo sapien
aaataaaatcccacctcattagcct

SEQ ID NO: 3287643 - DNA, 25 bp, Homo sapien
caccacattgttgcgcacacagttt

SEQ ID NO: 3287644 - DNA, 25 bp, Homo sapien
cacattgttgcgcacacagtttcct

SEQ ID NO: 3287645 - DNA, 25 bp, Homo sapien
tgtcaccacattgttgcgcacacag

SEQ ID NO: 3287646 - DNA, 25 bp, Homo sapien
attgttgcgcacacagtttcctctg

SEQ ID NO: 3287647 - DNA, 25 bp, Homo sapien
attgctgggtagaatagtagtccta

SEQ ID NO: 3287648 - DNA, 25 bp, Homo sapien
tccacattgataggcacctgggttg

SEQ ID NO: 3287649 - DNA, 25 bp, Homo sapien
cactttattatgaacagagtggtga

SEQ ID NO: 3287650 - DNA, 25 bp, Homo sapien
ttatacaatggcttattctcctttg

SEQ ID NO: 3287651 - DNA, 25 bp, Homo sapien
ggtttagaactctcatcatctaaga

SEQ ID NO: 3287652 - DNA, 25 bp, Homo sapien
tgtcttgttaaaagctgctgtagcc

SEQ ID NO: 3287653 - DNA, 25 bp, Homo sapien
tcatctaagaatgtcttgttaaaag

SEQ ID NO: 3287654 - DNA, 25 bp, Homo sapien
ctaagaatgtcttgttaaaagctgc

SEQ ID NO: 3287655 - DNA, 25 bp, Homo sapien
caagcactggaatcagggtcaggaa

SEQ ID NO: 3287656 - DNA, 25 bp, Homo sapien
tctatgctgcaaaactgtcaaactg

SEQ ID NO: 3287657 - DNA, 25 bp, Homo sapien
cagtcgcagttattgggtgtaccta

SEQ ID NO: 3287658 - DNA, 25 bp, Homo sapien
tgtcatggatcgcacaactaacaag

SEQ ID NO: 3287659 - DNA, 25 bp, Homo sapien
tgtgtttgtaggacaaagtcgtatt

SEQ ID NO: 3287660 - DNA, 25 bp, Homo sapien
tattgcaaggaactctttttgtaga

SEQ ID NO: 3287661 - DNA, 25 bp, Homo sapien
taggacaaagtcgtattgcaaggaa

SEQ ID NO: 3287662 - DNA, 25 bp, Homo sapien
gtcgtattgcaaggaactctttttg

SEQ ID NO: 3287663 - DNA, 25 bp, Homo sapien
gcttagcatggagagtgagacttca

SEQ ID NO: 3287664 - DNA, 25 bp, Homo sapien
cattggtgaacatccacaggcatca

SEQ ID NO: 3287665 - DNA, 25 bp, Homo sapien
acatttctagacctgccttgggcaa

SEQ ID NO: 3287666 - DNA, 25 bp, Homo sapien
tattacccaagattgccaaggctgg

SEQ ID NO: 3287667 - DNA, 25 bp, Homo sapien
gagtaagggccctggacttcatact

SEQ ID NO: 3287668 - DNA, 25 bp, Homo sapien
aggaatgagctcttttgttcaggcc

SEQ ID NO: 3287669 - DNA, 25 bp, Homo sapien
ggaatgagctcttttgttcaggccc

SEQ ID NO: 3287670 - DNA, 25 bp, Homo sapien
agtaagggccctggacttcatactg

SEQ ID NO: 3287671 - DNA, 25 bp, Homo sapien
ctggtgctgtagaactgcaggccat

SEQ ID NO: 3287672 - DNA, 25 bp, Homo sapien
tgagctcactgctcagatctaaggg

SEQ ID NO: 3287673 - DNA, 25 bp, Homo sapien
cacagggccagtaaatggtacttat

SEQ ID NO: 3287674 - DNA, 25 bp, Homo sapien
catggttccaaaattttcacagtgg

SEQ ID NO: 3287675 - DNA, 25 bp, Homo sapien
tatattgggctgttcagtttgaccc

SEQ ID NO: 3287676 - DNA, 25 bp, Homo sapien
tccatctactaaataaatcaaccca

SEQ ID NO: 3287677 - DNA, 25 bp, Homo sapien
catctactaaataaatcaacccaac

SEQ ID NO: 3287678 - DNA, 25 bp, Homo sapien
tcaccatatccatctactaaataaa

SEQ ID NO: 3287679 - DNA, 25 bp, Homo sapien
tatccatctactaaataaatcaacc

SEQ ID NO: 3287680 - DNA, 25 bp, Homo sapien
catacaccaggttaagttctccttc

SEQ ID NO: 3287681 - DNA, 25 bp, Homo sapien
tctatctcaaagtctacctcttcac

SEQ ID NO: 3287682 - DNA, 25 bp, Homo sapien
tgtggttcctccatacaccaggtta

SEQ ID NO: 3287683 - DNA, 25 bp, Homo sapien
tcctccatacaccaggttaagttct

SEQ ID NO: 3287684 - DNA, 25 bp, Homo sapien
ttgaaactctttgccggttgcagct

SEQ ID NO: 3287685 - DNA, 25 bp, Homo sapien
cccagtatgctctttgtcggcaggc

SEQ ID NO: 3287686 - DNA, 25 bp, Homo sapien
gcagctacattactttctacaaggg

SEQ ID NO: 3287687 - DNA, 25 bp, Homo sapien
tctacaagggcatataaaacctcat

SEQ ID NO: 3287688 - DNA, 25 bp, Homo sapien
ggacgggatccaaacattcaaacca

SEQ ID NO: 3287689 - DNA, 25 bp, Homo sapien
gaagtatctgagtgcaccatatggc

SEQ ID NO: 3287690 - DNA, 25 bp, Homo sapien
tcaaggtaccggcattcactggtca

SEQ ID NO: 3287691 - DNA, 25 bp, Homo sapien
tgatcgagggaaatactgtgacaac

SEQ ID NO: 3287692 - DNA, 25 bp, Homo sapien
tgagtgatgttaagtcctgacagag

SEQ ID NO: 3287693 - DNA, 25 bp, Homo sapien
gggactactactggatccctttcca

SEQ ID NO: 3287694 - DNA, 25 bp, Homo sapien
cacttagcacgttggtatttgggac

SEQ ID NO: 3287695 - DNA, 25 bp, Homo sapien
tcctcgaggacatgactttaaaata

SEQ ID NO: 3287696 - DNA, 25 bp, Homo sapien
caaggaatagggttgacatatttga

SEQ ID NO: 3287697 - DNA, 25 bp, Homo sapien
catattcttctactgtcatgtcaac

SEQ ID NO: 3287698 - DNA, 25 bp, Homo sapien
tatttgatgaaagaccaggagcctg

SEQ ID NO: 3287699 - DNA, 25 bp, Homo sapien
tgtcaaatagaggtccatattcttc

SEQ ID NO: 3287700 - DNA, 25 bp, Homo sapien
atgaacttttccattcttcacagac

SEQ ID NO: 3287701 - DNA, 25 bp, Homo sapien
catgaacttttccattcttcacaga

SEQ ID NO: 3287702 - DNA, 25 bp, Homo sapien
tgaacttttccattcttcacagaca

SEQ ID NO: 3287703 - DNA, 25 bp, Homo sapien
gaacttttccattcttcacagacat

SEQ ID NO: 3287704 - DNA, 25 bp, Homo sapien
caaacggattggtgacactcaaggt

SEQ ID NO: 3287705 - DNA, 25 bp, Homo sapien
aacggattggtgacactcaaggtcc

SEQ ID NO: 3287706 - DNA, 25 bp, Homo sapien
cactcaaggtcctgatagctgggaa

SEQ ID NO: 3287707 - DNA, 25 bp, Homo sapien
tagctgggaagaataaccagagact

SEQ ID NO: 3287708 - DNA, 25 bp, Homo sapien
gttagggtcagcagaataaggtgac

SEQ ID NO: 3287709 - DNA, 25 bp, Homo sapien
gtaaagctgtatcagcaggagtcag

SEQ ID NO: 3287710 - DNA, 25 bp, Homo sapien
cttgacatagtaaagctgtatcagc

SEQ ID NO: 3287711 - DNA, 25 bp, Homo sapien
gtgacccaataaggccttaagaggc

SEQ ID NO: 3287712 - DNA, 25 bp, Homo sapien
tgcaagctggaagtagagttctgat

SEQ ID NO: 3287713 - DNA, 25 bp, Homo sapien
ccatgaaaattattcctgcaagctg

SEQ ID NO: 3287714 - DNA, 25 bp, Homo sapien
caagctggaagtagagttctgattc

SEQ ID NO: 3287715 - DNA, 25 bp, Homo sapien
gctggaagtagagttctgattcctc

SEQ ID NO: 3287716 - DNA, 25 bp, Homo sapien
ctgcagcatcttatagatcatcttc

SEQ ID NO: 3287717 - DNA, 25 bp, Homo sapien
gcagcatcttatagatcatcttcag

SEQ ID NO: 3287718 - DNA, 25 bp, Homo sapien
gcatcttatagatcatcttcagctt

SEQ ID NO: 3287719 - DNA, 25 bp, Homo sapien
cagcatcttatagatcatcttcagc

SEQ ID NO: 3287720 - DNA, 25 bp, Homo sapien
ccagggtaacaaggttcttcacagc

SEQ ID NO: 3287721 - DNA, 25 bp, Homo sapien
tatcggccccttagactgattagat

SEQ ID NO: 3287722 - DNA, 25 bp, Homo sapien
cacagggacagcattatcctgggca

SEQ ID NO: 3287723 - DNA, 25 bp, Homo sapien
ccttggcggaatgtggaactctgga

SEQ ID NO: 3287724 - DNA, 25 bp, Homo sapien
actctgagcttgaagaacctccaga

SEQ ID NO: 3287725 - DNA, 25 bp, Homo sapien
ctgacaatgccatgggggactctga

SEQ ID NO: 3287726 - DNA, 25 bp, Homo sapien
ggggactctgagcttgaagaacctc

SEQ ID NO: 3287727 - DNA, 25 bp, Homo sapien
gactctgagcttgaagaacctccag

SEQ ID NO: 3287728 - DNA, 25 bp, Homo sapien
gacttctgttctacgtctttgggaa

SEQ ID NO: 3287729 - DNA, 25 bp, Homo sapien
tcctgccctaaaaggatgatacggt

SEQ ID NO: 3287730 - DNA, 25 bp, Homo sapien
gggaatcttccagtatcctccttgg

SEQ ID NO: 3287731 - DNA, 25 bp, Homo sapien
caccacgcctgaagcacagtcttta

SEQ ID NO: 3287732 - DNA, 25 bp, Homo sapien
gctgagtactttaaggtttcttgtg

SEQ ID NO: 3287733 - DNA, 25 bp, Homo sapien
tttcttgtggctgacagcaaggaga

SEQ ID NO: 3287734 - DNA, 25 bp, Homo sapien
tgagtactttaaggtttcttgtggc

SEQ ID NO: 3287735 - DNA, 25 bp, Homo sapien
cttgtggctgacagcaaggagagct

SEQ ID NO: 3287736 - DNA, 25 bp, Homo sapien
catgacgattgctgatactgtttat

SEQ ID NO: 3287737 - DNA, 25 bp, Homo sapien
cttaacatgacgattgctgatactg

SEQ ID NO: 3287738 - DNA, 25 bp, Homo sapien
aaagggctcttaacatgacgattgc

SEQ ID NO: 3287739 - DNA, 25 bp, Homo sapien
tgaagcctcaaaagggctcttaaca

SEQ ID NO: 3287740 - DNA, 25 bp, Homo sapien
ttacataaagtcagctgacgtcttc

SEQ ID NO: 3287741 - DNA, 25 bp, Homo sapien
cctctgtcccagagtgtattacata

SEQ ID NO: 3287742 - DNA, 25 bp, Homo sapien
gctccaagcactatttccgaaattc

SEQ ID NO: 3287743 - DNA, 25 bp, Homo sapien
cctgctccaagcactatttccgaaa

SEQ ID NO: 3287744 - DNA, 25 bp, Homo sapien
tctggattctgttgatgtctactgg

SEQ ID NO: 3287745 - DNA, 25 bp, Homo sapien
gaaaagaatcctacaggccctgcca

SEQ ID NO: 3287746 - DNA, 25 bp, Homo sapien
ttggaaaagaatcctacaggccctg

SEQ ID NO: 3287747 - DNA, 25 bp, Homo sapien
agtgaactggcatagtccaggcatc

SEQ ID NO: 3287748 - DNA, 25 bp, Homo sapien
tgctgtccttgtaagtgtccacttg

SEQ ID NO: 3287749 - DNA, 25 bp, Homo sapien
cccataaggctttcaatactattgt

SEQ ID NO: 3287750 - DNA, 25 bp, Homo sapien
catctatataacattcgattgccaa

SEQ ID NO: 3287751 - DNA, 25 bp, Homo sapien
tgtaagtatctctaattgctgtcct

SEQ ID NO: 3287752 - DNA, 25 bp, Homo sapien
ctaaaagagccttctgagcatggca

SEQ ID NO: 3287753 - DNA, 25 bp, Homo sapien
taaaagagccttctgagcatggcat

SEQ ID NO: 3287754 - DNA, 25 bp, Homo sapien
tccatatcactattaaacctcgagg

SEQ ID NO: 3287755 - DNA, 25 bp, Homo sapien
tatcactattaaacctcgagggaca

SEQ ID NO: 3287756 - DNA, 25 bp, Homo sapien
taatggataaggctccatatcacta

SEQ ID NO: 3287757 - DNA, 25 bp, Homo sapien
tcctcacagtaatggataaggctcc

SEQ ID NO: 3287758 - DNA, 25 bp, Homo sapien
taatggccccttttatgtgaggtcc

SEQ ID NO: 3287759 - DNA, 25 bp, Homo sapien
catgatacttgaacataatggcccc

SEQ ID NO: 3287760 - DNA, 25 bp, Homo sapien
tctacaaggcctataatctagtcca

SEQ ID NO: 3287761 - DNA, 25 bp, Homo sapien
gtgaggtccttggagcatctccaaa

SEQ ID NO: 3287762 - DNA, 25 bp, Homo sapien
tgtgcacaggatattcaagcagttc

SEQ ID NO: 3287763 - DNA, 25 bp, Homo sapien
taattggagcccaacaaatatgggc

SEQ ID NO: 3287764 - DNA, 25 bp, Homo sapien
tatgccttgcacataattggagccc

SEQ ID NO: 3287765 - DNA, 25 bp, Homo sapien
aatatgggctgatttgttgatccac

SEQ ID NO: 3287766 - DNA, 25 bp, Homo sapien
ccaaattatgggacagagttcctac

SEQ ID NO: 3287767 - DNA, 25 bp, Homo sapien
tcctacagggtcagagtaactgtta

SEQ ID NO: 3287768 - DNA, 25 bp, Homo sapien
gaggactacacccattacatgtttg

SEQ ID NO: 3287769 - DNA, 25 bp, Homo sapien
gaaattctcttaggcaggagctacc

SEQ ID NO: 3287770 - DNA, 25 bp, Homo sapien
aacattttcattggcgataagaggt

SEQ ID NO: 3287771 - DNA, 25 bp, Homo sapien
taaacttgagcacaactctctttgt

SEQ ID NO: 3287772 - DNA, 25 bp, Homo sapien
tcttccaacctttagcaacattttc

SEQ ID NO: 3287773 - DNA, 25 bp, Homo sapien
aaaatatcactcataaagaaagtgg

SEQ ID NO: 3287774 - DNA, 25 bp, Homo sapien
ctcctgagtgacagataattcatct

SEQ ID NO: 3287775 - DNA, 25 bp, Homo sapien
cctgagtgacagataattcatcttc

SEQ ID NO: 3287776 - DNA, 25 bp, Homo sapien
gcctagagatcattctaagtattgt

SEQ ID NO: 3287777 - DNA, 25 bp, Homo sapien
tcatcttctgtcagtttccattgcc

SEQ ID NO: 3287778 - DNA, 25 bp, Homo sapien
tctgatagacaggaatccaaagtac

SEQ ID NO: 3287779 - DNA, 25 bp, Homo sapien
agtactcatagtcttccaccagagg

SEQ ID NO: 3287780 - DNA, 25 bp, Homo sapien
tacaaaagcagcagagtactcatag

SEQ ID NO: 3287781 - DNA, 25 bp, Homo sapien
caggaatccaaagtacaaaagcagc

SEQ ID NO: 3287782 - DNA, 25 bp, Homo sapien
taaccccatccgagttggtcttgtc

SEQ ID NO: 3287783 - DNA, 25 bp, Homo sapien
tccgagttggtcttgtctctttttc

SEQ ID NO: 3287784 - DNA, 25 bp, Homo sapien
ccccatccgagttggtcttgtctct

SEQ ID NO: 3287785 - DNA, 25 bp, Homo sapien
ataattattaaccccatccgagttg

SEQ ID NO: 3287786 - DNA, 25 bp, Homo sapien
ggtactgaacttatgaagttttcca

SEQ ID NO: 3287787 - DNA, 25 bp, Homo sapien
tccattggtactgaacttatgaagt

SEQ ID NO: 3287788 - DNA, 25 bp, Homo sapien
cagtagtaaatgttccattggtact

SEQ ID NO: 3287789 - DNA, 25 bp, Homo sapien
caacactttgtcagtagtaaatgtt

SEQ ID NO: 3287790 - DNA, 25 bp, Homo sapien
tctgaccttgagatattgagtaccc

SEQ ID NO: 3287791 - DNA, 25 bp, Homo sapien
tgagatattgagtaccccaatgtac

SEQ ID NO: 3287792 - DNA, 25 bp, Homo sapien
ctccgtttctgaccttgagatattg

SEQ ID NO: 3287793 - DNA, 25 bp, Homo sapien
ttttgagttaagctccgtttctgac

SEQ ID NO: 3287794 - DNA, 25 bp, Homo sapien
tcaaagtcataagttgctgaaggat

SEQ ID NO: 3287795 - DNA, 25 bp, Homo sapien
atgttcaaatatcaagcacaggccc

SEQ ID NO: 3287796 - DNA, 25 bp, Homo sapien
tccctttgtcttggttgtcaataaa

SEQ ID NO: 3287797 - DNA, 25 bp, Homo sapien
tgtcaataaatagcacttacagtga

SEQ ID NO: 3287798 - DNA, 25 bp, Homo sapien
caaactgtcagttatcatatgcctg

SEQ ID NO: 3287799 - DNA, 25 bp, Homo sapien
ctcttaggccccacaaactaatggg

SEQ ID NO: 3287800 - DNA, 25 bp, Homo sapien
gggtcttgtatcatcaattaggtca

SEQ ID NO: 3287801 - DNA, 25 bp, Homo sapien
gatgctgtctattgtagatcctgct

SEQ ID NO: 3287802 - DNA, 25 bp, Homo sapien
gaatgcagaatgttcccacagggcc

SEQ ID NO: 3287803 - DNA, 25 bp, Homo sapien
tcttcttgtcaatcaggtgtcagca

SEQ ID NO: 3287804 - DNA, 25 bp, Homo sapien
gctggaataactctgcatacaatga

SEQ ID NO: 3287805 - DNA, 25 bp, Homo sapien
taccctttgcatagaaggatctgca

SEQ ID NO: 3287806 - DNA, 25 bp, Homo sapien
ctggctgctgtcaccaatttgattg

SEQ ID NO: 3287807 - DNA, 25 bp, Homo sapien
ctccaattaagtctccctggctgct

SEQ ID NO: 3287808 - DNA, 25 bp, Homo sapien
ttaaaggttcaatgaatctccaatt

SEQ ID NO: 3287809 - DNA, 25 bp, Homo sapien
tcaccaatttgattgatagatgtcc

SEQ ID NO: 3287810 - DNA, 25 bp, Homo sapien
gccaccatcaattatcactctcttg

SEQ ID NO: 3287811 - DNA, 25 bp, Homo sapien
gccctcacttgtcaatttatttgcc

SEQ ID NO: 3287812 - DNA, 25 bp, Homo sapien
aggacatgccagtacaccaggcccc

SEQ ID NO: 3287813 - DNA, 25 bp, Homo sapien
attatcactctcttgtcatcagtgc

SEQ ID NO: 3287814 - DNA, 25 bp, Homo sapien
tatctgcccattgctatgtgacttg

SEQ ID NO: 3287815 - DNA, 25 bp, Homo sapien
tgtgacttgtagtgccccctaggag

SEQ ID NO: 3287816 - DNA, 25 bp, Homo sapien
gttcctagttagtctctgctctccc

SEQ ID NO: 3287817 - DNA, 25 bp, Homo sapien
tggtagaatatattactgttcctag

SEQ ID NO: 3287818 - DNA, 25 bp, Homo sapien
caggcttgctgtgcagggcgttgaa

SEQ ID NO: 3287819 - DNA, 25 bp, Homo sapien
aggcttgctgtgcagggcgttgaag

SEQ ID NO: 3287820 - DNA, 25 bp, Homo sapien
aaagactttatggagcaactgtgtt

SEQ ID NO: 3287821 - DNA, 25 bp, Homo sapien
catgtagtctgggaaatgtacaccc

SEQ ID NO: 3287822 - DNA, 25 bp, Homo sapien
tagctcagttggttggaacaccgta

SEQ ID NO: 3287823 - DNA, 25 bp, Homo sapien
gtttgttctattccatggccatgag

SEQ ID NO: 3287824 - DNA, 25 bp, Homo sapien
cattataactgaaggtaaatggaag

SEQ ID NO: 3287825 - DNA, 25 bp, Homo sapien
ctttcattataactgaaggtaaatg

SEQ ID NO: 3287826 - DNA, 25 bp, Homo sapien
aagagagaagtgtagtctctcacca

SEQ ID NO: 3287827 - DNA, 25 bp, Homo sapien
taaatggaagagagaagtgtagtct

SEQ ID NO: 3287828 - DNA, 25 bp, Homo sapien
aattattcgaccatttcctattatc

SEQ ID NO: 3287829 - DNA, 25 bp, Homo sapien
atttcctattatcagtcgaagaccg

SEQ ID NO: 3287830 - DNA, 25 bp, Homo sapien
cgaagaccggaagccttgagagtca

SEQ ID NO: 3287831 - DNA, 25 bp, Homo sapien
ctattatcagtcgaagaccggaagc

SEQ ID NO: 3287832 - DNA, 25 bp, Homo sapien
ctacttgtgtgatgatccattttca

SEQ ID NO: 3287833 - DNA, 25 bp, Homo sapien
cattaggatgtcctctgaattccct

SEQ ID NO: 3287834 - DNA, 25 bp, Homo sapien
ttcattaggatgtcctctgaattcc

SEQ ID NO: 3287835 - DNA, 25 bp, Homo sapien
tcatttttcattaggatgtcctctg

SEQ ID NO: 3287836 - DNA, 25 bp, Homo sapien
gattataacatccttaacccttgcc

SEQ ID NO: 3287837 - DNA, 25 bp, Homo sapien
caaagattataacatccttaaccct

SEQ ID NO: 3287838 - DNA, 25 bp, Homo sapien
gagtgtggtcttaggagaacaaaga

SEQ ID NO: 3287839 - DNA, 25 bp, Homo sapien
agatgctgttcaaatgagtgtggtc

SEQ ID NO: 3287840 - DNA, 25 bp, Homo sapien
tcactgagtacagcgatgggcactt

SEQ ID NO: 3287841 - DNA, 25 bp, Homo sapien
tcacataaaccagactcagtaggcg

SEQ ID NO: 3287842 - DNA, 25 bp, Homo sapien
cactaatgcatcgtttgtcctggaa

SEQ ID NO: 3287843 - DNA, 25 bp, Homo sapien
gagctttcctgtgtgcccattttca

SEQ ID NO: 3287844 - DNA, 25 bp, Homo sapien
cagagagcaaaatccttcactccac

SEQ ID NO: 3287845 - DNA, 25 bp, Homo sapien
tcagagagcaaaatccttcactcca

SEQ ID NO: 3287846 - DNA, 25 bp, Homo sapien
caagttggataaacagtcaagaccc

SEQ ID NO: 3287847 - DNA, 25 bp, Homo sapien
cagactggcaagttggataaacagt

SEQ ID NO: 3287848 - DNA, 25 bp, Homo sapien
ctggcaagttggataaacagtcaag

SEQ ID NO: 3287849 - DNA, 25 bp, Homo sapien
ggcaagttggataaacagtcaagac

SEQ ID NO: 3287850 - DNA, 25 bp, Homo sapien
tcattcaagcttgcagagttccaat

SEQ ID NO: 3287851 - DNA, 25 bp, Homo sapien
tctgttctggtaccatagaggagcc

SEQ ID NO: 3287852 - DNA, 25 bp, Homo sapien
cagacataaggctccagacagggac

SEQ ID NO: 3287853 - DNA, 25 bp, Homo sapien
atctttaaaccccatgctgctgact

SEQ ID NO: 3287854 - DNA, 25 bp, Homo sapien
taacacttgtaattcagccacaatg

SEQ ID NO: 3287855 - DNA, 25 bp, Homo sapien
taaatgaagcaactattacacatgg

SEQ ID NO: 3287856 - DNA, 25 bp, Homo sapien
gggttggtatgaggtcatagctgca

SEQ ID NO: 3287857 - DNA, 25 bp, Homo sapien
tacacatggacaaaagatcaatcag

SEQ ID NO: 3287858 - DNA, 25 bp, Homo sapien
ccaattcctcacctccaatgtgaag

SEQ ID NO: 3287859 - DNA, 25 bp, Homo sapien
aattcctcacctccaatgtgaagaa

SEQ ID NO: 3287860 - DNA, 25 bp, Homo sapien
agagcccaattcctcacctccaatg

SEQ ID NO: 3287861 - DNA, 25 bp, Homo sapien
ggtctcagagcccaattcctcacct

SEQ ID NO: 3287862 - DNA, 25 bp, Homo sapien
aaaggcagtatcacatcccttccaa

SEQ ID NO: 3287863 - DNA, 25 bp, Homo sapien
gcagtatcacatcccttccaaatct

SEQ ID NO: 3287864 - DNA, 25 bp, Homo sapien
ggcagtatcacatcccttccaaatc

SEQ ID NO: 3287865 - DNA, 25 bp, Homo sapien
aaggcagtatcacatcccttccaaa

SEQ ID NO: 3287866 - DNA, 25 bp, Homo sapien
gaaagctctctgctcgtttccatct

SEQ ID NO: 3287867 - DNA, 25 bp, Homo sapien
agaaagctctctgctcgtttccatc

SEQ ID NO: 3287868 - DNA, 25 bp, Homo sapien
gggccaacataaaaatggtgcccag

SEQ ID NO: 3287869 - DNA, 25 bp, Homo sapien
gaaggacagggccaacataaaaatg

SEQ ID NO: 3287870 - DNA, 25 bp, Homo sapien
atgtgggtagttttctattctactt

SEQ ID NO: 3287871 - DNA, 25 bp, Homo sapien
tgtgggtagttttctattctactta

SEQ ID NO: 3287872 - DNA, 25 bp, Homo sapien
tctcctgaatttacagcttctaccc

SEQ ID NO: 3287873 - DNA, 25 bp, Homo sapien
agaaagacatcctttctgcttgtgt

SEQ ID NO: 3287874 - DNA, 25 bp, Homo sapien
aagacatcctttctgcttgtgtaac

SEQ ID NO: 3287875 - DNA, 25 bp, Homo sapien
aaagacatcctttctgcttgtgtaa

SEQ ID NO: 3287876 - DNA, 25 bp, Homo sapien
aaaactggagtgaaggtatgttcca

SEQ ID NO: 3287877 - DNA, 25 bp, Homo sapien
cctgtggaacctctgtgcttttgaa

SEQ ID NO: 3287878 - DNA, 25 bp, Homo sapien
caaagaacatgaaggtctaactaca

SEQ ID NO: 3287879 - DNA, 25 bp, Homo sapien
tggaacctctgtgcttttgaaaact

SEQ ID NO: 3287880 - DNA, 25 bp, Homo sapien
tgttctctcacatgttccactgttt

SEQ ID NO: 3287881 - DNA, 25 bp, Homo sapien
gtcaggcgtctgtcttggcgtgttc

SEQ ID NO: 3287882 - DNA, 25 bp, Homo sapien
tgtcttggcgtgttctctcacatgt

SEQ ID NO: 3287883 - DNA, 25 bp, Homo sapien
ggcgtctgtcttggcgtgttctctc

SEQ ID NO: 3287884 - DNA, 25 bp, Homo sapien
gatcagcagcaggcaagcgatggtc

SEQ ID NO: 3287885 - DNA, 25 bp, Homo sapien
caggatcagcagcaggcaagcgatg

SEQ ID NO: 3287886 - DNA, 25 bp, Homo sapien
tcagcagcaggcaagcgatggtcat

SEQ ID NO: 3287887 - DNA, 25 bp, Homo sapien
cccaggatcagcagcaggcaagcga

SEQ ID NO: 3287888 - DNA, 25 bp, Homo sapien
gcactcttcaacttatgagtggagt

SEQ ID NO: 3287889 - DNA, 25 bp, Homo sapien
tccaagcaagtgtttatgagattca

SEQ ID NO: 3287890 - DNA, 25 bp, Homo sapien
cgaaataaccgaaaaatgtcagtga

SEQ ID NO: 3287891 - DNA, 25 bp, Homo sapien
cccatgggtcaatgattaggtacaa

SEQ ID NO: 3287892 - DNA, 25 bp, Homo sapien
tctggaattttcccaagtgaactaa

SEQ ID NO: 3287893 - DNA, 25 bp, Homo sapien
ataaccccatctgttgcaataccag

SEQ ID NO: 3287894 - DNA, 25 bp, Homo sapien
tttctctgcattcaataaccccatc

SEQ ID NO: 3287895 - DNA, 25 bp, Homo sapien
aataaccccatctgttgcaatacca

SEQ ID NO: 3287896 - DNA, 25 bp, Homo sapien
gcttcacaagagtcacatctggccc

SEQ ID NO: 3287897 - DNA, 25 bp, Homo sapien
gctgaaactgagtgaagcatgcatt

SEQ ID NO: 3287898 - DNA, 25 bp, Homo sapien
agagtcacatctggcccactacatt

SEQ ID NO: 3287899 - DNA, 25 bp, Homo sapien
aactgagtgaagcatgcattttctc

SEQ ID NO: 3287900 - DNA, 25 bp, Homo sapien
tacctttgctgtagtctcagtctca

SEQ ID NO: 3287901 - DNA, 25 bp, Homo sapien
catctacctttgctgtagtctcagt

SEQ ID NO: 3287902 - DNA, 25 bp, Homo sapien
cctttgctgtagtctcagtctcaca

SEQ ID NO: 3287903 - DNA, 25 bp, Homo sapien
tctacctttgctgtagtctcagtct

SEQ ID NO: 3287904 - DNA, 25 bp, Homo sapien
cagccaaaggactgactgctctttc

SEQ ID NO: 3287905 - DNA, 25 bp, Homo sapien
ctgcagccaaaggactgactgctct

SEQ ID NO: 3287906 - DNA, 25 bp, Homo sapien
ctgactgctctttctcctcaaacag

SEQ ID NO: 3287907 - DNA, 25 bp, Homo sapien
tgactgctctttctcctcaaacaga

SEQ ID NO: 3287908 - DNA, 25 bp, Homo sapien
tgaaaataataggcaccaagcatac

SEQ ID NO: 3287909 - DNA, 25 bp, Homo sapien
tttgtaactaaagctccactgctga

SEQ ID NO: 3287910 - DNA, 25 bp, Homo sapien
ctgaaaataataggcaccaagcata

SEQ ID NO: 3287911 - DNA, 25 bp, Homo sapien
gtaactaaagctccactgctgaaaa

SEQ ID NO: 3287912 - DNA, 25 bp, Homo sapien
gcagaatcagccctactgtaatcac

SEQ ID NO: 3287913 - DNA, 25 bp, Homo sapien
gatttaccagtagcagaatcagccc

SEQ ID NO: 3287914 - DNA, 25 bp, Homo sapien
tcaaagacagcccataggatttacc

SEQ ID NO: 3287915 - DNA, 25 bp, Homo sapien
gattcaagcccatgtgacagatagt

SEQ ID NO: 3287916 - DNA, 25 bp, Homo sapien
aacaagaacaaggtgcagcactacc

SEQ ID NO: 3287917 - DNA, 25 bp, Homo sapien
actgcccttgacaggccaatgacaa

SEQ ID NO: 3287918 - DNA, 25 bp, Homo sapien
caatcatcccgtagcactgcccttg

SEQ ID NO: 3287919 - DNA, 25 bp, Homo sapien
ggtgcagcactacccatccaatcat

SEQ ID NO: 3287920 - DNA, 25 bp, Homo sapien
tctcccatctcacttgtaggtttcc

SEQ ID NO: 3287921 - DNA, 25 bp, Homo sapien
catctcacttgtaggtttccctttt

SEQ ID NO: 3287922 - DNA, 25 bp, Homo sapien
ttgtaggtttcccttttcagcacat

SEQ ID NO: 3287923 - DNA, 25 bp, Homo sapien
tcacttgtaggtttcccttttcagc

SEQ ID NO: 3287924 - DNA, 25 bp, Homo sapien
ctccagtctcttccctgctgaaaca

SEQ ID NO: 3287925 - DNA, 25 bp, Homo sapien
tccagtctcttccctgctgaaacat

SEQ ID NO: 3287926 - DNA, 25 bp, Homo sapien
atcttcatattctctccagtctctt

SEQ ID NO: 3287927 - DNA, 25 bp, Homo sapien
ctttatcttcatattctctccagtc

SEQ ID NO: 3287928 - DNA, 25 bp, Homo sapien
gaatcagttcaggtagtttgggtct

SEQ ID NO: 3287929 - DNA, 25 bp, Homo sapien
tcatgcgtccagcaatgggctagac

SEQ ID NO: 3287930 - DNA, 25 bp, Homo sapien
agtctttcaacccacaagtatcgga

SEQ ID NO: 3287931 - DNA, 25 bp, Homo sapien
catagatgccctttagtaggttgca

SEQ ID NO: 3287932 - DNA, 25 bp, Homo sapien
tgccagtatccagaggtccacagag

SEQ ID NO: 3287933 - DNA, 25 bp, Homo sapien
caatgactacgagggcatttgatgc

SEQ ID NO: 3287934 - DNA, 25 bp, Homo sapien
gtccacagagtataccttcagaagt

SEQ ID NO: 3287935 - DNA, 25 bp, Homo sapien
gaaagccttgcttaccagactattg

SEQ ID NO: 3287936 - DNA, 25 bp, Homo sapien
tatctgagcttcaataaatggagac

SEQ ID NO: 3287937 - DNA, 25 bp, Homo sapien
ggtatctgagcttcaataaatggag

SEQ ID NO: 3287938 - DNA, 25 bp, Homo sapien
cttgaagcaatggtatctgagcttc

SEQ ID NO: 3287939 - DNA, 25 bp, Homo sapien
gcaatggtatctgagcttcaataaa

SEQ ID NO: 3287940 - DNA, 25 bp, Homo sapien
aaaagcactatattttaagctagaa

SEQ ID NO: 3287941 - DNA, 25 bp, Homo sapien
aagcactatattttaagctagaaaa

SEQ ID NO: 3287942 - DNA, 25 bp, Homo sapien
agctagaaaagacatgatacaggaa

SEQ ID NO: 3287943 - DNA, 25 bp, Homo sapien
gctagaaaagacatgatacaggaaa

SEQ ID NO: 3287944 - DNA, 25 bp, Homo sapien
gggggcagataccacctccgagcct

SEQ ID NO: 3287945 - DNA, 25 bp, Homo sapien
cgagcctgcccttgtagctatgctg

SEQ ID NO: 3287946 - DNA, 25 bp, Homo sapien
gcccttgtagctatgctggagccac

SEQ ID NO: 3287947 - DNA, 25 bp, Homo sapien
caacactctctggacacccaagaag

SEQ ID NO: 3287948 - DNA, 25 bp, Homo sapien
cagtggatctatgccaagaaatgat

SEQ ID NO: 3287949 - DNA, 25 bp, Homo sapien
tcctcgccctattcagtggatctat

SEQ ID NO: 3287950 - DNA, 25 bp, Homo sapien
cctcagatgagaagttactaagcct

SEQ ID NO: 3287951 - DNA, 25 bp, Homo sapien
ggaagttacatttctggccctcaga

SEQ ID NO: 3287952 - DNA, 25 bp, Homo sapien
gacatcctattgagtggcaggtact

SEQ ID NO: 3287953 - DNA, 25 bp, Homo sapien
tggacttttcccaagccaagatcac

SEQ ID NO: 3287954 - DNA, 25 bp, Homo sapien
ccttgtgtcacacctgatggacttt

SEQ ID NO: 3287955 - DNA, 25 bp, Homo sapien
tttccttgagccttgtgtcacacct

SEQ ID NO: 3287956 - DNA, 25 bp, Homo sapien
cagacactatgcactgtttctccag

SEQ ID NO: 3287957 - DNA, 25 bp, Homo sapien
ccagagctgtatttagtccaaggct

SEQ ID NO: 3287958 - DNA, 25 bp, Homo sapien
tattaatgccccatgtctcatgagg

SEQ ID NO: 3287959 - DNA, 25 bp, Homo sapien
tataataggaatgataaacaacgaa

SEQ ID NO: 3287960 - DNA, 25 bp, Homo sapien
tcttgcacactattacccaaactca

SEQ ID NO: 3287961 - DNA, 25 bp, Homo sapien
cttaatcctagtgtcgttctctccc

SEQ ID NO: 3287962 - DNA, 25 bp, Homo sapien
ccgtgcaccatatcttgcacactat

SEQ ID NO: 3287963 - DNA, 25 bp, Homo sapien
cgttctctccccgtgcaccatatct

SEQ ID NO: 3287964 - DNA, 25 bp, Homo sapien
gcatcagagtgattggactgtacca

SEQ ID NO: 3287965 - DNA, 25 bp, Homo sapien
aatagtgattggacatgtttgcacc

SEQ ID NO: 3287966 - DNA, 25 bp, Homo sapien
gaactagaggtgtagcagcatcaga

SEQ ID NO: 3287967 - DNA, 25 bp, Homo sapien
gagattcccataacaagaactagag

SEQ ID NO: 3287968 - DNA, 25 bp, Homo sapien
tcatggcagaaagagaaggggaagc

SEQ ID NO: 3287969 - DNA, 25 bp, Homo sapien
acaatcatggcagaaagagaagggg

SEQ ID NO: 3287970 - DNA, 25 bp, Homo sapien
ctgtacaagaagcatcactggggag

SEQ ID NO: 3287971 - DNA, 25 bp, Homo sapien
tacaagaagcatcactggggaggcc

SEQ ID NO: 3287972 - DNA, 25 bp, Homo sapien
tatgttgtcagggtaatcactctaa

SEQ ID NO: 3287973 - DNA, 25 bp, Homo sapien
ccagcatcccttgacttgtggcggg

SEQ ID NO: 3287974 - DNA, 25 bp, Homo sapien
ttagaagtgaatttagggctgaccc

SEQ ID NO: 3287975 - DNA, 25 bp, Homo sapien
gggagtcattatgcaacctagtaaa

SEQ ID NO: 3287976 - DNA, 25 bp, Homo sapien
ggtcagcacatcctgagtttaatgg

SEQ ID NO: 3287977 - DNA, 25 bp, Homo sapien
catcctgagtttaatggataaacct

SEQ ID NO: 3287978 - DNA, 25 bp, Homo sapien
agtgagaacgcagtctctcactatc

SEQ ID NO: 3287979 - DNA, 25 bp, Homo sapien
tctctcactatcaccaattatgcag

SEQ ID NO: 3287980 - DNA, 25 bp, Homo sapien
cagagttccctgtaagataggtggc

SEQ ID NO: 3287981 - DNA, 25 bp, Homo sapien
aacagaccaacaggcagacaaggct

SEQ ID NO: 3287982 - DNA, 25 bp, Homo sapien
taggcttcatagaaaggcatgacac

SEQ ID NO: 3287983 - DNA, 25 bp, Homo sapien
tgtacccatgagtgcaacaccctat

SEQ ID NO: 3287984 - DNA, 25 bp, Homo sapien
gaatgaaattaagcatctgcacatg

SEQ ID NO: 3287985 - DNA, 25 bp, Homo sapien
tgtagtaaacttctggcacaactta

SEQ ID NO: 3287986 - DNA, 25 bp, Homo sapien
tggctcatcaggcaacatgactatc

SEQ ID NO: 3287987 - DNA, 25 bp, Homo sapien
gactactaacaattccttggagtga

SEQ ID NO: 3287988 - DNA, 25 bp, Homo sapien
cttttctgctaccatgtaaaatggg

SEQ ID NO: 3287989 - DNA, 25 bp, Homo sapien
cctagtaagattaggaagttgccaa

SEQ ID NO: 3287990 - DNA, 25 bp, Homo sapien
gtgtgaatacagactaatgctaata

SEQ ID NO: 3287991 - DNA, 25 bp, Homo sapien
gctcaaatgctgaaagatagatatc

SEQ ID NO: 3287992 - DNA, 25 bp, Homo sapien
ccacgctgcagaagctttgctcttt

SEQ ID NO: 3287993 - DNA, 25 bp, Homo sapien
cttccacgctgcagaagctttgctc

SEQ ID NO: 3287994 - DNA, 25 bp, Homo sapien
cagatccccttccacgctgcagaag

SEQ ID NO: 3287995 - DNA, 25 bp, Homo sapien
ctgcagaagctttgctctttcactc

SEQ ID NO: 3287996 - DNA, 25 bp, Homo sapien
gtgctctttactcctgcattattga

SEQ ID NO: 3287997 - DNA, 25 bp, Homo sapien
tctttactcctgcattattgaaggg

SEQ ID NO: 3287998 - DNA, 25 bp, Homo sapien
cctgcattattgaagggttaactat

SEQ ID NO: 3287999 - DNA, 25 bp, Homo sapien
aatttttaactgtttggttgatcag

SEQ ID NO: 3288000 - DNA, 25 bp, Homo sapien
aagtgaatttggtggttatcctaga

SEQ ID NO: 3288001 - DNA, 25 bp, Homo sapien
tatgagtagattacatgtcaaatgc

SEQ ID NO: 3288002 - DNA, 25 bp, Homo sapien
cctttcaagtcagtattacataatc

SEQ ID NO: 3288003 - DNA, 25 bp, Homo sapien
gttgccacttcagcccacaaaagct

SEQ ID NO: 3288004 - DNA, 25 bp, Homo sapien
taaaaatgggtggaatacatgaaca

SEQ ID NO: 3288005 - DNA, 25 bp, Homo sapien
gagacataaaagtggccaacagaca

SEQ ID NO: 3288006 - DNA, 25 bp, Homo sapien
ggaggaaatactcacagactatgtg

SEQ ID NO: 3288007 - DNA, 25 bp, Homo sapien
catattggacattagcctagggaaa

SEQ ID NO: 3288008 - DNA, 25 bp, Homo sapien
taatattatacaactggcagagcag

SEQ ID NO: 3288009 - DNA, 25 bp, Homo sapien
gactgcacaagcatactggaataga

SEQ ID NO: 3288010 - DNA, 25 bp, Homo sapien
aaatcaatgatggatagtgggagcc

SEQ ID NO: 3288011 - DNA, 25 bp, Homo sapien
caaacacgagtaatgcatcaagcta

SEQ ID NO: 3288012 - DNA, 25 bp, Homo sapien
accattctctagcaagaggaaccag

SEQ ID NO: 3288013 - DNA, 25 bp, Homo sapien
caaaaaaatatagacgatgagccta

SEQ ID NO: 3288014 - DNA, 25 bp, Homo sapien
tgcccagagtatatctagcacacaa

SEQ ID NO: 3288015 - DNA, 25 bp, Homo sapien
gagactctagaagcaaaatgcccag

SEQ ID NO: 3288016 - DNA, 25 bp, Homo sapien
tgtggtacagtcatccatactagag

SEQ ID NO: 3288017 - DNA, 25 bp, Homo sapien
ggtgatgcccacgatggattaatgg

SEQ ID NO: 3288018 - DNA, 25 bp, Homo sapien
ggtaactctatgcagacattggaca

SEQ ID NO: 3288019 - DNA, 25 bp, Homo sapien
cattggacaaaagtgaaggacggtg

SEQ ID NO: 3288020 - DNA, 25 bp, Homo sapien
gaaaggctacacttaagctgggcac

SEQ ID NO: 3288021 - DNA, 25 bp, Homo sapien
gaagcctatgagctgaacagagtac

SEQ ID NO: 3288022 - DNA, 25 bp, Homo sapien
cagacgtggctctgaccaagcagaa

SEQ ID NO: 3288023 - DNA, 25 bp, Homo sapien
gagagcctttgctgaaccatatggg

SEQ ID NO: 3288024 - DNA, 25 bp, Homo sapien
gtggcctccttgagtgaggtctcac

SEQ ID NO: 3288025 - DNA, 25 bp, Homo sapien
tcacccacccctaggttgattggta

SEQ ID NO: 3288026 - DNA, 25 bp, Homo sapien
tctcacccacccctaggttgattgg

SEQ ID NO: 3288027 - DNA, 25 bp, Homo sapien
aaaagaactgttggaatctgtggcc

SEQ ID NO: 3288028 - DNA, 25 bp, Homo sapien
tcttgaagagcaacagagcagccag

SEQ ID NO: 3288029 - DNA, 25 bp, Homo sapien
ctagttcttgaagagcaacagagca

SEQ ID NO: 3288030 - DNA, 25 bp, Homo sapien
tagttcttgaagagcaacagagcag

SEQ ID NO: 3288031 - DNA, 25 bp, Homo sapien
gttcttgaagagcaacagagcagcc

SEQ ID NO: 3288032 - DNA, 25 bp, Homo sapien
ggaactacccctagcaagcaagaat

SEQ ID NO: 3288033 - DNA, 25 bp, Homo sapien
gaaaactaaatctgtatgggcccag

SEQ ID NO: 3288034 - DNA, 25 bp, Homo sapien
tagattccacaatttgagtccagtc

SEQ ID NO: 3288035 - DNA, 25 bp, Homo sapien
cacacagaacaaccaacagtgggtg

SEQ ID NO: 3288036 - DNA, 25 bp, Homo sapien
aaggaatgccagaaattgccagtaa

SEQ ID NO: 3288037 - DNA, 25 bp, Homo sapien
gaaatgctaccggtgcaagccaagg

SEQ ID NO: 3288038 - DNA, 25 bp, Homo sapien
aaatagatgtcatgccaacacagac

SEQ ID NO: 3288039 - DNA, 25 bp, Homo sapien
ggttttcaaagacatcacggccttg

SEQ ID NO: 3288040 - DNA, 25 bp, Homo sapien
caagctattatgtacagtcactgaa

SEQ ID NO: 3288041 - DNA, 25 bp, Homo sapien
gacatattaatcaggtctcttttga

SEQ ID NO: 3288042 - DNA, 25 bp, Homo sapien
tcataaatatggacatcgctacaag

SEQ ID NO: 3288043 - DNA, 25 bp, Homo sapien
gtagacatattaatcaggtctcttt

SEQ ID NO: 3288044 - DNA, 25 bp, Homo sapien
aaatattccaactatacaaactgtt

SEQ ID NO: 3288045 - DNA, 25 bp, Homo sapien
ttaaaacatcacaagtaattacaaa

SEQ ID NO: 3288046 - DNA, 25 bp, Homo sapien
ttccaactatacaaactgtttttca

SEQ ID NO: 3288047 - DNA, 25 bp, Homo sapien
tacatatatttaaggttggttgatc

SEQ ID NO: 3288048 - DNA, 25 bp, Homo sapien
cattccggagatttttgatgttata

SEQ ID NO: 3288049 - DNA, 25 bp, Homo sapien
tcctcattccggagatttttgatgt

SEQ ID NO: 3288050 - DNA, 25 bp, Homo sapien
agaagaacactttcctcattccgga

SEQ ID NO: 3288051 - DNA, 25 bp, Homo sapien
gaacactttcctcattccggagatt

SEQ ID NO: 3288052 - DNA, 25 bp, Homo sapien
tggaccgcaagtatcacatgtgaca

SEQ ID NO: 3288053 - DNA, 25 bp, Homo sapien
aaggcaaatgctactcttaaataaa

SEQ ID NO: 3288054 - DNA, 25 bp, Homo sapien
catgtgacaggcttattagaattga

SEQ ID NO: 3288055 - DNA, 25 bp, Homo sapien
taaatgaggtaacaaataacagcaa

SEQ ID NO: 3288056 - DNA, 25 bp, Homo sapien
ctgaaggaacatagaacgaatcccc

SEQ ID NO: 3288057 - DNA, 25 bp, Homo sapien
aaggaacatagaacgaatccccagt

SEQ ID NO: 3288058 - DNA, 25 bp, Homo sapien
gaacatagaacgaatccccagtact

SEQ ID NO: 3288059 - DNA, 25 bp, Homo sapien
acatagaacgaatccccagtactta

SEQ ID NO: 3288060 - DNA, 25 bp, Homo sapien
catatccttagccagccagtggtag

SEQ ID NO: 3288061 - DNA, 25 bp, Homo sapien
cccaatagcttatcagggattgcaa

SEQ ID NO: 3288062 - DNA, 25 bp, Homo sapien
ttatctgtcagccactgagccttga

SEQ ID NO: 3288063 - DNA, 25 bp, Homo sapien
gagccttgatgcctagatcccaata

SEQ ID NO: 3288064 - DNA, 25 bp, Homo sapien
tgaaagagagttaatggcctatgct

SEQ ID NO: 3288065 - DNA, 25 bp, Homo sapien
catatatttgtaagtgtgcttcatg

SEQ ID NO: 3288066 - DNA, 25 bp, Homo sapien
tcatatatggctgttcttcaaaata

SEQ ID NO: 3288067 - DNA, 25 bp, Homo sapien
gtaaaacatgtattctcttcaagat

SEQ ID NO: 3288068 - DNA, 25 bp, Homo sapien
aacagaccaatgttgcagaggtgta

SEQ ID NO: 3288069 - DNA, 25 bp, Homo sapien
aagagaatcattctgactgtgatac

SEQ ID NO: 3288070 - DNA, 25 bp, Homo sapien
gatactttagtagcacaatttcaga

SEQ ID NO: 3288071 - DNA, 25 bp, Homo sapien
tacaattttcaaactcagactacaa

SEQ ID NO: 3288072 - DNA, 25 bp, Homo sapien
gttggctggttgactctaaacagat

SEQ ID NO: 3288073 - DNA, 25 bp, Homo sapien
tggtgtagtaatcgaatttcatttc

SEQ ID NO: 3288074 - DNA, 25 bp, Homo sapien
tctcaaaatacagtgctatgcagag

SEQ ID NO: 3288075 - DNA, 25 bp, Homo sapien
taaatcagagttctaccaagagtga

SEQ ID NO: 3288076 - DNA, 25 bp, Homo sapien
atatcctggccaacatgctgctttc

SEQ ID NO: 3288077 - DNA, 25 bp, Homo sapien
tcctggccaacatgctgctttccct

SEQ ID NO: 3288078 - DNA, 25 bp, Homo sapien
ctggccaacatgctgctttcccttt

SEQ ID NO: 3288079 - DNA, 25 bp, Homo sapien
tatcctggccaacatgctgctttcc

SEQ ID NO: 3288080 - DNA, 25 bp, Homo sapien
tgatatgtatcttgtggccttacaa

SEQ ID NO: 3288081 - DNA, 25 bp, Homo sapien
aaaaattgatatgtatcttgtggcc

SEQ ID NO: 3288082 - DNA, 25 bp, Homo sapien
gatatgtatcttgtggccttacaag

SEQ ID NO: 3288083 - DNA, 25 bp, Homo sapien
aattgatatgtatcttgtggcctta

SEQ ID NO: 3288084 - DNA, 25 bp, Homo sapien
ctgccttagagagttgtttcagagc

SEQ ID NO: 3288085 - DNA, 25 bp, Homo sapien
cagaggtcaaatcctgtctctgtct

SEQ ID NO: 3288086 - DNA, 25 bp, Homo sapien
aacaacagcagtattggttaatgat

SEQ ID NO: 3288087 - DNA, 25 bp, Homo sapien
cagagcattaactctggagctagaa

SEQ ID NO: 3288088 - DNA, 25 bp, Homo sapien
ggtcctttaccctcgttggctgcaa

SEQ ID NO: 3288089 - DNA, 25 bp, Homo sapien
tcctttaccctcgttggctgcaaag

SEQ ID NO: 3288090 - DNA, 25 bp, Homo sapien
tttaccctcgttggctgcaaaggat

SEQ ID NO: 3288091 - DNA, 25 bp, Homo sapien
ctgggtcctttaccctcgttggctg

SEQ ID NO: 3288092 - DNA, 25 bp, Homo sapien
tctcaaagtactcctatttaaaata

SEQ ID NO: 3288093 - DNA, 25 bp, Homo sapien
ttctttcatcgttatcaagacagat

SEQ ID NO: 3288094 - DNA, 25 bp, Homo sapien
ctttcatcgttatcaagacagatcc

SEQ ID NO: 3288095 - DNA, 25 bp, Homo sapien
tctttcatcgttatcaagacagatc

SEQ ID NO: 3288096 - DNA, 25 bp, Homo sapien
gtaccaaagaatatatgtctgcagc

SEQ ID NO: 3288097 - DNA, 25 bp, Homo sapien
tatatctctaccaccctaaatcaga

SEQ ID NO: 3288098 - DNA, 25 bp, Homo sapien
gatgaaacatgattagatggtccta

SEQ ID NO: 3288099 - DNA, 25 bp, Homo sapien
ctaaatcagaggctgataaaacagg

SEQ ID NO: 3288100 - DNA, 25 bp, Homo sapien
taccagttacaattttctcacgttc

SEQ ID NO: 3288101 - DNA, 25 bp, Homo sapien
ttcagctaccaaagagaaaatatca

SEQ ID NO: 3288102 - DNA, 25 bp, Homo sapien
tgatacaggaataacaacattcagc

SEQ ID NO: 3288103 - DNA, 25 bp, Homo sapien
tctcacgttctaatctaacgcttta

SEQ ID NO: 3288104 - DNA, 25 bp, Homo sapien
ttggtcctgcgaacatttggtgtgt

SEQ ID NO: 3288105 - DNA, 25 bp, Homo sapien
gttctcttggtcctgcgaacatttg

SEQ ID NO: 3288106 - DNA, 25 bp, Homo sapien
cctcgccagtactccaaaggtttca

SEQ ID NO: 3288107 - DNA, 25 bp, Homo sapien
tcctcgccagtactccaaaggtttc

SEQ ID NO: 3288108 - DNA, 25 bp, Homo sapien
tctttggtatcactttagattgttt

SEQ ID NO: 3288109 - DNA, 25 bp, Homo sapien
tatcactttagattgttttgagtca

SEQ ID NO: 3288110 - DNA, 25 bp, Homo sapien
tggtatcactttagattgttttgag

SEQ ID NO: 3288111 - DNA, 25 bp, Homo sapien
ctagtttgtgatggattctgttctt

SEQ ID NO: 3288112 - DNA, 25 bp, Homo sapien
gaagttacctcgaatgtccaaccca

SEQ ID NO: 3288113 - DNA, 25 bp, Homo sapien
gattaacacaagactgccatgctgt

SEQ ID NO: 3288114 - DNA, 25 bp, Homo sapien
tgagtgtactcaagtggcaattacc

SEQ ID NO: 3288115 - DNA, 25 bp, Homo sapien
aaagagatgcttggccaacctcaat

SEQ ID NO: 3288116 - DNA, 25 bp, Homo sapien
tgtaaacaaaacatagcactcctta

SEQ ID NO: 3288117 - DNA, 25 bp, Homo sapien
cataatgccataaaaatcaagacag

SEQ ID NO: 3288118 - DNA, 25 bp, Homo sapien
ggtactcaatatacactcgccatca

SEQ ID NO: 3288119 - DNA, 25 bp, Homo sapien
tctgtctcacttaggtacagggtct

SEQ ID NO: 3288120 - DNA, 25 bp, Homo sapien
ataattattattgagcctggaaggt

SEQ ID NO: 3288121 - DNA, 25 bp, Homo sapien
tccagaatccaagtttgactctgtt

SEQ ID NO: 3288122 - DNA, 25 bp, Homo sapien
cagaatccaagtttgactctgttgg

SEQ ID NO: 3288123 - DNA, 25 bp, Homo sapien
tattacatgtatatccactggtctg

SEQ ID NO: 3288124 - DNA, 25 bp, Homo sapien
tatccactggtctgaggctttaggg

SEQ ID NO: 3288125 - DNA, 25 bp, Homo sapien
cggctactattgtgatgcattggta

SEQ ID NO: 3288126 - DNA, 25 bp, Homo sapien
tgttttcttagtagattttcggcta

SEQ ID NO: 3288127 - DNA, 25 bp, Homo sapien
caatggctcactcagcgaacatctg

SEQ ID NO: 3288128 - DNA, 25 bp, Homo sapien
ggctcactcagcgaacatctggaaa

SEQ ID NO: 3288129 - DNA, 25 bp, Homo sapien
tgtcacacgtacgacaggcaggctg

SEQ ID NO: 3288130 - DNA, 25 bp, Homo sapien
cttccatcagatgagagtttagact

SEQ ID NO: 3288131 - DNA, 25 bp, Homo sapien
tatatggaagggcaacagtgtcaca

SEQ ID NO: 3288132 - DNA, 25 bp, Homo sapien
gactcccagcttgatcaaaaatcca

SEQ ID NO: 3288133 - DNA, 25 bp, Homo sapien
tgcctttcccaactagaatgcaagc

SEQ ID NO: 3288134 - DNA, 25 bp, Homo sapien
ggtggcagaacctcatattatcaat

SEQ ID NO: 3288135 - DNA, 25 bp, Homo sapien
tactgtatatattaacgcttcaagg

SEQ ID NO: 3288136 - DNA, 25 bp, Homo sapien
tctttgtatccctcacagccaggac

SEQ ID NO: 3288137 - DNA, 25 bp, Homo sapien
ggtacaagtttgttcttggactcac

SEQ ID NO: 3288138 - DNA, 25 bp, Homo sapien
tggactcactggaaaagcgcttctt

SEQ ID NO: 3288139 - DNA, 25 bp, Homo sapien
gaaattcttcgacttttcgtgacag

SEQ ID NO: 3288140 - DNA, 25 bp, Homo sapien
tcagatggacgcctggaaattcttc

SEQ ID NO: 3288141 - DNA, 25 bp, Homo sapien
agctgttcttcagctggtttagcca

SEQ ID NO: 3288142 - DNA, 25 bp, Homo sapien
gctgttcttcagctggtttagccat

SEQ ID NO: 3288143 - DNA, 25 bp, Homo sapien
cctttcttggtattgtaatccaaga

SEQ ID NO: 3288144 - DNA, 25 bp, Homo sapien
aatgaggtggagcagttgccgcatg

SEQ ID NO: 3288145 - DNA, 25 bp, Homo sapien
atgaggtggagcagttgccgcatgc

SEQ ID NO: 3288146 - DNA, 25 bp, Homo sapien
ctgcctttcttggtattgtaatcca

SEQ ID NO: 3288147 - DNA, 25 bp, Homo sapien
tattctgagatgatcctgatggttt

SEQ ID NO: 3288148 - DNA, 25 bp, Homo sapien
attctgagatgatcctgatggtttt

SEQ ID NO: 3288149 - DNA, 25 bp, Homo sapien
tatagctaggcaatggttctcaggg

SEQ ID NO: 3288150 - DNA, 25 bp, Homo sapien
tacttatgctctgctacccttgaag

SEQ ID NO: 3288151 - DNA, 25 bp, Homo sapien
gagcactgtgacagaccaaactttg

SEQ ID NO: 3288152 - DNA, 25 bp, Homo sapien
gaatatacttaactccttggctcca

SEQ ID NO: 3288153 - DNA, 25 bp, Homo sapien
aggtgtatttttggaactaacatca

SEQ ID NO: 3288154 - DNA, 25 bp, Homo sapien
cttttgggcactagatggaataaca

SEQ ID NO: 3288155 - DNA, 25 bp, Homo sapien
gtgtatttttggaactaacatcagt

SEQ ID NO: 3288156 - DNA, 25 bp, Homo sapien
tatttttggaactaacatcagttgc

SEQ ID NO: 3288157 - DNA, 25 bp, Homo sapien
gaataataagagaatcaagcaggct

SEQ ID NO: 3288158 - DNA, 25 bp, Homo sapien
taataagagaatcaagcaggctttt

SEQ ID NO: 3288159 - DNA, 25 bp, Homo sapien
ataataagagaatcaagcaggcttt

SEQ ID NO: 3288160 - DNA, 25 bp, Homo sapien
aataataagagaatcaagcaggctt

SEQ ID NO: 3288161 - DNA, 25 bp, Homo sapien
attcagcactctcggccatggagca

SEQ ID NO: 3288162 - DNA, 25 bp, Homo sapien
ggaagctcaagaccagaaacagaca

SEQ ID NO: 3288163 - DNA, 25 bp, Homo sapien
gcattctctgaacaaggtaaaccca

SEQ ID NO: 3288164 - DNA, 25 bp, Homo sapien
ccttcagaacgagatggcatttccc

SEQ ID NO: 3288165 - DNA, 25 bp, Homo sapien
tgtgcatgcactgctagtgtgaatg

SEQ ID NO: 3288166 - DNA, 25 bp, Homo sapien
gaaactctcaaagtagcatttttta

SEQ ID NO: 3288167 - DNA, 25 bp, Homo sapien
ctatgaaaagtgcacagtggatcct

SEQ ID NO: 3288168 - DNA, 25 bp, Homo sapien
tggatattagccattatcagtaagt

SEQ ID NO: 3288169 - DNA, 25 bp, Homo sapien
tgacacctggtcttgactgcaggct

SEQ ID NO: 3288170 - DNA, 25 bp, Homo sapien
ggtgatgacctaagaaagatcagaa

SEQ ID NO: 3288171 - DNA, 25 bp, Homo sapien
catctgacagcttgtttacacatat

SEQ ID NO: 3288172 - DNA, 25 bp, Homo sapien
agagagagatccagcatgccaagca

SEQ ID NO: 3288173 - DNA, 25 bp, Homo sapien
gtggcactagcacagttcattgcag

SEQ ID NO: 3288174 - DNA, 25 bp, Homo sapien
atactgaagtactagctaataatag

SEQ ID NO: 3288175 - DNA, 25 bp, Homo sapien
taagtggcacagtactaatttcagt

SEQ ID NO: 3288176 - DNA, 25 bp, Homo sapien
ggaactataggcctacgccacagtg

SEQ ID NO: 3288177 - DNA, 25 bp, Homo sapien
ttcgcctagtctggttgccctttca

SEQ ID NO: 3288178 - DNA, 25 bp, Homo sapien
tctttggagaaaagtctatacacag

SEQ ID NO: 3288179 - DNA, 25 bp, Homo sapien
tagctaacctagtgagtgtaaagtg

SEQ ID NO: 3288180 - DNA, 25 bp, Homo sapien
tacctaggagggaagtattgggtca

SEQ ID NO: 3288181 - DNA, 25 bp, Homo sapien
aataacataaaaaatgtgaattctc

SEQ ID NO: 3288182 - DNA, 25 bp, Homo sapien
taacataaaaaatgtgaattctcac

SEQ ID NO: 3288183 - DNA, 25 bp, Homo sapien
acataaaaaatgtgaattctcacga

SEQ ID NO: 3288184 - DNA, 25 bp, Homo sapien
cctaaataacataaaaaatgtgaat

SEQ ID NO: 3288185 - DNA, 25 bp, Homo sapien
ggctacctcagcagaatgataggag

SEQ ID NO: 3288186 - DNA, 25 bp, Homo sapien
tgaaagcaggtacaggcacagacac

SEQ ID NO: 3288187 - DNA, 25 bp, Homo sapien
catttatgggcaccaattaaggtac

SEQ ID NO: 3288188 - DNA, 25 bp, Homo sapien
tagactatcaggtaaaaggtactct

SEQ ID NO: 3288189 - DNA, 25 bp, Homo sapien
tcacttggttctacaacaaactgta

SEQ ID NO: 3288190 - DNA, 25 bp, Homo sapien
ggttctacaacaaactgtagagagg

SEQ ID NO: 3288191 - DNA, 25 bp, Homo sapien
tctacaacaaactgtagagaggctt

SEQ ID NO: 3288192 - DNA, 25 bp, Homo sapien
tgtggcttcacttggttctacaaca

SEQ ID NO: 3288193 - DNA, 25 bp, Homo sapien
tggaactgactttggatgtgatttc

SEQ ID NO: 3288194 - DNA, 25 bp, Homo sapien
agagaaggttgcacctgctgcgcca

SEQ ID NO: 3288195 - DNA, 25 bp, Homo sapien
cactgtgatctgtggtgaacatctg

SEQ ID NO: 3288196 - DNA, 25 bp, Homo sapien
tctaaacagcaactatgtggacaga

SEQ ID NO: 3288197 - DNA, 25 bp, Homo sapien
taccccttggttggcatctggagac

SEQ ID NO: 3288198 - DNA, 25 bp, Homo sapien
ccctcccaaacctatcagaagatta

SEQ ID NO: 3288199 - DNA, 25 bp, Homo sapien
tcccaaacctatcagaagattattt

SEQ ID NO: 3288200 - DNA, 25 bp, Homo sapien
gagcccctcccaaacctatcagaag

SEQ ID NO: 3288201 - DNA, 25 bp, Homo sapien
cctatcagaagattatttactctct

SEQ ID NO: 3288202 - DNA, 25 bp, Homo sapien
tttgcttggtgactgaatacaagtg

SEQ ID NO: 3288203 - DNA, 25 bp, Homo sapien
ttgcttggtgactgaatacaagtgt

SEQ ID NO: 3288204 - DNA, 25 bp, Homo sapien
ctttgcttggtgactgaatacaagt

SEQ ID NO: 3288205 - DNA, 25 bp, Homo sapien
aatttgtactaaaatcattggcaag

SEQ ID NO: 3288206 - DNA, 25 bp, Homo sapien
attttgcgtgttgaattaggcactg

SEQ ID NO: 3288207 - DNA, 25 bp, Homo sapien
tgaattaggcactgattttgtagaa

SEQ ID NO: 3288208 - DNA, 25 bp, Homo sapien
cttttattttgcgtgttgaattagg

SEQ ID NO: 3288209 - DNA, 25 bp, Homo sapien
ttgctctgtgttaatgtcacgtgcc

SEQ ID NO: 3288210 - DNA, 25 bp, Homo sapien
tttcttcaaaacagtcttgtaagat

SEQ ID NO: 3288211 - DNA, 25 bp, Homo sapien
cagaacattctggccttgctctgtg

SEQ ID NO: 3288212 - DNA, 25 bp, Homo sapien
tcttcaaaacagtcttgtaagattt

SEQ ID NO: 3288213 - DNA, 25 bp, Homo sapien
ggaaggtcgacaaaatcttcttctg

SEQ ID NO: 3288214 - DNA, 25 bp, Homo sapien
tcgacaaaatcttcttctgtagcca

SEQ ID NO: 3288215 - DNA, 25 bp, Homo sapien
ctggaaggtcgacaaaatcttcttc

SEQ ID NO: 3288216 - DNA, 25 bp, Homo sapien
aaggtcgacaaaatcttcttctgta

SEQ ID NO: 3288217 - DNA, 25 bp, Homo sapien
taaccttaagtctcaggcgactgcc

SEQ ID NO: 3288218 - DNA, 25 bp, Homo sapien
aacgaatcgccggaataccaggccg

SEQ ID NO: 3288219 - DNA, 25 bp, Homo sapien
ggccgcggccaagcaataaccttaa

SEQ ID NO: 3288220 - DNA, 25 bp, Homo sapien
ctgccgcgagagctgcgatccggaa

SEQ ID NO: 3288221 - DNA, 25 bp, Homo sapien
tgatggctgtaatgttgggctccaa

SEQ ID NO: 3288222 - DNA, 25 bp, Homo sapien
taagttatatttgccataaaacctg

SEQ ID NO: 3288223 - DNA, 25 bp, Homo sapien
gggctccaatagtttaatagtaaca

SEQ ID NO: 3288224 - DNA, 25 bp, Homo sapien
gatttgtaacaatcttctgtgacac

SEQ ID NO: 3288225 - DNA, 25 bp, Homo sapien
ccctatttctgtcttgagctgtttt

SEQ ID NO: 3288226 - DNA, 25 bp, Homo sapien
cctatttctgtcttgagctgttttc

SEQ ID NO: 3288227 - DNA, 25 bp, Homo sapien
aaaatatgttggctgcagtcttgac

SEQ ID NO: 3288228 - DNA, 25 bp, Homo sapien
caagtaatacctgtgaagtgcttaa

SEQ ID NO: 3288229 - DNA, 25 bp, Homo sapien
tcgttccctaatataaaccagtgtg

SEQ ID NO: 3288230 - DNA, 25 bp, Homo sapien
tagtagctaccactaaaagtgctca

SEQ ID NO: 3288231 - DNA, 25 bp, Homo sapien
gggcaagtaattaaactgcatgaag

SEQ ID NO: 3288232 - DNA, 25 bp, Homo sapien
ctgggcaagtaattaaactgcatga

SEQ ID NO: 3288233 - DNA, 25 bp, Homo sapien
tgggcaagtaattaaactgcatgaa

SEQ ID NO: 3288234 - DNA, 25 bp, Homo sapien
tactctatctgtactacaatcactg

SEQ ID NO: 3288235 - DNA, 25 bp, Homo sapien
tgacatcaggttctgttgcatactc

SEQ ID NO: 3288236 - DNA, 25 bp, Homo sapien
cctggtaccctgtttgacatcaggt

SEQ ID NO: 3288237 - DNA, 25 bp, Homo sapien
tgaaacccgccaaccatcattttta

SEQ ID NO: 3288238 - DNA, 25 bp, Homo sapien
accaacttgtaactgattcctgaag

SEQ ID NO: 3288239 - DNA, 25 bp, Homo sapien
ttcctgaagtttcagcgttaaggaa

SEQ ID NO: 3288240 - DNA, 25 bp, Homo sapien
ccttcaccaacttgtaactgattcc

SEQ ID NO: 3288241 - DNA, 25 bp, Homo sapien
cctgaagtttcagcgttaaggaatg

SEQ ID NO: 3288242 - DNA, 25 bp, Homo sapien
gatgaataggatatgcctcttgttc

SEQ ID NO: 3288243 - DNA, 25 bp, Homo sapien
ttctgtgcctaatgctagaatacag

SEQ ID NO: 3288244 - DNA, 25 bp, Homo sapien
tagaagaggaagacaatacgattca

SEQ ID NO: 3288245 - DNA, 25 bp, Homo sapien
taaaataccctgtatttgagtggta

SEQ ID NO: 3288246 - DNA, 25 bp, Homo sapien
tccaagaatcaagcactacaaagtg

SEQ ID NO: 3288247 - DNA, 25 bp, Homo sapien
tacaaagtgatgagcgtaggacaaa

SEQ ID NO: 3288248 - DNA, 25 bp, Homo sapien
attccttatagcctcctagtgctgg

SEQ ID NO: 3288249 - DNA, 25 bp, Homo sapien
gagccctgaatgtggcagatataca

SEQ ID NO: 3288250 - DNA, 25 bp, Homo sapien
agggtagcaaaccttcagggactag

SEQ ID NO: 3288251 - DNA, 25 bp, Homo sapien
taagaaccatctgattaggaaactg

SEQ ID NO: 3288252 - DNA, 25 bp, Homo sapien
cagggactaggacgcagttacttgt

SEQ ID NO: 3288253 - DNA, 25 bp, Homo sapien
agtggcactatcacaactcatgcag

SEQ ID NO: 3288254 - DNA, 25 bp, Homo sapien
agaaccaccgttttctacaatattg

SEQ ID NO: 3288255 - DNA, 25 bp, Homo sapien
taacaattactaaacacaccagcaa

SEQ ID NO: 3288256 - DNA, 25 bp, Homo sapien
cagcaatgttccacacacgagcagg

SEQ ID NO: 3288257 - DNA, 25 bp, Homo sapien
tacccacaatttctaggtcaagaac

SEQ ID NO: 3288258 - DNA, 25 bp, Homo sapien
caaaggtgagctttccaagagagca

SEQ ID NO: 3288259 - DNA, 25 bp, Homo sapien
catgcagtgtctcgtgagggtccac

SEQ ID NO: 3288260 - DNA, 25 bp, Homo sapien
cgttcagcccataggagtaagtctt

SEQ ID NO: 3288261 - DNA, 25 bp, Homo sapien
gctctgtgaaatctagggcctggaa

SEQ ID NO: 3288262 - DNA, 25 bp, Homo sapien
catgctttgaaaccctgaatggttg

SEQ ID NO: 3288263 - DNA, 25 bp, Homo sapien
gaacagaagagcattaccacagtct

SEQ ID NO: 3288264 - DNA, 25 bp, Homo sapien
aagggcctggtaactccaaaccatg

SEQ ID NO: 3288265 - DNA, 25 bp, Homo sapien
ggttgaaccctagaaataaggatga

SEQ ID NO: 3288266 - DNA, 25 bp, Homo sapien
tgcaggagtgacaaatttacatgct

SEQ ID NO: 3288267 - DNA, 25 bp, Homo sapien
actgcaggagtgacaaatttacatg

SEQ ID NO: 3288268 - DNA, 25 bp, Homo sapien
gcaggagtgacaaatttacatgctt

SEQ ID NO: 3288269 - DNA, 25 bp, Homo sapien
aactgcaggagtgacaaatttacat

SEQ ID NO: 3288270 - DNA, 25 bp, Homo sapien
gataatcaactaagacccaggcatc

SEQ ID NO: 3288271 - DNA, 25 bp, Homo sapien
ctgctctctttgaagtctgctgaga

SEQ ID NO: 3288272 - DNA, 25 bp, Homo sapien
ttcagataaactcgaccaattgtca

SEQ ID NO: 3288273 - DNA, 25 bp, Homo sapien
tccacaatctcttatttaacctgaa

SEQ ID NO: 3288274 - DNA, 25 bp, Homo sapien
gaaaggcaagccacaaattgggaga

SEQ ID NO: 3288275 - DNA, 25 bp, Homo sapien
caacaaaaacgtgtggcagtcctga

SEQ ID NO: 3288276 - DNA, 25 bp, Homo sapien
taacaccagcactgaccaagatatg

SEQ ID NO: 3288277 - DNA, 25 bp, Homo sapien
gacgagttcttgctccatgagttaa

SEQ ID NO: 3288278 - DNA, 25 bp, Homo sapien
tacaaatccctaaccagtagtatgg

SEQ ID NO: 3288279 - DNA, 25 bp, Homo sapien
tatgggatttaccagatcctctagg

SEQ ID NO: 3288280 - DNA, 25 bp, Homo sapien
cctctaggttttacatggtcacgac

SEQ ID NO: 3288281 - DNA, 25 bp, Homo sapien
ggtcacgactatttctctccaactg

SEQ ID NO: 3288282 - DNA, 25 bp, Homo sapien
tgctgaattaactacccgaaaagta

SEQ ID NO: 3288283 - DNA, 25 bp, Homo sapien
gaattatcattaacttcaccctggc

SEQ ID NO: 3288284 - DNA, 25 bp, Homo sapien
caccctggctttctagcttagtaga

SEQ ID NO: 3288285 - DNA, 25 bp, Homo sapien
ctataaatatgaactgacagcatcg

SEQ ID NO: 3288286 - DNA, 25 bp, Homo sapien
gggaaacaatacagctggttgataa

SEQ ID NO: 3288287 - DNA, 25 bp, Homo sapien
tgcccacttccccatgtacagatta

SEQ ID NO: 3288288 - DNA, 25 bp, Homo sapien
gccacagagccttgatattcctgga

SEQ ID NO: 3288289 - DNA, 25 bp, Homo sapien
cacttgggatatgcacaatgggaaa

SEQ ID NO: 3288290 - DNA, 25 bp, Homo sapien
catatcagaggtgcaggatgccaaa

SEQ ID NO: 3288291 - DNA, 25 bp, Homo sapien
gacaagtgtatgctatgccccaaaa

SEQ ID NO: 3288292 - DNA, 25 bp, Homo sapien
caaaatcaagtggtcctggagtaac

SEQ ID NO: 3288293 - DNA, 25 bp, Homo sapien
tgatcatagccacgtgtgaaccgtt

SEQ ID NO: 3288294 - DNA, 25 bp, Homo sapien
tcagtgtcatgactgaagtagtatc

SEQ ID NO: 3288295 - DNA, 25 bp, Homo sapien
gtgtcatgactgaagtagtatctta

SEQ ID NO: 3288296 - DNA, 25 bp, Homo sapien
agtgtcatgactgaagtagtatctt

SEQ ID NO: 3288297 - DNA, 25 bp, Homo sapien
cagtgtcatgactgaagtagtatct

SEQ ID NO: 3288298 - DNA, 25 bp, Homo sapien
tggaggtcccggcaaatcttcatct

SEQ ID NO: 3288299 - DNA, 25 bp, Homo sapien
gaggtcccggcaaatcttcatctcc

SEQ ID NO: 3288300 - DNA, 25 bp, Homo sapien
ggaggtcccggcaaatcttcatctc

SEQ ID NO: 3288301 - DNA, 25 bp, Homo sapien
aatctttttgcatgaccaggcatta

SEQ ID NO: 3288302 - DNA, 25 bp, Homo sapien
accattgttggctcaattccatact

SEQ ID NO: 3288303 - DNA, 25 bp, Homo sapien
ggaacataaagcattttgactccct

SEQ ID NO: 3288304 - DNA, 25 bp, Homo sapien
caggcattacaggaacataaagcat

SEQ ID NO: 3288305 - DNA, 25 bp, Homo sapien
tccaagagggtgaaatcttcttttc

SEQ ID NO: 3288306 - DNA, 25 bp, Homo sapien
ttatgaaatccaagagggtgaaatc

SEQ ID NO: 3288307 - DNA, 25 bp, Homo sapien
cggtccatcgatcccaaattgtaaa

SEQ ID NO: 3288308 - DNA, 25 bp, Homo sapien
cttcttttccatgtacggtccatcg

SEQ ID NO: 3288309 - DNA, 25 bp, Homo sapien
ttaatcagtaccttgctgatccttc

SEQ ID NO: 3288310 - DNA, 25 bp, Homo sapien
agaagtccattatttgtgatcaggc

SEQ ID NO: 3288311 - DNA, 25 bp, Homo sapien
aaatcagtatgttttagcaagacag

SEQ ID NO: 3288312 - DNA, 25 bp, Homo sapien
catcacatcatatagataaccactt

SEQ ID NO: 3288313 - DNA, 25 bp, Homo sapien
tactacaattggaatggctaagtta

SEQ ID NO: 3288314 - DNA, 25 bp, Homo sapien
gcttcaaatggatagccaccagtta

SEQ ID NO: 3288315 - DNA, 25 bp, Homo sapien
tttgtaagcttcaaatggatagcca

SEQ ID NO: 3288316 - DNA, 25 bp, Homo sapien
ttgtctctgtaaatactacaattgg

SEQ ID NO: 3288317 - DNA, 25 bp, Homo sapien
ggcacgaagatttgatgcagctgtg

SEQ ID NO: 3288318 - DNA, 25 bp, Homo sapien
tttaccagctatgcgctttgttttg

SEQ ID NO: 3288319 - DNA, 25 bp, Homo sapien
gtggttgttgctatagcaggtataa

SEQ ID NO: 3288320 - DNA, 25 bp, Homo sapien
tttgaaacggtcagctggttcaatg

SEQ ID NO: 3288321 - DNA, 25 bp, Homo sapien
cctctggtaactaagaacagggtca

SEQ ID NO: 3288322 - DNA, 25 bp, Homo sapien
tgccactaaactagagacgtttctg

SEQ ID NO: 3288323 - DNA, 25 bp, Homo sapien
gcaactaatgttattgaaggccaca

SEQ ID NO: 3288324 - DNA, 25 bp, Homo sapien
gtactgcacatctcctatcaagtgg

SEQ ID NO: 3288325 - DNA, 25 bp, Homo sapien
ttcattagataaaatagccttttct

SEQ ID NO: 3288326 - DNA, 25 bp, Homo sapien
cactgctaataggaacatggtctgg

SEQ ID NO: 3288327 - DNA, 25 bp, Homo sapien
aggaacatggtctggtttccttgca

SEQ ID NO: 3288328 - DNA, 25 bp, Homo sapien
catcttcactgctaataggaacatg

SEQ ID NO: 3288329 - DNA, 25 bp, Homo sapien
catttcctgcatctgtttggttacc

SEQ ID NO: 3288330 - DNA, 25 bp, Homo sapien
ttttattaatgttatcatttcctgc

SEQ ID NO: 3288331 - DNA, 25 bp, Homo sapien
atttcctgcatctgtttggttacca

SEQ ID NO: 3288332 - DNA, 25 bp, Homo sapien
attaatgttatcatttcctgcatct

SEQ ID NO: 3288333 - DNA, 25 bp, Homo sapien
ttctggtatagctaaattttgtgga

SEQ ID NO: 3288334 - DNA, 25 bp, Homo sapien
tacattgcctaaatttcatgttcca

SEQ ID NO: 3288335 - DNA, 25 bp, Homo sapien
caagaaaggcatatactgaacatgt

SEQ ID NO: 3288336 - DNA, 25 bp, Homo sapien
gaggtggtcattactccaccttttc

SEQ ID NO: 3288337 - DNA, 25 bp, Homo sapien
tagacgagtcctgaccttaaaagct

SEQ ID NO: 3288338 - DNA, 25 bp, Homo sapien
cagtataataccacccaagcagcta

SEQ ID NO: 3288339 - DNA, 25 bp, Homo sapien
ccttcactctgagctactaagctag

SEQ ID NO: 3288340 - DNA, 25 bp, Homo sapien
taaattctggctggagaaaagatca

SEQ ID NO: 3288341 - DNA, 25 bp, Homo sapien
cttattggaaggcttgaattcctga

SEQ ID NO: 3288342 - DNA, 25 bp, Homo sapien
ggaaggcttgaattcctgaatcttt

SEQ ID NO: 3288343 - DNA, 25 bp, Homo sapien
ttggaaggcttgaattcctgaatct

SEQ ID NO: 3288344 - DNA, 25 bp, Homo sapien
tattggaaggcttgaattcctgaat

SEQ ID NO: 3288345 - DNA, 25 bp, Homo sapien
tattcaagagggcatctgctgataa

SEQ ID NO: 3288346 - DNA, 25 bp, Homo sapien
atattcaagagggcatctgctgata

SEQ ID NO: 3288347 - DNA, 25 bp, Homo sapien
tgaaagaatattcaagagggcatct

SEQ ID NO: 3288348 - DNA, 25 bp, Homo sapien
tcaagagggcatctgctgataagtc

SEQ ID NO: 3288349 - DNA, 25 bp, Homo sapien
tatagttttgcagcattctgaagga

SEQ ID NO: 3288350 - DNA, 25 bp, Homo sapien
tctgcaaatggaatacaatatactg

SEQ ID NO: 3288351 - DNA, 25 bp, Homo sapien
tactgtagcatatagttttgcagca

SEQ ID NO: 3288352 - DNA, 25 bp, Homo sapien
tagcatatagttttgcagcattctg

SEQ ID NO: 3288353 - DNA, 25 bp, Homo sapien
ctctttggtgactgccaaaataaac

SEQ ID NO: 3288354 - DNA, 25 bp, Homo sapien
gtggcctctttggtgactgccaaaa

SEQ ID NO: 3288355 - DNA, 25 bp, Homo sapien
aattttattggagagggtggcctct

SEQ ID NO: 3288356 - DNA, 25 bp, Homo sapien
gcctctttggtgactgccaaaataa

SEQ ID NO: 3288357 - DNA, 25 bp, Homo sapien
tttaatcgtatgtccagagggaaac

SEQ ID NO: 3288358 - DNA, 25 bp, Homo sapien
tgccatcttttaatcgtatgtccag

SEQ ID NO: 3288359 - DNA, 25 bp, Homo sapien
catcttttaatcgtatgtccagagg

SEQ ID NO: 3288360 - DNA, 25 bp, Homo sapien
cttttaatcgtatgtccagagggaa

SEQ ID NO: 3288361 - DNA, 25 bp, Homo sapien
tgctttgtgttacctccttttatct

SEQ ID NO: 3288362 - DNA, 25 bp, Homo sapien
caactatatttaactggaggtaaga

SEQ ID NO: 3288363 - DNA, 25 bp, Homo sapien
aagaataacagctaatatttagtaa

SEQ ID NO: 3288364 - DNA, 25 bp, Homo sapien
tttatctttaccactaccttatgta

SEQ ID NO: 3288365 - DNA, 25 bp, Homo sapien
gctaattctacacactgggaccaat

SEQ ID NO: 3288366 - DNA, 25 bp, Homo sapien
taatcttgctaattctacacactgg

SEQ ID NO: 3288367 - DNA, 25 bp, Homo sapien
tttctaggtcttctgctaagtaact

SEQ ID NO: 3288368 - DNA, 25 bp, Homo sapien
aatttctaggtcttctgctaagtaa

SEQ ID NO: 3288369 - DNA, 25 bp, Homo sapien
aaagtgggccttgttagcaaaagat

SEQ ID NO: 3288370 - DNA, 25 bp, Homo sapien
taaagttgccttcactataagagta

SEQ ID NO: 3288371 - DNA, 25 bp, Homo sapien
tggagattattgttccctcatgaaa

SEQ ID NO: 3288372 - DNA, 25 bp, Homo sapien
aagtgtcaactcatgtgttttatgc

SEQ ID NO: 3288373 - DNA, 25 bp, Homo sapien
tgaataggtttgccaaaatttgtta

SEQ ID NO: 3288374 - DNA, 25 bp, Homo sapien
aggattttagagtacaaaatggtat

SEQ ID NO: 3288375 - DNA, 25 bp, Homo sapien
actgtatggtatgttcaatagcagc

SEQ ID NO: 3288376 - DNA, 25 bp, Homo sapien
tcttgcccactgtatggtatgttca

SEQ ID NO: 3288377 - DNA, 25 bp, Homo sapien
ttatctcttgcccactgtatggtat

SEQ ID NO: 3288378 - DNA, 25 bp, Homo sapien
gactcagtcaaatgcggtacaataa

SEQ ID NO: 3288379 - DNA, 25 bp, Homo sapien
atgcggtacaataacttcagtgtgt

SEQ ID NO: 3288380 - DNA, 25 bp, Homo sapien
tgtaagactcagtcaaatgcggtac

SEQ ID NO: 3288381 - DNA, 25 bp, Homo sapien
ggtacaataacttcagtgtgtccct

SEQ ID NO: 3288382 - DNA, 25 bp, Homo sapien
agaggccttagatttgctaagcaac

SEQ ID NO: 3288383 - DNA, 25 bp, Homo sapien
tctaaaagaggccttagatttgcta

SEQ ID NO: 3288384 - DNA, 25 bp, Homo sapien
gaatctaaaagaggccttagatttg

SEQ ID NO: 3288385 - DNA, 25 bp, Homo sapien
aaaagaggccttagatttgctaagc

SEQ ID NO: 3288386 - DNA, 25 bp, Homo sapien
tacatcttgtttagtatagaactca

SEQ ID NO: 3288387 - DNA, 25 bp, Homo sapien
gaactcatcattgtaaatggtctca

SEQ ID NO: 3288388 - DNA, 25 bp, Homo sapien
tccacattatctaatgctgtaataa

SEQ ID NO: 3288389 - DNA, 25 bp, Homo sapien
ctgtctacgtatctcctggcttcca

SEQ ID NO: 3288390 - DNA, 25 bp, Homo sapien
ctgtatgtgatgaggacgaaatagg

SEQ ID NO: 3288391 - DNA, 25 bp, Homo sapien
tggatttctctatcaagtcaggatc

SEQ ID NO: 3288392 - DNA, 25 bp, Homo sapien
tttctctatcaagtcaggatctgta

SEQ ID NO: 3288393 - DNA, 25 bp, Homo sapien
aataggaactgtctatttaagttgg

SEQ ID NO: 3288394 - DNA, 25 bp, Homo sapien
tgctttccatgagatcagttacact

SEQ ID NO: 3288395 - DNA, 25 bp, Homo sapien
gacaaatgcctctatatacccttta

SEQ ID NO: 3288396 - DNA, 25 bp, Homo sapien
tcttcctgaaaaccgagaatatcta

SEQ ID NO: 3288397 - DNA, 25 bp, Homo sapien
tgccttgtactggactgaccaagtt

SEQ ID NO: 3288398 - DNA, 25 bp, Homo sapien
ctttgcttgtgccaacaccaagtaa

SEQ ID NO: 3288399 - DNA, 25 bp, Homo sapien
tctctttgcttgtgccaacaccaag

SEQ ID NO: 3288400 - DNA, 25 bp, Homo sapien
gcttgtgccaacaccaagtaaagca

SEQ ID NO: 3288401 - DNA, 25 bp, Homo sapien
ctttctctttgcttgtgccaacacc

SEQ ID NO: 3288402 - DNA, 25 bp, Homo sapien
cacagcctatggctccacaccctac

SEQ ID NO: 3288403 - DNA, 25 bp, Homo sapien
tcacagcctatggctccacacccta

SEQ ID NO: 3288404 - DNA, 25 bp, Homo sapien
ttcacagcctatggctccacaccct

SEQ ID NO: 3288405 - DNA, 25 bp, Homo sapien
tcttaaggcatcatatctatctcct

SEQ ID NO: 3288406 - DNA, 25 bp, Homo sapien
acaaagtgtctccaatgcaagctct

SEQ ID NO: 3288407 - DNA, 25 bp, Homo sapien
ttttgcagtttctgacacaaagtgt

SEQ ID NO: 3288408 - DNA, 25 bp, Homo sapien
tccaatgcaagctcttaaggcatca

SEQ ID NO: 3288409 - DNA, 25 bp, Homo sapien
tgcctagtgattcaacaatatctgc

SEQ ID NO: 3288410 - DNA, 25 bp, Homo sapien
caggtttgcctagtgattcaacaat

SEQ ID NO: 3288411 - DNA, 25 bp, Homo sapien
tcaacaatatctgctgcttcaagat

SEQ ID NO: 3288412 - DNA, 25 bp, Homo sapien
attcaggtttgcctagtgattcaac

SEQ ID NO: 3288413 - DNA, 25 bp, Homo sapien
tataatttcacacactataggaaaa

SEQ ID NO: 3288414 - DNA, 25 bp, Homo sapien
tataggaaaataatctaggaaacca

SEQ ID NO: 3288415 - DNA, 25 bp, Homo sapien
ttgagaagaaagtacctactctgta

SEQ ID NO: 3288416 - DNA, 25 bp, Homo sapien
actgcgcccagtcataatttgatta

SEQ ID NO: 3288417 - DNA, 25 bp, Homo sapien
ggcagtccaagagagccaatgcaca

SEQ ID NO: 3288418 - DNA, 25 bp, Homo sapien
tccaagagagccaatgcacaatgtc

SEQ ID NO: 3288419 - DNA, 25 bp, Homo sapien
cagtccaagagagccaatgcacaat

SEQ ID NO: 3288420 - DNA, 25 bp, Homo sapien
tgggcagtccaagagagccaatgca

SEQ ID NO: 3288421 - DNA, 25 bp, Homo sapien
tcatgataacagacccatttgcgtg

SEQ ID NO: 3288422 - DNA, 25 bp, Homo sapien
tgtcaaagaacagttctgtgatgcc

SEQ ID NO: 3288423 - DNA, 25 bp, Homo sapien
gcgtgttaccttaagtagtgtctcc

SEQ ID NO: 3288424 - DNA, 25 bp, Homo sapien
ggattctatatgtcactctagggca

SEQ ID NO: 3288425 - DNA, 25 bp, Homo sapien
ccatgccaggttatctattaagtcc

SEQ ID NO: 3288426 - DNA, 25 bp, Homo sapien
taggttatgcaacctcccaggattc

SEQ ID NO: 3288427 - DNA, 25 bp, Homo sapien
tataagtgggtacttaccatgccag

SEQ ID NO: 3288428 - DNA, 25 bp, Homo sapien
gaagagttcttgtacacagaggaga

SEQ ID NO: 3288429 - DNA, 25 bp, Homo sapien
tcaactctgagatataacctggtaa

SEQ ID NO: 3288430 - DNA, 25 bp, Homo sapien
ttaacaagcacttggcaacgtaggg

SEQ ID NO: 3288431 - DNA, 25 bp, Homo sapien
gactctgcatatcaaaatgggctta

SEQ ID NO: 3288432 - DNA, 25 bp, Homo sapien
taaagcaagataccagtgaacaaag

SEQ ID NO: 3288433 - DNA, 25 bp, Homo sapien
tagcatggcgttcaagctctgagaa

SEQ ID NO: 3288434 - DNA, 25 bp, Homo sapien
taaacatggtcttggtcctcccaga

SEQ ID NO: 3288435 - DNA, 25 bp, Homo sapien
gagcagtggttctcatagcatggcg

SEQ ID NO: 3288436 - DNA, 25 bp, Homo sapien
cgaagcagggcggtatgtcacctca

SEQ ID NO: 3288437 - DNA, 25 bp, Homo sapien
tctaaatctgatgtacgaaatgtga

SEQ ID NO: 3288438 - DNA, 25 bp, Homo sapien
cacatggcatttctaagtactttac

SEQ ID NO: 3288439 - DNA, 25 bp, Homo sapien
gcaggcactggcatcataacacaca

SEQ ID NO: 3288440 - DNA, 25 bp, Homo sapien
actgaaaaaagttgtctaatgccac

SEQ ID NO: 3288441 - DNA, 25 bp, Homo sapien
caaacaaatattcggacagccataa

SEQ ID NO: 3288442 - DNA, 25 bp, Homo sapien
acaaatattcggacagccataaatt

SEQ ID NO: 3288443 - DNA, 25 bp, Homo sapien
caaatattcggacagccataaattt

SEQ ID NO: 3288444 - DNA, 25 bp, Homo sapien
aacaaatattcggacagccataaat

SEQ ID NO: 3288445 - DNA, 25 bp, Homo sapien
ttatagatgttgctagtttcaacag

SEQ ID NO: 3288446 - DNA, 25 bp, Homo sapien
cacttatagatgttgctagtttcaa

SEQ ID NO: 3288447 - DNA, 25 bp, Homo sapien
cttccaaggtttcacttatagatgt

SEQ ID NO: 3288448 - DNA, 25 bp, Homo sapien
ggtttcacttatagatgttgctagt

SEQ ID NO: 3288449 - DNA, 25 bp, Homo sapien
caactcaaaacagaacaccctaact

SEQ ID NO: 3288450 - DNA, 25 bp, Homo sapien
tacaactcaaaacagaacaccctaa

SEQ ID NO: 3288451 - DNA, 25 bp, Homo sapien
ctacaactcaaaacagaacacccta

SEQ ID NO: 3288452 - DNA, 25 bp, Homo sapien
caacagtactctgacttaacaggat

SEQ ID NO: 3288453 - DNA, 25 bp, Homo sapien
cacaacacccaatcccaagatttaa

SEQ ID NO: 3288454 - DNA, 25 bp, Homo sapien
gcacagcttggtatatctattggta

SEQ ID NO: 3288455 - DNA, 25 bp, Homo sapien
aaattcacatttagtatgattccac

SEQ ID NO: 3288456 - DNA, 25 bp, Homo sapien
ccaacatttggcttgcgactgtatt

SEQ ID NO: 3288457 - DNA, 25 bp, Homo sapien
ggcttgcgactgtatttctcctgaa

SEQ ID NO: 3288458 - DNA, 25 bp, Homo sapien
cctgaaactggtccaaggcaagcat

SEQ ID NO: 3288459 - DNA, 25 bp, Homo sapien
atttctcctgaaactggtccaaggc

SEQ ID NO: 3288460 - DNA, 25 bp, Homo sapien
aaatcggccaacatttactgagtgg

SEQ ID NO: 3288461 - DNA, 25 bp, Homo sapien
tataaggcccgacagccagatacct

SEQ ID NO: 3288462 - DNA, 25 bp, Homo sapien
tactgagtggttgtatgtcccaggc

SEQ ID NO: 3288463 - DNA, 25 bp, Homo sapien
caaggccatgaaggtaaatgatcta

SEQ ID NO: 3288464 - DNA, 25 bp, Homo sapien
taaaatccacaataaggcactttgg

SEQ ID NO: 3288465 - DNA, 25 bp, Homo sapien
ctcagggttgctaaaatccacaata

SEQ ID NO: 3288466 - DNA, 25 bp, Homo sapien
ccacaataaggcactttggatgttt

SEQ ID NO: 3288467 - DNA, 25 bp, Homo sapien
aggcactttggatgttttaactgcc

SEQ ID NO: 3288468 - DNA, 25 bp, Homo sapien
agttctgtggtgtcaccaatactaa

SEQ ID NO: 3288469 - DNA, 25 bp, Homo sapien
taacttggacagctatgcctccatg

SEQ ID NO: 3288470 - DNA, 25 bp, Homo sapien
cttaacttggacagctatgcctcca

SEQ ID NO: 3288471 - DNA, 25 bp, Homo sapien
ttggacagctatgcctccatgtaaa

SEQ ID NO: 3288472 - DNA, 25 bp, Homo sapien
gaatggtcagcagagtgaacaccaa

SEQ ID NO: 3288473 - DNA, 25 bp, Homo sapien
aacatggtccgataacattttcatc

SEQ ID NO: 3288474 - DNA, 25 bp, Homo sapien
gacatattaggtagctataaaagaa

SEQ ID NO: 3288475 - DNA, 25 bp, Homo sapien
tggctggtcatgaggtttttttatc

SEQ ID NO: 3288476 - DNA, 25 bp, Homo sapien
aatgttaggaattgtcctgtctcca

SEQ ID NO: 3288477 - DNA, 25 bp, Homo sapien
tgtatagatccatttaaacctgtca

SEQ ID NO: 3288478 - DNA, 25 bp, Homo sapien
tttcaaggcaagtaacaatgccagg

SEQ ID NO: 3288479 - DNA, 25 bp, Homo sapien
ccattaatttctcgaaatgttagga

SEQ ID NO: 3288480 - DNA, 25 bp, Homo sapien
tcaaattcatcaccgaaatcacaaa

SEQ ID NO: 3288481 - DNA, 25 bp, Homo sapien
tcttctcctgttgtatctaaaactt

SEQ ID NO: 3288482 - DNA, 25 bp, Homo sapien
taaccttgaccaaattccatgtaca

SEQ ID NO: 3288483 - DNA, 25 bp, Homo sapien
ttccatgtacatctgcactgataaa

SEQ ID NO: 3288484 - DNA, 25 bp, Homo sapien
taaacctcttcccaatgtcactgtg

SEQ ID NO: 3288485 - DNA, 25 bp, Homo sapien
gtaaaccacaacacgaatgctctag

SEQ ID NO: 3288486 - DNA, 25 bp, Homo sapien
cactgtgcacctaattatgctggag

SEQ ID NO: 3288487 - DNA, 25 bp, Homo sapien
ccttggtgcctaactcaaagaaaca

SEQ ID NO: 3288488 - DNA, 25 bp, Homo sapien
gagggcactgagaacggcaaaagtc

SEQ ID NO: 3288489 - DNA, 25 bp, Homo sapien
cactgagaacggcaaaagtcattga

SEQ ID NO: 3288490 - DNA, 25 bp, Homo sapien
gggcactgagaacggcaaaagtcat

SEQ ID NO: 3288491 - DNA, 25 bp, Homo sapien
ctgagaacggcaaaagtcattgatc

SEQ ID NO: 3288492 - DNA, 25 bp, Homo sapien
tagtttatgtagttctaggtctgaa

SEQ ID NO: 3288493 - DNA, 25 bp, Homo sapien
tagttctaggtctgaatcttctgtt

SEQ ID NO: 3288494 - DNA, 25 bp, Homo sapien
gaagaaggggaggtctcaattcaat

SEQ ID NO: 3288495 - DNA, 25 bp, Homo sapien
tgttcttgtccaccctttcactgag

SEQ ID NO: 3288496 - DNA, 25 bp, Homo sapien
ctgtggtctcattgaaaggaacaga

SEQ ID NO: 3288497 - DNA, 25 bp, Homo sapien
gaagatgatgtgacatgaacgtatg

SEQ ID NO: 3288498 - DNA, 25 bp, Homo sapien
ggagagatctgtggtctcattgaaa

SEQ ID NO: 3288499 - DNA, 25 bp, Homo sapien
agatgatgtgacatgaacgtatgga

SEQ ID NO: 3288500 - DNA, 25 bp, Homo sapien
aatatgtttaagtacagcttcagcc

SEQ ID NO: 3288501 - DNA, 25 bp, Homo sapien
ttttctgtatcatgaattgtaactg

SEQ ID NO: 3288502 - DNA, 25 bp, Homo sapien
cactgagaaagaagttggttcctag

SEQ ID NO: 3288503 - DNA, 25 bp, Homo sapien
tggttcctagatcccatgcttggca

SEQ ID NO: 3288504 - DNA, 25 bp, Homo sapien
gagaaagaagttggttcctagatcc

SEQ ID NO: 3288505 - DNA, 25 bp, Homo sapien
tgtaaacagcgacaaagactactgg

SEQ ID NO: 3288506 - DNA, 25 bp, Homo sapien
tatttaggctttcgtgtgatctccc

SEQ ID NO: 3288507 - DNA, 25 bp, Homo sapien
tgacctttggtcaagagccagcagg

SEQ ID NO: 3288508 - DNA, 25 bp, Homo sapien
acactgtgaactgccctatggagaa

SEQ ID NO: 3288509 - DNA, 25 bp, Homo sapien
cttaatccctgcaagaacaagattc

SEQ ID NO: 3288510 - DNA, 25 bp, Homo sapien
cacactagatatgtcttcacagagc

SEQ ID NO: 3288511 - DNA, 25 bp, Homo sapien
atgtgcataatcacaacacccagag

SEQ ID NO: 3288512 - DNA, 25 bp, Homo sapien
ggaagaatataacatcacgaaatag

SEQ ID NO: 3288513 - DNA, 25 bp, Homo sapien
tcaatattgggaatacacactagat

SEQ ID NO: 3288514 - DNA, 25 bp, Homo sapien
caaaccaagaccacccatcccactt

SEQ ID NO: 3288515 - DNA, 25 bp, Homo sapien
accaagaccacccatcccacttaag

SEQ ID NO: 3288516 - DNA, 25 bp, Homo sapien
caagaccacccatcccacttaagaa

SEQ ID NO: 3288517 - DNA, 25 bp, Homo sapien
ttccaaaccaagaccacccatccca

SEQ ID NO: 3288518 - DNA, 25 bp, Homo sapien
acttcttctattgttagtaccatct

SEQ ID NO: 3288519 - DNA, 25 bp, Homo sapien
gcttaaggatggaatgtgtaagtgc

SEQ ID NO: 3288520 - DNA, 25 bp, Homo sapien
tttgcttaaggatggaatgtgtaag

SEQ ID NO: 3288521 - DNA, 25 bp, Homo sapien
tattgttagtaccatctgcaccttt

SEQ ID NO: 3288522 - DNA, 25 bp, Homo sapien
ccagtaatgttgcaagtgctcccaa

SEQ ID NO: 3288523 - DNA, 25 bp, Homo sapien
gatgtcgccatttgcagttaagagg

SEQ ID NO: 3288524 - DNA, 25 bp, Homo sapien
tatctggttaaagcacatgtgactc

SEQ ID NO: 3288525 - DNA, 25 bp, Homo sapien
gcctgagcagttcctctctccagta

SEQ ID NO: 3288526 - DNA, 25 bp, Homo sapien
aatgcatcatcgatttccacagatg

SEQ ID NO: 3288527 - DNA, 25 bp, Homo sapien
tacaatgcatcatcgatttccacag

SEQ ID NO: 3288528 - DNA, 25 bp, Homo sapien
ctatacaatgcatcatcgatttcca

SEQ ID NO: 3288529 - DNA, 25 bp, Homo sapien
caatgcatcatcgatttccacagat

SEQ ID NO: 3288530 - DNA, 25 bp, Homo sapien
tcccgaatcccagccagaactgaga

SEQ ID NO: 3288531 - DNA, 25 bp, Homo sapien
gatcccgaatcccagccagaactga

SEQ ID NO: 3288532 - DNA, 25 bp, Homo sapien
aggatcccgaatcccagccagaact

SEQ ID NO: 3288533 - DNA, 25 bp, Homo sapien
aggaggatcccgaatcccagccaga

SEQ ID NO: 3288534 - DNA, 25 bp, Homo sapien
agcagaggccctagcccacgtcgcc

SEQ ID NO: 3288535 - DNA, 25 bp, Homo sapien
agaggccctagcccacgtcgccaca

SEQ ID NO: 3288536 - DNA, 25 bp, Homo sapien
aacagcagaggccctagcccacgtc

SEQ ID NO: 3288537 - DNA, 25 bp, Homo sapien
acagcagaggccctagcccacgtcg

SEQ ID NO: 3288538 - DNA, 25 bp, Homo sapien
cctcttccccctgatgggcggccac

SEQ ID NO: 3288539 - DNA, 25 bp, Homo sapien
tgggcggccacaggctcggatcctt

SEQ ID NO: 3288540 - DNA, 25 bp, Homo sapien
cttccccctgatgggcggccacagg

SEQ ID NO: 3288541 - DNA, 25 bp, Homo sapien
cggccacaggctcggatccttccat

SEQ ID NO: 3288542 - DNA, 25 bp, Homo sapien
tgccgcctgagacaccgccgccggc

SEQ ID NO: 3288543 - DNA, 25 bp, Homo sapien
accgccgccggctactggaaggtag

SEQ ID NO: 3288544 - DNA, 25 bp, Homo sapien
tgagacaccgccgccggctactgga

SEQ ID NO: 3288545 - DNA, 25 bp, Homo sapien
acaccgccgccggctactggaaggt

SEQ ID NO: 3288546 - DNA, 25 bp, Homo sapien
cgtcttgtgaaaagaccccgcagac

SEQ ID NO: 3288547 - DNA, 25 bp, Homo sapien
cccgtcttgtgaaaagaccccgcag

SEQ ID NO: 3288548 - DNA, 25 bp, Homo sapien
cttgtgaaaagaccccgcagacagg

SEQ ID NO: 3288549 - DNA, 25 bp, Homo sapien
ctgctcagaagctatacaagtctac

SEQ ID NO: 3288550 - DNA, 25 bp, Homo sapien
agtgggtaccgcctgtggctctgca

SEQ ID NO: 3288551 - DNA, 25 bp, Homo sapien
gatgctggtgagtgggtaccgcctg

SEQ ID NO: 3288552 - DNA, 25 bp, Homo sapien
gaggatgctggtgagtgggtaccgc

SEQ ID NO: 3288553 - DNA, 25 bp, Homo sapien
ggtgagtgggtaccgcctgtggctc

SEQ ID NO: 3288554 - DNA, 25 bp, Homo sapien
ctgggtggtagatcaggatcttatc

SEQ ID NO: 3288555 - DNA, 25 bp, Homo sapien
ggtggtagatcaggatcttatcctg

SEQ ID NO: 3288556 - DNA, 25 bp, Homo sapien
ggtagatcaggatcttatcctgttt

SEQ ID NO: 3288557 - DNA, 25 bp, Homo sapien
agatcaggatcttatcctgtttcac

SEQ ID NO: 3288558 - DNA, 25 bp, Homo sapien
cccggaagctctcagggtacaccag

SEQ ID NO: 3288559 - DNA, 25 bp, Homo sapien
ggaagctctcagggtacaccagatg

SEQ ID NO: 3288560 - DNA, 25 bp, Homo sapien
gaagctctcagggtacaccagatgg

SEQ ID NO: 3288561 - DNA, 25 bp, Homo sapien
ctcccggaagctctcagggtacacc

SEQ ID NO: 3288562 - DNA, 25 bp, Homo sapien
tgagcataaaattgtgactctatcg

SEQ ID NO: 3288563 - DNA, 25 bp, Homo sapien
tatgacaattgcctcaggttgcccg

SEQ ID NO: 3288564 - DNA, 25 bp, Homo sapien
aaattgtgactctatcgcaggccta

SEQ ID NO: 3288565 - DNA, 25 bp, Homo sapien
tatcgcaggcctatatgacaattgc

SEQ ID NO: 3288566 - DNA, 25 bp, Homo sapien
gacagcacagtgccagcagcccacc

SEQ ID NO: 3288567 - DNA, 25 bp, Homo sapien
cagcacagtgccagcagcccaccga

SEQ ID NO: 3288568 - DNA, 25 bp, Homo sapien
acagcacagtgccagcagcccaccg

SEQ ID NO: 3288569 - DNA, 25 bp, Homo sapien
agcacagtgccagcagcccaccgac

SEQ ID NO: 3288570 - DNA, 25 bp, Homo sapien
attgttgatgatattgggcttcttc

SEQ ID NO: 3288571 - DNA, 25 bp, Homo sapien
ctcagccaccattggtaggtgttgt

SEQ ID NO: 3288572 - DNA, 25 bp, Homo sapien
ctcatcgaaccaggctgagagccca

SEQ ID NO: 3288573 - DNA, 25 bp, Homo sapien
gcagctgcactatctggttgaacct

SEQ ID NO: 3288574 - DNA, 25 bp, Homo sapien
cttcactgtcctgatggcgacctcc

SEQ ID NO: 3288575 - DNA, 25 bp, Homo sapien
ttcatgctgtcaccagagacatggt

SEQ ID NO: 3288576 - DNA, 25 bp, Homo sapien
ctgaaaatggtaccagcatggctgg

SEQ ID NO: 3288577 - DNA, 25 bp, Homo sapien
tatgacaagcttgatgaaggccaca

SEQ ID NO: 3288578 - DNA, 25 bp, Homo sapien
tcccatccgaagaagctaagaggta

SEQ ID NO: 3288579 - DNA, 25 bp, Homo sapien
tgagtgtcccggatactcgccccct

SEQ ID NO: 3288580 - DNA, 25 bp, Homo sapien
tgtgagtgtcccggatactcgcccc

SEQ ID NO: 3288581 - DNA, 25 bp, Homo sapien
gggtgtgagtgtcccggatactcgc

SEQ ID NO: 3288582 - DNA, 25 bp, Homo sapien
ggtgtgagtgtcccggatactcgcc

SEQ ID NO: 3288583 - DNA, 25 bp, Homo sapien
cagaggcaggacacaatggctgtcc

SEQ ID NO: 3288584 - DNA, 25 bp, Homo sapien
cccagaggcaggacacaatggctgt

SEQ ID NO: 3288585 - DNA, 25 bp, Homo sapien
ctagggagcacccagaggcaggaca

SEQ ID NO: 3288586 - DNA, 25 bp, Homo sapien
gaggcaggacacaatggctgtcctc

SEQ ID NO: 3288587 - DNA, 25 bp, Homo sapien
tccttgacaggcgtgcatctgggcc

SEQ ID NO: 3288588 - DNA, 25 bp, Homo sapien
cctaaaccttgccatggaggcctgt

SEQ ID NO: 3288589 - DNA, 25 bp, Homo sapien
tgcagagtacatagtccagtcgttg

SEQ ID NO: 3288590 - DNA, 25 bp, Homo sapien
cagagcctgagtgacaagtacgttg

SEQ ID NO: 3288591 - DNA, 25 bp, Homo sapien
taaccttcaggttgaggctagaggg

SEQ ID NO: 3288592 - DNA, 25 bp, Homo sapien
caataaccttcaggttgaggctaga

SEQ ID NO: 3288593 - DNA, 25 bp, Homo sapien
ggcaataaccttcaggttgaggcta

SEQ ID NO: 3288594 - DNA, 25 bp, Homo sapien
aataaccttcaggttgaggctagag

SEQ ID NO: 3288595 - DNA, 25 bp, Homo sapien
cagatggcaggaagcttcgtggaga

SEQ ID NO: 3288596 - DNA, 25 bp, Homo sapien
gaggagatttcatgacagatggcag

SEQ ID NO: 3288597 - DNA, 25 bp, Homo sapien
tgtggtcttgtgaggagatttcatg

SEQ ID NO: 3288598 - DNA, 25 bp, Homo sapien
ttccctgatgtggtcttgtgaggag

SEQ ID NO: 3288599 - DNA, 25 bp, Homo sapien
tgaagacactcctgagctcccaaca

SEQ ID NO: 3288600 - DNA, 25 bp, Homo sapien
tcctgagctcccaacaccgggcaac

SEQ ID NO: 3288601 - DNA, 25 bp, Homo sapien
ctgaagacactcctgagctcccaac

SEQ ID NO: 3288602 - DNA, 25 bp, Homo sapien
tgagctcccaacaccgggcaactct

SEQ ID NO: 3288603 - DNA, 25 bp, Homo sapien
gacaccagttttcggcagatgaaat

SEQ ID NO: 3288604 - DNA, 25 bp, Homo sapien
agatgaaatccctctgatttcaggc

SEQ ID NO: 3288605 - DNA, 25 bp, Homo sapien
agttagacaccagttttcggcagat

SEQ ID NO: 3288606 - DNA, 25 bp, Homo sapien
ccagttttcggcagatgaaatccct

SEQ ID NO: 3288607 - DNA, 25 bp, Homo sapien
gctagtgatcgcttcctaaggcaaa

SEQ ID NO: 3288608 - DNA, 25 bp, Homo sapien
tcaacggtgtagtgactagaggcaa

SEQ ID NO: 3288609 - DNA, 25 bp, Homo sapien
ggcaaagctatttgatgcatcttct

SEQ ID NO: 3288610 - DNA, 25 bp, Homo sapien
gaatccaatccaacacttagtcaat

SEQ ID NO: 3288611 - DNA, 25 bp, Homo sapien
aaacaattttgtggagccatgcttg

SEQ ID NO: 3288612 - DNA, 25 bp, Homo sapien
cacaatagtcccgttgaagaaggta

SEQ ID NO: 3288613 - DNA, 25 bp, Homo sapien
tggagccatgcttgaccacaatagt

SEQ ID NO: 3288614 - DNA, 25 bp, Homo sapien
ctcagaatgctcttattgtttggca

SEQ ID NO: 3288615 - DNA, 25 bp, Homo sapien
gcatagactgcaggttaagaaaccc

SEQ ID NO: 3288616 - DNA, 25 bp, Homo sapien
gggattggttactgactcctccaaa

SEQ ID NO: 3288617 - DNA, 25 bp, Homo sapien
caaagcatgctgagtttagacctgt

SEQ ID NO: 3288618 - DNA, 25 bp, Homo sapien
gatggagagattcattaccttaccc

SEQ ID NO: 3288619 - DNA, 25 bp, Homo sapien
tagataagtggatcaaagcatgggt

SEQ ID NO: 3288620 - DNA, 25 bp, Homo sapien
tatccatagataagtggatcaaagc

SEQ ID NO: 3288621 - DNA, 25 bp, Homo sapien
agataagtggatcaaagcatgggtt

SEQ ID NO: 3288622 - DNA, 25 bp, Homo sapien
ccatagataagtggatcaaagcatg

SEQ ID NO: 3288623 - DNA, 25 bp, Homo sapien
cagccgtgctcttggtatattgttc

SEQ ID NO: 3288624 - DNA, 25 bp, Homo sapien
aatgaagtggcaaatgcaaccgtca

SEQ ID NO: 3288625 - DNA, 25 bp, Homo sapien
ttcctaggacatagtagggagtcca

SEQ ID NO: 3288626 - DNA, 25 bp, Homo sapien
catttttagagtcttcagccgtgct

SEQ ID NO: 3288627 - DNA, 25 bp, Homo sapien
cctgatgaaggacccgtgtcagggt

SEQ ID NO: 3288628 - DNA, 25 bp, Homo sapien
acccgtgtcagggtgaagatgattt

SEQ ID NO: 3288629 - DNA, 25 bp, Homo sapien
tcctgatgaaggacccgtgtcaggg

SEQ ID NO: 3288630 - DNA, 25 bp, Homo sapien
gtcagggtgaagatgatttttgcat

SEQ ID NO: 3288631 - DNA, 25 bp, Homo sapien
gatgaaaagagggatgatgaagagg

SEQ ID NO: 3288632 - DNA, 25 bp, Homo sapien
atgaaaagagggatgatgaagaggc

SEQ ID NO: 3288633 - DNA, 25 bp, Homo sapien
tgaaaagagggatgatgaagaggca

SEQ ID NO: 3288634 - DNA, 25 bp, Homo sapien
gaaaagagggatgatgaagaggcag

SEQ ID NO: 3288635 - DNA, 25 bp, Homo sapien
tgcagtgtgttacacattgagagaa

SEQ ID NO: 3288636 - DNA, 25 bp, Homo sapien
attgtgaaaaactgcagtgtgttac

SEQ ID NO: 3288637 - DNA, 25 bp, Homo sapien
agagctgtctgctagatgaatcatc

SEQ ID NO: 3288638 - DNA, 25 bp, Homo sapien
cagagctgtctgctagatgaatcat

SEQ ID NO: 3288639 - DNA, 25 bp, Homo sapien
acgtagaacctgagaatcttatatt

SEQ ID NO: 3288640 - DNA, 25 bp, Homo sapien
taaggttttagctacttccctctgc

SEQ ID NO: 3288641 - DNA, 25 bp, Homo sapien
ttcacgtagaacctgagaatcttat

SEQ ID NO: 3288642 - DNA, 25 bp, Homo sapien
gaacctgagaatcttatatttcttt

SEQ ID NO: 3288643 - DNA, 25 bp, Homo sapien
tcatctgctattaacattctttgtt

SEQ ID NO: 3288644 - DNA, 25 bp, Homo sapien
caggccaaccatggactgtccgact

SEQ ID NO: 3288645 - DNA, 25 bp, Homo sapien
ccaacaggttggctaaggtcagatg

SEQ ID NO: 3288646 - DNA, 25 bp, Homo sapien
cctgcaaagacactactgaggatcc

SEQ ID NO: 3288647 - DNA, 25 bp, Homo sapien
gaagcattaaaggtcgcagagagca

SEQ ID NO: 3288648 - DNA, 25 bp, Homo sapien
agcttcaagccttgtgtctctggtg

SEQ ID NO: 3288649 - DNA, 25 bp, Homo sapien
aggacagagcttcaagccttgtgtc

SEQ ID NO: 3288650 - DNA, 25 bp, Homo sapien
agagcttcaagccttgtgtctctgg

SEQ ID NO: 3288651 - DNA, 25 bp, Homo sapien
gacagagcttcaagccttgtgtctc

SEQ ID NO: 3288652 - DNA, 25 bp, Homo sapien
tgttgagcactcgaacactggacaa

SEQ ID NO: 3288653 - DNA, 25 bp, Homo sapien
tcttgagcagcttagaccagtcctg

SEQ ID NO: 3288654 - DNA, 25 bp, Homo sapien
tgtaactgtagcacctcagcagatg

SEQ ID NO: 3288655 - DNA, 25 bp, Homo sapien
gaaaagtgtttgtaagtggaccagc

SEQ ID NO: 3288656 - DNA, 25 bp, Homo sapien
taagtgcgttttctagcagcatgaa

SEQ ID NO: 3288657 - DNA, 25 bp, Homo sapien
ttaagtgcgttttctagcagcatga

SEQ ID NO: 3288658 - DNA, 25 bp, Homo sapien
gtgcgttttctagcagcatgaacaa

SEQ ID NO: 3288659 - DNA, 25 bp, Homo sapien
aagtgcgttttctagcagcatgaac

SEQ ID NO: 3288660 - DNA, 25 bp, Homo sapien
gacactaggcttgtttggaagagca

SEQ ID NO: 3288661 - DNA, 25 bp, Homo sapien
tagaatctgtaccaaccagtggtcc

SEQ ID NO: 3288662 - DNA, 25 bp, Homo sapien
tggaagagcacgttcatttctccag

SEQ ID NO: 3288663 - DNA, 25 bp, Homo sapien
taccagcagggaacctttagcaagg

SEQ ID NO: 3288664 - DNA, 25 bp, Homo sapien
gtggctccaggaacccggcacacaa

SEQ ID NO: 3288665 - DNA, 25 bp, Homo sapien
ccacacgtggctccaggaacccggc

SEQ ID NO: 3288666 - DNA, 25 bp, Homo sapien
acgtggctccaggaacccggcacac

SEQ ID NO: 3288667 - DNA, 25 bp, Homo sapien
acacgtggctccaggaacccggcac

SEQ ID NO: 3288668 - DNA, 25 bp, Homo sapien
gatgtgatgactctgccatctgcct

SEQ ID NO: 3288669 - DNA, 25 bp, Homo sapien
cagatgtgatgactctgccatctgc

SEQ ID NO: 3288670 - DNA, 25 bp, Homo sapien
agatgtgatgactctgccatctgcc

SEQ ID NO: 3288671 - DNA, 25 bp, Homo sapien
tccagatgtgatgactctgccatct

SEQ ID NO: 3288672 - DNA, 25 bp, Homo sapien
tgttctgtggaaggctagcttgcca

SEQ ID NO: 3288673 - DNA, 25 bp, Homo sapien
tccgcgtcggtagacattgttctgt

SEQ ID NO: 3288674 - DNA, 25 bp, Homo sapien
gctagcttgccagggccattctcct

SEQ ID NO: 3288675 - DNA, 25 bp, Homo sapien
cagctgttactaagccatgtggctc

SEQ ID NO: 3288676 - DNA, 25 bp, Homo sapien
cacctggttccagagggtaagtcct

SEQ ID NO: 3288677 - DNA, 25 bp, Homo sapien
agctgtctcagtccgtctcagtccc

SEQ ID NO: 3288678 - DNA, 25 bp, Homo sapien
tgctctaggttcctgcaacccagag

SEQ ID NO: 3288679 - DNA, 25 bp, Homo sapien
aagtcctctaatccagctgtctcag

SEQ ID NO: 3288680 - DNA, 25 bp, Homo sapien
gaagattttcggctgccggcattgc

SEQ ID NO: 3288681 - DNA, 25 bp, Homo sapien
ttttcggctgccggcattgcaatgt

SEQ ID NO: 3288682 - DNA, 25 bp, Homo sapien
ttgagaagattttcggctgccggca

SEQ ID NO: 3288683 - DNA, 25 bp, Homo sapien
agattttcggctgccggcattgcaa

SEQ ID NO: 3288684 - DNA, 25 bp, Homo sapien
gattcgttagttcagttgcttaaag

SEQ ID NO: 3288685 - DNA, 25 bp, Homo sapien
ggtgtgctcgataacaatctatacc

SEQ ID NO: 3288686 - DNA, 25 bp, Homo sapien
taagttgcatgaaaaaggtgtgctc

SEQ ID NO: 3288687 - DNA, 25 bp, Homo sapien
tatacctctgtgtaggctagccact

SEQ ID NO: 3288688 - DNA, 25 bp, Homo sapien
agtactaggccaagcttcatttttc

SEQ ID NO: 3288689 - DNA, 25 bp, Homo sapien
ttgtagaactctttgtagtgggtca

SEQ ID NO: 3288690 - DNA, 25 bp, Homo sapien
aaatgagtactaggccaagcttcat

SEQ ID NO: 3288691 - DNA, 25 bp, Homo sapien
tcttgtagaactctttgtagtgggt

SEQ ID NO: 3288692 - DNA, 25 bp, Homo sapien
cattcatgagatggagtttgccagg

SEQ ID NO: 3288693 - DNA, 25 bp, Homo sapien
tgccaggatagacaagacattttat

SEQ ID NO: 3288694 - DNA, 25 bp, Homo sapien
ccaatcatggttttgagtaagtatg

SEQ ID NO: 3288695 - DNA, 25 bp, Homo sapien
cgtccttgtatactaatgtatttgc

SEQ ID NO: 3288696 - DNA, 25 bp, Homo sapien
tacagttcgccaagagttggttgca

SEQ ID NO: 3288697 - DNA, 25 bp, Homo sapien
tcactacgggcatttagcacaactg

SEQ ID NO: 3288698 - DNA, 25 bp, Homo sapien
tacagactttgcaacagggatgcac

SEQ ID NO: 3288699 - DNA, 25 bp, Homo sapien
tttcagcaaatgtatggagcagtcc

SEQ ID NO: 3288700 - DNA, 25 bp, Homo sapien
tggcttatccggcaggccacactga

SEQ ID NO: 3288701 - DNA, 25 bp, Homo sapien
ccagtttgttgcctaatccagtcaa

SEQ ID NO: 3288702 - DNA, 25 bp, Homo sapien
taatccagtcaaggtaggctgtcac

SEQ ID NO: 3288703 - DNA, 25 bp, Homo sapien
tgtcactcgagtatacactcctggc

SEQ ID NO: 3288704 - DNA, 25 bp, Homo sapien
ttcttgtactagtgggccaccagag

SEQ ID NO: 3288705 - DNA, 25 bp, Homo sapien
gccgccgtgagtcttcttgtactag

SEQ ID NO: 3288706 - DNA, 25 bp, Homo sapien
caataaaccaaagccgccgtgagtc

SEQ ID NO: 3288707 - DNA, 25 bp, Homo sapien
ccacaataaaccaaagccgccgtga

SEQ ID NO: 3288708 - DNA, 25 bp, Homo sapien
tgacatgcgtccactccaccttgag

SEQ ID NO: 3288709 - DNA, 25 bp, Homo sapien
ctgacatgcgtccactccaccttga

SEQ ID NO: 3288710 - DNA, 25 bp, Homo sapien
catacatcattacttattattctga

SEQ ID NO: 3288711 - DNA, 25 bp, Homo sapien
cattataactatgtggtgcattaca

SEQ ID NO: 3288712 - DNA, 25 bp, Homo sapien
cattacttattattctgacctgtcc

SEQ ID NO: 3288713 - DNA, 25 bp, Homo sapien
cttattattctgacctgtccttgcc

SEQ ID NO: 3288714 - DNA, 25 bp, Homo sapien
gagcgccccatcctgttacataagc

SEQ ID NO: 3288715 - DNA, 25 bp, Homo sapien
agcatattcttgagcgccccatcct

SEQ ID NO: 3288716 - DNA, 25 bp, Homo sapien
tcttgagcgccccatcctgttacat

SEQ ID NO: 3288717 - DNA, 25 bp, Homo sapien
ttgagcgccccatcctgttacataa

SEQ ID NO: 3288718 - DNA, 25 bp, Homo sapien
tgttctcaagtctcacaagtgcaat

SEQ ID NO: 3288719 - DNA, 25 bp, Homo sapien
gaaataccagacgtggcaatccagt

SEQ ID NO: 3288720 - DNA, 25 bp, Homo sapien
caatccagtcacgaggattagagtt

SEQ ID NO: 3288721 - DNA, 25 bp, Homo sapien
tcatgagttgcagatttataattgt

SEQ ID NO: 3288722 - DNA, 25 bp, Homo sapien
gcaaaaccagactagtcaagaacaa

SEQ ID NO: 3288723 - DNA, 25 bp, Homo sapien
ttgtaacagaagatgaaatatggct

SEQ ID NO: 3288724 - DNA, 25 bp, Homo sapien
tgatggatgccaaaactgtttcgcc

SEQ ID NO: 3288725 - DNA, 25 bp, Homo sapien
gcttgttgaccttctaaagggtcag

SEQ ID NO: 3288726 - DNA, 25 bp, Homo sapien
acaactgttgtggtctgcgatgccc

SEQ ID NO: 3288727 - DNA, 25 bp, Homo sapien
gggtccaatacaaggttcacagagt

SEQ ID NO: 3288728 - DNA, 25 bp, Homo sapien
caatgggaaggtaggtcatgcaacc

SEQ ID NO: 3288729 - DNA, 25 bp, Homo sapien
gtttatgcaacctactcgccactgg

SEQ ID NO: 3288730 - DNA, 25 bp, Homo sapien
catgttattgatcaggctgcctcca

SEQ ID NO: 3288731 - DNA, 25 bp, Homo sapien
tattgagccgcagactgacttgcca

SEQ ID NO: 3288732 - DNA, 25 bp, Homo sapien
cacagtggtgggcattattgagccg

SEQ ID NO: 3288733 - DNA, 25 bp, Homo sapien
tctgctcagacaatgttattaggtc

SEQ ID NO: 3288734 - DNA, 25 bp, Homo sapien
caagactgatgctgtattaccaaac

SEQ ID NO: 3288735 - DNA, 25 bp, Homo sapien
cgtgaatagtctactggccagagct

SEQ ID NO: 3288736 - DNA, 25 bp, Homo sapien
taaaggagtcgctataccacagaat

SEQ ID NO: 3288737 - DNA, 25 bp, Homo sapien
tcacacaactattgctgggctggct

SEQ ID NO: 3288738 - DNA, 25 bp, Homo sapien
aatcactgaagtacctaagataggc

SEQ ID NO: 3288739 - DNA, 25 bp, Homo sapien
taagataggccagctaccaggtaca

SEQ ID NO: 3288740 - DNA, 25 bp, Homo sapien
ggataaaggaggaccaggcttccat

SEQ ID NO: 3288741 - DNA, 25 bp, Homo sapien
ggcatctcccaaacaaataccctag

SEQ ID NO: 3288742 - DNA, 25 bp, Homo sapien
cattaataagccaatttgctgcagc

SEQ ID NO: 3288743 - DNA, 25 bp, Homo sapien
attaataagccaatttgctgcagcc

SEQ ID NO: 3288744 - DNA, 25 bp, Homo sapien
ttaataagccaatttgctgcagcct

SEQ ID NO: 3288745 - DNA, 25 bp, Homo sapien
taataagccaatttgctgcagcctg

SEQ ID NO: 3288746 - DNA, 25 bp, Homo sapien
aaaggctgatatcatttcaccataa

SEQ ID NO: 3288747 - DNA, 25 bp, Homo sapien
aggctgatatcatttcaccataatt

SEQ ID NO: 3288748 - DNA, 25 bp, Homo sapien
gataaatacaataaaggctgatatc

SEQ ID NO: 3288749 - DNA, 25 bp, Homo sapien
ataaatacaataaaggctgatatca

SEQ ID NO: 3288750 - DNA, 25 bp, Homo sapien
aacttgagggatatattgaaataaa

SEQ ID NO: 3288751 - DNA, 25 bp, Homo sapien
ttggtaaacttgagggatatattga

SEQ ID NO: 3288752 - DNA, 25 bp, Homo sapien
gtaaacttgagggatatattgaaat

SEQ ID NO: 3288753 - DNA, 25 bp, Homo sapien
ttgaattggtaaacttgagggatat

SEQ ID NO: 3288754 - DNA, 25 bp, Homo sapien
aatttcatgacaacatccgctctca

SEQ ID NO: 3288755 - DNA, 25 bp, Homo sapien
tttcattgatgctccattgttattt

SEQ ID NO: 3288756 - DNA, 25 bp, Homo sapien
tgtcgtaaaacagactcaattctgc

SEQ ID NO: 3288757 - DNA, 25 bp, Homo sapien
tattcagcatttgtcgtaaaacaga

SEQ ID NO: 3288758 - DNA, 25 bp, Homo sapien
gctctgatgaactgatttcttaaat

SEQ ID NO: 3288759 - DNA, 25 bp, Homo sapien
ctcagtttggcaacatgagctctga

SEQ ID NO: 3288760 - DNA, 25 bp, Homo sapien
catgagctctgatgaactgatttct

SEQ ID NO: 3288761 - DNA, 25 bp, Homo sapien
ggcaacatgagctctgatgaactga

SEQ ID NO: 3288762 - DNA, 25 bp, Homo sapien
ttcttccactcaaagtcctgtattc

SEQ ID NO: 3288763 - DNA, 25 bp, Homo sapien
tcttccactcaaagtcctgtattcc

SEQ ID NO: 3288764 - DNA, 25 bp, Homo sapien
aaactgctcctataaaagtaagatt

SEQ ID NO: 3288765 - DNA, 25 bp, Homo sapien
ttaactgactattatattcaacatt

SEQ ID NO: 3288766 - DNA, 25 bp, Homo sapien
ggagttgaaaactgctcctataaaa

SEQ ID NO: 3288767 - DNA, 25 bp, Homo sapien
aaaactgctcctataaaagtaagat

SEQ ID NO: 3288768 - DNA, 25 bp, Homo sapien
tatgtagctattaaatctgaagagt

SEQ ID NO: 3288769 - DNA, 25 bp, Homo sapien
ctgaagagtaataatgttctggtac

SEQ ID NO: 3288770 - DNA, 25 bp, Homo sapien
caatgtttggtatactcaaaaggta

SEQ ID NO: 3288771 - DNA, 25 bp, Homo sapien
gaatgccagactttaaatctgaaat

SEQ ID NO: 3288772 - DNA, 25 bp, Homo sapien
agtaaacaagtagagctatggtgac

SEQ ID NO: 3288773 - DNA, 25 bp, Homo sapien
aaacaagtagagctatggtgactgc

SEQ ID NO: 3288774 - DNA, 25 bp, Homo sapien
aaaagtaaacaagtagagctatggt

SEQ ID NO: 3288775 - DNA, 25 bp, Homo sapien
gctatggtgactgccaggatcacta

SEQ ID NO: 3288776 - DNA, 25 bp, Homo sapien
cgacaatgaaacatactacatatgg

SEQ ID NO: 3288777 - DNA, 25 bp, Homo sapien
ccctgcgacgacaatgaaacatact

SEQ ID NO: 3288778 - DNA, 25 bp, Homo sapien
tcttgaagtcgaagttacacgtgct

SEQ ID NO: 3288779 - DNA, 25 bp, Homo sapien
tgaagtcgaagttacacgtgctggc

SEQ ID NO: 3288780 - DNA, 25 bp, Homo sapien
gtctttcccggtctcttatctggga

SEQ ID NO: 3288781 - DNA, 25 bp, Homo sapien
ttcccggtctcttatctgggacatg

SEQ ID NO: 3288782 - DNA, 25 bp, Homo sapien
ttagtgttcatgattgtcttctgtc

SEQ ID NO: 3288783 - DNA, 25 bp, Homo sapien
cggtctcttatctgggacatggctc

SEQ ID NO: 3288784 - DNA, 25 bp, Homo sapien
gggtcaggacggtagcatttctcat

SEQ ID NO: 3288785 - DNA, 25 bp, Homo sapien
catattattaaaaatcggcagaggc

SEQ ID NO: 3288786 - DNA, 25 bp, Homo sapien
cccaaggctgtactgaagagagatc

SEQ ID NO: 3288787 - DNA, 25 bp, Homo sapien
cattgcaagattccccatattatta

SEQ ID NO: 3288788 - DNA, 25 bp, Homo sapien
gcctgttacatgcaatcacaaatgc

SEQ ID NO: 3288789 - DNA, 25 bp, Homo sapien
gcaatcacaaatgcatagtgtctgg

SEQ ID NO: 3288790 - DNA, 25 bp, Homo sapien
catagtgtctggtatttgtgatttc

SEQ ID NO: 3288791 - DNA, 25 bp, Homo sapien
tcatggggttattgtgcctgttaca

SEQ ID NO: 3288792 - DNA, 25 bp, Homo sapien
agtagggtttcaagaatgctgctga

SEQ ID NO: 3288793 - DNA, 25 bp, Homo sapien
ccagcaatggtatagctaggaggat

SEQ ID NO: 3288794 - DNA, 25 bp, Homo sapien
atggtatagactgctgagtagggtt

SEQ ID NO: 3288795 - DNA, 25 bp, Homo sapien
gctgacacaagtcggtagtttgcca

SEQ ID NO: 3288796 - DNA, 25 bp, Homo sapien
ggtctgtctgctcgtatatttatta

SEQ ID NO: 3288797 - DNA, 25 bp, Homo sapien
atggatagatcctcccacgactcct

SEQ ID NO: 3288798 - DNA, 25 bp, Homo sapien
tgcaaacactttattcccctggaag

SEQ ID NO: 3288799 - DNA, 25 bp, Homo sapien
tccttcccatggctagcccatggat

SEQ ID NO: 3288800 - DNA, 25 bp, Homo sapien
taaaattatgccaaaattacctaca

SEQ ID NO: 3288801 - DNA, 25 bp, Homo sapien
aattatgccaaaattacctacaatt

SEQ ID NO: 3288802 - DNA, 25 bp, Homo sapien
aaattatgccaaaattacctacaat

SEQ ID NO: 3288803 - DNA, 25 bp, Homo sapien
ttttctgcctactcaactgctttga

SEQ ID NO: 3288804 - DNA, 25 bp, Homo sapien
tgagattcccactcaaatgaatgac

SEQ ID NO: 3288805 - DNA, 25 bp, Homo sapien
ttgagggaatcaacaaaccaatagt

SEQ ID NO: 3288806 - DNA, 25 bp, Homo sapien
tattacgtgtgatctatagttgagg

SEQ ID NO: 3288807 - DNA, 25 bp, Homo sapien
tgaacatccaaagtcagcattaagt

SEQ ID NO: 3288808 - DNA, 25 bp, Homo sapien
caatatctgcttacatgtgacccaa

SEQ ID NO: 3288809 - DNA, 25 bp, Homo sapien
gctgcctaaatgaatctcgtcattt

SEQ ID NO: 3288810 - DNA, 25 bp, Homo sapien
taatacaggttcaatagctctcact

SEQ ID NO: 3288811 - DNA, 25 bp, Homo sapien
aatagttgggacattgccataagcc

SEQ ID NO: 3288812 - DNA, 25 bp, Homo sapien
tatttggctgtagcaatgcgagggc

SEQ ID NO: 3288813 - DNA, 25 bp, Homo sapien
tcttatgccggtgttttgggactaa

SEQ ID NO: 3288814 - DNA, 25 bp, Homo sapien
tctcagttaaaaggagacccttgac

SEQ ID NO: 3288815 - DNA, 25 bp, Homo sapien
tttttgaagcaatccagtttcggta

SEQ ID NO: 3288816 - DNA, 25 bp, Homo sapien
tccaggcttgtccttttgaccacag

SEQ ID NO: 3288817 - DNA, 25 bp, Homo sapien
actccaggcttgtccttttgaccac

SEQ ID NO: 3288818 - DNA, 25 bp, Homo sapien
cagtttcggtaataagtcacttgtg

SEQ ID NO: 3288819 - DNA, 25 bp, Homo sapien
tttcagatcccttgtgactaaaggt

SEQ ID NO: 3288820 - DNA, 25 bp, Homo sapien
caatgagataccacgtatctttcag

SEQ ID NO: 3288821 - DNA, 25 bp, Homo sapien
ttgtgactaaaggtcccccagaatc

SEQ ID NO: 3288822 - DNA, 25 bp, Homo sapien
cacgtatctttcagatcccttgtga

SEQ ID NO: 3288823 - DNA, 25 bp, Homo sapien
ttatatcattgccatacacctgtgg

SEQ ID NO: 3288824 - DNA, 25 bp, Homo sapien
acacctgtggttgcttgcagacatc

SEQ ID NO: 3288825 - DNA, 25 bp, Homo sapien
tttcactctggcttctcggagatca

SEQ ID NO: 3288826 - DNA, 25 bp, Homo sapien
ccttccatatatccggcacagaaca

SEQ ID NO: 3288827 - DNA, 25 bp, Homo sapien
gaagagacctgcacaacagcaatgt

SEQ ID NO: 3288828 - DNA, 25 bp, Homo sapien
ggcttctggcaaacaaatctggcgt

SEQ ID NO: 3288829 - DNA, 25 bp, Homo sapien
tctggcgtatgtcatccgaaaaggt

SEQ ID NO: 3288830 - DNA, 25 bp, Homo sapien
caatgtcgtactctcttgctgcaga

SEQ ID NO: 3288831 - DNA, 25 bp, Homo sapien
ctgcagtgacaagccatgtgttact

SEQ ID NO: 3288832 - DNA, 25 bp, Homo sapien
tgtgttactaatcaaggtggcccca

SEQ ID NO: 3288833 - DNA, 25 bp, Homo sapien
ggccccacactgatggatgttatca

SEQ ID NO: 3288834 - DNA, 25 bp, Homo sapien
tactgaagggaagcttgccaaggcc

SEQ ID NO: 3288835 - DNA, 25 bp, Homo sapien
ttggacagttaactcccctgttgat

SEQ ID NO: 3288836 - DNA, 25 bp, Homo sapien
acagttaactcccctgttgatgagc

SEQ ID NO: 3288837 - DNA, 25 bp, Homo sapien
ggacagttaactcccctgttgatga

SEQ ID NO: 3288838 - DNA, 25 bp, Homo sapien
agttaactcccctgttgatgagctc

SEQ ID NO: 3288839 - DNA, 25 bp, Homo sapien
tatcttctgatttaagatgctttgg

SEQ ID NO: 3288840 - DNA, 25 bp, Homo sapien
tattggcaaggctcttaaattcctt

SEQ ID NO: 3288841 - DNA, 25 bp, Homo sapien
cattaacttgaactgatgaggcatt

SEQ ID NO: 3288842 - DNA, 25 bp, Homo sapien
ttactgccctttgttcagtagaggg

SEQ ID NO: 3288843 - DNA, 25 bp, Homo sapien
gacatctactttcacaccatcttcc

SEQ ID NO: 3288844 - DNA, 25 bp, Homo sapien
aatgacatctactttcacaccatct

SEQ ID NO: 3288845 - DNA, 25 bp, Homo sapien
tgacatctactttcacaccatcttc

SEQ ID NO: 3288846 - DNA, 25 bp, Homo sapien
catctactttcacaccatcttcctc

SEQ ID NO: 3288847 - DNA, 25 bp, Homo sapien
tgtgacacacaaaagaaaggtacat

SEQ ID NO: 3288848 - DNA, 25 bp, Homo sapien
ctgtgacacacaaaagaaaggtaca

SEQ ID NO: 3288849 - DNA, 25 bp, Homo sapien
ctgtgaaaaactctagaggcccatc

SEQ ID NO: 3288850 - DNA, 25 bp, Homo sapien
taggctctggaatataaagatctaa

SEQ ID NO: 3288851 - DNA, 25 bp, Homo sapien
tctaaataactagaattttatgtca

SEQ ID NO: 3288852 - DNA, 25 bp, Homo sapien
gaaaaactctagaggcccatctccc

SEQ ID NO: 3288853 - DNA, 25 bp, Homo sapien
gtcagtctgactacttggttcttga

SEQ ID NO: 3288854 - DNA, 25 bp, Homo sapien
tttcttccaggctgaatctataaat

SEQ ID NO: 3288855 - DNA, 25 bp, Homo sapien
ctgactacttggttcttgatataat

SEQ ID NO: 3288856 - DNA, 25 bp, Homo sapien
cagtctgactacttggttcttgata

SEQ ID NO: 3288857 - DNA, 25 bp, Homo sapien
tctctattacagttcctcctacctt

SEQ ID NO: 3288858 - DNA, 25 bp, Homo sapien
tttctctattacagttcctcctacc

SEQ ID NO: 3288859 - DNA, 25 bp, Homo sapien
ctattacagttcctcctacctttgc

SEQ ID NO: 3288860 - DNA, 25 bp, Homo sapien
tctttctctattacagttcctccta

SEQ ID NO: 3288861 - DNA, 25 bp, Homo sapien
agttgatatgtgttgctttgtccga

SEQ ID NO: 3288862 - DNA, 25 bp, Homo sapien
tctaaaattttaaaggagccatgat

SEQ ID NO: 3288863 - DNA, 25 bp, Homo sapien
caaattttcggtcgtctctcgtaag

SEQ ID NO: 3288864 - DNA, 25 bp, Homo sapien
ggagccatgatagtactcctttttt

SEQ ID NO: 3288865 - DNA, 25 bp, Homo sapien
ggaagtgaaccaggagacctatggt

SEQ ID NO: 3288866 - DNA, 25 bp, Homo sapien
aaatactaggaagtgaaccaggaga

SEQ ID NO: 3288867 - DNA, 25 bp, Homo sapien
caaatactaggaagtgaaccaggag

SEQ ID NO: 3288868 - DNA, 25 bp, Homo sapien
aagtgaaccaggagacctatggtca

SEQ ID NO: 3288869 - DNA, 25 bp, Homo sapien
tgccaccactgtcagggacaacaca

SEQ ID NO: 3288870 - DNA, 25 bp, Homo sapien
gaacggcaatcatccatggcttcag

SEQ ID NO: 3288871 - DNA, 25 bp, Homo sapien
caatgagaacggcaatcatccatgg

SEQ ID NO: 3288872 - DNA, 25 bp, Homo sapien
tttctgcttcgggtgccaaatccca

SEQ ID NO: 3288873 - DNA, 25 bp, Homo sapien
ggtctttaattttgttcaatgtcat

SEQ ID NO: 3288874 - DNA, 25 bp, Homo sapien
aggtctttaattttgttcaatgtca

SEQ ID NO: 3288875 - DNA, 25 bp, Homo sapien
gaagaaagccagagacaggatagtc

SEQ ID NO: 3288876 - DNA, 25 bp, Homo sapien
gaatatgatcttgcaggtctgcacc

SEQ ID NO: 3288877 - DNA, 25 bp, Homo sapien
caggatagtcccaacaagaaagcaa

SEQ ID NO: 3288878 - DNA, 25 bp, Homo sapien
gaacagcaggtatcttacagaagca

SEQ ID NO: 3288879 - DNA, 25 bp, Homo sapien
tccttgaggaagatgtaagataact

SEQ ID NO: 3288880 - DNA, 25 bp, Homo sapien
tcttcaaccgatgttattgtcatcc

SEQ ID NO: 3288881 - DNA, 25 bp, Homo sapien
gagatttttcttcaaccgatgttat

SEQ ID NO: 3288882 - DNA, 25 bp, Homo sapien
ggaagatgtaagataacttctctga

SEQ ID NO: 3288883 - DNA, 25 bp, Homo sapien
ctccaggagcatcagctgctttatc

SEQ ID NO: 3288884 - DNA, 25 bp, Homo sapien
cagctgctttatcaggcagcatggg

SEQ ID NO: 3288885 - DNA, 25 bp, Homo sapien
gcatcagctgctttatcaggcagca

SEQ ID NO: 3288886 - DNA, 25 bp, Homo sapien
aggagcatcagctgctttatcaggc

SEQ ID NO: 3288887 - DNA, 25 bp, Homo sapien
ctctggtggccccttttccactagt

SEQ ID NO: 3288888 - DNA, 25 bp, Homo sapien
gagtcacttcggtataaagtcctgg

SEQ ID NO: 3288889 - DNA, 25 bp, Homo sapien
gattaaactgctggctcactctgaa

SEQ ID NO: 3288890 - DNA, 25 bp, Homo sapien
gccatcaggtacaggaagtgtgcca

SEQ ID NO: 3288891 - DNA, 25 bp, Homo sapien
aatcagagacacttagcagcaatgg

SEQ ID NO: 3288892 - DNA, 25 bp, Homo sapien
caacaaggtaccaggcatttctatc

SEQ ID NO: 3288893 - DNA, 25 bp, Homo sapien
aacaaggtaccaggcatttctatca

SEQ ID NO: 3288894 - DNA, 25 bp, Homo sapien
tattccaacaaggtaccaggcattt

SEQ ID NO: 3288895 - DNA, 25 bp, Homo sapien
ttccaacaaggtaccaggcatttct

SEQ ID NO: 3288896 - DNA, 25 bp, Homo sapien
taaccagaggacctccagaatcacc

SEQ ID NO: 3288897 - DNA, 25 bp, Homo sapien
gtgcaataaccagaggacctccaga

SEQ ID NO: 3288898 - DNA, 25 bp, Homo sapien
aataaccagaggacctccagaatca

SEQ ID NO: 3288899 - DNA, 25 bp, Homo sapien
gcaataaccagaggacctccagaat

SEQ ID NO: 3288900 - DNA, 25 bp, Homo sapien
cctcaacttcccgtagcatattggg

SEQ ID NO: 3288901 - DNA, 25 bp, Homo sapien
tcccgtagcatattgggaaagggac

SEQ ID NO: 3288902 - DNA, 25 bp, Homo sapien
tcattacttatgatctctacctcaa

SEQ ID NO: 3288903 - DNA, 25 bp, Homo sapien
catctagttttcctgacaagaatcc

SEQ ID NO: 3288904 - DNA, 25 bp, Homo sapien
ttgctgagaaactaagtccagattc

SEQ ID NO: 3288905 - DNA, 25 bp, Homo sapien
gagaaactaagtccagattctctac

SEQ ID NO: 3288906 - DNA, 25 bp, Homo sapien
gctgagaaactaagtccagattctc

SEQ ID NO: 3288907 - DNA, 25 bp, Homo sapien
aactaagtccagattctctacagtc

SEQ ID NO: 3288908 - DNA, 25 bp, Homo sapien
agactctgtgcacctcattggaaaa

SEQ ID NO: 3288909 - DNA, 25 bp, Homo sapien
catcctcgtgtttatgggcagcata

SEQ ID NO: 3288910 - DNA, 25 bp, Homo sapien
taggcaaggcttcaaaagtagcttc

SEQ ID NO: 3288911 - DNA, 25 bp, Homo sapien
tgaagagcttcactacagcgatatc

SEQ ID NO: 3288912 - DNA, 25 bp, Homo sapien
tagtgagggattcgggttattccaa

SEQ ID NO: 3288913 - DNA, 25 bp, Homo sapien
tagccatccagagtttgggtttttc

SEQ ID NO: 3288914 - DNA, 25 bp, Homo sapien
ctagccatccagagtttgggttttt

SEQ ID NO: 3288915 - DNA, 25 bp, Homo sapien
agccatccagagtttgggtttttct

SEQ ID NO: 3288916 - DNA, 25 bp, Homo sapien
catccagagtttgggtttttcttca

SEQ ID NO: 3288917 - DNA, 25 bp, Homo sapien
agatgcaccacacaaatggatcccc

SEQ ID NO: 3288918 - DNA, 25 bp, Homo sapien
tgtcaggagccactcttcactgatc

SEQ ID NO: 3288919 - DNA, 25 bp, Homo sapien
tcttcactgatcaaagatgcaccac

SEQ ID NO: 3288920 - DNA, 25 bp, Homo sapien
aaagatgcaccacacaaatggatcc

SEQ ID NO: 3288921 - DNA, 25 bp, Homo sapien
ttttcttgcaatccgaccatcagca

SEQ ID NO: 3288922 - DNA, 25 bp, Homo sapien
cttgccaggccaatcaccttttctt

SEQ ID NO: 3288923 - DNA, 25 bp, Homo sapien
ttggtggatggaaactccttcccta

SEQ ID NO: 3288924 - DNA, 25 bp, Homo sapien
gaccatcagcaattcttttggtgga

SEQ ID NO: 3288925 - DNA, 25 bp, Homo sapien
tgttctgcttgtgctgcattcatat

SEQ ID NO: 3288926 - DNA, 25 bp, Homo sapien
gaatgtgttctgcttgtgctgcatt

SEQ ID NO: 3288927 - DNA, 25 bp, Homo sapien
agaatgtgttctgcttgtgctgcat

SEQ ID NO: 3288928 - DNA, 25 bp, Homo sapien
tgtgttctgcttgtgctgcattcat

SEQ ID NO: 3288929 - DNA, 25 bp, Homo sapien
aggcctggcagtccattctgccagc

SEQ ID NO: 3288930 - DNA, 25 bp, Homo sapien
ccaatccacacttcaaaaccaggaa

SEQ ID NO: 3288931 - DNA, 25 bp, Homo sapien
gtgacagccgaaagcccttgaccat

SEQ ID NO: 3288932 - DNA, 25 bp, Homo sapien
gaactacctggcagactgatacacc

SEQ ID NO: 3288933 - DNA, 25 bp, Homo sapien
tccttgcctctaagataaggtaatg

SEQ ID NO: 3288934 - DNA, 25 bp, Homo sapien
caatacatctgctttcaaattgtca

SEQ ID NO: 3288935 - DNA, 25 bp, Homo sapien
caacttctgatgcaaaatgttatca

SEQ ID NO: 3288936 - DNA, 25 bp, Homo sapien
cagcttgtgtttttattgcgttctc

SEQ ID NO: 3288937 - DNA, 25 bp, Homo sapien
ttatgtaatgatggtttaaattgga

SEQ ID NO: 3288938 - DNA, 25 bp, Homo sapien
ttatattcaatactggggatctgga

SEQ ID NO: 3288939 - DNA, 25 bp, Homo sapien
ggtcggtgctaagttttgagtgttc

SEQ ID NO: 3288940 - DNA, 25 bp, Homo sapien
gactttttgtttcaggtcggtgcta

SEQ ID NO: 3288941 - DNA, 25 bp, Homo sapien
tctggaaggaggtctggtaatagta

SEQ ID NO: 3288942 - DNA, 25 bp, Homo sapien
tcttttttaggaccacacattttca

SEQ ID NO: 3288943 - DNA, 25 bp, Homo sapien
cttttttaggaccacacattttcat

SEQ ID NO: 3288944 - DNA, 25 bp, Homo sapien
tcaccagaatcaacacaacagctct

SEQ ID NO: 3288945 - DNA, 25 bp, Homo sapien
caccagaatcaacacaacagctctg

SEQ ID NO: 3288946 - DNA, 25 bp, Homo sapien
ccatggtttcagtgaactcactctt

SEQ ID NO: 3288947 - DNA, 25 bp, Homo sapien
catggtttcagtgaactcactcttc

SEQ ID NO: 3288948 - DNA, 25 bp, Homo sapien
aactcactcttctacccagtgtcat

SEQ ID NO: 3288949 - DNA, 25 bp, Homo sapien
gtgaactcactcttctacccagtgt

SEQ ID NO: 3288950 - DNA, 25 bp, Homo sapien
cactctgaaggtatagtacttctct

SEQ ID NO: 3288951 - DNA, 25 bp, Homo sapien
ttttgcactctgaaggtatagtact

SEQ ID NO: 3288952 - DNA, 25 bp, Homo sapien
tgcactctgaaggtatagtacttct

SEQ ID NO: 3288953 - DNA, 25 bp, Homo sapien
tctgaaggtatagtacttctcttca

SEQ ID NO: 3288954 - DNA, 25 bp, Homo sapien
gtgctgctttgtgatgtatggtcaa

SEQ ID NO: 3288955 - DNA, 25 bp, Homo sapien
tcttctacttcgtgctgctttgtga

SEQ ID NO: 3288956 - DNA, 25 bp, Homo sapien
gccaactcttctacttcgtgctgct

SEQ ID NO: 3288957 - DNA, 25 bp, Homo sapien
gctgctttgtgatgtatggtcaaat

SEQ ID NO: 3288958 - DNA, 25 bp, Homo sapien
tctagcctgttcgttaaacctttga

SEQ ID NO: 3288959 - DNA, 25 bp, Homo sapien
tagtagttgtctttccaatagtttc

SEQ ID NO: 3288960 - DNA, 25 bp, Homo sapien
cttttctcatagtgaattctagcct

SEQ ID NO: 3288961 - DNA, 25 bp, Homo sapien
tttttcatcaaatagcttagtagtt

SEQ ID NO: 3288962 - DNA, 25 bp, Homo sapien
aaaccaatcaataagtcagacacct

SEQ ID NO: 3288963 - DNA, 25 bp, Homo sapien
cataaggtagacagcttaaggtccc

SEQ ID NO: 3288964 - DNA, 25 bp, Homo sapien
tgttcatcatcaatcaagcccatct

SEQ ID NO: 3288965 - DNA, 25 bp, Homo sapien
aaagtctcacaacaatgccataagg

SEQ ID NO: 3288966 - DNA, 25 bp, Homo sapien
gtaacttcagcaaggacacacagct

SEQ ID NO: 3288967 - DNA, 25 bp, Homo sapien
tgaggagcctggttcaaagtccatg

SEQ ID NO: 3288968 - DNA, 25 bp, Homo sapien
cagagacgatgtttcaacttgagga

SEQ ID NO: 3288969 - DNA, 25 bp, Homo sapien
gctaatccatgagacactaccgtgt

SEQ ID NO: 3288970 - DNA, 25 bp, Homo sapien
tagttcatagtatatgcaaggcact

SEQ ID NO: 3288971 - DNA, 25 bp, Homo sapien
ttatttagttcatagtatatgcaag

SEQ ID NO: 3288972 - DNA, 25 bp, Homo sapien
ttagttcatagtatatgcaaggcac

SEQ ID NO: 3288973 - DNA, 25 bp, Homo sapien
atttagttcatagtatatgcaaggc

SEQ ID NO: 3288974 - DNA, 25 bp, Homo sapien
gaaggtccacttatcagttctagaa

SEQ ID NO: 3288975 - DNA, 25 bp, Homo sapien
ctttctgggccaactgctactaaca

SEQ ID NO: 3288976 - DNA, 25 bp, Homo sapien
cctgtgctcatggaaaaacgttcca

SEQ ID NO: 3288977 - DNA, 25 bp, Homo sapien
aagattttggcattactggcagctc

SEQ ID NO: 3288978 - DNA, 25 bp, Homo sapien
tgtgtataactcatgggcaatccac

SEQ ID NO: 3288979 - DNA, 25 bp, Homo sapien
tacgtatgtaaaggccacctcagga

SEQ ID NO: 3288980 - DNA, 25 bp, Homo sapien
aatacgcaggagtatcagctctgtg

SEQ ID NO: 3288981 - DNA, 25 bp, Homo sapien
gaagggcttcttgacatctagcaaa

SEQ ID NO: 3288982 - DNA, 25 bp, Homo sapien
gattatcataaaccagaggtccacc

SEQ ID NO: 3288983 - DNA, 25 bp, Homo sapien
ctccaggttttttgggaagtgcaca

SEQ ID NO: 3288984 - DNA, 25 bp, Homo sapien
agtctttgaggcaatccaatctcga

SEQ ID NO: 3288985 - DNA, 25 bp, Homo sapien
gaagtgcacatgattgtccccaact

SEQ ID NO: 3288986 - DNA, 25 bp, Homo sapien
tgttacacacatcagtgcttatggt

SEQ ID NO: 3288987 - DNA, 25 bp, Homo sapien
taacattcctggagttatcaggcca

SEQ ID NO: 3288988 - DNA, 25 bp, Homo sapien
ggcttgccgaagtgtattttgtata

SEQ ID NO: 3288989 - DNA, 25 bp, Homo sapien
gcttatggtttccactctggcttgc

SEQ ID NO: 3288990 - DNA, 25 bp, Homo sapien
caaataaacagtattcctcaaatac

SEQ ID NO: 3288991 - DNA, 25 bp, Homo sapien
aataaacagtattcctcaaatacaa

SEQ ID NO: 3288992 - DNA, 25 bp, Homo sapien
cagtattcctcaaatacaattgtat

SEQ ID NO: 3288993 - DNA, 25 bp, Homo sapien
aacagtattcctcaaatacaattgt

SEQ ID NO: 3288994 - DNA, 25 bp, Homo sapien
atcgtgactctagcaacgcctgcca

SEQ ID NO: 3288995 - DNA, 25 bp, Homo sapien
tgactctagcaacgcctgccatcta

SEQ ID NO: 3288996 - DNA, 25 bp, Homo sapien
gtgactctagcaacgcctgccatct

SEQ ID NO: 3288997 - DNA, 25 bp, Homo sapien
tcatcgtgactctagcaacgcctgc

SEQ ID NO: 3288998 - DNA, 25 bp, Homo sapien
ccagagctgttgagacctaaataaa

SEQ ID NO: 3288999 - DNA, 25 bp, Homo sapien
cagtccagtgattgagttcttctcc

SEQ ID NO: 3289000 - DNA, 25 bp, Homo sapien
ctttcatttcagtccagtgattgag

SEQ ID NO: 3289001 - DNA, 25 bp, Homo sapien
acttgccgtccttttgactctttca

SEQ ID NO: 3289002 - DNA, 25 bp, Homo sapien
gctgaaatagggtcactttgaaaac

SEQ ID NO: 3289003 - DNA, 25 bp, Homo sapien
ttggacatctcttgatccgtggatt

SEQ ID NO: 3289004 - DNA, 25 bp, Homo sapien
aaagctgaaatagggtcactttgaa

SEQ ID NO: 3289005 - DNA, 25 bp, Homo sapien
tcttgatccgtggatttccgtagag

SEQ ID NO: 3289006 - DNA, 25 bp, Homo sapien
gacccgtcttcgagagactgacatg

SEQ ID NO: 3289007 - DNA, 25 bp, Homo sapien
tggaactgacccgtcttcgagagac

SEQ ID NO: 3289008 - DNA, 25 bp, Homo sapien
actgacccgtcttcgagagactgac

SEQ ID NO: 3289009 - DNA, 25 bp, Homo sapien
tcttcgagagactgacatgcggatg

SEQ ID NO: 3289010 - DNA, 25 bp, Homo sapien
gacatttctgacacgctcatttggg

SEQ ID NO: 3289011 - DNA, 25 bp, Homo sapien
tgacacgctcatttgggagtcacag

SEQ ID NO: 3289012 - DNA, 25 bp, Homo sapien
ttctgacacgctcatttgggagtca

SEQ ID NO: 3289013 - DNA, 25 bp, Homo sapien
ctgtattctgaaccaagatctggaa

SEQ ID NO: 3289014 - DNA, 25 bp, Homo sapien
ctggagatacttttctaaaacaggt

SEQ ID NO: 3289015 - DNA, 25 bp, Homo sapien
ctgcctctggagatacttttctaaa

SEQ ID NO: 3289016 - DNA, 25 bp, Homo sapien
agctgacaaaaacccaactgcctct

SEQ ID NO: 3289017 - DNA, 25 bp, Homo sapien
acaggtaagttcatgtactccacag

SEQ ID NO: 3289018 - DNA, 25 bp, Homo sapien
taagaaaattaggttgaaactgctc

SEQ ID NO: 3289019 - DNA, 25 bp, Homo sapien
ctaagaaaattaggttgaaactgct

SEQ ID NO: 3289020 - DNA, 25 bp, Homo sapien
tgctaagaaaattaggttgaaactg

SEQ ID NO: 3289021 - DNA, 25 bp, Homo sapien
gctaagaaaattaggttgaaactgc

SEQ ID NO: 3289022 - DNA, 25 bp, Homo sapien
tagagagctgaaccaaagcaatgtc

SEQ ID NO: 3289023 - DNA, 25 bp, Homo sapien
gaaaactcaactccagtagagagct

SEQ ID NO: 3289024 - DNA, 25 bp, Homo sapien
tcctcacatttcgtttcactgcggg

SEQ ID NO: 3289025 - DNA, 25 bp, Homo sapien
cactgcgggtggtgttatagttgca

SEQ ID NO: 3289026 - DNA, 25 bp, Homo sapien
tccttggacaattctttgagtagaa

SEQ ID NO: 3289027 - DNA, 25 bp, Homo sapien
tggcctgaccctatgagctggaggc

SEQ ID NO: 3289028 - DNA, 25 bp, Homo sapien
ggtaatggcatgtttgaagatgtca

SEQ ID NO: 3289029 - DNA, 25 bp, Homo sapien
ccatgtgttactgatgaggctggct

SEQ ID NO: 3289030 - DNA, 25 bp, Homo sapien
catgatcttttactgtgaaataaac

SEQ ID NO: 3289031 - DNA, 25 bp, Homo sapien
tgatcttttactgtgaaataaacag

SEQ ID NO: 3289032 - DNA, 25 bp, Homo sapien
gatcttttactgtgaaataaacagt

SEQ ID NO: 3289033 - DNA, 25 bp, Homo sapien
tcttttactgtgaaataaacagtta

SEQ ID NO: 3289034 - DNA, 25 bp, Homo sapien
gactgttgagaagattcctcatctt

SEQ ID NO: 3289035 - DNA, 25 bp, Homo sapien
gattcctcatctttttgctgtcaat

SEQ ID NO: 3289036 - DNA, 25 bp, Homo sapien
ttcctcatctttttgctgtcaatag

SEQ ID NO: 3289037 - DNA, 25 bp, Homo sapien
aagattcctcatctttttgctgtca

SEQ ID NO: 3289038 - DNA, 25 bp, Homo sapien
tattcccattttcatgttgtgttgt

SEQ ID NO: 3289039 - DNA, 25 bp, Homo sapien
gcaaaacatgaattagttggcagaa

SEQ ID NO: 3289040 - DNA, 25 bp, Homo sapien
gttggcagaagaatatattcccatt

SEQ ID NO: 3289041 - DNA, 25 bp, Homo sapien
tgttgttcaactggtcattaataga

SEQ ID NO: 3289042 - DNA, 25 bp, Homo sapien
ataagaatatccacaccttgttcat

SEQ ID NO: 3289043 - DNA, 25 bp, Homo sapien
gtgtgagtctaaatgatggtttgtt

SEQ ID NO: 3289044 - DNA, 25 bp, Homo sapien
gatgggtatcgaaatatgagcacta

SEQ ID NO: 3289045 - DNA, 25 bp, Homo sapien
tggtttgtttatggtcaaagacaat

SEQ ID NO: 3289046 - DNA, 25 bp, Homo sapien
gcctacagaagaatgtcgaaatatc

SEQ ID NO: 3289047 - DNA, 25 bp, Homo sapien
gatttgataaatcgaccgcctacag

SEQ ID NO: 3289048 - DNA, 25 bp, Homo sapien
catgagatttgataaatcgaccgcc

SEQ ID NO: 3289049 - DNA, 25 bp, Homo sapien
taaatcgaccgcctacagaagaatg

SEQ ID NO: 3289050 - DNA, 25 bp, Homo sapien
tcactccatcggttacttctctttc

SEQ ID NO: 3289051 - DNA, 25 bp, Homo sapien
tccacaatagaaaatcaactgtctc

SEQ ID NO: 3289052 - DNA, 25 bp, Homo sapien
actctggtctgacaatatcaggcaa

SEQ ID NO: 3289053 - DNA, 25 bp, Homo sapien
tgctaaaaggatagcaatagcaaca

SEQ ID NO: 3289054 - DNA, 25 bp, Homo sapien
cagcatcaagataaggattcctctt

SEQ ID NO: 3289055 - DNA, 25 bp, Homo sapien
cattttaggttcttgcctacaaagg

SEQ ID NO: 3289056 - DNA, 25 bp, Homo sapien
ttcctctttgaagtatggtccccac

SEQ ID NO: 3289057 - DNA, 25 bp, Homo sapien
ttgggacattagcttgtcacaaggg

SEQ ID NO: 3289058 - DNA, 25 bp, Homo sapien
tgcaaatttcctgttactgtcaagg

SEQ ID NO: 3289059 - DNA, 25 bp, Homo sapien
caaatttcctgttactgtcaaggga

SEQ ID NO: 3289060 - DNA, 25 bp, Homo sapien
tcaagggaatatgtgccagcagagg

SEQ ID NO: 3289061 - DNA, 25 bp, Homo sapien
ttactgtcaagggaatatgtgccag

SEQ ID NO: 3289062 - DNA, 25 bp, Homo sapien
ctgatgactcctttctataaactct

SEQ ID NO: 3289063 - DNA, 25 bp, Homo sapien
tatttgtgactttaaaagaggcaag

SEQ ID NO: 3289064 - DNA, 25 bp, Homo sapien
ggcaaggtaatagaaagacttatca

SEQ ID NO: 3289065 - DNA, 25 bp, Homo sapien
gactcctttctataaactctcttga

SEQ ID NO: 3289066 - DNA, 25 bp, Homo sapien
tacattcctggaagtggatccagcc

SEQ ID NO: 3289067 - DNA, 25 bp, Homo sapien
ctacattcctggaagtggatccagc

SEQ ID NO: 3289068 - DNA, 25 bp, Homo sapien
tcagctcgtgagaattcagcttctg

SEQ ID NO: 3289069 - DNA, 25 bp, Homo sapien
gagctagccgtactgagtcccaaaa

SEQ ID NO: 3289070 - DNA, 25 bp, Homo sapien
tgattgctacaattgctaatgtgaa

SEQ ID NO: 3289071 - DNA, 25 bp, Homo sapien
caataccaattgcaattcctatgat

SEQ ID NO: 3289072 - DNA, 25 bp, Homo sapien
tttgactcacatgaccccactggtg

SEQ ID NO: 3289073 - DNA, 25 bp, Homo sapien
atttgactcacatgaccccactggt

SEQ ID NO: 3289074 - DNA, 25 bp, Homo sapien
gactcacatgaccccactggtgcat

SEQ ID NO: 3289075 - DNA, 25 bp, Homo sapien
tgactcacatgaccccactggtgca

SEQ ID NO: 3289076 - DNA, 25 bp, Homo sapien
gccatgtacccaatgagcacacctt

SEQ ID NO: 3289077 - DNA, 25 bp, Homo sapien
gaagatcctccataatggagccctg

SEQ ID NO: 3289078 - DNA, 25 bp, Homo sapien
tctccagcctttacatgccatgtac

SEQ ID NO: 3289079 - DNA, 25 bp, Homo sapien
tgctgaatttcacacggactacagt

SEQ ID NO: 3289080 - DNA, 25 bp, Homo sapien
tattcaagttgggaagtgaggtaag

SEQ ID NO: 3289081 - DNA, 25 bp, Homo sapien
ataatgaactgcaagtctatcttag

SEQ ID NO: 3289082 - DNA, 25 bp, Homo sapien
tgaactgcaagtctatcttagccat

SEQ ID NO: 3289083 - DNA, 25 bp, Homo sapien
gttgcctttactatgttccttgata

SEQ ID NO: 3289084 - DNA, 25 bp, Homo sapien
tcagtcaccatctgatctgtatcag

SEQ ID NO: 3289085 - DNA, 25 bp, Homo sapien
actggggcagcttctattcagtcac

SEQ ID NO: 3289086 - DNA, 25 bp, Homo sapien
catctgatctgtatcagcaggttag

SEQ ID NO: 3289087 - DNA, 25 bp, Homo sapien
ctggggcagcttctattcagtcacc

SEQ ID NO: 3289088 - DNA, 25 bp, Homo sapien
tatttctagtgttgtgatgtgggta

SEQ ID NO: 3289089 - DNA, 25 bp, Homo sapien
ctagtgttgtgatgtgggtatttca

SEQ ID NO: 3289090 - DNA, 25 bp, Homo sapien
tgtgatgtgggtatttcatgttata

SEQ ID NO: 3289091 - DNA, 25 bp, Homo sapien
gatatttctagtgttgtgatgtggg

SEQ ID NO: 3289092 - DNA, 25 bp, Homo sapien
caatcagaaatagctaaaggacaca

SEQ ID NO: 3289093 - DNA, 25 bp, Homo sapien
gcttactccatgcagtgtggctgcc

SEQ ID NO: 3289094 - DNA, 25 bp, Homo sapien
agcttactccatgcagtgtggctgc

SEQ ID NO: 3289095 - DNA, 25 bp, Homo sapien
tagcttactccatgcagtgtggctg

SEQ ID NO: 3289096 - DNA, 25 bp, Homo sapien
cccagagtctgtggaagacgcaaaa

SEQ ID NO: 3289097 - DNA, 25 bp, Homo sapien
cagaagccgtcctgggatgaatagg

SEQ ID NO: 3289098 - DNA, 25 bp, Homo sapien
tgggcgcaaagcatgcagactctca

SEQ ID NO: 3289099 - DNA, 25 bp, Homo sapien
ttactgcaccgaagtggaagccgcc

SEQ ID NO: 3289100 - DNA, 25 bp, Homo sapien
cctggactattgattgcaccacatt

SEQ ID NO: 3289101 - DNA, 25 bp, Homo sapien
tggtcactcacgtgtagacccctgg

SEQ ID NO: 3289102 - DNA, 25 bp, Homo sapien
cagttgcagtaggtggtcactcacg

SEQ ID NO: 3289103 - DNA, 25 bp, Homo sapien
taaacacccgtctcagaggtaatcc

SEQ ID NO: 3289104 - DNA, 25 bp, Homo sapien
tttagagaattaggatgaactagtg

SEQ ID NO: 3289105 - DNA, 25 bp, Homo sapien
gagaattaggatgaactagtggtcc

SEQ ID NO: 3289106 - DNA, 25 bp, Homo sapien
aattaggatgaactagtggtcctcc

SEQ ID NO: 3289107 - DNA, 25 bp, Homo sapien
aggatgaactagtggtcctccagag

SEQ ID NO: 3289108 - DNA, 25 bp, Homo sapien
tagcattacaagtgtttgtatcagt

SEQ ID NO: 3289109 - DNA, 25 bp, Homo sapien
ccagcacatagcactctatcctgta

SEQ ID NO: 3289110 - DNA, 25 bp, Homo sapien
tatcctgtaccatactacgataggc

SEQ ID NO: 3289111 - DNA, 25 bp, Homo sapien
ctggcaggcgtctatatttccttcc

SEQ ID NO: 3289112 - DNA, 25 bp, Homo sapien
tatgttaagttttcactgatcttac

SEQ ID NO: 3289113 - DNA, 25 bp, Homo sapien
ggtatgttaagttttcactgatctt

SEQ ID NO: 3289114 - DNA, 25 bp, Homo sapien
atggtatgttaagttttcactgatc

SEQ ID NO: 3289115 - DNA, 25 bp, Homo sapien
tggtatgttaagttttcactgatct

SEQ ID NO: 3289116 - DNA, 25 bp, Homo sapien
tagtgagcagtataagtgcgatatc

SEQ ID NO: 3289117 - DNA, 25 bp, Homo sapien
ggaagacaaactcgatgtacatcat

SEQ ID NO: 3289118 - DNA, 25 bp, Homo sapien
agtcttccccatcctgtaacaacaa

SEQ ID NO: 3289119 - DNA, 25 bp, Homo sapien
catcatgatgttcatcctggatgta

SEQ ID NO: 3289120 - DNA, 25 bp, Homo sapien
aagctgacagtatagttttttggat

SEQ ID NO: 3289121 - DNA, 25 bp, Homo sapien
tttcgtgccaaagctgacagtatag

SEQ ID NO: 3289122 - DNA, 25 bp, Homo sapien
gagttactttcgtgccaaagctgac

SEQ ID NO: 3289123 - DNA, 25 bp, Homo sapien
atagggaagagttactttcgtgcca

SEQ ID NO: 3289124 - DNA, 25 bp, Homo sapien
gatgccccacagtagtgttgcccac

SEQ ID NO: 3289125 - DNA, 25 bp, Homo sapien
ccacagtagtgttgcccactcattt

SEQ ID NO: 3289126 - DNA, 25 bp, Homo sapien
tgcccactcattttaaggcttgctt

SEQ ID NO: 3289127 - DNA, 25 bp, Homo sapien
ctttcactgatcaatgatgccccac

SEQ ID NO: 3289128 - DNA, 25 bp, Homo sapien
cctcccctgactctatcaaatgtag

SEQ ID NO: 3289129 - DNA, 25 bp, Homo sapien
ctctatcaaatgtaggtggcatcct

SEQ ID NO: 3289130 - DNA, 25 bp, Homo sapien
tctccttcctgatcaatggaacctc

SEQ ID NO: 3289131 - DNA, 25 bp, Homo sapien
aggtggcatccttgctcgtctccca

SEQ ID NO: 3289132 - DNA, 25 bp, Homo sapien
tttgcagcactgaccttactgattt

SEQ ID NO: 3289133 - DNA, 25 bp, Homo sapien
ggttgttgataatttttgcagcact

SEQ ID NO: 3289134 - DNA, 25 bp, Homo sapien
aatttttgcagcactgaccttactg

SEQ ID NO: 3289135 - DNA, 25 bp, Homo sapien
gttgataatttttgcagcactgacc

SEQ ID NO: 3289136 - DNA, 25 bp, Homo sapien
tacctttaggttaagcacaggacca

SEQ ID NO: 3289137 - DNA, 25 bp, Homo sapien
cattgatcttggacccttgaatacc

SEQ ID NO: 3289138 - DNA, 25 bp, Homo sapien
cagatctgtagtcaaggatcctgag

SEQ ID NO: 3289139 - DNA, 25 bp, Homo sapien
ctctgttgttatcaggactggaaac

SEQ ID NO: 3289140 - DNA, 25 bp, Homo sapien
gagctagccaattagacacgcagga

SEQ ID NO: 3289141 - DNA, 25 bp, Homo sapien
ttaaatggcaaaggctaggctcagg

SEQ ID NO: 3289142 - DNA, 25 bp, Homo sapien
catagtcctgcgacactgatggaaa

SEQ ID NO: 3289143 - DNA, 25 bp, Homo sapien
catctctgagagatatctgggccct

SEQ ID NO: 3289144 - DNA, 25 bp, Homo sapien
ttgctattatatgggatatccagca

SEQ ID NO: 3289145 - DNA, 25 bp, Homo sapien
tttcataattgctattatatgggat

SEQ ID NO: 3289146 - DNA, 25 bp, Homo sapien
ttggctaagatagttattttctggt

SEQ ID NO: 3289147 - DNA, 25 bp, Homo sapien
aagatagttattttctggtgatgtc

SEQ ID NO: 3289148 - DNA, 25 bp, Homo sapien
ttaaagctaccttggtagaagtaga

SEQ ID NO: 3289149 - DNA, 25 bp, Homo sapien
gctaccttggtagaagtagatcctg

SEQ ID NO: 3289150 - DNA, 25 bp, Homo sapien
ccttggtagaagtagatcctgtttg

SEQ ID NO: 3289151 - DNA, 25 bp, Homo sapien
aagctaccttggtagaagtagatcc

SEQ ID NO: 3289152 - DNA, 25 bp, Homo sapien
gttccaatcttccagctaaggcaac

SEQ ID NO: 3289153 - DNA, 25 bp, Homo sapien
ttattgtatatgttccaatcttcca

SEQ ID NO: 3289154 - DNA, 25 bp, Homo sapien
atcttccagctaaggcaacttgctg

SEQ ID NO: 3289155 - DNA, 25 bp, Homo sapien
tgaaatcatacaattgtgacatttt

SEQ ID NO: 3289156 - DNA, 25 bp, Homo sapien
aagaagggcaatcatccatagtgac

SEQ ID NO: 3289157 - DNA, 25 bp, Homo sapien
caatagttattccaaagattgccaa

SEQ ID NO: 3289158 - DNA, 25 bp, Homo sapien
aatagttattccaaagattgccaac

SEQ ID NO: 3289159 - DNA, 25 bp, Homo sapien
tagttattccaaagattgccaacac

SEQ ID NO: 3289160 - DNA, 25 bp, Homo sapien
ctgatataatggctgttgaagtaaa

SEQ ID NO: 3289161 - DNA, 25 bp, Homo sapien
gatataatggctgttgaagtaaata

SEQ ID NO: 3289162 - DNA, 25 bp, Homo sapien
tgctgatataatggctgttgaagta

SEQ ID NO: 3289163 - DNA, 25 bp, Homo sapien
atataatggctgttgaagtaaataa

SEQ ID NO: 3289164 - DNA, 25 bp, Homo sapien
ccaaagccacagataaggatagcct

SEQ ID NO: 3289165 - DNA, 25 bp, Homo sapien
gaaagactcagtgtagctggagctc

SEQ ID NO: 3289166 - DNA, 25 bp, Homo sapien
cagatgatggagagtgactttaacc

SEQ ID NO: 3289167 - DNA, 25 bp, Homo sapien
tttactataaggagatgccacacag

SEQ ID NO: 3289168 - DNA, 25 bp, Homo sapien
gatgtaatccaattgcgataagaag

SEQ ID NO: 3289169 - DNA, 25 bp, Homo sapien
cagagtccagtcttggatgtaatcc

SEQ ID NO: 3289170 - DNA, 25 bp, Homo sapien
tccaattgcgataagaagtcactcg

SEQ ID NO: 3289171 - DNA, 25 bp, Homo sapien
taagaagtcactcgagtatagacac

SEQ ID NO: 3289172 - DNA, 25 bp, Homo sapien
tactattccaacaagatgccagata

SEQ ID NO: 3289173 - DNA, 25 bp, Homo sapien
taagctagtggtccaccagaatcat

SEQ ID NO: 3289174 - DNA, 25 bp, Homo sapien
atcagggtaagctagtggtccacca

SEQ ID NO: 3289175 - DNA, 25 bp, Homo sapien
ttttaccacatccatcaccccagct

SEQ ID NO: 3289176 - DNA, 25 bp, Homo sapien
ggcattgcaaattttgttgtcaata

SEQ ID NO: 3289177 - DNA, 25 bp, Homo sapien
cagagtatgcatatgaggcattgca

SEQ ID NO: 3289178 - DNA, 25 bp, Homo sapien
ccagcacataacattgtatcagtca

SEQ ID NO: 3289179 - DNA, 25 bp, Homo sapien
acaaagccagagtatgcatatgagg

SEQ ID NO: 3289180 - DNA, 25 bp, Homo sapien
ttcaggaagacaaatcttacgaatg

SEQ ID NO: 3289181 - DNA, 25 bp, Homo sapien
ggcttcaggaagacaaatcttacga

SEQ ID NO: 3289182 - DNA, 25 bp, Homo sapien
gcttcaggaagacaaatcttacgaa

SEQ ID NO: 3289183 - DNA, 25 bp, Homo sapien
ttttctgagagcttcattttggctt

SEQ ID NO: 3289184 - DNA, 25 bp, Homo sapien
gactttccgtgtcatatatggttta

SEQ ID NO: 3289185 - DNA, 25 bp, Homo sapien
cacaagggcaatatcatcatgaagc

SEQ ID NO: 3289186 - DNA, 25 bp, Homo sapien
gaagcccaggactgctataattttc

SEQ ID NO: 3289187 - DNA, 25 bp, Homo sapien
caattccaaagttgacagtccaatc

SEQ ID NO: 3289188 - DNA, 25 bp, Homo sapien
actgttcttagtggtgattatctca

SEQ ID NO: 3289189 - DNA, 25 bp, Homo sapien
ttagaatacactcagttgctgggtc

SEQ ID NO: 3289190 - DNA, 25 bp, Homo sapien
ctagaggacacaatgtaattagaat

SEQ ID NO: 3289191 - DNA, 25 bp, Homo sapien
acactgttcttagtggtgattatct

SEQ ID NO: 3289192 - DNA, 25 bp, Homo sapien
gcagtgagctgcagataatagccac

SEQ ID NO: 3289193 - DNA, 25 bp, Homo sapien
ggagctttttccattcacaattttg

SEQ ID NO: 3289194 - DNA, 25 bp, Homo sapien
tagtgacggcctttccattgcatgc

SEQ ID NO: 3289195 - DNA, 25 bp, Homo sapien
gagaggctccacagtagtgacggcc

SEQ ID NO: 3289196 - DNA, 25 bp, Homo sapien
gatactgttggctacttgtctccca

SEQ ID NO: 3289197 - DNA, 25 bp, Homo sapien
gttgttggtaagcatttcagaagca

SEQ ID NO: 3289198 - DNA, 25 bp, Homo sapien
agttgttggtaagcatttcagaagc

SEQ ID NO: 3289199 - DNA, 25 bp, Homo sapien
cacatttgaaccattggcattaggc

SEQ ID NO: 3289200 - DNA, 25 bp, Homo sapien
tagtcctcatgctaactccttctgc

SEQ ID NO: 3289201 - DNA, 25 bp, Homo sapien
tgaatttcagctgtaactgcacatt

SEQ ID NO: 3289202 - DNA, 25 bp, Homo sapien
catgagtttaatggaagcaggaact

SEQ ID NO: 3289203 - DNA, 25 bp, Homo sapien
catccttcaaaggtgtgtctagaca

SEQ ID NO: 3289204 - DNA, 25 bp, Homo sapien
ccaaattacaagtgggctctaccct

SEQ ID NO: 3289205 - DNA, 25 bp, Homo sapien
tctttgttccacagccattgtaagg

SEQ ID NO: 3289206 - DNA, 25 bp, Homo sapien
tgatcaattctagggtctttgaagg

SEQ ID NO: 3289207 - DNA, 25 bp, Homo sapien
tgatgacctcagatttgacatattc

SEQ ID NO: 3289208 - DNA, 25 bp, Homo sapien
gatgacctcagatttgacatattcc

SEQ ID NO: 3289209 - DNA, 25 bp, Homo sapien
atgacctcagatttgacatattcct

SEQ ID NO: 3289210 - DNA, 25 bp, Homo sapien
tggaattttgaaatgcatttaacat

SEQ ID NO: 3289211 - DNA, 25 bp, Homo sapien
tatcattgtatgtgactccagaaat

SEQ ID NO: 3289212 - DNA, 25 bp, Homo sapien
tttcacaattatcattgtatgtgac

SEQ ID NO: 3289213 - DNA, 25 bp, Homo sapien
aattatcattgtatgtgactccaga

SEQ ID NO: 3289214 - DNA, 25 bp, Homo sapien
ttgtgaagctgcgttttcacaatta

SEQ ID NO: 3289215 - DNA, 25 bp, Homo sapien
ctggcctggtttccattccttgatg

SEQ ID NO: 3289216 - DNA, 25 bp, Homo sapien
tggcctggtttccattccttgatgt

SEQ ID NO: 3289217 - DNA, 25 bp, Homo sapien
ggcctggtttccattccttgatgtt

SEQ ID NO: 3289218 - DNA, 25 bp, Homo sapien
gctggcctggtttccattccttgat

SEQ ID NO: 3289219 - DNA, 25 bp, Homo sapien
gaacaagaagaccaatggttactcc

SEQ ID NO: 3289220 - DNA, 25 bp, Homo sapien
gaagaccaatggttactcccaagat

SEQ ID NO: 3289221 - DNA, 25 bp, Homo sapien
aagaagaccaatggttactcccaag

SEQ ID NO: 3289222 - DNA, 25 bp, Homo sapien
accaatggttactcccaagattgcc

SEQ ID NO: 3289223 - DNA, 25 bp, Homo sapien
gaaaaataaagatcgtagtccatag

SEQ ID NO: 3289224 - DNA, 25 bp, Homo sapien
ataaagatcgtagtccatagtggcc

SEQ ID NO: 3289225 - DNA, 25 bp, Homo sapien
aaagatcgtagtccatagtggccaa

SEQ ID NO: 3289226 - DNA, 25 bp, Homo sapien
aaataaagatcgtagtccatagtgg

SEQ ID NO: 3289227 - DNA, 25 bp, Homo sapien
aaactagaacatacttaatggcaac

SEQ ID NO: 3289228 - DNA, 25 bp, Homo sapien
agggtctgtagacctcagacaatag

SEQ ID NO: 3289229 - DNA, 25 bp, Homo sapien
taatggcaacttgctacattttgcc

SEQ ID NO: 3289230 - DNA, 25 bp, Homo sapien
tcagacaatagagtgtttcttaaca

SEQ ID NO: 3289231 - DNA, 25 bp, Homo sapien
gacaatgctggtaatagtgatgaca

SEQ ID NO: 3289232 - DNA, 25 bp, Homo sapien
tatggcagtatcaggtataacggtg

SEQ ID NO: 3289233 - DNA, 25 bp, Homo sapien
gatgatgacgaagataacgataacg

SEQ ID NO: 3289234 - DNA, 25 bp, Homo sapien
tataacggtggtaatgatgatgacg

SEQ ID NO: 3289235 - DNA, 25 bp, Homo sapien
tgaggttctctaacttcccacgggc

SEQ ID NO: 3289236 - DNA, 25 bp, Homo sapien
tgctctaatatcagaaatagccact

SEQ ID NO: 3289237 - DNA, 25 bp, Homo sapien
tcagaaatagccactgtagactgat

SEQ ID NO: 3289238 - DNA, 25 bp, Homo sapien
tttcacacgcatccattcttccttt

SEQ ID NO: 3289239 - DNA, 25 bp, Homo sapien
attgtcagccgtggtggtaatctca

SEQ ID NO: 3289240 - DNA, 25 bp, Homo sapien
tttgctcagagctgtgctaggctgt

SEQ ID NO: 3289241 - DNA, 25 bp, Homo sapien
tttttcacaactaccattgtaggtg

SEQ ID NO: 3289242 - DNA, 25 bp, Homo sapien
ggtaatctcatttcaaagctatgta

SEQ ID NO: 3289243 - DNA, 25 bp, Homo sapien
gctcaagtccaatataacagctgct

SEQ ID NO: 3289244 - DNA, 25 bp, Homo sapien
ctttcatgtttctaatcactgatcc

SEQ ID NO: 3289245 - DNA, 25 bp, Homo sapien
tttcatgtttctaatcactgatccc

SEQ ID NO: 3289246 - DNA, 25 bp, Homo sapien
ttcatgtttctaatcactgatccca

SEQ ID NO: 3289247 - DNA, 25 bp, Homo sapien
tgcagagctgaggaccacatcttcc

SEQ ID NO: 3289248 - DNA, 25 bp, Homo sapien
tgaggaccacatcttccatttcctt

SEQ ID NO: 3289249 - DNA, 25 bp, Homo sapien
caaaagagtaagaccacagcaaacg

SEQ ID NO: 3289250 - DNA, 25 bp, Homo sapien
gaagaaagaattttctccatcacaa

SEQ ID NO: 3289251 - DNA, 25 bp, Homo sapien
tcttctattactatatatccgtgta

SEQ ID NO: 3289252 - DNA, 25 bp, Homo sapien
ttgttgtggataacaggtggaggca

SEQ ID NO: 3289253 - DNA, 25 bp, Homo sapien
gcttgttgtggataacaggtggagg

SEQ ID NO: 3289254 - DNA, 25 bp, Homo sapien
tactatatatccgtgtaaaccccag

SEQ ID NO: 3289255 - DNA, 25 bp, Homo sapien
gctcatcaaccttcatgggattttg

SEQ ID NO: 3289256 - DNA, 25 bp, Homo sapien
agactttgaaggtgaacaagcgtag

SEQ ID NO: 3289257 - DNA, 25 bp, Homo sapien
cgtaggctggttggcctcacggacc

SEQ ID NO: 3289258 - DNA, 25 bp, Homo sapien
catcaaccttcatgggattttgagg

SEQ ID NO: 3289259 - DNA, 25 bp, Homo sapien
gataaaccaggcttgcatgccaggg

SEQ ID NO: 3289260 - DNA, 25 bp, Homo sapien
tctgccttggatatgaaagtgattc

SEQ ID NO: 3289261 - DNA, 25 bp, Homo sapien
tacaatttggccatgaaaccttctg

SEQ ID NO: 3289262 - DNA, 25 bp, Homo sapien
aagtgattagagtgagaatcctccc

SEQ ID NO: 3289263 - DNA, 25 bp, Homo sapien
aaatacagattggattacggctggc

SEQ ID NO: 3289264 - DNA, 25 bp, Homo sapien
cagtcacccttacgttgggtcaggg

SEQ ID NO: 3289265 - DNA, 25 bp, Homo sapien
tgacaagacaggatgtatgtgaccc

SEQ ID NO: 3289266 - DNA, 25 bp, Homo sapien
gaaaaatcctctgcttaagcctgaa

SEQ ID NO: 3289267 - DNA, 25 bp, Homo sapien
acaggcctaggtcaatcatttctgc

SEQ ID NO: 3289268 - DNA, 25 bp, Homo sapien
cagggaaagatactacatgctggta

SEQ ID NO: 3289269 - DNA, 25 bp, Homo sapien
tgacttaccatgtatcactaaccgg

SEQ ID NO: 3289270 - DNA, 25 bp, Homo sapien
ggttaccactgggagaactggacag

SEQ ID NO: 3289271 - DNA, 25 bp, Homo sapien
tcaaccacgctactgaacataggaa

SEQ ID NO: 3289272 - DNA, 25 bp, Homo sapien
aatatgggaatcgtcttccgctgcc

SEQ ID NO: 3289273 - DNA, 25 bp, Homo sapien
cgctgccacgcacgcaagttgtgaa

SEQ ID NO: 3289274 - DNA, 25 bp, Homo sapien
caagccaatgtatacaatttggagg

SEQ ID NO: 3289275 - DNA, 25 bp, Homo sapien
acaagaggctgctacaacactgcca

SEQ ID NO: 3289276 - DNA, 25 bp, Homo sapien
ggaaaaaaacaagaggctgctacaa

SEQ ID NO: 3289277 - DNA, 25 bp, Homo sapien
gaggctgctacaacactgccataca

SEQ ID NO: 3289278 - DNA, 25 bp, Homo sapien
tacaacactgccatacagtcaaacc

SEQ ID NO: 3289279 - DNA, 25 bp, Homo sapien
acttcaatatttgcatactcgatag

SEQ ID NO: 3289280 - DNA, 25 bp, Homo sapien
gcatactcgatagcagcattatttt

SEQ ID NO: 3289281 - DNA, 25 bp, Homo sapien
tatttgcatactcgatagcagcatt

SEQ ID NO: 3289282 - DNA, 25 bp, Homo sapien
caatatttgcatactcgatagcagc

SEQ ID NO: 3289283 - DNA, 25 bp, Homo sapien
gatactgcatgcttggaacaaaggg

SEQ ID NO: 3289284 - DNA, 25 bp, Homo sapien
gtatctacattcttggactgttcca

SEQ ID NO: 3289285 - DNA, 25 bp, Homo sapien
tcatggcagttatcaatcaagatcc

SEQ ID NO: 3289286 - DNA, 25 bp, Homo sapien
gaacttcataggcagacagctgaaa

SEQ ID NO: 3289287 - DNA, 25 bp, Homo sapien
tctagggcggtctcgctctcgttcc

SEQ ID NO: 3289288 - DNA, 25 bp, Homo sapien
tctgtctcgtctgttatctctaggg

SEQ ID NO: 3289289 - DNA, 25 bp, Homo sapien
cctcggtctctgtctcgatcacata

SEQ ID NO: 3289290 - DNA, 25 bp, Homo sapien
ttatcttctatatcgacctctctcc

SEQ ID NO: 3289291 - DNA, 25 bp, Homo sapien
actgacaacagcttgtgtgcgacga

SEQ ID NO: 3289292 - DNA, 25 bp, Homo sapien
cagcttgtgtgcgacgaaggaaatc

SEQ ID NO: 3289293 - DNA, 25 bp, Homo sapien
caacagcttgtgtgcgacgaaggaa

SEQ ID NO: 3289294 - DNA, 25 bp, Homo sapien
tgtgtgcgacgaaggaaatcatcca

SEQ ID NO: 3289295 - DNA, 25 bp, Homo sapien
tgatcccttcagtaagatttaggcc

SEQ ID NO: 3289296 - DNA, 25 bp, Homo sapien
tataatcggcggagagaacaatcca

SEQ ID NO: 3289297 - DNA, 25 bp, Homo sapien
ttctggcacaggctagctctacatt

SEQ ID NO: 3289298 - DNA, 25 bp, Homo sapien
ggcaaatagtgttaagtggatccct

SEQ ID NO: 3289299 - DNA, 25 bp, Homo sapien
tatgcttccaacacttgccagaaga

SEQ ID NO: 3289300 - DNA, 25 bp, Homo sapien
ggtccgtcaatcatcatactctggt

SEQ ID NO: 3289301 - DNA, 25 bp, Homo sapien
tctcaatatggaaagaacatagcct

SEQ ID NO: 3289302 - DNA, 25 bp, Homo sapien
catttaataaactcagccccactag

SEQ ID NO: 3289303 - DNA, 25 bp, Homo sapien
ttgcttcatgtggtactggatgatg

SEQ ID NO: 3289304 - DNA, 25 bp, Homo sapien
gaggaggtggagcatggtgctgata

SEQ ID NO: 3289305 - DNA, 25 bp, Homo sapien
ggatggtgtggaggttgttccattc

SEQ ID NO: 3289306 - DNA, 25 bp, Homo sapien
ctggatgatgtcctgagtaaggggg

SEQ ID NO: 3289307 - DNA, 25 bp, Homo sapien
taagaatctaccaacacccttgtaa

SEQ ID NO: 3289308 - DNA, 25 bp, Homo sapien
ccaaacaagtgaatctgtactagac

SEQ ID NO: 3289309 - DNA, 25 bp, Homo sapien
gacatttactttgatggcattaagg

SEQ ID NO: 3289310 - DNA, 25 bp, Homo sapien
cccttgtaaacaagcgattcttaga

SEQ ID NO: 3289311 - DNA, 25 bp, Homo sapien
tatgctaaacttaacatgtactttg

SEQ ID NO: 3289312 - DNA, 25 bp, Homo sapien
gtgagtattagatcaggcactatgc

SEQ ID NO: 3289313 - DNA, 25 bp, Homo sapien
gcaggaataatcagggtttaattaa

SEQ ID NO: 3289314 - DNA, 25 bp, Homo sapien
tgcttcagctatcttcaatatctta

SEQ ID NO: 3289315 - DNA, 25 bp, Homo sapien
aattccctcacataatcattgtagg

SEQ ID NO: 3289316 - DNA, 25 bp, Homo sapien
ggtcccatgttatgaaattccctca

SEQ ID NO: 3289317 - DNA, 25 bp, Homo sapien
tgaaattccctcacataatcattgt

SEQ ID NO: 3289318 - DNA, 25 bp, Homo sapien
gtggtggtcccatgttatgaaattc

SEQ ID NO: 3289319 - DNA, 25 bp, Homo sapien
aattatcacagaactgcaaaataaa

SEQ ID NO: 3289320 - DNA, 25 bp, Homo sapien
aataaaagatgataatgtcaatata

SEQ ID NO: 3289321 - DNA, 25 bp, Homo sapien
taaaagatgataatgtcaatataat

SEQ ID NO: 3289322 - DNA, 25 bp, Homo sapien
aatcagagcctgattttatccacat

SEQ ID NO: 3289323 - DNA, 25 bp, Homo sapien
acacatctcggcgaactcctgaaaa

SEQ ID NO: 3289324 - DNA, 25 bp, Homo sapien
ttaaaaacacatctcggcgaactcc

SEQ ID NO: 3289325 - DNA, 25 bp, Homo sapien
atctcggcgaactcctgaaaatcgt

SEQ ID NO: 3289326 - DNA, 25 bp, Homo sapien
aaaaacacatctcggcgaactcctg

SEQ ID NO: 3289327 - DNA, 25 bp, Homo sapien
agaatgtaattcaaaactaggcaag

SEQ ID NO: 3289328 - DNA, 25 bp, Homo sapien
ctaggcaagagtgaacccgacttac

SEQ ID NO: 3289329 - DNA, 25 bp, Homo sapien
aatgtaattcaaaactaggcaagag

SEQ ID NO: 3289330 - DNA, 25 bp, Homo sapien
aactaggcaagagtgaacccgactt

SEQ ID NO: 3289331 - DNA, 25 bp, Homo sapien
acttcctggtatcgtggatccttta

SEQ ID NO: 3289332 - DNA, 25 bp, Homo sapien
cttcctggtatcgtggatcctttaa

SEQ ID NO: 3289333 - DNA, 25 bp, Homo sapien
cacttcctggtatcgtggatccttt

SEQ ID NO: 3289334 - DNA, 25 bp, Homo sapien
tcctggtatcgtggatcctttaaat

SEQ ID NO: 3289335 - DNA, 25 bp, Homo sapien
ttggaagaatgaggctaatcaagcc

SEQ ID NO: 3289336 - DNA, 25 bp, Homo sapien
taccatagggaacaaaaagcctgat

SEQ ID NO: 3289337 - DNA, 25 bp, Homo sapien
taagggcagaggaactatcttgagc

SEQ ID NO: 3289338 - DNA, 25 bp, Homo sapien
tatcttgagcacactatgacaggac

SEQ ID NO: 3289339 - DNA, 25 bp, Homo sapien
atctgcaggattataaaatattaac

SEQ ID NO: 3289340 - DNA, 25 bp, Homo sapien
aatatcataatcttctggtcgacgc

SEQ ID NO: 3289341 - DNA, 25 bp, Homo sapien
tctgctgttatgaatatcataatct

SEQ ID NO: 3289342 - DNA, 25 bp, Homo sapien
tcagggggatagtcaatccttggtt

SEQ ID NO: 3289343 - DNA, 25 bp, Homo sapien
tggtgaaactcagggggatagtcaa

SEQ ID NO: 3289344 - DNA, 25 bp, Homo sapien
cacaaattagacacattagaaatta

SEQ ID NO: 3289345 - DNA, 25 bp, Homo sapien
caaattagacacattagaaattaaa

SEQ ID NO: 3289346 - DNA, 25 bp, Homo sapien
ctacacaaattagacacattagaaa

SEQ ID NO: 3289347 - DNA, 25 bp, Homo sapien
attagacacattagaaattaaacca

SEQ ID NO: 3289348 - DNA, 25 bp, Homo sapien
gaaaaacctatcatcattgtacaat

SEQ ID NO: 3289349 - DNA, 25 bp, Homo sapien
gaagtagatattctctgccaactca

SEQ ID NO: 3289350 - DNA, 25 bp, Homo sapien
agtaaacaaagtcattctcaaacta

SEQ ID NO: 3289351 - DNA, 25 bp, Homo sapien
gcagactagtccaatcaaaacatgt

SEQ ID NO: 3289352 - DNA, 25 bp, Homo sapien
gttaagtgcaataatcccaagcccc

SEQ ID NO: 3289353 - DNA, 25 bp, Homo sapien
cacagttcactcaaactgcaaagtt

SEQ ID NO: 3289354 - DNA, 25 bp, Homo sapien
tactgtcttccataaatcgggttaa

SEQ ID NO: 3289355 - DNA, 25 bp, Homo sapien
taaattggcaagtaatgggtcagaa

SEQ ID NO: 3289356 - DNA, 25 bp, Homo sapien
tcatatagtagtccaactactgact

SEQ ID NO: 3289357 - DNA, 25 bp, Homo sapien
tagtaacagttcatatagtagtcca

SEQ ID NO: 3289358 - DNA, 25 bp, Homo sapien
ccggtataaaacatgatagtaacag

SEQ ID NO: 3289359 - DNA, 25 bp, Homo sapien
tagtttggggagtgcatttacgacc

SEQ ID NO: 3289360 - DNA, 25 bp, Homo sapien
cacatacataaatggaggccctggc

SEQ ID NO: 3289361 - DNA, 25 bp, Homo sapien
catacataaatggaggccctggcag

SEQ ID NO: 3289362 - DNA, 25 bp, Homo sapien
ctgtaagccacatacataaatggag

SEQ ID NO: 3289363 - DNA, 25 bp, Homo sapien
aagccacatacataaatggaggccc

SEQ ID NO: 3289364 - DNA, 25 bp, Homo sapien
taccacaggatgtctccaccaaaag

SEQ ID NO: 3289365 - DNA, 25 bp, Homo sapien
tggcaatagggttaacacatcacgg

SEQ ID NO: 3289366 - DNA, 25 bp, Homo sapien
ggtgctcagtccttttaggccaaaa

SEQ ID NO: 3289367 - DNA, 25 bp, Homo sapien
ttttaagtccacaggtactgccagc

SEQ ID NO: 3289368 - DNA, 25 bp, Homo sapien
tattatcagtccaaagaacgtttct

SEQ ID NO: 3289369 - DNA, 25 bp, Homo sapien
tatcagtccaaagaacgtttctaac

SEQ ID NO: 3289370 - DNA, 25 bp, Homo sapien
tgcctattatcagtccaaagaacgt

SEQ ID NO: 3289371 - DNA, 25 bp, Homo sapien
atgtgcctattatcagtccaaagaa

SEQ ID NO: 3289372 - DNA, 25 bp, Homo sapien
actggttctcgacgggatggacgtc

SEQ ID NO: 3289373 - DNA, 25 bp, Homo sapien
gcattcttctcttgtgacgcatttt

SEQ ID NO: 3289374 - DNA, 25 bp, Homo sapien
gatacaagtcaatactttcatcggg

SEQ ID NO: 3289375 - DNA, 25 bp, Homo sapien
cattttatgaatgacctgatacaag

SEQ ID NO: 3289376 - DNA, 25 bp, Homo sapien
tgtccatcacgtccgatctttactg

SEQ ID NO: 3289377 - DNA, 25 bp, Homo sapien
aggattggtgagatgagccgactta

SEQ ID NO: 3289378 - DNA, 25 bp, Homo sapien
tactggtttatgttcattccaagga

SEQ ID NO: 3289379 - DNA, 25 bp, Homo sapien
gatgagccgacttagtgaagggtaa

SEQ ID NO: 3289380 - DNA, 25 bp, Homo sapien
gccacgtaaagatcacttaaataat

SEQ ID NO: 3289381 - DNA, 25 bp, Homo sapien
tacaggtaatacatttgtgtatgcc

SEQ ID NO: 3289382 - DNA, 25 bp, Homo sapien
tcttgtgtacaatacttcagtgtgc

SEQ ID NO: 3289383 - DNA, 25 bp, Homo sapien
taatgagcttcttgtgtacaatact

SEQ ID NO: 3289384 - DNA, 25 bp, Homo sapien
taaaaatagtgacaactcagtgttc

SEQ ID NO: 3289385 - DNA, 25 bp, Homo sapien
aaaatactgtccacgactaaactag

SEQ ID NO: 3289386 - DNA, 25 bp, Homo sapien
cagatacgccagacaacatttcaag

SEQ ID NO: 3289387 - DNA, 25 bp, Homo sapien
tagttacctccgaaattgttagcca

SEQ ID NO: 3289388 - DNA, 25 bp, Homo sapien
agacacctcccagcattttagcact

SEQ ID NO: 3289389 - DNA, 25 bp, Homo sapien
ttagcactcattcctgctggaagca

SEQ ID NO: 3289390 - DNA, 25 bp, Homo sapien
gcacccagtgtataggagatcctcc

SEQ ID NO: 3289391 - DNA, 25 bp, Homo sapien
ctgcaaatccagtcaattttaaaga

SEQ ID NO: 3289392 - DNA, 25 bp, Homo sapien
tttcttctcatttacagggagcgtg

SEQ ID NO: 3289393 - DNA, 25 bp, Homo sapien
cttctcatttacagggagcgtggac

SEQ ID NO: 3289394 - DNA, 25 bp, Homo sapien
aatattaagataacactccttgcag

SEQ ID NO: 3289395 - DNA, 25 bp, Homo sapien
taacactccttgcagatctaaatgc

SEQ ID NO: 3289396 - DNA, 25 bp, Homo sapien
tatcaatagtttgactgaagaggcc

SEQ ID NO: 3289397 - DNA, 25 bp, Homo sapien
taaatcgaaagatgaggaaccctgt

SEQ ID NO: 3289398 - DNA, 25 bp, Homo sapien
tgtggataccgagggccaagtgtac

SEQ ID NO: 3289399 - DNA, 25 bp, Homo sapien
gcctacgttttacctacagctggaa

SEQ ID NO: 3289400 - DNA, 25 bp, Homo sapien
tcttgcatcttgaagcacatatttg

SEQ ID NO: 3289401 - DNA, 25 bp, Homo sapien
catggttgttactctttatgaggaa

SEQ ID NO: 3289402 - DNA, 25 bp, Homo sapien
cacatatttgagtttactggtttga

SEQ ID NO: 3289403 - DNA, 25 bp, Homo sapien
tcgctttggcaagagacacattctc

SEQ ID NO: 3289404 - DNA, 25 bp, Homo sapien
aacggaagatgataatttctcatgc

SEQ ID NO: 3289405 - DNA, 25 bp, Homo sapien
cttttcggacagcacgaacggaaga

SEQ ID NO: 3289406 - DNA, 25 bp, Homo sapien
cggacagcacgaacggaagatgata

SEQ ID NO: 3289407 - DNA, 25 bp, Homo sapien
cagcacgaacggaagatgataattt

SEQ ID NO: 3289408 - DNA, 25 bp, Homo sapien
tggagatatgcctctagctctcttc

SEQ ID NO: 3289409 - DNA, 25 bp, Homo sapien
tcaaaaacaattggagatatgcctc

SEQ ID NO: 3289410 - DNA, 25 bp, Homo sapien
gcttccacttctatcaaaaacaatt

SEQ ID NO: 3289411 - DNA, 25 bp, Homo sapien
ttccacttctatcaaaaacaattgg

SEQ ID NO: 3289412 - DNA, 25 bp, Homo sapien
cacgaaataactacaaagtcagggc

SEQ ID NO: 3289413 - DNA, 25 bp, Homo sapien
aagagatctgatgaacccctgaacc

SEQ ID NO: 3289414 - DNA, 25 bp, Homo sapien
tgccatgtaagaaccagtcccaagc

SEQ ID NO: 3289415 - DNA, 25 bp, Homo sapien
cttgaattagacaggcagttaggca

SEQ ID NO: 3289416 - DNA, 25 bp, Homo sapien
aaaataactggccatctgctctacc

SEQ ID NO: 3289417 - DNA, 25 bp, Homo sapien
gcttatgtagcaatctggtagcatc

SEQ ID NO: 3289418 - DNA, 25 bp, Homo sapien
aaggttgaaagcacttcagttgcca

SEQ ID NO: 3289419 - DNA, 25 bp, Homo sapien
tatagtataggtagagcagatggcc

SEQ ID NO: 3289420 - DNA, 25 bp, Homo sapien
agccctcttgtcgaccctgtctcag

SEQ ID NO: 3289421 - DNA, 25 bp, Homo sapien
tccatcttataccttacaccccagc

SEQ ID NO: 3289422 - DNA, 25 bp, Homo sapien
ccccagccctcttgtcgaccctgtc

SEQ ID NO: 3289423 - DNA, 25 bp, Homo sapien
tctccatcttataccttacacccca

SEQ ID NO: 3289424 - DNA, 25 bp, Homo sapien
tgaaccagatctgacagacccatct

SEQ ID NO: 3289425 - DNA, 25 bp, Homo sapien
cactggcctcacttcgagtgtcata

SEQ ID NO: 3289426 - DNA, 25 bp, Homo sapien
gcctgaaccagatctgacagaccca

SEQ ID NO: 3289427 - DNA, 25 bp, Homo sapien
acttcgagtgtcataatcatttccc

SEQ ID NO: 3289428 - DNA, 25 bp, Homo sapien
tctcatggtcagagccatattcttc

SEQ ID NO: 3289429 - DNA, 25 bp, Homo sapien
gtctatccacttcaagcccaattct

SEQ ID NO: 3289430 - DNA, 25 bp, Homo sapien
tggctggatctgcttgcacgtctat

SEQ ID NO: 3289431 - DNA, 25 bp, Homo sapien
tgctgccagtctcatggtcagagcc

SEQ ID NO: 3289432 - DNA, 25 bp, Homo sapien
tctggaggcactacttgatagacga

SEQ ID NO: 3289433 - DNA, 25 bp, Homo sapien
gaattttccgatcagcatctagacg

SEQ ID NO: 3289434 - DNA, 25 bp, Homo sapien
tcaggatcccttttccggacacagg

SEQ ID NO: 3289435 - DNA, 25 bp, Homo sapien
catctggcgtaggagatttggccct

SEQ ID NO: 3289436 - DNA, 25 bp, Homo sapien
tttttatcttgttcactctctggat

SEQ ID NO: 3289437 - DNA, 25 bp, Homo sapien
aaatatcatccagaacattaagttc

SEQ ID NO: 3289438 - DNA, 25 bp, Homo sapien
tatcatccagaacattaagttctcc

SEQ ID NO: 3289439 - DNA, 25 bp, Homo sapien
gattatacagttcatcatcttgttc

SEQ ID NO: 3289440 - DNA, 25 bp, Homo sapien
gaagagtctagtcttctgttaagac

SEQ ID NO: 3289441 - DNA, 25 bp, Homo sapien
taaaagttttacactagcagtctag

SEQ ID NO: 3289442 - DNA, 25 bp, Homo sapien
gaaataagcttaatgaaacaatcct

SEQ ID NO: 3289443 - DNA, 25 bp, Homo sapien
tatctggtgaatcagtattactacc

SEQ ID NO: 3289444 - DNA, 25 bp, Homo sapien
tggctgctagattcctccgtgaaag

SEQ ID NO: 3289445 - DNA, 25 bp, Homo sapien
taaaggtacagattcccaggataca

SEQ ID NO: 3289446 - DNA, 25 bp, Homo sapien
gatagattccacagttggctgctag

SEQ ID NO: 3289447 - DNA, 25 bp, Homo sapien
tataaaaagagtaacaggtcgggca

SEQ ID NO: 3289448 - DNA, 25 bp, Homo sapien
ttctcctcccgactgtcagccgcca

SEQ ID NO: 3289449 - DNA, 25 bp, Homo sapien
ctttctcctcccgactgtcagccgc

SEQ ID NO: 3289450 - DNA, 25 bp, Homo sapien
tttctcctcccgactgtcagccgcc

SEQ ID NO: 3289451 - DNA, 25 bp, Homo sapien
tctcctcccgactgtcagccgccat

SEQ ID NO: 3289452 - DNA, 25 bp, Homo sapien
tctcgttagggctcagactcgggct

SEQ ID NO: 3289453 - DNA, 25 bp, Homo sapien
tcgcacttggcctcttaacactcag

SEQ ID NO: 3289454 - DNA, 25 bp, Homo sapien
gtcagtccgtctgcccggatacgcg

SEQ ID NO: 3289455 - DNA, 25 bp, Homo sapien
gagcctgcttcctgcgcgaaacaat

SEQ ID NO: 3289456 - DNA, 25 bp, Homo sapien
gtctgcatatcaaaccgcctcctag

SEQ ID NO: 3289457 - DNA, 25 bp, Homo sapien
tctcactttagtctgcatatcaaac

SEQ ID NO: 3289458 - DNA, 25 bp, Homo sapien
aaaccgcctcctagacactttgagg

SEQ ID NO: 3289459 - DNA, 25 bp, Homo sapien
tatcaaaccgcctcctagacacttt

SEQ ID NO: 3289460 - DNA, 25 bp, Homo sapien
tcacgggtctgaagtgggtgtagtg

SEQ ID NO: 3289461 - DNA, 25 bp, Homo sapien
acgggtctgaagtgggtgtagtggc

SEQ ID NO: 3289462 - DNA, 25 bp, Homo sapien
cacgggtctgaagtgggtgtagtgg

SEQ ID NO: 3289463 - DNA, 25 bp, Homo sapien
tcctccaagtcccagcgagcccgtg

SEQ ID NO: 3289464 - DNA, 25 bp, Homo sapien
aagtcccagcgagcccgtgtacaac

SEQ ID NO: 3289465 - DNA, 25 bp, Homo sapien
cacgcctcctccaagtcccagcgag

SEQ ID NO: 3289466 - DNA, 25 bp, Homo sapien
caagtcccagcgagcccgtgtacaa

SEQ ID NO: 3289467 - DNA, 25 bp, Homo sapien
gccgcctcttcagctcgccatggat

SEQ ID NO: 3289468 - DNA, 25 bp, Homo sapien
gccatggatcccaactgctcctgtg

SEQ ID NO: 3289469 - DNA, 25 bp, Homo sapien
ttcagctcgccatggatcccaactg

SEQ ID NO: 3289470 - DNA, 25 bp, Homo sapien
cgccatggatcccaactgctcctgt

SEQ ID NO: 3289471 - DNA, 25 bp, Homo sapien
cagcttgtcctactagaggaatagt

SEQ ID NO: 3289472 - DNA, 25 bp, Homo sapien
gcagcttgtcctactagaggaatag

SEQ ID NO: 3289473 - DNA, 25 bp, Homo sapien
gcttgtcctactagaggaatagtct

SEQ ID NO: 3289474 - DNA, 25 bp, Homo sapien
tgcagcttgtcctactagaggaata

SEQ ID NO: 3289475 - DNA, 25 bp, Homo sapien
gtctagtagacatgattttccattg

SEQ ID NO: 3289476 - DNA, 25 bp, Homo sapien
gaaggtctagtagacatgattttcc

SEQ ID NO: 3289477 - DNA, 25 bp, Homo sapien
cctgagaaggtctagtagacatgat

SEQ ID NO: 3289478 - DNA, 25 bp, Homo sapien
acctgagaaggtctagtagacatga

SEQ ID NO: 3289479 - DNA, 25 bp, Homo sapien
ttgacactgttggaagatggtccat

SEQ ID NO: 3289480 - DNA, 25 bp, Homo sapien
cattgaataaacttgacactgttgg

SEQ ID NO: 3289481 - DNA, 25 bp, Homo sapien
tgaataaacttgacactgttggaag

SEQ ID NO: 3289482 - DNA, 25 bp, Homo sapien
acttgacactgttggaagatggtcc

SEQ ID NO: 3289483 - DNA, 25 bp, Homo sapien
ttgctacctgaagtttaggactcac

SEQ ID NO: 3289484 - DNA, 25 bp, Homo sapien
gtatttgctacctgaagtttaggac

SEQ ID NO: 3289485 - DNA, 25 bp, Homo sapien
tccctctggagctactatggcggag

SEQ ID NO: 3289486 - DNA, 25 bp, Homo sapien
gtctccgcggagttgtgtatttgct

SEQ ID NO: 3289487 - DNA, 25 bp, Homo sapien
aacaacagggatatatgaactgcat

SEQ ID NO: 3289488 - DNA, 25 bp, Homo sapien
gagagacacggcctagcaatggcct

SEQ ID NO: 3289489 - DNA, 25 bp, Homo sapien
tcatgaatggagttttcagggctag

SEQ ID NO: 3289490 - DNA, 25 bp, Homo sapien
ggacattattatacactaccgtaga

SEQ ID NO: 3289491 - DNA, 25 bp, Homo sapien
tggagttcccccacaaaatcgacat

SEQ ID NO: 3289492 - DNA, 25 bp, Homo sapien
aatcgacatttggtaagggtgggtg

SEQ ID NO: 3289493 - DNA, 25 bp, Homo sapien
gctggtttacagtggagttccccca

SEQ ID NO: 3289494 - DNA, 25 bp, Homo sapien
tcccagtacgtttgaatgagccaca

SEQ ID NO: 3289495 - DNA, 25 bp, Homo sapien
tcattttaccacttaattcagacag

SEQ ID NO: 3289496 - DNA, 25 bp, Homo sapien
cctctccacgaatgtcattttacca

SEQ ID NO: 3289497 - DNA, 25 bp, Homo sapien
gtcattttaccacttaattcagaca

SEQ ID NO: 3289498 - DNA, 25 bp, Homo sapien
tttaatcctctccacgaatgtcatt

SEQ ID NO: 3289499 - DNA, 25 bp, Homo sapien
aagggcatctgcaagaacgacatca

SEQ ID NO: 3289500 - DNA, 25 bp, Homo sapien
aacacagtctgtagattcccaaaag

SEQ ID NO: 3289501 - DNA, 25 bp, Homo sapien
tattgatcagtttcacaacaagacc

SEQ ID NO: 3289502 - DNA, 25 bp, Homo sapien
tgctcagctagcagttcaccacagg

SEQ ID NO: 3289503 - DNA, 25 bp, Homo sapien
tgagttgtatcaggagaatatttga

SEQ ID NO: 3289504 - DNA, 25 bp, Homo sapien
gttgtatcaggagaatatttgacat

SEQ ID NO: 3289505 - DNA, 25 bp, Homo sapien
actgagttgtatcaggagaatattt

SEQ ID NO: 3289506 - DNA, 25 bp, Homo sapien
gagttgtatcaggagaatatttgac

SEQ ID NO: 3289507 - DNA, 25 bp, Homo sapien
cactgttgttttgcgatgaaattct

SEQ ID NO: 3289508 - DNA, 25 bp, Homo sapien
gctgcagaagtcgattttcttcaaa

SEQ ID NO: 3289509 - DNA, 25 bp, Homo sapien
ataaagtgtagtagaggcggacagt

SEQ ID NO: 3289510 - DNA, 25 bp, Homo sapien
aggcggacagtgtcgtctcctgtgc

SEQ ID NO: 3289511 - DNA, 25 bp, Homo sapien
gcaaaacaatgttgatactatgagt

SEQ ID NO: 3289512 - DNA, 25 bp, Homo sapien
atcattgacatagaataattccaac

SEQ ID NO: 3289513 - DNA, 25 bp, Homo sapien
aatttcaatataagcccataaggtt

SEQ ID NO: 3289514 - DNA, 25 bp, Homo sapien
gagttgttaatgttttgtgttcaaa

SEQ ID NO: 3289515 - DNA, 25 bp, Homo sapien
ttggcaagctttcggaaacaaaaca

SEQ ID NO: 3289516 - DNA, 25 bp, Homo sapien
tggcaagctttcggaaacaaaacag

SEQ ID NO: 3289517 - DNA, 25 bp, Homo sapien
gcaagctttcggaaacaaaacaggc

SEQ ID NO: 3289518 - DNA, 25 bp, Homo sapien
caagctttcggaaacaaaacaggca

SEQ ID NO: 3289519 - DNA, 25 bp, Homo sapien
catggtcctgatgtccacactgagg

SEQ ID NO: 3289520 - DNA, 25 bp, Homo sapien
atgactgacttcaatgcattgagca

SEQ ID NO: 3289521 - DNA, 25 bp, Homo sapien
atggtcctgatgtccacactgaggg

SEQ ID NO: 3289522 - DNA, 25 bp, Homo sapien
gactgacttcaatgcattgagcaaa

SEQ ID NO: 3289523 - DNA, 25 bp, Homo sapien
atggtagattgcctcatagatgcca

SEQ ID NO: 3289524 - DNA, 25 bp, Homo sapien
gcccaccatagggatcccatggtag

SEQ ID NO: 3289525 - DNA, 25 bp, Homo sapien
gatcccatggtagattgcctcatag

SEQ ID NO: 3289526 - DNA, 25 bp, Homo sapien
catagggatcccatggtagattgcc

SEQ ID NO: 3289527 - DNA, 25 bp, Homo sapien
cagtcgagtattggaacctaaagta

SEQ ID NO: 3289528 - DNA, 25 bp, Homo sapien
tacagtcgagtattggaacctaaag

SEQ ID NO: 3289529 - DNA, 25 bp, Homo sapien
agtcgagtattggaacctaaagtat

SEQ ID NO: 3289530 - DNA, 25 bp, Homo sapien
cgagtattggaacctaaagtatttg

SEQ ID NO: 3289531 - DNA, 25 bp, Homo sapien
tagggaatcaaacttaacttatgga

SEQ ID NO: 3289532 - DNA, 25 bp, Homo sapien
ttcatctataaggtccctgtacagg

SEQ ID NO: 3289533 - DNA, 25 bp, Homo sapien
aaggcttccactggaatggtgggct

SEQ ID NO: 3289534 - DNA, 25 bp, Homo sapien
tggtgggctttcctttagggaatca

SEQ ID NO: 3289535 - DNA, 25 bp, Homo sapien
ttcttctgacatgttactgatcatc

SEQ ID NO: 3289536 - DNA, 25 bp, Homo sapien
tgacatgttactgatcatcgacccc

SEQ ID NO: 3289537 - DNA, 25 bp, Homo sapien
gatgcaatcatgttggcactttctt

SEQ ID NO: 3289538 - DNA, 25 bp, Homo sapien
tctgacatgttactgatcatcgacc

SEQ ID NO: 3289539 - DNA, 25 bp, Homo sapien
ctgaagtataagaatcattgacgtt

SEQ ID NO: 3289540 - DNA, 25 bp, Homo sapien
caaaatcccaataggttcgaatgag

SEQ ID NO: 3289541 - DNA, 25 bp, Homo sapien
ttcaaaatcccaataggttcgaatg

SEQ ID NO: 3289542 - DNA, 25 bp, Homo sapien
tcccaataggttcgaatgagccaca

SEQ ID NO: 3289543 - DNA, 25 bp, Homo sapien
aaatcccaataggttcgaatgagcc

SEQ ID NO: 3289544 - DNA, 25 bp, Homo sapien
taaacaccaattggacacacgactt

SEQ ID NO: 3289545 - DNA, 25 bp, Homo sapien
aacaccaattggacacacgacttac

SEQ ID NO: 3289546 - DNA, 25 bp, Homo sapien
aaacaccaattggacacacgactta

SEQ ID NO: 3289547 - DNA, 25 bp, Homo sapien
cacagagctttatattatagtcaga

SEQ ID NO: 3289548 - DNA, 25 bp, Homo sapien
ctcaccacagggattaacggcatct

SEQ ID NO: 3289549 - DNA, 25 bp, Homo sapien
ttcagatcatatgcttgaaaccaaa

SEQ ID NO: 3289550 - DNA, 25 bp, Homo sapien
atgatttactggcattgacaagaat

SEQ ID NO: 3289551 - DNA, 25 bp, Homo sapien
agtgcttcttttccagttgttgttt

SEQ ID NO: 3289552 - DNA, 25 bp, Homo sapien
ctggtcttatgcagtgcttcttttc

SEQ ID NO: 3289553 - DNA, 25 bp, Homo sapien
cctggtcttatgcagtgcttctttt

SEQ ID NO: 3289554 - DNA, 25 bp, Homo sapien
ttatgcagtgcttcttttccagttg

SEQ ID NO: 3289555 - DNA, 25 bp, Homo sapien
ggccctttacttgtgtgcttcggca

SEQ ID NO: 3289556 - DNA, 25 bp, Homo sapien
ttgcagagaccttgcttgatggtcc

SEQ ID NO: 3289557 - DNA, 25 bp, Homo sapien
taactttcacgttcctcatttgtct

SEQ ID NO: 3289558 - DNA, 25 bp, Homo sapien
cactaaagactgtctgctgtctgcc

SEQ ID NO: 3289559 - DNA, 25 bp, Homo sapien
catcagtagggaaaagatgctttcc

SEQ ID NO: 3289560 - DNA, 25 bp, Homo sapien
gccaagccagtggtatgagctgcca

SEQ ID NO: 3289561 - DNA, 25 bp, Homo sapien
cactgcgaagccctgatcctgggca

SEQ ID NO: 3289562 - DNA, 25 bp, Homo sapien
ccttgctgggagtctacatgggttt

SEQ ID NO: 3289563 - DNA, 25 bp, Homo sapien
tgccatggcaaacgagactcccagc

SEQ ID NO: 3289564 - DNA, 25 bp, Homo sapien
ccatggcaaacgagactcccagcct

SEQ ID NO: 3289565 - DNA, 25 bp, Homo sapien
atggcaaacgagactcccagcctcc

SEQ ID NO: 3289566 - DNA, 25 bp, Homo sapien
catggcaaacgagactcccagcctc

SEQ ID NO: 3289567 - DNA, 25 bp, Homo sapien
cccacttctcgtatcaaacatttga

SEQ ID NO: 3289568 - DNA, 25 bp, Homo sapien
ccacttctcgtatcaaacatttgaa

SEQ ID NO: 3289569 - DNA, 25 bp, Homo sapien
tcccacttctcgtatcaaacatttg

SEQ ID NO: 3289570 - DNA, 25 bp, Homo sapien
ttaacatgctcagctagcagttcac

SEQ ID NO: 3289571 - DNA, 25 bp, Homo sapien
agggcatctgcaagaacgacatcaa

SEQ ID NO: 3289572 - DNA, 25 bp, Homo sapien
ctagcagttcaccacaggcaccaag

SEQ ID NO: 3289573 - DNA, 25 bp, Homo sapien
aagggcatctgcaagaacgacatca

SEQ ID NO: 3289574 - DNA, 25 bp, Homo sapien
aacacagtctgtagattcccaaaag

SEQ ID NO: 3289575 - DNA, 25 bp, Homo sapien
gagttgtatcaggagaatatttgac

SEQ ID NO: 3289576 - DNA, 25 bp, Homo sapien
ctttacagagattattaacacagtc

SEQ ID NO: 3289577 - DNA, 25 bp, Homo sapien
cagtttcacaacaagaccctcaaaa

SEQ ID NO: 3289578 - DNA, 25 bp, Homo sapien
ttcagctcgccatggatcccaactg

SEQ ID NO: 3289579 - DNA, 25 bp, Homo sapien
gccgcctcttcagctcgccatggat

SEQ ID NO: 3289580 - DNA, 25 bp, Homo sapien
gccatggatcccaactgctcctgtg

SEQ ID NO: 3289581 - DNA, 25 bp, Homo sapien
cgccatggatcccaactgctcctgt

SEQ ID NO: 3289582 - DNA, 25 bp, Homo sapien
tgcaaaggggcgtcggacaagtgca

SEQ ID NO: 3289583 - DNA, 25 bp, Homo sapien
gacaagtgcagctgctgtgcctgat

SEQ ID NO: 3289584 - DNA, 25 bp, Homo sapien
ctgcaaaggggcgtcggacaagtgc

SEQ ID NO: 3289585 - DNA, 25 bp, Homo sapien
tgctgtgcctgatgctgggacagcc

SEQ ID NO: 3289586 - DNA, 25 bp, Homo sapien
caaaaaggtcatgtgccccagttcc

SEQ ID NO: 3289587 - DNA, 25 bp, Homo sapien
cattcatatagctgccaaaaaggtc

SEQ ID NO: 3289588 - DNA, 25 bp, Homo sapien
tgccaaaaaggtcatgtgccccagt

SEQ ID NO: 3289589 - DNA, 25 bp, Homo sapien
gccaaaaaggtcatgtgccccagtt

SEQ ID NO: 3289590 - DNA, 25 bp, Homo sapien
gcagcttgtcctactagaggaatag

SEQ ID NO: 3289591 - DNA, 25 bp, Homo sapien
tgcagcttgtcctactagaggaata

SEQ ID NO: 3289592 - DNA, 25 bp, Homo sapien
gcttgtcctactagaggaatagtct

SEQ ID NO: 3289593 - DNA, 25 bp, Homo sapien
cagcttgtcctactagaggaatagt

SEQ ID NO: 3289594 - DNA, 25 bp, Homo sapien
gaaggtctagtagacatgattttcc

SEQ ID NO: 3289595 - DNA, 25 bp, Homo sapien
gtctagtagacatgattttccattg

SEQ ID NO: 3289596 - DNA, 25 bp, Homo sapien
cctgagaaggtctagtagacatgat

SEQ ID NO: 3289597 - DNA, 25 bp, Homo sapien
acctgagaaggtctagtagacatga

SEQ ID NO: 3289598 - DNA, 25 bp, Homo sapien
acttgacactgttggaagatggtcc

SEQ ID NO: 3289599 - DNA, 25 bp, Homo sapien
tgaataaacttgacactgttggaag

SEQ ID NO: 3289600 - DNA, 25 bp, Homo sapien
ttgacactgttggaagatggtccat

SEQ ID NO: 3289601 - DNA, 25 bp, Homo sapien
cattgaataaacttgacactgttgg

SEQ ID NO: 3289602 - DNA, 25 bp, Homo sapien
gtctccgcggagttgtgtatttgct

SEQ ID NO: 3289603 - DNA, 25 bp, Homo sapien
tccctctggagctactatggcggag

SEQ ID NO: 3289604 - DNA, 25 bp, Homo sapien
ttgctacctgaagtttaggactcac

SEQ ID NO: 3289605 - DNA, 25 bp, Homo sapien
gtatttgctacctgaagtttaggac

SEQ ID NO: 3289606 - DNA, 25 bp, Homo sapien
ggacattattatacactaccgtaga

SEQ ID NO: 3289607 - DNA, 25 bp, Homo sapien
aacaacagggatatatgaactgcat

SEQ ID NO: 3289608 - DNA, 25 bp, Homo sapien
gagagacacggcctagcaatggcct

SEQ ID NO: 3289609 - DNA, 25 bp, Homo sapien
tcatgaatggagttttcagggctag

SEQ ID NO: 3289610 - DNA, 25 bp, Homo sapien
ccacttctcgtatcaaacatttgaa

SEQ ID NO: 3289611 - DNA, 25 bp, Homo sapien
tcccacttctcgtatcaaacatttg

SEQ ID NO: 3289612 - DNA, 25 bp, Homo sapien
cccacttctcgtatcaaacatttga

SEQ ID NO: 3289613 - DNA, 25 bp, Homo sapien
agggcatctgcaagaacgacatcaa

SEQ ID NO: 3289614 - DNA, 25 bp, Homo sapien
ctagcagttcaccacaggcaccaag

SEQ ID NO: 3289615 - DNA, 25 bp, Homo sapien
aagggcatctgcaagaacgacatca

SEQ ID NO: 3289616 - DNA, 25 bp, Homo sapien
ttaacatgctcagctagcagttcac

SEQ ID NO: 3289617 - DNA, 25 bp, Homo sapien
ctttacagagattattaacacagtc

SEQ ID NO: 3289618 - DNA, 25 bp, Homo sapien
cagtttcacaacaagaccctcaaaa

SEQ ID NO: 3289619 - DNA, 25 bp, Homo sapien
aacacagtctgtagattcccaaaag

SEQ ID NO: 3289620 - DNA, 25 bp, Homo sapien
gagttgtatcaggagaatatttgac

SEQ ID NO: 3289621 - DNA, 25 bp, Homo sapien
gatccaatactagaagttgtttcca

SEQ ID NO: 3289622 - DNA, 25 bp, Homo sapien
ttttcagatccaatactagaagttg

SEQ ID NO: 3289623 - DNA, 25 bp, Homo sapien
cagatccaatactagaagttgtttc

SEQ ID NO: 3289624 - DNA, 25 bp, Homo sapien
ttattttcagatccaatactagaag

SEQ ID NO: 3289625 - DNA, 25 bp, Homo sapien
gcaagctttcggaaacaaaacaggc

SEQ ID NO: 3289626 - DNA, 25 bp, Homo sapien
tggcaagctttcggaaacaaaacag

SEQ ID NO: 3289627 - DNA, 25 bp, Homo sapien
caagctttcggaaacaaaacaggca

SEQ ID NO: 3289628 - DNA, 25 bp, Homo sapien
ttggcaagctttcggaaacaaaaca

SEQ ID NO: 3289629 - DNA, 25 bp, Homo sapien
atccagaagactgctcgatccaggg

SEQ ID NO: 3289630 - DNA, 25 bp, Homo sapien
tcaatccagaagactgctcgatcca

SEQ ID NO: 3289631 - DNA, 25 bp, Homo sapien
gaagactgctcgatccaggggcttc

SEQ ID NO: 3289632 - DNA, 25 bp, Homo sapien
aagactgctcgatccaggggcttca

SEQ ID NO: 3289633 - DNA, 25 bp, Homo sapien
catggtcctgatgtccacactgagg

SEQ ID NO: 3289634 - DNA, 25 bp, Homo sapien
gactgacttcaatgcattgagcaaa

SEQ ID NO: 3289635 - DNA, 25 bp, Homo sapien
gatccgcaaacaagggaatgcccac

SEQ ID NO: 3289636 - DNA, 25 bp, Homo sapien
cgcaaacaagggaatgcccaccata

SEQ ID NO: 3289637 - DNA, 25 bp, Homo sapien
agaaatgcacaatataaggaactta

SEQ ID NO: 3289638 - DNA, 25 bp, Homo sapien
aattattaattacaaggtatgagaa

SEQ ID NO: 3289639 - DNA, 25 bp, Homo sapien
attattaattacaaggtatgagaat

SEQ ID NO: 3289640 - DNA, 25 bp, Homo sapien
gaaatgcacaatataaggaacttaa

SEQ ID NO: 3289641 - DNA, 25 bp, Homo sapien
cagtcgagtattggaacctaaagta

SEQ ID NO: 3289642 - DNA, 25 bp, Homo sapien
cgagtattggaacctaaagtatttg

SEQ ID NO: 3289643 - DNA, 25 bp, Homo sapien
agtcgagtattggaacctaaagtat

SEQ ID NO: 3289644 - DNA, 25 bp, Homo sapien
tacagtcgagtattggaacctaaag

SEQ ID NO: 3289645 - DNA, 25 bp, Homo sapien
ttcttctgacatgttactgatcatc

SEQ ID NO: 3289646 - DNA, 25 bp, Homo sapien
gatgcaatcatgttggcactttctt

SEQ ID NO: 3289647 - DNA, 25 bp, Homo sapien
tctgacatgttactgatcatcgacc

SEQ ID NO: 3289648 - DNA, 25 bp, Homo sapien
tgacatgttactgatcatcgacccc

SEQ ID NO: 3289649 - DNA, 25 bp, Homo sapien
caaaatcccaataggttcgaatgag

SEQ ID NO: 3289650 - DNA, 25 bp, Homo sapien
aaatcccaataggttcgaatgagcc

SEQ ID NO: 3289651 - DNA, 25 bp, Homo sapien
ttcaaaatcccaataggttcgaatg

SEQ ID NO: 3289652 - DNA, 25 bp, Homo sapien
tcccaataggttcgaatgagccaca

SEQ ID NO: 3289653 - DNA, 25 bp, Homo sapien
atgtgtagccaacagagaatcgaag

SEQ ID NO: 3289654 - DNA, 25 bp, Homo sapien
aatgtgtagccaacagagaatcgaa

SEQ ID NO: 3289655 - DNA, 25 bp, Homo sapien
aaatgtgtagccaacagagaatcga

SEQ ID NO: 3289656 - DNA, 25 bp, Homo sapien
agctcaccacagggattaagggcat

SEQ ID NO: 3289657 - DNA, 25 bp, Homo sapien
ctcaccacagggattaagggcatct

SEQ ID NO: 3289658 - DNA, 25 bp, Homo sapien
gctcaccacagggattaagggcatc

SEQ ID NO: 3289659 - DNA, 25 bp, Homo sapien
tttacagagcttgttactgtagtca

SEQ ID NO: 3289660 - DNA, 25 bp, Homo sapien
ttttttgaaacaccatatatccatc

SEQ ID NO: 3289661 - DNA, 25 bp, Homo sapien
tccatctatcgagaattttcagaag

SEQ ID NO: 3289662 - DNA, 25 bp, Homo sapien
cccaacacaattcttgtaattgtga

SEQ ID NO: 3289663 - DNA, 25 bp, Homo sapien
tggtcttatgcaatgcttcttttcc

SEQ ID NO: 3289664 - DNA, 25 bp, Homo sapien
ctggtcttatgcaatgcttcttttc

SEQ ID NO: 3289665 - DNA, 25 bp, Homo sapien
cctggtcttatgcaatgcttctttt

SEQ ID NO: 3289666 - DNA, 25 bp, Homo sapien
ggtcttatgcaatgcttcttttcca

SEQ ID NO: 3289667 - DNA, 25 bp, Homo sapien
tgatgaagatcacagttgacacata

SEQ ID NO: 3289668 - DNA, 25 bp, Homo sapien
gatgaagatcacagttgacacatag

SEQ ID NO: 3289669 - DNA, 25 bp, Homo sapien
gatccaggggcttaattggcaaatc

SEQ ID NO: 3289670 - DNA, 25 bp, Homo sapien
gaaggctgcttgatccaggggctta

SEQ ID NO: 3289671 - DNA, 25 bp, Homo sapien
gcaagttgtggtattggaaccaggt

SEQ ID NO: 3289672 - DNA, 25 bp, Homo sapien
caaatcatggcgaattattgataac

SEQ ID NO: 3289673 - DNA, 25 bp, Homo sapien
tgaaggataaacataaaaataccaa

SEQ ID NO: 3289674 - DNA, 25 bp, Homo sapien
aggataaacataaaaataccaacat

SEQ ID NO: 3289675 - DNA, 25 bp, Homo sapien
ctgaaggataaacataaaaatacca

SEQ ID NO: 3289676 - DNA, 25 bp, Homo sapien
cagggtcattaatgactgtcttcag

SEQ ID NO: 3289677 - DNA, 25 bp, Homo sapien
acagggtcattaatgactgtcttca

SEQ ID NO: 3289678 - DNA, 25 bp, Homo sapien
gagcaaatctgtacttgacatggtc

SEQ ID NO: 3289679 - DNA, 25 bp, Homo sapien
cttgacatggtcctgatgtccacat

SEQ ID NO: 3289680 - DNA, 25 bp, Homo sapien
gccactggtttcaccatgagtcata

SEQ ID NO: 3289681 - DNA, 25 bp, Homo sapien
actggtttcaccatgagtcataaaa

SEQ ID NO: 3289682 - DNA, 25 bp, Homo sapien
ccactggtttcaccatgagtcataa

SEQ ID NO: 3289683 - DNA, 25 bp, Homo sapien
tggtttcaccatgagtcataaaaga

SEQ ID NO: 3289684 - DNA, 25 bp, Homo sapien
ggataaattttagcaaaattattca

SEQ ID NO: 3289685 - DNA, 25 bp, Homo sapien
aggattggataaattttagcaaaat

SEQ ID NO: 3289686 - DNA, 25 bp, Homo sapien
taggattggataaattttagcaaaa

SEQ ID NO: 3289687 - DNA, 25 bp, Homo sapien
aattttagcaaaattattcataaga

SEQ ID NO: 3289688 - DNA, 25 bp, Homo sapien
taaaatgagaaatgcacaatagaat

SEQ ID NO: 3289689 - DNA, 25 bp, Homo sapien
aaatgagaaatgcacaatagaatgc

SEQ ID NO: 3289690 - DNA, 25 bp, Homo sapien
ctaaaatgagaaatgcacaatagaa

SEQ ID NO: 3289691 - DNA, 25 bp, Homo sapien
aatgagaaatgcacaatagaatgct

SEQ ID NO: 3289692 - DNA, 25 bp, Homo sapien
cagctgagtattggatgctaaagta

SEQ ID NO: 3289693 - DNA, 25 bp, Homo sapien
acttgtacagctgagtattggatgc

SEQ ID NO: 3289694 - DNA, 25 bp, Homo sapien
attggatgctaaagtatttggtctc

SEQ ID NO: 3289695 - DNA, 25 bp, Homo sapien
gtattggatgctaaagtatttggtc

SEQ ID NO: 3289696 - DNA, 25 bp, Homo sapien
gcaagactgccacgacaccattttc

SEQ ID NO: 3289697 - DNA, 25 bp, Homo sapien
gatgttactgaccatagacttaagc

SEQ ID NO: 3289698 - DNA, 25 bp, Homo sapien
aagagctgatgcaatcacgttggcc

SEQ ID NO: 3289699 - DNA, 25 bp, Homo sapien
tagacttaagcaagactgccacgac

SEQ ID NO: 3289700 - DNA, 25 bp, Homo sapien
tcacaaaagagtgtcagcatagcaa

SEQ ID NO: 3289701 - DNA, 25 bp, Homo sapien
caaaagagtgtcagcatagcaaaca

SEQ ID NO: 3289702 - DNA, 25 bp, Homo sapien
acaaaagagtgtcagcatagcaaac

SEQ ID NO: 3289703 - DNA, 25 bp, Homo sapien
ctatcacaaaagagtgtcagcatag

SEQ ID NO: 3289704 - DNA, 25 bp, Homo sapien
ctatagaaaagattagtacatacat

SEQ ID NO: 3289705 - DNA, 25 bp, Homo sapien
ttatctgaacttcattgatcttgtt

SEQ ID NO: 3289706 - DNA, 25 bp, Homo sapien
tttatctgaacttcattgatcttgt

SEQ ID NO: 3289707 - DNA, 25 bp, Homo sapien
gccaatcactctgagccactgtcat

SEQ ID NO: 3289708 - DNA, 25 bp, Homo sapien
ttgccaatcactctgagccactgtc

SEQ ID NO: 3289709 - DNA, 25 bp, Homo sapien
tcttcttccgtccttgcttccccga

SEQ ID NO: 3289710 - DNA, 25 bp, Homo sapien
cgagtgctggtaaccttggtatgtg

SEQ ID NO: 3289711 - DNA, 25 bp, Homo sapien
tccccgagtgctggtaaccttggta

SEQ ID NO: 3289712 - DNA, 25 bp, Homo sapien
cttccccgagtgctggtaaccttgg

SEQ ID NO: 3289713 - DNA, 25 bp, Homo sapien
tgccagttgctacaggattgaatga

SEQ ID NO: 3289714 - DNA, 25 bp, Homo sapien
actgccagttgctacaggattgaat

SEQ ID NO: 3289715 - DNA, 25 bp, Homo sapien
ctgccagtagacttgtcccaaggtt

SEQ ID NO: 3289716 - DNA, 25 bp, Homo sapien
ttgtcccaaggtttcttgctcatct

SEQ ID NO: 3289717 - DNA, 25 bp, Homo sapien
tgggaccctgtttgtagctcactgc

SEQ ID NO: 3289718 - DNA, 25 bp, Homo sapien
tcactgaaacaaccctgtggaggaa

SEQ ID NO: 3289719 - DNA, 25 bp, Homo sapien
gtggaggaacctacacaagcccgtg

SEQ ID NO: 3289720 - DNA, 25 bp, Homo sapien
aagcccgtgcatttgtgtgccccag

SEQ ID NO: 3289721 - DNA, 25 bp, Homo sapien
tggattttgggtgcagtgtaaaacc

SEQ ID NO: 3289722 - DNA, 25 bp, Homo sapien
gtgcagtgtaaaacctgaagggctt

SEQ ID NO: 3289723 - DNA, 25 bp, Homo sapien
acctgaagggcttccaaagtgccag

SEQ ID NO: 3289724 - DNA, 25 bp, Homo sapien
ttttgggtgcagtgtaaaacctgaa

SEQ ID NO: 3289725 - DNA, 25 bp, Homo sapien
tgtacaagcttctatggggcagcca

SEQ ID NO: 3289726 - DNA, 25 bp, Homo sapien
actgtgtacaagcttctatggggca

SEQ ID NO: 3289727 - DNA, 25 bp, Homo sapien
acagaggctgtactgtgtacaagct

SEQ ID NO: 3289728 - DNA, 25 bp, Homo sapien
tacaagcttctatggggcagccaga

SEQ ID NO: 3289729 - DNA, 25 bp, Homo sapien
ctgcagaacatatgtgtcacagttc

SEQ ID NO: 3289730 - DNA, 25 bp, Homo sapien
tgcagaacatatgtgtcacagttcc

SEQ ID NO: 3289731 - DNA, 25 bp, Homo sapien
gaattatagtccaacttgtttggac

SEQ ID NO: 3289732 - DNA, 25 bp, Homo sapien
caatccaggagacagtaagttcaga

SEQ ID NO: 3289733 - DNA, 25 bp, Homo sapien
cagtaagttcagagaattatagtcc

SEQ ID NO: 3289734 - DNA, 25 bp, Homo sapien
tatgccctgttctgcatgcacaatc

SEQ ID NO: 3289735 - DNA, 25 bp, Homo sapien
ctacggtcaaaatgtaagtggactc

SEQ ID NO: 3289736 - DNA, 25 bp, Homo sapien
ggattggcttttggtcgttcatttc

SEQ ID NO: 3289737 - DNA, 25 bp, Homo sapien
tcttctacggtcaaaatgtaagtgg

SEQ ID NO: 3289738 - DNA, 25 bp, Homo sapien
ggtcgttcatttcttctacggtcaa

SEQ ID NO: 3289739 - DNA, 25 bp, Homo sapien
ctggcttgtgtggcaaccgtgctat

SEQ ID NO: 3289740 - DNA, 25 bp, Homo sapien
ttgtgtggcaaccgtgctatttatc

SEQ ID NO: 3289741 - DNA, 25 bp, Homo sapien
ggcttgtgtggcaaccgtgctattt

SEQ ID NO: 3289742 - DNA, 25 bp, Homo sapien
gcttgtgtggcaaccgtgctattta

SEQ ID NO: 3289743 - DNA, 25 bp, Homo sapien
ttcagggatgaaagagtcactaaca

SEQ ID NO: 3289744 - DNA, 25 bp, Homo sapien
tgctagtcactctgagccatggtca

SEQ ID NO: 3289745 - DNA, 25 bp, Homo sapien
tgtcctaactcttgcaacctgcatg

SEQ ID NO: 3289746 - DNA, 25 bp, Homo sapien
aaatgaatgattgactgaacagccc

SEQ ID NO: 3289747 - DNA, 25 bp, Homo sapien
tgtgtgaatagcttcttataaggat

SEQ ID NO: 3289748 - DNA, 25 bp, Homo sapien
cttataaggattggaggttctactg

SEQ ID NO: 3289749 - DNA, 25 bp, Homo sapien
gaatagcttcttataaggattggag

SEQ ID NO: 3289750 - DNA, 25 bp, Homo sapien
gcttcttataaggattggaggttct

SEQ ID NO: 3289751 - DNA, 25 bp, Homo sapien
gaaaacacaacaacaccatcctcat

SEQ ID NO: 3289752 - DNA, 25 bp, Homo sapien
caggcctgaagtgataagatcaacc

SEQ ID NO: 3289753 - DNA, 25 bp, Homo sapien
gccaggcctgaagtgataagatcaa

SEQ ID NO: 3289754 - DNA, 25 bp, Homo sapien
gcctgaagtgataagatcaaccttt

SEQ ID NO: 3289755 - DNA, 25 bp, Homo sapien
tattacctggaatagtactacaatg

SEQ ID NO: 3289756 - DNA, 25 bp, Homo sapien
tactacaatgactctcgtgttgaca

SEQ ID NO: 3289757 - DNA, 25 bp, Homo sapien
gctacaagttactgcaatcacatgc

SEQ ID NO: 3289758 - DNA, 25 bp, Homo sapien
agcaatttgtggtctgcacagtcaa

SEQ ID NO: 3289759 - DNA, 25 bp, Homo sapien
tcttcaccaagagttgaatataatg

SEQ ID NO: 3289760 - DNA, 25 bp, Homo sapien
caagcacatcttcaccaagagttga

SEQ ID NO: 3289761 - DNA, 25 bp, Homo sapien
ccaagagttgaatataatgtgagaa

SEQ ID NO: 3289762 - DNA, 25 bp, Homo sapien
gcacatcttcaccaagagttgaata

SEQ ID NO: 3289763 - DNA, 25 bp, Homo sapien
tgtcctacctaaaccttgacctgag

SEQ ID NO: 3289764 - DNA, 25 bp, Homo sapien
taaagggatgatgagaattcctcac

SEQ ID NO: 3289765 - DNA, 25 bp, Homo sapien
caataccaaacacctgaatgtcagt

SEQ ID NO: 3289766 - DNA, 25 bp, Homo sapien
tgcaagcactccctgtgagacatag

SEQ ID NO: 3289767 - DNA, 25 bp, Homo sapien
gcaagttaattggtctgtgagcagc

SEQ ID NO: 3289768 - DNA, 25 bp, Homo sapien
gctcctagctgaaaagaggccttag

SEQ ID NO: 3289769 - DNA, 25 bp, Homo sapien
gctatgagatcaagtgggcactgac

SEQ ID NO: 3289770 - DNA, 25 bp, Homo sapien
gcttgttgtcccgatgtctctgcag

SEQ ID NO: 3289771 - DNA, 25 bp, Homo sapien
acattaagcaagtctaccaatgcta

SEQ ID NO: 3289772 - DNA, 25 bp, Homo sapien
atctttccaatagctaacacatgct

SEQ ID NO: 3289773 - DNA, 25 bp, Homo sapien
catgctaacaatgtgtcactgtggc

SEQ ID NO: 3289774 - DNA, 25 bp, Homo sapien
taagcaagtctaccaatgctatctt

SEQ ID NO: 3289775 - DNA, 25 bp, Homo sapien
aacaaaacaggcaatattttgtgat

SEQ ID NO: 3289776 - DNA, 25 bp, Homo sapien
caatattttgtgatgatgaatatca

SEQ ID NO: 3289777 - DNA, 25 bp, Homo sapien
aacaggcaatattttgtgatgatga

SEQ ID NO: 3289778 - DNA, 25 bp, Homo sapien
aatattttgtgatgatgaatatcac

SEQ ID NO: 3289779 - DNA, 25 bp, Homo sapien
gggcttcgttggctgatcatgatga

SEQ ID NO: 3289780 - DNA, 25 bp, Homo sapien
caatccagaagaccgcttgatcccg

SEQ ID NO: 3289781 - DNA, 25 bp, Homo sapien
ttcgttggctgatcatgatgaatcc

SEQ ID NO: 3289782 - DNA, 25 bp, Homo sapien
ttgatcccggggcttcgttggctga

SEQ ID NO: 3289783 - DNA, 25 bp, Homo sapien
cagaaaaataccaacatagaaagta

SEQ ID NO: 3289784 - DNA, 25 bp, Homo sapien
ggataaacagaaaaataccaacata

SEQ ID NO: 3289785 - DNA, 25 bp, Homo sapien
aacagaaaaataccaacatagaaag

SEQ ID NO: 3289786 - DNA, 25 bp, Homo sapien
taaacagaaaaataccaacatagaa

SEQ ID NO: 3289787 - DNA, 25 bp, Homo sapien
atgaggtttttcgcaggtggcggca

SEQ ID NO: 3289788 - DNA, 25 bp, Homo sapien
cagatgaggtttttcgcaggtggcg

SEQ ID NO: 3289789 - DNA, 25 bp, Homo sapien
gtttttcgcaggtggcggcaagtac

SEQ ID NO: 3289790 - DNA, 25 bp, Homo sapien
gatgaggtttttcgcaggtggcggc

SEQ ID NO: 3289791 - DNA, 25 bp, Homo sapien
gaccgataaccatataacattctct

SEQ ID NO: 3289792 - DNA, 25 bp, Homo sapien
aatgaccgataaccatataacattc

SEQ ID NO: 3289793 - DNA, 25 bp, Homo sapien
tgaatgaccgataaccatataacat

SEQ ID NO: 3289794 - DNA, 25 bp, Homo sapien
tgaccgataaccatataacattctc

SEQ ID NO: 3289795 - DNA, 25 bp, Homo sapien
ccattatgttggttgcttcgttgac

SEQ ID NO: 3289796 - DNA, 25 bp, Homo sapien
ttttcttatctttacagcgaagttg

SEQ ID NO: 3289797 - DNA, 25 bp, Homo sapien
cttatctttacagcgaagttgtcga

SEQ ID NO: 3289798 - DNA, 25 bp, Homo sapien
gcttcgttgacattccagtttttct

SEQ ID NO: 3289799 - DNA, 25 bp, Homo sapien
agctgttcccagtgcatgtttgtct

SEQ ID NO: 3289800 - DNA, 25 bp, Homo sapien
gctgttcccagtgcatgtttgtctg

SEQ ID NO: 3289801 - DNA, 25 bp, Homo sapien
ctgttcccagtgcatgtttgtctgc

SEQ ID NO: 3289802 - DNA, 25 bp, Homo sapien
tgttcccagtgcatgtttgtctgca

SEQ ID NO: 3289803 - DNA, 25 bp, Homo sapien
ttccctgtgttaatgaatgtcatca

SEQ ID NO: 3289804 - DNA, 25 bp, Homo sapien
tttccctgtgttaatgaatgtcatc

SEQ ID NO: 3289805 - DNA, 25 bp, Homo sapien
ctgaaaccaggtgagcttgtgggca

SEQ ID NO: 3289806 - DNA, 25 bp, Homo sapien
agtggtggcattaaatggcacaatt

SEQ ID NO: 3289807 - DNA, 25 bp, Homo sapien
caaagagagtaacaagagctgtgca

SEQ ID NO: 3289808 - DNA, 25 bp, Homo sapien
gcacaatttttggtatcatgcctgc

SEQ ID NO: 3289809 - DNA, 25 bp, Homo sapien
caggtcagatggtctgggtcctact

SEQ ID NO: 3289810 - DNA, 25 bp, Homo sapien
tgcacagactagtcagctcccagtg

SEQ ID NO: 3289811 - DNA, 25 bp, Homo sapien
tcttccgtgcatagacgggtcagct

SEQ ID NO: 3289812 - DNA, 25 bp, Homo sapien
ggactaagacttctggccacatttg

SEQ ID NO: 3289813 - DNA, 25 bp, Homo sapien
agggcgccattcctggaaccgtcct

SEQ ID NO: 3289814 - DNA, 25 bp, Homo sapien
ccctccgggttcccttgtgctgtca

SEQ ID NO: 3289815 - DNA, 25 bp, Homo sapien
ctggaaccgtcctgcaacccctccg

SEQ ID NO: 3289816 - DNA, 25 bp, Homo sapien
cctccgggttcccttgtgctgtcag

SEQ ID NO: 3289817 - DNA, 25 bp, Homo sapien
tttcccttctttccagttctagcaa

SEQ ID NO: 3289818 - DNA, 25 bp, Homo sapien
tagcaaacttccagacacaaaacat

SEQ ID NO: 3289819 - DNA, 25 bp, Homo sapien
tcccttctttccagttctagcaaac

SEQ ID NO: 3289820 - DNA, 25 bp, Homo sapien
ttctttccagttctagcaaacttcc

SEQ ID NO: 3289821 - DNA, 25 bp, Homo sapien
agttgccacatagtccagcaggaac

SEQ ID NO: 3289822 - DNA, 25 bp, Homo sapien
acagttgccacatagtccagcagga

SEQ ID NO: 3289823 - DNA, 25 bp, Homo sapien
aatatcacagttgccacatagtcca

SEQ ID NO: 3289824 - DNA, 25 bp, Homo sapien
tgataaatatcacagttgccacata

SEQ ID NO: 3289825 - DNA, 25 bp, Homo sapien
tcaatccagaagactgctcgatcca

SEQ ID NO: 3289826 - DNA, 25 bp, Homo sapien
atccagaagactgctcgatccaggg

SEQ ID NO: 3289827 - DNA, 25 bp, Homo sapien
caatccagaagactgctcgatccag

SEQ ID NO: 3289828 - DNA, 25 bp, Homo sapien
aatccagaagactgctcgatccagg

SEQ ID NO: 3289829 - DNA, 25 bp, Homo sapien
tgaaggataaatgtagagataccaa

SEQ ID NO: 3289830 - DNA, 25 bp, Homo sapien
gaaagtaagttaatttgcttgagca

SEQ ID NO: 3289831 - DNA, 25 bp, Homo sapien
aattgaaagtaagttaatttgcttg

SEQ ID NO: 3289832 - DNA, 25 bp, Homo sapien
atgtagagataccaaaattgaaagt

SEQ ID NO: 3289833 - DNA, 25 bp, Homo sapien
acttgacatcgtgtggaagtccaat

SEQ ID NO: 3289834 - DNA, 25 bp, Homo sapien
ttataggaatcccatggtaggtcac

SEQ ID NO: 3289835 - DNA, 25 bp, Homo sapien
tcatgcattgaacaagtctgtactt

SEQ ID NO: 3289836 - DNA, 25 bp, Homo sapien
taggaatcccatggtaggtcacctc

SEQ ID NO: 3289837 - DNA, 25 bp, Homo sapien
cagtatttgtactccagagtcatac

SEQ ID NO: 3289838 - DNA, 25 bp, Homo sapien
tcagtatttgtactccagagtcata

SEQ ID NO: 3289839 - DNA, 25 bp, Homo sapien
tcctaaagcatgtggtttatttcca

SEQ ID NO: 3289840 - DNA, 25 bp, Homo sapien
cacttgtacacccaagtattgagtc

SEQ ID NO: 3289841 - DNA, 25 bp, Homo sapien
caagtattgagtcctaaagcatgtg

SEQ ID NO: 3289842 - DNA, 25 bp, Homo sapien
tgtggtatccacttgtacacccaag

SEQ ID NO: 3289843 - DNA, 25 bp, Homo sapien
atctttctgcggcatcttggcaaga

SEQ ID NO: 3289844 - DNA, 25 bp, Homo sapien
ttatctatctttctgcggcatcttg

SEQ ID NO: 3289845 - DNA, 25 bp, Homo sapien
tttctgcggcatcttggcaagagct

SEQ ID NO: 3289846 - DNA, 25 bp, Homo sapien
atctatctttctgcggcatcttggc

SEQ ID NO: 3289847 - DNA, 25 bp, Homo sapien
tgaaaaaagaatttgttccatcaca

SEQ ID NO: 3289848 - DNA, 25 bp, Homo sapien
aagaatttgttccatcacaaaagag

SEQ ID NO: 3289849 - DNA, 25 bp, Homo sapien
tttgttccatcacaaaagagtaaca

SEQ ID NO: 3289850 - DNA, 25 bp, Homo sapien
ccatcacaaaagagtaacagcacag

SEQ ID NO: 3289851 - DNA, 25 bp, Homo sapien
tgggcaggctcctggttagaaattg

SEQ ID NO: 3289852 - DNA, 25 bp, Homo sapien
ctgggcaggctcctggttagaaatt

SEQ ID NO: 3289853 - DNA, 25 bp, Homo sapien
tagccagctaatctcatagaacact

SEQ ID NO: 3289854 - DNA, 25 bp, Homo sapien
tatccatgtgtttgggcgcacacca

SEQ ID NO: 3289855 - DNA, 25 bp, Homo sapien
tcaaagattgagactgaaaagcagt

SEQ ID NO: 3289856 - DNA, 25 bp, Homo sapien
cactgatgctggctatgtagaaggg

SEQ ID NO: 3289857 - DNA, 25 bp, Homo sapien
aacaagaatatagcagttgccacac

SEQ ID NO: 3289858 - DNA, 25 bp, Homo sapien
aaacattttgtgaacaagaatatag

SEQ ID NO: 3289859 - DNA, 25 bp, Homo sapien
tgaacaagaatatagcagttgccac

SEQ ID NO: 3289860 - DNA, 25 bp, Homo sapien
aaaaacattttgtgaacaagaatat

SEQ ID NO: 3289861 - DNA, 25 bp, Homo sapien
aggggctttacaggttgatcatggt

SEQ ID NO: 3289862 - DNA, 25 bp, Homo sapien
gggctttacaggttgatcatggtga

SEQ ID NO: 3289863 - DNA, 25 bp, Homo sapien
ggggctttacaggttgatcatggtg

SEQ ID NO: 3289864 - DNA, 25 bp, Homo sapien
agtctgtacaagcagtagtacttac

SEQ ID NO: 3289865 - DNA, 25 bp, Homo sapien
caaagccctcagtaaatcttcgctt

SEQ ID NO: 3289866 - DNA, 25 bp, Homo sapien
gatgagaaatggtgagatattttat

SEQ ID NO: 3289867 - DNA, 25 bp, Homo sapien
ttggatgagaaatggtgagatattt

SEQ ID NO: 3289868 - DNA, 25 bp, Homo sapien
ctagtatgtaaattggatgagaaat

SEQ ID NO: 3289869 - DNA, 25 bp, Homo sapien
attggatgagaaatggtgagatatt

SEQ ID NO: 3289870 - DNA, 25 bp, Homo sapien
gaatttcctgtcactctcaccttaa

SEQ ID NO: 3289871 - DNA, 25 bp, Homo sapien
taaagactacagatgggaattacga

SEQ ID NO: 3289872 - DNA, 25 bp, Homo sapien
taactcactgaagcgtacagcactt

SEQ ID NO: 3289873 - DNA, 25 bp, Homo sapien
cagcactttctttagaaggtgagca

SEQ ID NO: 3289874 - DNA, 25 bp, Homo sapien
gctcctaatgtggatggtttttttc

SEQ ID NO: 3289875 - DNA, 25 bp, Homo sapien
aatcatacagccgagtattggctcc

SEQ ID NO: 3289876 - DNA, 25 bp, Homo sapien
tacagccgagtattggctcctaatg

SEQ ID NO: 3289877 - DNA, 25 bp, Homo sapien
atccaatcatacagccgagtattgg

SEQ ID NO: 3289878 - DNA, 25 bp, Homo sapien
aagggctgaagcaatgatattagcc

SEQ ID NO: 3289879 - DNA, 25 bp, Homo sapien
acaccacaataccatcttcccctga

SEQ ID NO: 3289880 - DNA, 25 bp, Homo sapien
acattttgaaacagtgaccccagag

SEQ ID NO: 3289881 - DNA, 25 bp, Homo sapien
cctgaactctggacaaaattttcca

SEQ ID NO: 3289882 - DNA, 25 bp, Homo sapien
cccacaggaggtattaggagtgtca

SEQ ID NO: 3289883 - DNA, 25 bp, Homo sapien
ggacctagccagcactacagtagta

SEQ ID NO: 3289884 - DNA, 25 bp, Homo sapien
gaagcactaatcacagcaaatggca

SEQ ID NO: 3289885 - DNA, 25 bp, Homo sapien
tagtacaggagacacaatccaaggg

SEQ ID NO: 3289886 - DNA, 25 bp, Homo sapien
gagaatagcttagtaagaacccatc

SEQ ID NO: 3289887 - DNA, 25 bp, Homo sapien
caaatcaggcatagaggctcatatc

SEQ ID NO: 3289888 - DNA, 25 bp, Homo sapien
cacttgaagcccaaagattgagaat

SEQ ID NO: 3289889 - DNA, 25 bp, Homo sapien
gaaagtctacaacaacgaacacaca

SEQ ID NO: 3289890 - DNA, 25 bp, Homo sapien
gatgccatggcttaagagagcttgg

SEQ ID NO: 3289891 - DNA, 25 bp, Homo sapien
catggcttaagagagcttggttttc

SEQ ID NO: 3289892 - DNA, 25 bp, Homo sapien
gccatggcttaagagagcttggttt

SEQ ID NO: 3289893 - DNA, 25 bp, Homo sapien
tgccatggcttaagagagcttggtt

SEQ ID NO: 3289894 - DNA, 25 bp, Homo sapien
cacagtctcacataatgtagtgggc

SEQ ID NO: 3289895 - DNA, 25 bp, Homo sapien
tcccaatatgttcgtattagccata

SEQ ID NO: 3289896 - DNA, 25 bp, Homo sapien
gtgcaatcctccaacaaactcaaag

SEQ ID NO: 3289897 - DNA, 25 bp, Homo sapien
caaagctttggcaggtttacagtgc

SEQ ID NO: 3289898 - DNA, 25 bp, Homo sapien
ttcgctccatattgcctcctacaga

SEQ ID NO: 3289899 - DNA, 25 bp, Homo sapien
tgattgccaggttgataagcctggc

SEQ ID NO: 3289900 - DNA, 25 bp, Homo sapien
ctgattgccaggttgataagcctgg

SEQ ID NO: 3289901 - DNA, 25 bp, Homo sapien
cctacagaaattctaagtgtgagca

SEQ ID NO: 3289902 - DNA, 25 bp, Homo sapien
gaaggcttcctgtagtcaattaacg

SEQ ID NO: 3289903 - DNA, 25 bp, Homo sapien
ggcttcctgtagtcaattaacgaag

SEQ ID NO: 3289904 - DNA, 25 bp, Homo sapien
ggaccacctcaaatttcaatgcaga

SEQ ID NO: 3289905 - DNA, 25 bp, Homo sapien
ttaacgaaggctttgagtgagtcaa

SEQ ID NO: 3289906 - DNA, 25 bp, Homo sapien
ccaatggctcatgtcacagggccac

SEQ ID NO: 3289907 - DNA, 25 bp, Homo sapien
taccaaagctgacttgtcagacctc

SEQ ID NO: 3289908 - DNA, 25 bp, Homo sapien
accaaagctgacttgtcagacctca

SEQ ID NO: 3289909 - DNA, 25 bp, Homo sapien
ccaaagctgacttgtcagacctcat

SEQ ID NO: 3289910 - DNA, 25 bp, Homo sapien
atggcagttccctcacacactgatc

SEQ ID NO: 3289911 - DNA, 25 bp, Homo sapien
gatggcagttccctcacacactgat

SEQ ID NO: 3289912 - DNA, 25 bp, Homo sapien
gagcagattcttgggaaaggacgaa

SEQ ID NO: 3289913 - DNA, 25 bp, Homo sapien
aaaacgcaacgccagactgatgaag

SEQ ID NO: 3289914 - DNA, 25 bp, Homo sapien
gagaggataacaaccctgagcagat

SEQ ID NO: 3289915 - DNA, 25 bp, Homo sapien
gattgctgctgatctcaaaacgcaa

SEQ ID NO: 3289916 - DNA, 25 bp, Homo sapien
tggctttcatgtgagaggtgttgtc

SEQ ID NO: 3289917 - DNA, 25 bp, Homo sapien
caaacataggaaactcccaccatag

SEQ ID NO: 3289918 - DNA, 25 bp, Homo sapien
aaacataggaaactcccaccatagg

SEQ ID NO: 3289919 - DNA, 25 bp, Homo sapien
tgtcaagatgatcaccaaacatagg

SEQ ID NO: 3289920 - DNA, 25 bp, Homo sapien
tagaccccatttatatcaccatgag

SEQ ID NO: 3289921 - DNA, 25 bp, Homo sapien
gaccccatttatatcaccatgagtg

SEQ ID NO: 3289922 - DNA, 25 bp, Homo sapien
gtgcatgacctagttgggaaactga

SEQ ID NO: 3289923 - DNA, 25 bp, Homo sapien
tttgtgcatgacctagttgggaaac

SEQ ID NO: 3289924 - DNA, 25 bp, Homo sapien
tgtgtgaatagcttcttataaggat

SEQ ID NO: 3289925 - DNA, 25 bp, Homo sapien
cttataaggattggaggttctactg

SEQ ID NO: 3289926 - DNA, 25 bp, Homo sapien
gcttcttataaggattggaggttct

SEQ ID NO: 3289927 - DNA, 25 bp, Homo sapien
gaatagcttcttataaggattggag

SEQ ID NO: 3289928 - DNA, 25 bp, Homo sapien
ttatcagagcgctggaaaaattctt

SEQ ID NO: 3289929 - DNA, 25 bp, Homo sapien
ccagggcggaagtgataagataaac

SEQ ID NO: 3289930 - DNA, 25 bp, Homo sapien
ccatccttatcagagcgctggaaaa

SEQ ID NO: 3289931 - DNA, 25 bp, Homo sapien
gaaaacacaacaacaccatccttat

SEQ ID NO: 3289932 - DNA, 25 bp, Homo sapien
tcccagggagtcatgtggatggaga

SEQ ID NO: 3289933 - DNA, 25 bp, Homo sapien
gagaaggtctgaatctttgacaaga

SEQ ID NO: 3289934 - DNA, 25 bp, Homo sapien
ggcaagatctaagagaaggtctgaa

SEQ ID NO: 3289935 - DNA, 25 bp, Homo sapien
gatctaagagaaggtctgaatcttt

SEQ ID NO: 3289936 - DNA, 25 bp, Homo sapien
ttaatgactgcttttaatgcgttga

SEQ ID NO: 3289937 - DNA, 25 bp, Homo sapien
tctgtagttgacattgtttttgagt

SEQ ID NO: 3289938 - DNA, 25 bp, Homo sapien
catgaagagtcattaatgactgctt

SEQ ID NO: 3289939 - DNA, 25 bp, Homo sapien
taatgcgttgagcaaatctgtagtt

SEQ ID NO: 3289940 - DNA, 25 bp, Homo sapien
catgtgaacaaacttatcgggttga

SEQ ID NO: 3289941 - DNA, 25 bp, Homo sapien
ccttagccttcatgtgaacaaactt

SEQ ID NO: 3289942 - DNA, 25 bp, Homo sapien
cccttagccttcatgtgaacaaact

SEQ ID NO: 3289943 - DNA, 25 bp, Homo sapien
cttcatgtgaacaaacttatcgggt

SEQ ID NO: 3289944 - DNA, 25 bp, Homo sapien
acccaggattagataaatgtttgaa

SEQ ID NO: 3289945 - DNA, 25 bp, Homo sapien
ttttagatgacccaggattagataa

SEQ ID NO: 3289946 - DNA, 25 bp, Homo sapien
tgtttgaataattattcgtgatgag

SEQ ID NO: 3289947 - DNA, 25 bp, Homo sapien
tgatcctctcataagtgccattggc

SEQ ID NO: 3289948 - DNA, 25 bp, Homo sapien
gctgctaagtaagagtgagactgaa

SEQ ID NO: 3289949 - DNA, 25 bp, Homo sapien
gctaagtaagagtgagactgaatca

SEQ ID NO: 3289950 - DNA, 25 bp, Homo sapien
ctaagtaagagtgagactgaatcat

SEQ ID NO: 3289951 - DNA, 25 bp, Homo sapien
tgatgtttccattatgtcggttgct

SEQ ID NO: 3289952 - DNA, 25 bp, Homo sapien
ctatggcttttgctttcaactgttc

SEQ ID NO: 3289953 - DNA, 25 bp, Homo sapien
tggcttttgctttcaactgttctgc

SEQ ID NO: 3289954 - DNA, 25 bp, Homo sapien
tgctttcaactgttctgcaatgtgc

SEQ ID NO: 3289955 - DNA, 25 bp, Homo sapien
aataatgtctatggcttttgctttc

SEQ ID NO: 3289956 - DNA, 25 bp, Homo sapien
cttcctcacacatgactttcagctg

SEQ ID NO: 3289957 - DNA, 25 bp, Homo sapien
agggattactacacaaagcttcctc

SEQ ID NO: 3289958 - DNA, 25 bp, Homo sapien
ctgcaaggacaagtgtatcaacaac

SEQ ID NO: 3289959 - DNA, 25 bp, Homo sapien
acaacattttctactgagggattac

SEQ ID NO: 3289960 - DNA, 25 bp, Homo sapien
tagtaccacactcatctcacaaaat

SEQ ID NO: 3289961 - DNA, 25 bp, Homo sapien
tcagcttcgtcaagcaaatggtccc

SEQ ID NO: 3289962 - DNA, 25 bp, Homo sapien
atctggtaaaagaccttcagcttcg

SEQ ID NO: 3289963 - DNA, 25 bp, Homo sapien
tactgaatctagtaccacactcatc

SEQ ID NO: 3289964 - DNA, 25 bp, Homo sapien
gggagaatgcgagatgactctctaa

SEQ ID NO: 3289965 - DNA, 25 bp, Homo sapien
tcatgccaactcataattccaggtt

SEQ ID NO: 3289966 - DNA, 25 bp, Homo sapien
cccaataggttatacaatcatgcca

SEQ ID NO: 3289967 - DNA, 25 bp, Homo sapien
ggtgatagtggcacaacatttcaaa

SEQ ID NO: 3289968 - DNA, 25 bp, Homo sapien
tgaatgacactaataaattaatttg

SEQ ID NO: 3289969 - DNA, 25 bp, Homo sapien
tgctgtgttcatttcacaaattaaa

SEQ ID NO: 3289970 - DNA, 25 bp, Homo sapien
ttcctgtcttgaattgctgtgttca

SEQ ID NO: 3289971 - DNA, 25 bp, Homo sapien
tcttgaattgctgtgttcatttcac

SEQ ID NO: 3289972 - DNA, 25 bp, Homo sapien
tcagtatgaaaacaggcatgtacag

SEQ ID NO: 3289973 - DNA, 25 bp, Homo sapien
gggctggaataattggcaatccaca

SEQ ID NO: 3289974 - DNA, 25 bp, Homo sapien
tacttatagccaactgaactttgac

SEQ ID NO: 3289975 - DNA, 25 bp, Homo sapien
gattctcggctttgaaacctgcata

SEQ ID NO: 3289976 - DNA, 25 bp, Homo sapien
gagcttgtacggctttatgttattt

SEQ ID NO: 3289977 - DNA, 25 bp, Homo sapien
tatgagcttgtacggctttatgtta

SEQ ID NO: 3289978 - DNA, 25 bp, Homo sapien
aaatttcaatatgagcttgtacggc

SEQ ID NO: 3289979 - DNA, 25 bp, Homo sapien
ttcaatatgagcttgtacggcttta

SEQ ID NO: 3289980 - DNA, 25 bp, Homo sapien
tgtgatgataaatagcacagttgcc

SEQ ID NO: 3289981 - DNA, 25 bp, Homo sapien
atgataaatagcacagttgccacac

SEQ ID NO: 3289982 - DNA, 25 bp, Homo sapien
tgatgataaatagcacagttgccac

SEQ ID NO: 3289983 - DNA, 25 bp, Homo sapien
tttgtgatgataaatagcacagttg

SEQ ID NO: 3289984 - DNA, 25 bp, Homo sapien
caggaacccaatcacatccaaagag

SEQ ID NO: 3289985 - DNA, 25 bp, Homo sapien
gcaggaacccaatcacatccaaaga

SEQ ID NO: 3289986 - DNA, 25 bp, Homo sapien
tgcattcagcaggtctgtactcgac

SEQ ID NO: 3289987 - DNA, 25 bp, Homo sapien
cagtgcattcagcaggtctgtactc

SEQ ID NO: 3289988 - DNA, 25 bp, Homo sapien
cagcaggtctgtactcgacattgtg

SEQ ID NO: 3289989 - DNA, 25 bp, Homo sapien
tgtactcgacattgtgttgaagtcc

SEQ ID NO: 3289990 - DNA, 25 bp, Homo sapien
tattcataggaataaaatgagatgc

SEQ ID NO: 3289991 - DNA, 25 bp, Homo sapien
agtgacagtgttttctagattacac

SEQ ID NO: 3289992 - DNA, 25 bp, Homo sapien
gagatgcacaatgaaaggctctgaa

SEQ ID NO: 3289993 - DNA, 25 bp, Homo sapien
gacagtgttttctagattacacatt

SEQ ID NO: 3289994 - DNA, 25 bp, Homo sapien
tatccagtatttgttcaccagagtt

SEQ ID NO: 3289995 - DNA, 25 bp, Homo sapien
tatatccagtatttgttcaccagag

SEQ ID NO: 3289996 - DNA, 25 bp, Homo sapien
cagtatttgttcaccagagttttac

SEQ ID NO: 3289997 - DNA, 25 bp, Homo sapien
tccagtatttgttcaccagagtttt

SEQ ID NO: 3289998 - DNA, 25 bp, Homo sapien
gggtatccacctgtacagccgagta

SEQ ID NO: 3289999 - DNA, 25 bp, Homo sapien
tccacctgtacagccgagtattgag

SEQ ID NO: 3290000 - DNA, 25 bp, Homo sapien
ctgtacagccgagtattgagaccta

SEQ ID NO: 3290001 - DNA, 25 bp, Homo sapien
cattctggggtatccacctgtacag

SEQ ID NO: 3290002 - DNA, 25 bp, Homo sapien
ataaatctattcaaagaccgctgta

SEQ ID NO: 3290003 - DNA, 25 bp, Homo sapien
gagaatatcttattccacgagtgga

SEQ ID NO: 3290004 - DNA, 25 bp, Homo sapien
cagtaaagagaatatcttattccac

SEQ ID NO: 3290005 - DNA, 25 bp, Homo sapien
aaatctattcaaagaccgctgtaaa

SEQ ID NO: 3290006 - DNA, 25 bp, Homo sapien
tatgttctatggagggggcatctga

SEQ ID NO: 3290007 - DNA, 25 bp, Homo sapien
tgttctatggagggggcatctgaac

SEQ ID NO: 3290008 - DNA, 25 bp, Homo sapien
atgttctatggagggggcatctgaa

SEQ ID NO: 3290009 - DNA, 25 bp, Homo sapien
tctggtaattagtgctgagtccttg

SEQ ID NO: 3290010 - DNA, 25 bp, Homo sapien
gggttgttaatctggtaattagtgc

SEQ ID NO: 3290011 - DNA, 25 bp, Homo sapien
ccttctgctgcgtccattgggaggg

SEQ ID NO: 3290012 - DNA, 25 bp, Homo sapien
cacattttatactggacaggatcca

SEQ ID NO: 3290013 - DNA, 25 bp, Homo sapien
cttggcaagggctgttgcaattaca

SEQ ID NO: 3290014 - DNA, 25 bp, Homo sapien
agctctgtacaaactcctccatttg

SEQ ID NO: 3290015 - DNA, 25 bp, Homo sapien
gaaaacaccacagcaccatattctc

SEQ ID NO: 3290016 - DNA, 25 bp, Homo sapien
tcatgttactgaccattgaccccag

SEQ ID NO: 3290017 - DNA, 25 bp, Homo sapien
acaaaagagtatcaccacagcaggc

SEQ ID NO: 3290018 - DNA, 25 bp, Homo sapien
aaggctatagagtcatttctactga

SEQ ID NO: 3290019 - DNA, 25 bp, Homo sapien
tgtaaaccaaacactctgaatgaag

SEQ ID NO: 3290020 - DNA, 25 bp, Homo sapien
ccaaacactctgaatgaaggctata

SEQ ID NO: 3290021 - DNA, 25 bp, Homo sapien
tctgaatgaaggctatagagtcatt

SEQ ID NO: 3290022 - DNA, 25 bp, Homo sapien
gtttggcaggtttgcagtggagtcc

SEQ ID NO: 3290023 - DNA, 25 bp, Homo sapien
gggtttggcaggtttgcagtggagt

SEQ ID NO: 3290024 - DNA, 25 bp, Homo sapien
taggggtttggcaggtttgcagtgg

SEQ ID NO: 3290025 - DNA, 25 bp, Homo sapien
ttggcaggtttgcagtggagtcctc

SEQ ID NO: 3290026 - DNA, 25 bp, Homo sapien
cctttcaaatgagtagccaggagtg

SEQ ID NO: 3290027 - DNA, 25 bp, Homo sapien
gtgaagctgtgactgtacacaaagg

SEQ ID NO: 3290028 - DNA, 25 bp, Homo sapien
aataaagcacatagagcacattttt

SEQ ID NO: 3290029 - DNA, 25 bp, Homo sapien
aagggtatgttaaatagcgcagcca

SEQ ID NO: 3290030 - DNA, 25 bp, Homo sapien
tgcaaaaacgatgtcaaatcttgac

SEQ ID NO: 3290031 - DNA, 25 bp, Homo sapien
tctgcaaaaacgatgtcaaatcttg

SEQ ID NO: 3290032 - DNA, 25 bp, Homo sapien
caaaaacgatgtcaaatcttgactc

SEQ ID NO: 3290033 - DNA, 25 bp, Homo sapien
agcatctgcaaaaacgatgtcaaat

SEQ ID NO: 3290034 - DNA, 25 bp, Homo sapien
tacatctttacagaagtttctaatt

SEQ ID NO: 3290035 - DNA, 25 bp, Homo sapien
ctttacagaagtttctaattatgtt

SEQ ID NO: 3290036 - DNA, 25 bp, Homo sapien
catctttacagaagtttctaattat

SEQ ID NO: 3290037 - DNA, 25 bp, Homo sapien
ctacatctttacagaagtttctaat

SEQ ID NO: 3290038 - DNA, 25 bp, Homo sapien
aatgttgcatcgtgatattctccaa

SEQ ID NO: 3290039 - DNA, 25 bp, Homo sapien
atcttttggaatgttgcatcgtgat

SEQ ID NO: 3290040 - DNA, 25 bp, Homo sapien
tggaatgttgcatcgtgatattctc

SEQ ID NO: 3290041 - DNA, 25 bp, Homo sapien
tcttttggaatgttgcatcgtgata

SEQ ID NO: 3290042 - DNA, 25 bp, Homo sapien
gaagtttgagttcctttcagagcca

SEQ ID NO: 3290043 - DNA, 25 bp, Homo sapien
aagggctgtactctgcggcccacac

SEQ ID NO: 3290044 - DNA, 25 bp, Homo sapien
agaactgaagtttgagttcctttca

SEQ ID NO: 3290045 - DNA, 25 bp, Homo sapien
ttcatccaagggctgtactctgcgg

SEQ ID NO: 3290046 - DNA, 25 bp, Homo sapien
tggtgcaatgtgataattcttttcc

SEQ ID NO: 3290047 - DNA, 25 bp, Homo sapien
gtgcaatgtgataattcttttccag

SEQ ID NO: 3290048 - DNA, 25 bp, Homo sapien
cctggtgcaatgtgataattctttt

SEQ ID NO: 3290049 - DNA, 25 bp, Homo sapien
gcaatgtgataattcttttccagtc

SEQ ID NO: 3290050 - DNA, 25 bp, Homo sapien
ctcatggtgtttctgagcaagttca

SEQ ID NO: 3290051 - DNA, 25 bp, Homo sapien
atggtgtttctgagcaagttcatca

SEQ ID NO: 3290052 - DNA, 25 bp, Homo sapien
ttctgagcaagttcatcaagtatca

SEQ ID NO: 3290053 - DNA, 25 bp, Homo sapien
tctgagcaagttcatcaagtatcat

SEQ ID NO: 3290054 - DNA, 25 bp, Homo sapien
ctataaagcaataaagtcagggtcc

SEQ ID NO: 3290055 - DNA, 25 bp, Homo sapien
cattctaggaagtcataaacctgta

SEQ ID NO: 3290056 - DNA, 25 bp, Homo sapien
gtcggacccgtccacaaacatctta

SEQ ID NO: 3290057 - DNA, 25 bp, Homo sapien
tggccattgctaatacagaacattc

SEQ ID NO: 3290058 - DNA, 25 bp, Homo sapien
tgtggtgggacataaatcaagactc

SEQ ID NO: 3290059 - DNA, 25 bp, Homo sapien
tgtaagacagccatcacctaaagga

SEQ ID NO: 3290060 - DNA, 25 bp, Homo sapien
tgcaaaatgtctacccactccagct

SEQ ID NO: 3290061 - DNA, 25 bp, Homo sapien
gccatagaacattagaagaacacag

SEQ ID NO: 3290062 - DNA, 25 bp, Homo sapien
taaattgtacaaattctatgtcaat

SEQ ID NO: 3290063 - DNA, 25 bp, Homo sapien
tgaagtttctatgatgactcaaact

SEQ ID NO: 3290064 - DNA, 25 bp, Homo sapien
tatgatgactcaaactaaattgtac

SEQ ID NO: 3290065 - DNA, 25 bp, Homo sapien
tactctgaatcatttggcactgtaa

SEQ ID NO: 3290066 - DNA, 25 bp, Homo sapien
gtcatgtgctgtaaaggagccaagc

SEQ ID NO: 3290067 - DNA, 25 bp, Homo sapien
gtaacactccttcaacgtgattggg

SEQ ID NO: 3290068 - DNA, 25 bp, Homo sapien
tcaaccagtaaaggtcgagcagtct

SEQ ID NO: 3290069 - DNA, 25 bp, Homo sapien
aagcaacctcgggttgcagcccagg

SEQ ID NO: 3290070 - DNA, 25 bp, Homo sapien
ggcacacccatcatccgagcagtgt

SEQ ID NO: 3290071 - DNA, 25 bp, Homo sapien
gaacatccaatgtttagttacctaa

SEQ ID NO: 3290072 - DNA, 25 bp, Homo sapien
tccctgagtcctgagagtccattat

SEQ ID NO: 3290073 - DNA, 25 bp, Homo sapien
gctgttaatggcattattttcttcc

SEQ ID NO: 3290074 - DNA, 25 bp, Homo sapien
tatgcagacttcaagccaagaatca

SEQ ID NO: 3290075 - DNA, 25 bp, Homo sapien
gaagtccttgttaagccaatgtcta

SEQ ID NO: 3290076 - DNA, 25 bp, Homo sapien
tcttacaggaggacagtagtattgc

SEQ ID NO: 3290077 - DNA, 25 bp, Homo sapien
aagtgacttgtcaattatcccagca

SEQ ID NO: 3290078 - DNA, 25 bp, Homo sapien
ggaataacaaggtggcaaaggctaa

SEQ ID NO: 3290079 - DNA, 25 bp, Homo sapien
taatgctctagagatttgcaaccta

SEQ ID NO: 3290080 - DNA, 25 bp, Homo sapien
cacacttaaaaggtgggtatctatt

SEQ ID NO: 3290081 - DNA, 25 bp, Homo sapien
tcatgcagaaatccttccatataag

SEQ ID NO: 3290082 - DNA, 25 bp, Homo sapien
gctccaacaaatgtgagtgtagtca

SEQ ID NO: 3290083 - DNA, 25 bp, Homo sapien
cacatagctccaacaaatgtgagtg

SEQ ID NO: 3290084 - DNA, 25 bp, Homo sapien
tgagtgtagtcattgcagagaacag

SEQ ID NO: 3290085 - DNA, 25 bp, Homo sapien
caaatgtgagtgtagtcattgcaga

SEQ ID NO: 3290086 - DNA, 25 bp, Homo sapien
aagtttggcaaaccttgtagctgtc

SEQ ID NO: 3290087 - DNA, 25 bp, Homo sapien
tgtctcaacagaaacgatatagtgg

SEQ ID NO: 3290088 - DNA, 25 bp, Homo sapien
ggtagagagacacagatatatgccc

SEQ ID NO: 3290089 - DNA, 25 bp, Homo sapien
tatcccctccctttgaagtttggca

SEQ ID NO: 3290090 - DNA, 25 bp, Homo sapien
agctggcactctggatccagatgcc

SEQ ID NO: 3290091 - DNA, 25 bp, Homo sapien
tctgagaaaccactacataatgatg

SEQ ID NO: 3290092 - DNA, 25 bp, Homo sapien
gactcagcataacatggtggttaag

SEQ ID NO: 3290093 - DNA, 25 bp, Homo sapien
ggcattggtggtcatagtattatca

SEQ ID NO: 3290094 - DNA, 25 bp, Homo sapien
ctcgcagaggattaacacagtggct

SEQ ID NO: 3290095 - DNA, 25 bp, Homo sapien
gcaggccctcgcagaggattaacac

SEQ ID NO: 3290096 - DNA, 25 bp, Homo sapien
aggattaacacagtggctgaacacc

SEQ ID NO: 3290097 - DNA, 25 bp, Homo sapien
aagcaggtagcaggccctcgcagag

SEQ ID NO: 3290098 - DNA, 25 bp, Homo sapien
cgctcctttgtttcctacctgtact

SEQ ID NO: 3290099 - DNA, 25 bp, Homo sapien
tagttcaccaaagtgcttcagcaca

SEQ ID NO: 3290100 - DNA, 25 bp, Homo sapien
taaaaagcttcatcgctaccttagt

SEQ ID NO: 3290101 - DNA, 25 bp, Homo sapien
gtacttcttcaaatgataaaaagct

SEQ ID NO: 3290102 - DNA, 25 bp, Homo sapien
agagtgagaactcccgctaataaaa

SEQ ID NO: 3290103 - DNA, 25 bp, Homo sapien
gaactcccgctaataaaaagtgaga

SEQ ID NO: 3290104 - DNA, 25 bp, Homo sapien
taagagtgagaactcccgctaataa

SEQ ID NO: 3290105 - DNA, 25 bp, Homo sapien
gagaactcccgctaataaaaagtga

SEQ ID NO: 3290106 - DNA, 25 bp, Homo sapien
atgatgcagcaatccctcttctgga

SEQ ID NO: 3290107 - DNA, 25 bp, Homo sapien
caggatctcaaagggatatttgcac

SEQ ID NO: 3290108 - DNA, 25 bp, Homo sapien
tggatatttatccataagaattaaa

SEQ ID NO: 3290109 - DNA, 25 bp, Homo sapien
gaattaaaatcaggatctcaaaggg

SEQ ID NO: 3290110 - DNA, 25 bp, Homo sapien
attatataagttgatgtctatttga

SEQ ID NO: 3290111 - DNA, 25 bp, Homo sapien
tcattatataagttgatgtctattt

SEQ ID NO: 3290112 - DNA, 25 bp, Homo sapien
cattatataagttgatgtctatttg

SEQ ID NO: 3290113 - DNA, 25 bp, Homo sapien
tgcattgaagagagtaattaatgat

SEQ ID NO: 3290114 - DNA, 25 bp, Homo sapien
attgaagagagtaattaatgatcct

SEQ ID NO: 3290115 - DNA, 25 bp, Homo sapien
cattgaagagagtaattaatgatcc

SEQ ID NO: 3290116 - DNA, 25 bp, Homo sapien
gaatgcattgaagagagtaattaat

SEQ ID NO: 3290117 - DNA, 25 bp, Homo sapien
tccagcaagaaagattgtgatgcaa

SEQ ID NO: 3290118 - DNA, 25 bp, Homo sapien
gttatatctgagatttgaagctgga

SEQ ID NO: 3290119 - DNA, 25 bp, Homo sapien
aaacctgataggtgagactacttca

SEQ ID NO: 3290120 - DNA, 25 bp, Homo sapien
tatttatcgtcacaaaatgttgtct

SEQ ID NO: 3290121 - DNA, 25 bp, Homo sapien
tatttcggctcctgcaactcttctg

SEQ ID NO: 3290122 - DNA, 25 bp, Homo sapien
tcagctttggtatttcggctcctgc

SEQ ID NO: 3290123 - DNA, 25 bp, Homo sapien
tctgtgagaaggtcctggtgtggcc

SEQ ID NO: 3290124 - DNA, 25 bp, Homo sapien
actcttctgtgctagttgtgaattc

SEQ ID NO: 3290125 - DNA, 25 bp, Homo sapien
tcatgggcctaatcagagtcactgc

SEQ ID NO: 3290126 - DNA, 25 bp, Homo sapien
acttcattcgctgtgatcatgggcc

SEQ ID NO: 3290127 - DNA, 25 bp, Homo sapien
cactgctggagtggcattataccaa

SEQ ID NO: 3290128 - DNA, 25 bp, Homo sapien
caatgattagcaagtcaattccacc

SEQ ID NO: 3290129 - DNA, 25 bp, Homo sapien
tgtgaattcaaacaacaaatctcaa

SEQ ID NO: 3290130 - DNA, 25 bp, Homo sapien
aactgaagttgtcctatctatctgg

SEQ ID NO: 3290131 - DNA, 25 bp, Homo sapien
aaatttcaatatgagctcaaatggc

SEQ ID NO: 3290132 - DNA, 25 bp, Homo sapien
attattctgaggatgtgactactga

SEQ ID NO: 3290133 - DNA, 25 bp, Homo sapien
atgataaatatcacagttgccacac

SEQ ID NO: 3290134 - DNA, 25 bp, Homo sapien
cttcccttttctagcaaacttccag

SEQ ID NO: 3290135 - DNA, 25 bp, Homo sapien
aaaacagacaaaactttgtgatgat

SEQ ID NO: 3290136 - DNA, 25 bp, Homo sapien
cagacaaaactttgtgatgataaat

SEQ ID NO: 3290137 - DNA, 25 bp, Homo sapien
aatccagaagactgctcgatccagg

SEQ ID NO: 3290138 - DNA, 25 bp, Homo sapien
tcaatccagaagactgctcgatcca

SEQ ID NO: 3290139 - DNA, 25 bp, Homo sapien
atccagaagactgctcgatccaggg

SEQ ID NO: 3290140 - DNA, 25 bp, Homo sapien
caatccagaagactgctcgatccag

SEQ ID NO: 3290141 - DNA, 25 bp, Homo sapien
tcttgataatttcataatattctct

SEQ ID NO: 3290142 - DNA, 25 bp, Homo sapien
tactggttgatcatgttgaattctt

SEQ ID NO: 3290143 - DNA, 25 bp, Homo sapien
ctttactggttgatcatgttgaatt

SEQ ID NO: 3290144 - DNA, 25 bp, Homo sapien
ttcttgataatttcataatattctc

SEQ ID NO: 3290145 - DNA, 25 bp, Homo sapien
ctgaaggataaaaataaggatacca

SEQ ID NO: 3290146 - DNA, 25 bp, Homo sapien
gaaaattgcttcactaactggttac

SEQ ID NO: 3290147 - DNA, 25 bp, Homo sapien
tgtccacaaataccacctagtgaaa

SEQ ID NO: 3290148 - DNA, 25 bp, Homo sapien
cattagatgtatgggattcaaacac

SEQ ID NO: 3290149 - DNA, 25 bp, Homo sapien
gaaactcatgctcactattgacaag

SEQ ID NO: 3290150 - DNA, 25 bp, Homo sapien
tgcattcagcaggtctgtactcgac

SEQ ID NO: 3290151 - DNA, 25 bp, Homo sapien
cagtgcattcagcaggtctgtactc

SEQ ID NO: 3290152 - DNA, 25 bp, Homo sapien
tgtactcgacattgtgttgaagtcc

SEQ ID NO: 3290153 - DNA, 25 bp, Homo sapien
cagcaggtctgtactcgacattgtg

SEQ ID NO: 3290154 - DNA, 25 bp, Homo sapien
ttattcataggaataaaatgagatg

SEQ ID NO: 3290155 - DNA, 25 bp, Homo sapien
aaaatgagatgcacaatgaaaggtt

SEQ ID NO: 3290156 - DNA, 25 bp, Homo sapien
ctaggattggatgaattttagcaaa

SEQ ID NO: 3290157 - DNA, 25 bp, Homo sapien
ggaataaaatgagatgcacaatgaa

SEQ ID NO: 3290158 - DNA, 25 bp, Homo sapien
ctagataacacattgaactaatttg

SEQ ID NO: 3290159 - DNA, 25 bp, Homo sapien
ctaatatatccagtatttgttcacc

SEQ ID NO: 3290160 - DNA, 25 bp, Homo sapien
tatatccagtatttgttcaccagag

SEQ ID NO: 3290161 - DNA, 25 bp, Homo sapien
tatccagtatttgttcaccagagtg

SEQ ID NO: 3290162 - DNA, 25 bp, Homo sapien
aatatatccagtatttgttcaccag

SEQ ID NO: 3290163 - DNA, 25 bp, Homo sapien
gtacagccgagtattgagacctaag

SEQ ID NO: 3290164 - DNA, 25 bp, Homo sapien
acctaaggcatctggtttattcccg

SEQ ID NO: 3290165 - DNA, 25 bp, Homo sapien
ggcatctggtttattcccgtcaaat

SEQ ID NO: 3290166 - DNA, 25 bp, Homo sapien
cttgtacagccgagtattgagacct

SEQ ID NO: 3290167 - DNA, 25 bp, Homo sapien
tagaatgttagaactgtagaaagca

SEQ ID NO: 3290168 - DNA, 25 bp, Homo sapien
cagtaaagagaatatcttattccat

SEQ ID NO: 3290169 - DNA, 25 bp, Homo sapien
gagaatatcttattccatgagtgga

SEQ ID NO: 3290170 - DNA, 25 bp, Homo sapien
ataggaatgagatcaagggatgtta

SEQ ID NO: 3290171 - DNA, 25 bp, Homo sapien
cttgtgggaccatattttatactgt

SEQ ID NO: 3290172 - DNA, 25 bp, Homo sapien
atgttacttatcactgaccccagag

SEQ ID NO: 3290173 - DNA, 25 bp, Homo sapien
gctgtcatgttacttatcactgacc

SEQ ID NO: 3290174 - DNA, 25 bp, Homo sapien
ttctgctgtcatgttacttatcact

SEQ ID NO: 3290175 - DNA, 25 bp, Homo sapien
tcatgttacttatcactgaccccag

SEQ ID NO: 3290176 - DNA, 25 bp, Homo sapien
acaaaagagtatcaccacagcaggc

SEQ ID NO: 3290177 - DNA, 25 bp, Homo sapien
aaaactatagactcatttctactga

SEQ ID NO: 3290178 - DNA, 25 bp, Homo sapien
gaaaactatagactcatttctactg

SEQ ID NO: 3290179 - DNA, 25 bp, Homo sapien
gaatgaaaactatagactcatttct

SEQ ID NO: 3290180 - DNA, 25 bp, Homo sapien
atgaaaactatagactcatttctac

SEQ ID NO: 3290181 - DNA, 25 bp, Homo sapien
ctccaggagtttcgcataagccata

SEQ ID NO: 3290182 - DNA, 25 bp, Homo sapien
tgcagtggaatcctccaacaaaatc

SEQ ID NO: 3290183 - DNA, 25 bp, Homo sapien
tcccattgtctcaaataaggtagtg

SEQ ID NO: 3290184 - DNA, 25 bp, Homo sapien
tgaggaaattgaaaactccaggagt

SEQ ID NO: 3290185 - DNA, 25 bp, Homo sapien
cctttcaattgtgtagccaggagta

SEQ ID NO: 3290186 - DNA, 25 bp, Homo sapien
ggagactgtacacaaaccgtatgtt

SEQ ID NO: 3290187 - DNA, 25 bp, Homo sapien
gccaggagtaaagcggagactgtac

SEQ ID NO: 3290188 - DNA, 25 bp, Homo sapien
aaccgtatgttaagtagcgcagcca

SEQ ID NO: 3290189 - DNA, 25 bp, Homo sapien
agcatctgcaaaaacgatgtcaaat

SEQ ID NO: 3290190 - DNA, 25 bp, Homo sapien
caaaaacgatgtcaaatcttgactc

SEQ ID NO: 3290191 - DNA, 25 bp, Homo sapien
tctgcaaaaacgatgtcaaatcttg

SEQ ID NO: 3290192 - DNA, 25 bp, Homo sapien
tgcaaaaacgatgtcaaatcttgac

SEQ ID NO: 3290193 - DNA, 25 bp, Homo sapien
tctaaatatgtcatataattcccac

SEQ ID NO: 3290194 - DNA, 25 bp, Homo sapien
tataaccaaaagctatcttttcgaa

SEQ ID NO: 3290195 - DNA, 25 bp, Homo sapien
cagaagtttctaaatatgtcatata

SEQ ID NO: 3290196 - DNA, 25 bp, Homo sapien
tgtcatataattcccacaggatttc

SEQ ID NO: 3290197 - DNA, 25 bp, Homo sapien
gtctgaccatctcttaacctgttgc

SEQ ID NO: 3290198 - DNA, 25 bp, Homo sapien
catctcttaacctgttgcatgatga

SEQ ID NO: 3290199 - DNA, 25 bp, Homo sapien
acttcaaatttaagagtggatgcat

SEQ ID NO: 3290200 - DNA, 25 bp, Homo sapien
aatttaagagtggatgcatcattgg

SEQ ID NO: 3290201 - DNA, 25 bp, Homo sapien
tgtgtattagttctcatctccccac

SEQ ID NO: 3290202 - DNA, 25 bp, Homo sapien
cagcatttttgaatatcgtggttca

SEQ ID NO: 3290203 - DNA, 25 bp, Homo sapien
tgtgcatccaacgtaacaatcagtt

SEQ ID NO: 3290204 - DNA, 25 bp, Homo sapien
cagagcccttgacacagaataagag

SEQ ID NO: 3290205 - DNA, 25 bp, Homo sapien
gaaggattatgcactatttggaaga

SEQ ID NO: 3290206 - DNA, 25 bp, Homo sapien
cctttgcacattgaatagctgtatc

SEQ ID NO: 3290207 - DNA, 25 bp, Homo sapien
tgcatctgttgacccatcctctaag

SEQ ID NO: 3290208 - DNA, 25 bp, Homo sapien
ttttactgcacaagttctgggatac

SEQ ID NO: 3290209 - DNA, 25 bp, Homo sapien
ggaaggccctaagaaagcacagctc

SEQ ID NO: 3290210 - DNA, 25 bp, Homo sapien
ggatctgtggtaccttagccagcta

SEQ ID NO: 3290211 - DNA, 25 bp, Homo sapien
aaatgattgaatgaccctggaggag

SEQ ID NO: 3290212 - DNA, 25 bp, Homo sapien
taactccagattccgttgaaggcca

SEQ ID NO: 3290213 - DNA, 25 bp, Homo sapien
caagccatgaggtatgtcactcgcc

SEQ ID NO: 3290214 - DNA, 25 bp, Homo sapien
gcctgtttgagaactaagagtgtaa

SEQ ID NO: 3290215 - DNA, 25 bp, Homo sapien
gatgttgagcaggtactcatatgcc

SEQ ID NO: 3290216 - DNA, 25 bp, Homo sapien
gtcactcgccatgataaaattcctt

SEQ ID NO: 3290217 - DNA, 25 bp, Homo sapien
cattgaagataatgctctcacccat

SEQ ID NO: 3290218 - DNA, 25 bp, Homo sapien
tctcattgaagataatgctctcacc

SEQ ID NO: 3290219 - DNA, 25 bp, Homo sapien
ctcattgaagataatgctctcaccc

SEQ ID NO: 3290220 - DNA, 25 bp, Homo sapien
tcattgaagataatgctctcaccca

SEQ ID NO: 3290221 - DNA, 25 bp, Homo sapien
ggcttcctgtagtcaattaacaaag

SEQ ID NO: 3290222 - DNA, 25 bp, Homo sapien
tggcccctcactatgatctcctcta

SEQ ID NO: 3290223 - DNA, 25 bp, Homo sapien
ggcccctcactatgatctcctctag

SEQ ID NO: 3290224 - DNA, 25 bp, Homo sapien
catggcccctcactatgatctcctc

SEQ ID NO: 3290225 - DNA, 25 bp, Homo sapien
ctcatggcccctcactatgatctcc

SEQ ID NO: 3290226 - DNA, 25 bp, Homo sapien
caaggtgttggatggtttagaagaa

SEQ ID NO: 3290227 - DNA, 25 bp, Homo sapien
tcattccacactaaatccaaggtgt

SEQ ID NO: 3290228 - DNA, 25 bp, Homo sapien
attccacactaaatccaaggtgttg

SEQ ID NO: 3290229 - DNA, 25 bp, Homo sapien
aatccaaggtgttggatggtttaga

SEQ ID NO: 3290230 - DNA, 25 bp, Homo sapien
gatgcccgttttgcataccaatgaa

SEQ ID NO: 3290231 - DNA, 25 bp, Homo sapien
gcttttgacaagaatgatgcccgtt

SEQ ID NO: 3290232 - DNA, 25 bp, Homo sapien
cattggcctttggtaggatttctcc

SEQ ID NO: 3290233 - DNA, 25 bp, Homo sapien
ggatagatttctaaaacccatggga

SEQ ID NO: 3290234 - DNA, 25 bp, Homo sapien
tactttaccttttacagtgaagcag

SEQ ID NO: 3290235 - DNA, 25 bp, Homo sapien
tgaagcagcctagggtcactggagc

SEQ ID NO: 3290236 - DNA, 25 bp, Homo sapien
tgtttgaagtatcaccaggagttct

SEQ ID NO: 3290237 - DNA, 25 bp, Homo sapien
ctggagcagtcttgttgtttgaagt

SEQ ID NO: 3290238 - DNA, 25 bp, Homo sapien
acgttgattttgttggaggactcca

SEQ ID NO: 3290239 - DNA, 25 bp, Homo sapien
tccactgcaaacctgccaaacccct

SEQ ID NO: 3290240 - DNA, 25 bp, Homo sapien
tgattttgttggaggactccactgc

SEQ ID NO: 3290241 - DNA, 25 bp, Homo sapien
tcatcctttcttaccaaacgttgat

SEQ ID NO: 3290242 - DNA, 25 bp, Homo sapien
tgctgacagttgtattttagccctg

SEQ ID NO: 3290243 - DNA, 25 bp, Homo sapien
ccatgaggtaactgtgcttgtcacc

SEQ ID NO: 3290244 - DNA, 25 bp, Homo sapien
cctgaatcctgcgagaatgtgctgg

SEQ ID NO: 3290245 - DNA, 25 bp, Homo sapien
ctggtgtggccgatgaaatacagtc

SEQ ID NO: 3290246 - DNA, 25 bp, Homo sapien
tttcagtagaaatgagtctatagtc

SEQ ID NO: 3290247 - DNA, 25 bp, Homo sapien
ttcagtagaaatgagtctatagtct

SEQ ID NO: 3290248 - DNA, 25 bp, Homo sapien
gtagaaatgagtctatagtcttcat

SEQ ID NO: 3290249 - DNA, 25 bp, Homo sapien
cagtagaaatgagtctatagtcttc

SEQ ID NO: 3290250 - DNA, 25 bp, Homo sapien
cagacgatgtctgccttatgacaag

SEQ ID NO: 3290251 - DNA, 25 bp, Homo sapien
aagcaactcagtaaagcttcctggg

SEQ ID NO: 3290252 - DNA, 25 bp, Homo sapien
ggaacttgtctcaacatcataggtg

SEQ ID NO: 3290253 - DNA, 25 bp, Homo sapien
cctattagagcagacgatgtctgcc

SEQ ID NO: 3290254 - DNA, 25 bp, Homo sapien
aagcccctggatcgagcagtcttct

SEQ ID NO: 3290255 - DNA, 25 bp, Homo sapien
agcccctggatcgagcagtcttctg

SEQ ID NO: 3290256 - DNA, 25 bp, Homo sapien
catccattttcagggctagttgatt

SEQ ID NO: 3290257 - DNA, 25 bp, Homo sapien
caatatgtagccatcacttatcgcc

SEQ ID NO: 3290258 - DNA, 25 bp, Homo sapien
tatgtagccatcacttatcgcccca

SEQ ID NO: 3290259 - DNA, 25 bp, Homo sapien
tgtagccatcacttatcgccccaga

SEQ ID NO: 3290260 - DNA, 25 bp, Homo sapien
agccatcacttatcgccccagagga

SEQ ID NO: 3290261 - DNA, 25 bp, Homo sapien
tatttaattataagagtgcaaattt

SEQ ID NO: 3290262 - DNA, 25 bp, Homo sapien
catgcctagcctgtactacgcaatt

SEQ ID NO: 3290263 - DNA, 25 bp, Homo sapien
tatgaacagtaaacttgttgtggaa

SEQ ID NO: 3290264 - DNA, 25 bp, Homo sapien
accttgtgatgcaccaactttggtc

SEQ ID NO: 3290265 - DNA, 25 bp, Homo sapien
ttggtgagaaagctgaagcaaataa

SEQ ID NO: 3290266 - DNA, 25 bp, Homo sapien
acctgaattcagagtgccagctctt

SEQ ID NO: 3290267 - DNA, 25 bp, Homo sapien
ccattatttagtgatttctcagaga

SEQ ID NO: 3290268 - DNA, 25 bp, Homo sapien
gagatttgaatcaaggtgacctgaa

SEQ ID NO: 3290269 - DNA, 25 bp, Homo sapien
cttctgaacagcgaaagagataatc

SEQ ID NO: 3290270 - DNA, 25 bp, Homo sapien
tggaactcaattacactaaacagct

SEQ ID NO: 3290271 - DNA, 25 bp, Homo sapien
aaacaggcatgtagaccaatgaaac

SEQ ID NO: 3290272 - DNA, 25 bp, Homo sapien
tccacatagcccaagtaagactaag

SEQ ID NO: 3290273 - DNA, 25 bp, Homo sapien
tgtaacctgtgaattggaacaataa

SEQ ID NO: 3290274 - DNA, 25 bp, Homo sapien
tattagcttcctcaacaacagttaa

SEQ ID NO: 3290275 - DNA, 25 bp, Homo sapien
tgaaatggatccaaagtatgctgag

SEQ ID NO: 3290276 - DNA, 25 bp, Homo sapien
cttgtttccatgtacaatgtgtgac

SEQ ID NO: 3290277 - DNA, 25 bp, Homo sapien
ttcctgttctaacaaacttccagac

SEQ ID NO: 3290278 - DNA, 25 bp, Homo sapien
cctgttctaacaaacttccagacac

SEQ ID NO: 3290279 - DNA, 25 bp, Homo sapien
cagacattttgtgatgatgaatatc

SEQ ID NO: 3290280 - DNA, 25 bp, Homo sapien
gttctaacaaacttccagacacaaa

SEQ ID NO: 3290281 - DNA, 25 bp, Homo sapien
tggctcctttatggcgcatgacaaa

SEQ ID NO: 3290282 - DNA, 25 bp, Homo sapien
ttcaatccagaagactgctcgatca

SEQ ID NO: 3290283 - DNA, 25 bp, Homo sapien
aggaacccagtcacatccaaagagt

SEQ ID NO: 3290284 - DNA, 25 bp, Homo sapien
gctgcaacccgaaggtgcttggctc

SEQ ID NO: 3290285 - DNA, 25 bp, Homo sapien
agcctggtgacagagtgagacttcc

SEQ ID NO: 3290286 - DNA, 25 bp, Homo sapien
cctggtgacagagtgagacttccct

SEQ ID NO: 3290287 - DNA, 25 bp, Homo sapien
ccagcctggtgacagagtgagactt

SEQ ID NO: 3290288 - DNA, 25 bp, Homo sapien
aagttgcagtgagccacaatcacac

SEQ ID NO: 3290289 - DNA, 25 bp, Homo sapien
tcagtgcattgagtaagtctgtact

SEQ ID NO: 3290290 - DNA, 25 bp, Homo sapien
gtcttcagtgcattgagtaagtctg

SEQ ID NO: 3290291 - DNA, 25 bp, Homo sapien
cgacattgtgtggaagtccaaacta

SEQ ID NO: 3290292 - DNA, 25 bp, Homo sapien
cattgagtaagtctgtactcgacat

SEQ ID NO: 3290293 - DNA, 25 bp, Homo sapien
atggtagattgcctcatagatgcca

SEQ ID NO: 3290294 - DNA, 25 bp, Homo sapien
tagattgcctcatagatgccattgg

SEQ ID NO: 3290295 - DNA, 25 bp, Homo sapien
ggtagattgcctcatagatgccatt

SEQ ID NO: 3290296 - DNA, 25 bp, Homo sapien
ccatggtagattgcctcatagatgc

SEQ ID NO: 3290297 - DNA, 25 bp, Homo sapien
aatgagaaatgcacaatggaagaat

SEQ ID NO: 3290298 - DNA, 25 bp, Homo sapien
taaaatgagaaatgcacaatggaag

SEQ ID NO: 3290299 - DNA, 25 bp, Homo sapien
ctaggattggatgaattttagcaaa

SEQ ID NO: 3290300 - DNA, 25 bp, Homo sapien
attattcataggaataaaatgagaa

SEQ ID NO: 3290301 - DNA, 25 bp, Homo sapien
tctcttaagtacagtcacggagtgt

SEQ ID NO: 3290302 - DNA, 25 bp, Homo sapien
aagacaggtcacatttcattatgaa

SEQ ID NO: 3290303 - DNA, 25 bp, Homo sapien
cagcatccctggtgatagcagaaga

SEQ ID NO: 3290304 - DNA, 25 bp, Homo sapien
gacatttgaaataaccctacagagg

SEQ ID NO: 3290305 - DNA, 25 bp, Homo sapien
gagtcctaaagtatctggtttattc

SEQ ID NO: 3290306 - DNA, 25 bp, Homo sapien
gccgagtattgagtcctaaagtatc

SEQ ID NO: 3290307 - DNA, 25 bp, Homo sapien
gagtattgagtcctaaagtatctgg

SEQ ID NO: 3290308 - DNA, 25 bp, Homo sapien
acagccgagtattgagtcctaaagt

SEQ ID NO: 3290309 - DNA, 25 bp, Homo sapien
tctgatgtgttactgaccatcgacc

SEQ ID NO: 3290310 - DNA, 25 bp, Homo sapien
tcttctgatgtgttactgaccatcg

SEQ ID NO: 3290311 - DNA, 25 bp, Homo sapien
gatgtgttactgaccatcgacccca

SEQ ID NO: 3290312 - DNA, 25 bp, Homo sapien
cctttcttctgatgtgttactgacc

SEQ ID NO: 3290313 - DNA, 25 bp, Homo sapien
ctatcataatagattatcagcacag

SEQ ID NO: 3290314 - DNA, 25 bp, Homo sapien
tgttttgtttcagtggcttgatgtc

SEQ ID NO: 3290315 - DNA, 25 bp, Homo sapien
catttgatgtaacttacgttcagtg

SEQ ID NO: 3290316 - DNA, 25 bp, Homo sapien
gtagccacatttgatgtaacttacg

SEQ ID NO: 3290317 - DNA, 25 bp, Homo sapien
gagccgccttcatccacccagtgtt

SEQ ID NO: 3290318 - DNA, 25 bp, Homo sapien
gggtttggcaggtttgcagtggagt

SEQ ID NO: 3290319 - DNA, 25 bp, Homo sapien
gtttggcaggtttgcagtggagtcc

SEQ ID NO: 3290320 - DNA, 25 bp, Homo sapien
ttggcaggtttgcagtggagtcctc

SEQ ID NO: 3290321 - DNA, 25 bp, Homo sapien
taggggtttggcaggtttgcagtgg

SEQ ID NO: 3290322 - DNA, 25 bp, Homo sapien
ggtcacttagttctgacataacaac

SEQ ID NO: 3290323 - DNA, 25 bp, Homo sapien
tgaaagtcatttggtcacttagttc

SEQ ID NO: 3290324 - DNA, 25 bp, Homo sapien
tgatcccacttcttcatgtcaaata

SEQ ID NO: 3290325 - DNA, 25 bp, Homo sapien
ttagttctgacataacaacaggcac

SEQ ID NO: 3290326 - DNA, 25 bp, Homo sapien
ggtattttaagtaactcggccagca

SEQ ID NO: 3290327 - DNA, 25 bp, Homo sapien
tattttaagtaactcggccagcagc

SEQ ID NO: 3290328 - DNA, 25 bp, Homo sapien
attttaagtaactcggccagcagct

SEQ ID NO: 3290329 - DNA, 25 bp, Homo sapien
gtattttaagtaactcggccagcag

SEQ ID NO: 3290330 - DNA, 25 bp, Homo sapien
gcaagaacaacatcaaatcttgact

SEQ ID NO: 3290331 - DNA, 25 bp, Homo sapien
tgcaagaacaacatcaaatcttgac

SEQ ID NO: 3290332 - DNA, 25 bp, Homo sapien
caagaacaacatcaaatcttgactc

SEQ ID NO: 3290333 - DNA, 25 bp, Homo sapien
ctgcaagaacaacatcaaatcttga

SEQ ID NO: 3290334 - DNA, 25 bp, Homo sapien
tctaagtatgtcattaaatgtccac

SEQ ID NO: 3290335 - DNA, 25 bp, Homo sapien
gctgttgggatcgaaagaaatggaa

SEQ ID NO: 3290336 - DNA, 25 bp, Homo sapien
taaccagctgcttgataatatcctc

SEQ ID NO: 3290337 - DNA, 25 bp, Homo sapien
aatttaagagtagatgggctgttgg

SEQ ID NO: 3290338 - DNA, 25 bp, Homo sapien
ctttatattcatccagtggctgaat

SEQ ID NO: 3290339 - DNA, 25 bp, Homo sapien
ctcatgacctctctggacaagttca

SEQ ID NO: 3290340 - DNA, 25 bp, Homo sapien
gtggctgaattctgtgggccacacc

SEQ ID NO: 3290341 - DNA, 25 bp, Homo sapien
cagctgtatcagcagaagagctgaa

SEQ ID NO: 3290342 - DNA, 25 bp, Homo sapien
aatgcaatgcttgttttccagttgc

SEQ ID NO: 3290343 - DNA, 25 bp, Homo sapien
cctgatgcaatgcaatgcttgtttt

SEQ ID NO: 3290344 - DNA, 25 bp, Homo sapien
gcaatgcaatgcttgttttccagtt

SEQ ID NO: 3290345 - DNA, 25 bp, Homo sapien
tgatgcaatgcaatgcttgttttcc

SEQ ID NO: 3290346 - DNA, 25 bp, Homo sapien
tgtgtgtgtgagtcaacactgttac

SEQ ID NO: 3290347 - DNA, 25 bp, Homo sapien
ctgtgtgtgtgagtcaacactgtta

SEQ ID NO: 3290348 - DNA, 25 bp, Homo sapien
taagccaatggctgatgttacagtg

SEQ ID NO: 3290349 - DNA, 25 bp, Homo sapien
tagcagaattgtgaaaacccacttc

SEQ ID NO: 3290350 - DNA, 25 bp, Homo sapien
tgccccagtaccttctcacagaatc

SEQ ID NO: 3290351 - DNA, 25 bp, Homo sapien
tctatgagttcctccaaaatattgt

SEQ ID NO: 3290352 - DNA, 25 bp, Homo sapien
tactcaggtatctatgcacctgcca

SEQ ID NO: 3290353 - DNA, 25 bp, Homo sapien
cgttgatgagacatgtaagagagca

SEQ ID NO: 3290354 - DNA, 25 bp, Homo sapien
tatagtttcaagatatgggttagac

SEQ ID NO: 3290355 - DNA, 25 bp, Homo sapien
aacattatgatgtagtccctgtgct

SEQ ID NO: 3290356 - DNA, 25 bp, Homo sapien
taagcatcttatctaactactctgg

SEQ ID NO: 3290357 - DNA, 25 bp, Homo sapien
tactatgaaccactgtatgctgaaa

SEQ ID NO: 3290358 - DNA, 25 bp, Homo sapien
aaagatacctgtaggtgctgacaac

SEQ ID NO: 3290359 - DNA, 25 bp, Homo sapien
aatgcaaaggatcatcggtggctac

SEQ ID NO: 3290360 - DNA, 25 bp, Homo sapien
gactattgtcttcaagcattagaaa

SEQ ID NO: 3290361 - DNA, 25 bp, Homo sapien
gaactcatcaatccatgctatgtag

SEQ ID NO: 3290362 - DNA, 25 bp, Homo sapien
atacatacatgtactcagcattgtg

SEQ ID NO: 3290363 - DNA, 25 bp, Homo sapien
gacactcacaatggtttattgacta

SEQ ID NO: 3290364 - DNA, 25 bp, Homo sapien
tcaaggatttgatgaatatttgaat

SEQ ID NO: 3290365 - DNA, 25 bp, Homo sapien
tagatcctctcataggtgccgttgg

SEQ ID NO: 3290366 - DNA, 25 bp, Homo sapien
gtttttgtgtccagtctgatagctt

SEQ ID NO: 3290367 - DNA, 25 bp, Homo sapien
gaagccccctccacatagggatccc

SEQ ID NO: 3290368 - DNA, 25 bp, Homo sapien
tgaggcaatgaaacgggcagtgttc

SEQ ID NO: 3290369 - DNA, 25 bp, Homo sapien
tgcacaatatgaggcaatgaaacgg

SEQ ID NO: 3290370 - DNA, 25 bp, Homo sapien
aaacgagcaatgcacaatatgaggc

SEQ ID NO: 3290371 - DNA, 25 bp, Homo sapien
cttagaaataaaacgagcaatgcac

SEQ ID NO: 3290372 - DNA, 25 bp, Homo sapien
gatccgttggttcctcctgtccgga

SEQ ID NO: 3290373 - DNA, 25 bp, Homo sapien
ttatctcaaagagcgaaataaaaac

SEQ ID NO: 3290374 - DNA, 25 bp, Homo sapien
catctggatccgttggttcctcctg

SEQ ID NO: 3290375 - DNA, 25 bp, Homo sapien
gcggcgcatctggatccgttggttc

SEQ ID NO: 3290376 - DNA, 25 bp, Homo sapien
gatggccacaggtttctagctgatc

SEQ ID NO: 3290377 - DNA, 25 bp, Homo sapien
tctagctgatcctgtaactttcggt

SEQ ID NO: 3290378 - DNA, 25 bp, Homo sapien
agtgtcctgtataagtgatggccac

SEQ ID NO: 3290379 - DNA, 25 bp, Homo sapien
cagcttttccaccatattagtaaga

SEQ ID NO: 3290380 - DNA, 25 bp, Homo sapien
tacggtggctccctgatttgtttgg

SEQ ID NO: 3290381 - DNA, 25 bp, Homo sapien
tgtagacatttaatagggacgcacg

SEQ ID NO: 3290382 - DNA, 25 bp, Homo sapien
tcagtaggcttatcgcaggtagaga

SEQ ID NO: 3290383 - DNA, 25 bp, Homo sapien
gggacgcacgtcacacttaaaattc

SEQ ID NO: 3290384 - DNA, 25 bp, Homo sapien
attgtatgaccaaaaatatagccgt

SEQ ID NO: 3290385 - DNA, 25 bp, Homo sapien
gaccaaaaatatagccgttgtcaca

SEQ ID NO: 3290386 - DNA, 25 bp, Homo sapien
aaacaaacaacattgtatgaccaaa

SEQ ID NO: 3290387 - DNA, 25 bp, Homo sapien
caaacaacattgtatgaccaaaaat

SEQ ID NO: 3290388 - DNA, 25 bp, Homo sapien
aggggctttacaggttgatcatggt

SEQ ID NO: 3290389 - DNA, 25 bp, Homo sapien
gggctttacaggttgatcatggtga

SEQ ID NO: 3290390 - DNA, 25 bp, Homo sapien
ggggctttacaggttgatcatggtg

SEQ ID NO: 3290391 - DNA, 25 bp, Homo sapien
gttatcaggctgatcagcaaacatg

SEQ ID NO: 3290392 - DNA, 25 bp, Homo sapien
tcaaagcgctaagcaaatccacact

SEQ ID NO: 3290393 - DNA, 25 bp, Homo sapien
tgtgtttaggttcacttccacagct

SEQ ID NO: 3290394 - DNA, 25 bp, Homo sapien
gtagatcccattagttccaccatga

SEQ ID NO: 3290395 - DNA, 25 bp, Homo sapien
tgagaagtgggtgtgtaataataac

SEQ ID NO: 3290396 - DNA, 25 bp, Homo sapien
tgtaactctctaaagaaggatacgt

SEQ ID NO: 3290397 - DNA, 25 bp, Homo sapien
gaaggggtcaaaaagctgtaatgta

SEQ ID NO: 3290398 - DNA, 25 bp, Homo sapien
cattagcagaatttgagagacagaa

SEQ ID NO: 3290399 - DNA, 25 bp, Homo sapien
ttctggggtatccaatcaaagagct

SEQ ID NO: 3290400 - DNA, 25 bp, Homo sapien
ggtatccaatcaaagagctgagtat

SEQ ID NO: 3290401 - DNA, 25 bp, Homo sapien
tcaaagagctgagtattgtttccta

SEQ ID NO: 3290402 - DNA, 25 bp, Homo sapien
attgtttcctaatgtggctggtttc

SEQ ID NO: 3290403 - DNA, 25 bp, Homo sapien
cattgtctctcccattagtaaaaag

SEQ ID NO: 3290404 - DNA, 25 bp, Homo sapien
attgtctctcccattagtaaaaagc

SEQ ID NO: 3290405 - DNA, 25 bp, Homo sapien
ggtttttgaccattgatcccagaga

SEQ ID NO: 3290406 - DNA, 25 bp, Homo sapien
taaggtttttgaccattgatcccag

SEQ ID NO: 3290407 - DNA, 25 bp, Homo sapien
gaggcaataagattggccttttctt

SEQ ID NO: 3290408 - DNA, 25 bp, Homo sapien
caagggctgaggcaataagattggc

SEQ ID NO: 3290409 - DNA, 25 bp, Homo sapien
ataaaatcctccactgttgtagacc

SEQ ID NO: 3290410 - DNA, 25 bp, Homo sapien
aaatcctccactgttgtagacctac

SEQ ID NO: 3290411 - DNA, 25 bp, Homo sapien
taaaatcctccactgttgtagacct

SEQ ID NO: 3290412 - DNA, 25 bp, Homo sapien
aaaatcctccactgttgtagaccta

SEQ ID NO: 3290413 - DNA, 25 bp, Homo sapien
gtgcaatcctccaacaaactcaaaa

SEQ ID NO: 3290414 - DNA, 25 bp, Homo sapien
atcccaatatgttcggattaaccaa

SEQ ID NO: 3290415 - DNA, 25 bp, Homo sapien
tgttcggattaaccaaatttcagct

SEQ ID NO: 3290416 - DNA, 25 bp, Homo sapien
taggtaagtatggacgaggaaattc

SEQ ID NO: 3290417 - DNA, 25 bp, Homo sapien
gtctcacataacgtagtgggtcttc

SEQ ID NO: 3290418 - DNA, 25 bp, Homo sapien
agtctcacataacgtagtgggtctt

SEQ ID NO: 3290419 - DNA, 25 bp, Homo sapien
gaaaatgtaacaagttggatggagg

SEQ ID NO: 3290420 - DNA, 25 bp, Homo sapien
ggatggaggaaattagcttatatgt

SEQ ID NO: 3290421 - DNA, 25 bp, Homo sapien
tggaggaaattagcttatatgtttg

SEQ ID NO: 3290422 - DNA, 25 bp, Homo sapien
aaaatgtaacaagttggatggagga

SEQ ID NO: 3290423 - DNA, 25 bp, Homo sapien
acggagaatgactttgacgagctga

SEQ ID NO: 3290424 - DNA, 25 bp, Homo sapien
tggacggagaatgactttgacgagc

SEQ ID NO: 3290425 - DNA, 25 bp, Homo sapien
cgcaacagaacaaaactggacggag

SEQ ID NO: 3290426 - DNA, 25 bp, Homo sapien
ctggacggagaatgactttgacgag

SEQ ID NO: 3290427 - DNA, 25 bp, Homo sapien
aatgtagtcagatatttgtgtatct

SEQ ID NO: 3290428 - DNA, 25 bp, Homo sapien
tgtagtcagatatttgtgtatctaa

SEQ ID NO: 3290429 - DNA, 25 bp, Homo sapien
ttcaatgtagtcagatatttgtgta

SEQ ID NO: 3290430 - DNA, 25 bp, Homo sapien
caatgtagtcagatatttgtgtatc

SEQ ID NO: 3290431 - DNA, 25 bp, Homo sapien
ctattgcctgattctatgcttttca

SEQ ID NO: 3290432 - DNA, 25 bp, Homo sapien
tgcctgattctatgcttttcaaagc

SEQ ID NO: 3290433 - DNA, 25 bp, Homo sapien
ctgattctatgcttttcaaagcttt

SEQ ID NO: 3290434 - DNA, 25 bp, Homo sapien
tattgcctgattctatgcttttcaa

SEQ ID NO: 3290435 - DNA, 25 bp, Homo sapien
tttcagagcaacaagatcaccacag

SEQ ID NO: 3290436 - DNA, 25 bp, Homo sapien
tagaaagcccatattgtgagaggag

SEQ ID NO: 3290437 - DNA, 25 bp, Homo sapien
taaggctgccggtacataggagact

SEQ ID NO: 3290438 - DNA, 25 bp, Homo sapien
ggagttggtctatggtcaatccaca

SEQ ID NO: 3290439 - DNA, 25 bp, Homo sapien
acattcccacttagaacaacttcag

SEQ ID NO: 3290440 - DNA, 25 bp, Homo sapien
aattaacacattcccacttagaaca

SEQ ID NO: 3290441 - DNA, 25 bp, Homo sapien
taacacattcccacttagaacaact

SEQ ID NO: 3290442 - DNA, 25 bp, Homo sapien
caaattaacacattcccacttagaa

SEQ ID NO: 3290443 - DNA, 25 bp, Homo sapien
tgtacattccgctcttatatgaacg

SEQ ID NO: 3290444 - DNA, 25 bp, Homo sapien
cttatatgaacggagatgctgcaca

SEQ ID NO: 3290445 - DNA, 25 bp, Homo sapien
gatgctgcacatattcagagtccct

SEQ ID NO: 3290446 - DNA, 25 bp, Homo sapien
tcagagtcccttttagtttaccata

SEQ ID NO: 3290447 - DNA, 25 bp, Homo sapien
gctttactatagtatgaatcccatg

SEQ ID NO: 3290448 - DNA, 25 bp, Homo sapien
aaagacatttggtcggtgagttctg

SEQ ID NO: 3290449 - DNA, 25 bp, Homo sapien
caaacatgtagtcctgtaggtggta

SEQ ID NO: 3290450 - DNA, 25 bp, Homo sapien
agtttcaaacatgtagtcctgtagg

SEQ ID NO: 3290451 - DNA, 25 bp, Homo sapien
caccagaggcaactaggacagtcac

SEQ ID NO: 3290452 - DNA, 25 bp, Homo sapien
taaagctactatatcgccacaagga

SEQ ID NO: 3290453 - DNA, 25 bp, Homo sapien
tccagccatgtcaaaacgaagtcct

SEQ ID NO: 3290454 - DNA, 25 bp, Homo sapien
gaaggagatggtctattttccagcc

SEQ ID NO: 3290455 - DNA, 25 bp, Homo sapien
agaacagcagaaggttgtttaacat

SEQ ID NO: 3290456 - DNA, 25 bp, Homo sapien
ggagaacagcagaaggttgtttaac

SEQ ID NO: 3290457 - DNA, 25 bp, Homo sapien
gggagaacagcagaaggttgtttaa

SEQ ID NO: 3290458 - DNA, 25 bp, Homo sapien
aagggagaacagcagaaggttgttt

SEQ ID NO: 3290459 - DNA, 25 bp, Homo sapien
tttgatgagatgtgaagcaaatgtt

SEQ ID NO: 3290460 - DNA, 25 bp, Homo sapien
ttgatgagatgtgaagcaaatgttt

SEQ ID NO: 3290461 - DNA, 25 bp, Homo sapien
tgatgagatgtgaagcaaatgtttt

SEQ ID NO: 3290462 - DNA, 25 bp, Homo sapien
gatttgatgagatgtgaagcaaatg

SEQ ID NO: 3290463 - DNA, 25 bp, Homo sapien
tcccatgaagactaacaggcttcat

SEQ ID NO: 3290464 - DNA, 25 bp, Homo sapien
ctcccatgaagactaacaggcttca

SEQ ID NO: 3290465 - DNA, 25 bp, Homo sapien
cctcccatgaagactaacaggcttc

SEQ ID NO: 3290466 - DNA, 25 bp, Homo sapien
ttaatgctgcttttgctgtgatatt

SEQ ID NO: 3290467 - DNA, 25 bp, Homo sapien
tgcttttgctgtgatatttgcttac

SEQ ID NO: 3290468 - DNA, 25 bp, Homo sapien
atgctgcttttgctgtgatatttgc

SEQ ID NO: 3290469 - DNA, 25 bp, Homo sapien
gctgcttttgctgtgatatttgctt

SEQ ID NO: 3290470 - DNA, 25 bp, Homo sapien
tcttcctgtggtctgatgagcttct

SEQ ID NO: 3290471 - DNA, 25 bp, Homo sapien
ctaggcgtctgccttctgactccgg

SEQ ID NO: 3290472 - DNA, 25 bp, Homo sapien
cattttgttgagctttggttacact

SEQ ID NO: 3290473 - DNA, 25 bp, Homo sapien
acttttactccaggatgctaggcgt

SEQ ID NO: 3290474 - DNA, 25 bp, Homo sapien
atctccttccggtggagacactttg

SEQ ID NO: 3290475 - DNA, 25 bp, Homo sapien
gaacatctccagtatctccttccgg

SEQ ID NO: 3290476 - DNA, 25 bp, Homo sapien
cagtatctccttccggtggagacac

SEQ ID NO: 3290477 - DNA, 25 bp, Homo sapien
tctccagtatctccttccggtggag

SEQ ID NO: 3290478 - DNA, 25 bp, Homo sapien
tctttagaggatctacatgagcttc

SEQ ID NO: 3290479 - DNA, 25 bp, Homo sapien
ggcttgtatagcattgtttttggca

SEQ ID NO: 3290480 - DNA, 25 bp, Homo sapien
taaacctggcttgtatagcattgtt

SEQ ID NO: 3290481 - DNA, 25 bp, Homo sapien
catgagcttcttaaacctggcttgt

SEQ ID NO: 3290482 - DNA, 25 bp, Homo sapien
ttgcctgctcttattgcaatgtcac

SEQ ID NO: 3290483 - DNA, 25 bp, Homo sapien
cagcaacagaatatctcactttccg

SEQ ID NO: 3290484 - DNA, 25 bp, Homo sapien
gctcttattgcaatgtcacagcaac

SEQ ID NO: 3290485 - DNA, 25 bp, Homo sapien
aacagaatatctcactttccggcat

SEQ ID NO: 3290486 - DNA, 25 bp, Homo sapien
aatgccttaagcaggagtacttgac

SEQ ID NO: 3290487 - DNA, 25 bp, Homo sapien
tgtggaacaagaaatccgatgcctc

SEQ ID NO: 3290488 - DNA, 25 bp, Homo sapien
ttttgaagccagctagcagtgtgga

SEQ ID NO: 3290489 - DNA, 25 bp, Homo sapien
ccttgcctcccagtaatttgcgaca

SEQ ID NO: 3290490 - DNA, 25 bp, Homo sapien
aattgagcgcagaaaagttgtgact

SEQ ID NO: 3290491 - DNA, 25 bp, Homo sapien
gctccacgcacaaaaacaatatgca

SEQ ID NO: 3290492 - DNA, 25 bp, Homo sapien
aatactcattgtctacattgtacag

SEQ ID NO: 3290493 - DNA, 25 bp, Homo sapien
cagagttattaactagggaagaagc

SEQ ID NO: 3290494 - DNA, 25 bp, Homo sapien
catggcttggcatataacttggcac

SEQ ID NO: 3290495 - DNA, 25 bp, Homo sapien
tattcctggctattcctggctgaca

SEQ ID NO: 3290496 - DNA, 25 bp, Homo sapien
cctttcagaacaagtaagggcccag

SEQ ID NO: 3290497 - DNA, 25 bp, Homo sapien
taagccatagctacctcagttgtgg

SEQ ID NO: 3290498 - DNA, 25 bp, Homo sapien
aaccccatcaacaagtgtgcaaaga

SEQ ID NO: 3290499 - DNA, 25 bp, Homo sapien
ccccatcaacaagtgtgcaaagaat

SEQ ID NO: 3290500 - DNA, 25 bp, Homo sapien
atcaacaagtgtgcaaagaatatga

SEQ ID NO: 3290501 - DNA, 25 bp, Homo sapien
cccatcaacaagtgtgcaaagaata

SEQ ID NO: 3290502 - DNA, 25 bp, Homo sapien
tcagaatcaaaggaacaaaactggg

SEQ ID NO: 3290503 - DNA, 25 bp, Homo sapien
actgggatctgattaataacattga

SEQ ID NO: 3290504 - DNA, 25 bp, Homo sapien
tcttcagatgtgtgatttagacact

SEQ ID NO: 3290505 - DNA, 25 bp, Homo sapien
cataactgccctcgtttcaatcaac

SEQ ID NO: 3290506 - DNA, 25 bp, Homo sapien
ttaaatctctgtgcggaattgaagt

SEQ ID NO: 3290507 - DNA, 25 bp, Homo sapien
tgggccacggtgaagtaattcttcc

SEQ ID NO: 3290508 - DNA, 25 bp, Homo sapien
ctcattttgggccacggtgaagtaa

SEQ ID NO: 3290509 - DNA, 25 bp, Homo sapien
tctctgtgcggaattgaagtgcagt

SEQ ID NO: 3290510 - DNA, 25 bp, Homo sapien
tcaaatgaggtgtgatggatgatcc

SEQ ID NO: 3290511 - DNA, 25 bp, Homo sapien
tgctatgatccatcactgtagttgg

SEQ ID NO: 3290512 - DNA, 25 bp, Homo sapien
aaggattgtccttcatcacttcaaa

SEQ ID NO: 3290513 - DNA, 25 bp, Homo sapien
tcctatccaagatctcatcattcag

SEQ ID NO: 3290514 - DNA, 25 bp, Homo sapien
catgagtaaaccaggaaccataggc

SEQ ID NO: 3290515 - DNA, 25 bp, Homo sapien
atgagtaaaccaggaaccataggcc

SEQ ID NO: 3290516 - DNA, 25 bp, Homo sapien
aacatgagtaaaccaggaaccatag

SEQ ID NO: 3290517 - DNA, 25 bp, Homo sapien
tgagtaaaccaggaaccataggcca

SEQ ID NO: 3290518 - DNA, 25 bp, Homo sapien
caaaatggtaatatgagactgaaac

SEQ ID NO: 3290519 - DNA, 25 bp, Homo sapien
ctccagatattcttcccaggtacca

SEQ ID NO: 3290520 - DNA, 25 bp, Homo sapien
ccttggcattacgagccagataaat

SEQ ID NO: 3290521 - DNA, 25 bp, Homo sapien
gactgaaacatccttggcattacga

SEQ ID NO: 3290522 - DNA, 25 bp, Homo sapien
ttaggaagaagatcagtcggtagat

SEQ ID NO: 3290523 - DNA, 25 bp, Homo sapien
taggaagaagatcagtcggtagatg

SEQ ID NO: 3290524 - DNA, 25 bp, Homo sapien
tccggggtgatggattcttctccaa

SEQ ID NO: 3290525 - DNA, 25 bp, Homo sapien
gtagatgtgttttcacaatccgggg

SEQ ID NO: 3290526 - DNA, 25 bp, Homo sapien
tgttcttaatccagggagagtcatt

SEQ ID NO: 3290527 - DNA, 25 bp, Homo sapien
taatccagggagagtcatttccaac

SEQ ID NO: 3290528 - DNA, 25 bp, Homo sapien
tccaacattggaactttttcagtaa

SEQ ID NO: 3290529 - DNA, 25 bp, Homo sapien
cagggagagtcatttccaacattgg

SEQ ID NO: 3290530 - DNA, 25 bp, Homo sapien
tataatttcactaacccaagtagta

SEQ ID NO: 3290531 - DNA, 25 bp, Homo sapien
ctataatttcactaacccaagtagt

SEQ ID NO: 3290532 - DNA, 25 bp, Homo sapien
gggataaccatggaccaacttcaga

SEQ ID NO: 3290533 - DNA, 25 bp, Homo sapien
cacaggtcatgggataaccatggac

SEQ ID NO: 3290534 - DNA, 25 bp, Homo sapien
taggataagtggctatcacaatgtc

SEQ ID NO: 3290535 - DNA, 25 bp, Homo sapien
catctggtctgctatggaactgttc

SEQ ID NO: 3290536 - DNA, 25 bp, Homo sapien
tttaataccagattgtacaaatata

SEQ ID NO: 3290537 - DNA, 25 bp, Homo sapien
ttaataccagattgtacaaatatat

SEQ ID NO: 3290538 - DNA, 25 bp, Homo sapien
tcaactgattgcgtgagtcccattc

SEQ ID NO: 3290539 - DNA, 25 bp, Homo sapien
aaggcaatctgctgtactcaatctg

SEQ ID NO: 3290540 - DNA, 25 bp, Homo sapien
ttttgactagagctaaaccatcagc

SEQ ID NO: 3290541 - DNA, 25 bp, Homo sapien
tacttccaggagagtcacccttttg

SEQ ID NO: 3290542 - DNA, 25 bp, Homo sapien
tgctgtagagtaaccatgggaaacg

SEQ ID NO: 3290543 - DNA, 25 bp, Homo sapien
tcacaatttaatccctttgttcagt

SEQ ID NO: 3290544 - DNA, 25 bp, Homo sapien
caatcactgagtttacaggcagcta

SEQ ID NO: 3290545 - DNA, 25 bp, Homo sapien
tcaaggtttgatctgaacgtagcaa

SEQ ID NO: 3290546 - DNA, 25 bp, Homo sapien
ctctcatctgaatattgatctccct

SEQ ID NO: 3290547 - DNA, 25 bp, Homo sapien
gtgttccactgacaggtgtcactag

SEQ ID NO: 3290548 - DNA, 25 bp, Homo sapien
tgatctccctgtacgcctgacttat

SEQ ID NO: 3290549 - DNA, 25 bp, Homo sapien
cactgacaggtgtcactagaatgct

SEQ ID NO: 3290550 - DNA, 25 bp, Homo sapien
tgttttcaagatcccacttagggac

SEQ ID NO: 3290551 - DNA, 25 bp, Homo sapien
ttttcaagatcccacttagggacac

SEQ ID NO: 3290552 - DNA, 25 bp, Homo sapien
tttcaagatcccacttagggacacc

SEQ ID NO: 3290553 - DNA, 25 bp, Homo sapien
gttttcaagatcccacttagggaca

SEQ ID NO: 3290554 - DNA, 25 bp, Homo sapien
tgccatgggtgactgctgagcctga

SEQ ID NO: 3290555 - DNA, 25 bp, Homo sapien
gttctgccctgccatgggtgactgc

SEQ ID NO: 3290556 - DNA, 25 bp, Homo sapien
gccctgccatgggtgactgctgagc

SEQ ID NO: 3290557 - DNA, 25 bp, Homo sapien
gccatgggtgactgctgagcctgac

SEQ ID NO: 3290558 - DNA, 25 bp, Homo sapien
tttaggctataattaccatcacttg

SEQ ID NO: 3290559 - DNA, 25 bp, Homo sapien
taggctataattaccatcacttgct

SEQ ID NO: 3290560 - DNA, 25 bp, Homo sapien
gctataattaccatcacttgcttaa

SEQ ID NO: 3290561 - DNA, 25 bp, Homo sapien
ggctataattaccatcacttgctta

SEQ ID NO: 3290562 - DNA, 25 bp, Homo sapien
gatatatagcagaagcaccctgatg

SEQ ID NO: 3290563 - DNA, 25 bp, Homo sapien
gaccctgacagaggtgattcaaatc

SEQ ID NO: 3290564 - DNA, 25 bp, Homo sapien
gctatttaatgccagagggagcaat

SEQ ID NO: 3290565 - DNA, 25 bp, Homo sapien
gattcattgtatatggagaccctga

SEQ ID NO: 3290566 - DNA, 25 bp, Homo sapien
cctgaaaggcagataacaagtaaag

SEQ ID NO: 3290567 - DNA, 25 bp, Homo sapien
aattgaagagaaaactagttgataa

SEQ ID NO: 3290568 - DNA, 25 bp, Homo sapien
agaccatgagagactgagtaaaaag

SEQ ID NO: 3290569 - DNA, 25 bp, Homo sapien
ttgaaaataatatgttggcagtaaa

SEQ ID NO: 3290570 - DNA, 25 bp, Homo sapien
taagaaatacatcactactgaattt

SEQ ID NO: 3290571 - DNA, 25 bp, Homo sapien
agaaatacatcactactgaattttc

SEQ ID NO: 3290572 - DNA, 25 bp, Homo sapien
aagaaatacatcactactgaatttt

SEQ ID NO: 3290573 - DNA, 25 bp, Homo sapien
gaaatacatcactactgaattttcc

SEQ ID NO: 3290574 - DNA, 25 bp, Homo sapien
gatttctgatcgaaactgcagtgtg

SEQ ID NO: 3290575 - DNA, 25 bp, Homo sapien
actgggctacagtgaattgattctt

SEQ ID NO: 3290576 - DNA, 25 bp, Homo sapien
gctacagtgaattgattcttccagt

SEQ ID NO: 3290577 - DNA, 25 bp, Homo sapien
ctgcagtgtggactctttcattttt

SEQ ID NO: 3290578 - DNA, 25 bp, Homo sapien
gctgtgatggaggattttatccaca

SEQ ID NO: 3290579 - DNA, 25 bp, Homo sapien
gggaaacacataatggtccatctca

SEQ ID NO: 3290580 - DNA, 25 bp, Homo sapien
tatccacaattgtttctggcttgtc

SEQ ID NO: 3290581 - DNA, 25 bp, Homo sapien
tgcttcatcacatcaaaagagctgt

SEQ ID NO: 3290582 - DNA, 25 bp, Homo sapien
cagcccttcacatggtcataccagg

SEQ ID NO: 3290583 - DNA, 25 bp, Homo sapien
taggtaaaggatacgataatctttc

SEQ ID NO: 3290584 - DNA, 25 bp, Homo sapien
tggtcataccaggaaccaaaacaca

SEQ ID NO: 3290585 - DNA, 25 bp, Homo sapien
ctttcatgtcttcataaaataggta

SEQ ID NO: 3290586 - DNA, 25 bp, Homo sapien
tttccagtcatgaatttttccagga

SEQ ID NO: 3290587 - DNA, 25 bp, Homo sapien
ttccagtcatgaatttttccaggaa

SEQ ID NO: 3290588 - DNA, 25 bp, Homo sapien
actttccagtcatgaatttttccag

SEQ ID NO: 3290589 - DNA, 25 bp, Homo sapien
tccagtcatgaatttttccaggaac

SEQ ID NO: 3290590 - DNA, 25 bp, Homo sapien
gccatctggcggaaataataataag

SEQ ID NO: 3290591 - DNA, 25 bp, Homo sapien
tttgccatctggcggaaataataat

SEQ ID NO: 3290592 - DNA, 25 bp, Homo sapien
ttgccatctggcggaaataataata

SEQ ID NO: 3290593 - DNA, 25 bp, Homo sapien
taaaatttgctatcttacagttatt

SEQ ID NO: 3290594 - DNA, 25 bp, Homo sapien
ttatatctctttaaaatttgctatc

SEQ ID NO: 3290595 - DNA, 25 bp, Homo sapien
tatatctctttaaaatttgctatct

SEQ ID NO: 3290596 - DNA, 25 bp, Homo sapien
aatttgctatcttacagttattctt

SEQ ID NO: 3290597 - DNA, 25 bp, Homo sapien
ctgcatgttttgcaactgctcaaca

SEQ ID NO: 3290598 - DNA, 25 bp, Homo sapien
taattgaggagactgcatgttttgc

SEQ ID NO: 3290599 - DNA, 25 bp, Homo sapien
ggagactgcatgttttgcaactgct

SEQ ID NO: 3290600 - DNA, 25 bp, Homo sapien
ttcactaattgaggagactgcatgt

SEQ ID NO: 3290601 - DNA, 25 bp, Homo sapien
catccccattgttaaagatcaaatc

SEQ ID NO: 3290602 - DNA, 25 bp, Homo sapien
ccaatatttcactgatccaggtcat

SEQ ID NO: 3290603 - DNA, 25 bp, Homo sapien
gaaagtcactcgcttgtatattgca

SEQ ID NO: 3290604 - DNA, 25 bp, Homo sapien
tgtgagtccaggaattataagttcc

SEQ ID NO: 3290605 - DNA, 25 bp, Homo sapien
cagatttgggataggtagagatcag

SEQ ID NO: 3290606 - DNA, 25 bp, Homo sapien
tcttcagcaatgctctagaaaaggg

SEQ ID NO: 3290607 - DNA, 25 bp, Homo sapien
taactcccttctgaagacacgctgc

SEQ ID NO: 3290608 - DNA, 25 bp, Homo sapien
gggaatcccctgaacatccactaac

SEQ ID NO: 3290609 - DNA, 25 bp, Homo sapien
ccttcctagcatgggaacctcaggc

SEQ ID NO: 3290610 - DNA, 25 bp, Homo sapien
tagaactattcttcccttatgcagc

SEQ ID NO: 3290611 - DNA, 25 bp, Homo sapien
gtccctggctacttttacgtgtgca

SEQ ID NO: 3290612 - DNA, 25 bp, Homo sapien
cacacaatgttcagcggtttatcac

SEQ ID NO: 3290613 - DNA, 25 bp, Homo sapien
gaaaacagttcccagtgaaagagat

SEQ ID NO: 3290614 - DNA, 25 bp, Homo sapien
tgtagtcaagaagtaggatgccatt

SEQ ID NO: 3290615 - DNA, 25 bp, Homo sapien
tagaaactaggctgttttgcccagg

SEQ ID NO: 3290616 - DNA, 25 bp, Homo sapien
tatcctcaggtgcaagtgtagtcaa

SEQ ID NO: 3290617 - DNA, 25 bp, Homo sapien
aagtgtttgtttgggatgttcagaa

SEQ ID NO: 3290618 - DNA, 25 bp, Homo sapien
ccaagctagttataaactcctaggt

SEQ ID NO: 3290619 - DNA, 25 bp, Homo sapien
attatgattcaaaccctaaagacaa

SEQ ID NO: 3290620 - DNA, 25 bp, Homo sapien
tacaagaatctcaaaccagttatac

SEQ ID NO: 3290621 - DNA, 25 bp, Homo sapien
gagttaaaccttgctgttacaatga

SEQ ID NO: 3290622 - DNA, 25 bp, Homo sapien
cagaaggaggtcttttatgacgctg

SEQ ID NO: 3290623 - DNA, 25 bp, Homo sapien
gacgctgtacttttactggaccctg

SEQ ID NO: 3290624 - DNA, 25 bp, Homo sapien
caagtcttctggcttacgaggctaa

SEQ ID NO: 3290625 - DNA, 25 bp, Homo sapien
tgaaaatggtagcatacaaggggct

SEQ ID NO: 3290626 - DNA, 25 bp, Homo sapien
ggctaaggagtttcagaggcctagc

SEQ ID NO: 3290627 - DNA, 25 bp, Homo sapien
ttcagaggcctagcagacaagtagc

SEQ ID NO: 3290628 - DNA, 25 bp, Homo sapien
ctagcagacaagtagcatgcctggg

SEQ ID NO: 3290629 - DNA, 25 bp, Homo sapien
catatgcatgtacagctcaataaac

SEQ ID NO: 3290630 - DNA, 25 bp, Homo sapien
tcccataggttatagttgtgcatga

SEQ ID NO: 3290631 - DNA, 25 bp, Homo sapien
tgtgttactacatcattcccatagg

SEQ ID NO: 3290632 - DNA, 25 bp, Homo sapien
atacaactctaacaagatgaataat

SEQ ID NO: 3290633 - DNA, 25 bp, Homo sapien
cagcctggacactatagcaagcccc

SEQ ID NO: 3290634 - DNA, 25 bp, Homo sapien
agcctggacactatagcaagcccct

SEQ ID NO: 3290635 - DNA, 25 bp, Homo sapien
gcctggacactatagcaagcccctg

SEQ ID NO: 3290636 - DNA, 25 bp, Homo sapien
cctggacactatagcaagcccctgt

SEQ ID NO: 3290637 - DNA, 25 bp, Homo sapien
ttagccaaacatggttgcacatgtc

SEQ ID NO: 3290638 - DNA, 25 bp, Homo sapien
tgtcaacataatccatgattatgtc

SEQ ID NO: 3290639 - DNA, 25 bp, Homo sapien
tagccaaacatggttgcacatgtct

SEQ ID NO: 3290640 - DNA, 25 bp, Homo sapien
aagaaaatgtcaacataatccatga

SEQ ID NO: 3290641 - DNA, 25 bp, Homo sapien
tcagatatgttaagtaaagaaagac

SEQ ID NO: 3290642 - DNA, 25 bp, Homo sapien
taatatcagatatgttaagtaaaga

SEQ ID NO: 3290643 - DNA, 25 bp, Homo sapien
gaaatctttaatatcagatatgtta

SEQ ID NO: 3290644 - DNA, 25 bp, Homo sapien
ctttaatatcagatatgttaagtaa

SEQ ID NO: 3290645 - DNA, 25 bp, Homo sapien
gatctcagttcgaaacttcagtgta

SEQ ID NO: 3290646 - DNA, 25 bp, Homo sapien
tagatctcagttcgaaacttcagtg

SEQ ID NO: 3290647 - DNA, 25 bp, Homo sapien
ttagatctcagttcgaaacttcagt

SEQ ID NO: 3290648 - DNA, 25 bp, Homo sapien
tctcagttcgaaacttcagtgtaga

SEQ ID NO: 3290649 - DNA, 25 bp, Homo sapien
ggttcataatttcgtctggcagtgt

SEQ ID NO: 3290650 - DNA, 25 bp, Homo sapien
aagggcgacaatttctggttcataa

SEQ ID NO: 3290651 - DNA, 25 bp, Homo sapien
tcatctcttggaacgaagtatgatg

SEQ ID NO: 3290652 - DNA, 25 bp, Homo sapien
tgatgtataatcctgtccacaagct

SEQ ID NO: 3290653 - DNA, 25 bp, Homo sapien
tgtctaagagtagaatttcagggtc

SEQ ID NO: 3290654 - DNA, 25 bp, Homo sapien
gaatatctaacctaatgtacacaag

SEQ ID NO: 3290655 - DNA, 25 bp, Homo sapien
caaacttaggtatgaatctctagac

SEQ ID NO: 3290656 - DNA, 25 bp, Homo sapien
aaatagcctatttatctcactgtgc

SEQ ID NO: 3290657 - DNA, 25 bp, Homo sapien
tcaggtcttcgtagaaaagaaatag

SEQ ID NO: 3290658 - DNA, 25 bp, Homo sapien
aatagtacacgtggactctttccct

SEQ ID NO: 3290659 - DNA, 25 bp, Homo sapien
ctctttcaggtcttcgtagaaaaga

SEQ ID NO: 3290660 - DNA, 25 bp, Homo sapien
aaagaaatagtacacgtggactctt

SEQ ID NO: 3290661 - DNA, 25 bp, Homo sapien
aatgttctcgtaggtacccttagtg

SEQ ID NO: 3290662 - DNA, 25 bp, Homo sapien
cactattagtttacatgggaaggaa

SEQ ID NO: 3290663 - DNA, 25 bp, Homo sapien
caaattgttagtgaagggagttgac

SEQ ID NO: 3290664 - DNA, 25 bp, Homo sapien
taccatttacaaactaggtttggca

SEQ ID NO: 3290665 - DNA, 25 bp, Homo sapien
gagatggcatttgtcttataaaacc

SEQ ID NO: 3290666 - DNA, 25 bp, Homo sapien
tgtgttttaactatgaatcagggaa

SEQ ID NO: 3290667 - DNA, 25 bp, Homo sapien
tccaggcgcctttagatttctgtgt

SEQ ID NO: 3290668 - DNA, 25 bp, Homo sapien
cagggaagaaaacgtaccagaacag

SEQ ID NO: 3290669 - DNA, 25 bp, Homo sapien
tttgcattccggcaaagatagatta

SEQ ID NO: 3290670 - DNA, 25 bp, Homo sapien
aacagccacatcctttgcattccgg

SEQ ID NO: 3290671 - DNA, 25 bp, Homo sapien
cacatcctttgcattccggcaaaga

SEQ ID NO: 3290672 - DNA, 25 bp, Homo sapien
ggaaacagccacatcctttgcattc

SEQ ID NO: 3290673 - DNA, 25 bp, Homo sapien
taggtctgatactcaatgttacacg

SEQ ID NO: 3290674 - DNA, 25 bp, Homo sapien
tatcctcatgggcttctacttaggc

SEQ ID NO: 3290675 - DNA, 25 bp, Homo sapien
catctgtggcctactctaggtctga

SEQ ID NO: 3290676 - DNA, 25 bp, Homo sapien
taggccctcaggcacctaagcaatg

SEQ ID NO: 3290677 - DNA, 25 bp, Homo sapien
gatacttaactaactaatctatacc

SEQ ID NO: 3290678 - DNA, 25 bp, Homo sapien
ggccattcccttgctttaactgaag

SEQ ID NO: 3290679 - DNA, 25 bp, Homo sapien
tctgatgctatttctaagcttgtgg

SEQ ID NO: 3290680 - DNA, 25 bp, Homo sapien
taatctatacctctcctatctgatg

SEQ ID NO: 3290681 - DNA, 25 bp, Homo sapien
tcaggtggcaaatgagtcttcacaa

SEQ ID NO: 3290682 - DNA, 25 bp, Homo sapien
gcaggaagaagttcaggtggcaaat

SEQ ID NO: 3290683 - DNA, 25 bp, Homo sapien
cccaaaatgaggcaggaagaagttc

SEQ ID NO: 3290684 - DNA, 25 bp, Homo sapien
cttacaatccttttcccaaaatgag

SEQ ID NO: 3290685 - DNA, 25 bp, Homo sapien
gaattcatctcatctaattgtttta

SEQ ID NO: 3290686 - DNA, 25 bp, Homo sapien
ggagaattcatctcatctaattgtt

SEQ ID NO: 3290687 - DNA, 25 bp, Homo sapien
ttcatctcatctaattgttttactc

SEQ ID NO: 3290688 - DNA, 25 bp, Homo sapien
ctaggagaattcatctcatctaatt

SEQ ID NO: 3290689 - DNA, 25 bp, Homo sapien
atcaccctctttatagatcatatac

SEQ ID NO: 3290690 - DNA, 25 bp, Homo sapien
tatagatcatatacacaatttcact

SEQ ID NO: 3290691 - DNA, 25 bp, Homo sapien
aggtattcgattaaaaattacatct

SEQ ID NO: 3290692 - DNA, 25 bp, Homo sapien
gatcatatacacaatttcactaacc

SEQ ID NO: 3290693 - DNA, 25 bp, Homo sapien
gaacgcttccacattatcccaatat

SEQ ID NO: 3290694 - DNA, 25 bp, Homo sapien
gatcatctggtcttgcctggaacgc

SEQ ID NO: 3290695 - DNA, 25 bp, Homo sapien
cattagaatcccatggacttcttca

SEQ ID NO: 3290696 - DNA, 25 bp, Homo sapien
cagatttagggtaggtggcaatgac

SEQ ID NO: 3290697 - DNA, 25 bp, Homo sapien
taaaatgcaccacgatttgtcctgc

SEQ ID NO: 3290698 - DNA, 25 bp, Homo sapien
gaattggcttatagtcagctgggag

SEQ ID NO: 3290699 - DNA, 25 bp, Homo sapien
caattttggtctgagaggcaaagta

SEQ ID NO: 3290700 - DNA, 25 bp, Homo sapien
ataaattgccccagcccttaggaca

SEQ ID NO: 3290701 - DNA, 25 bp, Homo sapien
aagtaatgcccctatttgcaagacc

SEQ ID NO: 3290702 - DNA, 25 bp, Homo sapien
gagaacacgtccagcattcagcact

SEQ ID NO: 3290703 - DNA, 25 bp, Homo sapien
tagatacatagggttctcatagtcc

SEQ ID NO: 3290704 - DNA, 25 bp, Homo sapien
tgcaagaccccttatcacaggaaca

SEQ ID NO: 3290705 - DNA, 25 bp, Homo sapien
aataccaaggcagatcttaagctgc

SEQ ID NO: 3290706 - DNA, 25 bp, Homo sapien
caaggcagatcttaagctgcaaaaa

SEQ ID NO: 3290707 - DNA, 25 bp, Homo sapien
tgtttagttgatcctgtgaaagaaa

SEQ ID NO: 3290708 - DNA, 25 bp, Homo sapien
gttgatcctgtgaaagaaattgatc

SEQ ID NO: 3290709 - DNA, 25 bp, Homo sapien
tttttatctttgtagtctgaagaat

SEQ ID NO: 3290710 - DNA, 25 bp, Homo sapien
tgaagaattcagactatcctttgct

SEQ ID NO: 3290711 - DNA, 25 bp, Homo sapien
caagtctgaccctgactagctacct

SEQ ID NO: 3290712 - DNA, 25 bp, Homo sapien
tgaccctgactagctacctcaattg

SEQ ID NO: 3290713 - DNA, 25 bp, Homo sapien
ttaactactctcacatttgtaagga

SEQ ID NO: 3290714 - DNA, 25 bp, Homo sapien
aactactctcacatttgtaaggatg

SEQ ID NO: 3290715 - DNA, 25 bp, Homo sapien
ctcacatttgtaaggatgaaaatac

SEQ ID NO: 3290716 - DNA, 25 bp, Homo sapien
tttgtaaggatgaaaatacctttca

SEQ ID NO: 3290717 - DNA, 25 bp, Homo sapien
ccaatccggttgattatacctaagt

SEQ ID NO: 3290718 - DNA, 25 bp, Homo sapien
cctgtttgagtccaatccggttgat

SEQ ID NO: 3290719 - DNA, 25 bp, Homo sapien
ttatgccatctggacctgtttgagt

SEQ ID NO: 3290720 - DNA, 25 bp, Homo sapien
tctggacctgtttgagtccaatccg

SEQ ID NO: 3290721 - DNA, 25 bp, Homo sapien
gcgttgctggctaacaccacattac

SEQ ID NO: 3290722 - DNA, 25 bp, Homo sapien
gctggctaacaccacattacccagt

SEQ ID NO: 3290723 - DNA, 25 bp, Homo sapien
cagcgttgctggctaacaccacatt

SEQ ID NO: 3290724 - DNA, 25 bp, Homo sapien
cttcagcgttgctggctaacaccac

SEQ ID NO: 3290725 - DNA, 25 bp, Homo sapien
catttccaaatgagtattgaacttc

SEQ ID NO: 3290726 - DNA, 25 bp, Homo sapien
taaatagttcatgagtcaaatttca

SEQ ID NO: 3290727 - DNA, 25 bp, Homo sapien
ggtactagttgaattaagatttgga

SEQ ID NO: 3290728 - DNA, 25 bp, Homo sapien
acgtgatacaaagacggaaaaggca

SEQ ID NO: 3290729 - DNA, 25 bp, Homo sapien
ttattctaccatcacatacacatct

SEQ ID NO: 3290730 - DNA, 25 bp, Homo sapien
actttgggctgaggaacagaccaca

SEQ ID NO: 3290731 - DNA, 25 bp, Homo sapien
tcaacgaatggatagatcagaggct

SEQ ID NO: 3290732 - DNA, 25 bp, Homo sapien
tctctgagggtagggcaccacttgc

SEQ ID NO: 3290733 - DNA, 25 bp, Homo sapien
gaagggcttgaacaggcacagctct

SEQ ID NO: 3290734 - DNA, 25 bp, Homo sapien
gctgctggtcctcatgtttaacctt

SEQ ID NO: 3290735 - DNA, 25 bp, Homo sapien
ccttgctgctggtcctcatgtttaa

SEQ ID NO: 3290736 - DNA, 25 bp, Homo sapien
ggtcctcatgtttaaccttctcaac

SEQ ID NO: 3290737 - DNA, 25 bp, Homo sapien
tgctggtcctcatgtttaaccttct

SEQ ID NO: 3290738 - DNA, 25 bp, Homo sapien
taacacaatttcaagtagcaagcca

SEQ ID NO: 3290739 - DNA, 25 bp, Homo sapien
caatgtctgacccatagaaggccgt

SEQ ID NO: 3290740 - DNA, 25 bp, Homo sapien
tagcaagctcttaactatcactggc

SEQ ID NO: 3290741 - DNA, 25 bp, Homo sapien
gaaggccgtcagtatatgcttaagg

SEQ ID NO: 3290742 - DNA, 25 bp, Homo sapien
gaaaaatagcacaggattttactgt

SEQ ID NO: 3290743 - DNA, 25 bp, Homo sapien
atagcacaggattttactgttctaa

SEQ ID NO: 3290744 - DNA, 25 bp, Homo sapien
gccatgatgtaacaccatagaaaaa

SEQ ID NO: 3290745 - DNA, 25 bp, Homo sapien
actgccatgatgtaacaccatagaa

SEQ ID NO: 3290746 - DNA, 25 bp, Homo sapien
ctcactgcttgaaaggctttctatg

SEQ ID NO: 3290747 - DNA, 25 bp, Homo sapien
tcactgcttgaaaggctttctatgg

SEQ ID NO: 3290748 - DNA, 25 bp, Homo sapien
cactgcttgaaaggctttctatggt

SEQ ID NO: 3290749 - DNA, 25 bp, Homo sapien
gacacaggatttgacccagtgccct

SEQ ID NO: 3290750 - DNA, 25 bp, Homo sapien
taatctcacctcagaggatgcattg

SEQ ID NO: 3290751 - DNA, 25 bp, Homo sapien
cagtgccctaggctgtaaggtatat

SEQ ID NO: 3290752 - DNA, 25 bp, Homo sapien
tagtgactagcagcacattggtgca

SEQ ID NO: 3290753 - DNA, 25 bp, Homo sapien
ccaccaggcaggcgaggatgaggac

SEQ ID NO: 3290754 - DNA, 25 bp, Homo sapien
ttttccaagattgaagagaagtgaa

SEQ ID NO: 3290755 - DNA, 25 bp, Homo sapien
ttccaagattgaagagaagtgaagg

SEQ ID NO: 3290756 - DNA, 25 bp, Homo sapien
ccaagattgaagagaagtgaaggta

SEQ ID NO: 3290757 - DNA, 25 bp, Homo sapien
attgaagagaagtgaaggtagtgct

SEQ ID NO: 3290758 - DNA, 25 bp, Homo sapien
tgccaaatgtaaggtgtttatcata

SEQ ID NO: 3290759 - DNA, 25 bp, Homo sapien
tgataaagcagtagttctttgttga

SEQ ID NO: 3290760 - DNA, 25 bp, Homo sapien
ctgtgataaagcagtagttctttgt

SEQ ID NO: 3290761 - DNA, 25 bp, Homo sapien
taaagcagtagttctttgttgatgt

SEQ ID NO: 3290762 - DNA, 25 bp, Homo sapien
tgttgatgtttcctttgtaacgaaa

SEQ ID NO: 3290763 - DNA, 25 bp, Homo sapien
ttttcaaagagaacagtgtttggca

SEQ ID NO: 3290764 - DNA, 25 bp, Homo sapien
tttcaaagagaacagtgtttggcat

SEQ ID NO: 3290765 - DNA, 25 bp, Homo sapien
gacattttcaaagagaacagtgttt

SEQ ID NO: 3290766 - DNA, 25 bp, Homo sapien
cattttcaaagagaacagtgtttgg

SEQ ID NO: 3290767 - DNA, 25 bp, Homo sapien
tgcccagctaaatttttattattat

SEQ ID NO: 3290768 - DNA, 25 bp, Homo sapien
ccttggccttccaaagtgctgtgat

SEQ ID NO: 3290769 - DNA, 25 bp, Homo sapien
caccttggccttccaaagtgctgtg

SEQ ID NO: 3290770 - DNA, 25 bp, Homo sapien
ttggccttccaaagtgctgtgatta

SEQ ID NO: 3290771 - DNA, 25 bp, Homo sapien
acctctttggagtgatagcctataa

SEQ ID NO: 3290772 - DNA, 25 bp, Homo sapien
taggaatcgtaagagacagtaagct

SEQ ID NO: 3290773 - DNA, 25 bp, Homo sapien
tgaagaaacaccacataagctgaat

SEQ ID NO: 3290774 - DNA, 25 bp, Homo sapien
gcctataatcggtgttcctgcatgt

SEQ ID NO: 3290775 - DNA, 25 bp, Homo sapien
caaccacaataccaacaatatacct

SEQ ID NO: 3290776 - DNA, 25 bp, Homo sapien
gcttctaataaaaacgcttgcactg

SEQ ID NO: 3290777 - DNA, 25 bp, Homo sapien
agttccagaacaaccactataccca

SEQ ID NO: 3290778 - DNA, 25 bp, Homo sapien
tgtatacagtatgggtatggccctt

SEQ ID NO: 3290779 - DNA, 25 bp, Homo sapien
caggacatgattattgaggtaagat

SEQ ID NO: 3290780 - DNA, 25 bp, Homo sapien
catgattattgaggtaagatgggtt

SEQ ID NO: 3290781 - DNA, 25 bp, Homo sapien
ctgcaggacatgattattgaggtaa

SEQ ID NO: 3290782 - DNA, 25 bp, Homo sapien
aggtaagatgggtttagtgacattt

SEQ ID NO: 3290783 - DNA, 25 bp, Homo sapien
atcagtgttgtctaggggatctttt

SEQ ID NO: 3290784 - DNA, 25 bp, Homo sapien
catcagtgttgtctaggggatcttt

SEQ ID NO: 3290785 - DNA, 25 bp, Homo sapien
acatcagtgttgtctaggggatctt

SEQ ID NO: 3290786 - DNA, 25 bp, Homo sapien
ttggaagtaagtcctatttgttctg

SEQ ID NO: 3290787 - DNA, 25 bp, Homo sapien
tgggtccattcgctttccggttgcc

SEQ ID NO: 3290788 - DNA, 25 bp, Homo sapien
tttcctccagcgtgcttttccgttg

SEQ ID NO: 3290789 - DNA, 25 bp, Homo sapien
gcgtgcttttccgttgtctgactca

SEQ ID NO: 3290790 - DNA, 25 bp, Homo sapien
cactgcaatcatttctatgcctggt

SEQ ID NO: 3290791 - DNA, 25 bp, Homo sapien
ttatcactgcaatcatttctatgcc

SEQ ID NO: 3290792 - DNA, 25 bp, Homo sapien
gtccattcgctttccggttgctttg

SEQ ID NO: 3290793 - DNA, 25 bp, Homo sapien
tgggtccattcgctttccggttgct

SEQ ID NO: 3290794 - DNA, 25 bp, Homo sapien
tccattcgctttccggttgctttgt

SEQ ID NO: 3290795 - DNA, 25 bp, Homo sapien
tctggtgtcctttgccacagcacat

SEQ ID NO: 3290796 - DNA, 25 bp, Homo sapien
ttatctcaggccctacagtccagaa

SEQ ID NO: 3290797 - DNA, 25 bp, Homo sapien
ggccctacagtccagaagatgaccc

SEQ ID NO: 3290798 - DNA, 25 bp, Homo sapien
gtcctttgccacagcacatttctta

SEQ ID NO: 3290799 - DNA, 25 bp, Homo sapien
ttttcttattaatctagctggcagt

SEQ ID NO: 3290800 - DNA, 25 bp, Homo sapien
ggactcagttgtaaagtcacctttg

SEQ ID NO: 3290801 - DNA, 25 bp, Homo sapien
tctggttccgagttccatttactgc

SEQ ID NO: 3290802 - DNA, 25 bp, Homo sapien
gcttggtttactagttgtgtgcata

SEQ ID NO: 3290803 - DNA, 25 bp, Homo sapien
gtgactgccacaagaaatacctatt

SEQ ID NO: 3290804 - DNA, 25 bp, Homo sapien
taggtgagcacaattggaaaaggtc

SEQ ID NO: 3290805 - DNA, 25 bp, Homo sapien
tccagtagggtgaactatatgagtt

SEQ ID NO: 3290806 - DNA, 25 bp, Homo sapien
tttggtgactgccacaagaaatacc

SEQ ID NO: 3290807 - DNA, 25 bp, Homo sapien
cattatttcgtaggtcttcaggaca

SEQ ID NO: 3290808 - DNA, 25 bp, Homo sapien
caaatgtctgtggactgttactgtc

SEQ ID NO: 3290809 - DNA, 25 bp, Homo sapien
gatcacaagacaatacattcatgca

SEQ ID NO: 3290810 - DNA, 25 bp, Homo sapien
gtattgtcaacatggtgtctatttt

SEQ ID NO: 3290811 - DNA, 25 bp, Homo sapien
ccttccctcgaatttttctctgcat

SEQ ID NO: 3290812 - DNA, 25 bp, Homo sapien
actcctctggtattatagaacctac

SEQ ID NO: 3290813 - DNA, 25 bp, Homo sapien
cctctggtattatagaacctaccat

SEQ ID NO: 3290814 - DNA, 25 bp, Homo sapien
tgtaactcctctggtattatagaac

SEQ ID NO: 3290815 - DNA, 25 bp, Homo sapien
ctttctgtaactcctctggtattat

SEQ ID NO: 3290816 - DNA, 25 bp, Homo sapien
tctccagtgattgccagatggccca

SEQ ID NO: 3290817 - DNA, 25 bp, Homo sapien
gtatagcgttccctttagccactgg

SEQ ID NO: 3290818 - DNA, 25 bp, Homo sapien
gtgccctgccagaatagcctattaa

SEQ ID NO: 3290819 - DNA, 25 bp, Homo sapien
ttttgtggccagaaagtcaggacct

SEQ ID NO: 3290820 - DNA, 25 bp, Homo sapien
tgtctctatcaaaaagtaccacctt

SEQ ID NO: 3290821 - DNA, 25 bp, Homo sapien
aacatatttgaatgaaacctctctt

SEQ ID NO: 3290822 - DNA, 25 bp, Homo sapien
ttggtttcaaaacttcacttgtctc

SEQ ID NO: 3290823 - DNA, 25 bp, Homo sapien
ttaaaataacagctaatgaaattat

SEQ ID NO: 3290824 - DNA, 25 bp, Homo sapien
catggtttagacgtaattttcctat

SEQ ID NO: 3290825 - DNA, 25 bp, Homo sapien
ttacccatatccatttcgcccactt

SEQ ID NO: 3290826 - DNA, 25 bp, Homo sapien
gaatctgcccctacaactccccttc

SEQ ID NO: 3290827 - DNA, 25 bp, Homo sapien
aatacctgaatctgcccctacaact

SEQ ID NO: 3290828 - DNA, 25 bp, Homo sapien
gaaggtttattgttaactagtacat

SEQ ID NO: 3290829 - DNA, 25 bp, Homo sapien
atgtactagttaacaataaaccttc

SEQ ID NO: 3290830 - DNA, 25 bp, Homo sapien
cagagcccagaaaaatccaaccctc

SEQ ID NO: 3290831 - DNA, 25 bp, Homo sapien
acagagcccagaaaaatccaaccct

SEQ ID NO: 3290832 - DNA, 25 bp, Homo sapien
tgttcagcaccatcgcagcttcctt

SEQ ID NO: 3290833 - DNA, 25 bp, Homo sapien
taaagactggtggattcgttccagg

SEQ ID NO: 3290834 - DNA, 25 bp, Homo sapien
gttgcagctggactgaaaagccctg

SEQ ID NO: 3290835 - DNA, 25 bp, Homo sapien
ctttcgaaaacgcaagagcattgca

SEQ ID NO: 3290836 - DNA, 25 bp, Homo sapien
gaatgtagataggtgcagccactgt

SEQ ID NO: 3290837 - DNA, 25 bp, Homo sapien
tgaaaccaccctttgtaacgatatc

SEQ ID NO: 3290838 - DNA, 25 bp, Homo sapien
tgtgaaaaacagtacggaggtgcct

SEQ ID NO: 3290839 - DNA, 25 bp, Homo sapien
attactgtatgacccaaaaggccct

SEQ ID NO: 3290840 - DNA, 25 bp, Homo sapien
acttcctcagggtccacgctcttac

SEQ ID NO: 3290841 - DNA, 25 bp, Homo sapien
tcaccacttcctcagggtccacgct

SEQ ID NO: 3290842 - DNA, 25 bp, Homo sapien
cacttcctcagggtccacgctctta

SEQ ID NO: 3290843 - DNA, 25 bp, Homo sapien
accacttcctcagggtccacgctct

SEQ ID NO: 3290844 - DNA, 25 bp, Homo sapien
gaacttctttgactaatgcgagcct

SEQ ID NO: 3290845 - DNA, 25 bp, Homo sapien
catgggtgcctataacaatatcagc

SEQ ID NO: 3290846 - DNA, 25 bp, Homo sapien
ggactggacaaaaagttgcatctgg

SEQ ID NO: 3290847 - DNA, 25 bp, Homo sapien
ttagcaaattcaggactaccccgaa

SEQ ID NO: 3290848 - DNA, 25 bp, Homo sapien
gacactttatagatgaatcatatga

SEQ ID NO: 3290849 - DNA, 25 bp, Homo sapien
tagcactgtagcaattaattaggaa

SEQ ID NO: 3290850 - DNA, 25 bp, Homo sapien
cggggcacagcggttcacacatgta

SEQ ID NO: 3290851 - DNA, 25 bp, Homo sapien
tctctattgattactgtcacacaaa

SEQ ID NO: 3290852 - DNA, 25 bp, Homo sapien
tcctttcagctaattgagcctatga

SEQ ID NO: 3290853 - DNA, 25 bp, Homo sapien
ggtggtgtcctctgaagtctacata

SEQ ID NO: 3290854 - DNA, 25 bp, Homo sapien
ggagggattcacatctcaaacttgt

SEQ ID NO: 3290855 - DNA, 25 bp, Homo sapien
ttcccatctcgaatgcatgcgtggg

SEQ ID NO: 3290856 - DNA, 25 bp, Homo sapien
tactaactcggcaacaggtgctaca

SEQ ID NO: 3290857 - DNA, 25 bp, Homo sapien
gagtttaccacagaggacatagaag

SEQ ID NO: 3290858 - DNA, 25 bp, Homo sapien
gctaccacaaccctaataacacaaa

SEQ ID NO: 3290859 - DNA, 25 bp, Homo sapien
cacaaacccaaggactggctccaat

SEQ ID NO: 3290860 - DNA, 25 bp, Homo sapien
gggacacaactgcaataggtgccac

SEQ ID NO: 3290861 - DNA, 25 bp, Homo sapien
gaatgtatcatgtccacatccttgg

SEQ ID NO: 3290862 - DNA, 25 bp, Homo sapien
gctctgtcgtgtgctacaacctcat

SEQ ID NO: 3290863 - DNA, 25 bp, Homo sapien
acaaccctagggattggtgccacca

SEQ ID NO: 3290864 - DNA, 25 bp, Homo sapien
tattttcattacagcactactggtg

SEQ ID NO: 3290865 - DNA, 25 bp, Homo sapien
cctctcattctccatacctaataaa

SEQ ID NO: 3290866 - DNA, 25 bp, Homo sapien
ttttgagtctatggcctttattttc

SEQ ID NO: 3290867 - DNA, 25 bp, Homo sapien
catgtatttcaaacataagagaagg

SEQ ID NO: 3290868 - DNA, 25 bp, Homo sapien
cagttctggggtatataagttgaaa

SEQ ID NO: 3290869 - DNA, 25 bp, Homo sapien
aacaacaagagaaatctatatcccc

SEQ ID NO: 3290870 - DNA, 25 bp, Homo sapien
caaagtgccgcaaactgggtggtta

SEQ ID NO: 3290871 - DNA, 25 bp, Homo sapien
ctctgcagtttctaggggatttttt

SEQ ID NO: 3290872 - DNA, 25 bp, Homo sapien
gggagaattcaatcacactctcttc

SEQ ID NO: 3290873 - DNA, 25 bp, Homo sapien
tatggcccaggttatccacagccac

SEQ ID NO: 3290874 - DNA, 25 bp, Homo sapien
ctccaccctatggtccagggagatt

SEQ ID NO: 3290875 - DNA, 25 bp, Homo sapien
tccaccctatggtccagggagaatt

SEQ ID NO: 3290876 - DNA, 25 bp, Homo sapien
tcccgcaccctatggtccagggata

SEQ ID NO: 3290877 - DNA, 25 bp, Homo sapien
taaggtccaccactccatcctgatg

SEQ ID NO: 3290878 - DNA, 25 bp, Homo sapien
tgatgccccaggttatccacagcct

SEQ ID NO: 3290879 - DNA, 25 bp, Homo sapien
acctggaccgctggctcctcctcaa

SEQ ID NO: 3290880 - DNA, 25 bp, Homo sapien
ctccactctacaggccaagatgggt

SEQ ID NO: 3290881 - DNA, 25 bp, Homo sapien
agaagaccatatctacctggccagc

SEQ ID NO: 3290882 - DNA, 25 bp, Homo sapien
tattagacaacctcgactctttccg

SEQ ID NO: 3290883 - DNA, 25 bp, Homo sapien
ttctctcgatttagccaagcagtca

SEQ ID NO: 3290884 - DNA, 25 bp, Homo sapien
agtacctatctcttcaacaccagag

SEQ ID NO: 3290885 - DNA, 25 bp, Homo sapien
caaataaacatcaccaccgcagata

SEQ ID NO: 3290886 - DNA, 25 bp, Homo sapien
accgcagatacaacaatcaccacaa

SEQ ID NO: 3290887 - DNA, 25 bp, Homo sapien
aaaacccacaatgacgatcagctcc

SEQ ID NO: 3290888 - DNA, 25 bp, Homo sapien
cgacttccaaccaaactatattaag

SEQ ID NO: 3290889 - DNA, 25 bp, Homo sapien
aactatattaagcagcccagccttt

SEQ ID NO: 3290890 - DNA, 25 bp, Homo sapien
tttgccatttttggttgaacatgca

SEQ ID NO: 3290891 - DNA, 25 bp, Homo sapien
ccatttttggttgaacatgcaataa

SEQ ID NO: 3290892 - DNA, 25 bp, Homo sapien
tcagcacacttgcttccacagatgt

SEQ ID NO: 3290893 - DNA, 25 bp, Homo sapien
agttggaagtaccttcaaaactgct

SEQ ID NO: 3290894 - DNA, 25 bp, Homo sapien
agacttttgccacagatatgattgc

SEQ ID NO: 3290895 - DNA, 25 bp, Homo sapien
tattgatctgaaatctagaagcacc

SEQ ID NO: 3290896 - DNA, 25 bp, Homo sapien
caccactgtggcctacactgccctt

SEQ ID NO: 3290897 - DNA, 25 bp, Homo sapien
taggcacagcttcccctacaaggtc

SEQ ID NO: 3290898 - DNA, 25 bp, Homo sapien
cagcttcccctacaaggtccaacct

SEQ ID NO: 3290899 - DNA, 25 bp, Homo sapien
actgtggcctacactgccctttctc

SEQ ID NO: 3290900 - DNA, 25 bp, Homo sapien
taatacttggtctgattccaccaca

SEQ ID NO: 3290901 - DNA, 25 bp, Homo sapien
gctgcctccagctcacaatataact

SEQ ID NO: 3290902 - DNA, 25 bp, Homo sapien
tggcagtcaccaatacttcctcagg

SEQ ID NO: 3290903 - DNA, 25 bp, Homo sapien
catcactgctaccactaatacttgg

SEQ ID NO: 3290904 - DNA, 25 bp, Homo sapien
caactgcctcatctacactctttga

SEQ ID NO: 3290905 - DNA, 25 bp, Homo sapien
ctctatctcaactgcctcatctaca

SEQ ID NO: 3290906 - DNA, 25 bp, Homo sapien
tatctcaactgcctcatctacactc

SEQ ID NO: 3290907 - DNA, 25 bp, Homo sapien
tctcaactgcctcatctacactctt

SEQ ID NO: 3290908 - DNA, 25 bp, Homo sapien
tgtggaaaaggccacaacacccgtg

SEQ ID NO: 3290909 - DNA, 25 bp, Homo sapien
gtccatatctgaggctatagctacc

SEQ ID NO: 3290910 - DNA, 25 bp, Homo sapien
tgagagtgaccaacactagcctact

SEQ ID NO: 3290911 - DNA, 25 bp, Homo sapien
cagcttctaccacattgagagtgac

SEQ ID NO: 3290912 - DNA, 25 bp, Homo sapien
acaagctgggccgaccatagtggcc

SEQ ID NO: 3290913 - DNA, 25 bp, Homo sapien
ttgacaagctgggccgaccatagtg

SEQ ID NO: 3290914 - DNA, 25 bp, Homo sapien
gctgggccgaccatagtggcccatg

SEQ ID NO: 3290915 - DNA, 25 bp, Homo sapien
aagctgggccgaccatagtggccca

SEQ ID NO: 3290916 - DNA, 25 bp, Homo sapien
gactgctagctcaccagaagccgtt

SEQ ID NO: 3290917 - DNA, 25 bp, Homo sapien
taccacattatcctggactgctagc

SEQ ID NO: 3290918 - DNA, 25 bp, Homo sapien
taaaaatagcagtgtggtcaaccct

SEQ ID NO: 3290919 - DNA, 25 bp, Homo sapien
aatgtctgcacaaacgctgtaggcc

SEQ ID NO: 3290920 - DNA, 25 bp, Homo sapien
gatagcctactgagggcaaagaaag

SEQ ID NO: 3290921 - DNA, 25 bp, Homo sapien
tctttggatcctacagagatagcct

SEQ ID NO: 3290922 - DNA, 25 bp, Homo sapien
taaagtctgtcagccaagcacgaac

SEQ ID NO: 3290923 - DNA, 25 bp, Homo sapien
gaattattgacgacatggtggagca

SEQ ID NO: 3290924 - DNA, 25 bp, Homo sapien
ggagagccaggatagagacactgca

SEQ ID NO: 3290925 - DNA, 25 bp, Homo sapien
cactttaagagttccatattggtcc

SEQ ID NO: 3290926 - DNA, 25 bp, Homo sapien
tgcagattctggattctgcttcata

SEQ ID NO: 3290927 - DNA, 25 bp, Homo sapien
gattctgcttcatacactttaagag

SEQ ID NO: 3290928 - DNA, 25 bp, Homo sapien
gattctggattctgcttcatacact

SEQ ID NO: 3290929 - DNA, 25 bp, Homo sapien
ctcgggtcccacaaccacaatggca

SEQ ID NO: 3290930 - DNA, 25 bp, Homo sapien
atgcactatacctcgggtcccacaa

SEQ ID NO: 3290931 - DNA, 25 bp, Homo sapien
acatgcactatacctcgggtcccac

SEQ ID NO: 3290932 - DNA, 25 bp, Homo sapien
gcacatgcactatacctcgggtccc

SEQ ID NO: 3290933 - DNA, 25 bp, Homo sapien
ccttgagtaagcacaggtatgggct

SEQ ID NO: 3290934 - DNA, 25 bp, Homo sapien
ggtttccataatcttaaacacaata

SEQ ID NO: 3290935 - DNA, 25 bp, Homo sapien
ggatgaaggatcttccaccttaggc

SEQ ID NO: 3290936 - DNA, 25 bp, Homo sapien
gggctgttccttcacctcaggtaga

SEQ ID NO: 3290937 - DNA, 25 bp, Homo sapien
tattcctttactgccttccctgcta

SEQ ID NO: 3290938 - DNA, 25 bp, Homo sapien
tccccagctcaccaaaataattgtc

SEQ ID NO: 3290939 - DNA, 25 bp, Homo sapien
ctttactgccttccctgctatcaag

SEQ ID NO: 3290940 - DNA, 25 bp, Homo sapien
actgccttccctgctatcaagttct

SEQ ID NO: 3290941 - DNA, 25 bp, Homo sapien
agtatgaatattctttgcctgtgca

SEQ ID NO: 3290942 - DNA, 25 bp, Homo sapien
cgttgtttaatgagccatcccttcc

SEQ ID NO: 3290943 - DNA, 25 bp, Homo sapien
tctcccatcacagccatccttgaag

SEQ ID NO: 3290944 - DNA, 25 bp, Homo sapien
tcaacagccaggactgaaacctttt

SEQ ID NO: 3290945 - DNA, 25 bp, Homo sapien
catgggttctgaatacgacattaaa

SEQ ID NO: 3290946 - DNA, 25 bp, Homo sapien
cctgacttgtatacttctgacctga

SEQ ID NO: 3290947 - DNA, 25 bp, Homo sapien
tgtttggctttctagaagacggaag

SEQ ID NO: 3290948 - DNA, 25 bp, Homo sapien
aagacggaagttcattctgtaagac

SEQ ID NO: 3290949 - DNA, 25 bp, Homo sapien
tgcctcgaaacttgcaagtcacttg

SEQ ID NO: 3290950 - DNA, 25 bp, Homo sapien
aaaaagcaagaaggccatgaccatc

SEQ ID NO: 3290951 - DNA, 25 bp, Homo sapien
agcaataggagtagcgacccaggtg

SEQ ID NO: 3290952 - DNA, 25 bp, Homo sapien
tatggagatccacacatcagtatag

SEQ ID NO: 3290953 - DNA, 25 bp, Homo sapien
aaatgtatagtgtgaccaaaggaac

SEQ ID NO: 3290954 - DNA, 25 bp, Homo sapien
gagatcgctgcaatgtaaaatgtaa

SEQ ID NO: 3290955 - DNA, 25 bp, Homo sapien
tttcaccaaaatgcatgggttcaca

SEQ ID NO: 3290956 - DNA, 25 bp, Homo sapien
taagacactgctacttaaactacca

SEQ ID NO: 3290957 - DNA, 25 bp, Homo sapien
ggattgttgctaattgctaccacag

SEQ ID NO: 3290958 - DNA, 25 bp, Homo sapien
ccacagtggtaataagtgatatgca

SEQ ID NO: 3290959 - DNA, 25 bp, Homo sapien
gatatgcagacacagcatgcatcct

SEQ ID NO: 3290960 - DNA, 25 bp, Homo sapien
caatatagaccatggatttatccac

SEQ ID NO: 3290961 - DNA, 25 bp, Homo sapien
gactaaatgagattcaaagacttgg

SEQ ID NO: 3290962 - DNA, 25 bp, Homo sapien
gaaacactgaataatccgtggaagt

SEQ ID NO: 3290963 - DNA, 25 bp, Homo sapien
ggtataaaatggcaaagccacctca

SEQ ID NO: 3290964 - DNA, 25 bp, Homo sapien
cagtgtcctatgcatatccctaaag

SEQ ID NO: 3290965 - DNA, 25 bp, Homo sapien
ttttccaacaaattatttcacacag

SEQ ID NO: 3290966 - DNA, 25 bp, Homo sapien
tttttccaacaaattatttcacaca

SEQ ID NO: 3290967 - DNA, 25 bp, Homo sapien
tttccaacaaattatttcacacagg

SEQ ID NO: 3290968 - DNA, 25 bp, Homo sapien
aatggcaatttcttacactaacctg

SEQ ID NO: 3290969 - DNA, 25 bp, Homo sapien
gagaatacgtaccatgaaatacata

SEQ ID NO: 3290970 - DNA, 25 bp, Homo sapien
taaatattagagatttcaccttaaa

SEQ ID NO: 3290971 - DNA, 25 bp, Homo sapien
cataaggttcagttacaaaatggat

SEQ ID NO: 3290972 - DNA, 25 bp, Homo sapien
tataattgacctatgtttatgcata

SEQ ID NO: 3290973 - DNA, 25 bp, Homo sapien
tgcatatatgttctctacacagtga

SEQ ID NO: 3290974 - DNA, 25 bp, Homo sapien
taatggagacatataattgacctat

SEQ ID NO: 3290975 - DNA, 25 bp, Homo sapien
ttctaatggagacatataattgacc

SEQ ID NO: 3290976 - DNA, 25 bp, Homo sapien
tggagagcctctcaagaaaaagagc

SEQ ID NO: 3290977 - DNA, 25 bp, Homo sapien
cagggagttggttttacatcaccca

SEQ ID NO: 3290978 - DNA, 25 bp, Homo sapien
gctatgcagtcagcaatgacttaaa

SEQ ID NO: 3290979 - DNA, 25 bp, Homo sapien
gaaactgtattcctaagagagcata

SEQ ID NO: 3290980 - DNA, 25 bp, Homo sapien
atagcaggcatctggggttaaggct

SEQ ID NO: 3290981 - DNA, 25 bp, Homo sapien
ccatatacgagtgggaccacagctg

SEQ ID NO: 3290982 - DNA, 25 bp, Homo sapien
cattttggtctcaccaccatatacg

SEQ ID NO: 3290983 - DNA, 25 bp, Homo sapien
gtaactatctgattatccagctcca

SEQ ID NO: 3290984 - DNA, 25 bp, Homo sapien
gaaattggcctttctatgaatgcca

SEQ ID NO: 3290985 - DNA, 25 bp, Homo sapien
tgtgttaggcttattcccaactgta

SEQ ID NO: 3290986 - DNA, 25 bp, Homo sapien
tcaattagttcttgcagctctgaca

SEQ ID NO: 3290987 - DNA, 25 bp, Homo sapien
cagcaagggatgactcctttcagac

SEQ ID NO: 3290988 - DNA, 25 bp, Homo sapien
aatctggttctcaatggtgaggtgg

SEQ ID NO: 3290989 - DNA, 25 bp, Homo sapien
tctggttctcaatggtgaggtggga

SEQ ID NO: 3290990 - DNA, 25 bp, Homo sapien
ctggttctcaatggtgaggtgggat

SEQ ID NO: 3290991 - DNA, 25 bp, Homo sapien
aaatctggttctcaatggtgaggtg

SEQ ID NO: 3290992 - DNA, 25 bp, Homo sapien
gaggttagtgatccacccaagttca

SEQ ID NO: 3290993 - DNA, 25 bp, Homo sapien
gatgattgtcaacgagttcaggtga

SEQ ID NO: 3290994 - DNA, 25 bp, Homo sapien
tcatagttgcttgtctacagagtgg

SEQ ID NO: 3290995 - DNA, 25 bp, Homo sapien
tatttttggtaatgagtatacggcc

SEQ ID NO: 3290996 - DNA, 25 bp, Homo sapien
tcttcggaagaacggatgatcctgg

SEQ ID NO: 3290997 - DNA, 25 bp, Homo sapien
tgatcctggaagtaatccgggcaca

SEQ ID NO: 3290998 - DNA, 25 bp, Homo sapien
cctcattaggatcttcggaagaacg

SEQ ID NO: 3290999 - DNA, 25 bp, Homo sapien
aagtaatccgggcacacttacattt

SEQ ID NO: 3291000 - DNA, 25 bp, Homo sapien
ccccagaaaagcaaatggttcttca

SEQ ID NO: 3291001 - DNA, 25 bp, Homo sapien
caggactccccagaaaagcaaatgg

SEQ ID NO: 3291002 - DNA, 25 bp, Homo sapien
tgaacagccttaataaaaaccgcca

SEQ ID NO: 3291003 - DNA, 25 bp, Homo sapien
cacatgaacagccttaataaaaacc

SEQ ID NO: 3291004 - DNA, 25 bp, Homo sapien
aaagtcagggttaaggtgtgtgatc

SEQ ID NO: 3291005 - DNA, 25 bp, Homo sapien
gtgtgtgatctataaggagtgtgca

SEQ ID NO: 3291006 - DNA, 25 bp, Homo sapien
ttcttaaaataacactccaggcagc

SEQ ID NO: 3291007 - DNA, 25 bp, Homo sapien
gcaaatgatggtgcttctgctttct

SEQ ID NO: 3291008 - DNA, 25 bp, Homo sapien
cacttgtcatgcctagaataataaa

SEQ ID NO: 3291009 - DNA, 25 bp, Homo sapien
ttagtcttcaaatcagacatctgac

SEQ ID NO: 3291010 - DNA, 25 bp, Homo sapien
gaataataaatgaaggtaagtgaag

SEQ ID NO: 3291011 - DNA, 25 bp, Homo sapien
gacatctgacacttgtcatgcctag

SEQ ID NO: 3291012 - DNA, 25 bp, Homo sapien
cacgggtcgtgaaggatttggctaa

SEQ ID NO: 3291013 - DNA, 25 bp, Homo sapien
caaaaccagtgcctcaggtagatga

SEQ ID NO: 3291014 - DNA, 25 bp, Homo sapien
aaatgttgcgaaaggaatcaccaga

SEQ ID NO: 3291015 - DNA, 25 bp, Homo sapien
caagctgtccgttgtggatcagaag

SEQ ID NO: 3291016 - DNA, 25 bp, Homo sapien
cattctcgtgcagggaaatgttaat

SEQ ID NO: 3291017 - DNA, 25 bp, Homo sapien
tctcgtgcagggaaatgttaatctt

SEQ ID NO: 3291018 - DNA, 25 bp, Homo sapien
ttgcaggtcattctcgtgcagggaa

SEQ ID NO: 3291019 - DNA, 25 bp, Homo sapien
caggtcattctcgtgcagggaaatg

SEQ ID NO: 3291020 - DNA, 25 bp, Homo sapien
aaagcaggtgggcaaaatgttacac

SEQ ID NO: 3291021 - DNA, 25 bp, Homo sapien
catggcttctatgccagcattaaac

SEQ ID NO: 3291022 - DNA, 25 bp, Homo sapien
aaacacaaggctaatcagctaggaa

SEQ ID NO: 3291023 - DNA, 25 bp, Homo sapien
tttaattatgagtcaacatggcttc

SEQ ID NO: 3291024 - DNA, 25 bp, Homo sapien
ttcgaattctcaaagcaacggtggc

SEQ ID NO: 3291025 - DNA, 25 bp, Homo sapien
gatttcagtacagcgcacaagacgg

SEQ ID NO: 3291026 - DNA, 25 bp, Homo sapien
taattactagcgagacacgggcact

SEQ ID NO: 3291027 - DNA, 25 bp, Homo sapien
aacgccgccaggtatttcgccaggt

SEQ ID NO: 3291028 - DNA, 25 bp, Homo sapien
ggctaccctcgggaagctgttctcc

SEQ ID NO: 3291029 - DNA, 25 bp, Homo sapien
aaggagtgagcatggctgagacccc

SEQ ID NO: 3291030 - DNA, 25 bp, Homo sapien
ggtctctctcccgtcttgggctggg

SEQ ID NO: 3291031 - DNA, 25 bp, Homo sapien
cgcccaccgctggtgccgaaagttg

SEQ ID NO: 3291032 - DNA, 25 bp, Homo sapien
cgggggcgagaagcggcctgcctgc

SEQ ID NO: 3291033 - DNA, 25 bp, Homo sapien
gggcgggggcgagaagcggcctgcc

SEQ ID NO: 3291034 - DNA, 25 bp, Homo sapien
gggcgagaagcggcctgcctgcccc

SEQ ID NO: 3291035 - DNA, 25 bp, Homo sapien
gcgggggcgagaagcggcctgcctg

SEQ ID NO: 3291036 - DNA, 25 bp, Homo sapien
ttaatcactgtacgttccctcacca

SEQ ID NO: 3291037 - DNA, 25 bp, Homo sapien
tcaccaccaaggtcttaaagaagct

SEQ ID NO: 3291038 - DNA, 25 bp, Homo sapien
cagccttcaaagcgcatgttcttaa

SEQ ID NO: 3291039 - DNA, 25 bp, Homo sapien
tcttaaagaagctggtttgagtgga

SEQ ID NO: 3291040 - DNA, 25 bp, Homo sapien
tagtagcagccgagtacaaatatcc

SEQ ID NO: 3291041 - DNA, 25 bp, Homo sapien
taggtgccattactcacaaatggga

SEQ ID NO: 3291042 - DNA, 25 bp, Homo sapien
tacagactgtttaagcagctagaac

SEQ ID NO: 3291043 - DNA, 25 bp, Homo sapien
ttcttttagggccacagactgaact

SEQ ID NO: 3291044 - DNA, 25 bp, Homo sapien
tgaagagattgttgtggtttgtgac

SEQ ID NO: 3291045 - DNA, 25 bp, Homo sapien
ttggaccccagacaatcacatggca

SEQ ID NO: 3291046 - DNA, 25 bp, Homo sapien
tggaccccagacaatcacatggcat

SEQ ID NO: 3291047 - DNA, 25 bp, Homo sapien
tgttgtggtttgtgacaaggccaaa

SEQ ID NO: 3291048 - DNA, 25 bp, Homo sapien
attccttgttctgttttaagaacat

SEQ ID NO: 3291049 - DNA, 25 bp, Homo sapien
tattccttgttctgttttaagaaca

SEQ ID NO: 3291050 - DNA, 25 bp, Homo sapien
gcagcatcagctgtgcgggatttaa

SEQ ID NO: 3291051 - DNA, 25 bp, Homo sapien
ttcacttactcatatcgaggccaga

SEQ ID NO: 3291052 - DNA, 25 bp, Homo sapien
tcttattttgctatgtggtaggaac

SEQ ID NO: 3291053 - DNA, 25 bp, Homo sapien
tggtaggaactgtctataagatagt

SEQ ID NO: 3291054 - DNA, 25 bp, Homo sapien
gaattcacgttgtcagattcccaag

SEQ ID NO: 3291055 - DNA, 25 bp, Homo sapien
gatagagctcagaacggaattcacg

SEQ ID NO: 3291056 - DNA, 25 bp, Homo sapien
tgctgtgccagagaagataattgcc

SEQ ID NO: 3291057 - DNA, 25 bp, Homo sapien
aagcctgagtaccaaccaagatctg

SEQ ID NO: 3291058 - DNA, 25 bp, Homo sapien
actgcagcctctgctagtgattctt

SEQ ID NO: 3291059 - DNA, 25 bp, Homo sapien
cagcctctgctagtgattcttcttg

SEQ ID NO: 3291060 - DNA, 25 bp, Homo sapien
gcctctgctagtgattcttcttgcc

SEQ ID NO: 3291061 - DNA, 25 bp, Homo sapien
tctgctagtgattcttcttgcctca

SEQ ID NO: 3291062 - DNA, 25 bp, Homo sapien
acacacccattccaaccacttggaa

SEQ ID NO: 3291063 - DNA, 25 bp, Homo sapien
aaccacttggaataccgtccttcat

SEQ ID NO: 3291064 - DNA, 25 bp, Homo sapien
ggaggccagcagctaaaccttgacc

SEQ ID NO: 3291065 - DNA, 25 bp, Homo sapien
tgacctggagtaagagaaagcagaa

SEQ ID NO: 3291066 - DNA, 25 bp, Homo sapien
cagcagctaaaccttgacctggagt

SEQ ID NO: 3291067 - DNA, 25 bp, Homo sapien
taaaccttgacctggagtaagagaa

SEQ ID NO: 3291068 - DNA, 25 bp, Homo sapien
gccattgcagtgtgatgaacctaga

SEQ ID NO: 3291069 - DNA, 25 bp, Homo sapien
tactaatgatgcctttacaacccag

SEQ ID NO: 3291070 - DNA, 25 bp, Homo sapien
taagttggtcacgtcgcaagtccga

SEQ ID NO: 3291071 - DNA, 25 bp, Homo sapien
cctagggaattgaagctctgtacat

SEQ ID NO: 3291072 - DNA, 25 bp, Homo sapien
tatataggtccctgcacagattgga

SEQ ID NO: 3291073 - DNA, 25 bp, Homo sapien
tgatgggttgccttttctacgagca

SEQ ID NO: 3291074 - DNA, 25 bp, Homo sapien
tatggtcagagtcttaaacaggccc

SEQ ID NO: 3291075 - DNA, 25 bp, Homo sapien
ctacgagcatttggaaggagtgatc

SEQ ID NO: 3291076 - DNA, 25 bp, Homo sapien
caatctgctgagttggacaaccggc

SEQ ID NO: 3291077 - DNA, 25 bp, Homo sapien
tccagattgcgccaggctgagcgaa

SEQ ID NO: 3291078 - DNA, 25 bp, Homo sapien
cagctggaagtcgaggagctcacca

SEQ ID NO: 3291079 - DNA, 25 bp, Homo sapien
gacaaccggctcttcaaacaggact

SEQ ID NO: 3291080 - DNA, 25 bp, Homo sapien
aggttggctctgtctttgcaatgtc

SEQ ID NO: 3291081 - DNA, 25 bp, Homo sapien
cttagggtagacagcaagaaaaggg

SEQ ID NO: 3291082 - DNA, 25 bp, Homo sapien
gggtctcatgacttccagccaggtt

SEQ ID NO: 3291083 - DNA, 25 bp, Homo sapien
ggtagacagcaagaaaaggggtctc

SEQ ID NO: 3291084 - DNA, 25 bp, Homo sapien
tgtattatggtggtaggactaccta

SEQ ID NO: 3291085 - DNA, 25 bp, Homo sapien
aaaatgcatattctgaaagtactaa

SEQ ID NO: 3291086 - DNA, 25 bp, Homo sapien
ggtttagtttccagatagtctatag

SEQ ID NO: 3291087 - DNA, 25 bp, Homo sapien
gaagcataatgataggattatccga

SEQ ID NO: 3291088 - DNA, 25 bp, Homo sapien
cctgtgtggtttaggatcagctgct

SEQ ID NO: 3291089 - DNA, 25 bp, Homo sapien
cagtccctccccaggagtaacaggg

SEQ ID NO: 3291090 - DNA, 25 bp, Homo sapien
tttcatagggatgtctacagcagcc

SEQ ID NO: 3291091 - DNA, 25 bp, Homo sapien
ccgcatagagtgcagagtgcatgca

SEQ ID NO: 3291092 - DNA, 25 bp, Homo sapien
caggcttttcatagggatgtctaca

SEQ ID NO: 3291093 - DNA, 25 bp, Homo sapien
ctgggagtggggtgaaaagcaaaag

SEQ ID NO: 3291094 - DNA, 25 bp, Homo sapien
tcttggaaagagttaacaacagcct

SEQ ID NO: 3291095 - DNA, 25 bp, Homo sapien
ggtctcattggttgctcagcctggt

SEQ ID NO: 3291096 - DNA, 25 bp, Homo sapien
tcatggctgagaacagttagctcgg

SEQ ID NO: 3291097 - DNA, 25 bp, Homo sapien
gatatcagaatccatgggtgctcaa

SEQ ID NO: 3291098 - DNA, 25 bp, Homo sapien
tatacaggtgggtgaggcgtataca

SEQ ID NO: 3291099 - DNA, 25 bp, Homo sapien
caggaactctgtactctttttgcaa

SEQ ID NO: 3291100 - DNA, 25 bp, Homo sapien
tgtaggatactaacaataggtatac

SEQ ID NO: 3291101 - DNA, 25 bp, Homo sapien
aatatcctgcagtaatgtaggatac

SEQ ID NO: 3291102 - DNA, 25 bp, Homo sapien
gcgtgagccaccatggctagctagt

SEQ ID NO: 3291103 - DNA, 25 bp, Homo sapien
gtatttttggtagagatgggtttca

SEQ ID NO: 3291104 - DNA, 25 bp, Homo sapien
gtgagccaccatggctagctagttt

SEQ ID NO: 3291105 - DNA, 25 bp, Homo sapien
gagccaccatggctagctagttttt

SEQ ID NO: 3291106 - DNA, 25 bp, Homo sapien
caaagccaatagaaaagcggttaat

SEQ ID NO: 3291107 - DNA, 25 bp, Homo sapien
ctcagattatggaaacctacaggtt

SEQ ID NO: 3291108 - DNA, 25 bp, Homo sapien
ggttaataaacatcacacaaaggca

SEQ ID NO: 3291109 - DNA, 25 bp, Homo sapien
gatggcaaaacatcctgaataagag

SEQ ID NO: 3291110 - DNA, 25 bp, Homo sapien
tgagctgggatcacgtcactataac

SEQ ID NO: 3291111 - DNA, 25 bp, Homo sapien
tttggattggaactctactgctgac

SEQ ID NO: 3291112 - DNA, 25 bp, Homo sapien
aaaaaactccaatgacggctgggtg

SEQ ID NO: 3291113 - DNA, 25 bp, Homo sapien
cagggctgtgcgagaatagaaacta

SEQ ID NO: 3291114 - DNA, 25 bp, Homo sapien
gacggtaccgtcttccacttgcatg

SEQ ID NO: 3291115 - DNA, 25 bp, Homo sapien
tcagcctgtagcgtgccaagaagat

SEQ ID NO: 3291116 - DNA, 25 bp, Homo sapien
ttgcactccgtaagcagcagctagg

SEQ ID NO: 3291117 - DNA, 25 bp, Homo sapien
caggattttagagaacacacacacg

SEQ ID NO: 3291118 - DNA, 25 bp, Homo sapien
tttaagaactagaactgcatctcct

SEQ ID NO: 3291119 - DNA, 25 bp, Homo sapien
cagtgatttcgcatcttagctggta

SEQ ID NO: 3291120 - DNA, 25 bp, Homo sapien
caaagatggttatgtattaagtaag

SEQ ID NO: 3291121 - DNA, 25 bp, Homo sapien
ggtatcacctgtcagaaacctgggc

SEQ ID NO: 3291122 - DNA, 25 bp, Homo sapien
aagaaagcatacaggattttgattc

SEQ ID NO: 3291123 - DNA, 25 bp, Homo sapien
caaagaaagcatacaggattttgat

SEQ ID NO: 3291124 - DNA, 25 bp, Homo sapien
gaaagcatacaggattttgattctc

SEQ ID NO: 3291125 - DNA, 25 bp, Homo sapien
aggcaaagaaagcatacaggatttt

SEQ ID NO: 3291126 - DNA, 25 bp, Homo sapien
tagataggcaccaccgttatacgcc

SEQ ID NO: 3291127 - DNA, 25 bp, Homo sapien
tcagagcactcaattcacaggcaaa

SEQ ID NO: 3291128 - DNA, 25 bp, Homo sapien
tgccaaaccataccagttcaaaggt

SEQ ID NO: 3291129 - DNA, 25 bp, Homo sapien
tctaaaatatgggatgtactactcc

SEQ ID NO: 3291130 - DNA, 25 bp, Homo sapien
atgaaaacaaaccatttaatcatat

SEQ ID NO: 3291131 - DNA, 25 bp, Homo sapien
tcatataaaacaaagaccatatttt

SEQ ID NO: 3291132 - DNA, 25 bp, Homo sapien
atcatataaaacaaagaccatattt

SEQ ID NO: 3291133 - DNA, 25 bp, Homo sapien
acaaaccatttaatcatataaaaca

SEQ ID NO: 3291134 - DNA, 25 bp, Homo sapien
accaaaatcatttccctagcagttg

SEQ ID NO: 3291135 - DNA, 25 bp, Homo sapien
tagaagcaattaacccaaaacacca

SEQ ID NO: 3291136 - DNA, 25 bp, Homo sapien
tagcagttgctgctaataaactgga

SEQ ID NO: 3291137 - DNA, 25 bp, Homo sapien
ggaactgtatatcccaagtccaaga

SEQ ID NO: 3291138 - DNA, 25 bp, Homo sapien
caaaaagagtgagatttcatatcaa

SEQ ID NO: 3291139 - DNA, 25 bp, Homo sapien
ctgcacttcaccctgggcaaaaaga

SEQ ID NO: 3291140 - DNA, 25 bp, Homo sapien
gggcaaaaagagtgagatttcatat

SEQ ID NO: 3291141 - DNA, 25 bp, Homo sapien
actgcacttcaccctgggcaaaaag

SEQ ID NO: 3291142 - DNA, 25 bp, Homo sapien
ttcattccttatattgacacttcaa

SEQ ID NO: 3291143 - DNA, 25 bp, Homo sapien
agccagagcgagaattttcattcct

SEQ ID NO: 3291144 - DNA, 25 bp, Homo sapien
tattgacacttcaattatcattagt

SEQ ID NO: 3291145 - DNA, 25 bp, Homo sapien
cagagcgagaattttcattccttat

SEQ ID NO: 3291146 - DNA, 25 bp, Homo sapien
aggcacccaccatcatgctcggtta

SEQ ID NO: 3291147 - DNA, 25 bp, Homo sapien
ggcacccaccatcatgctcggttaa

SEQ ID NO: 3291148 - DNA, 25 bp, Homo sapien
gcacccaccatcatgctcggttaat

SEQ ID NO: 3291149 - DNA, 25 bp, Homo sapien
cacccaccatcatgctcggttaatt

SEQ ID NO: 3291150 - DNA, 25 bp, Homo sapien
gcacccagcccacagtattacctct

SEQ ID NO: 3291151 - DNA, 25 bp, Homo sapien
actgcacccagcccacagtattacc

SEQ ID NO: 3291152 - DNA, 25 bp, Homo sapien
ctgcacccagcccacagtattacct

SEQ ID NO: 3291153 - DNA, 25 bp, Homo sapien
tgcacccagcccacagtattacctc

SEQ ID NO: 3291154 - DNA, 25 bp, Homo sapien
cttattatctggagcccctagagtc

SEQ ID NO: 3291155 - DNA, 25 bp, Homo sapien
aattcaggaacagttcaatatacct

SEQ ID NO: 3291156 - DNA, 25 bp, Homo sapien
cttttggacatgaattcaggaacag

SEQ ID NO: 3291157 - DNA, 25 bp, Homo sapien
ggacatgaattcaggaacagttcaa

SEQ ID NO: 3291158 - DNA, 25 bp, Homo sapien
aggaacagttcaatatacctatgat

SEQ ID NO: 3291159 - DNA, 25 bp, Homo sapien
gatccttgagcatcgctgcaacagc

SEQ ID NO: 3291160 - DNA, 25 bp, Homo sapien
gaacgtgggaccgatccttgagcat

SEQ ID NO: 3291161 - DNA, 25 bp, Homo sapien
tcatgggtctcaaagtgcacatcag

SEQ ID NO: 3291162 - DNA, 25 bp, Homo sapien
ggagctgtattccatggtgattcta

SEQ ID NO: 3291163 - DNA, 25 bp, Homo sapien
caagctttgcaaccaggaagatgcc

SEQ ID NO: 3291164 - DNA, 25 bp, Homo sapien
gctactcggtagaccaaggcggaag

SEQ ID NO: 3291165 - DNA, 25 bp, Homo sapien
taaacctacctagaagtctggtggc

SEQ ID NO: 3291166 - DNA, 25 bp, Homo sapien
gaagatgccatcttactatccaacg

SEQ ID NO: 3291167 - DNA, 25 bp, Homo sapien
tgttcaaatctattgagattggata

SEQ ID NO: 3291168 - DNA, 25 bp, Homo sapien
gattggatatcttactgccacacac

SEQ ID NO: 3291169 - DNA, 25 bp, Homo sapien
tagaacttttgttcaaatctattga

SEQ ID NO: 3291170 - DNA, 25 bp, Homo sapien
ttgagattggatatcttactgccac

SEQ ID NO: 3291171 - DNA, 25 bp, Homo sapien
tcctctcatgtggacaaaatgcaga

SEQ ID NO: 3291172 - DNA, 25 bp, Homo sapien
cattggcttggaaaggtaatcctct

SEQ ID NO: 3291173 - DNA, 25 bp, Homo sapien
gtttataatgtcttgggcattggct

SEQ ID NO: 3291174 - DNA, 25 bp, Homo sapien
cagagaagacgtagttccaaaatca

SEQ ID NO: 3291175 - DNA, 25 bp, Homo sapien
tacttagcagtaggaaaagatgcga

SEQ ID NO: 3291176 - DNA, 25 bp, Homo sapien
tctggctcagttatatacttagcag

SEQ ID NO: 3291177 - DNA, 25 bp, Homo sapien
tgtgttcgaacttcattccttctgc

SEQ ID NO: 3291178 - DNA, 25 bp, Homo sapien
tcccttataagaaccgacatgtgtt

SEQ ID NO: 3291179 - DNA, 25 bp, Homo sapien
tatacaacagagtaggtcactgatt

SEQ ID NO: 3291180 - DNA, 25 bp, Homo sapien
gcatcaaggtaacactttttcttca

SEQ ID NO: 3291181 - DNA, 25 bp, Homo sapien
caggcacaaatggtgcaaagtaact

SEQ ID NO: 3291182 - DNA, 25 bp, Homo sapien
taatgcatacagatagtagcccatg

SEQ ID NO: 3291183 - DNA, 25 bp, Homo sapien
catcctgaggtgatgtcaacatgag

SEQ ID NO: 3291184 - DNA, 25 bp, Homo sapien
ggatttgctctagttcaagagaatc

SEQ ID NO: 3291185 - DNA, 25 bp, Homo sapien
aatgaacccacttatcatcatgtgc

SEQ ID NO: 3291186 - DNA, 25 bp, Homo sapien
catgagatactgtacaagacaactg

SEQ ID NO: 3291187 - DNA, 25 bp, Homo sapien
tgtttttcgcctccctctatagtcc

SEQ ID NO: 3291188 - DNA, 25 bp, Homo sapien
ttcttcaaattgcacataggcttcc

SEQ ID NO: 3291189 - DNA, 25 bp, Homo sapien
aaagtaatgtcaactatattcagtc

SEQ ID NO: 3291190 - DNA, 25 bp, Homo sapien
ggcttggttggccatttctggttct

SEQ ID NO: 3291191 - DNA, 25 bp, Homo sapien
ggacaccaagagattttaatgctac

SEQ ID NO: 3291192 - DNA, 25 bp, Homo sapien
gagattttaatgctactagcaggct

SEQ ID NO: 3291193 - DNA, 25 bp, Homo sapien
caagagattttaatgctactagcag

SEQ ID NO: 3291194 - DNA, 25 bp, Homo sapien
ctaggacaccaagagattttaatgc

SEQ ID NO: 3291195 - DNA, 25 bp, Homo sapien
gacttccctcctaaaatctgcctga

SEQ ID NO: 3291196 - DNA, 25 bp, Homo sapien
gaaatttaagtgaagagctctcccc

SEQ ID NO: 3291197 - DNA, 25 bp, Homo sapien
gatatagaaggagataccaagggaa

SEQ ID NO: 3291198 - DNA, 25 bp, Homo sapien
cagaaacaggctcatctaagatata

SEQ ID NO: 3291199 - DNA, 25 bp, Homo sapien
ggcgaagatttgacctgcaagctct

SEQ ID NO: 3291200 - DNA, 25 bp, Homo sapien
tcattgcaactataaggaagtcctc

SEQ ID NO: 3291201 - DNA, 25 bp, Homo sapien
tctcaaacgaaccacaccatcattt

SEQ ID NO: 3291202 - DNA, 25 bp, Homo sapien
tgcaaagaagtctacaatgtctttc

SEQ ID NO: 3291203 - DNA, 25 bp, Homo sapien
tgactccatttcaattaaggcatca

SEQ ID NO: 3291204 - DNA, 25 bp, Homo sapien
ttctctaaggctttctgcacatcct

SEQ ID NO: 3291205 - DNA, 25 bp, Homo sapien
tgctctgactccatttcaattaagg

SEQ ID NO: 3291206 - DNA, 25 bp, Homo sapien
tggcccatgtacatgcggtgcttct

SEQ ID NO: 3291207 - DNA, 25 bp, Homo sapien
tattccattctcaccgttgcggatt

SEQ ID NO: 3291208 - DNA, 25 bp, Homo sapien
tccattctcaccgttgcggattctg

SEQ ID NO: 3291209 - DNA, 25 bp, Homo sapien
attctcaccgttgcggattctgcag

SEQ ID NO: 3291210 - DNA, 25 bp, Homo sapien
atgtattccattctcaccgttgcgg

SEQ ID NO: 3291211 - DNA, 25 bp, Homo sapien
tggacggggccaattcatactcagg

SEQ ID NO: 3291212 - DNA, 25 bp, Homo sapien
cagtccttgagctcgaatgagaaag

SEQ ID NO: 3291213 - DNA, 25 bp, Homo sapien
cacttcctcttctaacttggacggg

SEQ ID NO: 3291214 - DNA, 25 bp, Homo sapien
tcttccatagtgcatgaccagggca

SEQ ID NO: 3291215 - DNA, 25 bp, Homo sapien
gatatcaccgcagtcaatttcatag

SEQ ID NO: 3291216 - DNA, 25 bp, Homo sapien
gagaaaggttcatctacaaagcaca

SEQ ID NO: 3291217 - DNA, 25 bp, Homo sapien
ccagatgccacgtaccaagaagaga

SEQ ID NO: 3291218 - DNA, 25 bp, Homo sapien
gcagcgtaaagtattgggccaggat

SEQ ID NO: 3291219 - DNA, 25 bp, Homo sapien
tgtatgagtggagttgcagaggtga

SEQ ID NO: 3291220 - DNA, 25 bp, Homo sapien
tctgtatgagtggagttgcagaggt

SEQ ID NO: 3291221 - DNA, 25 bp, Homo sapien
gtatgagtggagttgcagaggtgac

SEQ ID NO: 3291222 - DNA, 25 bp, Homo sapien
cttctgtatgagtggagttgcagag

SEQ ID NO: 3291223 - DNA, 25 bp, Homo sapien
ttcagtaaaccgggacagctcgtct

SEQ ID NO: 3291224 - DNA, 25 bp, Homo sapien
cagtaaaccgggacagctcgtcttt

SEQ ID NO: 3291225 - DNA, 25 bp, Homo sapien
cttcagtaaaccgggacagctcgtc

SEQ ID NO: 3291226 - DNA, 25 bp, Homo sapien
tcagtaaaccgggacagctcgtctt

SEQ ID NO: 3291227 - DNA, 25 bp, Homo sapien
ctggggacaggagagggaacggcgc

SEQ ID NO: 3291228 - DNA, 25 bp, Homo sapien
tggggacaggagagggaacggcgcg

SEQ ID NO: 3291229 - DNA, 25 bp, Homo sapien
ggacaggagagggaacggcgcgatg

SEQ ID NO: 3291230 - DNA, 25 bp, Homo sapien
gggacaggagagggaacggcgcgat

SEQ ID NO: 3291231 - DNA, 25 bp, Homo sapien
ggggaacaaggcctcaacattcacc

SEQ ID NO: 3291232 - DNA, 25 bp, Homo sapien
gggaacaaggcctcaacattcaccc

SEQ ID NO: 3291233 - DNA, 25 bp, Homo sapien
ggcggggaacaaggcctcaacattc

SEQ ID NO: 3291234 - DNA, 25 bp, Homo sapien
gccaggcggggaacaaggcctcaac

SEQ ID NO: 3291235 - DNA, 25 bp, Homo sapien
aagacccgacgcctgggagagcttc

SEQ ID NO: 3291236 - DNA, 25 bp, Homo sapien
tgttccagggcccaataggagcaca

SEQ ID NO: 3291237 - DNA, 25 bp, Homo sapien
gagggatctcgcgccaggtccctca

SEQ ID NO: 3291238 - DNA, 25 bp, Homo sapien
tgtgcggcgagtgtcgcggatcccc

SEQ ID NO: 3291239 - DNA, 25 bp, Homo sapien
ggcagcagagaggcacggagggcag

SEQ ID NO: 3291240 - DNA, 25 bp, Homo sapien
agcagagaggcacggagggcagagt

SEQ ID NO: 3291241 - DNA, 25 bp, Homo sapien
tgcggcagcagagaggcacggaggg

SEQ ID NO: 3291242 - DNA, 25 bp, Homo sapien
ctgcggcagcagagaggcacggagg

SEQ ID NO: 3291243 - DNA, 25 bp, Homo sapien
agaggtggccacagcgggaggcccc

SEQ ID NO: 3291244 - DNA, 25 bp, Homo sapien
ccgggaggcacaggcccggtctgga

SEQ ID NO: 3291245 - DNA, 25 bp, Homo sapien
ctggaggccacgcgtctgggaggca

SEQ ID NO: 3291246 - DNA, 25 bp, Homo sapien
ggcacaggcccggtctggaggccac

SEQ ID NO: 3291247 - DNA, 25 bp, Homo sapien
gcccggtctggaggccacgcgtctg

SEQ ID NO: 3291248 - DNA, 25 bp, Homo sapien
aggcggcgccggtgcgccggcagct

SEQ ID NO: 3291249 - DNA, 25 bp, Homo sapien
agctgctgcagttacagccgcagcc

SEQ ID NO: 3291250 - DNA, 25 bp, Homo sapien
gctgcagttacagccgcagccccgg

SEQ ID NO: 3291251 - DNA, 25 bp, Homo sapien
ggcggcgccggtgcgccggcagctg

SEQ ID NO: 3291252 - DNA, 25 bp, Homo sapien
gatggtggaacggaagtggaatcca

SEQ ID NO: 3291253 - DNA, 25 bp, Homo sapien
tgctccagcagcgatggtggaacgg

SEQ ID NO: 3291254 - DNA, 25 bp, Homo sapien
cggaagtggaatccagggccggttg

SEQ ID NO: 3291255 - DNA, 25 bp, Homo sapien
ctccagcagcgatggtggaacggaa

SEQ ID NO: 3291256 - DNA, 25 bp, Homo sapien
ttcccactgcttgttcgtgatttgt

SEQ ID NO: 3291257 - DNA, 25 bp, Homo sapien
tgcttgttcgtgatttgttcttgga

SEQ ID NO: 3291258 - DNA, 25 bp, Homo sapien
ctccctttggggtgagagcaggtgc

SEQ ID NO: 3291259 - DNA, 25 bp, Homo sapien
ttgttcgtgatttgttcttggatac

SEQ ID NO: 3291260 - DNA, 25 bp, Homo sapien
cttccctgaacagtaattttgttca

SEQ ID NO: 3291261 - DNA, 25 bp, Homo sapien
gtctcttccctgaacagtaattttg

SEQ ID NO: 3291262 - DNA, 25 bp, Homo sapien
tgtctcttccctgaacagtaatttt

SEQ ID NO: 3291263 - DNA, 25 bp, Homo sapien
tcttccctgaacagtaattttgttc

SEQ ID NO: 3291264 - DNA, 25 bp, Homo sapien
ccttgtggaggggaccatgctaatc

SEQ ID NO: 3291265 - DNA, 25 bp, Homo sapien
catgtcatccttgtggaggggacca

SEQ ID NO: 3291266 - DNA, 25 bp, Homo sapien
catgctaatcatctctatcattcta

SEQ ID NO: 3291267 - DNA, 25 bp, Homo sapien
gctaatcatctctatcattctaatt

SEQ ID NO: 3291268 - DNA, 25 bp, Homo sapien
cttctgagagctttttgcaaacaac

SEQ ID NO: 3291269 - DNA, 25 bp, Homo sapien
caactgtaatcctaaagtgttgtgt

SEQ ID NO: 3291270 - DNA, 25 bp, Homo sapien
caagaagatttatggaagtgtggcc

SEQ ID NO: 3291271 - DNA, 25 bp, Homo sapien
ttgtgtcttcaagaagatttatgga

SEQ ID NO: 3291272 - DNA, 25 bp, Homo sapien
tctgaggtagagctagtctaaattg

SEQ ID NO: 3291273 - DNA, 25 bp, Homo sapien
tctaaattggtagaaacactctaga

SEQ ID NO: 3291274 - DNA, 25 bp, Homo sapien
tggtagaaacactctagatttaggg

SEQ ID NO: 3291275 - DNA, 25 bp, Homo sapien
attggtagaaacactctagatttag

SEQ ID NO: 3291276 - DNA, 25 bp, Homo sapien
tgtttactatccagatactgagaag

SEQ ID NO: 3291277 - DNA, 25 bp, Homo sapien
gatactgagaagtagtggcatcagc

SEQ ID NO: 3291278 - DNA, 25 bp, Homo sapien
ctgagaagtagtggcatcagctagt

SEQ ID NO: 3291279 - DNA, 25 bp, Homo sapien
tatccagatactgagaagtagtggc

SEQ ID NO: 3291280 - DNA, 25 bp, Homo sapien
caaagagctatcaatactaacagga

SEQ ID NO: 3291281 - DNA, 25 bp, Homo sapien
tagactgtagtctagcctgggaact

SEQ ID NO: 3291282 - DNA, 25 bp, Homo sapien
cagtgaacaaatgactataaggtga

SEQ ID NO: 3291283 - DNA, 25 bp, Homo sapien
ggtgcatgccaacgcactcggctaa

SEQ ID NO: 3291284 - DNA, 25 bp, Homo sapien
cagcatagataagaagtagcgaata

SEQ ID NO: 3291285 - DNA, 25 bp, Homo sapien
taagtcgcagcaagatggcactgca

SEQ ID NO: 3291286 - DNA, 25 bp, Homo sapien
taagaagtagcgaataagtcgcagc

SEQ ID NO: 3291287 - DNA, 25 bp, Homo sapien
tagcgaataagtcgcagcaagatgg

SEQ ID NO: 3291288 - DNA, 25 bp, Homo sapien
tgtacctatcaacccccatggtggt

SEQ ID NO: 3291289 - DNA, 25 bp, Homo sapien
tccaagtcttcgctacggtaaatag

SEQ ID NO: 3291290 - DNA, 25 bp, Homo sapien
ccaagtcttcgctacggtaaatagt

SEQ ID NO: 3291291 - DNA, 25 bp, Homo sapien
caagtcttcgctacggtaaatagtg

SEQ ID NO: 3291292 - DNA, 25 bp, Homo sapien
cgcccttggccggacactcacggtg

SEQ ID NO: 3291293 - DNA, 25 bp, Homo sapien
ctttcaccgcccttggccggacact

SEQ ID NO: 3291294 - DNA, 25 bp, Homo sapien
ttcaccgcccttggccggacactca

SEQ ID NO: 3291295 - DNA, 25 bp, Homo sapien
ccttggccggacactcacggtgggc

SEQ ID NO: 3291296 - DNA, 25 bp, Homo sapien
catgactcctaaccgggtggacagg

SEQ ID NO: 3291297 - DNA, 25 bp, Homo sapien
tggtaattccatccctcactgcggg

SEQ ID NO: 3291298 - DNA, 25 bp, Homo sapien
actccggtggtaattccatccctca

SEQ ID NO: 3291299 - DNA, 25 bp, Homo sapien
gggaccttgacatccccgagctgaa

SEQ ID NO: 3291300 - DNA, 25 bp, Homo sapien
cattggaactagctgagccgaacta

SEQ ID NO: 3291301 - DNA, 25 bp, Homo sapien
actagctgagccgaactagttgcgg

SEQ ID NO: 3291302 - DNA, 25 bp, Homo sapien
agccgaactagttgcggccaccgag

SEQ ID NO: 3291303 - DNA, 25 bp, Homo sapien
cccctgccattggaactagctgagc

SEQ ID NO: 3291304 - DNA, 25 bp, Homo sapien
cccggggccagcgcctggattcctt

SEQ ID NO: 3291305 - DNA, 25 bp, Homo sapien
cattcccgggcttgtttgtgcgctt

SEQ ID NO: 3291306 - DNA, 25 bp, Homo sapien
cttcgctcgcattcccgggcttgtt

SEQ ID NO: 3291307 - DNA, 25 bp, Homo sapien
cctgcacaatccgtatccaagcggt

SEQ ID NO: 3291308 - DNA, 25 bp, Homo sapien
tcggttgaatggctccgtcgcggct

SEQ ID NO: 3291309 - DNA, 25 bp, Homo sapien
gataagactgtcgtactttcccctg

SEQ ID NO: 3291310 - DNA, 25 bp, Homo sapien
aagactgtcgtactttcccctgtca

SEQ ID NO: 3291311 - DNA, 25 bp, Homo sapien
agaagataagactgtcgtactttcc

SEQ ID NO: 3291312 - DNA, 25 bp, Homo sapien
gcacagaagataagactgtcgtact

SEQ ID NO: 3291313 - DNA, 25 bp, Homo sapien
cttttaacttcctctctcgtcttag

SEQ ID NO: 3291314 - DNA, 25 bp, Homo sapien
gagcctcaatgtagatccccgtact

SEQ ID NO: 3291315 - DNA, 25 bp, Homo sapien
cattttatttcccagcacattagga

SEQ ID NO: 3291316 - DNA, 25 bp, Homo sapien
tgagagattcccaataagggagcct

SEQ ID NO: 3291317 - DNA, 25 bp, Homo sapien
tttcttatttgtgtgagtgacagga

SEQ ID NO: 3291318 - DNA, 25 bp, Homo sapien
aatcacgtaactagtactagacaga

SEQ ID NO: 3291319 - DNA, 25 bp, Homo sapien
tcacgtaactagtactagacagatc

SEQ ID NO: 3291320 - DNA, 25 bp, Homo sapien
taactagtactagacagatcagcat

SEQ ID NO: 3291321 - DNA, 25 bp, Homo sapien
cgtaactagtactagacagatcagc

SEQ ID NO: 3291322 - DNA, 25 bp, Homo sapien
cccacaatgatgaataatcatctga

SEQ ID NO: 3291323 - DNA, 25 bp, Homo sapien
taatcatctgacataaaatagtgaa

SEQ ID NO: 3291324 - DNA, 25 bp, Homo sapien
aatgatgaataatcatctgacataa

SEQ ID NO: 3291325 - DNA, 25 bp, Homo sapien
tagtgaaagagctttgataaacttt

SEQ ID NO: 3291326 - DNA, 25 bp, Homo sapien
tatggcaactgctagatatctgtaa

SEQ ID NO: 3291327 - DNA, 25 bp, Homo sapien
taacacaaggttagttaacatcaca

SEQ ID NO: 3291328 - DNA, 25 bp, Homo sapien
taagtagcattaataagccttcaag

SEQ ID NO: 3291329 - DNA, 25 bp, Homo sapien
gccttcaagtgggtagagatctaga

SEQ ID NO: 3291330 - DNA, 25 bp, Homo sapien
aaatatccaaactgtctcacccttg

SEQ ID NO: 3291331 - DNA, 25 bp, Homo sapien
catagacatcaccaagccatgaagg

SEQ ID NO: 3291332 - DNA, 25 bp, Homo sapien
caagacagtatgagacagaggaagt

SEQ ID NO: 3291333 - DNA, 25 bp, Homo sapien
tcattcactatcacatagacatcac

SEQ ID NO: 3291334 - DNA, 25 bp, Homo sapien
ccattccccggttgggtggattctg

SEQ ID NO: 3291335 - DNA, 25 bp, Homo sapien
gtggattctggtaggagaagattca

SEQ ID NO: 3291336 - DNA, 25 bp, Homo sapien
cccgctgaagcaggagagatccggt

SEQ ID NO: 3291337 - DNA, 25 bp, Homo sapien
accggatctctcctgcttcagcggg

SEQ ID NO: 3291338 - DNA, 25 bp, Homo sapien
tcatgtactcttgccagccattttc

SEQ ID NO: 3291339 - DNA, 25 bp, Homo sapien
gacacagctgaggtccttgtagttc

SEQ ID NO: 3291340 - DNA, 25 bp, Homo sapien
ttttcagagctgcttgtcacatctt

SEQ ID NO: 3291341 - DNA, 25 bp, Homo sapien
cagagctgcttgtcacatcttcagt

SEQ ID NO: 3291342 - DNA, 25 bp, Homo sapien
tgaagtcttaaccaattcagtaagg

SEQ ID NO: 3291343 - DNA, 25 bp, Homo sapien
tgagtttaatgaggttgtcagctct

SEQ ID NO: 3291344 - DNA, 25 bp, Homo sapien
tgattgttctgaaaatccctttttg

SEQ ID NO: 3291345 - DNA, 25 bp, Homo sapien
taaccaattcagtaaggcaagaaaa

SEQ ID NO: 3291346 - DNA, 25 bp, Homo sapien
tattctgtggttagttatgccttga

SEQ ID NO: 3291347 - DNA, 25 bp, Homo sapien
cccctttagtattaattcttgccag

SEQ ID NO: 3291348 - DNA, 25 bp, Homo sapien
ctggtgttcactttggttaagcttc

SEQ ID NO: 3291349 - DNA, 25 bp, Homo sapien
catagtgttaaagctgtgtggtctc

SEQ ID NO: 3291350 - DNA, 25 bp, Homo sapien
aatgtgccatgatttccgaatttgc

SEQ ID NO: 3291351 - DNA, 25 bp, Homo sapien
cctatcttaatcatcagctcaactg

SEQ ID NO: 3291352 - DNA, 25 bp, Homo sapien
gagctaaaccattagggaagttcaa

SEQ ID NO: 3291353 - DNA, 25 bp, Homo sapien
tgttctctggagctaaaccattagg

SEQ ID NO: 3291354 - DNA, 25 bp, Homo sapien
ttattattgtacatgcataaccagg

SEQ ID NO: 3291355 - DNA, 25 bp, Homo sapien
gcatagaattaacactaggaacagt

SEQ ID NO: 3291356 - DNA, 25 bp, Homo sapien
gagggcactaatcttgtaggaaaca

SEQ ID NO: 3291357 - DNA, 25 bp, Homo sapien
taggaacagtgtcatgaaatctggg

SEQ ID NO: 3291358 - DNA, 25 bp, Homo sapien
acagacttgtatgtgatgggatggg

SEQ ID NO: 3291359 - DNA, 25 bp, Homo sapien
tcaaccagtggaaggaagtcataag

SEQ ID NO: 3291360 - DNA, 25 bp, Homo sapien
tgatggacaccctgaatgattcgat

SEQ ID NO: 3291361 - DNA, 25 bp, Homo sapien
tcagcatgcctcacattaaccaagg

SEQ ID NO: 3291362 - DNA, 25 bp, Homo sapien
tatttccccgctggctaatgaggct

SEQ ID NO: 3291363 - DNA, 25 bp, Homo sapien
cccagtggtctgtagtagtttccta

SEQ ID NO: 3291364 - DNA, 25 bp, Homo sapien
ctcccattcattttcgatgttcaaa

SEQ ID NO: 3291365 - DNA, 25 bp, Homo sapien
atttgtgccttaggagcctcaaaac

SEQ ID NO: 3291366 - DNA, 25 bp, Homo sapien
aaactcatggatttttgcctcccat

SEQ ID NO: 3291367 - DNA, 25 bp, Homo sapien
cctggtgcctctcacttcgttggtg

SEQ ID NO: 3291368 - DNA, 25 bp, Homo sapien
tactgtctggattaattaggcagcc

SEQ ID NO: 3291369 - DNA, 25 bp, Homo sapien
gatggttccagtatcagcatagtga

SEQ ID NO: 3291370 - DNA, 25 bp, Homo sapien
tgaagacagaggctagaaagcatcc

SEQ ID NO: 3291371 - DNA, 25 bp, Homo sapien
tttagtggattaaccagtccagacg

SEQ ID NO: 3291372 - DNA, 25 bp, Homo sapien
taagtggagacatatttcagtgatt

SEQ ID NO: 3291373 - DNA, 25 bp, Homo sapien
cttatgaactacagtggagctacac

SEQ ID NO: 3291374 - DNA, 25 bp, Homo sapien
ggagctacactcattgaaatgtaat

SEQ ID NO: 3291375 - DNA, 25 bp, Homo sapien
tgtatcctgccacttcgctattatc

SEQ ID NO: 3291376 - DNA, 25 bp, Homo sapien
ctgtcatctatgaagggagagaatt

SEQ ID NO: 3291377 - DNA, 25 bp, Homo sapien
tagtggtagaatttcgggttcttca

SEQ ID NO: 3291378 - DNA, 25 bp, Homo sapien
aacttccagtatgattctgaagagc

SEQ ID NO: 3291379 - DNA, 25 bp, Homo sapien
gaagagtagattgagatcctgaagt

SEQ ID NO: 3291380 - DNA, 25 bp, Homo sapien
aagtaagatctgctgtaaagtgcga

SEQ ID NO: 3291381 - DNA, 25 bp, Homo sapien
tgagatcctgaagtaagatctgctg

SEQ ID NO: 3291382 - DNA, 25 bp, Homo sapien
tgtaaagtgcgagggtgaattcctc

SEQ ID NO: 3291383 - DNA, 25 bp, Homo sapien
acagagtcctgaatgcattgaggta

SEQ ID NO: 3291384 - DNA, 25 bp, Homo sapien
tcttggtagctatcaaataccttgc

SEQ ID NO: 3291385 - DNA, 25 bp, Homo sapien
cacaaccattgatttccccatgaag

SEQ ID NO: 3291386 - DNA, 25 bp, Homo sapien
ggcctttactatgctcctggcttgc

SEQ ID NO: 3291387 - DNA, 25 bp, Homo sapien
gtggccttggccttggtgatagtgc

SEQ ID NO: 3291388 - DNA, 25 bp, Homo sapien
tagcctatactgtggccttggcctt

SEQ ID NO: 3291389 - DNA, 25 bp, Homo sapien
ttagcctatactgtggccttggcct

SEQ ID NO: 3291390 - DNA, 25 bp, Homo sapien
actgtggccttggccttggtgatag

SEQ ID NO: 3291391 - DNA, 25 bp, Homo sapien
tataaggcttgttgtctacaccagt

SEQ ID NO: 3291392 - DNA, 25 bp, Homo sapien
taaggcttgttgtctacaccagttt

SEQ ID NO: 3291393 - DNA, 25 bp, Homo sapien
ttataaggcttgttgtctacaccag

SEQ ID NO: 3291394 - DNA, 25 bp, Homo sapien
aggcttgttgtctacaccagttttc

SEQ ID NO: 3291395 - DNA, 25 bp, Homo sapien
tctaaaccagcaaggatgatgaagc

SEQ ID NO: 3291396 - DNA, 25 bp, Homo sapien
gctctaaaccagcaaggatgatgaa

SEQ ID NO: 3291397 - DNA, 25 bp, Homo sapien
tcagctctaaaccagcaaggatgat

SEQ ID NO: 3291398 - DNA, 25 bp, Homo sapien
cagctctaaaccagcaaggatgatg

SEQ ID NO: 3291399 - DNA, 25 bp, Homo sapien
gctgggctccgataagcctttaagt

SEQ ID NO: 3291400 - DNA, 25 bp, Homo sapien
ggttacagttgccatgagtccatcg

SEQ ID NO: 3291401 - DNA, 25 bp, Homo sapien
tgcttgctaggggttacagttgcca

SEQ ID NO: 3291402 - DNA, 25 bp, Homo sapien
gagtccatcgctgggctccgataag

SEQ ID NO: 3291403 - DNA, 25 bp, Homo sapien
tattgaagttatgatagaagccctc

SEQ ID NO: 3291404 - DNA, 25 bp, Homo sapien
ccaaggtggagcagatctctattac

SEQ ID NO: 3291405 - DNA, 25 bp, Homo sapien
tagctccaagccgagagacatctgc

SEQ ID NO: 3291406 - DNA, 25 bp, Homo sapien
tactgataagattagctctgcccca

SEQ ID NO: 3291407 - DNA, 25 bp, Homo sapien
tgcacttctcccctggatgaaccaa

SEQ ID NO: 3291408 - DNA, 25 bp, Homo sapien
ggtggaatgggtgaaatagcaactg

SEQ ID NO: 3291409 - DNA, 25 bp, Homo sapien
tatatcaacggtaggttttgcccta

SEQ ID NO: 3291410 - DNA, 25 bp, Homo sapien
ctatatcaacggtaggttttgccct

SEQ ID NO: 3291411 - DNA, 25 bp, Homo sapien
actggcctgaaggaactaattcagt

SEQ ID NO: 3291412 - DNA, 25 bp, Homo sapien
gcctgaaggaactaattcagtgcat

SEQ ID NO: 3291413 - DNA, 25 bp, Homo sapien
ttctttagagtactggcctgaagga

SEQ ID NO: 3291414 - DNA, 25 bp, Homo sapien
aaggaactaattcagtgcatttctc

SEQ ID NO: 3291415 - DNA, 25 bp, Homo sapien
ctcttctgatggtccaaggtgatct

SEQ ID NO: 3291416 - DNA, 25 bp, Homo sapien
cctcttctgatggtccaaggtgatc

SEQ ID NO: 3291417 - DNA, 25 bp, Homo sapien
tgtccaaataagtgtgtgcgcgcat

SEQ ID NO: 3291418 - DNA, 25 bp, Homo sapien
cttgagagaagttggcttatgtcca

SEQ ID NO: 3291419 - DNA, 25 bp, Homo sapien
gcttatgtccaaataagtgtgtgcg

SEQ ID NO: 3291420 - DNA, 25 bp, Homo sapien
gagaagttggcttatgtccaaataa

SEQ ID NO: 3291421 - DNA, 25 bp, Homo sapien
aagcaatctatgtgcacagttaaaa

SEQ ID NO: 3291422 - DNA, 25 bp, Homo sapien
ctccccgccgccgatgcccgggcgg

SEQ ID NO: 3291423 - DNA, 25 bp, Homo sapien
cgggcgctgcgcacagagcccaagc

SEQ ID NO: 3291424 - DNA, 25 bp, Homo sapien
gcggcgcggctcgaggcccctcccc

SEQ ID NO: 3291425 - DNA, 25 bp, Homo sapien
ggcgggcgctgcgcacagagcccaa

SEQ ID NO: 3291426 - DNA, 25 bp, Homo sapien
cagtaggccctgatggtaatctcat

SEQ ID NO: 3291427 - DNA, 25 bp, Homo sapien
aacaagagtgatatctggccatagc

SEQ ID NO: 3291428 - DNA, 25 bp, Homo sapien
tgcgatagaaatcgggtaacctttg

SEQ ID NO: 3291429 - DNA, 25 bp, Homo sapien
tcatttttcgctgagtgctggcagg

SEQ ID NO: 3291430 - DNA, 25 bp, Homo sapien
aaacaaatgcatccaggcgtgcctg

SEQ ID NO: 3291431 - DNA, 25 bp, Homo sapien
tggaagcaaggctcctttcggttct

SEQ ID NO: 3291432 - DNA, 25 bp, Homo sapien
tagtataccttgtgtgcttgacgca

SEQ ID NO: 3291433 - DNA, 25 bp, Homo sapien
gtatagctgttctgtggtactcaga

SEQ ID NO: 3291434 - DNA, 25 bp, Homo sapien
atgttagcagcgagtagggcctcat

SEQ ID NO: 3291435 - DNA, 25 bp, Homo sapien
gatgttagcagcgagtagggcctca

SEQ ID NO: 3291436 - DNA, 25 bp, Homo sapien
taaccaggggatagtgtccagctga

SEQ ID NO: 3291437 - DNA, 25 bp, Homo sapien
tgataagagcagttcataaccaggg

SEQ ID NO: 3291438 - DNA, 25 bp, Homo sapien
agtgttggtcttcaactatcccatc

SEQ ID NO: 3291439 - DNA, 25 bp, Homo sapien
cagctgagaagctcctcgaagtgtt

SEQ ID NO: 3291440 - DNA, 25 bp, Homo sapien
aggatggagtcactgtggcagatgc

SEQ ID NO: 3291441 - DNA, 25 bp, Homo sapien
ctggagagatgcaggatggagtcac

SEQ ID NO: 3291442 - DNA, 25 bp, Homo sapien
gatgcaggatggagtcactgtggca

SEQ ID NO: 3291443 - DNA, 25 bp, Homo sapien
tggagtcactgtggcagatgcagaa

SEQ ID NO: 3291444 - DNA, 25 bp, Homo sapien
gatgcctgctcataagatagataag

SEQ ID NO: 3291445 - DNA, 25 bp, Homo sapien
cctgctcataagatagataagatac

SEQ ID NO: 3291446 - DNA, 25 bp, Homo sapien
gtgatgcctgctcataagatagata

SEQ ID NO: 3291447 - DNA, 25 bp, Homo sapien
cataagatagataagatactggcag

SEQ ID NO: 3291448 - DNA, 25 bp, Homo sapien
gagttctttatctctattgttacta

SEQ ID NO: 3291449 - DNA, 25 bp, Homo sapien
tcaggaatggatctaggcagaatta

SEQ ID NO: 3291450 - DNA, 25 bp, Homo sapien
tctctaatgggctgttcactgagct

SEQ ID NO: 3291451 - DNA, 25 bp, Homo sapien
aggtttctcacttggttagattcgg

SEQ ID NO: 3291452 - DNA, 25 bp, Homo sapien
ctggtttagaaccatgaggattcac

SEQ ID NO: 3291453 - DNA, 25 bp, Homo sapien
caaccctggtttagaaccatgagga

SEQ ID NO: 3291454 - DNA, 25 bp, Homo sapien
tccaaccctggtttagaaccatgag

SEQ ID NO: 3291455 - DNA, 25 bp, Homo sapien
ccctggtttagaaccatgaggattc

SEQ ID NO: 3291456 - DNA, 25 bp, Homo sapien
caagttctgacatggtgctgtagga

SEQ ID NO: 3291457 - DNA, 25 bp, Homo sapien
tcaaggctctgaaccctcgggatga

SEQ ID NO: 3291458 - DNA, 25 bp, Homo sapien
gttgtggccccagaaagaccttcta

SEQ ID NO: 3291459 - DNA, 25 bp, Homo sapien
tcgggatgaagtctcctaaggtgtg

SEQ ID NO: 3291460 - DNA, 25 bp, Homo sapien
ccaagagcctgaatcctcacagccc

SEQ ID NO: 3291461 - DNA, 25 bp, Homo sapien
cccaagagcctgaatcctcacagcc

SEQ ID NO: 3291462 - DNA, 25 bp, Homo sapien
tggggcatccactgactaacagctg

SEQ ID NO: 3291463 - DNA, 25 bp, Homo sapien
gatattccctttcccgtgattgtcc

SEQ ID NO: 3291464 - DNA, 25 bp, Homo sapien
tgtcctgtggggtatcatcccttct

SEQ ID NO: 3291465 - DNA, 25 bp, Homo sapien
ccctttcccgtgattgtcctgtggg

SEQ ID NO: 3291466 - DNA, 25 bp, Homo sapien
agaggataaacatgcccgtcgccat

SEQ ID NO: 3291467 - DNA, 25 bp, Homo sapien
acagaggataaacatgcccgtcgcc

SEQ ID NO: 3291468 - DNA, 25 bp, Homo sapien
ggacagaggataaacatgcccgtcg

SEQ ID NO: 3291469 - DNA, 25 bp, Homo sapien
gaggggacagaggataaacatgccc

SEQ ID NO: 3291470 - DNA, 25 bp, Homo sapien
tgttgctggctgatctccgggagtc

SEQ ID NO: 3291471 - DNA, 25 bp, Homo sapien
tctccgggagtcatcactgctatca

SEQ ID NO: 3291472 - DNA, 25 bp, Homo sapien
ggaaggagatttgcttcgctttgtt

SEQ ID NO: 3291473 - DNA, 25 bp, Homo sapien
gctgattagggtgctcctgagctct

SEQ ID NO: 3291474 - DNA, 25 bp, Homo sapien
ttccagtagtactggctgtggtacg

SEQ ID NO: 3291475 - DNA, 25 bp, Homo sapien
tgacattcagagatacccaggaaag

SEQ ID NO: 3291476 - DNA, 25 bp, Homo sapien
ctgtggtacggattgggagatattc

SEQ ID NO: 3291477 - DNA, 25 bp, Homo sapien
ttagagtttgttgggaacttgcacc

SEQ ID NO: 3291478 - DNA, 25 bp, Homo sapien
ggaagcgagctagcttcgtatcccc

SEQ ID NO: 3291479 - DNA, 25 bp, Homo sapien
tgagagcgtggtgcactgagccatg

SEQ ID NO: 3291480 - DNA, 25 bp, Homo sapien
tattcccagtgtggcgtcagagctg

SEQ ID NO: 3291481 - DNA, 25 bp, Homo sapien
cctttcacagctgctattcccagtg

SEQ ID NO: 3291482 - DNA, 25 bp, Homo sapien
cagagaaatgggcagctgcttttgt

SEQ ID NO: 3291483 - DNA, 25 bp, Homo sapien
gtgaacattgttctgtgagcctggg

SEQ ID NO: 3291484 - DNA, 25 bp, Homo sapien
ccagaactgatggatttatgctagt

SEQ ID NO: 3291485 - DNA, 25 bp, Homo sapien
tccgggtaaatgaacagagtagctt

SEQ ID NO: 3291486 - DNA, 25 bp, Homo sapien
aactttcccatggataggagtctta

SEQ ID NO: 3291487 - DNA, 25 bp, Homo sapien
actttcccatggataggagtcttac

SEQ ID NO: 3291488 - DNA, 25 bp, Homo sapien
taactttcccatggataggagtctt

SEQ ID NO: 3291489 - DNA, 25 bp, Homo sapien
caaagtttctcttatgtctgccact

SEQ ID NO: 3291490 - DNA, 25 bp, Homo sapien
tgcactgagcgctgttggtttttcc

SEQ ID NO: 3291491 - DNA, 25 bp, Homo sapien
cacttttatagaggtgttgcgagca

SEQ ID NO: 3291492 - DNA, 25 bp, Homo sapien
tcttccatagccagccatgcactga

SEQ ID NO: 3291493 - DNA, 25 bp, Homo sapien
gataaagctggactaaggtccagct

SEQ ID NO: 3291494 - DNA, 25 bp, Homo sapien
gactaaggtccagctttaacaaaga

SEQ ID NO: 3291495 - DNA, 25 bp, Homo sapien
ggtccagctttaacaaagatgctac

SEQ ID NO: 3291496 - DNA, 25 bp, Homo sapien
gctggactaaggtccagctttaaca

SEQ ID NO: 3291497 - DNA, 25 bp, Homo sapien
tccaaggctgtcctcttggtagtct

SEQ ID NO: 3291498 - DNA, 25 bp, Homo sapien
aatccaaggctgtcctcttggtagt

SEQ ID NO: 3291499 - DNA, 25 bp, Homo sapien
caaggctgtcctcttggtagtctgc

SEQ ID NO: 3291500 - DNA, 25 bp, Homo sapien
caaatccaaggctgtcctcttggta

SEQ ID NO: 3291501 - DNA, 25 bp, Homo sapien
tcagaacatgtagaagtaacttctt

SEQ ID NO: 3291502 - DNA, 25 bp, Homo sapien
gttcagaacatgtagaagtaacttc

SEQ ID NO: 3291503 - DNA, 25 bp, Homo sapien
tgtgggcagattctgaacgggcttt

SEQ ID NO: 3291504 - DNA, 25 bp, Homo sapien
cgggcttttcccgttgctcatcagc

SEQ ID NO: 3291505 - DNA, 25 bp, Homo sapien
accaccagtgagcaggacacaacga

SEQ ID NO: 3291506 - DNA, 25 bp, Homo sapien
ccagtgagcaggacacaacgaagag

SEQ ID NO: 3291507 - DNA, 25 bp, Homo sapien
attgaccaccagtgagcaggacaca

SEQ ID NO: 3291508 - DNA, 25 bp, Homo sapien
gtgagcaggacacaacgaagaggca

SEQ ID NO: 3291509 - DNA, 25 bp, Homo sapien
ggcatgcagatctagattcaggagc

SEQ ID NO: 3291510 - DNA, 25 bp, Homo sapien
cccatgctgacaagccttccaggag

SEQ ID NO: 3291511 - DNA, 25 bp, Homo sapien
ggccactagcggcatgcagatctag

SEQ ID NO: 3291512 - DNA, 25 bp, Homo sapien
tgcccatgctgacaagccttccagg

SEQ ID NO: 3291513 - DNA, 25 bp, Homo sapien
catgagcagctctgtatgcagtgac

SEQ ID NO: 3291514 - DNA, 25 bp, Homo sapien
ggcagctgccgtctcttcatgagca

SEQ ID NO: 3291515 - DNA, 25 bp, Homo sapien
acgacaggcttgagatgaggcagtc

SEQ ID NO: 3291516 - DNA, 25 bp, Homo sapien
tgtatgcagtgacgacaggcttgag

SEQ ID NO: 3291517 - DNA, 25 bp, Homo sapien
ggctggcagcagcttctggaggggg

SEQ ID NO: 3291518 - DNA, 25 bp, Homo sapien
gggctggcagcagcttctggagggg

SEQ ID NO: 3291519 - DNA, 25 bp, Homo sapien
gctggcagcagcttctggagggggc

SEQ ID NO: 3291520 - DNA, 25 bp, Homo sapien
ggggctggcagcagcttctggaggg

SEQ ID NO: 3291521 - DNA, 25 bp, Homo sapien
aggccatctggtggatagcagaccc

SEQ ID NO: 3291522 - DNA, 25 bp, Homo sapien
tggtggatagcagacccccgcagcc

SEQ ID NO: 3291523 - DNA, 25 bp, Homo sapien
atctggtggatagcagacccccgca

SEQ ID NO: 3291524 - DNA, 25 bp, Homo sapien
ggccatctggtggatagcagacccc

SEQ ID NO: 3291525 - DNA, 25 bp, Homo sapien
gggccagtctgacggagttaggaga

SEQ ID NO: 3291526 - DNA, 25 bp, Homo sapien
tcatctgccaactccatagtcaggg

SEQ ID NO: 3291527 - DNA, 25 bp, Homo sapien
ctgacggagttaggagagggaagaa

SEQ ID NO: 3291528 - DNA, 25 bp, Homo sapien
tcttggggccagtctgacggagtta

SEQ ID NO: 3291529 - DNA, 25 bp, Homo sapien
gctattcgggctcttgcatagtgac

SEQ ID NO: 3291530 - DNA, 25 bp, Homo sapien
ggtgccccttgcaaagcccaataca

SEQ ID NO: 3291531 - DNA, 25 bp, Homo sapien
caatgtcatctccatgttgggcaca

SEQ ID NO: 3291532 - DNA, 25 bp, Homo sapien
tagcctgagctgcacagattgccag

SEQ ID NO: 3291533 - DNA, 25 bp, Homo sapien
tgactttgtcttccatgtgccgctg

SEQ ID NO: 3291534 - DNA, 25 bp, Homo sapien
actttgtcttccatgtgccgctgca

SEQ ID NO: 3291535 - DNA, 25 bp, Homo sapien
ttgactttgtcttccatgtgccgct

SEQ ID NO: 3291536 - DNA, 25 bp, Homo sapien
tttgtcttccatgtgccgctgcagg

SEQ ID NO: 3291537 - DNA, 25 bp, Homo sapien
tgctgctctggcatttgcactgtgg

SEQ ID NO: 3291538 - DNA, 25 bp, Homo sapien
ccactgcatttgtaggagttccctg

SEQ ID NO: 3291539 - DNA, 25 bp, Homo sapien
ttttggcttatctcgttcatcaggc

SEQ ID NO: 3291540 - DNA, 25 bp, Homo sapien
ccttcagatttgctgttgaaatttg

SEQ ID NO: 3291541 - DNA, 25 bp, Homo sapien
cagcaaactgttgcagggacagaaa

SEQ ID NO: 3291542 - DNA, 25 bp, Homo sapien
attctcagcaaactgttgcagggac

SEQ ID NO: 3291543 - DNA, 25 bp, Homo sapien
accaaacaccacatgttctcactca

SEQ ID NO: 3291544 - DNA, 25 bp, Homo sapien
tctcagcaaactgttgcagggacag

SEQ ID NO: 3291545 - DNA, 25 bp, Homo sapien
gggtgctgggcttgattaacattct

SEQ ID NO: 3291546 - DNA, 25 bp, Homo sapien
gacattgtgggctgatcgcttgatc

SEQ ID NO: 3291547 - DNA, 25 bp, Homo sapien
gatacaaggttaccactaacatggg

SEQ ID NO: 3291548 - DNA, 25 bp, Homo sapien
tacttctgaaacatatgggtgctgg

SEQ ID NO: 3291549 - DNA, 25 bp, Homo sapien
ggtgcagatctgggaccacatcctg

SEQ ID NO: 3291550 - DNA, 25 bp, Homo sapien
ctctgggagcaatcgaagtgtaggt

SEQ ID NO: 3291551 - DNA, 25 bp, Homo sapien
gcttggtttccttaatagagccacg

SEQ ID NO: 3291552 - DNA, 25 bp, Homo sapien
cttaatagagccacgcttgcaaagt

SEQ ID NO: 3291553 - DNA, 25 bp, Homo sapien
gcaacccgcaccttggatgatgacc

SEQ ID NO: 3291554 - DNA, 25 bp, Homo sapien
ttctgacactaaagtgcgcagcccg

SEQ ID NO: 3291555 - DNA, 25 bp, Homo sapien
ctcccagcgtgggatggctaagtaa

SEQ ID NO: 3291556 - DNA, 25 bp, Homo sapien
gcccgcttgagaactcagtgccctg

SEQ ID NO: 3291557 - DNA, 25 bp, Homo sapien
cttttaaggagtaagctctcatcat

SEQ ID NO: 3291558 - DNA, 25 bp, Homo sapien
tccttttaaggagtaagctctcatc

SEQ ID NO: 3291559 - DNA, 25 bp, Homo sapien
ccttttaaggagtaagctctcatca

SEQ ID NO: 3291560 - DNA, 25 bp, Homo sapien
gttccttttaaggagtaagctctca

SEQ ID NO: 3291561 - DNA, 25 bp, Homo sapien
cttcaaaggacctttgtacactagt

SEQ ID NO: 3291562 - DNA, 25 bp, Homo sapien
acactagttttattgggagggatga

SEQ ID NO: 3291563 - DNA, 25 bp, Homo sapien
gtgaggatatagtcctcttatatga

SEQ ID NO: 3291564 - DNA, 25 bp, Homo sapien
ttggtgaggatatagtcctcttata

SEQ ID NO: 3291565 - DNA, 25 bp, Homo sapien
gagataatgtacaactgtgggaaag

SEQ ID NO: 3291566 - DNA, 25 bp, Homo sapien
tacaactgtgggaaagttctagtag

SEQ ID NO: 3291567 - DNA, 25 bp, Homo sapien
tgtgttcctggtccagagataatgt

SEQ ID NO: 3291568 - DNA, 25 bp, Homo sapien
aaagttctagtagtgctgtactggg

SEQ ID NO: 3291569 - DNA, 25 bp, Homo sapien
tagcccagccatgacccataggaat

SEQ ID NO: 3291570 - DNA, 25 bp, Homo sapien
ttgtgtttttccaggtagcccagcc

SEQ ID NO: 3291571 - DNA, 25 bp, Homo sapien
aatctgacttcctccagtctgaatg

SEQ ID NO: 3291572 - DNA, 25 bp, Homo sapien
gaatgacatttctgataaaccggag

SEQ ID NO: 3291573 - DNA, 25 bp, Homo sapien
gaaccattgctctgtgctttgataa

SEQ ID NO: 3291574 - DNA, 25 bp, Homo sapien
tgctctgtgctttgataagagccct

SEQ ID NO: 3291575 - DNA, 25 bp, Homo sapien
gctttgataagagccctgacatctc

SEQ ID NO: 3291576 - DNA, 25 bp, Homo sapien
tctgtgctttgataagagccctgac

SEQ ID NO: 3291577 - DNA, 25 bp, Homo sapien
ccgttagtggagctatcagtgtccc

SEQ ID NO: 3291578 - DNA, 25 bp, Homo sapien
ttgcttcttactagcgacctttctg

SEQ ID NO: 3291579 - DNA, 25 bp, Homo sapien
gacctttctgaagtcgactaccacg

SEQ ID NO: 3291580 - DNA, 25 bp, Homo sapien
gactaccacgagatggagcaccgtt

SEQ ID NO: 3291581 - DNA, 25 bp, Homo sapien
gatagtaggaagtcttgtgctgagc

SEQ ID NO: 3291582 - DNA, 25 bp, Homo sapien
gctgagatagtaggaagtcttgtgc

SEQ ID NO: 3291583 - DNA, 25 bp, Homo sapien
atgagcacttatgaagttcccaagg

SEQ ID NO: 3291584 - DNA, 25 bp, Homo sapien
gaagtcttgtgctgagctctaaagg

SEQ ID NO: 3291585 - DNA, 25 bp, Homo sapien
gaatccacctatgacagctttcaga

SEQ ID NO: 3291586 - DNA, 25 bp, Homo sapien
agttcagatccgtcagagggatgcc

SEQ ID NO: 3291587 - DNA, 25 bp, Homo sapien
gataggccaatggtccaattagtac

SEQ ID NO: 3291588 - DNA, 25 bp, Homo sapien
taactatctcatagccacaggcaat

SEQ ID NO: 3291589 - DNA, 25 bp, Homo sapien
cataagttacaatatccagtaaatt

SEQ ID NO: 3291590 - DNA, 25 bp, Homo sapien
caatttccagaatacataagttaca

SEQ ID NO: 3291591 - DNA, 25 bp, Homo sapien
tagaaactactatcagtttgtggtg

SEQ ID NO: 3291592 - DNA, 25 bp, Homo sapien
gaaactactatcagtttgtggtggg

SEQ ID NO: 3291593 - DNA, 25 bp, Homo sapien
atttttatggaagggctgccatgtt

SEQ ID NO: 3291594 - DNA, 25 bp, Homo sapien
gacactgtagtctttgctgaaaaca

SEQ ID NO: 3291595 - DNA, 25 bp, Homo sapien
cactgtagtctttgctgaaaacaat

SEQ ID NO: 3291596 - DNA, 25 bp, Homo sapien
acactgtagtctttgctgaaaacaa

SEQ ID NO: 3291597 - DNA, 25 bp, Homo sapien
acaggccatgccaactgatccagtt

SEQ ID NO: 3291598 - DNA, 25 bp, Homo sapien
cttcaatttgccttcgtcaacatcc

SEQ ID NO: 3291599 - DNA, 25 bp, Homo sapien
ttaataagatgctgagagcacaggc

SEQ ID NO: 3291600 - DNA, 25 bp, Homo sapien
cacaaaggcaagtttatcacccaaa

SEQ ID NO: 3291601 - DNA, 25 bp, Homo sapien
gcaagttcaagcttgacagtcacca

SEQ ID NO: 3291602 - DNA, 25 bp, Homo sapien
ctataatggagatcttattgggatg

SEQ ID NO: 3291603 - DNA, 25 bp, Homo sapien
tgagcggccccctccaaagtgaaat

SEQ ID NO: 3291604 - DNA, 25 bp, Homo sapien
aagtgaaattcttggcaagttcaag

SEQ ID NO: 3291605 - DNA, 25 bp, Homo sapien
cataatcaaaaactcttcatgttta

SEQ ID NO: 3291606 - DNA, 25 bp, Homo sapien
gtacataatcaaaaactcttcatgt

SEQ ID NO: 3291607 - DNA, 25 bp, Homo sapien
acataatcaaaaactcttcatgttt

SEQ ID NO: 3291608 - DNA, 25 bp, Homo sapien
tacataatcaaaaactcttcatgtt

SEQ ID NO: 3291609 - DNA, 25 bp, Homo sapien
ttcttcagcagctgtacatttgagt

SEQ ID NO: 3291610 - DNA, 25 bp, Homo sapien
tacatttgagtattttagtacttga

SEQ ID NO: 3291611 - DNA, 25 bp, Homo sapien
tttcttcagcagctgtacatttgag

SEQ ID NO: 3291612 - DNA, 25 bp, Homo sapien
agtattttagtacttgaattatggg

SEQ ID NO: 3291613 - DNA, 25 bp, Homo sapien
ttccactcgttctggctcccattac

SEQ ID NO: 3291614 - DNA, 25 bp, Homo sapien
tccactcgttctggctcccattacc

SEQ ID NO: 3291615 - DNA, 25 bp, Homo sapien
attccactcgttctggctcccatta

SEQ ID NO: 3291616 - DNA, 25 bp, Homo sapien
tatgaacaacagcaggcaaacctag

SEQ ID NO: 3291617 - DNA, 25 bp, Homo sapien
tgttggcatcataacctggtatagc

SEQ ID NO: 3291618 - DNA, 25 bp, Homo sapien
gacaacagtgatccatcccagaaaa

SEQ ID NO: 3291619 - DNA, 25 bp, Homo sapien
caaacctaggaatactgaagatgga

SEQ ID NO: 3291620 - DNA, 25 bp, Homo sapien
tgtcccagtcctacaatgtgaaaag

SEQ ID NO: 3291621 - DNA, 25 bp, Homo sapien
ccagtgaaacttttagagccagaag

SEQ ID NO: 3291622 - DNA, 25 bp, Homo sapien
tcatggctggtacatattcgtacgc

SEQ ID NO: 3291623 - DNA, 25 bp, Homo sapien
tgaagtagatcaacatggtggaaca

SEQ ID NO: 3291624 - DNA, 25 bp, Homo sapien
gccaagtggaataaagcaagacaat

SEQ ID NO: 3291625 - DNA, 25 bp, Homo sapien
gtgttacccaagattccttctatga

SEQ ID NO: 3291626 - DNA, 25 bp, Homo sapien
tttgatggcacacatccatggcttg

SEQ ID NO: 3291627 - DNA, 25 bp, Homo sapien
tatacaaacaattaggccaagtgga

SEQ ID NO: 3291628 - DNA, 25 bp, Homo sapien
gatttgactgtgctgcgtccacatt

SEQ ID NO: 3291629 - DNA, 25 bp, Homo sapien
tttgactaggatttgactgtgctgc

SEQ ID NO: 3291630 - DNA, 25 bp, Homo sapien
tcttttgactaggatttgactgtgc

SEQ ID NO: 3291631 - DNA, 25 bp, Homo sapien
actaggatttgactgtgctgcgtcc

SEQ ID NO: 3291632 - DNA, 25 bp, Homo sapien
actctgtccatctatcactgcactt

SEQ ID NO: 3291633 - DNA, 25 bp, Homo sapien
tgcaccttcttgagagcaaacacca

SEQ ID NO: 3291634 - DNA, 25 bp, Homo sapien
tatcactgcacttgtactgtgccac

SEQ ID NO: 3291635 - DNA, 25 bp, Homo sapien
gtactgtgccacatgctctttgatt

SEQ ID NO: 3291636 - DNA, 25 bp, Homo sapien
tggtttcttatgatctgctctgtct

SEQ ID NO: 3291637 - DNA, 25 bp, Homo sapien
gggctgcatcccctgctgcatttgc

SEQ ID NO: 3291638 - DNA, 25 bp, Homo sapien
ccctgctgcatttgccctggcttgg

SEQ ID NO: 3291639 - DNA, 25 bp, Homo sapien
gctccctatcagcactaatattttg

SEQ ID NO: 3291640 - DNA, 25 bp, Homo sapien
actggagaggattccatgaagtgtt

SEQ ID NO: 3291641 - DNA, 25 bp, Homo sapien
ttttacagcatcttagactggagag

SEQ ID NO: 3291642 - DNA, 25 bp, Homo sapien
cattgtatgaagatattgtagctag

SEQ ID NO: 3291643 - DNA, 25 bp, Homo sapien
gaagatattgtagctagaaaaagta

SEQ ID NO: 3291644 - DNA, 25 bp, Homo sapien
ttgatagcaaatcatcatacttgtc

SEQ ID NO: 3291645 - DNA, 25 bp, Homo sapien
tcagtggttttgcttaggttaggtc

SEQ ID NO: 3291646 - DNA, 25 bp, Homo sapien
ggatatcttctcctattttaattag

SEQ ID NO: 3291647 - DNA, 25 bp, Homo sapien
gatatcttctcctattttaattagt

SEQ ID NO: 3291648 - DNA, 25 bp, Homo sapien
taggatatcttctcctattttaatt

SEQ ID NO: 3291649 - DNA, 25 bp, Homo sapien
cttaggatatcttctcctattttaa

SEQ ID NO: 3291650 - DNA, 25 bp, Homo sapien
caaagttaataaacatgcttcagga

SEQ ID NO: 3291651 - DNA, 25 bp, Homo sapien
ctacaggatattcttcaattcagca

SEQ ID NO: 3291652 - DNA, 25 bp, Homo sapien
tacaggatattcttcaattcagcat

SEQ ID NO: 3291653 - DNA, 25 bp, Homo sapien
caggatattcttcaattcagcatca

SEQ ID NO: 3291654 - DNA, 25 bp, Homo sapien
ggatattcttcaattcagcatcaat

SEQ ID NO: 3291655 - DNA, 25 bp, Homo sapien
aaagattctgccatgttaagtggag

SEQ ID NO: 3291656 - DNA, 25 bp, Homo sapien
gattggagtgcatacgttcttaaaa

SEQ ID NO: 3291657 - DNA, 25 bp, Homo sapien
gccaagttacaataacaccaggaaa

SEQ ID NO: 3291658 - DNA, 25 bp, Homo sapien
caggaaaagcctgtcacataatggc

SEQ ID NO: 3291659 - DNA, 25 bp, Homo sapien
agtgcttgttaaccagctttgccag

SEQ ID NO: 3291660 - DNA, 25 bp, Homo sapien
tgccagttccgtgggtgtggcatca

SEQ ID NO: 3291661 - DNA, 25 bp, Homo sapien
aattttgcttttagtcgctctgcca

SEQ ID NO: 3291662 - DNA, 25 bp, Homo sapien
ggtgtggcatcaggcaattttgctt

SEQ ID NO: 3291663 - DNA, 25 bp, Homo sapien
gcctcttcgagatcataaaaataaa

SEQ ID NO: 3291664 - DNA, 25 bp, Homo sapien
aataaacatacaaatcgctgctgaa

SEQ ID NO: 3291665 - DNA, 25 bp, Homo sapien
caagaaaattctatacctgtggtat

SEQ ID NO: 3291666 - DNA, 25 bp, Homo sapien
cctgtggtatagaatagtcaatttg

SEQ ID NO: 3291667 - DNA, 25 bp, Homo sapien
gaaaacaccaatacaggagtaagga

SEQ ID NO: 3291668 - DNA, 25 bp, Homo sapien
ctttcaggatggtgataagacttga

SEQ ID NO: 3291669 - DNA, 25 bp, Homo sapien
taatctagagttgggcttggcaaga

SEQ ID NO: 3291670 - DNA, 25 bp, Homo sapien
tgtacaatcgatgatctcggcgtct

SEQ ID NO: 3291671 - DNA, 25 bp, Homo sapien
cttgtcaatgaaagaagatagttcc

SEQ ID NO: 3291672 - DNA, 25 bp, Homo sapien
aagaagatagttccttctttagtag

SEQ ID NO: 3291673 - DNA, 25 bp, Homo sapien
tgtcaatgaaagaagatagttcctt

SEQ ID NO: 3291674 - DNA, 25 bp, Homo sapien
tcaatgaaagaagatagttccttct

SEQ ID NO: 3291675 - DNA, 25 bp, Homo sapien
ctgaggaatacttccggaagatgag

SEQ ID NO: 3291676 - DNA, 25 bp, Homo sapien
gagtcttcaacatcacagcattcac

SEQ ID NO: 3291677 - DNA, 25 bp, Homo sapien
tagggttggctcaagtaccttactg

SEQ ID NO: 3291678 - DNA, 25 bp, Homo sapien
gagtccttctgcttagttcaaatgt

SEQ ID NO: 3291679 - DNA, 25 bp, Homo sapien
tttttcttgacaacagtcttcaaac

SEQ ID NO: 3291680 - DNA, 25 bp, Homo sapien
ggtgtttcctggatcacacacatct

SEQ ID NO: 3291681 - DNA, 25 bp, Homo sapien
gttttttcttgacaacagtcttcaa

SEQ ID NO: 3291682 - DNA, 25 bp, Homo sapien
cacacacatctttgtttgtgggcaa

SEQ ID NO: 3291683 - DNA, 25 bp, Homo sapien
ttcagctagtggcaaaacatcctcc

SEQ ID NO: 3291684 - DNA, 25 bp, Homo sapien
ctccagatcagcagtaggcactttt

SEQ ID NO: 3291685 - DNA, 25 bp, Homo sapien
agaggatgttagtaatatcttcagc

SEQ ID NO: 3291686 - DNA, 25 bp, Homo sapien
tttttgggctaactttatgagattg

SEQ ID NO: 3291687 - DNA, 25 bp, Homo sapien
ccccatccaattattatactaacta

SEQ ID NO: 3291688 - DNA, 25 bp, Homo sapien
tccaattattatactaactaggcct

SEQ ID NO: 3291689 - DNA, 25 bp, Homo sapien
catccaattattatactaactaggc

SEQ ID NO: 3291690 - DNA, 25 bp, Homo sapien
ccaattattatactaactaggcctg

SEQ ID NO: 3291691 - DNA, 25 bp, Homo sapien
gcctgttgcagcaacgtgagctgga

SEQ ID NO: 3291692 - DNA, 25 bp, Homo sapien
ggatgagacattgtactgtggactt

SEQ ID NO: 3291693 - DNA, 25 bp, Homo sapien
ttggatgagacattgtactgtggac

SEQ ID NO: 3291694 - DNA, 25 bp, Homo sapien
gcaacgtgagctggatatgagacat

SEQ ID NO: 3291695 - DNA, 25 bp, Homo sapien
cctaatattatggatagacagtgca

SEQ ID NO: 3291696 - DNA, 25 bp, Homo sapien
gacagtgcagaaccaaacatctaaa

SEQ ID NO: 3291697 - DNA, 25 bp, Homo sapien
aaagaaaacgagaatttggccagat

SEQ ID NO: 3291698 - DNA, 25 bp, Homo sapien
gatttttggagattattggagctga

SEQ ID NO: 3291699 - DNA, 25 bp, Homo sapien
cagactctatttgacagagtggtga

SEQ ID NO: 3291700 - DNA, 25 bp, Homo sapien
gacagagtggtgagaagtgataaat

SEQ ID NO: 3291701 - DNA, 25 bp, Homo sapien
gcagcatattgtgagcagactctat

SEQ ID NO: 3291702 - DNA, 25 bp, Homo sapien
tgtgagcagactctatttgacagag

SEQ ID NO: 3291703 - DNA, 25 bp, Homo sapien
aaaagcatacagttgggcttgcaga

SEQ ID NO: 3291704 - DNA, 25 bp, Homo sapien
aaaaagcatacagttgggcttgcag

SEQ ID NO: 3291705 - DNA, 25 bp, Homo sapien
aagcatacagttgggcttgcagagg

SEQ ID NO: 3291706 - DNA, 25 bp, Homo sapien
aaagcatacagttgggcttgcagag

SEQ ID NO: 3291707 - DNA, 25 bp, Homo sapien
gtaactgactaaaagtgacagagga

SEQ ID NO: 3291708 - DNA, 25 bp, Homo sapien
cagaggagcttgtccgtaattagtg

SEQ ID NO: 3291709 - DNA, 25 bp, Homo sapien
ccgtaattagtggaatattcccaca

SEQ ID NO: 3291710 - DNA, 25 bp, Homo sapien
gaaagataactcttggtgtaactga

SEQ ID NO: 3291711 - DNA, 25 bp, Homo sapien
tccacgtaggtagggaattcctgtg

SEQ ID NO: 3291712 - DNA, 25 bp, Homo sapien
cagccatgcagagctttcgttccag

SEQ ID NO: 3291713 - DNA, 25 bp, Homo sapien
ttcacaggacttggcagacagtgct

SEQ ID NO: 3291714 - DNA, 25 bp, Homo sapien
tttggtgcagcactcagcagtgcct

SEQ ID NO: 3291715 - DNA, 25 bp, Homo sapien
gacctgttcaaacgtgccactggga

SEQ ID NO: 3291716 - DNA, 25 bp, Homo sapien
ttccgcacagcaggcttcggtcaag

SEQ ID NO: 3291717 - DNA, 25 bp, Homo sapien
ccttcacaagttggctgacctgttc

SEQ ID NO: 3291718 - DNA, 25 bp, Homo sapien
ttcggtcaaggagacaacttccttc

SEQ ID NO: 3291719 - DNA, 25 bp, Homo sapien
ctttcccagatgggagaattccttg

SEQ ID NO: 3291720 - DNA, 25 bp, Homo sapien
tttcccagatgggagaattccttgc

SEQ ID NO: 3291721 - DNA, 25 bp, Homo sapien
tcctttcccagatgggagaattcct

SEQ ID NO: 3291722 - DNA, 25 bp, Homo sapien
tcttctctcataacaggccacaatt

SEQ ID NO: 3291723 - DNA, 25 bp, Homo sapien
tccacgtggcctacaatgaaagtcg

SEQ ID NO: 3291724 - DNA, 25 bp, Homo sapien
ccccttttgatgaatattatgttac

SEQ ID NO: 3291725 - DNA, 25 bp, Homo sapien
catgtataaagtgatcttccacgtg

SEQ ID NO: 3291726 - DNA, 25 bp, Homo sapien
ttcctgctgctatctctcttactag

SEQ ID NO: 3291727 - DNA, 25 bp, Homo sapien
attttttgcccattgagttgagttt

SEQ ID NO: 3291728 - DNA, 25 bp, Homo sapien
catgctgcccattgaattttttgcc

SEQ ID NO: 3291729 - DNA, 25 bp, Homo sapien
gcccattgagttgagtttttcctgc

SEQ ID NO: 3291730 - DNA, 25 bp, Homo sapien
tgcaaataagcccaggaaatttccc

SEQ ID NO: 3291731 - DNA, 25 bp, Homo sapien
tgagttcattcacgctacagggaag

SEQ ID NO: 3291732 - DNA, 25 bp, Homo sapien
tacagggaagagctagttactaatc

SEQ ID NO: 3291733 - DNA, 25 bp, Homo sapien
tcacatatgtaatagggcggacaca

SEQ ID NO: 3291734 - DNA, 25 bp, Homo sapien
gtcatctcaggtgatatgatggtaa

SEQ ID NO: 3291735 - DNA, 25 bp, Homo sapien
taactgctgtcaggctttaatccca

SEQ ID NO: 3291736 - DNA, 25 bp, Homo sapien
taagggttgggaaagtcatctcagg

SEQ ID NO: 3291737 - DNA, 25 bp, Homo sapien
ctcaggtgatatgatggtaactgct

SEQ ID NO: 3291738 - DNA, 25 bp, Homo sapien
ctgaatcctgaatctgatgttattc

SEQ ID NO: 3291739 - DNA, 25 bp, Homo sapien
gaatcctgaatctgatgttattctg

SEQ ID NO: 3291740 - DNA, 25 bp, Homo sapien
atcctgaatctgatgttattctggc

SEQ ID NO: 3291741 - DNA, 25 bp, Homo sapien
cctgaatctgatgttattctggcaa

SEQ ID NO: 3291742 - DNA, 25 bp, Homo sapien
tactcactagacgtttgctaataga

SEQ ID NO: 3291743 - DNA, 25 bp, Homo sapien
aaggtgagcagattggttgaaagac

SEQ ID NO: 3291744 - DNA, 25 bp, Homo sapien
gacagagacttgaagtaatactcac

SEQ ID NO: 3291745 - DNA, 25 bp, Homo sapien
caggcgctttggtcttagtagtgac

SEQ ID NO: 3291746 - DNA, 25 bp, Homo sapien
caggttagcaaacccaaatgctcat

SEQ ID NO: 3291747 - DNA, 25 bp, Homo sapien
tattttaccatgacacccaggttag

SEQ ID NO: 3291748 - DNA, 25 bp, Homo sapien
ggagtgacaattcagctccagttca

SEQ ID NO: 3291749 - DNA, 25 bp, Homo sapien
aatgctcataggatctaggaaccac

SEQ ID NO: 3291750 - DNA, 25 bp, Homo sapien
tctgaacctgcttcagtaggatttt

SEQ ID NO: 3291751 - DNA, 25 bp, Homo sapien
tgatctgaacctgcttcagtaggat

SEQ ID NO: 3291752 - DNA, 25 bp, Homo sapien
gaacctgcttcagtaggatttttca

SEQ ID NO: 3291753 - DNA, 25 bp, Homo sapien
accctgatctgaacctgcttcagta

SEQ ID NO: 3291754 - DNA, 25 bp, Homo sapien
tctctctaaagcatgtccaaatgcc

SEQ ID NO: 3291755 - DNA, 25 bp, Homo sapien
gcaagcagtagtaccaggaccctct

SEQ ID NO: 3291756 - DNA, 25 bp, Homo sapien
tgccacagcaagcagtagtaccagg

SEQ ID NO: 3291757 - DNA, 25 bp, Homo sapien
agcatgtccaaatgccacagcaagc

SEQ ID NO: 3291758 - DNA, 25 bp, Homo sapien
tctaccagagagtcttgcagcacct

SEQ ID NO: 3291759 - DNA, 25 bp, Homo sapien
ctaccagagagtcttgcagcacctc

SEQ ID NO: 3291760 - DNA, 25 bp, Homo sapien
ttttctaccagagagtcttgcagca

SEQ ID NO: 3291761 - DNA, 25 bp, Homo sapien
tttctaccagagagtcttgcagcac

SEQ ID NO: 3291762 - DNA, 25 bp, Homo sapien
ctttttacaaagattcctgactatg

SEQ ID NO: 3291763 - DNA, 25 bp, Homo sapien
ctgtaggtgaccatgtaaaagtggt

SEQ ID NO: 3291764 - DNA, 25 bp, Homo sapien
accatgtaaaagtggtagccaaaag

SEQ ID NO: 3291765 - DNA, 25 bp, Homo sapien
gtgaccatgtaaaagtggtagccaa

SEQ ID NO: 3291766 - DNA, 25 bp, Homo sapien
ccctggggatactgtagtggaaaat

SEQ ID NO: 3291767 - DNA, 25 bp, Homo sapien
tcaaggtaaatagacaccctgggga

SEQ ID NO: 3291768 - DNA, 25 bp, Homo sapien
gtggaaaatctaggagattttaatc

SEQ ID NO: 3291769 - DNA, 25 bp, Homo sapien
agccaaggtatatagattattttcc

SEQ ID NO: 3291770 - DNA, 25 bp, Homo sapien
ttattcaactgtatttcgtcatctt

SEQ ID NO: 3291771 - DNA, 25 bp, Homo sapien
ctgtatttcgtcatcttctgattag

SEQ ID NO: 3291772 - DNA, 25 bp, Homo sapien
caactgtatttcgtcatcttctgat

SEQ ID NO: 3291773 - DNA, 25 bp, Homo sapien
ttcaactgtatttcgtcatcttctg

SEQ ID NO: 3291774 - DNA, 25 bp, Homo sapien
actctgatttggctgaacataaaaa

SEQ ID NO: 3291775 - DNA, 25 bp, Homo sapien
tctgatttggctgaacataaaaaga

SEQ ID NO: 3291776 - DNA, 25 bp, Homo sapien
ctctgatttggctgaacataaaaag

SEQ ID NO: 3291777 - DNA, 25 bp, Homo sapien
gtactctgatttggctgaacataaa

SEQ ID NO: 3291778 - DNA, 25 bp, Homo sapien
aatctgacattgagccaaagtggaa

SEQ ID NO: 3291779 - DNA, 25 bp, Homo sapien
tatgttggcatgctttcaggcggtt

SEQ ID NO: 3291780 - DNA, 25 bp, Homo sapien
gcatgtagagtggtctgccagcagt

SEQ ID NO: 3291781 - DNA, 25 bp, Homo sapien
catgtgcccagcctatggagtgaaa

SEQ ID NO: 3291782 - DNA, 25 bp, Homo sapien
tcactcggttataggctctggagcc

SEQ ID NO: 3291783 - DNA, 25 bp, Homo sapien
ttttagatgtcactcggttataggc

SEQ ID NO: 3291784 - DNA, 25 bp, Homo sapien
gatgtcactcggttataggctctgg

SEQ ID NO: 3291785 - DNA, 25 bp, Homo sapien
tctgtttttagatgtcactcggtta

SEQ ID NO: 3291786 - DNA, 25 bp, Homo sapien
aaattttccacatgagtctaagatg

SEQ ID NO: 3291787 - DNA, 25 bp, Homo sapien
catgagtctaagatgcagcagagtt

SEQ ID NO: 3291788 - DNA, 25 bp, Homo sapien
tgggatccaagcattggtgttttct

SEQ ID NO: 3291789 - DNA, 25 bp, Homo sapien
taaattagtctcccaggagtgggat

SEQ ID NO: 3291790 - DNA, 25 bp, Homo sapien
tcatggtagtgaaaacttcagcccc

SEQ ID NO: 3291791 - DNA, 25 bp, Homo sapien
aaacactccggctgtcaagtccatt

SEQ ID NO: 3291792 - DNA, 25 bp, Homo sapien
ccggctgtcaagtccattagatgtg

SEQ ID NO: 3291793 - DNA, 25 bp, Homo sapien
cattagatgtgacaactcatggtag

SEQ ID NO: 3291794 - DNA, 25 bp, Homo sapien
tcaactgagaagagtttctttttct

SEQ ID NO: 3291795 - DNA, 25 bp, Homo sapien
gaagagtttctttttctccagtctg

SEQ ID NO: 3291796 - DNA, 25 bp, Homo sapien
gagaagagtttctttttctccagtc

SEQ ID NO: 3291797 - DNA, 25 bp, Homo sapien
agagtttctttttctccagtctgtc

SEQ ID NO: 3291798 - DNA, 25 bp, Homo sapien
gatattcagataagattggtcccat

SEQ ID NO: 3291799 - DNA, 25 bp, Homo sapien
ccattcattgtacaacaaccatgat

SEQ ID NO: 3291800 - DNA, 25 bp, Homo sapien
tcattgtacaacaaccatgatattc

SEQ ID NO: 3291801 - DNA, 25 bp, Homo sapien
attgtacaacaaccatgatattcag

SEQ ID NO: 3291802 - DNA, 25 bp, Homo sapien
ggattctcctctagatttatagtgg

SEQ ID NO: 3291803 - DNA, 25 bp, Homo sapien
tctcctctagatttatagtggagac

SEQ ID NO: 3291804 - DNA, 25 bp, Homo sapien
tgttttatatcaggtaaggattctc

SEQ ID NO: 3291805 - DNA, 25 bp, Homo sapien
tttgttttatatcaggtaaggattc

SEQ ID NO: 3291806 - DNA, 25 bp, Homo sapien
gctgaatactagaatctatcctaga

SEQ ID NO: 3291807 - DNA, 25 bp, Homo sapien
gcaattgcttggtaagcatgctgaa

SEQ ID NO: 3291808 - DNA, 25 bp, Homo sapien
atcttccgctgattcttaggtactg

SEQ ID NO: 3291809 - DNA, 25 bp, Homo sapien
cttaggtactgtcaagttggagaac

SEQ ID NO: 3291810 - DNA, 25 bp, Homo sapien
tccagaacctttgtcacacgaggga

SEQ ID NO: 3291811 - DNA, 25 bp, Homo sapien
cacataactcgactgtgaagggaga

SEQ ID NO: 3291812 - DNA, 25 bp, Homo sapien
aagttgctgttgctactctttccag

SEQ ID NO: 3291813 - DNA, 25 bp, Homo sapien
tgctgctggtcacaaatccatagtg

SEQ ID NO: 3291814 - DNA, 25 bp, Homo sapien
tcctccttaagtgtctgcccatcaa

SEQ ID NO: 3291815 - DNA, 25 bp, Homo sapien
gacaaggctcttttgagtaaaaaca

SEQ ID NO: 3291816 - DNA, 25 bp, Homo sapien
gaaatgctgcttaatgccagacact

SEQ ID NO: 3291817 - DNA, 25 bp, Homo sapien
gaaacatctggtgactttaacttac

SEQ ID NO: 3291818 - DNA, 25 bp, Homo sapien
caggtcccaagccatagtcttcata

SEQ ID NO: 3291819 - DNA, 25 bp, Homo sapien
cagctatgggaacttctcacttcag

SEQ ID NO: 3291820 - DNA, 25 bp, Homo sapien
cacttcaggtcccaagccatagtct

SEQ ID NO: 3291821 - DNA, 25 bp, Homo sapien
tcagctatgggaacttctcacttca

SEQ ID NO: 3291822 - DNA, 25 bp, Homo sapien
tgttaagttggctgtgttgctgagc

SEQ ID NO: 3291823 - DNA, 25 bp, Homo sapien
tccctcccatgttaagttggctgtg

SEQ ID NO: 3291824 - DNA, 25 bp, Homo sapien
agctctgtccctcccatgttaagtt

SEQ ID NO: 3291825 - DNA, 25 bp, Homo sapien
tgtgttgctgagctccgaccacggg

SEQ ID NO: 3291826 - DNA, 25 bp, Homo sapien
tccgtgatgcttctaagcaatgatc

SEQ ID NO: 3291827 - DNA, 25 bp, Homo sapien
tttatccgtgatgcttctaagcaat

SEQ ID NO: 3291828 - DNA, 25 bp, Homo sapien
tctaaactgtttttatccgtgatgc

SEQ ID NO: 3291829 - DNA, 25 bp, Homo sapien
gcttctaagcaatgatctttgtgta

SEQ ID NO: 3291830 - DNA, 25 bp, Homo sapien
atcaggtttctgagctgcgtacagg

SEQ ID NO: 3291831 - DNA, 25 bp, Homo sapien
ggacaccagagtccttattgaaggc

SEQ ID NO: 3291832 - DNA, 25 bp, Homo sapien
aggtttctgagctgcgtacaggaca

SEQ ID NO: 3291833 - DNA, 25 bp, Homo sapien
cagagtccttattgaaggcgtttgg

SEQ ID NO: 3291834 - DNA, 25 bp, Homo sapien
agtgccgccctaggtcaaatttagg

SEQ ID NO: 3291835 - DNA, 25 bp, Homo sapien
gagtgagatagggtttccagacaat

SEQ ID NO: 3291836 - DNA, 25 bp, Homo sapien
ttcttctgtcaaaccatcaggcatt

SEQ ID NO: 3291837 - DNA, 25 bp, Homo sapien
gatagggtttccagacaataccatt

SEQ ID NO: 3291838 - DNA, 25 bp, Homo sapien
aagcctttggctaaaatcttccctg

SEQ ID NO: 3291839 - DNA, 25 bp, Homo sapien
ttgtccttgggtagccgtttatatc

SEQ ID NO: 3291840 - DNA, 25 bp, Homo sapien
agcctttggctaaaatcttccctgt

SEQ ID NO: 3291841 - DNA, 25 bp, Homo sapien
tgggtagccgtttatatcatttata

SEQ ID NO: 3291842 - DNA, 25 bp, Homo sapien
caggaaggtgtggaaccagtgtctt

SEQ ID NO: 3291843 - DNA, 25 bp, Homo sapien
aacactttctatctgctgaagctca

SEQ ID NO: 3291844 - DNA, 25 bp, Homo sapien
catagagctgactgtcactgctgga

SEQ ID NO: 3291845 - DNA, 25 bp, Homo sapien
ctatctgctgaagctcatagagctg

SEQ ID NO: 3291846 - DNA, 25 bp, Homo sapien
tgaattgctttactaaaagcctggt

SEQ ID NO: 3291847 - DNA, 25 bp, Homo sapien
agattctatgaattgctttactaaa

SEQ ID NO: 3291848 - DNA, 25 bp, Homo sapien
atgaattgctttactaaaagcctgg

SEQ ID NO: 3291849 - DNA, 25 bp, Homo sapien
ctgagattctatgaattgctttact

SEQ ID NO: 3291850 - DNA, 25 bp, Homo sapien
cctgagtgtgcctctcaggccccat

SEQ ID NO: 3291851 - DNA, 25 bp, Homo sapien
ctcctgagtgtgcctctcaggcccc

SEQ ID NO: 3291852 - DNA, 25 bp, Homo sapien
tcctgagtgtgcctctcaggcccca

SEQ ID NO: 3291853 - DNA, 25 bp, Homo sapien
atttctttaaactctcactgaaggt

SEQ ID NO: 3291854 - DNA, 25 bp, Homo sapien
gaaggtgcagctaccaatactcaca

SEQ ID NO: 3291855 - DNA, 25 bp, Homo sapien
atataaggatactgtggtgtcttca

SEQ ID NO: 3291856 - DNA, 25 bp, Homo sapien
aaacatccatccagttcacatccat

SEQ ID NO: 3291857 - DNA, 25 bp, Homo sapien
taactgatgctttctatcaatgctc

SEQ ID NO: 3291858 - DNA, 25 bp, Homo sapien
ttgtcctgccgattaattccattca

SEQ ID NO: 3291859 - DNA, 25 bp, Homo sapien
tcatattcaaagtagtttcagccat

SEQ ID NO: 3291860 - DNA, 25 bp, Homo sapien
tcatgtacttgtcctgccgattaat

SEQ ID NO: 3291861 - DNA, 25 bp, Homo sapien
tacattttctgttcaactttcagtg

SEQ ID NO: 3291862 - DNA, 25 bp, Homo sapien
cattttctgttcaactttcagtgtt

SEQ ID NO: 3291863 - DNA, 25 bp, Homo sapien
attttctgttcaactttcagtgttc

SEQ ID NO: 3291864 - DNA, 25 bp, Homo sapien
ttacattttctgttcaactttcagt

SEQ ID NO: 3291865 - DNA, 25 bp, Homo sapien
cagtatcatggctctaattgctatc

SEQ ID NO: 3291866 - DNA, 25 bp, Homo sapien
gacaaaatagcttagttccatagaa

SEQ ID NO: 3291867 - DNA, 25 bp, Homo sapien
gtagaattaaagaggtccagacaaa

SEQ ID NO: 3291868 - DNA, 25 bp, Homo sapien
tccatagaaaagtgcgtgatgcttc

SEQ ID NO: 3291869 - DNA, 25 bp, Homo sapien
taacaggaagtaggtagcacagaaa

SEQ ID NO: 3291870 - DNA, 25 bp, Homo sapien
cagctacttacggattttgaggaac

SEQ ID NO: 3291871 - DNA, 25 bp, Homo sapien
tattgctcattatagctatgatcag

SEQ ID NO: 3291872 - DNA, 25 bp, Homo sapien
cacagaaaacccagggtgaagaaag

SEQ ID NO: 3291873 - DNA, 25 bp, Homo sapien
tactattcgttgatccctgtgacca

SEQ ID NO: 3291874 - DNA, 25 bp, Homo sapien
caacggtgcctactgaggtcctgga

SEQ ID NO: 3291875 - DNA, 25 bp, Homo sapien
ggcaatactcaacgacaggcaccta

SEQ ID NO: 3291876 - DNA, 25 bp, Homo sapien
ttcccctgtggatgagatgtatgca

SEQ ID NO: 3291877 - DNA, 25 bp, Homo sapien
ctgaactgaggtggaccctcttggt

SEQ ID NO: 3291878 - DNA, 25 bp, Homo sapien
gatcttgtcggacgtctgttgtcaa

SEQ ID NO: 3291879 - DNA, 25 bp, Homo sapien
gatggtacggtgaccagtctcacag

SEQ ID NO: 3291880 - DNA, 25 bp, Homo sapien
gaagaagcacctattgaatcactgg

SEQ ID NO: 3291881 - DNA, 25 bp, Homo sapien
gataaggaaccaaagatgtaggcat

SEQ ID NO: 3291882 - DNA, 25 bp, Homo sapien
ggcgtaaattagcaccatcaggttt

SEQ ID NO: 3291883 - DNA, 25 bp, Homo sapien
tgcatttggacctcccactgaagag

SEQ ID NO: 3291884 - DNA, 25 bp, Homo sapien
gcttgctgagcactcctctggcgta

SEQ ID NO: 3291885 - DNA, 25 bp, Homo sapien
gctgcaggactcacaacataacttg

SEQ ID NO: 3291886 - DNA, 25 bp, Homo sapien
cagggtgctactgcgcttgctgcag

SEQ ID NO: 3291887 - DNA, 25 bp, Homo sapien
ggacttgtctcccaaacatggttca

SEQ ID NO: 3291888 - DNA, 25 bp, Homo sapien
tatggagcagtatcgtgccaacact

SEQ ID NO: 3291889 - DNA, 25 bp, Homo sapien
gaggcagttgacaggctctgaccga

SEQ ID NO: 3291890 - DNA, 25 bp, Homo sapien
tctgaccgactcaggcttttcacca

SEQ ID NO: 3291891 - DNA, 25 bp, Homo sapien
ttttcaccatcacagtggtccccag

SEQ ID NO: 3291892 - DNA, 25 bp, Homo sapien
ttccttcaccgcaggtcactgaaca

SEQ ID NO: 3291893 - DNA, 25 bp, Homo sapien
gcactctgttacagggccggcggct

SEQ ID NO: 3291894 - DNA, 25 bp, Homo sapien
cacagagcggttggtgccatcaagg

SEQ ID NO: 3291895 - DNA, 25 bp, Homo sapien
gaagctgatagccagaacttccaca

SEQ ID NO: 3291896 - DNA, 25 bp, Homo sapien
ggcagcgtacagtgcgaagctgata

SEQ ID NO: 3291897 - DNA, 25 bp, Homo sapien
tattatcacttttcctacggcatcc

SEQ ID NO: 3291898 - DNA, 25 bp, Homo sapien
gatgtgtacactcttgaatattgca

SEQ ID NO: 3291899 - DNA, 25 bp, Homo sapien
cacagaagctgcgatggaccatttt

SEQ ID NO: 3291900 - DNA, 25 bp, Homo sapien
cacattcgtctaataggtttcggct

SEQ ID NO: 3291901 - DNA, 25 bp, Homo sapien
tttaatataataaatgtgttcaatg

SEQ ID NO: 3291902 - DNA, 25 bp, Homo sapien
taatataataaatgtgttcaatggt

SEQ ID NO: 3291903 - DNA, 25 bp, Homo sapien
tataataaatgtgttcaatggttac

SEQ ID NO: 3291904 - DNA, 25 bp, Homo sapien
aatataataaatgtgttcaatggtt

SEQ ID NO: 3291905 - DNA, 25 bp, Homo sapien
catggatgatgtacttatatgtcag

SEQ ID NO: 3291906 - DNA, 25 bp, Homo sapien
cagctcttcaaagcccactcaaaag

SEQ ID NO: 3291907 - DNA, 25 bp, Homo sapien
tgttgctgttgattgtaggtacaga

SEQ ID NO: 3291908 - DNA, 25 bp, Homo sapien
caccacagggtttggaacactgaga

SEQ ID NO: 3291909 - DNA, 25 bp, Homo sapien
caccaagatctatgaaggtccgcga

SEQ ID NO: 3291910 - DNA, 25 bp, Homo sapien
aacaggatcatgtaaaggtccatcg

SEQ ID NO: 3291911 - DNA, 25 bp, Homo sapien
atataatggcctgtagcctggttct

SEQ ID NO: 3291912 - DNA, 25 bp, Homo sapien
gttataatcccactccacaccaaga

SEQ ID NO: 3291913 - DNA, 25 bp, Homo sapien
gattaacacatgtctagccccaggg

SEQ ID NO: 3291914 - DNA, 25 bp, Homo sapien
cctcgtcttcttggattaacacatg

SEQ ID NO: 3291915 - DNA, 25 bp, Homo sapien
cccagggggtatatcaaacatctta

SEQ ID NO: 3291916 - DNA, 25 bp, Homo sapien
caagaatatgaggagaagcctcgtc

SEQ ID NO: 3291917 - DNA, 25 bp, Homo sapien
taaatattgtaggaagcaaagaaga

SEQ ID NO: 3291918 - DNA, 25 bp, Homo sapien
ctttgcatgtgtagtaaatattgta

SEQ ID NO: 3291919 - DNA, 25 bp, Homo sapien
gtagtaaatattgtaggaagcaaag

SEQ ID NO: 3291920 - DNA, 25 bp, Homo sapien
atgtgtagtaaatattgtaggaagc

SEQ ID NO: 3291921 - DNA, 25 bp, Homo sapien
tctttctgcagtttgctacaactta

SEQ ID NO: 3291922 - DNA, 25 bp, Homo sapien
ctttctgcagtttgctacaacttac

SEQ ID NO: 3291923 - DNA, 25 bp, Homo sapien
gaaatattacgagctcctttgggta

SEQ ID NO: 3291924 - DNA, 25 bp, Homo sapien
tttcagcaagagaaatattacgagc

SEQ ID NO: 3291925 - DNA, 25 bp, Homo sapien
ctttgggtaaagtgaaagcgcctct

SEQ ID NO: 3291926 - DNA, 25 bp, Homo sapien
tacgagctcctttgggtaaagtgaa

SEQ ID NO: 3291927 - DNA, 25 bp, Homo sapien
cggttcggcagtgggaattatctcc

SEQ ID NO: 3291928 - DNA, 25 bp, Homo sapien
ttcacggttcggcagtgggaattat

SEQ ID NO: 3291929 - DNA, 25 bp, Homo sapien
tcctgggagttctggtaaatgtccc

SEQ ID NO: 3291930 - DNA, 25 bp, Homo sapien
cacttatcctcaaccttattagaac

SEQ ID NO: 3291931 - DNA, 25 bp, Homo sapien
tgcaccagttgtttcatgtaagcaa

SEQ ID NO: 3291932 - DNA, 25 bp, Homo sapien
actctcctcgcacacatatgctata

SEQ ID NO: 3291933 - DNA, 25 bp, Homo sapien
gatctttgtaagaacagtgcgttcc

SEQ ID NO: 3291934 - DNA, 25 bp, Homo sapien
tggactgacagtaaaggtggcatct

SEQ ID NO: 3291935 - DNA, 25 bp, Homo sapien
tccatggggttcgtgctggcaaagc

SEQ ID NO: 3291936 - DNA, 25 bp, Homo sapien
cacatagggatcaagagtccatggg

SEQ ID NO: 3291937 - DNA, 25 bp, Homo sapien
caggagaacttactcctataagcac

SEQ ID NO: 3291938 - DNA, 25 bp, Homo sapien
gcaccaagtttcctaagttaccaca

SEQ ID NO: 3291939 - DNA, 25 bp, Homo sapien
caaagtgggagtttcgctgctgaca

SEQ ID NO: 3291940 - DNA, 25 bp, Homo sapien
gctgtgctctgaagtcctcaaagtg

SEQ ID NO: 3291941 - DNA, 25 bp, Homo sapien
tcaggatgttcatatggcaaccagt

SEQ ID NO: 3291942 - DNA, 25 bp, Homo sapien
caaagctggtactcaaaattaacac

SEQ ID NO: 3291943 - DNA, 25 bp, Homo sapien
ggagccaaatttagtccatgacccc

SEQ ID NO: 3291944 - DNA, 25 bp, Homo sapien
tgggattattgcactggcgtgttct

SEQ ID NO: 3291945 - DNA, 25 bp, Homo sapien
cacatgcaatgacccttatagcacc

SEQ ID NO: 3291946 - DNA, 25 bp, Homo sapien
gaacaccagttccacatgtccgaga

SEQ ID NO: 3291947 - DNA, 25 bp, Homo sapien
agcagcacattcagtcccatcaagt

SEQ ID NO: 3291948 - DNA, 25 bp, Homo sapien
gctacaccacagctgtttacatggg

SEQ ID NO: 3291949 - DNA, 25 bp, Homo sapien
tgtttacatgggtcaaaggttcgga

SEQ ID NO: 3291950 - DNA, 25 bp, Homo sapien
ccatcaagtggaggtccctttttag

SEQ ID NO: 3291951 - DNA, 25 bp, Homo sapien
gaagttctgggagtttaggccaatc

SEQ ID NO: 3291952 - DNA, 25 bp, Homo sapien
taggccaatcatgatcaaaagggtc

SEQ ID NO: 3291953 - DNA, 25 bp, Homo sapien
ggtcatcaaggagacagtcatagga

SEQ ID NO: 3291954 - DNA, 25 bp, Homo sapien
ggtgcacattttatagccaacacca

SEQ ID NO: 3291955 - DNA, 25 bp, Homo sapien
agtggtaacgatggaatgctgcttg

SEQ ID NO: 3291956 - DNA, 25 bp, Homo sapien
ggagccatgacacttcccatagcag

SEQ ID NO: 3291957 - DNA, 25 bp, Homo sapien
tcttgaccactgcatcgggaccagt

SEQ ID NO: 3291958 - DNA, 25 bp, Homo sapien
gctgcttgtaccaagggagccatga

SEQ ID NO: 3291959 - DNA, 25 bp, Homo sapien
tacaaaagcagatgaaaaaccatcc

SEQ ID NO: 3291960 - DNA, 25 bp, Homo sapien
acatggcccgtttcatgggctacta

SEQ ID NO: 3291961 - DNA, 25 bp, Homo sapien
catgggctactacaaaagcagatga

SEQ ID NO: 3291962 - DNA, 25 bp, Homo sapien
cgtttcatgggctactacaaaagca

SEQ ID NO: 3291963 - DNA, 25 bp, Homo sapien
catggtgttcagagtggttgagatc

SEQ ID NO: 3291964 - DNA, 25 bp, Homo sapien
aaaattgcatggtcatggtgttcag

SEQ ID NO: 3291965 - DNA, 25 bp, Homo sapien
cagcaggtccaaagtcttgcctggt

SEQ ID NO: 3291966 - DNA, 25 bp, Homo sapien
caggtccaaagtcttgcctggttaa

SEQ ID NO: 3291967 - DNA, 25 bp, Homo sapien
tccaagcttctggatgggtttcccc

SEQ ID NO: 3291968 - DNA, 25 bp, Homo sapien
atgggtttcccctttctatgaggct

SEQ ID NO: 3291969 - DNA, 25 bp, Homo sapien
gcttcgtttgataatttcctctgaa

SEQ ID NO: 3291970 - DNA, 25 bp, Homo sapien
ctgacaatttcccaaaggcttcgtt

SEQ ID NO: 3291971 - DNA, 25 bp, Homo sapien
caaaggcttcgtttgataatttcct

SEQ ID NO: 3291972 - DNA, 25 bp, Homo sapien
caatttcccaaaggcttcgtttgat

SEQ ID NO: 3291973 - DNA, 25 bp, Homo sapien
gagggactcatcatggtaaatttca

SEQ ID NO: 3291974 - DNA, 25 bp, Homo sapien
cacatttatatgcactccgagggac

SEQ ID NO: 3291975 - DNA, 25 bp, Homo sapien
tgcgcaccaggaccacatttatatg

SEQ ID NO: 3291976 - DNA, 25 bp, Homo sapien
tgcatatcccagcattatcatgcgc

SEQ ID NO: 3291977 - DNA, 25 bp, Homo sapien
gggtctgctcaaacttgttcacttg

SEQ ID NO: 3291978 - DNA, 25 bp, Homo sapien
tatatcgaaatcatctagggtctgc

SEQ ID NO: 3291979 - DNA, 25 bp, Homo sapien
ttaggaagttatatcgaaatcatct

SEQ ID NO: 3291980 - DNA, 25 bp, Homo sapien
cgaaatcatctagggtctgctcaaa

SEQ ID NO: 3291981 - DNA, 25 bp, Homo sapien
gattgccaaagggtaccaacaaata

SEQ ID NO: 3291982 - DNA, 25 bp, Homo sapien
tctcacacagattgccaaagggtac

SEQ ID NO: 3291983 - DNA, 25 bp, Homo sapien
ttttggcacagtcatggaagttctc

SEQ ID NO: 3291984 - DNA, 25 bp, Homo sapien
catggaagttctcacacagattgcc

SEQ ID NO: 3291985 - DNA, 25 bp, Homo sapien
ggtagttttggacgtgctctttgcc

SEQ ID NO: 3291986 - DNA, 25 bp, Homo sapien
tctttgccatggaaacggaccacag

SEQ ID NO: 3291987 - DNA, 25 bp, Homo sapien
taaacagtacctagatcatcaaggc

SEQ ID NO: 3291988 - DNA, 25 bp, Homo sapien
gatattgtaatcgttttctcccgcg

SEQ ID NO: 3291989 - DNA, 25 bp, Homo sapien
agacaaaaggaaccaggaatttcag

SEQ ID NO: 3291990 - DNA, 25 bp, Homo sapien
ctaataagagacaaaaggaaccagg

SEQ ID NO: 3291991 - DNA, 25 bp, Homo sapien
gtttccctaacaggccttccaatca

SEQ ID NO: 3291992 - DNA, 25 bp, Homo sapien
ccaggaatttcagtttccctaacag

SEQ ID NO: 3291993 - DNA, 25 bp, Homo sapien
gacagacctgctacaaattgaacat

SEQ ID NO: 3291994 - DNA, 25 bp, Homo sapien
gatcagacagacctgctacaaattg

SEQ ID NO: 3291995 - DNA, 25 bp, Homo sapien
tacaaattgaacatagaagagcaac

SEQ ID NO: 3291996 - DNA, 25 bp, Homo sapien
catagaagagcaacactgaaggtaa

SEQ ID NO: 3291997 - DNA, 25 bp, Homo sapien
cctttgcaagcctctttaaataggt

SEQ ID NO: 3291998 - DNA, 25 bp, Homo sapien
ctttgcaagcctctttaaataggta

SEQ ID NO: 3291999 - DNA, 25 bp, Homo sapien
tttgcaagcctctttaaataggtag

SEQ ID NO: 3292000 - DNA, 25 bp, Homo sapien
tgcaagcctctttaaataggtagtt

SEQ ID NO: 3292001 - DNA, 25 bp, Homo sapien
ctgatgttggatgatgatagttctc

SEQ ID NO: 3292002 - DNA, 25 bp, Homo sapien
gatgttggatgatgatagttctcat

SEQ ID NO: 3292003 - DNA, 25 bp, Homo sapien
ttgctgatgttggatgatgatagtt

SEQ ID NO: 3292004 - DNA, 25 bp, Homo sapien
caggttgctgatgttggatgatgat

SEQ ID NO: 3292005 - DNA, 25 bp, Homo sapien
aatttcctatccctggactgtgacc

SEQ ID NO: 3292006 - DNA, 25 bp, Homo sapien
actgtgacctgacaggggcagtgta

SEQ ID NO: 3292007 - DNA, 25 bp, Homo sapien
gggcagtgtagtcatgacgaagctt

SEQ ID NO: 3292008 - DNA, 25 bp, Homo sapien
gaagcttaaatcgagcaatgtcaca

SEQ ID NO: 3292009 - DNA, 25 bp, Homo sapien
atacaaatcctggacttagcagtca

SEQ ID NO: 3292010 - DNA, 25 bp, Homo sapien
tacaaatcctggacttagcagtcat

SEQ ID NO: 3292011 - DNA, 25 bp, Homo sapien
tttccaatacaaatcctggacttag

SEQ ID NO: 3292012 - DNA, 25 bp, Homo sapien
acaagaacagcaatgtctgagtctc

SEQ ID NO: 3292013 - DNA, 25 bp, Homo sapien
tgtcaatgtgggtcccataccagaa

SEQ ID NO: 3292014 - DNA, 25 bp, Homo sapien
tccccacaattcttgtgcaacaaga

SEQ ID NO: 3292015 - DNA, 25 bp, Homo sapien
tgaatcagtgtcaatgtgggtccca

SEQ ID NO: 3292016 - DNA, 25 bp, Homo sapien
ggagataaaggctcactattccttg

SEQ ID NO: 3292017 - DNA, 25 bp, Homo sapien
acaccagcaacacaagcactcgggt

SEQ ID NO: 3292018 - DNA, 25 bp, Homo sapien
caagcactcgggttcatgcaggaaa

SEQ ID NO: 3292019 - DNA, 25 bp, Homo sapien
ccttgtttcccactggtaggatgta

SEQ ID NO: 3292020 - DNA, 25 bp, Homo sapien
tggacatgtctatgggagcctgttc

SEQ ID NO: 3292021 - DNA, 25 bp, Homo sapien
tgtagtggaagtctttggacatgtc

SEQ ID NO: 3292022 - DNA, 25 bp, Homo sapien
ctttccaagggttcaatgaaatact

SEQ ID NO: 3292023 - DNA, 25 bp, Homo sapien
gtagacaacatgaatccttcctttt

SEQ ID NO: 3292024 - DNA, 25 bp, Homo sapien
atataatttccaacatcttcctcat

SEQ ID NO: 3292025 - DNA, 25 bp, Homo sapien
tacaaatataatttccaacatcttc

SEQ ID NO: 3292026 - DNA, 25 bp, Homo sapien
tcttctacaaatataatttccaaca

SEQ ID NO: 3292027 - DNA, 25 bp, Homo sapien
ctcttctacaaatataatttccaac

SEQ ID NO: 3292028 - DNA, 25 bp, Homo sapien
cccctttggaagctgccagaggctt

SEQ ID NO: 3292029 - DNA, 25 bp, Homo sapien
cacactctgcttgtgtaaagggaag

SEQ ID NO: 3292030 - DNA, 25 bp, Homo sapien
ggctttaatctaaagcacactctgc

SEQ ID NO: 3292031 - DNA, 25 bp, Homo sapien
cccactttgcacaataacaattcta

SEQ ID NO: 3292032 - DNA, 25 bp, Homo sapien
ggtataactgaagagacatcaagga

SEQ ID NO: 3292033 - DNA, 25 bp, Homo sapien
aaatgcaggataagcaaggcctcag

SEQ ID NO: 3292034 - DNA, 25 bp, Homo sapien
ggcctcagtatgcagtagaattagc

SEQ ID NO: 3292035 - DNA, 25 bp, Homo sapien
tttatatcgtgatcaaaaatgcagg

SEQ ID NO: 3292036 - DNA, 25 bp, Homo sapien
catcagaactcaaaccatcttatat

SEQ ID NO: 3292037 - DNA, 25 bp, Homo sapien
cgagctctactcacagtaatgtaaa

SEQ ID NO: 3292038 - DNA, 25 bp, Homo sapien
cttatattgagagtaatagaagtca

SEQ ID NO: 3292039 - DNA, 25 bp, Homo sapien
gacatcacgagctctactcacagta

SEQ ID NO: 3292040 - DNA, 25 bp, Homo sapien
cccagaggtataggtaggcatgaaa

SEQ ID NO: 3292041 - DNA, 25 bp, Homo sapien
gcacaagtgctaagagacagtccag

SEQ ID NO: 3292042 - DNA, 25 bp, Homo sapien
gatctctctgcataggaagtgtgaa

SEQ ID NO: 3292043 - DNA, 25 bp, Homo sapien
ttatgggtaagagccggctatggcc

SEQ ID NO: 3292044 - DNA, 25 bp, Homo sapien
tcatgccagctcaccacagaatggc

SEQ ID NO: 3292045 - DNA, 25 bp, Homo sapien
gggttgctcacatacccagtggaaa

SEQ ID NO: 3292046 - DNA, 25 bp, Homo sapien
aacagagcgttcttccttgacctgg

SEQ ID NO: 3292047 - DNA, 25 bp, Homo sapien
caagcagttcaattgctggcccaag

SEQ ID NO: 3292048 - DNA, 25 bp, Homo sapien
cagcagattttcgtgaaccacaaat

SEQ ID NO: 3292049 - DNA, 25 bp, Homo sapien
agattttcgtgaaccacaaatgctg

SEQ ID NO: 3292050 - DNA, 25 bp, Homo sapien
cacaaatgctgctgtctaatcgttc

SEQ ID NO: 3292051 - DNA, 25 bp, Homo sapien
gaacagcagattttcgtgaaccaca

SEQ ID NO: 3292052 - DNA, 25 bp, Homo sapien
cagttaccaggaaaatctagccata

SEQ ID NO: 3292053 - DNA, 25 bp, Homo sapien
taaccaaacaagcaaggagaactca

SEQ ID NO: 3292054 - DNA, 25 bp, Homo sapien
gagccgtatatgtcccttaaccaaa

SEQ ID NO: 3292055 - DNA, 25 bp, Homo sapien
gaatgaaccttaattgagttggcag

SEQ ID NO: 3292056 - DNA, 25 bp, Homo sapien
tccctacaccggtgcccaggcagct

SEQ ID NO: 3292057 - DNA, 25 bp, Homo sapien
caggcagctggccaattcactaacc

SEQ ID NO: 3292058 - DNA, 25 bp, Homo sapien
ggcttccctacaccggtgcccaggc

SEQ ID NO: 3292059 - DNA, 25 bp, Homo sapien
aggcagctggccaattcactaaccc

SEQ ID NO: 3292060 - DNA, 25 bp, Homo sapien
ggggccaatgtctgttgctttgttc

SEQ ID NO: 3292061 - DNA, 25 bp, Homo sapien
aaaggggccaatgtctgttgctttg

SEQ ID NO: 3292062 - DNA, 25 bp, Homo sapien
aaggggccaatgtctgttgctttgt

SEQ ID NO: 3292063 - DNA, 25 bp, Homo sapien
gaaaggggccaatgtctgttgcttt

SEQ ID NO: 3292064 - DNA, 25 bp, Homo sapien
aggatataagagttttaagcgtctt

SEQ ID NO: 3292065 - DNA, 25 bp, Homo sapien
atataagagttttaagcgtcttcca

SEQ ID NO: 3292066 - DNA, 25 bp, Homo sapien
gatataagagttttaagcgtcttcc

SEQ ID NO: 3292067 - DNA, 25 bp, Homo sapien
ggatataagagttttaagcgtcttc

SEQ ID NO: 3292068 - DNA, 25 bp, Homo sapien
tgtaacataacaatgaagcctcctt

SEQ ID NO: 3292069 - DNA, 25 bp, Homo sapien
tgtcgtcttcgcattattccaagaa

SEQ ID NO: 3292070 - DNA, 25 bp, Homo sapien
caaacatacgcacaaaacagaagga

SEQ ID NO: 3292071 - DNA, 25 bp, Homo sapien
gccaaaatgcatatctttgacagca

SEQ ID NO: 3292072 - DNA, 25 bp, Homo sapien
tgacctctttttgtgactcgcagaa

SEQ ID NO: 3292073 - DNA, 25 bp, Homo sapien
gattctatacgtagcacttcctggt

SEQ ID NO: 3292074 - DNA, 25 bp, Homo sapien
tgctcagggttggaagacacgtccc

SEQ ID NO: 3292075 - DNA, 25 bp, Homo sapien
gatcggttatattcccaggcaccag

SEQ ID NO: 3292076 - DNA, 25 bp, Homo sapien
tggggtgaaaaacagaactgtcaaa

SEQ ID NO: 3292077 - DNA, 25 bp, Homo sapien
ctgtggggtgaaaaacagaactgtc

SEQ ID NO: 3292078 - DNA, 25 bp, Homo sapien
gtggggtgaaaaacagaactgtcaa

SEQ ID NO: 3292079 - DNA, 25 bp, Homo sapien
tgtggggtgaaaaacagaactgtca

SEQ ID NO: 3292080 - DNA, 25 bp, Homo sapien
gtcttatgctcataaagtatccttg

SEQ ID NO: 3292081 - DNA, 25 bp, Homo sapien
taaagtatccttgtagaatcactat

SEQ ID NO: 3292082 - DNA, 25 bp, Homo sapien
gctcataaagtatccttgtagaatc

SEQ ID NO: 3292083 - DNA, 25 bp, Homo sapien
tatgctcataaagtatccttgtaga

SEQ ID NO: 3292084 - DNA, 25 bp, Homo sapien
tgaggaagatttggtcttcctccat

SEQ ID NO: 3292085 - DNA, 25 bp, Homo sapien
gtgaggaagatttggtcttcctcca

SEQ ID NO: 3292086 - DNA, 25 bp, Homo sapien
gctgaccatttcaagggaaagagga

SEQ ID NO: 3292087 - DNA, 25 bp, Homo sapien
agcagtgcttaatttcaatgtatgg

SEQ ID NO: 3292088 - DNA, 25 bp, Homo sapien
catcggctgaccatttcaagggaaa

SEQ ID NO: 3292089 - DNA, 25 bp, Homo sapien
aaagaggaagcagtgcttaatttca

SEQ ID NO: 3292090 - DNA, 25 bp, Homo sapien
tttgcaccatttcttcattaccagc

SEQ ID NO: 3292091 - DNA, 25 bp, Homo sapien
tatttgcaccatttcttcattacca

SEQ ID NO: 3292092 - DNA, 25 bp, Homo sapien
ctatttgcaccatttcttcattacc

SEQ ID NO: 3292093 - DNA, 25 bp, Homo sapien
atttgcaccatttcttcattaccag

SEQ ID NO: 3292094 - DNA, 25 bp, Homo sapien
gagcggctgctatcaaccaaagtga

SEQ ID NO: 3292095 - DNA, 25 bp, Homo sapien
tgaagtcctaacctctaccagagcg

SEQ ID NO: 3292096 - DNA, 25 bp, Homo sapien
taacctctaccagagcggctgctat

SEQ ID NO: 3292097 - DNA, 25 bp, Homo sapien
tcaaccaaagtgacaggagaaccat

SEQ ID NO: 3292098 - DNA, 25 bp, Homo sapien
aagtattagcgagagagacgagcga

SEQ ID NO: 3292099 - DNA, 25 bp, Homo sapien
cattggtccctaaggttagcgcgga

SEQ ID NO: 3292100 - DNA, 25 bp, Homo sapien
gagttcactttccaactactgggca

SEQ ID NO: 3292101 - DNA, 25 bp, Homo sapien
gaggcttttcgagcaccattggtcc

SEQ ID NO: 3292102 - DNA, 25 bp, Homo sapien
caccgtgtcaggattggagaccgct

SEQ ID NO: 3292103 - DNA, 25 bp, Homo sapien
ccgcaccgtgtcaggattggagacc

SEQ ID NO: 3292104 - DNA, 25 bp, Homo sapien
ccccgcaccgtgtcaggattggaga

SEQ ID NO: 3292105 - DNA, 25 bp, Homo sapien
ccgtgtcaggattggagaccgctcg

SEQ ID NO: 3292106 - DNA, 25 bp, Homo sapien
aataatactttgctagttcagaggt

SEQ ID NO: 3292107 - DNA, 25 bp, Homo sapien
taataatactttgctagttcagagg

SEQ ID NO: 3292108 - DNA, 25 bp, Homo sapien
ttaataatactttgctagttcagag

SEQ ID NO: 3292109 - DNA, 25 bp, Homo sapien
tcccagaagcagtaataggatccgt

SEQ ID NO: 3292110 - DNA, 25 bp, Homo sapien
tccacttgccatgacctcctagaat

SEQ ID NO: 3292111 - DNA, 25 bp, Homo sapien
aataaatgccgctttgggcatctcc

SEQ ID NO: 3292112 - DNA, 25 bp, Homo sapien
tactgggccaagtaggcagggaata

SEQ ID NO: 3292113 - DNA, 25 bp, Homo sapien
atatggtctcttcacattttcccag

SEQ ID NO: 3292114 - DNA, 25 bp, Homo sapien
tgcaaagagtggtttgtgccagcac

SEQ ID NO: 3292115 - DNA, 25 bp, Homo sapien
tagcctttttgttcagagaggacat

SEQ ID NO: 3292116 - DNA, 25 bp, Homo sapien
gcacttcagagatcgctttagcctt

SEQ ID NO: 3292117 - DNA, 25 bp, Homo sapien
ctggcaaccgaattgcgtctctttg

SEQ ID NO: 3292118 - DNA, 25 bp, Homo sapien
ctctttgatggagggcgttcctact

SEQ ID NO: 3292119 - DNA, 25 bp, Homo sapien
ttttctcatggtagcctggcaaccg

SEQ ID NO: 3292120 - DNA, 25 bp, Homo sapien
cagctttatgaaaagtgtcagggtc

SEQ ID NO: 3292121 - DNA, 25 bp, Homo sapien
caatcctgcccaatgctgtgtcatg

SEQ ID NO: 3292122 - DNA, 25 bp, Homo sapien
gatttggcgtcttgacactggccat

SEQ ID NO: 3292123 - DNA, 25 bp, Homo sapien
ggctgagatttggcgtcttgacact

SEQ ID NO: 3292124 - DNA, 25 bp, Homo sapien
gcatatgtgctgtgtttcacacggg

SEQ ID NO: 3292125 - DNA, 25 bp, Homo sapien
agtcttttcctctaatcgccagtcg

SEQ ID NO: 3292126 - DNA, 25 bp, Homo sapien
aattgtgttcctgctagtctgaagc

SEQ ID NO: 3292127 - DNA, 25 bp, Homo sapien
tcgccagtcgttccctgcatatgtg

SEQ ID NO: 3292128 - DNA, 25 bp, Homo sapien
atgtgcgcatgcatttcaacggcac

SEQ ID NO: 3292129 - DNA, 25 bp, Homo sapien
tcaacggcactgttatgccaaccct

SEQ ID NO: 3292130 - DNA, 25 bp, Homo sapien
gcatttcaacggcactgttatgcca

SEQ ID NO: 3292131 - DNA, 25 bp, Homo sapien
catgcatttcaacggcactgttatg

SEQ ID NO: 3292132 - DNA, 25 bp, Homo sapien
tagaccggtattcaccactccctga

SEQ ID NO: 3292133 - DNA, 25 bp, Homo sapien
gaagctgttcttttgatatgccaag

SEQ ID NO: 3292134 - DNA, 25 bp, Homo sapien
caagaatactggtagaccggtattc

SEQ ID NO: 3292135 - DNA, 25 bp, Homo sapien
tctgctcctgttgtaactttataac

SEQ ID NO: 3292136 - DNA, 25 bp, Homo sapien
tcaaagctttccttcactaatgttc

SEQ ID NO: 3292137 - DNA, 25 bp, Homo sapien
agctttccttcactaatgttcttac

SEQ ID NO: 3292138 - DNA, 25 bp, Homo sapien
caaagctttccttcactaatgttct

SEQ ID NO: 3292139 - DNA, 25 bp, Homo sapien
aaagctttccttcactaatgttctt

SEQ ID NO: 3292140 - DNA, 25 bp, Homo sapien
tctctctggtttaggcaaatgtcta

SEQ ID NO: 3292141 - DNA, 25 bp, Homo sapien
gcagacctgttttgtcgggcagaag

SEQ ID NO: 3292142 - DNA, 25 bp, Homo sapien
tgttgttcaaaccagcatactgtac

SEQ ID NO: 3292143 - DNA, 25 bp, Homo sapien
tatcaattgaatgtgtgcagtgcac

SEQ ID NO: 3292144 - DNA, 25 bp, Homo sapien
aaccagagagtgacacttgactcat

SEQ ID NO: 3292145 - DNA, 25 bp, Homo sapien
caaataaaccagagagtgacacttg

SEQ ID NO: 3292146 - DNA, 25 bp, Homo sapien
tgaggtgacatcaaataaaccagag

SEQ ID NO: 3292147 - DNA, 25 bp, Homo sapien
catcaaataaaccagagagtgacac

SEQ ID NO: 3292148 - DNA, 25 bp, Homo sapien
cagcttctccaggtttgctcttatt

SEQ ID NO: 3292149 - DNA, 25 bp, Homo sapien
gggacagcttctccaggtttgctct

SEQ ID NO: 3292150 - DNA, 25 bp, Homo sapien
gacagcttctccaggtttgctctta

SEQ ID NO: 3292151 - DNA, 25 bp, Homo sapien
gcttctccaggtttgctcttatttc

SEQ ID NO: 3292152 - DNA, 25 bp, Homo sapien
gtgtcgcaacgccacattactttgc

SEQ ID NO: 3292153 - DNA, 25 bp, Homo sapien
gtgacccacacccttatccctgagg

SEQ ID NO: 3292154 - DNA, 25 bp, Homo sapien
tactttgccctttctcaggttgtgg

SEQ ID NO: 3292155 - DNA, 25 bp, Homo sapien
ttatccctgaggtgtcgcaacgcca

SEQ ID NO: 3292156 - DNA, 25 bp, Homo sapien
gacacccagggtagagggcaaggaa

SEQ ID NO: 3292157 - DNA, 25 bp, Homo sapien
cagggtagagggcaaggaatacttc

SEQ ID NO: 3292158 - DNA, 25 bp, Homo sapien
catgactaccccttgacacccaggg

SEQ ID NO: 3292159 - DNA, 25 bp, Homo sapien
ggtagagggcaaggaatacttccat

SEQ ID NO: 3292160 - DNA, 25 bp, Homo sapien
aaaatgcctttatggcccaaggtgc

SEQ ID NO: 3292161 - DNA, 25 bp, Homo sapien
aaatgcctttatggcccaaggtgct

SEQ ID NO: 3292162 - DNA, 25 bp, Homo sapien
tatctgctaatgtccagagactgtg

SEQ ID NO: 3292163 - DNA, 25 bp, Homo sapien
ctatcccccaagaagttttgcctgt

SEQ ID NO: 3292164 - DNA, 25 bp, Homo sapien
ccttcggttgcattcactacttgga

SEQ ID NO: 3292165 - DNA, 25 bp, Homo sapien
tcacagccattccttcggttgcatt

SEQ ID NO: 3292166 - DNA, 25 bp, Homo sapien
ctggacccggtaaaggcctcaagca

SEQ ID NO: 3292167 - DNA, 25 bp, Homo sapien
aaggcctcaagcagcacactttggg

SEQ ID NO: 3292168 - DNA, 25 bp, Homo sapien
ccggtaaaggcctcaagcagcacac

SEQ ID NO: 3292169 - DNA, 25 bp, Homo sapien
ggacccggtaaaggcctcaagcagc

SEQ ID NO: 3292170 - DNA, 25 bp, Homo sapien
ccttgtttttctatagcggatgaag

SEQ ID NO: 3292171 - DNA, 25 bp, Homo sapien
tctttctgagagcaagtagtttgtg

SEQ ID NO: 3292172 - DNA, 25 bp, Homo sapien
cacatttgtacatctgccatccttg

SEQ ID NO: 3292173 - DNA, 25 bp, Homo sapien
cattgcaaatatagagaaccacctt

SEQ ID NO: 3292174 - DNA, 25 bp, Homo sapien
ctttgaggcacagccttttattctc

SEQ ID NO: 3292175 - DNA, 25 bp, Homo sapien
tgaggcacagccttttattctcccc

SEQ ID NO: 3292176 - DNA, 25 bp, Homo sapien
ccttgtgagttttatggaggaccat

SEQ ID NO: 3292177 - DNA, 25 bp, Homo sapien
actgaattgttccttgtgagtttta

SEQ ID NO: 3292178 - DNA, 25 bp, Homo sapien
taatacagtcttgtcacgatccaca

SEQ ID NO: 3292179 - DNA, 25 bp, Homo sapien
tcttgtcacgatccacagtgccaag

SEQ ID NO: 3292180 - DNA, 25 bp, Homo sapien
gaatccgtaatacagtcttgtcacg

SEQ ID NO: 3292181 - DNA, 25 bp, Homo sapien
ccatttcagaatccgtaatacagtc

SEQ ID NO: 3292182 - DNA, 25 bp, Homo sapien
agcagcatctgcggcaaagctgtac

SEQ ID NO: 3292183 - DNA, 25 bp, Homo sapien
tcagcagcatctgcggcaaagctgt

SEQ ID NO: 3292184 - DNA, 25 bp, Homo sapien
cagcagcatctgcggcaaagctgta

SEQ ID NO: 3292185 - DNA, 25 bp, Homo sapien
ctttcagaaggcctatgcttcctgc

SEQ ID NO: 3292186 - DNA, 25 bp, Homo sapien
taggcttgccaaggcctgtactttc

SEQ ID NO: 3292187 - DNA, 25 bp, Homo sapien
ttttgccaagaccacccatgcagac

SEQ ID NO: 3292188 - DNA, 25 bp, Homo sapien
gatctgctgaggtcctaggcttgcc

SEQ ID NO: 3292189 - DNA, 25 bp, Homo sapien
ccaagacttatgagacctctgtgcc

SEQ ID NO: 3292190 - DNA, 25 bp, Homo sapien
gacttatgagacctctgtgcccttg

SEQ ID NO: 3292191 - DNA, 25 bp, Homo sapien
gtgccaagacttatgagacctctgt

SEQ ID NO: 3292192 - DNA, 25 bp, Homo sapien
aagacttatgagacctctgtgccct

SEQ ID NO: 3292193 - DNA, 25 bp, Homo sapien
ggaaacagctgtcagtgatgcagtc

SEQ ID NO: 3292194 - DNA, 25 bp, Homo sapien
ttagcccctactgagaatccaaagt

SEQ ID NO: 3292195 - DNA, 25 bp, Homo sapien
cagtaagcagatcaactggaaccct

SEQ ID NO: 3292196 - DNA, 25 bp, Homo sapien
tattgttaggaattggcagcccatc

SEQ ID NO: 3292197 - DNA, 25 bp, Homo sapien
gttacacagaactcatttgcccaga

SEQ ID NO: 3292198 - DNA, 25 bp, Homo sapien
tagttagcaggtattatttcagaaa

SEQ ID NO: 3292199 - DNA, 25 bp, Homo sapien
tttcagaaaggtcacactccgaggg

SEQ ID NO: 3292200 - DNA, 25 bp, Homo sapien
tccaaggatagttagcaggtattat

SEQ ID NO: 3292201 - DNA, 25 bp, Homo sapien
gtcacactccgaggggggcactgca

SEQ ID NO: 3292202 - DNA, 25 bp, Homo sapien
ttgattagccttatctcttccgtca

SEQ ID NO: 3292203 - DNA, 25 bp, Homo sapien
tatctcttccgtcaacagctcagac

SEQ ID NO: 3292204 - DNA, 25 bp, Homo sapien
tctcttccgtcaacagctcagactt

SEQ ID NO: 3292205 - DNA, 25 bp, Homo sapien
tttgattagccttatctcttccgtc

SEQ ID NO: 3292206 - DNA, 25 bp, Homo sapien
ttggtgcaatttttggaaaaatgaa

SEQ ID NO: 3292207 - DNA, 25 bp, Homo sapien
cttggtgcaatttttggaaaaatga

SEQ ID NO: 3292208 - DNA, 25 bp, Homo sapien
tggtgcaatttttggaaaaatgaaa

SEQ ID NO: 3292209 - DNA, 25 bp, Homo sapien
tccaactttttgtagcaagattgag

SEQ ID NO: 3292210 - DNA, 25 bp, Homo sapien
caattaaagtaagatcaccatccgg

SEQ ID NO: 3292211 - DNA, 25 bp, Homo sapien
aattgcctctgtctatcctgtggcc

SEQ ID NO: 3292212 - DNA, 25 bp, Homo sapien
ctaattgcctctgtctatcctgtgg

SEQ ID NO: 3292213 - DNA, 25 bp, Homo sapien
tttctactgcgagtcctaagccaga

SEQ ID NO: 3292214 - DNA, 25 bp, Homo sapien
atgaacttttctactgcgagtccta

SEQ ID NO: 3292215 - DNA, 25 bp, Homo sapien
gaacttttctactgcgagtcctaag

SEQ ID NO: 3292216 - DNA, 25 bp, Homo sapien
cttttctactgcgagtcctaagcca

SEQ ID NO: 3292217 - DNA, 25 bp, Homo sapien
atgtatgagtaatactcaaaaccac

SEQ ID NO: 3292218 - DNA, 25 bp, Homo sapien
tttgtgggtgtaaatgtatgagtaa

SEQ ID NO: 3292219 - DNA, 25 bp, Homo sapien
aatgtatgagtaatactcaaaacca

SEQ ID NO: 3292220 - DNA, 25 bp, Homo sapien
ttgtgggtgtaaatgtatgagtaat

SEQ ID NO: 3292221 - DNA, 25 bp, Homo sapien
actttcagaattatcctgattttcc

SEQ ID NO: 3292222 - DNA, 25 bp, Homo sapien
gcttgggttgaaagttctactttca

SEQ ID NO: 3292223 - DNA, 25 bp, Homo sapien
tgggttgaaagttctactttcagaa

SEQ ID NO: 3292224 - DNA, 25 bp, Homo sapien
tttcagaattatcctgattttcctc

SEQ ID NO: 3292225 - DNA, 25 bp, Homo sapien
gtgtctggcatagtcagaacttagt

SEQ ID NO: 3292226 - DNA, 25 bp, Homo sapien
tggcatagtcagaacttagttcgta

SEQ ID NO: 3292227 - DNA, 25 bp, Homo sapien
tagtcagaacttagttcgtaagaca

SEQ ID NO: 3292228 - DNA, 25 bp, Homo sapien
gaacttagttcgtaagacacagaca

SEQ ID NO: 3292229 - DNA, 25 bp, Homo sapien
ctggcacactgaacactctgctgct

SEQ ID NO: 3292230 - DNA, 25 bp, Homo sapien
ttcatttgtctgactgccttgttca

SEQ ID NO: 3292231 - DNA, 25 bp, Homo sapien
tggcacactgaacactctgctgctt

SEQ ID NO: 3292232 - DNA, 25 bp, Homo sapien
gttcacacttgccaagccaacatct

SEQ ID NO: 3292233 - DNA, 25 bp, Homo sapien
gggacctgtaagctatctccagcta

SEQ ID NO: 3292234 - DNA, 25 bp, Homo sapien
aatcaaacgatatccaagctctggg

SEQ ID NO: 3292235 - DNA, 25 bp, Homo sapien
cagctaaggctcctacatatgggtc

SEQ ID NO: 3292236 - DNA, 25 bp, Homo sapien
tctccaatagcaatcaaacgatatc

SEQ ID NO: 3292237 - DNA, 25 bp, Homo sapien
tgcctttcaggccatgaacacctgt

SEQ ID NO: 3292238 - DNA, 25 bp, Homo sapien
gcctttcaggccatgaacacctgtc

SEQ ID NO: 3292239 - DNA, 25 bp, Homo sapien
ctgcctttcaggccatgaacacctg

SEQ ID NO: 3292240 - DNA, 25 bp, Homo sapien
cctttcaggccatgaacacctgtct

SEQ ID NO: 3292241 - DNA, 25 bp, Homo sapien
tccccagtggatcatgacactttcc

SEQ ID NO: 3292242 - DNA, 25 bp, Homo sapien
ccatttccccagtggatcatgacac

SEQ ID NO: 3292243 - DNA, 25 bp, Homo sapien
ggatcatgacactttcccatttcca

SEQ ID NO: 3292244 - DNA, 25 bp, Homo sapien
tcccatttccatcgccttgcctttg

SEQ ID NO: 3292245 - DNA, 25 bp, Homo sapien
agcattccaaagccttggctgtagt

SEQ ID NO: 3292246 - DNA, 25 bp, Homo sapien
gcattccaaagccttggctgtagtg

SEQ ID NO: 3292247 - DNA, 25 bp, Homo sapien
aagcattccaaagccttggctgtag

SEQ ID NO: 3292248 - DNA, 25 bp, Homo sapien
catagatatttttaccaggagcaag

SEQ ID NO: 3292249 - DNA, 25 bp, Homo sapien
taacagctgtgacatcatagtgaag

SEQ ID NO: 3292250 - DNA, 25 bp, Homo sapien
gcaagcagggtattaggaacttccc

SEQ ID NO: 3292251 - DNA, 25 bp, Homo sapien
tcaaattgcagatccatagatattt

SEQ ID NO: 3292252 - DNA, 25 bp, Homo sapien
gttagcactccccttgacaaggatg

SEQ ID NO: 3292253 - DNA, 25 bp, Homo sapien
aggagagaaggttagcactcccctt

SEQ ID NO: 3292254 - DNA, 25 bp, Homo sapien
gggcctgacaacatgcatatggtta

SEQ ID NO: 3292255 - DNA, 25 bp, Homo sapien
ctagtgttgtacaaaaggagagaag

SEQ ID NO: 3292256 - DNA, 25 bp, Homo sapien
caatgggctcgggttgttcttcaga

SEQ ID NO: 3292257 - DNA, 25 bp, Homo sapien
atttcttgtaaacaatgggctcggg

SEQ ID NO: 3292258 - DNA, 25 bp, Homo sapien
cagagcgaatctgctcctcattgct

SEQ ID NO: 3292259 - DNA, 25 bp, Homo sapien
ctcgggttgttcttcagagcgaatc

SEQ ID NO: 3292260 - DNA, 25 bp, Homo sapien
caataaagaaggtagtcagttgtag

SEQ ID NO: 3292261 - DNA, 25 bp, Homo sapien
ggtagtcagttgtagaacacaagga

SEQ ID NO: 3292262 - DNA, 25 bp, Homo sapien
taaagaaggtagtcagttgtagaac

SEQ ID NO: 3292263 - DNA, 25 bp, Homo sapien
gaaggtagtcagttgtagaacacaa

SEQ ID NO: 3292264 - DNA, 25 bp, Homo sapien
tgaaccagctcgtaaggcacagtgt

SEQ ID NO: 3292265 - DNA, 25 bp, Homo sapien
agctgcagttaacaccccagaggaa

SEQ ID NO: 3292266 - DNA, 25 bp, Homo sapien
taatgctgtggctttaggaaattcc

SEQ ID NO: 3292267 - DNA, 25 bp, Homo sapien
cagtacagaaccacagcgttccaga

SEQ ID NO: 3292268 - DNA, 25 bp, Homo sapien
tcttaagagcatgcatattccctgt

SEQ ID NO: 3292269 - DNA, 25 bp, Homo sapien
tgctccaggctatgacaaactgtta

SEQ ID NO: 3292270 - DNA, 25 bp, Homo sapien
gccctgacttcattcaggttctgga

SEQ ID NO: 3292271 - DNA, 25 bp, Homo sapien
caagagtatttaccatcctgaagtc

SEQ ID NO: 3292272 - DNA, 25 bp, Homo sapien
taacacacacggcaaaggcaaagtt

SEQ ID NO: 3292273 - DNA, 25 bp, Homo sapien
gcatccttgattgtacacgctgcaa

SEQ ID NO: 3292274 - DNA, 25 bp, Homo sapien
ttaactctgcagattccgctggatg

SEQ ID NO: 3292275 - DNA, 25 bp, Homo sapien
tactatgacctaagctgcacacaca

SEQ ID NO: 3292276 - DNA, 25 bp, Homo sapien
tcagaaaccaggactaggaacttgt

SEQ ID NO: 3292277 - DNA, 25 bp, Homo sapien
cacttgtgcaagtactggttctggg

SEQ ID NO: 3292278 - DNA, 25 bp, Homo sapien
caattgccccaataggacagtcaga

SEQ ID NO: 3292279 - DNA, 25 bp, Homo sapien
tagaaggcagagtaccatttgtttc

SEQ ID NO: 3292280 - DNA, 25 bp, Homo sapien
ccactttgggtgctagcagtacaca

SEQ ID NO: 3292281 - DNA, 25 bp, Homo sapien
gtattctttctgagcagggccggga

SEQ ID NO: 3292282 - DNA, 25 bp, Homo sapien
taataagaaacatctcagctgggca

SEQ ID NO: 3292283 - DNA, 25 bp, Homo sapien
gccgggaggcaacatcatctaccat

SEQ ID NO: 3292284 - DNA, 25 bp, Homo sapien
tctttataaggagtttctgaatctg

SEQ ID NO: 3292285 - DNA, 25 bp, Homo sapien
gcgaaatccaggagaacgcagcagc

SEQ ID NO: 3292286 - DNA, 25 bp, Homo sapien
gacttggtcgatggtattcggcaaa

SEQ ID NO: 3292287 - DNA, 25 bp, Homo sapien
agcaaattctgtgaaaggcccacga

SEQ ID NO: 3292288 - DNA, 25 bp, Homo sapien
ggagcataaccagtagagaacaatt

SEQ ID NO: 3292289 - DNA, 25 bp, Homo sapien
agcataaccagtagagaacaattga

SEQ ID NO: 3292290 - DNA, 25 bp, Homo sapien
gagcataaccagtagagaacaattg

SEQ ID NO: 3292291 - DNA, 25 bp, Homo sapien
ctggagcataaccagtagagaacaa

SEQ ID NO: 3292292 - DNA, 25 bp, Homo sapien
cgtaatatacgtctgaaaacgagac

SEQ ID NO: 3292293 - DNA, 25 bp, Homo sapien
cgacattgcacggacaaagtacgta

SEQ ID NO: 3292294 - DNA, 25 bp, Homo sapien
tggtatcatcaacaccgacattgca

SEQ ID NO: 3292295 - DNA, 25 bp, Homo sapien
tgagggtaccgttgcagcaattggt

SEQ ID NO: 3292296 - DNA, 25 bp, Homo sapien
attctatcatctccattttcctcat

SEQ ID NO: 3292297 - DNA, 25 bp, Homo sapien
tatattctatcatctccattttcct

SEQ ID NO: 3292298 - DNA, 25 bp, Homo sapien
cttatattctatcatctccattttc

SEQ ID NO: 3292299 - DNA, 25 bp, Homo sapien
tattctatcatctccattttcctca

SEQ ID NO: 3292300 - DNA, 25 bp, Homo sapien
cagaattccaccagtagctaactgt

SEQ ID NO: 3292301 - DNA, 25 bp, Homo sapien
attaacaaattgatgacgccaacag

SEQ ID NO: 3292302 - DNA, 25 bp, Homo sapien
gcagaatccaagtggagtcgggtgc

SEQ ID NO: 3292303 - DNA, 25 bp, Homo sapien
accagtagctaactgttcctgaaca

SEQ ID NO: 3292304 - DNA, 25 bp, Homo sapien
gaaagggtggcagttatctcgcaca

SEQ ID NO: 3292305 - DNA, 25 bp, Homo sapien
aaattccggagagcaaaagacatga

SEQ ID NO: 3292306 - DNA, 25 bp, Homo sapien
cacattggaagctgaatccaaacca

SEQ ID NO: 3292307 - DNA, 25 bp, Homo sapien
tgctgcccccgtgcttaaattccgg

SEQ ID NO: 3292308 - DNA, 25 bp, Homo sapien
ctttatttccatagcacaaatagcg

SEQ ID NO: 3292309 - DNA, 25 bp, Homo sapien
gctgtagttattagctaaaggattt

SEQ ID NO: 3292310 - DNA, 25 bp, Homo sapien
attagctaaaggatttgtataaggg

SEQ ID NO: 3292311 - DNA, 25 bp, Homo sapien
atagcacaaatagcgcctgctgtag

SEQ ID NO: 3292312 - DNA, 25 bp, Homo sapien
gtgtcatttgttgaccaatatcaca

SEQ ID NO: 3292313 - DNA, 25 bp, Homo sapien
aaagaatggcaaagtgccttcatcc

SEQ ID NO: 3292314 - DNA, 25 bp, Homo sapien
caagattgtaaataacctgtgtcat

SEQ ID NO: 3292315 - DNA, 25 bp, Homo sapien
gccctgaccttccttgatgatctag

SEQ ID NO: 3292316 - DNA, 25 bp, Homo sapien
taagatgcctggcaatagtttttat

SEQ ID NO: 3292317 - DNA, 25 bp, Homo sapien
ttcttggttaagatgcctggcaata

SEQ ID NO: 3292318 - DNA, 25 bp, Homo sapien
ggcatctcttttggaccaccccaac

SEQ ID NO: 3292319 - DNA, 25 bp, Homo sapien
caactgatttgcacgaactgcaact

SEQ ID NO: 3292320 - DNA, 25 bp, Homo sapien
tacatttcctagtaacgtaagcgga

SEQ ID NO: 3292321 - DNA, 25 bp, Homo sapien
tattagataagaactgcaccctggg

SEQ ID NO: 3292322 - DNA, 25 bp, Homo sapien
cgtaagcggagaaaacagcagtttg

SEQ ID NO: 3292323 - DNA, 25 bp, Homo sapien
gcatacttatccatgtgatcctgtg

SEQ ID NO: 3292324 - DNA, 25 bp, Homo sapien
ttgctgctgattccgttcctgtttt

SEQ ID NO: 3292325 - DNA, 25 bp, Homo sapien
gttgctgctgattccgttcctgttt

SEQ ID NO: 3292326 - DNA, 25 bp, Homo sapien
tgttgctgctgattccgttcctgtt

SEQ ID NO: 3292327 - DNA, 25 bp, Homo sapien
tgctgctgattccgttcctgttttg

SEQ ID NO: 3292328 - DNA, 25 bp, Homo sapien
aagaaagccactatttttgaaatat

SEQ ID NO: 3292329 - DNA, 25 bp, Homo sapien
tttttgaaatatcccatttgaataa

SEQ ID NO: 3292330 - DNA, 25 bp, Homo sapien
tttgaaatatcccatttgaataatc

SEQ ID NO: 3292331 - DNA, 25 bp, Homo sapien
ctgaaaacaagaaagccactatttt

SEQ ID NO: 3292332 - DNA, 25 bp, Homo sapien
ggtcacgatgattaaacactaagca

SEQ ID NO: 3292333 - DNA, 25 bp, Homo sapien
taacgctaaaatggtcacaatgaaa

SEQ ID NO: 3292334 - DNA, 25 bp, Homo sapien
gtcacaatgaaatggtcacgatgat

SEQ ID NO: 3292335 - DNA, 25 bp, Homo sapien
ttttaacgctaaaatggtcacaatg

SEQ ID NO: 3292336 - DNA, 25 bp, Homo sapien
agggcctcgtaccagccgttcgcat

SEQ ID NO: 3292337 - DNA, 25 bp, Homo sapien
gcgtgcacgccgagcagtacttcct

SEQ ID NO: 3292338 - DNA, 25 bp, Homo sapien
ttcgcatgtactgcagagactggtg

SEQ ID NO: 3292339 - DNA, 25 bp, Homo sapien
tgacagcaccccgtaaggccacggt

SEQ ID NO: 3292340 - DNA, 25 bp, Homo sapien
gaaccggcgcaagcggcaggtccct

SEQ ID NO: 3292341 - DNA, 25 bp, Homo sapien
aggaaccggcgcaagcggcaggtcc

SEQ ID NO: 3292342 - DNA, 25 bp, Homo sapien
ctcgtaggaaccggcgcaagcggca

SEQ ID NO: 3292343 - DNA, 25 bp, Homo sapien
gtaggaaccggcgcaagcggcaggt

SEQ ID NO: 3292344 - DNA, 25 bp, Homo sapien
gcagggcagggagcggccgcagcca

SEQ ID NO: 3292345 - DNA, 25 bp, Homo sapien
ctgcagggcagggagcggccgcagc

SEQ ID NO: 3292346 - DNA, 25 bp, Homo sapien
gggcagggagcggccgcagccaccg

SEQ ID NO: 3292347 - DNA, 25 bp, Homo sapien
agggcagggagcggccgcagccacc

SEQ ID NO: 3292348 - DNA, 25 bp, Homo sapien
caagccggtgacgtcttgcgtcgca

SEQ ID NO: 3292349 - DNA, 25 bp, Homo sapien
ggcctactgcgcacacgcgaaagtt

SEQ ID NO: 3292350 - DNA, 25 bp, Homo sapien
gaaagtttcccgctgctagggtgta

SEQ ID NO: 3292351 - DNA, 25 bp, Homo sapien
caacagcgggcataaagcgcatgcg

SEQ ID NO: 3292352 - DNA, 25 bp, Homo sapien
ggagctctcgccttgtaaagttcat

SEQ ID NO: 3292353 - DNA, 25 bp, Homo sapien
gggagctctcgccttgtaaagttca

SEQ ID NO: 3292354 - DNA, 25 bp, Homo sapien
tcaaaacacggatggactattattt

SEQ ID NO: 3292355 - DNA, 25 bp, Homo sapien
ttctttataaacagtgaagtcagtg

SEQ ID NO: 3292356 - DNA, 25 bp, Homo sapien
ggagaaaaatgactatacgtagtca

SEQ ID NO: 3292357 - DNA, 25 bp, Homo sapien
taataaactagaggatctgaagaga

SEQ ID NO: 3292358 - DNA, 25 bp, Homo sapien
gagcatttcaatctatatcccctgg

SEQ ID NO: 3292359 - DNA, 25 bp, Homo sapien
tgatccccaagactaaatacggagc

SEQ ID NO: 3292360 - DNA, 25 bp, Homo sapien
tgttctccagcaggattaccttaaa

SEQ ID NO: 3292361 - DNA, 25 bp, Homo sapien
taaaaatgttcctagtacagacttc

SEQ ID NO: 3292362 - DNA, 25 bp, Homo sapien
tctggatatgtttgagaagtcatct

SEQ ID NO: 3292363 - DNA, 25 bp, Homo sapien
tttacttgacaaccaaggaaccatg

SEQ ID NO: 3292364 - DNA, 25 bp, Homo sapien
ccatgagacagggtaggacacataa

SEQ ID NO: 3292365 - DNA, 25 bp, Homo sapien
tgttaatatcatcaactctaggtga

SEQ ID NO: 3292366 - DNA, 25 bp, Homo sapien
cataaattgtcttcgtgacaaatgc

SEQ ID NO: 3292367 - DNA, 25 bp, Homo sapien
tcccactgagtagtttagtgtggcc

SEQ ID NO: 3292368 - DNA, 25 bp, Homo sapien
ggttaaatggagactttacactgta

SEQ ID NO: 3292369 - DNA, 25 bp, Homo sapien
tgtttcaagtggatggaatatataa

SEQ ID NO: 3292370 - DNA, 25 bp, Homo sapien
tatatgctgactgggaacagtggtg

SEQ ID NO: 3292371 - DNA, 25 bp, Homo sapien
tgtagcagccattacagtgaaaatc

SEQ ID NO: 3292372 - DNA, 25 bp, Homo sapien
tcttctatatgtgccttgctacaaa

SEQ ID NO: 3292373 - DNA, 25 bp, Homo sapien
cagaaccttttcactatcagaaaga

SEQ ID NO: 3292374 - DNA, 25 bp, Homo sapien
tgtatgaaggaaacatccagatttc

SEQ ID NO: 3292375 - DNA, 25 bp, Homo sapien
aagtctacataaagtagagcctcta

SEQ ID NO: 3292376 - DNA, 25 bp, Homo sapien
aagtagagcctctatactgacatat

SEQ ID NO: 3292377 - DNA, 25 bp, Homo sapien
tatgaaggtacatatctcacattaa

SEQ ID NO: 3292378 - DNA, 25 bp, Homo sapien
gccattctaaaacttcaggatcaag

SEQ ID NO: 3292379 - DNA, 25 bp, Homo sapien
tgctaaatttccgtgtttgctcaga

SEQ ID NO: 3292380 - DNA, 25 bp, Homo sapien
tatttgccattctaaaacttcagga

SEQ ID NO: 3292381 - DNA, 25 bp, Homo sapien
gtttgctcagaagcagtttacagta

SEQ ID NO: 3292382 - DNA, 25 bp, Homo sapien
tacacacttcagtcaagcacatcag

SEQ ID NO: 3292383 - DNA, 25 bp, Homo sapien
tgctaactaaggtaaaacggatgat

SEQ ID NO: 3292384 - DNA, 25 bp, Homo sapien
gaaaaggaatctgcaggctaacaag

SEQ ID NO: 3292385 - DNA, 25 bp, Homo sapien
ggaatgggcagtcacaaatgttcac

SEQ ID NO: 3292386 - DNA, 25 bp, Homo sapien
cagccaagctggttcatatgcacac

SEQ ID NO: 3292387 - DNA, 25 bp, Homo sapien
tcagccaagctggttcatatgcaca

SEQ ID NO: 3292388 - DNA, 25 bp, Homo sapien
gaggtgcccagggtccagtccacac

SEQ ID NO: 3292389 - DNA, 25 bp, Homo sapien
tgttcatgtgaggtgcccagggtcc

SEQ ID NO: 3292390 - DNA, 25 bp, Homo sapien
gttcatgtgaggtgcccagggtcca

SEQ ID NO: 3292391 - DNA, 25 bp, Homo sapien
atgtgaggtgcccagggtccagtcc

SEQ ID NO: 3292392 - DNA, 25 bp, Homo sapien
accatcagggataggtgctactgga

SEQ ID NO: 3292393 - DNA, 25 bp, Homo sapien
gagctggaaaccatctttatcagtg

SEQ ID NO: 3292394 - DNA, 25 bp, Homo sapien
ggaggaatcattgcattcccataca

SEQ ID NO: 3292395 - DNA, 25 bp, Homo sapien
gagggccattattttccgtggagct

SEQ ID NO: 3292396 - DNA, 25 bp, Homo sapien
cacacacattaacatccaagtcatt

SEQ ID NO: 3292397 - DNA, 25 bp, Homo sapien
cattaacatccaagtcattgttcat

SEQ ID NO: 3292398 - DNA, 25 bp, Homo sapien
cacacattaacatccaagtcattgt

SEQ ID NO: 3292399 - DNA, 25 bp, Homo sapien
cacattaacatccaagtcattgttc

SEQ ID NO: 3292400 - DNA, 25 bp, Homo sapien
gatcataggatttcccatcccaggg

SEQ ID NO: 3292401 - DNA, 25 bp, Homo sapien
tgtagcctgcaggaacatgctgatg

SEQ ID NO: 3292402 - DNA, 25 bp, Homo sapien
tgtactatctcgctccattgcttga

SEQ ID NO: 3292403 - DNA, 25 bp, Homo sapien
aatactcctgggtcagacatcggtc

SEQ ID NO: 3292404 - DNA, 25 bp, Homo sapien
gggacagagctcataaagaagtgat

SEQ ID NO: 3292405 - DNA, 25 bp, Homo sapien
catgcttgcattagatattttctga

SEQ ID NO: 3292406 - DNA, 25 bp, Homo sapien
ccatggtttgtaagtagtgacataa

SEQ ID NO: 3292407 - DNA, 25 bp, Homo sapien
tagaaatgactacgaggctgggcgt

SEQ ID NO: 3292408 - DNA, 25 bp, Homo sapien
aatcccttcaaaggaccagatgcca

SEQ ID NO: 3292409 - DNA, 25 bp, Homo sapien
tcaaaggaccagatgccactatgtc

SEQ ID NO: 3292410 - DNA, 25 bp, Homo sapien
caccaatcccttcaaaggaccagat

SEQ ID NO: 3292411 - DNA, 25 bp, Homo sapien
ccttcaaaggaccagatgccactat

SEQ ID NO: 3292412 - DNA, 25 bp, Homo sapien
tagacaaattgctcccaataacaga

SEQ ID NO: 3292413 - DNA, 25 bp, Homo sapien
gcagaacgttcagtcccaataggga

SEQ ID NO: 3292414 - DNA, 25 bp, Homo sapien
tccagtttgcctgatacgtgcagaa

SEQ ID NO: 3292415 - DNA, 25 bp, Homo sapien
gatggagctgacgttccagtttgcc

SEQ ID NO: 3292416 - DNA, 25 bp, Homo sapien
tgagacacattgctgggcttttctg

SEQ ID NO: 3292417 - DNA, 25 bp, Homo sapien
tgctgggcttttctgaccctaacgg

SEQ ID NO: 3292418 - DNA, 25 bp, Homo sapien
agacacattgctgggcttttctgac

SEQ ID NO: 3292419 - DNA, 25 bp, Homo sapien
attgctgggcttttctgaccctaac

SEQ ID NO: 3292420 - DNA, 25 bp, Homo sapien
gatggggcaggagatggtgcacgaa

SEQ ID NO: 3292421 - DNA, 25 bp, Homo sapien
tgatggggcaggagatggtgcacga

SEQ ID NO: 3292422 - DNA, 25 bp, Homo sapien
ctgatgatggggcaggagatggtgc

SEQ ID NO: 3292423 - DNA, 25 bp, Homo sapien
gatgatggggcaggagatggtgcac

SEQ ID NO: 3292424 - DNA, 25 bp, Homo sapien
tcccgaggatactgactgtgcagaa

SEQ ID NO: 3292425 - DNA, 25 bp, Homo sapien
ctcccgaggatactgactgtgcaga

SEQ ID NO: 3292426 - DNA, 25 bp, Homo sapien
gtgctcctccaaggggtgccccagg

SEQ ID NO: 3292427 - DNA, 25 bp, Homo sapien
taaagttagcagctgcgggtgctcc

SEQ ID NO: 3292428 - DNA, 25 bp, Homo sapien
gggtgccccaggtccgtacatctga

SEQ ID NO: 3292429 - DNA, 25 bp, Homo sapien
agcagctgcgggtgctcctccaagg

SEQ ID NO: 3292430 - DNA, 25 bp, Homo sapien
tacagaaccatatggcgagtccata

SEQ ID NO: 3292431 - DNA, 25 bp, Homo sapien
gaaggtgttacagaaccatatggcg

SEQ ID NO: 3292432 - DNA, 25 bp, Homo sapien
tatggcgagtccatattgacaatac

SEQ ID NO: 3292433 - DNA, 25 bp, Homo sapien
cccaaatgtgttgaagaaggtgtta

SEQ ID NO: 3292434 - DNA, 25 bp, Homo sapien
ctataatgtagaaggtcatcataat

SEQ ID NO: 3292435 - DNA, 25 bp, Homo sapien
gaaggtcatcataatttataatagt

SEQ ID NO: 3292436 - DNA, 25 bp, Homo sapien
ggtcatcataatttataatagttac

SEQ ID NO: 3292437 - DNA, 25 bp, Homo sapien
tgtagaaggtcatcataatttataa

SEQ ID NO: 3292438 - DNA, 25 bp, Homo sapien
ctacatatatcagtgttgcccagta

SEQ ID NO: 3292439 - DNA, 25 bp, Homo sapien
tgatgaactcccagaagaactgctg

SEQ ID NO: 3292440 - DNA, 25 bp, Homo sapien
cctgttcggaggaagatgccacttt

SEQ ID NO: 3292441 - DNA, 25 bp, Homo sapien
tgctgatccacaatccaaagggctg

SEQ ID NO: 3292442 - DNA, 25 bp, Homo sapien
ttcaaacaatgtgctaaagggccca

SEQ ID NO: 3292443 - DNA, 25 bp, Homo sapien
cagcccaagaactcaaattctaaag

SEQ ID NO: 3292444 - DNA, 25 bp, Homo sapien
gcccagcccaagaactcaaattcta

SEQ ID NO: 3292445 - DNA, 25 bp, Homo sapien
cgtgcccagcccaagaactcaaatt

SEQ ID NO: 3292446 - DNA, 25 bp, Homo sapien
gaactcaaattctaaagacacaatc

SEQ ID NO: 3292447 - DNA, 25 bp, Homo sapien
tttatttaaacctttgctacacatg

SEQ ID NO: 3292448 - DNA, 25 bp, Homo sapien
aaaagtatactatgtaacacaaagt

SEQ ID NO: 3292449 - DNA, 25 bp, Homo sapien
aagtatactatgtaacacaaagttc

SEQ ID NO: 3292450 - DNA, 25 bp, Homo sapien
taaacctttgctacacatgcataca

SEQ ID NO: 3292451 - DNA, 25 bp, Homo sapien
tatagtgattatccggtctccagtc

SEQ ID NO: 3292452 - DNA, 25 bp, Homo sapien
tatcaatatctatgtgtgcaccagt

SEQ ID NO: 3292453 - DNA, 25 bp, Homo sapien
cactctggatatcacagttgatgga

SEQ ID NO: 3292454 - DNA, 25 bp, Homo sapien
cagtaaactcccgaatagcattgat

SEQ ID NO: 3292455 - DNA, 25 bp, Homo sapien
cttttgcccacgcttaggacttgct

SEQ ID NO: 3292456 - DNA, 25 bp, Homo sapien
ttactggtcccttcactgatagttt

SEQ ID NO: 3292457 - DNA, 25 bp, Homo sapien
gctactgttaacttcccatttggag

SEQ ID NO: 3292458 - DNA, 25 bp, Homo sapien
tgtacaagtagatagagaattactg

SEQ ID NO: 3292459 - DNA, 25 bp, Homo sapien
cccttggaaaccacaatccatattt

SEQ ID NO: 3292460 - DNA, 25 bp, Homo sapien
taatcacagtaataatcccttggaa

SEQ ID NO: 3292461 - DNA, 25 bp, Homo sapien
gagccaactttaagaagatactatc

SEQ ID NO: 3292462 - DNA, 25 bp, Homo sapien
tatctagggtacacatttagcagag

SEQ ID NO: 3292463 - DNA, 25 bp, Homo sapien
tactactttcatcgctgcagctgga

SEQ ID NO: 3292464 - DNA, 25 bp, Homo sapien
gaatgattgtcactcttacgactgc

SEQ ID NO: 3292465 - DNA, 25 bp, Homo sapien
tgctgctcacagtggtagtgaccac

SEQ ID NO: 3292466 - DNA, 25 bp, Homo sapien
gagaacctgccaaagttgtccaggt

SEQ ID NO: 3292467 - DNA, 25 bp, Homo sapien
tggcacttggaggttctgtcaagac

SEQ ID NO: 3292468 - DNA, 25 bp, Homo sapien
tggttgtggcacttggaggttctgt

SEQ ID NO: 3292469 - DNA, 25 bp, Homo sapien
gttgtggcacttggaggttctgtca

SEQ ID NO: 3292470 - DNA, 25 bp, Homo sapien
cacttggaggttctgtcaagacttc

SEQ ID NO: 3292471 - DNA, 25 bp, Homo sapien
taagtgttcccagaatgtatttagc

SEQ ID NO: 3292472 - DNA, 25 bp, Homo sapien
tagctataagcacttgaagaaaaga

SEQ ID NO: 3292473 - DNA, 25 bp, Homo sapien
tgtatttagctataagcacttgaag

SEQ ID NO: 3292474 - DNA, 25 bp, Homo sapien
ccagaatgtatttagctataagcac

SEQ ID NO: 3292475 - DNA, 25 bp, Homo sapien
tccaggaaggaaaccaaggggcaga

SEQ ID NO: 3292476 - DNA, 25 bp, Homo sapien
ctccaggaaggaaaccaaggggcag

SEQ ID NO: 3292477 - DNA, 25 bp, Homo sapien
cacaactccaggaaggaaaccaagg

SEQ ID NO: 3292478 - DNA, 25 bp, Homo sapien
gcagtgaccgtgtgtgctgcctgtg

SEQ ID NO: 3292479 - DNA, 25 bp, Homo sapien
gagcagtgaccgtgtgtgctgcctg

SEQ ID NO: 3292480 - DNA, 25 bp, Homo sapien
ctgcctgtgcctcactgaaggagca

SEQ ID NO: 3292481 - DNA, 25 bp, Homo sapien
agcagtgaccgtgtgtgctgcctgt

SEQ ID NO: 3292482 - DNA, 25 bp, Homo sapien
ttagccacaccctgcacatgctgca

SEQ ID NO: 3292483 - DNA, 25 bp, Homo sapien
tagccacaccctgcacatgctgcat

SEQ ID NO: 3292484 - DNA, 25 bp, Homo sapien
ctgcatccccactcccttagtagta

SEQ ID NO: 3292485 - DNA, 25 bp, Homo sapien
cttagtagtagcaacactgctctct

SEQ ID NO: 3292486 - DNA, 25 bp, Homo sapien
ccatctcatcctggcatgccctact

SEQ ID NO: 3292487 - DNA, 25 bp, Homo sapien
tctcatcctggcatgccctactcca

SEQ ID NO: 3292488 - DNA, 25 bp, Homo sapien
tcatcctggcatgccctactccact

SEQ ID NO: 3292489 - DNA, 25 bp, Homo sapien
tcctggcatgccctactccactgcc

SEQ ID NO: 3292490 - DNA, 25 bp, Homo sapien
tccgttattgctgccgctaccagca

SEQ ID NO: 3292491 - DNA, 25 bp, Homo sapien
cccacaatacagtcagtcctcttta

SEQ ID NO: 3292492 - DNA, 25 bp, Homo sapien
tatccatagatttaaccaacactag

SEQ ID NO: 3292493 - DNA, 25 bp, Homo sapien
tatccgtgagggtcctggaaaccat

SEQ ID NO: 3292494 - DNA, 25 bp, Homo sapien
ggtttcatggcaatggttccttccc

SEQ ID NO: 3292495 - DNA, 25 bp, Homo sapien
ctacaggagtatgctactgtgtcca

SEQ ID NO: 3292496 - DNA, 25 bp, Homo sapien
ggtgccagatcatggctcatgacag

SEQ ID NO: 3292497 - DNA, 25 bp, Homo sapien
ccccaatccccagtagctagctggg

SEQ ID NO: 3292498 - DNA, 25 bp, Homo sapien
ggagtatgctactgtgtccagataa

SEQ ID NO: 3292499 - DNA, 25 bp, Homo sapien
gcttggagttcaaagttctctttat

SEQ ID NO: 3292500 - DNA, 25 bp, Homo sapien
gcagcttggagttcaaagttctctt

SEQ ID NO: 3292501 - DNA, 25 bp, Homo sapien
ttgagcagcttggagttcaaagttc

SEQ ID NO: 3292502 - DNA, 25 bp, Homo sapien
ttcttgagcagcttggagttcaaag

SEQ ID NO: 3292503 - DNA, 25 bp, Homo sapien
tttttctcttttcgcagccaaagcc

SEQ ID NO: 3292504 - DNA, 25 bp, Homo sapien
ttttttctcttttcgcagccaaagc

SEQ ID NO: 3292505 - DNA, 25 bp, Homo sapien
tattcaaaccactctaaagagacaa

SEQ ID NO: 3292506 - DNA, 25 bp, Homo sapien
gatacatagcttttaatcattaagg

SEQ ID NO: 3292507 - DNA, 25 bp, Homo sapien
cattaaggacatgtaagttgaaccg

SEQ ID NO: 3292508 - DNA, 25 bp, Homo sapien
tggagaagaagttgtcacataatca

SEQ ID NO: 3292509 - DNA, 25 bp, Homo sapien
gagactacctctggagggtggaaca

SEQ ID NO: 3292510 - DNA, 25 bp, Homo sapien
ttcacagaatactagataggcaccg

SEQ ID NO: 3292511 - DNA, 25 bp, Homo sapien
cacttttatgagagaagagaaccct

SEQ ID NO: 3292512 - DNA, 25 bp, Homo sapien
caaggtaagtctgtcaatgggaagg

SEQ ID NO: 3292513 - DNA, 25 bp, Homo sapien
tctgataacccatgacactcaaacc

SEQ ID NO: 3292514 - DNA, 25 bp, Homo sapien
gttctgataacccatgacactcaaa

SEQ ID NO: 3292515 - DNA, 25 bp, Homo sapien
tgataacccatgacactcaaaccag

SEQ ID NO: 3292516 - DNA, 25 bp, Homo sapien
gataacccatgacactcaaaccagc

SEQ ID NO: 3292517 - DNA, 25 bp, Homo sapien
ctaggtgagagataagtcttgttcc

SEQ ID NO: 3292518 - DNA, 25 bp, Homo sapien
gataagtcttgttcctgaaaagggc

SEQ ID NO: 3292519 - DNA, 25 bp, Homo sapien
tgagagataagtcttgttcctgaaa

SEQ ID NO: 3292520 - DNA, 25 bp, Homo sapien
cttaggctaggtgagagataagtct

SEQ ID NO: 3292521 - DNA, 25 bp, Homo sapien
ggcactaattcagaggtcctaggga

SEQ ID NO: 3292522 - DNA, 25 bp, Homo sapien
ggcacggagctctaaaagtaagcag

SEQ ID NO: 3292523 - DNA, 25 bp, Homo sapien
tgacccaactttacatggcacggag

SEQ ID NO: 3292524 - DNA, 25 bp, Homo sapien
catcataagtttgcaggcggtagct

SEQ ID NO: 3292525 - DNA, 25 bp, Homo sapien
gtcaagaccaactccagcgatgaag

SEQ ID NO: 3292526 - DNA, 25 bp, Homo sapien
tatggagaatctcaacttggaccag

SEQ ID NO: 3292527 - DNA, 25 bp, Homo sapien
cgaggaataacttacgtatggagaa

SEQ ID NO: 3292528 - DNA, 25 bp, Homo sapien
tttccaaattagaaagactgaccaa

SEQ ID NO: 3292529 - DNA, 25 bp, Homo sapien
tttcagaccatagggaaagcaaaac

SEQ ID NO: 3292530 - DNA, 25 bp, Homo sapien
aaaacatgaggacatctaagggaca

SEQ ID NO: 3292531 - DNA, 25 bp, Homo sapien
ggactactatatgttgacccacatg

SEQ ID NO: 3292532 - DNA, 25 bp, Homo sapien
aaagtacaccatcacaatcagtgtg

SEQ ID NO: 3292533 - DNA, 25 bp, Homo sapien
cacacaaactggctcaattatactg

SEQ ID NO: 3292534 - DNA, 25 bp, Homo sapien
tgtgggtaggcagatcattacagga

SEQ ID NO: 3292535 - DNA, 25 bp, Homo sapien
aaaggccttataggtaattgcagag

SEQ ID NO: 3292536 - DNA, 25 bp, Homo sapien
cattacaggatcttaaaaggcctta

SEQ ID NO: 3292537 - DNA, 25 bp, Homo sapien
atagatgggaatgatgttgtagtct

SEQ ID NO: 3292538 - DNA, 25 bp, Homo sapien
aatagatgggaatgatgttgtagtc

SEQ ID NO: 3292539 - DNA, 25 bp, Homo sapien
agatgggaatgatgttgtagtctgc

SEQ ID NO: 3292540 - DNA, 25 bp, Homo sapien
tagatgggaatgatgttgtagtctg

SEQ ID NO: 3292541 - DNA, 25 bp, Homo sapien
actattgactccatacaaagatgac

SEQ ID NO: 3292542 - DNA, 25 bp, Homo sapien
tctttggcttgtactattgactcca

SEQ ID NO: 3292543 - DNA, 25 bp, Homo sapien
ttcagcagcctgtctatctttggct

SEQ ID NO: 3292544 - DNA, 25 bp, Homo sapien
actcctctaacaaaatgctggcgtt

SEQ ID NO: 3292545 - DNA, 25 bp, Homo sapien
tactactcaaactaggaattcttag

SEQ ID NO: 3292546 - DNA, 25 bp, Homo sapien
tatattaaccgaatagagtcccttg

SEQ ID NO: 3292547 - DNA, 25 bp, Homo sapien
gagtcccttgctcatatagtgaaca

SEQ ID NO: 3292548 - DNA, 25 bp, Homo sapien
gcaagaatctcttaaatcgcatact

SEQ ID NO: 3292549 - DNA, 25 bp, Homo sapien
tctttgactaagtagcgcaccacct

SEQ ID NO: 3292550 - DNA, 25 bp, Homo sapien
ctttgactaagtagcgcaccacctt

SEQ ID NO: 3292551 - DNA, 25 bp, Homo sapien
atcagtgatggttgctatgtatctc

SEQ ID NO: 3292552 - DNA, 25 bp, Homo sapien
cttatcagtgatggttgctatgtat

SEQ ID NO: 3292553 - DNA, 25 bp, Homo sapien
ttgaaaacagactctaacagttcag

SEQ ID NO: 3292554 - DNA, 25 bp, Homo sapien
tgaaaacagactctaacagttcagt

SEQ ID NO: 3292555 - DNA, 25 bp, Homo sapien
tagatatcaatgtcagattgaaaac

SEQ ID NO: 3292556 - DNA, 25 bp, Homo sapien
tcaatgtcagattgaaaacagactc

SEQ ID NO: 3292557 - DNA, 25 bp, Homo sapien
tgtcaaacttgtacgacctctagag

SEQ ID NO: 3292558 - DNA, 25 bp, Homo sapien
cacagttgcacatgttaggtactca

SEQ ID NO: 3292559 - DNA, 25 bp, Homo sapien
ctaaattgtggtggctgtgaatacc

SEQ ID NO: 3292560 - DNA, 25 bp, Homo sapien
tatagtactctagcccacagttgca

SEQ ID NO: 3292561 - DNA, 25 bp, Homo sapien
tgtgaagattaagactgcaactaga

SEQ ID NO: 3292562 - DNA, 25 bp, Homo sapien
ctctgtagtggtaatacaagaaaac

SEQ ID NO: 3292563 - DNA, 25 bp, Homo sapien
tcttaactggatttacactttgtga

SEQ ID NO: 3292564 - DNA, 25 bp, Homo sapien
tagaggcagggcttcgctacatctg

SEQ ID NO: 3292565 - DNA, 25 bp, Homo sapien
ctttctaaatgctgccataagagga

SEQ ID NO: 3292566 - DNA, 25 bp, Homo sapien
tttctaaatgctgccataagaggag

SEQ ID NO: 3292567 - DNA, 25 bp, Homo sapien
actgaaccacatcgaggtgtccacc

SEQ ID NO: 3292568 - DNA, 25 bp, Homo sapien
accagtaactgaaccacatcgaggt

SEQ ID NO: 3292569 - DNA, 25 bp, Homo sapien
tgcacctgcttgcaccagtaactga

SEQ ID NO: 3292570 - DNA, 25 bp, Homo sapien
cagtaactgaaccacatcgaggtgt

SEQ ID NO: 3292571 - DNA, 25 bp, Homo sapien
gttccccttcttgttacgtacatca

SEQ ID NO: 3292572 - DNA, 25 bp, Homo sapien
ttgctgctagccacaatggagtgtt

SEQ ID NO: 3292573 - DNA, 25 bp, Homo sapien
gccacaatggagtgttccccttctt

SEQ ID NO: 3292574 - DNA, 25 bp, Homo sapien
gttacgtacatcaatatgagctccc

SEQ ID NO: 3292575 - DNA, 25 bp, Homo sapien
aaaaccaatgacacagatagcattg

SEQ ID NO: 3292576 - DNA, 25 bp, Homo sapien
ctaaaaaccaatgacacagatagca

SEQ ID NO: 3292577 - DNA, 25 bp, Homo sapien
aaccaatgacacagatagcattgtc

SEQ ID NO: 3292578 - DNA, 25 bp, Homo sapien
taaaaaccaatgacacagatagcat

SEQ ID NO: 3292579 - DNA, 25 bp, Homo sapien
tatgaagggtatggtaacaacatac

SEQ ID NO: 3292580 - DNA, 25 bp, Homo sapien
catatatgaagggtatggtaacaac

SEQ ID NO: 3292581 - DNA, 25 bp, Homo sapien
tagtaacacttgtgttcatatatga

SEQ ID NO: 3292582 - DNA, 25 bp, Homo sapien
cacttgtgttcatatatgaagggta

SEQ ID NO: 3292583 - DNA, 25 bp, Homo sapien
acctccgcatatccaccagaggcag

SEQ ID NO: 3292584 - DNA, 25 bp, Homo sapien
tgtaatgccctttatctgctgctat

SEQ ID NO: 3292585 - DNA, 25 bp, Homo sapien
tatccaaaagaactcggcccacctc

SEQ ID NO: 3292586 - DNA, 25 bp, Homo sapien
atctgctgctatggttaaagctgta

SEQ ID NO: 3292587 - DNA, 25 bp, Homo sapien
tgtctaacaggagcttaacagcagc

SEQ ID NO: 3292588 - DNA, 25 bp, Homo sapien
cttggaagcaggctaaagtaagggc

SEQ ID NO: 3292589 - DNA, 25 bp, Homo sapien
tgagcatttatgtcagagcccatgt

SEQ ID NO: 3292590 - DNA, 25 bp, Homo sapien
taagggcagtgttccgattggtttc

SEQ ID NO: 3292591 - DNA, 25 bp, Homo sapien
agagatgcccaatttgctaccagtt

SEQ ID NO: 3292592 - DNA, 25 bp, Homo sapien
ggagagatgcccaatttgctaccag

SEQ ID NO: 3292593 - DNA, 25 bp, Homo sapien
aggagagatgcccaatttgctacca

SEQ ID NO: 3292594 - DNA, 25 bp, Homo sapien
gagagatgcccaatttgctaccagt

SEQ ID NO: 3292595 - DNA, 25 bp, Homo sapien
tctcagctcctgcatttagtaatat

SEQ ID NO: 3292596 - DNA, 25 bp, Homo sapien
tttgcccctcgagctaacaatagct

SEQ ID NO: 3292597 - DNA, 25 bp, Homo sapien
tgtgctctttatttgcccctcgagc

SEQ ID NO: 3292598 - DNA, 25 bp, Homo sapien
tcctgtgctctttatttgcccctcg

SEQ ID NO: 3292599 - DNA, 25 bp, Homo sapien
ctttatttgcccctcgagctaacaa

SEQ ID NO: 3292600 - DNA, 25 bp, Homo sapien
gaagggaatctatggagacaacaca

SEQ ID NO: 3292601 - DNA, 25 bp, Homo sapien
caataattccttgatagagaaggga

SEQ ID NO: 3292602 - DNA, 25 bp, Homo sapien
cacaaagaataggtgacttcaggaa

SEQ ID NO: 3292603 - DNA, 25 bp, Homo sapien
ttcaggcctgataaataggaaaacc

SEQ ID NO: 3292604 - DNA, 25 bp, Homo sapien
ggttctttcagactgggcttcaatg

SEQ ID NO: 3292605 - DNA, 25 bp, Homo sapien
tatttccacaacaccaacatgacca

SEQ ID NO: 3292606 - DNA, 25 bp, Homo sapien
cttcccccagaacaagccaaggaga

SEQ ID NO: 3292607 - DNA, 25 bp, Homo sapien
gtctgcaccattgtccagcaatatt

SEQ ID NO: 3292608 - DNA, 25 bp, Homo sapien
tagctcctctctctagcagtgtttg

SEQ ID NO: 3292609 - DNA, 25 bp, Homo sapien
ttgtaccagttcctcgtggccacca

SEQ ID NO: 3292610 - DNA, 25 bp, Homo sapien
agtgttagtgccgtgtcatgattac

SEQ ID NO: 3292611 - DNA, 25 bp, Homo sapien
tgtctcggtgctctatactagctcc

SEQ ID NO: 3292612 - DNA, 25 bp, Homo sapien
tggtagtggctcctagaatcgatca

SEQ ID NO: 3292613 - DNA, 25 bp, Homo sapien
caacaagcagtttaggaatataggg

SEQ ID NO: 3292614 - DNA, 25 bp, Homo sapien
gaaaagacttcagcggcctcagaat

SEQ ID NO: 3292615 - DNA, 25 bp, Homo sapien
gaggacatgtgacaaaaaagaggct

SEQ ID NO: 3292616 - DNA, 25 bp, Homo sapien
agtacccactatgtaagagcccaca

SEQ ID NO: 3292617 - DNA, 25 bp, Homo sapien
tatctgcaaggcattaagcctgtat

SEQ ID NO: 3292618 - DNA, 25 bp, Homo sapien
agtaggctccaccactaattagctg

SEQ ID NO: 3292619 - DNA, 25 bp, Homo sapien
gctgttgggcaaggtagttaatatc

SEQ ID NO: 3292620 - DNA, 25 bp, Homo sapien
atggcagggtagataggaagcatgg

SEQ ID NO: 3292621 - DNA, 25 bp, Homo sapien
atcaatggcagggtagataggaagc

SEQ ID NO: 3292622 - DNA, 25 bp, Homo sapien
tgtgcatcaatatcaatggcagggt

SEQ ID NO: 3292623 - DNA, 25 bp, Homo sapien
caatatcaatggcagggtagatagg

SEQ ID NO: 3292624 - DNA, 25 bp, Homo sapien
tgaaggagagatgataggacttgga

SEQ ID NO: 3292625 - DNA, 25 bp, Homo sapien
gaaggagagatgataggacttggag

SEQ ID NO: 3292626 - DNA, 25 bp, Homo sapien
ctgaaggagagatgataggacttgg

SEQ ID NO: 3292627 - DNA, 25 bp, Homo sapien
tgggtaggagtgtttgacattgcag

SEQ ID NO: 3292628 - DNA, 25 bp, Homo sapien
ggatgcagcaatactgtgggtagga

SEQ ID NO: 3292629 - DNA, 25 bp, Homo sapien
ggtaggagtgtttgacattgcagat

SEQ ID NO: 3292630 - DNA, 25 bp, Homo sapien
gggtaggagtgtttgacattgcaga

SEQ ID NO: 3292631 - DNA, 25 bp, Homo sapien
ggctggctaccattaacccttgttg

SEQ ID NO: 3292632 - DNA, 25 bp, Homo sapien
tgtgcttggcccagtactggctgtc

SEQ ID NO: 3292633 - DNA, 25 bp, Homo sapien
tcatccagcgtgtcattgagggtct

SEQ ID NO: 3292634 - DNA, 25 bp, Homo sapien
tggctgtccaactatcactccttgc

SEQ ID NO: 3292635 - DNA, 25 bp, Homo sapien
tctgtaagatttgcgatggaccctg

SEQ ID NO: 3292636 - DNA, 25 bp, Homo sapien
tgtaaccgtgcatagtctccctcag

SEQ ID NO: 3292637 - DNA, 25 bp, Homo sapien
aaagcttgaggcatcgccagaggct

SEQ ID NO: 3292638 - DNA, 25 bp, Homo sapien
gattggcgcaaaacccatctgagca

SEQ ID NO: 3292639 - DNA, 25 bp, Homo sapien
gctgctggacttttgtttagaagca

SEQ ID NO: 3292640 - DNA, 25 bp, Homo sapien
ggctgctggacttttgtttagaagc

SEQ ID NO: 3292641 - DNA, 25 bp, Homo sapien
ctgctggacttttgtttagaagcag

SEQ ID NO: 3292642 - DNA, 25 bp, Homo sapien
atggctgctggacttttgtttagaa

SEQ ID NO: 3292643 - DNA, 25 bp, Homo sapien
tggtggcaacattggcaggtggttt

SEQ ID NO: 3292644 - DNA, 25 bp, Homo sapien
tcaggctcctgaggtggaacaacca

SEQ ID NO: 3292645 - DNA, 25 bp, Homo sapien
tggcaggtggtttgtcaggctcctg

SEQ ID NO: 3292646 - DNA, 25 bp, Homo sapien
ccatgggcagtgcttgaactggtac

SEQ ID NO: 3292647 - DNA, 25 bp, Homo sapien
ggagttaactgagtgacatctggtg

SEQ ID NO: 3292648 - DNA, 25 bp, Homo sapien
gcttctatcaacatagttgagccat

SEQ ID NO: 3292649 - DNA, 25 bp, Homo sapien
gatagcaaacaacacttgtatggcc

SEQ ID NO: 3292650 - DNA, 25 bp, Homo sapien
gaaagcaagttattaggataatcca

SEQ ID NO: 3292651 - DNA, 25 bp, Homo sapien
agataaagccaacaggtcccagacg

SEQ ID NO: 3292652 - DNA, 25 bp, Homo sapien
agaacgcttcaagtgaaaaaggaga

SEQ ID NO: 3292653 - DNA, 25 bp, Homo sapien
ggagaaaatttacacttagaatgcc

SEQ ID NO: 3292654 - DNA, 25 bp, Homo sapien
aatcataggtttggtaaagaacgct

SEQ ID NO: 3292655 - DNA, 25 bp, Homo sapien
cggtgagtaggatctgccccatgag

SEQ ID NO: 3292656 - DNA, 25 bp, Homo sapien
acaagccagggacagtacagtatgg

SEQ ID NO: 3292657 - DNA, 25 bp, Homo sapien
gccaaaagtagttccaccactgcca

SEQ ID NO: 3292658 - DNA, 25 bp, Homo sapien
tttcaaacggtgagtaggatctgcc

SEQ ID NO: 3292659 - DNA, 25 bp, Homo sapien
cccattaccgagctttaatgattat

SEQ ID NO: 3292660 - DNA, 25 bp, Homo sapien
cacaaggccaatctcatttcacaaa

SEQ ID NO: 3292661 - DNA, 25 bp, Homo sapien
gaaaaggtttgagtatgcaccagta

SEQ ID NO: 3292662 - DNA, 25 bp, Homo sapien
tcccagacaaacacgatataatttg

SEQ ID NO: 3292663 - DNA, 25 bp, Homo sapien
tctaaagcatatcaccagtgcatgg

SEQ ID NO: 3292664 - DNA, 25 bp, Homo sapien
tgaaaggaccctcctgactcgaggt

SEQ ID NO: 3292665 - DNA, 25 bp, Homo sapien
gggacagcgattatgtacataatgc

SEQ ID NO: 3292666 - DNA, 25 bp, Homo sapien
tgttgaaagtaatttcgccagtaag

SEQ ID NO: 3292667 - DNA, 25 bp, Homo sapien
gaactgaacagtacaaacatgacca

SEQ ID NO: 3292668 - DNA, 25 bp, Homo sapien
agaactgaacagtacaaacatgacc

SEQ ID NO: 3292669 - DNA, 25 bp, Homo sapien
gctgttgttgcatgaacgttagctc

SEQ ID NO: 3292670 - DNA, 25 bp, Homo sapien
gttagtgctgtatcccctgttgctg

SEQ ID NO: 3292671 - DNA, 25 bp, Homo sapien
gaagtaagacatctgctacatcagt

SEQ ID NO: 3292672 - DNA, 25 bp, Homo sapien
gaccattttcacaggcatatgttag

SEQ ID NO: 3292673 - DNA, 25 bp, Homo sapien
taattagaaagtctgccacttccag

SEQ ID NO: 3292674 - DNA, 25 bp, Homo sapien
ctagttctatatcggctcctgcctt

SEQ ID NO: 3292675 - DNA, 25 bp, Homo sapien
aacaccctagttctatatcggctcc

SEQ ID NO: 3292676 - DNA, 25 bp, Homo sapien
gggtagaacaccctagttctatatc

SEQ ID NO: 3292677 - DNA, 25 bp, Homo sapien
ttcatgtccttctcgagctgcttcc

SEQ ID NO: 3292678 - DNA, 25 bp, Homo sapien
ccatcaatggtgtataaccttcatc

SEQ ID NO: 3292679 - DNA, 25 bp, Homo sapien
ttgaccaagaagtaatgccaccatt

SEQ ID NO: 3292680 - DNA, 25 bp, Homo sapien
taagtaaagccgcaagttccacatg

SEQ ID NO: 3292681 - DNA, 25 bp, Homo sapien
gaagtaacctagctacttcaacatg

SEQ ID NO: 3292682 - DNA, 25 bp, Homo sapien
taacctagctacttcaacatggcca

SEQ ID NO: 3292683 - DNA, 25 bp, Homo sapien
acctagctacttcaacatggccatc

SEQ ID NO: 3292684 - DNA, 25 bp, Homo sapien
gtcaagaagtaacctagctacttca

SEQ ID NO: 3292685 - DNA, 25 bp, Homo sapien
ctgcttccaaaagaaatcgcaccat

SEQ ID NO: 3292686 - DNA, 25 bp, Homo sapien
agaaatcgcaccatctctaagtgtc

SEQ ID NO: 3292687 - DNA, 25 bp, Homo sapien
caaaagaaatcgcaccatctctaag

SEQ ID NO: 3292688 - DNA, 25 bp, Homo sapien
ttgatccgcgcctgcttccaaaaga

SEQ ID NO: 3292689 - DNA, 25 bp, Homo sapien
tagaatgcgtattaatgccagcccc

SEQ ID NO: 3292690 - DNA, 25 bp, Homo sapien
tatggtcctcaatactagcaccgga

SEQ ID NO: 3292691 - DNA, 25 bp, Homo sapien
tagcaccggattccaagagcacctt

SEQ ID NO: 3292692 - DNA, 25 bp, Homo sapien
gcctccagcacaagcatatgtaagt

SEQ ID NO: 3292693 - DNA, 25 bp, Homo sapien
tgctttatgagctagcagcaacttc

SEQ ID NO: 3292694 - DNA, 25 bp, Homo sapien
gtaatgtcacctttgattcccctat

SEQ ID NO: 3292695 - DNA, 25 bp, Homo sapien
tgaagactgtgcattaacatctgct

SEQ ID NO: 3292696 - DNA, 25 bp, Homo sapien
gacatgtcctccattagcagcagcc

SEQ ID NO: 3292697 - DNA, 25 bp, Homo sapien
gaacaagctaaacaaaggaggctct

SEQ ID NO: 3292698 - DNA, 25 bp, Homo sapien
gttcatttacacttcgcccttcaat

SEQ ID NO: 3292699 - DNA, 25 bp, Homo sapien
tcgcccttcaatgagtaactttcgc

SEQ ID NO: 3292700 - DNA, 25 bp, Homo sapien
taactttcgcacagcatttacatct

SEQ ID NO: 3292701 - DNA, 25 bp, Homo sapien
ttaccaaagtgaaagtctcgaccag

SEQ ID NO: 3292702 - DNA, 25 bp, Homo sapien
catgtgtgtataccagcttgaaaac

SEQ ID NO: 3292703 - DNA, 25 bp, Homo sapien
gcatgtttagaacaaatccttccca

SEQ ID NO: 3292704 - DNA, 25 bp, Homo sapien
ggacactgacagtccctagactcaa

SEQ ID NO: 3292705 - DNA, 25 bp, Homo sapien
ctcatacgggtaagtgcagcagcag

SEQ ID NO: 3292706 - DNA, 25 bp, Homo sapien
tgcaaaggctttaccatcagccgtg

SEQ ID NO: 3292707 - DNA, 25 bp, Homo sapien
ccgaagtacttcaggatctgcaaag

SEQ ID NO: 3292708 - DNA, 25 bp, Homo sapien
taacagacgatgtcaacctccgaag

SEQ ID NO: 3292709 - DNA, 25 bp, Homo sapien
tgggcataaggaatcctccggcctc

SEQ ID NO: 3292710 - DNA, 25 bp, Homo sapien
gggtagtttagatctcctagtctca

SEQ ID NO: 3292711 - DNA, 25 bp, Homo sapien
caggtgtaaactacttcatcgggcc

SEQ ID NO: 3292712 - DNA, 25 bp, Homo sapien
ggtgcatgccacgattacagtttac

SEQ ID NO: 3292713 - DNA, 25 bp, Homo sapien
caacaattaggtttcatacaggtgg

SEQ ID NO: 3292714 - DNA, 25 bp, Homo sapien
taggcagcctagattaagcaccgag

SEQ ID NO: 3292715 - DNA, 25 bp, Homo sapien
tctgcacagataagtatgtaacagt

SEQ ID NO: 3292716 - DNA, 25 bp, Homo sapien
tgttgccgtcctgaatgatttttag

SEQ ID NO: 3292717 - DNA, 25 bp, Homo sapien
gctgtttccagcattggattttcca

SEQ ID NO: 3292718 - DNA, 25 bp, Homo sapien
actgtcctgaggtctgcaccatcag

SEQ ID NO: 3292719 - DNA, 25 bp, Homo sapien
gtttctggatctactgtcctgaggt

SEQ ID NO: 3292720 - DNA, 25 bp, Homo sapien
atcagcagtacctgataagagcaac

SEQ ID NO: 3292721 - DNA, 25 bp, Homo sapien
cacgctcatgcctagtatccagaag

SEQ ID NO: 3292722 - DNA, 25 bp, Homo sapien
cactgtttttgcaccatcatcgtaa

SEQ ID NO: 3292723 - DNA, 25 bp, Homo sapien
gaaacactgatataagtctagccga

SEQ ID NO: 3292724 - DNA, 25 bp, Homo sapien
tttccatggccttcgggtccataag

SEQ ID NO: 3292725 - DNA, 25 bp, Homo sapien
taaattatgggcatacacctctctg

SEQ ID NO: 3292726 - DNA, 25 bp, Homo sapien
tacaaaacaagtgaagagagactgg

SEQ ID NO: 3292727 - DNA, 25 bp, Homo sapien
gagactggcataaagagatgcaatc

SEQ ID NO: 3292728 - DNA, 25 bp, Homo sapien
tatgggcatacacctctctgccata

SEQ ID NO: 3292729 - DNA, 25 bp, Homo sapien
tatacgagtctctgtacttttgttc

SEQ ID NO: 3292730 - DNA, 25 bp, Homo sapien
tttatacgagtctctgtacttttgt

SEQ ID NO: 3292731 - DNA, 25 bp, Homo sapien
ttttatacgagtctctgtacttttg

SEQ ID NO: 3292732 - DNA, 25 bp, Homo sapien
tacgagtctctgtacttttgttcat

SEQ ID NO: 3292733 - DNA, 25 bp, Homo sapien
acaggtttctgaatgtagcttcttt

SEQ ID NO: 3292734 - DNA, 25 bp, Homo sapien
cgtggtacaaatctacgaattttga

SEQ ID NO: 3292735 - DNA, 25 bp, Homo sapien
tcatgtaccactaccttttgcctct

SEQ ID NO: 3292736 - DNA, 25 bp, Homo sapien
gcctctaacaatcatgacttttctg

SEQ ID NO: 3292737 - DNA, 25 bp, Homo sapien
aaatacaatttctctaacagatatt

SEQ ID NO: 3292738 - DNA, 25 bp, Homo sapien
cccagcctgctgaagaatttttcat

SEQ ID NO: 3292739 - DNA, 25 bp, Homo sapien
gcctgctgaagaatttttcatgtga

SEQ ID NO: 3292740 - DNA, 25 bp, Homo sapien
cagcctgctgaagaatttttcatgt

SEQ ID NO: 3292741 - DNA, 25 bp, Homo sapien
ggaaattattatatcgctgatttga

SEQ ID NO: 3292742 - DNA, 25 bp, Homo sapien
ttattatatcgctgatttgaaaact

SEQ ID NO: 3292743 - DNA, 25 bp, Homo sapien
gctttggttcaatttgctcttctag

SEQ ID NO: 3292744 - DNA, 25 bp, Homo sapien
ctgcctgctttggttcaatttgctc

SEQ ID NO: 3292745 - DNA, 25 bp, Homo sapien
agtctgctagtcattcagaacccag

SEQ ID NO: 3292746 - DNA, 25 bp, Homo sapien
aatacttacgcaactctgtagtcag

SEQ ID NO: 3292747 - DNA, 25 bp, Homo sapien
tagatcttgtgggtgcactccccag

SEQ ID NO: 3292748 - DNA, 25 bp, Homo sapien
gacacattctgattaggacctctga

SEQ ID NO: 3292749 - DNA, 25 bp, Homo sapien
cgacaacgaaagctcaatatgagta

SEQ ID NO: 3292750 - DNA, 25 bp, Homo sapien
cattagtatatgtcctttctgaaac

SEQ ID NO: 3292751 - DNA, 25 bp, Homo sapien
cagtgcaggacacctagagggcagt

SEQ ID NO: 3292752 - DNA, 25 bp, Homo sapien
tgtcagtctttccaacgacaacgaa

SEQ ID NO: 3292753 - DNA, 25 bp, Homo sapien
gcaattgggacttggaaagacttcc

SEQ ID NO: 3292754 - DNA, 25 bp, Homo sapien
caaacatggacactatctggcagtc

SEQ ID NO: 3292755 - DNA, 25 bp, Homo sapien
tacagtacgatgtggcttataggca

SEQ ID NO: 3292756 - DNA, 25 bp, Homo sapien
caaatttgccacagcacagtaggtc

SEQ ID NO: 3292757 - DNA, 25 bp, Homo sapien
agaacagtaatttcaataagtagtg

SEQ ID NO: 3292758 - DNA, 25 bp, Homo sapien
aaaatgcaattacatcctatctcac

SEQ ID NO: 3292759 - DNA, 25 bp, Homo sapien
ctgggagaactagatactgacatgc

SEQ ID NO: 3292760 - DNA, 25 bp, Homo sapien
gaaatcaatctacccattttatggt

SEQ ID NO: 3292761 - DNA, 25 bp, Homo sapien
aacttatagtgtttaatattagtag

SEQ ID NO: 3292762 - DNA, 25 bp, Homo sapien
ataataacctaagcttccacataaa

SEQ ID NO: 3292763 - DNA, 25 bp, Homo sapien
aataataacctaagcttccacataa

SEQ ID NO: 3292764 - DNA, 25 bp, Homo sapien
tatagtgtttaatattagtagtaga

SEQ ID NO: 3292765 - DNA, 25 bp, Homo sapien
ctgagttcaggataaatatctggac

SEQ ID NO: 3292766 - DNA, 25 bp, Homo sapien
aacactgagttcaggataaatatct

SEQ ID NO: 3292767 - DNA, 25 bp, Homo sapien
tcaaacactgagttcaggataaata

SEQ ID NO: 3292768 - DNA, 25 bp, Homo sapien
agttcaggataaatatctggacaac

SEQ ID NO: 3292769 - DNA, 25 bp, Homo sapien
ctgcgcctggctgaaaatgtgattt

SEQ ID NO: 3292770 - DNA, 25 bp, Homo sapien
cgcctggctgaaaatgtgattttta

SEQ ID NO: 3292771 - DNA, 25 bp, Homo sapien
tgcgcctggctgaaaatgtgatttt

SEQ ID NO: 3292772 - DNA, 25 bp, Homo sapien
cactgcgcctggctgaaaatgtgat

SEQ ID NO: 3292773 - DNA, 25 bp, Homo sapien
tgtcaccatggttactttagaaatc

SEQ ID NO: 3292774 - DNA, 25 bp, Homo sapien
tctaccacatggagatttgatatca

SEQ ID NO: 3292775 - DNA, 25 bp, Homo sapien
caatgtgccttacagaataaaaaga

SEQ ID NO: 3292776 - DNA, 25 bp, Homo sapien
gaaatctatgaaagacttactggta

SEQ ID NO: 3292777 - DNA, 25 bp, Homo sapien
agggttcagtcaaatcctcaaccca

SEQ ID NO: 3292778 - DNA, 25 bp, Homo sapien
aacccactgtccatagacagaacca

SEQ ID NO: 3292779 - DNA, 25 bp, Homo sapien
gaaccatagagagttggcactttta

SEQ ID NO: 3292780 - DNA, 25 bp, Homo sapien
gttcagtcaaatcctcaacccactg

SEQ ID NO: 3292781 - DNA, 25 bp, Homo sapien
tagtcaacttaaatatatgtgggca

SEQ ID NO: 3292782 - DNA, 25 bp, Homo sapien
taactaatattcaataagagtacct

SEQ ID NO: 3292783 - DNA, 25 bp, Homo sapien
taaaaggtaagccatagtattatga

SEQ ID NO: 3292784 - DNA, 25 bp, Homo sapien
tacggtaatgaacttcaagtagctc

SEQ ID NO: 3292785 - DNA, 25 bp, Homo sapien
gcctctttatctgaattacccaggt

SEQ ID NO: 3292786 - DNA, 25 bp, Homo sapien
aaagcctctttatctgaattaccca

SEQ ID NO: 3292787 - DNA, 25 bp, Homo sapien
ctctttatctgaattacccaggttt

SEQ ID NO: 3292788 - DNA, 25 bp, Homo sapien
ccataaagcctctttatctgaatta

SEQ ID NO: 3292789 - DNA, 25 bp, Homo sapien
ccatttcagccgctgtctccaccat

SEQ ID NO: 3292790 - DNA, 25 bp, Homo sapien
tccatttcagccgctgtctccacca

SEQ ID NO: 3292791 - DNA, 25 bp, Homo sapien
ctcaagaatgtcttctagaacatat

SEQ ID NO: 3292792 - DNA, 25 bp, Homo sapien
tttatcaaactgccatgtttcttac

SEQ ID NO: 3292793 - DNA, 25 bp, Homo sapien
tcaaactgccatgtttcttactgca

SEQ ID NO: 3292794 - DNA, 25 bp, Homo sapien
gttttatcaaactgccatgtttctt

SEQ ID NO: 3292795 - DNA, 25 bp, Homo sapien
tatcaaactgccatgtttcttactg

SEQ ID NO: 3292796 - DNA, 25 bp, Homo sapien
tagagacaccaaatctggatcatca

SEQ ID NO: 3292797 - DNA, 25 bp, Homo sapien
aaaaggaacaatgggccgagcgcag

SEQ ID NO: 3292798 - DNA, 25 bp, Homo sapien
gagtgagtgacagtggagccaatat

SEQ ID NO: 3292799 - DNA, 25 bp, Homo sapien
tgatcttccatttagtaaaacttgt

SEQ ID NO: 3292800 - DNA, 25 bp, Homo sapien
cacgcccatctaacttttagtattt

SEQ ID NO: 3292801 - DNA, 25 bp, Homo sapien
ccacgcccatctaacttttagtatt

SEQ ID NO: 3292802 - DNA, 25 bp, Homo sapien
accacgcccatctaacttttagtat

SEQ ID NO: 3292803 - DNA, 25 bp, Homo sapien
catagcaaaataatgtatccccttt

SEQ ID NO: 3292804 - DNA, 25 bp, Homo sapien
tcatcaatatgattacctatgtcac

SEQ ID NO: 3292805 - DNA, 25 bp, Homo sapien
tatctttaggtcactggatcactga

SEQ ID NO: 3292806 - DNA, 25 bp, Homo sapien
tatgtcactgcaggataccatgggc

SEQ ID NO: 3292807 - DNA, 25 bp, Homo sapien
gggtccctgacaagctccaatcagt

SEQ ID NO: 3292808 - DNA, 25 bp, Homo sapien
atttgttgtctctacccatggtggg

SEQ ID NO: 3292809 - DNA, 25 bp, Homo sapien
taactcaagatagcatcaagggcat

SEQ ID NO: 3292810 - DNA, 25 bp, Homo sapien
tggaatctcattgctatcactggct

SEQ ID NO: 3292811 - DNA, 25 bp, Homo sapien
tgactgtccaccgaaaaaacgagca

SEQ ID NO: 3292812 - DNA, 25 bp, Homo sapien
tctagcacagttaccagtttaactt

SEQ ID NO: 3292813 - DNA, 25 bp, Homo sapien
tatgcttgttatctactgactgtcc

SEQ ID NO: 3292814 - DNA, 25 bp, Homo sapien
tcaaaggctacaaaggcacaagacg

SEQ ID NO: 3292815 - DNA, 25 bp, Homo sapien
tcattacgtttctacagctcaggaa

SEQ ID NO: 3292816 - DNA, 25 bp, Homo sapien
cattcattttggttactagatgggc

SEQ ID NO: 3292817 - DNA, 25 bp, Homo sapien
tgccttcaagcattcaacacagctg

SEQ ID NO: 3292818 - DNA, 25 bp, Homo sapien
cccatggttcctaaatctcttgctc

SEQ ID NO: 3292819 - DNA, 25 bp, Homo sapien
agtcaggattccaatagtttcagaa

SEQ ID NO: 3292820 - DNA, 25 bp, Homo sapien
ttgagacagtaacagggttgcagcc

SEQ ID NO: 3292821 - DNA, 25 bp, Homo sapien
gctgatacagaaggaaacgcagacc

SEQ ID NO: 3292822 - DNA, 25 bp, Homo sapien
taagcccggataaatagagttatac

SEQ ID NO: 3292823 - DNA, 25 bp, Homo sapien
tggttcacacctcaaatacctatgc

SEQ ID NO: 3292824 - DNA, 25 bp, Homo sapien
ctccaacacagaaggtagtatagtg

SEQ ID NO: 3292825 - DNA, 25 bp, Homo sapien
cagtcctcttgagctaaggttcata

SEQ ID NO: 3292826 - DNA, 25 bp, Homo sapien
taaagaaaattgatcctgactggga

SEQ ID NO: 3292827 - DNA, 25 bp, Homo sapien
agtagtcaacagagagggatatcca

SEQ ID NO: 3292828 - DNA, 25 bp, Homo sapien
gcagactttcatgtgagactaccca

SEQ ID NO: 3292829 - DNA, 25 bp, Homo sapien
gattcccatacctttggtctagcag

SEQ ID NO: 3292830 - DNA, 25 bp, Homo sapien
taaaccaattagaattgtggctggc

SEQ ID NO: 3292831 - DNA, 25 bp, Homo sapien
taaaaccccacacagatgttagcta

SEQ ID NO: 3292832 - DNA, 25 bp, Homo sapien
aaacacataactgacttgattaagt

SEQ ID NO: 3292833 - DNA, 25 bp, Homo sapien
cacaggaaactgcttagtacaagta

SEQ ID NO: 3292834 - DNA, 25 bp, Homo sapien
ccaggagttctagaataacttgggc

SEQ ID NO: 3292835 - DNA, 25 bp, Homo sapien
ggttggcgtgcagtggcacaatctc

SEQ ID NO: 3292836 - DNA, 25 bp, Homo sapien
agctcaggcaacccgcccacctcgg

SEQ ID NO: 3292837 - DNA, 25 bp, Homo sapien
tggagatgagtcttgctctgacacc

SEQ ID NO: 3292838 - DNA, 25 bp, Homo sapien
gagatgagtcttgctctgacaccca

SEQ ID NO: 3292839 - DNA, 25 bp, Homo sapien
tgccttctaagataccaaaccatgc

SEQ ID NO: 3292840 - DNA, 25 bp, Homo sapien
taatttcgccaaggttcaactgtga

SEQ ID NO: 3292841 - DNA, 25 bp, Homo sapien
taagtatgccatgtttccgaatggg

SEQ ID NO: 3292842 - DNA, 25 bp, Homo sapien
gagaatatttcatggtcacgtacaa

SEQ ID NO: 3292843 - DNA, 25 bp, Homo sapien
ggcacagccataaagcagttccata

SEQ ID NO: 3292844 - DNA, 25 bp, Homo sapien
gaaatagcactatctggtacacatt

SEQ ID NO: 3292845 - DNA, 25 bp, Homo sapien
gtgaaaggttaaattaggcaagcta

SEQ ID NO: 3292846 - DNA, 25 bp, Homo sapien
ccttataagtcagtttgagtatgaa

SEQ ID NO: 3292847 - DNA, 25 bp, Homo sapien
gcgtagaatctaacagtcccaggtt

SEQ ID NO: 3292848 - DNA, 25 bp, Homo sapien
tgtaaaatgaatgctccctgccaac

SEQ ID NO: 3292849 - DNA, 25 bp, Homo sapien
caacttgtcttcaatggccgtccaa

SEQ ID NO: 3292850 - DNA, 25 bp, Homo sapien
cagaggattcacagcctagccagac

SEQ ID NO: 3292851 - DNA, 25 bp, Homo sapien
gtctgctcatccctcatctgtatag

SEQ ID NO: 3292852 - DNA, 25 bp, Homo sapien
tcctagctccagaaagttaggcttc

SEQ ID NO: 3292853 - DNA, 25 bp, Homo sapien
gttaggcttctgctgacatgtcagt

SEQ ID NO: 3292854 - DNA, 25 bp, Homo sapien
tttagccacaagacttcctagctcc

SEQ ID NO: 3292855 - DNA, 25 bp, Homo sapien
ggatagttacgaaaaaccctgcaga

SEQ ID NO: 3292856 - DNA, 25 bp, Homo sapien
gatcactaggacaaaccgagaggcc

SEQ ID NO: 3292857 - DNA, 25 bp, Homo sapien
catattacgggacaacaggtcctag

SEQ ID NO: 3292858 - DNA, 25 bp, Homo sapien
cagttcatcgaaaatccctgggaga

SEQ ID NO: 3292859 - DNA, 25 bp, Homo sapien
tcttcttcctcgctgttgttactgc

SEQ ID NO: 3292860 - DNA, 25 bp, Homo sapien
cttcctcgctgttgttactgctggt

SEQ ID NO: 3292861 - DNA, 25 bp, Homo sapien
ttcttcctcgctgttgttactgctg

SEQ ID NO: 3292862 - DNA, 25 bp, Homo sapien
cctcttcttcctcgctgttgttact

SEQ ID NO: 3292863 - DNA, 25 bp, Homo sapien
gtcgctgtcgctgctgctttcgctg

SEQ ID NO: 3292864 - DNA, 25 bp, Homo sapien
ttcgctgctgctggggggtcggcaa

SEQ ID NO: 3292865 - DNA, 25 bp, Homo sapien
tgctgctggggggtcggcaagtccg

SEQ ID NO: 3292866 - DNA, 25 bp, Homo sapien
accgccgccgctgttgtcgctgtcg

SEQ ID NO: 3292867 - DNA, 25 bp, Homo sapien
aggagcaggtcgcagactcgcacca

SEQ ID NO: 3292868 - DNA, 25 bp, Homo sapien
ggagcaggtcgcagactcgcaccat

SEQ ID NO: 3292869 - DNA, 25 bp, Homo sapien
gccaccggaaccgtcgccttctcca

SEQ ID NO: 3292870 - DNA, 25 bp, Homo sapien
acgaggccgagcgagctctgctgct

SEQ ID NO: 3292871 - DNA, 25 bp, Homo sapien
cccacgaggagacgaggccgagcga

SEQ ID NO: 3292872 - DNA, 25 bp, Homo sapien
ggagacgaggccgagcgagctctgc

SEQ ID NO: 3292873 - DNA, 25 bp, Homo sapien
gggaggggcgtggggctacgctcta

SEQ ID NO: 3292874 - DNA, 25 bp, Homo sapien
cagggaaagagggagggcgcggacg

SEQ ID NO: 3292875 - DNA, 25 bp, Homo sapien
ggaggggcgtggggctacgctctac

SEQ ID NO: 3292876 - DNA, 25 bp, Homo sapien
gcctcggtcacctctactgccgccg

SEQ ID NO: 3292877 - DNA, 25 bp, Homo sapien
acacagcaatcggtgccgcctccgc

SEQ ID NO: 3292878 - DNA, 25 bp, Homo sapien
gacttcggccgcactggggccgaca

SEQ ID NO: 3292879 - DNA, 25 bp, Homo sapien
gccgacacagcaatcggtgccgcct

SEQ ID NO: 3292880 - DNA, 25 bp, Homo sapien
aaggaggcccatgtttgcagtggca

SEQ ID NO: 3292881 - DNA, 25 bp, Homo sapien
tagaatgaccatagctagtccagaa

SEQ ID NO: 3292882 - DNA, 25 bp, Homo sapien
gagcctggccgtgattaacttctag

SEQ ID NO: 3292883 - DNA, 25 bp, Homo sapien
gagcatggtgaccttcaaaactatg

SEQ ID NO: 3292884 - DNA, 25 bp, Homo sapien
taggattaaatcttacccaccactg

SEQ ID NO: 3292885 - DNA, 25 bp, Homo sapien
ccgtgcccaacctctaggattaaat

SEQ ID NO: 3292886 - DNA, 25 bp, Homo sapien
gggaagattcttcttagaatcctaa

SEQ ID NO: 3292887 - DNA, 25 bp, Homo sapien
tacccaccactgagggaagattctt

SEQ ID NO: 3292888 - DNA, 25 bp, Homo sapien
catagttcctttggattgttttgga

SEQ ID NO: 3292889 - DNA, 25 bp, Homo sapien
agttcctttggattgttttggatct

SEQ ID NO: 3292890 - DNA, 25 bp, Homo sapien
tagttcctttggattgttttggatc

SEQ ID NO: 3292891 - DNA, 25 bp, Homo sapien
ccatagttcctttggattgttttgg

SEQ ID NO: 3292892 - DNA, 25 bp, Homo sapien
cagagttcagcacaaattcagttgc

SEQ ID NO: 3292893 - DNA, 25 bp, Homo sapien
tgagaaggaggccatagctactagg

SEQ ID NO: 3292894 - DNA, 25 bp, Homo sapien
gaagctttcgatgaacttggttagg

SEQ ID NO: 3292895 - DNA, 25 bp, Homo sapien
aaattcatccgtccttttactgaga

SEQ ID NO: 3292896 - DNA, 25 bp, Homo sapien
cttactttccacaggatatttaggg

SEQ ID NO: 3292897 - DNA, 25 bp, Homo sapien
ggttccatgttcacaaggcaaatac

SEQ ID NO: 3292898 - DNA, 25 bp, Homo sapien
taagttacaggtgctttatcaaaac

SEQ ID NO: 3292899 - DNA, 25 bp, Homo sapien
tagcttcaagactacaaacctgtac

SEQ ID NO: 3292900 - DNA, 25 bp, Homo sapien
ttttctgcagacatgaactatgcca

SEQ ID NO: 3292901 - DNA, 25 bp, Homo sapien
tttctgcagacatgaactatgccac

SEQ ID NO: 3292902 - DNA, 25 bp, Homo sapien
ttctgcagacatgaactatgccact

SEQ ID NO: 3292903 - DNA, 25 bp, Homo sapien
tgtgatgtcccttccacaagcacag

SEQ ID NO: 3292904 - DNA, 25 bp, Homo sapien
ctttgggagcacttcaaaggcagtc

SEQ ID NO: 3292905 - DNA, 25 bp, Homo sapien
aaattcatatatggagccggccgcg

SEQ ID NO: 3292906 - DNA, 25 bp, Homo sapien
gattcttctaacagtaccacctcag

SEQ ID NO: 3292907 - DNA, 25 bp, Homo sapien
gtaattttcttttgcgcactaagga

SEQ ID NO: 3292908 - DNA, 25 bp, Homo sapien
caaagacctatccattgcactatgc

SEQ ID NO: 3292909 - DNA, 25 bp, Homo sapien
caaaacctgtgctgttgatctcata

SEQ ID NO: 3292910 - DNA, 25 bp, Homo sapien
tcgtcgagatgcacgtaagaaatcc

SEQ ID NO: 3292911 - DNA, 25 bp, Homo sapien
tctgtaggaatcagagcccaatatt

SEQ ID NO: 3292912 - DNA, 25 bp, Homo sapien
ttttctgtaggaatcagagcccaat

SEQ ID NO: 3292913 - DNA, 25 bp, Homo sapien
gaatcagagcccaatattttgaaac

SEQ ID NO: 3292914 - DNA, 25 bp, Homo sapien
gtaggaatcagagcccaatattttg

SEQ ID NO: 3292915 - DNA, 25 bp, Homo sapien
ccccgattggtgagaccagaggttg

SEQ ID NO: 3292916 - DNA, 25 bp, Homo sapien
ttatgcacagttgcaactcttcgtg

SEQ ID NO: 3292917 - DNA, 25 bp, Homo sapien
cttcgtgaaacctatggtgaaatgg

SEQ ID NO: 3292918 - DNA, 25 bp, Homo sapien
gagaaatgaatgcttcttgcaacac

SEQ ID NO: 3292919 - DNA, 25 bp, Homo sapien
tgcttttacagaatgttgccaagct

SEQ ID NO: 3292920 - DNA, 25 bp, Homo sapien
tctttgctaaaaggtataaagctgc

SEQ ID NO: 3292921 - DNA, 25 bp, Homo sapien
gctagatttagggaacctgagtgtc

SEQ ID NO: 3292922 - DNA, 25 bp, Homo sapien
tgcctgcctgttgccaaaggtatta

SEQ ID NO: 3292923 - DNA, 25 bp, Homo sapien
agctcgatgaacttcgggatgaagg

SEQ ID NO: 3292924 - DNA, 25 bp, Homo sapien
tgccaaacagagactcaagtgtgcc

SEQ ID NO: 3292925 - DNA, 25 bp, Homo sapien
caaacagagactcaagtgtgccagt

SEQ ID NO: 3292926 - DNA, 25 bp, Homo sapien
aacagagactcaagtgtgccagtct

SEQ ID NO: 3292927 - DNA, 25 bp, Homo sapien
cagagactcaagtgtgccagtctcc

SEQ ID NO: 3292928 - DNA, 25 bp, Homo sapien
ttatgcatgctctctagaaactgtc

SEQ ID NO: 3292929 - DNA, 25 bp, Homo sapien
agacattatgcatgctctctagaaa

SEQ ID NO: 3292930 - DNA, 25 bp, Homo sapien
cattatgcatgctctctagaaactg

SEQ ID NO: 3292931 - DNA, 25 bp, Homo sapien
gacattatgcatgctctctagaaac

SEQ ID NO: 3292932 - DNA, 25 bp, Homo sapien
caggctatgattggttttgggaaag

SEQ ID NO: 3292933 - DNA, 25 bp, Homo sapien
gaaaattagacgtttacatcttgtc

SEQ ID NO: 3292934 - DNA, 25 bp, Homo sapien
cctttacctgatttaggcaactgtg

SEQ ID NO: 3292935 - DNA, 25 bp, Homo sapien
ggcaactgtgaaatgactagagaat

SEQ ID NO: 3292936 - DNA, 25 bp, Homo sapien
cagatcttaccaaagtccacacgga

SEQ ID NO: 3292937 - DNA, 25 bp, Homo sapien
acggaatgctgccatggagatctgc

SEQ ID NO: 3292938 - DNA, 25 bp, Homo sapien
cagagatttcccaaagctgagtttg

SEQ ID NO: 3292939 - DNA, 25 bp, Homo sapien
agttagtgacagatcttaccaaagt

SEQ ID NO: 3292940 - DNA, 25 bp, Homo sapien
taagcagggcctatgactatgatct

SEQ ID NO: 3292941 - DNA, 25 bp, Homo sapien
ggagaaggtcactacttgaagagat

SEQ ID NO: 3292942 - DNA, 25 bp, Homo sapien
tactagaatcctaatctctcatggc

SEQ ID NO: 3292943 - DNA, 25 bp, Homo sapien
gattaaacttatgggcaaatactag

SEQ ID NO: 3292944 - DNA, 25 bp, Homo sapien
gaccttgccaagtatatctgtgaaa

SEQ ID NO: 3292945 - DNA, 25 bp, Homo sapien
cactgcattgccgaagtggaaaatg

SEQ ID NO: 3292946 - DNA, 25 bp, Homo sapien
gaaaatgatgagatgcctgctgact

SEQ ID NO: 3292947 - DNA, 25 bp, Homo sapien
agattcgatctccagtaaactgaag

SEQ ID NO: 3292948 - DNA, 25 bp, Homo sapien
cctaggaaaagtgggcagcaaatgt

SEQ ID NO: 3292949 - DNA, 25 bp, Homo sapien
actccaactcttgtagaggtctcaa

SEQ ID NO: 3292950 - DNA, 25 bp, Homo sapien
aaaagaatgccctgtgcagaagact

SEQ ID NO: 3292951 - DNA, 25 bp, Homo sapien
cttgtagaggtctcaagaaacctag

SEQ ID NO: 3292952 - DNA, 25 bp, Homo sapien
gctctggaagtcgatgaaacatacg

SEQ ID NO: 3292953 - DNA, 25 bp, Homo sapien
cagaatccttggtgaacaggcgacc

SEQ ID NO: 3292954 - DNA, 25 bp, Homo sapien
taagtttgccctatggtggccccac

SEQ ID NO: 3292955 - DNA, 25 bp, Homo sapien
catgtagaaatgcaagccctgaagc

SEQ ID NO: 3292956 - DNA, 25 bp, Homo sapien
ctgcaaggctgacgataaggagacc

SEQ ID NO: 3292957 - DNA, 25 bp, Homo sapien
gacttatagcggtatgcctgagccc

SEQ ID NO: 3292958 - DNA, 25 bp, Homo sapien
taaggagacctgctttgccgaggag

SEQ ID NO: 3292959 - DNA, 25 bp, Homo sapien
tgttgagctcgtgaaacacaagccc

SEQ ID NO: 3292960 - DNA, 25 bp, Homo sapien
caagagccatatagaccagcaccga

SEQ ID NO: 3292961 - DNA, 25 bp, Homo sapien
aaatagttgctgagttgggaaccac

SEQ ID NO: 3292962 - DNA, 25 bp, Homo sapien
ttgctgcaagtcaagctgccttagg

SEQ ID NO: 3292963 - DNA, 25 bp, Homo sapien
tctgacttatatgatgcggtacaca

SEQ ID NO: 3292964 - DNA, 25 bp, Homo sapien
tcagcagccgtaagtctaggacagg

SEQ ID NO: 3292965 - DNA, 25 bp, Homo sapien
ttattggtgtgtccccttgcctagc

SEQ ID NO: 3292966 - DNA, 25 bp, Homo sapien
tatgatggatctaccttctgtgaac

SEQ ID NO: 3292967 - DNA, 25 bp, Homo sapien
ttgcctagcccaacagaagaattca

SEQ ID NO: 3292968 - DNA, 25 bp, Homo sapien
acttccacatgccatattatatagg

SEQ ID NO: 3292969 - DNA, 25 bp, Homo sapien
cacagtctgtattaacagttttgcc

SEQ ID NO: 3292970 - DNA, 25 bp, Homo sapien
gaaaagtcaaattgagagatgcagg

SEQ ID NO: 3292971 - DNA, 25 bp, Homo sapien
ggacaatttgaaggatcacagtctg

SEQ ID NO: 3292972 - DNA, 25 bp, Homo sapien
tgacagttgcaaagtctcctatggc

SEQ ID NO: 3292973 - DNA, 25 bp, Homo sapien
gctgatttctcagtgtgacagttgc

SEQ ID NO: 3292974 - DNA, 25 bp, Homo sapien
tactcaatttgacatgcccctacaa

SEQ ID NO: 3292975 - DNA, 25 bp, Homo sapien
tacaataccagctagtgaagactgg

SEQ ID NO: 3292976 - DNA, 25 bp, Homo sapien
gaacagcttcaaatgaatgatatcc

SEQ ID NO: 3292977 - DNA, 25 bp, Homo sapien
gcagtatttgctaacctgaacagct

SEQ ID NO: 3292978 - DNA, 25 bp, Homo sapien
taatgtgtaaataagataaccccac

SEQ ID NO: 3292979 - DNA, 25 bp, Homo sapien
gaataaagttgtccatttgagcagt

SEQ ID NO: 3292980 - DNA, 25 bp, Homo sapien
gtgctcagccacaagagaagaccag

SEQ ID NO: 3292981 - DNA, 25 bp, Homo sapien
atgtgctcagccacaagagaagacc

SEQ ID NO: 3292982 - DNA, 25 bp, Homo sapien
tgctcagccacaagagaagaccagg

SEQ ID NO: 3292983 - DNA, 25 bp, Homo sapien
tgtgctcagccacaagagaagacca

SEQ ID NO: 3292984 - DNA, 25 bp, Homo sapien
taagaatttgactccaggaagcctg

SEQ ID NO: 3292985 - DNA, 25 bp, Homo sapien
ggaagcctggcctagcaagttgcag

SEQ ID NO: 3292986 - DNA, 25 bp, Homo sapien
gaagactagtgaacttggagccaca

SEQ ID NO: 3292987 - DNA, 25 bp, Homo sapien
tggagccacagggactatatttgag

SEQ ID NO: 3292988 - DNA, 25 bp, Homo sapien
tgaagccagctgctggagatatgta

SEQ ID NO: 3292989 - DNA, 25 bp, Homo sapien
ccagctgctggagatatgtaaagaa

SEQ ID NO: 3292990 - DNA, 25 bp, Homo sapien
gccagctgctggagatatgtaaaga

SEQ ID NO: 3292991 - DNA, 25 bp, Homo sapien
aagccagctgctggagatatgtaaa

SEQ ID NO: 3292992 - DNA, 25 bp, Homo sapien
tgtagctaacagaccccgatattgt

SEQ ID NO: 3292993 - DNA, 25 bp, Homo sapien
tgtttttctgggtatcagccactcc

SEQ ID NO: 3292994 - DNA, 25 bp, Homo sapien
tttctagataaccaagaggcgctta

SEQ ID NO: 3292995 - DNA, 25 bp, Homo sapien
tggttcatcctacatgaacaagaaa

SEQ ID NO: 3292996 - DNA, 25 bp, Homo sapien
caagcctagatgtggtgcatagcac

SEQ ID NO: 3292997 - DNA, 25 bp, Homo sapien
tcagttacatgtttccaagccagtg

SEQ ID NO: 3292998 - DNA, 25 bp, Homo sapien
caaataaattaatggccaagcctag

SEQ ID NO: 3292999 - DNA, 25 bp, Homo sapien
cacaagttttgcagactagtaggag

SEQ ID NO: 3293000 - DNA, 25 bp, Homo sapien
gacatacctactttgtactagaagt

SEQ ID NO: 3293001 - DNA, 25 bp, Homo sapien
tttgcaaccctaacaaaacatgcct

SEQ ID NO: 3293002 - DNA, 25 bp, Homo sapien
gacttatatccttaccacaaagaga

SEQ ID NO: 3293003 - DNA, 25 bp, Homo sapien
ttttgattagagatttagacatacc

SEQ ID NO: 3293004 - DNA, 25 bp, Homo sapien
aaaaataggcaatattctagtgcta

SEQ ID NO: 3293005 - DNA, 25 bp, Homo sapien
tgctatagctgtgggacaattttct

SEQ ID NO: 3293006 - DNA, 25 bp, Homo sapien
tagtagttccatgctttcgtaaatg

SEQ ID NO: 3293007 - DNA, 25 bp, Homo sapien
gaaaaccctttggaatgctatagct

SEQ ID NO: 3293008 - DNA, 25 bp, Homo sapien
aaaaagacataggtttcaatcctag

SEQ ID NO: 3293009 - DNA, 25 bp, Homo sapien
aaagacataggtttcaatcctagtc

SEQ ID NO: 3293010 - DNA, 25 bp, Homo sapien
agacataggtttcaatcctagtctc

SEQ ID NO: 3293011 - DNA, 25 bp, Homo sapien
gacataggtttcaatcctagtctct

SEQ ID NO: 3293012 - DNA, 25 bp, Homo sapien
tacagcaccacgttgcacttattct

SEQ ID NO: 3293013 - DNA, 25 bp, Homo sapien
agacatatttaagaactctccaccc

SEQ ID NO: 3293014 - DNA, 25 bp, Homo sapien
accacgttgcacttattctaaagct

SEQ ID NO: 3293015 - DNA, 25 bp, Homo sapien
ttctttacagcaccacgttgcactt

SEQ ID NO: 3293016 - DNA, 25 bp, Homo sapien
agaaactcactcgaaagtgcacaag

SEQ ID NO: 3293017 - DNA, 25 bp, Homo sapien
gcacaagtacacagaaactgcacaa

SEQ ID NO: 3293018 - DNA, 25 bp, Homo sapien
acaagtacacagaaactgcacaacc

SEQ ID NO: 3293019 - DNA, 25 bp, Homo sapien
cactcgaaagtgcacaagtacacag

SEQ ID NO: 3293020 - DNA, 25 bp, Homo sapien
gaaaccactgttacaaatgcaagct

SEQ ID NO: 3293021 - DNA, 25 bp, Homo sapien
caagtagttcccgaccttcatgcat

SEQ ID NO: 3293022 - DNA, 25 bp, Homo sapien
gggcaccccacctgttgttatatgt

SEQ ID NO: 3293023 - DNA, 25 bp, Homo sapien
tattcccaaggagtgtgaaaccact

SEQ ID NO: 3293024 - DNA, 25 bp, Homo sapien
tgatgtcggcttctgaacaaccttg

SEQ ID NO: 3293025 - DNA, 25 bp, Homo sapien
tgcaacagggatgcagttccaatca

SEQ ID NO: 3293026 - DNA, 25 bp, Homo sapien
gatttggttcacctgttggagatga

SEQ ID NO: 3293027 - DNA, 25 bp, Homo sapien
ccagaacttagggagtgcttgtgtt

SEQ ID NO: 3293028 - DNA, 25 bp, Homo sapien
atagatgcagaaaaaacctttgaca

SEQ ID NO: 3293029 - DNA, 25 bp, Homo sapien
aaattaggtattgatgggacgtatt

SEQ ID NO: 3293030 - DNA, 25 bp, Homo sapien
atgcagaaaaaacctttgacaaaat

SEQ ID NO: 3293031 - DNA, 25 bp, Homo sapien
ttaggtattgatgggacgtatttca

SEQ ID NO: 3293032 - DNA, 25 bp, Homo sapien
tgcccttcccagctaagtcttagac

SEQ ID NO: 3293033 - DNA, 25 bp, Homo sapien
tctatttggccaatttgttctgccc

SEQ ID NO: 3293034 - DNA, 25 bp, Homo sapien
aagaatgatgattggtggaggcttc

SEQ ID NO: 3293035 - DNA, 25 bp, Homo sapien
gatcaaaaagtactagtgtctatgg

SEQ ID NO: 3293036 - DNA, 25 bp, Homo sapien
gctatgggaccagacttgtaataag

SEQ ID NO: 3293037 - DNA, 25 bp, Homo sapien
atattttttcagctatgggaccaga

SEQ ID NO: 3293038 - DNA, 25 bp, Homo sapien
ggaccagacttgtaataagtaatac

SEQ ID NO: 3293039 - DNA, 25 bp, Homo sapien
tttcagctatgggaccagacttgta

SEQ ID NO: 3293040 - DNA, 25 bp, Homo sapien
aaagaatagcgatgcaagcctctgg

SEQ ID NO: 3293041 - DNA, 25 bp, Homo sapien
gcagtggtggtataacctggagcca

SEQ ID NO: 3293042 - DNA, 25 bp, Homo sapien
tattgagcacatcctacgcacaaga

SEQ ID NO: 3293043 - DNA, 25 bp, Homo sapien
tggttgcccgctccgtgaaaataga

SEQ ID NO: 3293044 - DNA, 25 bp, Homo sapien
caaataggtatttgtgggccaagtc

SEQ ID NO: 3293045 - DNA, 25 bp, Homo sapien
taaacagatctgtgagtaccttgag

SEQ ID NO: 3293046 - DNA, 25 bp, Homo sapien
tacagatagtcagaagtcaacaggc

SEQ ID NO: 3293047 - DNA, 25 bp, Homo sapien
gggattccctatgtaacttcagcta

SEQ ID NO: 3293048 - DNA, 25 bp, Homo sapien
ttcagtataatcgccttttctttat

SEQ ID NO: 3293049 - DNA, 25 bp, Homo sapien
ttattactagtttattttgaagaca

SEQ ID NO: 3293050 - DNA, 25 bp, Homo sapien
ttgaagacatttcagtataatcgcc

SEQ ID NO: 3293051 - DNA, 25 bp, Homo sapien
gacatttcagtataatcgccttttc

SEQ ID NO: 3293052 - DNA, 25 bp, Homo sapien
tgtgcattggacatattaaagaacg

SEQ ID NO: 3293053 - DNA, 25 bp, Homo sapien
tggacatattttgtgcattggacat

SEQ ID NO: 3293054 - DNA, 25 bp, Homo sapien
ggacatattttgtgcattggacata

SEQ ID NO: 3293055 - DNA, 25 bp, Homo sapien
cattggacatattaaagaacggagt

SEQ ID NO: 3293056 - DNA, 25 bp, Homo sapien
agtgaaagttaatgtactgagccac

SEQ ID NO: 3293057 - DNA, 25 bp, Homo sapien
agaaaagtgaaagttaatgtactga

SEQ ID NO: 3293058 - DNA, 25 bp, Homo sapien
aaaagtgaaagttaatgtactgagc

SEQ ID NO: 3293059 - DNA, 25 bp, Homo sapien
aagtgaaagttaatgtactgagcca

SEQ ID NO: 3293060 - DNA, 25 bp, Homo sapien
taggagcctctgcagtagcggaatg

SEQ ID NO: 3293061 - DNA, 25 bp, Homo sapien
ctgcagtagcggaatgtctgtcttc

SEQ ID NO: 3293062 - DNA, 25 bp, Homo sapien
ttttcagaaggtccctgtaggagcc

SEQ ID NO: 3293063 - DNA, 25 bp, Homo sapien
tatccatgaggaaaatgcgagcatt

SEQ ID NO: 3293064 - DNA, 25 bp, Homo sapien
ttaacttggcttagcatcctcttgc

SEQ ID NO: 3293065 - DNA, 25 bp, Homo sapien
tgtcaaagtagtttcacatctggga

SEQ ID NO: 3293066 - DNA, 25 bp, Homo sapien
gaccttcaggtccaatgttaacttg

SEQ ID NO: 3293067 - DNA, 25 bp, Homo sapien
gttgggagccttgacaacttagctc

SEQ ID NO: 3293068 - DNA, 25 bp, Homo sapien
atagcactcccgcaatgtgtcagac

SEQ ID NO: 3293069 - DNA, 25 bp, Homo sapien
tagcactcccgcaatgtgtcagacc

SEQ ID NO: 3293070 - DNA, 25 bp, Homo sapien
ggcagcaaactgtagcactctagag

SEQ ID NO: 3293071 - DNA, 25 bp, Homo sapien
tttcatataatcaacccttcaggga

SEQ ID NO: 3293072 - DNA, 25 bp, Homo sapien
tggccaacaagcaaactctttcata

SEQ ID NO: 3293073 - DNA, 25 bp, Homo sapien
gataatgttctaaagaccactcctt

SEQ ID NO: 3293074 - DNA, 25 bp, Homo sapien
gagcaaaatcctggggactattttc

SEQ ID NO: 3293075 - DNA, 25 bp, Homo sapien
gcaaaatcctggggactattttcaa

SEQ ID NO: 3293076 - DNA, 25 bp, Homo sapien
caaaatcctggggactattttcaat

SEQ ID NO: 3293077 - DNA, 25 bp, Homo sapien
agcaaaatcctggggactattttca

SEQ ID NO: 3293078 - DNA, 25 bp, Homo sapien
tgttgttatatgatgttttctaacc

SEQ ID NO: 3293079 - DNA, 25 bp, Homo sapien
gttgttatatgatgttttctaacct

SEQ ID NO: 3293080 - DNA, 25 bp, Homo sapien
tgtttactctgaccttagtttctga

SEQ ID NO: 3293081 - DNA, 25 bp, Homo sapien
gttctcatgttactgtttactctga

SEQ ID NO: 3293082 - DNA, 25 bp, Homo sapien
ctctgaccttagtttctgattcaaa

SEQ ID NO: 3293083 - DNA, 25 bp, Homo sapien
tttggagaagttgctttattacttc

SEQ ID NO: 3293084 - DNA, 25 bp, Homo sapien
tccgtgctgccaacctagtgtcaat

SEQ ID NO: 3293085 - DNA, 25 bp, Homo sapien
cataagctaatgtagaccgagttct

SEQ ID NO: 3293086 - DNA, 25 bp, Homo sapien
cacaagtgatccaatctgaaagcca

SEQ ID NO: 3293087 - DNA, 25 bp, Homo sapien
caattggtaggtacctctctgtggg

SEQ ID NO: 3293088 - DNA, 25 bp, Homo sapien
tgagacatcggctgcctcatctgca

SEQ ID NO: 3293089 - DNA, 25 bp, Homo sapien
aatccctgagctccgtgctggctga

SEQ ID NO: 3293090 - DNA, 25 bp, Homo sapien
ggcacagtgatagagttcacccatc

SEQ ID NO: 3293091 - DNA, 25 bp, Homo sapien
ggtatgttggtttccctgctcaatc

SEQ ID NO: 3293092 - DNA, 25 bp, Homo sapien
taatatctagcacatagagagtgcc

SEQ ID NO: 3293093 - DNA, 25 bp, Homo sapien
tggtattgttagtgaaacagggaac

SEQ ID NO: 3293094 - DNA, 25 bp, Homo sapien
aaattgtgaattgaattgggtggta

SEQ ID NO: 3293095 - DNA, 25 bp, Homo sapien
ggattgttttagtgattaataagat

SEQ ID NO: 3293096 - DNA, 25 bp, Homo sapien
gaagtgtccattaatagaggctcta

SEQ ID NO: 3293097 - DNA, 25 bp, Homo sapien
agctgcttcactcatggttctatag

SEQ ID NO: 3293098 - DNA, 25 bp, Homo sapien
agtctggttcatcctttgcatgtgg

SEQ ID NO: 3293099 - DNA, 25 bp, Homo sapien
ttctatagagcactggggagtctgg

SEQ ID NO: 3293100 - DNA, 25 bp, Homo sapien
gagttgaagtggctttcctatggac

SEQ ID NO: 3293101 - DNA, 25 bp, Homo sapien
tgtaaaagcattatagtccactgct

SEQ ID NO: 3293102 - DNA, 25 bp, Homo sapien
ttaaatgttgcctgagactgactca

SEQ ID NO: 3293103 - DNA, 25 bp, Homo sapien
ttagagctggaataaacctgatact

SEQ ID NO: 3293104 - DNA, 25 bp, Homo sapien
gatcgtcaaattccccccagcgtgt

SEQ ID NO: 3293105 - DNA, 25 bp, Homo sapien
tcactaatacgatagagatcgtcaa

SEQ ID NO: 3293106 - DNA, 25 bp, Homo sapien
ggtcctgtccagctcactaatacga

SEQ ID NO: 3293107 - DNA, 25 bp, Homo sapien
tacgatagagatcgtcaaattcccc

SEQ ID NO: 3293108 - DNA, 25 bp, Homo sapien
gatgacttcatactagtaaaagaag

SEQ ID NO: 3293109 - DNA, 25 bp, Homo sapien
tgtataggtcgttttactccccaga

SEQ ID NO: 3293110 - DNA, 25 bp, Homo sapien
gacttcatactagtaaaagaagaga

SEQ ID NO: 3293111 - DNA, 25 bp, Homo sapien
tttagctgtataggtcgttttactc

SEQ ID NO: 3293112 - DNA, 25 bp, Homo sapien
cttcaacaattagtttgccatcttc

SEQ ID NO: 3293113 - DNA, 25 bp, Homo sapien
ccttcaacaattagtttgccatctt

SEQ ID NO: 3293114 - DNA, 25 bp, Homo sapien
tccttcaacaattagtttgccatct

SEQ ID NO: 3293115 - DNA, 25 bp, Homo sapien
ctctccatataaaatatgcagattt

SEQ ID NO: 3293116 - DNA, 25 bp, Homo sapien
tataaaatatgcagatttttctggt

SEQ ID NO: 3293117 - DNA, 25 bp, Homo sapien
tttctggttctcataaaaaatgtta

SEQ ID NO: 3293118 - DNA, 25 bp, Homo sapien
tatgcagatttttctggttctcata

SEQ ID NO: 3293119 - DNA, 25 bp, Homo sapien
ggtaaattagtggtgcaatacaaag

SEQ ID NO: 3293120 - DNA, 25 bp, Homo sapien
ttaggtaaattagtggtgcaataca

SEQ ID NO: 3293121 - DNA, 25 bp, Homo sapien
aaatttagaagttgcctgaacaaat

SEQ ID NO: 3293122 - DNA, 25 bp, Homo sapien
agaaaatttagaagttgcctgaaca

SEQ ID NO: 3293123 - DNA, 25 bp, Homo sapien
taatcgtgtgtacaccttaccagag

SEQ ID NO: 3293124 - DNA, 25 bp, Homo sapien
tcacattacaccatcccacagaagg

SEQ ID NO: 3293125 - DNA, 25 bp, Homo sapien
gcctacggtgaaccttggttggtga

SEQ ID NO: 3293126 - DNA, 25 bp, Homo sapien
tgtaaagagtttacctggcaaagaa

SEQ ID NO: 3293127 - DNA, 25 bp, Homo sapien
ccagcttggttttaatgagtaatag

SEQ ID NO: 3293128 - DNA, 25 bp, Homo sapien
ggtcctgttcctttaaggctccagc

SEQ ID NO: 3293129 - DNA, 25 bp, Homo sapien
gtaaaatgctctggtgtactttgta

SEQ ID NO: 3293130 - DNA, 25 bp, Homo sapien
tgtaaaatgctctggtgtactttgt

SEQ ID NO: 3293131 - DNA, 25 bp, Homo sapien
tacactcaacgaggttgccaaaggc

SEQ ID NO: 3293132 - DNA, 25 bp, Homo sapien
cagcataattaagtggccatcctag

SEQ ID NO: 3293133 - DNA, 25 bp, Homo sapien
gacttccgtgtgatacaaatgaacc

SEQ ID NO: 3293134 - DNA, 25 bp, Homo sapien
caaaggcatgtttatcccctggctg

SEQ ID NO: 3293135 - DNA, 25 bp, Homo sapien
gccatgtttaagagcaggaaccaag

SEQ ID NO: 3293136 - DNA, 25 bp, Homo sapien
tgagctgcttagtgacaacaacatt

SEQ ID NO: 3293137 - DNA, 25 bp, Homo sapien
catggttccaattaagcagccactg

SEQ ID NO: 3293138 - DNA, 25 bp, Homo sapien
gctactcgtgagtctaggcagaaga

SEQ ID NO: 3293139 - DNA, 25 bp, Homo sapien
tattgtagcgatatgcctttcagcc

SEQ ID NO: 3293140 - DNA, 25 bp, Homo sapien
cgagcctgaaaacgggagacttcct

SEQ ID NO: 3293141 - DNA, 25 bp, Homo sapien
caggtgtgccacacaacagtaagca

SEQ ID NO: 3293142 - DNA, 25 bp, Homo sapien
tgctgctattcagaggatcctccag

SEQ ID NO: 3293143 - DNA, 25 bp, Homo sapien
taaaggctcaggtttgagctacagc

SEQ ID NO: 3293144 - DNA, 25 bp, Homo sapien
tagaactgggttccttccctcagaa

SEQ ID NO: 3293145 - DNA, 25 bp, Homo sapien
tcagattgcaagctccacaagagta

SEQ ID NO: 3293146 - DNA, 25 bp, Homo sapien
gggatggagcctagcaatctttctt

SEQ ID NO: 3293147 - DNA, 25 bp, Homo sapien
tctcattaatgaagatccaagaggg

SEQ ID NO: 3293148 - DNA, 25 bp, Homo sapien
tatgaatgtcttctcattaatgaag

SEQ ID NO: 3293149 - DNA, 25 bp, Homo sapien
aatgtcttctcattaatgaagatcc

SEQ ID NO: 3293150 - DNA, 25 bp, Homo sapien
tccaagaggggtactggtgagccat

SEQ ID NO: 3293151 - DNA, 25 bp, Homo sapien
ttcctcctttttgagatggtctgag

SEQ ID NO: 3293152 - DNA, 25 bp, Homo sapien
ctttttgagatggtctgaggatatc

SEQ ID NO: 3293153 - DNA, 25 bp, Homo sapien
ttttcctcctttttgagatggtctg

SEQ ID NO: 3293154 - DNA, 25 bp, Homo sapien
cctcctttttgagatggtctgagga

SEQ ID NO: 3293155 - DNA, 25 bp, Homo sapien
cagttgccttgtgaccagaatgagg

SEQ ID NO: 3293156 - DNA, 25 bp, Homo sapien
gaggccagaggacaggaagtgaatt

SEQ ID NO: 3293157 - DNA, 25 bp, Homo sapien
gttgccttgtgaccagaatgaggcc

SEQ ID NO: 3293158 - DNA, 25 bp, Homo sapien
gccttgtgaccagaatgaggccaga

SEQ ID NO: 3293159 - DNA, 25 bp, Homo sapien
tcgcggtttgttctcggctgggtca

SEQ ID NO: 3293160 - DNA, 25 bp, Homo sapien
tgttcggctgaacttgcttcgcggt

SEQ ID NO: 3293161 - DNA, 25 bp, Homo sapien
aggaggacccttttcaccatcgttg

SEQ ID NO: 3293162 - DNA, 25 bp, Homo sapien
aactctggtagagggaaaccagtgc

SEQ ID NO: 3293163 - DNA, 25 bp, Homo sapien
tgtaggggaggtccgaggcccgcgc

SEQ ID NO: 3293164 - DNA, 25 bp, Homo sapien
ctgtaggggaggtccgaggcccgcg

SEQ ID NO: 3293165 - DNA, 25 bp, Homo sapien
aggggcggcgcctgtctcctcccag

SEQ ID NO: 3293166 - DNA, 25 bp, Homo sapien
ggcgcaggggcggcgcctgtctcct

SEQ ID NO: 3293167 - DNA, 25 bp, Homo sapien
ccgacgcgatcagcgatcctggagc

SEQ ID NO: 3293168 - DNA, 25 bp, Homo sapien
ttatttctccttttcgccacagcag

SEQ ID NO: 3293169 - DNA, 25 bp, Homo sapien
gctgggcgcttgcagtgcccccgac

SEQ ID NO: 3293170 - DNA, 25 bp, Homo sapien
tctccttttcgccacagcagggaag

SEQ ID NO: 3293171 - DNA, 25 bp, Homo sapien
ctttgaatgatgactagcaggacct

SEQ ID NO: 3293172 - DNA, 25 bp, Homo sapien
gcatcttttacctgcaagcattgga

SEQ ID NO: 3293173 - DNA, 25 bp, Homo sapien
gcatcagggcaacattcttttgcat

SEQ ID NO: 3293174 - DNA, 25 bp, Homo sapien
taaatggcagatgctgtggaaactt

SEQ ID NO: 3293175 - DNA, 25 bp, Homo sapien
ggaaacttttactctgatgactgct

SEQ ID NO: 3293176 - DNA, 25 bp, Homo sapien
tcatttcatatctgaggctgtactt

SEQ ID NO: 3293177 - DNA, 25 bp, Homo sapien
gtgacttttgagtaaggccatgatt

SEQ ID NO: 3293178 - DNA, 25 bp, Homo sapien
cataagattcaacagtgacttttga

SEQ ID NO: 3293179 - DNA, 25 bp, Homo sapien
tccatagttatgtatcataagattc

SEQ ID NO: 3293180 - DNA, 25 bp, Homo sapien
gacttttgagtaaggccatgatttg

SEQ ID NO: 3293181 - DNA, 25 bp, Homo sapien
cattgcaaccttacagccagagggt

SEQ ID NO: 3293182 - DNA, 25 bp, Homo sapien
taattttgcctttgggtacacaaga

SEQ ID NO: 3293183 - DNA, 25 bp, Homo sapien
tacacaagaagggattaacggacac

SEQ ID NO: 3293184 - DNA, 25 bp, Homo sapien
tgttatccgaaacagctcacatttc

SEQ ID NO: 3293185 - DNA, 25 bp, Homo sapien
tggcttgacacaaaccacttctgca

SEQ ID NO: 3293186 - DNA, 25 bp, Homo sapien
ttctatggcttgacacaaaccactt

SEQ ID NO: 3293187 - DNA, 25 bp, Homo sapien
tatggcttgacacaaaccacttctg

SEQ ID NO: 3293188 - DNA, 25 bp, Homo sapien
ggcttgacacaaaccacttctgcac

SEQ ID NO: 3293189 - DNA, 25 bp, Homo sapien
ctgagagtgagggctacacaagaat

SEQ ID NO: 3293190 - DNA, 25 bp, Homo sapien
ggctgagagtgagggctacacaaga

SEQ ID NO: 3293191 - DNA, 25 bp, Homo sapien
gtgcgctggcctgctcgccttcaca

SEQ ID NO: 3293192 - DNA, 25 bp, Homo sapien
actctgtgcctgtgcgctggcctgc

SEQ ID NO: 3293193 - DNA, 25 bp, Homo sapien
gcctcaaggtatcctgtgactccag

SEQ ID NO: 3293194 - DNA, 25 bp, Homo sapien
aggaaccaggcctcaaggtatcctg

SEQ ID NO: 3293195 - DNA, 25 bp, Homo sapien
gactccaggggagtccgtgactcta

SEQ ID NO: 3293196 - DNA, 25 bp, Homo sapien
caggggagtccgtgactctagccga

SEQ ID NO: 3293197 - DNA, 25 bp, Homo sapien
agggagcctgcggctctaactgagt

SEQ ID NO: 3293198 - DNA, 25 bp, Homo sapien
ggcttcaagggagcctgcggctcta

SEQ ID NO: 3293199 - DNA, 25 bp, Homo sapien
tcaagggagcctgcggctctaactg

SEQ ID NO: 3293200 - DNA, 25 bp, Homo sapien
cttcaagggagcctgcggctctaac

SEQ ID NO: 3293201 - DNA, 25 bp, Homo sapien
tgaggcgggcttgttctggcaggct

SEQ ID NO: 3293202 - DNA, 25 bp, Homo sapien
ctctggttaggccagtcagtttgta

SEQ ID NO: 3293203 - DNA, 25 bp, Homo sapien
tgggctgtcctcctgacctaatgtt

SEQ ID NO: 3293204 - DNA, 25 bp, Homo sapien
agtcagtttgtatctttccagtcat

SEQ ID NO: 3293205 - DNA, 25 bp, Homo sapien
tcacccccatagaatttaatctcct

SEQ ID NO: 3293206 - DNA, 25 bp, Homo sapien
catctgctgatataggaggaaaaga

SEQ ID NO: 3293207 - DNA, 25 bp, Homo sapien
taatctcctctcgtattgtcatctg

SEQ ID NO: 3293208 - DNA, 25 bp, Homo sapien
tctcctctcgtattgtcatctgctg

SEQ ID NO: 3293209 - DNA, 25 bp, Homo sapien
atttcagactttcaggcttaaacat

SEQ ID NO: 3293210 - DNA, 25 bp, Homo sapien
catcagatagaacttgacgagcttt

SEQ ID NO: 3293211 - DNA, 25 bp, Homo sapien
tatgatcaatctgagtggagctctt

SEQ ID NO: 3293212 - DNA, 25 bp, Homo sapien
ctttgaccgaacttgttttgtcatc

SEQ ID NO: 3293213 - DNA, 25 bp, Homo sapien
ctgggttgttctttgaccgaacttg

SEQ ID NO: 3293214 - DNA, 25 bp, Homo sapien
ttttcaggtacagttcccatgctca

SEQ ID NO: 3293215 - DNA, 25 bp, Homo sapien
taccaagtgttgctcatcatgtgtc

SEQ ID NO: 3293216 - DNA, 25 bp, Homo sapien
ggtgggactctttcacagcgctgga

SEQ ID NO: 3293217 - DNA, 25 bp, Homo sapien
aacttgcacttatcgcctaagaggc

SEQ ID NO: 3293218 - DNA, 25 bp, Homo sapien
gcgttggaattttagcagcaggaaa

SEQ ID NO: 3293219 - DNA, 25 bp, Homo sapien
gccccagaggaggatgacaatagaa

SEQ ID NO: 3293220 - DNA, 25 bp, Homo sapien
caagactacaactgagtgaggcccc

SEQ ID NO: 3293221 - DNA, 25 bp, Homo sapien
caatctcagagtggccatggttcac

SEQ ID NO: 3293222 - DNA, 25 bp, Homo sapien
tgttggtcaacaagcgtttccaggc

SEQ ID NO: 3293223 - DNA, 25 bp, Homo sapien
tcaagtaggaattcccagtaattag

SEQ ID NO: 3293224 - DNA, 25 bp, Homo sapien
tattcaagtaggaattcccagtaat

SEQ ID NO: 3293225 - DNA, 25 bp, Homo sapien
ttcaagtaggaattcccagtaatta

SEQ ID NO: 3293226 - DNA, 25 bp, Homo sapien
caagtaggaattcccagtaattagc

SEQ ID NO: 3293227 - DNA, 25 bp, Homo sapien
caactacagtttatcatatgctggt

SEQ ID NO: 3293228 - DNA, 25 bp, Homo sapien
taacccaaggatagattacaagaaa

SEQ ID NO: 3293229 - DNA, 25 bp, Homo sapien
gattctctcctatgtacaactacag

SEQ ID NO: 3293230 - DNA, 25 bp, Homo sapien
cacgatttgtattatggttatgacc

SEQ ID NO: 3293231 - DNA, 25 bp, Homo sapien
tctgaagatgtggtcacagtaatca

SEQ ID NO: 3293232 - DNA, 25 bp, Homo sapien
tttctggttctgaagatgtggtcac

SEQ ID NO: 3293233 - DNA, 25 bp, Homo sapien
ccatgagtgcatgcttagggccagg

SEQ ID NO: 3293234 - DNA, 25 bp, Homo sapien
gctgcatgttgctttacaagtgtag

SEQ ID NO: 3293235 - DNA, 25 bp, Homo sapien
tgtttagaaggcatgcaacaagcaa

SEQ ID NO: 3293236 - DNA, 25 bp, Homo sapien
ctgtttagaaggcatgcaacaagca

SEQ ID NO: 3293237 - DNA, 25 bp, Homo sapien
agtcatatcttacagggtggcaggc

SEQ ID NO: 3293238 - DNA, 25 bp, Homo sapien
atgtgaccagggaagcctcacaaac

SEQ ID NO: 3293239 - DNA, 25 bp, Homo sapien
cagggaagcctcacaaacagggtgg

SEQ ID NO: 3293240 - DNA, 25 bp, Homo sapien
gtcatatcttacagggtggcaggca

SEQ ID NO: 3293241 - DNA, 25 bp, Homo sapien
tattggccagcaaaagagttttgac

SEQ ID NO: 3293242 - DNA, 25 bp, Homo sapien
tgatcccactattggccagcaaaag

SEQ ID NO: 3293243 - DNA, 25 bp, Homo sapien
aaatggagttttactatagtgctca

SEQ ID NO: 3293244 - DNA, 25 bp, Homo sapien
tggctactaaaaggcatgatcccac

SEQ ID NO: 3293245 - DNA, 25 bp, Homo sapien
ctcaccctttcttgggcaaactggt

SEQ ID NO: 3293246 - DNA, 25 bp, Homo sapien
tcagccaaagacattgcacaggatt

SEQ ID NO: 3293247 - DNA, 25 bp, Homo sapien
ttatactgagtcacctctctggaat

SEQ ID NO: 3293248 - DNA, 25 bp, Homo sapien
gcacaggattttatactgagtcacc

SEQ ID NO: 3293249 - DNA, 25 bp, Homo sapien
gacattgcacaggattttatactga

SEQ ID NO: 3293250 - DNA, 25 bp, Homo sapien
ttttaatgtacccaccatacgtgag

SEQ ID NO: 3293251 - DNA, 25 bp, Homo sapien
ccatacgtgaggattttaggatcca

SEQ ID NO: 3293252 - DNA, 25 bp, Homo sapien
ttcctctcttcaggagattttttaa

SEQ ID NO: 3293253 - DNA, 25 bp, Homo sapien
gaggattttaggatccaattcagac

SEQ ID NO: 3293254 - DNA, 25 bp, Homo sapien
gatggtgccagttgtgttttccagg

SEQ ID NO: 3293255 - DNA, 25 bp, Homo sapien
tttatatccagctttgtaggagatg

SEQ ID NO: 3293256 - DNA, 25 bp, Homo sapien
tatccagctttgtaggagatggtgc

SEQ ID NO: 3293257 - DNA, 25 bp, Homo sapien
gtgccagttgtgttttccaggtcca

SEQ ID NO: 3293258 - DNA, 25 bp, Homo sapien
cctcctcattctgctccttatccat

SEQ ID NO: 3293259 - DNA, 25 bp, Homo sapien
catgagtgttctcttcctcctcatt

SEQ ID NO: 3293260 - DNA, 25 bp, Homo sapien
cttcctcctcattctgctccttatc

SEQ ID NO: 3293261 - DNA, 25 bp, Homo sapien
atgagtgttctcttcctcctcattc

SEQ ID NO: 3293262 - DNA, 25 bp, Homo sapien
aaaacgttttctgaattctgtccag

SEQ ID NO: 3293263 - DNA, 25 bp, Homo sapien
cgttttctgaattctgtccaggaca

SEQ ID NO: 3293264 - DNA, 25 bp, Homo sapien
aacgttttctgaattctgtccagga

SEQ ID NO: 3293265 - DNA, 25 bp, Homo sapien
gttttctgaattctgtccaggacat

SEQ ID NO: 3293266 - DNA, 25 bp, Homo sapien
gattttcctagatattgcacgggag

SEQ ID NO: 3293267 - DNA, 25 bp, Homo sapien
caagggccaagagaatatccgaact

SEQ ID NO: 3293268 - DNA, 25 bp, Homo sapien
caaatagcaaaattgaggccaaggg

SEQ ID NO: 3293269 - DNA, 25 bp, Homo sapien
tagtctgctagccaggatccacaag

SEQ ID NO: 3293270 - DNA, 25 bp, Homo sapien
taattgaactaacaatcctagtttg

SEQ ID NO: 3293271 - DNA, 25 bp, Homo sapien
agtgctgtgttgaattacggaataa

SEQ ID NO: 3293272 - DNA, 25 bp, Homo sapien
tacggaataatgagttagaactatt

SEQ ID NO: 3293273 - DNA, 25 bp, Homo sapien
tagtttgatactcccagtcttgtca

SEQ ID NO: 3293274 - DNA, 25 bp, Homo sapien
taactatgactaactgaagtcccta

SEQ ID NO: 3293275 - DNA, 25 bp, Homo sapien
gatggtacagggtattttcatatac

SEQ ID NO: 3293276 - DNA, 25 bp, Homo sapien
cattggcagggtgtattttgtcaca

SEQ ID NO: 3293277 - DNA, 25 bp, Homo sapien
cctaaatcaatgtactggtcatgca

SEQ ID NO: 3293278 - DNA, 25 bp, Homo sapien
agacttctctgaaggtcaggctgta

SEQ ID NO: 3293279 - DNA, 25 bp, Homo sapien
cttagcttccaaggaagacttctct

SEQ ID NO: 3293280 - DNA, 25 bp, Homo sapien
tcttagcttccaaggaagacttctc

SEQ ID NO: 3293281 - DNA, 25 bp, Homo sapien
gacttctctgaaggtcaggctgtac

SEQ ID NO: 3293282 - DNA, 25 bp, Homo sapien
ggactggtgattggatagatctcaa

SEQ ID NO: 3293283 - DNA, 25 bp, Homo sapien
tataaaatgcctgatgcgtcaaaaa

SEQ ID NO: 3293284 - DNA, 25 bp, Homo sapien
gctgttgttcaatgactacatcttt

SEQ ID NO: 3293285 - DNA, 25 bp, Homo sapien
gatgcgtcaaaaaccagctgttgtt

SEQ ID NO: 3293286 - DNA, 25 bp, Homo sapien
cagcatattctatcaacttgttact

SEQ ID NO: 3293287 - DNA, 25 bp, Homo sapien
ctatcaacttgttactcccacagtg

SEQ ID NO: 3293288 - DNA, 25 bp, Homo sapien
acttgttactcccacagtgccacat

SEQ ID NO: 3293289 - DNA, 25 bp, Homo sapien
tattctatcaacttgttactcccac

SEQ ID NO: 3293290 - DNA, 25 bp, Homo sapien
tatttccagctatgtgaacttgaca

SEQ ID NO: 3293291 - DNA, 25 bp, Homo sapien
tgttacatacctgaccctatgcaag

SEQ ID NO: 3293292 - DNA, 25 bp, Homo sapien
taccctggaacaaagtagattcttg

SEQ ID NO: 3293293 - DNA, 25 bp, Homo sapien
taatagctatctcacaggcactacc

SEQ ID NO: 3293294 - DNA, 25 bp, Homo sapien
gattctgttgcatccccttcactgt

SEQ ID NO: 3293295 - DNA, 25 bp, Homo sapien
gatatggatctcttcccctttcccg

SEQ ID NO: 3293296 - DNA, 25 bp, Homo sapien
ttcccgtgtgggattctgttgcatc

SEQ ID NO: 3293297 - DNA, 25 bp, Homo sapien
tagagaagagaaaacggtcgatatg

SEQ ID NO: 3293298 - DNA, 25 bp, Homo sapien
gacatggcctggcaaactctccttg

SEQ ID NO: 3293299 - DNA, 25 bp, Homo sapien
tgccaacagtgcagcccatctcacc

SEQ ID NO: 3293300 - DNA, 25 bp, Homo sapien
tggcctggcaaactctccttgtcct

SEQ ID NO: 3293301 - DNA, 25 bp, Homo sapien
ggaagacatggcctggcaaactctc

SEQ ID NO: 3293302 - DNA, 25 bp, Homo sapien
gatgctgttcttggcgttgctgctc

SEQ ID NO: 3293303 - DNA, 25 bp, Homo sapien
gcgccacccgccaggagatgctgtt

SEQ ID NO: 3293304 - DNA, 25 bp, Homo sapien
ctgccagttgtggtcgccttcgcca

SEQ ID NO: 3293305 - DNA, 25 bp, Homo sapien
tcgccttcgccagaggtgagagcag

SEQ ID NO: 3293306 - DNA, 25 bp, Homo sapien
ctgggagggccagcagcggcgaggg

SEQ ID NO: 3293307 - DNA, 25 bp, Homo sapien
agcagcggcgagggggagtccggga

SEQ ID NO: 3293308 - DNA, 25 bp, Homo sapien
ctggggaggaatcctctaggatcat

SEQ ID NO: 3293309 - DNA, 25 bp, Homo sapien
gggccagcagcggcgagggggagtc

SEQ ID NO: 3293310 - DNA, 25 bp, Homo sapien
caaataggatgttgtcgggattgtt

SEQ ID NO: 3293311 - DNA, 25 bp, Homo sapien
gtcgggattgttgagactctaggtc

SEQ ID NO: 3293312 - DNA, 25 bp, Homo sapien
gtggtaaagatgtcacaccaaatag

SEQ ID NO: 3293313 - DNA, 25 bp, Homo sapien
ggttggagtctcgaggaaacccatg

SEQ ID NO: 3293314 - DNA, 25 bp, Homo sapien
ggccaatgagatcattgtgaaggca

SEQ ID NO: 3293315 - DNA, 25 bp, Homo sapien
ggagcctgcaacatgccagccactg

SEQ ID NO: 3293316 - DNA, 25 bp, Homo sapien
gctggcggatccaagcaaatggcca

SEQ ID NO: 3293317 - DNA, 25 bp, Homo sapien
tgttaatatttctgaggagcctgca

SEQ ID NO: 3293318 - DNA, 25 bp, Homo sapien
gtactatccagtcccgaccttgctc

SEQ ID NO: 3293319 - DNA, 25 bp, Homo sapien
tccagtcccgaccttgctcagcttc

SEQ ID NO: 3293320 - DNA, 25 bp, Homo sapien
tatccagtcccgaccttgctcagct

SEQ ID NO: 3293321 - DNA, 25 bp, Homo sapien
tactatccagtcccgaccttgctca

SEQ ID NO: 3293322 - DNA, 25 bp, Homo sapien
tctccagctaagctttgttccctaa

SEQ ID NO: 3293323 - DNA, 25 bp, Homo sapien
ctctccagctaagctttgttcccta

SEQ ID NO: 3293324 - DNA, 25 bp, Homo sapien
aaatctgttataacctgaagcttcc

SEQ ID NO: 3293325 - DNA, 25 bp, Homo sapien
gttataacctgaagcttccctgtca

SEQ ID NO: 3293326 - DNA, 25 bp, Homo sapien
tcgcctctttggctagaggaagcac

SEQ ID NO: 3293327 - DNA, 25 bp, Homo sapien
ttcgcctctttggctagaggaagca

SEQ ID NO: 3293328 - DNA, 25 bp, Homo sapien
gacagggctttcctagcttcacagc

SEQ ID NO: 3293329 - DNA, 25 bp, Homo sapien
agctgtggccattcacagtgtggta

SEQ ID NO: 3293330 - DNA, 25 bp, Homo sapien
agggctttcctagcttcacagctgt

SEQ ID NO: 3293331 - DNA, 25 bp, Homo sapien
gctttcctagcttcacagctgtggc

SEQ ID NO: 3293332 - DNA, 25 bp, Homo sapien
gataagtgggcacctggtctttgag

SEQ ID NO: 3293333 - DNA, 25 bp, Homo sapien
ttcacagataagtgggcacctggtc

SEQ ID NO: 3293334 - DNA, 25 bp, Homo sapien
tctttttcacagataagtgggcacc

SEQ ID NO: 3293335 - DNA, 25 bp, Homo sapien
atatctttttcacagataagtgggc

SEQ ID NO: 3293336 - DNA, 25 bp, Homo sapien
tagacagctctctttggttttataa

SEQ ID NO: 3293337 - DNA, 25 bp, Homo sapien
ttagacagctctctttggttttata

SEQ ID NO: 3293338 - DNA, 25 bp, Homo sapien
agacagctctctttggttttataac

SEQ ID NO: 3293339 - DNA, 25 bp, Homo sapien
catcctccttgcatggccttgcatt

SEQ ID NO: 3293340 - DNA, 25 bp, Homo sapien
tcttccatcctccttgcatggcctt

SEQ ID NO: 3293341 - DNA, 25 bp, Homo sapien
atcctccttgcatggccttgcattc

SEQ ID NO: 3293342 - DNA, 25 bp, Homo sapien
tccatcctccttgcatggccttgca

SEQ ID NO: 3293343 - DNA, 25 bp, Homo sapien
gtgtttggatctctcattaccgcac

SEQ ID NO: 3293344 - DNA, 25 bp, Homo sapien
tttgtgtttggatctctcattaccg

SEQ ID NO: 3293345 - DNA, 25 bp, Homo sapien
cttggagcactttgtgtttggatct

SEQ ID NO: 3293346 - DNA, 25 bp, Homo sapien
ttggagcactttgtgtttggatctc

SEQ ID NO: 3293347 - DNA, 25 bp, Homo sapien
agtccgtgagcgttctcctttgctc

SEQ ID NO: 3293348 - DNA, 25 bp, Homo sapien
ctttgctcaaaatggctccttaggc

SEQ ID NO: 3293349 - DNA, 25 bp, Homo sapien
aaatggctccttaggctctcatcag

SEQ ID NO: 3293350 - DNA, 25 bp, Homo sapien
tccgtgagcgttctcctttgctcaa

SEQ ID NO: 3293351 - DNA, 25 bp, Homo sapien
tgttcgggttctttaggagactctg

SEQ ID NO: 3293352 - DNA, 25 bp, Homo sapien
gttcgggttctttaggagactctga

SEQ ID NO: 3293353 - DNA, 25 bp, Homo sapien
ctgttcgggttctttaggagactct

SEQ ID NO: 3293354 - DNA, 25 bp, Homo sapien
cttagatgtaacagcagggagaaga

SEQ ID NO: 3293355 - DNA, 25 bp, Homo sapien
ctctcaaagttttccacccagacct

SEQ ID NO: 3293356 - DNA, 25 bp, Homo sapien
taaacattgatccagggaccctctc

SEQ ID NO: 3293357 - DNA, 25 bp, Homo sapien
aatgacagtgggctagagtaccaaa

SEQ ID NO: 3293358 - DNA, 25 bp, Homo sapien
gacttgctccaataatacattgata

SEQ ID NO: 3293359 - DNA, 25 bp, Homo sapien
tgcagtggggtccaggggacttcac

SEQ ID NO: 3293360 - DNA, 25 bp, Homo sapien
atatgacttcggtttgggtgcagtg

SEQ ID NO: 3293361 - DNA, 25 bp, Homo sapien
ttatatgacttcggtttgggtgcag

SEQ ID NO: 3293362 - DNA, 25 bp, Homo sapien
ggtgcagtggggtccaggggacttc

SEQ ID NO: 3293363 - DNA, 25 bp, Homo sapien
ctggcaaggcagttcatgggccacc

SEQ ID NO: 3293364 - DNA, 25 bp, Homo sapien
actggcaaggcagttcatgggccac

SEQ ID NO: 3293365 - DNA, 25 bp, Homo sapien
tggcaaggcagttcatgggccaccc

SEQ ID NO: 3293366 - DNA, 25 bp, Homo sapien
cactggcaaggcagttcatgggcca

SEQ ID NO: 3293367 - DNA, 25 bp, Homo sapien
cgggacccatctgccgctcgccggc

SEQ ID NO: 3293368 - DNA, 25 bp, Homo sapien
ccgggacccatctgccgctcgccgg

SEQ ID NO: 3293369 - DNA, 25 bp, Homo sapien
cagccgtgtcccgctccggagaccc

SEQ ID NO: 3293370 - DNA, 25 bp, Homo sapien
cgcccgcagtagccggggagcgcgg

SEQ ID NO: 3293371 - DNA, 25 bp, Homo sapien
ggtcgggcggcggtgcgaggagcgg

SEQ ID NO: 3293372 - DNA, 25 bp, Homo sapien
tggctccccaagatcggtgaaccct

SEQ ID NO: 3293373 - DNA, 25 bp, Homo sapien
tcaccgggctcagaaggcaggtcgg

SEQ ID NO: 3293374 - DNA, 25 bp, Homo sapien
ggatattcgctttctaccccaaatc

SEQ ID NO: 3293375 - DNA, 25 bp, Homo sapien
gagtccacctcgctggaaataccgc

SEQ ID NO: 3293376 - DNA, 25 bp, Homo sapien
tcccgtcgactgtgggatattcgct

SEQ ID NO: 3293377 - DNA, 25 bp, Homo sapien
gctcgccttccagagtaactcccgt

SEQ ID NO: 3293378 - DNA, 25 bp, Homo sapien
aaagtactgcaatcatgtaaatgca

SEQ ID NO: 3293379 - DNA, 25 bp, Homo sapien
gaaattgttatgtgtcaacacaatt

SEQ ID NO: 3293380 - DNA, 25 bp, Homo sapien
gcataaccagtattcacaccttcct

SEQ ID NO: 3293381 - DNA, 25 bp, Homo sapien
tcagccaacatgtaacaccaagcat

SEQ ID NO: 3293382 - DNA, 25 bp, Homo sapien
aaagaagtatgctatatagcaaatg

SEQ ID NO: 3293383 - DNA, 25 bp, Homo sapien
aaatcataaggataacacaaatatc

SEQ ID NO: 3293384 - DNA, 25 bp, Homo sapien
cataaggataacacaaatatcagaa

SEQ ID NO: 3293385 - DNA, 25 bp, Homo sapien
tgctatatagcaaatgcacacacgt

SEQ ID NO: 3293386 - DNA, 25 bp, Homo sapien
tttccttccattcttcagcgtggct

SEQ ID NO: 3293387 - DNA, 25 bp, Homo sapien
cggggcttgcaggtccaagcaaatt

SEQ ID NO: 3293388 - DNA, 25 bp, Homo sapien
tattttcttgtacagcggggcttgc

SEQ ID NO: 3293389 - DNA, 25 bp, Homo sapien
gcttgcaggtccaagcaaattttcc

SEQ ID NO: 3293390 - DNA, 25 bp, Homo sapien
gcagtggggtccggccttgatcacc

SEQ ID NO: 3293391 - DNA, 25 bp, Homo sapien
tggggtccggccttgatcacctcca

SEQ ID NO: 3293392 - DNA, 25 bp, Homo sapien
ctggtgatgtgcctgggacggacct

SEQ ID NO: 3293393 - DNA, 25 bp, Homo sapien
tggtgatgtgcctgggacggacctg

SEQ ID NO: 3293394 - DNA, 25 bp, Homo sapien
gggcgtgaggcgcagaacccggctg

SEQ ID NO: 3293395 - DNA, 25 bp, Homo sapien
cgcagaacccggctgcggagctcat

SEQ ID NO: 3293396 - DNA, 25 bp, Homo sapien
gcgaccacaagtggcaggagcagca

SEQ ID NO: 3293397 - DNA, 25 bp, Homo sapien
ctggcgaaggcgaccacaagtggca

SEQ ID NO: 3293398 - DNA, 25 bp, Homo sapien
tcagtgctcagtgcgatgggaaact

SEQ ID NO: 3293399 - DNA, 25 bp, Homo sapien
tgtggccaatgactcctgagcctcg

SEQ ID NO: 3293400 - DNA, 25 bp, Homo sapien
gagcctcgccggcacgttttattcc

SEQ ID NO: 3293401 - DNA, 25 bp, Homo sapien
gaagcctgaagtggacaccgaggaa

SEQ ID NO: 3293402 - DNA, 25 bp, Homo sapien
taagatagtactgggaagacttggg

SEQ ID NO: 3293403 - DNA, 25 bp, Homo sapien
actaagatagtactgggaagacttg

SEQ ID NO: 3293404 - DNA, 25 bp, Homo sapien
aaactaagatagtactgggaagact

SEQ ID NO: 3293405 - DNA, 25 bp, Homo sapien
gaaactaagatagtactgggaagac

SEQ ID NO: 3293406 - DNA, 25 bp, Homo sapien
ctctatgagggaggcaatattatcc

SEQ ID NO: 3293407 - DNA, 25 bp, Homo sapien
gcaacatgacctgatatacacagct

SEQ ID NO: 3293408 - DNA, 25 bp, Homo sapien
tacattaagaatgacaccgatcatc

SEQ ID NO: 3293409 - DNA, 25 bp, Homo sapien
ccagaggatgttcttttaaccagat

SEQ ID NO: 3293410 - DNA, 25 bp, Homo sapien
tctgttgggctccatgtaattccta

SEQ ID NO: 3293411 - DNA, 25 bp, Homo sapien
tctaataaccataaagtagaccagg

SEQ ID NO: 3293412 - DNA, 25 bp, Homo sapien
cactgagagactccattaagttcct

SEQ ID NO: 3293413 - DNA, 25 bp, Homo sapien
gtacagtccaatgtttaggcaagaa

SEQ ID NO: 3293414 - DNA, 25 bp, Homo sapien
ttctgccatcttttaaccaaccttc

SEQ ID NO: 3293415 - DNA, 25 bp, Homo sapien
tatcctgaataaatgagaactctag

SEQ ID NO: 3293416 - DNA, 25 bp, Homo sapien
gccatcttttaaccaaccttctcag

SEQ ID NO: 3293417 - DNA, 25 bp, Homo sapien
tacagtaagaataggtatcctgaat

SEQ ID NO: 3293418 - DNA, 25 bp, Homo sapien
tttttctgtacaattttcttgattc

SEQ ID NO: 3293419 - DNA, 25 bp, Homo sapien
attttcttgattctgggagcatctg

SEQ ID NO: 3293420 - DNA, 25 bp, Homo sapien
agcatctgggtccaggcagattttc

SEQ ID NO: 3293421 - DNA, 25 bp, Homo sapien
catctgggtccaggcagattttcct

SEQ ID NO: 3293422 - DNA, 25 bp, Homo sapien
caaaagagaacagggttatctgtgg

SEQ ID NO: 3293423 - DNA, 25 bp, Homo sapien
ggtgtcctgatctgaatatcagaac

SEQ ID NO: 3293424 - DNA, 25 bp, Homo sapien
tgaatatcagaactaatccatgaga

SEQ ID NO: 3293425 - DNA, 25 bp, Homo sapien
gttatctgtgggtgtcctgatctga

SEQ ID NO: 3293426 - DNA, 25 bp, Homo sapien
ttatacacatgcagcggagttcagc

SEQ ID NO: 3293427 - DNA, 25 bp, Homo sapien
gcaatgggttcctttcccgatcact

SEQ ID NO: 3293428 - DNA, 25 bp, Homo sapien
gatgaattccagaggttgtctttat

SEQ ID NO: 3293429 - DNA, 25 bp, Homo sapien
atcacttcgacttggttgcaatggg

SEQ ID NO: 3293430 - DNA, 25 bp, Homo sapien
gccagagcagtcagcagcaatgaca

SEQ ID NO: 3293431 - DNA, 25 bp, Homo sapien
tagtttgtcctttggtggaggaagc

SEQ ID NO: 3293432 - DNA, 25 bp, Homo sapien
cctgcaaggcatgaagtggtctcgc

SEQ ID NO: 3293433 - DNA, 25 bp, Homo sapien
tttgcctttcgccaagtttctctta

SEQ ID NO: 3293434 - DNA, 25 bp, Homo sapien
caggaaggggtggtatcaagtctga

SEQ ID NO: 3293435 - DNA, 25 bp, Homo sapien
ggaaggggtggtatcaagtctgagg

SEQ ID NO: 3293436 - DNA, 25 bp, Homo sapien
gaaggggtggtatcaagtctgaggc

SEQ ID NO: 3293437 - DNA, 25 bp, Homo sapien
agtgagggtgagttgctgcctacaa

SEQ ID NO: 3293438 - DNA, 25 bp, Homo sapien
ccagaagacctctgagtgagggtga

SEQ ID NO: 3293439 - DNA, 25 bp, Homo sapien
gaaggctgagctagagttgtttcca

SEQ ID NO: 3293440 - DNA, 25 bp, Homo sapien
cagaaccagaagacctctgagtgag

SEQ ID NO: 3293441 - DNA, 25 bp, Homo sapien
ttcttatatgcaggtagtggcccta

SEQ ID NO: 3293442 - DNA, 25 bp, Homo sapien
tgaataagcctcttcttatatgcag

SEQ ID NO: 3293443 - DNA, 25 bp, Homo sapien
ttaaggatgaataagcctcttctta

SEQ ID NO: 3293444 - DNA, 25 bp, Homo sapien
tatgcaggtagtggccctagcaaat

SEQ ID NO: 3293445 - DNA, 25 bp, Homo sapien
ttcaaaggacaaaataaagactatg

SEQ ID NO: 3293446 - DNA, 25 bp, Homo sapien
aaagactatgaaccaatgagacaca

SEQ ID NO: 3293447 - DNA, 25 bp, Homo sapien
aggacaaaataaagactatgaacca

SEQ ID NO: 3293448 - DNA, 25 bp, Homo sapien
caaaataaagactatgaaccaatga

SEQ ID NO: 3293449 - DNA, 25 bp, Homo sapien
tagtatcccacaatcaagagtaagg

SEQ ID NO: 3293450 - DNA, 25 bp, Homo sapien
gggaaacttttccatgcgtgctcat

SEQ ID NO: 3293451 - DNA, 25 bp, Homo sapien
tgctagggcctcgaggatgtcgcta

SEQ ID NO: 3293452 - DNA, 25 bp, Homo sapien
gattcctggctcacactatagtcaa

SEQ ID NO: 3293453 - DNA, 25 bp, Homo sapien
aaaaggggcttctggatcaagacaa

SEQ ID NO: 3293454 - DNA, 25 bp, Homo sapien
taaacaaacgcaacgcagctctctc

SEQ ID NO: 3293455 - DNA, 25 bp, Homo sapien
gatgaactccttgcgtggtctgtaa

SEQ ID NO: 3293456 - DNA, 25 bp, Homo sapien
gcactgtgggcctatggcgaacact

SEQ ID NO: 3293457 - DNA, 25 bp, Homo sapien
ggcgaacacttgcagattactgatc

SEQ ID NO: 3293458 - DNA, 25 bp, Homo sapien
cgctggcgatgggccctggctgcgt

SEQ ID NO: 3293459 - DNA, 25 bp, Homo sapien
gatgggccctggctgcgtcagcagc

SEQ ID NO: 3293460 - DNA, 25 bp, Homo sapien
gcgatgggccctggctgcgtcagca

SEQ ID NO: 3293461 - DNA, 25 bp, Homo sapien
tggcgatgggccctggctgcgtcag

SEQ ID NO: 3293462 - DNA, 25 bp, Homo sapien
gctgcgagcggtcgcgggttcctga

SEQ ID NO: 3293463 - DNA, 25 bp, Homo sapien
agtggtcaagagagcgctgcgagcg

SEQ ID NO: 3293464 - DNA, 25 bp, Homo sapien
agagcgctgcgagcggtcgcgggtt

SEQ ID NO: 3293465 - DNA, 25 bp, Homo sapien
tcaagagagcgctgcgagcggtcgc

SEQ ID NO: 3293466 - DNA, 25 bp, Homo sapien
ggaggagcggagattggaggagcga

SEQ ID NO: 3293467 - DNA, 25 bp, Homo sapien
gattggaggagcgaagattggagga

SEQ ID NO: 3293468 - DNA, 25 bp, Homo sapien
gagcgaagattggaggatccggagc

SEQ ID NO: 3293469 - DNA, 25 bp, Homo sapien
cgaagattggaggatccggagcact

SEQ ID NO: 3293470 - DNA, 25 bp, Homo sapien
gccggcttttctgaggcacgcagcc

SEQ ID NO: 3293471 - DNA, 25 bp, Homo sapien
cgggctagggatgccggcttttctg

SEQ ID NO: 3293472 - DNA, 25 bp, Homo sapien
ggcacgcagccctctgggagatgct

SEQ ID NO: 3293473 - DNA, 25 bp, Homo sapien
ctcatggcctgtgccagagcgggct

SEQ ID NO: 3293474 - DNA, 25 bp, Homo sapien
aaccatcgagtttcatgattactgg

SEQ ID NO: 3293475 - DNA, 25 bp, Homo sapien
tactggtgaccaacgctgtttccac

SEQ ID NO: 3293476 - DNA, 25 bp, Homo sapien
ttgaagggtgaagtagtttccagct

SEQ ID NO: 3293477 - DNA, 25 bp, Homo sapien
aggcctactctagtccccagtgagc

SEQ ID NO: 3293478 - DNA, 25 bp, Homo sapien
ctgcaagtctgggacgggacttcat

SEQ ID NO: 3293479 - DNA, 25 bp, Homo sapien
caccaaaaggcctatccggggagtg

SEQ ID NO: 3293480 - DNA, 25 bp, Homo sapien
aacactcccttgtgtttaggattga

SEQ ID NO: 3293481 - DNA, 25 bp, Homo sapien
ctatccggggagtgaatcctctcag

SEQ ID NO: 3293482 - DNA, 25 bp, Homo sapien
gtactttctacgctttccattcctg

SEQ ID NO: 3293483 - DNA, 25 bp, Homo sapien
caggacttctatggattcaacagca

SEQ ID NO: 3293484 - DNA, 25 bp, Homo sapien
tgttgtggtggcagttatgataacc

SEQ ID NO: 3293485 - DNA, 25 bp, Homo sapien
tatgcgtggcggtatccatatcctg

SEQ ID NO: 3293486 - DNA, 25 bp, Homo sapien
ggagacaaccaagtaatcaaaggca

SEQ ID NO: 3293487 - DNA, 25 bp, Homo sapien
caaaggcatgaagattggaaagtcc

SEQ ID NO: 3293488 - DNA, 25 bp, Homo sapien
gcagcaagtgactcaggtagatgga

SEQ ID NO: 3293489 - DNA, 25 bp, Homo sapien
aacactgaggaatggaaaacgctcc

SEQ ID NO: 3293490 - DNA, 25 bp, Homo sapien
tttattatcatgtcatttgtacaaa

SEQ ID NO: 3293491 - DNA, 25 bp, Homo sapien
tcatttgtacaaatgtaacagtaat

SEQ ID NO: 3293492 - DNA, 25 bp, Homo sapien
ttgtacaaatgtaacagtaatgata

SEQ ID NO: 3293493 - DNA, 25 bp, Homo sapien
gggaaagagaaacgctgcagaatgg

SEQ ID NO: 3293494 - DNA, 25 bp, Homo sapien
cattttcagctctggtaagggcagg

SEQ ID NO: 3293495 - DNA, 25 bp, Homo sapien
aagtcctttccagctgtccctagaa

SEQ ID NO: 3293496 - DNA, 25 bp, Homo sapien
cctgcaggaagtgtcaatgatacgc

SEQ ID NO: 3293497 - DNA, 25 bp, Homo sapien
aaggtggctgacacattatggtctc

SEQ ID NO: 3293498 - DNA, 25 bp, Homo sapien
tgtcacattgggttagaaatgtcca

SEQ ID NO: 3293499 - DNA, 25 bp, Homo sapien
aagaagtggctgtggactcaactag

SEQ ID NO: 3293500 - DNA, 25 bp, Homo sapien
catgatctcccttaagctgcacaca

SEQ ID NO: 3293501 - DNA, 25 bp, Homo sapien
gacagggatcctagccttgaactca

SEQ ID NO: 3293502 - DNA, 25 bp, Homo sapien
ctcttcaccaagaaggcttacaggc

SEQ ID NO: 3293503 - DNA, 25 bp, Homo sapien
aagaaggcttacaggcccaaagtgc

SEQ ID NO: 3293504 - DNA, 25 bp, Homo sapien
tcaccaagaaggcttacaggcccaa

SEQ ID NO: 3293505 - DNA, 25 bp, Homo sapien
gtgcccaaaccagacattgcatttt

SEQ ID NO: 3293506 - DNA, 25 bp, Homo sapien
gctccagtcgcctgtgtatatggaa

SEQ ID NO: 3293507 - DNA, 25 bp, Homo sapien
tgaggtaaacgtcccaaaacaggca

SEQ ID NO: 3293508 - DNA, 25 bp, Homo sapien
cagtatttctgaccaacggctccag

SEQ ID NO: 3293509 - DNA, 25 bp, Homo sapien
tctagtccttcagctaactcttggg

SEQ ID NO: 3293510 - DNA, 25 bp, Homo sapien
gggttgagacaagctttcttcccat

SEQ ID NO: 3293511 - DNA, 25 bp, Homo sapien
ggggttgagacaagctttcttccca

SEQ ID NO: 3293512 - DNA, 25 bp, Homo sapien
gttgagacaagctttcttcccattc

SEQ ID NO: 3293513 - DNA, 25 bp, Homo sapien
ggttgagacaagctttcttcccatt

SEQ ID NO: 3293514 - DNA, 25 bp, Homo sapien
ttggggcagcgggagagtcggggac

SEQ ID NO: 3293515 - DNA, 25 bp, Homo sapien
cagcgggagagtcggggaccccagc

SEQ ID NO: 3293516 - DNA, 25 bp, Homo sapien
atgacttcggtttgggcgcagtggg

SEQ ID NO: 3293517 - DNA, 25 bp, Homo sapien
tctgcaagcactggcagcgcagttc

SEQ ID NO: 3293518 - DNA, 25 bp, Homo sapien
gtctgcaagcactggcagcgcagtt

SEQ ID NO: 3293519 - DNA, 25 bp, Homo sapien
tgcaagcactggcagcgcagttcag

SEQ ID NO: 3293520 - DNA, 25 bp, Homo sapien
caagcactggcagcgcagttcagtg

SEQ ID NO: 3293521 - DNA, 25 bp, Homo sapien
agaatagactcgctgattgagcggg

SEQ ID NO: 3293522 - DNA, 25 bp, Homo sapien
gggaagaatagactcgctgattgag

SEQ ID NO: 3293523 - DNA, 25 bp, Homo sapien
gaagaatagactcgctgattgagcg

SEQ ID NO: 3293524 - DNA, 25 bp, Homo sapien
ctagggaagaatagactcgctgatt

SEQ ID NO: 3293525 - DNA, 25 bp, Homo sapien
gcgcccaccccagccgcgtccggcc

SEQ ID NO: 3293526 - DNA, 25 bp, Homo sapien
gcggggcgcccaccccagccgcgtc

SEQ ID NO: 3293527 - DNA, 25 bp, Homo sapien
ctgtcggcgcggggcgcccacccca

SEQ ID NO: 3293528 - DNA, 25 bp, Homo sapien
tcggcgcggggcgcccaccccagcc

SEQ ID NO: 3293529 - DNA, 25 bp, Homo sapien
gcggcggagagcgtggcgtgggcca

SEQ ID NO: 3293530 - DNA, 25 bp, Homo sapien
cggcggagagcgtggcgtgggccat

SEQ ID NO: 3293531 - DNA, 25 bp, Homo sapien
ggcggcggagagcgtggcgtgggcc

SEQ ID NO: 3293532 - DNA, 25 bp, Homo sapien
ggggctcagcagacgcgtcgggaag

SEQ ID NO: 3293533 - DNA, 25 bp, Homo sapien
tgtgcgagaagcgggagagctggcg

SEQ ID NO: 3293534 - DNA, 25 bp, Homo sapien
ggccagggaaattcccggagctcca

SEQ ID NO: 3293535 - DNA, 25 bp, Homo sapien
gctctctgtgaaagtacagccatcg

SEQ ID NO: 3293536 - DNA, 25 bp, Homo sapien
aagccagggctgtataacatgacct

SEQ ID NO: 3293537 - DNA, 25 bp, Homo sapien
acagccatcgtctcggattccagag

SEQ ID NO: 3293538 - DNA, 25 bp, Homo sapien
tcagtgttagtgtccgtggaagcca

SEQ ID NO: 3293539 - DNA, 25 bp, Homo sapien
gtcctctctatttagcctcctggag

SEQ ID NO: 3293540 - DNA, 25 bp, Homo sapien
caaggccatggtgcgtgctgaattc

SEQ ID NO: 3293541 - DNA, 25 bp, Homo sapien
gcttctctttcttccggtacactta

SEQ ID NO: 3293542 - DNA, 25 bp, Homo sapien
gagactgcttgtctggcagcttctc

SEQ ID NO: 3293543 - DNA, 25 bp, Homo sapien
tagaattatctgtgggtgtcctggc

SEQ ID NO: 3293544 - DNA, 25 bp, Homo sapien
tcagaaaggatctgtgagactggag

SEQ ID NO: 3293545 - DNA, 25 bp, Homo sapien
tctcccatcttacagagtggctctg

SEQ ID NO: 3293546 - DNA, 25 bp, Homo sapien
ctctgcaagagagaatagaattatc

SEQ ID NO: 3293547 - DNA, 25 bp, Homo sapien
tcacatacacgcagcgcagttcagt

SEQ ID NO: 3293548 - DNA, 25 bp, Homo sapien
tcctgctgagaccaactccaaattg

SEQ ID NO: 3293549 - DNA, 25 bp, Homo sapien
attacttcgtctttgctgcaatggg

SEQ ID NO: 3293550 - DNA, 25 bp, Homo sapien
tgggatgaagtacaaaggttgactt

SEQ ID NO: 3293551 - DNA, 25 bp, Homo sapien
taaattgaaggtaattgtacctctc

SEQ ID NO: 3293552 - DNA, 25 bp, Homo sapien
ctattagtggtcgtgaatatttttc

SEQ ID NO: 3293553 - DNA, 25 bp, Homo sapien
ggtaaaaagtgatctattagtggtc

SEQ ID NO: 3293554 - DNA, 25 bp, Homo sapien
tgtaaattgaaggtaattgtacctc

SEQ ID NO: 3293555 - DNA, 25 bp, Homo sapien
caacaggtgcaaggaacagatctct

SEQ ID NO: 3293556 - DNA, 25 bp, Homo sapien
tccattggtggaggaacccagaaca

SEQ ID NO: 3293557 - DNA, 25 bp, Homo sapien
cacaaagtgatctggcacagctgca

SEQ ID NO: 3293558 - DNA, 25 bp, Homo sapien
tgttgttataatggcactctccagc

SEQ ID NO: 3293559 - DNA, 25 bp, Homo sapien
gatgttctttgggaccgtatggata

SEQ ID NO: 3293560 - DNA, 25 bp, Homo sapien
tggccctgcgccaaagacagcagat

SEQ ID NO: 3293561 - DNA, 25 bp, Homo sapien
tatggtgcagaagccgaagttaaag

SEQ ID NO: 3293562 - DNA, 25 bp, Homo sapien
tgtgcccaacacaggtcaaaattcc

SEQ ID NO: 3293563 - DNA, 25 bp, Homo sapien
acatctggaaacttttctgagtttt

SEQ ID NO: 3293564 - DNA, 25 bp, Homo sapien
catctggaaacttttctgagttttt

SEQ ID NO: 3293565 - DNA, 25 bp, Homo sapien
ttacatctggaaacttttctgagtt

SEQ ID NO: 3293566 - DNA, 25 bp, Homo sapien
tacatctggaaacttttctgagttt

SEQ ID NO: 3293567 - DNA, 25 bp, Homo sapien
caaatgtgccaaacacaatgacagc

SEQ ID NO: 3293568 - DNA, 25 bp, Homo sapien
aacacaatgacagccatcaggagga

SEQ ID NO: 3293569 - DNA, 25 bp, Homo sapien
aatgacagccatcaggaggagtgct

SEQ ID NO: 3293570 - DNA, 25 bp, Homo sapien
tgtgccaaacacaatgacagccatc

SEQ ID NO: 3293571 - DNA, 25 bp, Homo sapien
ttgcttaatgttaaatataatctca

SEQ ID NO: 3293572 - DNA, 25 bp, Homo sapien
aatttcacagtttctatattttgct

SEQ ID NO: 3293573 - DNA, 25 bp, Homo sapien
gtttctatattttgcttaatgttaa

SEQ ID NO: 3293574 - DNA, 25 bp, Homo sapien
cttttaatttcacagtttctatatt

SEQ ID NO: 3293575 - DNA, 25 bp, Homo sapien
tacatctggaaccctttctgagttt

SEQ ID NO: 3293576 - DNA, 25 bp, Homo sapien
acatctggaaccctttctgagtttt

SEQ ID NO: 3293577 - DNA, 25 bp, Homo sapien
ttacatctggaaccctttctgagtt

SEQ ID NO: 3293578 - DNA, 25 bp, Homo sapien
catctggaaccctttctgagttttt

SEQ ID NO: 3293579 - DNA, 25 bp, Homo sapien
aggaggagtgctggtgagttctgag

SEQ ID NO: 3293580 - DNA, 25 bp, Homo sapien
gaggacaaggacagtcagaaggagg

SEQ ID NO: 3293581 - DNA, 25 bp, Homo sapien
gagtgctggtgagttctgagtaccc

SEQ ID NO: 3293582 - DNA, 25 bp, Homo sapien
gtgctggtgagttctgagtacccat

SEQ ID NO: 3293583 - DNA, 25 bp, Homo sapien
cccagagaatgttttattgctctcc

SEQ ID NO: 3293584 - DNA, 25 bp, Homo sapien
gatcctgttctggatggtggaatca

SEQ ID NO: 3293585 - DNA, 25 bp, Homo sapien
aatactgcagcccacttgcatgtgc

SEQ ID NO: 3293586 - DNA, 25 bp, Homo sapien
tggaatcaatactgcagcccacttg

SEQ ID NO: 3293587 - DNA, 25 bp, Homo sapien
gcgtcaattttattactggtctctg

SEQ ID NO: 3293588 - DNA, 25 bp, Homo sapien
ccagaatctataaaatcccaatgct

SEQ ID NO: 3293589 - DNA, 25 bp, Homo sapien
aacgaattgtctcaagtttgttaga

SEQ ID NO: 3293590 - DNA, 25 bp, Homo sapien
ctgcaagataacgaattgtctcaag

SEQ ID NO: 3293591 - DNA, 25 bp, Homo sapien
tcaactggtttcatgtattagttgt

SEQ ID NO: 3293592 - DNA, 25 bp, Homo sapien
ggtttcatgtattagttgttgctta

SEQ ID NO: 3293593 - DNA, 25 bp, Homo sapien
actggtttcatgtattagttgttgc

SEQ ID NO: 3293594 - DNA, 25 bp, Homo sapien
tttcatgtattagttgttgcttaac

SEQ ID NO: 3293595 - DNA, 25 bp, Homo sapien
ttctctgctctgagatttgcgaatt

SEQ ID NO: 3293596 - DNA, 25 bp, Homo sapien
ttctcattctctgctctgagatttg

SEQ ID NO: 3293597 - DNA, 25 bp, Homo sapien
gagatttgcgaattcacttttctct

SEQ ID NO: 3293598 - DNA, 25 bp, Homo sapien
tgctctgagatttgcgaattcactt

SEQ ID NO: 3293599 - DNA, 25 bp, Homo sapien
gataaagtagttaatgctgatactg

SEQ ID NO: 3293600 - DNA, 25 bp, Homo sapien
accgtctctttataggtagtatccg

SEQ ID NO: 3293601 - DNA, 25 bp, Homo sapien
gtctctttataggtagtatccgggc

SEQ ID NO: 3293602 - DNA, 25 bp, Homo sapien
tgataaagtagttaatgctgatact

SEQ ID NO: 3293603 - DNA, 25 bp, Homo sapien
ctgaaccaacgcatgggtatcaaaa

SEQ ID NO: 3293604 - DNA, 25 bp, Homo sapien
gaaccaacgcatgggtatcaaaagt

SEQ ID NO: 3293605 - DNA, 25 bp, Homo sapien
caacgcatgggtatcaaaagttaat

SEQ ID NO: 3293606 - DNA, 25 bp, Homo sapien
accaacgcatgggtatcaaaagtta

SEQ ID NO: 3293607 - DNA, 25 bp, Homo sapien
tttttggcattgcagtactccctga

SEQ ID NO: 3293608 - DNA, 25 bp, Homo sapien
gaaatgcattggctagagaattaag

SEQ ID NO: 3293609 - DNA, 25 bp, Homo sapien
tccctgattcacaattcatcttggc

SEQ ID NO: 3293610 - DNA, 25 bp, Homo sapien
atgaacttggacagttcttccccag

SEQ ID NO: 3293611 - DNA, 25 bp, Homo sapien
tgtgatgtatcatgtagcattcttc

SEQ ID NO: 3293612 - DNA, 25 bp, Homo sapien
aactgtgatgtatcatgtagcattc

SEQ ID NO: 3293613 - DNA, 25 bp, Homo sapien
tgtatcatgtagcattcttccccta

SEQ ID NO: 3293614 - DNA, 25 bp, Homo sapien
caaaactgtgatgtatcatgtagca

SEQ ID NO: 3293615 - DNA, 25 bp, Homo sapien
tcaaataggcttgtgtcccacttcc

SEQ ID NO: 3293616 - DNA, 25 bp, Homo sapien
cacttcctgccataacacgttctat

SEQ ID NO: 3293617 - DNA, 25 bp, Homo sapien
actgcgtggtacttgcaacttcttg

SEQ ID NO: 3293618 - DNA, 25 bp, Homo sapien
cgttctataggagactgcgtggtac

SEQ ID NO: 3293619 - DNA, 25 bp, Homo sapien
catggagttggcctgaggaccaatg

SEQ ID NO: 3293620 - DNA, 25 bp, Homo sapien
gtccatggagttggcctgaggacca

SEQ ID NO: 3293621 - DNA, 25 bp, Homo sapien
agttggcctgaggaccaatgacaag

SEQ ID NO: 3293622 - DNA, 25 bp, Homo sapien
aatgtccatggagttggcctgagga

SEQ ID NO: 3293623 - DNA, 25 bp, Homo sapien
cttgatctcaagtactggggctgcc

SEQ ID NO: 3293624 - DNA, 25 bp, Homo sapien
cacagaggttgtttcttgctactta

SEQ ID NO: 3293625 - DNA, 25 bp, Homo sapien
ataaccttggaattattaagagatt

SEQ ID NO: 3293626 - DNA, 25 bp, Homo sapien
cagctacttgggacaatccagaact

SEQ ID NO: 3293627 - DNA, 25 bp, Homo sapien
gcctgtgctagaggcagttacccaa

SEQ ID NO: 3293628 - DNA, 25 bp, Homo sapien
cttgcctgtgctagaggcagttacc

SEQ ID NO: 3293629 - DNA, 25 bp, Homo sapien
ctgtgctagaggcagttacccaagg

SEQ ID NO: 3293630 - DNA, 25 bp, Homo sapien
tgcctgtgctagaggcagttaccca

SEQ ID NO: 3293631 - DNA, 25 bp, Homo sapien
gatacctcatgcatgcaccattgtc

SEQ ID NO: 3293632 - DNA, 25 bp, Homo sapien
ccagagggcaaacgctatatgaggt

SEQ ID NO: 3293633 - DNA, 25 bp, Homo sapien
ctgaatacaaagttccccagagggc

SEQ ID NO: 3293634 - DNA, 25 bp, Homo sapien
tctgtcctgaaaacctggtgtgctg

SEQ ID NO: 3293635 - DNA, 25 bp, Homo sapien
cttagaagcattgtgtttggtatat

SEQ ID NO: 3293636 - DNA, 25 bp, Homo sapien
gattgaaacaacattaaacttagtg

SEQ ID NO: 3293637 - DNA, 25 bp, Homo sapien
tgggtccaaatttcaatcagaagtt

SEQ ID NO: 3293638 - DNA, 25 bp, Homo sapien
tatatttgaaggttagaacattggg

SEQ ID NO: 3293639 - DNA, 25 bp, Homo sapien
gacgagtgagaacgacagaggtcac

SEQ ID NO: 3293640 - DNA, 25 bp, Homo sapien
attagtgtataatgacgagtgagaa

SEQ ID NO: 3293641 - DNA, 25 bp, Homo sapien
tgtataatgacgagtgagaacgaca

SEQ ID NO: 3293642 - DNA, 25 bp, Homo sapien
taatgacgagtgagaacgacagagg

SEQ ID NO: 3293643 - DNA, 25 bp, Homo sapien
tttcagcaaatatagtccttgtttc

SEQ ID NO: 3293644 - DNA, 25 bp, Homo sapien
aataaatatcgaaacctctctgctc

SEQ ID NO: 3293645 - DNA, 25 bp, Homo sapien
tcaataaatatcgaaacctctctgc

SEQ ID NO: 3293646 - DNA, 25 bp, Homo sapien
caataaatatcgaaacctctctgct

SEQ ID NO: 3293647 - DNA, 25 bp, Homo sapien
gagagtgtgcaagtagattcaatca

SEQ ID NO: 3293648 - DNA, 25 bp, Homo sapien
catacatttccctgccgtcacattg

SEQ ID NO: 3293649 - DNA, 25 bp, Homo sapien
taacaaatgactagagaatatctgc

SEQ ID NO: 3293650 - DNA, 25 bp, Homo sapien
cacagtggctgacatgtgatatgtc

SEQ ID NO: 3293651 - DNA, 25 bp, Homo sapien
tgctcaaacacattaggcgcaatcc

SEQ ID NO: 3293652 - DNA, 25 bp, Homo sapien
tcaggaacagccaccaataagcttc

SEQ ID NO: 3293653 - DNA, 25 bp, Homo sapien
tccttcaggaacagccaccaataag

SEQ ID NO: 3293654 - DNA, 25 bp, Homo sapien
taggcgcaatccaggtggcctctgc

SEQ ID NO: 3293655 - DNA, 25 bp, Homo sapien
gcacccaagtgggtactgcctgtga

SEQ ID NO: 3293656 - DNA, 25 bp, Homo sapien
caagtgggtactgcctgtgacagct

SEQ ID NO: 3293657 - DNA, 25 bp, Homo sapien
cctggcacccaagtgggtactgcct

SEQ ID NO: 3293658 - DNA, 25 bp, Homo sapien
tgtttccccaggctctagagttttc

SEQ ID NO: 3293659 - DNA, 25 bp, Homo sapien
ttacctacattcactggcaggaggg

SEQ ID NO: 3293660 - DNA, 25 bp, Homo sapien
catggctaataggtggtggcaacca

SEQ ID NO: 3293661 - DNA, 25 bp, Homo sapien
tttcagtcctgcagctaaccctggg

SEQ ID NO: 3293662 - DNA, 25 bp, Homo sapien
gctctttgtcatactgggcctcact

SEQ ID NO: 3293663 - DNA, 25 bp, Homo sapien
gggcagacgccagtatttctgacca

SEQ ID NO: 3293664 - DNA, 25 bp, Homo sapien
gacgccagtatttctgaccaacagc

SEQ ID NO: 3293665 - DNA, 25 bp, Homo sapien
cagacgccagtatttctgaccaaca

SEQ ID NO: 3293666 - DNA, 25 bp, Homo sapien
gccagtatttctgaccaacagctcc

SEQ ID NO: 3293667 - DNA, 25 bp, Homo sapien
ttttcttaaccatgggcgatgcggg

SEQ ID NO: 3293668 - DNA, 25 bp, Homo sapien
atgcggggttgagacaagctttctg

SEQ ID NO: 3293669 - DNA, 25 bp, Homo sapien
cttttcgatgattttcttaaccatg

SEQ ID NO: 3293670 - DNA, 25 bp, Homo sapien
gctttctgcccattcttgagtgtgg

SEQ ID NO: 3293671 - DNA, 25 bp, Homo sapien
gcagcggcagcgatgggcgagactt

SEQ ID NO: 3293672 - DNA, 25 bp, Homo sapien
gagagtcggggaccccagcagtggc

SEQ ID NO: 3293673 - DNA, 25 bp, Homo sapien
agcggcagcgatgggcgagacttac

SEQ ID NO: 3293674 - DNA, 25 bp, Homo sapien
agcgggagagtcggggaccccagca

SEQ ID NO: 3293675 - DNA, 25 bp, Homo sapien
atgacttcggtttgggcgcagtggg

SEQ ID NO: 3293676 - DNA, 25 bp, Homo sapien
tgcaagcactggcagcgcagttcag

SEQ ID NO: 3293677 - DNA, 25 bp, Homo sapien
caagcactggcagcgcagttcagtg

SEQ ID NO: 3293678 - DNA, 25 bp, Homo sapien
gtctgcaagcactggcagcgcagtt

SEQ ID NO: 3293679 - DNA, 25 bp, Homo sapien
gattgagcggggctgtcggcgcggg

SEQ ID NO: 3293680 - DNA, 25 bp, Homo sapien
ctgattgagcggggctgtcggcgcg

SEQ ID NO: 3293681 - DNA, 25 bp, Homo sapien
tcggcgcggggcgcccaccccagcc

SEQ ID NO: 3293682 - DNA, 25 bp, Homo sapien
gcgcccaccccagccgcgtccggcc

SEQ ID NO: 3293683 - DNA, 25 bp, Homo sapien
cggcggagagcgtggcgcgggccat

SEQ ID NO: 3293684 - DNA, 25 bp, Homo sapien
gtcagatcccttagacccacgtagg

SEQ ID NO: 3293685 - DNA, 25 bp, Homo sapien
ttcgtgaacccagtgcagtgcgtcg

SEQ ID NO: 3293686 - DNA, 25 bp, Homo sapien
gagaacggcgaaccccttttatgca

SEQ ID NO: 3293687 - DNA, 25 bp, Homo sapien
agagataccgagataaccgcctgcg

SEQ ID NO: 3293688 - DNA, 25 bp, Homo sapien
tagttatagatccagacaccaatgc

SEQ ID NO: 3293689 - DNA, 25 bp, Homo sapien
taggagcccactagctgttaatgaa

SEQ ID NO: 3293690 - DNA, 25 bp, Homo sapien
gaattagcgcggatggttcttcccc

SEQ ID NO: 3293691 - DNA, 25 bp, Homo sapien
gttacaagtatgacagcctcccaag

SEQ ID NO: 3293692 - DNA, 25 bp, Homo sapien
ttccctcatgagagctgcttccgca

SEQ ID NO: 3293693 - DNA, 25 bp, Homo sapien
tggcctgaaagtccatgcagcaact

SEQ ID NO: 3293694 - DNA, 25 bp, Homo sapien
aacttccctcatgagagctgcttcc

SEQ ID NO: 3293695 - DNA, 25 bp, Homo sapien
tccatgcagcaacttccctcatgag

SEQ ID NO: 3293696 - DNA, 25 bp, Homo sapien
acttatcgatgatataatactctgc

SEQ ID NO: 3293697 - DNA, 25 bp, Homo sapien
gaactctgtacttatcgatgatata

SEQ ID NO: 3293698 - DNA, 25 bp, Homo sapien
tcgatgatataatactctgctgact

SEQ ID NO: 3293699 - DNA, 25 bp, Homo sapien
ttccatgaactctgtacttatcgat

SEQ ID NO: 3293700 - DNA, 25 bp, Homo sapien
ttggctaagaatgtttgattggaga

SEQ ID NO: 3293701 - DNA, 25 bp, Homo sapien
cattggctaagaatgtttgattgga

SEQ ID NO: 3293702 - DNA, 25 bp, Homo sapien
ctaagaatgtttgattggagagcat

SEQ ID NO: 3293703 - DNA, 25 bp, Homo sapien
ggctaagaatgtttgattggagagc

SEQ ID NO: 3293704 - DNA, 25 bp, Homo sapien
aacctggctgggaagcgctacttgc

SEQ ID NO: 3293705 - DNA, 25 bp, Homo sapien
tggacttcagcggttctaatgggag

SEQ ID NO: 3293706 - DNA, 25 bp, Homo sapien
gggttcttagcctgcatcgacttga

SEQ ID NO: 3293707 - DNA, 25 bp, Homo sapien
tctgtgccgtcgctatgggaatgcc

SEQ ID NO: 3293708 - DNA, 25 bp, Homo sapien
ggagccgctggcggtgggaggtcgg

SEQ ID NO: 3293709 - DNA, 25 bp, Homo sapien
gagccgctggcggtgggaggtcggc

SEQ ID NO: 3293710 - DNA, 25 bp, Homo sapien
ccgggtgcggagccgctggcggtgg

SEQ ID NO: 3293711 - DNA, 25 bp, Homo sapien
gcgccgggtgcggagccgctggcgg

SEQ ID NO: 3293712 - DNA, 25 bp, Homo sapien
ggcgagtcgcagttgcctcagcttg

SEQ ID NO: 3293713 - DNA, 25 bp, Homo sapien
gggaacgaaaacgtgctctgctctg

SEQ ID NO: 3293714 - DNA, 25 bp, Homo sapien
ctcagcttggggaacgaaaacgtgc

SEQ ID NO: 3293715 - DNA, 25 bp, Homo sapien
aacgaaaacgtgctctgctctgggc

SEQ ID NO: 3293716 - DNA, 25 bp, Homo sapien
cagaatgttccatctttgcagcagg

SEQ ID NO: 3293717 - DNA, 25 bp, Homo sapien
catctttgcagcaggtgcacttgat

SEQ ID NO: 3293718 - DNA, 25 bp, Homo sapien
ttgatttaggaagacatttgaggca

SEQ ID NO: 3293719 - DNA, 25 bp, Homo sapien
cttgatttaggaagacatttgaggc

SEQ ID NO: 3293720 - DNA, 25 bp, Homo sapien
cacgtggtcggcttggtcaaacatt

SEQ ID NO: 3293721 - DNA, 25 bp, Homo sapien
agtataaaaacacgtggtcggcttg

SEQ ID NO: 3293722 - DNA, 25 bp, Homo sapien
aacacgtggtcggcttggtcaaaca

SEQ ID NO: 3293723 - DNA, 25 bp, Homo sapien
taaaaacacgtggtcggcttggtca

SEQ ID NO: 3293724 - DNA, 25 bp, Homo sapien
gatagtgtgttctaatatctccaca

SEQ ID NO: 3293725 - DNA, 25 bp, Homo sapien
tcgcactggcatcggctgtataatt

SEQ ID NO: 3293726 - DNA, 25 bp, Homo sapien
taatttttgcagctagaccacattt

SEQ ID NO: 3293727 - DNA, 25 bp, Homo sapien
tctcttctaatgactaggaaaggca

SEQ ID NO: 3293728 - DNA, 25 bp, Homo sapien
tgatgggaggatgaaaacagcagaa

SEQ ID NO: 3293729 - DNA, 25 bp, Homo sapien
aaggagctcttagtcagtggtaagc

SEQ ID NO: 3293730 - DNA, 25 bp, Homo sapien
tgagatgttcttaacctgggacctt

SEQ ID NO: 3293731 - DNA, 25 bp, Homo sapien
tacagtatgtccttcgatcctcaca

SEQ ID NO: 3293732 - DNA, 25 bp, Homo sapien
tacatggtgaagacaaggcttgaac

SEQ ID NO: 3293733 - DNA, 25 bp, Homo sapien
tgggagcacggttgttgggaccaca

SEQ ID NO: 3293734 - DNA, 25 bp, Homo sapien
acaacatggagttgtatgccgctcc

SEQ ID NO: 3293735 - DNA, 25 bp, Homo sapien
gtaggacatatcttctaattaggtg

SEQ ID NO: 3293736 - DNA, 25 bp, Homo sapien
ggtgagatttccctaatcagccaca

SEQ ID NO: 3293737 - DNA, 25 bp, Homo sapien
ttgtaaggatcagtcccaccgctgg

SEQ ID NO: 3293738 - DNA, 25 bp, Homo sapien
tatggcctcagctaaagtgactcag

SEQ ID NO: 3293739 - DNA, 25 bp, Homo sapien
gataagaagcacacaagacctttgt

SEQ ID NO: 3293740 - DNA, 25 bp, Homo sapien
catggccatgacgtggttccaagag

SEQ ID NO: 3293741 - DNA, 25 bp, Homo sapien
cctgctcaggtgtccatcaatcttg

SEQ ID NO: 3293742 - DNA, 25 bp, Homo sapien
cttccctgctcaggtgtccatcaat

SEQ ID NO: 3293743 - DNA, 25 bp, Homo sapien
gctcaggtgtccatcaatcttgcag

SEQ ID NO: 3293744 - DNA, 25 bp, Homo sapien
ggtgtccatcaatcttgcagctttt

SEQ ID NO: 3293745 - DNA, 25 bp, Homo sapien
caaagtagatgcaatgtttctaaca

SEQ ID NO: 3293746 - DNA, 25 bp, Homo sapien
ggttagtaccttcactgagcaatag

SEQ ID NO: 3293747 - DNA, 25 bp, Homo sapien
aataatgactcttacccagcgcatg

SEQ ID NO: 3293748 - DNA, 25 bp, Homo sapien
ctttatcagtgtgtactcgtgacga

SEQ ID NO: 3293749 - DNA, 25 bp, Homo sapien
cacaatggttcatgcttataacttc

SEQ ID NO: 3293750 - DNA, 25 bp, Homo sapien
ggttcatgcttataacttcacctct

SEQ ID NO: 3293751 - DNA, 25 bp, Homo sapien
aatggttcatgcttataacttcacc

SEQ ID NO: 3293752 - DNA, 25 bp, Homo sapien
tgcttataacttcacctctttagga

SEQ ID NO: 3293753 - DNA, 25 bp, Homo sapien
aaagaacgtgtaagcgaaaactcag

SEQ ID NO: 3293754 - DNA, 25 bp, Homo sapien
cagcctggtgatgaaacaggaatta

SEQ ID NO: 3293755 - DNA, 25 bp, Homo sapien
aagaacgtgtaagcgaaaactcagt

SEQ ID NO: 3293756 - DNA, 25 bp, Homo sapien
ttccagcctggtgatgaaacaggaa

SEQ ID NO: 3293757 - DNA, 25 bp, Homo sapien
agccactgccgcgagcccgtctgct

SEQ ID NO: 3293758 - DNA, 25 bp, Homo sapien
tcccatcgccgatgaccgcggggag

SEQ ID NO: 3293759 - DNA, 25 bp, Homo sapien
ttccggccgccccaaagaggagaca

SEQ ID NO: 3293760 - DNA, 25 bp, Homo sapien
caacgtggggtcccttctaggctga

SEQ ID NO: 3293761 - DNA, 25 bp, Homo sapien
ttacaagtctaagtccaggaacaca

SEQ ID NO: 3293762 - DNA, 25 bp, Homo sapien
gaatgaggctgattccccagacact

SEQ ID NO: 3293763 - DNA, 25 bp, Homo sapien
tattttggcacaccttatctcaggg

SEQ ID NO: 3293764 - DNA, 25 bp, Homo sapien
taactctacctgtgaaggatgtgac

SEQ ID NO: 3293765 - DNA, 25 bp, Homo sapien
ataagccatggctgacctctggagc

SEQ ID NO: 3293766 - DNA, 25 bp, Homo sapien
tatataccctggtgcaatcacacga

SEQ ID NO: 3293767 - DNA, 25 bp, Homo sapien
tatcctggcatgtgctagggtaaac

SEQ ID NO: 3293768 - DNA, 25 bp, Homo sapien
ctgtcatctaaagtcctggccctgg

SEQ ID NO: 3293769 - DNA, 25 bp, Homo sapien
gaagacaaggaagcatattcaggtc

SEQ ID NO: 3293770 - DNA, 25 bp, Homo sapien
catcaggtgcccgtaaagaagactc

SEQ ID NO: 3293771 - DNA, 25 bp, Homo sapien
catttggtttccttggcatctgtat

SEQ ID NO: 3293772 - DNA, 25 bp, Homo sapien
tggcatctgtatagttgcggaagac

SEQ ID NO: 3293773 - DNA, 25 bp, Homo sapien
ctcttgccctcaagcgattcgctcg

SEQ ID NO: 3293774 - DNA, 25 bp, Homo sapien
gccctcaagcgattcgctcgccttg

SEQ ID NO: 3293775 - DNA, 25 bp, Homo sapien
tcttgccctcaagcgattcgctcgc

SEQ ID NO: 3293776 - DNA, 25 bp, Homo sapien
ttgccctcaagcgattcgctcgcct

SEQ ID NO: 3293777 - DNA, 25 bp, Homo sapien
caacagttcccagacctatgagcca

SEQ ID NO: 3293778 - DNA, 25 bp, Homo sapien
tcaggattatagagagctgccaggg

SEQ ID NO: 3293779 - DNA, 25 bp, Homo sapien
ttggctgggccataacatcctcctt

SEQ ID NO: 3293780 - DNA, 25 bp, Homo sapien
ccatgtgcgaattgctagaaaagtt

SEQ ID NO: 3293781 - DNA, 25 bp, Homo sapien
ttgtccatgcaggatatcacaacag

SEQ ID NO: 3293782 - DNA, 25 bp, Homo sapien
tccatgcaggatatcacaacagcct

SEQ ID NO: 3293783 - DNA, 25 bp, Homo sapien
tccttgtccatgcaggatatcacaa

SEQ ID NO: 3293784 - DNA, 25 bp, Homo sapien
gtccatgcaggatatcacaacagcc

SEQ ID NO: 3293785 - DNA, 25 bp, Homo sapien
tcctcttttagcactgctggagttt

SEQ ID NO: 3293786 - DNA, 25 bp, Homo sapien
acctccagtgccaaggatcataact

SEQ ID NO: 3293787 - DNA, 25 bp, Homo sapien
ccagtgccaaggatcataactggca

SEQ ID NO: 3293788 - DNA, 25 bp, Homo sapien
caaggatcataactggcaccctcac

SEQ ID NO: 3293789 - DNA, 25 bp, Homo sapien
tggcagaggcttggtatagtccttt

SEQ ID NO: 3293790 - DNA, 25 bp, Homo sapien
ccagatcacggtagttatacaccat

SEQ ID NO: 3293791 - DNA, 25 bp, Homo sapien
caatgcccaggttccttgcacttga

SEQ ID NO: 3293792 - DNA, 25 bp, Homo sapien
ccttcttccagatcacggtagttat

SEQ ID NO: 3293793 - DNA, 25 bp, Homo sapien
caagtatagagttctcctatggcaa

SEQ ID NO: 3293794 - DNA, 25 bp, Homo sapien
tcttctccaattgtgcatggcagct

SEQ ID NO: 3293795 - DNA, 25 bp, Homo sapien
catggcagctgtactaagttctgca

SEQ ID NO: 3293796 - DNA, 25 bp, Homo sapien
ctcagaattggtatatcaagacaca

SEQ ID NO: 3293797 - DNA, 25 bp, Homo sapien
tcaatgttgagaatagactacgtgt

SEQ ID NO: 3293798 - DNA, 25 bp, Homo sapien
tagaatgccttgttctctgaaggct

SEQ ID NO: 3293799 - DNA, 25 bp, Homo sapien
cgtcaggaaatatgaaggagaagct

SEQ ID NO: 3293800 - DNA, 25 bp, Homo sapien
gaaagaaacttcgacaagagaatgg

SEQ ID NO: 3293801 - DNA, 25 bp, Homo sapien
taacgagtgtgctgtagtataagcg

SEQ ID NO: 3293802 - DNA, 25 bp, Homo sapien
cattgcagttatattaacgagtgtg

SEQ ID NO: 3293803 - DNA, 25 bp, Homo sapien
taagcgttgtattacccctgtgatc

SEQ ID NO: 3293804 - DNA, 25 bp, Homo sapien
tgtagtataagcgttgtattacccc

SEQ ID NO: 3293805 - DNA, 25 bp, Homo sapien
tcctcatcagacctagacttaactg

SEQ ID NO: 3293806 - DNA, 25 bp, Homo sapien
gacttaactgtgtaattctgcattc

SEQ ID NO: 3293807 - DNA, 25 bp, Homo sapien
cactctcggttcttcctgttatgca

SEQ ID NO: 3293808 - DNA, 25 bp, Homo sapien
ggtgaaagggccagcgtcactagaa

SEQ ID NO: 3293809 - DNA, 25 bp, Homo sapien
tgagccttctggagaataatcactg

SEQ ID NO: 3293810 - DNA, 25 bp, Homo sapien
cctggacaagcgatacttgtgtttc

SEQ ID NO: 3293811 - DNA, 25 bp, Homo sapien
gtttcatctatttctgtgtgactgc

SEQ ID NO: 3293812 - DNA, 25 bp, Homo sapien
tgtcttcctggacaagcgatacttg

SEQ ID NO: 3293813 - DNA, 25 bp, Homo sapien
caaaataactgagaaggatataggg

SEQ ID NO: 3293814 - DNA, 25 bp, Homo sapien
acagggcagcccgcatctttatcta

SEQ ID NO: 3293815 - DNA, 25 bp, Homo sapien
ggcagcccgcatctttatctagcat

SEQ ID NO: 3293816 - DNA, 25 bp, Homo sapien
gggcagcccgcatctttatctagca

SEQ ID NO: 3293817 - DNA, 25 bp, Homo sapien
gaaagacttgtgagcaatcatcaac

SEQ ID NO: 3293818 - DNA, 25 bp, Homo sapien
aaagacttgtgagcaatcatcaaca

SEQ ID NO: 3293819 - DNA, 25 bp, Homo sapien
cgcagatcatattctcccagatact

SEQ ID NO: 3293820 - DNA, 25 bp, Homo sapien
aaaacgcagatcatattctcccaga

SEQ ID NO: 3293821 - DNA, 25 bp, Homo sapien
ccctctccaaaacgcagatcatatt

SEQ ID NO: 3293822 - DNA, 25 bp, Homo sapien
tccaaaacgcagatcatattctccc

SEQ ID NO: 3293823 - DNA, 25 bp, Homo sapien
tcacatttcttgtgaaggatagagg

SEQ ID NO: 3293824 - DNA, 25 bp, Homo sapien
acatttcttgtgaaggatagaggta

SEQ ID NO: 3293825 - DNA, 25 bp, Homo sapien
cacatttcttgtgaaggatagaggt

SEQ ID NO: 3293826 - DNA, 25 bp, Homo sapien
ttattgttagctgtaccttgtctgg

SEQ ID NO: 3293827 - DNA, 25 bp, Homo sapien
tattgttagctgtaccttgtctggc

SEQ ID NO: 3293828 - DNA, 25 bp, Homo sapien
tagctgtaccttgtctggctctcac

SEQ ID NO: 3293829 - DNA, 25 bp, Homo sapien
tgttagctgtaccttgtctggctct

SEQ ID NO: 3293830 - DNA, 25 bp, Homo sapien
tacagtgcacctcatcggccattag

SEQ ID NO: 3293831 - DNA, 25 bp, Homo sapien
tcatcggccattagacagatatcga

SEQ ID NO: 3293832 - DNA, 25 bp, Homo sapien
tttgaccctttccaacagagaggcc

SEQ ID NO: 3293833 - DNA, 25 bp, Homo sapien
cattagacagatatcgatttgaccc

SEQ ID NO: 3293834 - DNA, 25 bp, Homo sapien
tccagaataagacgcccgcactgga

SEQ ID NO: 3293835 - DNA, 25 bp, Homo sapien
tcaggccctggtcctgaatgtctgg

SEQ ID NO: 3293836 - DNA, 25 bp, Homo sapien
gaatgtctgggtctctaagaatagc

SEQ ID NO: 3293837 - DNA, 25 bp, Homo sapien
tcatccagaataagacgcccgcact

SEQ ID NO: 3293838 - DNA, 25 bp, Homo sapien
tgagctcttaaggtggccagccaag

SEQ ID NO: 3293839 - DNA, 25 bp, Homo sapien
tcttaaggtggccagccaaggataa

SEQ ID NO: 3293840 - DNA, 25 bp, Homo sapien
ttaaggtggccagccaaggataaaa

SEQ ID NO: 3293841 - DNA, 25 bp, Homo sapien
ttatgagctcttaaggtggccagcc

SEQ ID NO: 3293842 - DNA, 25 bp, Homo sapien
aacggcaatctttactttgactatg

SEQ ID NO: 3293843 - DNA, 25 bp, Homo sapien
ccagaacacttttgcttgagaagca

SEQ ID NO: 3293844 - DNA, 25 bp, Homo sapien
tctgctgtatgccagtacaccacct

SEQ ID NO: 3293845 - DNA, 25 bp, Homo sapien
gtccaactgagtgggaatccagaac

SEQ ID NO: 3293846 - DNA, 25 bp, Homo sapien
aagctttaattggtattggggcctg

SEQ ID NO: 3293847 - DNA, 25 bp, Homo sapien
catccactgtctaaagctttaattg

SEQ ID NO: 3293848 - DNA, 25 bp, Homo sapien
agctttaattggtattggggcctgc

SEQ ID NO: 3293849 - DNA, 25 bp, Homo sapien
gggcatccactgtctaaagctttaa

SEQ ID NO: 3293850 - DNA, 25 bp, Homo sapien
cttcttgttccctaaagcgacacat

SEQ ID NO: 3293851 - DNA, 25 bp, Homo sapien
ccactggactccagtgataaacagg

SEQ ID NO: 3293852 - DNA, 25 bp, Homo sapien
cccactggactccagtgataaacag

SEQ ID NO: 3293853 - DNA, 25 bp, Homo sapien
cactggactccagtgataaacaggg

SEQ ID NO: 3293854 - DNA, 25 bp, Homo sapien
taagagctagagttagagcccattc

SEQ ID NO: 3293855 - DNA, 25 bp, Homo sapien
tagagtaaggtaatccagcaactca

SEQ ID NO: 3293856 - DNA, 25 bp, Homo sapien
ggcagtaactgctacaggtatcata

SEQ ID NO: 3293857 - DNA, 25 bp, Homo sapien
gctctgccctcctggtaatgtttaa

SEQ ID NO: 3293858 - DNA, 25 bp, Homo sapien
tcaggcaaaggcctcagtcatccac

SEQ ID NO: 3293859 - DNA, 25 bp, Homo sapien
ttagagtaaggtcaggcttctatac

SEQ ID NO: 3293860 - DNA, 25 bp, Homo sapien
ggaagctagattaatcattgcttga

SEQ ID NO: 3293861 - DNA, 25 bp, Homo sapien
ggtcaggcttctatacccatcactg

SEQ ID NO: 3293862 - DNA, 25 bp, Homo sapien
gatgagctggttttgtagattctcc

SEQ ID NO: 3293863 - DNA, 25 bp, Homo sapien
tctccttttactgttgaatccaaag

SEQ ID NO: 3293864 - DNA, 25 bp, Homo sapien
ggtgccctctactagtggattctgg

SEQ ID NO: 3293865 - DNA, 25 bp, Homo sapien
gaatccaaaggtgccctctactagt

SEQ ID NO: 3293866 - DNA, 25 bp, Homo sapien
aaatactaagttcattgaagaaatg

SEQ ID NO: 3293867 - DNA, 25 bp, Homo sapien
tttctaaatactaagttcattgaag

SEQ ID NO: 3293868 - DNA, 25 bp, Homo sapien
gatgcttggagtgaagatatctttc

SEQ ID NO: 3293869 - DNA, 25 bp, Homo sapien
ttgcaggacagaaaagacttgatgc

SEQ ID NO: 3293870 - DNA, 25 bp, Homo sapien
tttctttctagtgctccatatcagg

SEQ ID NO: 3293871 - DNA, 25 bp, Homo sapien
ccgggttgatgcttggaaaaataat

SEQ ID NO: 3293872 - DNA, 25 bp, Homo sapien
ggacttccgggttgatgcttggaaa

SEQ ID NO: 3293873 - DNA, 25 bp, Homo sapien
agtgctccatatcaggcgtcagcaa

SEQ ID NO: 3293874 - DNA, 25 bp, Homo sapien
tgagatggtgccactgcacactcca

SEQ ID NO: 3293875 - DNA, 25 bp, Homo sapien
tgggaggctgacatgggaggattcc

SEQ ID NO: 3293876 - DNA, 25 bp, Homo sapien
gacatgggaggattccttgagccca

SEQ ID NO: 3293877 - DNA, 25 bp, Homo sapien
ggagatggaagttgcagtgagctga

SEQ ID NO: 3293878 - DNA, 25 bp, Homo sapien
caccagtgcagtagagtgtcctctt

SEQ ID NO: 3293879 - DNA, 25 bp, Homo sapien
tttgaatcatcacagatgagacacc

SEQ ID NO: 3293880 - DNA, 25 bp, Homo sapien
taacttggagattggacacttccag

SEQ ID NO: 3293881 - DNA, 25 bp, Homo sapien
tataattcccctaaatatgaggcat

SEQ ID NO: 3293882 - DNA, 25 bp, Homo sapien
ttactctgcttaatgccgaatagtg

SEQ ID NO: 3293883 - DNA, 25 bp, Homo sapien
tgttccgtagcactacaccgagctt

SEQ ID NO: 3293884 - DNA, 25 bp, Homo sapien
ggcccacactgttgactaagctatt

SEQ ID NO: 3293885 - DNA, 25 bp, Homo sapien
taatgccgaatagtgttccgtagca

SEQ ID NO: 3293886 - DNA, 25 bp, Homo sapien
tatcgttgccactttctagagaaga

SEQ ID NO: 3293887 - DNA, 25 bp, Homo sapien
caaagtgacgagtatattaacccat

SEQ ID NO: 3293888 - DNA, 25 bp, Homo sapien
ggcaggcatggttcaacagtactat

SEQ ID NO: 3293889 - DNA, 25 bp, Homo sapien
gaataaccctataagctccatgcaa

SEQ ID NO: 3293890 - DNA, 25 bp, Homo sapien
ttgcaccaattgcactatgcaatag

SEQ ID NO: 3293891 - DNA, 25 bp, Homo sapien
ggctgggaaagtgccacttctcttt

SEQ ID NO: 3293892 - DNA, 25 bp, Homo sapien
tgcataactatgcatgcctcttggc

SEQ ID NO: 3293893 - DNA, 25 bp, Homo sapien
accaattgcactatgcaatagtagg

SEQ ID NO: 3293894 - DNA, 25 bp, Homo sapien
gttttttgattactcagcccttgta

SEQ ID NO: 3293895 - DNA, 25 bp, Homo sapien
ttttttgattactcagcccttgtac

SEQ ID NO: 3293896 - DNA, 25 bp, Homo sapien
ctagcatggaatcgagtttaaggtc

SEQ ID NO: 3293897 - DNA, 25 bp, Homo sapien
ggaaggcaatcctactctaagctta

SEQ ID NO: 3293898 - DNA, 25 bp, Homo sapien
taaattactctacccaacatatgga

SEQ ID NO: 3293899 - DNA, 25 bp, Homo sapien
caagactgtccatgtcaggaaggca

SEQ ID NO: 3293900 - DNA, 25 bp, Homo sapien
tctgctttcgtcaattaggttatta

SEQ ID NO: 3293901 - DNA, 25 bp, Homo sapien
ccttcgatgaacaagctaccttact

SEQ ID NO: 3293902 - DNA, 25 bp, Homo sapien
ctctatctatctccttcgatgaaca

SEQ ID NO: 3293903 - DNA, 25 bp, Homo sapien
gctaccttactattgtcttgaatta

SEQ ID NO: 3293904 - DNA, 25 bp, Homo sapien
ggtctcccacaatggtagctacttt

SEQ ID NO: 3293905 - DNA, 25 bp, Homo sapien
tatactggctcgtagaattttgcca

SEQ ID NO: 3293906 - DNA, 25 bp, Homo sapien
catccaaatgtaacgacgaataccc

SEQ ID NO: 3293907 - DNA, 25 bp, Homo sapien
gccaatggtttaaactctggtctcc

SEQ ID NO: 3293908 - DNA, 25 bp, Homo sapien
cacaaaagtccaaactgccagcttc

SEQ ID NO: 3293909 - DNA, 25 bp, Homo sapien
tccttcatcacaaaagtccaaactg

SEQ ID NO: 3293910 - DNA, 25 bp, Homo sapien
ccagatccttcatcacaaaagtcca

SEQ ID NO: 3293911 - DNA, 25 bp, Homo sapien
tcatcacaaaagtccaaactgccag

SEQ ID NO: 3293912 - DNA, 25 bp, Homo sapien
tcacatgagcatgtattggaaagag

SEQ ID NO: 3293913 - DNA, 25 bp, Homo sapien
catgagcatgtattggaaagaggca

SEQ ID NO: 3293914 - DNA, 25 bp, Homo sapien
tgagcatgtattggaaagaggcagg

SEQ ID NO: 3293915 - DNA, 25 bp, Homo sapien
acatgagcatgtattggaaagaggc

SEQ ID NO: 3293916 - DNA, 25 bp, Homo sapien
cagctattgccaatgaggaagcata

SEQ ID NO: 3293917 - DNA, 25 bp, Homo sapien
ccagtctcccatggtcataacagtc

SEQ ID NO: 3293918 - DNA, 25 bp, Homo sapien
taacagtcagctattgccaatgagg

SEQ ID NO: 3293919 - DNA, 25 bp, Homo sapien
ggtcataacagtcagctattgccaa

SEQ ID NO: 3293920 - DNA, 25 bp, Homo sapien
tagagaacaagtcagagatacaagt

SEQ ID NO: 3293921 - DNA, 25 bp, Homo sapien
aaacaagccttgagtacctctgctg

SEQ ID NO: 3293922 - DNA, 25 bp, Homo sapien
gcaacactagagttccatgtttgtg

SEQ ID NO: 3293923 - DNA, 25 bp, Homo sapien
tacttgctagagaaagcaacactag

SEQ ID NO: 3293924 - DNA, 25 bp, Homo sapien
cagaccaatcaaatgcagctggagg

SEQ ID NO: 3293925 - DNA, 25 bp, Homo sapien
taaagaaaacacatggtcaggatgg

SEQ ID NO: 3293926 - DNA, 25 bp, Homo sapien
gaggtggagttcaaaaatatggcca

SEQ ID NO: 3293927 - DNA, 25 bp, Homo sapien
gacagtcccatagatgtccaacaca

SEQ ID NO: 3293928 - DNA, 25 bp, Homo sapien
caaagttatttagtgtatgcaaagc

SEQ ID NO: 3293929 - DNA, 25 bp, Homo sapien
taccaaatttcgagagccaccattg

SEQ ID NO: 3293930 - DNA, 25 bp, Homo sapien
tacatgataatattgacagtttaca

SEQ ID NO: 3293931 - DNA, 25 bp, Homo sapien
ctttcttgatatcagatctaccaaa

SEQ ID NO: 3293932 - DNA, 25 bp, Homo sapien
tcaaaacaccatggatgctagaagg

SEQ ID NO: 3293933 - DNA, 25 bp, Homo sapien
tatcatatgtaagtacagccccagc

SEQ ID NO: 3293934 - DNA, 25 bp, Homo sapien
catcgatttttgtaagtgaaccacg

SEQ ID NO: 3293935 - DNA, 25 bp, Homo sapien
tctaaaaaagaagctgcttggccga

SEQ ID NO: 3293936 - DNA, 25 bp, Homo sapien
taaatgaggatatggtcacaaccgg

SEQ ID NO: 3293937 - DNA, 25 bp, Homo sapien
tgagttaggttgcaccgattcagac

SEQ ID NO: 3293938 - DNA, 25 bp, Homo sapien
ttcatggagtaaaggagcacttggc

SEQ ID NO: 3293939 - DNA, 25 bp, Homo sapien
ttgagcataaacacttacccagggc

SEQ ID NO: 3293940 - DNA, 25 bp, Homo sapien
tataatttctcgtcaagcatttacc

SEQ ID NO: 3293941 - DNA, 25 bp, Homo sapien
cttaaaagaaatggactatgcaata

SEQ ID NO: 3293942 - DNA, 25 bp, Homo sapien
tgtttttgtaataagttaggagcac

SEQ ID NO: 3293943 - DNA, 25 bp, Homo sapien
taccaaccccattaagctgctggga

SEQ ID NO: 3293944 - DNA, 25 bp, Homo sapien
cattgataggagttatatctttacc

SEQ ID NO: 3293945 - DNA, 25 bp, Homo sapien
ataggagttatatctttacccagag

SEQ ID NO: 3293946 - DNA, 25 bp, Homo sapien
tcttcaatatcttcattgataggag

SEQ ID NO: 3293947 - DNA, 25 bp, Homo sapien
caatatcttcattgataggagttat

SEQ ID NO: 3293948 - DNA, 25 bp, Homo sapien
aatacgtgttagaagttagtatggg

SEQ ID NO: 3293949 - DNA, 25 bp, Homo sapien
aaaatacgtgttagaagttagtatg

SEQ ID NO: 3293950 - DNA, 25 bp, Homo sapien
aaatacgtgttagaagttagtatgg

SEQ ID NO: 3293951 - DNA, 25 bp, Homo sapien
atacgtgttagaagttagtatgggc

SEQ ID NO: 3293952 - DNA, 25 bp, Homo sapien
tatgaatacttctatatcaacaatg

SEQ ID NO: 3293953 - DNA, 25 bp, Homo sapien
tactgtgttatggtacagttttaga

SEQ ID NO: 3293954 - DNA, 25 bp, Homo sapien
gaagaaaaactatgagcaaatactg

SEQ ID NO: 3293955 - DNA, 25 bp, Homo sapien
gaaaatagaagtcttatgtagccta

SEQ ID NO: 3293956 - DNA, 25 bp, Homo sapien
tcaaacaaatcaccagaatctgtcc

SEQ ID NO: 3293957 - DNA, 25 bp, Homo sapien
aaaactaccataactgctatcaaac

SEQ ID NO: 3293958 - DNA, 25 bp, Homo sapien
tctctcacaccttgctccaatgtag

SEQ ID NO: 3293959 - DNA, 25 bp, Homo sapien
tgacagcatgtgcagacaccgatga

SEQ ID NO: 3293960 - DNA, 25 bp, Homo sapien
tcacagattaggtcatgcccttcta

SEQ ID NO: 3293961 - DNA, 25 bp, Homo sapien
tacccgttgattctagttctactgc

SEQ ID NO: 3293962 - DNA, 25 bp, Homo sapien
gttctactgcttgagggcatcacag

SEQ ID NO: 3293963 - DNA, 25 bp, Homo sapien
ggaggataaaattcccagtgcttaa

SEQ ID NO: 3293964 - DNA, 25 bp, Homo sapien
actgggactaaaccacgcgcgccac

SEQ ID NO: 3293965 - DNA, 25 bp, Homo sapien
aactgggactaaaccacgcgcgcca

SEQ ID NO: 3293966 - DNA, 25 bp, Homo sapien
gtaactgggactaaaccacgcgcgc

SEQ ID NO: 3293967 - DNA, 25 bp, Homo sapien
accacgaagcggcatctccctttga

SEQ ID NO: 3293968 - DNA, 25 bp, Homo sapien
agaagtggcctttccgctttgattg

SEQ ID NO: 3293969 - DNA, 25 bp, Homo sapien
ccctttgatgcagtaatgcttgtat

SEQ ID NO: 3293970 - DNA, 25 bp, Homo sapien
acaggagggcgtctgctcggccacc

SEQ ID NO: 3293971 - DNA, 25 bp, Homo sapien
gtataaccaacagcttgcaggatcc

SEQ ID NO: 3293972 - DNA, 25 bp, Homo sapien
tccacgttcatggtataaccaacag

SEQ ID NO: 3293973 - DNA, 25 bp, Homo sapien
actttccacgttcatggtataacca

SEQ ID NO: 3293974 - DNA, 25 bp, Homo sapien
gttcatggtataaccaacagcttgc

SEQ ID NO: 3293975 - DNA, 25 bp, Homo sapien
gataaccacctatgctgactgcttg

SEQ ID NO: 3293976 - DNA, 25 bp, Homo sapien
tgactgcttgaactacatgccagat

SEQ ID NO: 3293977 - DNA, 25 bp, Homo sapien
acatgccagatatttgcttgataca

SEQ ID NO: 3293978 - DNA, 25 bp, Homo sapien
tttgattggtgacttgataaccacc

SEQ ID NO: 3293979 - DNA, 25 bp, Homo sapien
cagagctgccctttttcatctaatc

SEQ ID NO: 3293980 - DNA, 25 bp, Homo sapien
agagctgccctttttcatctaatcc

SEQ ID NO: 3293981 - DNA, 25 bp, Homo sapien
ccagagctgccctttttcatctaat

SEQ ID NO: 3293982 - DNA, 25 bp, Homo sapien
acccagagctgccctttttcatcta

SEQ ID NO: 3293983 - DNA, 25 bp, Homo sapien
gtttcaggacttctggtggaattcc

SEQ ID NO: 3293984 - DNA, 25 bp, Homo sapien
cagaggaggccattagtttcaggac

SEQ ID NO: 3293985 - DNA, 25 bp, Homo sapien
gggtctccacagaggaggccattag

SEQ ID NO: 3293986 - DNA, 25 bp, Homo sapien
tcaggacttctggtggaattcccat

SEQ ID NO: 3293987 - DNA, 25 bp, Homo sapien
gccaccacacagtgaaggatcacta

SEQ ID NO: 3293988 - DNA, 25 bp, Homo sapien
caccacacagtgaaggatcactaga

SEQ ID NO: 3293989 - DNA, 25 bp, Homo sapien
accacacagtgaaggatcactagac

SEQ ID NO: 3293990 - DNA, 25 bp, Homo sapien
ctgccaccacacagtgaaggatcac

SEQ ID NO: 3293991 - DNA, 25 bp, Homo sapien
tcccaggaagggatacagaggccag

SEQ ID NO: 3293992 - DNA, 25 bp, Homo sapien
cccaggaagggatacagaggccagc

SEQ ID NO: 3293993 - DNA, 25 bp, Homo sapien
caggaagggatacagaggccagcat

SEQ ID NO: 3293994 - DNA, 25 bp, Homo sapien
ccaggaagggatacagaggccagca

SEQ ID NO: 3293995 - DNA, 25 bp, Homo sapien
cacaggttaccctgctgggcttgca

SEQ ID NO: 3293996 - DNA, 25 bp, Homo sapien
tcaaggcacgcattcgtgtcctcca

SEQ ID NO: 3293997 - DNA, 25 bp, Homo sapien
tgcatatccaaattcagtgcaagtt

SEQ ID NO: 3293998 - DNA, 25 bp, Homo sapien
tctgattccgtgaatttttccacag

SEQ ID NO: 3293999 - DNA, 25 bp, Homo sapien
agtggcagggagctggcgccgctgc

SEQ ID NO: 3294000 - DNA, 25 bp, Homo sapien
agggagctggcgccgctgcaccggg

SEQ ID NO: 3294001 - DNA, 25 bp, Homo sapien
tggcagggagctggcgccgctgcac

SEQ ID NO: 3294002 - DNA, 25 bp, Homo sapien
gagctggcgccgctgcaccgggcgg

SEQ ID NO: 3294003 - DNA, 25 bp, Homo sapien
gctccgtgaatgtcgccgggaggag

SEQ ID NO: 3294004 - DNA, 25 bp, Homo sapien
gaggagggagcctcctatttatccc

SEQ ID NO: 3294005 - DNA, 25 bp, Homo sapien
ctggaaactaatcccggaggcagaa

SEQ ID NO: 3294006 - DNA, 25 bp, Homo sapien
gggcagcccctagacaagtctccct

SEQ ID NO: 3294007 - DNA, 25 bp, Homo sapien
tatactccactttggccttcattat

SEQ ID NO: 3294008 - DNA, 25 bp, Homo sapien
ctgctcctctattcttgcagaaata

SEQ ID NO: 3294009 - DNA, 25 bp, Homo sapien
aatatctgtagaatttcattagaaa

SEQ ID NO: 3294010 - DNA, 25 bp, Homo sapien
cagtgatataacactggcctgagga

SEQ ID NO: 3294011 - DNA, 25 bp, Homo sapien
ctccaggcccatgatatgtttttct

SEQ ID NO: 3294012 - DNA, 25 bp, Homo sapien
tgcaggaggtctacactggtggtat

SEQ ID NO: 3294013 - DNA, 25 bp, Homo sapien
tattgtgacaatggaatcctccagg

SEQ ID NO: 3294014 - DNA, 25 bp, Homo sapien
tctacactggtggtatggcatccta

SEQ ID NO: 3294015 - DNA, 25 bp, Homo sapien
ggaaagtacttgagcgtgcacagtt

SEQ ID NO: 3294016 - DNA, 25 bp, Homo sapien
gtgacatcaacaagctccttctgcc

SEQ ID NO: 3294017 - DNA, 25 bp, Homo sapien
gattattgggtaattagtggaaaca

SEQ ID NO: 3294018 - DNA, 25 bp, Homo sapien
caagtggagggagttgcagcatttc

SEQ ID NO: 3294019 - DNA, 25 bp, Homo sapien
caagtagattgatgctctattgctg

SEQ ID NO: 3294020 - DNA, 25 bp, Homo sapien
cctatcattagaagaaagcaagtag

SEQ ID NO: 3294021 - DNA, 25 bp, Homo sapien
tataagtgaatgtggttttgaaact

SEQ ID NO: 3294022 - DNA, 25 bp, Homo sapien
aagaaactcaagataaaggagaaag

SEQ ID NO: 3294023 - DNA, 25 bp, Homo sapien
gcaagggcagtgattgatccttctt

SEQ ID NO: 3294024 - DNA, 25 bp, Homo sapien
tgaacacaaaatggccaagccttcg

SEQ ID NO: 3294025 - DNA, 25 bp, Homo sapien
caagccttcgctttcatagagttct

SEQ ID NO: 3294026 - DNA, 25 bp, Homo sapien
tagagttcttcattgcaagggcagt

SEQ ID NO: 3294027 - DNA, 25 bp, Homo sapien
cacgacttggtttcatatgttttag

SEQ ID NO: 3294028 - DNA, 25 bp, Homo sapien
acattgttttggtccggaaaagcag

SEQ ID NO: 3294029 - DNA, 25 bp, Homo sapien
tgttttggtccggaaaagcaggaca

SEQ ID NO: 3294030 - DNA, 25 bp, Homo sapien
agagcatgtgcccaaagtagttcag

SEQ ID NO: 3294031 - DNA, 25 bp, Homo sapien
ttcttcaccagggtttcggagcgca

SEQ ID NO: 3294032 - DNA, 25 bp, Homo sapien
gaccagacttcttgttgccgttggg

SEQ ID NO: 3294033 - DNA, 25 bp, Homo sapien
ttagctgcgtgttcgaacccagagt

SEQ ID NO: 3294034 - DNA, 25 bp, Homo sapien
tcggagcgcactctgccaaagtacg

SEQ ID NO: 3294035 - DNA, 25 bp, Homo sapien
cagttcccgaatactcgcaggcggc

SEQ ID NO: 3294036 - DNA, 25 bp, Homo sapien
tctttctcgctggtatctcggcacg

SEQ ID NO: 3294037 - DNA, 25 bp, Homo sapien
tttggagacgcgtccgcggacagtt

SEQ ID NO: 3294038 - DNA, 25 bp, Homo sapien
cccagcctcgggctgagatgagaga

SEQ ID NO: 3294039 - DNA, 25 bp, Homo sapien
aggtgcaataggcagcggagctccc

SEQ ID NO: 3294040 - DNA, 25 bp, Homo sapien
ctaggtccggcaggtgcaataggca

SEQ ID NO: 3294041 - DNA, 25 bp, Homo sapien
cggcaggtgcaataggcagcggagc

SEQ ID NO: 3294042 - DNA, 25 bp, Homo sapien
gcaggtgcaataggcagcggagctc

SEQ ID NO: 3294043 - DNA, 25 bp, Homo sapien
taattaggatcagagcccagatggt

SEQ ID NO: 3294044 - DNA, 25 bp, Homo sapien
gccttccagctgtgaggctcgagac

SEQ ID NO: 3294045 - DNA, 25 bp, Homo sapien
gactcaggaagacatactgcctcat

SEQ ID NO: 3294046 - DNA, 25 bp, Homo sapien
tgtgaggctcgagactcaggaagac

SEQ ID NO: 3294047 - DNA, 25 bp, Homo sapien
caagaagggaacgagaatggcaggc

SEQ ID NO: 3294048 - DNA, 25 bp, Homo sapien
caaaaccaagaagggaacgagaatg

SEQ ID NO: 3294049 - DNA, 25 bp, Homo sapien
aatggcaggcccctggtagcttcca

SEQ ID NO: 3294050 - DNA, 25 bp, Homo sapien
ggcaggcccctggtagcttccacat

SEQ ID NO: 3294051 - DNA, 25 bp, Homo sapien
taaatgacccaaaagtgagacattg

SEQ ID NO: 3294052 - DNA, 25 bp, Homo sapien
ccttaaatgacccaaaagtgagaca

SEQ ID NO: 3294053 - DNA, 25 bp, Homo sapien
aatgacccaaaagtgagacattggc

SEQ ID NO: 3294054 - DNA, 25 bp, Homo sapien
tttgccttaaatgacccaaaagtga

SEQ ID NO: 3294055 - DNA, 25 bp, Homo sapien
tcaggtgcttatgtctagtgcttcc

SEQ ID NO: 3294056 - DNA, 25 bp, Homo sapien
tatcaggtgcttatgtctagtgctt

SEQ ID NO: 3294057 - DNA, 25 bp, Homo sapien
atcaggtgcttatgtctagtgcttc

SEQ ID NO: 3294058 - DNA, 25 bp, Homo sapien
caggtgcttatgtctagtgcttcca

SEQ ID NO: 3294059 - DNA, 25 bp, Homo sapien
cagcagagagctgcgtctggtcttg

SEQ ID NO: 3294060 - DNA, 25 bp, Homo sapien
gtcttgtgcttgtggtgctggagga

SEQ ID NO: 3294061 - DNA, 25 bp, Homo sapien
gcagagagctgcgtctggtcttgtg

SEQ ID NO: 3294062 - DNA, 25 bp, Homo sapien
agagagctgcgtctggtcttgtgct

SEQ ID NO: 3294063 - DNA, 25 bp, Homo sapien
acctggtagtcagctaatgtcccca

SEQ ID NO: 3294064 - DNA, 25 bp, Homo sapien
tctctgcagtgtccttagggcatca

SEQ ID NO: 3294065 - DNA, 25 bp, Homo sapien
gggaaatatgttgccaggtgagacc

SEQ ID NO: 3294066 - DNA, 25 bp, Homo sapien
tagactcatgtgttggagagggaac

SEQ ID NO: 3294067 - DNA, 25 bp, Homo sapien
ctatgtcttattggcttttcgcaaa

SEQ ID NO: 3294068 - DNA, 25 bp, Homo sapien
tttctgagtaggtctatgactgata

SEQ ID NO: 3294069 - DNA, 25 bp, Homo sapien
tggcttttcgcaaattccctagaac

SEQ ID NO: 3294070 - DNA, 25 bp, Homo sapien
cctgaagcccagtatttactctata

SEQ ID NO: 3294071 - DNA, 25 bp, Homo sapien
tgccaagaacttgggtttggaggcc

SEQ ID NO: 3294072 - DNA, 25 bp, Homo sapien
aaagccgcagagttactgacaccca

SEQ ID NO: 3294073 - DNA, 25 bp, Homo sapien
aatttcggctctatatcagccctgg

SEQ ID NO: 3294074 - DNA, 25 bp, Homo sapien
cctggaaagttggtactactggtct

SEQ ID NO: 3294075 - DNA, 25 bp, Homo sapien
gcattcacaatcttaaacttggttt

SEQ ID NO: 3294076 - DNA, 25 bp, Homo sapien
agcattcacaatcttaaacttggtt

SEQ ID NO: 3294077 - DNA, 25 bp, Homo sapien
tatcttcaggtgacttctgcgcaga

SEQ ID NO: 3294078 - DNA, 25 bp, Homo sapien
caagtggaggatacaggtgctgtca

SEQ ID NO: 3294079 - DNA, 25 bp, Homo sapien
tgcgcagatagtcttcagaaggtct

SEQ ID NO: 3294080 - DNA, 25 bp, Homo sapien
gctagagcaggtggattccggaaac

SEQ ID NO: 3294081 - DNA, 25 bp, Homo sapien
ttgtcttggcctgggagcagattcc

SEQ ID NO: 3294082 - DNA, 25 bp, Homo sapien
caccatctagagtttggccattggc

SEQ ID NO: 3294083 - DNA, 25 bp, Homo sapien
cagtcaaaagatccttatccaggtg

SEQ ID NO: 3294084 - DNA, 25 bp, Homo sapien
tggtacctggaatccaccaagccgt

SEQ ID NO: 3294085 - DNA, 25 bp, Homo sapien
gtatctctccatgtaaagtcaagtg

SEQ ID NO: 3294086 - DNA, 25 bp, Homo sapien
taaggcccttgaaggcttatagtgg

SEQ ID NO: 3294087 - DNA, 25 bp, Homo sapien
tcatttgggtaattcctggagcagt

SEQ ID NO: 3294088 - DNA, 25 bp, Homo sapien
tcggctgggctagtgaaaacaagtt

SEQ ID NO: 3294089 - DNA, 25 bp, Homo sapien
ttgttctgctgtcatttaacttgtg

SEQ ID NO: 3294090 - DNA, 25 bp, Homo sapien
gttctgctgtcatttaacttgtggt

SEQ ID NO: 3294091 - DNA, 25 bp, Homo sapien
tctgctgtcatttaacttgtggttt

SEQ ID NO: 3294092 - DNA, 25 bp, Homo sapien
gctgtcatttaacttgtggtttttc

SEQ ID NO: 3294093 - DNA, 25 bp, Homo sapien
tgagggggcggctgtctaaggccct

SEQ ID NO: 3294094 - DNA, 25 bp, Homo sapien
tcatgggtcccttgtcgttgtgttg

SEQ ID NO: 3294095 - DNA, 25 bp, Homo sapien
gagagagccaagctcatgggtccct

SEQ ID NO: 3294096 - DNA, 25 bp, Homo sapien
ttgtcgttgtgttgagggggcggct

SEQ ID NO: 3294097 - DNA, 25 bp, Homo sapien
ctgtgttaagcagtttaaagagggt

SEQ ID NO: 3294098 - DNA, 25 bp, Homo sapien
cttagagggaaagcatgaacccaaa

SEQ ID NO: 3294099 - DNA, 25 bp, Homo sapien
agagggtttgtaggcacttagaggg

SEQ ID NO: 3294100 - DNA, 25 bp, Homo sapien
aaagagggtttgtaggcacttagag

SEQ ID NO: 3294101 - DNA, 25 bp, Homo sapien
cagtcagtgttgcaagaggaatgat

SEQ ID NO: 3294102 - DNA, 25 bp, Homo sapien
ccagtggtcctctgtagtcagagga

SEQ ID NO: 3294103 - DNA, 25 bp, Homo sapien
ggtcctctgtagtcagaggaaggca

SEQ ID NO: 3294104 - DNA, 25 bp, Homo sapien
tgatgcgtctggaggcatagctctg

SEQ ID NO: 3294105 - DNA, 25 bp, Homo sapien
taaatacctcgtgagaaggcaggtg

SEQ ID NO: 3294106 - DNA, 25 bp, Homo sapien
tagaaattgatagcgcactgcactc

SEQ ID NO: 3294107 - DNA, 25 bp, Homo sapien
ggcggtcagtatctccactcacatg

SEQ ID NO: 3294108 - DNA, 25 bp, Homo sapien
cagcggttcacagccagatgaccag

SEQ ID NO: 3294109 - DNA, 25 bp, Homo sapien
gtggctctgtccttcttttcaagtt

SEQ ID NO: 3294110 - DNA, 25 bp, Homo sapien
tcaagtttgagggggttgtggacca

SEQ ID NO: 3294111 - DNA, 25 bp, Homo sapien
tgtcctcttgtgtggctctgtcctt

SEQ ID NO: 3294112 - DNA, 25 bp, Homo sapien
aggagctgtcctcttgtgtggctct

SEQ ID NO: 3294113 - DNA, 25 bp, Homo sapien
tgctgcagctgaggaatctaggacc

SEQ ID NO: 3294114 - DNA, 25 bp, Homo sapien
gacagtgagcagtgatttaacccta

SEQ ID NO: 3294115 - DNA, 25 bp, Homo sapien
tgcagggcccaaacaacatacaact

SEQ ID NO: 3294116 - DNA, 25 bp, Homo sapien
catcataggacagctaggccttgca

SEQ ID NO: 3294117 - DNA, 25 bp, Homo sapien
gcactggtaaggttctattcctggt

SEQ ID NO: 3294118 - DNA, 25 bp, Homo sapien
cactggtaaggttctattcctggtc

SEQ ID NO: 3294119 - DNA, 25 bp, Homo sapien
aaagaatctggtccggcactggtaa

SEQ ID NO: 3294120 - DNA, 25 bp, Homo sapien
tacagtttcctagaggaaagaatct

SEQ ID NO: 3294121 - DNA, 25 bp, Homo sapien
tctaaggaacagacaatagaagttt

SEQ ID NO: 3294122 - DNA, 25 bp, Homo sapien
cagcttgcaagggtaattttttcct

SEQ ID NO: 3294123 - DNA, 25 bp, Homo sapien
aatggcagaagaaatatagggaagg

SEQ ID NO: 3294124 - DNA, 25 bp, Homo sapien
cagtagactaccaaggccaagaagt

SEQ ID NO: 3294125 - DNA, 25 bp, Homo sapien
gactctgcctccgatgaagcatgtg

SEQ ID NO: 3294126 - DNA, 25 bp, Homo sapien
gcctccgatgaagcatgtgtatatt

SEQ ID NO: 3294127 - DNA, 25 bp, Homo sapien
aggtgactctgcctccgatgaagca

SEQ ID NO: 3294128 - DNA, 25 bp, Homo sapien
tatttggggtgtcactgcataatcc

SEQ ID NO: 3294129 - DNA, 25 bp, Homo sapien
actcaagggagcaaccaacttcatt

SEQ ID NO: 3294130 - DNA, 25 bp, Homo sapien
ctcagtacatccagcctggtacact

SEQ ID NO: 3294131 - DNA, 25 bp, Homo sapien
ctcaagggagcaaccaacttcattc

SEQ ID NO: 3294132 - DNA, 25 bp, Homo sapien
tacatccagcctggtacactcaagg

SEQ ID NO: 3294133 - DNA, 25 bp, Homo sapien
cctttcagcatgcttgacaaaacag

SEQ ID NO: 3294134 - DNA, 25 bp, Homo sapien
tttcagcatgcttgacaaaacagac

SEQ ID NO: 3294135 - DNA, 25 bp, Homo sapien
tcagcatgcttgacaaaacagacca

SEQ ID NO: 3294136 - DNA, 25 bp, Homo sapien
ttcctttcagcatgcttgacaaaac

SEQ ID NO: 3294137 - DNA, 25 bp, Homo sapien
cattcaaagtgatgcctgagttctc

SEQ ID NO: 3294138 - DNA, 25 bp, Homo sapien
tctggtggacccagccgcagctttg

SEQ ID NO: 3294139 - DNA, 25 bp, Homo sapien
ccagcagatcccttgtcccattagt

SEQ ID NO: 3294140 - DNA, 25 bp, Homo sapien
cagagggttaccctgggagtgggct

SEQ ID NO: 3294141 - DNA, 25 bp, Homo sapien
ctgccaggcgaccacaagcaatgct

SEQ ID NO: 3294142 - DNA, 25 bp, Homo sapien
ccacatgttttctcacgtgcttgac

SEQ ID NO: 3294143 - DNA, 25 bp, Homo sapien
aatgctcccggctgacttggcagca

SEQ ID NO: 3294144 - DNA, 25 bp, Homo sapien
catgttttctcacgtgcttgacaag

SEQ ID NO: 3294145 - DNA, 25 bp, Homo sapien
tattgtcagactcatggccttcaag

SEQ ID NO: 3294146 - DNA, 25 bp, Homo sapien
tgtgggccatcaaaaacactttgcc

SEQ ID NO: 3294147 - DNA, 25 bp, Homo sapien
tcagtaggtccatggatgtgggcca

SEQ ID NO: 3294148 - DNA, 25 bp, Homo sapien
tgttagtaacagcacaagctttggc

SEQ ID NO: 3294149 - DNA, 25 bp, Homo sapien
cttgacctccaattcgttctcctcc

SEQ ID NO: 3294150 - DNA, 25 bp, Homo sapien
ttgacctccaattcgttctcctccc

SEQ ID NO: 3294151 - DNA, 25 bp, Homo sapien
tgacctccaattcgttctcctccca

SEQ ID NO: 3294152 - DNA, 25 bp, Homo sapien
aggatttgattggaactggaggttt

SEQ ID NO: 3294153 - DNA, 25 bp, Homo sapien
cagcccatgacctttgtttaccaaa

SEQ ID NO: 3294154 - DNA, 25 bp, Homo sapien
taacttgttcattctacagcttcca

SEQ ID NO: 3294155 - DNA, 25 bp, Homo sapien
catttctcaaccatcctgttaaagg

SEQ ID NO: 3294156 - DNA, 25 bp, Homo sapien
tttgaattgggcagaagattttagc

SEQ ID NO: 3294157 - DNA, 25 bp, Homo sapien
cagggagagcacctgtccaggtctg

SEQ ID NO: 3294158 - DNA, 25 bp, Homo sapien
cacacatctgaaatatatgccgaaa

SEQ ID NO: 3294159 - DNA, 25 bp, Homo sapien
aaaattgacgtctttgacctcaggg

SEQ ID NO: 3294160 - DNA, 25 bp, Homo sapien
agacctctgtcctttaccatctgag

SEQ ID NO: 3294161 - DNA, 25 bp, Homo sapien
cccttcatcttgcttgcaagtgtgc

SEQ ID NO: 3294162 - DNA, 25 bp, Homo sapien
gcagtagacgtagacctctgtcctt

SEQ ID NO: 3294163 - DNA, 25 bp, Homo sapien
actaacagcagtagacgtagacctc

SEQ ID NO: 3294164 - DNA, 25 bp, Homo sapien
tgctaaccaagagatcaatgccaga

SEQ ID NO: 3294165 - DNA, 25 bp, Homo sapien
gatatttgatgtcattgtatccaca

SEQ ID NO: 3294166 - DNA, 25 bp, Homo sapien
tcaactttgattttaatagtgctag

SEQ ID NO: 3294167 - DNA, 25 bp, Homo sapien
tagctgaagtcatttaaagatggaa

SEQ ID NO: 3294168 - DNA, 25 bp, Homo sapien
ttaacttttataggatgagtaatcc

SEQ ID NO: 3294169 - DNA, 25 bp, Homo sapien
cccagggactgtctgacgggttgtc

SEQ ID NO: 3294170 - DNA, 25 bp, Homo sapien
tcctcaatgacaattaatctcacgt

SEQ ID NO: 3294171 - DNA, 25 bp, Homo sapien
taatctcacgtccttaggcccaggg

SEQ ID NO: 3294172 - DNA, 25 bp, Homo sapien
ctggaaaggagccaagttcatcaag

SEQ ID NO: 3294173 - DNA, 25 bp, Homo sapien
aaaggagccaagttcatcaagcagc

SEQ ID NO: 3294174 - DNA, 25 bp, Homo sapien
aaggagccaagttcatcaagcagct

SEQ ID NO: 3294175 - DNA, 25 bp, Homo sapien
ggaaaggagccaagttcatcaagca

SEQ ID NO: 3294176 - DNA, 25 bp, Homo sapien
tgggcaccttggtagagcaatgtgc

SEQ ID NO: 3294177 - DNA, 25 bp, Homo sapien
taaggccaaaggatgtgagagcgtc

SEQ ID NO: 3294178 - DNA, 25 bp, Homo sapien
tgagagcgtcctgataagtgtttcc

SEQ ID NO: 3294179 - DNA, 25 bp, Homo sapien
tgaaacagtccaatctaagattctg

SEQ ID NO: 3294180 - DNA, 25 bp, Homo sapien
gggagcagaaggactcctgtggggc

SEQ ID NO: 3294181 - DNA, 25 bp, Homo sapien
cctctgcctttggatcttcactgaa

SEQ ID NO: 3294182 - DNA, 25 bp, Homo sapien
tctgcctttggatcttcactgaagt

SEQ ID NO: 3294183 - DNA, 25 bp, Homo sapien
ctctgcctttggatcttcactgaag

SEQ ID NO: 3294184 - DNA, 25 bp, Homo sapien
ctggaggaaacaagatttgatttca

SEQ ID NO: 3294185 - DNA, 25 bp, Homo sapien
tggaggaaacaagatttgatttcat

SEQ ID NO: 3294186 - DNA, 25 bp, Homo sapien
ctgcatatgacttctaagcattttc

SEQ ID NO: 3294187 - DNA, 25 bp, Homo sapien
tgcatatgacttctaagcattttct

SEQ ID NO: 3294188 - DNA, 25 bp, Homo sapien
agcaatgcagtagaaccttcccaga

SEQ ID NO: 3294189 - DNA, 25 bp, Homo sapien
tagattatcaggagccacatacttg

SEQ ID NO: 3294190 - DNA, 25 bp, Homo sapien
tttctgctggtagtatctgaggtcc

SEQ ID NO: 3294191 - DNA, 25 bp, Homo sapien
gacagtttcacccagtcacaatgga

SEQ ID NO: 3294192 - DNA, 25 bp, Homo sapien
cacacttagaaaattgcctggaaca

SEQ ID NO: 3294193 - DNA, 25 bp, Homo sapien
gagtgagttaatatatataacacac

SEQ ID NO: 3294194 - DNA, 25 bp, Homo sapien
cacagataacaacagcttctattca

SEQ ID NO: 3294195 - DNA, 25 bp, Homo sapien
acagcttctattcagagtggttgtg

SEQ ID NO: 3294196 - DNA, 25 bp, Homo sapien
agaggagggcattgtcttcttagtt

SEQ ID NO: 3294197 - DNA, 25 bp, Homo sapien
ggagggcattgtcttcttagtttgc

SEQ ID NO: 3294198 - DNA, 25 bp, Homo sapien
aaatatgtcatcccaaataattaag

SEQ ID NO: 3294199 - DNA, 25 bp, Homo sapien
gggcattgtcttcttagtttgctga

SEQ ID NO: 3294200 - DNA, 25 bp, Homo sapien
gccaaggagttccagtccatgcaag

SEQ ID NO: 3294201 - DNA, 25 bp, Homo sapien
ccagtccatgcaaggcaacatagtg

SEQ ID NO: 3294202 - DNA, 25 bp, Homo sapien
tgtagtagcatgtgcatatagtcct

SEQ ID NO: 3294203 - DNA, 25 bp, Homo sapien
gagttccagtccatgcaaggcaaca

SEQ ID NO: 3294204 - DNA, 25 bp, Homo sapien
caacttggagcacaatctaggatca

SEQ ID NO: 3294205 - DNA, 25 bp, Homo sapien
tgcttttaaaacagtactggaccac

SEQ ID NO: 3294206 - DNA, 25 bp, Homo sapien
cccatttcttggtgtgttacagaca

SEQ ID NO: 3294207 - DNA, 25 bp, Homo sapien
tcaagcaaataacttagaggacctc

SEQ ID NO: 3294208 - DNA, 25 bp, Homo sapien
atccagaaagaacaaggtgattctg

SEQ ID NO: 3294209 - DNA, 25 bp, Homo sapien
cagattctgaatagatccagaaaga

SEQ ID NO: 3294210 - DNA, 25 bp, Homo sapien
ggagtttcagattctgaatagatcc

SEQ ID NO: 3294211 - DNA, 25 bp, Homo sapien
ccagaaagaacaaggtgattctgga

SEQ ID NO: 3294212 - DNA, 25 bp, Homo sapien
tgccaaattagaagatataggtccc

SEQ ID NO: 3294213 - DNA, 25 bp, Homo sapien
tctcctgggttgtgttattaatctc

SEQ ID NO: 3294214 - DNA, 25 bp, Homo sapien
tattaatctccatccaaaaggcgag

SEQ ID NO: 3294215 - DNA, 25 bp, Homo sapien
gataagagagcattcccatctccta

SEQ ID NO: 3294216 - DNA, 25 bp, Homo sapien
gcagagatcacatcaaggagttcaa

SEQ ID NO: 3294217 - DNA, 25 bp, Homo sapien
catccacagttcagaggttaggctt

SEQ ID NO: 3294218 - DNA, 25 bp, Homo sapien
ttaggtttagggttgcatgatgtgc

SEQ ID NO: 3294219 - DNA, 25 bp, Homo sapien
ggttaggctttagaccgtcatggcg

SEQ ID NO: 3294220 - DNA, 25 bp, Homo sapien
tgcccaggttgaaatccctgccttc

SEQ ID NO: 3294221 - DNA, 25 bp, Homo sapien
aatctcatgttctgtggacttgttg

SEQ ID NO: 3294222 - DNA, 25 bp, Homo sapien
tgttctgtggacttgttgcccaggt

SEQ ID NO: 3294223 - DNA, 25 bp, Homo sapien
catgttctgtggacttgttgcccag

SEQ ID NO: 3294224 - DNA, 25 bp, Homo sapien
gctgccagaggaaccgggaagaaac

SEQ ID NO: 3294225 - DNA, 25 bp, Homo sapien
actttgtcttacagaagtccttggg

SEQ ID NO: 3294226 - DNA, 25 bp, Homo sapien
aagaagcagtaggaagacccctgtg

SEQ ID NO: 3294227 - DNA, 25 bp, Homo sapien
tgggctctcggtccccaaggaagta

SEQ ID NO: 3294228 - DNA, 25 bp, Homo sapien
tccctcccatagcaatgatgtccct

SEQ ID NO: 3294229 - DNA, 25 bp, Homo sapien
tagtctggacatagaagctcttctc

SEQ ID NO: 3294230 - DNA, 25 bp, Homo sapien
gactagtgataaaaggctcaagcct

SEQ ID NO: 3294231 - DNA, 25 bp, Homo sapien
tgtccctgagggaggattgttttcc

SEQ ID NO: 3294232 - DNA, 25 bp, Homo sapien
gtaaaccccagtttgcagggaatgc

SEQ ID NO: 3294233 - DNA, 25 bp, Homo sapien
ggcatctcaggaagcatacaggata

SEQ ID NO: 3294234 - DNA, 25 bp, Homo sapien
taaaccccagtttgcagggaatgca

SEQ ID NO: 3294235 - DNA, 25 bp, Homo sapien
gatggcatctcaggaagcatacagg

SEQ ID NO: 3294236 - DNA, 25 bp, Homo sapien
tgaaagttggtgttatttctgcatc

SEQ ID NO: 3294237 - DNA, 25 bp, Homo sapien
ctgatgagactttcaacttgaaggc

SEQ ID NO: 3294238 - DNA, 25 bp, Homo sapien
gagtttgaggtagttatttaatctg

SEQ ID NO: 3294239 - DNA, 25 bp, Homo sapien
tatggaaattcttcgtcttaagagt

SEQ ID NO: 3294240 - DNA, 25 bp, Homo sapien
gacagtgtcacaattactcttatgt

SEQ ID NO: 3294241 - DNA, 25 bp, Homo sapien
tcagcaactcccatttgttcagaca

SEQ ID NO: 3294242 - DNA, 25 bp, Homo sapien
gtcacaattactcttatgtgagccc

SEQ ID NO: 3294243 - DNA, 25 bp, Homo sapien
cagtgtcacaattactcttatgtga

SEQ ID NO: 3294244 - DNA, 25 bp, Homo sapien
ttaggtcatggagccccattcttct

SEQ ID NO: 3294245 - DNA, 25 bp, Homo sapien
taattactgggccaccattggcccc

SEQ ID NO: 3294246 - DNA, 25 bp, Homo sapien
caccagcactctctgttacttcagt

SEQ ID NO: 3294247 - DNA, 25 bp, Homo sapien
ctctgttacttcagtatttggagta

SEQ ID NO: 3294248 - DNA, 25 bp, Homo sapien
caattgtcacttaaatctgtctgaa

SEQ ID NO: 3294249 - DNA, 25 bp, Homo sapien
tcaggaggtcctggtcccttcttcc

SEQ ID NO: 3294250 - DNA, 25 bp, Homo sapien
cttaaatctgtctgaaagtctgctt

SEQ ID NO: 3294251 - DNA, 25 bp, Homo sapien
tgctgcattgtcttcagagtgatta

SEQ ID NO: 3294252 - DNA, 25 bp, Homo sapien
cagaatattacagtaggggatccca

SEQ ID NO: 3294253 - DNA, 25 bp, Homo sapien
gaattggcataaggccacaagtgcc

SEQ ID NO: 3294254 - DNA, 25 bp, Homo sapien
gctgcccgaattggcataaggccac

SEQ ID NO: 3294255 - DNA, 25 bp, Homo sapien
aatgaccagaatattacagtagggg

SEQ ID NO: 3294256 - DNA, 25 bp, Homo sapien
aaggccagcaagtctgtatgaggga

SEQ ID NO: 3294257 - DNA, 25 bp, Homo sapien
gcaggctcggaaggccagcaagtct

SEQ ID NO: 3294258 - DNA, 25 bp, Homo sapien
caagtctgtatgagggacacgggca

SEQ ID NO: 3294259 - DNA, 25 bp, Homo sapien
ggaagaggtcctgagttcaggtgca

SEQ ID NO: 3294260 - DNA, 25 bp, Homo sapien
gcctgggatgacaatctcagtccaa

SEQ ID NO: 3294261 - DNA, 25 bp, Homo sapien
tgatgcctgggatgacaatctcagt

SEQ ID NO: 3294262 - DNA, 25 bp, Homo sapien
tgcctgggatgacaatctcagtcca

SEQ ID NO: 3294263 - DNA, 25 bp, Homo sapien
gatgcctgggatgacaatctcagtc

SEQ ID NO: 3294264 - DNA, 25 bp, Homo sapien
catgtgggcctatcttgaagaggca

SEQ ID NO: 3294265 - DNA, 25 bp, Homo sapien
gaagaggcagccaatagactgagcc

SEQ ID NO: 3294266 - DNA, 25 bp, Homo sapien
agaggcagccaatagactgagccat

SEQ ID NO: 3294267 - DNA, 25 bp, Homo sapien
atcttgaagaggcagccaatagact

SEQ ID NO: 3294268 - DNA, 25 bp, Homo sapien
ctgcccacagagtccagatacaaaa

SEQ ID NO: 3294269 - DNA, 25 bp, Homo sapien
aagctgcccacagagtccagataca

SEQ ID NO: 3294270 - DNA, 25 bp, Homo sapien
caggtccacagaagctctagcttct

SEQ ID NO: 3294271 - DNA, 25 bp, Homo sapien
gctgcccacagagtccagatacaaa

SEQ ID NO: 3294272 - DNA, 25 bp, Homo sapien
aaatcaaccctacttgcatttaaca

SEQ ID NO: 3294273 - DNA, 25 bp, Homo sapien
aactcttagttcctcgaaatctaat

SEQ ID NO: 3294274 - DNA, 25 bp, Homo sapien
aatcaaccctacttgcatttaacat

SEQ ID NO: 3294275 - DNA, 25 bp, Homo sapien
caaaactcttagttcctcgaaatct

SEQ ID NO: 3294276 - DNA, 25 bp, Homo sapien
gaactactgctacccaggctttcac

SEQ ID NO: 3294277 - DNA, 25 bp, Homo sapien
gcagaactactgctacccaggcttt

SEQ ID NO: 3294278 - DNA, 25 bp, Homo sapien
tctgcagaactactgctacccaggc

SEQ ID NO: 3294279 - DNA, 25 bp, Homo sapien
tgtctctgcagaactactgctaccc

SEQ ID NO: 3294280 - DNA, 25 bp, Homo sapien
tcctcctcctcactagttaacacat

SEQ ID NO: 3294281 - DNA, 25 bp, Homo sapien
tctttgtgtgctacccctgagctgc

SEQ ID NO: 3294282 - DNA, 25 bp, Homo sapien
caaatctgttaaccccttctttgtg

SEQ ID NO: 3294283 - DNA, 25 bp, Homo sapien
ccttctttgtgtgctacccctgagc

SEQ ID NO: 3294284 - DNA, 25 bp, Homo sapien
ctagaagaagatttgtgttgacggt

SEQ ID NO: 3294285 - DNA, 25 bp, Homo sapien
ttgtgttgacggtttctatcatttt

SEQ ID NO: 3294286 - DNA, 25 bp, Homo sapien
tagaagaagatttgtgttgacggtt

SEQ ID NO: 3294287 - DNA, 25 bp, Homo sapien
gtgttgacggtttctatcattttaa

SEQ ID NO: 3294288 - DNA, 25 bp, Homo sapien
gccttgcacttatcccgtaatttcc

SEQ ID NO: 3294289 - DNA, 25 bp, Homo sapien
tttggcaggaaatagccttgcactt

SEQ ID NO: 3294290 - DNA, 25 bp, Homo sapien
gagatcccactgtactatctgactg

SEQ ID NO: 3294291 - DNA, 25 bp, Homo sapien
tactatctgactgtttggcaggaaa

SEQ ID NO: 3294292 - DNA, 25 bp, Homo sapien
gtaatcactgggtcttgggttctca

SEQ ID NO: 3294293 - DNA, 25 bp, Homo sapien
ctaacagtaaagataagcagtcgct

SEQ ID NO: 3294294 - DNA, 25 bp, Homo sapien
tatatgctgacttctagttgactca

SEQ ID NO: 3294295 - DNA, 25 bp, Homo sapien
gcacttagaacaagggctaacagta

SEQ ID NO: 3294296 - DNA, 25 bp, Homo sapien
gccactactgtggagggatgccaca

SEQ ID NO: 3294297 - DNA, 25 bp, Homo sapien
tataccctattgaaaatcttgcttc

SEQ ID NO: 3294298 - DNA, 25 bp, Homo sapien
cagtgccactactgtggagggatgc

SEQ ID NO: 3294299 - DNA, 25 bp, Homo sapien
cacagcccacgtataccctattgaa

SEQ ID NO: 3294300 - DNA, 25 bp, Homo sapien
cttgaccacagaagacattagtcgt

SEQ ID NO: 3294301 - DNA, 25 bp, Homo sapien
tgggaacagagaggctggtgttgaa

SEQ ID NO: 3294302 - DNA, 25 bp, Homo sapien
tcgtgaggtaatatgatcattccca

SEQ ID NO: 3294303 - DNA, 25 bp, Homo sapien
cacagaagacattagtcgtgaggta

SEQ ID NO: 3294304 - DNA, 25 bp, Homo sapien
gatacaacgcagatggatacagcag

SEQ ID NO: 3294305 - DNA, 25 bp, Homo sapien
cttctctagagatctggatgagcag

SEQ ID NO: 3294306 - DNA, 25 bp, Homo sapien
tcactaggctcttctgctaatgaga

SEQ ID NO: 3294307 - DNA, 25 bp, Homo sapien
gagatgcaactcctatctcactagg

SEQ ID NO: 3294308 - DNA, 25 bp, Homo sapien
ctggagaaaaacagccttgtgatga

SEQ ID NO: 3294309 - DNA, 25 bp, Homo sapien
aaaaacagccttgtgatgaagccca

SEQ ID NO: 3294310 - DNA, 25 bp, Homo sapien
aaacagccttgtgatgaagcccagc

SEQ ID NO: 3294311 - DNA, 25 bp, Homo sapien
agaaaaacagccttgtgatgaagcc

SEQ ID NO: 3294312 - DNA, 25 bp, Homo sapien
ttgagtacagcattcctcatgcagt

SEQ ID NO: 3294313 - DNA, 25 bp, Homo sapien
aaagccttgagtacagcattcctca

SEQ ID NO: 3294314 - DNA, 25 bp, Homo sapien
tcctcatgcagtggacagacaacaa

SEQ ID NO: 3294315 - DNA, 25 bp, Homo sapien
ctcatgcagtggacagacaacaaat

SEQ ID NO: 3294316 - DNA, 25 bp, Homo sapien
aactccgggcaaccacaaattcact

SEQ ID NO: 3294317 - DNA, 25 bp, Homo sapien
tttggctattatctgaacattttat

SEQ ID NO: 3294318 - DNA, 25 bp, Homo sapien
tttatcatcccgaaaagaagcccca

SEQ ID NO: 3294319 - DNA, 25 bp, Homo sapien
tcatgcaataatacatggtcctttg

SEQ ID NO: 3294320 - DNA, 25 bp, Homo sapien
agcatcctgttcccgtaggctgcca

SEQ ID NO: 3294321 - DNA, 25 bp, Homo sapien
tccagcatcctgttcccgtaggctg

SEQ ID NO: 3294322 - DNA, 25 bp, Homo sapien
cctgttcccgtaggctgccaatcat

SEQ ID NO: 3294323 - DNA, 25 bp, Homo sapien
catcctgttcccgtaggctgccaat

SEQ ID NO: 3294324 - DNA, 25 bp, Homo sapien
tgcaaattaacacaaggtatcacct

SEQ ID NO: 3294325 - DNA, 25 bp, Homo sapien
aacacttgtgcactgacgttgggaa

SEQ ID NO: 3294326 - DNA, 25 bp, Homo sapien
taaggtactgaagccactaataaga

SEQ ID NO: 3294327 - DNA, 25 bp, Homo sapien
gaggtatctgtaccaccacgttcac

SEQ ID NO: 3294328 - DNA, 25 bp, Homo sapien
tttactgatctattacacagaatgg

SEQ ID NO: 3294329 - DNA, 25 bp, Homo sapien
actttactgatctattacacagaat

SEQ ID NO: 3294330 - DNA, 25 bp, Homo sapien
actgatctattacacagaatggtga

SEQ ID NO: 3294331 - DNA, 25 bp, Homo sapien
tactgatctattacacagaatggtg

SEQ ID NO: 3294332 - DNA, 25 bp, Homo sapien
caaatacttgaagcaaccctgggta

SEQ ID NO: 3294333 - DNA, 25 bp, Homo sapien
tgcggcagggcaacctaacttattt

SEQ ID NO: 3294334 - DNA, 25 bp, Homo sapien
tcaaagtcggctggatcatcaaaca

SEQ ID NO: 3294335 - DNA, 25 bp, Homo sapien
tatagatacaaattctgcggcaggg

SEQ ID NO: 3294336 - DNA, 25 bp, Homo sapien
tttggaagagtcttattattttaca

SEQ ID NO: 3294337 - DNA, 25 bp, Homo sapien
cattatagaactgatgatactgccc

SEQ ID NO: 3294338 - DNA, 25 bp, Homo sapien
tgccctaattgagccaaacatagaa

SEQ ID NO: 3294339 - DNA, 25 bp, Homo sapien
caactacttttatggaatacctcaa

SEQ ID NO: 3294340 - DNA, 25 bp, Homo sapien
ggagaacttaatataacacagccct

SEQ ID NO: 3294341 - DNA, 25 bp, Homo sapien
caagaactagaaatgaactgcacgc

SEQ ID NO: 3294342 - DNA, 25 bp, Homo sapien
taagtgcagttctatcaagaactag

SEQ ID NO: 3294343 - DNA, 25 bp, Homo sapien
taaaaagtcaagactactactgaaa

SEQ ID NO: 3294344 - DNA, 25 bp, Homo sapien
tgataacacgataccaaggaaagcc

SEQ ID NO: 3294345 - DNA, 25 bp, Homo sapien
aaatgccaagttctccagtactgtg

SEQ ID NO: 3294346 - DNA, 25 bp, Homo sapien
tgataagtctatcaagagaccctga

SEQ ID NO: 3294347 - DNA, 25 bp, Homo sapien
gagaccctgaatccttacgtacttg

SEQ ID NO: 3294348 - DNA, 25 bp, Homo sapien
gaaattctacgtcctccagcttgag

SEQ ID NO: 3294349 - DNA, 25 bp, Homo sapien
tgaaactgaacagtggatcgtccat

SEQ ID NO: 3294350 - DNA, 25 bp, Homo sapien
gcttgagcagtattataggattcac

SEQ ID NO: 3294351 - DNA, 25 bp, Homo sapien
caaatcttacatttcatgcctaata

SEQ ID NO: 3294352 - DNA, 25 bp, Homo sapien
tccctacaataacaataagatgccg

SEQ ID NO: 3294353 - DNA, 25 bp, Homo sapien
tatcctcgtatgctgaagtatctga

SEQ ID NO: 3294354 - DNA, 25 bp, Homo sapien
acagagaggctcttcgctcatccct

SEQ ID NO: 3294355 - DNA, 25 bp, Homo sapien
tacatggaacatagcacacttcggc

SEQ ID NO: 3294356 - DNA, 25 bp, Homo sapien
aaattcaggactcagacaggctctg

SEQ ID NO: 3294357 - DNA, 25 bp, Homo sapien
cattcgggagggtacatctgtgtcc

SEQ ID NO: 3294358 - DNA, 25 bp, Homo sapien
tctggctaggtgagacctgggtaca

SEQ ID NO: 3294359 - DNA, 25 bp, Homo sapien
tagccctcctggttgacatatgact

SEQ ID NO: 3294360 - DNA, 25 bp, Homo sapien
gcaagagggttaactctattacagt

SEQ ID NO: 3294361 - DNA, 25 bp, Homo sapien
tcatgggacattcctagagaaatct

SEQ ID NO: 3294362 - DNA, 25 bp, Homo sapien
tagaaggtatcccatgcaagagggt

SEQ ID NO: 3294363 - DNA, 25 bp, Homo sapien
gctttgtcgaaaccataatcctggg

SEQ ID NO: 3294364 - DNA, 25 bp, Homo sapien
cctgtgtgcactccataaaaataag

SEQ ID NO: 3294365 - DNA, 25 bp, Homo sapien
cccgatctgagctacttaactaaaa

SEQ ID NO: 3294366 - DNA, 25 bp, Homo sapien
gccatctagtgttgggaaaaactac

SEQ ID NO: 3294367 - DNA, 25 bp, Homo sapien
ccagtgatccaaccctagtcagtta

SEQ ID NO: 3294368 - DNA, 25 bp, Homo sapien
gatggcataggagtctgtgctactt

SEQ ID NO: 3294369 - DNA, 25 bp, Homo sapien
ggcataggagtctgtgctacttcat

SEQ ID NO: 3294370 - DNA, 25 bp, Homo sapien
taggagtctgtgctacttcatcatc

SEQ ID NO: 3294371 - DNA, 25 bp, Homo sapien
cataggagtctgtgctacttcatca

SEQ ID NO: 3294372 - DNA, 25 bp, Homo sapien
tctaaagcagagtgcatacataatg

SEQ ID NO: 3294373 - DNA, 25 bp, Homo sapien
atctaaagcagagtgcatacataat

SEQ ID NO: 3294374 - DNA, 25 bp, Homo sapien
caagataatctcttaggaacctggg

SEQ ID NO: 3294375 - DNA, 25 bp, Homo sapien
ttcaggtatacaagaagatgcaggc

SEQ ID NO: 3294376 - DNA, 25 bp, Homo sapien
tacaacactataactgcatctggca

SEQ ID NO: 3294377 - DNA, 25 bp, Homo sapien
ggaacctgggaactttcacactata

SEQ ID NO: 3294378 - DNA, 25 bp, Homo sapien
tctttcaacatttcttcataacacg

SEQ ID NO: 3294379 - DNA, 25 bp, Homo sapien
ctttcaacatttcttcataacacgt

SEQ ID NO: 3294380 - DNA, 25 bp, Homo sapien
tttcaacatttcttcataacacgtt

SEQ ID NO: 3294381 - DNA, 25 bp, Homo sapien
ccactattttcaaacatcattgaga

SEQ ID NO: 3294382 - DNA, 25 bp, Homo sapien
aaactgtctccactattttcaaaca

SEQ ID NO: 3294383 - DNA, 25 bp, Homo sapien
tctccactattttcaaacatcattg

SEQ ID NO: 3294384 - DNA, 25 bp, Homo sapien
ctgtctccactattttcaaacatca

SEQ ID NO: 3294385 - DNA, 25 bp, Homo sapien
catgagcaacaacacgggatgtgtg

SEQ ID NO: 3294386 - DNA, 25 bp, Homo sapien
agacatgagcaacaacacgggatgt

SEQ ID NO: 3294387 - DNA, 25 bp, Homo sapien
tgagcaacaacacgggatgtgtgaa

SEQ ID NO: 3294388 - DNA, 25 bp, Homo sapien
caacaacacgggatgtgtgaatgtc

SEQ ID NO: 3294389 - DNA, 25 bp, Homo sapien
caattctgtcgggacacattttcaa

SEQ ID NO: 3294390 - DNA, 25 bp, Homo sapien
tctgtcgggacacattttcaataca

SEQ ID NO: 3294391 - DNA, 25 bp, Homo sapien
tattggacaattctgtcgggacaca

SEQ ID NO: 3294392 - DNA, 25 bp, Homo sapien
ctccaaacatattggacaattctgt

SEQ ID NO: 3294393 - DNA, 25 bp, Homo sapien
gattcatagctaggcataagttaca

SEQ ID NO: 3294394 - DNA, 25 bp, Homo sapien
gaagattcatagctaggcataagtt

SEQ ID NO: 3294395 - DNA, 25 bp, Homo sapien
tcatagctaggcataagttacattt

SEQ ID NO: 3294396 - DNA, 25 bp, Homo sapien
cttgaagattcatagctaggcataa

SEQ ID NO: 3294397 - DNA, 25 bp, Homo sapien
gcatatatcgcaataatattctcca

SEQ ID NO: 3294398 - DNA, 25 bp, Homo sapien
ccaaacaatgtgctacattcttcac

SEQ ID NO: 3294399 - DNA, 25 bp, Homo sapien
aacaaatggcatatatcgcaataat

SEQ ID NO: 3294400 - DNA, 25 bp, Homo sapien
tcacagtgatactgcttcttatctt

SEQ ID NO: 3294401 - DNA, 25 bp, Homo sapien
tcacagtttatgcactgcacttcct

SEQ ID NO: 3294402 - DNA, 25 bp, Homo sapien
ccttcactttaaagcgatctagttg

SEQ ID NO: 3294403 - DNA, 25 bp, Homo sapien
aagtataaagcttgtcacagcaagg

SEQ ID NO: 3294404 - DNA, 25 bp, Homo sapien
tcattgttatcatgacacaagcggc

SEQ ID NO: 3294405 - DNA, 25 bp, Homo sapien
gaaggaaatccctagattgaaacac

SEQ ID NO: 3294406 - DNA, 25 bp, Homo sapien
tgaaacactaatcccacaacacctg

SEQ ID NO: 3294407 - DNA, 25 bp, Homo sapien
agactctcccgtgccattctcgtga

SEQ ID NO: 3294408 - DNA, 25 bp, Homo sapien
cactacgtctgtatgaagttgaaca

SEQ ID NO: 3294409 - DNA, 25 bp, Homo sapien
ctcactctattgtatcatttcctag

SEQ ID NO: 3294410 - DNA, 25 bp, Homo sapien
catttcctagaatatacaaacatgc

SEQ ID NO: 3294411 - DNA, 25 bp, Homo sapien
tttggctactcagggacaatgccct

SEQ ID NO: 3294412 - DNA, 25 bp, Homo sapien
attataaaacgttctcactctattg

SEQ ID NO: 3294413 - DNA, 25 bp, Homo sapien
gctgaccacatcctccttgaaatac

SEQ ID NO: 3294414 - DNA, 25 bp, Homo sapien
tgctcccctttacagctaaacccca

SEQ ID NO: 3294415 - DNA, 25 bp, Homo sapien
aattcactctaatcctgatctctcc

SEQ ID NO: 3294416 - DNA, 25 bp, Homo sapien
cccaagaataccctataagtgctat

SEQ ID NO: 3294417 - DNA, 25 bp, Homo sapien
gagcttcatccagttcagtggagca

SEQ ID NO: 3294418 - DNA, 25 bp, Homo sapien
ggagcaatgttcgtcaagccatgac

SEQ ID NO: 3294419 - DNA, 25 bp, Homo sapien
catttttaaggagcttcatccagtt

SEQ ID NO: 3294420 - DNA, 25 bp, Homo sapien
acaacacttggtggatgaccaacat

SEQ ID NO: 3294421 - DNA, 25 bp, Homo sapien
attatctccacttccattatttcat

SEQ ID NO: 3294422 - DNA, 25 bp, Homo sapien
ccattatctccacttccattatttc

SEQ ID NO: 3294423 - DNA, 25 bp, Homo sapien
cgaataagcccactggcagagacca

SEQ ID NO: 3294424 - DNA, 25 bp, Homo sapien
gcagagaccactgtgcaagcctaat

SEQ ID NO: 3294425 - DNA, 25 bp, Homo sapien
gagaccactgtgcaagcctaatcac

SEQ ID NO: 3294426 - DNA, 25 bp, Homo sapien
gcctcagtctacttcggcagcaaaa

SEQ ID NO: 3294427 - DNA, 25 bp, Homo sapien
aggtacgaagcaggtaggaaaggtg

SEQ ID NO: 3294428 - DNA, 25 bp, Homo sapien
aaaggtggggcttatcgccttgcca

SEQ ID NO: 3294429 - DNA, 25 bp, Homo sapien
gccaaaaacgttctcctcaagaaga

SEQ ID NO: 3294430 - DNA, 25 bp, Homo sapien
gcttatcgccttgccaaaaacgttc

SEQ ID NO: 3294431 - DNA, 25 bp, Homo sapien
tcaaacttaaatccaagcctaacca

SEQ ID NO: 3294432 - DNA, 25 bp, Homo sapien
acttaaatccaagcctaaccacctg

SEQ ID NO: 3294433 - DNA, 25 bp, Homo sapien
aaatccaagcctaaccacctgccca

SEQ ID NO: 3294434 - DNA, 25 bp, Homo sapien
ctgaaaatcaggttaacctcaaact

SEQ ID NO: 3294435 - DNA, 25 bp, Homo sapien
gggaagagtccatagaaggcgtcac

SEQ ID NO: 3294436 - DNA, 25 bp, Homo sapien
aagcttgtcagggaagagtccatag

SEQ ID NO: 3294437 - DNA, 25 bp, Homo sapien
acggaagcttgtcagggaagagtcc

SEQ ID NO: 3294438 - DNA, 25 bp, Homo sapien
ctgacggaagcttgtcagggaagag

SEQ ID NO: 3294439 - DNA, 25 bp, Homo sapien
taggagacatcctctgtcatagtgc

SEQ ID NO: 3294440 - DNA, 25 bp, Homo sapien
gacatcctctgtcatagtgctcgca

SEQ ID NO: 3294441 - DNA, 25 bp, Homo sapien
tcctctgtcatagtgctcgcagccc

SEQ ID NO: 3294442 - DNA, 25 bp, Homo sapien
ctttaggagacatcctctgtcatag

SEQ ID NO: 3294443 - DNA, 25 bp, Homo sapien
tcgctcttgaccgctggcgccatct

SEQ ID NO: 3294444 - DNA, 25 bp, Homo sapien
catcttcccgggccgtcgccgccat

SEQ ID NO: 3294445 - DNA, 25 bp, Homo sapien
ccatcttcccgggccgtcgccgcca

SEQ ID NO: 3294446 - DNA, 25 bp, Homo sapien
gagaagctgcgcctctctagcacac

SEQ ID NO: 3294447 - DNA, 25 bp, Homo sapien
tagcgacaatatggctcctaagcac

SEQ ID NO: 3294448 - DNA, 25 bp, Homo sapien
ggataaaaaccacgcccagagaagc

SEQ ID NO: 3294449 - DNA, 25 bp, Homo sapien
ccagcggccactagcgacaatatgg

SEQ ID NO: 3294450 - DNA, 25 bp, Homo sapien
ctgcttttgcctaatctgatgatga

SEQ ID NO: 3294451 - DNA, 25 bp, Homo sapien
tatgtgtatattaggctgtctgaaa

SEQ ID NO: 3294452 - DNA, 25 bp, Homo sapien
tccttcaggaattctaattatgtgt

SEQ ID NO: 3294453 - DNA, 25 bp, Homo sapien
aaattgtgcaacatgttactgatgc

SEQ ID NO: 3294454 - DNA, 25 bp, Homo sapien
tttattgcaagttgggctgcaaatt

SEQ ID NO: 3294455 - DNA, 25 bp, Homo sapien
ttttattgcaagttgggctgcaaat

SEQ ID NO: 3294456 - DNA, 25 bp, Homo sapien
ttctcattctgaaccagtcagaaag

SEQ ID NO: 3294457 - DNA, 25 bp, Homo sapien
gagttcataggctagctactttgtg

SEQ ID NO: 3294458 - DNA, 25 bp, Homo sapien
gctagctactttgtgtagcagtgtc

SEQ ID NO: 3294459 - DNA, 25 bp, Homo sapien
gtcagaaagagttcataggctagct

SEQ ID NO: 3294460 - DNA, 25 bp, Homo sapien
caagcccctggaatagtgtctggca

SEQ ID NO: 3294461 - DNA, 25 bp, Homo sapien
gatgtcactgaaccacaagatccta

SEQ ID NO: 3294462 - DNA, 25 bp, Homo sapien
gtttatagcaatcccaggctttggg

SEQ ID NO: 3294463 - DNA, 25 bp, Homo sapien
tgtctggcagatagtgggcacccaa

SEQ ID NO: 3294464 - DNA, 25 bp, Homo sapien
cagggtgcaatatgagaaacaaatc

SEQ ID NO: 3294465 - DNA, 25 bp, Homo sapien
tcctcccaagatctacatgcaaaag

SEQ ID NO: 3294466 - DNA, 25 bp, Homo sapien
aatcccacagattgcattgattggt

SEQ ID NO: 3294467 - DNA, 25 bp, Homo sapien
tttggccactctgtaaaacacatct

SEQ ID NO: 3294468 - DNA, 25 bp, Homo sapien
catattaatcgacaatacattttcc

SEQ ID NO: 3294469 - DNA, 25 bp, Homo sapien
tcatattaatcgacaatacattttc

SEQ ID NO: 3294470 - DNA, 25 bp, Homo sapien
tcttgaaatagcatcggtggacgtg

SEQ ID NO: 3294471 - DNA, 25 bp, Homo sapien
tagtattgaaataagccgaagcgcc

SEQ ID NO: 3294472 - DNA, 25 bp, Homo sapien
ttcttagaagatctgcagggaggcc

SEQ ID NO: 3294473 - DNA, 25 bp, Homo sapien
gcaagcaagggattctcagtcagga

SEQ ID NO: 3294474 - DNA, 25 bp, Homo sapien
gttagcataacagtgaaatcaccta

SEQ ID NO: 3294475 - DNA, 25 bp, Homo sapien
tggtagtcccatagattatcatgaa

SEQ ID NO: 3294476 - DNA, 25 bp, Homo sapien
catctttcagaacattaaccgaggc

SEQ ID NO: 3294477 - DNA, 25 bp, Homo sapien
gctagtaacatcatagtgcaatgca

SEQ ID NO: 3294478 - DNA, 25 bp, Homo sapien
tgttccatttgaggcaaatcagccc

SEQ ID NO: 3294479 - DNA, 25 bp, Homo sapien
ttgaggcaaatcagcccctgaatca

SEQ ID NO: 3294480 - DNA, 25 bp, Homo sapien
agtgctggtgttccatttgaggcaa

SEQ ID NO: 3294481 - DNA, 25 bp, Homo sapien
tgaatcatctgacaggggaggtcct

SEQ ID NO: 3294482 - DNA, 25 bp, Homo sapien
ccccagggatacaataaaggctcca

SEQ ID NO: 3294483 - DNA, 25 bp, Homo sapien
atatgaaattgcagacatttggcca

SEQ ID NO: 3294484 - DNA, 25 bp, Homo sapien
ttgcagacatttggccagaagacca

SEQ ID NO: 3294485 - DNA, 25 bp, Homo sapien
cagggatacaataaaggctccaaca

SEQ ID NO: 3294486 - DNA, 25 bp, Homo sapien
tgaggttttgccaaagcggtggaag

SEQ ID NO: 3294487 - DNA, 25 bp, Homo sapien
ctgaggttttgccaaagcggtggaa

SEQ ID NO: 3294488 - DNA, 25 bp, Homo sapien
gaaggaattcgagattctgaaagaa

SEQ ID NO: 3294489 - DNA, 25 bp, Homo sapien
gcaggtcaatagcagccagagaagg

SEQ ID NO: 3294490 - DNA, 25 bp, Homo sapien
ttctttgttagcctggaatttcgag

SEQ ID NO: 3294491 - DNA, 25 bp, Homo sapien
ggtgtgcaggtcaatagcagccaga

SEQ ID NO: 3294492 - DNA, 25 bp, Homo sapien
tagttcaggcaaacggacatctgtc

SEQ ID NO: 3294493 - DNA, 25 bp, Homo sapien
tatgcctcccagtgctcttagttca

SEQ ID NO: 3294494 - DNA, 25 bp, Homo sapien
gagatgattatagtttagttcaggc

SEQ ID NO: 3294495 - DNA, 25 bp, Homo sapien
cttagttcagggagatgattatagt

SEQ ID NO: 3294496 - DNA, 25 bp, Homo sapien
cacctcctctcttgattacctcttc

SEQ ID NO: 3294497 - DNA, 25 bp, Homo sapien
aaagaagaataaatcagatctaaaa

SEQ ID NO: 3294498 - DNA, 25 bp, Homo sapien
attatcagccagcattgattatgca

SEQ ID NO: 3294499 - DNA, 25 bp, Homo sapien
tcacctcctctcttgattacctctt

SEQ ID NO: 3294500 - DNA, 25 bp, Homo sapien
cattcattcagtatggagtctttcc

SEQ ID NO: 3294501 - DNA, 25 bp, Homo sapien
cctttgggaatacatccatacctcc

SEQ ID NO: 3294502 - DNA, 25 bp, Homo sapien
tgtaggttaaaggacaatacctctc

SEQ ID NO: 3294503 - DNA, 25 bp, Homo sapien
taatgcaagcagagataagcctaga

SEQ ID NO: 3294504 - DNA, 25 bp, Homo sapien
tctcaatacttcactatcatattta

SEQ ID NO: 3294505 - DNA, 25 bp, Homo sapien
aagtctagagctgactggtgtttgc

SEQ ID NO: 3294506 - DNA, 25 bp, Homo sapien
gactatgatgggttgggataatata

SEQ ID NO: 3294507 - DNA, 25 bp, Homo sapien
aaggtttcactttatgtgtatccaa

SEQ ID NO: 3294508 - DNA, 25 bp, Homo sapien
tggtcacattaatgttataaatgcc

SEQ ID NO: 3294509 - DNA, 25 bp, Homo sapien
cctgatggggaatgtctgttcggtt

SEQ ID NO: 3294510 - DNA, 25 bp, Homo sapien
tggaatagaacacttcttagttttc

SEQ ID NO: 3294511 - DNA, 25 bp, Homo sapien
taatgtggtcacattaatgttataa

SEQ ID NO: 3294512 - DNA, 25 bp, Homo sapien
aattgccacgcttggattccttgtg

SEQ ID NO: 3294513 - DNA, 25 bp, Homo sapien
tgaattggtatagtctcagtcccca

SEQ ID NO: 3294514 - DNA, 25 bp, Homo sapien
tgctgggagcaactgcagaaagatt

SEQ ID NO: 3294515 - DNA, 25 bp, Homo sapien
tggtccacgctgacattgctgcagt

SEQ ID NO: 3294516 - DNA, 25 bp, Homo sapien
gatcattaacaaaaatattaataag

SEQ ID NO: 3294517 - DNA, 25 bp, Homo sapien
atcattaacaaaaatattaataagg

SEQ ID NO: 3294518 - DNA, 25 bp, Homo sapien
ctgatcattaacaaaaatattaata

SEQ ID NO: 3294519 - DNA, 25 bp, Homo sapien
caaaaatattaataaggttaatgat

SEQ ID NO: 3294520 - DNA, 25 bp, Homo sapien
tttcttcaactaaggaatcatcttt

SEQ ID NO: 3294521 - DNA, 25 bp, Homo sapien
tctttcttcaactaaggaatcatct

SEQ ID NO: 3294522 - DNA, 25 bp, Homo sapien
ctgtaccacaagtgtttttctttct

SEQ ID NO: 3294523 - DNA, 25 bp, Homo sapien
tttctttcttcaactaaggaatcat

SEQ ID NO: 3294524 - DNA, 25 bp, Homo sapien
aacatttctggcatctttctgtact

SEQ ID NO: 3294525 - DNA, 25 bp, Homo sapien
ggcatctttctgtacttttaactgt

SEQ ID NO: 3294526 - DNA, 25 bp, Homo sapien
taaagaaacatttctggcatctttc

SEQ ID NO: 3294527 - DNA, 25 bp, Homo sapien
ctgtacttttaactgtagttcttgg

SEQ ID NO: 3294528 - DNA, 25 bp, Homo sapien
aattgtaagacatggataaacctac

SEQ ID NO: 3294529 - DNA, 25 bp, Homo sapien
tgataaccacacattctcagttgct

SEQ ID NO: 3294530 - DNA, 25 bp, Homo sapien
tctcaccaggttaacatgaaagcag

SEQ ID NO: 3294531 - DNA, 25 bp, Homo sapien
gggatccctaagaacattcagaagg

SEQ ID NO: 3294532 - DNA, 25 bp, Homo sapien
aggaactgcattattgctaagggaa

SEQ ID NO: 3294533 - DNA, 25 bp, Homo sapien
taaccctaggttggtatggcctgaa

SEQ ID NO: 3294534 - DNA, 25 bp, Homo sapien
tgcattattgctaagggaatatggg

SEQ ID NO: 3294535 - DNA, 25 bp, Homo sapien
ctgcaaagtaggtgggaacagaaat

SEQ ID NO: 3294536 - DNA, 25 bp, Homo sapien
gctcagcacagaagggtcttttgtc

SEQ ID NO: 3294537 - DNA, 25 bp, Homo sapien
cagcacagaagggtcttttgtcggg

SEQ ID NO: 3294538 - DNA, 25 bp, Homo sapien
ggagctcagcacagaagggtctttt

SEQ ID NO: 3294539 - DNA, 25 bp, Homo sapien
tttgtcggggtcaatatgtaagcat

SEQ ID NO: 3294540 - DNA, 25 bp, Homo sapien
cttgatttcaggcaaccttactcca

SEQ ID NO: 3294541 - DNA, 25 bp, Homo sapien
gatttcaggcaaccttactccagca

SEQ ID NO: 3294542 - DNA, 25 bp, Homo sapien
atctatcaccacttcagagagctta

SEQ ID NO: 3294543 - DNA, 25 bp, Homo sapien
taggatagcgtctttcaagaggttc

SEQ ID NO: 3294544 - DNA, 25 bp, Homo sapien
atttcagttaccagacaaccaatgg

SEQ ID NO: 3294545 - DNA, 25 bp, Homo sapien
taaacacatcataatatgatatagc

SEQ ID NO: 3294546 - DNA, 25 bp, Homo sapien
aacatttcagttaccagacaaccaa

SEQ ID NO: 3294547 - DNA, 25 bp, Homo sapien
tatgatatagctgatcaatatcaga

SEQ ID NO: 3294548 - DNA, 25 bp, Homo sapien
tagttctggagctctgtaccatcgg

SEQ ID NO: 3294549 - DNA, 25 bp, Homo sapien
catagcttgacaacgccagactggg

SEQ ID NO: 3294550 - DNA, 25 bp, Homo sapien
taatcagtataaacctccccaggag

SEQ ID NO: 3294551 - DNA, 25 bp, Homo sapien
taccatcgggttgccacataatcag

SEQ ID NO: 3294552 - DNA, 25 bp, Homo sapien
tcaccaagttttcatgcctaagttg

SEQ ID NO: 3294553 - DNA, 25 bp, Homo sapien
catcaagaattgtgtggtcaacaaa

SEQ ID NO: 3294554 - DNA, 25 bp, Homo sapien
tccaagtcatcaagaattgtgtggt

SEQ ID NO: 3294555 - DNA, 25 bp, Homo sapien
caagagattcaccaagttttcatgc

SEQ ID NO: 3294556 - DNA, 25 bp, Homo sapien
gacaaaatccaattccattattaat

SEQ ID NO: 3294557 - DNA, 25 bp, Homo sapien
ccagagatggtttgtagagtggcca

SEQ ID NO: 3294558 - DNA, 25 bp, Homo sapien
caggaagccccacttttagggctga

SEQ ID NO: 3294559 - DNA, 25 bp, Homo sapien
gacacatagtcctcattggaaatgg

SEQ ID NO: 3294560 - DNA, 25 bp, Homo sapien
aaatctaaagattgccaatagtgaa

SEQ ID NO: 3294561 - DNA, 25 bp, Homo sapien
gtaacttgatttctcgcattgcaat

SEQ ID NO: 3294562 - DNA, 25 bp, Homo sapien
tgtcatcgtcactttctaagaactt

SEQ ID NO: 3294563 - DNA, 25 bp, Homo sapien
taaccattttgtcatcgtcactttc

SEQ ID NO: 3294564 - DNA, 25 bp, Homo sapien
tggccacaattcttccagtatcttt

SEQ ID NO: 3294565 - DNA, 25 bp, Homo sapien
cattccataactcccttctccaacc

SEQ ID NO: 3294566 - DNA, 25 bp, Homo sapien
tccataactcccttctccaaccaaa

SEQ ID NO: 3294567 - DNA, 25 bp, Homo sapien
ttccataactcccttctccaaccaa

SEQ ID NO: 3294568 - DNA, 25 bp, Homo sapien
accattccataactcccttctccaa

SEQ ID NO: 3294569 - DNA, 25 bp, Homo sapien
ttcttcaatccgttcgcatagaaag

SEQ ID NO: 3294570 - DNA, 25 bp, Homo sapien
aatgcatatggttcgcaggtccaaa

SEQ ID NO: 3294571 - DNA, 25 bp, Homo sapien
tggaaacaaatttgaggtgaaatgc

SEQ ID NO: 3294572 - DNA, 25 bp, Homo sapien
caatccgttcgcatagaaagaccca

SEQ ID NO: 3294573 - DNA, 25 bp, Homo sapien
ggtgggcctcggtccgccgcaagct

SEQ ID NO: 3294574 - DNA, 25 bp, Homo sapien
cagtcacgagtccagggcgaagcag

SEQ ID NO: 3294575 - DNA, 25 bp, Homo sapien
tgtgatttcttctgcggacgcagtc

SEQ ID NO: 3294576 - DNA, 25 bp, Homo sapien
tagcaaactagcaattccagcgctg

SEQ ID NO: 3294577 - DNA, 25 bp, Homo sapien
gtcgtcgtcaaggcaacgacctcac

SEQ ID NO: 3294578 - DNA, 25 bp, Homo sapien
tgtcgtcgtcaaggcaacgacctca

SEQ ID NO: 3294579 - DNA, 25 bp, Homo sapien
ctgtcgtcgtcaaggcaacgacctc

SEQ ID NO: 3294580 - DNA, 25 bp, Homo sapien
ttgggagacagatacggcccaggtc

SEQ ID NO: 3294581 - DNA, 25 bp, Homo sapien
atgcgttcacggcaggcaccaacac

SEQ ID NO: 3294582 - DNA, 25 bp, Homo sapien
tacggcccaggtcagaatgcgttca

SEQ ID NO: 3294583 - DNA, 25 bp, Homo sapien
ctgtccccaaccataggcacaaagt

SEQ ID NO: 3294584 - DNA, 25 bp, Homo sapien
ctcccagctcgtaaggcgcccagta

SEQ ID NO: 3294585 - DNA, 25 bp, Homo sapien
ctagagagcaattagctgggtgaga

SEQ ID NO: 3294586 - DNA, 25 bp, Homo sapien
tcccagctcgtaaggcgcccagtac

SEQ ID NO: 3294587 - DNA, 25 bp, Homo sapien
gccaagggctagagagcaattagct

SEQ ID NO: 3294588 - DNA, 25 bp, Homo sapien
caactacccctgggcgaaggcgttg

SEQ ID NO: 3294589 - DNA, 25 bp, Homo sapien
ctgggcgaaggcgttggccgcggag

SEQ ID NO: 3294590 - DNA, 25 bp, Homo sapien
ccgctccaactacccctgggcgaag

SEQ ID NO: 3294591 - DNA, 25 bp, Homo sapien
ctgggaacctgcaccgctccaacta

SEQ ID NO: 3294592 - DNA, 25 bp, Homo sapien
attggccgagccgagtcgtcacgag

SEQ ID NO: 3294593 - DNA, 25 bp, Homo sapien
cgagtcgtcacgagccatgattggc

SEQ ID NO: 3294594 - DNA, 25 bp, Homo sapien
ttcttctgattggccgagccgagtc

SEQ ID NO: 3294595 - DNA, 25 bp, Homo sapien
gagccgagtcgtcacgagccatgat

SEQ ID NO: 3294596 - DNA, 25 bp, Homo sapien
gattgtgatgcccacgcgaagggta

SEQ ID NO: 3294597 - DNA, 25 bp, Homo sapien
ggtttccctcatagcatcgccgctg

SEQ ID NO: 3294598 - DNA, 25 bp, Homo sapien
tatgcaaaatgcgatacggtttccc

SEQ ID NO: 3294599 - DNA, 25 bp, Homo sapien
ccttggttctcgtcaggaggcgcct

SEQ ID NO: 3294600 - DNA, 25 bp, Homo sapien
aatagatctcttacaatggtcaagt

SEQ ID NO: 3294601 - DNA, 25 bp, Homo sapien
aacccaactgcttattattcccact

SEQ ID NO: 3294602 - DNA, 25 bp, Homo sapien
tacaatggtcaagtgttacttaaat

SEQ ID NO: 3294603 - DNA, 25 bp, Homo sapien
cccacttagtttgtatgaaatgcaa

SEQ ID NO: 3294604 - DNA, 25 bp, Homo sapien
tccacagtactgcaggtgaacaatc

SEQ ID NO: 3294605 - DNA, 25 bp, Homo sapien
gtcttctatacctactaaagccaag

SEQ ID NO: 3294606 - DNA, 25 bp, Homo sapien
ccaatttggttgcaatagtgtcata

SEQ ID NO: 3294607 - DNA, 25 bp, Homo sapien
cacattcaatatggaaactcaaaga

SEQ ID NO: 3294608 - DNA, 25 bp, Homo sapien
agacttaaattcaggagccactcgg

SEQ ID NO: 3294609 - DNA, 25 bp, Homo sapien
gaaactggtatgtactgactgctcc

SEQ ID NO: 3294610 - DNA, 25 bp, Homo sapien
gaaactatgaaaatctgtgtcccca

SEQ ID NO: 3294611 - DNA, 25 bp, Homo sapien
gccagccatccctgtactgaagagg

SEQ ID NO: 3294612 - DNA, 25 bp, Homo sapien
gaattcagtgggcatgtccttttaa

SEQ ID NO: 3294613 - DNA, 25 bp, Homo sapien
taatgtaccactgccaagactttgc

SEQ ID NO: 3294614 - DNA, 25 bp, Homo sapien
tgagttcagagtacccattagtaca

SEQ ID NO: 3294615 - DNA, 25 bp, Homo sapien
tgtgttcccagcattaacaggcaga

SEQ ID NO: 3294616 - DNA, 25 bp, Homo sapien
gggacctcgatcattgcgcctaata

SEQ ID NO: 3294617 - DNA, 25 bp, Homo sapien
tcagcgacgctgtcctgtgaagcgg

SEQ ID NO: 3294618 - DNA, 25 bp, Homo sapien
gagccaagtttctgtgccatgccac

SEQ ID NO: 3294619 - DNA, 25 bp, Homo sapien
tgtgaagcggccctccatttgcccg

SEQ ID NO: 3294620 - DNA, 25 bp, Homo sapien
ttttgcaattaagattctctgaact

SEQ ID NO: 3294621 - DNA, 25 bp, Homo sapien
tggttcagagtcatcaaaaaccaca

SEQ ID NO: 3294622 - DNA, 25 bp, Homo sapien
tgatgcgaagttccacaacgtttcc

SEQ ID NO: 3294623 - DNA, 25 bp, Homo sapien
ccccaacacccttggtattgatgcg

SEQ ID NO: 3294624 - DNA, 25 bp, Homo sapien
tcatcaatatcatgtggcaagttac

SEQ ID NO: 3294625 - DNA, 25 bp, Homo sapien
caacaaaaagttgatgactatctgg

SEQ ID NO: 3294626 - DNA, 25 bp, Homo sapien
cagagtcattctgttccatatctcc

SEQ ID NO: 3294627 - DNA, 25 bp, Homo sapien
tatctggatagcgaattattctacg

SEQ ID NO: 3294628 - DNA, 25 bp, Homo sapien
tcttggtcctctaggaggaaaacca

SEQ ID NO: 3294629 - DNA, 25 bp, Homo sapien
cacgcacacgaggtggctgagattg

SEQ ID NO: 3294630 - DNA, 25 bp, Homo sapien
cgttctctaggtcgttgttcacgca

SEQ ID NO: 3294631 - DNA, 25 bp, Homo sapien
cttctggtttagcttcgactcttgg

SEQ ID NO: 3294632 - DNA, 25 bp, Homo sapien
agaaacagtaccactaggaggcagg

SEQ ID NO: 3294633 - DNA, 25 bp, Homo sapien
ggcaggtttttactggtcactgaag

SEQ ID NO: 3294634 - DNA, 25 bp, Homo sapien
gaagaaacagtaccactaggaggca

SEQ ID NO: 3294635 - DNA, 25 bp, Homo sapien
tgtgagactggtgctttaacatggg

SEQ ID NO: 3294636 - DNA, 25 bp, Homo sapien
caaacctagactactaatcatggaa

SEQ ID NO: 3294637 - DNA, 25 bp, Homo sapien
gcaacaaacctagactactaatcat

SEQ ID NO: 3294638 - DNA, 25 bp, Homo sapien
aaatgcaacaaacctagactactaa

SEQ ID NO: 3294639 - DNA, 25 bp, Homo sapien
aacaaacctagactactaatcatgg

SEQ ID NO: 3294640 - DNA, 25 bp, Homo sapien
acagcttctttcatatacataaaat

SEQ ID NO: 3294641 - DNA, 25 bp, Homo sapien
ctttcatatacataaaataatttac

SEQ ID NO: 3294642 - DNA, 25 bp, Homo sapien
tttaacataatagaaaaaggtcata

SEQ ID NO: 3294643 - DNA, 25 bp, Homo sapien
atttaacataatagaaaaaggtcat

SEQ ID NO: 3294644 - DNA, 25 bp, Homo sapien
ttcattaacagcaccaaatttgaac

SEQ ID NO: 3294645 - DNA, 25 bp, Homo sapien
taacagcaccaaatttgaacatgtg

SEQ ID NO: 3294646 - DNA, 25 bp, Homo sapien
ttgaacatgtgatgttgtaagtcta

SEQ ID NO: 3294647 - DNA, 25 bp, Homo sapien
gaacatgtgatgttgtaagtctaaa

SEQ ID NO: 3294648 - DNA, 25 bp, Homo sapien
caggttctgccggaggaggagtagt

SEQ ID NO: 3294649 - DNA, 25 bp, Homo sapien
gagtagtagatttctcctctagttc

SEQ ID NO: 3294650 - DNA, 25 bp, Homo sapien
ccggaggaggagtagtagatttctc

SEQ ID NO: 3294651 - DNA, 25 bp, Homo sapien
ctcctctagttcttctaagttcttc

SEQ ID NO: 3294652 - DNA, 25 bp, Homo sapien
agcattttcttgcacaggttcagga

SEQ ID NO: 3294653 - DNA, 25 bp, Homo sapien
agggtgagcttcatagtaaccactg

SEQ ID NO: 3294654 - DNA, 25 bp, Homo sapien
cattttcttgcacaggttcaggaga

SEQ ID NO: 3294655 - DNA, 25 bp, Homo sapien
gcttcatagtaaccactgttagcat

SEQ ID NO: 3294656 - DNA, 25 bp, Homo sapien
tacggcatagccacaacatagacag

SEQ ID NO: 3294657 - DNA, 25 bp, Homo sapien
gaaactaaccactgtacatcaatgg

SEQ ID NO: 3294658 - DNA, 25 bp, Homo sapien
tccataaagagtaccaacagaaccc

SEQ ID NO: 3294659 - DNA, 25 bp, Homo sapien
aagcagcaaatttccgtagatgtca

SEQ ID NO: 3294660 - DNA, 25 bp, Homo sapien
catcttcataacgaaacatatcatt

SEQ ID NO: 3294661 - DNA, 25 bp, Homo sapien
gttagacagcaaacccatgacctgg

SEQ ID NO: 3294662 - DNA, 25 bp, Homo sapien
ggagccagaacaaaggtttgcataa

SEQ ID NO: 3294663 - DNA, 25 bp, Homo sapien
actcaaggttgcatgagcatccaca

SEQ ID NO: 3294664 - DNA, 25 bp, Homo sapien
catgacctggacaactactccatca

SEQ ID NO: 3294665 - DNA, 25 bp, Homo sapien
ccatgaacataggaagaattcctgc

SEQ ID NO: 3294666 - DNA, 25 bp, Homo sapien
tcctggggctttccactagcatcta

SEQ ID NO: 3294667 - DNA, 25 bp, Homo sapien
ttttggccataaacagcttcctggg

SEQ ID NO: 3294668 - DNA, 25 bp, Homo sapien
actagcatctactccaccatgaaca

SEQ ID NO: 3294669 - DNA, 25 bp, Homo sapien
gaacctagtcagtctaacttgagag

SEQ ID NO: 3294670 - DNA, 25 bp, Homo sapien
gggcacccaagataagaacctagtc

SEQ ID NO: 3294671 - DNA, 25 bp, Homo sapien
tagtgttgcttaccacaagtggaaa

SEQ ID NO: 3294672 - DNA, 25 bp, Homo sapien
gaaaataactaactagcaacgtgca

SEQ ID NO: 3294673 - DNA, 25 bp, Homo sapien
aatgtgttatgtaccagaatatgac

SEQ ID NO: 3294674 - DNA, 25 bp, Homo sapien
taagaataagcgtgtgcatatatag

SEQ ID NO: 3294675 - DNA, 25 bp, Homo sapien
caaagatactgtcagataatgagga

SEQ ID NO: 3294676 - DNA, 25 bp, Homo sapien
cagtactttgggaatgcaagctgca

SEQ ID NO: 3294677 - DNA, 25 bp, Homo sapien
caagcagcggactgggcttctccat

SEQ ID NO: 3294678 - DNA, 25 bp, Homo sapien
atattgcctcacaaactcccgccct

SEQ ID NO: 3294679 - DNA, 25 bp, Homo sapien
taaatattccggagctttattcagc

SEQ ID NO: 3294680 - DNA, 25 bp, Homo sapien
ccggagctttattcagcaaagtata

SEQ ID NO: 3294681 - DNA, 25 bp, Homo sapien
aaagtcatctttgtcatcaaccacc

SEQ ID NO: 3294682 - DNA, 25 bp, Homo sapien
agcaaacacaagaataactattaaa

SEQ ID NO: 3294683 - DNA, 25 bp, Homo sapien
aaaaagtcatctttgtcatcaacca

SEQ ID NO: 3294684 - DNA, 25 bp, Homo sapien
gagcaaacacaagaataactattaa

SEQ ID NO: 3294685 - DNA, 25 bp, Homo sapien
tagcagtggggagttgtataccaat

SEQ ID NO: 3294686 - DNA, 25 bp, Homo sapien
gataacccactaccatcagactaac

SEQ ID NO: 3294687 - DNA, 25 bp, Homo sapien
tgataacccactaccatcagactaa

SEQ ID NO: 3294688 - DNA, 25 bp, Homo sapien
cagtggggagttgtataccaatttt

SEQ ID NO: 3294689 - DNA, 25 bp, Homo sapien
tccgaaggaacaaggtacaagagcc

SEQ ID NO: 3294690 - DNA, 25 bp, Homo sapien
tgcacagaaatggtgcccggaggcc

SEQ ID NO: 3294691 - DNA, 25 bp, Homo sapien
cacgacggaacactaggtactgggt

SEQ ID NO: 3294692 - DNA, 25 bp, Homo sapien
gaaggcgcacgttacagttccagta

SEQ ID NO: 3294693 - DNA, 25 bp, Homo sapien
tagggagccggcaagaacaatgtct

SEQ ID NO: 3294694 - DNA, 25 bp, Homo sapien
gactggtcttctctcacgcacacac

SEQ ID NO: 3294695 - DNA, 25 bp, Homo sapien
gaacaatgtctctgccgctacacct

SEQ ID NO: 3294696 - DNA, 25 bp, Homo sapien
acgcacacacggcaccgtagggagc

SEQ ID NO: 3294697 - DNA, 25 bp, Homo sapien
cggcgggtacgtcgcgcggaggtca

SEQ ID NO: 3294698 - DNA, 25 bp, Homo sapien
gtgcggcgggttcttattgctcgcc

SEQ ID NO: 3294699 - DNA, 25 bp, Homo sapien
ctcggaagccggagagccgcgagtt

SEQ ID NO: 3294700 - DNA, 25 bp, Homo sapien
tccgacaactcggaagcctcggaag

SEQ ID NO: 3294701 - DNA, 25 bp, Homo sapien
tgcgacaaggaccacggacgtcccg

SEQ ID NO: 3294702 - DNA, 25 bp, Homo sapien
cgacgtgcgacaaggaccacggacg

SEQ ID NO: 3294703 - DNA, 25 bp, Homo sapien
ctgcgacgtgcgacaaggaccacgg

SEQ ID NO: 3294704 - DNA, 25 bp, Homo sapien
acgtgcgacaaggaccacggacgtc

SEQ ID NO: 3294705 - DNA, 25 bp, Homo sapien
cccgagcacagcgtcagccaatcac

SEQ ID NO: 3294706 - DNA, 25 bp, Homo sapien
agcacagcgtcagccaatcacgcat

SEQ ID NO: 3294707 - DNA, 25 bp, Homo sapien
caatcacgcatctcctccagagccg

SEQ ID NO: 3294708 - DNA, 25 bp, Homo sapien
agggaacccccgagcacagcgtcag

SEQ ID NO: 3294709 - DNA, 25 bp, Homo sapien
ttcctgatcgcgcaagcgagagctg

SEQ ID NO: 3294710 - DNA, 25 bp, Homo sapien
gatttgacgtcacaagcaggctgcc

SEQ ID NO: 3294711 - DNA, 25 bp, Homo sapien
caacgcagtgtcttttgtagactga

SEQ ID NO: 3294712 - DNA, 25 bp, Homo sapien
gaaccggcctaaagccaagataaga

SEQ ID NO: 3294713 - DNA, 25 bp, Homo sapien
gaaggagggaatttagtaatctctc

SEQ ID NO: 3294714 - DNA, 25 bp, Homo sapien
ggagggaatttagtaatctctctga

SEQ ID NO: 3294715 - DNA, 25 bp, Homo sapien
tctctctgaataggtgtctgcaggt

SEQ ID NO: 3294716 - DNA, 25 bp, Homo sapien
ttagtaatctctctgaataggtgtc

SEQ ID NO: 3294717 - DNA, 25 bp, Homo sapien
gccagtccctcatgcagggtccgca

SEQ ID NO: 3294718 - DNA, 25 bp, Homo sapien
ccagtccctcatgcagggtccgcat

SEQ ID NO: 3294719 - DNA, 25 bp, Homo sapien
ggcctcaaatagcacattgataagt

SEQ ID NO: 3294720 - DNA, 25 bp, Homo sapien
aatagtaggtgtggaaggcctcaaa

SEQ ID NO: 3294721 - DNA, 25 bp, Homo sapien
cattgataagtttggactgtggcct

SEQ ID NO: 3294722 - DNA, 25 bp, Homo sapien
tgaagtacaaggtacctgaaggtac

SEQ ID NO: 3294723 - DNA, 25 bp, Homo sapien
cagatggcactagcagacaggatgg

SEQ ID NO: 3294724 - DNA, 25 bp, Homo sapien
gactgcgacatcacatccagaagta

SEQ ID NO: 3294725 - DNA, 25 bp, Homo sapien
gatttggacaggaagcgataaggac

SEQ ID NO: 3294726 - DNA, 25 bp, Homo sapien
gatgggctaaagactgcgacatcac

SEQ ID NO: 3294727 - DNA, 25 bp, Homo sapien
ggtccctctagattacgatcactgg

SEQ ID NO: 3294728 - DNA, 25 bp, Homo sapien
caattatcttgaactataagggagg

SEQ ID NO: 3294729 - DNA, 25 bp, Homo sapien
gttcttacaactgacaagaggaaag

SEQ ID NO: 3294730 - DNA, 25 bp, Homo sapien
gtgagattttactgccaactggtat

SEQ ID NO: 3294731 - DNA, 25 bp, Homo sapien
tcttcctctgaaataaggagtctat

SEQ ID NO: 3294732 - DNA, 25 bp, Homo sapien
tgaaagccagaagtattaacagtgc

SEQ ID NO: 3294733 - DNA, 25 bp, Homo sapien
agtcaggccgtcacaatttgttcaa

SEQ ID NO: 3294734 - DNA, 25 bp, Homo sapien
ggactcttatcctgaatgcttagat

SEQ ID NO: 3294735 - DNA, 25 bp, Homo sapien
gcagggaaaattcatagtaagctgt

SEQ ID NO: 3294736 - DNA, 25 bp, Homo sapien
tactcactgaagtacagtaacctac

SEQ ID NO: 3294737 - DNA, 25 bp, Homo sapien
aagaaaacaggtcaaatgcagggaa

SEQ ID NO: 3294738 - DNA, 25 bp, Homo sapien
cactcacgaaagtatagtaacctac

SEQ ID NO: 3294739 - DNA, 25 bp, Homo sapien
ccttaaggaattagcaggagtttgc

SEQ ID NO: 3294740 - DNA, 25 bp, Homo sapien
caccttttatgagacagtggtaagc

SEQ ID NO: 3294741 - DNA, 25 bp, Homo sapien
caagaatgatgtcagagttgagcct

SEQ ID NO: 3294742 - DNA, 25 bp, Homo sapien
taacaggcctgtatgacaaactaag

SEQ ID NO: 3294743 - DNA, 25 bp, Homo sapien
gtggtactactgagcacggcacgca

SEQ ID NO: 3294744 - DNA, 25 bp, Homo sapien
gtactgacaacctcactgccaaagg

SEQ ID NO: 3294745 - DNA, 25 bp, Homo sapien
tatgttactcgccaaactgacacag

SEQ ID NO: 3294746 - DNA, 25 bp, Homo sapien
gacctgtgctttttagcctcaagaa

SEQ ID NO: 3294747 - DNA, 25 bp, Homo sapien
tggtgtttagatctaggaattcctt

SEQ ID NO: 3294748 - DNA, 25 bp, Homo sapien
tttgatagcttgcagtaagtcccgc

SEQ ID NO: 3294749 - DNA, 25 bp, Homo sapien
gcttcggcggaacctagctaagagg

SEQ ID NO: 3294750 - DNA, 25 bp, Homo sapien
ccctgcaagtcgaaacgcgtagtct

SEQ ID NO: 3294751 - DNA, 25 bp, Homo sapien
tggcgacgattaaacaccctgcaag

SEQ ID NO: 3294752 - DNA, 25 bp, Homo sapien
cagcacacagaagccgagacggtga

SEQ ID NO: 3294753 - DNA, 25 bp, Homo sapien
gacggtgagaggagcagcgggtctg

SEQ ID NO: 3294754 - DNA, 25 bp, Homo sapien
gatgaatttcctccgcggggtaatg

SEQ ID NO: 3294755 - DNA, 25 bp, Homo sapien
gggtcagagtgccggaccccagcac

SEQ ID NO: 3294756 - DNA, 25 bp, Homo sapien
tctgtaggccctgaagctcgggcta

SEQ ID NO: 3294757 - DNA, 25 bp, Homo sapien
tctgcactggccgagaggagcctga

SEQ ID NO: 3294758 - DNA, 25 bp, Homo sapien
gctcgggctaggagagtggtccgca

SEQ ID NO: 3294759 - DNA, 25 bp, Homo sapien
tttctctttcgctcgtctgcactgg

SEQ ID NO: 3294760 - DNA, 25 bp, Homo sapien
catttggcaaatgctaccttgaacg

SEQ ID NO: 3294761 - DNA, 25 bp, Homo sapien
tcaactggaagagcggtcgttctgc

SEQ ID NO: 3294762 - DNA, 25 bp, Homo sapien
tatttgttcagatccggcttttcgg

SEQ ID NO: 3294763 - DNA, 25 bp, Homo sapien
aacgtagtagggatcttaagcgctc

SEQ ID NO: 3294764 - DNA, 25 bp, Homo sapien
ctttttcattgatgtgtttggagat

SEQ ID NO: 3294765 - DNA, 25 bp, Homo sapien
ttcattgatgtgtttggagatcttt

SEQ ID NO: 3294766 - DNA, 25 bp, Homo sapien
ttttcattgatgtgtttggagatct

SEQ ID NO: 3294767 - DNA, 25 bp, Homo sapien
cattgatgtgtttggagatctttcc

SEQ ID NO: 3294768 - DNA, 25 bp, Homo sapien
tgtgtatgaccttttatcctgcaac

SEQ ID NO: 3294769 - DNA, 25 bp, Homo sapien
tatggcactgactaggatcttcagg

SEQ ID NO: 3294770 - DNA, 25 bp, Homo sapien
tgtaagtagcacacacctattgtca

SEQ ID NO: 3294771 - DNA, 25 bp, Homo sapien
tgatgagattggacattcttgcctc

SEQ ID NO: 3294772 - DNA, 25 bp, Homo sapien
tatacaatgggatgttatttagcaa

SEQ ID NO: 3294773 - DNA, 25 bp, Homo sapien
ccatgaaaggacataaaggaaccat

SEQ ID NO: 3294774 - DNA, 25 bp, Homo sapien
aaggaaccataaaggcatattgctg

SEQ ID NO: 3294775 - DNA, 25 bp, Homo sapien
taggatttagggacaccaatgcccc

SEQ ID NO: 3294776 - DNA, 25 bp, Homo sapien
caggtatattgcttgagtataggag

SEQ ID NO: 3294777 - DNA, 25 bp, Homo sapien
aaatgtatacttaagccaggcgtgg

SEQ ID NO: 3294778 - DNA, 25 bp, Homo sapien
caaggcaggtatattgcttgagtat

SEQ ID NO: 3294779 - DNA, 25 bp, Homo sapien
aaataatctaattgtactcattaag

SEQ ID NO: 3294780 - DNA, 25 bp, Homo sapien
tctgaaaagaggtgtgtacttttcc

SEQ ID NO: 3294781 - DNA, 25 bp, Homo sapien
cctcaatggttcacacactctaggg

SEQ ID NO: 3294782 - DNA, 25 bp, Homo sapien
ttaaggaatttactaggccaggcat

SEQ ID NO: 3294783 - DNA, 25 bp, Homo sapien
cctatatgttaacactttggaagct

SEQ ID NO: 3294784 - DNA, 25 bp, Homo sapien
acttggcagctgttaatggtttggg

SEQ ID NO: 3294785 - DNA, 25 bp, Homo sapien
gcagcctgtggtgcatacaataatt

SEQ ID NO: 3294786 - DNA, 25 bp, Homo sapien
tgttcattttaggaagtgcagcctg

SEQ ID NO: 3294787 - DNA, 25 bp, Homo sapien
tatgcctctgaacatgaatcagttc

SEQ ID NO: 3294788 - DNA, 25 bp, Homo sapien
tttccttggatctcttaagccagaa

SEQ ID NO: 3294789 - DNA, 25 bp, Homo sapien
tcacctcattgcctgtgcgacagag

SEQ ID NO: 3294790 - DNA, 25 bp, Homo sapien
taagattttacaggatgggccaggc

SEQ ID NO: 3294791 - DNA, 25 bp, Homo sapien
gaacttttacaaagccagctgactg

SEQ ID NO: 3294792 - DNA, 25 bp, Homo sapien
gataggacagcttagaatgagtgcc

SEQ ID NO: 3294793 - DNA, 25 bp, Homo sapien
aagaagccgaaggatgctgacacac

SEQ ID NO: 3294794 - DNA, 25 bp, Homo sapien
taaaagcaagatagcctgggttggg

SEQ ID NO: 3294795 - DNA, 25 bp, Homo sapien
ggagttagtgcatatcatcagccct

SEQ ID NO: 3294796 - DNA, 25 bp, Homo sapien
aaggtctcactctgataagaacaga

SEQ ID NO: 3294797 - DNA, 25 bp, Homo sapien
cttagccaaaaggccaagaagcgat

SEQ ID NO: 3294798 - DNA, 25 bp, Homo sapien
tactacacttgatcttagccaaaag

SEQ ID NO: 3294799 - DNA, 25 bp, Homo sapien
gatcttagccaaaaggccaagaagc

SEQ ID NO: 3294800 - DNA, 25 bp, Homo sapien
cacacagcatggttgagagctctca

SEQ ID NO: 3294801 - DNA, 25 bp, Homo sapien
aaactttcatcaacatccggtacag

SEQ ID NO: 3294802 - DNA, 25 bp, Homo sapien
tcagcggctgttggtagtagtgaca

SEQ ID NO: 3294803 - DNA, 25 bp, Homo sapien
gggaataatctctcactagcctgag

SEQ ID NO: 3294804 - DNA, 25 bp, Homo sapien
ggagggcctgtctttagccagaaca

SEQ ID NO: 3294805 - DNA, 25 bp, Homo sapien
aatgctccctatttaggctggaggg

SEQ ID NO: 3294806 - DNA, 25 bp, Homo sapien
gaagacaggcatccagtggcaaagc

SEQ ID NO: 3294807 - DNA, 25 bp, Homo sapien
cactcccagggtgtaatgaagacag

SEQ ID NO: 3294808 - DNA, 25 bp, Homo sapien
tcttggctacatgtgctgaacatgc

SEQ ID NO: 3294809 - DNA, 25 bp, Homo sapien
gtggcgcgatctcaagctccgcctc

SEQ ID NO: 3294810 - DNA, 25 bp, Homo sapien
aagttcttggctacatgtgctgaac

SEQ ID NO: 3294811 - DNA, 25 bp, Homo sapien
ttggctacatgtgctgaacatgcag

SEQ ID NO: 3294812 - DNA, 25 bp, Homo sapien
aactttcctttaccaatagacattg

SEQ ID NO: 3294813 - DNA, 25 bp, Homo sapien
aatcgcctgggaggcggactttgcg

SEQ ID NO: 3294814 - DNA, 25 bp, Homo sapien
tatgcttgggtcatggaattacaat

SEQ ID NO: 3294815 - DNA, 25 bp, Homo sapien
tataaacactacagtaacaagtaag

SEQ ID NO: 3294816 - DNA, 25 bp, Homo sapien
gcatatggataggtaaattttcagc

SEQ ID NO: 3294817 - DNA, 25 bp, Homo sapien
cactgaaatacacaggtgattctga

SEQ ID NO: 3294818 - DNA, 25 bp, Homo sapien
gaagctgagcattgcctatgaggca

SEQ ID NO: 3294819 - DNA, 25 bp, Homo sapien
taagggagatagtctagtgagaagc

SEQ ID NO: 3294820 - DNA, 25 bp, Homo sapien
gcattctgaggcatcgccctctggg

SEQ ID NO: 3294821 - DNA, 25 bp, Homo sapien
catttgtagcttgtgggcattctga

SEQ ID NO: 3294822 - DNA, 25 bp, Homo sapien
caatgctccgagcaaggtcacagat

SEQ ID NO: 3294823 - DNA, 25 bp, Homo sapien
gcaggatttctccacaaggcggaag

SEQ ID NO: 3294824 - DNA, 25 bp, Homo sapien
ctgaactcgtccagtgagatgaacc

SEQ ID NO: 3294825 - DNA, 25 bp, Homo sapien
tctggaccccatacatctatagtca

SEQ ID NO: 3294826 - DNA, 25 bp, Homo sapien
ataaataaaggccagacatgctgcc

SEQ ID NO: 3294827 - DNA, 25 bp, Homo sapien
tacaagggtcccaagatcatttaat

SEQ ID NO: 3294828 - DNA, 25 bp, Homo sapien
tgagaaaccctgcatttaatcatct

SEQ ID NO: 3294829 - DNA, 25 bp, Homo sapien
gtttccagcaaacttgattgtatgt

SEQ ID NO: 3294830 - DNA, 25 bp, Homo sapien
tcactgtctatgatcctaaaaatgg

SEQ ID NO: 3294831 - DNA, 25 bp, Homo sapien
cggtttcgatacaatgtttccagca

SEQ ID NO: 3294832 - DNA, 25 bp, Homo sapien
ggtctctaggttggatcggtttcga

SEQ ID NO: 3294833 - DNA, 25 bp, Homo sapien
tagcccaaggttgcacatacgttac

SEQ ID NO: 3294834 - DNA, 25 bp, Homo sapien
tagtcgttctatgacctcaggcaag

SEQ ID NO: 3294835 - DNA, 25 bp, Homo sapien
tgggcagtgtcctcatacgtgtaat

SEQ ID NO: 3294836 - DNA, 25 bp, Homo sapien
aatgggccttgaggtaagacagacc

SEQ ID NO: 3294837 - DNA, 25 bp, Homo sapien
gcgactcagttgttccttggccaag

SEQ ID NO: 3294838 - DNA, 25 bp, Homo sapien
tcagccaagacttgtactccagcat

SEQ ID NO: 3294839 - DNA, 25 bp, Homo sapien
ctcgcgactcagttgttccttggcc

SEQ ID NO: 3294840 - DNA, 25 bp, Homo sapien
tggccaagttcttcagccaagactt

SEQ ID NO: 3294841 - DNA, 25 bp, Homo sapien
aggtgcaacacagactccaccgctg

SEQ ID NO: 3294842 - DNA, 25 bp, Homo sapien
ctaggtgcaacacagactccaccgc

SEQ ID NO: 3294843 - DNA, 25 bp, Homo sapien
tgcccagtcactcaaggtgattaaa

SEQ ID NO: 3294844 - DNA, 25 bp, Homo sapien
ctgcccagtcactcaaggtgattaa

SEQ ID NO: 3294845 - DNA, 25 bp, Homo sapien
taacctgttgccttgtcacctagaa

SEQ ID NO: 3294846 - DNA, 25 bp, Homo sapien
tacaggtgagagctaacctgttgcc

SEQ ID NO: 3294847 - DNA, 25 bp, Homo sapien
gtaatagaaataatgggcactgtca

SEQ ID NO: 3294848 - DNA, 25 bp, Homo sapien
tgacatccttcttactatctgcagg

SEQ ID NO: 3294849 - DNA, 25 bp, Homo sapien
tagcagagttggctggaagctaggc

SEQ ID NO: 3294850 - DNA, 25 bp, Homo sapien
acagcttctccctcagagctctcag

SEQ ID NO: 3294851 - DNA, 25 bp, Homo sapien
cgactttatctgcatcatgcttctt

SEQ ID NO: 3294852 - DNA, 25 bp, Homo sapien
gcttctccctcagagctctcagagc

SEQ ID NO: 3294853 - DNA, 25 bp, Homo sapien
tctgcatcatgcttcttaaattcac

SEQ ID NO: 3294854 - DNA, 25 bp, Homo sapien
gagatgaaaagcgacattttaacac

SEQ ID NO: 3294855 - DNA, 25 bp, Homo sapien
agatgaaaagcgacattttaacaca

SEQ ID NO: 3294856 - DNA, 25 bp, Homo sapien
ggagatgaaaagcgacattttaaca

SEQ ID NO: 3294857 - DNA, 25 bp, Homo sapien
tcatgctactataccctggccttgg

SEQ ID NO: 3294858 - DNA, 25 bp, Homo sapien
tactaaatgcagagctctacatgga

SEQ ID NO: 3294859 - DNA, 25 bp, Homo sapien
tatcagaggctaacagaagtatggg

SEQ ID NO: 3294860 - DNA, 25 bp, Homo sapien
gaggtcacatagctaccaaggagtg

SEQ ID NO: 3294861 - DNA, 25 bp, Homo sapien
gatctcttaagactagcaggtcgag

SEQ ID NO: 3294862 - DNA, 25 bp, Homo sapien
tctcttaagactagcaggtcgaggc

SEQ ID NO: 3294863 - DNA, 25 bp, Homo sapien
ggatctcttaagactagcaggtcga

SEQ ID NO: 3294864 - DNA, 25 bp, Homo sapien
aggatctcttaagactagcaggtcg

SEQ ID NO: 3294865 - DNA, 25 bp, Homo sapien
ccttcactcaaggactagctgtgtg

SEQ ID NO: 3294866 - DNA, 25 bp, Homo sapien
gaggccatcttcgttgtaggaggca

SEQ ID NO: 3294867 - DNA, 25 bp, Homo sapien
taaatttactgtgaggctacccata

SEQ ID NO: 3294868 - DNA, 25 bp, Homo sapien
cttttacagcactcacacaagggta

SEQ ID NO: 3294869 - DNA, 25 bp, Homo sapien
ctttgcctcatggtgagtgtgtggg

SEQ ID NO: 3294870 - DNA, 25 bp, Homo sapien
tgcctcatggtgagtgtgtgggtca

SEQ ID NO: 3294871 - DNA, 25 bp, Homo sapien
ttgcctcatggtgagtgtgtgggtc

SEQ ID NO: 3294872 - DNA, 25 bp, Homo sapien
gcctcatggtgagtgtgtgggtcac

SEQ ID NO: 3294873 - DNA, 25 bp, Homo sapien
gccccagtttgacataggcccctct

SEQ ID NO: 3294874 - DNA, 25 bp, Homo sapien
tctacggaatgttgtggctcctcag

SEQ ID NO: 3294875 - DNA, 25 bp, Homo sapien
tcaacttagaggcaagctgggtctg

SEQ ID NO: 3294876 - DNA, 25 bp, Homo sapien
tgagcccttcggactactttggtga

SEQ ID NO: 3294877 - DNA, 25 bp, Homo sapien
cattggtggacagtggccttaatca

SEQ ID NO: 3294878 - DNA, 25 bp, Homo sapien
tgttgtgtcacatcaggcccaaaat

SEQ ID NO: 3294879 - DNA, 25 bp, Homo sapien
tgtgaacggatcaggaattgcatgt

SEQ ID NO: 3294880 - DNA, 25 bp, Homo sapien
tgtgacagaattcatagccttcagg

SEQ ID NO: 3294881 - DNA, 25 bp, Homo sapien
tcgaatagtgttggccttgcagccc

SEQ ID NO: 3294882 - DNA, 25 bp, Homo sapien
tgggccttgtaggagccaagccgaa

SEQ ID NO: 3294883 - DNA, 25 bp, Homo sapien
tctttctctccggtcaccaggaggc

SEQ ID NO: 3294884 - DNA, 25 bp, Homo sapien
actcctcctgagtgggcttccgcag

SEQ ID NO: 3294885 - DNA, 25 bp, Homo sapien
aaaccatgggatgggtccctgtgca

SEQ ID NO: 3294886 - DNA, 25 bp, Homo sapien
taagtggcacgaattctgatcaggg

SEQ ID NO: 3294887 - DNA, 25 bp, Homo sapien
gacactccttgccacagggaattga

SEQ ID NO: 3294888 - DNA, 25 bp, Homo sapien
gacaaggataggaaagggcaactct

SEQ ID NO: 3294889 - DNA, 25 bp, Homo sapien
cacagagcagattgtagcagcgagc

SEQ ID NO: 3294890 - DNA, 25 bp, Homo sapien
caacaattgcctattccagggttca

SEQ ID NO: 3294891 - DNA, 25 bp, Homo sapien
ggtggcagagtaacaagaaacctgg

SEQ ID NO: 3294892 - DNA, 25 bp, Homo sapien
ttagaattgcccaaagctgaagtag

SEQ ID NO: 3294893 - DNA, 25 bp, Homo sapien
gctggcctccgactctcagagtgct

SEQ ID NO: 3294894 - DNA, 25 bp, Homo sapien
aatgaaactgggcattatggtgaaa

SEQ ID NO: 3294895 - DNA, 25 bp, Homo sapien
tatattggcaatgaaactgggcatt

SEQ ID NO: 3294896 - DNA, 25 bp, Homo sapien
aactgggcattatggtgaaatttgt

SEQ ID NO: 3294897 - DNA, 25 bp, Homo sapien
ttatattggcaatgaaactgggcat

SEQ ID NO: 3294898 - DNA, 25 bp, Homo sapien
cccaccatgaagaattagaactttc

SEQ ID NO: 3294899 - DNA, 25 bp, Homo sapien
tcttgcagggttcttagtatttcct

SEQ ID NO: 3294900 - DNA, 25 bp, Homo sapien
gtccaaaagctccagatcagttatg

SEQ ID NO: 3294901 - DNA, 25 bp, Homo sapien
ttctcatctatcagagtggccagtg

SEQ ID NO: 3294902 - DNA, 25 bp, Homo sapien
tcatcacttccttggtgaagccata

SEQ ID NO: 3294903 - DNA, 25 bp, Homo sapien
ttattcatcacttccttggtgaagc

SEQ ID NO: 3294904 - DNA, 25 bp, Homo sapien
cttgtatttattcatcacttccttg

SEQ ID NO: 3294905 - DNA, 25 bp, Homo sapien
atttattcatcacttccttggtgaa

SEQ ID NO: 3294906 - DNA, 25 bp, Homo sapien
gatccacaaagtcaccgttgaacac

SEQ ID NO: 3294907 - DNA, 25 bp, Homo sapien
tcaccgttgaacacatatgaccgtt

SEQ ID NO: 3294908 - DNA, 25 bp, Homo sapien
ttgcctcgatccacaaagtcaccgt

SEQ ID NO: 3294909 - DNA, 25 bp, Homo sapien
tgaatccttgcctcgatccacaaag

SEQ ID NO: 3294910 - DNA, 25 bp, Homo sapien
taaggagccaatgggacaaagctac

SEQ ID NO: 3294911 - DNA, 25 bp, Homo sapien
taccctctgtgggattttgactgaa

SEQ ID NO: 3294912 - DNA, 25 bp, Homo sapien
tgctcagtaccaacccgcaggttca

SEQ ID NO: 3294913 - DNA, 25 bp, Homo sapien
tgaatgcctctaagtcagaatcccg

SEQ ID NO: 3294914 - DNA, 25 bp, Homo sapien
caggatttcgcactgagcagagcag

SEQ ID NO: 3294915 - DNA, 25 bp, Homo sapien
ttctgggtcaggatttcgcactgag

SEQ ID NO: 3294916 - DNA, 25 bp, Homo sapien
tccctcgctgtgatctactgaaagt

SEQ ID NO: 3294917 - DNA, 25 bp, Homo sapien
cgctgtgatctactgaaagtcagcc

SEQ ID NO: 3294918 - DNA, 25 bp, Homo sapien
gattaagtcatccaattggccatgt

SEQ ID NO: 3294919 - DNA, 25 bp, Homo sapien
aaaatataaagattaagtcatccaa

SEQ ID NO: 3294920 - DNA, 25 bp, Homo sapien
taaagattaagtcatccaattggcc

SEQ ID NO: 3294921 - DNA, 25 bp, Homo sapien
agtcatccaattggccatgtaagtc

SEQ ID NO: 3294922 - DNA, 25 bp, Homo sapien
tgtgatctcctcactgtaacaggtt

SEQ ID NO: 3294923 - DNA, 25 bp, Homo sapien
tcatacaaaaggttcaagacgtagc

SEQ ID NO: 3294924 - DNA, 25 bp, Homo sapien
gagacccggttgatgtttggcagct

SEQ ID NO: 3294925 - DNA, 25 bp, Homo sapien
aggttcaagacgtagcgagcatgga

SEQ ID NO: 3294926 - DNA, 25 bp, Homo sapien
ccgtgtaactgtcgggtacctctat

SEQ ID NO: 3294927 - DNA, 25 bp, Homo sapien
cctctatggattcatagtcactgca

SEQ ID NO: 3294928 - DNA, 25 bp, Homo sapien
agaggcgtggccccgtgtaactgtc

SEQ ID NO: 3294929 - DNA, 25 bp, Homo sapien
ttctaccagggcagttgcatggtca

SEQ ID NO: 3294930 - DNA, 25 bp, Homo sapien
gtgaatatgcgggtcaggaagtccc

SEQ ID NO: 3294931 - DNA, 25 bp, Homo sapien
agtgaatatgcgggtcaggaagtcc

SEQ ID NO: 3294932 - DNA, 25 bp, Homo sapien
ctcagtgaatatgcgggtcaggaag

SEQ ID NO: 3294933 - DNA, 25 bp, Homo sapien
gtcctcagtgaatatgcgggtcagg

SEQ ID NO: 3294934 - DNA, 25 bp, Homo sapien
ggaaagccagtgtggaaaaatcaca

SEQ ID NO: 3294935 - DNA, 25 bp, Homo sapien
tagtgagcgcaacaggtgcatcaga

SEQ ID NO: 3294936 - DNA, 25 bp, Homo sapien
ctggatttgcaagcagaaggaaagg

SEQ ID NO: 3294937 - DNA, 25 bp, Homo sapien
cacaggtatttatgttgcatttagt

SEQ ID NO: 3294938 - DNA, 25 bp, Homo sapien
tgccagcattggcatctccagactg

SEQ ID NO: 3294939 - DNA, 25 bp, Homo sapien
tatttcctggatccggatggcaggc

SEQ ID NO: 3294940 - DNA, 25 bp, Homo sapien
ccagcattggcatctccagactgag

SEQ ID NO: 3294941 - DNA, 25 bp, Homo sapien
aggacttatttcctggatccggatg

SEQ ID NO: 3294942 - DNA, 25 bp, Homo sapien
gtaatctatggccttgcgacaggag

SEQ ID NO: 3294943 - DNA, 25 bp, Homo sapien
gccttgcgacaggaggacatgacat

SEQ ID NO: 3294944 - DNA, 25 bp, Homo sapien
tatggccttgcgacaggaggacatg

SEQ ID NO: 3294945 - DNA, 25 bp, Homo sapien
cgacaggaggacatgacatgtggca

SEQ ID NO: 3294946 - DNA, 25 bp, Homo sapien
tgatccatgagatagctgaagaagt

SEQ ID NO: 3294947 - DNA, 25 bp, Homo sapien
aagtgatccatgagatagctgaaga

SEQ ID NO: 3294948 - DNA, 25 bp, Homo sapien
tgaagtgatccatgagatagctgaa

SEQ ID NO: 3294949 - DNA, 25 bp, Homo sapien
atccatgagatagctgaagaagtca

SEQ ID NO: 3294950 - DNA, 25 bp, Homo sapien
agcaggaggcggctccgtcccacat

SEQ ID NO: 3294951 - DNA, 25 bp, Homo sapien
agccctgctgcccaagggagagcag

SEQ ID NO: 3294952 - DNA, 25 bp, Homo sapien
gggagagcaggaggcggctccgtcc

SEQ ID NO: 3294953 - DNA, 25 bp, Homo sapien
tttaggagcacccgagccctgctgc

SEQ ID NO: 3294954 - DNA, 25 bp, Homo sapien
gcccagcatattctatagactggaa

SEQ ID NO: 3294955 - DNA, 25 bp, Homo sapien
cttgacttggtcttgctgcccagca

SEQ ID NO: 3294956 - DNA, 25 bp, Homo sapien
gcgggccacgtagcgccggtaccat

SEQ ID NO: 3294957 - DNA, 25 bp, Homo sapien
gtaccatctctggatcagggctgct

SEQ ID NO: 3294958 - DNA, 25 bp, Homo sapien
aagcaagcctgtgagctcggactcc

SEQ ID NO: 3294959 - DNA, 25 bp, Homo sapien
gagctggcctgaggagaaatttaag

SEQ ID NO: 3294960 - DNA, 25 bp, Homo sapien
taagagctggcctgaggagaaattt

SEQ ID NO: 3294961 - DNA, 25 bp, Homo sapien
ctggcctgaggagaaatttaagggt

SEQ ID NO: 3294962 - DNA, 25 bp, Homo sapien
ctaagagctggcctgaggagaaatt

SEQ ID NO: 3294963 - DNA, 25 bp, Homo sapien
tccatgcaatatgggctttgtggta

SEQ ID NO: 3294964 - DNA, 25 bp, Homo sapien
tctccatgcaatatgggctttgtgg

SEQ ID NO: 3294965 - DNA, 25 bp, Homo sapien
atgcaatatgggctttgtggtaccc

SEQ ID NO: 3294966 - DNA, 25 bp, Homo sapien
cctctccatgcaatatgggctttgt

SEQ ID NO: 3294967 - DNA, 25 bp, Homo sapien
gatgttgggtggaggtgccgcttcc

SEQ ID NO: 3294968 - DNA, 25 bp, Homo sapien
gttgggtggaggtgccgcttcccat

SEQ ID NO: 3294969 - DNA, 25 bp, Homo sapien
tgatgttgggtggaggtgccgcttc

SEQ ID NO: 3294970 - DNA, 25 bp, Homo sapien
atgttgggtggaggtgccgcttccc

SEQ ID NO: 3294971 - DNA, 25 bp, Homo sapien
cagcagatccagaggacagtgagct

SEQ ID NO: 3294972 - DNA, 25 bp, Homo sapien
gatccagaggacagtgagctgtttg

SEQ ID NO: 3294973 - DNA, 25 bp, Homo sapien
gcaggacgcagcagatccagaggac

SEQ ID NO: 3294974 - DNA, 25 bp, Homo sapien
gacgcagcagatccagaggacagtg

SEQ ID NO: 3294975 - DNA, 25 bp, Homo sapien
tttcctgatgcctctaatgtcttca

SEQ ID NO: 3294976 - DNA, 25 bp, Homo sapien
tcactattgatcaaagcctttcctg

SEQ ID NO: 3294977 - DNA, 25 bp, Homo sapien
ttcctgatgcctctaatgtcttcat

SEQ ID NO: 3294978 - DNA, 25 bp, Homo sapien
ctattgatcaaagcctttcctgatg

SEQ ID NO: 3294979 - DNA, 25 bp, Homo sapien
ccagaacagcaaggccatctgtctc

SEQ ID NO: 3294980 - DNA, 25 bp, Homo sapien
agaacagcaaggccatctgtctcca

SEQ ID NO: 3294981 - DNA, 25 bp, Homo sapien
gaacagcaaggccatctgtctccat

SEQ ID NO: 3294982 - DNA, 25 bp, Homo sapien
cagaacagcaaggccatctgtctcc

SEQ ID NO: 3294983 - DNA, 25 bp, Homo sapien
tctttaacatgcaggcgtgatcccc

SEQ ID NO: 3294984 - DNA, 25 bp, Homo sapien
gaaggtgcagccctagtctgccatg

SEQ ID NO: 3294985 - DNA, 25 bp, Homo sapien
tttaccatgagacacaacaaggcag

SEQ ID NO: 3294986 - DNA, 25 bp, Homo sapien
cttcagagttggctgagggatccca

SEQ ID NO: 3294987 - DNA, 25 bp, Homo sapien
tgtagttaaaccacgtgacactgtt

SEQ ID NO: 3294988 - DNA, 25 bp, Homo sapien
attcaatatctggacacattgtagt

SEQ ID NO: 3294989 - DNA, 25 bp, Homo sapien
ccaagcaggcttaaacaaaattcaa

SEQ ID NO: 3294990 - DNA, 25 bp, Homo sapien
caacaaatcccaagcaggcttaaac

SEQ ID NO: 3294991 - DNA, 25 bp, Homo sapien
caagggcggagaggatattacaaag

SEQ ID NO: 3294992 - DNA, 25 bp, Homo sapien
ggagttcggagcaattttttgcagg

SEQ ID NO: 3294993 - DNA, 25 bp, Homo sapien
gaggcctgacaatcacctgatgggt

SEQ ID NO: 3294994 - DNA, 25 bp, Homo sapien
ggagggtgtcttgtcacaaagtcaa

SEQ ID NO: 3294995 - DNA, 25 bp, Homo sapien
cggtatttatacgacactgtccaag

SEQ ID NO: 3294996 - DNA, 25 bp, Homo sapien
gaagaaacacgaatattctgggcca

SEQ ID NO: 3294997 - DNA, 25 bp, Homo sapien
tagagacgtctgcagtatgtcaggg

SEQ ID NO: 3294998 - DNA, 25 bp, Homo sapien
tacagctggcatgagtaaactactt

SEQ ID NO: 3294999 - DNA, 25 bp, Homo sapien
ttagagaggatcgaggcaaaccatg

SEQ ID NO: 3295000 - DNA, 25 bp, Homo sapien
cctggacccacttcgcaaggttgta

SEQ ID NO: 3295001 - DNA, 25 bp, Homo sapien
ccagctcatttcattagcggagaag

SEQ ID NO: 3295002 - DNA, 25 bp, Homo sapien
cacaatgaacagaggtcttgccagc

SEQ ID NO: 3295003 - DNA, 25 bp, Homo sapien
gacacaaatgacaatgccagatgct

SEQ ID NO: 3295004 - DNA, 25 bp, Homo sapien
caatgccagatgcttgtcagaaaat

SEQ ID NO: 3295005 - DNA, 25 bp, Homo sapien
tttaaggatgttaccaccctctgta

SEQ ID NO: 3295006 - DNA, 25 bp, Homo sapien
cgccccgccgaagattggttttcat

SEQ ID NO: 3295007 - DNA, 25 bp, Homo sapien
agcacgggcgaactcgctcttctgc

SEQ ID NO: 3295008 - DNA, 25 bp, Homo sapien
ctttcacagcacgggcgaactcgct

SEQ ID NO: 3295009 - DNA, 25 bp, Homo sapien
tcacagcacgggcgaactcgctctt

SEQ ID NO: 3295010 - DNA, 25 bp, Homo sapien
cgaactcgctcttctgctgacttac

SEQ ID NO: 3295011 - DNA, 25 bp, Homo sapien
cgggtttctgatcctagtcatgtac

SEQ ID NO: 3295012 - DNA, 25 bp, Homo sapien
ttgtctgggctaccggcgctcatta

SEQ ID NO: 3295013 - DNA, 25 bp, Homo sapien
cattaccgtagtataaattgtgaag

SEQ ID NO: 3295014 - DNA, 25 bp, Homo sapien
tcatgtacttgtctgggctaccggc

SEQ ID NO: 3295015 - DNA, 25 bp, Homo sapien
cagaattagtagcactgggtccaca

SEQ ID NO: 3295016 - DNA, 25 bp, Homo sapien
ggtgcatgtgcaaaatatcggagct

SEQ ID NO: 3295017 - DNA, 25 bp, Homo sapien
gggcctctaaagctccaggatcaag

SEQ ID NO: 3295018 - DNA, 25 bp, Homo sapien
tgtaagcaagtgcagagctcgtcca

SEQ ID NO: 3295019 - DNA, 25 bp, Homo sapien
ggagctagctcctacagtctggtga

SEQ ID NO: 3295020 - DNA, 25 bp, Homo sapien
ggtttactagcagaccactgggtat

SEQ ID NO: 3295021 - DNA, 25 bp, Homo sapien
cattgtgccccgctatgaagggtac

SEQ ID NO: 3295022 - DNA, 25 bp, Homo sapien
tatgcaggaagtgtatgagccaact

SEQ ID NO: 3295023 - DNA, 25 bp, Homo sapien
ttgttataaactggaaccaccgaca

SEQ ID NO: 3295024 - DNA, 25 bp, Homo sapien
tgttataaactggaaccaccgacaa

SEQ ID NO: 3295025 - DNA, 25 bp, Homo sapien
tgagccaccacttttaatacatgat

SEQ ID NO: 3295026 - DNA, 25 bp, Homo sapien
tcctaggtatgcaggacactgtgac

SEQ ID NO: 3295027 - DNA, 25 bp, Homo sapien
aacaccaaacatcctaggtatgcag

SEQ ID NO: 3295028 - DNA, 25 bp, Homo sapien
ccagaagatttcacggagtttttca

SEQ ID NO: 3295029 - DNA, 25 bp, Homo sapien
tcatctaccagaagatttcacggag

SEQ ID NO: 3295030 - DNA, 25 bp, Homo sapien
gtttgcttgtcctgtagcattaagg

SEQ ID NO: 3295031 - DNA, 25 bp, Homo sapien
tgtcctgtagcattaagggccttga

SEQ ID NO: 3295032 - DNA, 25 bp, Homo sapien
tgcttgtcctgtagcattaagggcc

SEQ ID NO: 3295033 - DNA, 25 bp, Homo sapien
ctgtagcattaagggccttgatggc

SEQ ID NO: 3295034 - DNA, 25 bp, Homo sapien
gaactgaacagtggccaaacttgtg

SEQ ID NO: 3295035 - DNA, 25 bp, Homo sapien
tgtaaggacaaaggtcgaaggtcac

SEQ ID NO: 3295036 - DNA, 25 bp, Homo sapien
taaagccaaggcaacgtatatagct

SEQ ID NO: 3295037 - DNA, 25 bp, Homo sapien
tcaacaagcactgaagcccatcagc

SEQ ID NO: 3295038 - DNA, 25 bp, Homo sapien
ggtgctggcttccagtggtcgtaat

SEQ ID NO: 3295039 - DNA, 25 bp, Homo sapien
ctccggtcatcttccttgggtgctg

SEQ ID NO: 3295040 - DNA, 25 bp, Homo sapien
cggtcatcttccttgggtgctggct

SEQ ID NO: 3295041 - DNA, 25 bp, Homo sapien
cgtaatttgtctcaactcggaacca

SEQ ID NO: 3295042 - DNA, 25 bp, Homo sapien
gtcttggccaacttgccaacagctg

SEQ ID NO: 3295043 - DNA, 25 bp, Homo sapien
ctccattcaaaggatctagaggcca

SEQ ID NO: 3295044 - DNA, 25 bp, Homo sapien
tgtaataaacatcagcaataagggg

SEQ ID NO: 3295045 - DNA, 25 bp, Homo sapien
caataaggggagtcttggccaactt

SEQ ID NO: 3295046 - DNA, 25 bp, Homo sapien
gaaaggatgaacttgcgtgagcaac

SEQ ID NO: 3295047 - DNA, 25 bp, Homo sapien
aacgaaaggatgaacttgcgtgagc

SEQ ID NO: 3295048 - DNA, 25 bp, Homo sapien
ctgaacgaaaggatgaacttgcgtg

SEQ ID NO: 3295049 - DNA, 25 bp, Homo sapien
ggatgaacttgcgtgagcaacccca

SEQ ID NO: 3295050 - DNA, 25 bp, Homo sapien
ggtagaagagtccttggcaaggctt

SEQ ID NO: 3295051 - DNA, 25 bp, Homo sapien
atcacacccagcagattcgtcctta

SEQ ID NO: 3295052 - DNA, 25 bp, Homo sapien
gattcgtccttaccagagaacatag

SEQ ID NO: 3295053 - DNA, 25 bp, Homo sapien
caatgttgtctgttggacctgaact

SEQ ID NO: 3295054 - DNA, 25 bp, Homo sapien
cgcggatcagccagctgacgggaat

SEQ ID NO: 3295055 - DNA, 25 bp, Homo sapien
gggcagcgatagcattctcccacca

SEQ ID NO: 3295056 - DNA, 25 bp, Homo sapien
tccgaaacagggcagcgatagcatt

SEQ ID NO: 3295057 - DNA, 25 bp, Homo sapien
cgggaatgtgtctccgaaacagggc

SEQ ID NO: 3295058 - DNA, 25 bp, Homo sapien
ggctctggccagtccataatcctac

SEQ ID NO: 3295059 - DNA, 25 bp, Homo sapien
aactgtaaacttgtgtgggctctgg

SEQ ID NO: 3295060 - DNA, 25 bp, Homo sapien
cagtccataatcctacatagccaat

SEQ ID NO: 3295061 - DNA, 25 bp, Homo sapien
agccaataaaagtagttcctgtgaa

SEQ ID NO: 3295062 - DNA, 25 bp, Homo sapien
tatcaaagtgggactgttcaccaat

SEQ ID NO: 3295063 - DNA, 25 bp, Homo sapien
tcccatgaattataggcatcactcc

SEQ ID NO: 3295064 - DNA, 25 bp, Homo sapien
tctgtgaagttagaatatcaaagtg

SEQ ID NO: 3295065 - DNA, 25 bp, Homo sapien
gattgcaagataccactatgtaacc

SEQ ID NO: 3295066 - DNA, 25 bp, Homo sapien
gcagtaaagtagttatgagcctcca

SEQ ID NO: 3295067 - DNA, 25 bp, Homo sapien
caagaaagtggtgtgggtcaatcac

SEQ ID NO: 3295068 - DNA, 25 bp, Homo sapien
tcaagatttaaacctgggactgtca

SEQ ID NO: 3295069 - DNA, 25 bp, Homo sapien
gagctgtagtctgcaaaattaggga

SEQ ID NO: 3295070 - DNA, 25 bp, Homo sapien
caaattccgaccatggtaaatgtgg

SEQ ID NO: 3295071 - DNA, 25 bp, Homo sapien
gtcagcttgcgtaagacattcccaa

SEQ ID NO: 3295072 - DNA, 25 bp, Homo sapien
aaaggataatccaaattccgaccat

SEQ ID NO: 3295073 - DNA, 25 bp, Homo sapien
taagaattgcacatccactgtcagc

SEQ ID NO: 3295074 - DNA, 25 bp, Homo sapien
ggcaccgccctgtttttatcacacg

SEQ ID NO: 3295075 - DNA, 25 bp, Homo sapien
tggaggtttctaggcaagcaggcac

SEQ ID NO: 3295076 - DNA, 25 bp, Homo sapien
aaatatgtctcctcccgctagtctg

SEQ ID NO: 3295077 - DNA, 25 bp, Homo sapien
gcctacgatgtgcagctcagattta

SEQ ID NO: 3295078 - DNA, 25 bp, Homo sapien
caggctgaggttcatgaagtcacac

SEQ ID NO: 3295079 - DNA, 25 bp, Homo sapien
tgaagtcacacatgccgcggatctc

SEQ ID NO: 3295080 - DNA, 25 bp, Homo sapien
cgattaacacgtgcacccacttggg

SEQ ID NO: 3295081 - DNA, 25 bp, Homo sapien
ggttgaccagaaggcagtccgccag

SEQ ID NO: 3295082 - DNA, 25 bp, Homo sapien
aagggcgtctgacccgctcagaggt

SEQ ID NO: 3295083 - DNA, 25 bp, Homo sapien
acaaaaagcacaagggcgtctgacc

SEQ ID NO: 3295084 - DNA, 25 bp, Homo sapien
ggtcggcggcgtgcgactgcgtgtg

SEQ ID NO: 3295085 - DNA, 25 bp, Homo sapien
tctgacccgctcagaggtcggcggc

SEQ ID NO: 3295086 - DNA, 25 bp, Homo sapien
aaagccgaacctgccgcgctggatt

SEQ ID NO: 3295087 - DNA, 25 bp, Homo sapien
gcgtgccacgggtgacaccgaactt

SEQ ID NO: 3295088 - DNA, 25 bp, Homo sapien
gaatggctcaaggactggcgtgcca

SEQ ID NO: 3295089 - DNA, 25 bp, Homo sapien
gcagccaaaaccagttctccaaggg

SEQ ID NO: 3295090 - DNA, 25 bp, Homo sapien
tgacttgcgccatcgcggcgcgcac

SEQ ID NO: 3295091 - DNA, 25 bp, Homo sapien
atgacttgcgccatcgcggcgcgca

SEQ ID NO: 3295092 - DNA, 25 bp, Homo sapien
gatgacttgcgccatcgcggcgcgc

SEQ ID NO: 3295093 - DNA, 25 bp, Homo sapien
ccgatgacttgcgccatcgcggcgc

SEQ ID NO: 3295094 - DNA, 25 bp, Homo sapien
gcgcagctcggggaccgagtccagg

SEQ ID NO: 3295095 - DNA, 25 bp, Homo sapien
tcgtagtgccgcagcacgggcagcc

SEQ ID NO: 3295096 - DNA, 25 bp, Homo sapien
ccaagtcgtagtgccgcagcacggg

SEQ ID NO: 3295097 - DNA, 25 bp, Homo sapien
caagtccaagtcgtagtgccgcagc

SEQ ID NO: 3295098 - DNA, 25 bp, Homo sapien
gggggcgaggcggctgacagcccgg

SEQ ID NO: 3295099 - DNA, 25 bp, Homo sapien
gcagggacggaagccccgggcgcgc

SEQ ID NO: 3295100 - DNA, 25 bp, Homo sapien
ctcacgttgaagcgcggcgctgctg

SEQ ID NO: 3295101 - DNA, 25 bp, Homo sapien
ggggcgaggcggctgacagcccggc

SEQ ID NO: 3295102 - DNA, 25 bp, Homo sapien
tccagcggccgcaacttggagacct

SEQ ID NO: 3295103 - DNA, 25 bp, Homo sapien
gctccagcggccgcaacttggagac

SEQ ID NO: 3295104 - DNA, 25 bp, Homo sapien
ggctccagcggccgcaacttggaga

SEQ ID NO: 3295105 - DNA, 25 bp, Homo sapien
tcgggctccagcggccgcaacttgg

SEQ ID NO: 3295106 - DNA, 25 bp, Homo sapien
taaacacgtgcagaccaaagactct

SEQ ID NO: 3295107 - DNA, 25 bp, Homo sapien
cacactgggattggactgacaaaac

SEQ ID NO: 3295108 - DNA, 25 bp, Homo sapien
gagccttgaccttgtaagagaaaag

SEQ ID NO: 3295109 - DNA, 25 bp, Homo sapien
caaagactctgctaatattggaaag

SEQ ID NO: 3295110 - DNA, 25 bp, Homo sapien
gagcctggacaaagttaagttcatc

SEQ ID NO: 3295111 - DNA, 25 bp, Homo sapien
gatgaaacttccaggcgccatcaca

SEQ ID NO: 3295112 - DNA, 25 bp, Homo sapien
ggagacacccagttcaaaaatgcga

SEQ ID NO: 3295113 - DNA, 25 bp, Homo sapien
gcacagtagaagaacagaagtcaga

SEQ ID NO: 3295114 - DNA, 25 bp, Homo sapien
tcacagagttagtccataaggcctc

SEQ ID NO: 3295115 - DNA, 25 bp, Homo sapien
caggaaagcctatgtacaagtaaga

SEQ ID NO: 3295116 - DNA, 25 bp, Homo sapien
taaggcctcagtgacctcacagaaa

SEQ ID NO: 3295117 - DNA, 25 bp, Homo sapien
gggttacagctcattcgttttgcat

SEQ ID NO: 3295118 - DNA, 25 bp, Homo sapien
tcaaaagtgcatctcgtagtgccaa

SEQ ID NO: 3295119 - DNA, 25 bp, Homo sapien
ctttttcaaaagtgcatctcgtagt

SEQ ID NO: 3295120 - DNA, 25 bp, Homo sapien
tttcaaaagtgcatctcgtagtgcc

SEQ ID NO: 3295121 - DNA, 25 bp, Homo sapien
ttttcaaaagtgcatctcgtagtgc

SEQ ID NO: 3295122 - DNA, 25 bp, Homo sapien
cagaggctgggttcttcaagatccc

SEQ ID NO: 3295123 - DNA, 25 bp, Homo sapien
tcaagatccccagggtagaactgga

SEQ ID NO: 3295124 - DNA, 25 bp, Homo sapien
cttcaagatccccagggtagaactg

SEQ ID NO: 3295125 - DNA, 25 bp, Homo sapien
agatccccagggtagaactggaagg

SEQ ID NO: 3295126 - DNA, 25 bp, Homo sapien
cagtactggtctaaaggggagaaca

SEQ ID NO: 3295127 - DNA, 25 bp, Homo sapien
tatgtttataatgaagagatcttga

SEQ ID NO: 3295128 - DNA, 25 bp, Homo sapien
accaacaagtgcatatgtccaatga

SEQ ID NO: 3295129 - DNA, 25 bp, Homo sapien
caaagggacacacatagaaattctg

SEQ ID NO: 3295130 - DNA, 25 bp, Homo sapien
tctctttatttgtcgaactggaaaa

SEQ ID NO: 3295131 - DNA, 25 bp, Homo sapien
cttctctttatttgtcgaactggaa

SEQ ID NO: 3295132 - DNA, 25 bp, Homo sapien
cattgcagttgctagtcttgtctct

SEQ ID NO: 3295133 - DNA, 25 bp, Homo sapien
ttgcagttgctagtcttgtctcttt

SEQ ID NO: 3295134 - DNA, 25 bp, Homo sapien
attgcagttgctagtcttgtctctt

SEQ ID NO: 3295135 - DNA, 25 bp, Homo sapien
gtcttcctgagttaaaactcggcta

SEQ ID NO: 3295136 - DNA, 25 bp, Homo sapien
catttgggccatgcggattttctgg

SEQ ID NO: 3295137 - DNA, 25 bp, Homo sapien
aactcggctagtgctgatggctgca

SEQ ID NO: 3295138 - DNA, 25 bp, Homo sapien
cttccgctcctccatgggcatgctg

SEQ ID NO: 3295139 - DNA, 25 bp, Homo sapien
actgagactggtactttcccatcca

SEQ ID NO: 3295140 - DNA, 25 bp, Homo sapien
tcttcatcggaagagtgttgcacat

SEQ ID NO: 3295141 - DNA, 25 bp, Homo sapien
cctcctcactgagactggtactttc

SEQ ID NO: 3295142 - DNA, 25 bp, Homo sapien
tgcacatcaatccattcaccatcag

SEQ ID NO: 3295143 - DNA, 25 bp, Homo sapien
ctatggaggcctctgtaggcttacc

SEQ ID NO: 3295144 - DNA, 25 bp, Homo sapien
aattctccatattcttgtactcttg

SEQ ID NO: 3295145 - DNA, 25 bp, Homo sapien
ggaatgtaatctttagcatctaatt

SEQ ID NO: 3295146 - DNA, 25 bp, Homo sapien
tcttgtactcttgcttctatggagg

SEQ ID NO: 3295147 - DNA, 25 bp, Homo sapien
gaggattcagtgttcggaagaggtg

SEQ ID NO: 3295148 - DNA, 25 bp, Homo sapien
tcggaagaggtgaatcaaagttcta

SEQ ID NO: 3295149 - DNA, 25 bp, Homo sapien
caaagttctagcagacatcattaca

SEQ ID NO: 3295150 - DNA, 25 bp, Homo sapien
cagtgttcggaagaggtgaatcaaa

SEQ ID NO: 3295151 - DNA, 25 bp, Homo sapien
gacatcgagctgttatctcctttat

SEQ ID NO: 3295152 - DNA, 25 bp, Homo sapien
gccagaggacatcgagctgttatct

SEQ ID NO: 3295153 - DNA, 25 bp, Homo sapien
tggagaagttcttcagtcatggcca

SEQ ID NO: 3295154 - DNA, 25 bp, Homo sapien
gaggacatcgagctgttatctcctt

SEQ ID NO: 3295155 - DNA, 25 bp, Homo sapien
ccaattttatagaggtgatactacc

SEQ ID NO: 3295156 - DNA, 25 bp, Homo sapien
tgttgttatcttgggagaaggtccc

SEQ ID NO: 3295157 - DNA, 25 bp, Homo sapien
tgccaatgatgcagcaacgaggccc

SEQ ID NO: 3295158 - DNA, 25 bp, Homo sapien
tacggtgggagatcagaagaaaagc

SEQ ID NO: 3295159 - DNA, 25 bp, Homo sapien
gtcggtaacaaaattgtttgccaca

SEQ ID NO: 3295160 - DNA, 25 bp, Homo sapien
gtttgccacagtcataagcaatgat

SEQ ID NO: 3295161 - DNA, 25 bp, Homo sapien
tccagagttcttgtcggtaacaaaa

SEQ ID NO: 3295162 - DNA, 25 bp, Homo sapien
tactgtcatgacttctccagagttc

SEQ ID NO: 3295163 - DNA, 25 bp, Homo sapien
cccttaagagttagtgtctcttcta

SEQ ID NO: 3295164 - DNA, 25 bp, Homo sapien
ttctgtgtagatccccttaagagtt

SEQ ID NO: 3295165 - DNA, 25 bp, Homo sapien
gatccccttaagagttagtgtctct

SEQ ID NO: 3295166 - DNA, 25 bp, Homo sapien
tgtgtagatccccttaagagttagt

SEQ ID NO: 3295167 - DNA, 25 bp, Homo sapien
gtactaggtgatgagatgcttgtgc

SEQ ID NO: 3295168 - DNA, 25 bp, Homo sapien
tactaggtgatgagatgcttgtgca

SEQ ID NO: 3295169 - DNA, 25 bp, Homo sapien
actaggtgatgagatgcttgtgcag

SEQ ID NO: 3295170 - DNA, 25 bp, Homo sapien
gctgcagaaacctttgcaaaaaggg

SEQ ID NO: 3295171 - DNA, 25 bp, Homo sapien
tttgcaaaaagggatagaaattgaa

SEQ ID NO: 3295172 - DNA, 25 bp, Homo sapien
tttggtggggctgcagaaacctttg

SEQ ID NO: 3295173 - DNA, 25 bp, Homo sapien
tgcaaaaagggatagaaattgaaga

SEQ ID NO: 3295174 - DNA, 25 bp, Homo sapien
caatctggagataaggttcatgagc

SEQ ID NO: 3295175 - DNA, 25 bp, Homo sapien
atctggagataaggttcatgagcat

SEQ ID NO: 3295176 - DNA, 25 bp, Homo sapien
atcttcacttcaaacctctccttac

SEQ ID NO: 3295177 - DNA, 25 bp, Homo sapien
tcatgagcatcatcttcacttcaaa

SEQ ID NO: 3295178 - DNA, 25 bp, Homo sapien
agcactcaagctgctttagtagttt

SEQ ID NO: 3295179 - DNA, 25 bp, Homo sapien
tcaagctgctttagtagtttttccg

SEQ ID NO: 3295180 - DNA, 25 bp, Homo sapien
gctgctttagtagtttttccgcaaa

SEQ ID NO: 3295181 - DNA, 25 bp, Homo sapien
aagctgctttagtagtttttccgca

SEQ ID NO: 3295182 - DNA, 25 bp, Homo sapien
ttggtcaagtacaatgccctattac

SEQ ID NO: 3295183 - DNA, 25 bp, Homo sapien
ttttcttgttctgcgatagactggg

SEQ ID NO: 3295184 - DNA, 25 bp, Homo sapien
gaatctcagaaacatccgtttttcc

SEQ ID NO: 3295185 - DNA, 25 bp, Homo sapien
gttctgcgatagactgggaatcact

SEQ ID NO: 3295186 - DNA, 25 bp, Homo sapien
gtgaatggctgaaaagttaaacacc

SEQ ID NO: 3295187 - DNA, 25 bp, Homo sapien
tggctgaaaagttaaacacctctgg

SEQ ID NO: 3295188 - DNA, 25 bp, Homo sapien
gatcatgaatcaagtgaatggctga

SEQ ID NO: 3295189 - DNA, 25 bp, Homo sapien
cttggggatcatgaatcaagtgaat

SEQ ID NO: 3295190 - DNA, 25 bp, Homo sapien
ggtctcttgctgttggtccatcatc

SEQ ID NO: 3295191 - DNA, 25 bp, Homo sapien
acttttcttccctgtagcatattgt

SEQ ID NO: 3295192 - DNA, 25 bp, Homo sapien
tgtagcatattgtactagcaggtct

SEQ ID NO: 3295193 - DNA, 25 bp, Homo sapien
catattgtactagcaggtctcttgc

SEQ ID NO: 3295194 - DNA, 25 bp, Homo sapien
cttccaggttaaagtgatactccca

SEQ ID NO: 3295195 - DNA, 25 bp, Homo sapien
ccaccttccaggttaaagtgatact

SEQ ID NO: 3295196 - DNA, 25 bp, Homo sapien
gttggacaggatggttttgaactac

SEQ ID NO: 3295197 - DNA, 25 bp, Homo sapien
gctggagagttatggcacaatctca

SEQ ID NO: 3295198 - DNA, 25 bp, Homo sapien
gaaagaatgtcaaagcggcaactaa

SEQ ID NO: 3295199 - DNA, 25 bp, Homo sapien
ttcccaagaaagaatgtcaaagcgg

SEQ ID NO: 3295200 - DNA, 25 bp, Homo sapien
ggagtcactgtcctgtttttcatct

SEQ ID NO: 3295201 - DNA, 25 bp, Homo sapien
ctcagattcggagtcactgtcctgt

SEQ ID NO: 3295202 - DNA, 25 bp, Homo sapien
cagagcttacacacagccctatagg

SEQ ID NO: 3295203 - DNA, 25 bp, Homo sapien
cagaccatccacagacagagcttac

SEQ ID NO: 3295204 - DNA, 25 bp, Homo sapien
caggcatgcagtttatgctgagtga

SEQ ID NO: 3295205 - DNA, 25 bp, Homo sapien
taactgcatgcagaagcagaccatc

SEQ ID NO: 3295206 - DNA, 25 bp, Homo sapien
catgcagttgtgataacattgacag

SEQ ID NO: 3295207 - DNA, 25 bp, Homo sapien
cttggtgaccttagagaaacatgca

SEQ ID NO: 3295208 - DNA, 25 bp, Homo sapien
aaacatgcagttgtgataacattga

SEQ ID NO: 3295209 - DNA, 25 bp, Homo sapien
taacattgacagtttttgcatcatt

SEQ ID NO: 3295210 - DNA, 25 bp, Homo sapien
aagacatcttggctgcggttgcatt

SEQ ID NO: 3295211 - DNA, 25 bp, Homo sapien
tctcttaacatggtgtacatgaaat

SEQ ID NO: 3295212 - DNA, 25 bp, Homo sapien
tggctgcggttgcattgctatctct

SEQ ID NO: 3295213 - DNA, 25 bp, Homo sapien
gagttcaatcattacatctaaagac

SEQ ID NO: 3295214 - DNA, 25 bp, Homo sapien
gaagacttaatgcactgatggtaca

SEQ ID NO: 3295215 - DNA, 25 bp, Homo sapien
gaaagaagacttaatgcactgatgg

SEQ ID NO: 3295216 - DNA, 25 bp, Homo sapien
aagaagacttaatgcactgatggta

SEQ ID NO: 3295217 - DNA, 25 bp, Homo sapien
agaagacttaatgcactgatggtac

SEQ ID NO: 3295218 - DNA, 25 bp, Homo sapien
cttgatatcagtcacaatatgtgtg

SEQ ID NO: 3295219 - DNA, 25 bp, Homo sapien
cactttattgttcttgtgttttgca

SEQ ID NO: 3295220 - DNA, 25 bp, Homo sapien
atatcagtcacaatatgtgtgtata

SEQ ID NO: 3295221 - DNA, 25 bp, Homo sapien
tatattcttgatatcagtcacaata

SEQ ID NO: 3295222 - DNA, 25 bp, Homo sapien
caatgtcctgatttagccagccagt

SEQ ID NO: 3295223 - DNA, 25 bp, Homo sapien
catatagcatgcacacaatggttgc

SEQ ID NO: 3295224 - DNA, 25 bp, Homo sapien
tatagctgtgagtaccaatgtcctg

SEQ ID NO: 3295225 - DNA, 25 bp, Homo sapien
tatgtcgcctcaaggaagatgcagg

SEQ ID NO: 3295226 - DNA, 25 bp, Homo sapien
tcgcagaagtttatcatggcaacga

SEQ ID NO: 3295227 - DNA, 25 bp, Homo sapien
tttatcatggcaacgaaaaagttca

SEQ ID NO: 3295228 - DNA, 25 bp, Homo sapien
gcagaagtttatcatggcaacgaaa

SEQ ID NO: 3295229 - DNA, 25 bp, Homo sapien
gaagtttatcatggcaacgaaaaag

SEQ ID NO: 3295230 - DNA, 25 bp, Homo sapien
gcagctgtggcactcttgcttacca

SEQ ID NO: 3295231 - DNA, 25 bp, Homo sapien
caatccttgaagaatagttgattcc

SEQ ID NO: 3295232 - DNA, 25 bp, Homo sapien
caggcatgagctgatgcgcctagca

SEQ ID NO: 3295233 - DNA, 25 bp, Homo sapien
tacatgtagccctatcacccaaatt

SEQ ID NO: 3295234 - DNA, 25 bp, Homo sapien
atccaatacggtatgattgcaggag

SEQ ID NO: 3295235 - DNA, 25 bp, Homo sapien
tccaatacggtatgattgcaggaga

SEQ ID NO: 3295236 - DNA, 25 bp, Homo sapien
aaaggctcttctgaagttgctctct

SEQ ID NO: 3295237 - DNA, 25 bp, Homo sapien
gctcttctgaagttgctctctttct

SEQ ID NO: 3295238 - DNA, 25 bp, Homo sapien
tcttctgaagttgctctctttctct

SEQ ID NO: 3295239 - DNA, 25 bp, Homo sapien
ctgtaacaaagcaaaggctcttctg

SEQ ID NO: 3295240 - DNA, 25 bp, Homo sapien
ttcagatgcatacatttaggatgtt

SEQ ID NO: 3295241 - DNA, 25 bp, Homo sapien
ataattcagatgcatacatttagga

SEQ ID NO: 3295242 - DNA, 25 bp, Homo sapien
aattcagatgcatacatttaggatg

SEQ ID NO: 3295243 - DNA, 25 bp, Homo sapien
ctataattcagatgcatacatttag

SEQ ID NO: 3295244 - DNA, 25 bp, Homo sapien
ttgtagtgattatactgctgtagaa

SEQ ID NO: 3295245 - DNA, 25 bp, Homo sapien
tctgctagttctttgctgggtttat

SEQ ID NO: 3295246 - DNA, 25 bp, Homo sapien
aaatctccacattggatttgtagtg

SEQ ID NO: 3295247 - DNA, 25 bp, Homo sapien
ttggttgcaatttgaaaatctccac

SEQ ID NO: 3295248 - DNA, 25 bp, Homo sapien
cgcttgattagattctgtaactgcg

SEQ ID NO: 3295249 - DNA, 25 bp, Homo sapien
gtaggccggcgggtctcgcttgatt

SEQ ID NO: 3295250 - DNA, 25 bp, Homo sapien
gattagattctgtaactgcggcagg

SEQ ID NO: 3295251 - DNA, 25 bp, Homo sapien
ctcctcgatgtaggccggcgggtct

SEQ ID NO: 3295252 - DNA, 25 bp, Homo sapien
gctgcagcttggactcgtgtttccg

SEQ ID NO: 3295253 - DNA, 25 bp, Homo sapien
tcagacggccggcaccccgcaatcc

SEQ ID NO: 3295254 - DNA, 25 bp, Homo sapien
gacttcgcggcgagcagttttaaaa

SEQ ID NO: 3295255 - DNA, 25 bp, Homo sapien
caccccgcaatccctgccagctgca

SEQ ID NO: 3295256 - DNA, 25 bp, Homo sapien
taggattcagatctcacagatgagg

SEQ ID NO: 3295257 - DNA, 25 bp, Homo sapien
actggtccatcagaagcactgggac

SEQ ID NO: 3295258 - DNA, 25 bp, Homo sapien
catgcaaagaagtgtgtgtaggccc

SEQ ID NO: 3295259 - DNA, 25 bp, Homo sapien
tcatcaactccataaggtacacaca

SEQ ID NO: 3295260 - DNA, 25 bp, Homo sapien
aaagtaaataaggacatataagatt

SEQ ID NO: 3295261 - DNA, 25 bp, Homo sapien
ttatctcaactagtgttacacttta

SEQ ID NO: 3295262 - DNA, 25 bp, Homo sapien
taaggacatataagatttactatta

SEQ ID NO: 3295263 - DNA, 25 bp, Homo sapien
acagttgaagggtacattcaagaga

SEQ ID NO: 3295264 - DNA, 25 bp, Homo sapien
taagacgttcgggtgggatctccac

SEQ ID NO: 3295265 - DNA, 25 bp, Homo sapien
caaggtaagtgggtcacagactctc

SEQ ID NO: 3295266 - DNA, 25 bp, Homo sapien
aattcactgaacctcccctggaagg

SEQ ID NO: 3295267 - DNA, 25 bp, Homo sapien
ctgcagtacgtggaagcctagggct

SEQ ID NO: 3295268 - DNA, 25 bp, Homo sapien
tatgtagtcttcttttgacgagaac

SEQ ID NO: 3295269 - DNA, 25 bp, Homo sapien
tgagattttcgaactttcagaactt

SEQ ID NO: 3295270 - DNA, 25 bp, Homo sapien
gacgagaacgttgagattttcgaac

SEQ ID NO: 3295271 - DNA, 25 bp, Homo sapien
tcttcttttgacgagaacgttgaga

SEQ ID NO: 3295272 - DNA, 25 bp, Homo sapien
tcacatctgctgaatctgggtttag

SEQ ID NO: 3295273 - DNA, 25 bp, Homo sapien
tgaatctgggtttagacatgtttga

SEQ ID NO: 3295274 - DNA, 25 bp, Homo sapien
tttagacatgtttgaactccattct

SEQ ID NO: 3295275 - DNA, 25 bp, Homo sapien
gacatgtttgaactccattcttcag

SEQ ID NO: 3295276 - DNA, 25 bp, Homo sapien
ttgtaggtggatagtcccttggttg

SEQ ID NO: 3295277 - DNA, 25 bp, Homo sapien
tcaaggattgtaggtggatagtccc

SEQ ID NO: 3295278 - DNA, 25 bp, Homo sapien
tgatgcaggaacagcgaccctttct

SEQ ID NO: 3295279 - DNA, 25 bp, Homo sapien
caattttctcgcaggaagggcttgg

SEQ ID NO: 3295280 - DNA, 25 bp, Homo sapien
aaccagcaagatgatgcccaagagg

SEQ ID NO: 3295281 - DNA, 25 bp, Homo sapien
tcagaaccagcaagatgatgcccaa

SEQ ID NO: 3295282 - DNA, 25 bp, Homo sapien
cttgcactccaatcagaaccagcaa

SEQ ID NO: 3295283 - DNA, 25 bp, Homo sapien
ttgcactccaatcagaaccagcaag

SEQ ID NO: 3295284 - DNA, 25 bp, Homo sapien
agtgatagaatggagttccaagtca

SEQ ID NO: 3295285 - DNA, 25 bp, Homo sapien
tgagcctgagaaattctttagagaa

SEQ ID NO: 3295286 - DNA, 25 bp, Homo sapien
ggattttgagcctgagaaattcttt

SEQ ID NO: 3295287 - DNA, 25 bp, Homo sapien
agtcactcctgtattggattttgag

SEQ ID NO: 3295288 - DNA, 25 bp, Homo sapien
gctccccgtctgagcatggtgctaa

SEQ ID NO: 3295289 - DNA, 25 bp, Homo sapien
cgtgtccgcagcaacgctacgtttc

SEQ ID NO: 3295290 - DNA, 25 bp, Homo sapien
gctacgtttccctgcaaccctatgg

SEQ ID NO: 3295291 - DNA, 25 bp, Homo sapien
gggctctcaccgcacacttgcagag

SEQ ID NO: 3295292 - DNA, 25 bp, Homo sapien
tcagccgggcccaaggtgcgtgtac

SEQ ID NO: 3295293 - DNA, 25 bp, Homo sapien
ggcccaaggtgcgtgtactgcgcat

SEQ ID NO: 3295294 - DNA, 25 bp, Homo sapien
cagccgggcccaaggtgcgtgtact

SEQ ID NO: 3295295 - DNA, 25 bp, Homo sapien
aaggtgcgtgtactgcgcatgccca

SEQ ID NO: 3295296 - DNA, 25 bp, Homo sapien
gaggtctcgacgctcgctcgtgctg

SEQ ID NO: 3295297 - DNA, 25 bp, Homo sapien
ccggaggtctcgacgctcgctcgtg

SEQ ID NO: 3295298 - DNA, 25 bp, Homo sapien
tcgctcgtgctgctcgtgttgccgc

SEQ ID NO: 3295299 - DNA, 25 bp, Homo sapien
tgctgctcgtgttgccgctgggtac

SEQ ID NO: 3295300 - DNA, 25 bp, Homo sapien
tttgcaggtttcacacgaggcttgg

SEQ ID NO: 3295301 - DNA, 25 bp, Homo sapien
ccatgagcgaagaggcccgttttgc

SEQ ID NO: 3295302 - DNA, 25 bp, Homo sapien
agccggaggcgaagagaagcacttt

SEQ ID NO: 3295303 - DNA, 25 bp, Homo sapien
aaccctgggccgtgggcttcagtga

SEQ ID NO: 3295304 - DNA, 25 bp, Homo sapien
ggaattgtatgtaggtagccactga

SEQ ID NO: 3295305 - DNA, 25 bp, Homo sapien
gcctctgtgtggtccatccttggaa

SEQ ID NO: 3295306 - DNA, 25 bp, Homo sapien
gaagcagggtcagaacatccactaa

SEQ ID NO: 3295307 - DNA, 25 bp, Homo sapien
taagaacatagcacctcagtagagc

SEQ ID NO: 3295308 - DNA, 25 bp, Homo sapien
tatcacacaagatggtgcctcagca

SEQ ID NO: 3295309 - DNA, 25 bp, Homo sapien
tacttttaaaccagcgattgcacag

SEQ ID NO: 3295310 - DNA, 25 bp, Homo sapien
ccaagattgccgtttcctaaagagc

SEQ ID NO: 3295311 - DNA, 25 bp, Homo sapien
tgactggtaatcagggtaacttctg

SEQ ID NO: 3295312 - DNA, 25 bp, Homo sapien
cttgatggccttcgattctggattc

SEQ ID NO: 3295313 - DNA, 25 bp, Homo sapien
tcgattctggattcagacatctctt

SEQ ID NO: 3295314 - DNA, 25 bp, Homo sapien
tttcagtaaattcttgatggccttc

SEQ ID NO: 3295315 - DNA, 25 bp, Homo sapien
ttccttgctaactgctttcagtaaa

SEQ ID NO: 3295316 - DNA, 25 bp, Homo sapien
aacagatggcatacgcagttctgaa

SEQ ID NO: 3295317 - DNA, 25 bp, Homo sapien
gtgttgggtcaataaaacagatggc

SEQ ID NO: 3295318 - DNA, 25 bp, Homo sapien
aaacagatggcatacgcagttctga

SEQ ID NO: 3295319 - DNA, 25 bp, Homo sapien
ctgtgttgggtcaataaaacagatg

SEQ ID NO: 3295320 - DNA, 25 bp, Homo sapien
catcacaaaccctttactgatcttt

SEQ ID NO: 3295321 - DNA, 25 bp, Homo sapien
ataattacaaccagggaagtgataa

SEQ ID NO: 3295322 - DNA, 25 bp, Homo sapien
ggaagtgataatcagatgggatttc

SEQ ID NO: 3295323 - DNA, 25 bp, Homo sapien
aagtgataatcagatgggatttcac

SEQ ID NO: 3295324 - DNA, 25 bp, Homo sapien
ctcaacacgtggacaaaattggctt

SEQ ID NO: 3295325 - DNA, 25 bp, Homo sapien
attggcttgcaggaataatttcaag

SEQ ID NO: 3295326 - DNA, 25 bp, Homo sapien
tggcttgcaggaataatttcaagtt

SEQ ID NO: 3295327 - DNA, 25 bp, Homo sapien
acacgtggacaaaattggcttgcag

SEQ ID NO: 3295328 - DNA, 25 bp, Homo sapien
ctaaagaccttggattaacaggttg

SEQ ID NO: 3295329 - DNA, 25 bp, Homo sapien
ttgattactaatgctgatgcaggta

SEQ ID NO: 3295330 - DNA, 25 bp, Homo sapien
ggattaacaggttgattactaatgc

SEQ ID NO: 3295331 - DNA, 25 bp, Homo sapien
caggttgattactaatgctgatgca

SEQ ID NO: 3295332 - DNA, 25 bp, Homo sapien
tttaggcatttaatgtagactggtg

SEQ ID NO: 3295333 - DNA, 25 bp, Homo sapien
gaaggttagcacagtgttcatttta

SEQ ID NO: 3295334 - DNA, 25 bp, Homo sapien
ggcatttaatgtagactggtggtat

SEQ ID NO: 3295335 - DNA, 25 bp, Homo sapien
tagcacagtgttcattttaggcatt

SEQ ID NO: 3295336 - DNA, 25 bp, Homo sapien
tggatcacatcataacacaactgta

SEQ ID NO: 3295337 - DNA, 25 bp, Homo sapien
gattataaagtcaaacccttaagca

SEQ ID NO: 3295338 - DNA, 25 bp, Homo sapien
cagttcatgtggttcattgagctta

SEQ ID NO: 3295339 - DNA, 25 bp, Homo sapien
tatctgtatctcatctctgtccgca

SEQ ID NO: 3295340 - DNA, 25 bp, Homo sapien
cttgaatgccacttagagtcagaaa

SEQ ID NO: 3295341 - DNA, 25 bp, Homo sapien
aagataaggcagcaaatcagaatgg

SEQ ID NO: 3295342 - DNA, 25 bp, Homo sapien
ccacttagagtcagaaagataaggc

SEQ ID NO: 3295343 - DNA, 25 bp, Homo sapien
gataaggcagcaaatcagaatggca

SEQ ID NO: 3295344 - DNA, 25 bp, Homo sapien
ctctgctgtaggctcagaatatgtc

SEQ ID NO: 3295345 - DNA, 25 bp, Homo sapien
taggctcagaatatgtctaagcaat

SEQ ID NO: 3295346 - DNA, 25 bp, Homo sapien
ctgagactggaggttcctctgctgt

SEQ ID NO: 3295347 - DNA, 25 bp, Homo sapien
gtgctgagactggaggttcctctgc

SEQ ID NO: 3295348 - DNA, 25 bp, Homo sapien
tgtaaactccgatggtaaccagcct

SEQ ID NO: 3295349 - DNA, 25 bp, Homo sapien
gcacttttgccagtatcccatagcg

SEQ ID NO: 3295350 - DNA, 25 bp, Homo sapien
taatgtcaatgtctccaccgtaacc

SEQ ID NO: 3295351 - DNA, 25 bp, Homo sapien
gacttataagggcttgactccagta

SEQ ID NO: 3295352 - DNA, 25 bp, Homo sapien
gctgttcttgtttcccccaggacat

SEQ ID NO: 3295353 - DNA, 25 bp, Homo sapien
tgggctgttcttgtttcccccagga

SEQ ID NO: 3295354 - DNA, 25 bp, Homo sapien
cttgggctgttcttgtttcccccag

SEQ ID NO: 3295355 - DNA, 25 bp, Homo sapien
ggctgttcttgtttcccccaggaca

SEQ ID NO: 3295356 - DNA, 25 bp, Homo sapien
ttaggcatcgttgtcctttattttc

SEQ ID NO: 3295357 - DNA, 25 bp, Homo sapien
ccttgcttgcttcgatttgggattt

SEQ ID NO: 3295358 - DNA, 25 bp, Homo sapien
cttgcttcgatttgggatttaggca

SEQ ID NO: 3295359 - DNA, 25 bp, Homo sapien
ttgggatttaggcatcgttgtcctt

SEQ ID NO: 3295360 - DNA, 25 bp, Homo sapien
gttgttacttgggtacattatggag

SEQ ID NO: 3295361 - DNA, 25 bp, Homo sapien
tctcaatatctgccactttcactgc

SEQ ID NO: 3295362 - DNA, 25 bp, Homo sapien
tattttgtcacagttgttacttggg

SEQ ID NO: 3295363 - DNA, 25 bp, Homo sapien
gggtacattatggaggctttctcaa

SEQ ID NO: 3295364 - DNA, 25 bp, Homo sapien
ctatgcaaagacagcgtcctctttt

SEQ ID NO: 3295365 - DNA, 25 bp, Homo sapien
tgcaaagacagcgtcctcttttgaa

SEQ ID NO: 3295366 - DNA, 25 bp, Homo sapien
tatgcaaagacagcgtcctcttttg

SEQ ID NO: 3295367 - DNA, 25 bp, Homo sapien
gcaaagacagcgtcctcttttgaac

SEQ ID NO: 3295368 - DNA, 25 bp, Homo sapien
tgccagatattctagccaaatcaaa

SEQ ID NO: 3295369 - DNA, 25 bp, Homo sapien
tctagtatcttaaacatgtccacca

SEQ ID NO: 3295370 - DNA, 25 bp, Homo sapien
cattagaaaaggaacttataggttg

SEQ ID NO: 3295371 - DNA, 25 bp, Homo sapien
tgtccaccatttctgtgctaaagct

SEQ ID NO: 3295372 - DNA, 25 bp, Homo sapien
ccaaggctatagccatgcccttcac

SEQ ID NO: 3295373 - DNA, 25 bp, Homo sapien
caaggctatagccatgcccttcaca

SEQ ID NO: 3295374 - DNA, 25 bp, Homo sapien
agccaaggctatagccatgcccttc

SEQ ID NO: 3295375 - DNA, 25 bp, Homo sapien
gccaaggctatagccatgcccttca

SEQ ID NO: 3295376 - DNA, 25 bp, Homo sapien
tgctgctcttcttggaaggagtaga

SEQ ID NO: 3295377 - DNA, 25 bp, Homo sapien
ctgctgctgctacttcagctttgct

SEQ ID NO: 3295378 - DNA, 25 bp, Homo sapien
gctgctgctacttcagctttgctgc

SEQ ID NO: 3295379 - DNA, 25 bp, Homo sapien
ctttgctgctcttcttggaaggagt

SEQ ID NO: 3295380 - DNA, 25 bp, Homo sapien
gataattggcatatatagagcattt

SEQ ID NO: 3295381 - DNA, 25 bp, Homo sapien
aattggcatatatagagcattttat

SEQ ID NO: 3295382 - DNA, 25 bp, Homo sapien
ttgataattggcatatatagagcat

SEQ ID NO: 3295383 - DNA, 25 bp, Homo sapien
taattggcatatatagagcatttta

SEQ ID NO: 3295384 - DNA, 25 bp, Homo sapien
cttctcttggtgcagatgtttgtcc

SEQ ID NO: 3295385 - DNA, 25 bp, Homo sapien
ttctcttggtgcagatgtttgtccc

SEQ ID NO: 3295386 - DNA, 25 bp, Homo sapien
ttgatgaatttgagggcctgtttga

SEQ ID NO: 3295387 - DNA, 25 bp, Homo sapien
cttgatgaatttgagggcctgtttg

SEQ ID NO: 3295388 - DNA, 25 bp, Homo sapien
atttgagggcctgtttgaccttgga

SEQ ID NO: 3295389 - DNA, 25 bp, Homo sapien
tgagggcctgtttgaccttggagac

SEQ ID NO: 3295390 - DNA, 25 bp, Homo sapien
cacgccactcgttaggggtgaagcc

SEQ ID NO: 3295391 - DNA, 25 bp, Homo sapien
gcccacagctatagggtagtgcagt

SEQ ID NO: 3295392 - DNA, 25 bp, Homo sapien
ttgaggcccacagctatagggtagt

SEQ ID NO: 3295393 - DNA, 25 bp, Homo sapien
cagctatagggtagtgcagtgtcat

SEQ ID NO: 3295394 - DNA, 25 bp, Homo sapien
gctgccctccaatggtggccatggt

SEQ ID NO: 3295395 - DNA, 25 bp, Homo sapien
agttagtctgcctgatttctgctgg

SEQ ID NO: 3295396 - DNA, 25 bp, Homo sapien
tcaggattgtgacttgttctggctc

SEQ ID NO: 3295397 - DNA, 25 bp, Homo sapien
tatactctctgacatcacatgagga

SEQ ID NO: 3295398 - DNA, 25 bp, Homo sapien
gggtcagacgtgtcttcaggattgt

SEQ ID NO: 3295399 - DNA, 25 bp, Homo sapien
aaggtctgacaatgtaattcccaga

SEQ ID NO: 3295400 - DNA, 25 bp, Homo sapien
caaaggtctgacaatgtaattccca

SEQ ID NO: 3295401 - DNA, 25 bp, Homo sapien
tcaaaggtctgacaatgtaattccc

SEQ ID NO: 3295402 - DNA, 25 bp, Homo sapien
aaaggtctgacaatgtaattcccag

SEQ ID NO: 3295403 - DNA, 25 bp, Homo sapien
aggcagtaactgatgtcagtgcaat

SEQ ID NO: 3295404 - DNA, 25 bp, Homo sapien
ttataccagatgaaggtcttgtgac

SEQ ID NO: 3295405 - DNA, 25 bp, Homo sapien
tcagtgcaataggtagccagcaggt

SEQ ID NO: 3295406 - DNA, 25 bp, Homo sapien
aataggtagccagcaggtcaactcc

SEQ ID NO: 3295407 - DNA, 25 bp, Homo sapien
ggttccactaataagaggggaatca

SEQ ID NO: 3295408 - DNA, 25 bp, Homo sapien
gttccactaataagaggggaatcac

SEQ ID NO: 3295409 - DNA, 25 bp, Homo sapien
gctgtgctatgaccatgttttagtc

SEQ ID NO: 3295410 - DNA, 25 bp, Homo sapien
taatattcagagctgtgctatgacc

SEQ ID NO: 3295411 - DNA, 25 bp, Homo sapien
ttatttgtaatattcagagctgtgc

SEQ ID NO: 3295412 - DNA, 25 bp, Homo sapien
tcagagctgtgctatgaccatgttt

SEQ ID NO: 3295413 - DNA, 25 bp, Homo sapien
taagagaattggcttcgtggagatc

SEQ ID NO: 3295414 - DNA, 25 bp, Homo sapien
tttccactgaaggatatatggccca

SEQ ID NO: 3295415 - DNA, 25 bp, Homo sapien
tatgagggcttcttaggtatagctc

SEQ ID NO: 3295416 - DNA, 25 bp, Homo sapien
aatgaacctgtgtgactccaaatac

SEQ ID NO: 3295417 - DNA, 25 bp, Homo sapien
tgttccaggtcccaaaagccatcct

SEQ ID NO: 3295418 - DNA, 25 bp, Homo sapien
taggtggatgatacttgacataaaa

SEQ ID NO: 3295419 - DNA, 25 bp, Homo sapien
aaaatgatgtgtcagtgactgtgta

SEQ ID NO: 3295420 - DNA, 25 bp, Homo sapien
tgcatcctcgggcaaactgctgctt

SEQ ID NO: 3295421 - DNA, 25 bp, Homo sapien
tacctatgtggacaaaaaatggtca

SEQ ID NO: 3295422 - DNA, 25 bp, Homo sapien
ttagtacctatgtggacaaaaaatg

SEQ ID NO: 3295423 - DNA, 25 bp, Homo sapien
ataagacttaagactaaaattcctg

SEQ ID NO: 3295424 - DNA, 25 bp, Homo sapien
taagactaaaattcctgacttgtga

SEQ ID NO: 3295425 - DNA, 25 bp, Homo sapien
tatggaaagcagagtacaggctcaa

SEQ ID NO: 3295426 - DNA, 25 bp, Homo sapien
cattcttaaggaaggtctgatgcag

SEQ ID NO: 3295427 - DNA, 25 bp, Homo sapien
caagtacaaatctccaacagccaag

SEQ ID NO: 3295428 - DNA, 25 bp, Homo sapien
tctttgaagagctgtgaggtgacta

SEQ ID NO: 3295429 - DNA, 25 bp, Homo sapien
taaagacaccacctctgatgtggat

SEQ ID NO: 3295430 - DNA, 25 bp, Homo sapien
gttcgaccagctttatatcttctag

SEQ ID NO: 3295431 - DNA, 25 bp, Homo sapien
atgatgctaatcaaatggctaaggc

SEQ ID NO: 3295432 - DNA, 25 bp, Homo sapien
tcttctagatcgtctttaatgatgc

SEQ ID NO: 3295433 - DNA, 25 bp, Homo sapien
tccatgttcgaccagctttatatct

SEQ ID NO: 3295434 - DNA, 25 bp, Homo sapien
ttcttcagatctgactgctccaaaa

SEQ ID NO: 3295435 - DNA, 25 bp, Homo sapien
gcttgatttctcgtaacagatctgc

SEQ ID NO: 3295436 - DNA, 25 bp, Homo sapien
cagatctgactgctccaaaatgatt

SEQ ID NO: 3295437 - DNA, 25 bp, Homo sapien
tctcgtaacagatctgcatctatgt

SEQ ID NO: 3295438 - DNA, 25 bp, Homo sapien
ctgatttgagacatcaattcattta

SEQ ID NO: 3295439 - DNA, 25 bp, Homo sapien
gatttgagacatcaattcatttagt

SEQ ID NO: 3295440 - DNA, 25 bp, Homo sapien
tttgagacatcaattcatttagtcg

SEQ ID NO: 3295441 - DNA, 25 bp, Homo sapien
gagacatcaattcatttagtcggcc

SEQ ID NO: 3295442 - DNA, 25 bp, Homo sapien
taactttttgtctgcagatccacct

SEQ ID NO: 3295443 - DNA, 25 bp, Homo sapien
tacaaaattcctgcttgaagattac

SEQ ID NO: 3295444 - DNA, 25 bp, Homo sapien
gactgagtcaaattacaactgccga

SEQ ID NO: 3295445 - DNA, 25 bp, Homo sapien
tctaattggagataagaaacacaag

SEQ ID NO: 3295446 - DNA, 25 bp, Homo sapien
tcatcagcctgaatggcataaccac

SEQ ID NO: 3295447 - DNA, 25 bp, Homo sapien
cagctgaactcgcaactgctcttca

SEQ ID NO: 3295448 - DNA, 25 bp, Homo sapien
agtaggtgcatttagttcaccctga

SEQ ID NO: 3295449 - DNA, 25 bp, Homo sapien
tagttcaccctgaatcgtatccagc

SEQ ID NO: 3295450 - DNA, 25 bp, Homo sapien
tagtagtacaattagttactgaaag

SEQ ID NO: 3295451 - DNA, 25 bp, Homo sapien
tcaaacaacagtagggttcaacagt

SEQ ID NO: 3295452 - DNA, 25 bp, Homo sapien
caggatttgaattatgtttctgtcc

SEQ ID NO: 3295453 - DNA, 25 bp, Homo sapien
tagttatgcaagtagtagtagtaca

SEQ ID NO: 3295454 - DNA, 25 bp, Homo sapien
gggtctaaagcagtggcctctaaag

SEQ ID NO: 3295455 - DNA, 25 bp, Homo sapien
ctttccaatttaacaatgcatcggg

SEQ ID NO: 3295456 - DNA, 25 bp, Homo sapien
tgttaaaaacagtgcaaatccttcc

SEQ ID NO: 3295457 - DNA, 25 bp, Homo sapien
catagaccgactgctttttactcat

SEQ ID NO: 3295458 - DNA, 25 bp, Homo sapien
caattttttatgtggccaatgttgg

SEQ ID NO: 3295459 - DNA, 25 bp, Homo sapien
tatcacatgactattgacaaatggc

SEQ ID NO: 3295460 - DNA, 25 bp, Homo sapien
gcaattcccagattcctagtaaatt

SEQ ID NO: 3295461 - DNA, 25 bp, Homo sapien
ggttttactgtcaaattataggatc

SEQ ID NO: 3295462 - DNA, 25 bp, Homo sapien
tatgaaaacctccaagatagcaaca

SEQ ID NO: 3295463 - DNA, 25 bp, Homo sapien
gataatattgggtgtccgttgtcta

SEQ ID NO: 3295464 - DNA, 25 bp, Homo sapien
caccatagtgaatggaacattttcc

SEQ ID NO: 3295465 - DNA, 25 bp, Homo sapien
tgtacttttatatctagccagctta

SEQ ID NO: 3295466 - DNA, 25 bp, Homo sapien
tagaagtatatgtccaaacaaacac

SEQ ID NO: 3295467 - DNA, 25 bp, Homo sapien
aagtgactgacaatgggtacgggat

SEQ ID NO: 3295468 - DNA, 25 bp, Homo sapien
tactattacatggtacaacacagtt

SEQ ID NO: 3295469 - DNA, 25 bp, Homo sapien
taaacatagtgtgcatatgacacag

SEQ ID NO: 3295470 - DNA, 25 bp, Homo sapien
tgctttccctcaaactgtcactaaa

SEQ ID NO: 3295471 - DNA, 25 bp, Homo sapien
cagaagcttcccttgcactaagatg

SEQ ID NO: 3295472 - DNA, 25 bp, Homo sapien
tcttccagctgatgagatgcttagt

SEQ ID NO: 3295473 - DNA, 25 bp, Homo sapien
tcccactggttctggtatgtaatat

SEQ ID NO: 3295474 - DNA, 25 bp, Homo sapien
tttggctacagatgtagtttgattc

SEQ ID NO: 3295475 - DNA, 25 bp, Homo sapien
ttctatgggaaagatccatgagttt

SEQ ID NO: 3295476 - DNA, 25 bp, Homo sapien
ggctacagatgtagtttgattcttt

SEQ ID NO: 3295477 - DNA, 25 bp, Homo sapien
ttttggctacagatgtagtttgatt

SEQ ID NO: 3295478 - DNA, 25 bp, Homo sapien
gtatatttaagcattaattttatca

SEQ ID NO: 3295479 - DNA, 25 bp, Homo sapien
tatttaagcattaattttatcaaca

SEQ ID NO: 3295480 - DNA, 25 bp, Homo sapien
tctcctaaaaaagtctactttatga

SEQ ID NO: 3295481 - DNA, 25 bp, Homo sapien
accaggttttgccaagtcggccagg

SEQ ID NO: 3295482 - DNA, 25 bp, Homo sapien
tcttgaaccttcagtcttcggagaa

SEQ ID NO: 3295483 - DNA, 25 bp, Homo sapien
tctgatcttgaaccttcagtcttcg

SEQ ID NO: 3295484 - DNA, 25 bp, Homo sapien
gcttagtcatctgatcttgaacctt

SEQ ID NO: 3295485 - DNA, 25 bp, Homo sapien
tggtttgatgctgcttagtcatctg

SEQ ID NO: 3295486 - DNA, 25 bp, Homo sapien
gaaacgcagtgaacaattttcagac

SEQ ID NO: 3295487 - DNA, 25 bp, Homo sapien
aacgcagtgaacaattttcagacct

SEQ ID NO: 3295488 - DNA, 25 bp, Homo sapien
aagaaacgcagtgaacaattttcag

SEQ ID NO: 3295489 - DNA, 25 bp, Homo sapien
aaacgcagtgaacaattttcagacc

SEQ ID NO: 3295490 - DNA, 25 bp, Homo sapien
tataattaatagctcccatgtttgc

SEQ ID NO: 3295491 - DNA, 25 bp, Homo sapien
tctagggctctaaggcagatctatg

SEQ ID NO: 3295492 - DNA, 25 bp, Homo sapien
gaagctttagctggacaataatcaa

SEQ ID NO: 3295493 - DNA, 25 bp, Homo sapien
gatctatgactatgagataaccatg

SEQ ID NO: 3295494 - DNA, 25 bp, Homo sapien
ttttcagaatcagggttatctacct

SEQ ID NO: 3295495 - DNA, 25 bp, Homo sapien
tgttcccagataataggatcaacac

SEQ ID NO: 3295496 - DNA, 25 bp, Homo sapien
gttatctaccttggcctgttcccag

SEQ ID NO: 3295497 - DNA, 25 bp, Homo sapien
ggcctgttcccagataataggatca

SEQ ID NO: 3295498 - DNA, 25 bp, Homo sapien
cctagaagctataatgaaaagtgac

SEQ ID NO: 3295499 - DNA, 25 bp, Homo sapien
aaagcacagattgaaaggaactatc

SEQ ID NO: 3295500 - DNA, 25 bp, Homo sapien
taaagcaagaccctatacctagaag

SEQ ID NO: 3295501 - DNA, 25 bp, Homo sapien
tataggataatagattaacctccag

SEQ ID NO: 3295502 - DNA, 25 bp, Homo sapien
tagtcaatctagttatgccatccag

SEQ ID NO: 3295503 - DNA, 25 bp, Homo sapien
catgaaaagtgctaaggaatactgt

SEQ ID NO: 3295504 - DNA, 25 bp, Homo sapien
gaggtgttaagtaaaggtgtatcca

SEQ ID NO: 3295505 - DNA, 25 bp, Homo sapien
ccaaccaacacctctgaaatacggg

SEQ ID NO: 3295506 - DNA, 25 bp, Homo sapien
tatagcgttgtagctggaactcttc

SEQ ID NO: 3295507 - DNA, 25 bp, Homo sapien
ttcttgaagtaccatttggcgaacg

SEQ ID NO: 3295508 - DNA, 25 bp, Homo sapien
aaagggttacaccaagttgctgcaa

SEQ ID NO: 3295509 - DNA, 25 bp, Homo sapien
ggcgaacgctcaacaacataaataa

SEQ ID NO: 3295510 - DNA, 25 bp, Homo sapien
aaacctcagcatatcatagcatgtg

SEQ ID NO: 3295511 - DNA, 25 bp, Homo sapien
tcagaagggtttaagttgaattcag

SEQ ID NO: 3295512 - DNA, 25 bp, Homo sapien
tggagcacaaaactcatagcgacaa

SEQ ID NO: 3295513 - DNA, 25 bp, Homo sapien
acaaaactcatagcgacaaacctca

SEQ ID NO: 3295514 - DNA, 25 bp, Homo sapien
tgaaaactaaaaccactagcccatc

SEQ ID NO: 3295515 - DNA, 25 bp, Homo sapien
tctacatttacagtaagggtctggt

SEQ ID NO: 3295516 - DNA, 25 bp, Homo sapien
tgttgttggcttcgaatctctgttt

SEQ ID NO: 3295517 - DNA, 25 bp, Homo sapien
gattctaccaactgttgttgttggc

SEQ ID NO: 3295518 - DNA, 25 bp, Homo sapien
ggccaatgttaaatgaataccacta

SEQ ID NO: 3295519 - DNA, 25 bp, Homo sapien
gtgccaggcaaaccattctcctgtt

SEQ ID NO: 3295520 - DNA, 25 bp, Homo sapien
tagggtatactctcctggccaatgt

SEQ ID NO: 3295521 - DNA, 25 bp, Homo sapien
gtgtctcccctttacaggtgccagg

SEQ ID NO: 3295522 - DNA, 25 bp, Homo sapien
gttatacaaaatcttcaactgaaga

SEQ ID NO: 3295523 - DNA, 25 bp, Homo sapien
tacaaaatcttcaactgaagataaa

SEQ ID NO: 3295524 - DNA, 25 bp, Homo sapien
acaaaatcttcaactgaagataaaa

SEQ ID NO: 3295525 - DNA, 25 bp, Homo sapien
tctgttatacaaaatcttcaactga

SEQ ID NO: 3295526 - DNA, 25 bp, Homo sapien
ccactggcggaatattattgttgaa

SEQ ID NO: 3295527 - DNA, 25 bp, Homo sapien
cggcaaaagggattttcttgtgtga

SEQ ID NO: 3295528 - DNA, 25 bp, Homo sapien
caacagcgttggagcagaaagagca

SEQ ID NO: 3295529 - DNA, 25 bp, Homo sapien
aagagcactcgcagtatttatcagc

SEQ ID NO: 3295530 - DNA, 25 bp, Homo sapien
taaggtctcccactggccaaatgca

SEQ ID NO: 3295531 - DNA, 25 bp, Homo sapien
catcagggtgatcaagcagtcttgg

SEQ ID NO: 3295532 - DNA, 25 bp, Homo sapien
ccattagcacttcagttagggccta

SEQ ID NO: 3295533 - DNA, 25 bp, Homo sapien
taaataagggagctgatcaagcctg

SEQ ID NO: 3295534 - DNA, 25 bp, Homo sapien
tggaaggccatggaatctaagctag

SEQ ID NO: 3295535 - DNA, 25 bp, Homo sapien
tagaaatttcacaggattaccaggc

SEQ ID NO: 3295536 - DNA, 25 bp, Homo sapien
caagaatttagagaggtattatccc

SEQ ID NO: 3295537 - DNA, 25 bp, Homo sapien
tcttggaagtagcagtcaaggccat

SEQ ID NO: 3295538 - DNA, 25 bp, Homo sapien
tctgaaggatcctcgataatccatg

SEQ ID NO: 3295539 - DNA, 25 bp, Homo sapien
gcagaaagtatcagttgtcgaaaga

SEQ ID NO: 3295540 - DNA, 25 bp, Homo sapien
acttctggcggttgtcacaaagtca

SEQ ID NO: 3295541 - DNA, 25 bp, Homo sapien
tttggcttggaaaggacttctggcg

SEQ ID NO: 3295542 - DNA, 25 bp, Homo sapien
taaggcacgctaataatccaattca

SEQ ID NO: 3295543 - DNA, 25 bp, Homo sapien
tctgcgtggataccctagaatctcc

SEQ ID NO: 3295544 - DNA, 25 bp, Homo sapien
gatctagttatactggtcccaaagg

SEQ ID NO: 3295545 - DNA, 25 bp, Homo sapien
ttagaattgcttaaaggacagctcc

SEQ ID NO: 3295546 - DNA, 25 bp, Homo sapien
ggcactatttgtaacccctaatgaa

SEQ ID NO: 3295547 - DNA, 25 bp, Homo sapien
gcatccctgtacttcttctagagag

SEQ ID NO: 3295548 - DNA, 25 bp, Homo sapien
tgggagccaacttgaaaaggcttgc

SEQ ID NO: 3295549 - DNA, 25 bp, Homo sapien
ttaatccatacagaacaacccctgg

SEQ ID NO: 3295550 - DNA, 25 bp, Homo sapien
tgacatgggcagtgattacaagggt

SEQ ID NO: 3295551 - DNA, 25 bp, Homo sapien
aaagccaagactgcaggtcctctga

SEQ ID NO: 3295552 - DNA, 25 bp, Homo sapien
gaggagcctatggagatttaagaca

SEQ ID NO: 3295553 - DNA, 25 bp, Homo sapien
aaatgtggtaggcttctgaactggc

SEQ ID NO: 3295554 - DNA, 25 bp, Homo sapien
tactagttcccgttgttgtgccaaa

SEQ ID NO: 3295555 - DNA, 25 bp, Homo sapien
accagtactagttcccgttgttgtg

SEQ ID NO: 3295556 - DNA, 25 bp, Homo sapien
ttgttctgagtaccaccaaagagtc

SEQ ID NO: 3295557 - DNA, 25 bp, Homo sapien
gtgtattaaatcctccaaatcccag

SEQ ID NO: 3295558 - DNA, 25 bp, Homo sapien
agaacctgcagttgtagatgttgtc

SEQ ID NO: 3295559 - DNA, 25 bp, Homo sapien
cagtagtgcctgtgttagttggggc

SEQ ID NO: 3295560 - DNA, 25 bp, Homo sapien
agtgcctgtgttagttggggcagaa

SEQ ID NO: 3295561 - DNA, 25 bp, Homo sapien
tgtagatgttgtcccaaatcctcca

SEQ ID NO: 3295562 - DNA, 25 bp, Homo sapien
caaaggaagcataccaatatactta

SEQ ID NO: 3295563 - DNA, 25 bp, Homo sapien
aaaggaagcataccaatatacttac

SEQ ID NO: 3295564 - DNA, 25 bp, Homo sapien
tcaaaggaagcataccaatatactt

SEQ ID NO: 3295565 - DNA, 25 bp, Homo sapien
ttcaaaggaagcataccaatatact

SEQ ID NO: 3295566 - DNA, 25 bp, Homo sapien
caaatgtttgaaccattagtgtcga

SEQ ID NO: 3295567 - DNA, 25 bp, Homo sapien
ccaatgtggtatcaaaaagcctttc

SEQ ID NO: 3295568 - DNA, 25 bp, Homo sapien
cagataaatggaatgctagccaatc

SEQ ID NO: 3295569 - DNA, 25 bp, Homo sapien
caagagtaagctgcatgttgcatgc

SEQ ID NO: 3295570 - DNA, 25 bp, Homo sapien
caacccacgtgcatatgaaaatctt

SEQ ID NO: 3295571 - DNA, 25 bp, Homo sapien
tgaatgcaaagacgtctagcttacc

SEQ ID NO: 3295572 - DNA, 25 bp, Homo sapien
tacagtgtcactatgtaaagtaccc

SEQ ID NO: 3295573 - DNA, 25 bp, Homo sapien
tcttatagtatcctaatctgctgag

SEQ ID NO: 3295574 - DNA, 25 bp, Homo sapien
gagtcgccgaggtagtagaaacacc

SEQ ID NO: 3295575 - DNA, 25 bp, Homo sapien
taccaaaattgaacggagtcgccga

SEQ ID NO: 3295576 - DNA, 25 bp, Homo sapien
tattaaagttcactgcaggattagc

SEQ ID NO: 3295577 - DNA, 25 bp, Homo sapien
attaaacccactggcggtggagttg

SEQ ID NO: 3295578 - DNA, 25 bp, Homo sapien
ctggttttgctccaaacagtttaag

SEQ ID NO: 3295579 - DNA, 25 bp, Homo sapien
catgacggataaaccccacagcgag

SEQ ID NO: 3295580 - DNA, 25 bp, Homo sapien
tggaagaagcatgacggataaaccc

SEQ ID NO: 3295581 - DNA, 25 bp, Homo sapien
tggttttgctccaaacagtttaaga

SEQ ID NO: 3295582 - DNA, 25 bp, Homo sapien
aggatccccaggtcggagagtctcg

SEQ ID NO: 3295583 - DNA, 25 bp, Homo sapien
ggcaagcgagcttctagtgggaccc

SEQ ID NO: 3295584 - DNA, 25 bp, Homo sapien
gcgtcggcgggagattccaggatcc

SEQ ID NO: 3295585 - DNA, 25 bp, Homo sapien
aatgcctctaaagtctccgcgtcgg

SEQ ID NO: 3295586 - DNA, 25 bp, Homo sapien
gctgcagcggtaccggaggtgcccg

SEQ ID NO: 3295587 - DNA, 25 bp, Homo sapien
agggagccccaaaattgaaggccat

SEQ ID NO: 3295588 - DNA, 25 bp, Homo sapien
gtggctgcagcggtaccggaggtgc

SEQ ID NO: 3295589 - DNA, 25 bp, Homo sapien
gtgcccgagggagccccaaaattga

SEQ ID NO: 3295590 - DNA, 25 bp, Homo sapien
aaaccgccagtcagatcaccgagtt

SEQ ID NO: 3295591 - DNA, 25 bp, Homo sapien
cctttctgacctagcctaagaggcc

SEQ ID NO: 3295592 - DNA, 25 bp, Homo sapien
taggttactcctgcgacgcgcagcg

SEQ ID NO: 3295593 - DNA, 25 bp, Homo sapien
aaagcaggagaccaagtaggttact

SEQ ID NO: 3295594 - DNA, 25 bp, Homo sapien
caccttgtgtattctcccgttgacg

SEQ ID NO: 3295595 - DNA, 25 bp, Homo sapien
tttaacattccatggacagctggca

SEQ ID NO: 3295596 - DNA, 25 bp, Homo sapien
tcctgtaaatcattggcactccaaa

SEQ ID NO: 3295597 - DNA, 25 bp, Homo sapien
tcacaggagtggagatttttaacat

SEQ ID NO: 3295598 - DNA, 25 bp, Homo sapien
gccttggctcacctctccatgggat

SEQ ID NO: 3295599 - DNA, 25 bp, Homo sapien
tcacctctccatgggataacatgag

SEQ ID NO: 3295600 - DNA, 25 bp, Homo sapien
agcgttgtgggccttggctcacctc

SEQ ID NO: 3295601 - DNA, 25 bp, Homo sapien
ggataacatgaggatggtaccttct

SEQ ID NO: 3295602 - DNA, 25 bp, Homo sapien
tgaaacatttcattgcattaagggt

SEQ ID NO: 3295603 - DNA, 25 bp, Homo sapien
gaaacatttcattgcattaagggta

SEQ ID NO: 3295604 - DNA, 25 bp, Homo sapien
aatgaaacatttcattgcattaagg

SEQ ID NO: 3295605 - DNA, 25 bp, Homo sapien
aacatttcattgcattaagggtaga

SEQ ID NO: 3295606 - DNA, 25 bp, Homo sapien
gtgataatgtccagagggccaagga

SEQ ID NO: 3295607 - DNA, 25 bp, Homo sapien
tgcttacaatcacaaagcctttggg

SEQ ID NO: 3295608 - DNA, 25 bp, Homo sapien
gaaccgcatgaagtgaaccaactgt

SEQ ID NO: 3295609 - DNA, 25 bp, Homo sapien
gatgcggaccaccttttgcagaact

SEQ ID NO: 3295610 - DNA, 25 bp, Homo sapien
taagacatgcccaattatctagtta

SEQ ID NO: 3295611 - DNA, 25 bp, Homo sapien
gtttaatgaattgcctcttcaagag

SEQ ID NO: 3295612 - DNA, 25 bp, Homo sapien
tattagtatggataagtacatgcat

SEQ ID NO: 3295613 - DNA, 25 bp, Homo sapien
aaaggttctatcttgattctataga

SEQ ID NO: 3295614 - DNA, 25 bp, Homo sapien
tcacaggaagtatagggcacacgtt

SEQ ID NO: 3295615 - DNA, 25 bp, Homo sapien
gcttatcactatcaactcatgggta

SEQ ID NO: 3295616 - DNA, 25 bp, Homo sapien
tctgaacactgtgacatatgatggc

SEQ ID NO: 3295617 - DNA, 25 bp, Homo sapien
catatttggcaagggcgactcagga

SEQ ID NO: 3295618 - DNA, 25 bp, Homo sapien
gaatgttcctatcacttgccagcgc

SEQ ID NO: 3295619 - DNA, 25 bp, Homo sapien
acctctggccagaatgttcctatca

SEQ ID NO: 3295620 - DNA, 25 bp, Homo sapien
gctctttaacctctggccagaatgt

SEQ ID NO: 3295621 - DNA, 25 bp, Homo sapien
atgttcctatcacttgccagcgccg

SEQ ID NO: 3295622 - DNA, 25 bp, Homo sapien
cgtcatcgtccaggtcaggacagct

SEQ ID NO: 3295623 - DNA, 25 bp, Homo sapien
agggtttccccacgtcatcgtccag

SEQ ID NO: 3295624 - DNA, 25 bp, Homo sapien
caggcaacaagcctgcaaggaggtg

SEQ ID NO: 3295625 - DNA, 25 bp, Homo sapien
tttcttcaccaagcaaaggcaatgt

SEQ ID NO: 3295626 - DNA, 25 bp, Homo sapien
aggttcgaatgaggggtgctctttc

SEQ ID NO: 3295627 - DNA, 25 bp, Homo sapien
ttaggttcgaatgaggggtgctctt

SEQ ID NO: 3295628 - DNA, 25 bp, Homo sapien
taggttcgaatgaggggtgctcttt

SEQ ID NO: 3295629 - DNA, 25 bp, Homo sapien
gttcgaatgaggggtgctctttcat

SEQ ID NO: 3295630 - DNA, 25 bp, Homo sapien
ctccccagtgtgaaaagtttgggtg

SEQ ID NO: 3295631 - DNA, 25 bp, Homo sapien
agagagaaaacaagttagatgttca

SEQ ID NO: 3295632 - DNA, 25 bp, Homo sapien
gaaaacaagttagatgttcatgtca

SEQ ID NO: 3295633 - DNA, 25 bp, Homo sapien
caagttagatgttcatgtcagaaac

SEQ ID NO: 3295634 - DNA, 25 bp, Homo sapien
taccagagcagtacccttctctgtg

SEQ ID NO: 3295635 - DNA, 25 bp, Homo sapien
cttgttcttgaagattcagcaggcc

SEQ ID NO: 3295636 - DNA, 25 bp, Homo sapien
ctcaataccagagcagtacccttct

SEQ ID NO: 3295637 - DNA, 25 bp, Homo sapien
tcccaccctcaataccagagcagta

SEQ ID NO: 3295638 - DNA, 25 bp, Homo sapien
aatggaagaatatggaagtcaggga

SEQ ID NO: 3295639 - DNA, 25 bp, Homo sapien
taatggaagaatatggaagtcaggg

SEQ ID NO: 3295640 - DNA, 25 bp, Homo sapien
ataatggaagaatatggaagtcagg

SEQ ID NO: 3295641 - DNA, 25 bp, Homo sapien
gctcttactatatgctaacactggg

SEQ ID NO: 3295642 - DNA, 25 bp, Homo sapien
tagggtcgtatagctgttaagtggc

SEQ ID NO: 3295643 - DNA, 25 bp, Homo sapien
ttggtccagcagtaaaataagcacg

SEQ ID NO: 3295644 - DNA, 25 bp, Homo sapien
ttatcctaataagccagctgacagc

SEQ ID NO: 3295645 - DNA, 25 bp, Homo sapien
tgcatgcaagccaggtaaaaaccaa

SEQ ID NO: 3295646 - DNA, 25 bp, Homo sapien
ccagcgccatgatgatgtagggtat

SEQ ID NO: 3295647 - DNA, 25 bp, Homo sapien
gactcgccgtctctttatcaatgtg

SEQ ID NO: 3295648 - DNA, 25 bp, Homo sapien
tcatagacttcagtcgactcgccgt

SEQ ID NO: 3295649 - DNA, 25 bp, Homo sapien
tgagtctgaaaacacccgtggctcc

SEQ ID NO: 3295650 - DNA, 25 bp, Homo sapien
tccaaatcagctctcagacacaggc

SEQ ID NO: 3295651 - DNA, 25 bp, Homo sapien
tctgtttcctacgtgagcagctccc

SEQ ID NO: 3295652 - DNA, 25 bp, Homo sapien
aaagggctagctggcatctatctga

SEQ ID NO: 3295653 - DNA, 25 bp, Homo sapien
aggtacatcactgggaaaaccatgg

SEQ ID NO: 3295654 - DNA, 25 bp, Homo sapien
catggttctaatgtctcccgtttca

SEQ ID NO: 3295655 - DNA, 25 bp, Homo sapien
accatggttctaatgtctcccgttt

SEQ ID NO: 3295656 - DNA, 25 bp, Homo sapien
ctcattgaggtacatcactgggaaa

SEQ ID NO: 3295657 - DNA, 25 bp, Homo sapien
gaaggctccagtcgacagaacaaaa

SEQ ID NO: 3295658 - DNA, 25 bp, Homo sapien
tctttgcaacaagagccaactgagc

SEQ ID NO: 3295659 - DNA, 25 bp, Homo sapien
acaatggcacactttcccggacaga

SEQ ID NO: 3295660 - DNA, 25 bp, Homo sapien
gagaggcctaggatcaccacaagta

SEQ ID NO: 3295661 - DNA, 25 bp, Homo sapien
cttggctgcttttaggattattcca

SEQ ID NO: 3295662 - DNA, 25 bp, Homo sapien
tgatttggaacctcttggctgcttt

SEQ ID NO: 3295663 - DNA, 25 bp, Homo sapien
caaagtcatctaattttttgacata

SEQ ID NO: 3295664 - DNA, 25 bp, Homo sapien
ataaatgttgatttggaacctcttg

SEQ ID NO: 3295665 - DNA, 25 bp, Homo sapien
gaagtttgccaaaagtgactgaggt

SEQ ID NO: 3295666 - DNA, 25 bp, Homo sapien
tctcgtctatgaatacaggagtaaa

SEQ ID NO: 3295667 - DNA, 25 bp, Homo sapien
tatatgttgaggtccaaggctagca

SEQ ID NO: 3295668 - DNA, 25 bp, Homo sapien
taaccttatcgatctgtgtcccaag

SEQ ID NO: 3295669 - DNA, 25 bp, Homo sapien
ggtgaacaatgtatagacagaataa

SEQ ID NO: 3295670 - DNA, 25 bp, Homo sapien
ccacaaaattcagccttctaattac

SEQ ID NO: 3295671 - DNA, 25 bp, Homo sapien
aattacagggctatgagacaatgcc

SEQ ID NO: 3295672 - DNA, 25 bp, Homo sapien
tcaggactaaactggtgaacaatgt

SEQ ID NO: 3295673 - DNA, 25 bp, Homo sapien
tgatttgggtgcatgccttctatgg

SEQ ID NO: 3295674 - DNA, 25 bp, Homo sapien
catctgcttggtaaaagtgtgggaa

SEQ ID NO: 3295675 - DNA, 25 bp, Homo sapien
cctctcatctgcttggtaaaagtgt

SEQ ID NO: 3295676 - DNA, 25 bp, Homo sapien
tatggcagaaacaaacctctcatct

SEQ ID NO: 3295677 - DNA, 25 bp, Homo sapien
acagaaatgaatgatgctgttttta

SEQ ID NO: 3295678 - DNA, 25 bp, Homo sapien
ctgcatttgaaggaaaacagaaatg

SEQ ID NO: 3295679 - DNA, 25 bp, Homo sapien
tgctgtttttaaaatctaagctgag

SEQ ID NO: 3295680 - DNA, 25 bp, Homo sapien
aggaaaacagaaatgaatgatgctg

SEQ ID NO: 3295681 - DNA, 25 bp, Homo sapien
gacagctagccatcaggctatgaag

SEQ ID NO: 3295682 - DNA, 25 bp, Homo sapien
gctatgaaggcagaatactaagtga

SEQ ID NO: 3295683 - DNA, 25 bp, Homo sapien
tgaagggtgttgtacctcaaagcac

SEQ ID NO: 3295684 - DNA, 25 bp, Homo sapien
tcccaacagcccagtaaagtcagaa

SEQ ID NO: 3295685 - DNA, 25 bp, Homo sapien
taaaggaaacctattctagatctgg

SEQ ID NO: 3295686 - DNA, 25 bp, Homo sapien
gagcttgtcggcaagttatttaaat

SEQ ID NO: 3295687 - DNA, 25 bp, Homo sapien
catggcttaaggaactcatccctca

SEQ ID NO: 3295688 - DNA, 25 bp, Homo sapien
gagggacccaacaattgctgccagg

SEQ ID NO: 3295689 - DNA, 25 bp, Homo sapien
ggagaaagggactacacagagagct

SEQ ID NO: 3295690 - DNA, 25 bp, Homo sapien
taaagaggaattacagcccaagagg

SEQ ID NO: 3295691 - DNA, 25 bp, Homo sapien
gggaggagtcgcatcaaaatcacgt

SEQ ID NO: 3295692 - DNA, 25 bp, Homo sapien
caggccgctgaatgtctactatcta

SEQ ID NO: 3295693 - DNA, 25 bp, Homo sapien
cagtgactggcatacatcaggtgct

SEQ ID NO: 3295694 - DNA, 25 bp, Homo sapien
aactgatctttctattgggctgaca

SEQ ID NO: 3295695 - DNA, 25 bp, Homo sapien
tcaggtgcttagtaaacatgagcta

SEQ ID NO: 3295696 - DNA, 25 bp, Homo sapien
taagacttctaaaccactgtccaga

SEQ ID NO: 3295697 - DNA, 25 bp, Homo sapien
gaagccggcattgtctgacgtattg

SEQ ID NO: 3295698 - DNA, 25 bp, Homo sapien
cattcttgcagatgctgacattcag

SEQ ID NO: 3295699 - DNA, 25 bp, Homo sapien
tccctcaggtatacagaagccggca

SEQ ID NO: 3295700 - DNA, 25 bp, Homo sapien
actttataccgaaaggcaggcagtc

SEQ ID NO: 3295701 - DNA, 25 bp, Homo sapien
taaggtagaacaggcagcgatggcc

SEQ ID NO: 3295702 - DNA, 25 bp, Homo sapien
gaacctgtctacgtaatgctcttga

SEQ ID NO: 3295703 - DNA, 25 bp, Homo sapien
tcctttgaaggctggccggaagagc

SEQ ID NO: 3295704 - DNA, 25 bp, Homo sapien
gagctgttgatacatctctcgcaag

SEQ ID NO: 3295705 - DNA, 25 bp, Homo sapien
catctttggttattagtgggtgaaa

SEQ ID NO: 3295706 - DNA, 25 bp, Homo sapien
tgtctgttatccaccagtcaagtga

SEQ ID NO: 3295707 - DNA, 25 bp, Homo sapien
tattgcacttgtctgttatccacca

SEQ ID NO: 3295708 - DNA, 25 bp, Homo sapien
tgggaagacataaaggacctcatct

SEQ ID NO: 3295709 - DNA, 25 bp, Homo sapien
tgtagctactacacatcactcaatg

SEQ ID NO: 3295710 - DNA, 25 bp, Homo sapien
cagctttcatagaggcaatggccaa

SEQ ID NO: 3295711 - DNA, 25 bp, Homo sapien
aaagtaggtccctggcccaaatcag

SEQ ID NO: 3295712 - DNA, 25 bp, Homo sapien
aatgactactaagcaagagtgggac

SEQ ID NO: 3295713 - DNA, 25 bp, Homo sapien
aagttaaggtaactgtcttctccag

SEQ ID NO: 3295714 - DNA, 25 bp, Homo sapien
agttagaaaaacatagtctccatca

SEQ ID NO: 3295715 - DNA, 25 bp, Homo sapien
catagtctccatcattagtcccatt

SEQ ID NO: 3295716 - DNA, 25 bp, Homo sapien
attccattccacaatttttgtaaag

SEQ ID NO: 3295717 - DNA, 25 bp, Homo sapien
cctccaatctgttcaaagccttaca

SEQ ID NO: 3295718 - DNA, 25 bp, Homo sapien
ccctcaataatgagtggctgggccc

SEQ ID NO: 3295719 - DNA, 25 bp, Homo sapien
ttttgtaggtgtgattaatatctac

SEQ ID NO: 3295720 - DNA, 25 bp, Homo sapien
tttggtcaaacactagcccagatgg

SEQ ID NO: 3295721 - DNA, 25 bp, Homo sapien
aactcaaagttaatctggcttgggg

SEQ ID NO: 3295722 - DNA, 25 bp, Homo sapien
agttaatctggcttggggtgcccca

SEQ ID NO: 3295723 - DNA, 25 bp, Homo sapien
tctaggcaatttctagaagaaactc

SEQ ID NO: 3295724 - DNA, 25 bp, Homo sapien
tttcacacactctataagataactt

SEQ ID NO: 3295725 - DNA, 25 bp, Homo sapien
tcgggcctgaaaacatggataaggg

SEQ ID NO: 3295726 - DNA, 25 bp, Homo sapien
tagccccagagcaattcgtcaactg

SEQ ID NO: 3295727 - DNA, 25 bp, Homo sapien
ccaaaatagggagagatatcgggcc

SEQ ID NO: 3295728 - DNA, 25 bp, Homo sapien
tctgctgataggctttcaacatggc

SEQ ID NO: 3295729 - DNA, 25 bp, Homo sapien
aagtgcacctgggaccactctatga

SEQ ID NO: 3295730 - DNA, 25 bp, Homo sapien
aggaagtgcacctgggaccactcta

SEQ ID NO: 3295731 - DNA, 25 bp, Homo sapien
gtgcacctgggaccactctatgaca

SEQ ID NO: 3295732 - DNA, 25 bp, Homo sapien
gcacctgggaccactctatgacagt

SEQ ID NO: 3295733 - DNA, 25 bp, Homo sapien
ggccagaggctcattataaacccga

SEQ ID NO: 3295734 - DNA, 25 bp, Homo sapien
tacacccctgggactaggtggcagg

SEQ ID NO: 3295735 - DNA, 25 bp, Homo sapien
tcatactgtctaggtcctgggtcca

SEQ ID NO: 3295736 - DNA, 25 bp, Homo sapien
cagctgcatatggagcggtcaccta

SEQ ID NO: 3295737 - DNA, 25 bp, Homo sapien
gctaacagcagatattgttgttcca

SEQ ID NO: 3295738 - DNA, 25 bp, Homo sapien
tctccaacagattggtctcgttcaa

SEQ ID NO: 3295739 - DNA, 25 bp, Homo sapien
attggtctcgttcaaaaacataggc

SEQ ID NO: 3295740 - DNA, 25 bp, Homo sapien
aaaacataggccttgttgctaacag

SEQ ID NO: 3295741 - DNA, 25 bp, Homo sapien
aaacgaggcctaggatagagtcttc

SEQ ID NO: 3295742 - DNA, 25 bp, Homo sapien
caaagccgatgaactctctcctggg

SEQ ID NO: 3295743 - DNA, 25 bp, Homo sapien
gccttaaaaagctggagatcgaagc

SEQ ID NO: 3295744 - DNA, 25 bp, Homo sapien
tatagagactgcagctactaagcct

SEQ ID NO: 3295745 - DNA, 25 bp, Homo sapien
gctgaaggctgaaactggtacgtaa

SEQ ID NO: 3295746 - DNA, 25 bp, Homo sapien
agttcttagaaagcgcctggtgcca

SEQ ID NO: 3295747 - DNA, 25 bp, Homo sapien
catagcagcacagggatttttctca

SEQ ID NO: 3295748 - DNA, 25 bp, Homo sapien
tggtacgtaaaaatgcgcctcggtg

SEQ ID NO: 3295749 - DNA, 25 bp, Homo sapien
cagcatgtagtattgccccacttca

SEQ ID NO: 3295750 - DNA, 25 bp, Homo sapien
agaagagtgagaacttgatcccaag

SEQ ID NO: 3295751 - DNA, 25 bp, Homo sapien
gaaacgcctgtaggatgaaaccagc

SEQ ID NO: 3295752 - DNA, 25 bp, Homo sapien
tccaaggatcttaggagctgtatgc

SEQ ID NO: 3295753 - DNA, 25 bp, Homo sapien
ggtagctgcccccgtgattaaatta

SEQ ID NO: 3295754 - DNA, 25 bp, Homo sapien
agggtagctgcccccgtgattaaat

SEQ ID NO: 3295755 - DNA, 25 bp, Homo sapien
tagctgcccccgtgattaaattacc

SEQ ID NO: 3295756 - DNA, 25 bp, Homo sapien
gtagctgcccccgtgattaaattac

SEQ ID NO: 3295757 - DNA, 25 bp, Homo sapien
cctctggattggtgacattgaagaa

SEQ ID NO: 3295758 - DNA, 25 bp, Homo sapien
gatctcctctggattggtgacattg

SEQ ID NO: 3295759 - DNA, 25 bp, Homo sapien
ctgtaggtgtatggccccacttctt

SEQ ID NO: 3295760 - DNA, 25 bp, Homo sapien
gaaatagaactgagtatacacaggc

SEQ ID NO: 3295761 - DNA, 25 bp, Homo sapien
ctcagtaccattccttaacacaatt

SEQ ID NO: 3295762 - DNA, 25 bp, Homo sapien
cgtggcagtagaggcctgataaata

SEQ ID NO: 3295763 - DNA, 25 bp, Homo sapien
gtggcagtagaggcctgataaatac

SEQ ID NO: 3295764 - DNA, 25 bp, Homo sapien
tggcagtagaggcctgataaataca

SEQ ID NO: 3295765 - DNA, 25 bp, Homo sapien
tcccttgttggccagccctgactgt

SEQ ID NO: 3295766 - DNA, 25 bp, Homo sapien
ggagacagtcaacctgccagcacgt

SEQ ID NO: 3295767 - DNA, 25 bp, Homo sapien
gaagaggaagtcaaaggtgtaaaca

SEQ ID NO: 3295768 - DNA, 25 bp, Homo sapien
agttctgcatccctattactgggag

SEQ ID NO: 3295769 - DNA, 25 bp, Homo sapien
gcaggagcagggacaacgtccccgc

SEQ ID NO: 3295770 - DNA, 25 bp, Homo sapien
agcagcgtgacgctggtcaccagca

SEQ ID NO: 3295771 - DNA, 25 bp, Homo sapien
gccaccagcagcgtgacgctggtca

SEQ ID NO: 3295772 - DNA, 25 bp, Homo sapien
ccgtgtagaagcagcatcggcccat

SEQ ID NO: 3295773 - DNA, 25 bp, Homo sapien
agccgccgcagaggcgtcgaagacc

SEQ ID NO: 3295774 - DNA, 25 bp, Homo sapien
agcgcagctcgggagagtgcaggga

SEQ ID NO: 3295775 - DNA, 25 bp, Homo sapien
gcgcacggttcgtgcgcgcagctct

SEQ ID NO: 3295776 - DNA, 25 bp, Homo sapien
agggagcgcgcagggacgtgacgtt

SEQ ID NO: 3295777 - DNA, 25 bp, Homo sapien
caaactccataggtacccactcctc

SEQ ID NO: 3295778 - DNA, 25 bp, Homo sapien
cagattttctgtttgcgggctccat

SEQ ID NO: 3295779 - DNA, 25 bp, Homo sapien
gggcaaactccataggtacccactc

SEQ ID NO: 3295780 - DNA, 25 bp, Homo sapien
ctggaccaccaatcccagggtactc

SEQ ID NO: 3295781 - DNA, 25 bp, Homo sapien
agctgggaccacaggggtttcttca

SEQ ID NO: 3295782 - DNA, 25 bp, Homo sapien
gctgggaccacaggggtttcttcat

SEQ ID NO: 3295783 - DNA, 25 bp, Homo sapien
tgtgaagctaaagatggcattcttt

SEQ ID NO: 3295784 - DNA, 25 bp, Homo sapien
tgaatggtaagacagaattgtactg

SEQ ID NO: 3295785 - DNA, 25 bp, Homo sapien
gacttttcctttgtgaagctaaaga

SEQ ID NO: 3295786 - DNA, 25 bp, Homo sapien
aatggtaagacagaattgtactggg

SEQ ID NO: 3295787 - DNA, 25 bp, Homo sapien
cacttggtctgcttccacattttaa

SEQ ID NO: 3295788 - DNA, 25 bp, Homo sapien
attttgcttattcagtcatccacca

SEQ ID NO: 3295789 - DNA, 25 bp, Homo sapien
ggcaaccaccatttgactactctaa

SEQ ID NO: 3295790 - DNA, 25 bp, Homo sapien
tctctttgatactgctatcacttct

SEQ ID NO: 3295791 - DNA, 25 bp, Homo sapien
gaaacaaagaagtgtgaatcctcca

SEQ ID NO: 3295792 - DNA, 25 bp, Homo sapien
tcaaggactccccataaagcctgtg

SEQ ID NO: 3295793 - DNA, 25 bp, Homo sapien
cattaggttatggatctagtctgca

SEQ ID NO: 3295794 - DNA, 25 bp, Homo sapien
ttggataatcttagcacccttgtgc

SEQ ID NO: 3295795 - DNA, 25 bp, Homo sapien
tctctgtgctgaggattagcctgaa

SEQ ID NO: 3295796 - DNA, 25 bp, Homo sapien
caagttgtgtgcaaactggtccagg

SEQ ID NO: 3295797 - DNA, 25 bp, Homo sapien
caatcagagccctaatatttggagg

SEQ ID NO: 3295798 - DNA, 25 bp, Homo sapien
ttttctaagcctgtccctgggcacg

SEQ ID NO: 3295799 - DNA, 25 bp, Homo sapien
tggaattttgacaacacctcctgct

SEQ ID NO: 3295800 - DNA, 25 bp, Homo sapien
taatcttaaattcatggcactccac

SEQ ID NO: 3295801 - DNA, 25 bp, Homo sapien
tagtacctgatactagctctgggtc

SEQ ID NO: 3295802 - DNA, 25 bp, Homo sapien
tactgcaaactaacttggatttggg

SEQ ID NO: 3295803 - DNA, 25 bp, Homo sapien
tgatccagtctatggcgcgtttcgg

SEQ ID NO: 3295804 - DNA, 25 bp, Homo sapien
aatccgtattatgtggccacgtgcc

SEQ ID NO: 3295805 - DNA, 25 bp, Homo sapien
gatgagcaaaaaacgcctgatccag

SEQ ID NO: 3295806 - DNA, 25 bp, Homo sapien
ttgtctgctagaagtgagtcgaggc

SEQ ID NO: 3295807 - DNA, 25 bp, Homo sapien
gaggttgtacttgtggttaatgtta

SEQ ID NO: 3295808 - DNA, 25 bp, Homo sapien
tgctgagggtgataagtgcattccc

SEQ ID NO: 3295809 - DNA, 25 bp, Homo sapien
actgggcagctccaatgtgactgct

SEQ ID NO: 3295810 - DNA, 25 bp, Homo sapien
ttaatgttatgtggctccccaggag

SEQ ID NO: 3295811 - DNA, 25 bp, Homo sapien
gcaatgcctccattccctctcctgg

SEQ ID NO: 3295812 - DNA, 25 bp, Homo sapien
gcaaagcaatgcctccattccctct

SEQ ID NO: 3295813 - DNA, 25 bp, Homo sapien
tctatcaacttcagttctgcaaagc

SEQ ID NO: 3295814 - DNA, 25 bp, Homo sapien
tcagttctctatcaacttcagttct

SEQ ID NO: 3295815 - DNA, 25 bp, Homo sapien
ctgactttgcaaacagagttgcttt

SEQ ID NO: 3295816 - DNA, 25 bp, Homo sapien
tgactttgcaaacagagttgctttt

SEQ ID NO: 3295817 - DNA, 25 bp, Homo sapien
cacgcccaaagaggacgagactgga

SEQ ID NO: 3295818 - DNA, 25 bp, Homo sapien
gcacttgggttcttcacgcgggaca

SEQ ID NO: 3295819 - DNA, 25 bp, Homo sapien
cagttcatacagatgcgtgcgcatt

SEQ ID NO: 3295820 - DNA, 25 bp, Homo sapien
caaacttatctgtaggagctcgtcc

SEQ ID NO: 3295821 - DNA, 25 bp, Homo sapien
ttcccaggctggttggtacgcgcag

SEQ ID NO: 3295822 - DNA, 25 bp, Homo sapien
tgcgattccgggaggccatcagagt

SEQ ID NO: 3295823 - DNA, 25 bp, Homo sapien
atgcggagcaggagaaagacgcccc

SEQ ID NO: 3295824 - DNA, 25 bp, Homo sapien
acatctgccagagctttgaggttca

SEQ ID NO: 3295825 - DNA, 25 bp, Homo sapien
tctgccaggcgttgttatgtgctat

SEQ ID NO: 3295826 - DNA, 25 bp, Homo sapien
tgcccagggttcaagcttgagcctt

SEQ ID NO: 3295827 - DNA, 25 bp, Homo sapien
gtcacggagcaaaaacattaaccag

SEQ ID NO: 3295828 - DNA, 25 bp, Homo sapien
caggtgtaaactgtggtcacggagc

SEQ ID NO: 3295829 - DNA, 25 bp, Homo sapien
cagcacgcctgtacttgaaaatgaa

SEQ ID NO: 3295830 - DNA, 25 bp, Homo sapien
caaagttcacctttgactggaggga

SEQ ID NO: 3295831 - DNA, 25 bp, Homo sapien
gcaccagaggccgatttcttgctca

SEQ ID NO: 3295832 - DNA, 25 bp, Homo sapien
ggaatgcccaaacatgcccatgagg

SEQ ID NO: 3295833 - DNA, 25 bp, Homo sapien
tgtgagggattcaagaatagtttat

SEQ ID NO: 3295834 - DNA, 25 bp, Homo sapien
caagaatagtttatttcaaaataga

SEQ ID NO: 3295835 - DNA, 25 bp, Homo sapien
aagaatagtttatttcaaaatagag

SEQ ID NO: 3295836 - DNA, 25 bp, Homo sapien
gagggattcaagaatagtttatttc

SEQ ID NO: 3295837 - DNA, 25 bp, Homo sapien
ttacaagacagggtatcttttatta

SEQ ID NO: 3295838 - DNA, 25 bp, Homo sapien
aagtacacagggcactaattacgag

SEQ ID NO: 3295839 - DNA, 25 bp, Homo sapien
tacgagtaacaccacaattaattgg

SEQ ID NO: 3295840 - DNA, 25 bp, Homo sapien
ggcactaattacgagtaacaccaca

SEQ ID NO: 3295841 - DNA, 25 bp, Homo sapien
ctgtaaagaataggcaagcaacgag

SEQ ID NO: 3295842 - DNA, 25 bp, Homo sapien
ttcctggtcttttactttctgtatc

SEQ ID NO: 3295843 - DNA, 25 bp, Homo sapien
ttcttgatttctgatcattgaagac

SEQ ID NO: 3295844 - DNA, 25 bp, Homo sapien
cctggtcttttactttctgtatcct

SEQ ID NO: 3295845 - DNA, 25 bp, Homo sapien
actttctgtatcctcttttcttgat

SEQ ID NO: 3295846 - DNA, 25 bp, Homo sapien
aggctttaattctactatgtgctac

SEQ ID NO: 3295847 - DNA, 25 bp, Homo sapien
catgttctgagctcaagacattctt

SEQ ID NO: 3295848 - DNA, 25 bp, Homo sapien
gatagtatagaatagacatgttctg

SEQ ID NO: 3295849 - DNA, 25 bp, Homo sapien
tgtgctacttaaaagatcagcttga

SEQ ID NO: 3295850 - DNA, 25 bp, Homo sapien
ctaacgtgcagctccaacttggatg

SEQ ID NO: 3295851 - DNA, 25 bp, Homo sapien
gacttttgctccaagagccactgca

SEQ ID NO: 3295852 - DNA, 25 bp, Homo sapien
atggacagagcaacgtgtggagact

SEQ ID NO: 3295853 - DNA, 25 bp, Homo sapien
agacagggctaacgtgcagctccaa

SEQ ID NO: 3295854 - DNA, 25 bp, Homo sapien
cctttcagcaggtctatagacagga

SEQ ID NO: 3295855 - DNA, 25 bp, Homo sapien
ctttcagcaggtctatagacaggag

SEQ ID NO: 3295856 - DNA, 25 bp, Homo sapien
caataccctttcagcaggtctatag

SEQ ID NO: 3295857 - DNA, 25 bp, Homo sapien
taccctttcagcaggtctatagaca

SEQ ID NO: 3295858 - DNA, 25 bp, Homo sapien
aacattctcatgagcgaggaagatc

SEQ ID NO: 3295859 - DNA, 25 bp, Homo sapien
gaggaagatctctccaaaaacgtac

SEQ ID NO: 3295860 - DNA, 25 bp, Homo sapien
ggtgaacattctcatgagcgaggaa

SEQ ID NO: 3295861 - DNA, 25 bp, Homo sapien
catgagcgaggaagatctctccaaa

SEQ ID NO: 3295862 - DNA, 25 bp, Homo sapien
gagtttgcaagctttctagtctgtt

SEQ ID NO: 3295863 - DNA, 25 bp, Homo sapien
gtaaatcttctaccagagtttgcaa

SEQ ID NO: 3295864 - DNA, 25 bp, Homo sapien
tcctgttgtttctattggcggagac

SEQ ID NO: 3295865 - DNA, 25 bp, Homo sapien
ttctagtctgttctgaagcttcctg

SEQ ID NO: 3295866 - DNA, 25 bp, Homo sapien
gccagtgcccacgttagttctgtca

SEQ ID NO: 3295867 - DNA, 25 bp, Homo sapien
gatctaatatagaaactgcaccatt

SEQ ID NO: 3295868 - DNA, 25 bp, Homo sapien
tggatgccaacatgatcacactgaa

SEQ ID NO: 3295869 - DNA, 25 bp, Homo sapien
ttcaaggtatgtgaggccagtgccc

SEQ ID NO: 3295870 - DNA, 25 bp, Homo sapien
ataggtttggcagatctatactgtg

SEQ ID NO: 3295871 - DNA, 25 bp, Homo sapien
gaaccttcaactgaactagttagga

SEQ ID NO: 3295872 - DNA, 25 bp, Homo sapien
ttaggagtgagtgcactggagactt

SEQ ID NO: 3295873 - DNA, 25 bp, Homo sapien
gatgtggaacctattgaaccttcaa

SEQ ID NO: 3295874 - DNA, 25 bp, Homo sapien
aggagaagaattgaatgaacgagaa

SEQ ID NO: 3295875 - DNA, 25 bp, Homo sapien
ggagaagaattgaatgaacgagaag

SEQ ID NO: 3295876 - DNA, 25 bp, Homo sapien
gcaaccagagggatcttccctgtct

SEQ ID NO: 3295877 - DNA, 25 bp, Homo sapien
cttccctgtctcctgcgtgtaatgt

SEQ ID NO: 3295878 - DNA, 25 bp, Homo sapien
gtctcctgcgtgtaatgtgactggc

SEQ ID NO: 3295879 - DNA, 25 bp, Homo sapien
gcagatgtgaatgtgaagcaaccag

SEQ ID NO: 3295880 - DNA, 25 bp, Homo sapien
taagaatggtaatgcaagcattcca

SEQ ID NO: 3295881 - DNA, 25 bp, Homo sapien
aagaatggtaatgcaagcattccat

SEQ ID NO: 3295882 - DNA, 25 bp, Homo sapien
ataagaatggtaatgcaagcattcc

SEQ ID NO: 3295883 - DNA, 25 bp, Homo sapien
tatattctaagggtctactgcagtg

SEQ ID NO: 3295884 - DNA, 25 bp, Homo sapien
cactgtattttgatcaggcagcaga

SEQ ID NO: 3295885 - DNA, 25 bp, Homo sapien
cagtgcatggcacattacagacagt

SEQ ID NO: 3295886 - DNA, 25 bp, Homo sapien
tagtatcatatacccaggtgagacg

SEQ ID NO: 3295887 - DNA, 25 bp, Homo sapien
ggagtccctcaacgagttgttgctt

SEQ ID NO: 3295888 - DNA, 25 bp, Homo sapien
tcacttgatttgcttccttcagtgg

SEQ ID NO: 3295889 - DNA, 25 bp, Homo sapien
acttgatttgcttccttcagtggag

SEQ ID NO: 3295890 - DNA, 25 bp, Homo sapien
cttcagtggagtccctcaacgagtt

SEQ ID NO: 3295891 - DNA, 25 bp, Homo sapien
ctgttggtagagggatgggagaaat

SEQ ID NO: 3295892 - DNA, 25 bp, Homo sapien
tgttggtagagggatgggagaaatc

SEQ ID NO: 3295893 - DNA, 25 bp, Homo sapien
atggcacatgtctgatctcaggctg

SEQ ID NO: 3295894 - DNA, 25 bp, Homo sapien
tatggcacatgtctgatctcaggct

SEQ ID NO: 3295895 - DNA, 25 bp, Homo sapien
tggcacatgtctgatctcaggctgg

SEQ ID NO: 3295896 - DNA, 25 bp, Homo sapien
ctatggcacatgtctgatctcaggc

SEQ ID NO: 3295897 - DNA, 25 bp, Homo sapien
gatgagctttcccattctgtgtgca

SEQ ID NO: 3295898 - DNA, 25 bp, Homo sapien
cattcaagagatgagctttcccatt

SEQ ID NO: 3295899 - DNA, 25 bp, Homo sapien
agctttcccattctgtgtgcacaca

SEQ ID NO: 3295900 - DNA, 25 bp, Homo sapien
tttcccattctgtgtgcacacagcc

SEQ ID NO: 3295901 - DNA, 25 bp, Homo sapien
ccttcagtgtgttagcttttgtaga

SEQ ID NO: 3295902 - DNA, 25 bp, Homo sapien
acagctggctcctcattgatcacgc

SEQ ID NO: 3295903 - DNA, 25 bp, Homo sapien
ggtcccttgttggatcttccttcag

SEQ ID NO: 3295904 - DNA, 25 bp, Homo sapien
tgatcacgcttctcaactcttggag

SEQ ID NO: 3295905 - DNA, 25 bp, Homo sapien
ttataaaagggcactaatgccgggc

SEQ ID NO: 3295906 - DNA, 25 bp, Homo sapien
aacaagctctctcaagcctgtttta

SEQ ID NO: 3295907 - DNA, 25 bp, Homo sapien
taaaagggcactaatgccgggcgcg

SEQ ID NO: 3295908 - DNA, 25 bp, Homo sapien
aaacaagctctctcaagcctgtttt

SEQ ID NO: 3295909 - DNA, 25 bp, Homo sapien
tttgcgtaatggatcataagactgg

SEQ ID NO: 3295910 - DNA, 25 bp, Homo sapien
tgcgtaatggatcataagactggtt

SEQ ID NO: 3295911 - DNA, 25 bp, Homo sapien
tcatttgcgtaatggatcataagac

SEQ ID NO: 3295912 - DNA, 25 bp, Homo sapien
cgtaatggatcataagactggttac

SEQ ID NO: 3295913 - DNA, 25 bp, Homo sapien
gaagctggctgtagactgcgaagat

SEQ ID NO: 3295914 - DNA, 25 bp, Homo sapien
gcgaagatggtacattagaatgaga

SEQ ID NO: 3295915 - DNA, 25 bp, Homo sapien
ctggagaaggcgtggtttcaatgaa

SEQ ID NO: 3295916 - DNA, 25 bp, Homo sapien
agaatttgaggtgtatccagggccc

SEQ ID NO: 3295917 - DNA, 25 bp, Homo sapien
acaatatagaggtaagcaaaataac

SEQ ID NO: 3295918 - DNA, 25 bp, Homo sapien
gaaaacaatatagaggtaagcaaaa

SEQ ID NO: 3295919 - DNA, 25 bp, Homo sapien
aatatagaggtaagcaaaataactg

SEQ ID NO: 3295920 - DNA, 25 bp, Homo sapien
tggaaaacaatatagaggtaagcaa

SEQ ID NO: 3295921 - DNA, 25 bp, Homo sapien
gttgaagttttaagcgcactgattc

SEQ ID NO: 3295922 - DNA, 25 bp, Homo sapien
gttttaagcgcactgattcttgctc

SEQ ID NO: 3295923 - DNA, 25 bp, Homo sapien
ttgctcctgacgctgtattatatct

SEQ ID NO: 3295924 - DNA, 25 bp, Homo sapien
agtgtgttgaagttttaagcgcact

SEQ ID NO: 3295925 - DNA, 25 bp, Homo sapien
aaataaccataactggctgggcatg

SEQ ID NO: 3295926 - DNA, 25 bp, Homo sapien
gactgtattctaccaagtacccaag

SEQ ID NO: 3295927 - DNA, 25 bp, Homo sapien
actaaggatggaatgagcaaacagc

SEQ ID NO: 3295928 - DNA, 25 bp, Homo sapien
gaactgtgagcaactggaggccatg

SEQ ID NO: 3295929 - DNA, 25 bp, Homo sapien
tctgtggcaacagtactcaattcct

SEQ ID NO: 3295930 - DNA, 25 bp, Homo sapien
ttatccagagccacttccatattag

SEQ ID NO: 3295931 - DNA, 25 bp, Homo sapien
ctttcaaacggcgttcctgagatcg

SEQ ID NO: 3295932 - DNA, 25 bp, Homo sapien
tcctgagatcgcagaacttccaact

SEQ ID NO: 3295933 - DNA, 25 bp, Homo sapien
ctctgaagggcatctatctgacctc

SEQ ID NO: 3295934 - DNA, 25 bp, Homo sapien
gggcatctatctgacctcttttggc

SEQ ID NO: 3295935 - DNA, 25 bp, Homo sapien
tctgaagggcatctatctgacctct

SEQ ID NO: 3295936 - DNA, 25 bp, Homo sapien
tctatctgacctcttttggctgtga

SEQ ID NO: 3295937 - DNA, 25 bp, Homo sapien
cacagagactatggtaatcttcttt

SEQ ID NO: 3295938 - DNA, 25 bp, Homo sapien
atcaagaatttgtggtcgtccttgc

SEQ ID NO: 3295939 - DNA, 25 bp, Homo sapien
acagagactatggtaatcttcttta

SEQ ID NO: 3295940 - DNA, 25 bp, Homo sapien
cacatcaagaatttgtggtcgtcct

SEQ ID NO: 3295941 - DNA, 25 bp, Homo sapien
actttaatgtatttcttgtctgttc

SEQ ID NO: 3295942 - DNA, 25 bp, Homo sapien
ttcttgtctgttctagttcagactg

SEQ ID NO: 3295943 - DNA, 25 bp, Homo sapien
gaccatcagatccttccattgactt

SEQ ID NO: 3295944 - DNA, 25 bp, Homo sapien
tctagttcagactgtgcagatttta

SEQ ID NO: 3295945 - DNA, 25 bp, Homo sapien
tggcctcaagctcccggatctttgc

SEQ ID NO: 3295946 - DNA, 25 bp, Homo sapien
gaaagattgtttaattcactcctac

SEQ ID NO: 3295947 - DNA, 25 bp, Homo sapien
aataattgatctctctcttgtttga

SEQ ID NO: 3295948 - DNA, 25 bp, Homo sapien
gatgtccttcactgcacggagccgc

SEQ ID NO: 3295949 - DNA, 25 bp, Homo sapien
cacccgggagcggagctttgtgatc

SEQ ID NO: 3295950 - DNA, 25 bp, Homo sapien
ctctgcattggtagcctcgatggct

SEQ ID NO: 3295951 - DNA, 25 bp, Homo sapien
gaagttgtcaggtccgatattgtcc

SEQ ID NO: 3295952 - DNA, 25 bp, Homo sapien
tttggtggattcaagctgagcagtc

SEQ ID NO: 3295953 - DNA, 25 bp, Homo sapien
gttcccgccgcaggtggtcaatggt

SEQ ID NO: 3295954 - DNA, 25 bp, Homo sapien
gacactcgctcttcaaggccttgag

SEQ ID NO: 3295955 - DNA, 25 bp, Homo sapien
tcggtcccacagacgcttattctgc

SEQ ID NO: 3295956 - DNA, 25 bp, Homo sapien
gcacctccatgttccggttgtccag

SEQ ID NO: 3295957 - DNA, 25 bp, Homo sapien
aacagcttttgaagttgatcatcta

SEQ ID NO: 3295958 - DNA, 25 bp, Homo sapien
acagcttttgaagttgatcatctaa

SEQ ID NO: 3295959 - DNA, 25 bp, Homo sapien
caacagcttttgaagttgatcatct

SEQ ID NO: 3295960 - DNA, 25 bp, Homo sapien
caaggactaactgcttttccagctc

SEQ ID NO: 3295961 - DNA, 25 bp, Homo sapien
tctgagttggcaaggactaactgct

SEQ ID NO: 3295962 - DNA, 25 bp, Homo sapien
gctctgtccgggcttcagttagctc

SEQ ID NO: 3295963 - DNA, 25 bp, Homo sapien
ttgatcacgctctgtccgggcttca

SEQ ID NO: 3295964 - DNA, 25 bp, Homo sapien
tctaggttcagcgtatgctaagagg

SEQ ID NO: 3295965 - DNA, 25 bp, Homo sapien
ggtttagattttagctgagccacac

SEQ ID NO: 3295966 - DNA, 25 bp, Homo sapien
tcagactgtggagactaagggttta

SEQ ID NO: 3295967 - DNA, 25 bp, Homo sapien
tgctaagaggctaggatctcagact

SEQ ID NO: 3295968 - DNA, 25 bp, Homo sapien
tcatatcaaatcacacgaggtttgg

SEQ ID NO: 3295969 - DNA, 25 bp, Homo sapien
caatagtgacagcttctactggtcc

SEQ ID NO: 3295970 - DNA, 25 bp, Homo sapien
gaataataagggatgctacaggcca

SEQ ID NO: 3295971 - DNA, 25 bp, Homo sapien
gcatggcggtgcattggcagaacta

SEQ ID NO: 3295972 - DNA, 25 bp, Homo sapien
accttttggtataggcttggtctgc

SEQ ID NO: 3295973 - DNA, 25 bp, Homo sapien
ttgtctgcagggtgcggtcatgacc

SEQ ID NO: 3295974 - DNA, 25 bp, Homo sapien
ggtataggcttggtctgcccagact

SEQ ID NO: 3295975 - DNA, 25 bp, Homo sapien
ggacattcctgctataaatcatcag

SEQ ID NO: 3295976 - DNA, 25 bp, Homo sapien
ggcttcccttaattcagaacgtagc

SEQ ID NO: 3295977 - DNA, 25 bp, Homo sapien
gctgagctgacgcatatacatagag

SEQ ID NO: 3295978 - DNA, 25 bp, Homo sapien
ttcagaacgtagctgagaaacagta

SEQ ID NO: 3295979 - DNA, 25 bp, Homo sapien
gagaaacagtagattccagatcgct

SEQ ID NO: 3295980 - DNA, 25 bp, Homo sapien
tcatgttcacttattaactgctcaa

SEQ ID NO: 3295981 - DNA, 25 bp, Homo sapien
catttgactctggatactattggct

SEQ ID NO: 3295982 - DNA, 25 bp, Homo sapien
gatactattggcttggcttcgagca

SEQ ID NO: 3295983 - DNA, 25 bp, Homo sapien
gagcactgctagctttctcagtaag

SEQ ID NO: 3295984 - DNA, 25 bp, Homo sapien
ttcagatttcagtgcttcaagttga

SEQ ID NO: 3295985 - DNA, 25 bp, Homo sapien
cagatttcagtgcttcaagttgatc

SEQ ID NO: 3295986 - DNA, 25 bp, Homo sapien
tcagtgcttcaagttgatcctctac

SEQ ID NO: 3295987 - DNA, 25 bp, Homo sapien
gatttcagtgcttcaagttgatcct

SEQ ID NO: 3295988 - DNA, 25 bp, Homo sapien
tggaaatatcctccctttaagataa

SEQ ID NO: 3295989 - DNA, 25 bp, Homo sapien
ctttaagataagaaatctctgtgtc

SEQ ID NO: 3295990 - DNA, 25 bp, Homo sapien
gaaatatcctccctttaagataaga

SEQ ID NO: 3295991 - DNA, 25 bp, Homo sapien
gataagaaatctctgtgtctaattc

SEQ ID NO: 3295992 - DNA, 25 bp, Homo sapien
ttttactaatagctgagcccaagct

SEQ ID NO: 3295993 - DNA, 25 bp, Homo sapien
gaagcactccctcatgactaagcat

SEQ ID NO: 3295994 - DNA, 25 bp, Homo sapien
tgtcctctttaaggcatttggcagc

SEQ ID NO: 3295995 - DNA, 25 bp, Homo sapien
ggattgaccggatttcttgaagcac

SEQ ID NO: 3295996 - DNA, 25 bp, Homo sapien
gactgactgcctcaaataaaacttt

SEQ ID NO: 3295997 - DNA, 25 bp, Homo sapien
ttttgtttgcaaatcaatgactgac

SEQ ID NO: 3295998 - DNA, 25 bp, Homo sapien
tgatgtcagccatagcatctctctc

SEQ ID NO: 3295999 - DNA, 25 bp, Homo sapien
tccatttgcatctcctgaagttttg

SEQ ID NO: 3296000 - DNA, 25 bp, Homo sapien
tgtaccacgaatagatgacacaaaa

SEQ ID NO: 3296001 - DNA, 25 bp, Homo sapien
ttcatttagtcttctctgtaaatct

SEQ ID NO: 3296002 - DNA, 25 bp, Homo sapien
tcctttccaggagatgggatgattt

SEQ ID NO: 3296003 - DNA, 25 bp, Homo sapien
ctgtaaatctttgacttgatgtgaa

SEQ ID NO: 3296004 - DNA, 25 bp, Homo sapien
gtagcactcccacaagcatggtgaa

SEQ ID NO: 3296005 - DNA, 25 bp, Homo sapien
cagtagcactcccacaagcatggtg

SEQ ID NO: 3296006 - DNA, 25 bp, Homo sapien
agtagcactcccacaagcatggtga

SEQ ID NO: 3296007 - DNA, 25 bp, Homo sapien
atggtgaatgttcccaaacacccat

SEQ ID NO: 3296008 - DNA, 25 bp, Homo sapien
gatgtgacaccactacttgataaaa

SEQ ID NO: 3296009 - DNA, 25 bp, Homo sapien
caccactacttgataaaagatcttc

SEQ ID NO: 3296010 - DNA, 25 bp, Homo sapien
ttagatgtgacaccactacttgata

SEQ ID NO: 3296011 - DNA, 25 bp, Homo sapien
tgtgacaccactacttgataaaaga

SEQ ID NO: 3296012 - DNA, 25 bp, Homo sapien
gctacttcttattagagatcttgaa

SEQ ID NO: 3296013 - DNA, 25 bp, Homo sapien
atgaatggttccctctttggttctt

SEQ ID NO: 3296014 - DNA, 25 bp, Homo sapien
agtatgaatggttccctctttggtt

SEQ ID NO: 3296015 - DNA, 25 bp, Homo sapien
ttgctacttcttattagagatcttg

SEQ ID NO: 3296016 - DNA, 25 bp, Homo sapien
ctacaattaacgatagaacatatct

SEQ ID NO: 3296017 - DNA, 25 bp, Homo sapien
atatctaccttaatatgcttcgtgc

SEQ ID NO: 3296018 - DNA, 25 bp, Homo sapien
cttttgattactgagatgccacctg

SEQ ID NO: 3296019 - DNA, 25 bp, Homo sapien
ttcttccttttgattactgagatgc

SEQ ID NO: 3296020 - DNA, 25 bp, Homo sapien
agtaaaatacagaggtgagatcttg

SEQ ID NO: 3296021 - DNA, 25 bp, Homo sapien
atacagaggtgagatcttggcctct

SEQ ID NO: 3296022 - DNA, 25 bp, Homo sapien
ctgagtaaaatacagaggtgagatc

SEQ ID NO: 3296023 - DNA, 25 bp, Homo sapien
tttaaatctctgagtaaaatacaga

SEQ ID NO: 3296024 - DNA, 25 bp, Homo sapien
ctgggctggtacaatctcagaaaca

SEQ ID NO: 3296025 - DNA, 25 bp, Homo sapien
aagaaacatactgggctggtacaat

SEQ ID NO: 3296026 - DNA, 25 bp, Homo sapien
aaacatactgggctggtacaatctc

SEQ ID NO: 3296027 - DNA, 25 bp, Homo sapien
catactgggctggtacaatctcaga

SEQ ID NO: 3296028 - DNA, 25 bp, Homo sapien
cttaacttctggatattcttatttt

SEQ ID NO: 3296029 - DNA, 25 bp, Homo sapien
aacttctggatattcttattttcac

SEQ ID NO: 3296030 - DNA, 25 bp, Homo sapien
cttctggatattcttattttcactt

SEQ ID NO: 3296031 - DNA, 25 bp, Homo sapien
taacttctggatattcttattttca

SEQ ID NO: 3296032 - DNA, 25 bp, Homo sapien
catgttcatcacttaagaccttgac

SEQ ID NO: 3296033 - DNA, 25 bp, Homo sapien
gtttaattatatgctattggcccaa

SEQ ID NO: 3296034 - DNA, 25 bp, Homo sapien
taaaaatagcctatagtggccgggc

SEQ ID NO: 3296035 - DNA, 25 bp, Homo sapien
cttgacatgggaggcagatattgca

SEQ ID NO: 3296036 - DNA, 25 bp, Homo sapien
caaattatcaaaactcggtagctta

SEQ ID NO: 3296037 - DNA, 25 bp, Homo sapien
catgtatgtgatttatgagcacgct

SEQ ID NO: 3296038 - DNA, 25 bp, Homo sapien
tgctttaaatgccagactacctcct

SEQ ID NO: 3296039 - DNA, 25 bp, Homo sapien
actattgccccagctgaagacctgt

SEQ ID NO: 3296040 - DNA, 25 bp, Homo sapien
aaacacgaggcaccggaagattcca

SEQ ID NO: 3296041 - DNA, 25 bp, Homo sapien
gcttgtacctgcaaccaacacctaa

SEQ ID NO: 3296042 - DNA, 25 bp, Homo sapien
ttattgggcatcttccatgtgcaga

SEQ ID NO: 3296043 - DNA, 25 bp, Homo sapien
gaaatgaacacgagtcgctccgggt

SEQ ID NO: 3296044 - DNA, 25 bp, Homo sapien
accggccacatctccgcggggcgcc

SEQ ID NO: 3296045 - DNA, 25 bp, Homo sapien
acaccggccacatctccgcggggcg

SEQ ID NO: 3296046 - DNA, 25 bp, Homo sapien
ctaagacaccggccacatctccgcg

SEQ ID NO: 3296047 - DNA, 25 bp, Homo sapien
aagacaccggccacatctccgcggg

SEQ ID NO: 3296048 - DNA, 25 bp, Homo sapien
tcgacctggcggctgggacggggcg

SEQ ID NO: 3296049 - DNA, 25 bp, Homo sapien
acgtcgacctggcggctgggacggg

SEQ ID NO: 3296050 - DNA, 25 bp, Homo sapien
gacctggcggctgggacggggcggc

SEQ ID NO: 3296051 - DNA, 25 bp, Homo sapien
ctacgtcgacctggcggctgggacg

SEQ ID NO: 3296052 - DNA, 25 bp, Homo sapien
cccgcgcccgtcactcctcgcggct

SEQ ID NO: 3296053 - DNA, 25 bp, Homo sapien
tgggtgacggttaggacgctctgcg

SEQ ID NO: 3296054 - DNA, 25 bp, Homo sapien
tccgcccgccggacgccgtcgctgg

SEQ ID NO: 3296055 - DNA, 25 bp, Homo sapien
cagtccgcgcgagccgcgtgggtga

SEQ ID NO: 3296056 - DNA, 25 bp, Homo sapien
cactgactctatttcatcaacagct

SEQ ID NO: 3296057 - DNA, 25 bp, Homo sapien
tccacctgtaatatcaccacctttt

SEQ ID NO: 3296058 - DNA, 25 bp, Homo sapien
tcaatccaaatcttagcctccttgt

SEQ ID NO: 3296059 - DNA, 25 bp, Homo sapien
ttgactcactgactctatttcatca

SEQ ID NO: 3296060 - DNA, 25 bp, Homo sapien
ttggcgtcctgccaataaattgtac

SEQ ID NO: 3296061 - DNA, 25 bp, Homo sapien
gttgtttgcatttggcgtcctgcca

SEQ ID NO: 3296062 - DNA, 25 bp, Homo sapien
ccagatgggttttactcatgctgta

SEQ ID NO: 3296063 - DNA, 25 bp, Homo sapien
tgtactcgttaaggccagatgggtt

SEQ ID NO: 3296064 - DNA, 25 bp, Homo sapien
tgtaataactttcttcgtacacaga

SEQ ID NO: 3296065 - DNA, 25 bp, Homo sapien
aataactttcttcgtacacagagag

SEQ ID NO: 3296066 - DNA, 25 bp, Homo sapien
gtaataactttcttcgtacacagag

SEQ ID NO: 3296067 - DNA, 25 bp, Homo sapien
ataactttcttcgtacacagagaga

SEQ ID NO: 3296068 - DNA, 25 bp, Homo sapien
ttagcaaattgagagtatgtgtgta

SEQ ID NO: 3296069 - DNA, 25 bp, Homo sapien
tgtcagtaacttgactgaggtcctg

SEQ ID NO: 3296070 - DNA, 25 bp, Homo sapien
ttggcacgatcctgggaacttcacg

SEQ ID NO: 3296071 - DNA, 25 bp, Homo sapien
tcgccggctttcctaatagtacact

SEQ ID NO: 3296072 - DNA, 25 bp, Homo sapien
aatagtacactctcttggcacgatc

SEQ ID NO: 3296073 - DNA, 25 bp, Homo sapien
tcctgggaacttcacgtacagttgt

SEQ ID NO: 3296074 - DNA, 25 bp, Homo sapien
tatcctagcaggtctttcctctgtg

SEQ ID NO: 3296075 - DNA, 25 bp, Homo sapien
ggatagttttaagtccaggagtcaa

SEQ ID NO: 3296076 - DNA, 25 bp, Homo sapien
tctggtgtctctctgtatatccaaa

SEQ ID NO: 3296077 - DNA, 25 bp, Homo sapien
cctgaggactttgtcctaagtttgc

SEQ ID NO: 3296078 - DNA, 25 bp, Homo sapien
ttctgggaagtcaaggcagtagtga

SEQ ID NO: 3296079 - DNA, 25 bp, Homo sapien
gattctgggaagtcaaggcagtagt

SEQ ID NO: 3296080 - DNA, 25 bp, Homo sapien
ctgattctgggaagtcaaggcagta

SEQ ID NO: 3296081 - DNA, 25 bp, Homo sapien
agccataatcacaccaccactgcac

SEQ ID NO: 3296082 - DNA, 25 bp, Homo sapien
tccttgacatttgctggtgtctgct

SEQ ID NO: 3296083 - DNA, 25 bp, Homo sapien
cttccttgacatttgctggtgtctg

SEQ ID NO: 3296084 - DNA, 25 bp, Homo sapien
ttccttgacatttgctggtgtctgc

SEQ ID NO: 3296085 - DNA, 25 bp, Homo sapien
cttcctgtgtcaggccttcgtggag

SEQ ID NO: 3296086 - DNA, 25 bp, Homo sapien
cccaagtcccagagatgccatcact

SEQ ID NO: 3296087 - DNA, 25 bp, Homo sapien
ttaataatgacaggatccggttagt

SEQ ID NO: 3296088 - DNA, 25 bp, Homo sapien
cggttagtttttgtagtacagctgg

SEQ ID NO: 3296089 - DNA, 25 bp, Homo sapien
ggcctctggtgtagggtttggagta

SEQ ID NO: 3296090 - DNA, 25 bp, Homo sapien
ttttgtagtacagctggcctcttgg

SEQ ID NO: 3296091 - DNA, 25 bp, Homo sapien
atgaaagagcaggacaatgcataga

SEQ ID NO: 3296092 - DNA, 25 bp, Homo sapien
gatgaaagagcaggacaatgcatag

SEQ ID NO: 3296093 - DNA, 25 bp, Homo sapien
tgaggatgaaagagcaggacaatgc

SEQ ID NO: 3296094 - DNA, 25 bp, Homo sapien
cttgtgaggatgaaagagcaggaca

SEQ ID NO: 3296095 - DNA, 25 bp, Homo sapien
tacaatggcattgggctcataccct

SEQ ID NO: 3296096 - DNA, 25 bp, Homo sapien
cttgcaacccctacaatggcattgg

SEQ ID NO: 3296097 - DNA, 25 bp, Homo sapien
ggctcataccctgagattccaaagc

SEQ ID NO: 3296098 - DNA, 25 bp, Homo sapien
cccctacaatggcattgggctcata

SEQ ID NO: 3296099 - DNA, 25 bp, Homo sapien
tagggatcggatactgcaatgagcg

SEQ ID NO: 3296100 - DNA, 25 bp, Homo sapien
gcaatgagcgtggaatcatacattt

SEQ ID NO: 3296101 - DNA, 25 bp, Homo sapien
cccacggagggacagttagcagaaa

SEQ ID NO: 3296102 - DNA, 25 bp, Homo sapien
aaaggccttatcacagaccagagat

SEQ ID NO: 3296103 - DNA, 25 bp, Homo sapien
aagtcaccctccacagatgcagggc

SEQ ID NO: 3296104 - DNA, 25 bp, Homo sapien
gcctgccatggtgctaagtcaccct

SEQ ID NO: 3296105 - DNA, 25 bp, Homo sapien
tcaggcctgccatggtgctaagtca

SEQ ID NO: 3296106 - DNA, 25 bp, Homo sapien
ggtgctaagtcaccctccacagatg

SEQ ID NO: 3296107 - DNA, 25 bp, Homo sapien
aattctgaggaatagagggggagtc

SEQ ID NO: 3296108 - DNA, 25 bp, Homo sapien
tgatttttcttatccgggtcagaca

SEQ ID NO: 3296109 - DNA, 25 bp, Homo sapien
tttcttatccgggtcagacattgat

SEQ ID NO: 3296110 - DNA, 25 bp, Homo sapien
tctgaggaatagagggggagtctgg

SEQ ID NO: 3296111 - DNA, 25 bp, Homo sapien
ggaatccctgaactgaatggtctga

SEQ ID NO: 3296112 - DNA, 25 bp, Homo sapien
gaatttgccctatctaagcccctac

SEQ ID NO: 3296113 - DNA, 25 bp, Homo sapien
ccttgtaagaccatcagaatttgcc

SEQ ID NO: 3296114 - DNA, 25 bp, Homo sapien
gatcagatgaagctataggcagaga

SEQ ID NO: 3296115 - DNA, 25 bp, Homo sapien
tagtgctgaaaggatcattgcaagg

SEQ ID NO: 3296116 - DNA, 25 bp, Homo sapien
agaaagagtccgtgtgtctgcccat

SEQ ID NO: 3296117 - DNA, 25 bp, Homo sapien
aatgggattagatatttagtgctga

SEQ ID NO: 3296118 - DNA, 25 bp, Homo sapien
cctggtgagaaagagtccgtgtgtc

SEQ ID NO: 3296119 - DNA, 25 bp, Homo sapien
gctgttgctgatgcttgcctacttt

SEQ ID NO: 3296120 - DNA, 25 bp, Homo sapien
cagccacccgatcggaggcagagag

SEQ ID NO: 3296121 - DNA, 25 bp, Homo sapien
aatgttccagccacccgatcggagg

SEQ ID NO: 3296122 - DNA, 25 bp, Homo sapien
gcagagagctgttgctgatgcttgc

SEQ ID NO: 3296123 - DNA, 25 bp, Homo sapien
ggctccatgcttcagggtttgtttc

SEQ ID NO: 3296124 - DNA, 25 bp, Homo sapien
tgttcttaatactggatggatcgcc

SEQ ID NO: 3296125 - DNA, 25 bp, Homo sapien
tttcacaactcgtggagacttgttc

SEQ ID NO: 3296126 - DNA, 25 bp, Homo sapien
gtgtccatttcaaaggaaggctggc

SEQ ID NO: 3296127 - DNA, 25 bp, Homo sapien
ccttgcgtgggggccatgttatctt

SEQ ID NO: 3296128 - DNA, 25 bp, Homo sapien
ttgcgtgggggccatgttatcttct

SEQ ID NO: 3296129 - DNA, 25 bp, Homo sapien
cttgcgtgggggccatgttatcttc

SEQ ID NO: 3296130 - DNA, 25 bp, Homo sapien
ggaacacaaaagactcaatttggag

SEQ ID NO: 3296131 - DNA, 25 bp, Homo sapien
aagactcaatttggagtgcagcggc

SEQ ID NO: 3296132 - DNA, 25 bp, Homo sapien
tgcagcggcctcttgtctgtcaatc

SEQ ID NO: 3296133 - DNA, 25 bp, Homo sapien
tctgtcaatcctgtttgctgaacct

SEQ ID NO: 3296134 - DNA, 25 bp, Homo sapien
tgttgacagtcgcattcttggaata

SEQ ID NO: 3296135 - DNA, 25 bp, Homo sapien
ttttagctgctgaagtaattggtcc

SEQ ID NO: 3296136 - DNA, 25 bp, Homo sapien
ggtgaacttggacaaacaatgccag

SEQ ID NO: 3296137 - DNA, 25 bp, Homo sapien
aataagtaagttccatgcaggtgaa

SEQ ID NO: 3296138 - DNA, 25 bp, Homo sapien
ttttgaagatgtaaagcaagggctg

SEQ ID NO: 3296139 - DNA, 25 bp, Homo sapien
agggctggggagatgtcctgagcac

SEQ ID NO: 3296140 - DNA, 25 bp, Homo sapien
tttttgaagatgtaaagcaagggct

SEQ ID NO: 3296141 - DNA, 25 bp, Homo sapien
gcaagggctggggagatgtcctgag

SEQ ID NO: 3296142 - DNA, 25 bp, Homo sapien
gaaagctcactcgtggctgtcgcat

SEQ ID NO: 3296143 - DNA, 25 bp, Homo sapien
attcagctgatgtttaagggcgccc

SEQ ID NO: 3296144 - DNA, 25 bp, Homo sapien
cctagctggtccgttgggctctgca

SEQ ID NO: 3296145 - DNA, 25 bp, Homo sapien
gacaccctgagctccaaactgcagg

SEQ ID NO: 3296146 - DNA, 25 bp, Homo sapien
ctggtgaaaggatcctacaagaccc

SEQ ID NO: 3296147 - DNA, 25 bp, Homo sapien
tgaaaggatcctacaagaccctcag

SEQ ID NO: 3296148 - DNA, 25 bp, Homo sapien
gaaaggatcctacaagaccctcagg

SEQ ID NO: 3296149 - DNA, 25 bp, Homo sapien
ggtgaaaggatcctacaagaccctc

SEQ ID NO: 3296150 - DNA, 25 bp, Homo sapien
aatggcagaatccacactcctgatg

SEQ ID NO: 3296151 - DNA, 25 bp, Homo sapien
cattgatctgttgggtactaatggc

SEQ ID NO: 3296152 - DNA, 25 bp, Homo sapien
gaaacactgggcattgatctgttgg

SEQ ID NO: 3296153 - DNA, 25 bp, Homo sapien
taatggcagaatccacactcctgat

SEQ ID NO: 3296154 - DNA, 25 bp, Homo sapien
tgtggtgatagattggcctctggaa

SEQ ID NO: 3296155 - DNA, 25 bp, Homo sapien
actgtggtgatagattggcctctgg

SEQ ID NO: 3296156 - DNA, 25 bp, Homo sapien
gactgtggtgatagattggcctctg

SEQ ID NO: 3296157 - DNA, 25 bp, Homo sapien
tggtgatagattggcctctggaaag

SEQ ID NO: 3296158 - DNA, 25 bp, Homo sapien
ggcggccagagattcacatccagaa

SEQ ID NO: 3296159 - DNA, 25 bp, Homo sapien
ttcattctcgtcaacaccaaatcct

SEQ ID NO: 3296160 - DNA, 25 bp, Homo sapien
gaatcatgctgccaacgttctcctc

SEQ ID NO: 3296161 - DNA, 25 bp, Homo sapien
tgctaggatccactctgatggccag

SEQ ID NO: 3296162 - DNA, 25 bp, Homo sapien
ctgcctctttttctcttaaagttat

SEQ ID NO: 3296163 - DNA, 25 bp, Homo sapien
ttattttggctgggcgagggcggca

SEQ ID NO: 3296164 - DNA, 25 bp, Homo sapien
ttggctgggcgagggcggcacctca

SEQ ID NO: 3296165 - DNA, 25 bp, Homo sapien
ttttggctgggcgagggcggcacct

SEQ ID NO: 3296166 - DNA, 25 bp, Homo sapien
cctgggtttgaagtctgatggcata

SEQ ID NO: 3296167 - DNA, 25 bp, Homo sapien
cagagaggatacctgagatagcggt

SEQ ID NO: 3296168 - DNA, 25 bp, Homo sapien
agatagcggtgtccagcactaccag

SEQ ID NO: 3296169 - DNA, 25 bp, Homo sapien
gcactaccagatttgagactgcctg

SEQ ID NO: 3296170 - DNA, 25 bp, Homo sapien
gcctctttcctggatcctcatccaa

SEQ ID NO: 3296171 - DNA, 25 bp, Homo sapien
tgcctctttcctggatcctcatcca

SEQ ID NO: 3296172 - DNA, 25 bp, Homo sapien
tccttcctgagaattgttcctccat

SEQ ID NO: 3296173 - DNA, 25 bp, Homo sapien
cagctggtaaatccatggtcagcca

SEQ ID NO: 3296174 - DNA, 25 bp, Homo sapien
tgcagctggtaaatccatggtcagc

SEQ ID NO: 3296175 - DNA, 25 bp, Homo sapien
agctggtaaatccatggtcagccat

SEQ ID NO: 3296176 - DNA, 25 bp, Homo sapien
gcctccaacgctgaatcctgcagct

SEQ ID NO: 3296177 - DNA, 25 bp, Homo sapien
tggtcttcacagcacgtcgtgttta

SEQ ID NO: 3296178 - DNA, 25 bp, Homo sapien
gaggaccctagagcgacacttgttg

SEQ ID NO: 3296179 - DNA, 25 bp, Homo sapien
cgtgtttatgagtcagaggacccta

SEQ ID NO: 3296180 - DNA, 25 bp, Homo sapien
tgccagcgcggtggaaaccggttct

SEQ ID NO: 3296181 - DNA, 25 bp, Homo sapien
accccttcaactggggcttgatcag

SEQ ID NO: 3296182 - DNA, 25 bp, Homo sapien
cttcaactggggcttgatcaggacc

SEQ ID NO: 3296183 - DNA, 25 bp, Homo sapien
ctggggcttgatcaggacctgttct

SEQ ID NO: 3296184 - DNA, 25 bp, Homo sapien
caactggggcttgatcaggacctgt

SEQ ID NO: 3296185 - DNA, 25 bp, Homo sapien
tcattcctggatgctaaaggggcat

SEQ ID NO: 3296186 - DNA, 25 bp, Homo sapien
cagtttttacgtagtgaactttctg

SEQ ID NO: 3296187 - DNA, 25 bp, Homo sapien
gataagaacttcttaaggtcacagt

SEQ ID NO: 3296188 - DNA, 25 bp, Homo sapien
tatatttgccctccattgataagaa

SEQ ID NO: 3296189 - DNA, 25 bp, Homo sapien
tcatacctgaaaggattatcatctt

SEQ ID NO: 3296190 - DNA, 25 bp, Homo sapien
tctggcgaatcatacctgaaaggat

SEQ ID NO: 3296191 - DNA, 25 bp, Homo sapien
catcttcacccagtgtccggatcat

SEQ ID NO: 3296192 - DNA, 25 bp, Homo sapien
tctggagtttctggcgaatcatacc

SEQ ID NO: 3296193 - DNA, 25 bp, Homo sapien
tggcccttctcagcaacggaacatt

SEQ ID NO: 3296194 - DNA, 25 bp, Homo sapien
accaaatcttttacttgaatgtcaa

SEQ ID NO: 3296195 - DNA, 25 bp, Homo sapien
tcctggaaccaaatcttttacttga

SEQ ID NO: 3296196 - DNA, 25 bp, Homo sapien
ctcagcaacggaacattcttgactc

SEQ ID NO: 3296197 - DNA, 25 bp, Homo sapien
tgtcttgtgcttgccaatagaggtt

SEQ ID NO: 3296198 - DNA, 25 bp, Homo sapien
tggtcttgtggctttaacaccgaag

SEQ ID NO: 3296199 - DNA, 25 bp, Homo sapien
gcactcctgtccttccgtcgtctgg

SEQ ID NO: 3296200 - DNA, 25 bp, Homo sapien
cttccgtcgtctggggccacatctg

SEQ ID NO: 3296201 - DNA, 25 bp, Homo sapien
agtaatttcagaaggccttgagtcc

SEQ ID NO: 3296202 - DNA, 25 bp, Homo sapien
tacacgtgaatactggtatctggcg

SEQ ID NO: 3296203 - DNA, 25 bp, Homo sapien
gcaacatttgctccagcctgagtaa

SEQ ID NO: 3296204 - DNA, 25 bp, Homo sapien
aagacagtacattagagctccagag

SEQ ID NO: 3296205 - DNA, 25 bp, Homo sapien
tacttcacactccaatcgccgagaa

SEQ ID NO: 3296206 - DNA, 25 bp, Homo sapien
gccgagaaccatgtccagttcctga

SEQ ID NO: 3296207 - DNA, 25 bp, Homo sapien
tccaatcgccgagaaccatgtccag

SEQ ID NO: 3296208 - DNA, 25 bp, Homo sapien
catgtccagttcctgagcataccat

SEQ ID NO: 3296209 - DNA, 25 bp, Homo sapien
gaagtgagggtaagcctcaatgcca

SEQ ID NO: 3296210 - DNA, 25 bp, Homo sapien
cctagtaaagggaattgtctgtgca

SEQ ID NO: 3296211 - DNA, 25 bp, Homo sapien
tgaagatggtagctatggtgacacc

SEQ ID NO: 3296212 - DNA, 25 bp, Homo sapien
gactcaccgcagcttggatctcctg

SEQ ID NO: 3296213 - DNA, 25 bp, Homo sapien
tctcttgagcttgcttctgaaggtc

SEQ ID NO: 3296214 - DNA, 25 bp, Homo sapien
ttcatcttggacataagcagccagg

SEQ ID NO: 3296215 - DNA, 25 bp, Homo sapien
tctgaaggtcctagcttcatcttgg

SEQ ID NO: 3296216 - DNA, 25 bp, Homo sapien
tcatggtcttcggagctccaccttc

SEQ ID NO: 3296217 - DNA, 25 bp, Homo sapien
ggagaagcaagttcaaatggggttc

SEQ ID NO: 3296218 - DNA, 25 bp, Homo sapien
gtgtcttggacaggacttaaggaga

SEQ ID NO: 3296219 - DNA, 25 bp, Homo sapien
gaagcaagttcaaatggggttcagt

SEQ ID NO: 3296220 - DNA, 25 bp, Homo sapien
ccttttgtgtcttggacaggactta

SEQ ID NO: 3296221 - DNA, 25 bp, Homo sapien
cttgctcttgatggtctacttctat

SEQ ID NO: 3296222 - DNA, 25 bp, Homo sapien
tagatgtgctaagcttaagatttca

SEQ ID NO: 3296223 - DNA, 25 bp, Homo sapien
tctacttctattagatgtgctaagc

SEQ ID NO: 3296224 - DNA, 25 bp, Homo sapien
gctaagcttaagatttcatccaatt

SEQ ID NO: 3296225 - DNA, 25 bp, Homo sapien
tggcagttggttttggcagtttaat

SEQ ID NO: 3296226 - DNA, 25 bp, Homo sapien
ctggtgttggcagttggttttggca

SEQ ID NO: 3296227 - DNA, 25 bp, Homo sapien
gtgttggcagttggttttggcagtt

SEQ ID NO: 3296228 - DNA, 25 bp, Homo sapien
gttggcagttggttttggcagttta

SEQ ID NO: 3296229 - DNA, 25 bp, Homo sapien
cctcacgatccaggcattctacttg

SEQ ID NO: 3296230 - DNA, 25 bp, Homo sapien
cgatccaggcattctacttggttgt

SEQ ID NO: 3296231 - DNA, 25 bp, Homo sapien
tcacgatccaggcattctacttggt

SEQ ID NO: 3296232 - DNA, 25 bp, Homo sapien
cacgatccaggcattctacttggtt

SEQ ID NO: 3296233 - DNA, 25 bp, Homo sapien
tctgctgggggagtcagttctggac

SEQ ID NO: 3296234 - DNA, 25 bp, Homo sapien
ctctgctgggggagtcagttctgga

SEQ ID NO: 3296235 - DNA, 25 bp, Homo sapien
actcaggcatggtgagggcgccagg

SEQ ID NO: 3296236 - DNA, 25 bp, Homo sapien
ctcaggcatggtgagggcgccagga

SEQ ID NO: 3296237 - DNA, 25 bp, Homo sapien
tcccaaatagtgagggtgctgctgt

SEQ ID NO: 3296238 - DNA, 25 bp, Homo sapien
gtgctctgctctcctaatgttccca

SEQ ID NO: 3296239 - DNA, 25 bp, Homo sapien
tctcctaatgttcccaaatagtgag

SEQ ID NO: 3296240 - DNA, 25 bp, Homo sapien
tgctctcctaatgttcccaaatagt

SEQ ID NO: 3296241 - DNA, 25 bp, Homo sapien
ctcacccacgtcagggcactgccac

SEQ ID NO: 3296242 - DNA, 25 bp, Homo sapien
tctcacccacgtcagggcactgcca

SEQ ID NO: 3296243 - DNA, 25 bp, Homo sapien
ctctctcacccacgtcagggcactg

SEQ ID NO: 3296244 - DNA, 25 bp, Homo sapien
tctctcacccacgtcagggcactgc

SEQ ID NO: 3296245 - DNA, 25 bp, Homo sapien
gtaatcctatggctggactcagtgg

SEQ ID NO: 3296246 - DNA, 25 bp, Homo sapien
aaaagtaatcctatggctggactca

SEQ ID NO: 3296247 - DNA, 25 bp, Homo sapien
aagtaatcctatggctggactcagt

SEQ ID NO: 3296248 - DNA, 25 bp, Homo sapien
aaaaaagtaatcctatggctggact

SEQ ID NO: 3296249 - DNA, 25 bp, Homo sapien
gacctcactcgtggcacacaactaa

SEQ ID NO: 3296250 - DNA, 25 bp, Homo sapien
tcagctgagactttggctaatgttg

SEQ ID NO: 3296251 - DNA, 25 bp, Homo sapien
tcacatcagtgaggagactcagctg

SEQ ID NO: 3296252 - DNA, 25 bp, Homo sapien
gcagtcttcgcttccaaatccacaa

SEQ ID NO: 3296253 - DNA, 25 bp, Homo sapien
atggtgagctccagtaggcctcagg

SEQ ID NO: 3296254 - DNA, 25 bp, Homo sapien
aactatggtgagctccagtaggcct

SEQ ID NO: 3296255 - DNA, 25 bp, Homo sapien
ccgtcagcaccagaagtacagtatt

SEQ ID NO: 3296256 - DNA, 25 bp, Homo sapien
cctcaggggaatggggccgtcagca

SEQ ID NO: 3296257 - DNA, 25 bp, Homo sapien
tcctgtgcagcagagtatattatac

SEQ ID NO: 3296258 - DNA, 25 bp, Homo sapien
tctaataaaggcaccaaatgctgca

SEQ ID NO: 3296259 - DNA, 25 bp, Homo sapien
cagctaagtgtgtggcaggtcctga

SEQ ID NO: 3296260 - DNA, 25 bp, Homo sapien
ggtcctgagctaagtgtaatctaca

SEQ ID NO: 3296261 - DNA, 25 bp, Homo sapien
cactgtatgtgaggcgcagctggac

SEQ ID NO: 3296262 - DNA, 25 bp, Homo sapien
gaatatctgagtctgtcctgcggga

SEQ ID NO: 3296263 - DNA, 25 bp, Homo sapien
gaaaccccggtgtatagcatggatg

SEQ ID NO: 3296264 - DNA, 25 bp, Homo sapien
ccacctcatgaggattatgaagacg

SEQ ID NO: 3296265 - DNA, 25 bp, Homo sapien
ctaaagtgacaattgcaagggaaag

SEQ ID NO: 3296266 - DNA, 25 bp, Homo sapien
tctaaagtgacaattgcaagggaaa

SEQ ID NO: 3296267 - DNA, 25 bp, Homo sapien
ctttctaaagtgacaattgcaaggg

SEQ ID NO: 3296268 - DNA, 25 bp, Homo sapien
tttctaaagtgacaattgcaaggga

SEQ ID NO: 3296269 - DNA, 25 bp, Homo sapien
gactagttgcctgatgttctcctac

SEQ ID NO: 3296270 - DNA, 25 bp, Homo sapien
gataagtctaggactagttgcctga

SEQ ID NO: 3296271 - DNA, 25 bp, Homo sapien
ccaagagtgacattttatctcagtc

SEQ ID NO: 3296272 - DNA, 25 bp, Homo sapien
gggatgatgataagtctaggactag

SEQ ID NO: 3296273 - DNA, 25 bp, Homo sapien
ttatccagggtcatgtctttagcaa

SEQ ID NO: 3296274 - DNA, 25 bp, Homo sapien
catggagcttttgcagcactgagac

SEQ ID NO: 3296275 - DNA, 25 bp, Homo sapien
tatgtttgctccgtcagtttagaag

SEQ ID NO: 3296276 - DNA, 25 bp, Homo sapien
agtatttcctagcattaccactgga

SEQ ID NO: 3296277 - DNA, 25 bp, Homo sapien
tacattgataaattcttagtggcga

SEQ ID NO: 3296278 - DNA, 25 bp, Homo sapien
taagatgtgacaggctagtttaggg

SEQ ID NO: 3296279 - DNA, 25 bp, Homo sapien
gagtctttgataaccctacataagc

SEQ ID NO: 3296280 - DNA, 25 bp, Homo sapien
tagggcaaagacacatgagtctttg

SEQ ID NO: 3296281 - DNA, 25 bp, Homo sapien
taccattaatgaagggtctgcaaca

SEQ ID NO: 3296282 - DNA, 25 bp, Homo sapien
tggacatagatgattacgtttgagc

SEQ ID NO: 3296283 - DNA, 25 bp, Homo sapien
cctgatggcagggtacaagtaccat

SEQ ID NO: 3296284 - DNA, 25 bp, Homo sapien
tgtgctaaccacttatttgattctg

SEQ ID NO: 3296285 - DNA, 25 bp, Homo sapien
taaaaactgcctccttaacctctga

SEQ ID NO: 3296286 - DNA, 25 bp, Homo sapien
aacctgttgaccacactttgattaa

SEQ ID NO: 3296287 - DNA, 25 bp, Homo sapien
ctaaatacggcctgtttattgaggc

SEQ ID NO: 3296288 - DNA, 25 bp, Homo sapien
tctgtagccccagttgtaagcttat

SEQ ID NO: 3296289 - DNA, 25 bp, Homo sapien
gcatttcagcaggtttcccatgtta

SEQ ID NO: 3296290 - DNA, 25 bp, Homo sapien
ctcaaagtgtggtcaggatacgatc

SEQ ID NO: 3296291 - DNA, 25 bp, Homo sapien
tgctatgacaaaaccaagtctgctg

SEQ ID NO: 3296292 - DNA, 25 bp, Homo sapien
ccttaactctttgggatgcatagga

SEQ ID NO: 3296293 - DNA, 25 bp, Homo sapien
tcctctggtcgggactgccctgtga

SEQ ID NO: 3296294 - DNA, 25 bp, Homo sapien
gccctgtgactatgtctggaatatg

SEQ ID NO: 3296295 - DNA, 25 bp, Homo sapien
tatttgccaagagttatcccaggtg

SEQ ID NO: 3296296 - DNA, 25 bp, Homo sapien
atatcttaagcacctcgtcaatggg

SEQ ID NO: 3296297 - DNA, 25 bp, Homo sapien
tcttaatgatgagcgtctgccgggc

SEQ ID NO: 3296298 - DNA, 25 bp, Homo sapien
gaaaggcaaagtgttcggaatcgca

SEQ ID NO: 3296299 - DNA, 25 bp, Homo sapien
ttccccagggtgttcgcattagcgc

SEQ ID NO: 3296300 - DNA, 25 bp, Homo sapien
gcgattcccctaccagacttggcag

SEQ ID NO: 3296301 - DNA, 25 bp, Homo sapien
tttctccaggatgctaccaacttct

SEQ ID NO: 3296302 - DNA, 25 bp, Homo sapien
cttctcaatgccctcctcccgggtt

SEQ ID NO: 3296303 - DNA, 25 bp, Homo sapien
ccttgtgtgatgaagtaagtcctca

SEQ ID NO: 3296304 - DNA, 25 bp, Homo sapien
tccctccttctggaggagaccttag

SEQ ID NO: 3296305 - DNA, 25 bp, Homo sapien
gagaagctggcctttaagctacgcc

SEQ ID NO: 3296306 - DNA, 25 bp, Homo sapien
ccagactagacaagtaggaggaggt

SEQ ID NO: 3296307 - DNA, 25 bp, Homo sapien
cagactccaatcagaggaagaggca

SEQ ID NO: 3296308 - DNA, 25 bp, Homo sapien
taggaacggtttttcagagaagctg

SEQ ID NO: 3296309 - DNA, 25 bp, Homo sapien
aatccacatatctgctggccacact

SEQ ID NO: 3296310 - DNA, 25 bp, Homo sapien
cagtgcctgctgttgggagctgcca

SEQ ID NO: 3296311 - DNA, 25 bp, Homo sapien
tctgatttgcaacattgacacttgg

SEQ ID NO: 3296312 - DNA, 25 bp, Homo sapien
agtgcctgctgttgggagctgccac

SEQ ID NO: 3296313 - DNA, 25 bp, Homo sapien
tctgtaagttttggcagctggctcc

SEQ ID NO: 3296314 - DNA, 25 bp, Homo sapien
caagggatttgaaatgcatgcctac

SEQ ID NO: 3296315 - DNA, 25 bp, Homo sapien
gaatgttcaccagaacagcaggtcc

SEQ ID NO: 3296316 - DNA, 25 bp, Homo sapien
tgtcacatggctcataaattccagg

SEQ ID NO: 3296317 - DNA, 25 bp, Homo sapien
ccagggcagggatttgaactcagct

SEQ ID NO: 3296318 - DNA, 25 bp, Homo sapien
tatgacaggtatcaggaatcttgcc

SEQ ID NO: 3296319 - DNA, 25 bp, Homo sapien
gatacactgctcctgaaagaaatgt

SEQ ID NO: 3296320 - DNA, 25 bp, Homo sapien
cagaatgcacggaaagaggctccac

SEQ ID NO: 3296321 - DNA, 25 bp, Homo sapien
gaatcttgcccaataaatccagggc

SEQ ID NO: 3296322 - DNA, 25 bp, Homo sapien
catgacgtggactagtataggcctc

SEQ ID NO: 3296323 - DNA, 25 bp, Homo sapien
caaggactggatgtggtctgcctca

SEQ ID NO: 3296324 - DNA, 25 bp, Homo sapien
ggtgggatccactgaaggcaaagac

SEQ ID NO: 3296325 - DNA, 25 bp, Homo sapien
gatccataggtgttccatgacgtgg

SEQ ID NO: 3296326 - DNA, 25 bp, Homo sapien
caactctaggatgtagtcgaccagc

SEQ ID NO: 3296327 - DNA, 25 bp, Homo sapien
tgctgcccagtgagaaggtacttgg

SEQ ID NO: 3296328 - DNA, 25 bp, Homo sapien
tcagcagagatggtcgtaaggccct

SEQ ID NO: 3296329 - DNA, 25 bp, Homo sapien
gttcaggaccgcataagagggactc

SEQ ID NO: 3296330 - DNA, 25 bp, Homo sapien
aggaaccacctctgctgacctcttg

SEQ ID NO: 3296331 - DNA, 25 bp, Homo sapien
ctgctgacctcttggctatgtttac

SEQ ID NO: 3296332 - DNA, 25 bp, Homo sapien
agctgggtgctggataatggcacca

SEQ ID NO: 3296333 - DNA, 25 bp, Homo sapien
gtgttggtgtcattcttgggtgggc

SEQ ID NO: 3296334 - DNA, 25 bp, Homo sapien
tgaaatcttgatgctctactgacgt

SEQ ID NO: 3296335 - DNA, 25 bp, Homo sapien
tactgacgtttatagactagccatt

SEQ ID NO: 3296336 - DNA, 25 bp, Homo sapien
taatatttggcactcgctgagacat

SEQ ID NO: 3296337 - DNA, 25 bp, Homo sapien
caagttatcggtctcttcaaaagca

SEQ ID NO: 3296338 - DNA, 25 bp, Homo sapien
gaaacaatatggcttactgtgccca

SEQ ID NO: 3296339 - DNA, 25 bp, Homo sapien
gaagaatgcctcctagatatcaagc

SEQ ID NO: 3296340 - DNA, 25 bp, Homo sapien
tatttagcggcttagatagtcctgg

SEQ ID NO: 3296341 - DNA, 25 bp, Homo sapien
aaaagcttggatgaccctcttgagg

SEQ ID NO: 3296342 - DNA, 25 bp, Homo sapien
gaaaatgggcttgccccgaggagct

SEQ ID NO: 3296343 - DNA, 25 bp, Homo sapien
aacagctgccatatttccccagagg

SEQ ID NO: 3296344 - DNA, 25 bp, Homo sapien
gagaagccaacctttgcactagcaa

SEQ ID NO: 3296345 - DNA, 25 bp, Homo sapien
tgtccctgacatttacccgagaagc

SEQ ID NO: 3296346 - DNA, 25 bp, Homo sapien
tttgtgcaaggccagttgagggtcc

SEQ ID NO: 3296347 - DNA, 25 bp, Homo sapien
gcagtgtacccagtcaaaaagtctt

SEQ ID NO: 3296348 - DNA, 25 bp, Homo sapien
catgtttggctatccagtgcaacgc

SEQ ID NO: 3296349 - DNA, 25 bp, Homo sapien
gcaagcttcacaatccactcatgct

SEQ ID NO: 3296350 - DNA, 25 bp, Homo sapien
gccttaacctctgcaagttttagtg

SEQ ID NO: 3296351 - DNA, 25 bp, Homo sapien
taaacctgcatcaacccttgggctg

SEQ ID NO: 3296352 - DNA, 25 bp, Homo sapien
ctcctcatcagaggaggacaatttg

SEQ ID NO: 3296353 - DNA, 25 bp, Homo sapien
tcttttcagcaagccctcatcgagg

SEQ ID NO: 3296354 - DNA, 25 bp, Homo sapien
tgccctccttccgagatacagaaag

SEQ ID NO: 3296355 - DNA, 25 bp, Homo sapien
ggcccccagctggattcctgagctt

SEQ ID NO: 3296356 - DNA, 25 bp, Homo sapien
ggtggcctgcaaggccattagcccc

SEQ ID NO: 3296357 - DNA, 25 bp, Homo sapien
attcctgagcttccccctatctggg

SEQ ID NO: 3296358 - DNA, 25 bp, Homo sapien
aagttgtctggcagcaccgaccagg

SEQ ID NO: 3296359 - DNA, 25 bp, Homo sapien
aagacagtcaatgaagggttccccg

SEQ ID NO: 3296360 - DNA, 25 bp, Homo sapien
tcatccagatcttggagggacagct

SEQ ID NO: 3296361 - DNA, 25 bp, Homo sapien
gagtccattgcaagctgcgtcggcg

SEQ ID NO: 3296362 - DNA, 25 bp, Homo sapien
caaaaggtccctgtatctcctcttg

SEQ ID NO: 3296363 - DNA, 25 bp, Homo sapien
tcgcggggagcagggcgcagctccc

SEQ ID NO: 3296364 - DNA, 25 bp, Homo sapien
gcgggcggctcgcggggtcgctgca

SEQ ID NO: 3296365 - DNA, 25 bp, Homo sapien
agctccccctgcactgggggcggcc

SEQ ID NO: 3296366 - DNA, 25 bp, Homo sapien
tcctggcgcactgcggcgaccgagt

SEQ ID NO: 3296367 - DNA, 25 bp, Homo sapien
cgaccgagttgacgaagcccttgaa

SEQ ID NO: 3296368 - DNA, 25 bp, Homo sapien
gctcagcaaggcagcgttggtcacg

SEQ ID NO: 3296369 - DNA, 25 bp, Homo sapien
cacagaaagtccagtagtgcctcct

SEQ ID NO: 3296370 - DNA, 25 bp, Homo sapien
aaccctggccgggcgagtgtcacct

SEQ ID NO: 3296371 - DNA, 25 bp, Homo sapien
ggtgtctgagtctcgccctcccggg

SEQ ID NO: 3296372 - DNA, 25 bp, Homo sapien
cgggcgagtgtcacctgcgcccggg

SEQ ID NO: 3296373 - DNA, 25 bp, Homo sapien
tggccgggcgagtgtcacctgcgcc

SEQ ID NO: 3296374 - DNA, 25 bp, Homo sapien
cctgtcctccggtgctttgatgagt

SEQ ID NO: 3296375 - DNA, 25 bp, Homo sapien
caggaaacaaaagcgatagaaggtc

SEQ ID NO: 3296376 - DNA, 25 bp, Homo sapien
ctaagtctccgccacgcaggaaaca

SEQ ID NO: 3296377 - DNA, 25 bp, Homo sapien
aggtccgttcctgtcctccggtgct

SEQ ID NO: 3296378 - DNA, 25 bp, Homo sapien
tgaagccgatgggggaggaggagaa

SEQ ID NO: 3296379 - DNA, 25 bp, Homo sapien
ctgaagccgatgggggaggaggaga

SEQ ID NO: 3296380 - DNA, 25 bp, Homo sapien
gaagccgatgggggaggaggagaag

SEQ ID NO: 3296381 - DNA, 25 bp, Homo sapien
tgaactaggaattatgtctcgccag

SEQ ID NO: 3296382 - DNA, 25 bp, Homo sapien
gtctcgccagttaaggtatttgatg

SEQ ID NO: 3296383 - DNA, 25 bp, Homo sapien
gacatgcctgagatagttttcactg

SEQ ID NO: 3296384 - DNA, 25 bp, Homo sapien
cccttctgtctttgatgtgagatcc

SEQ ID NO: 3296385 - DNA, 25 bp, Homo sapien
cggcctctactgacaggaaatatgt

SEQ ID NO: 3296386 - DNA, 25 bp, Homo sapien
catccttgtttaccttcggcctcta

SEQ ID NO: 3296387 - DNA, 25 bp, Homo sapien
ttctttctgttacacgacatccttg

SEQ ID NO: 3296388 - DNA, 25 bp, Homo sapien
tctgttacacgacatccttgtttac

SEQ ID NO: 3296389 - DNA, 25 bp, Homo sapien
tgctccatggaaccatatagcaggt

SEQ ID NO: 3296390 - DNA, 25 bp, Homo sapien
tggaaccatatagcaggtagctgat

SEQ ID NO: 3296391 - DNA, 25 bp, Homo sapien
gggtcctgtcctctacatctgctcc

SEQ ID NO: 3296392 - DNA, 25 bp, Homo sapien
ctgcagccttaacatagaaccttgg

SEQ ID NO: 3296393 - DNA, 25 bp, Homo sapien
tctcaatctctagtgcatccttctg

SEQ ID NO: 3296394 - DNA, 25 bp, Homo sapien
aagcaaacactattctcaatctcta

SEQ ID NO: 3296395 - DNA, 25 bp, Homo sapien
caatctctagtgcatccttctgaag

SEQ ID NO: 3296396 - DNA, 25 bp, Homo sapien
aaagcaaacactattctcaatctct

SEQ ID NO: 3296397 - DNA, 25 bp, Homo sapien
ggtctgtccctactggaatgcatat

SEQ ID NO: 3296398 - DNA, 25 bp, Homo sapien
gataccccaagccaccattgttttg

SEQ ID NO: 3296399 - DNA, 25 bp, Homo sapien
gctatgaatgcttttttgtggactc

SEQ ID NO: 3296400 - DNA, 25 bp, Homo sapien
tattttataccaaagcagggttcta

SEQ ID NO: 3296401 - DNA, 25 bp, Homo sapien
tatgattgtatgttggccgattcca

SEQ ID NO: 3296402 - DNA, 25 bp, Homo sapien
ggcacttgtgccaacaatcaattga

SEQ ID NO: 3296403 - DNA, 25 bp, Homo sapien
gactttccatatgctctcccactgg

SEQ ID NO: 3296404 - DNA, 25 bp, Homo sapien
tggatatccaatagtcccagtatga

SEQ ID NO: 3296405 - DNA, 25 bp, Homo sapien
aatcggaaataaacatctaggctgg

SEQ ID NO: 3296406 - DNA, 25 bp, Homo sapien
tttgccagtggaatgtgaacacagg

SEQ ID NO: 3296407 - DNA, 25 bp, Homo sapien
tcctctgcagctaagtacattcctg

SEQ ID NO: 3296408 - DNA, 25 bp, Homo sapien
taccctttccatgggctagaatgtg

SEQ ID NO: 3296409 - DNA, 25 bp, Homo sapien
gatcctgtatcttgtaaacttgctg

SEQ ID NO: 3296410 - DNA, 25 bp, Homo sapien
aagctactgcttcgtgctgatgaca

SEQ ID NO: 3296411 - DNA, 25 bp, Homo sapien
tacttgccacaagagggtgaacaag

SEQ ID NO: 3296412 - DNA, 25 bp, Homo sapien
ggctactaaaatccagcatggtaag

SEQ ID NO: 3296413 - DNA, 25 bp, Homo sapien
tgttcacaggctcaatcataacgca

SEQ ID NO: 3296414 - DNA, 25 bp, Homo sapien
tgtaacagcatctaattggccaagc

SEQ ID NO: 3296415 - DNA, 25 bp, Homo sapien
tgtgatggaacgtctcttcaggagc

SEQ ID NO: 3296416 - DNA, 25 bp, Homo sapien
gattacaaggcatgaaccagtacgc

SEQ ID NO: 3296417 - DNA, 25 bp, Homo sapien
gacagaagcgtgatagtacgaccac

SEQ ID NO: 3296418 - DNA, 25 bp, Homo sapien
cattcatagtctagtgacagaagcg

SEQ ID NO: 3296419 - DNA, 25 bp, Homo sapien
tatgtctaaagcagagtttactggc

SEQ ID NO: 3296420 - DNA, 25 bp, Homo sapien
tattgaatataccagaccatgtgac

SEQ ID NO: 3296421 - DNA, 25 bp, Homo sapien
tcaggtcagactctgaggcgcccgt

SEQ ID NO: 3296422 - DNA, 25 bp, Homo sapien
cagacttttctctggcggttccaca

SEQ ID NO: 3296423 - DNA, 25 bp, Homo sapien
gaataaataagctctgcgtcggcgc

SEQ ID NO: 3296424 - DNA, 25 bp, Homo sapien
tctgggcgtttgaagactcaggtca

SEQ ID NO: 3296425 - DNA, 25 bp, Homo sapien
ttcctcccaagcaggcggccgttgg

SEQ ID NO: 3296426 - DNA, 25 bp, Homo sapien
tctccaatgggatcccctgtctgcc

SEQ ID NO: 3296427 - DNA, 25 bp, Homo sapien
ttgggtcggccgaaggcagcagcga

SEQ ID NO: 3296428 - DNA, 25 bp, Homo sapien
agcagcgactactacggctcttcct

SEQ ID NO: 3296429 - DNA, 25 bp, Homo sapien
cagtgcggagacgaggaggccagcc

SEQ ID NO: 3296430 - DNA, 25 bp, Homo sapien
caattcttccagtgcggagacgagg

SEQ ID NO: 3296431 - DNA, 25 bp, Homo sapien
agcccagccgcacttcggtcgccca

SEQ ID NO: 3296432 - DNA, 25 bp, Homo sapien
gcggaagggcaattcttccagtgcg

SEQ ID NO: 3296433 - DNA, 25 bp, Homo sapien
acaggctgtcggcatctcatggcag

SEQ ID NO: 3296434 - DNA, 25 bp, Homo sapien
ctcatggcagcggagacggtcgttt

SEQ ID NO: 3296435 - DNA, 25 bp, Homo sapien
gcttttactcagattccagcacctg

SEQ ID NO: 3296436 - DNA, 25 bp, Homo sapien
gggctaactttccgccacgtgctgt

SEQ ID NO: 3296437 - DNA, 25 bp, Homo sapien
cggctgcccgcggtgctttcaaaga

SEQ ID NO: 3296438 - DNA, 25 bp, Homo sapien
aattcgatttggtggttcggctgcc

SEQ ID NO: 3296439 - DNA, 25 bp, Homo sapien
ctaattcgatttggtggttcggctg

SEQ ID NO: 3296440 - DNA, 25 bp, Homo sapien
tgcccgcggtgctttcaaagacgtt

SEQ ID NO: 3296441 - DNA, 25 bp, Homo sapien
cagactactaattcttcaggattca

SEQ ID NO: 3296442 - DNA, 25 bp, Homo sapien
cgatcaggggagttgattcctttca

SEQ ID NO: 3296443 - DNA, 25 bp, Homo sapien
gattcctttcatgcccaaattgaac

SEQ ID NO: 3296444 - DNA, 25 bp, Homo sapien
gatatctcagatccttgaaattggt

SEQ ID NO: 3296445 - DNA, 25 bp, Homo sapien
tgttgctgtgtcaacccccggtagg

SEQ ID NO: 3296446 - DNA, 25 bp, Homo sapien
tagacctcgcaagtccactttctgc

SEQ ID NO: 3296447 - DNA, 25 bp, Homo sapien
ccccggtaggtgtagacctcgcaag

SEQ ID NO: 3296448 - DNA, 25 bp, Homo sapien
tagctattctgacctttgtgcactt

SEQ ID NO: 3296449 - DNA, 25 bp, Homo sapien
tattggccccagaaaattcacccac

SEQ ID NO: 3296450 - DNA, 25 bp, Homo sapien
taattcattatggtggcttcaagct

SEQ ID NO: 3296451 - DNA, 25 bp, Homo sapien
ggtttataatcttcatactttatgt

SEQ ID NO: 3296452 - DNA, 25 bp, Homo sapien
tgtcacccagatggcaattaggttt

SEQ ID NO: 3296453 - DNA, 25 bp, Homo sapien
catccacatctacttcaaggaatac

SEQ ID NO: 3296454 - DNA, 25 bp, Homo sapien
aaactggaatgttggcatgcatttg

SEQ ID NO: 3296455 - DNA, 25 bp, Homo sapien
tgcatttgacttcatactctaaagc

SEQ ID NO: 3296456 - DNA, 25 bp, Homo sapien
aaagcaacatcctgacagtcatcca

SEQ ID NO: 3296457 - DNA, 25 bp, Homo sapien
gatcgttttaccattcttggctgct

SEQ ID NO: 3296458 - DNA, 25 bp, Homo sapien
caactacaagtttattgcctgcggt

SEQ ID NO: 3296459 - DNA, 25 bp, Homo sapien
agtttattgcctgcggtgtccaagg

SEQ ID NO: 3296460 - DNA, 25 bp, Homo sapien
gcaaccttgctcttgatcgttttac

SEQ ID NO: 3296461 - DNA, 25 bp, Homo sapien
gatggaaacggatccaaagcactgg

SEQ ID NO: 3296462 - DNA, 25 bp, Homo sapien
taacgaccgatggaaacggatccaa

SEQ ID NO: 3296463 - DNA, 25 bp, Homo sapien
ctgtaacgaccgatggaaacggatc

SEQ ID NO: 3296464 - DNA, 25 bp, Homo sapien
gaccgatggaaacggatccaaagca

SEQ ID NO: 3296465 - DNA, 25 bp, Homo sapien
tggtttaacaaagataggtcatgag

SEQ ID NO: 3296466 - DNA, 25 bp, Homo sapien
tcaaggagagatactcgaggatctt

SEQ ID NO: 3296467 - DNA, 25 bp, Homo sapien
cgaggatcttcaaacgtatctgtga

SEQ ID NO: 3296468 - DNA, 25 bp, Homo sapien
ttgaagcaaataacaggcactgtct

SEQ ID NO: 3296469 - DNA, 25 bp, Homo sapien
gaaggaaataatgcttgcaccaatg

SEQ ID NO: 3296470 - DNA, 25 bp, Homo sapien
gtacattttagtcatatgaacagac

SEQ ID NO: 3296471 - DNA, 25 bp, Homo sapien
gcagttttcctcacaacataaagca

SEQ ID NO: 3296472 - DNA, 25 bp, Homo sapien
gaatttatgcctattactggtggta

SEQ ID NO: 3296473 - DNA, 25 bp, Homo sapien
cacatctgacaatgttggcaactaa

SEQ ID NO: 3296474 - DNA, 25 bp, Homo sapien
aatactgtgtgggtcacataaacac

SEQ ID NO: 3296475 - DNA, 25 bp, Homo sapien
aacatatagattggttgaggacaac

SEQ ID NO: 3296476 - DNA, 25 bp, Homo sapien
cacatttgctggttgagtctgccaa

SEQ ID NO: 3296477 - DNA, 25 bp, Homo sapien
taagcacaacacttacgaagatgcc

SEQ ID NO: 3296478 - DNA, 25 bp, Homo sapien
gaatagcacatggacttcatgcaga

SEQ ID NO: 3296479 - DNA, 25 bp, Homo sapien
tgtttatcccactattccatgctgc

SEQ ID NO: 3296480 - DNA, 25 bp, Homo sapien
tttacaagtaaagatagaggctcag

SEQ ID NO: 3296481 - DNA, 25 bp, Homo sapien
tactgccctgccaattgggctattt

SEQ ID NO: 3296482 - DNA, 25 bp, Homo sapien
tccaggttgttacgatccccaacta

SEQ ID NO: 3296483 - DNA, 25 bp, Homo sapien
gatggccggtggatccacaagatac

SEQ ID NO: 3296484 - DNA, 25 bp, Homo sapien
ccatgacttagtgaggttggacatc

SEQ ID NO: 3296485 - DNA, 25 bp, Homo sapien
tttatggtgaaaagaatctcactgt

SEQ ID NO: 3296486 - DNA, 25 bp, Homo sapien
tgtagacagattcttcagtcgtttc

SEQ ID NO: 3296487 - DNA, 25 bp, Homo sapien
tcgtttcacactgccaagtggagaa

SEQ ID NO: 3296488 - DNA, 25 bp, Homo sapien
tcaccgatcttgtgtttaggaccct

SEQ ID NO: 3296489 - DNA, 25 bp, Homo sapien
cacatactaggtagagatacagaaa

SEQ ID NO: 3296490 - DNA, 25 bp, Homo sapien
ttgctcctcagtagtctataagaag

SEQ ID NO: 3296491 - DNA, 25 bp, Homo sapien
tctagcccatactaccgaaaggtta

SEQ ID NO: 3296492 - DNA, 25 bp, Homo sapien
cagttccttgcacatactaggtaga

SEQ ID NO: 3296493 - DNA, 25 bp, Homo sapien
aatctgtactctctgggttagactt

SEQ ID NO: 3296494 - DNA, 25 bp, Homo sapien
tctgtactctctgggttagacttac

SEQ ID NO: 3296495 - DNA, 25 bp, Homo sapien
atctgtactctctgggttagactta

SEQ ID NO: 3296496 - DNA, 25 bp, Homo sapien
taatctgtactctctgggttagact

SEQ ID NO: 3296497 - DNA, 25 bp, Homo sapien
acttcccgtagctcccacgttgctt

SEQ ID NO: 3296498 - DNA, 25 bp, Homo sapien
aatataagaaatccactccagcagc

SEQ ID NO: 3296499 - DNA, 25 bp, Homo sapien
tctgtgagaaatataagaaatccac

SEQ ID NO: 3296500 - DNA, 25 bp, Homo sapien
gctcccacgttgctttccttgtgtg

SEQ ID NO: 3296501 - DNA, 25 bp, Homo sapien
gggcctgtgcaccatgacaacctac

SEQ ID NO: 3296502 - DNA, 25 bp, Homo sapien
cttggtggaatagggcctgtgcacc

SEQ ID NO: 3296503 - DNA, 25 bp, Homo sapien
aatagggcctgtgcaccatgacaac

SEQ ID NO: 3296504 - DNA, 25 bp, Homo sapien
gtggaatagggcctgtgcaccatga

SEQ ID NO: 3296505 - DNA, 25 bp, Homo sapien
cttctgtagtgtgatgtgcttgggt

SEQ ID NO: 3296506 - DNA, 25 bp, Homo sapien
tagtgtgatgtgcttgggtgggcca

SEQ ID NO: 3296507 - DNA, 25 bp, Homo sapien
tgacttctgtagtgtgatgtgcttg

SEQ ID NO: 3296508 - DNA, 25 bp, Homo sapien
tgtgatgtgcttgggtgggccacgc

SEQ ID NO: 3296509 - DNA, 25 bp, Homo sapien
gtcccttgatggccaacacacacat

SEQ ID NO: 3296510 - DNA, 25 bp, Homo sapien
tatggccctggctacttgtgatgtc

SEQ ID NO: 3296511 - DNA, 25 bp, Homo sapien
gaagcaatggtgtctaattcaagga

SEQ ID NO: 3296512 - DNA, 25 bp, Homo sapien
caaacataccatgggcatttcagcc

SEQ ID NO: 3296513 - DNA, 25 bp, Homo sapien
gatgcaagatgtgaccaaggaccca

SEQ ID NO: 3296514 - DNA, 25 bp, Homo sapien
tgaattattaatatccgggctaaag

SEQ ID NO: 3296515 - DNA, 25 bp, Homo sapien
gtttcttgggtgttcatgcatgtga

SEQ ID NO: 3296516 - DNA, 25 bp, Homo sapien
tgcgctaaacccactcccggtaata

SEQ ID NO: 3296517 - DNA, 25 bp, Homo sapien
ttccttatatcggtggctgcagctg

SEQ ID NO: 3296518 - DNA, 25 bp, Homo sapien
aagcgtcccatccatatttcattat

SEQ ID NO: 3296519 - DNA, 25 bp, Homo sapien
gtggctaatttatatccggtgatag

SEQ ID NO: 3296520 - DNA, 25 bp, Homo sapien
tgtgtgaatatgagtagcacaggac

SEQ ID NO: 3296521 - DNA, 25 bp, Homo sapien
gacctcctattcgtcactgttttga

SEQ ID NO: 3296522 - DNA, 25 bp, Homo sapien
tatctggggttgtaagcagctctgg

SEQ ID NO: 3296523 - DNA, 25 bp, Homo sapien
ttttcacacttggtggttgtttgct

SEQ ID NO: 3296524 - DNA, 25 bp, Homo sapien
aatgctgttttgctagtgattcccc

SEQ ID NO: 3296525 - DNA, 25 bp, Homo sapien
gggctctgttcacttcggatacctg

SEQ ID NO: 3296526 - DNA, 25 bp, Homo sapien
gaaggtgaaactctagtcccaggta

SEQ ID NO: 3296527 - DNA, 25 bp, Homo sapien
gcaaagttaaataccctaggtcaca

SEQ ID NO: 3296528 - DNA, 25 bp, Homo sapien
caataaatattgtgggcttacctcc

SEQ ID NO: 3296529 - DNA, 25 bp, Homo sapien
tcttgacttcacatgttgggcacct

SEQ ID NO: 3296530 - DNA, 25 bp, Homo sapien
gctaaactatgaaagaggtgctctt

SEQ ID NO: 3296531 - DNA, 25 bp, Homo sapien
tagaatgcagtcagataagagtgtg

SEQ ID NO: 3296532 - DNA, 25 bp, Homo sapien
gcatgagaactaagggcgtttccca

SEQ ID NO: 3296533 - DNA, 25 bp, Homo sapien
tagctttgaaagcatcccgatgctg

SEQ ID NO: 3296534 - DNA, 25 bp, Homo sapien
ttatgaaagttaccccagcaatgct

SEQ ID NO: 3296535 - DNA, 25 bp, Homo sapien
taggacctcagaaaaagacatgacc

SEQ ID NO: 3296536 - DNA, 25 bp, Homo sapien
tcagaaaaagacatgacctaagatg

SEQ ID NO: 3296537 - DNA, 25 bp, Homo sapien
tgtactactgaaataggacctcaga

SEQ ID NO: 3296538 - DNA, 25 bp, Homo sapien
tcttcagctcagaggcgtctgtact

SEQ ID NO: 3296539 - DNA, 25 bp, Homo sapien
caggtactgctgctcagaaagacta

SEQ ID NO: 3296540 - DNA, 25 bp, Homo sapien
aggtactgctgctcagaaagactat

SEQ ID NO: 3296541 - DNA, 25 bp, Homo sapien
gcacatcagctgtacacaggggccg

SEQ ID NO: 3296542 - DNA, 25 bp, Homo sapien
cacatcagctgtacacaggggccgc

SEQ ID NO: 3296543 - DNA, 25 bp, Homo sapien
ttattcatatgtccgagagccctgc

SEQ ID NO: 3296544 - DNA, 25 bp, Homo sapien
gatatgtatgagagagcctagcacc

SEQ ID NO: 3296545 - DNA, 25 bp, Homo sapien
gaagacctgttaagtgctaggcact

SEQ ID NO: 3296546 - DNA, 25 bp, Homo sapien
gctcagaatgtaggtggtggcacac

SEQ ID NO: 3296547 - DNA, 25 bp, Homo sapien
tagcaatgactatgttcgacaactc

SEQ ID NO: 3296548 - DNA, 25 bp, Homo sapien
ttcagtttcatgagatagcaatgac

SEQ ID NO: 3296549 - DNA, 25 bp, Homo sapien
tggaattccaaatagcttgagcagc

SEQ ID NO: 3296550 - DNA, 25 bp, Homo sapien
cagcaccttgactttactagttggg

SEQ ID NO: 3296551 - DNA, 25 bp, Homo sapien
gttcacgaacggttgaagtcagtga

SEQ ID NO: 3296552 - DNA, 25 bp, Homo sapien
cgttcacgaacggttgaagtcagtg

SEQ ID NO: 3296553 - DNA, 25 bp, Homo sapien
tatctgccttatacatgtcacaagt

SEQ ID NO: 3296554 - DNA, 25 bp, Homo sapien
cacaagttataaagattgagagctg

SEQ ID NO: 3296555 - DNA, 25 bp, Homo sapien
ggtaaatgcgttgtatgttttgtca

SEQ ID NO: 3296556 - DNA, 25 bp, Homo sapien
cagttaagcaactgatcattacaat

SEQ ID NO: 3296557 - DNA, 25 bp, Homo sapien
tatgccggagtatgtttcatcaaag

SEQ ID NO: 3296558 - DNA, 25 bp, Homo sapien
aatgattgctccagatgaaacacag

SEQ ID NO: 3296559 - DNA, 25 bp, Homo sapien
cacgctggctcatcttatgccggag

SEQ ID NO: 3296560 - DNA, 25 bp, Homo sapien
cattagcagatatttagtgagcatg

SEQ ID NO: 3296561 - DNA, 25 bp, Homo sapien
gttgtctgtggccaactagcagggc

SEQ ID NO: 3296562 - DNA, 25 bp, Homo sapien
tagcagggccatggatgtaaaggat

SEQ ID NO: 3296563 - DNA, 25 bp, Homo sapien
cagtgagcgcccaagcattaatttc

SEQ ID NO: 3296564 - DNA, 25 bp, Homo sapien
caaacgtgcaaacagtgtcagtgtc

SEQ ID NO: 3296565 - DNA, 25 bp, Homo sapien
gagatagcaggatccatcccaggta

SEQ ID NO: 3296566 - DNA, 25 bp, Homo sapien
caaatttgaaagtgacccagctact

SEQ ID NO: 3296567 - DNA, 25 bp, Homo sapien
gacaccgtgggatttggagaccaga

SEQ ID NO: 3296568 - DNA, 25 bp, Homo sapien
gcaatgtacggctgaagttaaccat

SEQ ID NO: 3296569 - DNA, 25 bp, Homo sapien
gctagagtactcttcgcagaataaa

SEQ ID NO: 3296570 - DNA, 25 bp, Homo sapien
caggcacagacacagtagtttacag

SEQ ID NO: 3296571 - DNA, 25 bp, Homo sapien
taatggcctggaaggatcactgcag

SEQ ID NO: 3296572 - DNA, 25 bp, Homo sapien
catgatagtggagagatcacgggca

SEQ ID NO: 3296573 - DNA, 25 bp, Homo sapien
tcaatagtcttcaggagacatatga

SEQ ID NO: 3296574 - DNA, 25 bp, Homo sapien
tgtgaactgaaatttcttagtatac

SEQ ID NO: 3296575 - DNA, 25 bp, Homo sapien
cttagtatacaatttcatgatgctg

SEQ ID NO: 3296576 - DNA, 25 bp, Homo sapien
ccttcgtttgtggattttcaatagt

SEQ ID NO: 3296577 - DNA, 25 bp, Homo sapien
gaccaagcaatcaggcctggaggaa

SEQ ID NO: 3296578 - DNA, 25 bp, Homo sapien
tctcatgactcttgatagagagcat

SEQ ID NO: 3296579 - DNA, 25 bp, Homo sapien
caacactaggagtctcaaagaagac

SEQ ID NO: 3296580 - DNA, 25 bp, Homo sapien
tcagcaccctctgaagacaattctc

SEQ ID NO: 3296581 - DNA, 25 bp, Homo sapien
gaataaccgcgaatgctctgtgcag

SEQ ID NO: 3296582 - DNA, 25 bp, Homo sapien
gacagactggtgagcaagcattata

SEQ ID NO: 3296583 - DNA, 25 bp, Homo sapien
taaaatgctacctgtacgtctgaca

SEQ ID NO: 3296584 - DNA, 25 bp, Homo sapien
ttctgaatggcagcacgaagcaggc

SEQ ID NO: 3296585 - DNA, 25 bp, Homo sapien
ttgttccaaccaccgcttgtgtgag

SEQ ID NO: 3296586 - DNA, 25 bp, Homo sapien
catagtcttcacaggtttaggagct

SEQ ID NO: 3296587 - DNA, 25 bp, Homo sapien
gcataacaacgaaaggcatccagct

SEQ ID NO: 3296588 - DNA, 25 bp, Homo sapien
tctagtctggagctaactgtggagc

SEQ ID NO: 3296589 - DNA, 25 bp, Homo sapien
ccttggctctgcacggaataaatga

SEQ ID NO: 3296590 - DNA, 25 bp, Homo sapien
taattggatgtgctttcgcctttgc

SEQ ID NO: 3296591 - DNA, 25 bp, Homo sapien
tcgcctttgcatgtaagtacggtag

SEQ ID NO: 3296592 - DNA, 25 bp, Homo sapien
ccgaaattactaatccaggccaggt

SEQ ID NO: 3296593 - DNA, 25 bp, Homo sapien
tgtcaggtctcagcttcgaaaagtc

SEQ ID NO: 3296594 - DNA, 25 bp, Homo sapien
tacataactagctggccttacccca

SEQ ID NO: 3296595 - DNA, 25 bp, Homo sapien
tcattggatagctcagagggccctt

SEQ ID NO: 3296596 - DNA, 25 bp, Homo sapien
tgtgctctacatagcctcatgggca

SEQ ID NO: 3296597 - DNA, 25 bp, Homo sapien
gtaagctgcatgttagacatttgtc

SEQ ID NO: 3296598 - DNA, 25 bp, Homo sapien
tttggcatctgttaaggtaggagag

SEQ ID NO: 3296599 - DNA, 25 bp, Homo sapien
aatctatgcatatatcactagtgcc

SEQ ID NO: 3296600 - DNA, 25 bp, Homo sapien
gaaagtgatcacttagcaacatgct

SEQ ID NO: 3296601 - DNA, 25 bp, Homo sapien
tctttatgtaaccatcctgttgaca

SEQ ID NO: 3296602 - DNA, 25 bp, Homo sapien
taagaatcaaatttgaatctgaacc

SEQ ID NO: 3296603 - DNA, 25 bp, Homo sapien
gcttgttgtagagaagctccttttc

SEQ ID NO: 3296604 - DNA, 25 bp, Homo sapien
atcctgttgacaagccctactctct

SEQ ID NO: 3296605 - DNA, 25 bp, Homo sapien
ccagggcccacaaacttgatctcat

SEQ ID NO: 3296606 - DNA, 25 bp, Homo sapien
tcatggtaactcctgtcctttctgt

SEQ ID NO: 3296607 - DNA, 25 bp, Homo sapien
tcaggtcataagatccgagcaacat

SEQ ID NO: 3296608 - DNA, 25 bp, Homo sapien
cagcctgatcaggatcctcaaccgt

SEQ ID NO: 3296609 - DNA, 25 bp, Homo sapien
gtgttgggtagatgacttttctgcc

SEQ ID NO: 3296610 - DNA, 25 bp, Homo sapien
tttgacctacaaatcctaatcatgt

SEQ ID NO: 3296611 - DNA, 25 bp, Homo sapien
tattggttattcagcttacttttgg

SEQ ID NO: 3296612 - DNA, 25 bp, Homo sapien
atgtttaaaatgtgccggtgttggg

SEQ ID NO: 3296613 - DNA, 25 bp, Homo sapien
aataccgttggtggcatgagttgcc

SEQ ID NO: 3296614 - DNA, 25 bp, Homo sapien
gcctttaatcaagatcctcaggagt

SEQ ID NO: 3296615 - DNA, 25 bp, Homo sapien
aggagtgttcccctctgaataagaa

SEQ ID NO: 3296616 - DNA, 25 bp, Homo sapien
tgaagaagcaacagtccctgcctct

SEQ ID NO: 3296617 - DNA, 25 bp, Homo sapien
ttccagaggcttcacggagcgacag

SEQ ID NO: 3296618 - DNA, 25 bp, Homo sapien
caagtaacttgggacaggctgagaa

SEQ ID NO: 3296619 - DNA, 25 bp, Homo sapien
taaccaccaggaggcacaagacaat

SEQ ID NO: 3296620 - DNA, 25 bp, Homo sapien
ggaactaattgaacagcaggaactt

SEQ ID NO: 3296621 - DNA, 25 bp, Homo sapien
tacagacttaaatcatagagctgcc

SEQ ID NO: 3296622 - DNA, 25 bp, Homo sapien
tagagctgccccaacatctagacag

SEQ ID NO: 3296623 - DNA, 25 bp, Homo sapien
tctctgattaatatgggacaattcc

SEQ ID NO: 3296624 - DNA, 25 bp, Homo sapien
gcaagctacgttacattatggcaga

SEQ ID NO: 3296625 - DNA, 25 bp, Homo sapien
gctcactccaaatcagcctgttaag

SEQ ID NO: 3296626 - DNA, 25 bp, Homo sapien
cactcaaaggtagcacttgttgaaa

SEQ ID NO: 3296627 - DNA, 25 bp, Homo sapien
ctcattcccaaagtagtctacctta

SEQ ID NO: 3296628 - DNA, 25 bp, Homo sapien
tatttccttctacagcctttcctga

SEQ ID NO: 3296629 - DNA, 25 bp, Homo sapien
gacaaggggaagcatgtccctcttg

SEQ ID NO: 3296630 - DNA, 25 bp, Homo sapien
gtggacaaggggaagcatgtccctc

SEQ ID NO: 3296631 - DNA, 25 bp, Homo sapien
tatcttcattatagagccgtttgat

SEQ ID NO: 3296632 - DNA, 25 bp, Homo sapien
agagccgtttgattccatcatagaa

SEQ ID NO: 3296633 - DNA, 25 bp, Homo sapien
tccatttcctctactttgcgtttag

SEQ ID NO: 3296634 - DNA, 25 bp, Homo sapien
tactttgcgtttagtagaggtctgc

SEQ ID NO: 3296635 - DNA, 25 bp, Homo sapien
agtagaggtctgcttgcacccactg

SEQ ID NO: 3296636 - DNA, 25 bp, Homo sapien
tgcgtttagtagaggtctgcttgca

SEQ ID NO: 3296637 - DNA, 25 bp, Homo sapien
tctgactggcacttctggcttgctg

SEQ ID NO: 3296638 - DNA, 25 bp, Homo sapien
ttgtccttggagaagtctgggcctg

SEQ ID NO: 3296639 - DNA, 25 bp, Homo sapien
tagacataaacggaattcagaggca

SEQ ID NO: 3296640 - DNA, 25 bp, Homo sapien
gggatgtaatctgaacactcctttg

SEQ ID NO: 3296641 - DNA, 25 bp, Homo sapien
caagctcccgacaatggatcaactg

SEQ ID NO: 3296642 - DNA, 25 bp, Homo sapien
gctcccgacaatggatcaactggga

SEQ ID NO: 3296643 - DNA, 25 bp, Homo sapien
gtgccacaagctcccgacaatggat

SEQ ID NO: 3296644 - DNA, 25 bp, Homo sapien
ccacaagctcccgacaatggatcaa

SEQ ID NO: 3296645 - DNA, 25 bp, Homo sapien
tgctgaacatttacatgagaacaga

SEQ ID NO: 3296646 - DNA, 25 bp, Homo sapien
catttatttatccagctacccatcc

SEQ ID NO: 3296647 - DNA, 25 bp, Homo sapien
tgatcattaattaacataggctgct

SEQ ID NO: 3296648 - DNA, 25 bp, Homo sapien
tgtgctttccgtccccgctgagtct

SEQ ID NO: 3296649 - DNA, 25 bp, Homo sapien
caatcctttctggagttacccctga

SEQ ID NO: 3296650 - DNA, 25 bp, Homo sapien
ccaaaactctaaatgccacggtcat

SEQ ID NO: 3296651 - DNA, 25 bp, Homo sapien
tacccttcaggacaattcacagata

SEQ ID NO: 3296652 - DNA, 25 bp, Homo sapien
tttcagtggagtccaaagtactcat

SEQ ID NO: 3296653 - DNA, 25 bp, Homo sapien
gatatggagagccaactgtacctcg

SEQ ID NO: 3296654 - DNA, 25 bp, Homo sapien
tgatgaacagcatgaagcactgagg

SEQ ID NO: 3296655 - DNA, 25 bp, Homo sapien
tatattttagcggtgggagactgac

SEQ ID NO: 3296656 - DNA, 25 bp, Homo sapien
tattgcgcattccttccaggactgg

SEQ ID NO: 3296657 - DNA, 25 bp, Homo sapien
taatctaaacctacactacataggt

SEQ ID NO: 3296658 - DNA, 25 bp, Homo sapien
cgctatgttgagtggagatctgccc

SEQ ID NO: 3296659 - DNA, 25 bp, Homo sapien
cgtccaaagactacctacataatat

SEQ ID NO: 3296660 - DNA, 25 bp, Homo sapien
ctatggaagggaaaacgctatgttg

SEQ ID NO: 3296661 - DNA, 25 bp, Homo sapien
gtcctctgacactaacactttaaag

SEQ ID NO: 3296662 - DNA, 25 bp, Homo sapien
taagcacagagaataagtcagaagg

SEQ ID NO: 3296663 - DNA, 25 bp, Homo sapien
tctttctaacactccagggtgagca

SEQ ID NO: 3296664 - DNA, 25 bp, Homo sapien
tgtactatcttgagagtaagcacag

SEQ ID NO: 3296665 - DNA, 25 bp, Homo sapien
gcagttcaattgtaagagaaagcca

SEQ ID NO: 3296666 - DNA, 25 bp, Homo sapien
tgcagaagttggttgcaggccatac

SEQ ID NO: 3296667 - DNA, 25 bp, Homo sapien
catttccagactaaccatggccaga

SEQ ID NO: 3296668 - DNA, 25 bp, Homo sapien
gccagagcaagcatggatcctctga

SEQ ID NO: 3296669 - DNA, 25 bp, Homo sapien
cctagttgacactgcaatggcatgg

SEQ ID NO: 3296670 - DNA, 25 bp, Homo sapien
gatgggctcaatttgggcaaactga

SEQ ID NO: 3296671 - DNA, 25 bp, Homo sapien
ctgccaaatgttgagatgggctcaa

SEQ ID NO: 3296672 - DNA, 25 bp, Homo sapien
ctgaggcctagttgacactgcaatg

SEQ ID NO: 3296673 - DNA, 25 bp, Homo sapien
aatgagtaggcaatctattttttaa

SEQ ID NO: 3296674 - DNA, 25 bp, Homo sapien
cgaattaagcttcagtgatatgaca

SEQ ID NO: 3296675 - DNA, 25 bp, Homo sapien
gcccagcctaacctattcaatttct

SEQ ID NO: 3296676 - DNA, 25 bp, Homo sapien
caatttctaagtctgcgaattaagc

SEQ ID NO: 3296677 - DNA, 25 bp, Homo sapien
cagaaactgtctcttgccaatacct

SEQ ID NO: 3296678 - DNA, 25 bp, Homo sapien
aaaatccaatggtgtggctgtgtga

SEQ ID NO: 3296679 - DNA, 25 bp, Homo sapien
tgaggaacatccacagaaactgtct

SEQ ID NO: 3296680 - DNA, 25 bp, Homo sapien
ggctgtgtgaagatcccaattcaac

SEQ ID NO: 3296681 - DNA, 25 bp, Homo sapien
gattgcaatacaactcaagtatttt

SEQ ID NO: 3296682 - DNA, 25 bp, Homo sapien
atacaactcaagtattttggatgag

SEQ ID NO: 3296683 - DNA, 25 bp, Homo sapien
ggaaaaaacagctgattgcaataca

SEQ ID NO: 3296684 - DNA, 25 bp, Homo sapien
aaacagctgattgcaatacaactca

SEQ ID NO: 3296685 - DNA, 25 bp, Homo sapien
gtcttacactccgtaattatttggc

SEQ ID NO: 3296686 - DNA, 25 bp, Homo sapien
gagtagaagtttgagcagctattca

SEQ ID NO: 3296687 - DNA, 25 bp, Homo sapien
ttgagggcctatttactaacttgac

SEQ ID NO: 3296688 - DNA, 25 bp, Homo sapien
agtaagcccgtagaaagcactttgt

SEQ ID NO: 3296689 - DNA, 25 bp, Homo sapien
gggtacatacatcattctccagcaa

SEQ ID NO: 3296690 - DNA, 25 bp, Homo sapien
cagaatgttcactaatagcctctag

SEQ ID NO: 3296691 - DNA, 25 bp, Homo sapien
gcctctagtttagcatacatacact

SEQ ID NO: 3296692 - DNA, 25 bp, Homo sapien
taaacaatagcagaagacatcacca

SEQ ID NO: 3296693 - DNA, 25 bp, Homo sapien
agcaaatgtttctgggtaaaggttg

SEQ ID NO: 3296694 - DNA, 25 bp, Homo sapien
aattggtacttgagtttggccagcc

SEQ ID NO: 3296695 - DNA, 25 bp, Homo sapien
tccaaaagactgctagccagagcaa

SEQ ID NO: 3296696 - DNA, 25 bp, Homo sapien
tggccagccattgaattacttcatc

SEQ ID NO: 3296697 - DNA, 25 bp, Homo sapien
tctctctcataaaaggttaggtaat

SEQ ID NO: 3296698 - DNA, 25 bp, Homo sapien
gacttgagacacatgaaataaaact

SEQ ID NO: 3296699 - DNA, 25 bp, Homo sapien
gaatttctcccgcagcaagtagcca

SEQ ID NO: 3296700 - DNA, 25 bp, Homo sapien
gaattaaatttaggtgctcagagaa

SEQ ID NO: 3296701 - DNA, 25 bp, Homo sapien
tctagttctggactaaggatccata

SEQ ID NO: 3296702 - DNA, 25 bp, Homo sapien
tagtaagcctacaatggtatggaac

SEQ ID NO: 3296703 - DNA, 25 bp, Homo sapien
tccctgagaaccaagtaaagccaat

SEQ ID NO: 3296704 - DNA, 25 bp, Homo sapien
tgtatccaggctactttaagatcta

SEQ ID NO: 3296705 - DNA, 25 bp, Homo sapien
gaagtaatactgagtctaaggtcac

SEQ ID NO: 3296706 - DNA, 25 bp, Homo sapien
tattttgatgttactccccgccaga

SEQ ID NO: 3296707 - DNA, 25 bp, Homo sapien
tattgctcctactgactggaacgca

SEQ ID NO: 3296708 - DNA, 25 bp, Homo sapien
tacaaatagtaagttctgcgcctaa

SEQ ID NO: 3296709 - DNA, 25 bp, Homo sapien
tgagcaaattgggactactgagtac

SEQ ID NO: 3296710 - DNA, 25 bp, Homo sapien
aacactcctcattcaagttaactaa

SEQ ID NO: 3296711 - DNA, 25 bp, Homo sapien
tattaaagtcttgagcaaattggga

SEQ ID NO: 3296712 - DNA, 25 bp, Homo sapien
ctgcgtccagcccaaattatcattc

SEQ ID NO: 3296713 - DNA, 25 bp, Homo sapien
gaccagctggctatcttctaaaaag

SEQ ID NO: 3296714 - DNA, 25 bp, Homo sapien
cacatgaactccttaccgctaatga

SEQ ID NO: 3296715 - DNA, 25 bp, Homo sapien
tagttgactaaagacaatggtatga

SEQ ID NO: 3296716 - DNA, 25 bp, Homo sapien
gcttccaacattggtattaccttag

SEQ ID NO: 3296717 - DNA, 25 bp, Homo sapien
tatgtatggcagtagtatgtttatt

SEQ ID NO: 3296718 - DNA, 25 bp, Homo sapien
atgtatggcagtagtatgtttattt

SEQ ID NO: 3296719 - DNA, 25 bp, Homo sapien
tgtatggcagtagtatgtttatttc

SEQ ID NO: 3296720 - DNA, 25 bp, Homo sapien
tgatttgaaggcattttccgcacat

SEQ ID NO: 3296721 - DNA, 25 bp, Homo sapien
tctgtgcttccctagtgattgcctt

SEQ ID NO: 3296722 - DNA, 25 bp, Homo sapien
tttccacatctgtgcttccctagtg

SEQ ID NO: 3296723 - DNA, 25 bp, Homo sapien
aggcattttccgcacattcactttc

SEQ ID NO: 3296724 - DNA, 25 bp, Homo sapien
atcctttggatctgcctgctaccca

SEQ ID NO: 3296725 - DNA, 25 bp, Homo sapien
atatcctttggatctgcctgctacc

SEQ ID NO: 3296726 - DNA, 25 bp, Homo sapien
gatatcctttggatctgcctgctac

SEQ ID NO: 3296727 - DNA, 25 bp, Homo sapien
tatcctttggatctgcctgctaccc

SEQ ID NO: 3296728 - DNA, 25 bp, Homo sapien
agaagcaaactacagacttgaggtt

SEQ ID NO: 3296729 - DNA, 25 bp, Homo sapien
aattggattaagaaactgctaaaga

SEQ ID NO: 3296730 - DNA, 25 bp, Homo sapien
gactgtgtgtagaaaattggattaa

SEQ ID NO: 3296731 - DNA, 25 bp, Homo sapien
ttgactgtgtgtagaaaattggatt

SEQ ID NO: 3296732 - DNA, 25 bp, Homo sapien
tagaaacggaatgtaggccaggtgc

SEQ ID NO: 3296733 - DNA, 25 bp, Homo sapien
agctatcgaagttttgggaggccaa

SEQ ID NO: 3296734 - DNA, 25 bp, Homo sapien
tgccccaacccattgtgtgcgaggt

SEQ ID NO: 3296735 - DNA, 25 bp, Homo sapien
tcaacaatttggtaggcaagctcac

SEQ ID NO: 3296736 - DNA, 25 bp, Homo sapien
tgctgctctaagtcgagtggctccc

SEQ ID NO: 3296737 - DNA, 25 bp, Homo sapien
gaaagttaatcttgtggagtctcag

SEQ ID NO: 3296738 - DNA, 25 bp, Homo sapien
caagccacttaggagaatgcctggc

SEQ ID NO: 3296739 - DNA, 25 bp, Homo sapien
tgccaaaaggatctgtaacggagcc

SEQ ID NO: 3296740 - DNA, 25 bp, Homo sapien
gagtagctaatttgccgctgccaca

SEQ ID NO: 3296741 - DNA, 25 bp, Homo sapien
tggcccgaaaaggaacacagtagtg

SEQ ID NO: 3296742 - DNA, 25 bp, Homo sapien
cagtagtgccgttttcaagtgggca

SEQ ID NO: 3296743 - DNA, 25 bp, Homo sapien
gttactcgctgacagaaaaactggc

SEQ ID NO: 3296744 - DNA, 25 bp, Homo sapien
cctccccggcagagctgtaggcctc

SEQ ID NO: 3296745 - DNA, 25 bp, Homo sapien
tccccggcagagctgtaggcctcac

SEQ ID NO: 3296746 - DNA, 25 bp, Homo sapien
ctcctccccggcagagctgtaggcc

SEQ ID NO: 3296747 - DNA, 25 bp, Homo sapien
tcctcctccccggcagagctgtagg

SEQ ID NO: 3296748 - DNA, 25 bp, Homo sapien
cataggcgcgcggaggcggtgcgcg

SEQ ID NO: 3296749 - DNA, 25 bp, Homo sapien
ggtgcgcgcgggacgactcggccaa

SEQ ID NO: 3296750 - DNA, 25 bp, Homo sapien
ggggcccgttaccacctcattctca

SEQ ID NO: 3296751 - DNA, 25 bp, Homo sapien
tggtgacgcggggtcatccgggggc

SEQ ID NO: 3296752 - DNA, 25 bp, Homo sapien
gggcgctggcgctcgagcgggacgc

SEQ ID NO: 3296753 - DNA, 25 bp, Homo sapien
gcgggcgctggcgctcgagcgggac

SEQ ID NO: 3296754 - DNA, 25 bp, Homo sapien
gcgctggcgctcgagcgggacgcac

SEQ ID NO: 3296755 - DNA, 25 bp, Homo sapien
ggcgctggcgctcgagcgggacgca

SEQ ID NO: 3296756 - DNA, 25 bp, Homo sapien
gagaggcggggggtgagaccggctc

SEQ ID NO: 3296757 - DNA, 25 bp, Homo sapien
tccctctcgccatagggcggcgggg

SEQ ID NO: 3296758 - DNA, 25 bp, Homo sapien
cgccgctcgagcccgggttgggagg

SEQ ID NO: 3296759 - DNA, 25 bp, Homo sapien
agcgaattagttccatgatgacccc

SEQ ID NO: 3296760 - DNA, 25 bp, Homo sapien
aaataagaaaaagcgagacagaggc

SEQ ID NO: 3296761 - DNA, 25 bp, Homo sapien
taagaaaaagcgagacagaggcgct

SEQ ID NO: 3296762 - DNA, 25 bp, Homo sapien
aaaaagcgagacagaggcgctgccg

SEQ ID NO: 3296763 - DNA, 25 bp, Homo sapien
cgcctccgaggggaaatggtgaaag

SEQ ID NO: 3296764 - DNA, 25 bp, Homo sapien
taaactacgcggacttggtctttca

SEQ ID NO: 3296765 - DNA, 25 bp, Homo sapien
tagactcgcccactccttgtaaact

SEQ ID NO: 3296766 - DNA, 25 bp, Homo sapien
ctcgcggaccgattcctagactcgc

SEQ ID NO: 3296767 - DNA, 25 bp, Homo sapien
aagaagtgccggcttcctcggctcc

SEQ ID NO: 3296768 - DNA, 25 bp, Homo sapien
gaaaagccgaaggtccgtggactca

SEQ ID NO: 3296769 - DNA, 25 bp, Homo sapien
tcccggtccaacgaaagtacagaga

SEQ ID NO: 3296770 - DNA, 25 bp, Homo sapien
aagtgcggccgaaaggagacgggct

SEQ ID NO: 3296771 - DNA, 25 bp, Homo sapien
ggaggacgttttctcgtggctaaga

SEQ ID NO: 3296772 - DNA, 25 bp, Homo sapien
agaccgcacggtgacgtcagcgtct

SEQ ID NO: 3296773 - DNA, 25 bp, Homo sapien
ggtgacgtcagcgtctctgggcccc

SEQ ID NO: 3296774 - DNA, 25 bp, Homo sapien
cttgcagaccgcacggtgacgtcag

SEQ ID NO: 3296775 - DNA, 25 bp, Homo sapien
cacggtgacgtcagcgtctctgggc

SEQ ID NO: 3296776 - DNA, 25 bp, Homo sapien
catgtaaatagaattgcggtttttc

SEQ ID NO: 3296777 - DNA, 25 bp, Homo sapien
agaattgcggtttttctcactgcca

SEQ ID NO: 3296778 - DNA, 25 bp, Homo sapien
ttgacatgtaaatagaattgcggtt

SEQ ID NO: 3296779 - DNA, 25 bp, Homo sapien
aatagaattgcggtttttctcactg

SEQ ID NO: 3296780 - DNA, 25 bp, Homo sapien
cagcattggcgacagagtgacatcc

SEQ ID NO: 3296781 - DNA, 25 bp, Homo sapien
gccaggaagtggttcgctatcatta

SEQ ID NO: 3296782 - DNA, 25 bp, Homo sapien
gaaatactgcctacatttttaggag

SEQ ID NO: 3296783 - DNA, 25 bp, Homo sapien
gcaaaatagtgtaaagtgagacctc

SEQ ID NO: 3296784 - DNA, 25 bp, Homo sapien
attgacaaaaatttactgccatttg

SEQ ID NO: 3296785 - DNA, 25 bp, Homo sapien
tgacaaaaatttactgccatttggc

SEQ ID NO: 3296786 - DNA, 25 bp, Homo sapien
gacaaaaatttactgccatttggca

SEQ ID NO: 3296787 - DNA, 25 bp, Homo sapien
ttcattgacaaaaatttactgccat

SEQ ID NO: 3296788 - DNA, 25 bp, Homo sapien
gcattcaccctgatagccagctgtg

SEQ ID NO: 3296789 - DNA, 25 bp, Homo sapien
ccactgagtggtggaaagggcacaa

SEQ ID NO: 3296790 - DNA, 25 bp, Homo sapien
attcaccctgatagccagctgtgcc

SEQ ID NO: 3296791 - DNA, 25 bp, Homo sapien
gatgcattcaccctgatagccagct

SEQ ID NO: 3296792 - DNA, 25 bp, Homo sapien
gtcagagagatggtcttattcttga

SEQ ID NO: 3296793 - DNA, 25 bp, Homo sapien
tcagagagatggtcttattcttgac

SEQ ID NO: 3296794 - DNA, 25 bp, Homo sapien
ctgtcagagagatggtcttattctt

SEQ ID NO: 3296795 - DNA, 25 bp, Homo sapien
tgtcagagagatggtcttattcttg

SEQ ID NO: 3296796 - DNA, 25 bp, Homo sapien
ggttctctgccccagtaaactcaca

SEQ ID NO: 3296797 - DNA, 25 bp, Homo sapien
agtcttgcaatggttctctgcccca

SEQ ID NO: 3296798 - DNA, 25 bp, Homo sapien
tgcaatggttctctgccccagtaaa

SEQ ID NO: 3296799 - DNA, 25 bp, Homo sapien
cgaagtcttgcaatggttctctgcc

SEQ ID NO: 3296800 - DNA, 25 bp, Homo sapien
atcaatccttttgatgcacacaaca

SEQ ID NO: 3296801 - DNA, 25 bp, Homo sapien
tccttttgatgcacacaacaaaggc

SEQ ID NO: 3296802 - DNA, 25 bp, Homo sapien
tttgatgcacacaacaaaggccaag

SEQ ID NO: 3296803 - DNA, 25 bp, Homo sapien
catcaatccttttgatgcacacaac

SEQ ID NO: 3296804 - DNA, 25 bp, Homo sapien
tcacttctagttgtctgagaagcag

SEQ ID NO: 3296805 - DNA, 25 bp, Homo sapien
cttctagttgtctgagaagcagctt

SEQ ID NO: 3296806 - DNA, 25 bp, Homo sapien
ctagttgtctgagaagcagcttgtc

SEQ ID NO: 3296807 - DNA, 25 bp, Homo sapien
agttgtctgagaagcagcttgtcat

SEQ ID NO: 3296808 - DNA, 25 bp, Homo sapien
ggcttgataagccttcacctttttc

SEQ ID NO: 3296809 - DNA, 25 bp, Homo sapien
taaacctgagctcttttcctttgct

SEQ ID NO: 3296810 - DNA, 25 bp, Homo sapien
gagctcttttcctttgctccttctt

SEQ ID NO: 3296811 - DNA, 25 bp, Homo sapien
ttgagggcttgataagccttcacct

SEQ ID NO: 3296812 - DNA, 25 bp, Homo sapien
tctttgcccttgatccaccgtcttt

SEQ ID NO: 3296813 - DNA, 25 bp, Homo sapien
ttctttgcccttgatccaccgtctt

SEQ ID NO: 3296814 - DNA, 25 bp, Homo sapien
gatgctcgattgagtcctttcaggt

SEQ ID NO: 3296815 - DNA, 25 bp, Homo sapien
cattgctgatgctcgattgagtcct

SEQ ID NO: 3296816 - DNA, 25 bp, Homo sapien
gctcgattgagtcctttcaggtcag

SEQ ID NO: 3296817 - DNA, 25 bp, Homo sapien
gctgatgctcgattgagtcctttca

SEQ ID NO: 3296818 - DNA, 25 bp, Homo sapien
taggccttttgagtagagtccccat

SEQ ID NO: 3296819 - DNA, 25 bp, Homo sapien
catcattctgtgttgtatttgccaa

SEQ ID NO: 3296820 - DNA, 25 bp, Homo sapien
gccaataacttgatgacattaggcc

SEQ ID NO: 3296821 - DNA, 25 bp, Homo sapien
cattctgtgttgtatttgccaataa

SEQ ID NO: 3296822 - DNA, 25 bp, Homo sapien
catataggacttaattcagaggaca

SEQ ID NO: 3296823 - DNA, 25 bp, Homo sapien
gcaccaactcaatatagggccttgg

SEQ ID NO: 3296824 - DNA, 25 bp, Homo sapien
ggtttgtgccttaatactcttcagg

SEQ ID NO: 3296825 - DNA, 25 bp, Homo sapien
gcatatgtctggattgaaattaccc

SEQ ID NO: 3296826 - DNA, 25 bp, Homo sapien
taactactctgaaacctgtggctga

SEQ ID NO: 3296827 - DNA, 25 bp, Homo sapien
taagtacaccattgtcttaatggag

SEQ ID NO: 3296828 - DNA, 25 bp, Homo sapien
acaggaagccttgtagtcttgagca

SEQ ID NO: 3296829 - DNA, 25 bp, Homo sapien
gaaacctgtggctgataagtacacc

SEQ ID NO: 3296830 - DNA, 25 bp, Homo sapien
catgcttgagaattggtggctgtag

SEQ ID NO: 3296831 - DNA, 25 bp, Homo sapien
tcatgcttgagaattggtggctgta

SEQ ID NO: 3296832 - DNA, 25 bp, Homo sapien
ggagatatgctccatttagacctca

SEQ ID NO: 3296833 - DNA, 25 bp, Homo sapien
catttagacctcattattttaggtg

SEQ ID NO: 3296834 - DNA, 25 bp, Homo sapien
attttaggtgtagcctcttcacatc

SEQ ID NO: 3296835 - DNA, 25 bp, Homo sapien
actggtatcagtttctggagatatg

SEQ ID NO: 3296836 - DNA, 25 bp, Homo sapien
ttcagtcaccacctcgccttagatt

SEQ ID NO: 3296837 - DNA, 25 bp, Homo sapien
cacctcgccttagattgagtataga

SEQ ID NO: 3296838 - DNA, 25 bp, Homo sapien
cacccattagtcagtagtaagaggc

SEQ ID NO: 3296839 - DNA, 25 bp, Homo sapien
acccagtacacccattagtcagtag

SEQ ID NO: 3296840 - DNA, 25 bp, Homo sapien
ctgaaacccatcatgtggtagtctt

SEQ ID NO: 3296841 - DNA, 25 bp, Homo sapien
catgtccttccatatgttcactgac

SEQ ID NO: 3296842 - DNA, 25 bp, Homo sapien
gaaacccatcatgtggtagtcttca

SEQ ID NO: 3296843 - DNA, 25 bp, Homo sapien
ccaactgaaacccatcatgtggtag

SEQ ID NO: 3296844 - DNA, 25 bp, Homo sapien
tctaacttcaaggtgaatctcactt

SEQ ID NO: 3296845 - DNA, 25 bp, Homo sapien
tctttactgccaatccacagtcggt

SEQ ID NO: 3296846 - DNA, 25 bp, Homo sapien
cacagtcggtgttgttctaacttca

SEQ ID NO: 3296847 - DNA, 25 bp, Homo sapien
ggtgaatctcacttttcctccggac

SEQ ID NO: 3296848 - DNA, 25 bp, Homo sapien
tgtaggtgctcctgggcccccttaa

SEQ ID NO: 3296849 - DNA, 25 bp, Homo sapien
gcaggggtaccttttgtaggtgctc

SEQ ID NO: 3296850 - DNA, 25 bp, Homo sapien
gtaccttttgtaggtgctcctgggc

SEQ ID NO: 3296851 - DNA, 25 bp, Homo sapien
taccttttgtaggtgctcctgggcc

SEQ ID NO: 3296852 - DNA, 25 bp, Homo sapien
tctttgggtgtgtttactgctaaaa

SEQ ID NO: 3296853 - DNA, 25 bp, Homo sapien
gatggtggagccaaccaccatgatc

SEQ ID NO: 3296854 - DNA, 25 bp, Homo sapien
ggtggagccaaccaccatgatcttg

SEQ ID NO: 3296855 - DNA, 25 bp, Homo sapien
ttgggtgtgtttactgctaaaacat

SEQ ID NO: 3296856 - DNA, 25 bp, Homo sapien
tcagttcggagcctgtgctgtccag

SEQ ID NO: 3296857 - DNA, 25 bp, Homo sapien
tcttctgtttcagttcggagcctgt

SEQ ID NO: 3296858 - DNA, 25 bp, Homo sapien
tctgtttcagttcggagcctgtgct

SEQ ID NO: 3296859 - DNA, 25 bp, Homo sapien
tggatcttctgtttcagttcggagc

SEQ ID NO: 3296860 - DNA, 25 bp, Homo sapien
tgttccagatgatcctcaggtccac

SEQ ID NO: 3296861 - DNA, 25 bp, Homo sapien
tcgctgtctgcgctgccgcccgagt

SEQ ID NO: 3296862 - DNA, 25 bp, Homo sapien
ccgttgctgacagaagcctgggaca

SEQ ID NO: 3296863 - DNA, 25 bp, Homo sapien
cgagtcttcgccgttgctgacagaa

SEQ ID NO: 3296864 - DNA, 25 bp, Homo sapien
cgtggcttcggcctccaagcagttg

SEQ ID NO: 3296865 - DNA, 25 bp, Homo sapien
tcttagcttcggtgtccatgccagg

SEQ ID NO: 3296866 - DNA, 25 bp, Homo sapien
gcctcggtcgccacggtcttagctt

SEQ ID NO: 3296867 - DNA, 25 bp, Homo sapien
gcttcggcctccaagcagttgaggg

SEQ ID NO: 3296868 - DNA, 25 bp, Homo sapien
cactgaaaggctcatcaaaatccca

SEQ ID NO: 3296869 - DNA, 25 bp, Homo sapien
cagtgaacatgagattgctggtatc

SEQ ID NO: 3296870 - DNA, 25 bp, Homo sapien
taaattgattgagacaggccttaga

SEQ ID NO: 3296871 - DNA, 25 bp, Homo sapien
tttctggactgaacgagtatacatc

SEQ ID NO: 3296872 - DNA, 25 bp, Homo sapien
atacggaacacttcataaatttgcc

SEQ ID NO: 3296873 - DNA, 25 bp, Homo sapien
cggaacacttcataaatttgcctgt

SEQ ID NO: 3296874 - DNA, 25 bp, Homo sapien
tgcctgtcatccttgcatgggggcc

SEQ ID NO: 3296875 - DNA, 25 bp, Homo sapien
tttgcctgtcatccttgcatggggg

SEQ ID NO: 3296876 - DNA, 25 bp, Homo sapien
tgccaagagcaggaaattcaacgcc

SEQ ID NO: 3296877 - DNA, 25 bp, Homo sapien
taaagagataagtggactaacgtgg

SEQ ID NO: 3296878 - DNA, 25 bp, Homo sapien
aacgtggataaagggctccatcttg

SEQ ID NO: 3296879 - DNA, 25 bp, Homo sapien
tccatcttggacaacttgatcagtc

SEQ ID NO: 3296880 - DNA, 25 bp, Homo sapien
tagctctagtctctaagttagtttc

SEQ ID NO: 3296881 - DNA, 25 bp, Homo sapien
ggatagttggtcgagctgctttctg

SEQ ID NO: 3296882 - DNA, 25 bp, Homo sapien
gatttccagcaagatgattatgtca

SEQ ID NO: 3296883 - DNA, 25 bp, Homo sapien
tgtccactcagcctattgatgctct

SEQ ID NO: 3296884 - DNA, 25 bp, Homo sapien
tgacagttgttaaaagaagcctctt

SEQ ID NO: 3296885 - DNA, 25 bp, Homo sapien
tgcttctgacataaaacggatggaa

SEQ ID NO: 3296886 - DNA, 25 bp, Homo sapien
ccactcatgatgtgatccggattag

SEQ ID NO: 3296887 - DNA, 25 bp, Homo sapien
taattgtgggtaaagagccagtaca

SEQ ID NO: 3296888 - DNA, 25 bp, Homo sapien
gattgaatatgaagaacccgagtgt

SEQ ID NO: 3296889 - DNA, 25 bp, Homo sapien
tagtgtattgctatatgggtgccaa

SEQ ID NO: 3296890 - DNA, 25 bp, Homo sapien
gcaaatctgtgtggtgatacagcca

SEQ ID NO: 3296891 - DNA, 25 bp, Homo sapien
gcagaaataattaggctagggctct

SEQ ID NO: 3296892 - DNA, 25 bp, Homo sapien
tgaggtggggtttgatgatgctgca

SEQ ID NO: 3296893 - DNA, 25 bp, Homo sapien
ctggtggtggaatggcaagatcttc

SEQ ID NO: 3296894 - DNA, 25 bp, Homo sapien
ccctcctggtggtggaatggcaaga

SEQ ID NO: 3296895 - DNA, 25 bp, Homo sapien
ctcctggtggtggaatggcaagatc

SEQ ID NO: 3296896 - DNA, 25 bp, Homo sapien
cagctgttgtctggacttagggcaa

SEQ ID NO: 3296897 - DNA, 25 bp, Homo sapien
ggttgaatgatttgactcctttatg

SEQ ID NO: 3296898 - DNA, 25 bp, Homo sapien
tttagagcacaatggtgcagctgct

SEQ ID NO: 3296899 - DNA, 25 bp, Homo sapien
agctttagagcacaatggtgcagct

SEQ ID NO: 3296900 - DNA, 25 bp, Homo sapien
gctgcaagtatagcaggtgtagaaa

SEQ ID NO: 3296901 - DNA, 25 bp, Homo sapien
gaaagaaccaccatttgggcagctc

SEQ ID NO: 3296902 - DNA, 25 bp, Homo sapien
caggtgtagaaagaaccaccatttg

SEQ ID NO: 3296903 - DNA, 25 bp, Homo sapien
aatgtgctgcaagtatagcaggtgt

SEQ ID NO: 3296904 - DNA, 25 bp, Homo sapien
ccatcttgcaaccaagaggccataa

SEQ ID NO: 3296905 - DNA, 25 bp, Homo sapien
ccataagcaaatgtgctgaaggata

SEQ ID NO: 3296906 - DNA, 25 bp, Homo sapien
tgaaggatatagttccttgatgaca

SEQ ID NO: 3296907 - DNA, 25 bp, Homo sapien
gatgacattaatgagactgctctct

SEQ ID NO: 3296908 - DNA, 25 bp, Homo sapien
tataagggtgcctcttttcttgggc

SEQ ID NO: 3296909 - DNA, 25 bp, Homo sapien
ctcagaatagaaccccttggcatat

SEQ ID NO: 3296910 - DNA, 25 bp, Homo sapien
gccagtgtctgcaattagggaagaa

SEQ ID NO: 3296911 - DNA, 25 bp, Homo sapien
ggccagtgtctgcaattagggaaga

SEQ ID NO: 3296912 - DNA, 25 bp, Homo sapien
caaggccagtgtctgcaattaggga

SEQ ID NO: 3296913 - DNA, 25 bp, Homo sapien
ctgcagtttgccaattcactgagca

SEQ ID NO: 3296914 - DNA, 25 bp, Homo sapien
aaatcccctgagttgtagacatgcc

SEQ ID NO: 3296915 - DNA, 25 bp, Homo sapien
tcccctgagttgtagacatgccaat

SEQ ID NO: 3296916 - DNA, 25 bp, Homo sapien
ccttcaaatcccctgagttgtagac

SEQ ID NO: 3296917 - DNA, 25 bp, Homo sapien
tatgactgactcagatatgtcaggg

SEQ ID NO: 3296918 - DNA, 25 bp, Homo sapien
gatatgtcagggctatttttaagtt

SEQ ID NO: 3296919 - DNA, 25 bp, Homo sapien
ctatgactgactcagatatgtcagg

SEQ ID NO: 3296920 - DNA, 25 bp, Homo sapien
tgtcagggctatttttaagttccac

SEQ ID NO: 3296921 - DNA, 25 bp, Homo sapien
gagttgatgagttccagcctgctca

SEQ ID NO: 3296922 - DNA, 25 bp, Homo sapien
tgtgcccgtggatcccattctgcgt

SEQ ID NO: 3296923 - DNA, 25 bp, Homo sapien
ttctgcgtagaatctttcctgactg

SEQ ID NO: 3296924 - DNA, 25 bp, Homo sapien
tcctgactgcttaggaacaatagct

SEQ ID NO: 3296925 - DNA, 25 bp, Homo sapien
gggtgtgtgtaaactctcaggtact

SEQ ID NO: 3296926 - DNA, 25 bp, Homo sapien
ggtccaacactcaaaaggcagtctt

SEQ ID NO: 3296927 - DNA, 25 bp, Homo sapien
aggtacttctggctccttgtgagtg

SEQ ID NO: 3296928 - DNA, 25 bp, Homo sapien
tccaacagcaaaagtgaaggtgctg

SEQ ID NO: 3296929 - DNA, 25 bp, Homo sapien
cacctcttctgggttgtggcctaag

SEQ ID NO: 3296930 - DNA, 25 bp, Homo sapien
cagcagagctgttctcgagacacct

SEQ ID NO: 3296931 - DNA, 25 bp, Homo sapien
tcagacaagtcgcagggctgatggc

SEQ ID NO: 3296932 - DNA, 25 bp, Homo sapien
ttgaattctgtgtgaacagatggca

SEQ ID NO: 3296933 - DNA, 25 bp, Homo sapien
aagcttcaagatctcttgtcctaag

SEQ ID NO: 3296934 - DNA, 25 bp, Homo sapien
catctttaccctcttcactcagaca

SEQ ID NO: 3296935 - DNA, 25 bp, Homo sapien
tctctgccttggtcaaaggtagcct

SEQ ID NO: 3296936 - DNA, 25 bp, Homo sapien
tctcttgtcctaaggccattccatc

SEQ ID NO: 3296937 - DNA, 25 bp, Homo sapien
tacctctcggaagtggttcctcagg

SEQ ID NO: 3296938 - DNA, 25 bp, Homo sapien
tctaccaggtgttcgctcattttct

SEQ ID NO: 3296939 - DNA, 25 bp, Homo sapien
cggaagtggttcctcaggtactcac

SEQ ID NO: 3296940 - DNA, 25 bp, Homo sapien
cttggtgccttttacctctcggaag

SEQ ID NO: 3296941 - DNA, 25 bp, Homo sapien
ccattcattagtgacctggtttgga

SEQ ID NO: 3296942 - DNA, 25 bp, Homo sapien
tgtgtgcgcacacaggcaaacgggt

SEQ ID NO: 3296943 - DNA, 25 bp, Homo sapien
tctgcaatgggtgattctggctgca

SEQ ID NO: 3296944 - DNA, 25 bp, Homo sapien
ggtctaagaacccaagtgcagtgct

SEQ ID NO: 3296945 - DNA, 25 bp, Homo sapien
cagcagcttgactagcatgttcact

SEQ ID NO: 3296946 - DNA, 25 bp, Homo sapien
cacatgtttctaactgtcagaggat

SEQ ID NO: 3296947 - DNA, 25 bp, Homo sapien
gttcctactgaagacactcctgtgc

SEQ ID NO: 3296948 - DNA, 25 bp, Homo sapien
tcaccagggagtggtcttgggctcc

SEQ ID NO: 3296949 - DNA, 25 bp, Homo sapien
ggcaacagggcttcaatgttttgac

SEQ ID NO: 3296950 - DNA, 25 bp, Homo sapien
cgagaattgtcaggaggaaacccca

SEQ ID NO: 3296951 - DNA, 25 bp, Homo sapien
gactcagagcagaacgagaattgtc

SEQ ID NO: 3296952 - DNA, 25 bp, Homo sapien
cttttggggcaacagggcttcaatg

SEQ ID NO: 3296953 - DNA, 25 bp, Homo sapien
ggagtctccgtgatcttgaatgcat

SEQ ID NO: 3296954 - DNA, 25 bp, Homo sapien
cacatgcgtgcagagtgcttgtcca

SEQ ID NO: 3296955 - DNA, 25 bp, Homo sapien
tgacggcttaaggtttgcaggctcg

SEQ ID NO: 3296956 - DNA, 25 bp, Homo sapien
caaggtataacaaaaggagtctccg

SEQ ID NO: 3296957 - DNA, 25 bp, Homo sapien
gtcttggctggacccatccgtgagg

SEQ ID NO: 3296958 - DNA, 25 bp, Homo sapien
cagaagcatggaagtactgatgtgc

SEQ ID NO: 3296959 - DNA, 25 bp, Homo sapien
gagatgagtctcctttccgggtaaa

SEQ ID NO: 3296960 - DNA, 25 bp, Homo sapien
tctgctcagggaggcttactacctg

SEQ ID NO: 3296961 - DNA, 25 bp, Homo sapien
aacacactgcactgacaatatacag

SEQ ID NO: 3296962 - DNA, 25 bp, Homo sapien
caagatgtttctttcagcgaatctc

SEQ ID NO: 3296963 - DNA, 25 bp, Homo sapien
acaatatacagcctttggctgcagt

SEQ ID NO: 3296964 - DNA, 25 bp, Homo sapien
gctttgtgtcactttaaactcctgt

SEQ ID NO: 3296965 - DNA, 25 bp, Homo sapien
ctttggtgtagaatgggcatgcgac

SEQ ID NO: 3296966 - DNA, 25 bp, Homo sapien
tagatgacccaaaataagccttatt

SEQ ID NO: 3296967 - DNA, 25 bp, Homo sapien
catgcgactgactggttgatgctag

SEQ ID NO: 3296968 - DNA, 25 bp, Homo sapien
catccagggaggtcttattcttcct

SEQ ID NO: 3296969 - DNA, 25 bp, Homo sapien
tccacaagattcctagaggacggga

SEQ ID NO: 3296970 - DNA, 25 bp, Homo sapien
tggcccatccactatggcagtcacc

SEQ ID NO: 3296971 - DNA, 25 bp, Homo sapien
cactatggcagtcacctggatgttg

SEQ ID NO: 3296972 - DNA, 25 bp, Homo sapien
attcctagaggacgggaaagtctga

SEQ ID NO: 3296973 - DNA, 25 bp, Homo sapien
actcaatccccagaataggagggac

SEQ ID NO: 3296974 - DNA, 25 bp, Homo sapien
ccactcaatccccagaataggaggg

SEQ ID NO: 3296975 - DNA, 25 bp, Homo sapien
ggaccactcaatccccagaatagga

SEQ ID NO: 3296976 - DNA, 25 bp, Homo sapien
gaccactcaatccccagaataggag

SEQ ID NO: 3296977 - DNA, 25 bp, Homo sapien
ctctttccatggcaggtgtgaagta

SEQ ID NO: 3296978 - DNA, 25 bp, Homo sapien
tgaggggactgcattgggaacatct

SEQ ID NO: 3296979 - DNA, 25 bp, Homo sapien
ttccatggcaggtgtgaagtatgca

SEQ ID NO: 3296980 - DNA, 25 bp, Homo sapien
ttccctctttccatggcaggtgtga

SEQ ID NO: 3296981 - DNA, 25 bp, Homo sapien
tcaacaagacaatggaaaggcattt

SEQ ID NO: 3296982 - DNA, 25 bp, Homo sapien
catgttatatccagtacttgggcta

SEQ ID NO: 3296983 - DNA, 25 bp, Homo sapien
gcctctgtgctaggaggcctttggt

SEQ ID NO: 3296984 - DNA, 25 bp, Homo sapien
gtcagcagtggagtgtaaacaaagc

SEQ ID NO: 3296985 - DNA, 25 bp, Homo sapien
gatatgcaaggttattcccttggcc

SEQ ID NO: 3296986 - DNA, 25 bp, Homo sapien
taccccgaaggcgtacttggaatca

SEQ ID NO: 3296987 - DNA, 25 bp, Homo sapien
tgttctgcaagtgccttaaggcttg

SEQ ID NO: 3296988 - DNA, 25 bp, Homo sapien
tgggcagaccaattaatgggcagtc

SEQ ID NO: 3296989 - DNA, 25 bp, Homo sapien
ggcccctgggctttgctagaatcct

SEQ ID NO: 3296990 - DNA, 25 bp, Homo sapien
tccacaggccaggaaagataactgt

SEQ ID NO: 3296991 - DNA, 25 bp, Homo sapien
tgaggcatcctttgcctaacgcctg

SEQ ID NO: 3296992 - DNA, 25 bp, Homo sapien
tcctctaaaatagtctggctctcag

SEQ ID NO: 3296993 - DNA, 25 bp, Homo sapien
tagcaggtactaggtagcatcattc

SEQ ID NO: 3296994 - DNA, 25 bp, Homo sapien
tctcccttggatggcagctgcatgt

SEQ ID NO: 3296995 - DNA, 25 bp, Homo sapien
ggtgactatttatcctagcaggtac

SEQ ID NO: 3296996 - DNA, 25 bp, Homo sapien
cccaaagaaggctgtgagtctccct

SEQ ID NO: 3296997 - DNA, 25 bp, Homo sapien
tataggagtcaagcttcgttgcacc

SEQ ID NO: 3296998 - DNA, 25 bp, Homo sapien
gctgtagcccaaatgtctctgcgga

SEQ ID NO: 3296999 - DNA, 25 bp, Homo sapien
tgtgacagtgcagcctaccggctta

SEQ ID NO: 3297000 - DNA, 25 bp, Homo sapien
tattgtaaaccaactaaagcgagtg

SEQ ID NO: 3297001 - DNA, 25 bp, Homo sapien
gaactggggcagccgtcatggacat

SEQ ID NO: 3297002 - DNA, 25 bp, Homo sapien
cagccgtcatggacatgggggcact

SEQ ID NO: 3297003 - DNA, 25 bp, Homo sapien
tggacatgggggcactcaatcccca

SEQ ID NO: 3297004 - DNA, 25 bp, Homo sapien
gcactcaatccccagagtaaggagg

SEQ ID NO: 3297005 - DNA, 25 bp, Homo sapien
tgaggggaagacttaagctgggcag

SEQ ID NO: 3297006 - DNA, 25 bp, Homo sapien
gaggggaagacttaagctgggcagc

SEQ ID NO: 3297007 - DNA, 25 bp, Homo sapien
ctgaggggaagacttaagctgggca

SEQ ID NO: 3297008 - DNA, 25 bp, Homo sapien
ctgtggaggatgagggttgatgctt

SEQ ID NO: 3297009 - DNA, 25 bp, Homo sapien
tgtggaggatgagggttgatgcttg

SEQ ID NO: 3297010 - DNA, 25 bp, Homo sapien
tggaggatgagggttgatgcttgcc

SEQ ID NO: 3297011 - DNA, 25 bp, Homo sapien
gaggatgagggttgatgcttgccat

SEQ ID NO: 3297012 - DNA, 25 bp, Homo sapien
tttggctttggctgctctagagctc

SEQ ID NO: 3297013 - DNA, 25 bp, Homo sapien
tggctttggctgctctagagctcat

SEQ ID NO: 3297014 - DNA, 25 bp, Homo sapien
tgactgtgacattctactttggctt

SEQ ID NO: 3297015 - DNA, 25 bp, Homo sapien
cctgaatcccatttgactgtgacat

SEQ ID NO: 3297016 - DNA, 25 bp, Homo sapien
aaggcaaacttgcagagtggattga

SEQ ID NO: 3297017 - DNA, 25 bp, Homo sapien
tgtgtggtggtctgcctgagtccca

SEQ ID NO: 3297018 - DNA, 25 bp, Homo sapien
ttgaggctagggctctccactggga

SEQ ID NO: 3297019 - DNA, 25 bp, Homo sapien
taaggagcatagcaatctggtctgt

SEQ ID NO: 3297020 - DNA, 25 bp, Homo sapien
taacctctgcaatggcggttgaggc

SEQ ID NO: 3297021 - DNA, 25 bp, Homo sapien
tggacattgataagccccacggtcg

SEQ ID NO: 3297022 - DNA, 25 bp, Homo sapien
gctttgttgggatcctgcctggcat

SEQ ID NO: 3297023 - DNA, 25 bp, Homo sapien
gattcaggaggtagggccaacttcg

SEQ ID NO: 3297024 - DNA, 25 bp, Homo sapien
cacggtcggcaatgctgctcctaga

SEQ ID NO: 3297025 - DNA, 25 bp, Homo sapien
cagaacaggattgtaagtgtagtag

SEQ ID NO: 3297026 - DNA, 25 bp, Homo sapien
tagaattgccagtcctccttccagg

SEQ ID NO: 3297027 - DNA, 25 bp, Homo sapien
tgtgtgcttgtcagaacaggattgt

SEQ ID NO: 3297028 - DNA, 25 bp, Homo sapien
tctcattttggatagtgaaggctgt

SEQ ID NO: 3297029 - DNA, 25 bp, Homo sapien
cacccgacggtgtatggtctgcaag

SEQ ID NO: 3297030 - DNA, 25 bp, Homo sapien
cttagtgagatgacggttgaggcca

SEQ ID NO: 3297031 - DNA, 25 bp, Homo sapien
ggtctgcaagagtcccagtggtaag

SEQ ID NO: 3297032 - DNA, 25 bp, Homo sapien
gatggagggcacagaatctaactgc

SEQ ID NO: 3297033 - DNA, 25 bp, Homo sapien
accttggtgaaggttgtatcttcca

SEQ ID NO: 3297034 - DNA, 25 bp, Homo sapien
ggtgaaggttgtatcttccaggcac

SEQ ID NO: 3297035 - DNA, 25 bp, Homo sapien
ttggtgaaggttgtatcttccaggc

SEQ ID NO: 3297036 - DNA, 25 bp, Homo sapien
tgaaggttgtatcttccaggcactc

SEQ ID NO: 3297037 - DNA, 25 bp, Homo sapien
atgcttctaccactcttcttgctct

SEQ ID NO: 3297038 - DNA, 25 bp, Homo sapien
ttctaccactcttcttgctctccat

SEQ ID NO: 3297039 - DNA, 25 bp, Homo sapien
tatgcttctaccactcttcttgctc

SEQ ID NO: 3297040 - DNA, 25 bp, Homo sapien
gcttctaccactcttcttgctctcc

SEQ ID NO: 3297041 - DNA, 25 bp, Homo sapien
caagaacatggttgggagttcggag

SEQ ID NO: 3297042 - DNA, 25 bp, Homo sapien
cagaaagagggtgaacgatagcaca

SEQ ID NO: 3297043 - DNA, 25 bp, Homo sapien
gaacgatagcacaactggcagcaag

SEQ ID NO: 3297044 - DNA, 25 bp, Homo sapien
catggttgggagttcggaggtagct

SEQ ID NO: 3297045 - DNA, 25 bp, Homo sapien
aggaatgccacaggccttaggctgg

SEQ ID NO: 3297046 - DNA, 25 bp, Homo sapien
cctgaaaggctataggaatgccaca

SEQ ID NO: 3297047 - DNA, 25 bp, Homo sapien
tggggtccactttggctcctgaaag

SEQ ID NO: 3297048 - DNA, 25 bp, Homo sapien
gctcctgaaaggctataggaatgcc

SEQ ID NO: 3297049 - DNA, 25 bp, Homo sapien
tatgtgataccctgtatacttcatg

SEQ ID NO: 3297050 - DNA, 25 bp, Homo sapien
ctctgcttgagacgccgggtaattg

SEQ ID NO: 3297051 - DNA, 25 bp, Homo sapien
ctggatttcctggtcattccatggt

SEQ ID NO: 3297052 - DNA, 25 bp, Homo sapien
ccctgtatacttcatgctcaagaaa

SEQ ID NO: 3297053 - DNA, 25 bp, Homo sapien
acatctctctaatcctagctggcag

SEQ ID NO: 3297054 - DNA, 25 bp, Homo sapien
ctctctaatcctagctggcagagtg

SEQ ID NO: 3297055 - DNA, 25 bp, Homo sapien
ttatgagctgtgggtagtcatgaac

SEQ ID NO: 3297056 - DNA, 25 bp, Homo sapien
ggtcaagctgtggggccagacccac

SEQ ID NO: 3297057 - DNA, 25 bp, Homo sapien
gccaggagatggcagcgtgtaatca

SEQ ID NO: 3297058 - DNA, 25 bp, Homo sapien
ttggatggagccatactgggaagct

SEQ ID NO: 3297059 - DNA, 25 bp, Homo sapien
taatcatacagtagaaccctgagct

SEQ ID NO: 3297060 - DNA, 25 bp, Homo sapien
agctttgcggcagcttggcttggat

SEQ ID NO: 3297061 - DNA, 25 bp, Homo sapien
tggatgggtcccactttggaccctg

SEQ ID NO: 3297062 - DNA, 25 bp, Homo sapien
gctccatgatccactggatgggtcc

SEQ ID NO: 3297063 - DNA, 25 bp, Homo sapien
tggaccctgctatcttgccaaaagt

SEQ ID NO: 3297064 - DNA, 25 bp, Homo sapien
tgttcctgacagtggtaaatagctc

SEQ ID NO: 3297065 - DNA, 25 bp, Homo sapien
tttaacatgtgttctttttgatgag

SEQ ID NO: 3297066 - DNA, 25 bp, Homo sapien
ttaacatgtgttctttttgatgagg

SEQ ID NO: 3297067 - DNA, 25 bp, Homo sapien
tcagtctgactgcattacatctgtt

SEQ ID NO: 3297068 - DNA, 25 bp, Homo sapien
tacaaccagcagttgacagaccatc

SEQ ID NO: 3297069 - DNA, 25 bp, Homo sapien
tattgacgcacaaggatgactgtac

SEQ ID NO: 3297070 - DNA, 25 bp, Homo sapien
tgctaactggtaccttcaagagtcc

SEQ ID NO: 3297071 - DNA, 25 bp, Homo sapien
ctggcagacagaaggcatccaaggt

SEQ ID NO: 3297072 - DNA, 25 bp, Homo sapien
ggctgcaagcttgtgtgtacttgga

SEQ ID NO: 3297073 - DNA, 25 bp, Homo sapien
aaacttggcagtagatttccctctg

SEQ ID NO: 3297074 - DNA, 25 bp, Homo sapien
aaagccgcctagctcctggaaaagc

SEQ ID NO: 3297075 - DNA, 25 bp, Homo sapien
tttcctgaagaaagccgcctagctc

SEQ ID NO: 3297076 - DNA, 25 bp, Homo sapien
tcccattctcttgaattcctgtcat

SEQ ID NO: 3297077 - DNA, 25 bp, Homo sapien
tatctctgatttcccattctcttga

SEQ ID NO: 3297078 - DNA, 25 bp, Homo sapien
tttatctctgatttcccattctctt

SEQ ID NO: 3297079 - DNA, 25 bp, Homo sapien
taatcttcctctttatctctgattt

SEQ ID NO: 3297080 - DNA, 25 bp, Homo sapien
tcatgcaaagaggatggtcagcagg

SEQ ID NO: 3297081 - DNA, 25 bp, Homo sapien
catgcaaagaggatggtcagcaggt

SEQ ID NO: 3297082 - DNA, 25 bp, Homo sapien
agaggatggtcagcaggtccagagg

SEQ ID NO: 3297083 - DNA, 25 bp, Homo sapien
gcaaagaggatggtcagcaggtcca

SEQ ID NO: 3297084 - DNA, 25 bp, Homo sapien
tctgggtctaagctttgtggcctct

SEQ ID NO: 3297085 - DNA, 25 bp, Homo sapien
ggcttttctgggtctaagctttgtg

SEQ ID NO: 3297086 - DNA, 25 bp, Homo sapien
tcttcagcatcactgcttgccacat

SEQ ID NO: 3297087 - DNA, 25 bp, Homo sapien
gctttgtggcctcttcagcatcact

SEQ ID NO: 3297088 - DNA, 25 bp, Homo sapien
gagcctctgattaatctttctgctg

SEQ ID NO: 3297089 - DNA, 25 bp, Homo sapien
ctgttactgcagagcctctgattaa

SEQ ID NO: 3297090 - DNA, 25 bp, Homo sapien
tctgctgctgacagatgatctagca

SEQ ID NO: 3297091 - DNA, 25 bp, Homo sapien
ctgcagagcctctgattaatctttc

SEQ ID NO: 3297092 - DNA, 25 bp, Homo sapien
cgagaactagcagtctgggtaacaa

SEQ ID NO: 3297093 - DNA, 25 bp, Homo sapien
tgaaagctgccgttagctctgtgct

SEQ ID NO: 3297094 - DNA, 25 bp, Homo sapien
tgacctgctgatgggtgaaagctgc

SEQ ID NO: 3297095 - DNA, 25 bp, Homo sapien
taaacgtcctcagccacatcgtgtg

SEQ ID NO: 3297096 - DNA, 25 bp, Homo sapien
tctgcagccgtttcaaggaggttct

SEQ ID NO: 3297097 - DNA, 25 bp, Homo sapien
gaaacagtctggtaacctcacaggg

SEQ ID NO: 3297098 - DNA, 25 bp, Homo sapien
ttatctctgagtggtagtcccagcg

SEQ ID NO: 3297099 - DNA, 25 bp, Homo sapien
ccaggacaggtcttgtggaaacagt

SEQ ID NO: 3297100 - DNA, 25 bp, Homo sapien
tctaatcccactgtgtcatgcagga

SEQ ID NO: 3297101 - DNA, 25 bp, Homo sapien
caggcggtcatcagtaaggtattca

SEQ ID NO: 3297102 - DNA, 25 bp, Homo sapien
cctcttaatgggaactcgtgcacat

SEQ ID NO: 3297103 - DNA, 25 bp, Homo sapien
attgcgcgcgtgtgctctaatccca

SEQ ID NO: 3297104 - DNA, 25 bp, Homo sapien
gcagccatggatcatgagcactgaa

SEQ ID NO: 3297105 - DNA, 25 bp, Homo sapien
tatcgatattccagtgagtgccctt

SEQ ID NO: 3297106 - DNA, 25 bp, Homo sapien
ctacgggatgtgacatagaaaatcc

SEQ ID NO: 3297107 - DNA, 25 bp, Homo sapien
taggcaactggatactctgcccagg

SEQ ID NO: 3297108 - DNA, 25 bp, Homo sapien
tacattactgacatcatactggcat

SEQ ID NO: 3297109 - DNA, 25 bp, Homo sapien
ggtgatgccaaagtattgacaccat

SEQ ID NO: 3297110 - DNA, 25 bp, Homo sapien
gatgccaaagtattgacaccatgag

SEQ ID NO: 3297111 - DNA, 25 bp, Homo sapien
actacattactgacatcatactggc

SEQ ID NO: 3297112 - DNA, 25 bp, Homo sapien
ctaaaggctggccaacacaaaggct

SEQ ID NO: 3297113 - DNA, 25 bp, Homo sapien
agtgacagccttctcacactggatc

SEQ ID NO: 3297114 - DNA, 25 bp, Homo sapien
aaaggctggccaacacaaaggcttc

SEQ ID NO: 3297115 - DNA, 25 bp, Homo sapien
taaaggctggccaacacaaaggctt

SEQ ID NO: 3297116 - DNA, 25 bp, Homo sapien
tatttagccctatacatcatgtgtg

SEQ ID NO: 3297117 - DNA, 25 bp, Homo sapien
tgtcccatggacaattagttggcac

SEQ ID NO: 3297118 - DNA, 25 bp, Homo sapien
catgtgtgagcagtaaccaatctcc

SEQ ID NO: 3297119 - DNA, 25 bp, Homo sapien
acaccctggcccttatagagagaaa

SEQ ID NO: 3297120 - DNA, 25 bp, Homo sapien
gaatcgcccaaagcaaccatagtat

SEQ ID NO: 3297121 - DNA, 25 bp, Homo sapien
caactgtacgaatgcccatagtgca

SEQ ID NO: 3297122 - DNA, 25 bp, Homo sapien
caaaatcaacgagcaaggagcagta

SEQ ID NO: 3297123 - DNA, 25 bp, Homo sapien
tgtatgccacaaggaactgccaact

SEQ ID NO: 3297124 - DNA, 25 bp, Homo sapien
ctgaattggcagctcaaaacagata

SEQ ID NO: 3297125 - DNA, 25 bp, Homo sapien
ttctcactgccaaagttccaaatgg

SEQ ID NO: 3297126 - DNA, 25 bp, Homo sapien
tctgatcatctgaattggcagctca

SEQ ID NO: 3297127 - DNA, 25 bp, Homo sapien
gcatgcggtttaacaagacaatgct

SEQ ID NO: 3297128 - DNA, 25 bp, Homo sapien
gcagagagaacccaattacacacct

SEQ ID NO: 3297129 - DNA, 25 bp, Homo sapien
cagtgggctaaagggaaaccgtgca

SEQ ID NO: 3297130 - DNA, 25 bp, Homo sapien
tttgggttaccatgccccaagtgtg

SEQ ID NO: 3297131 - DNA, 25 bp, Homo sapien
ccttcctgcaacagagtgcctcgat

SEQ ID NO: 3297132 - DNA, 25 bp, Homo sapien
tataatagatgacaaacaacgcctc

SEQ ID NO: 3297133 - DNA, 25 bp, Homo sapien
aataaaacagccgaagatgtcaggt

SEQ ID NO: 3297134 - DNA, 25 bp, Homo sapien
gaacccttctgatgcaatcccatgt

SEQ ID NO: 3297135 - DNA, 25 bp, Homo sapien
ctatcactaggcacttttaaaaggg

SEQ ID NO: 3297136 - DNA, 25 bp, Homo sapien
tgttcactgcctcttgagtcacaga

SEQ ID NO: 3297137 - DNA, 25 bp, Homo sapien
agattttcaactggcccctcctagg

SEQ ID NO: 3297138 - DNA, 25 bp, Homo sapien
aaagattccaacatacctaaaggca

SEQ ID NO: 3297139 - DNA, 25 bp, Homo sapien
caacaattgggaataaaccagtagc

SEQ ID NO: 3297140 - DNA, 25 bp, Homo sapien
aaagcatatgatggccatttggcag

SEQ ID NO: 3297141 - DNA, 25 bp, Homo sapien
tatgatggccatttggcagctagag

SEQ ID NO: 3297142 - DNA, 25 bp, Homo sapien
agcatatgatggccatttggcagct

SEQ ID NO: 3297143 - DNA, 25 bp, Homo sapien
catatgatggccatttggcagctag

SEQ ID NO: 3297144 - DNA, 25 bp, Homo sapien
cacataatctatgttggaaacacat

SEQ ID NO: 3297145 - DNA, 25 bp, Homo sapien
gatcaaggcctttttattcagcaga

SEQ ID NO: 3297146 - DNA, 25 bp, Homo sapien
ccatctgaaactttgatcaaggcct

SEQ ID NO: 3297147 - DNA, 25 bp, Homo sapien
tctgaaactttgatcaaggcctttt

SEQ ID NO: 3297148 - DNA, 25 bp, Homo sapien
gttacatgctggattataaaagtat

SEQ ID NO: 3297149 - DNA, 25 bp, Homo sapien
tacatgctggattataaaagtatac

SEQ ID NO: 3297150 - DNA, 25 bp, Homo sapien
acatgctggattataaaagtatact

SEQ ID NO: 3297151 - DNA, 25 bp, Homo sapien
gtgttacatgctggattataaaagt

SEQ ID NO: 3297152 - DNA, 25 bp, Homo sapien
taaagagagtaatactttggttcca

SEQ ID NO: 3297153 - DNA, 25 bp, Homo sapien
aacctgaagaagcagcttaaggatg

SEQ ID NO: 3297154 - DNA, 25 bp, Homo sapien
tttgaatgctggctgttaatacaat

SEQ ID NO: 3297155 - DNA, 25 bp, Homo sapien
cagccctactgccaaatgataccaa

SEQ ID NO: 3297156 - DNA, 25 bp, Homo sapien
tgaggatctaaaggccccaggacac

SEQ ID NO: 3297157 - DNA, 25 bp, Homo sapien
ggagttcaagttgtgttaacagtga

SEQ ID NO: 3297158 - DNA, 25 bp, Homo sapien
caccattgacaagaggcaggagtgg

SEQ ID NO: 3297159 - DNA, 25 bp, Homo sapien
tgttgttctcaaccagccattgagg

SEQ ID NO: 3297160 - DNA, 25 bp, Homo sapien
cacctgactgaagctatagtaaacc

SEQ ID NO: 3297161 - DNA, 25 bp, Homo sapien
gatagtgggtcaaataaggctcaaa

SEQ ID NO: 3297162 - DNA, 25 bp, Homo sapien
tcatctttagaattggcctgcttgg

SEQ ID NO: 3297163 - DNA, 25 bp, Homo sapien
taaaggtggctcaatagggaaacac

SEQ ID NO: 3297164 - DNA, 25 bp, Homo sapien
caaaccactttctaacacttggatt

SEQ ID NO: 3297165 - DNA, 25 bp, Homo sapien
gttattggaaatataagggaggcca

SEQ ID NO: 3297166 - DNA, 25 bp, Homo sapien
tcctctaggcttcttataccaaacc

SEQ ID NO: 3297167 - DNA, 25 bp, Homo sapien
tttgtttcttggacaggagctaacc

SEQ ID NO: 3297168 - DNA, 25 bp, Homo sapien
cctacttatatttaggtgcatactt

SEQ ID NO: 3297169 - DNA, 25 bp, Homo sapien
ggtgcatacttagcctagacatttt

SEQ ID NO: 3297170 - DNA, 25 bp, Homo sapien
tatttaggtgcatacttagcctaga

SEQ ID NO: 3297171 - DNA, 25 bp, Homo sapien
cttatatttaggtgcatacttagcc

SEQ ID NO: 3297172 - DNA, 25 bp, Homo sapien
aataatttctacacctgcccaaagg

SEQ ID NO: 3297173 - DNA, 25 bp, Homo sapien
aatttctacacctgcccaaaggctg

SEQ ID NO: 3297174 - DNA, 25 bp, Homo sapien
taatttctacacctgcccaaaggct

SEQ ID NO: 3297175 - DNA, 25 bp, Homo sapien
atttctacacctgcccaaaggctgc

SEQ ID NO: 3297176 - DNA, 25 bp, Homo sapien
taggcgctcttaagttggaagccat

SEQ ID NO: 3297177 - DNA, 25 bp, Homo sapien
ggaagccatgtgtgattctcccttc

SEQ ID NO: 3297178 - DNA, 25 bp, Homo sapien
tggtgtaaggcatcaagttattttc

SEQ ID NO: 3297179 - DNA, 25 bp, Homo sapien
ctcttaagttggaagccatgtgtga

SEQ ID NO: 3297180 - DNA, 25 bp, Homo sapien
ctgaatctggcaatgagttaagatc

SEQ ID NO: 3297181 - DNA, 25 bp, Homo sapien
gggcatttgccactataagcagctg

SEQ ID NO: 3297182 - DNA, 25 bp, Homo sapien
tgcacatagcaccagcgggatggaa

SEQ ID NO: 3297183 - DNA, 25 bp, Homo sapien
gagcttcacatcagaatactctggg

SEQ ID NO: 3297184 - DNA, 25 bp, Homo sapien
caaatagttctttgtggacctctaa

SEQ ID NO: 3297185 - DNA, 25 bp, Homo sapien
gttcagcatagcttcggatccatct

SEQ ID NO: 3297186 - DNA, 25 bp, Homo sapien
catagcttcggatccatctgaatta

SEQ ID NO: 3297187 - DNA, 25 bp, Homo sapien
atagttctttgtggacctctaatac

SEQ ID NO: 3297188 - DNA, 25 bp, Homo sapien
cctagactatcatgctgaaagatat

SEQ ID NO: 3297189 - DNA, 25 bp, Homo sapien
tataccttgccccttacagctagtg

SEQ ID NO: 3297190 - DNA, 25 bp, Homo sapien
gaaacatgacatgcattgtctccct

SEQ ID NO: 3297191 - DNA, 25 bp, Homo sapien
ccatgtgatacagttctggccacta

SEQ ID NO: 3297192 - DNA, 25 bp, Homo sapien
taggtaacaaatatcgtcaggcacg

SEQ ID NO: 3297193 - DNA, 25 bp, Homo sapien
aggtaacaaatatcgtcaggcacgg

SEQ ID NO: 3297194 - DNA, 25 bp, Homo sapien
cataggtaacaaatatcgtcaggca

SEQ ID NO: 3297195 - DNA, 25 bp, Homo sapien
ataggtaacaaatatcgtcaggcac

SEQ ID NO: 3297196 - DNA, 25 bp, Homo sapien
acttgtctgtaccttggtttcctca

SEQ ID NO: 3297197 - DNA, 25 bp, Homo sapien
aagcatggactatgaaatcagactg

SEQ ID NO: 3297198 - DNA, 25 bp, Homo sapien
aatcagactgtgtaactggaactag

SEQ ID NO: 3297199 - DNA, 25 bp, Homo sapien
ggaaatagctgtatagctgcctgta

SEQ ID NO: 3297200 - DNA, 25 bp, Homo sapien
gctcagacatgattttggcacgtga

SEQ ID NO: 3297201 - DNA, 25 bp, Homo sapien
catgattttggcacgtgactttgga

SEQ ID NO: 3297202 - DNA, 25 bp, Homo sapien
tgctcagacatgattttggcacgtg

SEQ ID NO: 3297203 - DNA, 25 bp, Homo sapien
cagacatgattttggcacgtgactt

SEQ ID NO: 3297204 - DNA, 25 bp, Homo sapien
cccggcctgtaacacacaacatttt

SEQ ID NO: 3297205 - DNA, 25 bp, Homo sapien
tagtaagtttctgagttgatgaata

SEQ ID NO: 3297206 - DNA, 25 bp, Homo sapien
gaaatagtaagtttctgagttgatg

SEQ ID NO: 3297207 - DNA, 25 bp, Homo sapien
ctttaagaaatagtaagtttctgag

SEQ ID NO: 3297208 - DNA, 25 bp, Homo sapien
gactaatgatatctgcgtcacagtt

SEQ ID NO: 3297209 - DNA, 25 bp, Homo sapien
ctgaagactaatgatatctgcgtca

SEQ ID NO: 3297210 - DNA, 25 bp, Homo sapien
aatgatatctgcgtcacagttaaca

SEQ ID NO: 3297211 - DNA, 25 bp, Homo sapien
gatatctgcgtcacagttaacaatt

SEQ ID NO: 3297212 - DNA, 25 bp, Homo sapien
tatagctgccgggtagcgtatttat

SEQ ID NO: 3297213 - DNA, 25 bp, Homo sapien
ggtagcgtatttatcacataacaca

SEQ ID NO: 3297214 - DNA, 25 bp, Homo sapien
tgccgggtagcgtatttatcacata

SEQ ID NO: 3297215 - DNA, 25 bp, Homo sapien
agctgccgggtagcgtatttatcac

SEQ ID NO: 3297216 - DNA, 25 bp, Homo sapien
aatgtaatccatggcctcggaggaa

SEQ ID NO: 3297217 - DNA, 25 bp, Homo sapien
taatgtaatccatggcctcggagga

SEQ ID NO: 3297218 - DNA, 25 bp, Homo sapien
ttaatgtaatccatggcctcggagg

SEQ ID NO: 3297219 - DNA, 25 bp, Homo sapien
gattgtcaagcatgaagttcagtag

SEQ ID NO: 3297220 - DNA, 25 bp, Homo sapien
gcgagattgtcaagcatgaagttca

SEQ ID NO: 3297221 - DNA, 25 bp, Homo sapien
ctgcgagattgtcaagcatgaagtt

SEQ ID NO: 3297222 - DNA, 25 bp, Homo sapien
gagattgtcaagcatgaagttcagt

SEQ ID NO: 3297223 - DNA, 25 bp, Homo sapien
ctgggtcctggtataagttgagaat

SEQ ID NO: 3297224 - DNA, 25 bp, Homo sapien
tgggtcctggtataagttgagaata

SEQ ID NO: 3297225 - DNA, 25 bp, Homo sapien
gggtcctggtataagttgagaatat

SEQ ID NO: 3297226 - DNA, 25 bp, Homo sapien
caatcggccaactttaggtatcacc

SEQ ID NO: 3297227 - DNA, 25 bp, Homo sapien
tcagaactcggaattatgaatggct

SEQ ID NO: 3297228 - DNA, 25 bp, Homo sapien
cactttaccgtatggatttgcccca

SEQ ID NO: 3297229 - DNA, 25 bp, Homo sapien
atctgcgcacaacagcaatcggcca

SEQ ID NO: 3297230 - DNA, 25 bp, Homo sapien
ggcaatgacagttttacaggactgt

SEQ ID NO: 3297231 - DNA, 25 bp, Homo sapien
aaaatgggcaaccagtgccctaagg

SEQ ID NO: 3297232 - DNA, 25 bp, Homo sapien
tttaccaagatttcaaggaatacat

SEQ ID NO: 3297233 - DNA, 25 bp, Homo sapien
gaggcatgaaaaaatcaccccttgt

SEQ ID NO: 3297234 - DNA, 25 bp, Homo sapien
tatgaattatcctagagtcagtgca

SEQ ID NO: 3297235 - DNA, 25 bp, Homo sapien
gccaagaaggctcactataagatta

SEQ ID NO: 3297236 - DNA, 25 bp, Homo sapien
cagaagtacgcccagtattaatgct

SEQ ID NO: 3297237 - DNA, 25 bp, Homo sapien
attagaagcagtccctttaaaactg

SEQ ID NO: 3297238 - DNA, 25 bp, Homo sapien
aatgaattaaagaattaactgcgaa

SEQ ID NO: 3297239 - DNA, 25 bp, Homo sapien
attaaagaattaactgcgaagagca

SEQ ID NO: 3297240 - DNA, 25 bp, Homo sapien
aacacacaaatgtactaactacaag

SEQ ID NO: 3297241 - DNA, 25 bp, Homo sapien
ctgatccgggaagggcaagatttct

SEQ ID NO: 3297242 - DNA, 25 bp, Homo sapien
cagatgcatacataaccccaatatc

SEQ ID NO: 3297243 - DNA, 25 bp, Homo sapien
cccaatatctaaattcagggtagta

SEQ ID NO: 3297244 - DNA, 25 bp, Homo sapien
tctaaattcagggtagtagtaacat

SEQ ID NO: 3297245 - DNA, 25 bp, Homo sapien
gatgcatacataaccccaatatcta

SEQ ID NO: 3297246 - DNA, 25 bp, Homo sapien
ggaagagccgaccaagttcataagg

SEQ ID NO: 3297247 - DNA, 25 bp, Homo sapien
cataaggcaaaacccgtaacagatt

SEQ ID NO: 3297248 - DNA, 25 bp, Homo sapien
ttcataaggcaaaacccgtaacaga

SEQ ID NO: 3297249 - DNA, 25 bp, Homo sapien
ctggaagagccgaccaagttcataa

SEQ ID NO: 3297250 - DNA, 25 bp, Homo sapien
caaagtgatgtacttaggctccgca

SEQ ID NO: 3297251 - DNA, 25 bp, Homo sapien
gcagcgctgtcaagtgtgtcaatga

SEQ ID NO: 3297252 - DNA, 25 bp, Homo sapien
gaagcttggcaatatcaggtggaat

SEQ ID NO: 3297253 - DNA, 25 bp, Homo sapien
taattgtcatttaggtgcagcgctg

SEQ ID NO: 3297254 - DNA, 25 bp, Homo sapien
catcttgtagtttttcaatgagtcc

SEQ ID NO: 3297255 - DNA, 25 bp, Homo sapien
tcttgtagtttttcaatgagtccat

SEQ ID NO: 3297256 - DNA, 25 bp, Homo sapien
atcttgtagtttttcaatgagtcca

SEQ ID NO: 3297257 - DNA, 25 bp, Homo sapien
ggtataaattctgcgaggatctgga

SEQ ID NO: 3297258 - DNA, 25 bp, Homo sapien
tgatggtataaattctgcgaggatc

SEQ ID NO: 3297259 - DNA, 25 bp, Homo sapien
tcctctgctgacatgatggtataaa

SEQ ID NO: 3297260 - DNA, 25 bp, Homo sapien
cctctgctgacatgatggtataaat

SEQ ID NO: 3297261 - DNA, 25 bp, Homo sapien
ctggctctggaaagcgatgagggca

SEQ ID NO: 3297262 - DNA, 25 bp, Homo sapien
tggctctggaaagcgatgagggcat

SEQ ID NO: 3297263 - DNA, 25 bp, Homo sapien
tattcacactgtttagtatacctgc

SEQ ID NO: 3297264 - DNA, 25 bp, Homo sapien
gccaacagggtcaaaagatattaaa

SEQ ID NO: 3297265 - DNA, 25 bp, Homo sapien
gcagtttgtaacctgtagccaacag

SEQ ID NO: 3297266 - DNA, 25 bp, Homo sapien
gtatacctgcctattagtcaatcag

SEQ ID NO: 3297267 - DNA, 25 bp, Homo sapien
tagcatgtgactgtgagtgagcacc

SEQ ID NO: 3297268 - DNA, 25 bp, Homo sapien
tacacaaaggccaggtattatggct

SEQ ID NO: 3297269 - DNA, 25 bp, Homo sapien
tagtatgactattctgagaagcagg

SEQ ID NO: 3297270 - DNA, 25 bp, Homo sapien
gaaagtctgaatagctgtaacagcc

SEQ ID NO: 3297271 - DNA, 25 bp, Homo sapien
atagttgattagaaggataaagaac

SEQ ID NO: 3297272 - DNA, 25 bp, Homo sapien
aatagttgattagaaggataaagaa

SEQ ID NO: 3297273 - DNA, 25 bp, Homo sapien
cagccactgaaaagtagacacccag

SEQ ID NO: 3297274 - DNA, 25 bp, Homo sapien
cctacgtgaaagcaaaaaccagcca

SEQ ID NO: 3297275 - DNA, 25 bp, Homo sapien
gacacccagattttgccagcagaag

SEQ ID NO: 3297276 - DNA, 25 bp, Homo sapien
aaaggatactctgaccctacgtgaa

SEQ ID NO: 3297277 - DNA, 25 bp, Homo sapien
aatttcaatcctgcactcacaacgc

SEQ ID NO: 3297278 - DNA, 25 bp, Homo sapien
tgctcttcacaatttcaatcctgca

SEQ ID NO: 3297279 - DNA, 25 bp, Homo sapien
acagaggagctaatttcctgttttg

SEQ ID NO: 3297280 - DNA, 25 bp, Homo sapien
cactcacaacgccagcttcacaaac

SEQ ID NO: 3297281 - DNA, 25 bp, Homo sapien
agtgagaatacgtggtgttttacct

SEQ ID NO: 3297282 - DNA, 25 bp, Homo sapien
cttctaagagatcgactttttttgg

SEQ ID NO: 3297283 - DNA, 25 bp, Homo sapien
ctatttgaaactacataataatatt

SEQ ID NO: 3297284 - DNA, 25 bp, Homo sapien
atacaatgtgtagcgatcagatcaa

SEQ ID NO: 3297285 - DNA, 25 bp, Homo sapien
tcacacctgctagaagaactatgat

SEQ ID NO: 3297286 - DNA, 25 bp, Homo sapien
acacctgctagaagaactatgatga

SEQ ID NO: 3297287 - DNA, 25 bp, Homo sapien
cacacctgctagaagaactatgatg

SEQ ID NO: 3297288 - DNA, 25 bp, Homo sapien
tgatagccaaaaagtctatgtccat

SEQ ID NO: 3297289 - DNA, 25 bp, Homo sapien
tcacagcggcatgatttataatgat

SEQ ID NO: 3297290 - DNA, 25 bp, Homo sapien
aaatgtggtgtattcttatgctgac

SEQ ID NO: 3297291 - DNA, 25 bp, Homo sapien
aaatactgcgactgctttggaaagc

SEQ ID NO: 3297292 - DNA, 25 bp, Homo sapien
tggaacgccaaaataagccttcgcc

SEQ ID NO: 3297293 - DNA, 25 bp, Homo sapien
ccggccgggcgaaggcttgcagttg

SEQ ID NO: 3297294 - DNA, 25 bp, Homo sapien
acggcgacggcaatcggcgagtccc

SEQ ID NO: 3297295 - DNA, 25 bp, Homo sapien
cttcgcctctcaggagacgcggagg

SEQ ID NO: 3297296 - DNA, 25 bp, Homo sapien
cgaggcagcgccgtgggctcgcgcg

SEQ ID NO: 3297297 - DNA, 25 bp, Homo sapien
aggcagcgccgtgggctcgcgcggg

SEQ ID NO: 3297298 - DNA, 25 bp, Homo sapien
cccaggcagttaggccgcgctgcag

SEQ ID NO: 3297299 - DNA, 25 bp, Homo sapien
gggcgggcgcccaggcagttaggcc

SEQ ID NO: 3297300 - DNA, 25 bp, Homo sapien
gggacgcgctcctcttcccaacact

SEQ ID NO: 3297301 - DNA, 25 bp, Homo sapien
tctcggtcctactcggaggcaaaag

SEQ ID NO: 3297302 - DNA, 25 bp, Homo sapien
caacactctcggtcctactcggagg

SEQ ID NO: 3297303 - DNA, 25 bp, Homo sapien
tcttcccaacactctcggtcctact

SEQ ID NO: 3297304 - DNA, 25 bp, Homo sapien
ttccccgcggcaggggaaacacaca

SEQ ID NO: 3297305 - DNA, 25 bp, Homo sapien
caacagcagccatttccccgcggca

SEQ ID NO: 3297306 - DNA, 25 bp, Homo sapien
agaagcaacagcagccatttccccg

SEQ ID NO: 3297307 - DNA, 25 bp, Homo sapien
cttcctctggcccagaagcaacagc

SEQ ID NO: 3297308 - DNA, 25 bp, Homo sapien
cggcgacggggcggctggtgctggt

SEQ ID NO: 3297309 - DNA, 25 bp, Homo sapien
attcagcgcgccggggtccgggcgg

SEQ ID NO: 3297310 - DNA, 25 bp, Homo sapien
cggcggggctgagggcagcaaagac

SEQ ID NO: 3297311 - DNA, 25 bp, Homo sapien
tgcattcagcgcgccggggtccggg

SEQ ID NO: 3297312 - DNA, 25 bp, Homo sapien
cgaggttgaacagagacgccagctt

SEQ ID NO: 3297313 - DNA, 25 bp, Homo sapien
ggcggagctcctacgcagcgccttg

SEQ ID NO: 3297314 - DNA, 25 bp, Homo sapien
cgtccgggcgatatcggtattgaga

SEQ ID NO: 3297315 - DNA, 25 bp, Homo sapien
gagccgcggctactgctccgagagc

SEQ ID NO: 3297316 - DNA, 25 bp, Homo sapien
atctactgtgggcatactcgtccaa

SEQ ID NO: 3297317 - DNA, 25 bp, Homo sapien
tgtgggcatactcgtccaagacacg

SEQ ID NO: 3297318 - DNA, 25 bp, Homo sapien
tactgtgggcatactcgtccaagac

SEQ ID NO: 3297319 - DNA, 25 bp, Homo sapien
gtgggcatactcgtccaagacacgt

SEQ ID NO: 3297320 - DNA, 25 bp, Homo sapien
gaatgaagccaccactcaaatgaga

SEQ ID NO: 3297321 - DNA, 25 bp, Homo sapien
taaagaacaattcctgccggtgcac

SEQ ID NO: 3297322 - DNA, 25 bp, Homo sapien
aaggaagtcagaacggtcaatggcc

SEQ ID NO: 3297323 - DNA, 25 bp, Homo sapien
tattccaccatagcagtagagccca

SEQ ID NO: 3297324 - DNA, 25 bp, Homo sapien
tgctaacctggaaggaacaacagaa

SEQ ID NO: 3297325 - DNA, 25 bp, Homo sapien
ctgtgcacaggcgaatattggagta

SEQ ID NO: 3297326 - DNA, 25 bp, Homo sapien
tagtttaggcaagatgcagtgctac

SEQ ID NO: 3297327 - DNA, 25 bp, Homo sapien
tgccaagaaagcctgaccagaacct

SEQ ID NO: 3297328 - DNA, 25 bp, Homo sapien
tctttgcggattctagaacggaacc

SEQ ID NO: 3297329 - DNA, 25 bp, Homo sapien
tgggcaacacggaggactaacagta

SEQ ID NO: 3297330 - DNA, 25 bp, Homo sapien
gaacaatttcgtgaacgcaatccgg

SEQ ID NO: 3297331 - DNA, 25 bp, Homo sapien
caacaggatcgtattttcccgaagg

SEQ ID NO: 3297332 - DNA, 25 bp, Homo sapien
atttctgtaggagtcgacacatgcc

SEQ ID NO: 3297333 - DNA, 25 bp, Homo sapien
gtgctctgaaatatacgttttcctc

SEQ ID NO: 3297334 - DNA, 25 bp, Homo sapien
ggagtcgacacatgccttctttctt

SEQ ID NO: 3297335 - DNA, 25 bp, Homo sapien
tgaaatatacgttttcctcatctcc

SEQ ID NO: 3297336 - DNA, 25 bp, Homo sapien
ccccagggatacaatgaatgcttca

SEQ ID NO: 3297337 - DNA, 25 bp, Homo sapien
caatgaatgcttcaacaatatgaaa

SEQ ID NO: 3297338 - DNA, 25 bp, Homo sapien
cggaggttcattaaagcactggaag

SEQ ID NO: 3297339 - DNA, 25 bp, Homo sapien
cagaaggccccacatcggaggttca

SEQ ID NO: 3297340 - DNA, 25 bp, Homo sapien
gaagtaggttgtggttagtatgcac

SEQ ID NO: 3297341 - DNA, 25 bp, Homo sapien
tatgcacattgtgctccctagagca

SEQ ID NO: 3297342 - DNA, 25 bp, Homo sapien
tcaaggaggtagataagctggcgca

SEQ ID NO: 3297343 - DNA, 25 bp, Homo sapien
gatttgggtatgacaataatatcac

SEQ ID NO: 3297344 - DNA, 25 bp, Homo sapien
gactaatcatcaagtacagttggag

SEQ ID NO: 3297345 - DNA, 25 bp, Homo sapien
ttgctgagttacaaggcaggtctga

SEQ ID NO: 3297346 - DNA, 25 bp, Homo sapien
tcttagtcatcttggcctagctgat

SEQ ID NO: 3297347 - DNA, 25 bp, Homo sapien
catgtcagaacttgtgggatgcagc

SEQ ID NO: 3297348 - DNA, 25 bp, Homo sapien
ctgataacaaaggtagacaaggaca

SEQ ID NO: 3297349 - DNA, 25 bp, Homo sapien
ggacattacgagaaaactacaggat

SEQ ID NO: 3297350 - DNA, 25 bp, Homo sapien
gaattagtcatgtataagttctccc

SEQ ID NO: 3297351 - DNA, 25 bp, Homo sapien
gaaatggaaaacctgaatagatctg

SEQ ID NO: 3297352 - DNA, 25 bp, Homo sapien
catagcatgaagcataattggttgg

SEQ ID NO: 3297353 - DNA, 25 bp, Homo sapien
gacatatgtacctggccaatgttta

SEQ ID NO: 3297354 - DNA, 25 bp, Homo sapien
gctgccaagagatcagataaaaggg

SEQ ID NO: 3297355 - DNA, 25 bp, Homo sapien
attggttgggataaaagcaagctgc

SEQ ID NO: 3297356 - DNA, 25 bp, Homo sapien
cctttgtggtacgtgctttccttcg

SEQ ID NO: 3297357 - DNA, 25 bp, Homo sapien
gaggacctactttatttgctcatga

SEQ ID NO: 3297358 - DNA, 25 bp, Homo sapien
ccaagaacctagtgacaatattaag

SEQ ID NO: 3297359 - DNA, 25 bp, Homo sapien
tgctcatgaggtggtattgcgatat

SEQ ID NO: 3297360 - DNA, 25 bp, Homo sapien
cccttgggagtcataaccatctgag

SEQ ID NO: 3297361 - DNA, 25 bp, Homo sapien
ggcagaatcatgagctacatcacaa

SEQ ID NO: 3297362 - DNA, 25 bp, Homo sapien
accatctgagggaatagtaacatcc

SEQ ID NO: 3297363 - DNA, 25 bp, Homo sapien
ctacgtactggtaattatagcagca

SEQ ID NO: 3297364 - DNA, 25 bp, Homo sapien
actataaaatgcctttttagaagct

SEQ ID NO: 3297365 - DNA, 25 bp, Homo sapien
agagaactataaaatgcctttttag

SEQ ID NO: 3297366 - DNA, 25 bp, Homo sapien
gagaactataaaatgcctttttaga

SEQ ID NO: 3297367 - DNA, 25 bp, Homo sapien
ctataaaatgcctttttagaagctt

SEQ ID NO: 3297368 - DNA, 25 bp, Homo sapien
tctagttttggcatgcgatgcagac

SEQ ID NO: 3297369 - DNA, 25 bp, Homo sapien
ctgggatttggaacaaggcggttct

SEQ ID NO: 3297370 - DNA, 25 bp, Homo sapien
gcaagacttgtaatatgttttggaa

SEQ ID NO: 3297371 - DNA, 25 bp, Homo sapien
tgtcttgagcaagacttgtaatatg

SEQ ID NO: 3297372 - DNA, 25 bp, Homo sapien
tcatttctttcttgggctgggactt

SEQ ID NO: 3297373 - DNA, 25 bp, Homo sapien
ttctttcttgggctgggacttggac

SEQ ID NO: 3297374 - DNA, 25 bp, Homo sapien
tttctttcttgggctgggacttgga

SEQ ID NO: 3297375 - DNA, 25 bp, Homo sapien
catttctttcttgggctgggacttg

SEQ ID NO: 3297376 - DNA, 25 bp, Homo sapien
gactgatttcagtgtttgactctat

SEQ ID NO: 3297377 - DNA, 25 bp, Homo sapien
ctctttctaggactacaagatcttc

SEQ ID NO: 3297378 - DNA, 25 bp, Homo sapien
accatggtcttccagtccatccact

SEQ ID NO: 3297379 - DNA, 25 bp, Homo sapien
ccatccactctttctaggactacaa

SEQ ID NO: 3297380 - DNA, 25 bp, Homo sapien
tgcaaactgtttccatttgacatcc

SEQ ID NO: 3297381 - DNA, 25 bp, Homo sapien
ttccaattgaacataagcaactcct

SEQ ID NO: 3297382 - DNA, 25 bp, Homo sapien
cttccaattgaacataagcaactcc

SEQ ID NO: 3297383 - DNA, 25 bp, Homo sapien
tttctcccataactcctcatctagc

SEQ ID NO: 3297384 - DNA, 25 bp, Homo sapien
taactcctcatctagcatgtggaaa

SEQ ID NO: 3297385 - DNA, 25 bp, Homo sapien
tcccataactcctcatctagcatgt

SEQ ID NO: 3297386 - DNA, 25 bp, Homo sapien
tcctcatctagcatgtggaaatttt

SEQ ID NO: 3297387 - DNA, 25 bp, Homo sapien
gccaccttggtttcctggttgggca

SEQ ID NO: 3297388 - DNA, 25 bp, Homo sapien
ttcctggttgggcaaagtattggcc

SEQ ID NO: 3297389 - DNA, 25 bp, Homo sapien
ccaccacagtggccagagcttctgc

SEQ ID NO: 3297390 - DNA, 25 bp, Homo sapien
ctccaccaccacagtggccagagct

SEQ ID NO: 3297391 - DNA, 25 bp, Homo sapien
caacaaatatctttttaagtgggca

SEQ ID NO: 3297392 - DNA, 25 bp, Homo sapien
atgccaccaacaaatatctttttaa

SEQ ID NO: 3297393 - DNA, 25 bp, Homo sapien
ttaggtgatattcttcagtgtcttc

SEQ ID NO: 3297394 - DNA, 25 bp, Homo sapien
caccaacaaatatctttttaagtgg

SEQ ID NO: 3297395 - DNA, 25 bp, Homo sapien
tccatccacattgcgtggctttgca

SEQ ID NO: 3297396 - DNA, 25 bp, Homo sapien
agtcttccatccacattgcgtggct

SEQ ID NO: 3297397 - DNA, 25 bp, Homo sapien
cacattgcgtggctttgcattcttg

SEQ ID NO: 3297398 - DNA, 25 bp, Homo sapien
tccacattgcgtggctttgcattct

SEQ ID NO: 3297399 - DNA, 25 bp, Homo sapien
ctagctctttgggttctttaggaga

SEQ ID NO: 3297400 - DNA, 25 bp, Homo sapien
cctagctctttgggttctttaggag

SEQ ID NO: 3297401 - DNA, 25 bp, Homo sapien
tgttataaaaatgtagccccacggc

SEQ ID NO: 3297402 - DNA, 25 bp, Homo sapien
aatgtagccccacggcagtttgcca

SEQ ID NO: 3297403 - DNA, 25 bp, Homo sapien
tgccaactcttaacagccttagggg

SEQ ID NO: 3297404 - DNA, 25 bp, Homo sapien
cagagcacacgagcatctatttcct

SEQ ID NO: 3297405 - DNA, 25 bp, Homo sapien
tgtttttccttggtagtgttcatcc

SEQ ID NO: 3297406 - DNA, 25 bp, Homo sapien
ctggggatgactgagtaggactcct

SEQ ID NO: 3297407 - DNA, 25 bp, Homo sapien
gatgactgagtaggactcctccagc

SEQ ID NO: 3297408 - DNA, 25 bp, Homo sapien
gactgagtaggactcctccagcagc

SEQ ID NO: 3297409 - DNA, 25 bp, Homo sapien
gagatgggcagctgagtcaagctgg

SEQ ID NO: 3297410 - DNA, 25 bp, Homo sapien
agatgggcagctgagtcaagctggc

SEQ ID NO: 3297411 - DNA, 25 bp, Homo sapien
caatatcttcttgtatgtcattaat

SEQ ID NO: 3297412 - DNA, 25 bp, Homo sapien
cttcttgtatgtcattaatttcttt

SEQ ID NO: 3297413 - DNA, 25 bp, Homo sapien
tatcttcttgtatgtcattaatttc

SEQ ID NO: 3297414 - DNA, 25 bp, Homo sapien
tcttcttgtatgtcattaatttctt

SEQ ID NO: 3297415 - DNA, 25 bp, Homo sapien
ccccagtcggccgtgtcctgatgtt

SEQ ID NO: 3297416 - DNA, 25 bp, Homo sapien
cacagctcccagaccgcgttgtgtt

SEQ ID NO: 3297417 - DNA, 25 bp, Homo sapien
cagtcggccgtgtcctgatgttact

SEQ ID NO: 3297418 - DNA, 25 bp, Homo sapien
cagaccgcgttgtgttccactgaca

SEQ ID NO: 3297419 - DNA, 25 bp, Homo sapien
cgccaaagctccgagtctctgggtc

SEQ ID NO: 3297420 - DNA, 25 bp, Homo sapien
ctttccccacgtgactctctggaat

SEQ ID NO: 3297421 - DNA, 25 bp, Homo sapien
tctctggaatttcgccaaagctccg

SEQ ID NO: 3297422 - DNA, 25 bp, Homo sapien
tggaatttcgccaaagctccgagtc

SEQ ID NO: 3297423 - DNA, 25 bp, Homo sapien
tgaccagcaactttccggcgagatt

SEQ ID NO: 3297424 - DNA, 25 bp, Homo sapien
gattttgacgcggagaactgtgctc

SEQ ID NO: 3297425 - DNA, 25 bp, Homo sapien
gaaatgctggaagatcccatcggcc

SEQ ID NO: 3297426 - DNA, 25 bp, Homo sapien
taaaaagctgcttcggacaaaccag

SEQ ID NO: 3297427 - DNA, 25 bp, Homo sapien
tgggctcctccatcgtgggtgccga

SEQ ID NO: 3297428 - DNA, 25 bp, Homo sapien
cgttttggcggagccgcttcttgga

SEQ ID NO: 3297429 - DNA, 25 bp, Homo sapien
ttcagtgcgcccgggttccaagcgc

SEQ ID NO: 3297430 - DNA, 25 bp, Homo sapien
ttccaagcgccggagccagcgtttt

SEQ ID NO: 3297431 - DNA, 25 bp, Homo sapien
ggtgcagcttgtcggaaccaaaact

SEQ ID NO: 3297432 - DNA, 25 bp, Homo sapien
gaatggtgcagcttgtcggaaccaa

SEQ ID NO: 3297433 - DNA, 25 bp, Homo sapien
ttggaatggtgcagcttgtcggaac

SEQ ID NO: 3297434 - DNA, 25 bp, Homo sapien
ggcagttggaatggtgcagcttgtc

SEQ ID NO: 3297435 - DNA, 25 bp, Homo sapien
gaagtcctgtgaagttacagtagat

SEQ ID NO: 3297436 - DNA, 25 bp, Homo sapien
tctgttgacatatggaagtcctgtg

SEQ ID NO: 3297437 - DNA, 25 bp, Homo sapien
catatggaagtcctgtgaagttaca

SEQ ID NO: 3297438 - DNA, 25 bp, Homo sapien
gagttctgttgacatatggaagtcc

SEQ ID NO: 3297439 - DNA, 25 bp, Homo sapien
gctgcattctgtgccttgaaattgg

SEQ ID NO: 3297440 - DNA, 25 bp, Homo sapien
agccaatggggttgctggttctgac

SEQ ID NO: 3297441 - DNA, 25 bp, Homo sapien
tagccaatggggttgctggttctga

SEQ ID NO: 3297442 - DNA, 25 bp, Homo sapien
ttagccaatggggttgctggttctg

SEQ ID NO: 3297443 - DNA, 25 bp, Homo sapien
gaactccggtttcgtatgctcttgg

SEQ ID NO: 3297444 - DNA, 25 bp, Homo sapien
acagagccttgctgaggcagctttc

SEQ ID NO: 3297445 - DNA, 25 bp, Homo sapien
gaagggctgataaggcaagaactcc

SEQ ID NO: 3297446 - DNA, 25 bp, Homo sapien
tttcgtatgctcttggttgacaggc

SEQ ID NO: 3297447 - DNA, 25 bp, Homo sapien
cctcagggcatcgtagctgatggat

SEQ ID NO: 3297448 - DNA, 25 bp, Homo sapien
agagatagaatctgggagcctcaga

SEQ ID NO: 3297449 - DNA, 25 bp, Homo sapien
tggatggacaaacactcttcttacc

SEQ ID NO: 3297450 - DNA, 25 bp, Homo sapien
gcattctccttccttacgccatatc

SEQ ID NO: 3297451 - DNA, 25 bp, Homo sapien
tagctcatactgcagatgcacacca

SEQ ID NO: 3297452 - DNA, 25 bp, Homo sapien
ttcacaggcaaggtcatagtgccct

SEQ ID NO: 3297453 - DNA, 25 bp, Homo sapien
ctctagggtggaatgaatgggccaa

SEQ ID NO: 3297454 - DNA, 25 bp, Homo sapien
ggaattctgagcttcttcactgggc

SEQ ID NO: 3297455 - DNA, 25 bp, Homo sapien
cccttcccacttccaccaagtcttg

SEQ ID NO: 3297456 - DNA, 25 bp, Homo sapien
cccacttccaccaagtcttgatggc

SEQ ID NO: 3297457 - DNA, 25 bp, Homo sapien
acttccaccaagtcttgatggccat

SEQ ID NO: 3297458 - DNA, 25 bp, Homo sapien
ttcccacttccaccaagtcttgatg

SEQ ID NO: 3297459 - DNA, 25 bp, Homo sapien
tcatgtgtagctcacaactgttcct

SEQ ID NO: 3297460 - DNA, 25 bp, Homo sapien
tgtgtagctcacaactgttcctcat

SEQ ID NO: 3297461 - DNA, 25 bp, Homo sapien
gtgtagctcacaactgttcctcata

SEQ ID NO: 3297462 - DNA, 25 bp, Homo sapien
catgtgtagctcacaactgttcctc

SEQ ID NO: 3297463 - DNA, 25 bp, Homo sapien
atattcattagtagtttggtttcct

SEQ ID NO: 3297464 - DNA, 25 bp, Homo sapien
tccaaattgcttagaaagcctgctg

SEQ ID NO: 3297465 - DNA, 25 bp, Homo sapien
gctttgtaaacttgcttcctccatt

SEQ ID NO: 3297466 - DNA, 25 bp, Homo sapien
ttctgatttagattgatcatattca

SEQ ID NO: 3297467 - DNA, 25 bp, Homo sapien
cccaccagtctgaaagagtgcttac

SEQ ID NO: 3297468 - DNA, 25 bp, Homo sapien
ctgtggatatgcccaccagtctgaa

SEQ ID NO: 3297469 - DNA, 25 bp, Homo sapien
agtcctctgaagagtaaatgtttaa

SEQ ID NO: 3297470 - DNA, 25 bp, Homo sapien
taatgggaatacttgccttccacat

SEQ ID NO: 3297471 - DNA, 25 bp, Homo sapien
aaggcagaatttaggcttggcttgg

SEQ ID NO: 3297472 - DNA, 25 bp, Homo sapien
ctgaaggcagaatttaggcttggct

SEQ ID NO: 3297473 - DNA, 25 bp, Homo sapien
ctgctctggactgttgattttacct

SEQ ID NO: 3297474 - DNA, 25 bp, Homo sapien
gctctggactgttgattttacctga

SEQ ID NO: 3297475 - DNA, 25 bp, Homo sapien
ctggactgttgattttacctgacat

SEQ ID NO: 3297476 - DNA, 25 bp, Homo sapien
tctggactgttgattttacctgaca

SEQ ID NO: 3297477 - DNA, 25 bp, Homo sapien
ttctccattggcgtctagaccagcc

SEQ ID NO: 3297478 - DNA, 25 bp, Homo sapien
tctatacaggcatgacagtccagga

SEQ ID NO: 3297479 - DNA, 25 bp, Homo sapien
tctgtcagctctctatacaggcatg

SEQ ID NO: 3297480 - DNA, 25 bp, Homo sapien
ccaggaataagaagttgtaaggagg

SEQ ID NO: 3297481 - DNA, 25 bp, Homo sapien
tcaggaacctgagtattccagcggt

SEQ ID NO: 3297482 - DNA, 25 bp, Homo sapien
ttgaagcaataagccgtgtatgtac

SEQ ID NO: 3297483 - DNA, 25 bp, Homo sapien
gtaagcctgatatgacctttctcct

SEQ ID NO: 3297484 - DNA, 25 bp, Homo sapien
ttctccttgaagcaataagccgtgt

SEQ ID NO: 3297485 - DNA, 25 bp, Homo sapien
cagtgagaaccctgattagggtgag

SEQ ID NO: 3297486 - DNA, 25 bp, Homo sapien
tgagagtattcattggcactaagag

SEQ ID NO: 3297487 - DNA, 25 bp, Homo sapien
cattggcactaagaggggcctctgt

SEQ ID NO: 3297488 - DNA, 25 bp, Homo sapien
ccagtgagaaccctgattagggtga

SEQ ID NO: 3297489 - DNA, 25 bp, Homo sapien
tggtgtcctgtcagtgctgatttgt

SEQ ID NO: 3297490 - DNA, 25 bp, Homo sapien
tcctgtcagtgctgatttgtgtttt

SEQ ID NO: 3297491 - DNA, 25 bp, Homo sapien
tgtcctgtcagtgctgatttgtgtt

SEQ ID NO: 3297492 - DNA, 25 bp, Homo sapien
ggtgtcctgtcagtgctgatttgtg

SEQ ID NO: 3297493 - DNA, 25 bp, Homo sapien
cttctgcaggtggtttcaggccgaa

SEQ ID NO: 3297494 - DNA, 25 bp, Homo sapien
ccaatcccttgcctgcagaaagctt

SEQ ID NO: 3297495 - DNA, 25 bp, Homo sapien
tgcctgcagaaagcttcatatccag

SEQ ID NO: 3297496 - DNA, 25 bp, Homo sapien
catatccagtggcattggaggctct

SEQ ID NO: 3297497 - DNA, 25 bp, Homo sapien
ttgcagttgctctcattttgagtag

SEQ ID NO: 3297498 - DNA, 25 bp, Homo sapien
cacgtaatttttgcagttgctctca

SEQ ID NO: 3297499 - DNA, 25 bp, Homo sapien
ttgctctcattttgagtagtgatag

SEQ ID NO: 3297500 - DNA, 25 bp, Homo sapien
cattttgagtagtgatagtgatcat

SEQ ID NO: 3297501 - DNA, 25 bp, Homo sapien
catctgcacgatctgcacctccctt

SEQ ID NO: 3297502 - DNA, 25 bp, Homo sapien
tcaggactttctaggggattccact

SEQ ID NO: 3297503 - DNA, 25 bp, Homo sapien
caagagatcggaagagtagctgatg

SEQ ID NO: 3297504 - DNA, 25 bp, Homo sapien
aaagcattcggttgcaattctctca

SEQ ID NO: 3297505 - DNA, 25 bp, Homo sapien
cctggagctgtggatttctagagcc

SEQ ID NO: 3297506 - DNA, 25 bp, Homo sapien
taatagagaatgtcaagagatcgga

SEQ ID NO: 3297507 - DNA, 25 bp, Homo sapien
tttcttttgcaataatcgtattagt

SEQ ID NO: 3297508 - DNA, 25 bp, Homo sapien
ctttcttttgcaataatcgtattag

SEQ ID NO: 3297509 - DNA, 25 bp, Homo sapien
tgctttcttttgcaataatcgtatt

SEQ ID NO: 3297510 - DNA, 25 bp, Homo sapien
gctttcttttgcaataatcgtatta

SEQ ID NO: 3297511 - DNA, 25 bp, Homo sapien
catggactcgtacagagttggtgag

SEQ ID NO: 3297512 - DNA, 25 bp, Homo sapien
gagtgggccatcaatgggatctctg

SEQ ID NO: 3297513 - DNA, 25 bp, Homo sapien
caatgggatctctgttagctcattt

SEQ ID NO: 3297514 - DNA, 25 bp, Homo sapien
gaatttcttgtgtagggtgaaatcc

SEQ ID NO: 3297515 - DNA, 25 bp, Homo sapien
gatagtgaggatcacattggccacc

SEQ ID NO: 3297516 - DNA, 25 bp, Homo sapien
ccactggccctgatagtgaggatca

SEQ ID NO: 3297517 - DNA, 25 bp, Homo sapien
taagctggcgatagctaggttcctg

SEQ ID NO: 3297518 - DNA, 25 bp, Homo sapien
cctgaacaacagttgggttcaataa

SEQ ID NO: 3297519 - DNA, 25 bp, Homo sapien
ctagcctgtgagtgtcgcctcctgg

SEQ ID NO: 3297520 - DNA, 25 bp, Homo sapien
ggttctttgcctagcctgtgagtgt

SEQ ID NO: 3297521 - DNA, 25 bp, Homo sapien
ctccctttgtagcttctcttaccac

SEQ ID NO: 3297522 - DNA, 25 bp, Homo sapien
ttcaatgctttacagcttccacggg

SEQ ID NO: 3297523 - DNA, 25 bp, Homo sapien
gctggctgttctctccagcacatcg

SEQ ID NO: 3297524 - DNA, 25 bp, Homo sapien
tccagcacatcgctgtagccttttc

SEQ ID NO: 3297525 - DNA, 25 bp, Homo sapien
ggcccttaagagcaccatcatgcag

SEQ ID NO: 3297526 - DNA, 25 bp, Homo sapien
ttcaatacaggctcgttgacccggc

SEQ ID NO: 3297527 - DNA, 25 bp, Homo sapien
ttcagtctttaggtgtgaatggtat

SEQ ID NO: 3297528 - DNA, 25 bp, Homo sapien
accagggttgtcttatggcatccag

SEQ ID NO: 3297529 - DNA, 25 bp, Homo sapien
tggaatccttaagcatgcaaaagct

SEQ ID NO: 3297530 - DNA, 25 bp, Homo sapien
taagcatgcaaaagctttgaacaga

SEQ ID NO: 3297531 - DNA, 25 bp, Homo sapien
ccaaggtctccaaaattgatctcca

SEQ ID NO: 3297532 - DNA, 25 bp, Homo sapien
aaggtctccaaaattgatctccagc

SEQ ID NO: 3297533 - DNA, 25 bp, Homo sapien
caaggtctccaaaattgatctccag

SEQ ID NO: 3297534 - DNA, 25 bp, Homo sapien
ggtctccaaaattgatctccagctg

SEQ ID NO: 3297535 - DNA, 25 bp, Homo sapien
gaaaacaaatcccttcttccactgc

SEQ ID NO: 3297536 - DNA, 25 bp, Homo sapien
actgcccatcagcaccttcatttgg

SEQ ID NO: 3297537 - DNA, 25 bp, Homo sapien
gcccatcagcaccttcatttggttt

SEQ ID NO: 3297538 - DNA, 25 bp, Homo sapien
tatgaaaacaaatcccttcttccac

SEQ ID NO: 3297539 - DNA, 25 bp, Homo sapien
gaatagccttccactcatccaaagt

SEQ ID NO: 3297540 - DNA, 25 bp, Homo sapien
ggtccttattttgaatagccttcca

SEQ ID NO: 3297541 - DNA, 25 bp, Homo sapien
gtcatctcttttggaccctcctctt

SEQ ID NO: 3297542 - DNA, 25 bp, Homo sapien
ttgcccggtccttattttgaatagc

SEQ ID NO: 3297543 - DNA, 25 bp, Homo sapien
ttgacagttccccagttgtgagatc

SEQ ID NO: 3297544 - DNA, 25 bp, Homo sapien
gattgatccaagtcagttaattcgt

SEQ ID NO: 3297545 - DNA, 25 bp, Homo sapien
tgagatccgctacctccacgtttgt

SEQ ID NO: 3297546 - DNA, 25 bp, Homo sapien
accttcaggtgtttcgtcagtcaca

SEQ ID NO: 3297547 - DNA, 25 bp, Homo sapien
taatgtgaaaaagaagatctatcac

SEQ ID NO: 3297548 - DNA, 25 bp, Homo sapien
gtaatgtgaaaaagaagatctatca

SEQ ID NO: 3297549 - DNA, 25 bp, Homo sapien
tgtaatgtgaaaaagaagatctatc

SEQ ID NO: 3297550 - DNA, 25 bp, Homo sapien
ctgtaatgtgaaaaagaagatctat

SEQ ID NO: 3297551 - DNA, 25 bp, Homo sapien
tcctcggcccattccacgtccacgg

SEQ ID NO: 3297552 - DNA, 25 bp, Homo sapien
tatgcctatcaaattcacgtttgcc

SEQ ID NO: 3297553 - DNA, 25 bp, Homo sapien
cacgtttgccacgagaatcaaatcc

SEQ ID NO: 3297554 - DNA, 25 bp, Homo sapien
tcgacctcttccaagaccaccacga

SEQ ID NO: 3297555 - DNA, 25 bp, Homo sapien
ggtcggtcaataatcggtctatcaa

SEQ ID NO: 3297556 - DNA, 25 bp, Homo sapien
taggtcggtcaataatcggtctatc

SEQ ID NO: 3297557 - DNA, 25 bp, Homo sapien
ctcgaataggtcggtcaataatcgg

SEQ ID NO: 3297558 - DNA, 25 bp, Homo sapien
gaataggtcggtcaataatcggtct

SEQ ID NO: 3297559 - DNA, 25 bp, Homo sapien
cacaaggtggttgcctttctggtct

SEQ ID NO: 3297560 - DNA, 25 bp, Homo sapien
cttttcttcaagtggcttttcgaat

SEQ ID NO: 3297561 - DNA, 25 bp, Homo sapien
tcgaatcttcgttcacaaggtggtt

SEQ ID NO: 3297562 - DNA, 25 bp, Homo sapien
ttcaagtggcttttcgaatcttcgt

SEQ ID NO: 3297563 - DNA, 25 bp, Homo sapien
gccttcagcacctcgaaggggtccg

SEQ ID NO: 3297564 - DNA, 25 bp, Homo sapien
ataactggtcgaatcggttggtgac

SEQ ID NO: 3297565 - DNA, 25 bp, Homo sapien
caaataactggtcgaatcggttggt

SEQ ID NO: 3297566 - DNA, 25 bp, Homo sapien
taactggtcgaatcggttggtgacc

SEQ ID NO: 3297567 - DNA, 25 bp, Homo sapien
tcttcatcctcatcatctttatttc

SEQ ID NO: 3297568 - DNA, 25 bp, Homo sapien
atcttcatcctcatcatctttattt

SEQ ID NO: 3297569 - DNA, 25 bp, Homo sapien
cttcatcctcatcatctttatttct

SEQ ID NO: 3297570 - DNA, 25 bp, Homo sapien
ggctgctccttttcttgatgagcct

SEQ ID NO: 3297571 - DNA, 25 bp, Homo sapien
gctccttttcttgatgagccttcat

SEQ ID NO: 3297572 - DNA, 25 bp, Homo sapien
tgctccttttcttgatgagccttca

SEQ ID NO: 3297573 - DNA, 25 bp, Homo sapien
ctctgtgggctgctccttttcttga

SEQ ID NO: 3297574 - DNA, 25 bp, Homo sapien
gctgttttcgatctatttttatgag

SEQ ID NO: 3297575 - DNA, 25 bp, Homo sapien
ttcttggctgttttcgatctatttt

SEQ ID NO: 3297576 - DNA, 25 bp, Homo sapien
tgttttcgatctatttttatgagaa

SEQ ID NO: 3297577 - DNA, 25 bp, Homo sapien
tggctgttttcgatctatttttatg

SEQ ID NO: 3297578 - DNA, 25 bp, Homo sapien
atgttgagtccataaatgataaggg

SEQ ID NO: 3297579 - DNA, 25 bp, Homo sapien
gaataggagtctctgacaatagtca

SEQ ID NO: 3297580 - DNA, 25 bp, Homo sapien
caaatgcacgatgaagggcatctgc

SEQ ID NO: 3297581 - DNA, 25 bp, Homo sapien
caatagtcagatgtaatgttgagtc

SEQ ID NO: 3297582 - DNA, 25 bp, Homo sapien
tatattttcgggctttcttgacttc

SEQ ID NO: 3297583 - DNA, 25 bp, Homo sapien
ccccaggcttttcatatctcaggga

SEQ ID NO: 3297584 - DNA, 25 bp, Homo sapien
tgcatgccctgagaagttggggcca

SEQ ID NO: 3297585 - DNA, 25 bp, Homo sapien
tcatatctcagggatacttgcatgc

SEQ ID NO: 3297586 - DNA, 25 bp, Homo sapien
gcatcttcgggaaagtagttggttc

SEQ ID NO: 3297587 - DNA, 25 bp, Homo sapien
gctggaactcgggaataaggtctgt

SEQ ID NO: 3297588 - DNA, 25 bp, Homo sapien
tatggttgccgctgaatttagcacg

SEQ ID NO: 3297589 - DNA, 25 bp, Homo sapien
tgtggctccttttatagactggatt

SEQ ID NO: 3297590 - DNA, 25 bp, Homo sapien
gagagaattactctgtagaatgttt

SEQ ID NO: 3297591 - DNA, 25 bp, Homo sapien
tgagagaattactctgtagaatgtt

SEQ ID NO: 3297592 - DNA, 25 bp, Homo sapien
cattctcaccgacagaggagatgac

SEQ ID NO: 3297593 - DNA, 25 bp, Homo sapien
gaatcaggtaatgaaggcccatcat

SEQ ID NO: 3297594 - DNA, 25 bp, Homo sapien
taggcaggtatccaagtactaatac

SEQ ID NO: 3297595 - DNA, 25 bp, Homo sapien
tttgctctgtgataggcaggtatcc

SEQ ID NO: 3297596 - DNA, 25 bp, Homo sapien
acatattgtcctacaaagagttttg

SEQ ID NO: 3297597 - DNA, 25 bp, Homo sapien
ctttcctacatttgacatgaggctt

SEQ ID NO: 3297598 - DNA, 25 bp, Homo sapien
cagtgtgattcagggacatattgtc

SEQ ID NO: 3297599 - DNA, 25 bp, Homo sapien
ctgctttgctaatgaatacttcctc

SEQ ID NO: 3297600 - DNA, 25 bp, Homo sapien
ttaacagtgggtgtcattagcctcg

SEQ ID NO: 3297601 - DNA, 25 bp, Homo sapien
tgggtgtcattagcctcgtataagg

SEQ ID NO: 3297602 - DNA, 25 bp, Homo sapien
cagtgggtgtcattagcctcgtata

SEQ ID NO: 3297603 - DNA, 25 bp, Homo sapien
aacagtgggtgtcattagcctcgta

SEQ ID NO: 3297604 - DNA, 25 bp, Homo sapien
cagtccctttcatcttatcattgtt

SEQ ID NO: 3297605 - DNA, 25 bp, Homo sapien
cttttgttgcggtgggtctcctaat

SEQ ID NO: 3297606 - DNA, 25 bp, Homo sapien
ctgtgggttgtctgcagcctgctct

SEQ ID NO: 3297607 - DNA, 25 bp, Homo sapien
ctgctcttttgttgcggtgggtctc

SEQ ID NO: 3297608 - DNA, 25 bp, Homo sapien
gattgcttggtctgagtactgagtc

SEQ ID NO: 3297609 - DNA, 25 bp, Homo sapien
gctggaagcaaatcgagtgaagcat

SEQ ID NO: 3297610 - DNA, 25 bp, Homo sapien
tgttagagaatacaaccggtgtgta

SEQ ID NO: 3297611 - DNA, 25 bp, Homo sapien
tattttgctgactgcgggagtggat

SEQ ID NO: 3297612 - DNA, 25 bp, Homo sapien
ctgtgtaagataccagacagctgga

SEQ ID NO: 3297613 - DNA, 25 bp, Homo sapien
cactaggctgtgtaagataccagac

SEQ ID NO: 3297614 - DNA, 25 bp, Homo sapien
ggctgcactaggctgtgtaagatac

SEQ ID NO: 3297615 - DNA, 25 bp, Homo sapien
tgtaagataccagacagctggaaga

SEQ ID NO: 3297616 - DNA, 25 bp, Homo sapien
agaggctcgaatggctattccatgg

SEQ ID NO: 3297617 - DNA, 25 bp, Homo sapien
tctctgaggacgtttaagatagtgg

SEQ ID NO: 3297618 - DNA, 25 bp, Homo sapien
tgagccttgaggattcacacaagga

SEQ ID NO: 3297619 - DNA, 25 bp, Homo sapien
ccatggcagttgataggtaaccatg

SEQ ID NO: 3297620 - DNA, 25 bp, Homo sapien
cttctaacgaaggatgtaaattcat

SEQ ID NO: 3297621 - DNA, 25 bp, Homo sapien
atgtaaattcatactgaaattgcct

SEQ ID NO: 3297622 - DNA, 25 bp, Homo sapien
aggatgtaaattcatactgaaattg

SEQ ID NO: 3297623 - DNA, 25 bp, Homo sapien
gatgtaaattcatactgaaattgcc

SEQ ID NO: 3297624 - DNA, 25 bp, Homo sapien
tctaatattaattaatccgagtagt

SEQ ID NO: 3297625 - DNA, 25 bp, Homo sapien
taccagatctaatattaattaatcc

SEQ ID NO: 3297626 - DNA, 25 bp, Homo sapien
aatattaattaatccgagtagtttg

SEQ ID NO: 3297627 - DNA, 25 bp, Homo sapien
cagatctaatattaattaatccgag

SEQ ID NO: 3297628 - DNA, 25 bp, Homo sapien
tatgtaatgctacatactttgtaga

SEQ ID NO: 3297629 - DNA, 25 bp, Homo sapien
tgctatttaggaggctttttcctaa

SEQ ID NO: 3297630 - DNA, 25 bp, Homo sapien
tcctaagtcccacagttttctgttc

SEQ ID NO: 3297631 - DNA, 25 bp, Homo sapien
tcatgttctatgtaatgctacatac

SEQ ID NO: 3297632 - DNA, 25 bp, Homo sapien
agttctgcgtggctggagaggcctc

SEQ ID NO: 3297633 - DNA, 25 bp, Homo sapien
tctgcgtggctggagaggcctcagg

SEQ ID NO: 3297634 - DNA, 25 bp, Homo sapien
gttctgcgtggctggagaggcctca

SEQ ID NO: 3297635 - DNA, 25 bp, Homo sapien
tgcgtggctggagaggcctcaggaa

SEQ ID NO: 3297636 - DNA, 25 bp, Homo sapien
tttgcggtcccgcctttggctcttc

SEQ ID NO: 3297637 - DNA, 25 bp, Homo sapien
tgcggtcccgcctttggctcttcag

SEQ ID NO: 3297638 - DNA, 25 bp, Homo sapien
tggtttgcggtcccgcctttggctc

SEQ ID NO: 3297639 - DNA, 25 bp, Homo sapien
cggtcccgcctttggctcttcagtt

SEQ ID NO: 3297640 - DNA, 25 bp, Homo sapien
tgtgtctaccaaagaccctgctaaa

SEQ ID NO: 3297641 - DNA, 25 bp, Homo sapien
aaatcattcagctgtatcacaatca

SEQ ID NO: 3297642 - DNA, 25 bp, Homo sapien
tatattactcaagacgggtaaatca

SEQ ID NO: 3297643 - DNA, 25 bp, Homo sapien
tcattggctgggaagtaatttcctt

SEQ ID NO: 3297644 - DNA, 25 bp, Homo sapien
gaaaaggcttctacaacaggcaggg

SEQ ID NO: 3297645 - DNA, 25 bp, Homo sapien
ccatgagtcctgtgcaggttgctgg

SEQ ID NO: 3297646 - DNA, 25 bp, Homo sapien
gctgggttgcgatgctgacgtgtcc

SEQ ID NO: 3297647 - DNA, 25 bp, Homo sapien
tttgctattcgtctgcagtctgcca

SEQ ID NO: 3297648 - DNA, 25 bp, Homo sapien
tgagtgaacgtccaaagctccagcc

SEQ ID NO: 3297649 - DNA, 25 bp, Homo sapien
ccattgcccattgcattagctgtaa

SEQ ID NO: 3297650 - DNA, 25 bp, Homo sapien
gacactgaaaacttgtcgatgcctt

SEQ ID NO: 3297651 - DNA, 25 bp, Homo sapien
tctcctagtccttcccaagacgagg

SEQ ID NO: 3297652 - DNA, 25 bp, Homo sapien
catgctcttcccttctaacaagggt

SEQ ID NO: 3297653 - DNA, 25 bp, Homo sapien
caagggtgtcctcaactggcaccat

SEQ ID NO: 3297654 - DNA, 25 bp, Homo sapien
ccacgccacactgctctgttcctgt

SEQ ID NO: 3297655 - DNA, 25 bp, Homo sapien
gctcttcccttctaacaagggtgtc

SEQ ID NO: 3297656 - DNA, 25 bp, Homo sapien
tgtggctctacatgacaggctcgcc

SEQ ID NO: 3297657 - DNA, 25 bp, Homo sapien
tcatggccttctcgttcgctggtaa

SEQ ID NO: 3297658 - DNA, 25 bp, Homo sapien
tgaggcacccaactgctctctgtgg

SEQ ID NO: 3297659 - DNA, 25 bp, Homo sapien
gtttccgaagaatgtcagactccca

SEQ ID NO: 3297660 - DNA, 25 bp, Homo sapien
tcctgtagagttgtttaagttccta

SEQ ID NO: 3297661 - DNA, 25 bp, Homo sapien
tcttgtcctcctatgctgggcgatg

SEQ ID NO: 3297662 - DNA, 25 bp, Homo sapien
cttcagatatctgctgggagcggaa

SEQ ID NO: 3297663 - DNA, 25 bp, Homo sapien
gccatccaccttttagcagcacagg

SEQ ID NO: 3297664 - DNA, 25 bp, Homo sapien
catttcactgggttacggagcccta

SEQ ID NO: 3297665 - DNA, 25 bp, Homo sapien
tgaggtgctttatctggggcaaaca

SEQ ID NO: 3297666 - DNA, 25 bp, Homo sapien
tatacatatactcccttatgcttta

SEQ ID NO: 3297667 - DNA, 25 bp, Homo sapien
atataacctatacatatactccctt

SEQ ID NO: 3297668 - DNA, 25 bp, Homo sapien
aacctatacatatactcccttatgc

SEQ ID NO: 3297669 - DNA, 25 bp, Homo sapien
ggcctcctagaggactcctgcagat

SEQ ID NO: 3297670 - DNA, 25 bp, Homo sapien
gatttgctcactaatgccttgtgtg

SEQ ID NO: 3297671 - DNA, 25 bp, Homo sapien
caactctcagtggttactacttgct

SEQ ID NO: 3297672 - DNA, 25 bp, Homo sapien
cctgcagattctattgttgggtggg

SEQ ID NO: 3297673 - DNA, 25 bp, Homo sapien
agaagttacacatgcacagggctga

SEQ ID NO: 3297674 - DNA, 25 bp, Homo sapien
gagaacacagccagaaggtgccgta

SEQ ID NO: 3297675 - DNA, 25 bp, Homo sapien
tagattgcaggacccttagacaggg

SEQ ID NO: 3297676 - DNA, 25 bp, Homo sapien
gaatgctaagacagacagccaccgt

SEQ ID NO: 3297677 - DNA, 25 bp, Homo sapien
taaaaatgccgacattcctgaagcg

SEQ ID NO: 3297678 - DNA, 25 bp, Homo sapien
gaattaagcttgcagtggagcaggc

SEQ ID NO: 3297679 - DNA, 25 bp, Homo sapien
tcttccacacccataagagaattca

SEQ ID NO: 3297680 - DNA, 25 bp, Homo sapien
tgcaagcagtcctgtttggctgtaa

SEQ ID NO: 3297681 - DNA, 25 bp, Homo sapien
tagcaacagttacaaagctctttac

SEQ ID NO: 3297682 - DNA, 25 bp, Homo sapien
gtagatccaaaatctatacgcttga

SEQ ID NO: 3297683 - DNA, 25 bp, Homo sapien
ctgggaccatgatacagcagtagca

SEQ ID NO: 3297684 - DNA, 25 bp, Homo sapien
tacgcttgactctctcacgctggga

SEQ ID NO: 3297685 - DNA, 25 bp, Homo sapien
tgaaaccattcagcaacgaggattt

SEQ ID NO: 3297686 - DNA, 25 bp, Homo sapien
aaccattcagcaacgaggatttggc

SEQ ID NO: 3297687 - DNA, 25 bp, Homo sapien
attcagcaacgaggatttggcagct

SEQ ID NO: 3297688 - DNA, 25 bp, Homo sapien
ccattcagcaacgaggatttggcag

SEQ ID NO: 3297689 - DNA, 25 bp, Homo sapien
tgacttgagcagagaagataaggct

SEQ ID NO: 3297690 - DNA, 25 bp, Homo sapien
tgagcagagaagataaggctatcat

SEQ ID NO: 3297691 - DNA, 25 bp, Homo sapien
ccgctgacttgagcagagaagataa

SEQ ID NO: 3297692 - DNA, 25 bp, Homo sapien
cttgagcagagaagataaggctatc

SEQ ID NO: 3297693 - DNA, 25 bp, Homo sapien
cagttgggagaacagtgatttcaca

SEQ ID NO: 3297694 - DNA, 25 bp, Homo sapien
gaacagtgatttcacaggagagcat

SEQ ID NO: 3297695 - DNA, 25 bp, Homo sapien
ggagaacagtgatttcacaggagag

SEQ ID NO: 3297696 - DNA, 25 bp, Homo sapien
gctgaaaacagttgggagaacagtg

SEQ ID NO: 3297697 - DNA, 25 bp, Homo sapien
aattctggaagacctgctagtgagc

SEQ ID NO: 3297698 - DNA, 25 bp, Homo sapien
tagactaggagaatgcagctaactc

SEQ ID NO: 3297699 - DNA, 25 bp, Homo sapien
gaatctcagcagtgttaaggccatc

SEQ ID NO: 3297700 - DNA, 25 bp, Homo sapien
ctcacctgaaggagaatggtaccaa

SEQ ID NO: 3297701 - DNA, 25 bp, Homo sapien
gaggatgccagactctcattggcca

SEQ ID NO: 3297702 - DNA, 25 bp, Homo sapien
tatagaactacgcttcaggatcgct

SEQ ID NO: 3297703 - DNA, 25 bp, Homo sapien
tgtgtgacatcccataacagaggag

SEQ ID NO: 3297704 - DNA, 25 bp, Homo sapien
tttcaccaaggttgagaggacgggc

SEQ ID NO: 3297705 - DNA, 25 bp, Homo sapien
tgtgttacttatcttactgggttac

SEQ ID NO: 3297706 - DNA, 25 bp, Homo sapien
ggcaaatctacccagtgatttttca

SEQ ID NO: 3297707 - DNA, 25 bp, Homo sapien
attgcctgtgttacttatcttactg

SEQ ID NO: 3297708 - DNA, 25 bp, Homo sapien
atgatgaggcaaatctacccagtga

SEQ ID NO: 3297709 - DNA, 25 bp, Homo sapien
agagtagaatgaggaatttgatctg

SEQ ID NO: 3297710 - DNA, 25 bp, Homo sapien
gtagaatgaggaatttgatctgtaa

SEQ ID NO: 3297711 - DNA, 25 bp, Homo sapien
gaaagagtagaatgaggaatttgat

SEQ ID NO: 3297712 - DNA, 25 bp, Homo sapien
gggaaagagtagaatgaggaatttg

SEQ ID NO: 3297713 - DNA, 25 bp, Homo sapien
ttcgaacaagtttggatccttgatc

SEQ ID NO: 3297714 - DNA, 25 bp, Homo sapien
ctcttcaacttttcgaacaagtttg

SEQ ID NO: 3297715 - DNA, 25 bp, Homo sapien
tcaacttttcgaacaagtttggatc

SEQ ID NO: 3297716 - DNA, 25 bp, Homo sapien
tcgaacaagtttggatccttgatct

SEQ ID NO: 3297717 - DNA, 25 bp, Homo sapien
ttgggttgttccttaattctgggca

SEQ ID NO: 3297718 - DNA, 25 bp, Homo sapien
gggccttattatctcggattctttc

SEQ ID NO: 3297719 - DNA, 25 bp, Homo sapien
tgggttgttccttaattctgggcat

SEQ ID NO: 3297720 - DNA, 25 bp, Homo sapien
ccttattatctcggattctttcatc

SEQ ID NO: 3297721 - DNA, 25 bp, Homo sapien
tcttcaaaggttggcaaagggacat

SEQ ID NO: 3297722 - DNA, 25 bp, Homo sapien
tctctcttcaaaggttggcaaaggg

SEQ ID NO: 3297723 - DNA, 25 bp, Homo sapien
tctcttcaaaggttggcaaagggac

SEQ ID NO: 3297724 - DNA, 25 bp, Homo sapien
tcaaaggttggcaaagggacatagc

SEQ ID NO: 3297725 - DNA, 25 bp, Homo sapien
ctattccttactccgctcctgtttt

SEQ ID NO: 3297726 - DNA, 25 bp, Homo sapien
tgagacgcaatcctttaattaaatc

SEQ ID NO: 3297727 - DNA, 25 bp, Homo sapien
actgacagaatgaaatctcagagcc

SEQ ID NO: 3297728 - DNA, 25 bp, Homo sapien
tgcaaaactggcaactagcttctca

SEQ ID NO: 3297729 - DNA, 25 bp, Homo sapien
tgagcagctcctaaagcggacatga

SEQ ID NO: 3297730 - DNA, 25 bp, Homo sapien
tcatctgtgtacacagttctcttcc

SEQ ID NO: 3297731 - DNA, 25 bp, Homo sapien
tcatttccgaagtggaacccgtgct

SEQ ID NO: 3297732 - DNA, 25 bp, Homo sapien
catttccggttttgagtcctgggct

SEQ ID NO: 3297733 - DNA, 25 bp, Homo sapien
ggtgacagaatcatctgtgtacaca

SEQ ID NO: 3297734 - DNA, 25 bp, Homo sapien
ggtcccaactgtcatctggtttaac

SEQ ID NO: 3297735 - DNA, 25 bp, Homo sapien
tgcaggtcccaactgtcatctggtt

SEQ ID NO: 3297736 - DNA, 25 bp, Homo sapien
ccagagttctactattggtgcaggt

SEQ ID NO: 3297737 - DNA, 25 bp, Homo sapien
tggtttaactgctcatctgcagctt

SEQ ID NO: 3297738 - DNA, 25 bp, Homo sapien
ttacaatcataacactcaagaaata

SEQ ID NO: 3297739 - DNA, 25 bp, Homo sapien
actggtcccgtcctggatttaagca

SEQ ID NO: 3297740 - DNA, 25 bp, Homo sapien
ctgaaactgactcaactcttctggg

SEQ ID NO: 3297741 - DNA, 25 bp, Homo sapien
taagcacgcaattgctgtggcacca

SEQ ID NO: 3297742 - DNA, 25 bp, Homo sapien
catagaaggtgcatactggagtcct

SEQ ID NO: 3297743 - DNA, 25 bp, Homo sapien
caccgagccggtttagaagtccagt

SEQ ID NO: 3297744 - DNA, 25 bp, Homo sapien
taagaaactggaacctctgggcaca

SEQ ID NO: 3297745 - DNA, 25 bp, Homo sapien
tttaagcccctagagtggcacagcg

SEQ ID NO: 3297746 - DNA, 25 bp, Homo sapien
cgctttcagtgaaatctgatttgga

SEQ ID NO: 3297747 - DNA, 25 bp, Homo sapien
gataatgtgtgacagtacctgacag

SEQ ID NO: 3297748 - DNA, 25 bp, Homo sapien
gcattgccaaatctcttcataacta

SEQ ID NO: 3297749 - DNA, 25 bp, Homo sapien
tccgatttggttatacgctttcagt

SEQ ID NO: 3297750 - DNA, 25 bp, Homo sapien
taatttgggtccttaatacatctcg

SEQ ID NO: 3297751 - DNA, 25 bp, Homo sapien
tgatatgtgtgggaaattgggtacc

SEQ ID NO: 3297752 - DNA, 25 bp, Homo sapien
tatgaggaggaggtatgacagtact

SEQ ID NO: 3297753 - DNA, 25 bp, Homo sapien
ttttgtttccaatgctgtcagccct

SEQ ID NO: 3297754 - DNA, 25 bp, Homo sapien
gaagtgctgtaatatcggatcccta

SEQ ID NO: 3297755 - DNA, 25 bp, Homo sapien
ttcagcatagcaacacggaggacct

SEQ ID NO: 3297756 - DNA, 25 bp, Homo sapien
caactttagatagaggctgagcccc

SEQ ID NO: 3297757 - DNA, 25 bp, Homo sapien
tcatgttgccagctaagaagactca

SEQ ID NO: 3297758 - DNA, 25 bp, Homo sapien
tgcatatgaaggtatcacctggccc

SEQ ID NO: 3297759 - DNA, 25 bp, Homo sapien
acttggtatgtccaaaactgtgctg

SEQ ID NO: 3297760 - DNA, 25 bp, Homo sapien
tgtccagtaggcatctctaacttgg

SEQ ID NO: 3297761 - DNA, 25 bp, Homo sapien
aactgtgctgttgatattctgccta

SEQ ID NO: 3297762 - DNA, 25 bp, Homo sapien
tcttttcccctattatgtattccta

SEQ ID NO: 3297763 - DNA, 25 bp, Homo sapien
aactctgtattgatctgagtgcagg

SEQ ID NO: 3297764 - DNA, 25 bp, Homo sapien
gaatgaggagcagagttacaactta

SEQ ID NO: 3297765 - DNA, 25 bp, Homo sapien
acttattattgctcaggatgctgct

SEQ ID NO: 3297766 - DNA, 25 bp, Homo sapien
cacatggcagtggttagctgggatt

SEQ ID NO: 3297767 - DNA, 25 bp, Homo sapien
ctgggattagttggagtagctctgc

SEQ ID NO: 3297768 - DNA, 25 bp, Homo sapien
tcaacttagcttggttgggtggcac

SEQ ID NO: 3297769 - DNA, 25 bp, Homo sapien
tatcacctgtgtatccatgggccag

SEQ ID NO: 3297770 - DNA, 25 bp, Homo sapien
cagactgcagagttacatgacaaag

SEQ ID NO: 3297771 - DNA, 25 bp, Homo sapien
tgcctcatttattgggacagactgc

SEQ ID NO: 3297772 - DNA, 25 bp, Homo sapien
tcttgggactaggacactgacgctt

SEQ ID NO: 3297773 - DNA, 25 bp, Homo sapien
catgactgagcccaaatcaaagagc

SEQ ID NO: 3297774 - DNA, 25 bp, Homo sapien
agccagtccgactgcaaaaactgaa

SEQ ID NO: 3297775 - DNA, 25 bp, Homo sapien
cagtccgactgcaaaaactgaagca

SEQ ID NO: 3297776 - DNA, 25 bp, Homo sapien
ggaagccagtccgactgcaaaaact

SEQ ID NO: 3297777 - DNA, 25 bp, Homo sapien
gccagtccgactgcaaaaactgaag

SEQ ID NO: 3297778 - DNA, 25 bp, Homo sapien
ctaaacattgggtatagacaaataa

SEQ ID NO: 3297779 - DNA, 25 bp, Homo sapien
tattgagtacctacaaagaactaaa

SEQ ID NO: 3297780 - DNA, 25 bp, Homo sapien
gctttgcagttctaaaagtagataa

SEQ ID NO: 3297781 - DNA, 25 bp, Homo sapien
gactcattcgacatttactcagcaa

SEQ ID NO: 3297782 - DNA, 25 bp, Homo sapien
tttgagtctcacgaacctgatttga

SEQ ID NO: 3297783 - DNA, 25 bp, Homo sapien
caagtaaagtatatgttcaggaaag

SEQ ID NO: 3297784 - DNA, 25 bp, Homo sapien
cctgatacacggtatgcctttgata

SEQ ID NO: 3297785 - DNA, 25 bp, Homo sapien
ggctgtttaatgtgctacctgatac

SEQ ID NO: 3297786 - DNA, 25 bp, Homo sapien
ggcagaggatcccttggacccagta

SEQ ID NO: 3297787 - DNA, 25 bp, Homo sapien
atcccttggacccagtagatggaga

SEQ ID NO: 3297788 - DNA, 25 bp, Homo sapien
ttggacccagtagatggagattgca

SEQ ID NO: 3297789 - DNA, 25 bp, Homo sapien
ccttggacccagtagatggagattg

SEQ ID NO: 3297790 - DNA, 25 bp, Homo sapien
tatcacaagaaagacgcccccgtga

SEQ ID NO: 3297791 - DNA, 25 bp, Homo sapien
actatcacaagaaagacgcccccgt

SEQ ID NO: 3297792 - DNA, 25 bp, Homo sapien
ccctgggtccgtcctacaacatggg

SEQ ID NO: 3297793 - DNA, 25 bp, Homo sapien
tgggtccgtcctacaacatgggaat

SEQ ID NO: 3297794 - DNA, 25 bp, Homo sapien
ctaggattgaacagttgcatttgaa

SEQ ID NO: 3297795 - DNA, 25 bp, Homo sapien
aagctgttgtacttaggtctgagga

SEQ ID NO: 3297796 - DNA, 25 bp, Homo sapien
tgcctagggtataatttatggagct

SEQ ID NO: 3297797 - DNA, 25 bp, Homo sapien
tctgaggacgtttgaggatactaac

SEQ ID NO: 3297798 - DNA, 25 bp, Homo sapien
taaatagatgcagtgctgacagtgc

SEQ ID NO: 3297799 - DNA, 25 bp, Homo sapien
tcagatgccgcagtatcagcaggct

SEQ ID NO: 3297800 - DNA, 25 bp, Homo sapien
gatgctagctcaacatcagccgtct

SEQ ID NO: 3297801 - DNA, 25 bp, Homo sapien
ctgacagtgctttaggactggagca

SEQ ID NO: 3297802 - DNA, 25 bp, Homo sapien
tgttgtttcacctatgaagccacag

SEQ ID NO: 3297803 - DNA, 25 bp, Homo sapien
tccttcagtgtagaataacagagct

SEQ ID NO: 3297804 - DNA, 25 bp, Homo sapien
tggctataagcatctgaatctgtag

SEQ ID NO: 3297805 - DNA, 25 bp, Homo sapien
caccattatccatataagcagcaga

SEQ ID NO: 3297806 - DNA, 25 bp, Homo sapien
tcattctgagtcagtctcttccatt

SEQ ID NO: 3297807 - DNA, 25 bp, Homo sapien
tttctcaccccctcttttctctgtc

SEQ ID NO: 3297808 - DNA, 25 bp, Homo sapien
ccatttgttctttctcaccccctct

SEQ ID NO: 3297809 - DNA, 25 bp, Homo sapien
ttctctgtcctcagtgctttataca

SEQ ID NO: 3297810 - DNA, 25 bp, Homo sapien
cgtttcatcttatttttgcagatag

SEQ ID NO: 3297811 - DNA, 25 bp, Homo sapien
tttttgcagataggctcgaggagag

SEQ ID NO: 3297812 - DNA, 25 bp, Homo sapien
tcctcagataagaatgtagactcac

SEQ ID NO: 3297813 - DNA, 25 bp, Homo sapien
catcttatttttgcagataggctcg

SEQ ID NO: 3297814 - DNA, 25 bp, Homo sapien
cataaccatcctccagaagatcctt

SEQ ID NO: 3297815 - DNA, 25 bp, Homo sapien
tttctgctccacataaccatcctcc

SEQ ID NO: 3297816 - DNA, 25 bp, Homo sapien
tgctccacataaccatcctccagaa

SEQ ID NO: 3297817 - DNA, 25 bp, Homo sapien
tccacataaccatcctccagaagat

SEQ ID NO: 3297818 - DNA, 25 bp, Homo sapien
cattcaggcaagttacacatgtaac

SEQ ID NO: 3297819 - DNA, 25 bp, Homo sapien
ttcaggcaagttacacatgtaacat

SEQ ID NO: 3297820 - DNA, 25 bp, Homo sapien
ttctcattcaggcaagttacacatg

SEQ ID NO: 3297821 - DNA, 25 bp, Homo sapien
ctcattcaggcaagttacacatgta

SEQ ID NO: 3297822 - DNA, 25 bp, Homo sapien
gtaactgtcggccatgttcttcagt

SEQ ID NO: 3297823 - DNA, 25 bp, Homo sapien
ggtaaaagttcgatatattcatggt

SEQ ID NO: 3297824 - DNA, 25 bp, Homo sapien
cttggcaaagggaaatatgttagaa

SEQ ID NO: 3297825 - DNA, 25 bp, Homo sapien
tactaggatggaataggatcgtgca

SEQ ID NO: 3297826 - DNA, 25 bp, Homo sapien
tgctgagtacattgaacagcttttc

SEQ ID NO: 3297827 - DNA, 25 bp, Homo sapien
ggatttctgctgagtacattgaaca

SEQ ID NO: 3297828 - DNA, 25 bp, Homo sapien
gagtgtttaggatttctgctgagta

SEQ ID NO: 3297829 - DNA, 25 bp, Homo sapien
gcttttcaacattcagacttgtttg

SEQ ID NO: 3297830 - DNA, 25 bp, Homo sapien
attgctttcatactccatatttttc

SEQ ID NO: 3297831 - DNA, 25 bp, Homo sapien
gggaacatagcttactgtgtctgtt

SEQ ID NO: 3297832 - DNA, 25 bp, Homo sapien
gtttacttattctgcataaatgtgt

SEQ ID NO: 3297833 - DNA, 25 bp, Homo sapien
gacataattaactggggaacatagc

SEQ ID NO: 3297834 - DNA, 25 bp, Homo sapien
tgcaaaatcagtggactcttcatga

SEQ ID NO: 3297835 - DNA, 25 bp, Homo sapien
tattgaaggctgctgatggattagg

SEQ ID NO: 3297836 - DNA, 25 bp, Homo sapien
attagggtgttggttgctgaaagaa

SEQ ID NO: 3297837 - DNA, 25 bp, Homo sapien
tacatttacgctatgctgtaatctg

SEQ ID NO: 3297838 - DNA, 25 bp, Homo sapien
cttggattgtggtaacttgcagcct

SEQ ID NO: 3297839 - DNA, 25 bp, Homo sapien
ggattgtggtaacttgcagcctgga

SEQ ID NO: 3297840 - DNA, 25 bp, Homo sapien
tggattgtggtaacttgcagcctgg

SEQ ID NO: 3297841 - DNA, 25 bp, Homo sapien
ttggattgtggtaacttgcagcctg

SEQ ID NO: 3297842 - DNA, 25 bp, Homo sapien
gaagaccttcaggaacacaactaga

SEQ ID NO: 3297843 - DNA, 25 bp, Homo sapien
cctttaatgagcatactccaggtga

SEQ ID NO: 3297844 - DNA, 25 bp, Homo sapien
gaggcagaatgcagagtgcaccatt

SEQ ID NO: 3297845 - DNA, 25 bp, Homo sapien
tgtcttctgaaaagtaatggtagcc

SEQ ID NO: 3297846 - DNA, 25 bp, Homo sapien
tgtcttacaacctgaggagagcctg

SEQ ID NO: 3297847 - DNA, 25 bp, Homo sapien
gccaaaggcgcacaaagcaggatat

SEQ ID NO: 3297848 - DNA, 25 bp, Homo sapien
tacctatcgcactccagagagggct

SEQ ID NO: 3297849 - DNA, 25 bp, Homo sapien
gggcctgagcgacatccgtgctgat

SEQ ID NO: 3297850 - DNA, 25 bp, Homo sapien
tctcaggttgattaatactgctaat

SEQ ID NO: 3297851 - DNA, 25 bp, Homo sapien
aaaatagattcaagtgatactttct

SEQ ID NO: 3297852 - DNA, 25 bp, Homo sapien
ctgctaatgcaaatgctcaagtaga

SEQ ID NO: 3297853 - DNA, 25 bp, Homo sapien
tgcaaatgctcaagtagatgtttaa

SEQ ID NO: 3297854 - DNA, 25 bp, Homo sapien
tacattcttataacacagcacagtg

SEQ ID NO: 3297855 - DNA, 25 bp, Homo sapien
gaccctttgacttataaattctgag

SEQ ID NO: 3297856 - DNA, 25 bp, Homo sapien
agctcagagaaaagatacaggattc

SEQ ID NO: 3297857 - DNA, 25 bp, Homo sapien
tctgacactgatgtagaccctttga

SEQ ID NO: 3297858 - DNA, 25 bp, Homo sapien
aagctcccaagatatgtgaaagtgc

SEQ ID NO: 3297859 - DNA, 25 bp, Homo sapien
taaaagtttggctctattatgggat

SEQ ID NO: 3297860 - DNA, 25 bp, Homo sapien
tcatggtcaaggtgtaggtcactcc

SEQ ID NO: 3297861 - DNA, 25 bp, Homo sapien
tattcccttgtgagaattatgagaa

SEQ ID NO: 3297862 - DNA, 25 bp, Homo sapien
cccctgtgcttctttaggatgtagt

SEQ ID NO: 3297863 - DNA, 25 bp, Homo sapien
tagttacgacattatccggatttgc

SEQ ID NO: 3297864 - DNA, 25 bp, Homo sapien
tgtacgtgttgggtatagttacgac

SEQ ID NO: 3297865 - DNA, 25 bp, Homo sapien
gaggccaaagttgtttcttaacagc

SEQ ID NO: 3297866 - DNA, 25 bp, Homo sapien
ggaaaatctaaggtggagcccactc

SEQ ID NO: 3297867 - DNA, 25 bp, Homo sapien
aagttcaccaggcagagcagttttc

SEQ ID NO: 3297868 - DNA, 25 bp, Homo sapien
ttttcttacaagtcagctactctgc

SEQ ID NO: 3297869 - DNA, 25 bp, Homo sapien
gtttaagagtgatagactgttgtcc

SEQ ID NO: 3297870 - DNA, 25 bp, Homo sapien
cactcctagtgagggtttacaaaag

SEQ ID NO: 3297871 - DNA, 25 bp, Homo sapien
cttcagtcctcaaatatagctggga

SEQ ID NO: 3297872 - DNA, 25 bp, Homo sapien
tatcactagttttgaggcgcttggg

SEQ ID NO: 3297873 - DNA, 25 bp, Homo sapien
gcatgtcacatctctctactgtgga

SEQ ID NO: 3297874 - DNA, 25 bp, Homo sapien
ctgccaaatggagagttgtacagtt

SEQ ID NO: 3297875 - DNA, 25 bp, Homo sapien
caggtgggatgccataagatgtgac

SEQ ID NO: 3297876 - DNA, 25 bp, Homo sapien
caaatcggatattctgtccaggtgg

SEQ ID NO: 3297877 - DNA, 25 bp, Homo sapien
tacagttttacggaagtcaatcaca

SEQ ID NO: 3297878 - DNA, 25 bp, Homo sapien
tacaaggctcagatttgtagacaac

SEQ ID NO: 3297879 - DNA, 25 bp, Homo sapien
catatactaatacagggactgcaaa

SEQ ID NO: 3297880 - DNA, 25 bp, Homo sapien
tgtcatgcagcttactgaattgcag

SEQ ID NO: 3297881 - DNA, 25 bp, Homo sapien
tcttaaatgagttaaccacaaccat

SEQ ID NO: 3297882 - DNA, 25 bp, Homo sapien
taacacatgcagaaaccgaggacca

SEQ ID NO: 3297883 - DNA, 25 bp, Homo sapien
taaggttcatttcagggtcaagaca

SEQ ID NO: 3297884 - DNA, 25 bp, Homo sapien
gtattcctttactgagcctcctggg

SEQ ID NO: 3297885 - DNA, 25 bp, Homo sapien
catcataacgatgggtaagacacgg

SEQ ID NO: 3297886 - DNA, 25 bp, Homo sapien
tgtgaaacatagtcaggacaaggct

SEQ ID NO: 3297887 - DNA, 25 bp, Homo sapien
aatgtgaaacatagtcaggacaagg

SEQ ID NO: 3297888 - DNA, 25 bp, Homo sapien
caaatgtgaaacatagtcaggacaa

SEQ ID NO: 3297889 - DNA, 25 bp, Homo sapien
tcacaaatgtgaaacatagtcagga

SEQ ID NO: 3297890 - DNA, 25 bp, Homo sapien
tgtctgtactgcatgacatacactg

SEQ ID NO: 3297891 - DNA, 25 bp, Homo sapien
tatgccatatttggtggcttgatcc

SEQ ID NO: 3297892 - DNA, 25 bp, Homo sapien
cttgatccgaggtagtttagttgtc

SEQ ID NO: 3297893 - DNA, 25 bp, Homo sapien
caatataacatcactactgcaagga

SEQ ID NO: 3297894 - DNA, 25 bp, Homo sapien
taatcacatagagaattttcatggt

SEQ ID NO: 3297895 - DNA, 25 bp, Homo sapien
taaggcctaaaacccactatggtca

SEQ ID NO: 3297896 - DNA, 25 bp, Homo sapien
gtttagtgttctacttgtcttgcta

SEQ ID NO: 3297897 - DNA, 25 bp, Homo sapien
tcatggtttagtgttctacttgtct

SEQ ID NO: 3297898 - DNA, 25 bp, Homo sapien
ggcatgtcctagatctgttcccaaa

SEQ ID NO: 3297899 - DNA, 25 bp, Homo sapien
caaatcctcatgtttacaacgcagg

SEQ ID NO: 3297900 - DNA, 25 bp, Homo sapien
tctgtgggatggattgtttaggcca

SEQ ID NO: 3297901 - DNA, 25 bp, Homo sapien
cattcttatttaaagctcagtggtg

SEQ ID NO: 3297902 - DNA, 25 bp, Homo sapien
tcccaacacacgtgacgagtggtac

SEQ ID NO: 3297903 - DNA, 25 bp, Homo sapien
cacacgtgacgagtggtacaatccc

SEQ ID NO: 3297904 - DNA, 25 bp, Homo sapien
cgtgacgagtggtacaatcccttct

SEQ ID NO: 3297905 - DNA, 25 bp, Homo sapien
cgagtggtacaatcccttctctgat

SEQ ID NO: 3297906 - DNA, 25 bp, Homo sapien
gactcatagctctccaaactgaaaa

SEQ ID NO: 3297907 - DNA, 25 bp, Homo sapien
tatttctgacccatgccaaaactta

SEQ ID NO: 3297908 - DNA, 25 bp, Homo sapien
tttcacttataagaccagggctggg

SEQ ID NO: 3297909 - DNA, 25 bp, Homo sapien
cctggatttgcatcactttgtctct

SEQ ID NO: 3297910 - DNA, 25 bp, Homo sapien
gaaagtggttgatgtgggtcttgaa

SEQ ID NO: 3297911 - DNA, 25 bp, Homo sapien
aaagtggttgatgtgggtcttgaac

SEQ ID NO: 3297912 - DNA, 25 bp, Homo sapien
cccacgtaactagaaagtggttgat

SEQ ID NO: 3297913 - DNA, 25 bp, Homo sapien
agcccacgtaactagaaagtggttg

SEQ ID NO: 3297914 - DNA, 25 bp, Homo sapien
ttggagactgttgttcactccaccc

SEQ ID NO: 3297915 - DNA, 25 bp, Homo sapien
tttggagactgttgttcactccacc

SEQ ID NO: 3297916 - DNA, 25 bp, Homo sapien
ttttggagactgttgttcactccac

SEQ ID NO: 3297917 - DNA, 25 bp, Homo sapien
tggagactgttgttcactccaccca

SEQ ID NO: 3297918 - DNA, 25 bp, Homo sapien
atatacatcacaattacacggggtg

SEQ ID NO: 3297919 - DNA, 25 bp, Homo sapien
tacatcacaattacacggggtgcaa

SEQ ID NO: 3297920 - DNA, 25 bp, Homo sapien
catcacaattacacggggtgcaaag

SEQ ID NO: 3297921 - DNA, 25 bp, Homo sapien
ctggaaagtaccgctctgggacttt

SEQ ID NO: 3297922 - DNA, 25 bp, Homo sapien
tgagaatcatcatagccctccctaa

SEQ ID NO: 3297923 - DNA, 25 bp, Homo sapien
taaaattcactgacttaatgggtct

SEQ ID NO: 3297924 - DNA, 25 bp, Homo sapien
gcttcctcaccggaatgatctgtga

SEQ ID NO: 3297925 - DNA, 25 bp, Homo sapien
ttctagaacacaacttgatcttgcc

SEQ ID NO: 3297926 - DNA, 25 bp, Homo sapien
tgccaggatcatagcaagcactgtg

SEQ ID NO: 3297927 - DNA, 25 bp, Homo sapien
gaatctgcgcaaagaacactgccag

SEQ ID NO: 3297928 - DNA, 25 bp, Homo sapien
tgtgatcaagtacacctgacgccag

SEQ ID NO: 3297929 - DNA, 25 bp, Homo sapien
caaacccagtgaagagtaggaatca

SEQ ID NO: 3297930 - DNA, 25 bp, Homo sapien
catagcagcccagtattccaataga

SEQ ID NO: 3297931 - DNA, 25 bp, Homo sapien
ataaaatgcgtaaaatactcctgag

SEQ ID NO: 3297932 - DNA, 25 bp, Homo sapien
catcttcgacatgttttttctgacc

SEQ ID NO: 3297933 - DNA, 25 bp, Homo sapien
gaaattcctgcataatctaatgcca

SEQ ID NO: 3297934 - DNA, 25 bp, Homo sapien
gatattcagggaagtagttaagagg

SEQ ID NO: 3297935 - DNA, 25 bp, Homo sapien
aactaaagcaacttatgcatgatat

SEQ ID NO: 3297936 - DNA, 25 bp, Homo sapien
caacttatgcatgatattcagggaa

SEQ ID NO: 3297937 - DNA, 25 bp, Homo sapien
tatgcatgatattcagggaagtagt

SEQ ID NO: 3297938 - DNA, 25 bp, Homo sapien
tgttatgaaaatcaataagctgacc

SEQ ID NO: 3297939 - DNA, 25 bp, Homo sapien
aatcaataagctgaccaacatgcca

SEQ ID NO: 3297940 - DNA, 25 bp, Homo sapien
ctcataagaacacatcgtttggtgt

SEQ ID NO: 3297941 - DNA, 25 bp, Homo sapien
agaacacatcgtttggtgtttatgt

SEQ ID NO: 3297942 - DNA, 25 bp, Homo sapien
ctgcctgtcaaaaagttctctttac

SEQ ID NO: 3297943 - DNA, 25 bp, Homo sapien
ctttaccaacagcagtatttgtgaa

SEQ ID NO: 3297944 - DNA, 25 bp, Homo sapien
gcctgtcaaaaagttctctttacca

SEQ ID NO: 3297945 - DNA, 25 bp, Homo sapien
tcaaaaagttctctttaccaacagc

SEQ ID NO: 3297946 - DNA, 25 bp, Homo sapien
aatcttctctggacgcacttgctga

SEQ ID NO: 3297947 - DNA, 25 bp, Homo sapien
tacaaaatcttctctggacgcactt

SEQ ID NO: 3297948 - DNA, 25 bp, Homo sapien
aattacaaaatcttctctggacgca

SEQ ID NO: 3297949 - DNA, 25 bp, Homo sapien
tctctggacgcacttgctgaaggta

SEQ ID NO: 3297950 - DNA, 25 bp, Homo sapien
catctttatgacactactgttcaca

SEQ ID NO: 3297951 - DNA, 25 bp, Homo sapien
taatggtcagtaccattcatcttta

SEQ ID NO: 3297952 - DNA, 25 bp, Homo sapien
ttccagcctatcaattccctaatgg

SEQ ID NO: 3297953 - DNA, 25 bp, Homo sapien
tgctcacctctattatcatacttac

SEQ ID NO: 3297954 - DNA, 25 bp, Homo sapien
atctgctcgtaggtgtacaggcgga

SEQ ID NO: 3297955 - DNA, 25 bp, Homo sapien
ctcgtaggtgtacaggcggatgcca

SEQ ID NO: 3297956 - DNA, 25 bp, Homo sapien
gctcgatgtaatgcgcgctcttcag

SEQ ID NO: 3297957 - DNA, 25 bp, Homo sapien
ccaggaccggccagtactggtagct

SEQ ID NO: 3297958 - DNA, 25 bp, Homo sapien
gggagggggcttcgccgctggcgcc

SEQ ID NO: 3297959 - DNA, 25 bp, Homo sapien
ggagcccgcggacgctgcgcgaggt

SEQ ID NO: 3297960 - DNA, 25 bp, Homo sapien
ggacgctgcgcgaggtcctaccgcg

SEQ ID NO: 3297961 - DNA, 25 bp, Homo sapien
tgcgcgaggtcctaccgcgctgccg

SEQ ID NO: 3297962 - DNA, 25 bp, Homo sapien
tgataggtggagatcgacagcatcc

SEQ ID NO: 3297963 - DNA, 25 bp, Homo sapien
cagcatccagcaggagactttggtg

SEQ ID NO: 3297964 - DNA, 25 bp, Homo sapien
gactttggtgcctcttgaagtggca

SEQ ID NO: 3297965 - DNA, 25 bp, Homo sapien
ggaaaatggtagcaccctatcatga

SEQ ID NO: 3297966 - DNA, 25 bp, Homo sapien
tgggtgggccactgttcatcaggct

SEQ ID NO: 3297967 - DNA, 25 bp, Homo sapien
cccagggtgattgagcctgtcgaga

SEQ ID NO: 3297968 - DNA, 25 bp, Homo sapien
aatctgactggttcctgggtgggcc

SEQ ID NO: 3297969 - DNA, 25 bp, Homo sapien
cctgtcgagatgaatagctggtgaa

SEQ ID NO: 3297970 - DNA, 25 bp, Homo sapien
cagctagcgctgagtacaggccttc

SEQ ID NO: 3297971 - DNA, 25 bp, Homo sapien
tagcgctgagtacaggccttcggaa

SEQ ID NO: 3297972 - DNA, 25 bp, Homo sapien
gcgctgagtacaggccttcggaaac

SEQ ID NO: 3297973 - DNA, 25 bp, Homo sapien
ccacagctagcgctgagtacaggcc

SEQ ID NO: 3297974 - DNA, 25 bp, Homo sapien
gattgtttaagatctgatccagtgt

SEQ ID NO: 3297975 - DNA, 25 bp, Homo sapien
cttcctcagaggagaattcctcgaa

SEQ ID NO: 3297976 - DNA, 25 bp, Homo sapien
tagcaagcaatgattgtttaagatc

SEQ ID NO: 3297977 - DNA, 25 bp, Homo sapien
tcagaggagaattcctcgaatcctc

SEQ ID NO: 3297978 - DNA, 25 bp, Homo sapien
tccatggtatgcataagttcctgaa

SEQ ID NO: 3297979 - DNA, 25 bp, Homo sapien
ggtatgcataagttcctgaaaggac

SEQ ID NO: 3297980 - DNA, 25 bp, Homo sapien
cttccatggtatgcataagttcctg

SEQ ID NO: 3297981 - DNA, 25 bp, Homo sapien
catggtatgcataagttcctgaaag

SEQ ID NO: 3297982 - DNA, 25 bp, Homo sapien
gctgtaaatcttggtgacacttcag

SEQ ID NO: 3297983 - DNA, 25 bp, Homo sapien
aatgttcctctgaaaagggaacttg

SEQ ID NO: 3297984 - DNA, 25 bp, Homo sapien
gaaaggattctagtatttatctgcc

SEQ ID NO: 3297985 - DNA, 25 bp, Homo sapien
caaagttgtcttcatgtacctgcag

SEQ ID NO: 3297986 - DNA, 25 bp, Homo sapien
ctttgaaaagtcagcagtgtctgac

SEQ ID NO: 3297987 - DNA, 25 bp, Homo sapien
gataactttgaaaagtcagcagtgt

SEQ ID NO: 3297988 - DNA, 25 bp, Homo sapien
gaagttgtaaggtgataactttgaa

SEQ ID NO: 3297989 - DNA, 25 bp, Homo sapien
atccggaagcttaatttggaagttg

SEQ ID NO: 3297990 - DNA, 25 bp, Homo sapien
tgaacttcttaatatagcatcccag

SEQ ID NO: 3297991 - DNA, 25 bp, Homo sapien
cacagacagtactaaccagccgtag

SEQ ID NO: 3297992 - DNA, 25 bp, Homo sapien
tactaaccagccgtaggcttcccat

SEQ ID NO: 3297993 - DNA, 25 bp, Homo sapien
gaattagactgaacactctgtcaca

SEQ ID NO: 3297994 - DNA, 25 bp, Homo sapien
cctacctggacttggatagatgtct

SEQ ID NO: 3297995 - DNA, 25 bp, Homo sapien
caggacactgccttacaacagcatc

SEQ ID NO: 3297996 - DNA, 25 bp, Homo sapien
cctggtgacttataaaaatgaaggc

SEQ ID NO: 3297997 - DNA, 25 bp, Homo sapien
tcccactctgttttgatgatcctct

SEQ ID NO: 3297998 - DNA, 25 bp, Homo sapien
gtcattctcaatcggacattcacat

SEQ ID NO: 3297999 - DNA, 25 bp, Homo sapien
cattctcaatcggacattcacattt

SEQ ID NO: 3298000 - DNA, 25 bp, Homo sapien
ctgtcattctcaatcggacattcac

SEQ ID NO: 3298001 - DNA, 25 bp, Homo sapien
tctcaatcggacattcacatttagc

SEQ ID NO: 3298002 - DNA, 25 bp, Homo sapien
tataaaacttctcaagccagtccac

SEQ ID NO: 3298003 - DNA, 25 bp, Homo sapien
ggaacaattataaaacttctcaagc

SEQ ID NO: 3298004 - DNA, 25 bp, Homo sapien
taaaacttctcaagccagtccacat

SEQ ID NO: 3298005 - DNA, 25 bp, Homo sapien
attataaaacttctcaagccagtcc

SEQ ID NO: 3298006 - DNA, 25 bp, Homo sapien
taaaagggcatcttggcagaggcat

SEQ ID NO: 3298007 - DNA, 25 bp, Homo sapien
ttttcagaccaattttattacagag

SEQ ID NO: 3298008 - DNA, 25 bp, Homo sapien
attttcagaccaattttattacaga

SEQ ID NO: 3298009 - DNA, 25 bp, Homo sapien
gattttcagaccaattttattacag

SEQ ID NO: 3298010 - DNA, 25 bp, Homo sapien
ccaacttgagctttcagtgcagcaa

SEQ ID NO: 3298011 - DNA, 25 bp, Homo sapien
caatgtcagtagactgcatggtctg

SEQ ID NO: 3298012 - DNA, 25 bp, Homo sapien
taacgtggatatctctctgcatctc

SEQ ID NO: 3298013 - DNA, 25 bp, Homo sapien
ggcaagcttatcttttgtacattct

SEQ ID NO: 3298014 - DNA, 25 bp, Homo sapien
cttgctcatgctcatcctgcacaat

SEQ ID NO: 3298015 - DNA, 25 bp, Homo sapien
cacaatttctagcatttggagaatg

SEQ ID NO: 3298016 - DNA, 25 bp, Homo sapien
catcctgcacaatttctagcatttg

SEQ ID NO: 3298017 - DNA, 25 bp, Homo sapien
atttctagcatttggagaatgtttc

SEQ ID NO: 3298018 - DNA, 25 bp, Homo sapien
aaatcccaatgttcaggatagtcaa

SEQ ID NO: 3298019 - DNA, 25 bp, Homo sapien
gcagtgatgtacttagcaaagctgc

SEQ ID NO: 3298020 - DNA, 25 bp, Homo sapien
taaaacaagcagtgatgtacttagc

SEQ ID NO: 3298021 - DNA, 25 bp, Homo sapien
ttcaggatagtcaatctgtcatctg

SEQ ID NO: 3298022 - DNA, 25 bp, Homo sapien
gacgatgtccttacaattggaggat

SEQ ID NO: 3298023 - DNA, 25 bp, Homo sapien
ctaggatggacgatgtccttacaat

SEQ ID NO: 3298024 - DNA, 25 bp, Homo sapien
tgtccttacaattggaggatgagct

SEQ ID NO: 3298025 - DNA, 25 bp, Homo sapien
tggacgatgtccttacaattggagg

SEQ ID NO: 3298026 - DNA, 25 bp, Homo sapien
cagagtttgtgactgcggtggtctc

SEQ ID NO: 3298027 - DNA, 25 bp, Homo sapien
cacactggcgtggtttattaattga

SEQ ID NO: 3298028 - DNA, 25 bp, Homo sapien
tgcgcccgcggttgagcaatgatct

SEQ ID NO: 3298029 - DNA, 25 bp, Homo sapien
gatttccggttcagttcaccctgcg

SEQ ID NO: 3298030 - DNA, 25 bp, Homo sapien
caaaggtttactctgtaacagctgt

SEQ ID NO: 3298031 - DNA, 25 bp, Homo sapien
ctggcgggagaggagagcttgtctg

SEQ ID NO: 3298032 - DNA, 25 bp, Homo sapien
gaggtgacacagatcaatacctttg

SEQ ID NO: 3298033 - DNA, 25 bp, Homo sapien
ttgatggaaagtaataatcaggcct

SEQ ID NO: 3298034 - DNA, 25 bp, Homo sapien
gagcctacactcagttatctgcagc

SEQ ID NO: 3298035 - DNA, 25 bp, Homo sapien
gggcacagatggtccgcattcagag

SEQ ID NO: 3298036 - DNA, 25 bp, Homo sapien
cagagcagcacgagtgtgaagaaag

SEQ ID NO: 3298037 - DNA, 25 bp, Homo sapien
tccgcattcagagcagcacgagtgt

SEQ ID NO: 3298038 - DNA, 25 bp, Homo sapien
tcccattgcacatctcaattatctg

SEQ ID NO: 3298039 - DNA, 25 bp, Homo sapien
ccattgcacatctcaattatctggg

SEQ ID NO: 3298040 - DNA, 25 bp, Homo sapien
tcatgttttcccattgcacatctca

SEQ ID NO: 3298041 - DNA, 25 bp, Homo sapien
gttttcccattgcacatctcaatta

SEQ ID NO: 3298042 - DNA, 25 bp, Homo sapien
tgataactcttatctgcctaatatc

SEQ ID NO: 3298043 - DNA, 25 bp, Homo sapien
cggagacagatcatttctgtacaga

SEQ ID NO: 3298044 - DNA, 25 bp, Homo sapien
tgtttcttgtatggaaatacttcac

SEQ ID NO: 3298045 - DNA, 25 bp, Homo sapien
gtgtttcttgtatggaaatacttca

SEQ ID NO: 3298046 - DNA, 25 bp, Homo sapien
agtgtttcttgtatggaaatacttc

SEQ ID NO: 3298047 - DNA, 25 bp, Homo sapien
gtttcttgtatggaaatacttcacg

SEQ ID NO: 3298048 - DNA, 25 bp, Homo sapien
cttgaactttgaagatccatcttga

SEQ ID NO: 3298049 - DNA, 25 bp, Homo sapien
gtatgatacggccatctcttttgca

SEQ ID NO: 3298050 - DNA, 25 bp, Homo sapien
tattgcctcttccatgcttgaactc

SEQ ID NO: 3298051 - DNA, 25 bp, Homo sapien
tccatcttgagagtatgatacggcc

SEQ ID NO: 3298052 - DNA, 25 bp, Homo sapien
tgagggtccagatctgtgcaaagag

SEQ ID NO: 3298053 - DNA, 25 bp, Homo sapien
caaagagttctactgcaaataggca

SEQ ID NO: 3298054 - DNA, 25 bp, Homo sapien
tttatgggcaagtgccttgaactgc

SEQ ID NO: 3298055 - DNA, 25 bp, Homo sapien
tctgcatgagtgaataagggctgag

SEQ ID NO: 3298056 - DNA, 25 bp, Homo sapien
gtgtaaaagtttgtgctttagatct

SEQ ID NO: 3298057 - DNA, 25 bp, Homo sapien
gggatccattgcatggatccaaaca

SEQ ID NO: 3298058 - DNA, 25 bp, Homo sapien
gcatggatccaaacaatggatccaa

SEQ ID NO: 3298059 - DNA, 25 bp, Homo sapien
ttccacttcagcattgagtgggtgt

SEQ ID NO: 3298060 - DNA, 25 bp, Homo sapien
tcagcattgagtgggtgtaatagga

SEQ ID NO: 3298061 - DNA, 25 bp, Homo sapien
ctatatgtccgtcttcatgctggta

SEQ ID NO: 3298062 - DNA, 25 bp, Homo sapien
tatgtccgtcttcatgctggtacta

SEQ ID NO: 3298063 - DNA, 25 bp, Homo sapien
gtccgtcttcatgctggtactatgc

SEQ ID NO: 3298064 - DNA, 25 bp, Homo sapien
tggtctatatgtccgtcttcatgct

SEQ ID NO: 3298065 - DNA, 25 bp, Homo sapien
tcaaatttatgaacgtaggatgtgt

SEQ ID NO: 3298066 - DNA, 25 bp, Homo sapien
gtagtttgctttccttctagtgtca

SEQ ID NO: 3298067 - DNA, 25 bp, Homo sapien
ctttattattaggatacagaacaca

SEQ ID NO: 3298068 - DNA, 25 bp, Homo sapien
tgtttcaaggtttatgtgtttcacc

SEQ ID NO: 3298069 - DNA, 25 bp, Homo sapien
tgtgtcctttgcagtgacatcgatg

SEQ ID NO: 3298070 - DNA, 25 bp, Homo sapien
attgtgtcctttgcagtgacatcga

SEQ ID NO: 3298071 - DNA, 25 bp, Homo sapien
agattgtgtcctttgcagtgacatc

SEQ ID NO: 3298072 - DNA, 25 bp, Homo sapien
acggaaggagattgtgtcctttgca

SEQ ID NO: 3298073 - DNA, 25 bp, Homo sapien
ctgaacaccagtaataaggttgtca

SEQ ID NO: 3298074 - DNA, 25 bp, Homo sapien
tgaacaccagtaataaggttgtcat

SEQ ID NO: 3298075 - DNA, 25 bp, Homo sapien
aagttctcaaatgggtgatctggta

SEQ ID NO: 3298076 - DNA, 25 bp, Homo sapien
agttctcaaatgggtgatctggtat

SEQ ID NO: 3298077 - DNA, 25 bp, Homo sapien
tatgaacgtaattgtgtgcttgcac

SEQ ID NO: 3298078 - DNA, 25 bp, Homo sapien
cacaggcacaccacacggagggaac

SEQ ID NO: 3298079 - DNA, 25 bp, Homo sapien
aggtatgattgtattgcctgctgcc

SEQ ID NO: 3298080 - DNA, 25 bp, Homo sapien
gcctgctgccatgccaattactgga

SEQ ID NO: 3298081 - DNA, 25 bp, Homo sapien
cccacattgtgccaaagtgcccttg

SEQ ID NO: 3298082 - DNA, 25 bp, Homo sapien
tgtttatgttgacaaccaccgcccc

SEQ ID NO: 3298083 - DNA, 25 bp, Homo sapien
tctatgtggagatatttcaggtcag

SEQ ID NO: 3298084 - DNA, 25 bp, Homo sapien
tgttaaaggttgaatatggtctatg

SEQ ID NO: 3298085 - DNA, 25 bp, Homo sapien
ggttcccatgctcagaatatcagtg

SEQ ID NO: 3298086 - DNA, 25 bp, Homo sapien
tgctcagaatatcagtgtccttact

SEQ ID NO: 3298087 - DNA, 25 bp, Homo sapien
cttactgcaggggtgtataagctca

SEQ ID NO: 3298088 - DNA, 25 bp, Homo sapien
gcaggggtgtataagctcagatctc

SEQ ID NO: 3298089 - DNA, 25 bp, Homo sapien
tacccaaattctatgcaacctgcag

SEQ ID NO: 3298090 - DNA, 25 bp, Homo sapien
gcatgcaattctggcatgagcaggg

SEQ ID NO: 3298091 - DNA, 25 bp, Homo sapien
atgaagagggatctgcaagtgtaac

SEQ ID NO: 3298092 - DNA, 25 bp, Homo sapien
tttctctatggcaaatggcatgcaa

SEQ ID NO: 3298093 - DNA, 25 bp, Homo sapien
gatctcccgttaaaaagctgccggc

SEQ ID NO: 3298094 - DNA, 25 bp, Homo sapien
gctgccggcaaactggtcaattgtc

SEQ ID NO: 3298095 - DNA, 25 bp, Homo sapien
tattttaccatagcatcaccagagt

SEQ ID NO: 3298096 - DNA, 25 bp, Homo sapien
cattccttaggttgtgctgtctcag

SEQ ID NO: 3298097 - DNA, 25 bp, Homo sapien
cacttgctgactgtcaaaaagaccc

SEQ ID NO: 3298098 - DNA, 25 bp, Homo sapien
cctggactgccactagctgtctttt

SEQ ID NO: 3298099 - DNA, 25 bp, Homo sapien
tgtattgcttctaaacacttgctga

SEQ ID NO: 3298100 - DNA, 25 bp, Homo sapien
tctagaagaagccatgagcaggttc

SEQ ID NO: 3298101 - DNA, 25 bp, Homo sapien
caggtctagctgcaattgtgtctgc

SEQ ID NO: 3298102 - DNA, 25 bp, Homo sapien
ttcaactcacttgtactatggaggg

SEQ ID NO: 3298103 - DNA, 25 bp, Homo sapien
agctctagttccctgcctaccagtt

SEQ ID NO: 3298104 - DNA, 25 bp, Homo sapien
ttggaagtgcatttctggcttgcca

SEQ ID NO: 3298105 - DNA, 25 bp, Homo sapien
ggtacagtgtacatagagtcccgct

SEQ ID NO: 3298106 - DNA, 25 bp, Homo sapien
agattatccaaaccccaacaagaag

SEQ ID NO: 3298107 - DNA, 25 bp, Homo sapien
tggcatctgactaggccattttggg

SEQ ID NO: 3298108 - DNA, 25 bp, Homo sapien
tctgttttaatgtgaggatcttgga

SEQ ID NO: 3298109 - DNA, 25 bp, Homo sapien
tctagagcctctactggaacgggtt

SEQ ID NO: 3298110 - DNA, 25 bp, Homo sapien
caagcaatgagaggtcagccgagat

SEQ ID NO: 3298111 - DNA, 25 bp, Homo sapien
tcttaggaattaggcccagaactgg

SEQ ID NO: 3298112 - DNA, 25 bp, Homo sapien
tggtgggccccttggagataagcta

SEQ ID NO: 3298113 - DNA, 25 bp, Homo sapien
ccttgacaacttgtgatggtgacca

SEQ ID NO: 3298114 - DNA, 25 bp, Homo sapien
ggatatctgaaggtgacacatgctg

SEQ ID NO: 3298115 - DNA, 25 bp, Homo sapien
tgcaaagccatgaagaatccatatg

SEQ ID NO: 3298116 - DNA, 25 bp, Homo sapien
ggaattctggcagcctctatcttgg

SEQ ID NO: 3298117 - DNA, 25 bp, Homo sapien
gatatctgcttggataaactttgga

SEQ ID NO: 3298118 - DNA, 25 bp, Homo sapien
tggtattacgattgaagatatctgc

SEQ ID NO: 3298119 - DNA, 25 bp, Homo sapien
tctcagccgttctcagtgcatatgg

SEQ ID NO: 3298120 - DNA, 25 bp, Homo sapien
ccacctggacctgtgataataaaca

SEQ ID NO: 3298121 - DNA, 25 bp, Homo sapien
ggcccttgccagatgtcaccacctt

SEQ ID NO: 3298122 - DNA, 25 bp, Homo sapien
tgtaaatcactcagtctgtggcatt

SEQ ID NO: 3298123 - DNA, 25 bp, Homo sapien
ccttgccagatgtcaccaccttgat

SEQ ID NO: 3298124 - DNA, 25 bp, Homo sapien
taagtgtaaatcactcagtctgtgg

SEQ ID NO: 3298125 - DNA, 25 bp, Homo sapien
tctgattttgacataatccaaatac

SEQ ID NO: 3298126 - DNA, 25 bp, Homo sapien
ggtctctgattttgacataatccaa

SEQ ID NO: 3298127 - DNA, 25 bp, Homo sapien
tctctgattttgacataatccaaat

SEQ ID NO: 3298128 - DNA, 25 bp, Homo sapien
ctgattttgacataatccaaatact

SEQ ID NO: 3298129 - DNA, 25 bp, Homo sapien
cacagtgttagaaacaggtacaggc

SEQ ID NO: 3298130 - DNA, 25 bp, Homo sapien
gaaaattgccagtgacacagtgtta

SEQ ID NO: 3298131 - DNA, 25 bp, Homo sapien
gtgatttgagaacccctcttgagcc

SEQ ID NO: 3298132 - DNA, 25 bp, Homo sapien
tcttgagccccttgccctagtatct

SEQ ID NO: 3298133 - DNA, 25 bp, Homo sapien
catgtcccacgtgatgcactaagaa

SEQ ID NO: 3298134 - DNA, 25 bp, Homo sapien
tccccagactggcagtggtacctca

SEQ ID NO: 3298135 - DNA, 25 bp, Homo sapien
ccccagactggcagtggtacctcat

SEQ ID NO: 3298136 - DNA, 25 bp, Homo sapien
ctgtccccagactggcagtggtacc

SEQ ID NO: 3298137 - DNA, 25 bp, Homo sapien
ctctgtcatagtagcagtcgcctgt

SEQ ID NO: 3298138 - DNA, 25 bp, Homo sapien
catagtagcagtcgcctgtcttcat

SEQ ID NO: 3298139 - DNA, 25 bp, Homo sapien
aaaatcctcattaatgtatgctggc

SEQ ID NO: 3298140 - DNA, 25 bp, Homo sapien
gaaggaagattgcactaacattagc

SEQ ID NO: 3298141 - DNA, 25 bp, Homo sapien
gatgagttagtactgctgcctgtgc

SEQ ID NO: 3298142 - DNA, 25 bp, Homo sapien
tactatagatcattccgagaggagg

SEQ ID NO: 3298143 - DNA, 25 bp, Homo sapien
taatcccaatattgaggtataatct

SEQ ID NO: 3298144 - DNA, 25 bp, Homo sapien
atcccaatattgaggtataatcttc

SEQ ID NO: 3298145 - DNA, 25 bp, Homo sapien
cccaatattgaggtataatcttcat

SEQ ID NO: 3298146 - DNA, 25 bp, Homo sapien
atcataatcccaatattgaggtata

SEQ ID NO: 3298147 - DNA, 25 bp, Homo sapien
gctagcagacctgagcacatccagt

SEQ ID NO: 3298148 - DNA, 25 bp, Homo sapien
gctttctcctggtacgagactggga

SEQ ID NO: 3298149 - DNA, 25 bp, Homo sapien
gctaaatcaccgctactgtcctgga

SEQ ID NO: 3298150 - DNA, 25 bp, Homo sapien
tgtgcctcagtaaaaagtcccttca

SEQ ID NO: 3298151 - DNA, 25 bp, Homo sapien
tatgtaactaatgaaggctccagca

SEQ ID NO: 3298152 - DNA, 25 bp, Homo sapien
gtactcaataaatgccaagtgacat

SEQ ID NO: 3298153 - DNA, 25 bp, Homo sapien
tatttacaattgacatacagtagcc

SEQ ID NO: 3298154 - DNA, 25 bp, Homo sapien
cagaggtcaaggtactttgtcttca

SEQ ID NO: 3298155 - DNA, 25 bp, Homo sapien
ctgtaatggcaggtctcaaagttcc

SEQ ID NO: 3298156 - DNA, 25 bp, Homo sapien
cagacagactaagccagggttcaca

SEQ ID NO: 3298157 - DNA, 25 bp, Homo sapien
cagcgtagtgtgagtaggccaagaa

SEQ ID NO: 3298158 - DNA, 25 bp, Homo sapien
gactacttcacctcctcaaggatga

SEQ ID NO: 3298159 - DNA, 25 bp, Homo sapien
ctaggaggtggaatccgagctttct

SEQ ID NO: 3298160 - DNA, 25 bp, Homo sapien
tgagctgtcctggacgttggtgctc

SEQ ID NO: 3298161 - DNA, 25 bp, Homo sapien
gtcctggacgttggtgctctccaca

SEQ ID NO: 3298162 - DNA, 25 bp, Homo sapien
gactccttaggttctttgctgtcac

SEQ ID NO: 3298163 - DNA, 25 bp, Homo sapien
tggccatgcgggacatcatctggtt

SEQ ID NO: 3298164 - DNA, 25 bp, Homo sapien
tgtgaacgcttcacggccagtgagg

SEQ ID NO: 3298165 - DNA, 25 bp, Homo sapien
caggtccatttgtcgtctcagctca

SEQ ID NO: 3298166 - DNA, 25 bp, Homo sapien
tattcatcaggtcgtctggctgagc

SEQ ID NO: 3298167 - DNA, 25 bp, Homo sapien
atggcagagggtagggaaccggttg

SEQ ID NO: 3298168 - DNA, 25 bp, Homo sapien
gaagaggctgtcgccgaccttaagg

SEQ ID NO: 3298169 - DNA, 25 bp, Homo sapien
gggctaacaccaccgggctgaatcg

SEQ ID NO: 3298170 - DNA, 25 bp, Homo sapien
tttgcctcaggaatcgagtccaggg

SEQ ID NO: 3298171 - DNA, 25 bp, Homo sapien
tgaatcgtgtggagggcggatggcg

SEQ ID NO: 3298172 - DNA, 25 bp, Homo sapien
atttattgcttctgtaaacgagagc

SEQ ID NO: 3298173 - DNA, 25 bp, Homo sapien
taaacgagagccagtagagggaagc

SEQ ID NO: 3298174 - DNA, 25 bp, Homo sapien
tctgtaaacgagagccagtagaggg

SEQ ID NO: 3298175 - DNA, 25 bp, Homo sapien
taattatatcccgaagtaatggctg

SEQ ID NO: 3298176 - DNA, 25 bp, Homo sapien
gctgggcagagttatcatcaatgct

SEQ ID NO: 3298177 - DNA, 25 bp, Homo sapien
gggcagagttatcatcaatgctttc

SEQ ID NO: 3298178 - DNA, 25 bp, Homo sapien
actacagataatgaagttagctgct

SEQ ID NO: 3298179 - DNA, 25 bp, Homo sapien
ctgctgggcagagttatcatcaatg

SEQ ID NO: 3298180 - DNA, 25 bp, Homo sapien
gacatttcgctaacattagtgcttc

SEQ ID NO: 3298181 - DNA, 25 bp, Homo sapien
ttagtgcttcaacactgaaccatct

SEQ ID NO: 3298182 - DNA, 25 bp, Homo sapien
tctgctagagagttccgagtctgaa

SEQ ID NO: 3298183 - DNA, 25 bp, Homo sapien
cgagtctgaatgaaaggtgcaaacc

SEQ ID NO: 3298184 - DNA, 25 bp, Homo sapien
aaggctctgtgtcgctgtgggatca

SEQ ID NO: 3298185 - DNA, 25 bp, Homo sapien
tagcttcgacagaacttagtgggca

SEQ ID NO: 3298186 - DNA, 25 bp, Homo sapien
catgatcggctgtcactggtttcac

SEQ ID NO: 3298187 - DNA, 25 bp, Homo sapien
tagtgggcatttagtcaaggctctg

SEQ ID NO: 3298188 - DNA, 25 bp, Homo sapien
cacatgcagatctttgtcatgatta

SEQ ID NO: 3298189 - DNA, 25 bp, Homo sapien
ttttgccacactcttgagagctgaa

SEQ ID NO: 3298190 - DNA, 25 bp, Homo sapien
cttgagagctgaaagaagtcatgga

SEQ ID NO: 3298191 - DNA, 25 bp, Homo sapien
agctgcaacatgaattattgaagac

SEQ ID NO: 3298192 - DNA, 25 bp, Homo sapien
ccagatctgcgatgattaagaacac

SEQ ID NO: 3298193 - DNA, 25 bp, Homo sapien
gtcttgatcatccagatctgcgatg

SEQ ID NO: 3298194 - DNA, 25 bp, Homo sapien
gatcatccagatctgcgatgattaa

SEQ ID NO: 3298195 - DNA, 25 bp, Homo sapien
tcatccagatctgcgatgattaaga

SEQ ID NO: 3298196 - DNA, 25 bp, Homo sapien
cacaaacatcgtgctgatgagcaag

SEQ ID NO: 3298197 - DNA, 25 bp, Homo sapien
caaacatcgtgctgatgagcaagga

SEQ ID NO: 3298198 - DNA, 25 bp, Homo sapien
gagcccacaaacatcgtgctgatga

SEQ ID NO: 3298199 - DNA, 25 bp, Homo sapien
caaacagagcccacaaacatcgtgc

SEQ ID NO: 3298200 - DNA, 25 bp, Homo sapien
aacctttccaagatgaatctgggga

SEQ ID NO: 3298201 - DNA, 25 bp, Homo sapien
gtaacctttccaagatgaatctggg

SEQ ID NO: 3298202 - DNA, 25 bp, Homo sapien
ggttgtaacctttccaagatgaatc

SEQ ID NO: 3298203 - DNA, 25 bp, Homo sapien
ttgtaacctttccaagatgaatctg

SEQ ID NO: 3298204 - DNA, 25 bp, Homo sapien
cacaagtctagggttttcatgggtc

SEQ ID NO: 3298205 - DNA, 25 bp, Homo sapien
tcaggtcacaagtctagggttttca

SEQ ID NO: 3298206 - DNA, 25 bp, Homo sapien
gtctagggttttcatgggtcatgta

SEQ ID NO: 3298207 - DNA, 25 bp, Homo sapien
ttatttcaggtcacaagtctagggt

SEQ ID NO: 3298208 - DNA, 25 bp, Homo sapien
tacatcttgggactccatagctggt

SEQ ID NO: 3298209 - DNA, 25 bp, Homo sapien
tcttgggactccatagctggtatta

SEQ ID NO: 3298210 - DNA, 25 bp, Homo sapien
gaactgctatatgctttcattatgt

SEQ ID NO: 3298211 - DNA, 25 bp, Homo sapien
gtcattatattaagaggcagaactg

SEQ ID NO: 3298212 - DNA, 25 bp, Homo sapien
cacacccgagatatatcttgctcca

SEQ ID NO: 3298213 - DNA, 25 bp, Homo sapien
tggcacacccgagatatatcttgct

SEQ ID NO: 3298214 - DNA, 25 bp, Homo sapien
cacccgagatatatcttgctccaat

SEQ ID NO: 3298215 - DNA, 25 bp, Homo sapien
ttatggcacacccgagatatatctt

SEQ ID NO: 3298216 - DNA, 25 bp, Homo sapien
aaaaaatcccaaaggcagactagag

SEQ ID NO: 3298217 - DNA, 25 bp, Homo sapien
agactagagaagatagaaggatcac

SEQ ID NO: 3298218 - DNA, 25 bp, Homo sapien
ataaaaaatcccaaaggcagactag

SEQ ID NO: 3298219 - DNA, 25 bp, Homo sapien
gcagactagagaagatagaaggatc

SEQ ID NO: 3298220 - DNA, 25 bp, Homo sapien
gtggttcaaatcgttccatcctgag

SEQ ID NO: 3298221 - DNA, 25 bp, Homo sapien
tgtttttggcttgtccctcctggaa

SEQ ID NO: 3298222 - DNA, 25 bp, Homo sapien
tatacactcgtagacagactgaaga

SEQ ID NO: 3298223 - DNA, 25 bp, Homo sapien
tccacagtcacggttcatggcttcc

SEQ ID NO: 3298224 - DNA, 25 bp, Homo sapien
cagctctgggaccgtttcccaggcc

SEQ ID NO: 3298225 - DNA, 25 bp, Homo sapien
gacaccagtaggtcggctcagcagc

SEQ ID NO: 3298226 - DNA, 25 bp, Homo sapien
ccagtaggtcggctcagcagctctg

SEQ ID NO: 3298227 - DNA, 25 bp, Homo sapien
acaccagtaggtcggctcagcagct

SEQ ID NO: 3298228 - DNA, 25 bp, Homo sapien
tgctggctgagtcgcttgtgagtct

SEQ ID NO: 3298229 - DNA, 25 bp, Homo sapien
tttctggagcatgctggctgagtcg

SEQ ID NO: 3298230 - DNA, 25 bp, Homo sapien
tgttgacctggccaataattaggcc

SEQ ID NO: 3298231 - DNA, 25 bp, Homo sapien
gagctgggtggtcaggatctgagat

SEQ ID NO: 3298232 - DNA, 25 bp, Homo sapien
ctctgaaggggttgactgttgtctt

SEQ ID NO: 3298233 - DNA, 25 bp, Homo sapien
tctgaaggggttgactgttgtcttc

SEQ ID NO: 3298234 - DNA, 25 bp, Homo sapien
taccagcaatttagactagtgggca

SEQ ID NO: 3298235 - DNA, 25 bp, Homo sapien
caaaatatgttgaggatcttctttc

SEQ ID NO: 3298236 - DNA, 25 bp, Homo sapien
tatccaaaatatgttgaggatcttc

SEQ ID NO: 3298237 - DNA, 25 bp, Homo sapien
gactagtgggcaattcatatccaaa

SEQ ID NO: 3298238 - DNA, 25 bp, Homo sapien
gattatagcaatcagtcacgtctga

SEQ ID NO: 3298239 - DNA, 25 bp, Homo sapien
tgtgttaatgagactaatccttgca

SEQ ID NO: 3298240 - DNA, 25 bp, Homo sapien
gctgcccagagtacagattatagca

SEQ ID NO: 3298241 - DNA, 25 bp, Homo sapien
ggtaatttgcttaatggctgcccag

SEQ ID NO: 3298242 - DNA, 25 bp, Homo sapien
attatttgcacttgtggaaatgttc

SEQ ID NO: 3298243 - DNA, 25 bp, Homo sapien
ttatttgcacttgtggaaatgttca

SEQ ID NO: 3298244 - DNA, 25 bp, Homo sapien
tcttcccagcgctaaatcctgtcga

SEQ ID NO: 3298245 - DNA, 25 bp, Homo sapien
cgctaaatcctgtcgactggattca

SEQ ID NO: 3298246 - DNA, 25 bp, Homo sapien
ggtttcttcccagcgctaaatcctg

SEQ ID NO: 3298247 - DNA, 25 bp, Homo sapien
cagcgctaaatcctgtcgactggat

SEQ ID NO: 3298248 - DNA, 25 bp, Homo sapien
tgcattccaagcagtcttgcccaga

SEQ ID NO: 3298249 - DNA, 25 bp, Homo sapien
gcattccaagcagtcttgcccagat

SEQ ID NO: 3298250 - DNA, 25 bp, Homo sapien
ggctgaagaactagacgcacaaagg

SEQ ID NO: 3298251 - DNA, 25 bp, Homo sapien
tctggtggctgaagaactagacgca

SEQ ID NO: 3298252 - DNA, 25 bp, Homo sapien
gacgcacaaagggagaatcttggcc

SEQ ID NO: 3298253 - DNA, 25 bp, Homo sapien
ctttgtatggtctggtggctgaaga

SEQ ID NO: 3298254 - DNA, 25 bp, Homo sapien
ctctgcagcgatgatggggtcctcc

SEQ ID NO: 3298255 - DNA, 25 bp, Homo sapien
ggatagacttcttcatgttcaacag

SEQ ID NO: 3298256 - DNA, 25 bp, Homo sapien
atttttgcctggatagacttcttca

SEQ ID NO: 3298257 - DNA, 25 bp, Homo sapien
tccggagcaaatctggcccagaagg

SEQ ID NO: 3298258 - DNA, 25 bp, Homo sapien
gcagaaaaatgtcgacagcctaagg

SEQ ID NO: 3298259 - DNA, 25 bp, Homo sapien
tggctgctgcacatgactatttggc

SEQ ID NO: 3298260 - DNA, 25 bp, Homo sapien
tgctcacacaaagctacagtatggg

SEQ ID NO: 3298261 - DNA, 25 bp, Homo sapien
gattttcccagaatgtgctagcata

SEQ ID NO: 3298262 - DNA, 25 bp, Homo sapien
tgtttttaggcaacttccacgtgga

SEQ ID NO: 3298263 - DNA, 25 bp, Homo sapien
gaatgtaacccaacttatgaagagg

SEQ ID NO: 3298264 - DNA, 25 bp, Homo sapien
gaaactgtccaggtgataagcatca

SEQ ID NO: 3298265 - DNA, 25 bp, Homo sapien
aatgctctgatttgtgcaggtgacc

SEQ ID NO: 3298266 - DNA, 25 bp, Homo sapien
ggttcagatctgtggcataatcagg

SEQ ID NO: 3298267 - DNA, 25 bp, Homo sapien
gcttcctaatcctgaaccaaagttg

SEQ ID NO: 3298268 - DNA, 25 bp, Homo sapien
gttgtatctcgtagttgtcacctga

SEQ ID NO: 3298269 - DNA, 25 bp, Homo sapien
gagatcaacacaagctttggagagg

SEQ ID NO: 3298270 - DNA, 25 bp, Homo sapien
tctggaaatgcccggaagcatatag

SEQ ID NO: 3298271 - DNA, 25 bp, Homo sapien
ttctggaaatgcccggaagcatata

SEQ ID NO: 3298272 - DNA, 25 bp, Homo sapien
cttctggaaatgcccggaagcatat

SEQ ID NO: 3298273 - DNA, 25 bp, Homo sapien
gagccctctactgattggaaattgt

SEQ ID NO: 3298274 - DNA, 25 bp, Homo sapien
tgactgctgcatgtatagactgtgc

SEQ ID NO: 3298275 - DNA, 25 bp, Homo sapien
tgtactagatgtaaactatagaggg

SEQ ID NO: 3298276 - DNA, 25 bp, Homo sapien
tagagggatgctttcagtgcgttgc

SEQ ID NO: 3298277 - DNA, 25 bp, Homo sapien
gacaaggacagccaagcgaggacag

SEQ ID NO: 3298278 - DNA, 25 bp, Homo sapien
caggtaaatggacaaggacagccaa

SEQ ID NO: 3298279 - DNA, 25 bp, Homo sapien
gcactgtgaccaggtaaatggacaa

SEQ ID NO: 3298280 - DNA, 25 bp, Homo sapien
gtaaatggacaaggacagccaagcg

SEQ ID NO: 3298281 - DNA, 25 bp, Homo sapien
ttggcccctccatcgagctgaactt

SEQ ID NO: 3298282 - DNA, 25 bp, Homo sapien
ccatcgagctgaacttctttggaaa

SEQ ID NO: 3298283 - DNA, 25 bp, Homo sapien
ttcttggcccctccatcgagctgaa

SEQ ID NO: 3298284 - DNA, 25 bp, Homo sapien
ccctccatcgagctgaacttctttg

SEQ ID NO: 3298285 - DNA, 25 bp, Homo sapien
gcagatgcacattctgttataaagg

SEQ ID NO: 3298286 - DNA, 25 bp, Homo sapien
aagagtgagcctgtgtcgcttctcc

SEQ ID NO: 3298287 - DNA, 25 bp, Homo sapien
ttgttttcaggtaatgctcagcgcc

SEQ ID NO: 3298288 - DNA, 25 bp, Homo sapien
gtatttttgtcttggcagatgcaca

SEQ ID NO: 3298289 - DNA, 25 bp, Homo sapien
gctggtctccatatgcctcttttca

SEQ ID NO: 3298290 - DNA, 25 bp, Homo sapien
tgttaggcttcgcatgctggtctcc

SEQ ID NO: 3298291 - DNA, 25 bp, Homo sapien
tcttttcaattacatgtgccgccac

SEQ ID NO: 3298292 - DNA, 25 bp, Homo sapien
caagtatggctaaacgaaacgcttc

SEQ ID NO: 3298293 - DNA, 25 bp, Homo sapien
attttaagggttctctgaacatcaa

SEQ ID NO: 3298294 - DNA, 25 bp, Homo sapien
aaaaccagatttatacatatgataa

SEQ ID NO: 3298295 - DNA, 25 bp, Homo sapien
caaaaccagatttatacatatgata

SEQ ID NO: 3298296 - DNA, 25 bp, Homo sapien
attattttaagggttctctgaacat

SEQ ID NO: 3298297 - DNA, 25 bp, Homo sapien
aggatttataatccagccaatacgg

SEQ ID NO: 3298298 - DNA, 25 bp, Homo sapien
ttataatccagccaatacggtacat

SEQ ID NO: 3298299 - DNA, 25 bp, Homo sapien
gaaaggatttataatccagccaata

SEQ ID NO: 3298300 - DNA, 25 bp, Homo sapien
gatttataatccagccaatacggta

SEQ ID NO: 3298301 - DNA, 25 bp, Homo sapien
gtctttcagaaagcgtcattataga

SEQ ID NO: 3298302 - DNA, 25 bp, Homo sapien
cagaaagcgtcattatagaattttt

SEQ ID NO: 3298303 - DNA, 25 bp, Homo sapien
ctttcagaaagcgtcattatagaat

SEQ ID NO: 3298304 - DNA, 25 bp, Homo sapien
gtgtctttcagaaagcgtcattata

SEQ ID NO: 3298305 - DNA, 25 bp, Homo sapien
tatagggtttgtggacgatgtaagt

SEQ ID NO: 3298306 - DNA, 25 bp, Homo sapien
ctttatagggtttgtggacgatgta

SEQ ID NO: 3298307 - DNA, 25 bp, Homo sapien
tagggtttgtggacgatgtaagtaa

SEQ ID NO: 3298308 - DNA, 25 bp, Homo sapien
ttatagggtttgtggacgatgtaag

SEQ ID NO: 3298309 - DNA, 25 bp, Homo sapien
agcggtcatgcaatctgggtgattt

SEQ ID NO: 3298310 - DNA, 25 bp, Homo sapien
tacaggccttgggattttgcagcgt

SEQ ID NO: 3298311 - DNA, 25 bp, Homo sapien
ttttgcagcgttagttgtggtgtga

SEQ ID NO: 3298312 - DNA, 25 bp, Homo sapien
ctacaaagcggtcatgcaatctggg

SEQ ID NO: 3298313 - DNA, 25 bp, Homo sapien
ttatcatgagggaaattgagaacat

SEQ ID NO: 3298314 - DNA, 25 bp, Homo sapien
tctccagctcgtctatcaagataac

SEQ ID NO: 3298315 - DNA, 25 bp, Homo sapien
ttatgactcaatgttatcatgaggg

SEQ ID NO: 3298316 - DNA, 25 bp, Homo sapien
ttctccagctcgtctatcaagataa

SEQ ID NO: 3298317 - DNA, 25 bp, Homo sapien
gaaggtctctaactctgtgatcctg

SEQ ID NO: 3298318 - DNA, 25 bp, Homo sapien
tctctaactctgtgatcctgtgttg

SEQ ID NO: 3298319 - DNA, 25 bp, Homo sapien
ggtctctaactctgtgatcctgtgt

SEQ ID NO: 3298320 - DNA, 25 bp, Homo sapien
cacagaaggtctctaactctgtgat

SEQ ID NO: 3298321 - DNA, 25 bp, Homo sapien
tatctcctcttagccagttgcctga

SEQ ID NO: 3298322 - DNA, 25 bp, Homo sapien
tgaatgtggaacatctgtgtttatt

SEQ ID NO: 3298323 - DNA, 25 bp, Homo sapien
gggtgatgataaagctcaagtggca

SEQ ID NO: 3298324 - DNA, 25 bp, Homo sapien
tgtggattttccgtagggtgatgat

SEQ ID NO: 3298325 - DNA, 25 bp, Homo sapien
tttcattgaaagcatttccgtaagg

SEQ ID NO: 3298326 - DNA, 25 bp, Homo sapien
ttgaaagcatttccgtaaggcaagg

SEQ ID NO: 3298327 - DNA, 25 bp, Homo sapien
tcattgaaagcatttccgtaaggca

SEQ ID NO: 3298328 - DNA, 25 bp, Homo sapien
cattgaaagcatttccgtaaggcaa

SEQ ID NO: 3298329 - DNA, 25 bp, Homo sapien
tcaggagggtgatttgaagataact

SEQ ID NO: 3298330 - DNA, 25 bp, Homo sapien
gaaatatcaggagggtgatttgaag

SEQ ID NO: 3298331 - DNA, 25 bp, Homo sapien
tcccatgaaatatcaggagggtgat

SEQ ID NO: 3298332 - DNA, 25 bp, Homo sapien
cccatgaaatatcaggagggtgatt

SEQ ID NO: 3298333 - DNA, 25 bp, Homo sapien
tggtttatctaaagcagcactactg

SEQ ID NO: 3298334 - DNA, 25 bp, Homo sapien
gtttatctaaagcagcactactgta

SEQ ID NO: 3298335 - DNA, 25 bp, Homo sapien
ttatctaaagcagcactactgtata

SEQ ID NO: 3298336 - DNA, 25 bp, Homo sapien
ggtttatctaaagcagcactactgt

SEQ ID NO: 3298337 - DNA, 25 bp, Homo sapien
tgaatggctctaagatcagacatct

SEQ ID NO: 3298338 - DNA, 25 bp, Homo sapien
ggcaatcttcatgaagtatatgaca

SEQ ID NO: 3298339 - DNA, 25 bp, Homo sapien
gacatcttgagagctcatcctctcc

SEQ ID NO: 3298340 - DNA, 25 bp, Homo sapien
tccccctaaggcaatcttcatgaag

SEQ ID NO: 3298341 - DNA, 25 bp, Homo sapien
gaggcagcaaactcttgattcagca

SEQ ID NO: 3298342 - DNA, 25 bp, Homo sapien
tcttcaccataagctcagcaaggtt

SEQ ID NO: 3298343 - DNA, 25 bp, Homo sapien
tgtcaaaaaatgcaccctcacctga

SEQ ID NO: 3298344 - DNA, 25 bp, Homo sapien
tgaagtacatcagtagtcaacaggt

SEQ ID NO: 3298345 - DNA, 25 bp, Homo sapien
taattgatggctttgtgcaccttac

SEQ ID NO: 3298346 - DNA, 25 bp, Homo sapien
ttaattgatggctttgtgcacctta

SEQ ID NO: 3298347 - DNA, 25 bp, Homo sapien
cagtaactgcccttctaatggtgac

SEQ ID NO: 3298348 - DNA, 25 bp, Homo sapien
cattggtcagaatgtgggcagcttc

SEQ ID NO: 3298349 - DNA, 25 bp, Homo sapien
cttttgtaaagtgacgcagaattcc

SEQ ID NO: 3298350 - DNA, 25 bp, Homo sapien
ccccaaggagagtattccaaacatc

SEQ ID NO: 3298351 - DNA, 25 bp, Homo sapien
aatatagtgagtccagtaagtctat

SEQ ID NO: 3298352 - DNA, 25 bp, Homo sapien
tagtgagtccagtaagtctatcaga

SEQ ID NO: 3298353 - DNA, 25 bp, Homo sapien
tatagtgagtccagtaagtctatca

SEQ ID NO: 3298354 - DNA, 25 bp, Homo sapien
atagtgagtccagtaagtctatcag

SEQ ID NO: 3298355 - DNA, 25 bp, Homo sapien
aaaggtcttcaaactttgaggtcat

SEQ ID NO: 3298356 - DNA, 25 bp, Homo sapien
taaaggtcttcaaactttgaggtca

SEQ ID NO: 3298357 - DNA, 25 bp, Homo sapien
gagactatccaactgtctaatttca

SEQ ID NO: 3298358 - DNA, 25 bp, Homo sapien
cacaaatgatctagttactgcctct

SEQ ID NO: 3298359 - DNA, 25 bp, Homo sapien
tggaatgccttaacactagcagcaa

SEQ ID NO: 3298360 - DNA, 25 bp, Homo sapien
gtgacaccatccctgagactatcca

SEQ ID NO: 3298361 - DNA, 25 bp, Homo sapien
tgaaacccactgtgtgaaacttaga

SEQ ID NO: 3298362 - DNA, 25 bp, Homo sapien
aacccactgtgtgaaacttagaatg

SEQ ID NO: 3298363 - DNA, 25 bp, Homo sapien
tctccacctccgcagcacctttatt

SEQ ID NO: 3298364 - DNA, 25 bp, Homo sapien
cactgtgtgaaacttagaatggaaa

SEQ ID NO: 3298365 - DNA, 25 bp, Homo sapien
gatatcagcactaggacagtcacaa

SEQ ID NO: 3298366 - DNA, 25 bp, Homo sapien
ttttatagccttacctgtcttcctg

SEQ ID NO: 3298367 - DNA, 25 bp, Homo sapien
caccagctgaaggatatctaagttg

SEQ ID NO: 3298368 - DNA, 25 bp, Homo sapien
tgcaactacaagtcaagctgctgtg

SEQ ID NO: 3298369 - DNA, 25 bp, Homo sapien
tacccaatatttttggcaccacgga

SEQ ID NO: 3298370 - DNA, 25 bp, Homo sapien
tggcacatgatgtaacaatttcctt

SEQ ID NO: 3298371 - DNA, 25 bp, Homo sapien
tctttttcatagtctacaccctaga

SEQ ID NO: 3298372 - DNA, 25 bp, Homo sapien
aggtgtcatctgctagaactagtca

SEQ ID NO: 3298373 - DNA, 25 bp, Homo sapien
tgctaaccctatgaaaccagagtga

SEQ ID NO: 3298374 - DNA, 25 bp, Homo sapien
ccactgaatacttgctatgggtagc

SEQ ID NO: 3298375 - DNA, 25 bp, Homo sapien
tatgggtagcacaggcatagtaact

SEQ ID NO: 3298376 - DNA, 25 bp, Homo sapien
ccagagtgaagtacatgcatacatt

SEQ ID NO: 3298377 - DNA, 25 bp, Homo sapien
gataataaagttaacttcacagaaa

SEQ ID NO: 3298378 - DNA, 25 bp, Homo sapien
taataaagttaacttcacagaaaca

SEQ ID NO: 3298379 - DNA, 25 bp, Homo sapien
gcaaccttatgcaacacgaatggat

SEQ ID NO: 3298380 - DNA, 25 bp, Homo sapien
acagatgctgctccctagtcaatgg

SEQ ID NO: 3298381 - DNA, 25 bp, Homo sapien
taacttagggaaaggcatcagtgct

SEQ ID NO: 3298382 - DNA, 25 bp, Homo sapien
cacataagttaggagtcatttccca

SEQ ID NO: 3298383 - DNA, 25 bp, Homo sapien
gggtatactatatcaggcttccaag

SEQ ID NO: 3298384 - DNA, 25 bp, Homo sapien
caataactcattgcagaaagggttg

SEQ ID NO: 3298385 - DNA, 25 bp, Homo sapien
gaattccatccctgaaactaagcat

SEQ ID NO: 3298386 - DNA, 25 bp, Homo sapien
caactgcatattcaacccaagaagg

SEQ ID NO: 3298387 - DNA, 25 bp, Homo sapien
ggacacatgactttggatccagcca

SEQ ID NO: 3298388 - DNA, 25 bp, Homo sapien
caatcgctctttccatcttgtgcac

SEQ ID NO: 3298389 - DNA, 25 bp, Homo sapien
tgtgtgtaaggcctcttggaacagt

SEQ ID NO: 3298390 - DNA, 25 bp, Homo sapien
gggtaattataccaggatgctccaa

SEQ ID NO: 3298391 - DNA, 25 bp, Homo sapien
taccagttcacatcaaagcaggcgc

SEQ ID NO: 3298392 - DNA, 25 bp, Homo sapien
gcaggcgcactttgtcaggtttcca

SEQ ID NO: 3298393 - DNA, 25 bp, Homo sapien
tgcccgccaaacatgaaatgttcgc

SEQ ID NO: 3298394 - DNA, 25 bp, Homo sapien
gaagtacagtatcgaaagtgactag

SEQ ID NO: 3298395 - DNA, 25 bp, Homo sapien
aatttggcatcgtcgacgtgacacg

SEQ ID NO: 3298396 - DNA, 25 bp, Homo sapien
tcacgctaacataatttggcatcgt

SEQ ID NO: 3298397 - DNA, 25 bp, Homo sapien
catcgtcgacgtgacacgatggtgg

SEQ ID NO: 3298398 - DNA, 25 bp, Homo sapien
gctaacataatttggcatcgtcgac

SEQ ID NO: 3298399 - DNA, 25 bp, Homo sapien
caatgttttgtgatagcgaccctcc

SEQ ID NO: 3298400 - DNA, 25 bp, Homo sapien
gaaacttcccataaggcacactgtg

SEQ ID NO: 3298401 - DNA, 25 bp, Homo sapien
cccgactgagaggaattaagctgct

SEQ ID NO: 3298402 - DNA, 25 bp, Homo sapien
taaccaaggtagagtgcccctcaaa

SEQ ID NO: 3298403 - DNA, 25 bp, Homo sapien
gaactcgggagaagtttatgcaccg

SEQ ID NO: 3298404 - DNA, 25 bp, Homo sapien
tactgagatggaactcgggagaagt

SEQ ID NO: 3298405 - DNA, 25 bp, Homo sapien
ctcgggagaagtttatgcaccggcc

SEQ ID NO: 3298406 - DNA, 25 bp, Homo sapien
gatggaactcgggagaagtttatgc

SEQ ID NO: 3298407 - DNA, 25 bp, Homo sapien
aaaaacaaggcaatgcatcccggtt

SEQ ID NO: 3298408 - DNA, 25 bp, Homo sapien
ccggttgtaagtgaccatgatcaga

SEQ ID NO: 3298409 - DNA, 25 bp, Homo sapien
gtaagtgaccatgatcagatagcat

SEQ ID NO: 3298410 - DNA, 25 bp, Homo sapien
caatgcatcccggttgtaagtgacc

SEQ ID NO: 3298411 - DNA, 25 bp, Homo sapien
caattcctggaatatataagctagt

SEQ ID NO: 3298412 - DNA, 25 bp, Homo sapien
taagctagttcatccctcttgtgct

SEQ ID NO: 3298413 - DNA, 25 bp, Homo sapien
aatctcttgctacagtttgaaaagc

SEQ ID NO: 3298414 - DNA, 25 bp, Homo sapien
ttgaaaagcaatgtgcaattcctgg

SEQ ID NO: 3298415 - DNA, 25 bp, Homo sapien
gatgccagagcatgaaaagtgtatt

SEQ ID NO: 3298416 - DNA, 25 bp, Homo sapien
cataaaagagtatctgatgccagag

SEQ ID NO: 3298417 - DNA, 25 bp, Homo sapien
ctacagtaactgtcaaaaggtgaag

SEQ ID NO: 3298418 - DNA, 25 bp, Homo sapien
tactgctgttgctatacctagggat

SEQ ID NO: 3298419 - DNA, 25 bp, Homo sapien
gaaactttgatcctgttatctgctg

SEQ ID NO: 3298420 - DNA, 25 bp, Homo sapien
ttcaatctctcattcatgagcccct

SEQ ID NO: 3298421 - DNA, 25 bp, Homo sapien
acgaaggtcctgaaactttgatcct

SEQ ID NO: 3298422 - DNA, 25 bp, Homo sapien
tcttttcaatctctcattcatgagc

SEQ ID NO: 3298423 - DNA, 25 bp, Homo sapien
tagacactggcaaatttacaaccaa

SEQ ID NO: 3298424 - DNA, 25 bp, Homo sapien
aggaagtagacactggcaaatttac

SEQ ID NO: 3298425 - DNA, 25 bp, Homo sapien
atttacaaccaacagctcggacagc

SEQ ID NO: 3298426 - DNA, 25 bp, Homo sapien
tacaaccaacagctcggacagctgt

SEQ ID NO: 3298427 - DNA, 25 bp, Homo sapien
aggaactaatctagttaagagcata

SEQ ID NO: 3298428 - DNA, 25 bp, Homo sapien
aaggaactaatctagttaagagcat

SEQ ID NO: 3298429 - DNA, 25 bp, Homo sapien
aactacctccgctgacaatccggcc

SEQ ID NO: 3298430 - DNA, 25 bp, Homo sapien
gagagtgagaccaaaacggttttgc

SEQ ID NO: 3298431 - DNA, 25 bp, Homo sapien
acggttttgccgctctcaactacct

SEQ ID NO: 3298432 - DNA, 25 bp, Homo sapien
ctccaggcagcgagagtgagaccaa

SEQ ID NO: 3298433 - DNA, 25 bp, Homo sapien
cgggatggggaggccgctgccgccg

SEQ ID NO: 3298434 - DNA, 25 bp, Homo sapien
gcgggatggggaggccgctgccgcc

SEQ ID NO: 3298435 - DNA, 25 bp, Homo sapien
ctgcgggatggggaggccgctgccg

SEQ ID NO: 3298436 - DNA, 25 bp, Homo sapien
tgcgggatggggaggccgctgccgc

SEQ ID NO: 3298437 - DNA, 25 bp, Homo sapien
gattatgctaggacttagacacaca

SEQ ID NO: 3298438 - DNA, 25 bp, Homo sapien
tttcaaagggcaatggacatctctt

SEQ ID NO: 3298439 - DNA, 25 bp, Homo sapien
taggatttcacccttgcttagagcc

SEQ ID NO: 3298440 - DNA, 25 bp, Homo sapien
tagagcccaattgtaggtatatgtg

SEQ ID NO: 3298441 - DNA, 25 bp, Homo sapien
cccagattatctagcaaaccacgaa

SEQ ID NO: 3298442 - DNA, 25 bp, Homo sapien
gaatcactgcctcagtgactttgct

SEQ ID NO: 3298443 - DNA, 25 bp, Homo sapien
cccagtgaatctttctggttttcac

SEQ ID NO: 3298444 - DNA, 25 bp, Homo sapien
acttctgaaccccagattatctagc

SEQ ID NO: 3298445 - DNA, 25 bp, Homo sapien
cgcccggccctcaaatcgcatttaa

SEQ ID NO: 3298446 - DNA, 25 bp, Homo sapien
gcgcccggccctcaaatcgcattta

SEQ ID NO: 3298447 - DNA, 25 bp, Homo sapien
gcccggccctcaaatcgcatttaaa

SEQ ID NO: 3298448 - DNA, 25 bp, Homo sapien
gatgacccggaagttgtcacacctt

SEQ ID NO: 3298449 - DNA, 25 bp, Homo sapien
cttggacaccagacctaattgatga

SEQ ID NO: 3298450 - DNA, 25 bp, Homo sapien
gctcctctgagcacgatgcctatag

SEQ ID NO: 3298451 - DNA, 25 bp, Homo sapien
tagaaatgtctgcatgatccacccc

SEQ ID NO: 3298452 - DNA, 25 bp, Homo sapien
atttccctgcctccattatactgac

SEQ ID NO: 3298453 - DNA, 25 bp, Homo sapien
caagcagttagctctttctcaatac

SEQ ID NO: 3298454 - DNA, 25 bp, Homo sapien
gctctttctcaatacattcccatat

SEQ ID NO: 3298455 - DNA, 25 bp, Homo sapien
gttagctctttctcaatacattccc

SEQ ID NO: 3298456 - DNA, 25 bp, Homo sapien
tctcaatacattcccatatacaaac

SEQ ID NO: 3298457 - DNA, 25 bp, Homo sapien
aagcccagagagcatcaagacgacc

SEQ ID NO: 3298458 - DNA, 25 bp, Homo sapien
aagaaacccggtcatactgccgcct

SEQ ID NO: 3298459 - DNA, 25 bp, Homo sapien
acaaagcccagagagcatcaagacg

SEQ ID NO: 3298460 - DNA, 25 bp, Homo sapien
tccttcctgaggtcgcatcaaagaa

SEQ ID NO: 3298461 - DNA, 25 bp, Homo sapien
tcttcaccacagcatttttggcttt

SEQ ID NO: 3298462 - DNA, 25 bp, Homo sapien
ccattttgtctgaggaggctggtgt

SEQ ID NO: 3298463 - DNA, 25 bp, Homo sapien
tagccttgcaccttcctcagtagat

SEQ ID NO: 3298464 - DNA, 25 bp, Homo sapien
gtggtctaggcctgatgggttcctc

SEQ ID NO: 3298465 - DNA, 25 bp, Homo sapien
gaccaccataataggaagcatccac

SEQ ID NO: 3298466 - DNA, 25 bp, Homo sapien
tccaacccctcgaccaccataatag

SEQ ID NO: 3298467 - DNA, 25 bp, Homo sapien
cctcgaccaccataataggaagcat

SEQ ID NO: 3298468 - DNA, 25 bp, Homo sapien
caccataataggaagcatccacagt

SEQ ID NO: 3298469 - DNA, 25 bp, Homo sapien
gtggtggtggaggatccttaataac

SEQ ID NO: 3298470 - DNA, 25 bp, Homo sapien
cttcctctctccctgatgaattctc

SEQ ID NO: 3298471 - DNA, 25 bp, Homo sapien
tcagataacccaattgtagaagagg

SEQ ID NO: 3298472 - DNA, 25 bp, Homo sapien
gaaactgaaccagagctaaggctca

SEQ ID NO: 3298473 - DNA, 25 bp, Homo sapien
gaattaggattcaaaccgaggacca

SEQ ID NO: 3298474 - DNA, 25 bp, Homo sapien
gaggaccaagtctacctatctccaa

SEQ ID NO: 3298475 - DNA, 25 bp, Homo sapien
cacaacctcatgagtaacaaagaag

SEQ ID NO: 3298476 - DNA, 25 bp, Homo sapien
gcataatattgcctagttgccagaa

SEQ ID NO: 3298477 - DNA, 25 bp, Homo sapien
tttagctaatatgcccaatgtcacc

SEQ ID NO: 3298478 - DNA, 25 bp, Homo sapien
accactttatgaaccatatgcagag

SEQ ID NO: 3298479 - DNA, 25 bp, Homo sapien
agttcttacattactgcttgtgaag

SEQ ID NO: 3298480 - DNA, 25 bp, Homo sapien
acacaaagttcttacattactgctt

SEQ ID NO: 3298481 - DNA, 25 bp, Homo sapien
cacaaagttcttacattactgcttg

SEQ ID NO: 3298482 - DNA, 25 bp, Homo sapien
caaagttcttacattactgcttgtg

SEQ ID NO: 3298483 - DNA, 25 bp, Homo sapien
gaacagtgtgagagtgtattctgcc

SEQ ID NO: 3298484 - DNA, 25 bp, Homo sapien
gctctgtcggaaagcatcaccatga

SEQ ID NO: 3298485 - DNA, 25 bp, Homo sapien
ctgtctcgtaaaagatgctctgtcg

SEQ ID NO: 3298486 - DNA, 25 bp, Homo sapien
tctgccaggagttaagtaaaggtgc

SEQ ID NO: 3298487 - DNA, 25 bp, Homo sapien
taggctctagggatggatttgtttc

SEQ ID NO: 3298488 - DNA, 25 bp, Homo sapien
tgaagtgagtcttacagggttaaaa

SEQ ID NO: 3298489 - DNA, 25 bp, Homo sapien
caactctggggaatatcagaaaatt

SEQ ID NO: 3298490 - DNA, 25 bp, Homo sapien
aaattcaggagataatataggtttc

SEQ ID NO: 3298491 - DNA, 25 bp, Homo sapien
gataaaggattgtcaagttgcctca

SEQ ID NO: 3298492 - DNA, 25 bp, Homo sapien
agttgcctcatgaaagcaaactgaa

SEQ ID NO: 3298493 - DNA, 25 bp, Homo sapien
ataaacgcagggctaaaacaaagca

SEQ ID NO: 3298494 - DNA, 25 bp, Homo sapien
gaagtacaactaataataaacgcag

SEQ ID NO: 3298495 - DNA, 25 bp, Homo sapien
agcaaaggggccaaaaccaccacat

SEQ ID NO: 3298496 - DNA, 25 bp, Homo sapien
ttgcagcaaaggggccaaaaccacc

SEQ ID NO: 3298497 - DNA, 25 bp, Homo sapien
cagcaaaggggccaaaaccaccaca

SEQ ID NO: 3298498 - DNA, 25 bp, Homo sapien
cactttgcagcaaaggggccaaaac

SEQ ID NO: 3298499 - DNA, 25 bp, Homo sapien
taacaatgatggctgcgatcccgtt

SEQ ID NO: 3298500 - DNA, 25 bp, Homo sapien
caaaccgatccccaggagtagcagt

SEQ ID NO: 3298501 - DNA, 25 bp, Homo sapien
caatgatggctgcgatcccgttaga

SEQ ID NO: 3298502 - DNA, 25 bp, Homo sapien
ataacaatgatggctgcgatcccgt

SEQ ID NO: 3298503 - DNA, 25 bp, Homo sapien
gctgtgacaattaatgatcctgaaa

SEQ ID NO: 3298504 - DNA, 25 bp, Homo sapien
gtgacaattaatgatcctgaaatga

SEQ ID NO: 3298505 - DNA, 25 bp, Homo sapien
ctgtgacaattaatgatcctgaaat

SEQ ID NO: 3298506 - DNA, 25 bp, Homo sapien
tgtgacaattaatgatcctgaaatg

SEQ ID NO: 3298507 - DNA, 25 bp, Homo sapien
ccaaaagtacagtgagtcagatcat

SEQ ID NO: 3298508 - DNA, 25 bp, Homo sapien
ggccaaaagtacagtgagtcagatc

SEQ ID NO: 3298509 - DNA, 25 bp, Homo sapien
aaaagtacagtgagtcagatcatgc

SEQ ID NO: 3298510 - DNA, 25 bp, Homo sapien
aaagtacagtgagtcagatcatgcc

SEQ ID NO: 3298511 - DNA, 25 bp, Homo sapien
tacatggtgacatcttattagccac

SEQ ID NO: 3298512 - DNA, 25 bp, Homo sapien
ggagagttaatgcatcacatctgaa

SEQ ID NO: 3298513 - DNA, 25 bp, Homo sapien
tgttaaaagacattgccagaaccgt

SEQ ID NO: 3298514 - DNA, 25 bp, Homo sapien
tattgatctgaaatgtgcttcccct

SEQ ID NO: 3298515 - DNA, 25 bp, Homo sapien
gttgatttcaatccaatctcataag

SEQ ID NO: 3298516 - DNA, 25 bp, Homo sapien
cataagagagctcatcacctacaaa

SEQ ID NO: 3298517 - DNA, 25 bp, Homo sapien
gagagctcatcacctacaaaagtgt

SEQ ID NO: 3298518 - DNA, 25 bp, Homo sapien
ttcaattgtgttgatttcaatccaa

SEQ ID NO: 3298519 - DNA, 25 bp, Homo sapien
tcctctatcctggtacaagtacctg

SEQ ID NO: 3298520 - DNA, 25 bp, Homo sapien
cagacaaacaattggctttggagaa

SEQ ID NO: 3298521 - DNA, 25 bp, Homo sapien
caagacaaaacgtgtcctagcagga

SEQ ID NO: 3298522 - DNA, 25 bp, Homo sapien
gtacctgatcccaccaatcaaatga

SEQ ID NO: 3298523 - DNA, 25 bp, Homo sapien
aagctgtacacttactggttttaca

SEQ ID NO: 3298524 - DNA, 25 bp, Homo sapien
ctttattcaggataggtgcaggaca

SEQ ID NO: 3298525 - DNA, 25 bp, Homo sapien
caaagcatagaattaagctgtacac

SEQ ID NO: 3298526 - DNA, 25 bp, Homo sapien
tgcaggacaaagcatagaattaagc

SEQ ID NO: 3298527 - DNA, 25 bp, Homo sapien
tgtttcatttacagtgtaagtgcag

SEQ ID NO: 3298528 - DNA, 25 bp, Homo sapien
cactgccattccgactgcccagcat

SEQ ID NO: 3298529 - DNA, 25 bp, Homo sapien
acagtgtaagtgcagagaacactgc

SEQ ID NO: 3298530 - DNA, 25 bp, Homo sapien
gagaacactgccattccgactgccc

SEQ ID NO: 3298531 - DNA, 25 bp, Homo sapien
cacagacacttgagggctgcaattc

SEQ ID NO: 3298532 - DNA, 25 bp, Homo sapien
gagggctgcaattctaggatttcag

SEQ ID NO: 3298533 - DNA, 25 bp, Homo sapien
caattctaggatttcagtacatgac

SEQ ID NO: 3298534 - DNA, 25 bp, Homo sapien
ccacacagacacttgagggctgcaa

SEQ ID NO: 3298535 - DNA, 25 bp, Homo sapien
ggaatccgtctaggcaaaatagcta

SEQ ID NO: 3298536 - DNA, 25 bp, Homo sapien
tatgaacttccaggaggaatccgtc

SEQ ID NO: 3298537 - DNA, 25 bp, Homo sapien
tagtgggtacaatgtgtcttattcc

SEQ ID NO: 3298538 - DNA, 25 bp, Homo sapien
ctcagagggcacagaataggcagaa

SEQ ID NO: 3298539 - DNA, 25 bp, Homo sapien
tcttgaaccctatagccagtgagct

SEQ ID NO: 3298540 - DNA, 25 bp, Homo sapien
caaatagtgaaacatcccatggtcc

SEQ ID NO: 3298541 - DNA, 25 bp, Homo sapien
tcagggacagaatgcccaagttact

SEQ ID NO: 3298542 - DNA, 25 bp, Homo sapien
cctaaatgtatggatgatcgttccc

SEQ ID NO: 3298543 - DNA, 25 bp, Homo sapien
gactgcccgacagaaggatcaggag

SEQ ID NO: 3298544 - DNA, 25 bp, Homo sapien
gatccttgacctagttccattgcga

SEQ ID NO: 3298545 - DNA, 25 bp, Homo sapien
tataagtcccaccacaggaattgtg

SEQ ID NO: 3298546 - DNA, 25 bp, Homo sapien
aatatttgccatgtctctcggagcc

SEQ ID NO: 3298547 - DNA, 25 bp, Homo sapien
ttacattgccggacataccccaggt

SEQ ID NO: 3298548 - DNA, 25 bp, Homo sapien
cattttgtctccactatgctgtgct

SEQ ID NO: 3298549 - DNA, 25 bp, Homo sapien
gcttcctttcatcgtgtctcacaag

SEQ ID NO: 3298550 - DNA, 25 bp, Homo sapien
taccccaggtcacttggcaagacag

SEQ ID NO: 3298551 - DNA, 25 bp, Homo sapien
caatgctttggcttagagaatatat

SEQ ID NO: 3298552 - DNA, 25 bp, Homo sapien
tcccagaaccaaatgttagaagaaa

SEQ ID NO: 3298553 - DNA, 25 bp, Homo sapien
cacttccattttaggatggtgttta

SEQ ID NO: 3298554 - DNA, 25 bp, Homo sapien
tcattttgtgtttctaaacaacatg

SEQ ID NO: 3298555 - DNA, 25 bp, Homo sapien
aattaattattcctttaagagcctg

SEQ ID NO: 3298556 - DNA, 25 bp, Homo sapien
tgaaatccacctttgacagggaaaa

SEQ ID NO: 3298557 - DNA, 25 bp, Homo sapien
cctttgacagggaaaacttgctcct

SEQ ID NO: 3298558 - DNA, 25 bp, Homo sapien
ttaattattcctttaagagcctgaa

SEQ ID NO: 3298559 - DNA, 25 bp, Homo sapien
caacacaataaacactagccccaag

SEQ ID NO: 3298560 - DNA, 25 bp, Homo sapien
caataaacactagccccaagtgacc

SEQ ID NO: 3298561 - DNA, 25 bp, Homo sapien
ggacaccaacacaataaacactagc

SEQ ID NO: 3298562 - DNA, 25 bp, Homo sapien
cactagccccaagtgacctggatat

SEQ ID NO: 3298563 - DNA, 25 bp, Homo sapien
cagagcaattatgatactggaggtt

SEQ ID NO: 3298564 - DNA, 25 bp, Homo sapien
ctttctctgcatatgatggcaccag

SEQ ID NO: 3298565 - DNA, 25 bp, Homo sapien
tgatggcaccagaccgtccaacttg

SEQ ID NO: 3298566 - DNA, 25 bp, Homo sapien
ggaggttttcaagcctcctgctttc

SEQ ID NO: 3298567 - DNA, 25 bp, Homo sapien
tttaaatcctccaagcctttactga

SEQ ID NO: 3298568 - DNA, 25 bp, Homo sapien
tagctttagtccttcatggatatat

SEQ ID NO: 3298569 - DNA, 25 bp, Homo sapien
gtccttcatggatatatgtctctcc

SEQ ID NO: 3298570 - DNA, 25 bp, Homo sapien
gtctctcctactggactaacacgtt

SEQ ID NO: 3298571 - DNA, 25 bp, Homo sapien
aaactggcttacatactctgttaaa

SEQ ID NO: 3298572 - DNA, 25 bp, Homo sapien
ccaaaaactggcttacatactctgt

SEQ ID NO: 3298573 - DNA, 25 bp, Homo sapien
gatcccattctttaaaacatgtcag

SEQ ID NO: 3298574 - DNA, 25 bp, Homo sapien
tcccactatggatcccattctttaa

SEQ ID NO: 3298575 - DNA, 25 bp, Homo sapien
ctgtctccagttaatggcaaaataa

SEQ ID NO: 3298576 - DNA, 25 bp, Homo sapien
ctccagttaatggcaaaataatagt

SEQ ID NO: 3298577 - DNA, 25 bp, Homo sapien
tgtctccagttaatggcaaaataat

SEQ ID NO: 3298578 - DNA, 25 bp, Homo sapien
tctccagttaatggcaaaataatag

SEQ ID NO: 3298579 - DNA, 25 bp, Homo sapien
tctccgcaagttgctgtacgaaatt

SEQ ID NO: 3298580 - DNA, 25 bp, Homo sapien
gcaagttgctgtacgaaattataaa

SEQ ID NO: 3298581 - DNA, 25 bp, Homo sapien
ccgcaagttgctgtacgaaattata

SEQ ID NO: 3298582 - DNA, 25 bp, Homo sapien
tctctccgcaagttgctgtacgaaa

SEQ ID NO: 3298583 - DNA, 25 bp, Homo sapien
ggaccgctgagcaccaacagccaca

SEQ ID NO: 3298584 - DNA, 25 bp, Homo sapien
tccaggacgaagtagagatcaaagg

SEQ ID NO: 3298585 - DNA, 25 bp, Homo sapien
ttgtccaggacgaagtagagatcaa

SEQ ID NO: 3298586 - DNA, 25 bp, Homo sapien
gaagtagagatcaaaggctcttctg

SEQ ID NO: 3298587 - DNA, 25 bp, Homo sapien
gacagctcgcgaaaggagttcctct

SEQ ID NO: 3298588 - DNA, 25 bp, Homo sapien
cctaagctcaggagggtcgcaaagg

SEQ ID NO: 3298589 - DNA, 25 bp, Homo sapien
ggaactcttgacgaatcccagtgga

SEQ ID NO: 3298590 - DNA, 25 bp, Homo sapien
ggcgacggcagaacaaactaggagt

SEQ ID NO: 3298591 - DNA, 25 bp, Homo sapien
tgcaggcctggcctattttagcagc

SEQ ID NO: 3298592 - DNA, 25 bp, Homo sapien
gctgtgctaaaacagcccccatgcg

SEQ ID NO: 3298593 - DNA, 25 bp, Homo sapien
ttagcagctgtgctaaaacagcccc

SEQ ID NO: 3298594 - DNA, 25 bp, Homo sapien
tattttagcagctgtgctaaaacag

SEQ ID NO: 3298595 - DNA, 25 bp, Homo sapien
tgcaaaacttgtgcaagcactcaag

SEQ ID NO: 3298596 - DNA, 25 bp, Homo sapien
gctttgggcaagctaggtctccttt

SEQ ID NO: 3298597 - DNA, 25 bp, Homo sapien
tagcaggcctctttgggagtggaaa

SEQ ID NO: 3298598 - DNA, 25 bp, Homo sapien
tgcacaaatcctctgtctactagtt

SEQ ID NO: 3298599 - DNA, 25 bp, Homo sapien
ctaattaagatcaggaggacaacac

SEQ ID NO: 3298600 - DNA, 25 bp, Homo sapien
gcgtcgcttcctgtagaaccctggg

SEQ ID NO: 3298601 - DNA, 25 bp, Homo sapien
tttgagctgagtcgaagtggacgct

SEQ ID NO: 3298602 - DNA, 25 bp, Homo sapien
gaaggaggtgacgtttctgacccta

SEQ ID NO: 3298603 - DNA, 25 bp, Homo sapien
tctgggacatcagaataaaccaagg

SEQ ID NO: 3298604 - DNA, 25 bp, Homo sapien
attgcttctgggacatcagaataaa

SEQ ID NO: 3298605 - DNA, 25 bp, Homo sapien
tgcttctgggacatcagaataaacc

SEQ ID NO: 3298606 - DNA, 25 bp, Homo sapien
cttctgggacatcagaataaaccaa

SEQ ID NO: 3298607 - DNA, 25 bp, Homo sapien
ggtctgcatgaagtcaaagggcaca

SEQ ID NO: 3298608 - DNA, 25 bp, Homo sapien
ttggcaaatacagcctcagagcgtg

SEQ ID NO: 3298609 - DNA, 25 bp, Homo sapien
cacttctgtcagtgcagtttcagca

SEQ ID NO: 3298610 - DNA, 25 bp, Homo sapien
taaccagctgacatgggtattctgg

SEQ ID NO: 3298611 - DNA, 25 bp, Homo sapien
tatttgcccagagaacaattctaca

SEQ ID NO: 3298612 - DNA, 25 bp, Homo sapien
tttccagtattttacgagcatcttc

SEQ ID NO: 3298613 - DNA, 25 bp, Homo sapien
tattactaacaatagctgcaagtct

SEQ ID NO: 3298614 - DNA, 25 bp, Homo sapien
tatatttgcccctaagtgctctgga

SEQ ID NO: 3298615 - DNA, 25 bp, Homo sapien
cctgctgccaatagggtgggatgac

SEQ ID NO: 3298616 - DNA, 25 bp, Homo sapien
ccccagggtctgatttcgctggctg

SEQ ID NO: 3298617 - DNA, 25 bp, Homo sapien
tctgatttcgctggctgaggctgtt

SEQ ID NO: 3298618 - DNA, 25 bp, Homo sapien
tgggccaagctatccggataatgtc

SEQ ID NO: 3298619 - DNA, 25 bp, Homo sapien
gccacctggggcccataagaaagta

SEQ ID NO: 3298620 - DNA, 25 bp, Homo sapien
acagcagccacctggggcccataag

SEQ ID NO: 3298621 - DNA, 25 bp, Homo sapien
aaacagagcccaattccacagcagc

SEQ ID NO: 3298622 - DNA, 25 bp, Homo sapien
tcaaacagagcccaattccacagca

SEQ ID NO: 3298623 - DNA, 25 bp, Homo sapien
tagtcgctctgtctcattctttctc

SEQ ID NO: 3298624 - DNA, 25 bp, Homo sapien
tctagtcgctctgtctcattctttc

SEQ ID NO: 3298625 - DNA, 25 bp, Homo sapien
ctagtcgctctgtctcattctttct

SEQ ID NO: 3298626 - DNA, 25 bp, Homo sapien
catgaagaagactttggaagatgaa

SEQ ID NO: 3298627 - DNA, 25 bp, Homo sapien
ttacatgaagaagactttggaagat

SEQ ID NO: 3298628 - DNA, 25 bp, Homo sapien
tacaaacacttgtatttgtttagtg

SEQ ID NO: 3298629 - DNA, 25 bp, Homo sapien
gcctccaattaaaacctcaggtaca

SEQ ID NO: 3298630 - DNA, 25 bp, Homo sapien
agaatgtttatagcaagatagcctt

SEQ ID NO: 3298631 - DNA, 25 bp, Homo sapien
tattctctaagattaacctcttgaa

SEQ ID NO: 3298632 - DNA, 25 bp, Homo sapien
ctcttgaaatatcttagggctaaat

SEQ ID NO: 3298633 - DNA, 25 bp, Homo sapien
tgaaatacagtttacagaccctgtt

SEQ ID NO: 3298634 - DNA, 25 bp, Homo sapien
gaactggaatgtctataaggtatga

SEQ ID NO: 3298635 - DNA, 25 bp, Homo sapien
ttctgtcccttgatgcttgccctgg

SEQ ID NO: 3298636 - DNA, 25 bp, Homo sapien
tgttcattcaggctttgggtaccat

SEQ ID NO: 3298637 - DNA, 25 bp, Homo sapien
cttgccctggcttggacagtgtatc

SEQ ID NO: 3298638 - DNA, 25 bp, Homo sapien
cactcaggcatgatattggacttgg

SEQ ID NO: 3298639 - DNA, 25 bp, Homo sapien
ggctctgagaggttgtctttggacc

SEQ ID NO: 3298640 - DNA, 25 bp, Homo sapien
gtaatggtccattgtcactcaggca

SEQ ID NO: 3298641 - DNA, 25 bp, Homo sapien
tctttggacctatgatcagacacct

SEQ ID NO: 3298642 - DNA, 25 bp, Homo sapien
acttaatgtggcagcatggcccttc

SEQ ID NO: 3298643 - DNA, 25 bp, Homo sapien
tccttttcatcgtattcttgaatat

SEQ ID NO: 3298644 - DNA, 25 bp, Homo sapien
cttgaatatagggatcagaactgtg

SEQ ID NO: 3298645 - DNA, 25 bp, Homo sapien
ttacacttaatgtggcagcatggcc

SEQ ID NO: 3298646 - DNA, 25 bp, Homo sapien
taaaatgtagcccttgaatattcca

SEQ ID NO: 3298647 - DNA, 25 bp, Homo sapien
gcatgtgtacacagagactttccag

SEQ ID NO: 3298648 - DNA, 25 bp, Homo sapien
acacagagactttccagagatgtag

SEQ ID NO: 3298649 - DNA, 25 bp, Homo sapien
ggcaagggcatcagcacagcaggct

SEQ ID NO: 3298650 - DNA, 25 bp, Homo sapien
gggccaagctgacgtttgctgctgc

SEQ ID NO: 3298651 - DNA, 25 bp, Homo sapien
ctggagccactccaattgctggccg

SEQ ID NO: 3298652 - DNA, 25 bp, Homo sapien
gccactccaattgctggccgcttca

SEQ ID NO: 3298653 - DNA, 25 bp, Homo sapien
ctagagggccaagctgacgtttgct

SEQ ID NO: 3298654 - DNA, 25 bp, Homo sapien
tggcatgctgcagagtagaagcccc

SEQ ID NO: 3298655 - DNA, 25 bp, Homo sapien
gatacatctgttgggtgcctcgcat

SEQ ID NO: 3298656 - DNA, 25 bp, Homo sapien
tagaagccccgtgctaatgaatgcc

SEQ ID NO: 3298657 - DNA, 25 bp, Homo sapien
caatgaatgattggcagcgggcatc

SEQ ID NO: 3298658 - DNA, 25 bp, Homo sapien
taatcccttacacgagcaaatgcga

SEQ ID NO: 3298659 - DNA, 25 bp, Homo sapien
caaggagcccggaaaatcgtcaggg

SEQ ID NO: 3298660 - DNA, 25 bp, Homo sapien
ccgaaggcttaggacccatgtgact

SEQ ID NO: 3298661 - DNA, 25 bp, Homo sapien
taaaaatgcggtcctgaagtggagc

SEQ ID NO: 3298662 - DNA, 25 bp, Homo sapien
gatgcatgcgatattgccctttaga

SEQ ID NO: 3298663 - DNA, 25 bp, Homo sapien
tataatgcggcctttcttctgctgt

SEQ ID NO: 3298664 - DNA, 25 bp, Homo sapien
gatgcctcttccgtgttttgtttta

SEQ ID NO: 3298665 - DNA, 25 bp, Homo sapien
aaatctgttagtgccccttttatct

SEQ ID NO: 3298666 - DNA, 25 bp, Homo sapien
cggataagaacctgggcctagagcg

SEQ ID NO: 3298667 - DNA, 25 bp, Homo sapien
tattagcgcggcgtagtgaggacct

SEQ ID NO: 3298668 - DNA, 25 bp, Homo sapien
tattcccagggcaggcggataagaa

SEQ ID NO: 3298669 - DNA, 25 bp, Homo sapien
gaaacgttgcgtggcaaaggcgacc

SEQ ID NO: 3298670 - DNA, 25 bp, Homo sapien
gaaaatgtccctttatgacacctta

SEQ ID NO: 3298671 - DNA, 25 bp, Homo sapien
taaattgctgcggattaaacagctg

SEQ ID NO: 3298672 - DNA, 25 bp, Homo sapien
ggcattggggcattactttctaaat

SEQ ID NO: 3298673 - DNA, 25 bp, Homo sapien
gagcccactgaggagtgctcaagca

SEQ ID NO: 3298674 - DNA, 25 bp, Homo sapien
tgctcacttcatgagccacatgtga

SEQ ID NO: 3298675 - DNA, 25 bp, Homo sapien
tcatgagccacatgtgactcaatcc

SEQ ID NO: 3298676 - DNA, 25 bp, Homo sapien
tgtcctgtacctgctcacttcatga

SEQ ID NO: 3298677 - DNA, 25 bp, Homo sapien
gacactttaggcctgtcctgtacct

SEQ ID NO: 3298678 - DNA, 25 bp, Homo sapien
cacagaattagtggccctgacattc

SEQ ID NO: 3298679 - DNA, 25 bp, Homo sapien
gcagacatacgtcccttcttgtagg

SEQ ID NO: 3298680 - DNA, 25 bp, Homo sapien
gcagagaaaggttagctgacacaga

SEQ ID NO: 3298681 - DNA, 25 bp, Homo sapien
taattaaagcctcagaggaacagtg

SEQ ID NO: 3298682 - DNA, 25 bp, Homo sapien
tactggcatccagcgaggcatctgg

SEQ ID NO: 3298683 - DNA, 25 bp, Homo sapien
tttaccagcgtttacaccacctgcg

SEQ ID NO: 3298684 - DNA, 25 bp, Homo sapien
gatgccaaggctgtccaacaatgtc

SEQ ID NO: 3298685 - DNA, 25 bp, Homo sapien
tctttcgggtaagtctccactgtag

SEQ ID NO: 3298686 - DNA, 25 bp, Homo sapien
aattctccatacctttgtaatgtgg

SEQ ID NO: 3298687 - DNA, 25 bp, Homo sapien
ttaggaacatgattgccatagcata

SEQ ID NO: 3298688 - DNA, 25 bp, Homo sapien
aattgttctagccaagattaggaac

SEQ ID NO: 3298689 - DNA, 25 bp, Homo sapien
cataatttctaagatctaagcttgc

SEQ ID NO: 3298690 - DNA, 25 bp, Homo sapien
cagcagcaaatggttcctcagaagg

SEQ ID NO: 3298691 - DNA, 25 bp, Homo sapien
tctcatgtggctgcggttggtccaa

SEQ ID NO: 3298692 - DNA, 25 bp, Homo sapien
caaacttttggaagcgtggtctcag

SEQ ID NO: 3298693 - DNA, 25 bp, Homo sapien
gttacaaacatgaggacaggtccca

SEQ ID NO: 3298694 - DNA, 25 bp, Homo sapien
ttgctcactaagcagggtcgtcccc

SEQ ID NO: 3298695 - DNA, 25 bp, Homo sapien
gaatgcagccaacgtttccagtttg

SEQ ID NO: 3298696 - DNA, 25 bp, Homo sapien
ggtcgtccccttacacatgcctgga

SEQ ID NO: 3298697 - DNA, 25 bp, Homo sapien
tgaggataaagcgaggaaacttgct

SEQ ID NO: 3298698 - DNA, 25 bp, Homo sapien
gaggatctggtgtgcacaccgcagc

SEQ ID NO: 3298699 - DNA, 25 bp, Homo sapien
tatgtggcgcatctgcgtttccgct

SEQ ID NO: 3298700 - DNA, 25 bp, Homo sapien
tacttcggcctggaagagaacggcc

SEQ ID NO: 3298701 - DNA, 25 bp, Homo sapien
tataagtccccaagacgaacaaggc

SEQ ID NO: 3298702 - DNA, 25 bp, Homo sapien
gccagcacgctctttctcgcagctg

SEQ ID NO: 3298703 - DNA, 25 bp, Homo sapien
cgcgtcggacgagcgcaaaagcgcc

SEQ ID NO: 3298704 - DNA, 25 bp, Homo sapien
tttctcgcagctgtccccgctggtg

SEQ ID NO: 3298705 - DNA, 25 bp, Homo sapien
acgagcgcaaaagcgccttctcgca

SEQ ID NO: 3298706 - DNA, 25 bp, Homo sapien
ttcctgtacgccaccgccttctggc

SEQ ID NO: 3298707 - DNA, 25 bp, Homo sapien
ggccgcggacctgaacggaggttgc

SEQ ID NO: 3298708 - DNA, 25 bp, Homo sapien
cgcggaccctctagcggtgaagctc

SEQ ID NO: 3298709 - DNA, 25 bp, Homo sapien
tgccaccccgccgacggcgtgggcc

SEQ ID NO: 3298710 - DNA, 25 bp, Homo sapien
tatgaggtcgcaccacaaaaaggag

SEQ ID NO: 3298711 - DNA, 25 bp, Homo sapien
tgcaatgagtccttcagggagcgcc

SEQ ID NO: 3298712 - DNA, 25 bp, Homo sapien
gaactggtgcgccaagtgcaatgcc

SEQ ID NO: 3298713 - DNA, 25 bp, Homo sapien
caaaaaggagtatgcgatggagccc

SEQ ID NO: 3298714 - DNA, 25 bp, Homo sapien
caggcatgtggaaaccggaaggccc

SEQ ID NO: 3298715 - DNA, 25 bp, Homo sapien
tcaagccaagttggtcccacgacgt

SEQ ID NO: 3298716 - DNA, 25 bp, Homo sapien
gaaattgaaagccaagcggttgctg

SEQ ID NO: 3298717 - DNA, 25 bp, Homo sapien
gaggcccactcataagctctgcggc

SEQ ID NO: 3298718 - DNA, 25 bp, Homo sapien
cctccaacaaagaggtagtatccaa

SEQ ID NO: 3298719 - DNA, 25 bp, Homo sapien
gagttctatcccctccaacaaagag

SEQ ID NO: 3298720 - DNA, 25 bp, Homo sapien
aagaggtagtatccaaaattgccac

SEQ ID NO: 3298721 - DNA, 25 bp, Homo sapien
cctgagttctatcccctccaacaaa

SEQ ID NO: 3298722 - DNA, 25 bp, Homo sapien
gggttcttagagtatttgtggatgc

SEQ ID NO: 3298723 - DNA, 25 bp, Homo sapien
ctaggctaagaactctgggttctta

SEQ ID NO: 3298724 - DNA, 25 bp, Homo sapien
atgcccaagggctccttttggatta

SEQ ID NO: 3298725 - DNA, 25 bp, Homo sapien
caagggctccttttggattattgtc

SEQ ID NO: 3298726 - DNA, 25 bp, Homo sapien
gtcatcatggtatgatcctcccaag

SEQ ID NO: 3298727 - DNA, 25 bp, Homo sapien
tctgctggagtactgcaggcttccc

SEQ ID NO: 3298728 - DNA, 25 bp, Homo sapien
gggtacctatcatcctgctatgaca

SEQ ID NO: 3298729 - DNA, 25 bp, Homo sapien
tataagctctgggtgactctcatgt

SEQ ID NO: 3298730 - DNA, 25 bp, Homo sapien
acctgctccggtaccttgccaacat

SEQ ID NO: 3298731 - DNA, 25 bp, Homo sapien
ttgccaacatctcccctactgcctt

SEQ ID NO: 3298732 - DNA, 25 bp, Homo sapien
tgctgccacctgctccggtaccttg

SEQ ID NO: 3298733 - DNA, 25 bp, Homo sapien
ccctactgccttcaatgccggccat

SEQ ID NO: 3298734 - DNA, 25 bp, Homo sapien
gacttcacagatataatgtccagtg

SEQ ID NO: 3298735 - DNA, 25 bp, Homo sapien
tacggctggccttagacaggataaa

SEQ ID NO: 3298736 - DNA, 25 bp, Homo sapien
tacaactgggtaatgcaggctagga

SEQ ID NO: 3298737 - DNA, 25 bp, Homo sapien
gagaaagaagtctaacctcaggact

SEQ ID NO: 3298738 - DNA, 25 bp, Homo sapien
caggtctgggtaagctaaagcgagc

SEQ ID NO: 3298739 - DNA, 25 bp, Homo sapien
taatcattcactgaggtcggtccct

SEQ ID NO: 3298740 - DNA, 25 bp, Homo sapien
tcagttacatgtgctggtgtccagc

SEQ ID NO: 3298741 - DNA, 25 bp, Homo sapien
tcctgaggttgaaatccagcgcgca

SEQ ID NO: 3298742 - DNA, 25 bp, Homo sapien
taatgcttacaactttctaagaggg

SEQ ID NO: 3298743 - DNA, 25 bp, Homo sapien
tgtctataggtgacaaacatctcca

SEQ ID NO: 3298744 - DNA, 25 bp, Homo sapien
taagtaactagaaccaccaaatatc

SEQ ID NO: 3298745 - DNA, 25 bp, Homo sapien
gagactaatttgagagtacaggtgc

SEQ ID NO: 3298746 - DNA, 25 bp, Homo sapien
acatgtccacaatgcacatgtctgt

SEQ ID NO: 3298747 - DNA, 25 bp, Homo sapien
agattatatgattaggtattagcag

SEQ ID NO: 3298748 - DNA, 25 bp, Homo sapien
caggtgaggcatctttacatctaag

SEQ ID NO: 3298749 - DNA, 25 bp, Homo sapien
aagatgctgatccaacctgagtgga

SEQ ID NO: 3298750 - DNA, 25 bp, Homo sapien
cagtgacaggtccagctccaatgtg

SEQ ID NO: 3298751 - DNA, 25 bp, Homo sapien
ttaaattctctgtcgttccctctgt

SEQ ID NO: 3298752 - DNA, 25 bp, Homo sapien
ctctgtgggaaactggacaatttat

SEQ ID NO: 3298753 - DNA, 25 bp, Homo sapien
gtgggaaactggacaatttatcaga

SEQ ID NO: 3298754 - DNA, 25 bp, Homo sapien
cagagtgggcggaactgccctgtct

SEQ ID NO: 3298755 - DNA, 25 bp, Homo sapien
cctgaagagcaacggactagagccc

SEQ ID NO: 3298756 - DNA, 25 bp, Homo sapien
ggccatgagccaaggtttatgaatg

SEQ ID NO: 3298757 - DNA, 25 bp, Homo sapien
ctcttgccgtggctctgcccggaaa

SEQ ID NO: 3298758 - DNA, 25 bp, Homo sapien
cacagcgagcatggcacatgggccc

SEQ ID NO: 3298759 - DNA, 25 bp, Homo sapien
acagcgagcatggcacatgggccct

SEQ ID NO: 3298760 - DNA, 25 bp, Homo sapien
cagcgagcatggcacatgggccctc

SEQ ID NO: 3298761 - DNA, 25 bp, Homo sapien
gcacagcgagcatggcacatgggcc

SEQ ID NO: 3298762 - DNA, 25 bp, Homo sapien
acccacgacgatggaaagctccgcg

SEQ ID NO: 3298763 - DNA, 25 bp, Homo sapien
cgacgatggaaagctccgcgttcag

SEQ ID NO: 3298764 - DNA, 25 bp, Homo sapien
gcaccacccacgacgatggaaagct

SEQ ID NO: 3298765 - DNA, 25 bp, Homo sapien
gctccgcgttcagctctgcgaaggg

SEQ ID NO: 3298766 - DNA, 25 bp, Homo sapien
actgccgccacggcgcggggctgcc

SEQ ID NO: 3298767 - DNA, 25 bp, Homo sapien
cactgccgccacggcgcggggctgc

SEQ ID NO: 3298768 - DNA, 25 bp, Homo sapien
gccgagacgacagcggtgatctttg

SEQ ID NO: 3298769 - DNA, 25 bp, Homo sapien
gggccgagacgacagcggtgatctt

SEQ ID NO: 3298770 - DNA, 25 bp, Homo sapien
agacgacagcggtgatctttgaggt

SEQ ID NO: 3298771 - DNA, 25 bp, Homo sapien
acgacagcggtgatctttgaggtat

SEQ ID NO: 3298772 - DNA, 25 bp, Homo sapien
cacagggcgcatttgtggagcttca

SEQ ID NO: 3298773 - DNA, 25 bp, Homo sapien
agggcgcatttgtggagcttcatgc

SEQ ID NO: 3298774 - DNA, 25 bp, Homo sapien
ccttcagcttgtccggccggttgaa

SEQ ID NO: 3298775 - DNA, 25 bp, Homo sapien
tgggccttcagcttgtccggccggt

SEQ ID NO: 3298776 - DNA, 25 bp, Homo sapien
ctggtggatcaacatgtctctctta

SEQ ID NO: 3298777 - DNA, 25 bp, Homo sapien
tggtggatcaacatgtctctcttac

SEQ ID NO: 3298778 - DNA, 25 bp, Homo sapien
cttgaggttgaatgcggactcgcac

SEQ ID NO: 3298779 - DNA, 25 bp, Homo sapien
agtttgtccttgaggttgaatgcgg

SEQ ID NO: 3298780 - DNA, 25 bp, Homo sapien
tgaggttgaatgcggactcgcacac

SEQ ID NO: 3298781 - DNA, 25 bp, Homo sapien
ccttgaggttgaatgcggactcgca

SEQ ID NO: 3298782 - DNA, 25 bp, Homo sapien
ttctcgcctgagtggttgtgagcgc

SEQ ID NO: 3298783 - DNA, 25 bp, Homo sapien
agtttgaggtaatgcacccgccggg

SEQ ID NO: 3298784 - DNA, 25 bp, Homo sapien
ttgtgagcgcgcagtttgaggtaat

SEQ ID NO: 3298785 - DNA, 25 bp, Homo sapien
gccgggaggacttcttgcacacctg

SEQ ID NO: 3298786 - DNA, 25 bp, Homo sapien
gcaggtagcgttcacaaggaaacac

SEQ ID NO: 3298787 - DNA, 25 bp, Homo sapien
gtggatatttgttgacacgtttgac

SEQ ID NO: 3298788 - DNA, 25 bp, Homo sapien
tggatatttgttgacacgtttgaca

SEQ ID NO: 3298789 - DNA, 25 bp, Homo sapien
gaagtggccggggtagctcagctcc

SEQ ID NO: 3298790 - DNA, 25 bp, Homo sapien
catcgggggtaagtccttgttgcag

SEQ ID NO: 3298791 - DNA, 25 bp, Homo sapien
tacatcgggggtaagtccttgttgc

SEQ ID NO: 3298792 - DNA, 25 bp, Homo sapien
ggtgcacgctcaggtcgtacatcgg

SEQ ID NO: 3298793 - DNA, 25 bp, Homo sapien
gagacttgagctggaaataggtgct

SEQ ID NO: 3298794 - DNA, 25 bp, Homo sapien
cttgagctggaaataggtgctgaac

SEQ ID NO: 3298795 - DNA, 25 bp, Homo sapien
gacttgagctggaaataggtgctga

SEQ ID NO: 3298796 - DNA, 25 bp, Homo sapien
gtgagacttgagctggaaataggtg

SEQ ID NO: 3298797 - DNA, 25 bp, Homo sapien
tgtgttttcctcatcctcctgccta

SEQ ID NO: 3298798 - DNA, 25 bp, Homo sapien
gcctactggggttcagggccaagac

SEQ ID NO: 3298799 - DNA, 25 bp, Homo sapien
tcctcctgcctactggggttcaggg

SEQ ID NO: 3298800 - DNA, 25 bp, Homo sapien
tttcctcatcctcctgcctactggg

SEQ ID NO: 3298801 - DNA, 25 bp, Homo sapien
ccgtgtcctgaaggccataccttgt

SEQ ID NO: 3298802 - DNA, 25 bp, Homo sapien
gccaccaccgtgtcctgaaggccat

SEQ ID NO: 3298803 - DNA, 25 bp, Homo sapien
caccgtgtcctgaaggccatacctt

SEQ ID NO: 3298804 - DNA, 25 bp, Homo sapien
caccaccgtgtcctgaaggccatac

SEQ ID NO: 3298805 - DNA, 25 bp, Homo sapien
gggcaaaggcatggccacatgcaat

SEQ ID NO: 3298806 - DNA, 25 bp, Homo sapien
tgcaatgcattggaagggcttctca

SEQ ID NO: 3298807 - DNA, 25 bp, Homo sapien
cacatgcaatgcattggaagggctt

SEQ ID NO: 3298808 - DNA, 25 bp, Homo sapien
caaaggcatggccacatgcaatgca

SEQ ID NO: 3298809 - DNA, 25 bp, Homo sapien
ttttggtgaatgacttgtcacagta

SEQ ID NO: 3298810 - DNA, 25 bp, Homo sapien
ttggtgaatgacttgtcacagtatg

SEQ ID NO: 3298811 - DNA, 25 bp, Homo sapien
tttggtgaatgacttgtcacagtat

SEQ ID NO: 3298812 - DNA, 25 bp, Homo sapien
agagtcaaagatggccacggtgccc

SEQ ID NO: 3298813 - DNA, 25 bp, Homo sapien
ttcagcattggtggagagtcaaaga

SEQ ID NO: 3298814 - DNA, 25 bp, Homo sapien
ctttagcccgtggggtcttcagcat

SEQ ID NO: 3298815 - DNA, 25 bp, Homo sapien
catggggcagcagggtttggtcctt

SEQ ID NO: 3298816 - DNA, 25 bp, Homo sapien
gtgcagcagcactgtacaccttcac

SEQ ID NO: 3298817 - DNA, 25 bp, Homo sapien
attcccaccaggattgggatgccca

SEQ ID NO: 3298818 - DNA, 25 bp, Homo sapien
gtagggctgcatcaccagtgcctgg

SEQ ID NO: 3298819 - DNA, 25 bp, Homo sapien
agtgcctggatctccaccattccac

SEQ ID NO: 3298820 - DNA, 25 bp, Homo sapien
gctgccgaaggtgtgtagattgtgt

SEQ ID NO: 3298821 - DNA, 25 bp, Homo sapien
tggtgaccagcgagactgtgtccag

SEQ ID NO: 3298822 - DNA, 25 bp, Homo sapien
ctgccgaaggtgtgtagattgtgta

SEQ ID NO: 3298823 - DNA, 25 bp, Homo sapien
ccaggtcgggggcatttctttggca

SEQ ID NO: 3298824 - DNA, 25 bp, Homo sapien
ggctggatagcaggggacgcattga

SEQ ID NO: 3298825 - DNA, 25 bp, Homo sapien
gctggatagcaggggacgcattgac

SEQ ID NO: 3298826 - DNA, 25 bp, Homo sapien
atcatccaatggctggatagcaggg

SEQ ID NO: 3298827 - DNA, 25 bp, Homo sapien
ctcatcatccaatggctggatagca

SEQ ID NO: 3298828 - DNA, 25 bp, Homo sapien
taatgatgggacagctagaatggtc

SEQ ID NO: 3298829 - DNA, 25 bp, Homo sapien
atgggacagctagaatggtctggtt

SEQ ID NO: 3298830 - DNA, 25 bp, Homo sapien
catccagtaatgatgggacagctag

SEQ ID NO: 3298831 - DNA, 25 bp, Homo sapien
ggacagctagaatggtctggttgtc

SEQ ID NO: 3298832 - DNA, 25 bp, Homo sapien
tgttataggaggtatggacaattgt

SEQ ID NO: 3298833 - DNA, 25 bp, Homo sapien
gacaattgtgggatgtgaagctttg

SEQ ID NO: 3298834 - DNA, 25 bp, Homo sapien
aagctttgaacatggccagtttcca

SEQ ID NO: 3298835 - DNA, 25 bp, Homo sapien
gaaattatactagagttgttatagg

SEQ ID NO: 3298836 - DNA, 25 bp, Homo sapien
ctggcccatgttcatctttataagc

SEQ ID NO: 3298837 - DNA, 25 bp, Homo sapien
ttctggttaagagggcagaatcatc

SEQ ID NO: 3298838 - DNA, 25 bp, Homo sapien
cacttctggttaagagggcagaatc

SEQ ID NO: 3298839 - DNA, 25 bp, Homo sapien
tataagcatgaatatcatctctgaa

SEQ ID NO: 3298840 - DNA, 25 bp, Homo sapien
tatctgtagtaatctgcacctccac

SEQ ID NO: 3298841 - DNA, 25 bp, Homo sapien
tgttttaaccagctgaattactctg

SEQ ID NO: 3298842 - DNA, 25 bp, Homo sapien
gcacctccaccttagtagcagcatg

SEQ ID NO: 3298843 - DNA, 25 bp, Homo sapien
aacaggcagggagtattctttatct

SEQ ID NO: 3298844 - DNA, 25 bp, Homo sapien
gttcaaagttgaaattacagtactg

SEQ ID NO: 3298845 - DNA, 25 bp, Homo sapien
aatgtatagttcagagttcaaagtt

SEQ ID NO: 3298846 - DNA, 25 bp, Homo sapien
tgagcatttgacaagttcacacaat

SEQ ID NO: 3298847 - DNA, 25 bp, Homo sapien
ttttcttgatgagctttctctggca

SEQ ID NO: 3298848 - DNA, 25 bp, Homo sapien
gaattttgtaaccagtatcatcagg

SEQ ID NO: 3298849 - DNA, 25 bp, Homo sapien
tttgtaaccagtatcatcaggtaaa

SEQ ID NO: 3298850 - DNA, 25 bp, Homo sapien
aattttgtaaccagtatcatcaggt

SEQ ID NO: 3298851 - DNA, 25 bp, Homo sapien
tcttctgtttgagatcatgtgtcat

SEQ ID NO: 3298852 - DNA, 25 bp, Homo sapien
cataaaataaattctcatctgaact

SEQ ID NO: 3298853 - DNA, 25 bp, Homo sapien
taaattctcatctgaacttggtttc

SEQ ID NO: 3298854 - DNA, 25 bp, Homo sapien
aattctcatctgaacttggtttcat

SEQ ID NO: 3298855 - DNA, 25 bp, Homo sapien
aaaataaattctcatctgaacttgg

SEQ ID NO: 3298856 - DNA, 25 bp, Homo sapien
ggccatccttcactcgcagctttcg

SEQ ID NO: 3298857 - DNA, 25 bp, Homo sapien
actcgcagctttcggtttgctttca

SEQ ID NO: 3298858 - DNA, 25 bp, Homo sapien
atccttcactcgcagctttcggttt

SEQ ID NO: 3298859 - DNA, 25 bp, Homo sapien
cttcactcgcagctttcggtttgct

SEQ ID NO: 3298860 - DNA, 25 bp, Homo sapien
cacatgaatgactattaagttctgc

SEQ ID NO: 3298861 - DNA, 25 bp, Homo sapien
taagttctgcttgcttggtcttaaa

SEQ ID NO: 3298862 - DNA, 25 bp, Homo sapien
cttggtgtccacaagttagtagtgg

SEQ ID NO: 3298863 - DNA, 25 bp, Homo sapien
cagctgaaattctaacctagccaca

SEQ ID NO: 3298864 - DNA, 25 bp, Homo sapien
gcaaatcgtgtttaagcaaagctat

SEQ ID NO: 3298865 - DNA, 25 bp, Homo sapien
ctgactggtatgctagaggccttcc

SEQ ID NO: 3298866 - DNA, 25 bp, Homo sapien
taggtgacattgctcctaactgcaa

SEQ ID NO: 3298867 - DNA, 25 bp, Homo sapien
tcttgttatatcgaggtagggtcct

SEQ ID NO: 3298868 - DNA, 25 bp, Homo sapien
agatggctcggatttgatttgcaag

SEQ ID NO: 3298869 - DNA, 25 bp, Homo sapien
cggatttgatttgcaaggcgggaaa

SEQ ID NO: 3298870 - DNA, 25 bp, Homo sapien
tactgtcgttagagaagatggctcg

SEQ ID NO: 3298871 - DNA, 25 bp, Homo sapien
ctaataggcatcacaaatactgtcg

SEQ ID NO: 3298872 - DNA, 25 bp, Homo sapien
aatctccactcaagccagtacatcc

SEQ ID NO: 3298873 - DNA, 25 bp, Homo sapien
tgatctccaatatgaatctccactc

SEQ ID NO: 3298874 - DNA, 25 bp, Homo sapien
actgatctccaatatgaatctccac

SEQ ID NO: 3298875 - DNA, 25 bp, Homo sapien
ctccactcaagccagtacatcccat

SEQ ID NO: 3298876 - DNA, 25 bp, Homo sapien
agacttcttgcctctaacctgagct

SEQ ID NO: 3298877 - DNA, 25 bp, Homo sapien
aacctgagctctctcaattcaactt

SEQ ID NO: 3298878 - DNA, 25 bp, Homo sapien
ttcttgcctctaacctgagctctct

SEQ ID NO: 3298879 - DNA, 25 bp, Homo sapien
tcaattcaacttccctggaatgtgc

SEQ ID NO: 3298880 - DNA, 25 bp, Homo sapien
ctcttttcctgccaattctaaagaa

SEQ ID NO: 3298881 - DNA, 25 bp, Homo sapien
caagacaggcgttcatcagctcttt

SEQ ID NO: 3298882 - DNA, 25 bp, Homo sapien
tttcctgccaattctaaagaaaagc

SEQ ID NO: 3298883 - DNA, 25 bp, Homo sapien
gtctcacaagacaggcgttcatcag

SEQ ID NO: 3298884 - DNA, 25 bp, Homo sapien
tttccagttgaattatactcttcgt

SEQ ID NO: 3298885 - DNA, 25 bp, Homo sapien
tcttcgtatacaaattcaattggaa

SEQ ID NO: 3298886 - DNA, 25 bp, Homo sapien
ctgagtccaacattccatgtgatgc

SEQ ID NO: 3298887 - DNA, 25 bp, Homo sapien
aaactgagtccaacattccatgtga

SEQ ID NO: 3298888 - DNA, 25 bp, Homo sapien
aggatgtggcttctttgaaagacat

SEQ ID NO: 3298889 - DNA, 25 bp, Homo sapien
ctttgtaaaggatgtggcttctttg

SEQ ID NO: 3298890 - DNA, 25 bp, Homo sapien
ttgtaaaggatgtggcttctttgaa

SEQ ID NO: 3298891 - DNA, 25 bp, Homo sapien
aaaggatgtggcttctttgaaagac

SEQ ID NO: 3298892 - DNA, 25 bp, Homo sapien
gataaaatgtaacacgaacaccgat

SEQ ID NO: 3298893 - DNA, 25 bp, Homo sapien
tcaggtccttgaggtcactaggcac

SEQ ID NO: 3298894 - DNA, 25 bp, Homo sapien
tgttaagtcaacaccttgcatagga

SEQ ID NO: 3298895 - DNA, 25 bp, Homo sapien
gatttcgctgatgttgcctgcaatg

SEQ ID NO: 3298896 - DNA, 25 bp, Homo sapien
tcataagctagatcaaaggcacatc

SEQ ID NO: 3298897 - DNA, 25 bp, Homo sapien
tagggtgtataccaaactggatcat

SEQ ID NO: 3298898 - DNA, 25 bp, Homo sapien
cttcacagcctggatcatagggtgt

SEQ ID NO: 3298899 - DNA, 25 bp, Homo sapien
gatcaaaggcacatctaaagcccag

SEQ ID NO: 3298900 - DNA, 25 bp, Homo sapien
tcttgattaatatggtaagatctgg

SEQ ID NO: 3298901 - DNA, 25 bp, Homo sapien
gagggactgatattagagttaggcc

SEQ ID NO: 3298902 - DNA, 25 bp, Homo sapien
tctggagggactgatattagagtta

SEQ ID NO: 3298903 - DNA, 25 bp, Homo sapien
tatggtaagatctggagggactgat

SEQ ID NO: 3298904 - DNA, 25 bp, Homo sapien
caccaagagcaacctgccagaaagc

SEQ ID NO: 3298905 - DNA, 25 bp, Homo sapien
cagaaagcttaagggcctccatcac

SEQ ID NO: 3298906 - DNA, 25 bp, Homo sapien
tgtggcgaagggctcgtccataaca

SEQ ID NO: 3298907 - DNA, 25 bp, Homo sapien
gcgaagggctcgtccataacatttt

SEQ ID NO: 3298908 - DNA, 25 bp, Homo sapien
gaaacacttctccatgcctagcaca

SEQ ID NO: 3298909 - DNA, 25 bp, Homo sapien
accagggagccagtaggccacgcat

SEQ ID NO: 3298910 - DNA, 25 bp, Homo sapien
ctagcacagaattgcaccagggagc

SEQ ID NO: 3298911 - DNA, 25 bp, Homo sapien
gccagtaggccacgcatgtgcttcc

SEQ ID NO: 3298912 - DNA, 25 bp, Homo sapien
tacgtcctatatgcagatggttcca

SEQ ID NO: 3298913 - DNA, 25 bp, Homo sapien
aatctcttggaacctcgcccttcag

SEQ ID NO: 3298914 - DNA, 25 bp, Homo sapien
aacggagacccataacatttctacg

SEQ ID NO: 3298915 - DNA, 25 bp, Homo sapien
ccttcagtgaaggtcctcagtttta

SEQ ID NO: 3298916 - DNA, 25 bp, Homo sapien
aaagcctttcgctaggaattctgaa

SEQ ID NO: 3298917 - DNA, 25 bp, Homo sapien
atcctgtgtcactgctttgatcatg

SEQ ID NO: 3298918 - DNA, 25 bp, Homo sapien
ttgtaaagcctttcgctaggaattc

SEQ ID NO: 3298919 - DNA, 25 bp, Homo sapien
ctgaagttagtgactcatggggttc

SEQ ID NO: 3298920 - DNA, 25 bp, Homo sapien
tctgtgaaaaaagtctataggagct

SEQ ID NO: 3298921 - DNA, 25 bp, Homo sapien
gaaaaaagtctataggagcttgatg

SEQ ID NO: 3298922 - DNA, 25 bp, Homo sapien
aagtctataggagcttgatggggat

SEQ ID NO: 3298923 - DNA, 25 bp, Homo sapien
agtctataggagcttgatggggata

SEQ ID NO: 3298924 - DNA, 25 bp, Homo sapien
taattttattgcagacatcttccac

SEQ ID NO: 3298925 - DNA, 25 bp, Homo sapien
tcgtgccttttgtctgaaatgtgct

SEQ ID NO: 3298926 - DNA, 25 bp, Homo sapien
catttgctggaattctagttgtcct

SEQ ID NO: 3298927 - DNA, 25 bp, Homo sapien
tccacgtggtcctctctaatttctg

SEQ ID NO: 3298928 - DNA, 25 bp, Homo sapien
agcacacagcggtatccaaggtgcc

SEQ ID NO: 3298929 - DNA, 25 bp, Homo sapien
tcatttgtcagcacacagcggtatc

SEQ ID NO: 3298930 - DNA, 25 bp, Homo sapien
tgtcagcacacagcggtatccaagg

SEQ ID NO: 3298931 - DNA, 25 bp, Homo sapien
acagcggtatccaaggtgcctggac

SEQ ID NO: 3298932 - DNA, 25 bp, Homo sapien
aagcaaagccgtctgaagccactca

SEQ ID NO: 3298933 - DNA, 25 bp, Homo sapien
tctgaagccactcacacattgatct

SEQ ID NO: 3298934 - DNA, 25 bp, Homo sapien
gccgtctgaagccactcacacattg

SEQ ID NO: 3298935 - DNA, 25 bp, Homo sapien
aagccgtctgaagccactcacacat

SEQ ID NO: 3298936 - DNA, 25 bp, Homo sapien
atgaaacctgccactcctgaaccat

SEQ ID NO: 3298937 - DNA, 25 bp, Homo sapien
cttctatggtccagtcgtgaatatt

SEQ ID NO: 3298938 - DNA, 25 bp, Homo sapien
ctcctggaggagtcattatcttcta

SEQ ID NO: 3298939 - DNA, 25 bp, Homo sapien
ttctatggtccagtcgtgaatattc

SEQ ID NO: 3298940 - DNA, 25 bp, Homo sapien
tctatggtccagtcgtgaatattca

SEQ ID NO: 3298941 - DNA, 25 bp, Homo sapien
taaggttttacatgggtcatctgag

SEQ ID NO: 3298942 - DNA, 25 bp, Homo sapien
acatgggtcatctgagcagctacac

SEQ ID NO: 3298943 - DNA, 25 bp, Homo sapien
tttacatgggtcatctgagcagcta

SEQ ID NO: 3298944 - DNA, 25 bp, Homo sapien
ttaaggttttacatgggtcatctga

SEQ ID NO: 3298945 - DNA, 25 bp, Homo sapien
ttccttcagagagggtctttacgtc

SEQ ID NO: 3298946 - DNA, 25 bp, Homo sapien
gatgtgtcctgaccatgtaagcgct

SEQ ID NO: 3298947 - DNA, 25 bp, Homo sapien
gctgactacttgcagagggtgatgt

SEQ ID NO: 3298948 - DNA, 25 bp, Homo sapien
tgtaagcgctctgtcattatacttc

SEQ ID NO: 3298949 - DNA, 25 bp, Homo sapien
caaggatttgttattgtgcccaaag

SEQ ID NO: 3298950 - DNA, 25 bp, Homo sapien
catgtgtgccctgaatgtagaattt

SEQ ID NO: 3298951 - DNA, 25 bp, Homo sapien
tcatcatattggaaccctcaggtaa

SEQ ID NO: 3298952 - DNA, 25 bp, Homo sapien
gtatcttgtgtgaatgacttaatag

SEQ ID NO: 3298953 - DNA, 25 bp, Homo sapien
gagtaaagctgaggtttaatgttca

SEQ ID NO: 3298954 - DNA, 25 bp, Homo sapien
ttaaagaaggcattaagaacctata

SEQ ID NO: 3298955 - DNA, 25 bp, Homo sapien
ttctggcgcaagatttcaaagcttt

SEQ ID NO: 3298956 - DNA, 25 bp, Homo sapien
tgtttattacgaatgacctactagt

SEQ ID NO: 3298957 - DNA, 25 bp, Homo sapien
gggaggataacacattgacatggtc

SEQ ID NO: 3298958 - DNA, 25 bp, Homo sapien
tagctcccgtctatgcagcaatggt

SEQ ID NO: 3298959 - DNA, 25 bp, Homo sapien
gataccgggcaaaagactctctaca

SEQ ID NO: 3298960 - DNA, 25 bp, Homo sapien
tagagacagtaacagtagctcccgt

SEQ ID NO: 3298961 - DNA, 25 bp, Homo sapien
gagtcagcagtcttacctactagaa

SEQ ID NO: 3298962 - DNA, 25 bp, Homo sapien
tctatttactgggaggcaaaagcct

SEQ ID NO: 3298963 - DNA, 25 bp, Homo sapien
cctggactcatgtcagaggcgtatt

SEQ ID NO: 3298964 - DNA, 25 bp, Homo sapien
cagttactttaggaaatggtgccac

SEQ ID NO: 3298965 - DNA, 25 bp, Homo sapien
ttatcccagcctgatagctcatctg

SEQ ID NO: 3298966 - DNA, 25 bp, Homo sapien
aagtctttatcccagcctgatagct

SEQ ID NO: 3298967 - DNA, 25 bp, Homo sapien
cccagcctgatagctcatctggagg

SEQ ID NO: 3298968 - DNA, 25 bp, Homo sapien
gtctttatcccagcctgatagctca

SEQ ID NO: 3298969 - DNA, 25 bp, Homo sapien
tgcaaaggtgatggaaggctccgtg

SEQ ID NO: 3298970 - DNA, 25 bp, Homo sapien
caaaggtgatggaaggctccgtgct

SEQ ID NO: 3298971 - DNA, 25 bp, Homo sapien
tgctttcagtccctcccaattaaaa

SEQ ID NO: 3298972 - DNA, 25 bp, Homo sapien
ggtgatggaaggctccgtgctttca

SEQ ID NO: 3298973 - DNA, 25 bp, Homo sapien
cttaatgtcatttattccattcttc

SEQ ID NO: 3298974 - DNA, 25 bp, Homo sapien
atgtcatttattccattcttcagat

SEQ ID NO: 3298975 - DNA, 25 bp, Homo sapien
gatttcccagcctttctgttggatt

SEQ ID NO: 3298976 - DNA, 25 bp, Homo sapien
tcagatttcccagcctttctgttgg

SEQ ID NO: 3298977 - DNA, 25 bp, Homo sapien
cgtgttatcttcctgggaaaatcca

SEQ ID NO: 3298978 - DNA, 25 bp, Homo sapien
caaatcctcaggtcgtcgtgttatc

SEQ ID NO: 3298979 - DNA, 25 bp, Homo sapien
ggtcgtcgtgttatcttcctgggaa

SEQ ID NO: 3298980 - DNA, 25 bp, Homo sapien
tgcaaagcctccgaatcaaatcctc

SEQ ID NO: 3298981 - DNA, 25 bp, Homo sapien
gaagaggtggctgcataaaacttga

SEQ ID NO: 3298982 - DNA, 25 bp, Homo sapien
actgaagtcatgtcccttgttgaga

SEQ ID NO: 3298983 - DNA, 25 bp, Homo sapien
gaatgacttcaggagctacatattc

SEQ ID NO: 3298984 - DNA, 25 bp, Homo sapien
tccacactgaagtcatgtcccttgt

SEQ ID NO: 3298985 - DNA, 25 bp, Homo sapien
cacactgaagtcatgtcccttgttg

SEQ ID NO: 3298986 - DNA, 25 bp, Homo sapien
cgttctactcccacttagagggaga

SEQ ID NO: 3298987 - DNA, 25 bp, Homo sapien
tctcatcgttctactcccacttaga

SEQ ID NO: 3298988 - DNA, 25 bp, Homo sapien
catcgttctactcccacttagaggg

SEQ ID NO: 3298989 - DNA, 25 bp, Homo sapien
tctactcccacttagagggagaaca

SEQ ID NO: 3298990 - DNA, 25 bp, Homo sapien
caatttaaggtaaccctcagcatct

SEQ ID NO: 3298991 - DNA, 25 bp, Homo sapien
aatttaaggtaaccctcagcatcta

SEQ ID NO: 3298992 - DNA, 25 bp, Homo sapien
atacctagtcgatgcaggtaatcaa

SEQ ID NO: 3298993 - DNA, 25 bp, Homo sapien
agataatacctagtcgatgcaggta

SEQ ID NO: 3298994 - DNA, 25 bp, Homo sapien
acgcagaatttggaggtgggttcat

SEQ ID NO: 3298995 - DNA, 25 bp, Homo sapien
caagcaacgcagaatttggaggtgg

SEQ ID NO: 3298996 - DNA, 25 bp, Homo sapien
cacaagcaacgcagaatttggaggt

SEQ ID NO: 3298997 - DNA, 25 bp, Homo sapien
tgtcacacaagcaacgcagaatttg

SEQ ID NO: 3298998 - DNA, 25 bp, Homo sapien
gtcccttaatatactccagagctcc

SEQ ID NO: 3298999 - DNA, 25 bp, Homo sapien
ctgtcccttaatatactccagagct

SEQ ID NO: 3299000 - DNA, 25 bp, Homo sapien
cccttaatatactccagagctcccc

SEQ ID NO: 3299001 - DNA, 25 bp, Homo sapien
cttaatatactccagagctccccac

SEQ ID NO: 3299002 - DNA, 25 bp, Homo sapien
catacttattgtccttgaaagtacg

SEQ ID NO: 3299003 - DNA, 25 bp, Homo sapien
gcctccagaagcatgtatacatact

SEQ ID NO: 3299004 - DNA, 25 bp, Homo sapien
tattgtccttgaaagtacgatataa

SEQ ID NO: 3299005 - DNA, 25 bp, Homo sapien
catgtatacatacttattgtccttg

SEQ ID NO: 3299006 - DNA, 25 bp, Homo sapien
gatcctcttctctgagtagacatgc

SEQ ID NO: 3299007 - DNA, 25 bp, Homo sapien
tcttctctgagtagacatgctcctg

SEQ ID NO: 3299008 - DNA, 25 bp, Homo sapien
tcctcttctctgagtagacatgctc

SEQ ID NO: 3299009 - DNA, 25 bp, Homo sapien
tctctgagtagacatgctcctgctg

SEQ ID NO: 3299010 - DNA, 25 bp, Homo sapien
cagatgcttgaaacgtaaacccctt

SEQ ID NO: 3299011 - DNA, 25 bp, Homo sapien
cttctctcagatgcttgaaacgtaa

SEQ ID NO: 3299012 - DNA, 25 bp, Homo sapien
tctctcagatgcttgaaacgtaaac

SEQ ID NO: 3299013 - DNA, 25 bp, Homo sapien
tctcagatgcttgaaacgtaaaccc

SEQ ID NO: 3299014 - DNA, 25 bp, Homo sapien
cagcttccagttagacatggaccgc

SEQ ID NO: 3299015 - DNA, 25 bp, Homo sapien
tgcaataatctcaaggttctggaat

SEQ ID NO: 3299016 - DNA, 25 bp, Homo sapien
ggacagcttccagttagacatggac

SEQ ID NO: 3299017 - DNA, 25 bp, Homo sapien
ccaccaacgcccagtgttgcaataa

SEQ ID NO: 3299018 - DNA, 25 bp, Homo sapien
atatccttcaaggtatttttgcagc

SEQ ID NO: 3299019 - DNA, 25 bp, Homo sapien
tgtaccgacagtttggttgaatgtt

SEQ ID NO: 3299020 - DNA, 25 bp, Homo sapien
tcatcatcacggttcaggtttgcca

SEQ ID NO: 3299021 - DNA, 25 bp, Homo sapien
agctcttcaaatgtaccgacagttt

SEQ ID NO: 3299022 - DNA, 25 bp, Homo sapien
tctcgatctataaccaggcatgcaa

SEQ ID NO: 3299023 - DNA, 25 bp, Homo sapien
taatgttagctgacctgacatcatc

SEQ ID NO: 3299024 - DNA, 25 bp, Homo sapien
aataatgttagctgacctgacatca

SEQ ID NO: 3299025 - DNA, 25 bp, Homo sapien
gatctataaccaggcatgcaacatc

SEQ ID NO: 3299026 - DNA, 25 bp, Homo sapien
atcagctgtggttgatcatggcctt

SEQ ID NO: 3299027 - DNA, 25 bp, Homo sapien
ttatcagctgtggttgatcatggcc

SEQ ID NO: 3299028 - DNA, 25 bp, Homo sapien
gctgtggttgatcatggccttctgt

SEQ ID NO: 3299029 - DNA, 25 bp, Homo sapien
agctgtggttgatcatggccttctg

SEQ ID NO: 3299030 - DNA, 25 bp, Homo sapien
cttcctcgccctctctaatgatgta

SEQ ID NO: 3299031 - DNA, 25 bp, Homo sapien
agccattcgggcatgtagcacctga

SEQ ID NO: 3299032 - DNA, 25 bp, Homo sapien
cgggcatgtagcacctgattggtta

SEQ ID NO: 3299033 - DNA, 25 bp, Homo sapien
ggcccagtcagccattcgggcatgt

SEQ ID NO: 3299034 - DNA, 25 bp, Homo sapien
tgtagcacctgattggttattttca

SEQ ID NO: 3299035 - DNA, 25 bp, Homo sapien
tgccaggtacgtaagtcatattatt

SEQ ID NO: 3299036 - DNA, 25 bp, Homo sapien
catactgcataactgccaggtacgt

SEQ ID NO: 3299037 - DNA, 25 bp, Homo sapien
ttttcattgtcgttaatctgtacac

SEQ ID NO: 3299038 - DNA, 25 bp, Homo sapien
gttaatctgtacactccgttctgaa

SEQ ID NO: 3299039 - DNA, 25 bp, Homo sapien
ctatatcatgctttacagttctcat

SEQ ID NO: 3299040 - DNA, 25 bp, Homo sapien
tgcatgacagatttagcctgttttt

SEQ ID NO: 3299041 - DNA, 25 bp, Homo sapien
ccaaatcaactcctaaactgcatga

SEQ ID NO: 3299042 - DNA, 25 bp, Homo sapien
tcccaaatcaactcctaaactgcat

SEQ ID NO: 3299043 - DNA, 25 bp, Homo sapien
aactgcatgacagatttagcctgtt

SEQ ID NO: 3299044 - DNA, 25 bp, Homo sapien
cacttccaagcagtcaatgatcttg

SEQ ID NO: 3299045 - DNA, 25 bp, Homo sapien
aggtaaattcttcagcaaggataca

SEQ ID NO: 3299046 - DNA, 25 bp, Homo sapien
caagcagtcaatgatcttggttaat

SEQ ID NO: 3299047 - DNA, 25 bp, Homo sapien
cttccaagcagtcaatgatcttggt

SEQ ID NO: 3299048 - DNA, 25 bp, Homo sapien
tgtattgttcatctctagcttgggc

SEQ ID NO: 3299049 - DNA, 25 bp, Homo sapien
ggctgtcctcctcattatattctgg

SEQ ID NO: 3299050 - DNA, 25 bp, Homo sapien
tacctctcgatctagtgcccatgtt

SEQ ID NO: 3299051 - DNA, 25 bp, Homo sapien
tatattctggaatacctctcgatct

SEQ ID NO: 3299052 - DNA, 25 bp, Homo sapien
aaatgtggtccacatagggatggag

SEQ ID NO: 3299053 - DNA, 25 bp, Homo sapien
tctccccttggaacacctctagtcg

SEQ ID NO: 3299054 - DNA, 25 bp, Homo sapien
attgtataaaatggcaagctcccca

SEQ ID NO: 3299055 - DNA, 25 bp, Homo sapien
cacagaggcagtccttgtacaattg

SEQ ID NO: 3299056 - DNA, 25 bp, Homo sapien
ccttgctgatagtttctcccataca

SEQ ID NO: 3299057 - DNA, 25 bp, Homo sapien
gctgatagtttctcccatacatgca

SEQ ID NO: 3299058 - DNA, 25 bp, Homo sapien
actgatttttattaagggcatctgt

SEQ ID NO: 3299059 - DNA, 25 bp, Homo sapien
aactcccttgctgatagtttctccc

SEQ ID NO: 3299060 - DNA, 25 bp, Homo sapien
ggaaccaagcagatccagaaactgc

SEQ ID NO: 3299061 - DNA, 25 bp, Homo sapien
gcaacttgccagatgtctctgatta

SEQ ID NO: 3299062 - DNA, 25 bp, Homo sapien
ttccaccagacattcagcatgagct

SEQ ID NO: 3299063 - DNA, 25 bp, Homo sapien
tgtctctgattaatttgcctgtgtt

SEQ ID NO: 3299064 - DNA, 25 bp, Homo sapien
ttgcctgtgttccaccagacattca

SEQ ID NO: 3299065 - DNA, 25 bp, Homo sapien
tgttccgcagagcatcagtggtgag

SEQ ID NO: 3299066 - DNA, 25 bp, Homo sapien
cactttatctggagaggcctgaagc

SEQ ID NO: 3299067 - DNA, 25 bp, Homo sapien
tcttccggtggacctcaagaggcac

SEQ ID NO: 3299068 - DNA, 25 bp, Homo sapien
tcataggtccgggttgttggctcag

SEQ ID NO: 3299069 - DNA, 25 bp, Homo sapien
aactttccaggtgcgcagcttgtca

SEQ ID NO: 3299070 - DNA, 25 bp, Homo sapien
aggtgcgcagcttgtcacctcggcg

SEQ ID NO: 3299071 - DNA, 25 bp, Homo sapien
cgggtaactttccaggtgcgcagct

SEQ ID NO: 3299072 - DNA, 25 bp, Homo sapien
cagacagccgggtaactttccaggt

SEQ ID NO: 3299073 - DNA, 25 bp, Homo sapien
ccggtgcagaggagacacgcaggga

SEQ ID NO: 3299074 - DNA, 25 bp, Homo sapien
gctactgcctggatagttgggcgcc

SEQ ID NO: 3299075 - DNA, 25 bp, Homo sapien
cagtcgctccggctacgtgtgagcc

SEQ ID NO: 3299076 - DNA, 25 bp, Homo sapien
ggttagcgcgatgcgggcaggagct

SEQ ID NO: 3299077 - DNA, 25 bp, Homo sapien
accagcaaattcacggaggacaagg

SEQ ID NO: 3299078 - DNA, 25 bp, Homo sapien
tctggagttgtgagatctccatgtg

SEQ ID NO: 3299079 - DNA, 25 bp, Homo sapien
tgtgctctggagttgtgagatctcc

SEQ ID NO: 3299080 - DNA, 25 bp, Homo sapien
aattcacggaggacaagggcagttt

SEQ ID NO: 3299081 - DNA, 25 bp, Homo sapien
tgctgagaactgacctccagaaaca

SEQ ID NO: 3299082 - DNA, 25 bp, Homo sapien
tggcttctgagggaaactttcctcc

SEQ ID NO: 3299083 - DNA, 25 bp, Homo sapien
gcttctgagggaaactttcctccat

SEQ ID NO: 3299084 - DNA, 25 bp, Homo sapien
tctgctgagaactgacctccagaaa

SEQ ID NO: 3299085 - DNA, 25 bp, Homo sapien
gatcaccatgtaccacagcctcaaa

SEQ ID NO: 3299086 - DNA, 25 bp, Homo sapien
tctgggtttcggctgaagttcagtt

SEQ ID NO: 3299087 - DNA, 25 bp, Homo sapien
cacaatcatacaactcactgtctgt

SEQ ID NO: 3299088 - DNA, 25 bp, Homo sapien
gacagtgcccatgtgacaaaattat

SEQ ID NO: 3299089 - DNA, 25 bp, Homo sapien
agaatggagccatgtgcccccgact

SEQ ID NO: 3299090 - DNA, 25 bp, Homo sapien
ccgtgagtgcagaatggagccatgt

SEQ ID NO: 3299091 - DNA, 25 bp, Homo sapien
agtgcagaatggagccatgtgcccc

SEQ ID NO: 3299092 - DNA, 25 bp, Homo sapien
aatggagccatgtgcccccgactca

SEQ ID NO: 3299093 - DNA, 25 bp, Homo sapien
cacccatccatctgggtggtcttca

SEQ ID NO: 3299094 - DNA, 25 bp, Homo sapien
ctgcttgctcttgcaccacccatcc

SEQ ID NO: 3299095 - DNA, 25 bp, Homo sapien
accacccatccatctgggtggtctt

SEQ ID NO: 3299096 - DNA, 25 bp, Homo sapien
actgtggccctgcttgctcttgcac

SEQ ID NO: 3299097 - DNA, 25 bp, Homo sapien
agaggaagactgattgaaaccagag

SEQ ID NO: 3299098 - DNA, 25 bp, Homo sapien
gactgattgaaaccagagttgctgt

SEQ ID NO: 3299099 - DNA, 25 bp, Homo sapien
tgaaaccagagttgctgtgccaccc

SEQ ID NO: 3299100 - DNA, 25 bp, Homo sapien
aaccagagttgctgtgccacccaca

SEQ ID NO: 3299101 - DNA, 25 bp, Homo sapien
tctagtttctgaacgcagccagctg

SEQ ID NO: 3299102 - DNA, 25 bp, Homo sapien
caattctagtttctgaacgcagcca

SEQ ID NO: 3299103 - DNA, 25 bp, Homo sapien
aattctagtttctgaacgcagccag

SEQ ID NO: 3299104 - DNA, 25 bp, Homo sapien
aacgcagccagctgaagcatattcg

SEQ ID NO: 3299105 - DNA, 25 bp, Homo sapien
ctacatgaactatcttaagaatttc

SEQ ID NO: 3299106 - DNA, 25 bp, Homo sapien
aagaatttctatgtcaataataaag

SEQ ID NO: 3299107 - DNA, 25 bp, Homo sapien
ttttgtctacatgaactatcttaag

SEQ ID NO: 3299108 - DNA, 25 bp, Homo sapien
cttaagaatttctatgtcaataata

SEQ ID NO: 3299109 - DNA, 25 bp, Homo sapien
agtgtgatcgtaagatccactccat

SEQ ID NO: 3299110 - DNA, 25 bp, Homo sapien
aagtgtgatcgtaagatccactcca

SEQ ID NO: 3299111 - DNA, 25 bp, Homo sapien
ctgaagtgtgatcgtaagatccact

SEQ ID NO: 3299112 - DNA, 25 bp, Homo sapien
gaagtgtgatcgtaagatccactcc

SEQ ID NO: 3299113 - DNA, 25 bp, Homo sapien
tgcactaatcgtggtacctggttag

SEQ ID NO: 3299114 - DNA, 25 bp, Homo sapien
ctgcactaatcgtggtacctggtta

SEQ ID NO: 3299115 - DNA, 25 bp, Homo sapien
ttcactagtaagaccactggacaaa

SEQ ID NO: 3299116 - DNA, 25 bp, Homo sapien
tcaagatttattgccatgtccaaaa

SEQ ID NO: 3299117 - DNA, 25 bp, Homo sapien
actggacaaagttcatcaagattta

SEQ ID NO: 3299118 - DNA, 25 bp, Homo sapien
caactggttgtatgatgttagagcc

SEQ ID NO: 3299119 - DNA, 25 bp, Homo sapien
tgcccaaagtagctttccgtaactg

SEQ ID NO: 3299120 - DNA, 25 bp, Homo sapien
aaatgcaccccttgaagaatcttca

SEQ ID NO: 3299121 - DNA, 25 bp, Homo sapien
tgctaagctttgtacaattgaaggg

SEQ ID NO: 3299122 - DNA, 25 bp, Homo sapien
gagaggatccagaaagcacatgtat

SEQ ID NO: 3299123 - DNA, 25 bp, Homo sapien
agccagggtacacagtaatgtcgtt

SEQ ID NO: 3299124 - DNA, 25 bp, Homo sapien
cccagacagctgttgtgtgactagc

SEQ ID NO: 3299125 - DNA, 25 bp, Homo sapien
tgacagctggatcccagacagctgt

SEQ ID NO: 3299126 - DNA, 25 bp, Homo sapien
tgctggactgctcacgtgcattgga

SEQ ID NO: 3299127 - DNA, 25 bp, Homo sapien
cgtgagcacagcgtctccgatcagg

SEQ ID NO: 3299128 - DNA, 25 bp, Homo sapien
tctatttccccgtgagcacagcgtc

SEQ ID NO: 3299129 - DNA, 25 bp, Homo sapien
ggagccctgcctctatttccccgtg

SEQ ID NO: 3299130 - DNA, 25 bp, Homo sapien
tccgatcagggtccctcatcaaagc

SEQ ID NO: 3299131 - DNA, 25 bp, Homo sapien
ttcttttgagagcacgagcacctgt

SEQ ID NO: 3299132 - DNA, 25 bp, Homo sapien
acgagcacctgtgcattatgagcat

SEQ ID NO: 3299133 - DNA, 25 bp, Homo sapien
cctgtgcattatgagcatttgctct

SEQ ID NO: 3299134 - DNA, 25 bp, Homo sapien
tcttttgagagcacgagcacctgtg

SEQ ID NO: 3299135 - DNA, 25 bp, Homo sapien
ctgctgtttgacttggaaaaaccat

SEQ ID NO: 3299136 - DNA, 25 bp, Homo sapien
ctctgacttcaaagcctcttagttt

SEQ ID NO: 3299137 - DNA, 25 bp, Homo sapien
taaaactgctgtttgacttggaaaa

SEQ ID NO: 3299138 - DNA, 25 bp, Homo sapien
agcctcttagttttaaaactgctgt

SEQ ID NO: 3299139 - DNA, 25 bp, Homo sapien
acaaagagagaacatcactgtggaa

SEQ ID NO: 3299140 - DNA, 25 bp, Homo sapien
cacttttctaggacagaagtggaga

SEQ ID NO: 3299141 - DNA, 25 bp, Homo sapien
caaagagagaacatcactgtggaaa

SEQ ID NO: 3299142 - DNA, 25 bp, Homo sapien
cagaagtggagagttcaggccacaa

SEQ ID NO: 3299143 - DNA, 25 bp, Homo sapien
gaagactgctggatttgagccatgg

SEQ ID NO: 3299144 - DNA, 25 bp, Homo sapien
tgtggctatctgagttgagttgaag

SEQ ID NO: 3299145 - DNA, 25 bp, Homo sapien
tcaggaagataaggcaaggtggcaa

SEQ ID NO: 3299146 - DNA, 25 bp, Homo sapien
ttgacagtgaacaacataggctccc

SEQ ID NO: 3299147 - DNA, 25 bp, Homo sapien
gaatgatattacagttgtccactac

SEQ ID NO: 3299148 - DNA, 25 bp, Homo sapien
accacactggcaaggcttccaggac

SEQ ID NO: 3299149 - DNA, 25 bp, Homo sapien
tgtccactacccctaaagttaggca

SEQ ID NO: 3299150 - DNA, 25 bp, Homo sapien
aacgtctgcttggaccacactggca

SEQ ID NO: 3299151 - DNA, 25 bp, Homo sapien
cagcccatccagagcagacacgttc

SEQ ID NO: 3299152 - DNA, 25 bp, Homo sapien
cagagcagacacgttctcctcctcc

SEQ ID NO: 3299153 - DNA, 25 bp, Homo sapien
acagcccatccagagcagacacgtt

SEQ ID NO: 3299154 - DNA, 25 bp, Homo sapien
ttctgggaatcctatcagaacacac

SEQ ID NO: 3299155 - DNA, 25 bp, Homo sapien
tcttctgggaatcctatcagaacac

SEQ ID NO: 3299156 - DNA, 25 bp, Homo sapien
caggtcttctgggaatcctatcaga

SEQ ID NO: 3299157 - DNA, 25 bp, Homo sapien
ggtggcaggtcttctgggaatccta

SEQ ID NO: 3299158 - DNA, 25 bp, Homo sapien
gaacattttattagctaaggggaca

SEQ ID NO: 3299159 - DNA, 25 bp, Homo sapien
ggacaatatccacatactccctttg

SEQ ID NO: 3299160 - DNA, 25 bp, Homo sapien
cagctttgtagcctcggtcaaaggc

SEQ ID NO: 3299161 - DNA, 25 bp, Homo sapien
tccacacatcagctttgtagcctcg

SEQ ID NO: 3299162 - DNA, 25 bp, Homo sapien
actgatttgatttccgcaaagcaga

SEQ ID NO: 3299163 - DNA, 25 bp, Homo sapien
tcagatgggaatggactgatttgat

SEQ ID NO: 3299164 - DNA, 25 bp, Homo sapien
cagatgggaatggactgatttgatt

SEQ ID NO: 3299165 - DNA, 25 bp, Homo sapien
gatttgatttccgcaaagcagaagg

SEQ ID NO: 3299166 - DNA, 25 bp, Homo sapien
aaggagatcccaggctgatggaaga

SEQ ID NO: 3299167 - DNA, 25 bp, Homo sapien
ctaaggagatcccaggctgatggaa

SEQ ID NO: 3299168 - DNA, 25 bp, Homo sapien
caatacccgccagggctgatgtggg

SEQ ID NO: 3299169 - DNA, 25 bp, Homo sapien
ttcaatacccgccagggctgatgtg

SEQ ID NO: 3299170 - DNA, 25 bp, Homo sapien
ttctccaatgatataaccatcatca

SEQ ID NO: 3299171 - DNA, 25 bp, Homo sapien
ctccaatgatataaccatcatcaac

SEQ ID NO: 3299172 - DNA, 25 bp, Homo sapien
tctccaatgatataaccatcatcaa

SEQ ID NO: 3299173 - DNA, 25 bp, Homo sapien
cacttgcatggccctgtgaagttgg

SEQ ID NO: 3299174 - DNA, 25 bp, Homo sapien
atggccctgtgaagttggttccaca

SEQ ID NO: 3299175 - DNA, 25 bp, Homo sapien
ccctgtgaagttggttccacagcca

SEQ ID NO: 3299176 - DNA, 25 bp, Homo sapien
tgcatggccctgtgaagttggttcc

SEQ ID NO: 3299177 - DNA, 25 bp, Homo sapien
tatgggattcctgtctctcttgaga

SEQ ID NO: 3299178 - DNA, 25 bp, Homo sapien
cagaaaagcctccatgaagcatcga

SEQ ID NO: 3299179 - DNA, 25 bp, Homo sapien
catcgatgtactgtagatttttcca

SEQ ID NO: 3299180 - DNA, 25 bp, Homo sapien
ccctgaatcaccatccagaaaagcc

SEQ ID NO: 3299181 - DNA, 25 bp, Homo sapien
tgtcgtcagttattagcagggctga

SEQ ID NO: 3299182 - DNA, 25 bp, Homo sapien
attggaaatggtgtcgtcagttatt

SEQ ID NO: 3299183 - DNA, 25 bp, Homo sapien
tggtgtcgtcagttattagcagggc

SEQ ID NO: 3299184 - DNA, 25 bp, Homo sapien
tcagttattagcagggctgactttt

SEQ ID NO: 3299185 - DNA, 25 bp, Homo sapien
ggatgggtacctgcccactgacctc

SEQ ID NO: 3299186 - DNA, 25 bp, Homo sapien
atgaggatgggtacctgcccactga

SEQ ID NO: 3299187 - DNA, 25 bp, Homo sapien
agatgaggatgggtacctgcccact

SEQ ID NO: 3299188 - DNA, 25 bp, Homo sapien
gaggatgggtacctgcccactgacc

SEQ ID NO: 3299189 - DNA, 25 bp, Homo sapien
ttgaaggtccacagcctacacctgc

SEQ ID NO: 3299190 - DNA, 25 bp, Homo sapien
gaaccatagtactgctagttccatt

SEQ ID NO: 3299191 - DNA, 25 bp, Homo sapien
ctttcacctcttgtagaaccatagt

SEQ ID NO: 3299192 - DNA, 25 bp, Homo sapien
ttgaaggtccacagcctacacctgg

SEQ ID NO: 3299193 - DNA, 25 bp, Homo sapien
gttgatttctgggaatagtgccacc

SEQ ID NO: 3299194 - DNA, 25 bp, Homo sapien
tagtgccacccatgacaatggattg

SEQ ID NO: 3299195 - DNA, 25 bp, Homo sapien
tactttcccacaacgattcatctgg

SEQ ID NO: 3299196 - DNA, 25 bp, Homo sapien
taataatgccagtcctccaactgcc

SEQ ID NO: 3299197 - DNA, 25 bp, Homo sapien
gggtcacactctgtcaccctagctg

SEQ ID NO: 3299198 - DNA, 25 bp, Homo sapien
cagggtcacactctgtcaccctagc

SEQ ID NO: 3299199 - DNA, 25 bp, Homo sapien
tggagtgcagtggtgcaatcttggc

SEQ ID NO: 3299200 - DNA, 25 bp, Homo sapien
cacacctggctaattatttgttgta

SEQ ID NO: 3299201 - DNA, 25 bp, Homo sapien
tgtatttacccaggcttccatccag

SEQ ID NO: 3299202 - DNA, 25 bp, Homo sapien
tgtttagtataagacgctgcagctg

SEQ ID NO: 3299203 - DNA, 25 bp, Homo sapien
cagtaaagtttccatcgagtcccat

SEQ ID NO: 3299204 - DNA, 25 bp, Homo sapien
taaattcatctatacacccactggg

SEQ ID NO: 3299205 - DNA, 25 bp, Homo sapien
tcttggagacagcaaaggactgagc

SEQ ID NO: 3299206 - DNA, 25 bp, Homo sapien
gactcccaggactagctaattcttg

SEQ ID NO: 3299207 - DNA, 25 bp, Homo sapien
tattgtcaagaacatagccgcaacc

SEQ ID NO: 3299208 - DNA, 25 bp, Homo sapien
gactgagccctgagcatatctaact

SEQ ID NO: 3299209 - DNA, 25 bp, Homo sapien
tcagctgggcaagtcccattagcag

SEQ ID NO: 3299210 - DNA, 25 bp, Homo sapien
caggcatcatggaaaactaagtaac

SEQ ID NO: 3299211 - DNA, 25 bp, Homo sapien
gatcaaccattgagttaacagcaag

SEQ ID NO: 3299212 - DNA, 25 bp, Homo sapien
tttgcagagcgactacagacttact

SEQ ID NO: 3299213 - DNA, 25 bp, Homo sapien
aggaaataagttctccatctggtct

SEQ ID NO: 3299214 - DNA, 25 bp, Homo sapien
gctccaatgactgcagggtcttcat

SEQ ID NO: 3299215 - DNA, 25 bp, Homo sapien
agtgttcgtggtacgagatgccaga

SEQ ID NO: 3299216 - DNA, 25 bp, Homo sapien
agggtcttcatgagtgttcgtggta

SEQ ID NO: 3299217 - DNA, 25 bp, Homo sapien
tcgtggtacgagatgccagaaaaca

SEQ ID NO: 3299218 - DNA, 25 bp, Homo sapien
agcagcaggcaggcagctcccatgt

SEQ ID NO: 3299219 - DNA, 25 bp, Homo sapien
cagcagcaggcaggcagctcccatg

SEQ ID NO: 3299220 - DNA, 25 bp, Homo sapien
gcagcaggcaggcagctcccatgtg

SEQ ID NO: 3299221 - DNA, 25 bp, Homo sapien
ttaaactctgcctaagaggctcgac

SEQ ID NO: 3299222 - DNA, 25 bp, Homo sapien
aacactgggagagtttaaacaatag

SEQ ID NO: 3299223 - DNA, 25 bp, Homo sapien
ggtgtctgccgtcagaggtgtatct

SEQ ID NO: 3299224 - DNA, 25 bp, Homo sapien
taaacaatagttgacaataagggtg

SEQ ID NO: 3299225 - DNA, 25 bp, Homo sapien
caataagggtgtctgccgtcagagg

SEQ ID NO: 3299226 - DNA, 25 bp, Homo sapien
ttcaggtccttcactctcataagaa

SEQ ID NO: 3299227 - DNA, 25 bp, Homo sapien
ccttcactctcataagaagccaagt

SEQ ID NO: 3299228 - DNA, 25 bp, Homo sapien
tgtctttctctatatgattttcagg

SEQ ID NO: 3299229 - DNA, 25 bp, Homo sapien
gattttcaggtccttcactctcata

SEQ ID NO: 3299230 - DNA, 25 bp, Homo sapien
aataaccccatttgtgcccatagct

SEQ ID NO: 3299231 - DNA, 25 bp, Homo sapien
aacaggtcaaaatgttccagtactt

SEQ ID NO: 3299232 - DNA, 25 bp, Homo sapien
tcttaacatggaacagatcagagga

SEQ ID NO: 3299233 - DNA, 25 bp, Homo sapien
gtctattcaagtaagctcaagcaag

SEQ ID NO: 3299234 - DNA, 25 bp, Homo sapien
cctctcaaatggacactccacttgt

SEQ ID NO: 3299235 - DNA, 25 bp, Homo sapien
tactgtgagcagatactgcaagatc

SEQ ID NO: 3299236 - DNA, 25 bp, Homo sapien
gatactgcaagatcttccggtccct

SEQ ID NO: 3299237 - DNA, 25 bp, Homo sapien
tcttccggtccctctcaaatggaca

SEQ ID NO: 3299238 - DNA, 25 bp, Homo sapien
aggcggttggcacaaccctcattga

SEQ ID NO: 3299239 - DNA, 25 bp, Homo sapien
taaatatctttgattaagagactga

SEQ ID NO: 3299240 - DNA, 25 bp, Homo sapien
ccctcattgaggaaataaatatctt

SEQ ID NO: 3299241 - DNA, 25 bp, Homo sapien
agagactgaagaatggtatcacaat

SEQ ID NO: 3299242 - DNA, 25 bp, Homo sapien
tgtaaacctagcctgtgtatgatga

SEQ ID NO: 3299243 - DNA, 25 bp, Homo sapien
tctccctgctagaagctgtactgct

SEQ ID NO: 3299244 - DNA, 25 bp, Homo sapien
gattttaagatgcatgacccatctc

SEQ ID NO: 3299245 - DNA, 25 bp, Homo sapien
tgtatgatgaacaagttagcacctg

SEQ ID NO: 3299246 - DNA, 25 bp, Homo sapien
ctgaagcccatgcagagagaacctt

SEQ ID NO: 3299247 - DNA, 25 bp, Homo sapien
gaaattgcttgaagggtccatctga

SEQ ID NO: 3299248 - DNA, 25 bp, Homo sapien
ctactactatgagcagttaaagacc

SEQ ID NO: 3299249 - DNA, 25 bp, Homo sapien
ccccacgaagagctgttcgataatt

SEQ ID NO: 3299250 - DNA, 25 bp, Homo sapien
gaagagctgttcgataattatagaa

SEQ ID NO: 3299251 - DNA, 25 bp, Homo sapien
catataaggtgatgtgactgacagg

SEQ ID NO: 3299252 - DNA, 25 bp, Homo sapien
gactgacaggtcactatttccccag

SEQ ID NO: 3299253 - DNA, 25 bp, Homo sapien
aaaactctcaactgctcaggaccaa

SEQ ID NO: 3299254 - DNA, 25 bp, Homo sapien
gaagctaataggctcacagtgaagt

SEQ ID NO: 3299255 - DNA, 25 bp, Homo sapien
gagaggcaagaccacataaaggaat

SEQ ID NO: 3299256 - DNA, 25 bp, Homo sapien
gatggagaggcaagaccacataaag

SEQ ID NO: 3299257 - DNA, 25 bp, Homo sapien
ggcaagaccacataaaggaattcca

SEQ ID NO: 3299258 - DNA, 25 bp, Homo sapien
tcctctgtcgtagtctgatggagag

SEQ ID NO: 3299259 - DNA, 25 bp, Homo sapien
atgtcaaattttgcagtcttcactt

SEQ ID NO: 3299260 - DNA, 25 bp, Homo sapien
aatgtcaaattttgcagtcttcact

SEQ ID NO: 3299261 - DNA, 25 bp, Homo sapien
gaatgtcaaattttgcagtcttcac

SEQ ID NO: 3299262 - DNA, 25 bp, Homo sapien
aatgctatcactgactctgtgcaga

SEQ ID NO: 3299263 - DNA, 25 bp, Homo sapien
gaaaaacgataaacacatacttcta

SEQ ID NO: 3299264 - DNA, 25 bp, Homo sapien
gaaacagcataaatgctatcactga

SEQ ID NO: 3299265 - DNA, 25 bp, Homo sapien
tcattactaagtgagaattctaaaa

SEQ ID NO: 3299266 - DNA, 25 bp, Homo sapien
taatgtgtcaaacacgctttgcgtg

SEQ ID NO: 3299267 - DNA, 25 bp, Homo sapien
gttaacaagtaacagagatggaagc

SEQ ID NO: 3299268 - DNA, 25 bp, Homo sapien
tcataaagaaaccagtgacggacca

SEQ ID NO: 3299269 - DNA, 25 bp, Homo sapien
tcccaaggatatccagttaacaagt

SEQ ID NO: 3299270 - DNA, 25 bp, Homo sapien
gacatgtatcctccacaaaatactc

SEQ ID NO: 3299271 - DNA, 25 bp, Homo sapien
acgacatgtatcctccacaaaatac

SEQ ID NO: 3299272 - DNA, 25 bp, Homo sapien
cgtaaagataaacgacatgtatcct

SEQ ID NO: 3299273 - DNA, 25 bp, Homo sapien
ttacaggattcgtaaagataaacga

SEQ ID NO: 3299274 - DNA, 25 bp, Homo sapien
caatgttaaaacactcccgagctac

SEQ ID NO: 3299275 - DNA, 25 bp, Homo sapien
gaaatactcaatcattcttgctcgg

SEQ ID NO: 3299276 - DNA, 25 bp, Homo sapien
cttgctcggtgttttttcttaacag

SEQ ID NO: 3299277 - DNA, 25 bp, Homo sapien
tatcgccatcaaggagttgaagttg

SEQ ID NO: 3299278 - DNA, 25 bp, Homo sapien
catacagatttctgtagcaaccaag

SEQ ID NO: 3299279 - DNA, 25 bp, Homo sapien
cagatttctgtagcaaccaagtagc

SEQ ID NO: 3299280 - DNA, 25 bp, Homo sapien
accaagtagctgaggcgattaaacc

SEQ ID NO: 3299281 - DNA, 25 bp, Homo sapien
tccacgtaagcttctaagtttcgtg

SEQ ID NO: 3299282 - DNA, 25 bp, Homo sapien
cacgaacgcctgaacaaattcttct

SEQ ID NO: 3299283 - DNA, 25 bp, Homo sapien
ttctggcccaatataattgagcctc

SEQ ID NO: 3299284 - DNA, 25 bp, Homo sapien
aagggtccttctgcacgaacgcctg

SEQ ID NO: 3299285 - DNA, 25 bp, Homo sapien
ttcttctggcccaatataattgagc

SEQ ID NO: 3299286 - DNA, 25 bp, Homo sapien
atcgtctggttgccaaagcaaagca

SEQ ID NO: 3299287 - DNA, 25 bp, Homo sapien
agggcaatgatgataacggccttac

SEQ ID NO: 3299288 - DNA, 25 bp, Homo sapien
cgctgacaaatatatcgtctggttg

SEQ ID NO: 3299289 - DNA, 25 bp, Homo sapien
aaatctgtggttgtaaagggcaatg

SEQ ID NO: 3299290 - DNA, 25 bp, Homo sapien
tgcggatcagacactgcatcatttg

SEQ ID NO: 3299291 - DNA, 25 bp, Homo sapien
gacttcttcgtactggctgagcgca

SEQ ID NO: 3299292 - DNA, 25 bp, Homo sapien
tggtcttgagaactgtgagccgatc

SEQ ID NO: 3299293 - DNA, 25 bp, Homo sapien
cgttgcagacagtaatgatatccct

SEQ ID NO: 3299294 - DNA, 25 bp, Homo sapien
tcccgggatccctgcagaaaatact

SEQ ID NO: 3299295 - DNA, 25 bp, Homo sapien
tactatccagggtagaatcgcttct

SEQ ID NO: 3299296 - DNA, 25 bp, Homo sapien
ctgtatacataggagcagcgccgga

SEQ ID NO: 3299297 - DNA, 25 bp, Homo sapien
ttctattcagggtaccacacaaggg

SEQ ID NO: 3299298 - DNA, 25 bp, Homo sapien
cccagcctattccgcaattttagaa

SEQ ID NO: 3299299 - DNA, 25 bp, Homo sapien
ccagcctattccgcaattttagaaa

SEQ ID NO: 3299300 - DNA, 25 bp, Homo sapien
cagcctattccgcaattttagaaaa

SEQ ID NO: 3299301 - DNA, 25 bp, Homo sapien
ggatgcagatcccacaaatacagag

SEQ ID NO: 3299302 - DNA, 25 bp, Homo sapien
tctgaggagagccacctaagcacgt

SEQ ID NO: 3299303 - DNA, 25 bp, Homo sapien
gaggaaggacatcgatcacacagtt

SEQ ID NO: 3299304 - DNA, 25 bp, Homo sapien
taaattatatatacggcacacctgg

SEQ ID NO: 3299305 - DNA, 25 bp, Homo sapien
tccaggaaggtatgttgtaaacacc

SEQ ID NO: 3299306 - DNA, 25 bp, Homo sapien
tatgaactcagcttctatccaggaa

SEQ ID NO: 3299307 - DNA, 25 bp, Homo sapien
gacagtgaatattacatgaccagct

SEQ ID NO: 3299308 - DNA, 25 bp, Homo sapien
tgtgcctgaatgacttgttcccaga

SEQ ID NO: 3299309 - DNA, 25 bp, Homo sapien
gaagcagtggagattaggatgcata

SEQ ID NO: 3299310 - DNA, 25 bp, Homo sapien
ggtataatcattctcacttgacata

SEQ ID NO: 3299311 - DNA, 25 bp, Homo sapien
tgcataattcggcaccatttcccac

SEQ ID NO: 3299312 - DNA, 25 bp, Homo sapien
cctttgaagtgggatggtataatca

SEQ ID NO: 3299313 - DNA, 25 bp, Homo sapien
gcctgggaattccagcagccgcgct

SEQ ID NO: 3299314 - DNA, 25 bp, Homo sapien
ggaattccagcagccgcgctaaatt

SEQ ID NO: 3299315 - DNA, 25 bp, Homo sapien
agcagccgcgctaaattcaggttac

SEQ ID NO: 3299316 - DNA, 25 bp, Homo sapien
ccagcagccgcgctaaattcaggtt

SEQ ID NO: 3299317 - DNA, 25 bp, Homo sapien
gagttgaaggattttgggtgcaatt

SEQ ID NO: 3299318 - DNA, 25 bp, Homo sapien
gccactggctattcggtgagccaga

SEQ ID NO: 3299319 - DNA, 25 bp, Homo sapien
gaaatgtttccgtccattccgtgag

SEQ ID NO: 3299320 - DNA, 25 bp, Homo sapien
tctttcatcccgaaaatcataggga

SEQ ID NO: 3299321 - DNA, 25 bp, Homo sapien
gccatgatgccatttatgcacttca

SEQ ID NO: 3299322 - DNA, 25 bp, Homo sapien
tctaagccataaagtaagcattcct

SEQ ID NO: 3299323 - DNA, 25 bp, Homo sapien
caattccccttgtatagccatgatg

SEQ ID NO: 3299324 - DNA, 25 bp, Homo sapien
taaaacaaattgtaatgtaccatta

SEQ ID NO: 3299325 - DNA, 25 bp, Homo sapien
tttggccattagctcatacggatgc

SEQ ID NO: 3299326 - DNA, 25 bp, Homo sapien
taaataaccgagaactgagtaggaa

SEQ ID NO: 3299327 - DNA, 25 bp, Homo sapien
ggtgctcaacacataagtggcaaac

SEQ ID NO: 3299328 - DNA, 25 bp, Homo sapien
caggatcacttagtctctggtgctc

SEQ ID NO: 3299329 - DNA, 25 bp, Homo sapien
aaaaagtcatcatcgttacattctc

SEQ ID NO: 3299330 - DNA, 25 bp, Homo sapien
aaaagtcatcatcgttacattctct

SEQ ID NO: 3299331 - DNA, 25 bp, Homo sapien
aaaaaagtcatcatcgttacattct

SEQ ID NO: 3299332 - DNA, 25 bp, Homo sapien
cattaagttctcctgatcaagttca

SEQ ID NO: 3299333 - DNA, 25 bp, Homo sapien
cctgatcaagttcatatgctgcagt

SEQ ID NO: 3299334 - DNA, 25 bp, Homo sapien
gtttcaaaagtaatgcctactagta

SEQ ID NO: 3299335 - DNA, 25 bp, Homo sapien
taatatcttgcctttatactatgtc

SEQ ID NO: 3299336 - DNA, 25 bp, Homo sapien
tttatcaataaccagctgctcggca

SEQ ID NO: 3299337 - DNA, 25 bp, Homo sapien
tatggtgaattactgcggcaagcac

SEQ ID NO: 3299338 - DNA, 25 bp, Homo sapien
aaaacctgtgtttgactgctgatgc

SEQ ID NO: 3299339 - DNA, 25 bp, Homo sapien
tgtgtcagaacattcaaaggcaggc

SEQ ID NO: 3299340 - DNA, 25 bp, Homo sapien
catatactttccttggttacattca

SEQ ID NO: 3299341 - DNA, 25 bp, Homo sapien
gctatataaatgtaggttaccaagg

SEQ ID NO: 3299342 - DNA, 25 bp, Homo sapien
catcttgagcataaatcttgttttc

SEQ ID NO: 3299343 - DNA, 25 bp, Homo sapien
caaattccctagattagaaagtgct

SEQ ID NO: 3299344 - DNA, 25 bp, Homo sapien
acttcatttagatggtatcagacca

SEQ ID NO: 3299345 - DNA, 25 bp, Homo sapien
ttgccaaggatgtgtttcagagaaa

SEQ ID NO: 3299346 - DNA, 25 bp, Homo sapien
tccaggctcgatttgatttcaatgc

SEQ ID NO: 3299347 - DNA, 25 bp, Homo sapien
tatggtccctgcctactgtactgca

SEQ ID NO: 3299348 - DNA, 25 bp, Homo sapien
gtttcgattgtaaccactgctgtca

SEQ ID NO: 3299349 - DNA, 25 bp, Homo sapien
taggtactaagtgctggatgagtgc

SEQ ID NO: 3299350 - DNA, 25 bp, Homo sapien
ggtaatacaaccctccacagctgtc

SEQ ID NO: 3299351 - DNA, 25 bp, Homo sapien
ggatgagtgcttccagggatccaga

SEQ ID NO: 3299352 - DNA, 25 bp, Homo sapien
ctgaaaagggaggagtctgaggcat

SEQ ID NO: 3299353 - DNA, 25 bp, Homo sapien
agtcgttttatagacactgcaggca

SEQ ID NO: 3299354 - DNA, 25 bp, Homo sapien
taaatcactgattagggctccagat

SEQ ID NO: 3299355 - DNA, 25 bp, Homo sapien
tcattagtccacctctaagacaggg

SEQ ID NO: 3299356 - DNA, 25 bp, Homo sapien
tccatgtacccagaaagtaggtgaa

SEQ ID NO: 3299357 - DNA, 25 bp, Homo sapien
caatccctgcttcaaggattctaga

SEQ ID NO: 3299358 - DNA, 25 bp, Homo sapien
ttcccaatccctgcttcaaggattc

SEQ ID NO: 3299359 - DNA, 25 bp, Homo sapien
tttattatgtgtggcatcagaatca

SEQ ID NO: 3299360 - DNA, 25 bp, Homo sapien
ttatgtgtggcatcagaatcaagtt

SEQ ID NO: 3299361 - DNA, 25 bp, Homo sapien
cagcagttcctgaccgtcgtcacat

SEQ ID NO: 3299362 - DNA, 25 bp, Homo sapien
ttggagacgcgttcggcccaaacac

SEQ ID NO: 3299363 - DNA, 25 bp, Homo sapien
catggtgctgacgaaggactccttg

SEQ ID NO: 3299364 - DNA, 25 bp, Homo sapien
ggactccttggagacgcgttcggcc

SEQ ID NO: 3299365 - DNA, 25 bp, Homo sapien
ccgaggcgactcaactgagctctgg

SEQ ID NO: 3299366 - DNA, 25 bp, Homo sapien
tggcaaaagcaaggcgactcagtgt

SEQ ID NO: 3299367 - DNA, 25 bp, Homo sapien
tcagtgtctcccaagtttgccaggt

SEQ ID NO: 3299368 - DNA, 25 bp, Homo sapien
tgaacaccgaaggatgacagcacat

SEQ ID NO: 3299369 - DNA, 25 bp, Homo sapien
tcggtggcgagtatgtgacttctgt

SEQ ID NO: 3299370 - DNA, 25 bp, Homo sapien
cttgtcggtggcgagtatgtgactt

SEQ ID NO: 3299371 - DNA, 25 bp, Homo sapien
tggcgagtatgtgacttctgttccc

SEQ ID NO: 3299372 - DNA, 25 bp, Homo sapien
caccttgtcggtggcgagtatgtga

SEQ ID NO: 3299373 - DNA, 25 bp, Homo sapien
gcgcgcccacaaatgcgaccaaagg

SEQ ID NO: 3299374 - DNA, 25 bp, Homo sapien
acaaatgcgaccaaaggacagggag

SEQ ID NO: 3299375 - DNA, 25 bp, Homo sapien
caggtgaactccgagtcctcggcct

SEQ ID NO: 3299376 - DNA, 25 bp, Homo sapien
gcccacaaatgcgaccaaaggacag

SEQ ID NO: 3299377 - DNA, 25 bp, Homo sapien
tctgtctaaccagtcgggttccttg

SEQ ID NO: 3299378 - DNA, 25 bp, Homo sapien
cagtcgggttccttgtttatactga

SEQ ID NO: 3299379 - DNA, 25 bp, Homo sapien
ccagtcgggttccttgtttatactg

SEQ ID NO: 3299380 - DNA, 25 bp, Homo sapien
aacaaaatctgtctaaccagtcggg

SEQ ID NO: 3299381 - DNA, 25 bp, Homo sapien
tgtaaactgattgaggtatgcaccc

SEQ ID NO: 3299382 - DNA, 25 bp, Homo sapien
aattccatgagtacgcaggcaggcc

SEQ ID NO: 3299383 - DNA, 25 bp, Homo sapien
tgctgatgtggacctgagcacattc

SEQ ID NO: 3299384 - DNA, 25 bp, Homo sapien
gagcctcatccatgactggtgtaaa

SEQ ID NO: 3299385 - DNA, 25 bp, Homo sapien
ctggacaccgtgaactgcttctgca

SEQ ID NO: 3299386 - DNA, 25 bp, Homo sapien
gctggacaccgtgaactgcttctgc

SEQ ID NO: 3299387 - DNA, 25 bp, Homo sapien
tgctggacaccgtgaactgcttctg

SEQ ID NO: 3299388 - DNA, 25 bp, Homo sapien
tggacaccgtgaactgcttctgcat

SEQ ID NO: 3299389 - DNA, 25 bp, Homo sapien
catctgactaagagttggaaggcgt

SEQ ID NO: 3299390 - DNA, 25 bp, Homo sapien
cgtgggttccggttctgactctgcc

SEQ ID NO: 3299391 - DNA, 25 bp, Homo sapien
tctgtcacagacaatcatctgacta

SEQ ID NO: 3299392 - DNA, 25 bp, Homo sapien
tgacggcgctcacgggacatgttct

SEQ ID NO: 3299393 - DNA, 25 bp, Homo sapien
tcagaggtttatgtgaggctttagc

SEQ ID NO: 3299394 - DNA, 25 bp, Homo sapien
cttcagaggtttatgtgaggcttta

SEQ ID NO: 3299395 - DNA, 25 bp, Homo sapien
gaggtttatgtgaggctttagccat

SEQ ID NO: 3299396 - DNA, 25 bp, Homo sapien
tccttcagaggtttatgtgaggctt

SEQ ID NO: 3299397 - DNA, 25 bp, Homo sapien
cttactgtgtgacctgaacaagtac

SEQ ID NO: 3299398 - DNA, 25 bp, Homo sapien
gaagggcaggttgtaatcctggctc

SEQ ID NO: 3299399 - DNA, 25 bp, Homo sapien
ttcagaatatggtgtcagaggttgt

SEQ ID NO: 3299400 - DNA, 25 bp, Homo sapien
gaacaagtacaaaagtctccttgtg

SEQ ID NO: 3299401 - DNA, 25 bp, Homo sapien
tcaggagatgggtttctaagagctt

SEQ ID NO: 3299402 - DNA, 25 bp, Homo sapien
gcagaactgtagcacaagggcaaga

SEQ ID NO: 3299403 - DNA, 25 bp, Homo sapien
caagggcaagaatgaccaaaggccc

SEQ ID NO: 3299404 - DNA, 25 bp, Homo sapien
catggcaaattcagattatcgcagc

SEQ ID NO: 3299405 - DNA, 25 bp, Homo sapien
gggcctcaacagtgtctgagcagta

SEQ ID NO: 3299406 - DNA, 25 bp, Homo sapien
cttttccagggtgcacgacactcct

SEQ ID NO: 3299407 - DNA, 25 bp, Homo sapien
actctactgattccctgggcctcaa

SEQ ID NO: 3299408 - DNA, 25 bp, Homo sapien
cctgttaggcacactctactgattc

SEQ ID NO: 3299409 - DNA, 25 bp, Homo sapien
gttaaccagactttgccagccacgt

SEQ ID NO: 3299410 - DNA, 25 bp, Homo sapien
tgggtctgtcctgagagttaaccag

SEQ ID NO: 3299411 - DNA, 25 bp, Homo sapien
cacaaagacaactggtgggtctgtc

SEQ ID NO: 3299412 - DNA, 25 bp, Homo sapien
acacttaagcagtgaatctgaccca

SEQ ID NO: 3299413 - DNA, 25 bp, Homo sapien
gaccagatatgattgctcagcacac

SEQ ID NO: 3299414 - DNA, 25 bp, Homo sapien
cacacaagccttctggacatgtcaa

SEQ ID NO: 3299415 - DNA, 25 bp, Homo sapien
gaataggatttgatcttgaccagat

SEQ ID NO: 3299416 - DNA, 25 bp, Homo sapien
tcccctggaagagctaggtaggaag

SEQ ID NO: 3299417 - DNA, 25 bp, Homo sapien
gaattcttggagtactatctaccag

SEQ ID NO: 3299418 - DNA, 25 bp, Homo sapien
tgcccattcatagaaagtcctgagg

SEQ ID NO: 3299419 - DNA, 25 bp, Homo sapien
gccaaatatgagttaagagttcctc

SEQ ID NO: 3299420 - DNA, 25 bp, Homo sapien
cgcaacagccaataatgcctctggg

SEQ ID NO: 3299421 - DNA, 25 bp, Homo sapien
tatattaagcccaaaagccagagct

SEQ ID NO: 3299422 - DNA, 25 bp, Homo sapien
ggtgaaaatcccatcttgagccagc

SEQ ID NO: 3299423 - DNA, 25 bp, Homo sapien
caatatcgcagaaccatggatggtc

SEQ ID NO: 3299424 - DNA, 25 bp, Homo sapien
ggtgacaccgtacagaaagcccatc

SEQ ID NO: 3299425 - DNA, 25 bp, Homo sapien
ctccacagacaaactggtgatctat

SEQ ID NO: 3299426 - DNA, 25 bp, Homo sapien
tgacttttgaccttcgcctttgaaa

SEQ ID NO: 3299427 - DNA, 25 bp, Homo sapien
gtcaagcgacccctgaggggttcat

SEQ ID NO: 3299428 - DNA, 25 bp, Homo sapien
caaactggtgatctatttagaggct

SEQ ID NO: 3299429 - DNA, 25 bp, Homo sapien
ctggaacagttagcaacacattctg

SEQ ID NO: 3299430 - DNA, 25 bp, Homo sapien
atctttgggcgaaaggatattcctc

SEQ ID NO: 3299431 - DNA, 25 bp, Homo sapien
gttagcaacacattctgtgacatcc

SEQ ID NO: 3299432 - DNA, 25 bp, Homo sapien
tgttgtcggttggttgctttaatct

SEQ ID NO: 3299433 - DNA, 25 bp, Homo sapien
tgtggccaaggcaaaattaccagga

SEQ ID NO: 3299434 - DNA, 25 bp, Homo sapien
ggtccagagatgtactgcagtagca

SEQ ID NO: 3299435 - DNA, 25 bp, Homo sapien
ggtatgcttgatctactcaccagag

SEQ ID NO: 3299436 - DNA, 25 bp, Homo sapien
tacgcctgcaaaatgtcagcctcgc

SEQ ID NO: 3299437 - DNA, 25 bp, Homo sapien
tagggtgctatactccccagtggga

SEQ ID NO: 3299438 - DNA, 25 bp, Homo sapien
tatttcaccgaaatagctcaaggca

SEQ ID NO: 3299439 - DNA, 25 bp, Homo sapien
cccgtgaatggcagacttgtgactt

SEQ ID NO: 3299440 - DNA, 25 bp, Homo sapien
ggacagggactctcggatcaaagtt

SEQ ID NO: 3299441 - DNA, 25 bp, Homo sapien
tgctgctgtacatggaaggtttcca

SEQ ID NO: 3299442 - DNA, 25 bp, Homo sapien
tcaatcagagggcttggaaagcaaa

SEQ ID NO: 3299443 - DNA, 25 bp, Homo sapien
cttctcaatcagagggcttggaaag

SEQ ID NO: 3299444 - DNA, 25 bp, Homo sapien
tctcaatcagagggcttggaaagca

SEQ ID NO: 3299445 - DNA, 25 bp, Homo sapien
tggagtaggcatctgataaaagttc

SEQ ID NO: 3299446 - DNA, 25 bp, Homo sapien
ggtgctatagtcttggatttcccag

SEQ ID NO: 3299447 - DNA, 25 bp, Homo sapien
tctctgtctcatgtgctcgcttcct

SEQ ID NO: 3299448 - DNA, 25 bp, Homo sapien
gagtacttgtgactatctgctgtga

SEQ ID NO: 3299449 - DNA, 25 bp, Homo sapien
gctcaaaggctacgggctctttctg

SEQ ID NO: 3299450 - DNA, 25 bp, Homo sapien
tcacactgctcaaaggctacgggct

SEQ ID NO: 3299451 - DNA, 25 bp, Homo sapien
acaaagcactttggttgctcctcac

SEQ ID NO: 3299452 - DNA, 25 bp, Homo sapien
ttcaacaaactgatgacaaagcact

SEQ ID NO: 3299453 - DNA, 25 bp, Homo sapien
ttttggcaggatcttgttagagcct

SEQ ID NO: 3299454 - DNA, 25 bp, Homo sapien
ttttttggcaggatcttgttagagc

SEQ ID NO: 3299455 - DNA, 25 bp, Homo sapien
ttggcaggatcttgttagagcctga

SEQ ID NO: 3299456 - DNA, 25 bp, Homo sapien
tttttggcaggatcttgttagagcc

SEQ ID NO: 3299457 - DNA, 25 bp, Homo sapien
tattcttcagcacctccctcagtac

SEQ ID NO: 3299458 - DNA, 25 bp, Homo sapien
ctgctaatgtattcttcagcacctc

SEQ ID NO: 3299459 - DNA, 25 bp, Homo sapien
tgtattcttcagcacctccctcagt

SEQ ID NO: 3299460 - DNA, 25 bp, Homo sapien
ttcttcagcacctccctcagtaccc

SEQ ID NO: 3299461 - DNA, 25 bp, Homo sapien
gatgccccacccattgattacctga

SEQ ID NO: 3299462 - DNA, 25 bp, Homo sapien
tctccttgaagctaaaagattgctc

SEQ ID NO: 3299463 - DNA, 25 bp, Homo sapien
gatggcacattggtttttattcaca

SEQ ID NO: 3299464 - DNA, 25 bp, Homo sapien
tagtgtggaagataccgtaatctcc

SEQ ID NO: 3299465 - DNA, 25 bp, Homo sapien
ataaaatgacaacttgcccatcatt

SEQ ID NO: 3299466 - DNA, 25 bp, Homo sapien
tatgacagaagcattacaggttgat

SEQ ID NO: 3299467 - DNA, 25 bp, Homo sapien
gcttaaatgtcacctatgacagaag

SEQ ID NO: 3299468 - DNA, 25 bp, Homo sapien
tcacctatgacagaagcattacagg

SEQ ID NO: 3299469 - DNA, 25 bp, Homo sapien
cacagccacctgccatacccgagtc

SEQ ID NO: 3299470 - DNA, 25 bp, Homo sapien
agccacctgccatacccgagtctcc

SEQ ID NO: 3299471 - DNA, 25 bp, Homo sapien
ccacctgccatacccgagtctcctt

SEQ ID NO: 3299472 - DNA, 25 bp, Homo sapien
acagccacctgccatacccgagtct

SEQ ID NO: 3299473 - DNA, 25 bp, Homo sapien
ggatctgaatcaatccatgaggctc

SEQ ID NO: 3299474 - DNA, 25 bp, Homo sapien
caattaggataagcctggatctgaa

SEQ ID NO: 3299475 - DNA, 25 bp, Homo sapien
tcttcattcccgctgtgcccggatt

SEQ ID NO: 3299476 - DNA, 25 bp, Homo sapien
caccatcaatgaacctgaattggca

SEQ ID NO: 3299477 - DNA, 25 bp, Homo sapien
ctcgctgaggatttgtcaagagtcg

SEQ ID NO: 3299478 - DNA, 25 bp, Homo sapien
tcaagagtcgaatgccagtcggtgt

SEQ ID NO: 3299479 - DNA, 25 bp, Homo sapien
gtcccttcctcatgtaaaagtcact

SEQ ID NO: 3299480 - DNA, 25 bp, Homo sapien
atccaggatcaaaccctagtccctt

SEQ ID NO: 3299481 - DNA, 25 bp, Homo sapien
aaatcatcattctaagcaaagtaac

SEQ ID NO: 3299482 - DNA, 25 bp, Homo sapien
tgtgctttgcaggaacacggatgaa

SEQ ID NO: 3299483 - DNA, 25 bp, Homo sapien
agttcatgtgctttgcaggaacacg

SEQ ID NO: 3299484 - DNA, 25 bp, Homo sapien
catcattctaagcaaagtaacatga

SEQ ID NO: 3299485 - DNA, 25 bp, Homo sapien
tcgttattgctggtgcgcacagacc

SEQ ID NO: 3299486 - DNA, 25 bp, Homo sapien
gtcgttattgctggtgcgcacagac

SEQ ID NO: 3299487 - DNA, 25 bp, Homo sapien
gttattgctggtgcgcacagacctt

SEQ ID NO: 3299488 - DNA, 25 bp, Homo sapien
cgttattgctggtgcgcacagacct

SEQ ID NO: 3299489 - DNA, 25 bp, Homo sapien
tcttgccagcctgttctgacagacc

SEQ ID NO: 3299490 - DNA, 25 bp, Homo sapien
tagtcgcaggaaagctgcttcggga

SEQ ID NO: 3299491 - DNA, 25 bp, Homo sapien
gttctgacagaccacaagcaccagg

SEQ ID NO: 3299492 - DNA, 25 bp, Homo sapien
caagttctcctctcaccgtctggga

SEQ ID NO: 3299493 - DNA, 25 bp, Homo sapien
gatttcccaattgctctatgctcat

SEQ ID NO: 3299494 - DNA, 25 bp, Homo sapien
cattcaatccatccaagggagtgac

SEQ ID NO: 3299495 - DNA, 25 bp, Homo sapien
taagtttcatcaacctgatccacag

SEQ ID NO: 3299496 - DNA, 25 bp, Homo sapien
gatctaattcccagaaagacttcat

SEQ ID NO: 3299497 - DNA, 25 bp, Homo sapien
aagggaattgtatcaggccattttt

SEQ ID NO: 3299498 - DNA, 25 bp, Homo sapien
ttggaacaaagggaattgtatcagg

SEQ ID NO: 3299499 - DNA, 25 bp, Homo sapien
gaacaaagggaattgtatcaggcca

SEQ ID NO: 3299500 - DNA, 25 bp, Homo sapien
gctcatggtcctgccggctgtacac

SEQ ID NO: 3299501 - DNA, 25 bp, Homo sapien
tttgtaaccaccaggctcactgcca

SEQ ID NO: 3299502 - DNA, 25 bp, Homo sapien
tgctttgtgtatggagccttcccct

SEQ ID NO: 3299503 - DNA, 25 bp, Homo sapien
cctatttgagggcaagcccttgcct

SEQ ID NO: 3299504 - DNA, 25 bp, Homo sapien
cattagctcctgaggatctagctcc

SEQ ID NO: 3299505 - DNA, 25 bp, Homo sapien
gctgtgtggagccctttttcagcat

SEQ ID NO: 3299506 - DNA, 25 bp, Homo sapien
catgagcctagtgatcatttgcaaa

SEQ ID NO: 3299507 - DNA, 25 bp, Homo sapien
caggatatttacagctgtgtggagc

SEQ ID NO: 3299508 - DNA, 25 bp, Homo sapien
ccttcagctcgtgggacatgagcct

SEQ ID NO: 3299509 - DNA, 25 bp, Homo sapien
attcctccatatcccctcccttttg

SEQ ID NO: 3299510 - DNA, 25 bp, Homo sapien
acattatcattcctccatatcccct

SEQ ID NO: 3299511 - DNA, 25 bp, Homo sapien
tacattatcattcctccatatcccc

SEQ ID NO: 3299512 - DNA, 25 bp, Homo sapien
tatcattcctccatatcccctccct

SEQ ID NO: 3299513 - DNA, 25 bp, Homo sapien
agattcagcattccagcattctgtc

SEQ ID NO: 3299514 - DNA, 25 bp, Homo sapien
gattcagcattccagcattctgtcc

SEQ ID NO: 3299515 - DNA, 25 bp, Homo sapien
attcagcattccagcattctgtcca

SEQ ID NO: 3299516 - DNA, 25 bp, Homo sapien
agaagttgataaagaagacaacacc

SEQ ID NO: 3299517 - DNA, 25 bp, Homo sapien
aagaagacaacaccacaatcttaca

SEQ ID NO: 3299518 - DNA, 25 bp, Homo sapien
gacaacaccacaatcttacatagat

SEQ ID NO: 3299519 - DNA, 25 bp, Homo sapien
cagaagttgataaagaagacaacac

SEQ ID NO: 3299520 - DNA, 25 bp, Homo sapien
gaggcagagctttagcaaggccctc

SEQ ID NO: 3299521 - DNA, 25 bp, Homo sapien
tcctctttgaatgcactaggcaagt

SEQ ID NO: 3299522 - DNA, 25 bp, Homo sapien
tactacagctacagggatatcttga

SEQ ID NO: 3299523 - DNA, 25 bp, Homo sapien
cgttggtgctagctcagatgcatgc

SEQ ID NO: 3299524 - DNA, 25 bp, Homo sapien
aagcccatgtactaggacacagtag

SEQ ID NO: 3299525 - DNA, 25 bp, Homo sapien
gacacagtagtgagctgctaaaatt

SEQ ID NO: 3299526 - DNA, 25 bp, Homo sapien
ggtccagtaatgagttgatccacaa

SEQ ID NO: 3299527 - DNA, 25 bp, Homo sapien
gaatcctgctaacctccgcaatttg

SEQ ID NO: 3299528 - DNA, 25 bp, Homo sapien
ttcaaagactccggggtacaggctc

SEQ ID NO: 3299529 - DNA, 25 bp, Homo sapien
aagactccggggtacaggctctaag

SEQ ID NO: 3299530 - DNA, 25 bp, Homo sapien
actccggggtacaggctctaagagc

SEQ ID NO: 3299531 - DNA, 25 bp, Homo sapien
caaagactccggggtacaggctcta

SEQ ID NO: 3299532 - DNA, 25 bp, Homo sapien
cctgctccgttccagggtctggtct

SEQ ID NO: 3299533 - DNA, 25 bp, Homo sapien
atcaaaaacctgctccgttccaggg

SEQ ID NO: 3299534 - DNA, 25 bp, Homo sapien
tttattcatcattcaacaggcattc

SEQ ID NO: 3299535 - DNA, 25 bp, Homo sapien
tattcatcattcaacaggcattcat

SEQ ID NO: 3299536 - DNA, 25 bp, Homo sapien
gcatgggaagaagtccctgtgacct

SEQ ID NO: 3299537 - DNA, 25 bp, Homo sapien
gtcatgggaatctgcccaaccagct

SEQ ID NO: 3299538 - DNA, 25 bp, Homo sapien
tgaggaatttcctcccgctgacacg

SEQ ID NO: 3299539 - DNA, 25 bp, Homo sapien
ccagctttgtggaggtcactgaaca

SEQ ID NO: 3299540 - DNA, 25 bp, Homo sapien
tcctcactgatatcgcagcttttca

SEQ ID NO: 3299541 - DNA, 25 bp, Homo sapien
ttcgaatatcaccaactctgaagcc

SEQ ID NO: 3299542 - DNA, 25 bp, Homo sapien
gaaagagagccataatattccatca

SEQ ID NO: 3299543 - DNA, 25 bp, Homo sapien
tattccatcagaacatcctcactga

SEQ ID NO: 3299544 - DNA, 25 bp, Homo sapien
tttgcagtcagataaggacttctca

SEQ ID NO: 3299545 - DNA, 25 bp, Homo sapien
tttttgcagtcagataaggacttct

SEQ ID NO: 3299546 - DNA, 25 bp, Homo sapien
ttttgcagtcagataaggacttctc

SEQ ID NO: 3299547 - DNA, 25 bp, Homo sapien
gcaggatttatatcccagactaatg

SEQ ID NO: 3299548 - DNA, 25 bp, Homo sapien
cttgtagtccatgaatactgaaaat

SEQ ID NO: 3299549 - DNA, 25 bp, Homo sapien
gttttcttgtagtccatgaatactg

SEQ ID NO: 3299550 - DNA, 25 bp, Homo sapien
ccagactaatgaccatcatctgcat

SEQ ID NO: 3299551 - DNA, 25 bp, Homo sapien
ttcatctttcgctgaagcttctttg

SEQ ID NO: 3299552 - DNA, 25 bp, Homo sapien
tttgaccatcttgagctcatgtcta

SEQ ID NO: 3299553 - DNA, 25 bp, Homo sapien
ataaacattcatctttcgctgaagc

SEQ ID NO: 3299554 - DNA, 25 bp, Homo sapien
tctatggtgccaacagctgacaaag

SEQ ID NO: 3299555 - DNA, 25 bp, Homo sapien
tcttcacactcactgccataaggaa

SEQ ID NO: 3299556 - DNA, 25 bp, Homo sapien
ggctggacttgggcggacagctcca

SEQ ID NO: 3299557 - DNA, 25 bp, Homo sapien
ttcacactcactgccataaggaatt

SEQ ID NO: 3299558 - DNA, 25 bp, Homo sapien
atgtcttcacactcactgccataag

SEQ ID NO: 3299559 - DNA, 25 bp, Homo sapien
gatgacccagtcaggcaatgaagtt

SEQ ID NO: 3299560 - DNA, 25 bp, Homo sapien
tgctgaaccccgagaaagatccttc

SEQ ID NO: 3299561 - DNA, 25 bp, Homo sapien
caatgaagttgaaagtgctgaaccc

SEQ ID NO: 3299562 - DNA, 25 bp, Homo sapien
tgagaatgaaacagatgacccagtc

SEQ ID NO: 3299563 - DNA, 25 bp, Homo sapien
gaaatttagagcagattcattaatc

SEQ ID NO: 3299564 - DNA, 25 bp, Homo sapien
atttgaaatttagagcagattcatt

SEQ ID NO: 3299565 - DNA, 25 bp, Homo sapien
ttgaaatttagagcagattcattaa

SEQ ID NO: 3299566 - DNA, 25 bp, Homo sapien
ttatttgaaatttagagcagattca

SEQ ID NO: 3299567 - DNA, 25 bp, Homo sapien
tatcttctctatctacaggcaggtc

SEQ ID NO: 3299568 - DNA, 25 bp, Homo sapien
caatataaagttctacatgagtaac

SEQ ID NO: 3299569 - DNA, 25 bp, Homo sapien
tacaggcaggtcttcaatataaagt

SEQ ID NO: 3299570 - DNA, 25 bp, Homo sapien
tataaagttctacatgagtaaccat

SEQ ID NO: 3299571 - DNA, 25 bp, Homo sapien
caggaagctacaggaggatgaatac

SEQ ID NO: 3299572 - DNA, 25 bp, Homo sapien
tcaggaagctacaggaggatgaata

SEQ ID NO: 3299573 - DNA, 25 bp, Homo sapien
agctacaggaggatgaatacataaa

SEQ ID NO: 3299574 - DNA, 25 bp, Homo sapien
aggccaactcgggaatgacttttag

SEQ ID NO: 3299575 - DNA, 25 bp, Homo sapien
tgatttcaggccaactcgggaatga

SEQ ID NO: 3299576 - DNA, 25 bp, Homo sapien
ggccaactcgggaatgacttttaga

SEQ ID NO: 3299577 - DNA, 25 bp, Homo sapien
tttcaggccaactcgggaatgactt

SEQ ID NO: 3299578 - DNA, 25 bp, Homo sapien
ggcagcagcttataatgggttccac

SEQ ID NO: 3299579 - DNA, 25 bp, Homo sapien
gggcattgctgctgggtctcgcctt

SEQ ID NO: 3299580 - DNA, 25 bp, Homo sapien
tgcagcccactatactcttgttggt

SEQ ID NO: 3299581 - DNA, 25 bp, Homo sapien
tggtgatggaggaaactaaattagg

SEQ ID NO: 3299582 - DNA, 25 bp, Homo sapien
gccaaaaccagatgacagcacagtt

SEQ ID NO: 3299583 - DNA, 25 bp, Homo sapien
catctccaatccagtcgtgtgctca

SEQ ID NO: 3299584 - DNA, 25 bp, Homo sapien
caatccagtcgtgtgctcatcatca

SEQ ID NO: 3299585 - DNA, 25 bp, Homo sapien
tctccaatccagtcgtgtgctcatc

SEQ ID NO: 3299586 - DNA, 25 bp, Homo sapien
tccagtcgtgtgctcatcatcaata

SEQ ID NO: 3299587 - DNA, 25 bp, Homo sapien
cctcagggccttcgcagccagtgct

SEQ ID NO: 3299588 - DNA, 25 bp, Homo sapien
cacggccaccccattgggaccacag

SEQ ID NO: 3299589 - DNA, 25 bp, Homo sapien
ctccacgaagtaaccttgaagccat

SEQ ID NO: 3299590 - DNA, 25 bp, Homo sapien
ccagtgctccagctccacgaagtaa

SEQ ID NO: 3299591 - DNA, 25 bp, Homo sapien
ctgctgtcaggcccttctagattct

SEQ ID NO: 3299592 - DNA, 25 bp, Homo sapien
attctcttctcacatctggggtaac

SEQ ID NO: 3299593 - DNA, 25 bp, Homo sapien
ctgtcaggcccttctagattctctt

SEQ ID NO: 3299594 - DNA, 25 bp, Homo sapien
tattctcttctcacatctggggtaa

SEQ ID NO: 3299595 - DNA, 25 bp, Homo sapien
tccattactgcatgaattcctgtcc

SEQ ID NO: 3299596 - DNA, 25 bp, Homo sapien
actgcatgaattcctgtccaccttc

SEQ ID NO: 3299597 - DNA, 25 bp, Homo sapien
tcctccattactgcatgaattcctg

SEQ ID NO: 3299598 - DNA, 25 bp, Homo sapien
attactgcatgaattcctgtccacc

SEQ ID NO: 3299599 - DNA, 25 bp, Homo sapien
tatgaactgtcaccgaaagctgact

SEQ ID NO: 3299600 - DNA, 25 bp, Homo sapien
ccattactgggacaacaatagcttg

SEQ ID NO: 3299601 - DNA, 25 bp, Homo sapien
gggatccttatggtatgaactgtca

SEQ ID NO: 3299602 - DNA, 25 bp, Homo sapien
cgaaagctgacttcccattactggg

SEQ ID NO: 3299603 - DNA, 25 bp, Homo sapien
tagctgaagattaattggaacaact

SEQ ID NO: 3299604 - DNA, 25 bp, Homo sapien
tggatttgtgtaccagaaatgtcac

SEQ ID NO: 3299605 - DNA, 25 bp, Homo sapien
tcctgagctagaactttgccaaccc

SEQ ID NO: 3299606 - DNA, 25 bp, Homo sapien
ataaaagacaccagcggttttcctg

SEQ ID NO: 3299607 - DNA, 25 bp, Homo sapien
tctttctcagtgacgtctctctcca

SEQ ID NO: 3299608 - DNA, 25 bp, Homo sapien
ttctacagctctctttctcagtgac

SEQ ID NO: 3299609 - DNA, 25 bp, Homo sapien
tacagctctctttctcagtgacgtc

SEQ ID NO: 3299610 - DNA, 25 bp, Homo sapien
ctcagtgacgtctctctccaggcat

SEQ ID NO: 3299611 - DNA, 25 bp, Homo sapien
ctatgcttggttgtgcccatcgtgg

SEQ ID NO: 3299612 - DNA, 25 bp, Homo sapien
tgcttggttgtgcccatcgtggcca

SEQ ID NO: 3299613 - DNA, 25 bp, Homo sapien
tatgcttggttgtgcccatcgtggc

SEQ ID NO: 3299614 - DNA, 25 bp, Homo sapien
atgcttggttgtgcccatcgtggcc

SEQ ID NO: 3299615 - DNA, 25 bp, Homo sapien
gatcatagaactcacttcccaggct

SEQ ID NO: 3299616 - DNA, 25 bp, Homo sapien
gatggcactgggcataaattaacat

SEQ ID NO: 3299617 - DNA, 25 bp, Homo sapien
tgatctaacatttggcctccctagg

SEQ ID NO: 3299618 - DNA, 25 bp, Homo sapien
caatcactgtagtggctggaagaca

SEQ ID NO: 3299619 - DNA, 25 bp, Homo sapien
ccttctgtccgtacagcaacactta

SEQ ID NO: 3299620 - DNA, 25 bp, Homo sapien
caccttctgtccgtacagcaacact

SEQ ID NO: 3299621 - DNA, 25 bp, Homo sapien
ctccaccttctgtccgtacagcaac

SEQ ID NO: 3299622 - DNA, 25 bp, Homo sapien
cttctgtccgtacagcaacacttaa

SEQ ID NO: 3299623 - DNA, 25 bp, Homo sapien
tggtaggcagtgaactcaacagcat

SEQ ID NO: 3299624 - DNA, 25 bp, Homo sapien
ctggtaggcagtgaactcaacagca

SEQ ID NO: 3299625 - DNA, 25 bp, Homo sapien
accttcctcacccttgaggaatttg

SEQ ID NO: 3299626 - DNA, 25 bp, Homo sapien
attattaaccttcctcacccttgag

SEQ ID NO: 3299627 - DNA, 25 bp, Homo sapien
aaagactgtgaagaataggcttgcc

SEQ ID NO: 3299628 - DNA, 25 bp, Homo sapien
cagtcatgtccaaaacaagcaggca

SEQ ID NO: 3299629 - DNA, 25 bp, Homo sapien
ccttaaggataggacccatgggtga

SEQ ID NO: 3299630 - DNA, 25 bp, Homo sapien
caaggagcagtgacaactgtgttca

SEQ ID NO: 3299631 - DNA, 25 bp, Homo sapien
tcctaccaccaagatcccaaatgaa

SEQ ID NO: 3299632 - DNA, 25 bp, Homo sapien
tcccagcactcgcaactggatatgt

SEQ ID NO: 3299633 - DNA, 25 bp, Homo sapien
agatccaaacgcaggtatcctccct

SEQ ID NO: 3299634 - DNA, 25 bp, Homo sapien
ctggatatgtccttctgatcctacc

SEQ ID NO: 3299635 - DNA, 25 bp, Homo sapien
gcccttgttgaccacggagctatga

SEQ ID NO: 3299636 - DNA, 25 bp, Homo sapien
agagaagcccttgttgaccacggag

SEQ ID NO: 3299637 - DNA, 25 bp, Homo sapien
tgttgaccacggagctatgagttct

SEQ ID NO: 3299638 - DNA, 25 bp, Homo sapien
accacggagctatgagttcttagca

SEQ ID NO: 3299639 - DNA, 25 bp, Homo sapien
cagcacagcccatgactaggtagga

SEQ ID NO: 3299640 - DNA, 25 bp, Homo sapien
tcttttgtattcctccaagagcaaa

SEQ ID NO: 3299641 - DNA, 25 bp, Homo sapien
cccaacccacagagaataggccttg

SEQ ID NO: 3299642 - DNA, 25 bp, Homo sapien
catctgatgaaacgcatactccaag

SEQ ID NO: 3299643 - DNA, 25 bp, Homo sapien
aactctcaggatgacccagatggcc

SEQ ID NO: 3299644 - DNA, 25 bp, Homo sapien
cctagggacgtagttatttagagag

SEQ ID NO: 3299645 - DNA, 25 bp, Homo sapien
agtagaaactctcaggatgacccag

SEQ ID NO: 3299646 - DNA, 25 bp, Homo sapien
gcagttagaatgtgaagttcatcaa

SEQ ID NO: 3299647 - DNA, 25 bp, Homo sapien
gaacactgagaaaaaccaagctcat

SEQ ID NO: 3299648 - DNA, 25 bp, Homo sapien
ctgagagtctcctgaccctttcttc

SEQ ID NO: 3299649 - DNA, 25 bp, Homo sapien
agagtctcctgaccctttcttctca

SEQ ID NO: 3299650 - DNA, 25 bp, Homo sapien
tttcttctcatcagttcccaagaga

SEQ ID NO: 3299651 - DNA, 25 bp, Homo sapien
caaacattccgactgctccccaacg

SEQ ID NO: 3299652 - DNA, 25 bp, Homo sapien
aaacattccgactgctccccaacgt

SEQ ID NO: 3299653 - DNA, 25 bp, Homo sapien
cctcctgtttattcatccagaagca

SEQ ID NO: 3299654 - DNA, 25 bp, Homo sapien
tcctatacttgcctgcattttggct

SEQ ID NO: 3299655 - DNA, 25 bp, Homo sapien
cctgcattttggctttgatatcttc

SEQ ID NO: 3299656 - DNA, 25 bp, Homo sapien
ttttgaataattcttcacctttaga

SEQ ID NO: 3299657 - DNA, 25 bp, Homo sapien
ttttctctgtggaaccttttatcac

SEQ ID NO: 3299658 - DNA, 25 bp, Homo sapien
tacttaaaagttgcatatccttctc

SEQ ID NO: 3299659 - DNA, 25 bp, Homo sapien
ggactgccttctagatatacttaaa

SEQ ID NO: 3299660 - DNA, 25 bp, Homo sapien
acttaaaagttgcatatccttctcc

SEQ ID NO: 3299661 - DNA, 25 bp, Homo sapien
cacaggtggactgccttctagatat

SEQ ID NO: 3299662 - DNA, 25 bp, Homo sapien
ctaatatgcactggccctgaactac

SEQ ID NO: 3299663 - DNA, 25 bp, Homo sapien
ccactaatatgcactggccctgaac

SEQ ID NO: 3299664 - DNA, 25 bp, Homo sapien
agttactaagcgctgtccactaata

SEQ ID NO: 3299665 - DNA, 25 bp, Homo sapien
gttactaagcgctgtccactaatat

SEQ ID NO: 3299666 - DNA, 25 bp, Homo sapien
aaacatgggagaggcgcccttgctc

SEQ ID NO: 3299667 - DNA, 25 bp, Homo sapien
ggcgcccttgctcggcaacgtgcag

SEQ ID NO: 3299668 - DNA, 25 bp, Homo sapien
caggagctcggcgagaaactttgcc

SEQ ID NO: 3299669 - DNA, 25 bp, Homo sapien
ggagctcggcgagaaactttgccat

SEQ ID NO: 3299670 - DNA, 25 bp, Homo sapien
ggtccctcccgatgcgccgtttctg

SEQ ID NO: 3299671 - DNA, 25 bp, Homo sapien
ccccttgccagagcccgagcgccag

SEQ ID NO: 3299672 - DNA, 25 bp, Homo sapien
ttgccagagcccgagcgccaggatc

SEQ ID NO: 3299673 - DNA, 25 bp, Homo sapien
tcccgatgcgccgtttctgtccttt

SEQ ID NO: 3299674 - DNA, 25 bp, Homo sapien
gcctgatacggcatctcctgaacca

SEQ ID NO: 3299675 - DNA, 25 bp, Homo sapien
cagatgttacatgaatggatgcctc

SEQ ID NO: 3299676 - DNA, 25 bp, Homo sapien
tgcagacccgtagaggacaatgact

SEQ ID NO: 3299677 - DNA, 25 bp, Homo sapien
tctatgtagcaaggctgcagacccg

SEQ ID NO: 3299678 - DNA, 25 bp, Homo sapien
gctgtgctggccagtgattcagcca

SEQ ID NO: 3299679 - DNA, 25 bp, Homo sapien
tgctgtgctggccagtgattcagcc

SEQ ID NO: 3299680 - DNA, 25 bp, Homo sapien
tgtgctggccagtgattcagccaag

SEQ ID NO: 3299681 - DNA, 25 bp, Homo sapien
gtgctggccagtgattcagccaagc

SEQ ID NO: 3299682 - DNA, 25 bp, Homo sapien
tgaccaatggcaccctttccatggc

SEQ ID NO: 3299683 - DNA, 25 bp, Homo sapien
ctgaccaatggcaccctttccatgg

SEQ ID NO: 3299684 - DNA, 25 bp, Homo sapien
gccagcatccattatctggtctcca

SEQ ID NO: 3299685 - DNA, 25 bp, Homo sapien
ccctgacttcgtggttgtaatagca

SEQ ID NO: 3299686 - DNA, 25 bp, Homo sapien
gatcactgaattccctgacttcgtg

SEQ ID NO: 3299687 - DNA, 25 bp, Homo sapien
gagctagctgatggatttgatcact

SEQ ID NO: 3299688 - DNA, 25 bp, Homo sapien
taatagcatttgtaccagggttctt

SEQ ID NO: 3299689 - DNA, 25 bp, Homo sapien
ggttcttgattcttagctgcaacag

SEQ ID NO: 3299690 - DNA, 25 bp, Homo sapien
aacccgaaactaatgtcagtctcct

SEQ ID NO: 3299691 - DNA, 25 bp, Homo sapien
ttctgtggcagtaaacccgaaacta

SEQ ID NO: 3299692 - DNA, 25 bp, Homo sapien
gcactgaagaaagctgtgaggccac

SEQ ID NO: 3299693 - DNA, 25 bp, Homo sapien
ttcatttgaagctttaggactacat

SEQ ID NO: 3299694 - DNA, 25 bp, Homo sapien
caccatctgctcgatttccatagct

SEQ ID NO: 3299695 - DNA, 25 bp, Homo sapien
gcctcttagtctattggccacagcc

SEQ ID NO: 3299696 - DNA, 25 bp, Homo sapien
taggactacatgactgcctcttagt

SEQ ID NO: 3299697 - DNA, 25 bp, Homo sapien
ccagcccaactccagccattgcagc

SEQ ID NO: 3299698 - DNA, 25 bp, Homo sapien
ttaaggtgtaagtggcctgaggaac

SEQ ID NO: 3299699 - DNA, 25 bp, Homo sapien
ttctacagccttaggcttccaggct

SEQ ID NO: 3299700 - DNA, 25 bp, Homo sapien
gaggaacgacaataagttctacagc

SEQ ID NO: 3299701 - DNA, 25 bp, Homo sapien
tcttcatatttggttaaggtgtaag

SEQ ID NO: 3299702 - DNA, 25 bp, Homo sapien
taagaaactctattcaacaaaaggc

SEQ ID NO: 3299703 - DNA, 25 bp, Homo sapien
ggaagcaggagcttccatcccctta

SEQ ID NO: 3299704 - DNA, 25 bp, Homo sapien
gatggaaattttgttaggggaagca

SEQ ID NO: 3299705 - DNA, 25 bp, Homo sapien
cacaaattttacagggatggaaatt

SEQ ID NO: 3299706 - DNA, 25 bp, Homo sapien
gagaatgatgtacacaaattttaca

SEQ ID NO: 3299707 - DNA, 25 bp, Homo sapien
tccatcagccagaggcctcagttct

SEQ ID NO: 3299708 - DNA, 25 bp, Homo sapien
cataggtctgctcacaatatggcag

SEQ ID NO: 3299709 - DNA, 25 bp, Homo sapien
gattgcaaggtcacccatgtgtcca

SEQ ID NO: 3299710 - DNA, 25 bp, Homo sapien
cttggttgaagccagaagacttgat

SEQ ID NO: 3299711 - DNA, 25 bp, Homo sapien
ctcttccaaacacaacgcagaaatg

SEQ ID NO: 3299712 - DNA, 25 bp, Homo sapien
cctcttccaaacacaacgcagaaat

SEQ ID NO: 3299713 - DNA, 25 bp, Homo sapien
tcttccaaacacaacgcagaaatgc

SEQ ID NO: 3299714 - DNA, 25 bp, Homo sapien
catgatttggtatcttcttgagtcc

SEQ ID NO: 3299715 - DNA, 25 bp, Homo sapien
ttggtatcttcttgagtccagtaat

SEQ ID NO: 3299716 - DNA, 25 bp, Homo sapien
ggtatcttcttgagtccagtaatta

SEQ ID NO: 3299717 - DNA, 25 bp, Homo sapien
tatcttcttgagtccagtaattatc

SEQ ID NO: 3299718 - DNA, 25 bp, Homo sapien
tcatcctttcaatgcagcatttaag

SEQ ID NO: 3299719 - DNA, 25 bp, Homo sapien
tcacatccgttctgtttcatccttt

SEQ ID NO: 3299720 - DNA, 25 bp, Homo sapien
tcttgttcacatccgttctgtttca

SEQ ID NO: 3299721 - DNA, 25 bp, Homo sapien
cagggaactcttgttcacatccgtt

SEQ ID NO: 3299722 - DNA, 25 bp, Homo sapien
tccagtcctgatatctgtcccactt

SEQ ID NO: 3299723 - DNA, 25 bp, Homo sapien
gatatctgtcccacttttcttcact

SEQ ID NO: 3299724 - DNA, 25 bp, Homo sapien
tttcttcacttcgtacctcatcatc

SEQ ID NO: 3299725 - DNA, 25 bp, Homo sapien
cacttttcttcacttcgtacctcat

SEQ ID NO: 3299726 - DNA, 25 bp, Homo sapien
actggaaggctagctgatcctgctg

SEQ ID NO: 3299727 - DNA, 25 bp, Homo sapien
ccaactggaaggctagctgatcctg

SEQ ID NO: 3299728 - DNA, 25 bp, Homo sapien
ttttgcattggccttagattgaatc

SEQ ID NO: 3299729 - DNA, 25 bp, Homo sapien
ttagattgaatctttcatgcaagca

SEQ ID NO: 3299730 - DNA, 25 bp, Homo sapien
tcttctttttctactttaagatgga

SEQ ID NO: 3299731 - DNA, 25 bp, Homo sapien
caccacacccggctttgttcttctt

SEQ ID NO: 3299732 - DNA, 25 bp, Homo sapien
tctttttctactttaagatggaaga

SEQ ID NO: 3299733 - DNA, 25 bp, Homo sapien
tttttctactttaagatggaagatg

SEQ ID NO: 3299734 - DNA, 25 bp, Homo sapien
tttatttgcccctgcccatgtcctg

SEQ ID NO: 3299735 - DNA, 25 bp, Homo sapien
gggacccaagagggttgctgctgct

SEQ ID NO: 3299736 - DNA, 25 bp, Homo sapien
tattcctttatttgcccctgcccat

SEQ ID NO: 3299737 - DNA, 25 bp, Homo sapien
cttctacagcatgggaggggaccca

SEQ ID NO: 3299738 - DNA, 25 bp, Homo sapien
tgcttaaagcacaggctatcaccct

SEQ ID NO: 3299739 - DNA, 25 bp, Homo sapien
tatcaccctggttccaagcaagaag

SEQ ID NO: 3299740 - DNA, 25 bp, Homo sapien
tcttcactggtagcatgcttaaagc

SEQ ID NO: 3299741 - DNA, 25 bp, Homo sapien
gctgtcgaatgctgcctagtaagga

SEQ ID NO: 3299742 - DNA, 25 bp, Homo sapien
aactaattgattagcagtagcatgc

SEQ ID NO: 3299743 - DNA, 25 bp, Homo sapien
gttaaatggtacagagaacatcatg

SEQ ID NO: 3299744 - DNA, 25 bp, Homo sapien
tctagaactggaaacacttggttcc

SEQ ID NO: 3299745 - DNA, 25 bp, Homo sapien
tatttactgccttagccaatctctt

SEQ ID NO: 3299746 - DNA, 25 bp, Homo sapien
tgagaatcgaaaaggcgctaaggac

SEQ ID NO: 3299747 - DNA, 25 bp, Homo sapien
tcaaggtagacttagggtccacaac

SEQ ID NO: 3299748 - DNA, 25 bp, Homo sapien
tattatatagtcagtcccctggaga

SEQ ID NO: 3299749 - DNA, 25 bp, Homo sapien
tagagtgcaaacagagtacagcctc

SEQ ID NO: 3299750 - DNA, 25 bp, Homo sapien
caagcctctttgaaatgccaaccag

SEQ ID NO: 3299751 - DNA, 25 bp, Homo sapien
taccaactaacaggacaagcggact

SEQ ID NO: 3299752 - DNA, 25 bp, Homo sapien
tctgatatagatgcctacaagcctc

SEQ ID NO: 3299753 - DNA, 25 bp, Homo sapien
catggaaattttcaggcgactccta

SEQ ID NO: 3299754 - DNA, 25 bp, Homo sapien
aagtgggattccaaccagagtctac

SEQ ID NO: 3299755 - DNA, 25 bp, Homo sapien
tcccaggatgtaaagagtattatgc

SEQ ID NO: 3299756 - DNA, 25 bp, Homo sapien
gagaaattaactcacctggtagcag

SEQ ID NO: 3299757 - DNA, 25 bp, Homo sapien
tcagcatgaactggcacctggacag

SEQ ID NO: 3299758 - DNA, 25 bp, Homo sapien
tttataagattgcaacccagctatg

SEQ ID NO: 3299759 - DNA, 25 bp, Homo sapien
tagatccaaattgaggacctgtgtc

SEQ ID NO: 3299760 - DNA, 25 bp, Homo sapien
tagcattcagggaattgatacccat

SEQ ID NO: 3299761 - DNA, 25 bp, Homo sapien
cctgtcatttgttggaagcttcttg

SEQ ID NO: 3299762 - DNA, 25 bp, Homo sapien
gatgctaagaatttgacctccaact

SEQ ID NO: 3299763 - DNA, 25 bp, Homo sapien
tccaccctgagtggtaatctaaggc

SEQ ID NO: 3299764 - DNA, 25 bp, Homo sapien
caattccctgaatgctaataacaga

SEQ ID NO: 3299765 - DNA, 25 bp, Homo sapien
catagctgggttgcaatcttataaa

SEQ ID NO: 3299766 - DNA, 25 bp, Homo sapien
gacacaggtcctcaatttggatcta

SEQ ID NO: 3299767 - DNA, 25 bp, Homo sapien
gccttagattaccactcagggtgga

SEQ ID NO: 3299768 - DNA, 25 bp, Homo sapien
caagaagcttccaacaaatgacagg

SEQ ID NO: 3299769 - DNA, 25 bp, Homo sapien
gaggtcaaattcttagcatcagatg

SEQ ID NO: 3299770 - DNA, 25 bp, Homo sapien
gatttttagagctgtggtggacttc

SEQ ID NO: 3299771 - DNA, 25 bp, Homo sapien
tagagctgtggtggacttcatagat

SEQ ID NO: 3299772 - DNA, 25 bp, Homo sapien
tagaaatgcggctagttcagagaga

SEQ ID NO: 3299773 - DNA, 25 bp, Homo sapien
tggacttcatagatgaattcaagtg

SEQ ID NO: 3299774 - DNA, 25 bp, Homo sapien
gctgtggtggacttcatagatgaat

SEQ ID NO: 3299775 - DNA, 25 bp, Homo sapien
caagtgttgagggaggattaaagaa

SEQ ID NO: 3299776 - DNA, 25 bp, Homo sapien
ctttaatcctccctcaacacttgaa

SEQ ID NO: 3299777 - DNA, 25 bp, Homo sapien
tgaagtccaccacagctctaaaaat

SEQ ID NO: 3299778 - DNA, 25 bp, Homo sapien
tctatgaagtccaccacagctctaa

SEQ ID NO: 3299779 - DNA, 25 bp, Homo sapien
cacttgaattcatctatgaagtcca

SEQ ID NO: 3299780 - DNA, 25 bp, Homo sapien
aattcatctatgaagtccaccacag

SEQ ID NO: 3299781 - DNA, 25 bp, Homo sapien
tctctctgaactagccgcatttcta

SEQ ID NO: 3299782 - DNA, 25 bp, Homo sapien
gacaggcttgccgaaattgaggaca

SEQ ID NO: 3299783 - DNA, 25 bp, Homo sapien
aatacttccttatgtagccattaag

SEQ ID NO: 3299784 - DNA, 25 bp, Homo sapien
gccgaaattgaggacatgattaaaa

SEQ ID NO: 3299785 - DNA, 25 bp, Homo sapien
aagtacccctttgcacagatagtta

SEQ ID NO: 3299786 - DNA, 25 bp, Homo sapien
tggataaatgtgcaaaagtacccct

SEQ ID NO: 3299787 - DNA, 25 bp, Homo sapien
ccaaattgggaatgacttaatgtca

SEQ ID NO: 3299788 - DNA, 25 bp, Homo sapien
ccagatttgttctaaaaagcacaat

SEQ ID NO: 3299789 - DNA, 25 bp, Homo sapien
ttttaatcatgtcctcaatttcggc

SEQ ID NO: 3299790 - DNA, 25 bp, Homo sapien
tcttaatggctacataaggaagtat

SEQ ID NO: 3299791 - DNA, 25 bp, Homo sapien
gggtacttttgcacatttatccaga

SEQ ID NO: 3299792 - DNA, 25 bp, Homo sapien
tgtcctcaatttcggcaagcctgtc

SEQ ID NO: 3299793 - DNA, 25 bp, Homo sapien
tgacattaagtcattcccaatttgg

SEQ ID NO: 3299794 - DNA, 25 bp, Homo sapien
catgatgtagtagtgtcttactggt

SEQ ID NO: 3299795 - DNA, 25 bp, Homo sapien
tgtgacagtgtcatgatgtagtagt

SEQ ID NO: 3299796 - DNA, 25 bp, Homo sapien
cagtgtcatgatgtagtagtgtctt

SEQ ID NO: 3299797 - DNA, 25 bp, Homo sapien
cagtattgtagagcaagtcttgtgt

SEQ ID NO: 3299798 - DNA, 25 bp, Homo sapien
tagagcaagtcttgtgttaaaagcc

SEQ ID NO: 3299799 - DNA, 25 bp, Homo sapien
cccagtattgtagagcaagtcttgt

SEQ ID NO: 3299800 - DNA, 25 bp, Homo sapien
ggcttttaacacaagacttgctcta

SEQ ID NO: 3299801 - DNA, 25 bp, Homo sapien
taagacactactacatcatgacact

SEQ ID NO: 3299802 - DNA, 25 bp, Homo sapien
acaagacttgctctacaatactggg

SEQ ID NO: 3299803 - DNA, 25 bp, Homo sapien
actactacatcatgacactgtcaca

SEQ ID NO: 3299804 - DNA, 25 bp, Homo sapien
cagtaagacactactacatcatgac

SEQ ID NO: 3299805 - DNA, 25 bp, Homo sapien
accagtaagacactactacatcatg

SEQ ID NO: 3299806 - DNA, 25 bp, Homo sapien
tctgaagtttaattctgagttctca

SEQ ID NO: 3299807 - DNA, 25 bp, Homo sapien
tgggtccctctgaagtttaattctg

SEQ ID NO: 3299808 - DNA, 25 bp, Homo sapien
ttaattctgagttctcattaaaaga

SEQ ID NO: 3299809 - DNA, 25 bp, Homo sapien
tggaagtatgacgttgggtccctct

SEQ ID NO: 3299810 - DNA, 25 bp, Homo sapien
tatgacgttgggtccctctgaagtt

SEQ ID NO: 3299811 - DNA, 25 bp, Homo sapien
gaagtatgacgttgggtccctctga

SEQ ID NO: 3299812 - DNA, 25 bp, Homo sapien
aaacttcagagggacccaacgtcat

SEQ ID NO: 3299813 - DNA, 25 bp, Homo sapien
tcagagggacccaacgtcatacttc

SEQ ID NO: 3299814 - DNA, 25 bp, Homo sapien
gagaactcagaattaaacttcagag

SEQ ID NO: 3299815 - DNA, 25 bp, Homo sapien
cagaattaaacttcagagggaccca

SEQ ID NO: 3299816 - DNA, 25 bp, Homo sapien
taatgagaactcagaattaaacttc

SEQ ID NO: 3299817 - DNA, 25 bp, Homo sapien
gagggacccaacgtcatacttccat

SEQ ID NO: 3299818 - DNA, 25 bp, Homo sapien
cctgctaatagcagttcaaactaaa

SEQ ID NO: 3299819 - DNA, 25 bp, Homo sapien
ggctcctgccacctgctaatagcag

SEQ ID NO: 3299820 - DNA, 25 bp, Homo sapien
gattcatttgaaggtggctcctgcc

SEQ ID NO: 3299821 - DNA, 25 bp, Homo sapien
tgaagattcatttgaaggtggctcc

SEQ ID NO: 3299822 - DNA, 25 bp, Homo sapien
cagtattttccaatttgaagattca

SEQ ID NO: 3299823 - DNA, 25 bp, Homo sapien
gaagcagtattttccaatttgaaga

SEQ ID NO: 3299824 - DNA, 25 bp, Homo sapien
gcaggagccaccttcaaatgaatct

SEQ ID NO: 3299825 - DNA, 25 bp, Homo sapien
gtggcaggagccaccttcaaatgaa

SEQ ID NO: 3299826 - DNA, 25 bp, Homo sapien
tttagtttgaactgctattagcagg

SEQ ID NO: 3299827 - DNA, 25 bp, Homo sapien
gaactgctattagcaggtggcagga

SEQ ID NO: 3299828 - DNA, 25 bp, Homo sapien
caaattggaaaatactgcttcacca

SEQ ID NO: 3299829 - DNA, 25 bp, Homo sapien
gaatcttcaaattggaaaatactgc

SEQ ID NO: 3299830 - DNA, 25 bp, Homo sapien
cccatttatagacgttgtagcagta

SEQ ID NO: 3299831 - DNA, 25 bp, Homo sapien
ggatttacagctcatggactctact

SEQ ID NO: 3299832 - DNA, 25 bp, Homo sapien
tagtggaacatagggataactcagt

SEQ ID NO: 3299833 - DNA, 25 bp, Homo sapien
tgttaagtgttgtagcctgcccaga

SEQ ID NO: 3299834 - DNA, 25 bp, Homo sapien
cccagtaatggttaaatacgtcagc

SEQ ID NO: 3299835 - DNA, 25 bp, Homo sapien
aatgcattttttacaggcccagtaa

SEQ ID NO: 3299836 - DNA, 25 bp, Homo sapien
aaaatagaagtcactctgggcaggc

SEQ ID NO: 3299837 - DNA, 25 bp, Homo sapien
agtagagtccatgagctgtaaatcc

SEQ ID NO: 3299838 - DNA, 25 bp, Homo sapien
tctgggcaggctacaacacttaaca

SEQ ID NO: 3299839 - DNA, 25 bp, Homo sapien
tgacgtatttaaccattactgggcc

SEQ ID NO: 3299840 - DNA, 25 bp, Homo sapien
tactgctacaacgtctataaatggg

SEQ ID NO: 3299841 - DNA, 25 bp, Homo sapien
gaaaatccagagacaagctgtatcc

SEQ ID NO: 3299842 - DNA, 25 bp, Homo sapien
tacgagatgctcacgctctcgaatg

SEQ ID NO: 3299843 - DNA, 25 bp, Homo sapien
gctcacgctctcgaatgctgccgtt

SEQ ID NO: 3299844 - DNA, 25 bp, Homo sapien
tgctcacgctctcgaatgctgccgt

SEQ ID NO: 3299845 - DNA, 25 bp, Homo sapien
gagatgctcacgctctcgaatgctg

SEQ ID NO: 3299846 - DNA, 25 bp, Homo sapien
tcacgctctcgaatgctgccgtttg

SEQ ID NO: 3299847 - DNA, 25 bp, Homo sapien
gatgctcacgctctcgaatgctgcc

SEQ ID NO: 3299848 - DNA, 25 bp, Homo sapien
cattcgagagcgtgagcatctcgta

SEQ ID NO: 3299849 - DNA, 25 bp, Homo sapien
caaacggcagcattcgagagcgtga

SEQ ID NO: 3299850 - DNA, 25 bp, Homo sapien
cagcattcgagagcgtgagcatctc

SEQ ID NO: 3299851 - DNA, 25 bp, Homo sapien
gcagcattcgagagcgtgagcatct

SEQ ID NO: 3299852 - DNA, 25 bp, Homo sapien
aacggcagcattcgagagcgtgagc

SEQ ID NO: 3299853 - DNA, 25 bp, Homo sapien
cggcagcattcgagagcgtgagcat

SEQ ID NO: 3299854 - DNA, 25 bp, Homo sapien
attgcaggccctgtgtcgcgctgac

SEQ ID NO: 3299855 - DNA, 25 bp, Homo sapien
tcattgcaggccctgtgtcgcgctg

SEQ ID NO: 3299856 - DNA, 25 bp, Homo sapien
cgcgctgacttcacgattctcacag

SEQ ID NO: 3299857 - DNA, 25 bp, Homo sapien
ccctgtgtcgcgctgacttcacgat

SEQ ID NO: 3299858 - DNA, 25 bp, Homo sapien
tgtgtcgcgctgacttcacgattct

SEQ ID NO: 3299859 - DNA, 25 bp, Homo sapien
caggccctgtgtcgcgctgacttca

SEQ ID NO: 3299860 - DNA, 25 bp, Homo sapien
ctgtgagaatcgtgaagtcagcgcg

SEQ ID NO: 3299861 - DNA, 25 bp, Homo sapien
tgagaatcgtgaagtcagcgcgaca

SEQ ID NO: 3299862 - DNA, 25 bp, Homo sapien
tgaagtcagcgcgacacagggcctg

SEQ ID NO: 3299863 - DNA, 25 bp, Homo sapien
atcgtgaagtcagcgcgacacaggg

SEQ ID NO: 3299864 - DNA, 25 bp, Homo sapien
gaatcgtgaagtcagcgcgacacag

SEQ ID NO: 3299865 - DNA, 25 bp, Homo sapien
cagcgcgacacagggcctgcaatga

SEQ ID NO: 3299866 - DNA, 25 bp, Homo sapien
aaagtattgcctactaactctgaca

SEQ ID NO: 3299867 - DNA, 25 bp, Homo sapien
cagcaaaaaagtattgcctactaac

SEQ ID NO: 3299868 - DNA, 25 bp, Homo sapien
gcaaaaaagtattgcctactaactc

SEQ ID NO: 3299869 - DNA, 25 bp, Homo sapien
gtattgcctactaactctgacatta

SEQ ID NO: 3299870 - DNA, 25 bp, Homo sapien
aaaaagtattgcctactaactctga

SEQ ID NO: 3299871 - DNA, 25 bp, Homo sapien
tgcagcaaaaaagtattgcctacta

SEQ ID NO: 3299872 - DNA, 25 bp, Homo sapien
ctctgacattataccttgtttgtac

SEQ ID NO: 3299873 - DNA, 25 bp, Homo sapien
ctaactctgacattataccttgttt

SEQ ID NO: 3299874 - DNA, 25 bp, Homo sapien
actctgacattataccttgtttgta

SEQ ID NO: 3299875 - DNA, 25 bp, Homo sapien
aactctgacattataccttgtttgt

SEQ ID NO: 3299876 - DNA, 25 bp, Homo sapien
tctgacattataccttgtttgtacc

SEQ ID NO: 3299877 - DNA, 25 bp, Homo sapien
taactctgacattataccttgtttg

SEQ ID NO: 3299878 - DNA, 25 bp, Homo sapien
caaacaaggtataatgtcagagtta

SEQ ID NO: 3299879 - DNA, 25 bp, Homo sapien
tacaaacaaggtataatgtcagagt

SEQ ID NO: 3299880 - DNA, 25 bp, Homo sapien
ggtacaaacaaggtataatgtcaga

SEQ ID NO: 3299881 - DNA, 25 bp, Homo sapien
gtacaaacaaggtataatgtcagag

SEQ ID NO: 3299882 - DNA, 25 bp, Homo sapien
acaaacaaggtataatgtcagagtt

SEQ ID NO: 3299883 - DNA, 25 bp, Homo sapien
aaacaaggtataatgtcagagttag

SEQ ID NO: 3299884 - DNA, 25 bp, Homo sapien
gagttagtaggcaatacttttttgc

SEQ ID NO: 3299885 - DNA, 25 bp, Homo sapien
gttagtaggcaatacttttttgctg

SEQ ID NO: 3299886 - DNA, 25 bp, Homo sapien
tcagagttagtaggcaatacttttt

SEQ ID NO: 3299887 - DNA, 25 bp, Homo sapien
tagtaggcaatacttttttgctgca

SEQ ID NO: 3299888 - DNA, 25 bp, Homo sapien
tgtcagagttagtaggcaatacttt

SEQ ID NO: 3299889 - DNA, 25 bp, Homo sapien
taatgtcagagttagtaggcaatac

SEQ ID NO: 3299890 - DNA, 25 bp, Homo sapien
tatgtaacacaggtgctcttaagct

SEQ ID NO: 3299891 - DNA, 25 bp, Homo sapien
cagaagtgcttaccatattataaca

SEQ ID NO: 3299892 - DNA, 25 bp, Homo sapien
gcttaccatattataacatagtgac

SEQ ID NO: 3299893 - DNA, 25 bp, Homo sapien
tattataacatagtgactttcaaag

SEQ ID NO: 3299894 - DNA, 25 bp, Homo sapien
gtaacacaggtgctcttaagctttt

SEQ ID NO: 3299895 - DNA, 25 bp, Homo sapien
caatgcttaatttaagagtttcaca

SEQ ID NO: 3299896 - DNA, 25 bp, Homo sapien
agcttaagagcacctgtgttacata

SEQ ID NO: 3299897 - DNA, 25 bp, Homo sapien
cactatgttataatatggtaagcac

SEQ ID NO: 3299898 - DNA, 25 bp, Homo sapien
aaaagcttaagagcacctgtgttac

SEQ ID NO: 3299899 - DNA, 25 bp, Homo sapien
tgttataatatggtaagcacttctg

SEQ ID NO: 3299900 - DNA, 25 bp, Homo sapien
tgaaagtcactatgttataatatgg

SEQ ID NO: 3299901 - DNA, 25 bp, Homo sapien
tgtgaaactcttaaattaagcattg

SEQ ID NO: 3299902 - DNA, 25 bp, Homo sapien
attattccatttgcaacttatcccc

SEQ ID NO: 3299903 - DNA, 25 bp, Homo sapien
ttccatttgcaacttatccccaaca

SEQ ID NO: 3299904 - DNA, 25 bp, Homo sapien
ttattccatttgcaacttatcccca

SEQ ID NO: 3299905 - DNA, 25 bp, Homo sapien
attccatttgcaacttatccccaac

SEQ ID NO: 3299906 - DNA, 25 bp, Homo sapien
tccatttgcaacttatccccaacag

SEQ ID NO: 3299907 - DNA, 25 bp, Homo sapien
tattccatttgcaacttatccccaa

SEQ ID NO: 3299908 - DNA, 25 bp, Homo sapien
ctgttggggataagttgcaaatgga

SEQ ID NO: 3299909 - DNA, 25 bp, Homo sapien
ttggggataagttgcaaatggaata

SEQ ID NO: 3299910 - DNA, 25 bp, Homo sapien
tgttggggataagttgcaaatggaa

SEQ ID NO: 3299911 - DNA, 25 bp, Homo sapien
tggggataagttgcaaatggaataa

SEQ ID NO: 3299912 - DNA, 25 bp, Homo sapien
ggggataagttgcaaatggaataat

SEQ ID NO: 3299913 - DNA, 25 bp, Homo sapien
gttggggataagttgcaaatggaat

SEQ ID NO: 3299914 - DNA, 25 bp, Homo sapien
cgaggtggtcatcaaaatagctaca

SEQ ID NO: 3299915 - DNA, 25 bp, Homo sapien
ggtggtcatcaaaatagctacaaac

SEQ ID NO: 3299916 - DNA, 25 bp, Homo sapien
ggcgaggtggtcatcaaaatagcta

SEQ ID NO: 3299917 - DNA, 25 bp, Homo sapien
gaggtggtcatcaaaatagctacaa

SEQ ID NO: 3299918 - DNA, 25 bp, Homo sapien
gggaaggtatccaggcgaggtggtc

SEQ ID NO: 3299919 - DNA, 25 bp, Homo sapien
gtcatcaaaatagctacaaaccata

SEQ ID NO: 3299920 - DNA, 25 bp, Homo sapien
gtttgtagctattttgatgaccacc

SEQ ID NO: 3299921 - DNA, 25 bp, Homo sapien
tatggtttgtagctattttgatgac

SEQ ID NO: 3299922 - DNA, 25 bp, Homo sapien
gaccacctcgcctggataccttccc

SEQ ID NO: 3299923 - DNA, 25 bp, Homo sapien
ttgtagctattttgatgaccacctc

SEQ ID NO: 3299924 - DNA, 25 bp, Homo sapien
tgtagctattttgatgaccacctcg

SEQ ID NO: 3299925 - DNA, 25 bp, Homo sapien
tagctattttgatgaccacctcgcc

SEQ ID NO: 3299926 - DNA, 25 bp, Homo sapien
tttagacatggaaagccctgacttc

SEQ ID NO: 3299927 - DNA, 25 bp, Homo sapien
tagtatgtaaccactaccgttctgg

SEQ ID NO: 3299928 - DNA, 25 bp, Homo sapien
tcttaggtgactaggcctgctgcac

SEQ ID NO: 3299929 - DNA, 25 bp, Homo sapien
tagttgctctccacctgatttgtag

SEQ ID NO: 3299930 - DNA, 25 bp, Homo sapien
tgagtcgtcaggtaaagggttctac

SEQ ID NO: 3299931 - DNA, 25 bp, Homo sapien
tagaagggcagagatactaagcact

SEQ ID NO: 3299932 - DNA, 25 bp, Homo sapien
gaagtcagggctttccatgtctaaa

SEQ ID NO: 3299933 - DNA, 25 bp, Homo sapien
ttaagtttcaaaggatggacagctg

SEQ ID NO: 3299934 - DNA, 25 bp, Homo sapien
tattgtgcagcaggcctagtcacct

SEQ ID NO: 3299935 - DNA, 25 bp, Homo sapien
tagaaccctttacctgacgactcaa

SEQ ID NO: 3299936 - DNA, 25 bp, Homo sapien
tacaaatcaggtggagagcaactac

SEQ ID NO: 3299937 - DNA, 25 bp, Homo sapien
gactcaacagttgctacaaatcagg

SEQ ID NO: 3299938 - DNA, 25 bp, Homo sapien
aaccagggatatagtaactattgga

SEQ ID NO: 3299939 - DNA, 25 bp, Homo sapien
cagggatatagtaactattggaatc

SEQ ID NO: 3299940 - DNA, 25 bp, Homo sapien
gatatagtaactattggaatcaagg

SEQ ID NO: 3299941 - DNA, 25 bp, Homo sapien
tatagtaactattggaatcaaggct

SEQ ID NO: 3299942 - DNA, 25 bp, Homo sapien
agtaactattggaatcaaggctatg

SEQ ID NO: 3299943 - DNA, 25 bp, Homo sapien
tagtaactattggaatcaaggctat

SEQ ID NO: 3299944 - DNA, 25 bp, Homo sapien
aggctatggcaactatggatataac

SEQ ID NO: 3299945 - DNA, 25 bp, Homo sapien
gttatatccatagttgccatagcct

SEQ ID NO: 3299946 - DNA, 25 bp, Homo sapien
gattccaatagttactatatccctg

SEQ ID NO: 3299947 - DNA, 25 bp, Homo sapien
tccaatagttactatatccctggtt

SEQ ID NO: 3299948 - DNA, 25 bp, Homo sapien
catagccttgattccaatagttact

SEQ ID NO: 3299949 - DNA, 25 bp, Homo sapien
tagccttgattccaatagttactat

SEQ ID NO: 3299950 - DNA, 25 bp, Homo sapien
gccttgattccaatagttactatat

SEQ ID NO: 3299951 - DNA, 25 bp, Homo sapien
ttccaatagttactatatccctggt

SEQ ID NO: 3299952 - DNA, 25 bp, Homo sapien
agtttactctatcttaagcttttct

SEQ ID NO: 3299953 - DNA, 25 bp, Homo sapien
gaagtaaagatctttgctgatcttc

SEQ ID NO: 3299954 - DNA, 25 bp, Homo sapien
tctgctttttaattatcctgaagta

SEQ ID NO: 3299955 - DNA, 25 bp, Homo sapien
gagcctaagtttactctatcttaag

SEQ ID NO: 3299956 - DNA, 25 bp, Homo sapien
gtaagctagagcctaagtttactct

SEQ ID NO: 3299957 - DNA, 25 bp, Homo sapien
tagtgaacctattaatgtgctgcag

SEQ ID NO: 3299958 - DNA, 25 bp, Homo sapien
agaaaagcttaagatagagtaaact

SEQ ID NO: 3299959 - DNA, 25 bp, Homo sapien
agagtaaacttaggctctagcttac

SEQ ID NO: 3299960 - DNA, 25 bp, Homo sapien
tgcagcacattaataggttcactaa

SEQ ID NO: 3299961 - DNA, 25 bp, Homo sapien
tacttcaggataattaaaaagcaga

SEQ ID NO: 3299962 - DNA, 25 bp, Homo sapien
gaagatcagcaaagatctttacttc

SEQ ID NO: 3299963 - DNA, 25 bp, Homo sapien
cttaagatagagtaaacttaggctc

SEQ ID NO: 3299964 - DNA, 25 bp, Homo sapien
aggaagagctcgtggaagaggtggt

SEQ ID NO: 3299965 - DNA, 25 bp, Homo sapien
ggaagagctcgtggaagaggtggtg

SEQ ID NO: 3299966 - DNA, 25 bp, Homo sapien
accacctcttccacgagctcttcct

SEQ ID NO: 3299967 - DNA, 25 bp, Homo sapien
caccacctcttccacgagctcttcc

SEQ ID NO: 3299968 - DNA, 25 bp, Homo sapien
gccatgtcgaaggaacaatatcagc

SEQ ID NO: 3299969 - DNA, 25 bp, Homo sapien
atctagaggaggatttgcaggaaga

SEQ ID NO: 3299970 - DNA, 25 bp, Homo sapien
atttgcaggaagagctcgtggaaga

SEQ ID NO: 3299971 - DNA, 25 bp, Homo sapien
tcgaaggaacaatatcagcaacagc

SEQ ID NO: 3299972 - DNA, 25 bp, Homo sapien
caatatcagcaacagcaacagtggg

SEQ ID NO: 3299973 - DNA, 25 bp, Homo sapien
tgtgaaataaaagtagccatgtcga

SEQ ID NO: 3299974 - DNA, 25 bp, Homo sapien
gctgttgctgatattgttccttcga

SEQ ID NO: 3299975 - DNA, 25 bp, Homo sapien
tcgacatggctacttttatttcaca

SEQ ID NO: 3299976 - DNA, 25 bp, Homo sapien
tcttcctgcaaatcctcctctagat

SEQ ID NO: 3299977 - DNA, 25 bp, Homo sapien
gctgatattgttccttcgacatggc

SEQ ID NO: 3299978 - DNA, 25 bp, Homo sapien
ctctagatccccactgttgctgttg

SEQ ID NO: 3299979 - DNA, 25 bp, Homo sapien
tcttccacgagctcttcctgcaaat

SEQ ID NO: 3299980 - DNA, 25 bp, Homo sapien
tgaagtaacatcactagcaagtact

SEQ ID NO: 3299981 - DNA, 25 bp, Homo sapien
cattggttacttaccattgaccaac

SEQ ID NO: 3299982 - DNA, 25 bp, Homo sapien
ttgtctaggctttcacaaaaatagt

SEQ ID NO: 3299983 - DNA, 25 bp, Homo sapien
gtaaaggcttaagttctttgcatgc

SEQ ID NO: 3299984 - DNA, 25 bp, Homo sapien
gctgttgtaaagagcttaaccattt

SEQ ID NO: 3299985 - DNA, 25 bp, Homo sapien
ctagcaagtactcataagtgattac

SEQ ID NO: 3299986 - DNA, 25 bp, Homo sapien
aaatggttaagctctttacaacagc

SEQ ID NO: 3299987 - DNA, 25 bp, Homo sapien
actatttttgtgaaagcctagacaa

SEQ ID NO: 3299988 - DNA, 25 bp, Homo sapien
tatgagtacttgctagtgatgttac

SEQ ID NO: 3299989 - DNA, 25 bp, Homo sapien
caatggtaagtaaccaatgagaagt

SEQ ID NO: 3299990 - DNA, 25 bp, Homo sapien
ccacaaaaagttggtcaatggtaag

SEQ ID NO: 3299991 - DNA, 25 bp, Homo sapien
gcaaagaacttaagcctttacagag

SEQ ID NO: 3299992 - DNA, 25 bp, Homo sapien
agaccaataagaggcgtgggttctg

SEQ ID NO: 3299993 - DNA, 25 bp, Homo sapien
gaggcgtgggttctgctttattacc

SEQ ID NO: 3299994 - DNA, 25 bp, Homo sapien
taagaggcgtgggttctgctttatt

SEQ ID NO: 3299995 - DNA, 25 bp, Homo sapien
ccaataagaggcgtgggttctgctt

SEQ ID NO: 3299996 - DNA, 25 bp, Homo sapien
aggcgtgggttctgctttattacct

SEQ ID NO: 3299997 - DNA, 25 bp, Homo sapien
aataagaggcgtgggttctgcttta

SEQ ID NO: 3299998 - DNA, 25 bp, Homo sapien
gaatccatagagctccccatggaca

SEQ ID NO: 3299999 - DNA, 25 bp, Homo sapien
aatccatagagctccccatggacaa

SEQ ID NO: 3300000 - DNA, 25 bp, Homo sapien
ggaatccatagagctccccatggac

SEQ ID NO: 3300001 - DNA, 25 bp, Homo sapien
atccatagagctccccatggacaac

SEQ ID NO: 3300002 - DNA, 25 bp, Homo sapien
gtggaatccatagagctccccatgg

SEQ ID NO: 3300003 - DNA, 25 bp, Homo sapien
tccatagagctccccatggacaaca

SEQ ID NO: 3300004 - DNA, 25 bp, Homo sapien
gttgtccatggggagctctatggat

SEQ ID NO: 3300005 - DNA, 25 bp, Homo sapien
ccatggggagctctatggattccac

SEQ ID NO: 3300006 - DNA, 25 bp, Homo sapien
tgttgtccatggggagctctatgga

SEQ ID NO: 3300007 - DNA, 25 bp, Homo sapien
gtccatggggagctctatggattcc

SEQ ID NO: 3300008 - DNA, 25 bp, Homo sapien
ttgtccatggggagctctatggatt

SEQ ID NO: 3300009 - DNA, 25 bp, Homo sapien
tgtccatggggagctctatggattc

SEQ ID NO: 3300010 - DNA, 25 bp, Homo sapien
taaagcagaacccacgcctcttatt

SEQ ID NO: 3300011 - DNA, 25 bp, Homo sapien
cagaacccacgcctcttattggtct

SEQ ID NO: 3300012 - DNA, 25 bp, Homo sapien
aagcagaacccacgcctcttattgg

SEQ ID NO: 3300013 - DNA, 25 bp, Homo sapien
ggtaataaagcagaacccacgcctc

SEQ ID NO: 3300014 - DNA, 25 bp, Homo sapien
taataaagcagaacccacgcctctt

SEQ ID NO: 3300015 - DNA, 25 bp, Homo sapien
aggtaataaagcagaacccacgcct

SEQ ID NO: 3300016 - DNA, 25 bp, Homo sapien
ggtgcgtgaccccagagtgtccccg

SEQ ID NO: 3300017 - DNA, 25 bp, Homo sapien
cggggacactctggggtcacgcacc

SEQ ID NO: 3300018 - DNA, 25 bp, Homo sapien
tggccttgggctccagatacgtccc

SEQ ID NO: 3300019 - DNA, 25 bp, Homo sapien
gagatattgcccacaaaactcagta

SEQ ID NO: 3300020 - DNA, 25 bp, Homo sapien
tagtagcttccatcttggtttgggc

SEQ ID NO: 3300021 - DNA, 25 bp, Homo sapien
tgtacggcagcatctctcaaactga

SEQ ID NO: 3300022 - DNA, 25 bp, Homo sapien
gcaacatgggaactgacgctgccct

SEQ ID NO: 3300023 - DNA, 25 bp, Homo sapien
aaacaggagactagaacttcagtgc

SEQ ID NO: 3300024 - DNA, 25 bp, Homo sapien
tgggacgtatctggagcccaaggcc

SEQ ID NO: 3300025 - DNA, 25 bp, Homo sapien
aaataagctttaccacgcactgaca

SEQ ID NO: 3300026 - DNA, 25 bp, Homo sapien
aaccaagatggaagctactactcag

SEQ ID NO: 3300027 - DNA, 25 bp, Homo sapien
tcagtttgagagatgctgccgtaca

SEQ ID NO: 3300028 - DNA, 25 bp, Homo sapien
gtacaggagggcagcgtcagttccc

SEQ ID NO: 3300029 - DNA, 25 bp, Homo sapien
tgaggactactaaaaactggagagc

SEQ ID NO: 3300030 - DNA, 25 bp, Homo sapien
tatgttataaatgttttgacccagt

SEQ ID NO: 3300031 - DNA, 25 bp, Homo sapien
gtatgttataaatgttttgacccag

SEQ ID NO: 3300032 - DNA, 25 bp, Homo sapien
atgttataaatgttttgacccagtt

SEQ ID NO: 3300033 - DNA, 25 bp, Homo sapien
ctgggtcaaaacatttataacatac

SEQ ID NO: 3300034 - DNA, 25 bp, Homo sapien
aactgggtcaaaacatttataacat

SEQ ID NO: 3300035 - DNA, 25 bp, Homo sapien
actgggtcaaaacatttataacata

SEQ ID NO: 3300036 - DNA, 25 bp, Homo sapien
aatgttttgacccagtttatgtcaa

SEQ ID NO: 3300037 - DNA, 25 bp, Homo sapien
taaatgttttgacccagtttatgtc

SEQ ID NO: 3300038 - DNA, 25 bp, Homo sapien
ccagtttatgtcaaaattagtgtga

SEQ ID NO: 3300039 - DNA, 25 bp, Homo sapien
tatgttataaatgttttgacccagt

SEQ ID NO: 3300040 - DNA, 25 bp, Homo sapien
gtatgttataaatgttttgacccag

SEQ ID NO: 3300041 - DNA, 25 bp, Homo sapien
atgttataaatgttttgacccagtt

SEQ ID NO: 3300042 - DNA, 25 bp, Homo sapien
ctgggtcaaaacatttataacatac

SEQ ID NO: 3300043 - DNA, 25 bp, Homo sapien
aactgggtcaaaacatttataacat

SEQ ID NO: 3300044 - DNA, 25 bp, Homo sapien
tcacactaattttgacataaactgg

SEQ ID NO: 3300045 - DNA, 25 bp, Homo sapien
gacataaactgggtcaaaacattta

SEQ ID NO: 3300046 - DNA, 25 bp, Homo sapien
ttgacataaactgggtcaaaacatt

SEQ ID NO: 3300047 - DNA, 25 bp, Homo sapien
actgggtcaaaacatttataacata

SEQ ID NO: 3300048 - DNA, 25 bp, Homo sapien
tctccagatacacctgaagagaaaa

SEQ ID NO: 3300049 - DNA, 25 bp, Homo sapien
gtgattgatcctaaaagggccaaag

SEQ ID NO: 3300050 - DNA, 25 bp, Homo sapien
aaggtgattgatcctaaaagggcca

SEQ ID NO: 3300051 - DNA, 25 bp, Homo sapien
gaaggtgattgatcctaaaagggcc

SEQ ID NO: 3300052 - DNA, 25 bp, Homo sapien
ggtgattgatcctaaaagggccaaa

SEQ ID NO: 3300053 - DNA, 25 bp, Homo sapien
tgggaaggtgattgatcctaaaagg

SEQ ID NO: 3300054 - DNA, 25 bp, Homo sapien
ctttggcccttttaggatcaatcac

SEQ ID NO: 3300055 - DNA, 25 bp, Homo sapien
ttggcccttttaggatcaatcacct

SEQ ID NO: 3300056 - DNA, 25 bp, Homo sapien
ggcccttttaggatcaatcaccttc

SEQ ID NO: 3300057 - DNA, 25 bp, Homo sapien
gcccttttaggatcaatcaccttcc

SEQ ID NO: 3300058 - DNA, 25 bp, Homo sapien
ccttttaggatcaatcaccttccca

SEQ ID NO: 3300059 - DNA, 25 bp, Homo sapien
ttttctcttcaggtgtatctggaga

SEQ ID NO: 3300060 - DNA, 25 bp, Homo sapien
gaagaatagttcttgccccaatacg

SEQ ID NO: 3300061 - DNA, 25 bp, Homo sapien
ggcaagcaacttttaactgaatcat

SEQ ID NO: 3300062 - DNA, 25 bp, Homo sapien
tgagcaagtcaacatatgcttggca

SEQ ID NO: 3300063 - DNA, 25 bp, Homo sapien
tgttttagcaattcacagaagtcca

SEQ ID NO: 3300064 - DNA, 25 bp, Homo sapien
tccaggctctgctaaattttgaaat

SEQ ID NO: 3300065 - DNA, 25 bp, Homo sapien
tgagtttgcctatttgtggttcccc

SEQ ID NO: 3300066 - DNA, 25 bp, Homo sapien
gggaaccacaaataggcaaactcat

SEQ ID NO: 3300067 - DNA, 25 bp, Homo sapien
ggacttctgtgaattgctaaaacac

SEQ ID NO: 3300068 - DNA, 25 bp, Homo sapien
taactgatcagaacacgtaacacac

SEQ ID NO: 3300069 - DNA, 25 bp, Homo sapien
atttcaaaatttagcagagcctgga

SEQ ID NO: 3300070 - DNA, 25 bp, Homo sapien
taaactgtcaagtcatggtggtgat

SEQ ID NO: 3300071 - DNA, 25 bp, Homo sapien
atgattcagttaaaagttgcttgcc

SEQ ID NO: 3300072 - DNA, 25 bp, Homo sapien
gaaaatgtttataggaggccttagc

SEQ ID NO: 3300073 - DNA, 25 bp, Homo sapien
tataggaggccttagctgggacact

SEQ ID NO: 3300074 - DNA, 25 bp, Homo sapien
ggaggccttagctgggacactacaa

SEQ ID NO: 3300075 - DNA, 25 bp, Homo sapien
tctgaagttagatcctatcacaggg

SEQ ID NO: 3300076 - DNA, 25 bp, Homo sapien
gactgcactctgaagttagatccta

SEQ ID NO: 3300077 - DNA, 25 bp, Homo sapien
gccttagctgggacactacaaagaa

SEQ ID NO: 3300078 - DNA, 25 bp, Homo sapien
gctaaggcctcctataaacattttc

SEQ ID NO: 3300079 - DNA, 25 bp, Homo sapien
taggatctaacttcagagtgcagtc

SEQ ID NO: 3300080 - DNA, 25 bp, Homo sapien
ccctgtgataggatctaacttcaga

SEQ ID NO: 3300081 - DNA, 25 bp, Homo sapien
ttgtagtgtcccagctaaggcctcc

SEQ ID NO: 3300082 - DNA, 25 bp, Homo sapien
agtgtcccagctaaggcctcctata

SEQ ID NO: 3300083 - DNA, 25 bp, Homo sapien
ttctttgtagtgtcccagctaaggc

SEQ ID NO: 3300084 - DNA, 25 bp, Homo sapien
gaaaaggtgtgttattgatgtggat

SEQ ID NO: 3300085 - DNA, 25 bp, Homo sapien
cagcagtaataagccagctttttgg

SEQ ID NO: 3300086 - DNA, 25 bp, Homo sapien
tatgtttatcttttagcaagttgaa

SEQ ID NO: 3300087 - DNA, 25 bp, Homo sapien
aataggatgttcctgatgtgtggtt

SEQ ID NO: 3300088 - DNA, 25 bp, Homo sapien
tttgggagcagcagtaataagccag

SEQ ID NO: 3300089 - DNA, 25 bp, Homo sapien
gctttttggaataggatgttcctga

SEQ ID NO: 3300090 - DNA, 25 bp, Homo sapien
gctggcttattactgctgctcccaa

SEQ ID NO: 3300091 - DNA, 25 bp, Homo sapien
aaccacacatcaggaacatcctatt

SEQ ID NO: 3300092 - DNA, 25 bp, Homo sapien
tcaggaacatcctattccaaaaagc

SEQ ID NO: 3300093 - DNA, 25 bp, Homo sapien
ttcaacttgctaaaagataaacata

SEQ ID NO: 3300094 - DNA, 25 bp, Homo sapien
caaaaagctggcttattactgctgc

SEQ ID NO: 3300095 - DNA, 25 bp, Homo sapien
tatccacatcaataacacacctttt

SEQ ID NO: 3300096 - DNA, 25 bp, Homo sapien
caaagggagcctatgtaaagctgcc

SEQ ID NO: 3300097 - DNA, 25 bp, Homo sapien
tgaaaagctaacctgaagtgggaag

SEQ ID NO: 3300098 - DNA, 25 bp, Homo sapien
gatagtaagatcagtaacacctcag

SEQ ID NO: 3300099 - DNA, 25 bp, Homo sapien
ggcccagctctagaatacatgtaag

SEQ ID NO: 3300100 - DNA, 25 bp, Homo sapien
gggaagcgcagtatatacctaagac

SEQ ID NO: 3300101 - DNA, 25 bp, Homo sapien
tagagctgagttagtgtcacatccc

SEQ ID NO: 3300102 - DNA, 25 bp, Homo sapien
tacagtagaacctcagttaaccagc

SEQ ID NO: 3300103 - DNA, 25 bp, Homo sapien
ttacatgtattctagagctgggcca

SEQ ID NO: 3300104 - DNA, 25 bp, Homo sapien
ttaggtatatactgcgcttcccact

SEQ ID NO: 3300105 - DNA, 25 bp, Homo sapien
tcaccatgggaatcaaatcagactt

SEQ ID NO: 3300106 - DNA, 25 bp, Homo sapien
gatctggcagctttacataggctcc

SEQ ID NO: 3300107 - DNA, 25 bp, Homo sapien
gggatgtgacactaactcagctcta

SEQ ID NO: 3300108 - DNA, 25 bp, Homo sapien
tttgaaaagtttgacagctggctac

SEQ ID NO: 3300109 - DNA, 25 bp, Homo sapien
tatgccatcagtttgagggagagca

SEQ ID NO: 3300110 - DNA, 25 bp, Homo sapien
taatctggacagacagtacatgtgc

SEQ ID NO: 3300111 - DNA, 25 bp, Homo sapien
tacgtttgtctcaaagacgagccac

SEQ ID NO: 3300112 - DNA, 25 bp, Homo sapien
tagaacagcaactggtgatctggca

SEQ ID NO: 3300113 - DNA, 25 bp, Homo sapien
ctctgcaaaacggaagggagacttt

SEQ ID NO: 3300114 - DNA, 25 bp, Homo sapien
aaagtctcccttccgttttgcagag

SEQ ID NO: 3300115 - DNA, 25 bp, Homo sapien
taaagcacatgtactgtctgtccag

SEQ ID NO: 3300116 - DNA, 25 bp, Homo sapien
cagttgctgttctaaaaagtctccc

SEQ ID NO: 3300117 - DNA, 25 bp, Homo sapien
tctctaagcaagcacctaagtggct

SEQ ID NO: 3300118 - DNA, 25 bp, Homo sapien
ttagagctacaagggttcactgaag

SEQ ID NO: 3300119 - DNA, 25 bp, Homo sapien
cgttttgcagagtaagtagccagct

SEQ ID NO: 3300120 - DNA, 25 bp, Homo sapien
tgtaatcactggctactcagaagtc

SEQ ID NO: 3300121 - DNA, 25 bp, Homo sapien
caatttactggtggtgcttggccag

SEQ ID NO: 3300122 - DNA, 25 bp, Homo sapien
tggaaacaatgctcaccacaggagg

SEQ ID NO: 3300123 - DNA, 25 bp, Homo sapien
gcttggccagtaatcaaggtgacag

SEQ ID NO: 3300124 - DNA, 25 bp, Homo sapien
gttaattaaagtagtggctcgtgcc

SEQ ID NO: 3300125 - DNA, 25 bp, Homo sapien
tattgggtcttgcactgtaaactcc

SEQ ID NO: 3300126 - DNA, 25 bp, Homo sapien
taaactgtcaccttgattactggcc

SEQ ID NO: 3300127 - DNA, 25 bp, Homo sapien
ggcacgagccactactttaattaac

SEQ ID NO: 3300128 - DNA, 25 bp, Homo sapien
gacttctgagtagccagtgattaca

SEQ ID NO: 3300129 - DNA, 25 bp, Homo sapien
tggccaagcaccaccagtaaattgg

SEQ ID NO: 3300130 - DNA, 25 bp, Homo sapien
cctcctgtggtgagcattgtttcca

SEQ ID NO: 3300131 - DNA, 25 bp, Homo sapien
caggagtttacagtgcaagacccaa

SEQ ID NO: 3300132 - DNA, 25 bp, Homo sapien
ctggatgctgaaagcgtgggatctc

SEQ ID NO: 3300133 - DNA, 25 bp, Homo sapien
tgctgaaagcgtgggatctctttct

SEQ ID NO: 3300134 - DNA, 25 bp, Homo sapien
actggatgctgaaagcgtgggatct

SEQ ID NO: 3300135 - DNA, 25 bp, Homo sapien
tggatgctgaaagcgtgggatctct

SEQ ID NO: 3300136 - DNA, 25 bp, Homo sapien
aactggatgctgaaagcgtgggatc

SEQ ID NO: 3300137 - DNA, 25 bp, Homo sapien
tgaaagcgtgggatctctttctgtt

SEQ ID NO: 3300138 - DNA, 25 bp, Homo sapien
agagatcccacgctttcagcatcca

SEQ ID NO: 3300139 - DNA, 25 bp, Homo sapien
aacagaaagagatcccacgctttca

SEQ ID NO: 3300140 - DNA, 25 bp, Homo sapien
agaaagagatcccacgctttcagca

SEQ ID NO: 3300141 - DNA, 25 bp, Homo sapien
gagatcccacgctttcagcatccag

SEQ ID NO: 3300142 - DNA, 25 bp, Homo sapien
gaaagagatcccacgctttcagcat

SEQ ID NO: 3300143 - DNA, 25 bp, Homo sapien
gatcccacgctttcagcatccagtt

SEQ ID NO: 3300144 - DNA, 25 bp, Homo sapien
tagtgtataatgagcccaagtgtga

SEQ ID NO: 3300145 - DNA, 25 bp, Homo sapien
cctgggtactctgctatcgtcctaa

SEQ ID NO: 3300146 - DNA, 25 bp, Homo sapien
ggaagctgtgtacctcaagtgtgtg

SEQ ID NO: 3300147 - DNA, 25 bp, Homo sapien
taaggctgccctaatacgagaacat

SEQ ID NO: 3300148 - DNA, 25 bp, Homo sapien
cattttactttgtggtgtggaccca

SEQ ID NO: 3300149 - DNA, 25 bp, Homo sapien
cctgcattggattgggtaggaagca

SEQ ID NO: 3300150 - DNA, 25 bp, Homo sapien
aatgttcagattgccccagaagcac

SEQ ID NO: 3300151 - DNA, 25 bp, Homo sapien
cctcagagagcttgctacatggcat

SEQ ID NO: 3300152 - DNA, 25 bp, Homo sapien
tattaggacgatagcagagtaccca

SEQ ID NO: 3300153 - DNA, 25 bp, Homo sapien
taacactgagaccaatctacgcagg

SEQ ID NO: 3300154 - DNA, 25 bp, Homo sapien
gaaagggtcacatggcttaagggaa

SEQ ID NO: 3300155 - DNA, 25 bp, Homo sapien
tgggtccacaccacaaagtaaaatg

SEQ ID NO: 3300156 - DNA, 25 bp, Homo sapien
caccaccactggagagtagaaggcc

SEQ ID NO: 3300157 - DNA, 25 bp, Homo sapien
tctggagatgtctgaagcagttctt

SEQ ID NO: 3300158 - DNA, 25 bp, Homo sapien
cacagtttcgatgaatgttattccc

SEQ ID NO: 3300159 - DNA, 25 bp, Homo sapien
ggtgggcactagcagctcaatttca

SEQ ID NO: 3300160 - DNA, 25 bp, Homo sapien
aaaggtgggctaatgtggctttcca

SEQ ID NO: 3300161 - DNA, 25 bp, Homo sapien
tagaaggccactaacttgcaggcag

SEQ ID NO: 3300162 - DNA, 25 bp, Homo sapien
acattcatcgaaactgtgaccccag

SEQ ID NO: 3300163 - DNA, 25 bp, Homo sapien
ccagtggtggtgtataaacccctga

SEQ ID NO: 3300164 - DNA, 25 bp, Homo sapien
ttaactgcctgcaagttagtggcct

SEQ ID NO: 3300165 - DNA, 25 bp, Homo sapien
tggaaagccacattagcccaccttt

SEQ ID NO: 3300166 - DNA, 25 bp, Homo sapien
ttagtggccttctactctccagtgg

SEQ ID NO: 3300167 - DNA, 25 bp, Homo sapien
gaaattgagctgctagtgcccacca

SEQ ID NO: 3300168 - DNA, 25 bp, Homo sapien
attcaaactcctccccacgacactc

SEQ ID NO: 3300169 - DNA, 25 bp, Homo sapien
acactctgaagcagcgacggcacag

SEQ ID NO: 3300170 - DNA, 25 bp, Homo sapien
gacactctgaagcagcgacggcaca

SEQ ID NO: 3300171 - DNA, 25 bp, Homo sapien
ctctgaagcagcgacggcacagcgg

SEQ ID NO: 3300172 - DNA, 25 bp, Homo sapien
ccacgacactctgaagcagcgacgg

SEQ ID NO: 3300173 - DNA, 25 bp, Homo sapien
acgacactctgaagcagcgacggca

SEQ ID NO: 3300174 - DNA, 25 bp, Homo sapien
ctgtgccgtcgctgcttcagagtgt

SEQ ID NO: 3300175 - DNA, 25 bp, Homo sapien
ccgtcgctgcttcagagtgtcgtgg

SEQ ID NO: 3300176 - DNA, 25 bp, Homo sapien
tgccgtcgctgcttcagagtgtcgt

SEQ ID NO: 3300177 - DNA, 25 bp, Homo sapien
gctgtgccgtcgctgcttcagagtg

SEQ ID NO: 3300178 - DNA, 25 bp, Homo sapien
ccgctgtgccgtcgctgcttcagag

SEQ ID NO: 3300179 - DNA, 25 bp, Homo sapien
tgtgccgtcgctgcttcagagtgtc

SEQ ID NO: 3300180 - DNA, 25 bp, Homo sapien
ggcggcgacacagggggcagcggcg

SEQ ID NO: 3300181 - DNA, 25 bp, Homo sapien
atggtggcggcgacacagggggcag

SEQ ID NO: 3300182 - DNA, 25 bp, Homo sapien
gcggcgacacagggggcagcggcgg

SEQ ID NO: 3300183 - DNA, 25 bp, Homo sapien
ggtggcggcgacacagggggcagcg

SEQ ID NO: 3300184 - DNA, 25 bp, Homo sapien
tggtggcggcgacacagggggcagc

SEQ ID NO: 3300185 - DNA, 25 bp, Homo sapien
ttgacgccagtaagaacgaggagga

SEQ ID NO: 3300186 - DNA, 25 bp, Homo sapien
aagattgacgccagtaagaacgagg

SEQ ID NO: 3300187 - DNA, 25 bp, Homo sapien
gaagattgacgccagtaagaacgag

SEQ ID NO: 3300188 - DNA, 25 bp, Homo sapien
gggcgaagattgacgccagtaagaa

SEQ ID NO: 3300189 - DNA, 25 bp, Homo sapien
gattgacgccagtaagaacgaggag

SEQ ID NO: 3300190 - DNA, 25 bp, Homo sapien
tgacgccagtaagaacgaggaggat

SEQ ID NO: 3300191 - DNA, 25 bp, Homo sapien
cctcctcgttcttactggcgtcaat

SEQ ID NO: 3300192 - DNA, 25 bp, Homo sapien
ttcttactggcgtcaatcttcgccc

SEQ ID NO: 3300193 - DNA, 25 bp, Homo sapien
ctcgttcttactggcgtcaatcttc

SEQ ID NO: 3300194 - DNA, 25 bp, Homo sapien
atcctcctcgttcttactggcgtca

SEQ ID NO: 3300195 - DNA, 25 bp, Homo sapien
tcctcgttcttactggcgtcaatct

SEQ ID NO: 3300196 - DNA, 25 bp, Homo sapien
gttcttactggcgtcaatcttcgcc

SEQ ID NO: 3300197 - DNA, 25 bp, Homo sapien
ctgccccctgtgtcgccgccaccat

SEQ ID NO: 3300198 - DNA, 25 bp, Homo sapien
cgccgctgccccctgtgtcgccgcc

SEQ ID NO: 3300199 - DNA, 25 bp, Homo sapien
cgctgccccctgtgtcgccgccacc

SEQ ID NO: 3300200 - DNA, 25 bp, Homo sapien
gctgccccctgtgtcgccgccacca

SEQ ID NO: 3300201 - DNA, 25 bp, Homo sapien
ccgccgctgccccctgtgtcgccgc

SEQ ID NO: 3300202 - DNA, 25 bp, Homo sapien
tcggaggagcagttcggcggggacg

SEQ ID NO: 3300203 - DNA, 25 bp, Homo sapien
cggaggagcagttcggcggggacgg

SEQ ID NO: 3300204 - DNA, 25 bp, Homo sapien
cgtccccgccgaactgctcctccga

SEQ ID NO: 3300205 - DNA, 25 bp, Homo sapien
ccgtccccgccgaactgctcctccg

SEQ ID NO: 3300206 - DNA, 25 bp, Homo sapien
tcggaggagcagttcggcggggacg

SEQ ID NO: 3300207 - DNA, 25 bp, Homo sapien
gtcggaggagcagttcggcggggac

SEQ ID NO: 3300208 - DNA, 25 bp, Homo sapien
tgtcggaggagcagttcggcgggga

SEQ ID NO: 3300209 - DNA, 25 bp, Homo sapien
cggaggagcagttcggcggggacgg

SEQ ID NO: 3300210 - DNA, 25 bp, Homo sapien
tcggcggggacggggcggcggcagc

SEQ ID NO: 3300211 - DNA, 25 bp, Homo sapien
atgtcggaggagcagttcggcgggg

SEQ ID NO: 3300212 - DNA, 25 bp, Homo sapien
tccccgccgaactgctcctccgaca

SEQ ID NO: 3300213 - DNA, 25 bp, Homo sapien
cgtccccgccgaactgctcctccga

SEQ ID NO: 3300214 - DNA, 25 bp, Homo sapien
gctgccgccgccccgtccccgccga

SEQ ID NO: 3300215 - DNA, 25 bp, Homo sapien
ccccgccgaactgctcctccgacat

SEQ ID NO: 3300216 - DNA, 25 bp, Homo sapien
ccgtccccgccgaactgctcctccg

SEQ ID NO: 3300217 - DNA, 25 bp, Homo sapien
gtccccgccgaactgctcctccgac

SEQ ID NO: 3300218 - DNA, 25 bp, Homo sapien
cggcagcggcggagacactagcact

SEQ ID NO: 3300219 - DNA, 25 bp, Homo sapien
agtgctagtgtctccgccgctgccg

SEQ ID NO: 3300220 - DNA, 25 bp, Homo sapien
ttgctgctagtttcggttcgcggca

SEQ ID NO: 3300221 - DNA, 25 bp, Homo sapien
ctgctagtttcggttcgcggcagcg

SEQ ID NO: 3300222 - DNA, 25 bp, Homo sapien
gctagtttcggttcgcggcagcggc

SEQ ID NO: 3300223 - DNA, 25 bp, Homo sapien
tgctgctagtttcggttcgcggcag

SEQ ID NO: 3300224 - DNA, 25 bp, Homo sapien
gctgctagtttcggttcgcggcagc

SEQ ID NO: 3300225 - DNA, 25 bp, Homo sapien
tgctagtttcggttcgcggcagcgg

SEQ ID NO: 3300226 - DNA, 25 bp, Homo sapien
gccgctgccgcgaaccgaaactagc

SEQ ID NO: 3300227 - DNA, 25 bp, Homo sapien
cgctgccgcgaaccgaaactagcag

SEQ ID NO: 3300228 - DNA, 25 bp, Homo sapien
gctgccgcgaaccgaaactagcagc

SEQ ID NO: 3300229 - DNA, 25 bp, Homo sapien
ctgccgcgaaccgaaactagcagca

SEQ ID NO: 3300230 - DNA, 25 bp, Homo sapien
ccgctgccgcgaaccgaaactagca

SEQ ID NO: 3300231 - DNA, 25 bp, Homo sapien
tgccgcgaaccgaaactagcagcaa

SEQ ID NO: 3300232 - DNA, 25 bp, Homo sapien
tcggttcgcggcagcggcgggtgta

SEQ ID NO: 3300233 - DNA, 25 bp, Homo sapien
ttgctgctagtttcggttcgcggca

SEQ ID NO: 3300234 - DNA, 25 bp, Homo sapien
ctgctagtttcggttcgcggcagcg

SEQ ID NO: 3300235 - DNA, 25 bp, Homo sapien
gctagtttcggttcgcggcagcggc

SEQ ID NO: 3300236 - DNA, 25 bp, Homo sapien
agcggcggggattactttgctgcta

SEQ ID NO: 3300237 - DNA, 25 bp, Homo sapien
tgctgctagtttcggttcgcggcag

SEQ ID NO: 3300238 - DNA, 25 bp, Homo sapien
actagcagcaaagtaatccccgccg

SEQ ID NO: 3300239 - DNA, 25 bp, Homo sapien
gaaactagcagcaaagtaatccccg

SEQ ID NO: 3300240 - DNA, 25 bp, Homo sapien
cgctgccgcgaaccgaaactagcag

SEQ ID NO: 3300241 - DNA, 25 bp, Homo sapien
agcagcaaagtaatccccgccgctg

SEQ ID NO: 3300242 - DNA, 25 bp, Homo sapien
ctgccgcgaaccgaaactagcagca

SEQ ID NO: 3300243 - DNA, 25 bp, Homo sapien
tgccgcgaaccgaaactagcagcaa

SEQ ID NO: 3300244 - DNA, 25 bp, Homo sapien
caggagcctttgcagccacgcgcgc

SEQ ID NO: 3300245 - DNA, 25 bp, Homo sapien
gagagcgggagtgtgcgccgcgcga

SEQ ID NO: 3300246 - DNA, 25 bp, Homo sapien
tgtgcgccgcgcgagagtgggaggc

SEQ ID NO: 3300247 - DNA, 25 bp, Homo sapien
cttttttagtgcagcgggagagagc

SEQ ID NO: 3300248 - DNA, 25 bp, Homo sapien
tccgcggcggcgccattaaagcgag

SEQ ID NO: 3300249 - DNA, 25 bp, Homo sapien
cggcgccattaaagcgaggaggagg

SEQ ID NO: 3300250 - DNA, 25 bp, Homo sapien
gcgcgcgtggctgcaaaggctcctg

SEQ ID NO: 3300251 - DNA, 25 bp, Homo sapien
gctctctcccgctgcactaaaaaag

SEQ ID NO: 3300252 - DNA, 25 bp, Homo sapien
tcgctttaatggcgccgccgcggac

SEQ ID NO: 3300253 - DNA, 25 bp, Homo sapien
cctcctcctcgctttaatggcgccg

SEQ ID NO: 3300254 - DNA, 25 bp, Homo sapien
tctctcccgctgcactaaaaaagaa

SEQ ID NO: 3300255 - DNA, 25 bp, Homo sapien
ctcgcgcggcgcacactcccgctct

SEQ ID NO: 3300256 - DNA, 25 bp, Homo sapien
ccgcccttccgaggattcctggagt

SEQ ID NO: 3300257 - DNA, 25 bp, Homo sapien
accactccagtagcggcgggagcag

SEQ ID NO: 3300258 - DNA, 25 bp, Homo sapien
tgtcgtgagctaagacagtcgcgcg

SEQ ID NO: 3300259 - DNA, 25 bp, Homo sapien
gggaccatcgagaacaaggagtgct

SEQ ID NO: 3300260 - DNA, 25 bp, Homo sapien
tgaggttttcgtctatcgccgctgg

SEQ ID NO: 3300261 - DNA, 25 bp, Homo sapien
gctgggccgatagggcttcttttta

SEQ ID NO: 3300262 - DNA, 25 bp, Homo sapien
aggagggaattagccctgagatgtc

SEQ ID NO: 3300263 - DNA, 25 bp, Homo sapien
tgtttttggtcgaagaagcaggtaa

SEQ ID NO: 3300264 - DNA, 25 bp, Homo sapien
gtgtgttaaatcaagggttcgctta

SEQ ID NO: 3300265 - DNA, 25 bp, Homo sapien
taaatcaagggttcgcttaatgttc

SEQ ID NO: 3300266 - DNA, 25 bp, Homo sapien
cgttactaataattggaaagtgtgt

SEQ ID NO: 3300267 - DNA, 25 bp, Homo sapien
caagggttcgcttaatgttctttag

SEQ ID NO: 3300268 - DNA, 25 bp, Homo sapien
gcagaatgaagaagaattgtcagaa

SEQ ID NO: 3300269 - DNA, 25 bp, Homo sapien
gggctcaaccaatttgccaacctca

SEQ ID NO: 3300270 - DNA, 25 bp, Homo sapien
caggaagtctaaagatatttgaagg

SEQ ID NO: 3300271 - DNA, 25 bp, Homo sapien
aatttagggcctaatataaaggcag

SEQ ID NO: 3300272 - DNA, 25 bp, Homo sapien
gatgttcctattgctgagccgcttt

SEQ ID NO: 3300273 - DNA, 25 bp, Homo sapien
tgttcctattgctgagccgcttttc

SEQ ID NO: 3300274 - DNA, 25 bp, Homo sapien
gttcctattgctgagccgcttttct

SEQ ID NO: 3300275 - DNA, 25 bp, Homo sapien
atgttcctattgctgagccgctttt

SEQ ID NO: 3300276 - DNA, 25 bp, Homo sapien
gataacctgctccaaatactttggc

SEQ ID NO: 3300277 - DNA, 25 bp, Homo sapien
gcttgggccgtgttctgagtgagaa

SEQ ID NO: 3300278 - DNA, 25 bp, Homo sapien
aatactttggcttgggccgtgttct

SEQ ID NO: 3300279 - DNA, 25 bp, Homo sapien
cttggataacctgctccaaatactt

SEQ ID NO: 3300280 - DNA, 25 bp, Homo sapien
ttagaagttgatgcctcctgaagag

SEQ ID NO: 3300281 - DNA, 25 bp, Homo sapien
agaagttgatgcctcctgaagagtc

SEQ ID NO: 3300282 - DNA, 25 bp, Homo sapien
gagtctctttctctcgggatcttta

SEQ ID NO: 3300283 - DNA, 25 bp, Homo sapien
tcctgaagagtctctttctctcggg

SEQ ID NO: 3300284 - DNA, 25 bp, Homo sapien
ttggctttgggcagctcaaactctg

SEQ ID NO: 3300285 - DNA, 25 bp, Homo sapien
aactctgccacatgatagcaatgac

SEQ ID NO: 3300286 - DNA, 25 bp, Homo sapien
cttcatttcggctgaacaactcgag

SEQ ID NO: 3300287 - DNA, 25 bp, Homo sapien
gattttcggctgagttgttcttggc

SEQ ID NO: 3300288 - DNA, 25 bp, Homo sapien
caaggagatccatccaggcccttga

SEQ ID NO: 3300289 - DNA, 25 bp, Homo sapien
gagatccatccaggcccttgaacac

SEQ ID NO: 3300290 - DNA, 25 bp, Homo sapien
ctcaaggagatccatccaggccctt

SEQ ID NO: 3300291 - DNA, 25 bp, Homo sapien
aggagatccatccaggcccttgaac

SEQ ID NO: 3300292 - DNA, 25 bp, Homo sapien
ctatccgggaatcggcaggttcagt

SEQ ID NO: 3300293 - DNA, 25 bp, Homo sapien
cgggaatcggcaggttcagtcgcta

SEQ ID NO: 3300294 - DNA, 25 bp, Homo sapien
gggaatcggcaggttcagtcgctac

SEQ ID NO: 3300295 - DNA, 25 bp, Homo sapien
tccgggaatcggcaggttcagtcgc

SEQ ID NO: 3300296 - DNA, 25 bp, Homo sapien
cagaatctgtttgccggtttccagc

SEQ ID NO: 3300297 - DNA, 25 bp, Homo sapien
tccagaatctgtttgccggtttcca

SEQ ID NO: 3300298 - DNA, 25 bp, Homo sapien
ttctacttcgtccagaatctgtttg

SEQ ID NO: 3300299 - DNA, 25 bp, Homo sapien
ttcgtccagaatctgtttgccggtt

SEQ ID NO: 3300300 - DNA, 25 bp, Homo sapien
gcagcgggagcagtagttcgtcttc

SEQ ID NO: 3300301 - DNA, 25 bp, Homo sapien
ggcagcgggagcagtagttcgtctt

SEQ ID NO: 3300302 - DNA, 25 bp, Homo sapien
agcgggagcagtagttcgtcttcag

SEQ ID NO: 3300303 - DNA, 25 bp, Homo sapien
cagcgggagcagtagttcgtcttca

SEQ ID NO: 3300304 - DNA, 25 bp, Homo sapien
attgggttctgttgaggcctcttcc

SEQ ID NO: 3300305 - DNA, 25 bp, Homo sapien
tctctgcgtttgtgttggtgaagtg

SEQ ID NO: 3300306 - DNA, 25 bp, Homo sapien
taccacaaattaggtggcctaaaca

SEQ ID NO: 3300307 - DNA, 25 bp, Homo sapien
agtccgctcaggctaccataagaaa

SEQ ID NO: 3300308 - DNA, 25 bp, Homo sapien
gaccctcaaggtcaagcaacagtga

SEQ ID NO: 3300309 - DNA, 25 bp, Homo sapien
gatgagaatacacaaagctccctgt

SEQ ID NO: 3300310 - DNA, 25 bp, Homo sapien
tctaaatccgttgtgtcccagtggt

SEQ ID NO: 3300311 - DNA, 25 bp, Homo sapien
ttgagactcaatctagggctatggc

SEQ ID NO: 3300312 - DNA, 25 bp, Homo sapien
caaaccgagcatttgttataggtac

SEQ ID NO: 3300313 - DNA, 25 bp, Homo sapien
taaattaatccttgggaacgagatc

SEQ ID NO: 3300314 - DNA, 25 bp, Homo sapien
gaacgagatcttgatagtagcttca

SEQ ID NO: 3300315 - DNA, 25 bp, Homo sapien
gcttcagttcatccaacctaggaca

SEQ ID NO: 3300316 - DNA, 25 bp, Homo sapien
tctcagtcatacatatcaagacttg

SEQ ID NO: 3300317 - DNA, 25 bp, Homo sapien
tttttctcagtcatacatatcaaga

SEQ ID NO: 3300318 - DNA, 25 bp, Homo sapien
tcagtcatacatatcaagacttgat

SEQ ID NO: 3300319 - DNA, 25 bp, Homo sapien
ttttctcagtcatacatatcaagac

SEQ ID NO: 3300320 - DNA, 25 bp, Homo sapien
tgagatcaactactctgcctgtgaa

SEQ ID NO: 3300321 - DNA, 25 bp, Homo sapien
tgaggccaaggtcccaaaatccaac

SEQ ID NO: 3300322 - DNA, 25 bp, Homo sapien
cattataatgtgatagcccaggaag

SEQ ID NO: 3300323 - DNA, 25 bp, Homo sapien
tgtgaacacgtatgccaatcccagt

SEQ ID NO: 3300324 - DNA, 25 bp, Homo sapien
ctggatataaaacggattcttttca

SEQ ID NO: 3300325 - DNA, 25 bp, Homo sapien
cagagggtccactgtaatgactcag

SEQ ID NO: 3300326 - DNA, 25 bp, Homo sapien
gggtccactgtaatgactcagtcac

SEQ ID NO: 3300327 - DNA, 25 bp, Homo sapien
ttcttttcaatgcacccagagggtc

SEQ ID NO: 3300328 - DNA, 25 bp, Homo sapien
gactttttctaaactcacagagcat

SEQ ID NO: 3300329 - DNA, 25 bp, Homo sapien
gctaatacaacttcctcaggatgcc

SEQ ID NO: 3300330 - DNA, 25 bp, Homo sapien
cacagagcattaacagctaatacaa

SEQ ID NO: 3300331 - DNA, 25 bp, Homo sapien
atcttgtggcggctctgagaaaaca

SEQ ID NO: 3300332 - DNA, 25 bp, Homo sapien
tttcgaccaaactcatacctttcta

SEQ ID NO: 3300333 - DNA, 25 bp, Homo sapien
gaccaaactcatacctttctaccaa

SEQ ID NO: 3300334 - DNA, 25 bp, Homo sapien
caaactcatacctttctaccaaaat

SEQ ID NO: 3300335 - DNA, 25 bp, Homo sapien
atacctttctaccaaaatccttgag

SEQ ID NO: 3300336 - DNA, 25 bp, Homo sapien
gaccactgattaaagccaaagtaat

SEQ ID NO: 3300337 - DNA, 25 bp, Homo sapien
gtgaccactgattaaagccaaagta

SEQ ID NO: 3300338 - DNA, 25 bp, Homo sapien
taggtgaccactgattaaagccaaa

SEQ ID NO: 3300339 - DNA, 25 bp, Homo sapien
ggtgaccactgattaaagccaaagt

SEQ ID NO: 3300340 - DNA, 25 bp, Homo sapien
caattttattacaatccagaagaaa

SEQ ID NO: 3300341 - DNA, 25 bp, Homo sapien
aggagctactaacaattttattaca

SEQ ID NO: 3300342 - DNA, 25 bp, Homo sapien
tgtggtagaaatctcagttacaggg

SEQ ID NO: 3300343 - DNA, 25 bp, Homo sapien
tcagataaccagaagggaaagaaca

SEQ ID NO: 3300344 - DNA, 25 bp, Homo sapien
aatacacctacaaattggagaagag

SEQ ID NO: 3300345 - DNA, 25 bp, Homo sapien
cagggagaagatgaagccttaagag

SEQ ID NO: 3300346 - DNA, 25 bp, Homo sapien
gagggcgcggcgcacccacttcgcg

SEQ ID NO: 3300347 - DNA, 25 bp, Homo sapien
cgcgaagtgggtgcgccgcgccctc

SEQ ID NO: 3300348 - DNA, 25 bp, Homo sapien
tggacacaatggtgtcttgtacact

SEQ ID NO: 3300349 - DNA, 25 bp, Homo sapien
ggacacaatggtgtcttgtacacta

SEQ ID NO: 3300350 - DNA, 25 bp, Homo sapien
cagttggacacaatggtgtcttgta

SEQ ID NO: 3300351 - DNA, 25 bp, Homo sapien
tatacagttggacacaatggtgtct

SEQ ID NO: 3300352 - DNA, 25 bp, Homo sapien
agatgggttactttaacatctcctc

SEQ ID NO: 3300353 - DNA, 25 bp, Homo sapien
tcaatgtcgtcctgcaagatgggtt

SEQ ID NO: 3300354 - DNA, 25 bp, Homo sapien
caagatgggttactttaacatctcc

SEQ ID NO: 3300355 - DNA, 25 bp, Homo sapien
aatgtcgtcctgcaagatgggttac

SEQ ID NO: 3300356 - DNA, 25 bp, Homo sapien
gaagcatctctagtaacccaagtaa

SEQ ID NO: 3300357 - DNA, 25 bp, Homo sapien
gattaaggtctactagaagcatctc

SEQ ID NO: 3300358 - DNA, 25 bp, Homo sapien
ggtagtcaataaactcaccctggag

SEQ ID NO: 3300359 - DNA, 25 bp, Homo sapien
cagttagatttgtgcaactctgaca

SEQ ID NO: 3300360 - DNA, 25 bp, Homo sapien
tctttacgctggtacatgaagttgg

SEQ ID NO: 3300361 - DNA, 25 bp, Homo sapien
ggtacatgaagttggaagagaccat

SEQ ID NO: 3300362 - DNA, 25 bp, Homo sapien
tacgctggtacatgaagttggaaga

SEQ ID NO: 3300363 - DNA, 25 bp, Homo sapien
ttaatctttacgctggtacatgaag

SEQ ID NO: 3300364 - DNA, 25 bp, Homo sapien
cacaggacagcgttttctggtgtat

SEQ ID NO: 3300365 - DNA, 25 bp, Homo sapien
cagggtgacacacggcctgcaatga

SEQ ID NO: 3300366 - DNA, 25 bp, Homo sapien
ccccagagatagacgtggtcagggt

SEQ ID NO: 3300367 - DNA, 25 bp, Homo sapien
tctggtgtatgccttgcgctctgcc

SEQ ID NO: 3300368 - DNA, 25 bp, Homo sapien
aaacaaggtataatgtcagagttag

SEQ ID NO: 3300369 - DNA, 25 bp, Homo sapien
tacaaacaaggtataatgtcagagt

SEQ ID NO: 3300370 - DNA, 25 bp, Homo sapien
ggtacaaacaaggtataatgtcaga

SEQ ID NO: 3300371 - DNA, 25 bp, Homo sapien
caaacaaggtataatgtcagagtta

SEQ ID NO: 3300372 - DNA, 25 bp, Homo sapien
ttaaagttaaagatctatagacact

SEQ ID NO: 3300373 - DNA, 25 bp, Homo sapien
tattcctctagaccacctggtacac

SEQ ID NO: 3300374 - DNA, 25 bp, Homo sapien
tcaacaatttagtaaaaacaggcta

SEQ ID NO: 3300375 - DNA, 25 bp, Homo sapien
aaacaggctcataaagcaattaaaa

SEQ ID NO: 3300376 - DNA, 25 bp, Homo sapien
taattgttttggtgattgccacccc

SEQ ID NO: 3300377 - DNA, 25 bp, Homo sapien
tgccttgccataagtgctctgttgg

SEQ ID NO: 3300378 - DNA, 25 bp, Homo sapien
gctggtaattgttttggtgattgcc

SEQ ID NO: 3300379 - DNA, 25 bp, Homo sapien
ccctcgagatgccttgccataagtg

SEQ ID NO: 3300380 - DNA, 25 bp, Homo sapien
ccaccagtctatgttagtataatca

SEQ ID NO: 3300381 - DNA, 25 bp, Homo sapien
aagatattttagcacccattagatg

SEQ ID NO: 3300382 - DNA, 25 bp, Homo sapien
catcctatgattgtaacatgcctca

SEQ ID NO: 3300383 - DNA, 25 bp, Homo sapien
tccgaacactttaatggaaagccca

SEQ ID NO: 3300384 - DNA, 25 bp, Homo sapien
cagtataatcatatccgccatagcc

SEQ ID NO: 3300385 - DNA, 25 bp, Homo sapien
cccagtataatcatatccgccatag

SEQ ID NO: 3300386 - DNA, 25 bp, Homo sapien
agtataatcatatccgccatagcca

SEQ ID NO: 3300387 - DNA, 25 bp, Homo sapien
tacccagtataatcatatccgccat

SEQ ID NO: 3300388 - DNA, 25 bp, Homo sapien
tccttggttccagttttggccctga

SEQ ID NO: 3300389 - DNA, 25 bp, Homo sapien
ccatatccttgatcataatagttat

SEQ ID NO: 3300390 - DNA, 25 bp, Homo sapien
taatttccatatccttgatcataat

SEQ ID NO: 3300391 - DNA, 25 bp, Homo sapien
atccttggttccagttttggccctg

SEQ ID NO: 3300392 - DNA, 25 bp, Homo sapien
gtacaggactactcatattcagcag

SEQ ID NO: 3300393 - DNA, 25 bp, Homo sapien
cacaccacggtgtatcatgtaatgg

SEQ ID NO: 3300394 - DNA, 25 bp, Homo sapien
tccattaaagccgaagacaggtaca

SEQ ID NO: 3300395 - DNA, 25 bp, Homo sapien
tacagcttaaataaaccacggagtc

SEQ ID NO: 3300396 - DNA, 25 bp, Homo sapien
tgctgttgctgcctatatacctctt

SEQ ID NO: 3300397 - DNA, 25 bp, Homo sapien
tgttgctgcctatatacctctttgg

SEQ ID NO: 3300398 - DNA, 25 bp, Homo sapien
ctatatacctctttgggttgtgcaa

SEQ ID NO: 3300399 - DNA, 25 bp, Homo sapien
gctgcctatatacctctttgggttg

SEQ ID NO: 3300400 - DNA, 25 bp, Homo sapien
tcttcatcagtatatgtgataaaac

SEQ ID NO: 3300401 - DNA, 25 bp, Homo sapien
cttcccagaaccaatttgatggtat

SEQ ID NO: 3300402 - DNA, 25 bp, Homo sapien
ggctcttcatcagtatatgtgataa

SEQ ID NO: 3300403 - DNA, 25 bp, Homo sapien
cagaaccaatttgatggtatctgct

SEQ ID NO: 3300404 - DNA, 25 bp, Homo sapien
cccttttgggatctatcaatttgcc

SEQ ID NO: 3300405 - DNA, 25 bp, Homo sapien
cttcagaagtatccgggctcaatcc

SEQ ID NO: 3300406 - DNA, 25 bp, Homo sapien
ccttttgggatctatcaatttgcca

SEQ ID NO: 3300407 - DNA, 25 bp, Homo sapien
tcttcagaagtatccgggctcaatc

SEQ ID NO: 3300408 - DNA, 25 bp, Homo sapien
caaatcgagacaagtactctgtcag

SEQ ID NO: 3300409 - DNA, 25 bp, Homo sapien
ttgcttgtatcccagctcaagcctc

SEQ ID NO: 3300410 - DNA, 25 bp, Homo sapien
cagtctacaacttccccaaatcgag

SEQ ID NO: 3300411 - DNA, 25 bp, Homo sapien
tctgttttaattgtgcagtctacaa

SEQ ID NO: 3300412 - DNA, 25 bp, Homo sapien
taacaataactcaaatgatccttca

SEQ ID NO: 3300413 - DNA, 25 bp, Homo sapien
acaataactcaaatgatccttcagt

SEQ ID NO: 3300414 - DNA, 25 bp, Homo sapien
attaacaataactcaaatgatcctt

SEQ ID NO: 3300415 - DNA, 25 bp, Homo sapien
aaattaacaataactcaaatgatcc

SEQ ID NO: 3300416 - DNA, 25 bp, Homo sapien
caacgaagttactcaaaccagcgga

SEQ ID NO: 3300417 - DNA, 25 bp, Homo sapien
cactgtccgcactacataaagcaaa

SEQ ID NO: 3300418 - DNA, 25 bp, Homo sapien
ggttctgcccagattcctttaggta

SEQ ID NO: 3300419 - DNA, 25 bp, Homo sapien
caaaaatcccaatatcccaacgaag

SEQ ID NO: 3300420 - DNA, 25 bp, Homo sapien
ttccctccaatctagtggggcccag

SEQ ID NO: 3300421 - DNA, 25 bp, Homo sapien
cgcctgcgcgctcgggacacagacg

SEQ ID NO: 3300422 - DNA, 25 bp, Homo sapien
actcttcccgggtctctccagtcac

SEQ ID NO: 3300423 - DNA, 25 bp, Homo sapien
cacgcggggaatcgactctgagaaa

SEQ ID NO: 3300424 - DNA, 25 bp, Homo sapien
ggagcgggggaagaagcgtgcggta

SEQ ID NO: 3300425 - DNA, 25 bp, Homo sapien
aacgaagggcgcgtgcggcgcgctg

SEQ ID NO: 3300426 - DNA, 25 bp, Homo sapien
gagcgggggaagaagcgtgcggtac

SEQ ID NO: 3300427 - DNA, 25 bp, Homo sapien
aggaacgaagggcgcgtgcggcgcg

SEQ ID NO: 3300428 - DNA, 25 bp, Homo sapien
cctctatattgctgtactcgttcat

SEQ ID NO: 3300429 - DNA, 25 bp, Homo sapien
cttgctcgcgttgatcttggatccc

SEQ ID NO: 3300430 - DNA, 25 bp, Homo sapien
ccctctgcgaattcctctatattgc

SEQ ID NO: 3300431 - DNA, 25 bp, Homo sapien
ctgctgattcttgctcgcgttgatc

SEQ ID NO: 3300432 - DNA, 25 bp, Homo sapien
gcaggggggtgctggcgcgcagtcc

SEQ ID NO: 3300433 - DNA, 25 bp, Homo sapien
tgacggagctgtcggcaggggggtg

SEQ ID NO: 3300434 - DNA, 25 bp, Homo sapien
cgcgcagtccgggtcgcggcagcag

SEQ ID NO: 3300435 - DNA, 25 bp, Homo sapien
ggtgctggcgcgcagtccgggtcgc

SEQ ID NO: 3300436 - DNA, 25 bp, Homo sapien
ggcggaagagatccgggcgccgcct

SEQ ID NO: 3300437 - DNA, 25 bp, Homo sapien
ctggatttaaaatggcggcggaaga

SEQ ID NO: 3300438 - DNA, 25 bp, Homo sapien
gagaggctgcgggaggctaaagtag

SEQ ID NO: 3300439 - DNA, 25 bp, Homo sapien
ctgctgggcggtgacgtggcgctgg

SEQ ID NO: 3300440 - DNA, 25 bp, Homo sapien
tgggaaagcctgggcgggacctcca

SEQ ID NO: 3300441 - DNA, 25 bp, Homo sapien
gcggccctcccggcaaggagagagg

SEQ ID NO: 3300442 - DNA, 25 bp, Homo sapien
gaggccacgcgtgaggggacgcggg

SEQ ID NO: 3300443 - DNA, 25 bp, Homo sapien
gtcagcagtcccgagcagagccgac

SEQ ID NO: 3300444 - DNA, 25 bp, Homo sapien
tttgtctctggcgtccggtccagcc

SEQ ID NO: 3300445 - DNA, 25 bp, Homo sapien
gctccggaaaaaggcggactgcgcc

SEQ ID NO: 3300446 - DNA, 25 bp, Homo sapien
accgcggccagtctgctccggaaaa

SEQ ID NO: 3300447 - DNA, 25 bp, Homo sapien
ctcggttcgccagtgcggagccgct

SEQ ID NO: 3300448 - DNA, 25 bp, Homo sapien
tttttctgccctcggttcgccagtg

SEQ ID NO: 3300449 - DNA, 25 bp, Homo sapien
ccgcgcgcacgcgtgttttgtcctc

SEQ ID NO: 3300450 - DNA, 25 bp, Homo sapien
gcgcgcacgcgtgttttgtcctcga

SEQ ID NO: 3300451 - DNA, 25 bp, Homo sapien
cgccgcgcgcacgcgtgttttgtcc

SEQ ID NO: 3300452 - DNA, 25 bp, Homo sapien
cgcgcacgcgtgttttgtcctcgag

SEQ ID NO: 3300453 - DNA, 25 bp, Homo sapien
ctctggcgggctgacgccgggagga

SEQ ID NO: 3300454 - DNA, 25 bp, Homo sapien
ctgtatctatgcaaaggcggaggcg

SEQ ID NO: 3300455 - DNA, 25 bp, Homo sapien
tggcaggaaccagccgaacaggaag

SEQ ID NO: 3300456 - DNA, 25 bp, Homo sapien
ttcagtagagggcaaggggcactca

SEQ ID NO: 3300457 - DNA, 25 bp, Homo sapien
ccacgcgaggcccattttgacggat

SEQ ID NO: 3300458 - DNA, 25 bp, Homo sapien
ttcgaggcctgacggcggccaatcg

SEQ ID NO: 3300459 - DNA, 25 bp, Homo sapien
tgctcccgcgttcgcttctttgttc

SEQ ID NO: 3300460 - DNA, 25 bp, Homo sapien
ttttcctgcccacgtggtctcgggc

SEQ ID NO: 3300461 - DNA, 25 bp, Homo sapien
acgcgcggcgggctgcacttggtcg

SEQ ID NO: 3300462 - DNA, 25 bp, Homo sapien
aacagcaggccgagtcccgtagcat

SEQ ID NO: 3300463 - DNA, 25 bp, Homo sapien
tccaggtgtgcagaagtgtcctctc

SEQ ID NO: 3300464 - DNA, 25 bp, Homo sapien
ttggtcgctggctccgagatcgcgc

SEQ ID NO: 3300465 - DNA, 25 bp, Homo sapien
tcggtccccgccgaagtcaccgtga

SEQ ID NO: 3300466 - DNA, 25 bp, Homo sapien
cggtagggaaatggtcgtgctttcg

SEQ ID NO: 3300467 - DNA, 25 bp, Homo sapien
ggtccccgccgaagtcaccgtgatc

SEQ ID NO: 3300468 - DNA, 25 bp, Homo sapien
tggtcgtgctttcggtccccgccga

SEQ ID NO: 3300469 - DNA, 25 bp, Homo sapien
atcgaaggtaccacaaccccgattg

SEQ ID NO: 3300470 - DNA, 25 bp, Homo sapien
ctgttagatatcgaaggtaccacaa

SEQ ID NO: 3300471 - DNA, 25 bp, Homo sapien
ttagatatcgaaggtaccacaaccc

SEQ ID NO: 3300472 - DNA, 25 bp, Homo sapien
agatatcgaaggtaccacaaccccg

SEQ ID NO: 3300473 - DNA, 25 bp, Homo sapien
tccagagtccttaagacccagctgt

SEQ ID NO: 3300474 - DNA, 25 bp, Homo sapien
ctgtcatgttccaggatatggtagg

SEQ ID NO: 3300475 - DNA, 25 bp, Homo sapien
tagggatccagagtccttaagaccc

SEQ ID NO: 3300476 - DNA, 25 bp, Homo sapien
tccaggatatggtagggatccagag

SEQ ID NO: 3300477 - DNA, 25 bp, Homo sapien
gctactggagccaatagctgacttg

SEQ ID NO: 3300478 - DNA, 25 bp, Homo sapien
gatgttggatgtgtgtcctcttttt

SEQ ID NO: 3300479 - DNA, 25 bp, Homo sapien
gagccaatagctgacttgtgatgtt

SEQ ID NO: 3300480 - DNA, 25 bp, Homo sapien
gtagtatttgctactggagccaata

SEQ ID NO: 3300481 - DNA, 25 bp, Homo sapien
gctgtaacatgctgggtgatggtga

SEQ ID NO: 3300482 - DNA, 25 bp, Homo sapien
catgctgggtgatggtgatatgcat

SEQ ID NO: 3300483 - DNA, 25 bp, Homo sapien
taacatgctgggtgatggtgatatg

SEQ ID NO: 3300484 - DNA, 25 bp, Homo sapien
ctgtaacatgctgggtgatggtgat

SEQ ID NO: 3300485 - DNA, 25 bp, Homo sapien
cctgccacgtgttatcattatagat

SEQ ID NO: 3300486 - DNA, 25 bp, Homo sapien
taagatgagccctaatatgtaagat

SEQ ID NO: 3300487 - DNA, 25 bp, Homo sapien
aaaggtgcactgaggtaacatctaa

SEQ ID NO: 3300488 - DNA, 25 bp, Homo sapien
tacttagcacagtttgagaatacgt

SEQ ID NO: 3300489 - DNA, 25 bp, Homo sapien
gaattttatttagtggccagatccc

SEQ ID NO: 3300490 - DNA, 25 bp, Homo sapien
cagtcattgcttggttctgctaaaa

SEQ ID NO: 3300491 - DNA, 25 bp, Homo sapien
gccagatcccaatgaataatgtcag

SEQ ID NO: 3300492 - DNA, 25 bp, Homo sapien
tagatatattcttaagaaagtgtac

SEQ ID NO: 3300493 - DNA, 25 bp, Homo sapien
tgacaggagaatcttgttctcagct

SEQ ID NO: 3300494 - DNA, 25 bp, Homo sapien
tgtctcacatgaaacagccatcttc

SEQ ID NO: 3300495 - DNA, 25 bp, Homo sapien
aactaacaaatgtcaccttggacta

SEQ ID NO: 3300496 - DNA, 25 bp, Homo sapien
cagtaagacgcctttttgacaggag

SEQ ID NO: 3300497 - DNA, 25 bp, Homo sapien
tcttggaagaaagtgcactcatgga

SEQ ID NO: 3300498 - DNA, 25 bp, Homo sapien
catggttgaacccaaagcaagctca

SEQ ID NO: 3300499 - DNA, 25 bp, Homo sapien
tagcttcccacgtaagcctgcaggt

SEQ ID NO: 3300500 - DNA, 25 bp, Homo sapien
tgaagcacagtctcataagcccaca

SEQ ID NO: 3300501 - DNA, 25 bp, Homo sapien
gggaaagttcttctcactatgcctt

SEQ ID NO: 3300502 - DNA, 25 bp, Homo sapien
atcaagtccagatcacagcggcggg

SEQ ID NO: 3300503 - DNA, 25 bp, Homo sapien
gccgaccactgaacaacgatgaagg

SEQ ID NO: 3300504 - DNA, 25 bp, Homo sapien
gtggcatatgtctctcctgggatcc

SEQ ID NO: 3300505 - DNA, 25 bp, Homo sapien
cctgtgagtgtgtcctactggcccc

SEQ ID NO: 3300506 - DNA, 25 bp, Homo sapien
ggaacatttggcctgccctactcgg

SEQ ID NO: 3300507 - DNA, 25 bp, Homo sapien
cacgagctggttccaagccctttgg

SEQ ID NO: 3300508 - DNA, 25 bp, Homo sapien
gagttggcattactcccaaggaaca

SEQ ID NO: 3300509 - DNA, 25 bp, Homo sapien
ggaaattctcctggtactcagagca

SEQ ID NO: 3300510 - DNA, 25 bp, Homo sapien
tcatagcggtaatgccggaactcca

SEQ ID NO: 3300511 - DNA, 25 bp, Homo sapien
tcagagcaaacaatctcatagcggt

SEQ ID NO: 3300512 - DNA, 25 bp, Homo sapien
catacatgtggatgctttgggccat

SEQ ID NO: 3300513 - DNA, 25 bp, Homo sapien
ctaagctagactctctctgggatct

SEQ ID NO: 3300514 - DNA, 25 bp, Homo sapien
cactccatggaatgagtgactgatc

SEQ ID NO: 3300515 - DNA, 25 bp, Homo sapien
tacacatgcagccttaatctagtgc

SEQ ID NO: 3300516 - DNA, 25 bp, Homo sapien
tattgggccacactaccagtaggtg

SEQ ID NO: 3300517 - DNA, 25 bp, Homo sapien
caaggaagttccgacgttatggatt

SEQ ID NO: 3300518 - DNA, 25 bp, Homo sapien
ttgaccttgagtgtcagcgcagcct

SEQ ID NO: 3300519 - DNA, 25 bp, Homo sapien
tagatgccgacagaataacccgtgg

SEQ ID NO: 3300520 - DNA, 25 bp, Homo sapien
cagcaggtcaatgtgccaaatccaa

SEQ ID NO: 3300521 - DNA, 25 bp, Homo sapien
cttagggatgaatggataatgacac

SEQ ID NO: 3300522 - DNA, 25 bp, Homo sapien
tagggatgaatggataatgacacat

SEQ ID NO: 3300523 - DNA, 25 bp, Homo sapien
ttagggatgaatggataatgacaca

SEQ ID NO: 3300524 - DNA, 25 bp, Homo sapien
gcggatctcatcggatctgtttttg

SEQ ID NO: 3300525 - DNA, 25 bp, Homo sapien
tggcggatctcatcggatctgtttt

SEQ ID NO: 3300526 - DNA, 25 bp, Homo sapien
ctcatcggatctgtttttgtaattg

SEQ ID NO: 3300527 - DNA, 25 bp, Homo sapien
tctcatcggatctgtttttgtaatt

SEQ ID NO: 3300528 - DNA, 25 bp, Homo sapien
cctcttgataatgcagcaagagacc

SEQ ID NO: 3300529 - DNA, 25 bp, Homo sapien
agtggggacgtcctctttgcaggca

SEQ ID NO: 3300530 - DNA, 25 bp, Homo sapien
tgacagtgttaactcctactcgaag

SEQ ID NO: 3300531 - DNA, 25 bp, Homo sapien
cgtcctctttgcaggcagctttctt

SEQ ID NO: 3300532 - DNA, 25 bp, Homo sapien
ctgcttggcatccagggcctgggtg

SEQ ID NO: 3300533 - DNA, 25 bp, Homo sapien
gagtagctgcttggcatccagggcc

SEQ ID NO: 3300534 - DNA, 25 bp, Homo sapien
ctgagtagctgcttggcatccaggg

SEQ ID NO: 3300535 - DNA, 25 bp, Homo sapien
gcttggcatccagggcctgggtgaa

SEQ ID NO: 3300536 - DNA, 25 bp, Homo sapien
gaggttaattgcagccgcttataga

SEQ ID NO: 3300537 - DNA, 25 bp, Homo sapien
agaggttaattgcagccgcttatag

SEQ ID NO: 3300538 - DNA, 25 bp, Homo sapien
aggttaattgcagccgcttatagag

SEQ ID NO: 3300539 - DNA, 25 bp, Homo sapien
tgaggtcacttttgggctggatgtc

SEQ ID NO: 3300540 - DNA, 25 bp, Homo sapien
agtgaggtcacttttgggctggatg

SEQ ID NO: 3300541 - DNA, 25 bp, Homo sapien
cgagtgaggtcacttttgggctgga

SEQ ID NO: 3300542 - DNA, 25 bp, Homo sapien
aaagcgagtgaggtcacttttgggc

SEQ ID NO: 3300543 - DNA, 25 bp, Homo sapien
gccttttctcaaaccagggattcac

SEQ ID NO: 3300544 - DNA, 25 bp, Homo sapien
attcttaggccttttctcaaaccag

SEQ ID NO: 3300545 - DNA, 25 bp, Homo sapien
ggccttttctcaaaccagggattca

SEQ ID NO: 3300546 - DNA, 25 bp, Homo sapien
ctttcttggcctcctgcttcttcat

SEQ ID NO: 3300547 - DNA, 25 bp, Homo sapien
actttcttggcctcctgcttcttca

SEQ ID NO: 3300548 - DNA, 25 bp, Homo sapien
cactttcttggcctcctgcttcttc

SEQ ID NO: 3300549 - DNA, 25 bp, Homo sapien
gcaggggccggagccaccttcttta

SEQ ID NO: 3300550 - DNA, 25 bp, Homo sapien
gacagcaggggccggagccaccttc

SEQ ID NO: 3300551 - DNA, 25 bp, Homo sapien
agcaggggccggagccaccttcttt

SEQ ID NO: 3300552 - DNA, 25 bp, Homo sapien
cagcaggggccggagccaccttctt

SEQ ID NO: 3300553 - DNA, 25 bp, Homo sapien
tttcctgactagattcagacttaga

SEQ ID NO: 3300554 - DNA, 25 bp, Homo sapien
cacaacttgttccttgcgcttctct

SEQ ID NO: 3300555 - DNA, 25 bp, Homo sapien
cttcacaacttgttccttgcgcttc

SEQ ID NO: 3300556 - DNA, 25 bp, Homo sapien
atctttttcctgactagattcagac

SEQ ID NO: 3300557 - DNA, 25 bp, Homo sapien
agatctcgccactgcgctaaaacct

SEQ ID NO: 3300558 - DNA, 25 bp, Homo sapien
gatctcgccactgcgctaaaacctg

SEQ ID NO: 3300559 - DNA, 25 bp, Homo sapien
ccactgcgctaaaacctgggcgaca

SEQ ID NO: 3300560 - DNA, 25 bp, Homo sapien
cagtccaggtatagccttctctctt

SEQ ID NO: 3300561 - DNA, 25 bp, Homo sapien
tggcatccacagtgcaaccacgaac

SEQ ID NO: 3300562 - DNA, 25 bp, Homo sapien
ctagctcttttaggccccaggtgac

SEQ ID NO: 3300563 - DNA, 25 bp, Homo sapien
ggtgacgaggcaccctagtatcagt

SEQ ID NO: 3300564 - DNA, 25 bp, Homo sapien
tatataacaggaatgtaacaggcag

SEQ ID NO: 3300565 - DNA, 25 bp, Homo sapien
ataacaggaatgtaacaggcaggcg

SEQ ID NO: 3300566 - DNA, 25 bp, Homo sapien
tataacaggaatgtaacaggcaggc

SEQ ID NO: 3300567 - DNA, 25 bp, Homo sapien
tatatataacaggaatgtaacaggc

SEQ ID NO: 3300568 - DNA, 25 bp, Homo sapien
gaagtttgcgttcatcttccacttt

SEQ ID NO: 3300569 - DNA, 25 bp, Homo sapien
cacccagagcataagcagcaatttc

SEQ ID NO: 3300570 - DNA, 25 bp, Homo sapien
ggcagccaatggctaggaaggagct

SEQ ID NO: 3300571 - DNA, 25 bp, Homo sapien
atggctaggaaggagctgttcagct

SEQ ID NO: 3300572 - DNA, 25 bp, Homo sapien
gaagcagctgaacagctccgagttg

SEQ ID NO: 3300573 - DNA, 25 bp, Homo sapien
aagcagctgaacagctccgagttgc

SEQ ID NO: 3300574 - DNA, 25 bp, Homo sapien
agcagctgaacagctccgagttgcc

SEQ ID NO: 3300575 - DNA, 25 bp, Homo sapien
gcagctgaacagctccgagttgcca

SEQ ID NO: 3300576 - DNA, 25 bp, Homo sapien
tcaatagctttgatagtctcagaag

SEQ ID NO: 3300577 - DNA, 25 bp, Homo sapien
catatggtgattatacctcaatagc

SEQ ID NO: 3300578 - DNA, 25 bp, Homo sapien
gaaggtcttaccagtgtcagaggga

SEQ ID NO: 3300579 - DNA, 25 bp, Homo sapien
ggtttgtgcagaattatatgggcca

SEQ ID NO: 3300580 - DNA, 25 bp, Homo sapien
aaccttcggtttcagttgtatgaag

SEQ ID NO: 3300581 - DNA, 25 bp, Homo sapien
cagttgtatgaagcgcagaacagct

SEQ ID NO: 3300582 - DNA, 25 bp, Homo sapien
caagtaaggtcattccgaaggaagc

SEQ ID NO: 3300583 - DNA, 25 bp, Homo sapien
caatccactaatattcagccacggg

SEQ ID NO: 3300584 - DNA, 25 bp, Homo sapien
gaataaagcaaagtcttaaaatgga

SEQ ID NO: 3300585 - DNA, 25 bp, Homo sapien
tcacacacctagactgtgaggcaga

SEQ ID NO: 3300586 - DNA, 25 bp, Homo sapien
ttaaatcacacacctagactgtgag

SEQ ID NO: 3300587 - DNA, 25 bp, Homo sapien
agaaattaaatcacacacctagact

SEQ ID NO: 3300588 - DNA, 25 bp, Homo sapien
gaaggctgccatgttcataacttga

SEQ ID NO: 3300589 - DNA, 25 bp, Homo sapien
ggctgccatgttcataacttgacta

SEQ ID NO: 3300590 - DNA, 25 bp, Homo sapien
aaggctgccatgttcataacttgac

SEQ ID NO: 3300591 - DNA, 25 bp, Homo sapien
aggctgccatgttcataacttgact

SEQ ID NO: 3300592 - DNA, 25 bp, Homo sapien
tatggtgcatgcttcacaccaggtt

SEQ ID NO: 3300593 - DNA, 25 bp, Homo sapien
tggtgcatgcttcacaccaggtttc

SEQ ID NO: 3300594 - DNA, 25 bp, Homo sapien
cttatatatggtgcatgcttcacac

SEQ ID NO: 3300595 - DNA, 25 bp, Homo sapien
tatatatggtgcatgcttcacacca

SEQ ID NO: 3300596 - DNA, 25 bp, Homo sapien
ttaatggtaaaattttgtcatcttc

SEQ ID NO: 3300597 - DNA, 25 bp, Homo sapien
aatggtaaaattttgtcatcttcca

SEQ ID NO: 3300598 - DNA, 25 bp, Homo sapien
ctttcagctgaatttaatggtaaaa

SEQ ID NO: 3300599 - DNA, 25 bp, Homo sapien
gtcatcttccacagctatgaagtat

SEQ ID NO: 3300600 - DNA, 25 bp, Homo sapien
caagaggtaggaacatccatacgct

SEQ ID NO: 3300601 - DNA, 25 bp, Homo sapien
taggaacatccatacgctgcatttc

SEQ ID NO: 3300602 - DNA, 25 bp, Homo sapien
atccatacgctgcatttcttcccat

SEQ ID NO: 3300603 - DNA, 25 bp, Homo sapien
gaggtaggaacatccatacgctgca

SEQ ID NO: 3300604 - DNA, 25 bp, Homo sapien
aaggcaaacataatcccacctgagg

SEQ ID NO: 3300605 - DNA, 25 bp, Homo sapien
taacctgaaggcatctagaggagga

SEQ ID NO: 3300606 - DNA, 25 bp, Homo sapien
taatgcaaacaagtcctacaaagcc

SEQ ID NO: 3300607 - DNA, 25 bp, Homo sapien
gacagacacaattacgtaatcacga

SEQ ID NO: 3300608 - DNA, 25 bp, Homo sapien
gccaaagtttcatcaaacactagta

SEQ ID NO: 3300609 - DNA, 25 bp, Homo sapien
tacttgttatacatggaggagccaa

SEQ ID NO: 3300610 - DNA, 25 bp, Homo sapien
tgccttgtggcctggtacttgttat

SEQ ID NO: 3300611 - DNA, 25 bp, Homo sapien
ccgtcaataaaaaggatgcacagtg

SEQ ID NO: 3300612 - DNA, 25 bp, Homo sapien
tggtatatctggttccccaacagga

SEQ ID NO: 3300613 - DNA, 25 bp, Homo sapien
tgaaaggcggtctggccggaataaa

SEQ ID NO: 3300614 - DNA, 25 bp, Homo sapien
caggacctcgcatgtaggacatcgg

SEQ ID NO: 3300615 - DNA, 25 bp, Homo sapien
gggttcactcgggaagatggacttc

SEQ ID NO: 3300616 - DNA, 25 bp, Homo sapien
tggtgcggcggggccgctgtcgcct

SEQ ID NO: 3300617 - DNA, 25 bp, Homo sapien
ctgctctggtgcggcggggccgctg

SEQ ID NO: 3300618 - DNA, 25 bp, Homo sapien
gtgcggcggggccgctgtcgcctcg

SEQ ID NO: 3300619 - DNA, 25 bp, Homo sapien
tctggtgcggcggggccgctgtcgc

SEQ ID NO: 3300620 - DNA, 25 bp, Homo sapien
agtagcggcgggtagggcgcttcct

SEQ ID NO: 3300621 - DNA, 25 bp, Homo sapien
gcagtagcggcgggtagggcgcttc

SEQ ID NO: 3300622 - DNA, 25 bp, Homo sapien
cagcagtagcggcgggtagggcgct

SEQ ID NO: 3300623 - DNA, 25 bp, Homo sapien
tagcggcgggtagggcgcttccttc

SEQ ID NO: 3300624 - DNA, 25 bp, Homo sapien
gagccgcttccttccgaagcctttg

SEQ ID NO: 3300625 - DNA, 25 bp, Homo sapien
gcgggcgagccgcttccttccgaag

SEQ ID NO: 3300626 - DNA, 25 bp, Homo sapien
cttccttccgaagcctttgtggacg

SEQ ID NO: 3300627 - DNA, 25 bp, Homo sapien
gtgtgggcgggcgagccgcttcctt

SEQ ID NO: 3300628 - DNA, 25 bp, Homo sapien
aacaaaaggaaggacagaatcttgg

SEQ ID NO: 3300629 - DNA, 25 bp, Homo sapien
gcgctcctcatccaacaaaaggaag

SEQ ID NO: 3300630 - DNA, 25 bp, Homo sapien
caacaaaaggaaggacagaatcttg

SEQ ID NO: 3300631 - DNA, 25 bp, Homo sapien
ctggcgctcctcatccaacaaaagg

SEQ ID NO: 3300632 - DNA, 25 bp, Homo sapien
gctttcctccctgggtctcgtctga

SEQ ID NO: 3300633 - DNA, 25 bp, Homo sapien
tctcgtctgagtccgtcataaactg

SEQ ID NO: 3300634 - DNA, 25 bp, Homo sapien
tcatcagcgttttgacagcttcccc

SEQ ID NO: 3300635 - DNA, 25 bp, Homo sapien
cagcgccagcttgcagctttcctcc

SEQ ID NO: 3300636 - DNA, 25 bp, Homo sapien
cctgtattctctggagtcctgtatc

SEQ ID NO: 3300637 - DNA, 25 bp, Homo sapien
ggagtcctgtatcactcctgccatc

SEQ ID NO: 3300638 - DNA, 25 bp, Homo sapien
ggaattcccgagcattttcctgtat

SEQ ID NO: 3300639 - DNA, 25 bp, Homo sapien
cagtttccatattatgcacttggca

SEQ ID NO: 3300640 - DNA, 25 bp, Homo sapien
ttttcatagactctagcactgtctc

SEQ ID NO: 3300641 - DNA, 25 bp, Homo sapien
tagactctagcactgtctcctctca

SEQ ID NO: 3300642 - DNA, 25 bp, Homo sapien
ggatcaggcccacgttttcatagac

SEQ ID NO: 3300643 - DNA, 25 bp, Homo sapien
tggatcaggcccacgttttcataga

SEQ ID NO: 3300644 - DNA, 25 bp, Homo sapien
ctgacctcgtagaccacaccatctg

SEQ ID NO: 3300645 - DNA, 25 bp, Homo sapien
atccctgacctcgtagaccacacca

SEQ ID NO: 3300646 - DNA, 25 bp, Homo sapien
tggtttggggaacatcaacgtcgca

SEQ ID NO: 3300647 - DNA, 25 bp, Homo sapien
gaacatcaacgtcgcagtcaacacc

SEQ ID NO: 3300648 - DNA, 25 bp, Homo sapien
agtgcaccaagaccggccctgcatc

SEQ ID NO: 3300649 - DNA, 25 bp, Homo sapien
tgctctcctgcttatggtgcacctt

SEQ ID NO: 3300650 - DNA, 25 bp, Homo sapien
atgaacgtccctgtccggccaattc

SEQ ID NO: 3300651 - DNA, 25 bp, Homo sapien
caggaggtccagcacacccccgggg

SEQ ID NO: 3300652 - DNA, 25 bp, Homo sapien
cttctccagcctttgaaagtttaag

SEQ ID NO: 3300653 - DNA, 25 bp, Homo sapien
ttctcttagcgtatagtcatgagcg

SEQ ID NO: 3300654 - DNA, 25 bp, Homo sapien
cgtatagtcatgagcggcgctttct

SEQ ID NO: 3300655 - DNA, 25 bp, Homo sapien
tctctccgaattcccttctccagcc

SEQ ID NO: 3300656 - DNA, 25 bp, Homo sapien
aaaagtcgttcactgtgttttgtag

SEQ ID NO: 3300657 - DNA, 25 bp, Homo sapien
aaagtcgttcactgtgttttgtagg

SEQ ID NO: 3300658 - DNA, 25 bp, Homo sapien
aagtcgttcactgtgttttgtaggc

SEQ ID NO: 3300659 - DNA, 25 bp, Homo sapien
gagaagtttgcactcctgttgttgc

SEQ ID NO: 3300660 - DNA, 25 bp, Homo sapien
gttgttgcagtgtctcaaattcttt

SEQ ID NO: 3300661 - DNA, 25 bp, Homo sapien
actcctgttgttgcagtgtctcaaa

SEQ ID NO: 3300662 - DNA, 25 bp, Homo sapien
tcagctgtagagaagtttgcactcc

SEQ ID NO: 3300663 - DNA, 25 bp, Homo sapien
cagcagcatttatacaagttatgtt

SEQ ID NO: 3300664 - DNA, 25 bp, Homo sapien
gcatttatacaagttatgttaaggg

SEQ ID NO: 3300665 - DNA, 25 bp, Homo sapien
tatacaagttatgttaaggggctgc

SEQ ID NO: 3300666 - DNA, 25 bp, Homo sapien
gcagcatttatacaagttatgttaa

SEQ ID NO: 3300667 - DNA, 25 bp, Homo sapien
gttctcctccaccaatgttgtattt

SEQ ID NO: 3300668 - DNA, 25 bp, Homo sapien
taatgctccacaagatctgtcaaag

SEQ ID NO: 3300669 - DNA, 25 bp, Homo sapien
ccaatgtttccaccattagattctt

SEQ ID NO: 3300670 - DNA, 25 bp, Homo sapien
ttcttgtaatgctccacaagatctg

SEQ ID NO: 3300671 - DNA, 25 bp, Homo sapien
tgaactcccacttactcagcaatgg

SEQ ID NO: 3300672 - DNA, 25 bp, Homo sapien
cagcaatggtcccttgtattcatca

SEQ ID NO: 3300673 - DNA, 25 bp, Homo sapien
tagtcaaacgcgatgaactcccact

SEQ ID NO: 3300674 - DNA, 25 bp, Homo sapien
ttttccatagtcaaacgcgatgaac

SEQ ID NO: 3300675 - DNA, 25 bp, Homo sapien
caagaaacagtctgattcctcagag

SEQ ID NO: 3300676 - DNA, 25 bp, Homo sapien
taagagcagacttacaagaaacagt

SEQ ID NO: 3300677 - DNA, 25 bp, Homo sapien
ctgcagtaagagcagacttacaaga

SEQ ID NO: 3300678 - DNA, 25 bp, Homo sapien
aagaaacagtctgattcctcagagg

SEQ ID NO: 3300679 - DNA, 25 bp, Homo sapien
atctacagtttaagttttctgctgc

SEQ ID NO: 3300680 - DNA, 25 bp, Homo sapien
agtttaagttttctgctgcatagca

SEQ ID NO: 3300681 - DNA, 25 bp, Homo sapien
ttaagttttctgctgcatagcacat

SEQ ID NO: 3300682 - DNA, 25 bp, Homo sapien
ccatctacagtttaagttttctgct

SEQ ID NO: 3300683 - DNA, 25 bp, Homo sapien
tgtgggttcggattcttaggtgcct

SEQ ID NO: 3300684 - DNA, 25 bp, Homo sapien
cacaccgacctaggagtatagggca

SEQ ID NO: 3300685 - DNA, 25 bp, Homo sapien
gcaaacctagacaagattggtaaca

SEQ ID NO: 3300686 - DNA, 25 bp, Homo sapien
gatatcagaccttagaccagcaagc

SEQ ID NO: 3300687 - DNA, 25 bp, Homo sapien
gcagagtgtcgtttaaaatacgatt

SEQ ID NO: 3300688 - DNA, 25 bp, Homo sapien
tttaaaatacgattatcttgagtgt

SEQ ID NO: 3300689 - DNA, 25 bp, Homo sapien
caagcagagtgtcgtttaaaatacg

SEQ ID NO: 3300690 - DNA, 25 bp, Homo sapien
ggatcaagcagagtgtcgtttaaaa

SEQ ID NO: 3300691 - DNA, 25 bp, Homo sapien
taacactccctgctccggtgtgaag

SEQ ID NO: 3300692 - DNA, 25 bp, Homo sapien
tcacagatcctagctgtttcttgac

SEQ ID NO: 3300693 - DNA, 25 bp, Homo sapien
gcctttgccaagaaaactccagagt

SEQ ID NO: 3300694 - DNA, 25 bp, Homo sapien
gaggtcagtctctcggttccacaag

SEQ ID NO: 3300695 - DNA, 25 bp, Homo sapien
accctagccattccacttcttcttc

SEQ ID NO: 3300696 - DNA, 25 bp, Homo sapien
caccctagccattccacttcttctt

SEQ ID NO: 3300697 - DNA, 25 bp, Homo sapien
tgtttatcccattgtgttcactcct

SEQ ID NO: 3300698 - DNA, 25 bp, Homo sapien
gtttgtttatcccattgtgttcact

SEQ ID NO: 3300699 - DNA, 25 bp, Homo sapien
ttgtttatcccattgtgttcactcc

SEQ ID NO: 3300700 - DNA, 25 bp, Homo sapien
tttatcccattgtgttcactcctcc

SEQ ID NO: 3300701 - DNA, 25 bp, Homo sapien
ctggaatttcttgccaagatgtctc

SEQ ID NO: 3300702 - DNA, 25 bp, Homo sapien
gcctgagaacccttgggaagccgct

SEQ ID NO: 3300703 - DNA, 25 bp, Homo sapien
gtcgtcagtctgtggcttaaggcct

SEQ ID NO: 3300704 - DNA, 25 bp, Homo sapien
aacccttgggaagccgctggtgcaa

SEQ ID NO: 3300705 - DNA, 25 bp, Homo sapien
aattggctagcacaattacaaggca

SEQ ID NO: 3300706 - DNA, 25 bp, Homo sapien
gccaccaagaggtctcgctggttgg

SEQ ID NO: 3300707 - DNA, 25 bp, Homo sapien
caccaagaggtctcgctggttggca

SEQ ID NO: 3300708 - DNA, 25 bp, Homo sapien
ctggccaccaagaggtctcgctggt

SEQ ID NO: 3300709 - DNA, 25 bp, Homo sapien
accaagaggtctcgctggttggcat

SEQ ID NO: 3300710 - DNA, 25 bp, Homo sapien
acatcaccattctcaggtcttgccc

SEQ ID NO: 3300711 - DNA, 25 bp, Homo sapien
caccattctcaggtcttgccctcag

SEQ ID NO: 3300712 - DNA, 25 bp, Homo sapien
tcaccattctcaggtcttgccctca

SEQ ID NO: 3300713 - DNA, 25 bp, Homo sapien
agaaatgtgactccatcagtcctcc

SEQ ID NO: 3300714 - DNA, 25 bp, Homo sapien
taatcacgatgagaaacgcgactga

SEQ ID NO: 3300715 - DNA, 25 bp, Homo sapien
cactgaagagcaaatcaatggctgg

SEQ ID NO: 3300716 - DNA, 25 bp, Homo sapien
gggtgttaatcacgatgagaaacgc

SEQ ID NO: 3300717 - DNA, 25 bp, Homo sapien
gatgagaaacgcgactgacacgtgg

SEQ ID NO: 3300718 - DNA, 25 bp, Homo sapien
ctgtaatagttagtgggttctcatc

SEQ ID NO: 3300719 - DNA, 25 bp, Homo sapien
tccttgtccatgctctggatctgtg

SEQ ID NO: 3300720 - DNA, 25 bp, Homo sapien
ccatgctctggatctgtgccaattc

SEQ ID NO: 3300721 - DNA, 25 bp, Homo sapien
cagcagaagtgtaagtccttgtcca

SEQ ID NO: 3300722 - DNA, 25 bp, Homo sapien
ccctgaagtcttggttgctttttag

SEQ ID NO: 3300723 - DNA, 25 bp, Homo sapien
gaaacagtgcgatctgatgacatgc

SEQ ID NO: 3300724 - DNA, 25 bp, Homo sapien
acagtgcgatctgatgacatgcagt

SEQ ID NO: 3300725 - DNA, 25 bp, Homo sapien
gagagaaacagtgcgatctgatgac

SEQ ID NO: 3300726 - DNA, 25 bp, Homo sapien
aagagagaaacagtgcgatctgatg

SEQ ID NO: 3300727 - DNA, 25 bp, Homo sapien
agggaatgagagcacgggaattgca

SEQ ID NO: 3300728 - DNA, 25 bp, Homo sapien
attgcaagggttggcggcgagggct

SEQ ID NO: 3300729 - DNA, 25 bp, Homo sapien
tgagagcacgggaattgcaagggtt

SEQ ID NO: 3300730 - DNA, 25 bp, Homo sapien
cacgggaattgcaagggttggcggc

SEQ ID NO: 3300731 - DNA, 25 bp, Homo sapien
tgttgagacatgtggttctcattac

SEQ ID NO: 3300732 - DNA, 25 bp, Homo sapien
gagacatgtggttctcattactgtc

SEQ ID NO: 3300733 - DNA, 25 bp, Homo sapien
ttctaagcttctgttgagacatgtg

SEQ ID NO: 3300734 - DNA, 25 bp, Homo sapien
gattaaatgtgcttttctaagcttc

SEQ ID NO: 3300735 - DNA, 25 bp, Homo sapien
gcctgtaggcatttatcttgtgatg

SEQ ID NO: 3300736 - DNA, 25 bp, Homo sapien
cctgtaggcatttatcttgtgatgc

SEQ ID NO: 3300737 - DNA, 25 bp, Homo sapien
gtaggcatttatcttgtgatgctgt

SEQ ID NO: 3300738 - DNA, 25 bp, Homo sapien
ctgcctgtaggcatttatcttgtga

SEQ ID NO: 3300739 - DNA, 25 bp, Homo sapien
tctagtctgtaaaacagtagaaggg

SEQ ID NO: 3300740 - DNA, 25 bp, Homo sapien
caccacctcgcatccagggagaatt

SEQ ID NO: 3300741 - DNA, 25 bp, Homo sapien
tttctgttgggacactgacgtgatg

SEQ ID NO: 3300742 - DNA, 25 bp, Homo sapien
gacccagccgagatgacaattacag

SEQ ID NO: 3300743 - DNA, 25 bp, Homo sapien
gagagatcatgctgtcggcaagact

SEQ ID NO: 3300744 - DNA, 25 bp, Homo sapien
tagagatcaccaactgagtggctga

SEQ ID NO: 3300745 - DNA, 25 bp, Homo sapien
tatcccagggacttcatgcattctt

SEQ ID NO: 3300746 - DNA, 25 bp, Homo sapien
taaatcggtttgctaaggactgctg

SEQ ID NO: 3300747 - DNA, 25 bp, Homo sapien
ctggaaatggctctgtgattgcaca

SEQ ID NO: 3300748 - DNA, 25 bp, Homo sapien
tggaaatggctctgtgattgcacag

SEQ ID NO: 3300749 - DNA, 25 bp, Homo sapien
tctggaaatggctctgtgattgcac

SEQ ID NO: 3300750 - DNA, 25 bp, Homo sapien
cgtctggaaatggctctgtgattgc

SEQ ID NO: 3300751 - DNA, 25 bp, Homo sapien
cagacatgtgggatggctgttccaa

SEQ ID NO: 3300752 - DNA, 25 bp, Homo sapien
gaaccgaggttgcaacggcagacat

SEQ ID NO: 3300753 - DNA, 25 bp, Homo sapien
tcaggacacaaaacgagctgggcag

SEQ ID NO: 3300754 - DNA, 25 bp, Homo sapien
gctaaagtacatgcatcagtggctg

SEQ ID NO: 3300755 - DNA, 25 bp, Homo sapien
tttaagccaaattcactcgcagagt

SEQ ID NO: 3300756 - DNA, 25 bp, Homo sapien
tgtgatggtaattatggaagccttc

SEQ ID NO: 3300757 - DNA, 25 bp, Homo sapien
tgcccgtttgcggtcagtggccagc

SEQ ID NO: 3300758 - DNA, 25 bp, Homo sapien
gatcatcggcttggttgcccgtttg

SEQ ID NO: 3300759 - DNA, 25 bp, Homo sapien
aaagacccacatgccttagccatca

SEQ ID NO: 3300760 - DNA, 25 bp, Homo sapien
ttgtacgtatccatccatcagttga

SEQ ID NO: 3300761 - DNA, 25 bp, Homo sapien
cattatatggatgtacaacattgta

SEQ ID NO: 3300762 - DNA, 25 bp, Homo sapien
tttcattactctccaaaaagaccca

SEQ ID NO: 3300763 - DNA, 25 bp, Homo sapien
gcacatgagcaccacggagatctta

SEQ ID NO: 3300764 - DNA, 25 bp, Homo sapien
gtttccatacatgtgggcggcgctg

SEQ ID NO: 3300765 - DNA, 25 bp, Homo sapien
tgtgcttgtcatagggccggtttcc

SEQ ID NO: 3300766 - DNA, 25 bp, Homo sapien
tctgccgagggctgatgtgcttgtc

SEQ ID NO: 3300767 - DNA, 25 bp, Homo sapien
tgacagtgctgcctctgatggagag

SEQ ID NO: 3300768 - DNA, 25 bp, Homo sapien
tctcccagtagctgacagtgctgcc

SEQ ID NO: 3300769 - DNA, 25 bp, Homo sapien
acagtgctgcctctgatggagagct

SEQ ID NO: 3300770 - DNA, 25 bp, Homo sapien
ccagtagctgacagtgctgcctctg

SEQ ID NO: 3300771 - DNA, 25 bp, Homo sapien
agccagttggagtgcacagagaggt

SEQ ID NO: 3300772 - DNA, 25 bp, Homo sapien
tgctcagagcaaatggccaaatgcc

SEQ ID NO: 3300773 - DNA, 25 bp, Homo sapien
caaagccagttggagtgcacagaga

SEQ ID NO: 3300774 - DNA, 25 bp, Homo sapien
gaggtgctcagagcaaatggccaaa

SEQ ID NO: 3300775 - DNA, 25 bp, Homo sapien
gagtctcggtcttgtctgagtcatt

SEQ ID NO: 3300776 - DNA, 25 bp, Homo sapien
tattaaattttgctggcccatccct

SEQ ID NO: 3300777 - DNA, 25 bp, Homo sapien
cttaatttcaggtctaccctgagca

SEQ ID NO: 3300778 - DNA, 25 bp, Homo sapien
actgtaagaactgggtccttatatt

SEQ ID NO: 3300779 - DNA, 25 bp, Homo sapien
cagtgttgccaccagcagttgcttc

SEQ ID NO: 3300780 - DNA, 25 bp, Homo sapien
tttgctccttctaacttgtttctct

SEQ ID NO: 3300781 - DNA, 25 bp, Homo sapien
tgttgccaccagcagttgcttcttt

SEQ ID NO: 3300782 - DNA, 25 bp, Homo sapien
tcatttctgtttgtcagtgttgcca

SEQ ID NO: 3300783 - DNA, 25 bp, Homo sapien
tctttctatggaggtacaggatgga

SEQ ID NO: 3300784 - DNA, 25 bp, Homo sapien
gaacacatgggctctcggtgagacc

SEQ ID NO: 3300785 - DNA, 25 bp, Homo sapien
tgaaaaccagacaactaagactatt

SEQ ID NO: 3300786 - DNA, 25 bp, Homo sapien
aaggagtcggtcgtgccgagactaa

SEQ ID NO: 3300787 - DNA, 25 bp, Homo sapien
tctttgagggtcaccgggcctttga

SEQ ID NO: 3300788 - DNA, 25 bp, Homo sapien
ctggtgtagggaagacccatgcctt

SEQ ID NO: 3300789 - DNA, 25 bp, Homo sapien
actggagttggccaaggttattgac

SEQ ID NO: 3300790 - DNA, 25 bp, Homo sapien
ggttattgacagcagacatggccaa

SEQ ID NO: 3300791 - DNA, 25 bp, Homo sapien
gcagtaacatcaccagttgcaaaag

SEQ ID NO: 3300792 - DNA, 25 bp, Homo sapien
caagcaagcatttggccacactctg

SEQ ID NO: 3300793 - DNA, 25 bp, Homo sapien
gatggtattagtggccacaagcaag

SEQ ID NO: 3300794 - DNA, 25 bp, Homo sapien
gctaggtttgtgctaaagttctgag

SEQ ID NO: 3300795 - DNA, 25 bp, Homo sapien
gcagctctgtctatgcttcacaccg

SEQ ID NO: 3300796 - DNA, 25 bp, Homo sapien
tatacgttatcaccaagcctcgctg

SEQ ID NO: 3300797 - DNA, 25 bp, Homo sapien
tattaccctgctctagatgtggaaa

SEQ ID NO: 3300798 - DNA, 25 bp, Homo sapien
gctgcctccttgtgtcaactgattg

SEQ ID NO: 3300799 - DNA, 25 bp, Homo sapien
agcagcacttttcggagtggttaca

SEQ ID NO: 3300800 - DNA, 25 bp, Homo sapien
tgccattcacgaagcatctcacacg

SEQ ID NO: 3300801 - DNA, 25 bp, Homo sapien
gagcacgcagcatcaagcagcactt

SEQ ID NO: 3300802 - DNA, 25 bp, Homo sapien
cacacgctgcctcttgattgagagc

SEQ ID NO: 3300803 - DNA, 25 bp, Homo sapien
gggacgtttccactgtgtcagattt

SEQ ID NO: 3300804 - DNA, 25 bp, Homo sapien
ttttgtgaccattctaccttcttcc

SEQ ID NO: 3300805 - DNA, 25 bp, Homo sapien
tggcagggttctggacagggacgtg

SEQ ID NO: 3300806 - DNA, 25 bp, Homo sapien
gagacagtgtctttgtctttggcca

SEQ ID NO: 3300807 - DNA, 25 bp, Homo sapien
caacaaaaagagtcttgctgagcaa

SEQ ID NO: 3300808 - DNA, 25 bp, Homo sapien
aaaaagagtcttgctgagcaatagg

SEQ ID NO: 3300809 - DNA, 25 bp, Homo sapien
acaaaaagagtcttgctgagcaata

SEQ ID NO: 3300810 - DNA, 25 bp, Homo sapien
aacaacaaaaagagtcttgctgagc

SEQ ID NO: 3300811 - DNA, 25 bp, Homo sapien
ttaaacagcttttgttctcttataa

SEQ ID NO: 3300812 - DNA, 25 bp, Homo sapien
aaactgtgagctggcagaaaggata

SEQ ID NO: 3300813 - DNA, 25 bp, Homo sapien
agtgggtactcaaaacatagttgtc

SEQ ID NO: 3300814 - DNA, 25 bp, Homo sapien
tgcttacagcatggccaagtgatgc

SEQ ID NO: 3300815 - DNA, 25 bp, Homo sapien
gaaagaagccgacttcgctgagaaa

SEQ ID NO: 3300816 - DNA, 25 bp, Homo sapien
gagtaaaataggcaatcaccaaacc

SEQ ID NO: 3300817 - DNA, 25 bp, Homo sapien
ctgctgcaggaccagtattttacct

SEQ ID NO: 3300818 - DNA, 25 bp, Homo sapien
gcatggttgtacttaaaagcccctg

SEQ ID NO: 3300819 - DNA, 25 bp, Homo sapien
aatcaccaaacccagggtaattgag

SEQ ID NO: 3300820 - DNA, 25 bp, Homo sapien
gtgaattctgattgcctccaactgg

SEQ ID NO: 3300821 - DNA, 25 bp, Homo sapien
taaactctccaagaggcacttagct

SEQ ID NO: 3300822 - DNA, 25 bp, Homo sapien
gatctgcacaaacattgcaccctgg

SEQ ID NO: 3300823 - DNA, 25 bp, Homo sapien
tccaactggaatagggactgttcct

SEQ ID NO: 3300824 - DNA, 25 bp, Homo sapien
ccaatatgggagaagaagaagcccc

SEQ ID NO: 3300825 - DNA, 25 bp, Homo sapien
tctctgagtacttgtggtgggctcg

SEQ ID NO: 3300826 - DNA, 25 bp, Homo sapien
gaacaaacagccacccaatatggga

SEQ ID NO: 3300827 - DNA, 25 bp, Homo sapien
catctcgatgcttgcgaacaaacag

SEQ ID NO: 3300828 - DNA, 25 bp, Homo sapien
catgtgtgactcacagagatcagga

SEQ ID NO: 3300829 - DNA, 25 bp, Homo sapien
cccaaatggctacttccccaaatct

SEQ ID NO: 3300830 - DNA, 25 bp, Homo sapien
gtgactcacagagatcaggaagcca

SEQ ID NO: 3300831 - DNA, 25 bp, Homo sapien
gatcaggaagccagtagtttaaaaa

SEQ ID NO: 3300832 - DNA, 25 bp, Homo sapien
agccctgagacagactctggtgccc

SEQ ID NO: 3300833 - DNA, 25 bp, Homo sapien
tggagccctgagacagactctggtg

SEQ ID NO: 3300834 - DNA, 25 bp, Homo sapien
ggagccctgagacagactctggtgc

SEQ ID NO: 3300835 - DNA, 25 bp, Homo sapien
gagccctgagacagactctggtgcc

SEQ ID NO: 3300836 - DNA, 25 bp, Homo sapien
tgaaagaggtctttagattttacag

SEQ ID NO: 3300837 - DNA, 25 bp, Homo sapien
tgtaatatgaaagaggtctttagat

SEQ ID NO: 3300838 - DNA, 25 bp, Homo sapien
ttagattttacagtgtatttaaaca

SEQ ID NO: 3300839 - DNA, 25 bp, Homo sapien
tagattttacagtgtatttaaacat

SEQ ID NO: 3300840 - DNA, 25 bp, Homo sapien
ctgtgaatagcatttgtgttgaaaa

SEQ ID NO: 3300841 - DNA, 25 bp, Homo sapien
aaaggtttgggtacctagagctcat

SEQ ID NO: 3300842 - DNA, 25 bp, Homo sapien
agcatttgtgttgaaaaggtttggg

SEQ ID NO: 3300843 - DNA, 25 bp, Homo sapien
gtgaatagcatttgtgttgaaaagg

SEQ ID NO: 3300844 - DNA, 25 bp, Homo sapien
tgtaggttccagtagatcacagtct

SEQ ID NO: 3300845 - DNA, 25 bp, Homo sapien
attaaaagtgcactctcaccacatg

SEQ ID NO: 3300846 - DNA, 25 bp, Homo sapien
tgaactcagcagtaattcctgaagc

SEQ ID NO: 3300847 - DNA, 25 bp, Homo sapien
ccatgtacatattctggtagggaca

SEQ ID NO: 3300848 - DNA, 25 bp, Homo sapien
aagcataaaatccttggatcttcac

SEQ ID NO: 3300849 - DNA, 25 bp, Homo sapien
ctaagcataaaatccttggatcttc

SEQ ID NO: 3300850 - DNA, 25 bp, Homo sapien
taagcataaaatccttggatcttca

SEQ ID NO: 3300851 - DNA, 25 bp, Homo sapien
gaggacatgagcatccagagcactc

SEQ ID NO: 3300852 - DNA, 25 bp, Homo sapien
catgctgaccgacgccatgatggac

SEQ ID NO: 3300853 - DNA, 25 bp, Homo sapien
cagttcttggtctgcgcctgctgca

SEQ ID NO: 3300854 - DNA, 25 bp, Homo sapien
cggcatggtaggttagatcaggact

SEQ ID NO: 3300855 - DNA, 25 bp, Homo sapien
tccctacgtcgggagcaggcatcgc

SEQ ID NO: 3300856 - DNA, 25 bp, Homo sapien
ggagaggcggtatcccgtgtcaggt

SEQ ID NO: 3300857 - DNA, 25 bp, Homo sapien
catcgcagcccctgagcggagaggc

SEQ ID NO: 3300858 - DNA, 25 bp, Homo sapien
gtgactgccagctggcgcctgttct

SEQ ID NO: 3300859 - DNA, 25 bp, Homo sapien
aagcccatgtccgagcctggctggg

SEQ ID NO: 3300860 - DNA, 25 bp, Homo sapien
agcaagctcaggggtgttccagcca

SEQ ID NO: 3300861 - DNA, 25 bp, Homo sapien
gggtgagaggcaagcccatgtccga

SEQ ID NO: 3300862 - DNA, 25 bp, Homo sapien
ggtcccccagacggacacagaggtc

SEQ ID NO: 3300863 - DNA, 25 bp, Homo sapien
tgcgtggcaccctatgcagggtctg

SEQ ID NO: 3300864 - DNA, 25 bp, Homo sapien
tgggtcccacagttctgagtctgct

SEQ ID NO: 3300865 - DNA, 25 bp, Homo sapien
tccgaggcaacctccagagcatggg

SEQ ID NO: 3300866 - DNA, 25 bp, Homo sapien
tactctggatattgcacacactggc

SEQ ID NO: 3300867 - DNA, 25 bp, Homo sapien
gcttagcagccctgtgctgactcca

SEQ ID NO: 3300868 - DNA, 25 bp, Homo sapien
agatgcttgcccacggttcccacag

SEQ ID NO: 3300869 - DNA, 25 bp, Homo sapien
gccctggagttctcagatgcttgcc

SEQ ID NO: 3300870 - DNA, 25 bp, Homo sapien
acaccgtgcttagcagccctgtgct

SEQ ID NO: 3300871 - DNA, 25 bp, Homo sapien
catttaagtgaagctgcgcagttca

SEQ ID NO: 3300872 - DNA, 25 bp, Homo sapien
tcaaacccattctgttcaagggtta

SEQ ID NO: 3300873 - DNA, 25 bp, Homo sapien
ttaagtgaagctgcgcagttcaaac

SEQ ID NO: 3300874 - DNA, 25 bp, Homo sapien
tttaagtgaagctgcgcagttcaaa

SEQ ID NO: 3300875 - DNA, 25 bp, Homo sapien
tatagagaggggcaagcattgaatc

SEQ ID NO: 3300876 - DNA, 25 bp, Homo sapien
gttgatcttgaactaaaaggtggta

SEQ ID NO: 3300877 - DNA, 25 bp, Homo sapien
gctctctctggctacaatatagaga

SEQ ID NO: 3300878 - DNA, 25 bp, Homo sapien
aatcagaagaccagttcaggaggct

SEQ ID NO: 3300879 - DNA, 25 bp, Homo sapien
cttccaaaatcacaccaggaaaagc

SEQ ID NO: 3300880 - DNA, 25 bp, Homo sapien
ttccaaaatcacaccaggaaaagct

SEQ ID NO: 3300881 - DNA, 25 bp, Homo sapien
tccaaaatcacaccaggaaaagctg

SEQ ID NO: 3300882 - DNA, 25 bp, Homo sapien
tgggtcaggaccacttctgctgctg

SEQ ID NO: 3300883 - DNA, 25 bp, Homo sapien
gggcatctgggtcaggaccacttct

SEQ ID NO: 3300884 - DNA, 25 bp, Homo sapien
atctgggtcaggaccacttctgctg

SEQ ID NO: 3300885 - DNA, 25 bp, Homo sapien
tcagggcatctgggtcaggaccact

SEQ ID NO: 3300886 - DNA, 25 bp, Homo sapien
tgtacttgagggtgctgcctcgcac

SEQ ID NO: 3300887 - DNA, 25 bp, Homo sapien
gctgctgctaacagcatgagctgta

SEQ ID NO: 3300888 - DNA, 25 bp, Homo sapien
tcttctacacaaccgccactgcatg

SEQ ID NO: 3300889 - DNA, 25 bp, Homo sapien
ccagccttgggggatggtctattat

SEQ ID NO: 3300890 - DNA, 25 bp, Homo sapien
actgggtctcccaacacagagagga

SEQ ID NO: 3300891 - DNA, 25 bp, Homo sapien
atctgcactgggtctcccaacacag

SEQ ID NO: 3300892 - DNA, 25 bp, Homo sapien
tgcactgggtctcccaacacagaga

SEQ ID NO: 3300893 - DNA, 25 bp, Homo sapien
tcccatactgccatctgcactgggt

SEQ ID NO: 3300894 - DNA, 25 bp, Homo sapien
gcgacagccagaaatatcctcagag

SEQ ID NO: 3300895 - DNA, 25 bp, Homo sapien
aaagccatggagttggcgacagcca

SEQ ID NO: 3300896 - DNA, 25 bp, Homo sapien
cttggcccggtaggacctgtggctc

SEQ ID NO: 3300897 - DNA, 25 bp, Homo sapien
tgtggctccacaagcgatgggcacc

SEQ ID NO: 3300898 - DNA, 25 bp, Homo sapien
aagacacaagcagggacaacgtcaa

SEQ ID NO: 3300899 - DNA, 25 bp, Homo sapien
gcagggacaacgtcaacaatggtcc

SEQ ID NO: 3300900 - DNA, 25 bp, Homo sapien
caagcagggacaacgtcaacaatgg

SEQ ID NO: 3300901 - DNA, 25 bp, Homo sapien
caacgtcaacaatggtccctgagct

SEQ ID NO: 3300902 - DNA, 25 bp, Homo sapien
atccttccctacagcaaatctttta

SEQ ID NO: 3300903 - DNA, 25 bp, Homo sapien
ttgccagtcttgatgcaaagtcaca

SEQ ID NO: 3300904 - DNA, 25 bp, Homo sapien
tatccttccctacagcaaatctttt

SEQ ID NO: 3300905 - DNA, 25 bp, Homo sapien
catcgtctactgtgccgcatatgag

SEQ ID NO: 3300906 - DNA, 25 bp, Homo sapien
gcagaaagatatgttctctcatccc

SEQ ID NO: 3300907 - DNA, 25 bp, Homo sapien
tccactaagccatcgtctactgtgc

SEQ ID NO: 3300908 - DNA, 25 bp, Homo sapien
catgaatctttaagcaactgcccac

SEQ ID NO: 3300909 - DNA, 25 bp, Homo sapien
gttgttgttatcacaatgtttctgg

SEQ ID NO: 3300910 - DNA, 25 bp, Homo sapien
aagaatatttggcagcgaggtgtac

SEQ ID NO: 3300911 - DNA, 25 bp, Homo sapien
caaacgttcctctatctggcagcca

SEQ ID NO: 3300912 - DNA, 25 bp, Homo sapien
catggtgatcggtgtgaacccagtg

SEQ ID NO: 3300913 - DNA, 25 bp, Homo sapien
gtgcggagtatcagagtgggcagcc

SEQ ID NO: 3300914 - DNA, 25 bp, Homo sapien
ccacatgcccgtttcctccagggtg

SEQ ID NO: 3300915 - DNA, 25 bp, Homo sapien
gagcaccttccacatgcccgtttcc

SEQ ID NO: 3300916 - DNA, 25 bp, Homo sapien
tttcctccagggtgcggagtatcag

SEQ ID NO: 3300917 - DNA, 25 bp, Homo sapien
gctgtcctaattggtcaagaaaagg

SEQ ID NO: 3300918 - DNA, 25 bp, Homo sapien
tcaattgctgcccaagctcatcctg

SEQ ID NO: 3300919 - DNA, 25 bp, Homo sapien
tctgaagggcacctgtcaattgctg

SEQ ID NO: 3300920 - DNA, 25 bp, Homo sapien
tacacagccctcttcgtcctgttcc

SEQ ID NO: 3300921 - DNA, 25 bp, Homo sapien
tgaaaggcaagctgtcatctgtctg

SEQ ID NO: 3300922 - DNA, 25 bp, Homo sapien
gcttcttacaacctcacaattccaa

SEQ ID NO: 3300923 - DNA, 25 bp, Homo sapien
gtcatctgtctgattaagatcaggg

SEQ ID NO: 3300924 - DNA, 25 bp, Homo sapien
caattccaaccatgaatgtgacaat

SEQ ID NO: 3300925 - DNA, 25 bp, Homo sapien
cgaggttgttttgccagcacccagc

SEQ ID NO: 3300926 - DNA, 25 bp, Homo sapien
acctcgccttgctgttgatcacctt

SEQ ID NO: 3300927 - DNA, 25 bp, Homo sapien
acctggaacctgaaggcgaggttgt

SEQ ID NO: 3300928 - DNA, 25 bp, Homo sapien
agcacctcgccttgctgttgatcac

SEQ ID NO: 3300929 - DNA, 25 bp, Homo sapien
ggtctctgaagagcccaccacaatg

SEQ ID NO: 3300930 - DNA, 25 bp, Homo sapien
gggtctctgaagagcccaccacaat

SEQ ID NO: 3300931 - DNA, 25 bp, Homo sapien
tctctgaagagcccaccacaatgtc

SEQ ID NO: 3300932 - DNA, 25 bp, Homo sapien
gcgggtctctgaagagcccaccaca

SEQ ID NO: 3300933 - DNA, 25 bp, Homo sapien
gatttacatctgcacgtgctgcccc

SEQ ID NO: 3300934 - DNA, 25 bp, Homo sapien
taagaagctgagtccttaaggactg

SEQ ID NO: 3300935 - DNA, 25 bp, Homo sapien
cccgatttacatctgcacgtgctgc

SEQ ID NO: 3300936 - DNA, 25 bp, Homo sapien
cttcatcccgatttacatctgcacg

SEQ ID NO: 3300937 - DNA, 25 bp, Homo sapien
ctttcacagtgctttgtatttcctc

SEQ ID NO: 3300938 - DNA, 25 bp, Homo sapien
gcggctttgctttcacagtgctttg

SEQ ID NO: 3300939 - DNA, 25 bp, Homo sapien
gccagcctggacggctgcttctccg

SEQ ID NO: 3300940 - DNA, 25 bp, Homo sapien
tctcccttcaaccttcagactgaag

SEQ ID NO: 3300941 - DNA, 25 bp, Homo sapien
ccttggaagaggtgttggctgtctc

SEQ ID NO: 3300942 - DNA, 25 bp, Homo sapien
gctcttttgcccttgcctcatgtga

SEQ ID NO: 3300943 - DNA, 25 bp, Homo sapien
ggtgggctagactcagtgactcatg

SEQ ID NO: 3300944 - DNA, 25 bp, Homo sapien
taacctaccgctctactgggaagag

SEQ ID NO: 3300945 - DNA, 25 bp, Homo sapien
cacaagtttgtagaaggcagccctc

SEQ ID NO: 3300946 - DNA, 25 bp, Homo sapien
cattgactccatgtgctgcccggaa

SEQ ID NO: 3300947 - DNA, 25 bp, Homo sapien
tagacaagctggattcccaagggcc

SEQ ID NO: 3300948 - DNA, 25 bp, Homo sapien
gaattaaacattgctgctgccggct

SEQ ID NO: 3300949 - DNA, 25 bp, Homo sapien
acagagccctccaacctttctagta

SEQ ID NO: 3300950 - DNA, 25 bp, Homo sapien
agagccctccaacctttctagtaag

SEQ ID NO: 3300951 - DNA, 25 bp, Homo sapien
gccctccaacctttctagtaagcag

SEQ ID NO: 3300952 - DNA, 25 bp, Homo sapien
agcaggccctgcagtagccccaaca

SEQ ID NO: 3300953 - DNA, 25 bp, Homo sapien
ggcactgattctcggtcccatggca

SEQ ID NO: 3300954 - DNA, 25 bp, Homo sapien
gcacttgagaatggatggtgtcttg

SEQ ID NO: 3300955 - DNA, 25 bp, Homo sapien
cggtcccatggcacttgagaatgga

SEQ ID NO: 3300956 - DNA, 25 bp, Homo sapien
cccctaagctggcactgattctcgg

SEQ ID NO: 3300957 - DNA, 25 bp, Homo sapien
ccccagggaccgcagaggtgacaca

SEQ ID NO: 3300958 - DNA, 25 bp, Homo sapien
caaggtccgtgacccgcggaggtga

SEQ ID NO: 3300959 - DNA, 25 bp, Homo sapien
agaggtgacacaatcgcccgcccgt

SEQ ID NO: 3300960 - DNA, 25 bp, Homo sapien
tcgctgggagccgattcagcctgtg

SEQ ID NO: 3300961 - DNA, 25 bp, Homo sapien
tttcgagcccggcacggatttcttc

SEQ ID NO: 3300962 - DNA, 25 bp, Homo sapien
caggacgacattcctccagacgatg

SEQ ID NO: 3300963 - DNA, 25 bp, Homo sapien
ccttggcgtcgcagaaagggatctt

SEQ ID NO: 3300964 - DNA, 25 bp, Homo sapien
agacgatgttctgccgctgcccgcg

SEQ ID NO: 3300965 - DNA, 25 bp, Homo sapien
cttccccagggtcttagcgtggcct

SEQ ID NO: 3300966 - DNA, 25 bp, Homo sapien
cctagggatgcagatcttggcggcc

SEQ ID NO: 3300967 - DNA, 25 bp, Homo sapien
ccggcgtctgttgctggcgtatccc

SEQ ID NO: 3300968 - DNA, 25 bp, Homo sapien
taggggggaattctccgcacgtcca

SEQ ID NO: 3300969 - DNA, 25 bp, Homo sapien
acaggtctgtgtcacgacacgcagc

SEQ ID NO: 3300970 - DNA, 25 bp, Homo sapien
gactttcagagctgcaagtgaagtt

SEQ ID NO: 3300971 - DNA, 25 bp, Homo sapien
gaaaaggcggatgtatcacagactt

SEQ ID NO: 3300972 - DNA, 25 bp, Homo sapien
gacttgtaggtaacagacaaagaca

SEQ ID NO: 3300973 - DNA, 25 bp, Homo sapien
tccctggtgtgatctacaagaagta

SEQ ID NO: 3300974 - DNA, 25 bp, Homo sapien
ggcttccctccagtctagaacgctg

SEQ ID NO: 3300975 - DNA, 25 bp, Homo sapien
cactacttccagcagtcgggataaa

SEQ ID NO: 3300976 - DNA, 25 bp, Homo sapien
aagaagtatgccgttgttctggcca

SEQ ID NO: 3300977 - DNA, 25 bp, Homo sapien
caatgagctaggtgacaatatatcc

SEQ ID NO: 3300978 - DNA, 25 bp, Homo sapien
taagtctagatagtccattcctgag

SEQ ID NO: 3300979 - DNA, 25 bp, Homo sapien
ttacaggcgtgtgactcacactatc

SEQ ID NO: 3300980 - DNA, 25 bp, Homo sapien
tcaagtgcataggaaaccaatgagc

SEQ ID NO: 3300981 - DNA, 25 bp, Homo sapien
catgcctggcacagctataggtaat

SEQ ID NO: 3300982 - DNA, 25 bp, Homo sapien
ggcacagctataggtaatttaaaca

SEQ ID NO: 3300983 - DNA, 25 bp, Homo sapien
ctggcacagctataggtaatttaaa

SEQ ID NO: 3300984 - DNA, 25 bp, Homo sapien
gcctggcacagctataggtaattta

SEQ ID NO: 3300985 - DNA, 25 bp, Homo sapien
gttaaagccagtgatcccattttta

SEQ ID NO: 3300986 - DNA, 25 bp, Homo sapien
gcagtttgtagatgtagttatttac

SEQ ID NO: 3300987 - DNA, 25 bp, Homo sapien
tattaatatctgctaaaacccatgt

SEQ ID NO: 3300988 - DNA, 25 bp, Homo sapien
tactcaggaatcctaagacacaaaa

SEQ ID NO: 3300989 - DNA, 25 bp, Homo sapien
tacacactttaatctgattgacact

SEQ ID NO: 3300990 - DNA, 25 bp, Homo sapien
cacactttaatctgattgacactga

SEQ ID NO: 3300991 - DNA, 25 bp, Homo sapien
ttacacactttaatctgattgacac

SEQ ID NO: 3300992 - DNA, 25 bp, Homo sapien
acacactttaatctgattgacactg

SEQ ID NO: 3300993 - DNA, 25 bp, Homo sapien
gaataggaaaatcatcactggcaac

SEQ ID NO: 3300994 - DNA, 25 bp, Homo sapien
tgctcttgactggttgctatgcaaa

SEQ ID NO: 3300995 - DNA, 25 bp, Homo sapien
cagttctaaggtgagtatatcagca

SEQ ID NO: 3300996 - DNA, 25 bp, Homo sapien
tacttcaggaaaccatactatgtgt

SEQ ID NO: 3300997 - DNA, 25 bp, Homo sapien
gggtgagaacaactttgagaactgg

SEQ ID NO: 3300998 - DNA, 25 bp, Homo sapien
cttattggcctgggtgagaacaact

SEQ ID NO: 3300999 - DNA, 25 bp, Homo sapien
agcttattggcctgggtgagaacaa

SEQ ID NO: 3301000 - DNA, 25 bp, Homo sapien
ggtgagaacaactttgagaactggc

SEQ ID NO: 3301001 - DNA, 25 bp, Homo sapien
tcgagtttcaatgctccttgcaatg

SEQ ID NO: 3301002 - DNA, 25 bp, Homo sapien
tctgagtagtttcgagtttcaatgc

SEQ ID NO: 3301003 - DNA, 25 bp, Homo sapien
gaagttgctggtgctaactatgtgg

SEQ ID NO: 3301004 - DNA, 25 bp, Homo sapien
ggtatgcatggtcaatccttctgag

SEQ ID NO: 3301005 - DNA, 25 bp, Homo sapien
gggataacttcccatgagatcctcc

SEQ ID NO: 3301006 - DNA, 25 bp, Homo sapien
catgagatcctccataaacattaaa

SEQ ID NO: 3301007 - DNA, 25 bp, Homo sapien
taacttcccatgagatcctccataa

SEQ ID NO: 3301008 - DNA, 25 bp, Homo sapien
gatcctccataaacattaaacccag

SEQ ID NO: 3301009 - DNA, 25 bp, Homo sapien
ggtcagctaccttatggccaacaca

SEQ ID NO: 3301010 - DNA, 25 bp, Homo sapien
taaatgggagtgctgataagacaac

SEQ ID NO: 3301011 - DNA, 25 bp, Homo sapien
tattttggatcagtccaaggaccac

SEQ ID NO: 3301012 - DNA, 25 bp, Homo sapien
tttatgattcaacacagccatgccc

SEQ ID NO: 3301013 - DNA, 25 bp, Homo sapien
tgtctgttccctaagtttatcatac

SEQ ID NO: 3301014 - DNA, 25 bp, Homo sapien
aacgtttgctggcatcatctagctt

SEQ ID NO: 3301015 - DNA, 25 bp, Homo sapien
tttatcatacagaaactccaaacgt

SEQ ID NO: 3301016 - DNA, 25 bp, Homo sapien
tttgctggcatcatctagcttcctc

SEQ ID NO: 3301017 - DNA, 25 bp, Homo sapien
gaaatggaggcaactacaactaaga

SEQ ID NO: 3301018 - DNA, 25 bp, Homo sapien
tgcactaaaccttatacttaaaatg

SEQ ID NO: 3301019 - DNA, 25 bp, Homo sapien
acttgaacagattatggccgggcgt

SEQ ID NO: 3301020 - DNA, 25 bp, Homo sapien
taacctaagaacttgccctatctca

SEQ ID NO: 3301021 - DNA, 25 bp, Homo sapien
acaggtgtattccaccacacacagc

SEQ ID NO: 3301022 - DNA, 25 bp, Homo sapien
caggtgtattccaccacacacagct

SEQ ID NO: 3301023 - DNA, 25 bp, Homo sapien
aggtgtattccaccacacacagcta

SEQ ID NO: 3301024 - DNA, 25 bp, Homo sapien
gctgaataagatcctcaaatgtggt

SEQ ID NO: 3301025 - DNA, 25 bp, Homo sapien
gctgaagaaaggcagcgctgaataa

SEQ ID NO: 3301026 - DNA, 25 bp, Homo sapien
tgaggtgctcatctggaataggttt

SEQ ID NO: 3301027 - DNA, 25 bp, Homo sapien
caaatgtggtctttagaatgaggtg

SEQ ID NO: 3301028 - DNA, 25 bp, Homo sapien
tagtacaaagtgtaggcgctcttcc

SEQ ID NO: 3301029 - DNA, 25 bp, Homo sapien
ggattttcatatgcaggactggata

SEQ ID NO: 3301030 - DNA, 25 bp, Homo sapien
cactcggctggttagaatggctgct

SEQ ID NO: 3301031 - DNA, 25 bp, Homo sapien
aaggcactggaaaacacactcggct

SEQ ID NO: 3301032 - DNA, 25 bp, Homo sapien
aatcatgcaatcataaaagttagca

SEQ ID NO: 3301033 - DNA, 25 bp, Homo sapien
taataatcatgcaatcataaaagtt

SEQ ID NO: 3301034 - DNA, 25 bp, Homo sapien
taatcatgcaatcataaaagttagc

SEQ ID NO: 3301035 - DNA, 25 bp, Homo sapien
ataatcatgcaatcataaaagttag

SEQ ID NO: 3301036 - DNA, 25 bp, Homo sapien
ggtggcatgcctgtttgaccaagag

SEQ ID NO: 3301037 - DNA, 25 bp, Homo sapien
gggcaccttcaatattgggctttga

SEQ ID NO: 3301038 - DNA, 25 bp, Homo sapien
aggtatttccaataggagcccctgg

SEQ ID NO: 3301039 - DNA, 25 bp, Homo sapien
caagaggttgctgtacgccatggaa

SEQ ID NO: 3301040 - DNA, 25 bp, Homo sapien
catgattggtgatgtgatgggaaca

SEQ ID NO: 3301041 - DNA, 25 bp, Homo sapien
tgggaacaggaggcatgaagttttc

SEQ ID NO: 3301042 - DNA, 25 bp, Homo sapien
gcagcatttgtgactgggggtcacc

SEQ ID NO: 3301043 - DNA, 25 bp, Homo sapien
tgaagactggcttgacagtggtact

SEQ ID NO: 3301044 - DNA, 25 bp, Homo sapien
acatctgtaggccattggatggaca

SEQ ID NO: 3301045 - DNA, 25 bp, Homo sapien
cataacatctgtaggccattggatg

SEQ ID NO: 3301046 - DNA, 25 bp, Homo sapien
aacataacatctgtaggccattgga

SEQ ID NO: 3301047 - DNA, 25 bp, Homo sapien
tgtaggccattggatggacatcttt

SEQ ID NO: 3301048 - DNA, 25 bp, Homo sapien
caaagctggagggtcattccaacca

SEQ ID NO: 3301049 - DNA, 25 bp, Homo sapien
gttcaaagctggagggtcattccaa

SEQ ID NO: 3301050 - DNA, 25 bp, Homo sapien
aaagctggagggtcattccaaccat

SEQ ID NO: 3301051 - DNA, 25 bp, Homo sapien
gctggagggtcattccaaccattct

SEQ ID NO: 3301052 - DNA, 25 bp, Homo sapien
acagagaatgttttcctttagaatc

SEQ ID NO: 3301053 - DNA, 25 bp, Homo sapien
ctataacagataacagagaatgttt

SEQ ID NO: 3301054 - DNA, 25 bp, Homo sapien
gataacagagaatgttttcctttag

SEQ ID NO: 3301055 - DNA, 25 bp, Homo sapien
taacagagaatgttttcctttagaa

SEQ ID NO: 3301056 - DNA, 25 bp, Homo sapien
gccttaaccctgaaataactgtcac

SEQ ID NO: 3301057 - DNA, 25 bp, Homo sapien
aaaataaaactgaatcgatcaccta

SEQ ID NO: 3301058 - DNA, 25 bp, Homo sapien
tgaatcgatcacctaatacttcaaa

SEQ ID NO: 3301059 - DNA, 25 bp, Homo sapien
tgccttaaccctgaaataactgtca

SEQ ID NO: 3301060 - DNA, 25 bp, Homo sapien
tagccctggattctcacactcacat

SEQ ID NO: 3301061 - DNA, 25 bp, Homo sapien
taataggaacaaggtcttcacttgg

SEQ ID NO: 3301062 - DNA, 25 bp, Homo sapien
gagtgtggggatcactatgtagccc

SEQ ID NO: 3301063 - DNA, 25 bp, Homo sapien
caaggtcttcacttggtaggtaaga

SEQ ID NO: 3301064 - DNA, 25 bp, Homo sapien
aaagtgaaaaatgaacaacagtagc

SEQ ID NO: 3301065 - DNA, 25 bp, Homo sapien
tgatattctctataaggaagcagat

SEQ ID NO: 3301066 - DNA, 25 bp, Homo sapien
gaaaaatgaacaacagtagcagaac

SEQ ID NO: 3301067 - DNA, 25 bp, Homo sapien
cagtagcagaacttattaagtattt

SEQ ID NO: 3301068 - DNA, 25 bp, Homo sapien
aaaaaatgatcctgatcagatttgg

SEQ ID NO: 3301069 - DNA, 25 bp, Homo sapien
ctcaagacagtcttggcatagttgt

SEQ ID NO: 3301070 - DNA, 25 bp, Homo sapien
tgtgtaatcacgtaaattcaatcag

SEQ ID NO: 3301071 - DNA, 25 bp, Homo sapien
cagcctttataaccaagctacttgt

SEQ ID NO: 3301072 - DNA, 25 bp, Homo sapien
tgcctggtcttggatagactggttt

SEQ ID NO: 3301073 - DNA, 25 bp, Homo sapien
ggtgcctggtcttggatagactggt

SEQ ID NO: 3301074 - DNA, 25 bp, Homo sapien
gcctggtcttggatagactggtttt

SEQ ID NO: 3301075 - DNA, 25 bp, Homo sapien
gtgcctggtcttggatagactggtt

SEQ ID NO: 3301076 - DNA, 25 bp, Homo sapien
gaagacattctaaactttactcatt

SEQ ID NO: 3301077 - DNA, 25 bp, Homo sapien
gtttgcatggattgtttttctacta

SEQ ID NO: 3301078 - DNA, 25 bp, Homo sapien
tgacagagggaatttatttaagttg

SEQ ID NO: 3301079 - DNA, 25 bp, Homo sapien
tttaatcaagtcatgtgaaatgtct

SEQ ID NO: 3301080 - DNA, 25 bp, Homo sapien
ttttcactgctggatttaggaggcc

SEQ ID NO: 3301081 - DNA, 25 bp, Homo sapien
ggcccagcaaataatgtaaccacct

SEQ ID NO: 3301082 - DNA, 25 bp, Homo sapien
gataaacgtgcctatcttagcacag

SEQ ID NO: 3301083 - DNA, 25 bp, Homo sapien
tacatgtcctacagacttcaacctg

SEQ ID NO: 3301084 - DNA, 25 bp, Homo sapien
tgtgcccgccccaagaaacattcat

SEQ ID NO: 3301085 - DNA, 25 bp, Homo sapien
catgggtggagttgcacagcatcct

SEQ ID NO: 3301086 - DNA, 25 bp, Homo sapien
gaactgctggtctcacatgcatggg

SEQ ID NO: 3301087 - DNA, 25 bp, Homo sapien
gagtcctatccaccttagcgtagag

SEQ ID NO: 3301088 - DNA, 25 bp, Homo sapien
ggatactatcttcagtcacccaagt

SEQ ID NO: 3301089 - DNA, 25 bp, Homo sapien
tcaacttggagactatcactgtgca

SEQ ID NO: 3301090 - DNA, 25 bp, Homo sapien
tataacaagtgccagaacatgtcca

SEQ ID NO: 3301091 - DNA, 25 bp, Homo sapien
aacatgggctttgaagatagggacc

SEQ ID NO: 3301092 - DNA, 25 bp, Homo sapien
cagtttacaaacagttagaaataat

SEQ ID NO: 3301093 - DNA, 25 bp, Homo sapien
aaccaaatccctttcaagcgcagac

SEQ ID NO: 3301094 - DNA, 25 bp, Homo sapien
ctgttctttgggacgcaggcagctc

SEQ ID NO: 3301095 - DNA, 25 bp, Homo sapien
tgctgtgctgcgtacagctgagact

SEQ ID NO: 3301096 - DNA, 25 bp, Homo sapien
gagcaacaggctgctgaggtcgata

SEQ ID NO: 3301097 - DNA, 25 bp, Homo sapien
ccctgttccgaagggatacggctgg

SEQ ID NO: 3301098 - DNA, 25 bp, Homo sapien
gctgagactgcccagtataggaaga

SEQ ID NO: 3301099 - DNA, 25 bp, Homo sapien
catgcgtggcttagggagatctaaa

SEQ ID NO: 3301100 - DNA, 25 bp, Homo sapien
cgtggcttagggagatctaaatata

SEQ ID NO: 3301101 - DNA, 25 bp, Homo sapien
caccatgcgtggcttagggagatct

SEQ ID NO: 3301102 - DNA, 25 bp, Homo sapien
aaatataaataccatcacattcaca

SEQ ID NO: 3301103 - DNA, 25 bp, Homo sapien
tagcagggactcaggaatcctatgc

SEQ ID NO: 3301104 - DNA, 25 bp, Homo sapien
caccactgtggcgtaggatgtcaat

SEQ ID NO: 3301105 - DNA, 25 bp, Homo sapien
gctgaggaacaggagtcaactactc

SEQ ID NO: 3301106 - DNA, 25 bp, Homo sapien
tcataaatactgctctgaaaggact

SEQ ID NO: 3301107 - DNA, 25 bp, Homo sapien
gtggctgtggataaggtggtacctg

SEQ ID NO: 3301108 - DNA, 25 bp, Homo sapien
tttggattaacatttccatgcatta

SEQ ID NO: 3301109 - DNA, 25 bp, Homo sapien
ccatgcattatgaaacccggaggtg

SEQ ID NO: 3301110 - DNA, 25 bp, Homo sapien
cctgggtgtgcatatgacctggaga

SEQ ID NO: 3301111 - DNA, 25 bp, Homo sapien
cactactccactctgtaaatataag

SEQ ID NO: 3301112 - DNA, 25 bp, Homo sapien
tataagtataaatgccataaaggga

SEQ ID NO: 3301113 - DNA, 25 bp, Homo sapien
cagacagatccaaagtaataattgc

SEQ ID NO: 3301114 - DNA, 25 bp, Homo sapien
taccacattttctgagcagcacatt

SEQ ID NO: 3301115 - DNA, 25 bp, Homo sapien
caggtagtgacagtaggggcaattc

SEQ ID NO: 3301116 - DNA, 25 bp, Homo sapien
gggcagtaggagttttgttactcca

SEQ ID NO: 3301117 - DNA, 25 bp, Homo sapien
tccaggtagtgacagtaggggcaat

SEQ ID NO: 3301118 - DNA, 25 bp, Homo sapien
gtagtgacagtaggggcaattctaa

SEQ ID NO: 3301119 - DNA, 25 bp, Homo sapien
aacaagacgcttgggagttctaatc

SEQ ID NO: 3301120 - DNA, 25 bp, Homo sapien
aacttggccggtaaccagccatgca

SEQ ID NO: 3301121 - DNA, 25 bp, Homo sapien
gccatgcaacgctgagaaattcaag

SEQ ID NO: 3301122 - DNA, 25 bp, Homo sapien
cctgacaggtagcttggtttaacaa

SEQ ID NO: 3301123 - DNA, 25 bp, Homo sapien
taactttgctatcaatcaagaccat

SEQ ID NO: 3301124 - DNA, 25 bp, Homo sapien
caagaccatttattacctatggaaa

SEQ ID NO: 3301125 - DNA, 25 bp, Homo sapien
tgtaaaaagactccatcaatcctat

SEQ ID NO: 3301126 - DNA, 25 bp, Homo sapien
ttaaaataggcagagtacctgttaa

SEQ ID NO: 3301127 - DNA, 25 bp, Homo sapien
gggagctgctgtttctcgtacggaa

SEQ ID NO: 3301128 - DNA, 25 bp, Homo sapien
tgtcacgaagctgcatgatatttgg

SEQ ID NO: 3301129 - DNA, 25 bp, Homo sapien
cggaattttaggtgattcatgtcct

SEQ ID NO: 3301130 - DNA, 25 bp, Homo sapien
ttcatgtcctgctacaggctctcct

SEQ ID NO: 3301131 - DNA, 25 bp, Homo sapien
tgcacagcttttcgcaggatgacaa

SEQ ID NO: 3301132 - DNA, 25 bp, Homo sapien
ctgccctgagctgccaacaaattgg

SEQ ID NO: 3301133 - DNA, 25 bp, Homo sapien
tgtccatggcttgagtgagttgcac

SEQ ID NO: 3301134 - DNA, 25 bp, Homo sapien
caagagaactcctacagtactagtg

SEQ ID NO: 3301135 - DNA, 25 bp, Homo sapien
ccaacatgcaactaatttctctaca

SEQ ID NO: 3301136 - DNA, 25 bp, Homo sapien
gagctttagtccaacatgcaactaa

SEQ ID NO: 3301137 - DNA, 25 bp, Homo sapien
ttccatcttgagctttagtccaaca

SEQ ID NO: 3301138 - DNA, 25 bp, Homo sapien
cattccctgcacaaatatagcagag

SEQ ID NO: 3301139 - DNA, 25 bp, Homo sapien
gccacgtatgtaaatgcagttaaat

SEQ ID NO: 3301140 - DNA, 25 bp, Homo sapien
tttatttacaatataccctgccacg

SEQ ID NO: 3301141 - DNA, 25 bp, Homo sapien
taccctgccacgtatgtaaatgcag

SEQ ID NO: 3301142 - DNA, 25 bp, Homo sapien
gtaaatgcagttaaatataaagcac

SEQ ID NO: 3301143 - DNA, 25 bp, Homo sapien
aaattcatccggctttgcataagtc

SEQ ID NO: 3301144 - DNA, 25 bp, Homo sapien
aatttttaagatcacaagactcaac

SEQ ID NO: 3301145 - DNA, 25 bp, Homo sapien
aatactgcagctaaagcctctctcc

SEQ ID NO: 3301146 - DNA, 25 bp, Homo sapien
acaaagggctgaaaattcatccggc

SEQ ID NO: 3301147 - DNA, 25 bp, Homo sapien
tgtgacctggtcagatggatcagga

SEQ ID NO: 3301148 - DNA, 25 bp, Homo sapien
tattgttcctcaagaaacaacagca

SEQ ID NO: 3301149 - DNA, 25 bp, Homo sapien
catatttcataaagtgctgagaagg

SEQ ID NO: 3301150 - DNA, 25 bp, Homo sapien
cctttaatagaaaggtgtgacctgg

SEQ ID NO: 3301151 - DNA, 25 bp, Homo sapien
gatgagatgaggctaatgggactca

SEQ ID NO: 3301152 - DNA, 25 bp, Homo sapien
gatgtagaaataacaccaagtaacc

SEQ ID NO: 3301153 - DNA, 25 bp, Homo sapien
tgggactcaatactggtacaacttt

SEQ ID NO: 3301154 - DNA, 25 bp, Homo sapien
tagaaataacaccaagtaaccacaa

SEQ ID NO: 3301155 - DNA, 25 bp, Homo sapien
tcggccatgcggttatcatgtaaac

SEQ ID NO: 3301156 - DNA, 25 bp, Homo sapien
tgctatggccaatataatggcatcg

SEQ ID NO: 3301157 - DNA, 25 bp, Homo sapien
ttttctgggttcgagccaagagttc

SEQ ID NO: 3301158 - DNA, 25 bp, Homo sapien
tcaacagcactctcaaaattgcccg

SEQ ID NO: 3301159 - DNA, 25 bp, Homo sapien
gacagagatattaaatgttcctcca

SEQ ID NO: 3301160 - DNA, 25 bp, Homo sapien
cagagatattaaatgttcctccaga

SEQ ID NO: 3301161 - DNA, 25 bp, Homo sapien
tgacagagatattaaatgttcctcc

SEQ ID NO: 3301162 - DNA, 25 bp, Homo sapien
acagagatattaaatgttcctccag

SEQ ID NO: 3301163 - DNA, 25 bp, Homo sapien
tacacatgattcttcatctacagag

SEQ ID NO: 3301164 - DNA, 25 bp, Homo sapien
tttacaactaagatctatgccttcc

SEQ ID NO: 3301165 - DNA, 25 bp, Homo sapien
gatgacataccaagttattccagaa

SEQ ID NO: 3301166 - DNA, 25 bp, Homo sapien
tgaagaatactggttaaacaggctg

SEQ ID NO: 3301167 - DNA, 25 bp, Homo sapien
tgcctggcctagttcaaagttttag

SEQ ID NO: 3301168 - DNA, 25 bp, Homo sapien
taattaaactctaggagatccactt

SEQ ID NO: 3301169 - DNA, 25 bp, Homo sapien
cataagcaaacatcatgcctggcct

SEQ ID NO: 3301170 - DNA, 25 bp, Homo sapien
ccatagtcaagatatcacaaagaac

SEQ ID NO: 3301171 - DNA, 25 bp, Homo sapien
tgctacttggtcagagtctttaaga

SEQ ID NO: 3301172 - DNA, 25 bp, Homo sapien
tgtgctacttggtcagagtctttaa

SEQ ID NO: 3301173 - DNA, 25 bp, Homo sapien
cactctgtgctacttggtcagagtc

SEQ ID NO: 3301174 - DNA, 25 bp, Homo sapien
tctgtgctacttggtcagagtcttt

SEQ ID NO: 3301175 - DNA, 25 bp, Homo sapien
gtatttgagtagtcattaattctgt

SEQ ID NO: 3301176 - DNA, 25 bp, Homo sapien
ttttatcttaagtatttgagtagtc

SEQ ID NO: 3301177 - DNA, 25 bp, Homo sapien
tcttaagtatttgagtagtcattaa

SEQ ID NO: 3301178 - DNA, 25 bp, Homo sapien
gagtagtcattaattctgtttttcc

SEQ ID NO: 3301179 - DNA, 25 bp, Homo sapien
ccactttgttcaaggccaaagcaat

SEQ ID NO: 3301180 - DNA, 25 bp, Homo sapien
tccactttgttcaaggccaaagcaa

SEQ ID NO: 3301181 - DNA, 25 bp, Homo sapien
cacattggctccatccactttgttc

SEQ ID NO: 3301182 - DNA, 25 bp, Homo sapien
tggctccatccactttgttcaaggc

SEQ ID NO: 3301183 - DNA, 25 bp, Homo sapien
ttaaaagtatgattcataaagagca

SEQ ID NO: 3301184 - DNA, 25 bp, Homo sapien
gtatgattcataaagagcatgccat

SEQ ID NO: 3301185 - DNA, 25 bp, Homo sapien
aaagtatgattcataaagagcatgc

SEQ ID NO: 3301186 - DNA, 25 bp, Homo sapien
gataatctgtgtagaactttatttt

SEQ ID NO: 3301187 - DNA, 25 bp, Homo sapien
tgtatcctagaagttcaaggtattt

SEQ ID NO: 3301188 - DNA, 25 bp, Homo sapien
ggtattttccacgagaatcatcctc

SEQ ID NO: 3301189 - DNA, 25 bp, Homo sapien
cacgagaatcatcctcaaagtttac

SEQ ID NO: 3301190 - DNA, 25 bp, Homo sapien
agttcaaggtattttccacgagaat

SEQ ID NO: 3301191 - DNA, 25 bp, Homo sapien
ctttataaggcttcttaatttcatg

SEQ ID NO: 3301192 - DNA, 25 bp, Homo sapien
cttaatttcatgatgaattgctgaa

SEQ ID NO: 3301193 - DNA, 25 bp, Homo sapien
aaactctggacataagttaggttgt

SEQ ID NO: 3301194 - DNA, 25 bp, Homo sapien
ttctttaataggaggacagatttag

SEQ ID NO: 3301195 - DNA, 25 bp, Homo sapien
ctgatgagaaggcattctgacattc

SEQ ID NO: 3301196 - DNA, 25 bp, Homo sapien
tctgacattctcaaacgtaaccagt

SEQ ID NO: 3301197 - DNA, 25 bp, Homo sapien
aagttggtctgatcggctgaggaac

SEQ ID NO: 3301198 - DNA, 25 bp, Homo sapien
tgttacaacctgactaatgaacaca

SEQ ID NO: 3301199 - DNA, 25 bp, Homo sapien
agaagcaccaacaggccttcgaatc

SEQ ID NO: 3301200 - DNA, 25 bp, Homo sapien
tctgctgtggaatttgtaacggagg

SEQ ID NO: 3301201 - DNA, 25 bp, Homo sapien
cactatactatgctgagcagtctgc

SEQ ID NO: 3301202 - DNA, 25 bp, Homo sapien
ccacttgggcggcttcttcagaggc

SEQ ID NO: 3301203 - DNA, 25 bp, Homo sapien
tgtgccaaagggatcaagattccca

SEQ ID NO: 3301204 - DNA, 25 bp, Homo sapien
ctgtgccaaagggatcaagattccc

SEQ ID NO: 3301205 - DNA, 25 bp, Homo sapien
gccaaagggatcaagattcccaaaa

SEQ ID NO: 3301206 - DNA, 25 bp, Homo sapien
gtgccaaagggatcaagattcccaa

SEQ ID NO: 3301207 - DNA, 25 bp, Homo sapien
tctgtcttaaaccatctgtgctacc

SEQ ID NO: 3301208 - DNA, 25 bp, Homo sapien
tagaataaacactgatacgcccatc

SEQ ID NO: 3301209 - DNA, 25 bp, Homo sapien
acgaagcagctgataagacagcagg

SEQ ID NO: 3301210 - DNA, 25 bp, Homo sapien
tgtgctacctcccatgatagaataa

SEQ ID NO: 3301211 - DNA, 25 bp, Homo sapien
gtgtgttggtgggaagttcatataa

SEQ ID NO: 3301212 - DNA, 25 bp, Homo sapien
ctgtgtgttggtgggaagttcatat

SEQ ID NO: 3301213 - DNA, 25 bp, Homo sapien
tgtgtgttggtgggaagttcatata

SEQ ID NO: 3301214 - DNA, 25 bp, Homo sapien
taaagcaggcaaaagatgcaaacct

SEQ ID NO: 3301215 - DNA, 25 bp, Homo sapien
gatcctcaggaacggtaaagcaggc

SEQ ID NO: 3301216 - DNA, 25 bp, Homo sapien
gatactgattcccataaaccacatg

SEQ ID NO: 3301217 - DNA, 25 bp, Homo sapien
tccagaagtgaaagaggatcctcag

SEQ ID NO: 3301218 - DNA, 25 bp, Homo sapien
tcaggatctgccatgctccaagcaa

SEQ ID NO: 3301219 - DNA, 25 bp, Homo sapien
cctgtgtttggattggagcagagaa

SEQ ID NO: 3301220 - DNA, 25 bp, Homo sapien
gcagagaatcttagcatcttttcca

SEQ ID NO: 3301221 - DNA, 25 bp, Homo sapien
gccatgctccaagcaattgccaaaa

SEQ ID NO: 3301222 - DNA, 25 bp, Homo sapien
tgggcatgaaatctaactgcagtaa

SEQ ID NO: 3301223 - DNA, 25 bp, Homo sapien
taccatagactaactgataactgac

SEQ ID NO: 3301224 - DNA, 25 bp, Homo sapien
gaaaacatcaccgacatgttcagaa

SEQ ID NO: 3301225 - DNA, 25 bp, Homo sapien
cctatggtgtatttctggtcacgaa

SEQ ID NO: 3301226 - DNA, 25 bp, Homo sapien
catggttttccaggacacgaagtgg

SEQ ID NO: 3301227 - DNA, 25 bp, Homo sapien
caaggaccatctgagtagcaacatc

SEQ ID NO: 3301228 - DNA, 25 bp, Homo sapien
catctggatcactggtaaccggtca

SEQ ID NO: 3301229 - DNA, 25 bp, Homo sapien
gcaaatcgaagatcccacatctgga

SEQ ID NO: 3301230 - DNA, 25 bp, Homo sapien
tggctgatgctaaaatatgctgaac

SEQ ID NO: 3301231 - DNA, 25 bp, Homo sapien
tctaagatcccatacagtggcccgg

SEQ ID NO: 3301232 - DNA, 25 bp, Homo sapien
tatgctgaacttgtctgttccatgc

SEQ ID NO: 3301233 - DNA, 25 bp, Homo sapien
tctgttactatggtcactgactttg

SEQ ID NO: 3301234 - DNA, 25 bp, Homo sapien
cattggggttgcaaaattatttaga

SEQ ID NO: 3301235 - DNA, 25 bp, Homo sapien
tagcaccagaagctaccagattagt

SEQ ID NO: 3301236 - DNA, 25 bp, Homo sapien
cagattcattagcaccagaagctac

SEQ ID NO: 3301237 - DNA, 25 bp, Homo sapien
tagatcccatatgtagatttcagat

SEQ ID NO: 3301238 - DNA, 25 bp, Homo sapien
tattccaggtggcaatatttctagg

SEQ ID NO: 3301239 - DNA, 25 bp, Homo sapien
tctggtacataccttaagggtcaaa

SEQ ID NO: 3301240 - DNA, 25 bp, Homo sapien
caaacctggctggataaattcttaa

SEQ ID NO: 3301241 - DNA, 25 bp, Homo sapien
agataatgggcttcatatactgacc

SEQ ID NO: 3301242 - DNA, 25 bp, Homo sapien
gtttatgaaggcaacagtacaaaga

SEQ ID NO: 3301243 - DNA, 25 bp, Homo sapien
cctgttcaggctaagatcgttatta

SEQ ID NO: 3301244 - DNA, 25 bp, Homo sapien
accatgttctgctaattgtttgcat

SEQ ID NO: 3301245 - DNA, 25 bp, Homo sapien
gatcgttattaagctgtgcatttat

SEQ ID NO: 3301246 - DNA, 25 bp, Homo sapien
agccacatgcccagccattacattt

SEQ ID NO: 3301247 - DNA, 25 bp, Homo sapien
taattatttcatagagtattaatct

SEQ ID NO: 3301248 - DNA, 25 bp, Homo sapien
ctaattatttcatagagtattaatc

SEQ ID NO: 3301249 - DNA, 25 bp, Homo sapien
atgcccagccattacatttaatttc

SEQ ID NO: 3301250 - DNA, 25 bp, Homo sapien
aaatgttcacatccaaggctctcac

SEQ ID NO: 3301251 - DNA, 25 bp, Homo sapien
ctggaaaatgttcacatccaaggct

SEQ ID NO: 3301252 - DNA, 25 bp, Homo sapien
ggaaaatgttcacatccaaggctct

SEQ ID NO: 3301253 - DNA, 25 bp, Homo sapien
gaaaatgttcacatccaaggctctc

SEQ ID NO: 3301254 - DNA, 25 bp, Homo sapien
tgggccagtatgcttgtcattctgg

SEQ ID NO: 3301255 - DNA, 25 bp, Homo sapien
cagtatgcttgtcattctgggcaat

SEQ ID NO: 3301256 - DNA, 25 bp, Homo sapien
gcttgtcattctgggcaatcacaac

SEQ ID NO: 3301257 - DNA, 25 bp, Homo sapien
ttttagaaggatcatagagaataat

SEQ ID NO: 3301258 - DNA, 25 bp, Homo sapien
tggaatccattttataaggccccca

SEQ ID NO: 3301259 - DNA, 25 bp, Homo sapien
tttcatatccaaggatggatcagag

SEQ ID NO: 3301260 - DNA, 25 bp, Homo sapien
tcaagggaagcattcgtactaaatg

SEQ ID NO: 3301261 - DNA, 25 bp, Homo sapien
tgcatccaattgctgagcagatgtt

SEQ ID NO: 3301262 - DNA, 25 bp, Homo sapien
gcattcgtactaaatgttgcatcca

SEQ ID NO: 3301263 - DNA, 25 bp, Homo sapien
tgcctgcatggctgtacgatctact

SEQ ID NO: 3301264 - DNA, 25 bp, Homo sapien
gcatggctgtacgatctacttcctt

SEQ ID NO: 3301265 - DNA, 25 bp, Homo sapien
gtacgatctacttcctttaacttca

SEQ ID NO: 3301266 - DNA, 25 bp, Homo sapien
tgttgctaggtaaatggggtgattc

SEQ ID NO: 3301267 - DNA, 25 bp, Homo sapien
ccaaagccaaagtaatcctgagatt

SEQ ID NO: 3301268 - DNA, 25 bp, Homo sapien
catgtaacacttaatgagactgccc

SEQ ID NO: 3301269 - DNA, 25 bp, Homo sapien
gacagtagacgtcagttcaaaccta

SEQ ID NO: 3301270 - DNA, 25 bp, Homo sapien
gagactgccctcaaagtacaggctg

SEQ ID NO: 3301271 - DNA, 25 bp, Homo sapien
agcctcgggtggcttttgctcagca

SEQ ID NO: 3301272 - DNA, 25 bp, Homo sapien
tgtgcacaagggtctgaaagtctcc

SEQ ID NO: 3301273 - DNA, 25 bp, Homo sapien
ctcagcagtggagacgtcggcgaat

SEQ ID NO: 3301274 - DNA, 25 bp, Homo sapien
agtccagatgccaggcgttgttccg

SEQ ID NO: 3301275 - DNA, 25 bp, Homo sapien
cgaagaggacaaaaagcaacgggcg

SEQ ID NO: 3301276 - DNA, 25 bp, Homo sapien
gacaaaaagcaacgggcggacgcac

SEQ ID NO: 3301277 - DNA, 25 bp, Homo sapien
gcgaagaggacaaaaagcaacgggc

SEQ ID NO: 3301278 - DNA, 25 bp, Homo sapien
ggacaaaaagcaacgggcggacgca

SEQ ID NO: 3301279 - DNA, 25 bp, Homo sapien
gttagtgcagcgctcgtcggactct

SEQ ID NO: 3301280 - DNA, 25 bp, Homo sapien
gatcctgcgttagtgcagcgctcgt

SEQ ID NO: 3301281 - DNA, 25 bp, Homo sapien
gaggaccttcggcagccggatcctg

SEQ ID NO: 3301282 - DNA, 25 bp, Homo sapien
ttcggcagccggatcctgcgttagt

SEQ ID NO: 3301283 - DNA, 25 bp, Homo sapien
ttccgttccaacgtggcagccgcag

SEQ ID NO: 3301284 - DNA, 25 bp, Homo sapien
tccacgttccgttccaacgtggcag

SEQ ID NO: 3301285 - DNA, 25 bp, Homo sapien
ctgcgcccaacacttccgggagcga

SEQ ID NO: 3301286 - DNA, 25 bp, Homo sapien
acacttccgggagcgacatctttcc

SEQ ID NO: 3301287 - DNA, 25 bp, Homo sapien
ctggttggtggcgctctgcggtcat

SEQ ID NO: 3301288 - DNA, 25 bp, Homo sapien
aggcggggtacggctccgctggttg

SEQ ID NO: 3301289 - DNA, 25 bp, Homo sapien
gaataaccgccgtggcccgcaggaa

SEQ ID NO: 3301290 - DNA, 25 bp, Homo sapien
cgcaggaacgccacgtagcactagt

SEQ ID NO: 3301291 - DNA, 25 bp, Homo sapien
ccgtctggccgaataaccgccgtgg

SEQ ID NO: 3301292 - DNA, 25 bp, Homo sapien
actagtcctgtgaggcgtcggcagc

SEQ ID NO: 3301293 - DNA, 25 bp, Homo sapien
cttaaaattacccacttgattgcac

SEQ ID NO: 3301294 - DNA, 25 bp, Homo sapien
caggtggaaaatcgggctgcaaggg

SEQ ID NO: 3301295 - DNA, 25 bp, Homo sapien
taaaattacccacttgattgcacat

SEQ ID NO: 3301296 - DNA, 25 bp, Homo sapien
atcgggctgcaagggctttattgta

SEQ ID NO: 3301297 - DNA, 25 bp, Homo sapien
gtggcaatgatcacagcgcgctgca

SEQ ID NO: 3301298 - DNA, 25 bp, Homo sapien
agcttcaacatccagggcgcaagtg

SEQ ID NO: 3301299 - DNA, 25 bp, Homo sapien
caaagagtgaagttgtagacaaaac

SEQ ID NO: 3301300 - DNA, 25 bp, Homo sapien
tgcatagcacaaagatattctaggt

SEQ ID NO: 3301301 - DNA, 25 bp, Homo sapien
taagcacgttaccattctttggccc

SEQ ID NO: 3301302 - DNA, 25 bp, Homo sapien
gaaaggcttcaagatcctgatccca

SEQ ID NO: 3301303 - DNA, 25 bp, Homo sapien
gaagaactctctggtctttctcggg

SEQ ID NO: 3301304 - DNA, 25 bp, Homo sapien
caaaaagtcagaaggtgccaaacca

SEQ ID NO: 3301305 - DNA, 25 bp, Homo sapien
ttctaagaaaagataaccaacagcc

SEQ ID NO: 3301306 - DNA, 25 bp, Homo sapien
gagtacagtatccacattaggctga

SEQ ID NO: 3301307 - DNA, 25 bp, Homo sapien
ccttggcatatctaacagtcatttg

SEQ ID NO: 3301308 - DNA, 25 bp, Homo sapien
agttataggctagtcatccttggca

SEQ ID NO: 3301309 - DNA, 25 bp, Homo sapien
tcttcaacttcttgatcaaataaat

SEQ ID NO: 3301310 - DNA, 25 bp, Homo sapien
tatataaatcttcaacttcttgatc

SEQ ID NO: 3301311 - DNA, 25 bp, Homo sapien
tgatgttctctaagaaaaacaccct

SEQ ID NO: 3301312 - DNA, 25 bp, Homo sapien
atgacaaatgatgttctctaagaaa

SEQ ID NO: 3301313 - DNA, 25 bp, Homo sapien
gataccaaccctagaaagcaagaag

SEQ ID NO: 3301314 - DNA, 25 bp, Homo sapien
caaaagggtaggtcctcaacaagca

SEQ ID NO: 3301315 - DNA, 25 bp, Homo sapien
aaagctcagcataatttgtggccca

SEQ ID NO: 3301316 - DNA, 25 bp, Homo sapien
gagcgtattagggtgtagctgcccc

SEQ ID NO: 3301317 - DNA, 25 bp, Homo sapien
catgtatcttttctcaacatctctg

SEQ ID NO: 3301318 - DNA, 25 bp, Homo sapien
cttccaagacccatgtatcttttct

SEQ ID NO: 3301319 - DNA, 25 bp, Homo sapien
caagacccatgtatcttttctcaac

SEQ ID NO: 3301320 - DNA, 25 bp, Homo sapien
ctcaacatctctgagagtacaattc

SEQ ID NO: 3301321 - DNA, 25 bp, Homo sapien
tatctagagcagtgaccccttgcgg

SEQ ID NO: 3301322 - DNA, 25 bp, Homo sapien
ggtgcagccactagggaaaataatc

SEQ ID NO: 3301323 - DNA, 25 bp, Homo sapien
ccactcttaggtgtgtaatcaggaa

SEQ ID NO: 3301324 - DNA, 25 bp, Homo sapien
gagacagccacttcacatgcacaaa

SEQ ID NO: 3301325 - DNA, 25 bp, Homo sapien
gcctcactcgggtcttaattggttg

SEQ ID NO: 3301326 - DNA, 25 bp, Homo sapien
taattggttgagcaggaaaaggctc

SEQ ID NO: 3301327 - DNA, 25 bp, Homo sapien
cttgaccatctatccttaggccatg

SEQ ID NO: 3301328 - DNA, 25 bp, Homo sapien
ttaggccatgtgacttttaaggaac

SEQ ID NO: 3301329 - DNA, 25 bp, Homo sapien
cttaatatgtatcttcggctgtaat

SEQ ID NO: 3301330 - DNA, 25 bp, Homo sapien
tttgactcctgctcctccggtatca

SEQ ID NO: 3301331 - DNA, 25 bp, Homo sapien
ttaaaagtcggcgtatcctatttga

SEQ ID NO: 3301332 - DNA, 25 bp, Homo sapien
ttccttcattgtggcaaagtgtttc

SEQ ID NO: 3301333 - DNA, 25 bp, Homo sapien
gtcggcgtatcctatttgactcctg

SEQ ID NO: 3301334 - DNA, 25 bp, Homo sapien
tttttggcccgactctgtcttcaac

SEQ ID NO: 3301335 - DNA, 25 bp, Homo sapien
tatttttggcccgactctgtcttca

SEQ ID NO: 3301336 - DNA, 25 bp, Homo sapien
atatatttttggcccgactctgtct

SEQ ID NO: 3301337 - DNA, 25 bp, Homo sapien
tatatttttggcccgactctgtctt

SEQ ID NO: 3301338 - DNA, 25 bp, Homo sapien
ctaaggcaccgtgttttatccctct

SEQ ID NO: 3301339 - DNA, 25 bp, Homo sapien
tatcctccagtttcagagaccgcac

SEQ ID NO: 3301340 - DNA, 25 bp, Homo sapien
ccgatatcctccagtttcagagacc

SEQ ID NO: 3301341 - DNA, 25 bp, Homo sapien
cctttcctcccgatatcctccagtt

SEQ ID NO: 3301342 - DNA, 25 bp, Homo sapien
gatatcctccagtttcagagaccgc

SEQ ID NO: 3301343 - DNA, 25 bp, Homo sapien
agaagatgacccgaagttgctccgc

SEQ ID NO: 3301344 - DNA, 25 bp, Homo sapien
tcaaatgcacgtcttcaggctcagg

SEQ ID NO: 3301345 - DNA, 25 bp, Homo sapien
ccaccagtgcgtatgggagcagcct

SEQ ID NO: 3301346 - DNA, 25 bp, Homo sapien
caaataaaggtcgtagccgcagagt

SEQ ID NO: 3301347 - DNA, 25 bp, Homo sapien
tggcactatcacagctcagcgcagc

SEQ ID NO: 3301348 - DNA, 25 bp, Homo sapien
gcactatcacagctcagcgcagcct

SEQ ID NO: 3301349 - DNA, 25 bp, Homo sapien
tcacagctcagcgcagcctctatct

SEQ ID NO: 3301350 - DNA, 25 bp, Homo sapien
acagctcagcgcagcctctatctcc

SEQ ID NO: 3301351 - DNA, 25 bp, Homo sapien
tggtttatataagagatttcaggta

SEQ ID NO: 3301352 - DNA, 25 bp, Homo sapien
caactcctagattaaatcttcctgg

SEQ ID NO: 3301353 - DNA, 25 bp, Homo sapien
tcctggtaattccagcgcacattta

SEQ ID NO: 3301354 - DNA, 25 bp, Homo sapien
cttcatttcccatagttctgcgtca

SEQ ID NO: 3301355 - DNA, 25 bp, Homo sapien
caaactcagcagaacataagttggt

SEQ ID NO: 3301356 - DNA, 25 bp, Homo sapien
tcatgacattgttctagtagctgta

SEQ ID NO: 3301357 - DNA, 25 bp, Homo sapien
tatgtaccacatatgcaacacagtt

SEQ ID NO: 3301358 - DNA, 25 bp, Homo sapien
gatattcagataccattgagatttc

SEQ ID NO: 3301359 - DNA, 25 bp, Homo sapien
aaagcagtaggtcagtaggagcaaa

SEQ ID NO: 3301360 - DNA, 25 bp, Homo sapien
aaattgcgcattctgcacagtggac

SEQ ID NO: 3301361 - DNA, 25 bp, Homo sapien
tatacttttggtatggcttgcagca

SEQ ID NO: 3301362 - DNA, 25 bp, Homo sapien
taggagcaaactagccaacaggtac

SEQ ID NO: 3301363 - DNA, 25 bp, Homo sapien
taaataagcatatagtggccgggcg

SEQ ID NO: 3301364 - DNA, 25 bp, Homo sapien
gaataagaatgccttgctcccagtc

SEQ ID NO: 3301365 - DNA, 25 bp, Homo sapien
taggcattcatatcatcaagtagtc

SEQ ID NO: 3301366 - DNA, 25 bp, Homo sapien
cctgccttattgcacagtgagctac

SEQ ID NO: 3301367 - DNA, 25 bp, Homo sapien
gctttcaactcataaaatcacatgg

SEQ ID NO: 3301368 - DNA, 25 bp, Homo sapien
tatagctttcaactcataaaatcac

SEQ ID NO: 3301369 - DNA, 25 bp, Homo sapien
aaaaccttatagctttcaactcata

SEQ ID NO: 3301370 - DNA, 25 bp, Homo sapien
aaaaaccttatagctttcaactcat

SEQ ID NO: 3301371 - DNA, 25 bp, Homo sapien
ttgggtagccacaccagaattccta

SEQ ID NO: 3301372 - DNA, 25 bp, Homo sapien
gtatacagataatgacaaaatgtgc

SEQ ID NO: 3301373 - DNA, 25 bp, Homo sapien
aatttacatgatgaaaataactcca

SEQ ID NO: 3301374 - DNA, 25 bp, Homo sapien
attcaagaagccctaacaagaaaag

SEQ ID NO: 3301375 - DNA, 25 bp, Homo sapien
gttatggccggaggtcctgctgtga

SEQ ID NO: 3301376 - DNA, 25 bp, Homo sapien
ttatggccggaggtcctgctgtgaa

SEQ ID NO: 3301377 - DNA, 25 bp, Homo sapien
catgatcaaagttatggccggaggt

SEQ ID NO: 3301378 - DNA, 25 bp, Homo sapien
gatcaaagttatggccggaggtcct

SEQ ID NO: 3301379 - DNA, 25 bp, Homo sapien
aaatcaagagtcctgtcacaacagg

SEQ ID NO: 3301380 - DNA, 25 bp, Homo sapien
caaagaatgggtgctaaccactgct

SEQ ID NO: 3301381 - DNA, 25 bp, Homo sapien
caaaatgcctgaattccaacatggt

SEQ ID NO: 3301382 - DNA, 25 bp, Homo sapien
tactttagtgaataacggaatcctc

SEQ ID NO: 3301383 - DNA, 25 bp, Homo sapien
tacagttccatttatcagtcttttg

SEQ ID NO: 3301384 - DNA, 25 bp, Homo sapien
ttagcaattcatggcacaagggtca

SEQ ID NO: 3301385 - DNA, 25 bp, Homo sapien
caaggaggcaattacatgtggcttc

SEQ ID NO: 3301386 - DNA, 25 bp, Homo sapien
aattcctcaagtatcatccgttccg

SEQ ID NO: 3301387 - DNA, 25 bp, Homo sapien
catcaaacatcgtccgaattcctca

SEQ ID NO: 3301388 - DNA, 25 bp, Homo sapien
ccaataggatgggaaaagtgctcca

SEQ ID NO: 3301389 - DNA, 25 bp, Homo sapien
tagacagaaattaagcacagtggac

SEQ ID NO: 3301390 - DNA, 25 bp, Homo sapien
aacataattacacgttcagcgagac

SEQ ID NO: 3301391 - DNA, 25 bp, Homo sapien
gagataacaatacggagctgcacta

SEQ ID NO: 3301392 - DNA, 25 bp, Homo sapien
tgttggcctagtaagcaagtctgaa

SEQ ID NO: 3301393 - DNA, 25 bp, Homo sapien
tttccgcctccactatttaaagctg

SEQ ID NO: 3301394 - DNA, 25 bp, Homo sapien
gagaggataacttcgtcttggctgc

SEQ ID NO: 3301395 - DNA, 25 bp, Homo sapien
caagtctgaaatttgagaggataac

SEQ ID NO: 3301396 - DNA, 25 bp, Homo sapien
tacatttgcatattgaggaacacat

SEQ ID NO: 3301397 - DNA, 25 bp, Homo sapien
tagtttttaagacatcctgatcgtt

SEQ ID NO: 3301398 - DNA, 25 bp, Homo sapien
tatgacgtcgatcagattctccctc

SEQ ID NO: 3301399 - DNA, 25 bp, Homo sapien
aattacaccctttgctatgacgtcg

SEQ ID NO: 3301400 - DNA, 25 bp, Homo sapien
tatcttaggcttaaaggcttctgga

SEQ ID NO: 3301401 - DNA, 25 bp, Homo sapien
caaattgttgtaacaattagtacaa

SEQ ID NO: 3301402 - DNA, 25 bp, Homo sapien
ccaaattgttgtaacaattagtaca

SEQ ID NO: 3301403 - DNA, 25 bp, Homo sapien
aaattgttgtaacaattagtacaat

SEQ ID NO: 3301404 - DNA, 25 bp, Homo sapien
attacagggctttcggggccgactg

SEQ ID NO: 3301405 - DNA, 25 bp, Homo sapien
tgtacaattacagggctttcggggc

SEQ ID NO: 3301406 - DNA, 25 bp, Homo sapien
ccgactggccgactctgatgggatt

SEQ ID NO: 3301407 - DNA, 25 bp, Homo sapien
gctttcggggccgactggccgactc

SEQ ID NO: 3301408 - DNA, 25 bp, Homo sapien
gtgcctgggtctggataccagatgt

SEQ ID NO: 3301409 - DNA, 25 bp, Homo sapien
attgaatggaagccgtgcctgggtc

SEQ ID NO: 3301410 - DNA, 25 bp, Homo sapien
tggataccagatgttccagtaaagg

SEQ ID NO: 3301411 - DNA, 25 bp, Homo sapien
ggtagagttgcttgctattgataca

SEQ ID NO: 3301412 - DNA, 25 bp, Homo sapien
caggttagtgaggttgggctggatc

SEQ ID NO: 3301413 - DNA, 25 bp, Homo sapien
tgtggcaggcatgataagccgttgc

SEQ ID NO: 3301414 - DNA, 25 bp, Homo sapien
gaagcactgcataacccacattccc

SEQ ID NO: 3301415 - DNA, 25 bp, Homo sapien
cccacattccctgttcccggagctg

SEQ ID NO: 3301416 - DNA, 25 bp, Homo sapien
tagtagttactatttgtgaagttgg

SEQ ID NO: 3301417 - DNA, 25 bp, Homo sapien
ctagtagttactatttgtgaagttg

SEQ ID NO: 3301418 - DNA, 25 bp, Homo sapien
tccgcactggggttgtattaacaac

SEQ ID NO: 3301419 - DNA, 25 bp, Homo sapien
gagctgagacaattggaactgacat

SEQ ID NO: 3301420 - DNA, 25 bp, Homo sapien
cagcctgagctgagacaattggaac

SEQ ID NO: 3301421 - DNA, 25 bp, Homo sapien
ttggaactgacatccgcactggggt

SEQ ID NO: 3301422 - DNA, 25 bp, Homo sapien
gattggacttatagcacttctctca

SEQ ID NO: 3301423 - DNA, 25 bp, Homo sapien
tactaaaggcatactcttgctaatg

SEQ ID NO: 3301424 - DNA, 25 bp, Homo sapien
tctctcagtaccctgctaagtttaa

SEQ ID NO: 3301425 - DNA, 25 bp, Homo sapien
cacactacctaagtagattggactt

SEQ ID NO: 3301426 - DNA, 25 bp, Homo sapien
gctaattcacgaccttcagactacc

SEQ ID NO: 3301427 - DNA, 25 bp, Homo sapien
caagctaattcacgaccttcagact

SEQ ID NO: 3301428 - DNA, 25 bp, Homo sapien
agctaattcacgaccttcagactac

SEQ ID NO: 3301429 - DNA, 25 bp, Homo sapien
atcaagctaattcacgaccttcaga

SEQ ID NO: 3301430 - DNA, 25 bp, Homo sapien
gactaactggctgggttgagctact

SEQ ID NO: 3301431 - DNA, 25 bp, Homo sapien
gacataatgaaacttgcttccaggc

SEQ ID NO: 3301432 - DNA, 25 bp, Homo sapien
tgatgtggcagtaacaagtcggaca

SEQ ID NO: 3301433 - DNA, 25 bp, Homo sapien
cacttgaatctgctggacattggga

SEQ ID NO: 3301434 - DNA, 25 bp, Homo sapien
gcctaggaacagagtgctaaagatc

SEQ ID NO: 3301435 - DNA, 25 bp, Homo sapien
tgaagttggaccctcacctacctaa

SEQ ID NO: 3301436 - DNA, 25 bp, Homo sapien
tgtggattagctacatgatctgaag

SEQ ID NO: 3301437 - DNA, 25 bp, Homo sapien
caaagcttcacaacactgggtctgg

SEQ ID NO: 3301438 - DNA, 25 bp, Homo sapien
gtccttcactcttgtggctgacatc

SEQ ID NO: 3301439 - DNA, 25 bp, Homo sapien
gctccagtccttcactcttgtggct

SEQ ID NO: 3301440 - DNA, 25 bp, Homo sapien
acgatggtatccctatcatctacct

SEQ ID NO: 3301441 - DNA, 25 bp, Homo sapien
taaacgatggtatccctatcatcta

SEQ ID NO: 3301442 - DNA, 25 bp, Homo sapien
cgatggtatccctatcatctacctc

SEQ ID NO: 3301443 - DNA, 25 bp, Homo sapien
aaacgatggtatccctatcatctac

SEQ ID NO: 3301444 - DNA, 25 bp, Homo sapien
tcgtatgtcatcaggtataaaccat

SEQ ID NO: 3301445 - DNA, 25 bp, Homo sapien
ggtctcagactaaaacaagcttgtt

SEQ ID NO: 3301446 - DNA, 25 bp, Homo sapien
tatggcagggctaaagtcaaggatg

SEQ ID NO: 3301447 - DNA, 25 bp, Homo sapien
taaagccagttcctattcgtatgtc

SEQ ID NO: 3301448 - DNA, 25 bp, Homo sapien
ttccgggagtagactgtgaaagaac

SEQ ID NO: 3301449 - DNA, 25 bp, Homo sapien
gttgatccaataacaccactttcag

SEQ ID NO: 3301450 - DNA, 25 bp, Homo sapien
tatggtctttgatggagttccggga

SEQ ID NO: 3301451 - DNA, 25 bp, Homo sapien
cgatttcaaaggtgagatggctatt

SEQ ID NO: 3301452 - DNA, 25 bp, Homo sapien
tgcaaagatcagcttcgtgattact

SEQ ID NO: 3301453 - DNA, 25 bp, Homo sapien
ggttggcgttcgaggcttcttagca

SEQ ID NO: 3301454 - DNA, 25 bp, Homo sapien
tactggaccagaggttggcgttcga

SEQ ID NO: 3301455 - DNA, 25 bp, Homo sapien
gaaacttgagttgtctgtcctgtaa

SEQ ID NO: 3301456 - DNA, 25 bp, Homo sapien
aatactctgactaaacttaacactg

SEQ ID NO: 3301457 - DNA, 25 bp, Homo sapien
cagtctcaatactctgactaaactt

SEQ ID NO: 3301458 - DNA, 25 bp, Homo sapien
ctcaatactctgactaaacttaaca

SEQ ID NO: 3301459 - DNA, 25 bp, Homo sapien
gtctcaatactctgactaaacttaa

SEQ ID NO: 3301460 - DNA, 25 bp, Homo sapien
tatcagctgagtgtagtctcccaaa

SEQ ID NO: 3301461 - DNA, 25 bp, Homo sapien
caaataaaaggcacacgctggctga

SEQ ID NO: 3301462 - DNA, 25 bp, Homo sapien
taagatagaggcaactcaagcccag

SEQ ID NO: 3301463 - DNA, 25 bp, Homo sapien
cacgcactattactggctctgaggg

SEQ ID NO: 3301464 - DNA, 25 bp, Homo sapien
aaatgggcgtggctgtagagtcacc

SEQ ID NO: 3301465 - DNA, 25 bp, Homo sapien
ttgaaggccacttggaaaagctggt

SEQ ID NO: 3301466 - DNA, 25 bp, Homo sapien
tctgagcaccaagtttttgaaggcc

SEQ ID NO: 3301467 - DNA, 25 bp, Homo sapien
caattggtgaaccagacttgcccaa

SEQ ID NO: 3301468 - DNA, 25 bp, Homo sapien
ttctcccgctagaaagttgatcagg

SEQ ID NO: 3301469 - DNA, 25 bp, Homo sapien
cgttctcccgctagaaagttgatca

SEQ ID NO: 3301470 - DNA, 25 bp, Homo sapien
ctcccgctagaaagttgatcaggca

SEQ ID NO: 3301471 - DNA, 25 bp, Homo sapien
atcgttctcccgctagaaagttgat

SEQ ID NO: 3301472 - DNA, 25 bp, Homo sapien
cttgttttgcccgtgcacgatagct

SEQ ID NO: 3301473 - DNA, 25 bp, Homo sapien
gtttgtccaaactggagcgctccag

SEQ ID NO: 3301474 - DNA, 25 bp, Homo sapien
tccagaaggtcctgggcaatcccga

SEQ ID NO: 3301475 - DNA, 25 bp, Homo sapien
cgtgcacgatagctctggccagcag

SEQ ID NO: 3301476 - DNA, 25 bp, Homo sapien
gattgtatttcgaaagatccgccat

SEQ ID NO: 3301477 - DNA, 25 bp, Homo sapien
tatttcgaaagatccgccattttca

SEQ ID NO: 3301478 - DNA, 25 bp, Homo sapien
tcaggggccgggattgtatttcgaa

SEQ ID NO: 3301479 - DNA, 25 bp, Homo sapien
ggccgggattgtatttcgaaagatc

SEQ ID NO: 3301480 - DNA, 25 bp, Homo sapien
ctcgtcatcaccatcacagctcagc

SEQ ID NO: 3301481 - DNA, 25 bp, Homo sapien
agctcagcagcttccccgacagccg

SEQ ID NO: 3301482 - DNA, 25 bp, Homo sapien
agcttccccgacagccggagcccgg

SEQ ID NO: 3301483 - DNA, 25 bp, Homo sapien
agcagcttccccgacagccggagcc

SEQ ID NO: 3301484 - DNA, 25 bp, Homo sapien
cgcacaagggccgtgcaagtgcaca

SEQ ID NO: 3301485 - DNA, 25 bp, Homo sapien
gcacacgggctacgccgagaccttt

SEQ ID NO: 3301486 - DNA, 25 bp, Homo sapien
agggacgccaaaggaagtcgcgcca

SEQ ID NO: 3301487 - DNA, 25 bp, Homo sapien
ccgcagggacgccaaaggaagtcgc

SEQ ID NO: 3301488 - DNA, 25 bp, Homo sapien
gggtgacagccaccctctcgggagc

SEQ ID NO: 3301489 - DNA, 25 bp, Homo sapien
tgtgcgtgtcaacagccgcaggagc

SEQ ID NO: 3301490 - DNA, 25 bp, Homo sapien
gagaccgagccccaaggatccttcg

SEQ ID NO: 3301491 - DNA, 25 bp, Homo sapien
tctcgggagccgacgggaagagacc

SEQ ID NO: 3301492 - DNA, 25 bp, Homo sapien
tcccggagggagcggtccagcgctc

SEQ ID NO: 3301493 - DNA, 25 bp, Homo sapien
tccgcccgcgcaggcactcgcagcg

SEQ ID NO: 3301494 - DNA, 25 bp, Homo sapien
gtccagcgctctccgcccgcgcagg

SEQ ID NO: 3301495 - DNA, 25 bp, Homo sapien
gccgcctcctggtcgcgcggcgctc

SEQ ID NO: 3301496 - DNA, 25 bp, Homo sapien
ttatcagggcagtgagtatccatac

SEQ ID NO: 3301497 - DNA, 25 bp, Homo sapien
tccattatcagggcagtgagtatcc

SEQ ID NO: 3301498 - DNA, 25 bp, Homo sapien
cattatcagggcagtgagtatccat

SEQ ID NO: 3301499 - DNA, 25 bp, Homo sapien
caaggaacttattccattatcaggg

SEQ ID NO: 3301500 - DNA, 25 bp, Homo sapien
catcccaatgtgataggtttctgca

SEQ ID NO: 3301501 - DNA, 25 bp, Homo sapien
tacgggccagtaactgctgtgtttc

SEQ ID NO: 3301502 - DNA, 25 bp, Homo sapien
tgagttttaactgtgattggcctgt

SEQ ID NO: 3301503 - DNA, 25 bp, Homo sapien
tacatctctggaacatgaaacacca

SEQ ID NO: 3301504 - DNA, 25 bp, Homo sapien
tccaaagtccaagcgtgagagccag

SEQ ID NO: 3301505 - DNA, 25 bp, Homo sapien
ccaatccaaagtccaagcgtgagag

SEQ ID NO: 3301506 - DNA, 25 bp, Homo sapien
aaagtccaagcgtgagagccagagc

SEQ ID NO: 3301507 - DNA, 25 bp, Homo sapien
gagttcatcagccaatccaaagtcc

SEQ ID NO: 3301508 - DNA, 25 bp, Homo sapien
tggcccacacagacgctactctgta

SEQ ID NO: 3301509 - DNA, 25 bp, Homo sapien
cacagacgctactctgtagcatctc

SEQ ID NO: 3301510 - DNA, 25 bp, Homo sapien
agaggcccccgcatccaccgctgag

SEQ ID NO: 3301511 - DNA, 25 bp, Homo sapien
ccacacagacgctactctgtagcat

SEQ ID NO: 3301512 - DNA, 25 bp, Homo sapien
caactctgatggcacataggcggaa

SEQ ID NO: 3301513 - DNA, 25 bp, Homo sapien
cttgtgtttcgggtattttctctgc

SEQ ID NO: 3301514 - DNA, 25 bp, Homo sapien
tttgattcagagaaatgtatattct

SEQ ID NO: 3301515 - DNA, 25 bp, Homo sapien
tatggccgctgtcatgtcgtccaga

SEQ ID NO: 3301516 - DNA, 25 bp, Homo sapien
agaagagtcgggcatcagacaggct

SEQ ID NO: 3301517 - DNA, 25 bp, Homo sapien
actgcagatggttttcgtcaccctg

SEQ ID NO: 3301518 - DNA, 25 bp, Homo sapien
tctctaaattcgaggtcacaggtcc

SEQ ID NO: 3301519 - DNA, 25 bp, Homo sapien
tcacaggtcctcagcactacatagg

SEQ ID NO: 3301520 - DNA, 25 bp, Homo sapien
gggaacacaccctaactgactctag

SEQ ID NO: 3301521 - DNA, 25 bp, Homo sapien
caagaaagggaaaactacagtctct

SEQ ID NO: 3301522 - DNA, 25 bp, Homo sapien
caaattcagcttcgtgataatgcac

SEQ ID NO: 3301523 - DNA, 25 bp, Homo sapien
gtgttccataactcacacaaggaga

SEQ ID NO: 3301524 - DNA, 25 bp, Homo sapien
tctgatatctcatattcaaaaggga

SEQ ID NO: 3301525 - DNA, 25 bp, Homo sapien
gagttttcttactctgatatctcat

SEQ ID NO: 3301526 - DNA, 25 bp, Homo sapien
gctgacggatcaaatgggacaagaa

SEQ ID NO: 3301527 - DNA, 25 bp, Homo sapien
ttttcatcagggcaaaatgatgctg

SEQ ID NO: 3301528 - DNA, 25 bp, Homo sapien
aaattatgagactgacccttggaac

SEQ ID NO: 3301529 - DNA, 25 bp, Homo sapien
aaagagagctgggttactgtgaacc

SEQ ID NO: 3301530 - DNA, 25 bp, Homo sapien
aggcttgctagaggcccggagttca

SEQ ID NO: 3301531 - DNA, 25 bp, Homo sapien
ctcctgctaagaaaccaaagtatgg

SEQ ID NO: 3301532 - DNA, 25 bp, Homo sapien
gaatcatttttgattgacggaaaag

SEQ ID NO: 3301533 - DNA, 25 bp, Homo sapien
catttttgattgacggaaaagttgc

SEQ ID NO: 3301534 - DNA, 25 bp, Homo sapien
cagaatcatttttgattgacggaaa

SEQ ID NO: 3301535 - DNA, 25 bp, Homo sapien
tcatttttgattgacggaaaagttg

SEQ ID NO: 3301536 - DNA, 25 bp, Homo sapien
caatgggaaaaccagaaggacatcc

SEQ ID NO: 3301537 - DNA, 25 bp, Homo sapien
gacctgcggactaccgtgacacttt

SEQ ID NO: 3301538 - DNA, 25 bp, Homo sapien
tttctggtgggttcagccaatggga

SEQ ID NO: 3301539 - DNA, 25 bp, Homo sapien
gagtcagtgatcctctgtttgcccc

SEQ ID NO: 3301540 - DNA, 25 bp, Homo sapien
gtctataggcattaattgaattctg

SEQ ID NO: 3301541 - DNA, 25 bp, Homo sapien
tcacctatacatcttacaagatgtg

SEQ ID NO: 3301542 - DNA, 25 bp, Homo sapien
acatcttacaagatgtgatcttttc

SEQ ID NO: 3301543 - DNA, 25 bp, Homo sapien
tttcctcctctgaacataaaatacc

SEQ ID NO: 3301544 - DNA, 25 bp, Homo sapien
taacctcaccttgctatgatagatg

SEQ ID NO: 3301545 - DNA, 25 bp, Homo sapien
gatagatgctttatgccacaatcaa

SEQ ID NO: 3301546 - DNA, 25 bp, Homo sapien
aacttgtttgtcttagcagggaaca

SEQ ID NO: 3301547 - DNA, 25 bp, Homo sapien
catactctggtattttacaagtggt

SEQ ID NO: 3301548 - DNA, 25 bp, Homo sapien
acagcaaagagttgccatatagtca

SEQ ID NO: 3301549 - DNA, 25 bp, Homo sapien
gacagcaaagagttgccatatagtc

SEQ ID NO: 3301550 - DNA, 25 bp, Homo sapien
ggacagcaaagagttgccatatagt

SEQ ID NO: 3301551 - DNA, 25 bp, Homo sapien
cagcaaagagttgccatatagtcat

SEQ ID NO: 3301552 - DNA, 25 bp, Homo sapien
ctgtagagagtcctcattgcgacgc

SEQ ID NO: 3301553 - DNA, 25 bp, Homo sapien
tgacacccaaggcacgggaaacaaa

SEQ ID NO: 3301554 - DNA, 25 bp, Homo sapien
ctgcaacttgacacccaaggcacgg

SEQ ID NO: 3301555 - DNA, 25 bp, Homo sapien
tagagagtcctcattgcgacgcttg

SEQ ID NO: 3301556 - DNA, 25 bp, Homo sapien
ttgctttcacaaatggcagtccgag

SEQ ID NO: 3301557 - DNA, 25 bp, Homo sapien
caggggtacatattactccactctg

SEQ ID NO: 3301558 - DNA, 25 bp, Homo sapien
tttcacaaatggcagtccgagtcat

SEQ ID NO: 3301559 - DNA, 25 bp, Homo sapien
ctagacacatgaaaccaggggtaca

SEQ ID NO: 3301560 - DNA, 25 bp, Homo sapien
tgcctgtctgccagttggagttctg

SEQ ID NO: 3301561 - DNA, 25 bp, Homo sapien
cagtcgctgaaacagtcacacatgc

SEQ ID NO: 3301562 - DNA, 25 bp, Homo sapien
tccaggttgggtcacaacgaccacc

SEQ ID NO: 3301563 - DNA, 25 bp, Homo sapien
agactccgcagtcgctgaaacagtc

SEQ ID NO: 3301564 - DNA, 25 bp, Homo sapien
cagggacaggtctgaagcacgggct

SEQ ID NO: 3301565 - DNA, 25 bp, Homo sapien
ggacaggtctgaagcacgggcttca

SEQ ID NO: 3301566 - DNA, 25 bp, Homo sapien
tgaagcacgggcttcaggaggcggg

SEQ ID NO: 3301567 - DNA, 25 bp, Homo sapien
caggtctgaagcacgggcttcagga

SEQ ID NO: 3301568 - DNA, 25 bp, Homo sapien
atcccaaggagaccgcccatttttg

SEQ ID NO: 3301569 - DNA, 25 bp, Homo sapien
tgccggtaaattcttaagagcagcc

SEQ ID NO: 3301570 - DNA, 25 bp, Homo sapien
caatcagggaactgcgtctgcggat

SEQ ID NO: 3301571 - DNA, 25 bp, Homo sapien
aagagcagcccgcgcagaatctatc

SEQ ID NO: 3301572 - DNA, 25 bp, Homo sapien
gggtgatggcttcccacatttgaaa

SEQ ID NO: 3301573 - DNA, 25 bp, Homo sapien
aatcccaactccagtactaacatgg

SEQ ID NO: 3301574 - DNA, 25 bp, Homo sapien
aacatggtcgaaaccatatttttgg

SEQ ID NO: 3301575 - DNA, 25 bp, Homo sapien
ctgactctgcagacctccacaggtg

SEQ ID NO: 3301576 - DNA, 25 bp, Homo sapien
tgtcaagtggctatccctaggtgat

SEQ ID NO: 3301577 - DNA, 25 bp, Homo sapien
tatgaaaggctaattatccgtaatg

SEQ ID NO: 3301578 - DNA, 25 bp, Homo sapien
caggaaatgctagagaatatgtatt

SEQ ID NO: 3301579 - DNA, 25 bp, Homo sapien
tttgtgataaggtctctttgttgtc

SEQ ID NO: 3301580 - DNA, 25 bp, Homo sapien
tgcccttatgccataggcttttgtc

SEQ ID NO: 3301581 - DNA, 25 bp, Homo sapien
agggctgctgcccttatgccatagg

SEQ ID NO: 3301582 - DNA, 25 bp, Homo sapien
tgctgcccttatgccataggctttt

SEQ ID NO: 3301583 - DNA, 25 bp, Homo sapien
gctgctgcccttatgccataggctt

SEQ ID NO: 3301584 - DNA, 25 bp, Homo sapien
tgagcacgtagctgcttcggtgaga

SEQ ID NO: 3301585 - DNA, 25 bp, Homo sapien
gatgaagcccatgctagaccctctc

SEQ ID NO: 3301586 - DNA, 25 bp, Homo sapien
acggtacaccttcctccatgcgatg

SEQ ID NO: 3301587 - DNA, 25 bp, Homo sapien
tgcttcggtgagaattcgaaaaacg

SEQ ID NO: 3301588 - DNA, 25 bp, Homo sapien
ttagtaaacaaggttccgagcagga

SEQ ID NO: 3301589 - DNA, 25 bp, Homo sapien
ggaaatgtcttgtggcctgggagag

SEQ ID NO: 3301590 - DNA, 25 bp, Homo sapien
actgtgtttctatcgcagggcatag

SEQ ID NO: 3301591 - DNA, 25 bp, Homo sapien
gcctgggagagaatctcaccacaaa

SEQ ID NO: 3301592 - DNA, 25 bp, Homo sapien
tgtcagctcagctccaaactatggc

SEQ ID NO: 3301593 - DNA, 25 bp, Homo sapien
gattttagctcatgtcagctcagct

SEQ ID NO: 3301594 - DNA, 25 bp, Homo sapien
tcagctcagctccaaactatggctc

SEQ ID NO: 3301595 - DNA, 25 bp, Homo sapien
ctaggattttagctcatgtcagctc

SEQ ID NO: 3301596 - DNA, 25 bp, Homo sapien
tattattcggtctattgccacacca

SEQ ID NO: 3301597 - DNA, 25 bp, Homo sapien
gttgagagaactgtatggacccatc

SEQ ID NO: 3301598 - DNA, 25 bp, Homo sapien
tcttggctctcgcatattgttacaa

SEQ ID NO: 3301599 - DNA, 25 bp, Homo sapien
aaaaggtggacaacaggatggctgc

SEQ ID NO: 3301600 - DNA, 25 bp, Homo sapien
gcattttgatccgttgcagttatat

SEQ ID NO: 3301601 - DNA, 25 bp, Homo sapien
ggtgcattttgatccgttgcagtta

SEQ ID NO: 3301602 - DNA, 25 bp, Homo sapien
tatttggtgcattttgatccgttgc

SEQ ID NO: 3301603 - DNA, 25 bp, Homo sapien
ttgatccgttgcagttatattgttt

SEQ ID NO: 3301604 - DNA, 25 bp, Homo sapien
tctgattgcttcgtttttcctcaaa

SEQ ID NO: 3301605 - DNA, 25 bp, Homo sapien
gctaaacagtggacaattacttccc

SEQ ID NO: 3301606 - DNA, 25 bp, Homo sapien
cacaggtgtcagagaacaggacata

SEQ ID NO: 3301607 - DNA, 25 bp, Homo sapien
cagagttgtaatatctagtctttaa

SEQ ID NO: 3301608 - DNA, 25 bp, Homo sapien
ttctcccctgcagtggccgtgtgct

SEQ ID NO: 3301609 - DNA, 25 bp, Homo sapien
cgtgtgctgggccaaagagatgctc

SEQ ID NO: 3301610 - DNA, 25 bp, Homo sapien
tcttctcccctgcagtggccgtgtg

SEQ ID NO: 3301611 - DNA, 25 bp, Homo sapien
tgcagtggccgtgtgctgggccaaa

SEQ ID NO: 3301612 - DNA, 25 bp, Homo sapien
ccaagcacgtggtcagagcaagttt

SEQ ID NO: 3301613 - DNA, 25 bp, Homo sapien
agctggagaagtccaagcacgtggt

SEQ ID NO: 3301614 - DNA, 25 bp, Homo sapien
acatcttatttagggctaggagctg

SEQ ID NO: 3301615 - DNA, 25 bp, Homo sapien
cttcggaggtgtaagaaaaacatct

SEQ ID NO: 3301616 - DNA, 25 bp, Homo sapien
ttgtttccctcagaaaccacctctg

SEQ ID NO: 3301617 - DNA, 25 bp, Homo sapien
ctggggctgcttcagcaagtgacca

SEQ ID NO: 3301618 - DNA, 25 bp, Homo sapien
gggctgcttcagcaagtgaccacat

SEQ ID NO: 3301619 - DNA, 25 bp, Homo sapien
tgtttccctcagaaaccacctctgg

SEQ ID NO: 3301620 - DNA, 25 bp, Homo sapien
aaagggcagcatcctaggcaaacac

SEQ ID NO: 3301621 - DNA, 25 bp, Homo sapien
aaaactgttcagtgagtgctctagc

SEQ ID NO: 3301622 - DNA, 25 bp, Homo sapien
gatagcctcagccataaaactggtg

SEQ ID NO: 3301623 - DNA, 25 bp, Homo sapien
caacaacttgtactagggatggaag

SEQ ID NO: 3301624 - DNA, 25 bp, Homo sapien
caagtgtgaaaatacagtcagtccc

SEQ ID NO: 3301625 - DNA, 25 bp, Homo sapien
gcatttgaatgctgcagcaagtgtg

SEQ ID NO: 3301626 - DNA, 25 bp, Homo sapien
gtgaaaatacagtcagtcccttact

SEQ ID NO: 3301627 - DNA, 25 bp, Homo sapien
gcagcaagtgtgaaaatacagtcag

SEQ ID NO: 3301628 - DNA, 25 bp, Homo sapien
ttagtgctactttcagcaaaggaaa

SEQ ID NO: 3301629 - DNA, 25 bp, Homo sapien
agcaaaggaaaggacaaatatggtc

SEQ ID NO: 3301630 - DNA, 25 bp, Homo sapien
tgttagtgctactttcagcaaagga

SEQ ID NO: 3301631 - DNA, 25 bp, Homo sapien
tatgttagtgctactttcagcaaag

SEQ ID NO: 3301632 - DNA, 25 bp, Homo sapien
gcagattccagtctgggacaccggg

SEQ ID NO: 3301633 - DNA, 25 bp, Homo sapien
tggaccactggaccagacacttagt

SEQ ID NO: 3301634 - DNA, 25 bp, Homo sapien
gcccagaatgaacaacatgctcagt

SEQ ID NO: 3301635 - DNA, 25 bp, Homo sapien
accactggaccagacacttagtttt

SEQ ID NO: 3301636 - DNA, 25 bp, Homo sapien
cagccgctggcgcagcacgtgttcc

SEQ ID NO: 3301637 - DNA, 25 bp, Homo sapien
agccgctggcgcagcacgtgttcct

SEQ ID NO: 3301638 - DNA, 25 bp, Homo sapien
gccgctggcgcagcacgtgttcctg

SEQ ID NO: 3301639 - DNA, 25 bp, Homo sapien
gtgttctacatgtcacatccctcag

SEQ ID NO: 3301640 - DNA, 25 bp, Homo sapien
catggcatggtgcatccccttctct

SEQ ID NO: 3301641 - DNA, 25 bp, Homo sapien
tctgttggccttgcaatacctaaat

SEQ ID NO: 3301642 - DNA, 25 bp, Homo sapien
tataaccaactgtcttgtcaatggc

SEQ ID NO: 3301643 - DNA, 25 bp, Homo sapien
catgtcctctgggatccgagggacc

SEQ ID NO: 3301644 - DNA, 25 bp, Homo sapien
ccatgcctggcggtaagcgaagttt

SEQ ID NO: 3301645 - DNA, 25 bp, Homo sapien
ttcaaagcttgaacacgtagccttc

SEQ ID NO: 3301646 - DNA, 25 bp, Homo sapien
ccccgtttcctctgatggcgagata

SEQ ID NO: 3301647 - DNA, 25 bp, Homo sapien
attttaaaaaataatggagtggcag

SEQ ID NO: 3301648 - DNA, 25 bp, Homo sapien
aaaataatggagtggcagggtcttg

SEQ ID NO: 3301649 - DNA, 25 bp, Homo sapien
taaaaaataatggagtggcagggtc

SEQ ID NO: 3301650 - DNA, 25 bp, Homo sapien
tattttaaaaaataatggagtggca

SEQ ID NO: 3301651 - DNA, 25 bp, Homo sapien
gaataagtatgataagacaaattcc

SEQ ID NO: 3301652 - DNA, 25 bp, Homo sapien
tccttgccagcaactcaattttaga

SEQ ID NO: 3301653 - DNA, 25 bp, Homo sapien
ctcaggtagcttgggatggcagaaa

SEQ ID NO: 3301654 - DNA, 25 bp, Homo sapien
gaaatatacactaagaaacctatat

SEQ ID NO: 3301655 - DNA, 25 bp, Homo sapien
taaactcggacaacagcagtgggac

SEQ ID NO: 3301656 - DNA, 25 bp, Homo sapien
caatctgcaatggaacaagctggag

SEQ ID NO: 3301657 - DNA, 25 bp, Homo sapien
ctcataaagtagaagccaggtaagc

SEQ ID NO: 3301658 - DNA, 25 bp, Homo sapien
tcagaggcagtactcaagtgaggtc

SEQ ID NO: 3301659 - DNA, 25 bp, Homo sapien
ccagccctagatggaattctgctac

SEQ ID NO: 3301660 - DNA, 25 bp, Homo sapien
taccgctgtaatcattagcaagcag

SEQ ID NO: 3301661 - DNA, 25 bp, Homo sapien
aagcaggcgtgctcttcttacaagc

SEQ ID NO: 3301662 - DNA, 25 bp, Homo sapien
gctcttcttacaagctcagctcagt

SEQ ID NO: 3301663 - DNA, 25 bp, Homo sapien
gagatgtctacttcctgcatctggg

SEQ ID NO: 3301664 - DNA, 25 bp, Homo sapien
caaaatatagccctcaactactgag

SEQ ID NO: 3301665 - DNA, 25 bp, Homo sapien
catctgggcccttattataaatgaa

SEQ ID NO: 3301666 - DNA, 25 bp, Homo sapien
tgcaacataactgcaattgccttgc

SEQ ID NO: 3301667 - DNA, 25 bp, Homo sapien
gacatttaactatcagtcttcctac

SEQ ID NO: 3301668 - DNA, 25 bp, Homo sapien
tgacatgattaagcctgtgatgcca

SEQ ID NO: 3301669 - DNA, 25 bp, Homo sapien
cactaggtaactgcaggaacagggt

SEQ ID NO: 3301670 - DNA, 25 bp, Homo sapien
tcttgaaaccctgactgcaacggat

SEQ ID NO: 3301671 - DNA, 25 bp, Homo sapien
cagaaaggaatggcatcaacatcaa

SEQ ID NO: 3301672 - DNA, 25 bp, Homo sapien
tttccaactgagcctctgctggtga

SEQ ID NO: 3301673 - DNA, 25 bp, Homo sapien
gcatttccaactgagcctctgctgg

SEQ ID NO: 3301674 - DNA, 25 bp, Homo sapien
tccacaccaaaaccctatctgtagg

SEQ ID NO: 3301675 - DNA, 25 bp, Homo sapien
cccgtcagaggcgacaatgcagtgg

SEQ ID NO: 3301676 - DNA, 25 bp, Homo sapien
aatattctaagaactacatctccca

SEQ ID NO: 3301677 - DNA, 25 bp, Homo sapien
tctgtgcaccatctgcacccgtcag

SEQ ID NO: 3301678 - DNA, 25 bp, Homo sapien
catctcccagcatgtgtggcagagt

SEQ ID NO: 3301679 - DNA, 25 bp, Homo sapien
cagtgctggcagcttgcgcctggag

SEQ ID NO: 3301680 - DNA, 25 bp, Homo sapien
gatgaacacactacccctgtggagg

SEQ ID NO: 3301681 - DNA, 25 bp, Homo sapien
ccggctgtacaggagtgacactgat

SEQ ID NO: 3301682 - DNA, 25 bp, Homo sapien
ctggaggcaggcctccggctgtaca

SEQ ID NO: 3301683 - DNA, 25 bp, Homo sapien
gagcgacagaccagccattcaatgt

SEQ ID NO: 3301684 - DNA, 25 bp, Homo sapien
ggaccctgtttctgagcgacagacc

SEQ ID NO: 3301685 - DNA, 25 bp, Homo sapien
ttgtctggttaagggggccatacca

SEQ ID NO: 3301686 - DNA, 25 bp, Homo sapien
aagggggccataccacctactctct

SEQ ID NO: 3301687 - DNA, 25 bp, Homo sapien
ggctgctgtaaacttggggatggtt

SEQ ID NO: 3301688 - DNA, 25 bp, Homo sapien
ctgctgtaaacttggggatggttga

SEQ ID NO: 3301689 - DNA, 25 bp, Homo sapien
gtggggctgctgtaaacttggggat

SEQ ID NO: 3301690 - DNA, 25 bp, Homo sapien
tgctgtaaacttggggatggttgag

SEQ ID NO: 3301691 - DNA, 25 bp, Homo sapien
tacgtgcccacctaggaaggtctga

SEQ ID NO: 3301692 - DNA, 25 bp, Homo sapien
cccaaggaggcaaaatagagtaaca

SEQ ID NO: 3301693 - DNA, 25 bp, Homo sapien
gccaccaggtacagcttcctagaag

SEQ ID NO: 3301694 - DNA, 25 bp, Homo sapien
ggcagatttgccactggatccagtt

SEQ ID NO: 3301695 - DNA, 25 bp, Homo sapien
cctactggaacttgctgagctttgg

SEQ ID NO: 3301696 - DNA, 25 bp, Homo sapien
ggaacttgctgagctttggcaataa

SEQ ID NO: 3301697 - DNA, 25 bp, Homo sapien
tggaacttgctgagctttggcaata

SEQ ID NO: 3301698 - DNA, 25 bp, Homo sapien
ctggaacttgctgagctttggcaat

SEQ ID NO: 3301699 - DNA, 25 bp, Homo sapien
gaaggctagtcttctaccaagagca

SEQ ID NO: 3301700 - DNA, 25 bp, Homo sapien
tgtccccagatgagcttaacacaga

SEQ ID NO: 3301701 - DNA, 25 bp, Homo sapien
caagctacttccacaggagagggaa

SEQ ID NO: 3301702 - DNA, 25 bp, Homo sapien
tagggctatcctcaaagctctgtcg

SEQ ID NO: 3301703 - DNA, 25 bp, Homo sapien
ccttttgtagtcagatactcctctg

SEQ ID NO: 3301704 - DNA, 25 bp, Homo sapien
agaacagttccatcatcctccgaaa

SEQ ID NO: 3301705 - DNA, 25 bp, Homo sapien
tgtcaaaccattgcaatcaagatat

SEQ ID NO: 3301706 - DNA, 25 bp, Homo sapien
gtcagatactcctctgacctccagt

SEQ ID NO: 3301707 - DNA, 25 bp, Homo sapien
catgaaatctccattctcgcaaggg

SEQ ID NO: 3301708 - DNA, 25 bp, Homo sapien
caaccctggcaagctgtcgtcatga

SEQ ID NO: 3301709 - DNA, 25 bp, Homo sapien
gtatttgagccaccgagaggtcagg

SEQ ID NO: 3301710 - DNA, 25 bp, Homo sapien
taatggttgcacctaacaccaggtc

SEQ ID NO: 3301711 - DNA, 25 bp, Homo sapien
atctcaaatcctgaagagtccctgg

SEQ ID NO: 3301712 - DNA, 25 bp, Homo sapien
tctaaagtgccaaaacccgtgcaat

SEQ ID NO: 3301713 - DNA, 25 bp, Homo sapien
tgcaatccccataacttcaggtgag

SEQ ID NO: 3301714 - DNA, 25 bp, Homo sapien
catttatgtaagacccacatcaggc

SEQ ID NO: 3301715 - DNA, 25 bp, Homo sapien
attctctatacccttctttgttttg

SEQ ID NO: 3301716 - DNA, 25 bp, Homo sapien
ttctattttattctctatacccttc

SEQ ID NO: 3301717 - DNA, 25 bp, Homo sapien
attttattctctatacccttctttg

SEQ ID NO: 3301718 - DNA, 25 bp, Homo sapien
taattttctattttattctctatac

SEQ ID NO: 3301719 - DNA, 25 bp, Homo sapien
tcccagtgttcggttggagataaat

SEQ ID NO: 3301720 - DNA, 25 bp, Homo sapien
cctcaggtctgtggatgtctagagt

SEQ ID NO: 3301721 - DNA, 25 bp, Homo sapien
taaatttattccaacaatcctcagg

SEQ ID NO: 3301722 - DNA, 25 bp, Homo sapien
aactattagtcccagtgttcggttg

SEQ ID NO: 3301723 - DNA, 25 bp, Homo sapien
tatagtatttgtgattgtcttaata

SEQ ID NO: 3301724 - DNA, 25 bp, Homo sapien
tattaacatatacccattatccaga

SEQ ID NO: 3301725 - DNA, 25 bp, Homo sapien
tatccagaccagacaatcaaatgac

SEQ ID NO: 3301726 - DNA, 25 bp, Homo sapien
caaatgacaatgtcagccctcatgg

SEQ ID NO: 3301727 - DNA, 25 bp, Homo sapien
tttaatgaaaataacaataacactg

SEQ ID NO: 3301728 - DNA, 25 bp, Homo sapien
taatgaaaataacaataacactgat

SEQ ID NO: 3301729 - DNA, 25 bp, Homo sapien
aatgaaaataacaataacactgata

SEQ ID NO: 3301730 - DNA, 25 bp, Homo sapien
ctgtttaatgaaaataacaataaca

SEQ ID NO: 3301731 - DNA, 25 bp, Homo sapien
gagtaattcaactcaaaccacaagc

SEQ ID NO: 3301732 - DNA, 25 bp, Homo sapien
tctgtccttggtctttatgccagca

SEQ ID NO: 3301733 - DNA, 25 bp, Homo sapien
agcttcctgctctctactggcagaa

SEQ ID NO: 3301734 - DNA, 25 bp, Homo sapien
gtaattccaggaaaatcagatggga

SEQ ID NO: 3301735 - DNA, 25 bp, Homo sapien
tgggcaaaatctcaagaccccattt

SEQ ID NO: 3301736 - DNA, 25 bp, Homo sapien
gcacttttgggagaccagggcagga

SEQ ID NO: 3301737 - DNA, 25 bp, Homo sapien
tggggttggtagctcacactggtaa

SEQ ID NO: 3301738 - DNA, 25 bp, Homo sapien
ggctggggttggtagctcacactgg

SEQ ID NO: 3301739 - DNA, 25 bp, Homo sapien
gagccacggcttggtattttctccg

SEQ ID NO: 3301740 - DNA, 25 bp, Homo sapien
gggagcagtctgtccactgttcaca

SEQ ID NO: 3301741 - DNA, 25 bp, Homo sapien
agtcagatgggctcctacagcaccc

SEQ ID NO: 3301742 - DNA, 25 bp, Homo sapien
gcattgcaacactgaagccgctgag

SEQ ID NO: 3301743 - DNA, 25 bp, Homo sapien
gacagcaacctgacaggctctcttt

SEQ ID NO: 3301744 - DNA, 25 bp, Homo sapien
acagcaacctgacaggctctctttt

SEQ ID NO: 3301745 - DNA, 25 bp, Homo sapien
caaataacaatgactgtgggtgttt

SEQ ID NO: 3301746 - DNA, 25 bp, Homo sapien
atccaaataacaatgactgtgggtg

SEQ ID NO: 3301747 - DNA, 25 bp, Homo sapien
tattagtgtccacataactccagaa

SEQ ID NO: 3301748 - DNA, 25 bp, Homo sapien
cagatggatcacaggaacccttgat

SEQ ID NO: 3301749 - DNA, 25 bp, Homo sapien
tgatagcagaccatccaagtaacgc

SEQ ID NO: 3301750 - DNA, 25 bp, Homo sapien
taacgctccccaattaaatgtcaag

SEQ ID NO: 3301751 - DNA, 25 bp, Homo sapien
ctacaattagcaaaacacaaaaagg

SEQ ID NO: 3301752 - DNA, 25 bp, Homo sapien
tctctccataaaagtgtagtttgca

SEQ ID NO: 3301753 - DNA, 25 bp, Homo sapien
ctatctctccataaaagtgtagttt

SEQ ID NO: 3301754 - DNA, 25 bp, Homo sapien
atctctccataaaagtgtagtttgc

SEQ ID NO: 3301755 - DNA, 25 bp, Homo sapien
tatctctccataaaagtgtagtttg

SEQ ID NO: 3301756 - DNA, 25 bp, Homo sapien
ccaaggctagttgaggccagtatga

SEQ ID NO: 3301757 - DNA, 25 bp, Homo sapien
caaggctagttgaggccagtatgaa

SEQ ID NO: 3301758 - DNA, 25 bp, Homo sapien
aggtgatgacaagaagtaaggatcc

SEQ ID NO: 3301759 - DNA, 25 bp, Homo sapien
gggtaggtgatgacaagaagtaagg

SEQ ID NO: 3301760 - DNA, 25 bp, Homo sapien
gtaggtgatgacaagaagtaaggat

SEQ ID NO: 3301761 - DNA, 25 bp, Homo sapien
tgacaagaagtaaggatcctgctcc

SEQ ID NO: 3301762 - DNA, 25 bp, Homo sapien
agttgaaatgtctccagcggctatt

SEQ ID NO: 3301763 - DNA, 25 bp, Homo sapien
gacacagaagaacacccagtgccag

SEQ ID NO: 3301764 - DNA, 25 bp, Homo sapien
tctccagcggctattggacgattgg

SEQ ID NO: 3301765 - DNA, 25 bp, Homo sapien
agacacagaagaacacccagtgcca

SEQ ID NO: 3301766 - DNA, 25 bp, Homo sapien
acatgtcattaatagtacagcctgc

SEQ ID NO: 3301767 - DNA, 25 bp, Homo sapien
attaatagtacagcctgctccacgc

SEQ ID NO: 3301768 - DNA, 25 bp, Homo sapien
tcagaatagctccagtgccaaagag

SEQ ID NO: 3301769 - DNA, 25 bp, Homo sapien
tgctccacgcatcagaatagctcca

SEQ ID NO: 3301770 - DNA, 25 bp, Homo sapien
caacctggttcagctgccaaaccaa

SEQ ID NO: 3301771 - DNA, 25 bp, Homo sapien
gctgccaaaccaatgctccaggtac

SEQ ID NO: 3301772 - DNA, 25 bp, Homo sapien
tgtagagctcccctacagatgacaa

SEQ ID NO: 3301773 - DNA, 25 bp, Homo sapien
gtgacactagacagtaaagtatctt

SEQ ID NO: 3301774 - DNA, 25 bp, Homo sapien
tcctacagtgaaggggaaagtaaga

SEQ ID NO: 3301775 - DNA, 25 bp, Homo sapien
cagtaaagtatcttaaggcttaagt

SEQ ID NO: 3301776 - DNA, 25 bp, Homo sapien
tgtgaagaaagacgcagaggtagca

SEQ ID NO: 3301777 - DNA, 25 bp, Homo sapien
gtggtattccaacccagacagtctg

SEQ ID NO: 3301778 - DNA, 25 bp, Homo sapien
aaatacagaaactgacgcagagagg

SEQ ID NO: 3301779 - DNA, 25 bp, Homo sapien
gagggagtaattgtgcccaagacca

SEQ ID NO: 3301780 - DNA, 25 bp, Homo sapien
tgttacatggcggaaggtccagcca

SEQ ID NO: 3301781 - DNA, 25 bp, Homo sapien
tatggccggacaacgtagtaggaac

SEQ ID NO: 3301782 - DNA, 25 bp, Homo sapien
tctcaacgtgaatgtggccccaaaa

SEQ ID NO: 3301783 - DNA, 25 bp, Homo sapien
caaaagcaaggcctaattcgggtct

SEQ ID NO: 3301784 - DNA, 25 bp, Homo sapien
ttctggtctggctctgacgaggagc

SEQ ID NO: 3301785 - DNA, 25 bp, Homo sapien
taaaagagctccgactcagcatcaa

SEQ ID NO: 3301786 - DNA, 25 bp, Homo sapien
tcaaaacacagagttcttctggtct

SEQ ID NO: 3301787 - DNA, 25 bp, Homo sapien
aaatctttgccttatgggtgatgca

SEQ ID NO: 3301788 - DNA, 25 bp, Homo sapien
tgagaattatcttgcccgcttcagg

SEQ ID NO: 3301789 - DNA, 25 bp, Homo sapien
tcaaagtgtcccgaggtgattcgcc

SEQ ID NO: 3301790 - DNA, 25 bp, Homo sapien
tttaggagactgtcccgactgcgtg

SEQ ID NO: 3301791 - DNA, 25 bp, Homo sapien
cagacagacgtgaaactggcgggtc

SEQ ID NO: 3301792 - DNA, 25 bp, Homo sapien
tgtccaaccgcatgaggcgcaagta

SEQ ID NO: 3301793 - DNA, 25 bp, Homo sapien
cttgtccaaccgcatgaggcgcaag

SEQ ID NO: 3301794 - DNA, 25 bp, Homo sapien
gggcttgtccaaccgcatgaggcgc

SEQ ID NO: 3301795 - DNA, 25 bp, Homo sapien
ccaaccgcatgaggcgcaagtacgg

SEQ ID NO: 3301796 - DNA, 25 bp, Homo sapien
cgccgcggacaaactgagctggcgc

SEQ ID NO: 3301797 - DNA, 25 bp, Homo sapien
cgccgccgcggacaaactgagctgg

SEQ ID NO: 3301798 - DNA, 25 bp, Homo sapien
accgccgccgcggacaaactgagct

SEQ ID NO: 3301799 - DNA, 25 bp, Homo sapien
ccgccgcggacaaactgagctggcg

SEQ ID NO: 3301800 - DNA, 25 bp, Homo sapien
tgcaagtcaccaccgtggggcgcgc

SEQ ID NO: 3301801 - DNA, 25 bp, Homo sapien
tcaccaccgtggggcgcgcctgccg

SEQ ID NO: 3301802 - DNA, 25 bp, Homo sapien
ctgcaagtcaccaccgtggggcgcg

SEQ ID NO: 3301803 - DNA, 25 bp, Homo sapien
aagtcaccaccgtggggcgcgcctg

SEQ ID NO: 3301804 - DNA, 25 bp, Homo sapien
cgccagggcgaaggagcggccccgc

SEQ ID NO: 3301805 - DNA, 25 bp, Homo sapien
gcgccagggcgaaggagcggccccg

SEQ ID NO: 3301806 - DNA, 25 bp, Homo sapien
cacgccagtgccacagcccgcaggc

SEQ ID NO: 3301807 - DNA, 25 bp, Homo sapien
cgcgcgaaccccgcggctcgcgagc

SEQ ID NO: 3301808 - DNA, 25 bp, Homo sapien
ccgcgcgaaccccgcggctcgcgag

SEQ ID NO: 3301809 - DNA, 25 bp, Homo sapien
ggacgagctcggattgacgtcattc

SEQ ID NO: 3301810 - DNA, 25 bp, Homo sapien
aggccgggacgagctcggattgacg

SEQ ID NO: 3301811 - DNA, 25 bp, Homo sapien
gggacgagctcggattgacgtcatt

SEQ ID NO: 3301812 - DNA, 25 bp, Homo sapien
ccgggacgagctcggattgacgtca

SEQ ID NO: 3301813 - DNA, 25 bp, Homo sapien
tgacgtactgaagtgctggagcctg

SEQ ID NO: 3301814 - DNA, 25 bp, Homo sapien
cagtttcacggtaacggcagtatgc

SEQ ID NO: 3301815 - DNA, 25 bp, Homo sapien
ccattccaaagggttactcagagac

SEQ ID NO: 3301816 - DNA, 25 bp, Homo sapien
gccatcatgctaccagagtctgaga

SEQ ID NO: 3301817 - DNA, 25 bp, Homo sapien
tctagcactgacagtgtcccagtgt

SEQ ID NO: 3301818 - DNA, 25 bp, Homo sapien
agttgctttgcaaggtatctgcttc

SEQ ID NO: 3301819 - DNA, 25 bp, Homo sapien
tatttggaacaaggtattattagct

SEQ ID NO: 3301820 - DNA, 25 bp, Homo sapien
tagcagtgttctacctagcgagatc

SEQ ID NO: 3301821 - DNA, 25 bp, Homo sapien
aactttggcatttcttatcacaaaa

SEQ ID NO: 3301822 - DNA, 25 bp, Homo sapien
aagcccagtgaacttcctggccgga

SEQ ID NO: 3301823 - DNA, 25 bp, Homo sapien
tcagatgcaagcagcaactttggca

SEQ ID NO: 3301824 - DNA, 25 bp, Homo sapien
aaaaaactatatgagaaagctggca

SEQ ID NO: 3301825 - DNA, 25 bp, Homo sapien
caagtacttggtgacattatggagg

SEQ ID NO: 3301826 - DNA, 25 bp, Homo sapien
ccatgaggtcccaaaggtcttagaa

SEQ ID NO: 3301827 - DNA, 25 bp, Homo sapien
cattatggaggtttatggcatacag

SEQ ID NO: 3301828 - DNA, 25 bp, Homo sapien
aggatagggtaaccgcaagtacttg

SEQ ID NO: 3301829 - DNA, 25 bp, Homo sapien
tccttctctttgaaccttgcacgct

SEQ ID NO: 3301830 - DNA, 25 bp, Homo sapien
cagtgtttgtgcaatgaaggtatac

SEQ ID NO: 3301831 - DNA, 25 bp, Homo sapien
aaggtatactcgaagcttccttctc

SEQ ID NO: 3301832 - DNA, 25 bp, Homo sapien
cacgcttgccattaacaccttggtg

SEQ ID NO: 3301833 - DNA, 25 bp, Homo sapien
tgaacagaagagatagccaataatc

SEQ ID NO: 3301834 - DNA, 25 bp, Homo sapien
cttgaacagaagagatagccaataa

SEQ ID NO: 3301835 - DNA, 25 bp, Homo sapien
ttgaacagaagagatagccaataat

SEQ ID NO: 3301836 - DNA, 25 bp, Homo sapien
tccaaagaatacttgcctcatcacc

SEQ ID NO: 3301837 - DNA, 25 bp, Homo sapien
ctgacaggcccaatttatccagcca

SEQ ID NO: 3301838 - DNA, 25 bp, Homo sapien
tctattcccattcgggctgacaggc

SEQ ID NO: 3301839 - DNA, 25 bp, Homo sapien
ggtaaaggatcgaagttttcatcca

SEQ ID NO: 3301840 - DNA, 25 bp, Homo sapien
agctgcaaaggtgtcggatagcaag

SEQ ID NO: 3301841 - DNA, 25 bp, Homo sapien
tagcaagggcgctccgcctccatat

SEQ ID NO: 3301842 - DNA, 25 bp, Homo sapien
gggcgctccgcctccatatgcagag

SEQ ID NO: 3301843 - DNA, 25 bp, Homo sapien
tgtcggatagcaagggcgctccgcc

SEQ ID NO: 3301844 - DNA, 25 bp, Homo sapien
tgccaggcctggtgctctcaaccac

SEQ ID NO: 3301845 - DNA, 25 bp, Homo sapien
cttgccaggcctggtgctctcaacc

SEQ ID NO: 3301846 - DNA, 25 bp, Homo sapien
ttgccaggcctggtgctctcaacca

SEQ ID NO: 3301847 - DNA, 25 bp, Homo sapien
aaaatgtccaatacatcagggttta

SEQ ID NO: 3301848 - DNA, 25 bp, Homo sapien
tccaatacatcagggtttagaaaat

SEQ ID NO: 3301849 - DNA, 25 bp, Homo sapien
gtagcagtccgtccattcaaatagt

SEQ ID NO: 3301850 - DNA, 25 bp, Homo sapien
tggaaaactttttgcacagatgaaa

SEQ ID NO: 3301851 - DNA, 25 bp, Homo sapien
tgatgccatgtaactgaatcaatca

SEQ ID NO: 3301852 - DNA, 25 bp, Homo sapien
atgccatgtaactgaatcaatcact

SEQ ID NO: 3301853 - DNA, 25 bp, Homo sapien
gatgccatgtaactgaatcaatcac

SEQ ID NO: 3301854 - DNA, 25 bp, Homo sapien
tgccatgtaactgaatcaatcactt

SEQ ID NO: 3301855 - DNA, 25 bp, Homo sapien
ttgagcacaggaattcaagagacca

SEQ ID NO: 3301856 - DNA, 25 bp, Homo sapien
tgagcacaggaattcaagagaccag

SEQ ID NO: 3301857 - DNA, 25 bp, Homo sapien
gagcacaggaattcaagagaccagc

SEQ ID NO: 3301858 - DNA, 25 bp, Homo sapien
cttgagcacaggaattcaagagacc

SEQ ID NO: 3301859 - DNA, 25 bp, Homo sapien
agtaaagtgattctgcatcctctag

SEQ ID NO: 3301860 - DNA, 25 bp, Homo sapien
tgattctgcatcctctagttcctac

SEQ ID NO: 3301861 - DNA, 25 bp, Homo sapien
aagtgattctgcatcctctagttcc

SEQ ID NO: 3301862 - DNA, 25 bp, Homo sapien
gaaaagtaaagtgattctgcatcct

SEQ ID NO: 3301863 - DNA, 25 bp, Homo sapien
gcatcttagccgtctttcttcgagg

SEQ ID NO: 3301864 - DNA, 25 bp, Homo sapien
tcttcgaggctgaccaacatcagga

SEQ ID NO: 3301865 - DNA, 25 bp, Homo sapien
tcctaactgcgacccattgatgaaa

SEQ ID NO: 3301866 - DNA, 25 bp, Homo sapien
gatgaaaatatcagccttcttaagg

SEQ ID NO: 3301867 - DNA, 25 bp, Homo sapien
gcagtttgcaaaagtgtatagcaca

SEQ ID NO: 3301868 - DNA, 25 bp, Homo sapien
aaatctgctgttcttaataacgcat

SEQ ID NO: 3301869 - DNA, 25 bp, Homo sapien
ggccaaagatcaagtccagtcctga

SEQ ID NO: 3301870 - DNA, 25 bp, Homo sapien
aatgttataccccttggaagagcag

SEQ ID NO: 3301871 - DNA, 25 bp, Homo sapien
tgtttctaagtctttggcctgaatt

SEQ ID NO: 3301872 - DNA, 25 bp, Homo sapien
tctttggcctgaattacttgaataa

SEQ ID NO: 3301873 - DNA, 25 bp, Homo sapien
aagtctttggcctgaattacttgaa

SEQ ID NO: 3301874 - DNA, 25 bp, Homo sapien
ttctaagtctttggcctgaattact

SEQ ID NO: 3301875 - DNA, 25 bp, Homo sapien
tataaagagtggagagatccttgga

SEQ ID NO: 3301876 - DNA, 25 bp, Homo sapien
gtctatgtcagcatccaatgtgggc

SEQ ID NO: 3301877 - DNA, 25 bp, Homo sapien
tctcttactgtataaagagtggaga

SEQ ID NO: 3301878 - DNA, 25 bp, Homo sapien
aaaaaatggcagatctttcccttgg

SEQ ID NO: 3301879 - DNA, 25 bp, Homo sapien
ggtggctggacttacactaactaac

SEQ ID NO: 3301880 - DNA, 25 bp, Homo sapien
agggtggctggacttacactaacta

SEQ ID NO: 3301881 - DNA, 25 bp, Homo sapien
gggtggctggacttacactaactaa

SEQ ID NO: 3301882 - DNA, 25 bp, Homo sapien
ccctggtgtaggaactatgaaagcc

SEQ ID NO: 3301883 - DNA, 25 bp, Homo sapien
aaggaaggcatttcccctggtgtag

SEQ ID NO: 3301884 - DNA, 25 bp, Homo sapien
ggttgcatagttagcaaaggaaggc

SEQ ID NO: 3301885 - DNA, 25 bp, Homo sapien
cagaaagatcctgtaaagtagtaaa

SEQ ID NO: 3301886 - DNA, 25 bp, Homo sapien
taggacttgctagattggtgcccga

SEQ ID NO: 3301887 - DNA, 25 bp, Homo sapien
gcccgagtccaacctattcaaatat

SEQ ID NO: 3301888 - DNA, 25 bp, Homo sapien
gggctggaacatctctagggtgcct

SEQ ID NO: 3301889 - DNA, 25 bp, Homo sapien
tttatacaacttccgtaggacttgc

SEQ ID NO: 3301890 - DNA, 25 bp, Homo sapien
tttctggtagtgttctcggagtagc

SEQ ID NO: 3301891 - DNA, 25 bp, Homo sapien
ctggtagtgttctcggagtagcaat

SEQ ID NO: 3301892 - DNA, 25 bp, Homo sapien
agtgttctcggagtagcaattgctc

SEQ ID NO: 3301893 - DNA, 25 bp, Homo sapien
actttttctggtagtgttctcggag

SEQ ID NO: 3301894 - DNA, 25 bp, Homo sapien
caggagggatggatccatatttgca

SEQ ID NO: 3301895 - DNA, 25 bp, Homo sapien
cattccaaccgtaacttctcctcca

SEQ ID NO: 3301896 - DNA, 25 bp, Homo sapien
catcaggagggatggatccatattt

SEQ ID NO: 3301897 - DNA, 25 bp, Homo sapien
gagggatggatccatatttgcaaat

SEQ ID NO: 3301898 - DNA, 25 bp, Homo sapien
ttctggaaagctgcacactgactcg

SEQ ID NO: 3301899 - DNA, 25 bp, Homo sapien
aaagctgcacactgactcgctggcg

SEQ ID NO: 3301900 - DNA, 25 bp, Homo sapien
tcacagaggatgtttcagaggaact

SEQ ID NO: 3301901 - DNA, 25 bp, Homo sapien
acactgactcgctggcggctggtgc

SEQ ID NO: 3301902 - DNA, 25 bp, Homo sapien
tcttgggatcgaaaattaggaagtc

SEQ ID NO: 3301903 - DNA, 25 bp, Homo sapien
gcctctggccaaggtacgaagcttt

SEQ ID NO: 3301904 - DNA, 25 bp, Homo sapien
tcaggtacgcaggagacaagcctct

SEQ ID NO: 3301905 - DNA, 25 bp, Homo sapien
ttggtgccaccaaacctcaggtacg

SEQ ID NO: 3301906 - DNA, 25 bp, Homo sapien
cgtggccaggttggcgtcaatggtg

SEQ ID NO: 3301907 - DNA, 25 bp, Homo sapien
gaggatgaggaaccgcgggtccgtg

SEQ ID NO: 3301908 - DNA, 25 bp, Homo sapien
aggaggatgaggaaccgcgggtccg

SEQ ID NO: 3301909 - DNA, 25 bp, Homo sapien
cgtcaatggtgacggacaggaacga

SEQ ID NO: 3301910 - DNA, 25 bp, Homo sapien
cagcgcaggcttcgagcgcagcagc

SEQ ID NO: 3301911 - DNA, 25 bp, Homo sapien
gaagaagtccaggtccacgacgtcc

SEQ ID NO: 3301912 - DNA, 25 bp, Homo sapien
aggtccacgacgtcctgtgcttgcg

SEQ ID NO: 3301913 - DNA, 25 bp, Homo sapien
gcgcaggcttcgagcgcagcagcat

SEQ ID NO: 3301914 - DNA, 25 bp, Homo sapien
gctcacctggctgctccccccgcca

SEQ ID NO: 3301915 - DNA, 25 bp, Homo sapien
gggctcacctggctgctccccccgc

SEQ ID NO: 3301916 - DNA, 25 bp, Homo sapien
cttgggctcacctggctgctccccc

SEQ ID NO: 3301917 - DNA, 25 bp, Homo sapien
ttgggctcacctggctgctcccccc

SEQ ID NO: 3301918 - DNA, 25 bp, Homo sapien
cggagagtcgagagctctagcactt

SEQ ID NO: 3301919 - DNA, 25 bp, Homo sapien
gagagtcgagagctctagcacttcc

SEQ ID NO: 3301920 - DNA, 25 bp, Homo sapien
agtcgagagctctagcacttcctcc

SEQ ID NO: 3301921 - DNA, 25 bp, Homo sapien
agcggagagtcgagagctctagcac

SEQ ID NO: 3301922 - DNA, 25 bp, Homo sapien
gccgggatccaagcgcccgggaggc

SEQ ID NO: 3301923 - DNA, 25 bp, Homo sapien
acccacacccacttgaagggtgcgg

SEQ ID NO: 3301924 - DNA, 25 bp, Homo sapien
gggtgcggagatggccgggatccaa

SEQ ID NO: 3301925 - DNA, 25 bp, Homo sapien
cacacccacttgaagggtgcggaga

SEQ ID NO: 3301926 - DNA, 25 bp, Homo sapien
ttttcggtcactagggtcccattga

SEQ ID NO: 3301927 - DNA, 25 bp, Homo sapien
ggtcactagggtcccattgaccctc

SEQ ID NO: 3301928 - DNA, 25 bp, Homo sapien
tcaaatagggttccaccttggccca

SEQ ID NO: 3301929 - DNA, 25 bp, Homo sapien
tactccctgggtacaaattagtgct

SEQ ID NO: 3301930 - DNA, 25 bp, Homo sapien
tgggaatctaatttaagctcggtcg

SEQ ID NO: 3301931 - DNA, 25 bp, Homo sapien
tctaatttaagctcggtcgctgttt

SEQ ID NO: 3301932 - DNA, 25 bp, Homo sapien
gaatgggaatctaatttaagctcgg

SEQ ID NO: 3301933 - DNA, 25 bp, Homo sapien
gaatctaatttaagctcggtcgctg

SEQ ID NO: 3301934 - DNA, 25 bp, Homo sapien
aatgggtttctgaggctactatttt

SEQ ID NO: 3301935 - DNA, 25 bp, Homo sapien
tgtcatcatccctcacatgacatat

SEQ ID NO: 3301936 - DNA, 25 bp, Homo sapien
ggctactattttggtgctgtcatca

SEQ ID NO: 3301937 - DNA, 25 bp, Homo sapien
ctgaggctactattttggtgctgtc

SEQ ID NO: 3301938 - DNA, 25 bp, Homo sapien
tccacaaccttgatccagggcagct

SEQ ID NO: 3301939 - DNA, 25 bp, Homo sapien
gaagctaatggtggccactggaacc

SEQ ID NO: 3301940 - DNA, 25 bp, Homo sapien
tgctgctggacacccatgaagctaa

SEQ ID NO: 3301941 - DNA, 25 bp, Homo sapien
ccacaaccttgatccagggcagctg

SEQ ID NO: 3301942 - DNA, 25 bp, Homo sapien
ggtgtcacagtgtccctcttgactg

SEQ ID NO: 3301943 - DNA, 25 bp, Homo sapien
tctggaccatgtgacaccgaggatt

SEQ ID NO: 3301944 - DNA, 25 bp, Homo sapien
tgacaccgaggatttgttcgtgacc

SEQ ID NO: 3301945 - DNA, 25 bp, Homo sapien
cgaggatttgttcgtgaccactgca

SEQ ID NO: 3301946 - DNA, 25 bp, Homo sapien
tgcttctgtatcatggctgtcactg

SEQ ID NO: 3301947 - DNA, 25 bp, Homo sapien
tgtgcagtccctgctctgaagcttc

SEQ ID NO: 3301948 - DNA, 25 bp, Homo sapien
tggccttggcagctgttgtgcagtc

SEQ ID NO: 3301949 - DNA, 25 bp, Homo sapien
ctgtatcatggctgtcactgccact

SEQ ID NO: 3301950 - DNA, 25 bp, Homo sapien
tgaattgccactttgatggtactgc

SEQ ID NO: 3301951 - DNA, 25 bp, Homo sapien
gggtttccttgaattgccactttga

SEQ ID NO: 3301952 - DNA, 25 bp, Homo sapien
agcccagcagttcacttccgggttt

SEQ ID NO: 3301953 - DNA, 25 bp, Homo sapien
agcagttcacttccgggtttccttg

SEQ ID NO: 3301954 - DNA, 25 bp, Homo sapien
tcaagtggccacatatcacttccat

SEQ ID NO: 3301955 - DNA, 25 bp, Homo sapien
aagtggccacatatcacttccatag

SEQ ID NO: 3301956 - DNA, 25 bp, Homo sapien
catttatcacatcttcaagaagtac

SEQ ID NO: 3301957 - DNA, 25 bp, Homo sapien
ttgaaagacatttatcacatcttca

SEQ ID NO: 3301958 - DNA, 25 bp, Homo sapien
gaaaaggctcatacttgaccaaaac

SEQ ID NO: 3301959 - DNA, 25 bp, Homo sapien
tagaaagatcttgaagctaagcatc

SEQ ID NO: 3301960 - DNA, 25 bp, Homo sapien
gccagctggcttgtagcttgaaaag

SEQ ID NO: 3301961 - DNA, 25 bp, Homo sapien
tgggtgtgctccaacagaaaagcct

SEQ ID NO: 3301962 - DNA, 25 bp, Homo sapien
gttggggaagtggggagggatagca

SEQ ID NO: 3301963 - DNA, 25 bp, Homo sapien
atgttaaatgatgagttgatgggtg

SEQ ID NO: 3301964 - DNA, 25 bp, Homo sapien
ctaatgttaaatgatgagttgatgg

SEQ ID NO: 3301965 - DNA, 25 bp, Homo sapien
ttggggaagtggggagggatagcat

SEQ ID NO: 3301966 - DNA, 25 bp, Homo sapien
ctggttctaactgccctaaggccaa

SEQ ID NO: 3301967 - DNA, 25 bp, Homo sapien
tgccctaaggccaattctattgctg

SEQ ID NO: 3301968 - DNA, 25 bp, Homo sapien
tgagtatggacggtgttaggattct

SEQ ID NO: 3301969 - DNA, 25 bp, Homo sapien
taaggaagcaagtctggtgctgccc

SEQ ID NO: 3301970 - DNA, 25 bp, Homo sapien
tgtgggtgctggtcgcatacacaca

SEQ ID NO: 3301971 - DNA, 25 bp, Homo sapien
cacacatgcaggacttggacatcca

SEQ ID NO: 3301972 - DNA, 25 bp, Homo sapien
tctctgagattcctacttcgtgcag

SEQ ID NO: 3301973 - DNA, 25 bp, Homo sapien
ggacatccagattataaagtagcgg

SEQ ID NO: 3301974 - DNA, 25 bp, Homo sapien
taataacacacatgtacaataaata

SEQ ID NO: 3301975 - DNA, 25 bp, Homo sapien
ttcatatatgaaaattctcatcaga

SEQ ID NO: 3301976 - DNA, 25 bp, Homo sapien
gtataagttatctttaataacacac

SEQ ID NO: 3301977 - DNA, 25 bp, Homo sapien
taattcatatatgaaaattctcatc

SEQ ID NO: 3301978 - DNA, 25 bp, Homo sapien
aatcagaaggcaatcttagtaactc

SEQ ID NO: 3301979 - DNA, 25 bp, Homo sapien
aaatcagaaggcaatcttagtaact

SEQ ID NO: 3301980 - DNA, 25 bp, Homo sapien
atcagaaggcaatcttagtaactct

SEQ ID NO: 3301981 - DNA, 25 bp, Homo sapien
gaaatcagaaggcaatcttagtaac

SEQ ID NO: 3301982 - DNA, 25 bp, Homo sapien
cttctgctttttcatgcaacagcat

SEQ ID NO: 3301983 - DNA, 25 bp, Homo sapien
ctcttcttgcagggcttctgctttt

SEQ ID NO: 3301984 - DNA, 25 bp, Homo sapien
gggcttctgctttttcatgcaacag

SEQ ID NO: 3301985 - DNA, 25 bp, Homo sapien
tcttcttgcagggcttctgcttttt

SEQ ID NO: 3301986 - DNA, 25 bp, Homo sapien
gcttgtgtcacaacagatgcattat

SEQ ID NO: 3301987 - DNA, 25 bp, Homo sapien
acagttatgcaatgtgaaatgtttt

SEQ ID NO: 3301988 - DNA, 25 bp, Homo sapien
tactcacaaataagagtatgtactt

SEQ ID NO: 3301989 - DNA, 25 bp, Homo sapien
tacaaggaaataacactacgcaaga

SEQ ID NO: 3301990 - DNA, 25 bp, Homo sapien
cacttcaggatttgcattagctaag

SEQ ID NO: 3301991 - DNA, 25 bp, Homo sapien
caatttgcttggcttggcgtcttga

SEQ ID NO: 3301992 - DNA, 25 bp, Homo sapien
agacttttgtaacctgcactgtata

SEQ ID NO: 3301993 - DNA, 25 bp, Homo sapien
gatcaattgtccttacgagcacttc

SEQ ID NO: 3301994 - DNA, 25 bp, Homo sapien
taacagcggatttctggaaggccat

SEQ ID NO: 3301995 - DNA, 25 bp, Homo sapien
aaataaaagattcccatgacaaatg

SEQ ID NO: 3301996 - DNA, 25 bp, Homo sapien
caattaaggctcttgctatcacttc

SEQ ID NO: 3301997 - DNA, 25 bp, Homo sapien
cataatttcaattgggaaaccaaca

SEQ ID NO: 3301998 - DNA, 25 bp, Homo sapien
gtaagtcagcttcttggtaagttct

SEQ ID NO: 3301999 - DNA, 25 bp, Homo sapien
cagcttcttggtaagttctaccaaa

SEQ ID NO: 3302000 - DNA, 25 bp, Homo sapien
tgcctttacacagtaagtcagcttc

SEQ ID NO: 3302001 - DNA, 25 bp, Homo sapien
tctgcctttacacagtaagtcagct

SEQ ID NO: 3302002 - DNA, 25 bp, Homo sapien
gagttaagccagagatgaaagatga

SEQ ID NO: 3302003 - DNA, 25 bp, Homo sapien
cagagagaatgttccttacataagt

SEQ ID NO: 3302004 - DNA, 25 bp, Homo sapien
gaatgttccttacataagttctgga

SEQ ID NO: 3302005 - DNA, 25 bp, Homo sapien
taagttctggaacttgagttaagcc

SEQ ID NO: 3302006 - DNA, 25 bp, Homo sapien
caaaagacagatatagcctgttgac

SEQ ID NO: 3302007 - DNA, 25 bp, Homo sapien
ctctttgagcaaggtataaagaaca

SEQ ID NO: 3302008 - DNA, 25 bp, Homo sapien
agattttgtatatatcctcgaggca

SEQ ID NO: 3302009 - DNA, 25 bp, Homo sapien
cagaaatgtaacacacaagatgaga

SEQ ID NO: 3302010 - DNA, 25 bp, Homo sapien
tttcttcccaataaagctttcagag

SEQ ID NO: 3302011 - DNA, 25 bp, Homo sapien
gctttcagagactccaagaatggca

SEQ ID NO: 3302012 - DNA, 25 bp, Homo sapien
tttccgatggcttggcctgatgctt

SEQ ID NO: 3302013 - DNA, 25 bp, Homo sapien
gaatggcagctacattttgttctgc

SEQ ID NO: 3302014 - DNA, 25 bp, Homo sapien
aaagttaaacgaaccataaatgctg

SEQ ID NO: 3302015 - DNA, 25 bp, Homo sapien
aaagcatataataggccgggtacag

SEQ ID NO: 3302016 - DNA, 25 bp, Homo sapien
gaaccataaatgctgttgccagatt

SEQ ID NO: 3302017 - DNA, 25 bp, Homo sapien
ttcataaacgaagtagcctaagttg

SEQ ID NO: 3302018 - DNA, 25 bp, Homo sapien
ggttgttaggtagattagatgaaga

SEQ ID NO: 3302019 - DNA, 25 bp, Homo sapien
gaagtatatcatccaatcagggtta

SEQ ID NO: 3302020 - DNA, 25 bp, Homo sapien
gaatgtcacaataagctaaatctat

SEQ ID NO: 3302021 - DNA, 25 bp, Homo sapien
aggctttcaagcacaagtccttcaa

SEQ ID NO: 3302022 - DNA, 25 bp, Homo sapien
tatgtaccccaaaatacatagagat

SEQ ID NO: 3302023 - DNA, 25 bp, Homo sapien
tcttactatataactattttggagg

SEQ ID NO: 3302024 - DNA, 25 bp, Homo sapien
tgcttaaatatagcaaaaagtcttc

SEQ ID NO: 3302025 - DNA, 25 bp, Homo sapien
gtacataccttctgaaccaactatt

SEQ ID NO: 3302026 - DNA, 25 bp, Homo sapien
caggaggattactttaggtgagaag

SEQ ID NO: 3302027 - DNA, 25 bp, Homo sapien
ccacaacactttattcactgtcatg

SEQ ID NO: 3302028 - DNA, 25 bp, Homo sapien
gcaggaggattactttaggtgagaa

SEQ ID NO: 3302029 - DNA, 25 bp, Homo sapien
aacaatctctaagacattatattca

SEQ ID NO: 3302030 - DNA, 25 bp, Homo sapien
acaggcatgtatcaccatgcctggc

SEQ ID NO: 3302031 - DNA, 25 bp, Homo sapien
ctacaggcatgtatcaccatgcctg

SEQ ID NO: 3302032 - DNA, 25 bp, Homo sapien
aggttcaaacaattcctgtgcctca

SEQ ID NO: 3302033 - DNA, 25 bp, Homo sapien
gactacaggcatgtatcaccatgcc

SEQ ID NO: 3302034 - DNA, 25 bp, Homo sapien
tcaggtatctaagtgattcaacagt

SEQ ID NO: 3302035 - DNA, 25 bp, Homo sapien
atagtgtctttttgtaggagtcctt

SEQ ID NO: 3302036 - DNA, 25 bp, Homo sapien
ttctgtcaggtatctaagtgattca

SEQ ID NO: 3302037 - DNA, 25 bp, Homo sapien
tgaagcacgtcccaactttgtaata

SEQ ID NO: 3302038 - DNA, 25 bp, Homo sapien
aatgatagatgtcatcaagattcgt

SEQ ID NO: 3302039 - DNA, 25 bp, Homo sapien
tagatgtcatcaagattcgttgcaa

SEQ ID NO: 3302040 - DNA, 25 bp, Homo sapien
gatagatgtcatcaagattcgttgc

SEQ ID NO: 3302041 - DNA, 25 bp, Homo sapien
agatgtcatcaagattcgttgcaat

SEQ ID NO: 3302042 - DNA, 25 bp, Homo sapien
ttcaaaccaatcaaagagagaaata

SEQ ID NO: 3302043 - DNA, 25 bp, Homo sapien
tggtgaattcctgaacaagatggct

SEQ ID NO: 3302044 - DNA, 25 bp, Homo sapien
tccaatggtttagttattaactcca

SEQ ID NO: 3302045 - DNA, 25 bp, Homo sapien
tcctgaacaagatggctgtaacagt

SEQ ID NO: 3302046 - DNA, 25 bp, Homo sapien
aatagtatctattccagcacgacca

SEQ ID NO: 3302047 - DNA, 25 bp, Homo sapien
caacatagggagctcttaaaataac

SEQ ID NO: 3302048 - DNA, 25 bp, Homo sapien
gcaacatagggagctcttaaaataa

SEQ ID NO: 3302049 - DNA, 25 bp, Homo sapien
tatctattccagcacgaccagctct

SEQ ID NO: 3302050 - DNA, 25 bp, Homo sapien
cacctgccgctagggtagatgtgca

SEQ ID NO: 3302051 - DNA, 25 bp, Homo sapien
taaaaagacagagcactcctgtgga

SEQ ID NO: 3302052 - DNA, 25 bp, Homo sapien
gccactgtggtgataggcaactcca

SEQ ID NO: 3302053 - DNA, 25 bp, Homo sapien
tcgagctggtaggttgacacctgcc

SEQ ID NO: 3302054 - DNA, 25 bp, Homo sapien
agttcttaatcacctcacatttttc

SEQ ID NO: 3302055 - DNA, 25 bp, Homo sapien
aagttcttaatcacctcacattttt

SEQ ID NO: 3302056 - DNA, 25 bp, Homo sapien
caagttcttaatcacctcacatttt

SEQ ID NO: 3302057 - DNA, 25 bp, Homo sapien
gagcccttgatcttttagtgacaaa

SEQ ID NO: 3302058 - DNA, 25 bp, Homo sapien
gaaatatgagcccttgatcttttag

SEQ ID NO: 3302059 - DNA, 25 bp, Homo sapien
ctgttagaaatatgagcccttgatc

SEQ ID NO: 3302060 - DNA, 25 bp, Homo sapien
tatgagcccttgatcttttagtgac

SEQ ID NO: 3302061 - DNA, 25 bp, Homo sapien
tagccagtgtctccatcttattacc

SEQ ID NO: 3302062 - DNA, 25 bp, Homo sapien
tcaaaatcattgtaaaagcagactg

SEQ ID NO: 3302063 - DNA, 25 bp, Homo sapien
tgttaccaaaatgagcaactccttc

SEQ ID NO: 3302064 - DNA, 25 bp, Homo sapien
aaaacactgcctaaacacttgcact

SEQ ID NO: 3302065 - DNA, 25 bp, Homo sapien
aggtcaaggccttcagtatactaaa

SEQ ID NO: 3302066 - DNA, 25 bp, Homo sapien
gcataattagtgtttgcccaataaa

SEQ ID NO: 3302067 - DNA, 25 bp, Homo sapien
cttcaaggtcaaggccttcagtata

SEQ ID NO: 3302068 - DNA, 25 bp, Homo sapien
cagccaccttagaatgtttctctgg

SEQ ID NO: 3302069 - DNA, 25 bp, Homo sapien
tgggaataacttctgtcaccaatgc

SEQ ID NO: 3302070 - DNA, 25 bp, Homo sapien
caggatccatcttttttagggtatc

SEQ ID NO: 3302071 - DNA, 25 bp, Homo sapien
tactaggacaaaaaactaagcagga

SEQ ID NO: 3302072 - DNA, 25 bp, Homo sapien
aatgctaccaagtgatcaggatcca

SEQ ID NO: 3302073 - DNA, 25 bp, Homo sapien
tccaacaaatgtcaagcatcagctg

SEQ ID NO: 3302074 - DNA, 25 bp, Homo sapien
ggcagtctgcatggtgtccaacaaa

SEQ ID NO: 3302075 - DNA, 25 bp, Homo sapien
gagctatcttgaactggcagtctgc

SEQ ID NO: 3302076 - DNA, 25 bp, Homo sapien
gactattctacggaatccattggaa

SEQ ID NO: 3302077 - DNA, 25 bp, Homo sapien
aaagtcatgccattctcagctttgc

SEQ ID NO: 3302078 - DNA, 25 bp, Homo sapien
tgctgtcaacttcatatattgtatc

SEQ ID NO: 3302079 - DNA, 25 bp, Homo sapien
taattaagaagacgtgaaaaagtca

SEQ ID NO: 3302080 - DNA, 25 bp, Homo sapien
ttaagaagacgtgaaaaagtcatgc

SEQ ID NO: 3302081 - DNA, 25 bp, Homo sapien
gaaaggacagctataaaagagttta

SEQ ID NO: 3302082 - DNA, 25 bp, Homo sapien
ggacatttgcaattaatacgacata

SEQ ID NO: 3302083 - DNA, 25 bp, Homo sapien
taacttttactaaggtatcatctgt

SEQ ID NO: 3302084 - DNA, 25 bp, Homo sapien
ttatgtctcaagatctaaaactttg

SEQ ID NO: 3302085 - DNA, 25 bp, Homo sapien
taatgttgcactcataccaataatt

SEQ ID NO: 3302086 - DNA, 25 bp, Homo sapien
tgtaggtcttcaacattgtttaatg

SEQ ID NO: 3302087 - DNA, 25 bp, Homo sapien
tggtctaaattgactggtataatat

SEQ ID NO: 3302088 - DNA, 25 bp, Homo sapien
ggtataatattctgcttgaagaaac

SEQ ID NO: 3302089 - DNA, 25 bp, Homo sapien
ggcttccttcaccaatcatgtgcaa

SEQ ID NO: 3302090 - DNA, 25 bp, Homo sapien
cacggcttccttcaccaatcatgtg

SEQ ID NO: 3302091 - DNA, 25 bp, Homo sapien
tttccagtgtagctccacggcttcc

SEQ ID NO: 3302092 - DNA, 25 bp, Homo sapien
tagtgtagaggatttttgctagggt

SEQ ID NO: 3302093 - DNA, 25 bp, Homo sapien
aacaaccagacccagactgtcaatt

SEQ ID NO: 3302094 - DNA, 25 bp, Homo sapien
caagctatgtcctttttcaatagtg

SEQ ID NO: 3302095 - DNA, 25 bp, Homo sapien
tccagtttcaatcaaggagttcacc

SEQ ID NO: 3302096 - DNA, 25 bp, Homo sapien
tttcaatagtggcaatatagagtga

SEQ ID NO: 3302097 - DNA, 25 bp, Homo sapien
tcttggacaattgccacatatggaa

SEQ ID NO: 3302098 - DNA, 25 bp, Homo sapien
taaaacatctttccgacagcaaagc

SEQ ID NO: 3302099 - DNA, 25 bp, Homo sapien
cagttcttgcagcattaaaatctca

SEQ ID NO: 3302100 - DNA, 25 bp, Homo sapien
cagccacgagggtttttccaccact

SEQ ID NO: 3302101 - DNA, 25 bp, Homo sapien
taagtcatgaacctcacaatttgga

SEQ ID NO: 3302102 - DNA, 25 bp, Homo sapien
tgtagagtcttttattagactttgt

SEQ ID NO: 3302103 - DNA, 25 bp, Homo sapien
ttgtagagtcttttattagactttg

SEQ ID NO: 3302104 - DNA, 25 bp, Homo sapien
catatcattcataagatcctaacag

SEQ ID NO: 3302105 - DNA, 25 bp, Homo sapien
gaacccaagttttcatatcattcat

SEQ ID NO: 3302106 - DNA, 25 bp, Homo sapien
ttcataagatcctaacaggagttcc

SEQ ID NO: 3302107 - DNA, 25 bp, Homo sapien
ccaagttttcatatcattcataaga

SEQ ID NO: 3302108 - DNA, 25 bp, Homo sapien
cagtatggcagcaactgtcccttct

SEQ ID NO: 3302109 - DNA, 25 bp, Homo sapien
tggaaggttgatggggctgaccctc

SEQ ID NO: 3302110 - DNA, 25 bp, Homo sapien
ggctgaccctccagtatggcagcaa

SEQ ID NO: 3302111 - DNA, 25 bp, Homo sapien
gaccctccagtatggcagcaactgt

SEQ ID NO: 3302112 - DNA, 25 bp, Homo sapien
cagtatggaccatgaaagcatttgc

SEQ ID NO: 3302113 - DNA, 25 bp, Homo sapien
tcaaagacataccacaacagctagg

SEQ ID NO: 3302114 - DNA, 25 bp, Homo sapien
ctgaaatatatgcaaggaccctgga

SEQ ID NO: 3302115 - DNA, 25 bp, Homo sapien
tgaggatctctactagacaatcggg

SEQ ID NO: 3302116 - DNA, 25 bp, Homo sapien
ttttttattccagcaaaaagcatta

SEQ ID NO: 3302117 - DNA, 25 bp, Homo sapien
tttttattccagcaaaaagcattac

SEQ ID NO: 3302118 - DNA, 25 bp, Homo sapien
atttttttattccagcaaaaagcat

SEQ ID NO: 3302119 - DNA, 25 bp, Homo sapien
caattcccttgaattgggcataaag

SEQ ID NO: 3302120 - DNA, 25 bp, Homo sapien
ccttgaattgggcataaaggtctct

SEQ ID NO: 3302121 - DNA, 25 bp, Homo sapien
ttttcaattcccttgaattgggcat

SEQ ID NO: 3302122 - DNA, 25 bp, Homo sapien
tgaattgggcataaaggtctctcac

SEQ ID NO: 3302123 - DNA, 25 bp, Homo sapien
tttcctcagataggagagtgtcttt

SEQ ID NO: 3302124 - DNA, 25 bp, Homo sapien
atttcctcagataggagagtgtctt

SEQ ID NO: 3302125 - DNA, 25 bp, Homo sapien
tcaaagtatatagcctgtgaggaag

SEQ ID NO: 3302126 - DNA, 25 bp, Homo sapien
tgttccaggtcgtcaacttgagcta

SEQ ID NO: 3302127 - DNA, 25 bp, Homo sapien
cagtgttgtgagaggatgacttcca

SEQ ID NO: 3302128 - DNA, 25 bp, Homo sapien
tcagctccaggttcaatagtgacac

SEQ ID NO: 3302129 - DNA, 25 bp, Homo sapien
gaagacgagagaagtaaacgaaggc

SEQ ID NO: 3302130 - DNA, 25 bp, Homo sapien
cgataaaactggtcaactctttgca

SEQ ID NO: 3302131 - DNA, 25 bp, Homo sapien
taacagtggtaacgaagacgagaga

SEQ ID NO: 3302132 - DNA, 25 bp, Homo sapien
ctcctaagtgccgattaacagtggt

SEQ ID NO: 3302133 - DNA, 25 bp, Homo sapien
tgtcagtgggcatgtgacgtaggag

SEQ ID NO: 3302134 - DNA, 25 bp, Homo sapien
gtccgggtttgtatcaccacctcca

SEQ ID NO: 3302135 - DNA, 25 bp, Homo sapien
cacctccaaggacgagacattccgg

SEQ ID NO: 3302136 - DNA, 25 bp, Homo sapien
cattccggggaatctgagagtagaa

SEQ ID NO: 3302137 - DNA, 25 bp, Homo sapien
ctcaaccggcagtacgcccgcggtt

SEQ ID NO: 3302138 - DNA, 25 bp, Homo sapien
ccgccggcggatgcgggaaccacat

SEQ ID NO: 3302139 - DNA, 25 bp, Homo sapien
gcggttttccgcctcctgttctcag

SEQ ID NO: 3302140 - DNA, 25 bp, Homo sapien
gagcgccaaaaatacaccccaagct

SEQ ID NO: 3302141 - DNA, 25 bp, Homo sapien
aagttagctctcagggctcgcggac

SEQ ID NO: 3302142 - DNA, 25 bp, Homo sapien
tctacatccaccttgggaaaagacc

SEQ ID NO: 3302143 - DNA, 25 bp, Homo sapien
agacgctaagcccatatggaaggga

SEQ ID NO: 3302144 - DNA, 25 bp, Homo sapien
cagacgtcgttctcagtgacccaga

SEQ ID NO: 3302145 - DNA, 25 bp, Homo sapien
tcgcgggtcctcagcgttctcctgc

SEQ ID NO: 3302146 - DNA, 25 bp, Homo sapien
ggtcctcagcgttctcctgcggaac

SEQ ID NO: 3302147 - DNA, 25 bp, Homo sapien
gcgggtcctcagcgttctcctgcgg

SEQ ID NO: 3302148 - DNA, 25 bp, Homo sapien
tctcgcgggtcctcagcgttctcct

SEQ ID NO: 3302149 - DNA, 25 bp, Homo sapien
catggccgctgtggttgctgtttgc

SEQ ID NO: 3302150 - DNA, 25 bp, Homo sapien
tttgaacggggtactcgagcccaca

SEQ ID NO: 3302151 - DNA, 25 bp, Homo sapien
gaagagcagcggaaggggcctttcg

SEQ ID NO: 3302152 - DNA, 25 bp, Homo sapien
gaagaaacgcggaaccatggccgct

SEQ ID NO: 3302153 - DNA, 25 bp, Homo sapien
tatcctatgctccattgtagcgctg

SEQ ID NO: 3302154 - DNA, 25 bp, Homo sapien
cacatcccgggactcacacgggtaa

SEQ ID NO: 3302155 - DNA, 25 bp, Homo sapien
tatgctccattgtagcgctgcaggc

SEQ ID NO: 3302156 - DNA, 25 bp, Homo sapien
gggtaaagtctccatatcctatgct

SEQ ID NO: 3302157 - DNA, 25 bp, Homo sapien
aaatgtgtctgaaatttagtaaagc

SEQ ID NO: 3302158 - DNA, 25 bp, Homo sapien
tctccatttactggatgcatttatg

SEQ ID NO: 3302159 - DNA, 25 bp, Homo sapien
tagacttgacacactggatagaaaa

SEQ ID NO: 3302160 - DNA, 25 bp, Homo sapien
acataaaactccaaaacagcttttg

SEQ ID NO: 3302161 - DNA, 25 bp, Homo sapien
tagacgagtctaccctcaaaccagt

SEQ ID NO: 3302162 - DNA, 25 bp, Homo sapien
tacaaggatcctgcatatctcaagg

SEQ ID NO: 3302163 - DNA, 25 bp, Homo sapien
tcatgcaaaggactctaaactaggg

SEQ ID NO: 3302164 - DNA, 25 bp, Homo sapien
tagtggtgctgtcacagaaggacaa

SEQ ID NO: 3302165 - DNA, 25 bp, Homo sapien
ctctagccataatgtacttctaaaa

SEQ ID NO: 3302166 - DNA, 25 bp, Homo sapien
gcaaatttattgcatgatatccagc

SEQ ID NO: 3302167 - DNA, 25 bp, Homo sapien
tctggcaactctagccataatgtac

SEQ ID NO: 3302168 - DNA, 25 bp, Homo sapien
tgcaaatttattgcatgatatccag

SEQ ID NO: 3302169 - DNA, 25 bp, Homo sapien
ctttccatattttgaaaataaggct

SEQ ID NO: 3302170 - DNA, 25 bp, Homo sapien
taatgactcagataaattttcatat

SEQ ID NO: 3302171 - DNA, 25 bp, Homo sapien
ttaaggagaattttaatgactcaga

SEQ ID NO: 3302172 - DNA, 25 bp, Homo sapien
tctttccatattttgaaaataaggc

SEQ ID NO: 3302173 - DNA, 25 bp, Homo sapien
gaacttactgcaagtagctcaacat

SEQ ID NO: 3302174 - DNA, 25 bp, Homo sapien
taagagttatctgtgtattactgca

SEQ ID NO: 3302175 - DNA, 25 bp, Homo sapien
tgtgtaagccttcccctcaacaact

SEQ ID NO: 3302176 - DNA, 25 bp, Homo sapien
taatagacatggtctcaatacgttg

SEQ ID NO: 3302177 - DNA, 25 bp, Homo sapien
gatcgtttgtcttgtgtatctaaca

SEQ ID NO: 3302178 - DNA, 25 bp, Homo sapien
tactaccagtatctgctttagatcg

SEQ ID NO: 3302179 - DNA, 25 bp, Homo sapien
atgtaggagaccgtgaatattcacc

SEQ ID NO: 3302180 - DNA, 25 bp, Homo sapien
gctcattttggatgctttatcttgg

SEQ ID NO: 3302181 - DNA, 25 bp, Homo sapien
aaaggtccgtaatgcctgacaaaga

SEQ ID NO: 3302182 - DNA, 25 bp, Homo sapien
tggaaaaaaggtccgtaatgcctga

SEQ ID NO: 3302183 - DNA, 25 bp, Homo sapien
aaaaggtccgtaatgcctgacaaag

SEQ ID NO: 3302184 - DNA, 25 bp, Homo sapien
gaaaaaaggtccgtaatgcctgaca

SEQ ID NO: 3302185 - DNA, 25 bp, Homo sapien
tttctcaatttctcgttttaatctg

SEQ ID NO: 3302186 - DNA, 25 bp, Homo sapien
tctggaggatgtcagtaacaagcac

SEQ ID NO: 3302187 - DNA, 25 bp, Homo sapien
tcatgccagttagttcgctgaaaat

SEQ ID NO: 3302188 - DNA, 25 bp, Homo sapien
tttatacagcttttatcatgccagt

SEQ ID NO: 3302189 - DNA, 25 bp, Homo sapien
gaaatattaactcatgggccagctg

SEQ ID NO: 3302190 - DNA, 25 bp, Homo sapien
cctggatgaagatgacattcagaaa

SEQ ID NO: 3302191 - DNA, 25 bp, Homo sapien
gacatgtcccaaataagggctgctc

SEQ ID NO: 3302192 - DNA, 25 bp, Homo sapien
tcctggatgaagatgacattcagaa

SEQ ID NO: 3302193 - DNA, 25 bp, Homo sapien
tgccttatgccatgaggacatgtcc

SEQ ID NO: 3302194 - DNA, 25 bp, Homo sapien
cctttaaggatccatcttcttcaaa

SEQ ID NO: 3302195 - DNA, 25 bp, Homo sapien
cttatgtacctcctttaaggatcca

SEQ ID NO: 3302196 - DNA, 25 bp, Homo sapien
ttcctcttgtaatgaagcatacatt

SEQ ID NO: 3302197 - DNA, 25 bp, Homo sapien
ttaattcctcttgtaatgaagcata

SEQ ID NO: 3302198 - DNA, 25 bp, Homo sapien
tcagacatgcccagattggcaacca

SEQ ID NO: 3302199 - DNA, 25 bp, Homo sapien
tataacccagttgttcagacatgcc

SEQ ID NO: 3302200 - DNA, 25 bp, Homo sapien
ttcagacatgcccagattggcaacc

SEQ ID NO: 3302201 - DNA, 25 bp, Homo sapien
gttcagacatgcccagattggcaac

SEQ ID NO: 3302202 - DNA, 25 bp, Homo sapien
ctgacaaaataaaactttagagtat

SEQ ID NO: 3302203 - DNA, 25 bp, Homo sapien
tgacaaaataaaactttagagtata

SEQ ID NO: 3302204 - DNA, 25 bp, Homo sapien
gaaaaactgctgaagtatctaggct

SEQ ID NO: 3302205 - DNA, 25 bp, Homo sapien
gattagtatctacctgctggaatag

SEQ ID NO: 3302206 - DNA, 25 bp, Homo sapien
cctgtaaggagtccctggttagact

SEQ ID NO: 3302207 - DNA, 25 bp, Homo sapien
cactgggcccagatgacatgtaaag

SEQ ID NO: 3302208 - DNA, 25 bp, Homo sapien
taaggaatgttccagtcgatgagta

SEQ ID NO: 3302209 - DNA, 25 bp, Homo sapien
ttccagtcgatgagtagagcagctt

SEQ ID NO: 3302210 - DNA, 25 bp, Homo sapien
tgttccagtcgatgagtagagcagc

SEQ ID NO: 3302211 - DNA, 25 bp, Homo sapien
gaatgttccagtcgatgagtagagc

SEQ ID NO: 3302212 - DNA, 25 bp, Homo sapien
tctgaatgacgacggaatttgtacc

SEQ ID NO: 3302213 - DNA, 25 bp, Homo sapien
cggaatttgtaccaacctaccacat

SEQ ID NO: 3302214 - DNA, 25 bp, Homo sapien
gatctgatctgaatgacgacggaat

SEQ ID NO: 3302215 - DNA, 25 bp, Homo sapien
tgacgacggaatttgtaccaaccta

SEQ ID NO: 3302216 - DNA, 25 bp, Homo sapien
ttttcttcagtgcttgctcatttac

SEQ ID NO: 3302217 - DNA, 25 bp, Homo sapien
ttcagtgcttgctcatttacttcgc

SEQ ID NO: 3302218 - DNA, 25 bp, Homo sapien
taatattttcttcagtgcttgctca

SEQ ID NO: 3302219 - DNA, 25 bp, Homo sapien
ctttttgacatttgataatattttc

SEQ ID NO: 3302220 - DNA, 25 bp, Homo sapien
aaaagctgatagcatggaatatatt

SEQ ID NO: 3302221 - DNA, 25 bp, Homo sapien
ctaaaaagctgatagcatggaatat

SEQ ID NO: 3302222 - DNA, 25 bp, Homo sapien
taaaaagctgatagcatggaatata

SEQ ID NO: 3302223 - DNA, 25 bp, Homo sapien
aaaaagctgatagcatggaatatat

SEQ ID NO: 3302224 - DNA, 25 bp, Homo sapien
tacctccaggagtgtgactttcaaa

SEQ ID NO: 3302225 - DNA, 25 bp, Homo sapien
gataatacctagtgttggcaagagc

SEQ ID NO: 3302226 - DNA, 25 bp, Homo sapien
ggcaatcagctagtctacctccagg

SEQ ID NO: 3302227 - DNA, 25 bp, Homo sapien
tacaacaggatatatgcagccagca

SEQ ID NO: 3302228 - DNA, 25 bp, Homo sapien
catatagtaagatcccatttgtgta

SEQ ID NO: 3302229 - DNA, 25 bp, Homo sapien
atattaggcacatatagtaagatcc

SEQ ID NO: 3302230 - DNA, 25 bp, Homo sapien
taggcacatatagtaagatcccatt

SEQ ID NO: 3302231 - DNA, 25 bp, Homo sapien
agatcccatttgtgtaaataaaaag

SEQ ID NO: 3302232 - DNA, 25 bp, Homo sapien
tctgggcgacagaatgagactccat

SEQ ID NO: 3302233 - DNA, 25 bp, Homo sapien
agtctgggcgacagaatgagactcc

SEQ ID NO: 3302234 - DNA, 25 bp, Homo sapien
gagaatcgcttgacctcgagaggca

SEQ ID NO: 3302235 - DNA, 25 bp, Homo sapien
aatcgcttgacctcgagaggcagag

SEQ ID NO: 3302236 - DNA, 25 bp, Homo sapien
gacacagtaataccatatctaggaa

SEQ ID NO: 3302237 - DNA, 25 bp, Homo sapien
tccggaaagcaatctgctaatgcag

SEQ ID NO: 3302238 - DNA, 25 bp, Homo sapien
ccttacaagtgttcataccctgtga

SEQ ID NO: 3302239 - DNA, 25 bp, Homo sapien
tttaaatcacagtaaggccacaggg

SEQ ID NO: 3302240 - DNA, 25 bp, Homo sapien
ccttggtcttcctattgccgggcca

SEQ ID NO: 3302241 - DNA, 25 bp, Homo sapien
ttccttggtcttcctattgccgggc

SEQ ID NO: 3302242 - DNA, 25 bp, Homo sapien
ggtcttcctattgccgggccatctt

SEQ ID NO: 3302243 - DNA, 25 bp, Homo sapien
ttggtcttcctattgccgggccatc

SEQ ID NO: 3302244 - DNA, 25 bp, Homo sapien
gcataaactatcaaatataggagac

SEQ ID NO: 3302245 - DNA, 25 bp, Homo sapien
tcaaatataggagacacagatgatt

SEQ ID NO: 3302246 - DNA, 25 bp, Homo sapien
ctatcaaatataggagacacagatg

SEQ ID NO: 3302247 - DNA, 25 bp, Homo sapien
agatgattcaaatataggagaaata

SEQ ID NO: 3302248 - DNA, 25 bp, Homo sapien
tcatccatttgggaatcagtaatgc

SEQ ID NO: 3302249 - DNA, 25 bp, Homo sapien
catccatttgggaatcagtaatgct

SEQ ID NO: 3302250 - DNA, 25 bp, Homo sapien
tactcaaaagacgaactcagggaag

SEQ ID NO: 3302251 - DNA, 25 bp, Homo sapien
tctttactggaatcacgcgggggga

SEQ ID NO: 3302252 - DNA, 25 bp, Homo sapien
tgattttgatactcaaaagacgaac

SEQ ID NO: 3302253 - DNA, 25 bp, Homo sapien
gggatatccagaatctagtgttctt

SEQ ID NO: 3302254 - DNA, 25 bp, Homo sapien
tattactttgtaaggttatctgaaa

SEQ ID NO: 3302255 - DNA, 25 bp, Homo sapien
ctttgtaaggttatctgaaattgta

SEQ ID NO: 3302256 - DNA, 25 bp, Homo sapien
tactttgtaaggttatctgaaattg

SEQ ID NO: 3302257 - DNA, 25 bp, Homo sapien
tttgtaaggttatctgaaattgtat

SEQ ID NO: 3302258 - DNA, 25 bp, Homo sapien
caattccaacctttattaggattgt

SEQ ID NO: 3302259 - DNA, 25 bp, Homo sapien
caacctttattaggattgtgccaaa

SEQ ID NO: 3302260 - DNA, 25 bp, Homo sapien
tcactacgttgtccccgatggtctc

SEQ ID NO: 3302261 - DNA, 25 bp, Homo sapien
ctttattaggattgtgccaaagagc

SEQ ID NO: 3302262 - DNA, 25 bp, Homo sapien
gtgtatttcagatgcttagactttc

SEQ ID NO: 3302263 - DNA, 25 bp, Homo sapien
tgaacttagcagaaattactaggca

SEQ ID NO: 3302264 - DNA, 25 bp, Homo sapien
cattgttcagcagggtattctccga

SEQ ID NO: 3302265 - DNA, 25 bp, Homo sapien
tctccgaactgtaccacacagcagg

SEQ ID NO: 3302266 - DNA, 25 bp, Homo sapien
tctgcatgaaaaagtccgcctggtt

SEQ ID NO: 3302267 - DNA, 25 bp, Homo sapien
tggttttgcaaacgcctgtcgggcg

SEQ ID NO: 3302268 - DNA, 25 bp, Homo sapien
aacacgcacagacgctgctctgcat

SEQ ID NO: 3302269 - DNA, 25 bp, Homo sapien
gcagagcagcggaaagacgctccgt

SEQ ID NO: 3302270 - DNA, 25 bp, Homo sapien
tgtccgagtccgtgttgaggtgctg

SEQ ID NO: 3302271 - DNA, 25 bp, Homo sapien
aaagcccgagagcaccgccgacgta

SEQ ID NO: 3302272 - DNA, 25 bp, Homo sapien
agtgcgccgagcacaaagcccgaga

SEQ ID NO: 3302273 - DNA, 25 bp, Homo sapien
tgaggtgctggaaagcgagtgcgcc

SEQ ID NO: 3302274 - DNA, 25 bp, Homo sapien
ctcaggctacacaagaggacgaggg

SEQ ID NO: 3302275 - DNA, 25 bp, Homo sapien
agaccctgtggtggcagcgaggcgg

SEQ ID NO: 3302276 - DNA, 25 bp, Homo sapien
gcggggcgcgcggaggcaagaccct

SEQ ID NO: 3302277 - DNA, 25 bp, Homo sapien
ggctacacaagaggacgagggcggg

SEQ ID NO: 3302278 - DNA, 25 bp, Homo sapien
tcaagcaccaaaagctatactctgg

SEQ ID NO: 3302279 - DNA, 25 bp, Homo sapien
tactctggaaactccaagatcagtg

SEQ ID NO: 3302280 - DNA, 25 bp, Homo sapien
gtttcaaggaatgccagagtgccag

SEQ ID NO: 3302281 - DNA, 25 bp, Homo sapien
aatagggcagtcagataggcttcac

SEQ ID NO: 3302282 - DNA, 25 bp, Homo sapien
aataaagtacaatgccacactggcc

SEQ ID NO: 3302283 - DNA, 25 bp, Homo sapien
ataaagtacaatgccacactggcca

SEQ ID NO: 3302284 - DNA, 25 bp, Homo sapien
aaataaagtacaatgccacactggc

SEQ ID NO: 3302285 - DNA, 25 bp, Homo sapien
aaaataaagtacaatgccacactgg

SEQ ID NO: 3302286 - DNA, 25 bp, Homo sapien
taggaaattagggtccttgacacca

SEQ ID NO: 3302287 - DNA, 25 bp, Homo sapien
gctaggaaattagggtccttgacac

SEQ ID NO: 3302288 - DNA, 25 bp, Homo sapien
gaaattagggtccttgacaccatta

SEQ ID NO: 3302289 - DNA, 25 bp, Homo sapien
catgctaggaaattagggtccttga

SEQ ID NO: 3302290 - DNA, 25 bp, Homo sapien
gtttcaaactctggtttgatgggga

SEQ ID NO: 3302291 - DNA, 25 bp, Homo sapien
ctgtttcaaactctggtttgatggg

SEQ ID NO: 3302292 - DNA, 25 bp, Homo sapien
tgtttcaaactctggtttgatgggg

SEQ ID NO: 3302293 - DNA, 25 bp, Homo sapien
ctgttggctgtgaccctggtgatga

SEQ ID NO: 3302294 - DNA, 25 bp, Homo sapien
ttcatttctgaaggcgcctatgtcg

SEQ ID NO: 3302295 - DNA, 25 bp, Homo sapien
gtccattcttcatcgaagtgaagca

SEQ ID NO: 3302296 - DNA, 25 bp, Homo sapien
ggtatcacacctttccttacgaata

SEQ ID NO: 3302297 - DNA, 25 bp, Homo sapien
caggcaaaacctttaggcaggagct

SEQ ID NO: 3302298 - DNA, 25 bp, Homo sapien
gatatactggtgttgaagcggccat

SEQ ID NO: 3302299 - DNA, 25 bp, Homo sapien
cagaatagtatggtggaagctccac

SEQ ID NO: 3302300 - DNA, 25 bp, Homo sapien
gatgtaaaagcgtagataaacccag

SEQ ID NO: 3302301 - DNA, 25 bp, Homo sapien
tacttgccagtgtgtaggccaaccc

SEQ ID NO: 3302302 - DNA, 25 bp, Homo sapien
cagcatctgatgttccactggcata

SEQ ID NO: 3302303 - DNA, 25 bp, Homo sapien
gcccaactgtgctaatcgataaaga

SEQ ID NO: 3302304 - DNA, 25 bp, Homo sapien
gacctcccacaaatgatatcaagtg

SEQ ID NO: 3302305 - DNA, 25 bp, Homo sapien
gcattttgtaattgaggaagataac

SEQ ID NO: 3302306 - DNA, 25 bp, Homo sapien
aggaagataacaaaactaatatcct

SEQ ID NO: 3302307 - DNA, 25 bp, Homo sapien
gtttatcagggtttgtgtgacagag

SEQ ID NO: 3302308 - DNA, 25 bp, Homo sapien
tcagggtttgtgtgacagagagtaa

SEQ ID NO: 3302309 - DNA, 25 bp, Homo sapien
cattagccccatggattgtaaggtg

SEQ ID NO: 3302310 - DNA, 25 bp, Homo sapien
aactcatcgatagggtaattctcca

SEQ ID NO: 3302311 - DNA, 25 bp, Homo sapien
tggttatggtctactgcaaggttga

SEQ ID NO: 3302312 - DNA, 25 bp, Homo sapien
gaaaagtgtgtttggaactcatcga

SEQ ID NO: 3302313 - DNA, 25 bp, Homo sapien
gctctgggccaccagtgcttcccat

SEQ ID NO: 3302314 - DNA, 25 bp, Homo sapien
gctccaccatgcacagaccctgctc

SEQ ID NO: 3302315 - DNA, 25 bp, Homo sapien
ccaccatgcacagaccctgctctgg

SEQ ID NO: 3302316 - DNA, 25 bp, Homo sapien
tgcacaggctccaccatgcacagac

SEQ ID NO: 3302317 - DNA, 25 bp, Homo sapien
tgtaatcaattagttgtaaacaccc

SEQ ID NO: 3302318 - DNA, 25 bp, Homo sapien
taaaggctagttaagggaagcagtg

SEQ ID NO: 3302319 - DNA, 25 bp, Homo sapien
gaaatctgtgactggttgtaatcaa

SEQ ID NO: 3302320 - DNA, 25 bp, Homo sapien
ggagtggagaagaaacaaagaaatc

SEQ ID NO: 3302321 - DNA, 25 bp, Homo sapien
gatttcagtgctgaggatatgatga

SEQ ID NO: 3302322 - DNA, 25 bp, Homo sapien
taatgtgacaacattgccagtaggg

SEQ ID NO: 3302323 - DNA, 25 bp, Homo sapien
gggtgctgtttcacgtagcattaga

SEQ ID NO: 3302324 - DNA, 25 bp, Homo sapien
cattagaagctttatggctttggat

SEQ ID NO: 3302325 - DNA, 25 bp, Homo sapien
tctgctcctctatacgaagaccttg

SEQ ID NO: 3302326 - DNA, 25 bp, Homo sapien
ccatggtcttcctgtagcaaggtct

SEQ ID NO: 3302327 - DNA, 25 bp, Homo sapien
cagtccaagagctgtggtgcaagga

SEQ ID NO: 3302328 - DNA, 25 bp, Homo sapien
ttaggccttatagagacactgcttc

SEQ ID NO: 3302329 - DNA, 25 bp, Homo sapien
aaagctggcgttctgaaagaaactg

SEQ ID NO: 3302330 - DNA, 25 bp, Homo sapien
tgaaagctggcgttctgaaagaaac

SEQ ID NO: 3302331 - DNA, 25 bp, Homo sapien
agaaactgattaaatgacgcatcat

SEQ ID NO: 3302332 - DNA, 25 bp, Homo sapien
ctgaaagctggcgttctgaaagaaa

SEQ ID NO: 3302333 - DNA, 25 bp, Homo sapien
aaaattcgtgtagctagacaactcc

SEQ ID NO: 3302334 - DNA, 25 bp, Homo sapien
gctttatggacccaaagtcctccag

SEQ ID NO: 3302335 - DNA, 25 bp, Homo sapien
gcattgtgcatttggagcgctgatt

SEQ ID NO: 3302336 - DNA, 25 bp, Homo sapien
cacataatgtttctaagtgctgcat

SEQ ID NO: 3302337 - DNA, 25 bp, Homo sapien
gactgtggactctctcctgggggac

SEQ ID NO: 3302338 - DNA, 25 bp, Homo sapien
tctgagcactggatgagtgactgtg

SEQ ID NO: 3302339 - DNA, 25 bp, Homo sapien
tttggagctgctcctatggctctgg

SEQ ID NO: 3302340 - DNA, 25 bp, Homo sapien
tggagctgctcctatggctctggat

SEQ ID NO: 3302341 - DNA, 25 bp, Homo sapien
gaatcttgggctttatcgaaagctt

SEQ ID NO: 3302342 - DNA, 25 bp, Homo sapien
ctttgaagctggaaacaagttgaca

SEQ ID NO: 3302343 - DNA, 25 bp, Homo sapien
tcagtaccaagactgtgtagtagct

SEQ ID NO: 3302344 - DNA, 25 bp, Homo sapien
tgtagtagcttgaggaaacaacgtc

SEQ ID NO: 3302345 - DNA, 25 bp, Homo sapien
gtgaccgacaatgggagcagctgaa

SEQ ID NO: 3302346 - DNA, 25 bp, Homo sapien
agctgaaacagaatcacccttgttc

SEQ ID NO: 3302347 - DNA, 25 bp, Homo sapien
agagccatggatagccgtcgggaca

SEQ ID NO: 3302348 - DNA, 25 bp, Homo sapien
gacacgtgaaagagtgaccgacaat

SEQ ID NO: 3302349 - DNA, 25 bp, Homo sapien
ctctctcctcttcggcagccgttcc

SEQ ID NO: 3302350 - DNA, 25 bp, Homo sapien
tctcctcttcggcagccgttccact

SEQ ID NO: 3302351 - DNA, 25 bp, Homo sapien
tcggcagccgttccactgacttttc

SEQ ID NO: 3302352 - DNA, 25 bp, Homo sapien
tcttcggcagccgttccactgactt

SEQ ID NO: 3302353 - DNA, 25 bp, Homo sapien
tgacagggtcttctgctaatgcagc

SEQ ID NO: 3302354 - DNA, 25 bp, Homo sapien
gcagccatgaaataatcaaatccaa

SEQ ID NO: 3302355 - DNA, 25 bp, Homo sapien
gatataaagtgactggcagctatca

SEQ ID NO: 3302356 - DNA, 25 bp, Homo sapien
aacccatgatggtgcggcccacaac

SEQ ID NO: 3302357 - DNA, 25 bp, Homo sapien
gaatggaagtgggctgaagttccca

SEQ ID NO: 3302358 - DNA, 25 bp, Homo sapien
aatggaagtgggctgaagttcccat

SEQ ID NO: 3302359 - DNA, 25 bp, Homo sapien
ctggaaatactgccactgtctgggg

SEQ ID NO: 3302360 - DNA, 25 bp, Homo sapien
tctggatagggctgacaaagatgag

SEQ ID NO: 3302361 - DNA, 25 bp, Homo sapien
tctggggagtatcattggggttaaa

SEQ ID NO: 3302362 - DNA, 25 bp, Homo sapien
gatgcatcactgatagtctccccat

SEQ ID NO: 3302363 - DNA, 25 bp, Homo sapien
agaaacaatcgccactgttgaccac

SEQ ID NO: 3302364 - DNA, 25 bp, Homo sapien
gaaacaatcgccactgttgaccaca

SEQ ID NO: 3302365 - DNA, 25 bp, Homo sapien
aaacaatcgccactgttgaccacaa

SEQ ID NO: 3302366 - DNA, 25 bp, Homo sapien
gaatcttaactgatttacaggccaa

SEQ ID NO: 3302367 - DNA, 25 bp, Homo sapien
tacaggccaaagttattctataggc

SEQ ID NO: 3302368 - DNA, 25 bp, Homo sapien
tccccactgagctctgtacattttg

SEQ ID NO: 3302369 - DNA, 25 bp, Homo sapien
gagcttgcagaggatacataggtgt

SEQ ID NO: 3302370 - DNA, 25 bp, Homo sapien
tgtgtaagtttcttatctatttcca

SEQ ID NO: 3302371 - DNA, 25 bp, Homo sapien
gatgaatggagttttcgctagtttc

SEQ ID NO: 3302372 - DNA, 25 bp, Homo sapien
cagatatctgacttgcaatgtgtaa

SEQ ID NO: 3302373 - DNA, 25 bp, Homo sapien
ctagtttccgtaggacattagttgg

SEQ ID NO: 3302374 - DNA, 25 bp, Homo sapien
ctgttgtaggctgggcgagagagtg

SEQ ID NO: 3302375 - DNA, 25 bp, Homo sapien
actgttgtaggctgggcgagagagt

SEQ ID NO: 3302376 - DNA, 25 bp, Homo sapien
ccactgttgtaggctgggcgagaga

SEQ ID NO: 3302377 - DNA, 25 bp, Homo sapien
cactgttgtaggctgggcgagagag

SEQ ID NO: 3302378 - DNA, 25 bp, Homo sapien
gttgtagaggtagaaagtactcaga

SEQ ID NO: 3302379 - DNA, 25 bp, Homo sapien
tgcaggaccaatccagttgtagagg

SEQ ID NO: 3302380 - DNA, 25 bp, Homo sapien
aaagtactcagaattgtggaaatat

SEQ ID NO: 3302381 - DNA, 25 bp, Homo sapien
tcctcctttgcaggaccaatccagt

SEQ ID NO: 3302382 - DNA, 25 bp, Homo sapien
gaatgcgagatgataaagaaccttg

SEQ ID NO: 3302383 - DNA, 25 bp, Homo sapien
tggaaataaccatgaatcgaataca

SEQ ID NO: 3302384 - DNA, 25 bp, Homo sapien
acattcttagtgtcagaatgcgaga

SEQ ID NO: 3302385 - DNA, 25 bp, Homo sapien
aacatccaagataatgaaagtttga

SEQ ID NO: 3302386 - DNA, 25 bp, Homo sapien
ttatacactcgaggtgacccgttgc

SEQ ID NO: 3302387 - DNA, 25 bp, Homo sapien
atacactcgaggtgacccgttgctg

SEQ ID NO: 3302388 - DNA, 25 bp, Homo sapien
tatacactcgaggtgacccgttgct

SEQ ID NO: 3302389 - DNA, 25 bp, Homo sapien
tacactcgaggtgacccgttgctgt

SEQ ID NO: 3302390 - DNA, 25 bp, Homo sapien
ttcccttggggttcgcctctctctc

SEQ ID NO: 3302391 - DNA, 25 bp, Homo sapien
cttcccttggggttcgcctctctct

SEQ ID NO: 3302392 - DNA, 25 bp, Homo sapien
tgacttcccttggggttcgcctctc

SEQ ID NO: 3302393 - DNA, 25 bp, Homo sapien
accttcctcgtctgcttgccaaaga

SEQ ID NO: 3302394 - DNA, 25 bp, Homo sapien
taatataacttccatcccaccttcc

SEQ ID NO: 3302395 - DNA, 25 bp, Homo sapien
gaaaatagacttgttctctcgaata

SEQ ID NO: 3302396 - DNA, 25 bp, Homo sapien
cctcgtctgcttgccaaagaaggaa

SEQ ID NO: 3302397 - DNA, 25 bp, Homo sapien
tgtacttcttggtttggcgtagaag

SEQ ID NO: 3302398 - DNA, 25 bp, Homo sapien
tcttggtttggcgtagaaggtcctc

SEQ ID NO: 3302399 - DNA, 25 bp, Homo sapien
cttggtttggcgtagaaggtcctct

SEQ ID NO: 3302400 - DNA, 25 bp, Homo sapien
tccctgaactttcaatttaatgaac

SEQ ID NO: 3302401 - DNA, 25 bp, Homo sapien
ccctgaactttcaatttaatgaaca

SEQ ID NO: 3302402 - DNA, 25 bp, Homo sapien
aagtggtaatagtcttctaatttct

SEQ ID NO: 3302403 - DNA, 25 bp, Homo sapien
agtggtaatagtcttctaatttctt

SEQ ID NO: 3302404 - DNA, 25 bp, Homo sapien
catctgggggacatggactggtgtt

SEQ ID NO: 3302405 - DNA, 25 bp, Homo sapien
acatgtgtcctgcatctgggggaca

SEQ ID NO: 3302406 - DNA, 25 bp, Homo sapien
acatggactggtgtttgatttccat

SEQ ID NO: 3302407 - DNA, 25 bp, Homo sapien
tacatgtgtcctgcatctgggggac

SEQ ID NO: 3302408 - DNA, 25 bp, Homo sapien
gaggatctgtgttcccccaatgctc

SEQ ID NO: 3302409 - DNA, 25 bp, Homo sapien
tggaggaccttgctgcaatgtggac

SEQ ID NO: 3302410 - DNA, 25 bp, Homo sapien
ttaaccgactggaggaccttgctgc

SEQ ID NO: 3302411 - DNA, 25 bp, Homo sapien
caatgtggacctgcctctttgtgga

SEQ ID NO: 3302412 - DNA, 25 bp, Homo sapien
ttgacacctggattcatagaatctg

SEQ ID NO: 3302413 - DNA, 25 bp, Homo sapien
cttcatagaaatccggcagttggca

SEQ ID NO: 3302414 - DNA, 25 bp, Homo sapien
agcaacattacagccttcatagaaa

SEQ ID NO: 3302415 - DNA, 25 bp, Homo sapien
tcctattccctgttgtgagaagggg

SEQ ID NO: 3302416 - DNA, 25 bp, Homo sapien
gagccccaggaatgcctcattaata

SEQ ID NO: 3302417 - DNA, 25 bp, Homo sapien
tgagtgccctaatgagacagagccc

SEQ ID NO: 3302418 - DNA, 25 bp, Homo sapien
ggaaattgaacgtgacccactctga

SEQ ID NO: 3302419 - DNA, 25 bp, Homo sapien
gctggtcagcccttcattcgatatt

SEQ ID NO: 3302420 - DNA, 25 bp, Homo sapien
cagaggtacagcgagtcttggcaaa

SEQ ID NO: 3302421 - DNA, 25 bp, Homo sapien
acagcgagtcttggcaaagtgagca

SEQ ID NO: 3302422 - DNA, 25 bp, Homo sapien
cttttaggcgccaagagaatgtgat

SEQ ID NO: 3302423 - DNA, 25 bp, Homo sapien
gaatgtgatgacagaggtacagcga

SEQ ID NO: 3302424 - DNA, 25 bp, Homo sapien
ccttttccttctgtcgttggacatc

SEQ ID NO: 3302425 - DNA, 25 bp, Homo sapien
ccttctgtcgttggacatcagaact

SEQ ID NO: 3302426 - DNA, 25 bp, Homo sapien
ctgggaattgcaccaccagcccccg

SEQ ID NO: 3302427 - DNA, 25 bp, Homo sapien
tttccttctgtcgttggacatcaga

SEQ ID NO: 3302428 - DNA, 25 bp, Homo sapien
tctgggagatactgctgacctggta

SEQ ID NO: 3302429 - DNA, 25 bp, Homo sapien
ttctctgggagatactgctgacctg

SEQ ID NO: 3302430 - DNA, 25 bp, Homo sapien
aatattctctgggagatactgctga

SEQ ID NO: 3302431 - DNA, 25 bp, Homo sapien
gaaggcaatattctctgggagatac

SEQ ID NO: 3302432 - DNA, 25 bp, Homo sapien
gatgatgatctacagtcttttttgc

SEQ ID NO: 3302433 - DNA, 25 bp, Homo sapien
tgatgacagctgttagcgaggccat

SEQ ID NO: 3302434 - DNA, 25 bp, Homo sapien
tttgctacaggactgatgacagctg

SEQ ID NO: 3302435 - DNA, 25 bp, Homo sapien
tctacagtcttttttgctacaggac

SEQ ID NO: 3302436 - DNA, 25 bp, Homo sapien
gatgtatgaaagtagctcatcaaag

SEQ ID NO: 3302437 - DNA, 25 bp, Homo sapien
cacatagatctttctaccgaaaatc

SEQ ID NO: 3302438 - DNA, 25 bp, Homo sapien
ctttctaccgaaaatcatgctattt

SEQ ID NO: 3302439 - DNA, 25 bp, Homo sapien
aagagatgtatgaaagtagctcatc

SEQ ID NO: 3302440 - DNA, 25 bp, Homo sapien
tagctccgggctaatggaatcttgt

SEQ ID NO: 3302441 - DNA, 25 bp, Homo sapien
tcggttctcattgataagaggtcct

SEQ ID NO: 3302442 - DNA, 25 bp, Homo sapien
tttcaggaggaggtcaaaactacca

SEQ ID NO: 3302443 - DNA, 25 bp, Homo sapien
gacattgatgagtgggacattctct

SEQ ID NO: 3302444 - DNA, 25 bp, Homo sapien
tggcgtgtagttacgctcctctctg

SEQ ID NO: 3302445 - DNA, 25 bp, Homo sapien
ggtttccgttgacagggtatcagca

SEQ ID NO: 3302446 - DNA, 25 bp, Homo sapien
gcttctgcaatgactggtttccgtt

SEQ ID NO: 3302447 - DNA, 25 bp, Homo sapien
gtttctaagtaaaggagcttctgca

SEQ ID NO: 3302448 - DNA, 25 bp, Homo sapien
ggtgtttgatctgactgacggcccc

SEQ ID NO: 3302449 - DNA, 25 bp, Homo sapien
tgatctgactgacggcccccgtctg

SEQ ID NO: 3302450 - DNA, 25 bp, Homo sapien
gtttgatctgactgacggcccccgt

SEQ ID NO: 3302451 - DNA, 25 bp, Homo sapien
aggtgtttgatctgactgacggccc

SEQ ID NO: 3302452 - DNA, 25 bp, Homo sapien
cccacagtaattgaatttgccacag

SEQ ID NO: 3302453 - DNA, 25 bp, Homo sapien
ttacaccgctttgaacaagtcccca

SEQ ID NO: 3302454 - DNA, 25 bp, Homo sapien
gcctcttggaagttacaccgctttg

SEQ ID NO: 3302455 - DNA, 25 bp, Homo sapien
catttcattagctgcaaggttttca

SEQ ID NO: 3302456 - DNA, 25 bp, Homo sapien
ctgcatgaaggcaagcaagcaggca

SEQ ID NO: 3302457 - DNA, 25 bp, Homo sapien
gcaggcagggcatacacatattcct

SEQ ID NO: 3302458 - DNA, 25 bp, Homo sapien
tcaatttatcaatccagcggtgcca

SEQ ID NO: 3302459 - DNA, 25 bp, Homo sapien
catattgccctgaagatcaagtccg

SEQ ID NO: 3302460 - DNA, 25 bp, Homo sapien
ggccgtgtgggctatcaacttcaaa

SEQ ID NO: 3302461 - DNA, 25 bp, Homo sapien
gggtcattccatcaattcactgcgg

SEQ ID NO: 3302462 - DNA, 25 bp, Homo sapien
agaagagatgtccaaggatggacat

SEQ ID NO: 3302463 - DNA, 25 bp, Homo sapien
atctccatgcttgtattgccctctc

SEQ ID NO: 3302464 - DNA, 25 bp, Homo sapien
gcatctccatgcttgtattgccctc

SEQ ID NO: 3302465 - DNA, 25 bp, Homo sapien
gcttgtattgccctctcccttctta

SEQ ID NO: 3302466 - DNA, 25 bp, Homo sapien
aagcatctccatgcttgtattgccc

SEQ ID NO: 3302467 - DNA, 25 bp, Homo sapien
cacctggatattccaggatgcctca

SEQ ID NO: 3302468 - DNA, 25 bp, Homo sapien
catcatggatcctgctggtttttca

SEQ ID NO: 3302469 - DNA, 25 bp, Homo sapien
gtacttaattcaccaatattgtcat

SEQ ID NO: 3302470 - DNA, 25 bp, Homo sapien
tcatctctactccatgttgccacct

SEQ ID NO: 3302471 - DNA, 25 bp, Homo sapien
catctgagcagcgtatctctgtatc

SEQ ID NO: 3302472 - DNA, 25 bp, Homo sapien
gggcatctgagcagcgtatctctgt

SEQ ID NO: 3302473 - DNA, 25 bp, Homo sapien
tctgagcagcgtatctctgtatcta

SEQ ID NO: 3302474 - DNA, 25 bp, Homo sapien
ggcatctgagcagcgtatctctgta

SEQ ID NO: 3302475 - DNA, 25 bp, Homo sapien
acttgtgcttgtggtctcagattca

SEQ ID NO: 3302476 - DNA, 25 bp, Homo sapien
taaaaatgcgagagcaaacgaaggt

SEQ ID NO: 3302477 - DNA, 25 bp, Homo sapien
cattgctatcagttttattgtgggc

SEQ ID NO: 3302478 - DNA, 25 bp, Homo sapien
tctgagccacttgcaccacttgtgc

SEQ ID NO: 3302479 - DNA, 25 bp, Homo sapien
ttcagccttgcttgcttgataattg

SEQ ID NO: 3302480 - DNA, 25 bp, Homo sapien
tctgtggtgcggtatttcagccttg

SEQ ID NO: 3302481 - DNA, 25 bp, Homo sapien
aaacaccatagatggatgagctctg

SEQ ID NO: 3302482 - DNA, 25 bp, Homo sapien
tgataattgtcaggcagagctttcc

SEQ ID NO: 3302483 - DNA, 25 bp, Homo sapien
gggagcatgctacaagatgaactaa

SEQ ID NO: 3302484 - DNA, 25 bp, Homo sapien
ttaacagttatgattgggagcatgc

SEQ ID NO: 3302485 - DNA, 25 bp, Homo sapien
tgttttatctctgggctaaatgctg

SEQ ID NO: 3302486 - DNA, 25 bp, Homo sapien
gctttggcacagtcttctgtccctc

SEQ ID NO: 3302487 - DNA, 25 bp, Homo sapien
cccagatctgtccaacaagcaaggg

SEQ ID NO: 3302488 - DNA, 25 bp, Homo sapien
tcccagatctgtccaacaagcaagg

SEQ ID NO: 3302489 - DNA, 25 bp, Homo sapien
ccagatctgtccaacaagcaagggc

SEQ ID NO: 3302490 - DNA, 25 bp, Homo sapien
ggagagcccatcaccgtctttagtt

SEQ ID NO: 3302491 - DNA, 25 bp, Homo sapien
tactggttctatagtaagtggtgcc

SEQ ID NO: 3302492 - DNA, 25 bp, Homo sapien
catccttagtcatgtggtccactgg

SEQ ID NO: 3302493 - DNA, 25 bp, Homo sapien
tctttagtttggctgagtaaaagga

SEQ ID NO: 3302494 - DNA, 25 bp, Homo sapien
gagaacatcctcctaagcatgaagg

SEQ ID NO: 3302495 - DNA, 25 bp, Homo sapien
gaacagttctggacgtacattcacc

SEQ ID NO: 3302496 - DNA, 25 bp, Homo sapien
cctcttcaagtgtgtagtgacagca

SEQ ID NO: 3302497 - DNA, 25 bp, Homo sapien
gacttgactcagaacgttggactcc

SEQ ID NO: 3302498 - DNA, 25 bp, Homo sapien
cattaatagtggagagtgcctcagt

SEQ ID NO: 3302499 - DNA, 25 bp, Homo sapien
tgctttctcagaggtcggctggcgt

SEQ ID NO: 3302500 - DNA, 25 bp, Homo sapien
gagctgaactcaaactttggaggca

SEQ ID NO: 3302501 - DNA, 25 bp, Homo sapien
tgtttgagactccatgctgaggatt

SEQ ID NO: 3302502 - DNA, 25 bp, Homo sapien
ctctgtcaatgaccttgaattcctc

SEQ ID NO: 3302503 - DNA, 25 bp, Homo sapien
tgaattcctcagaaagaacatcgtt

SEQ ID NO: 3302504 - DNA, 25 bp, Homo sapien
ttgaattcctcagaaagaacatcgt

SEQ ID NO: 3302505 - DNA, 25 bp, Homo sapien
tgtcaatgaccttgaattcctcaga

SEQ ID NO: 3302506 - DNA, 25 bp, Homo sapien
tcaatcctttaaggatatacagttg

SEQ ID NO: 3302507 - DNA, 25 bp, Homo sapien
ttcaatcctttaaggatatacagtt

SEQ ID NO: 3302508 - DNA, 25 bp, Homo sapien
cagttgtagtgacagcactagcttc

SEQ ID NO: 3302509 - DNA, 25 bp, Homo sapien
gttgtagtgacagcactagcttcat

SEQ ID NO: 3302510 - DNA, 25 bp, Homo sapien
ggagagcagttgtagtgacagcact

SEQ ID NO: 3302511 - DNA, 25 bp, Homo sapien
gagcagttgtagtgacagcactagc

SEQ ID NO: 3302512 - DNA, 25 bp, Homo sapien
atagaattgtcttttcctcctattc

SEQ ID NO: 3302513 - DNA, 25 bp, Homo sapien
ccctgtttcaatatagaattgtctt

SEQ ID NO: 3302514 - DNA, 25 bp, Homo sapien
ttccctgtttcaatatagaattgtc

SEQ ID NO: 3302515 - DNA, 25 bp, Homo sapien
tcttccctgtttcaatatagaattg

SEQ ID NO: 3302516 - DNA, 25 bp, Homo sapien
acctgctagggtccaagttttcctg

SEQ ID NO: 3302517 - DNA, 25 bp, Homo sapien
cagggtacgttgtatcagggtgacc

SEQ ID NO: 3302518 - DNA, 25 bp, Homo sapien
tcttcattagatttctggtaacctg

SEQ ID NO: 3302519 - DNA, 25 bp, Homo sapien
aacatctcagggtacgttgtatcag

SEQ ID NO: 3302520 - DNA, 25 bp, Homo sapien
catgggcctcctgctgtggaaataa

SEQ ID NO: 3302521 - DNA, 25 bp, Homo sapien
catagacttggcaacagactggtga

SEQ ID NO: 3302522 - DNA, 25 bp, Homo sapien
taagagcgattgagtgttgccatgg

SEQ ID NO: 3302523 - DNA, 25 bp, Homo sapien
gagagccagagtttaccatatccca

SEQ ID NO: 3302524 - DNA, 25 bp, Homo sapien
ctaataaggtctttcctgacacagg

SEQ ID NO: 3302525 - DNA, 25 bp, Homo sapien
tgggtctgtttgctccagggaatct

SEQ ID NO: 3302526 - DNA, 25 bp, Homo sapien
tctgggttctggcaaatccctgtgg

SEQ ID NO: 3302527 - DNA, 25 bp, Homo sapien
tcattctgccgctgcctctgagatg

SEQ ID NO: 3302528 - DNA, 25 bp, Homo sapien
tactgcacccgaatacaaagctgcc

SEQ ID NO: 3302529 - DNA, 25 bp, Homo sapien
tccttctgctgattcaacaatttcc

SEQ ID NO: 3302530 - DNA, 25 bp, Homo sapien
actgccattactgcacccgaataca

SEQ ID NO: 3302531 - DNA, 25 bp, Homo sapien
acaatttccctgtcgactgccatta

SEQ ID NO: 3302532 - DNA, 25 bp, Homo sapien
ttgacaacttcctgttgcaaggagg

SEQ ID NO: 3302533 - DNA, 25 bp, Homo sapien
ttgcaaggaggttgtctttgggagg

SEQ ID NO: 3302534 - DNA, 25 bp, Homo sapien
caaggaggttgtctttgggagggct

SEQ ID NO: 3302535 - DNA, 25 bp, Homo sapien
tgacaacttcctgttgcaaggaggt

SEQ ID NO: 3302536 - DNA, 25 bp, Homo sapien
tattccatgaatcttactactgcca

SEQ ID NO: 3302537 - DNA, 25 bp, Homo sapien
gccactagtttgctaccttttacca

SEQ ID NO: 3302538 - DNA, 25 bp, Homo sapien
gatttgagttgccacctggtcatgg

SEQ ID NO: 3302539 - DNA, 25 bp, Homo sapien
ctaggatttgagttgccacctggtc

SEQ ID NO: 3302540 - DNA, 25 bp, Homo sapien
ccaaggacccactagccttccccat

SEQ ID NO: 3302541 - DNA, 25 bp, Homo sapien
tccaaggacccactagccttcccca

SEQ ID NO: 3302542 - DNA, 25 bp, Homo sapien
tatttgatgacaccatactgttgca

SEQ ID NO: 3302543 - DNA, 25 bp, Homo sapien
ctttggatgttgctcgaagcttgac

SEQ ID NO: 3302544 - DNA, 25 bp, Homo sapien
tattaactggatggtgaaaatactc

SEQ ID NO: 3302545 - DNA, 25 bp, Homo sapien
gaagcttgacatataacccaaatgt

SEQ ID NO: 3302546 - DNA, 25 bp, Homo sapien
aaagaaatggatacatcccatcatg

SEQ ID NO: 3302547 - DNA, 25 bp, Homo sapien
ctagtatttattgacagctagaaaa

SEQ ID NO: 3302548 - DNA, 25 bp, Homo sapien
tagtatttattgacagctagaaaac

SEQ ID NO: 3302549 - DNA, 25 bp, Homo sapien
gaatttgtcctgactctctaagaga

SEQ ID NO: 3302550 - DNA, 25 bp, Homo sapien
caccaaagtcagtatcctagggcag

SEQ ID NO: 3302551 - DNA, 25 bp, Homo sapien
catgttgggcatcggcatcattgct

SEQ ID NO: 3302552 - DNA, 25 bp, Homo sapien
cctgtggctttccaaggaggtgagc

SEQ ID NO: 3302553 - DNA, 25 bp, Homo sapien
tcaatggagatacccaaaccgggag

SEQ ID NO: 3302554 - DNA, 25 bp, Homo sapien
gacaggaatccatactatttgcggg

SEQ ID NO: 3302555 - DNA, 25 bp, Homo sapien
cctaaatattctgagcggcagcaca

SEQ ID NO: 3302556 - DNA, 25 bp, Homo sapien
catctactgtggtgctggttgccaa

SEQ ID NO: 3302557 - DNA, 25 bp, Homo sapien
taggacacagagtgcttgctgtcct

SEQ ID NO: 3302558 - DNA, 25 bp, Homo sapien
gcaggattagaatatggtgctaatg

SEQ ID NO: 3302559 - DNA, 25 bp, Homo sapien
gattagaatatggtgctaatgaggc

SEQ ID NO: 3302560 - DNA, 25 bp, Homo sapien
ctgggtctggccacggtaggacaca

SEQ ID NO: 3302561 - DNA, 25 bp, Homo sapien
gcttgttcctgtgaatcaactagaa

SEQ ID NO: 3302562 - DNA, 25 bp, Homo sapien
tgtgaatcaactagaaatcttctgc

SEQ ID NO: 3302563 - DNA, 25 bp, Homo sapien
tctgctgcagctcagaaagaacaaa

SEQ ID NO: 3302564 - DNA, 25 bp, Homo sapien
taaattctatattcactagttgttt

SEQ ID NO: 3302565 - DNA, 25 bp, Homo sapien
agccttttagtaacatgtcagttac

SEQ ID NO: 3302566 - DNA, 25 bp, Homo sapien
taatatgaccttcatgttagccttt

SEQ ID NO: 3302567 - DNA, 25 bp, Homo sapien
acatgtcagttactaaaagatgtgt

SEQ ID NO: 3302568 - DNA, 25 bp, Homo sapien
tgttagccttttagtaacatgtcag

SEQ ID NO: 3302569 - DNA, 25 bp, Homo sapien
taggaggttcctggctacataatcc

SEQ ID NO: 3302570 - DNA, 25 bp, Homo sapien
taatccaacatactgcagaagactt

SEQ ID NO: 3302571 - DNA, 25 bp, Homo sapien
tgacttacgctttgtgacaggccag

SEQ ID NO: 3302572 - DNA, 25 bp, Homo sapien
gaagacttgctgacttacgctttgt

SEQ ID NO: 3302573 - DNA, 25 bp, Homo sapien
ctcttgtaccaataagcagtaagac

SEQ ID NO: 3302574 - DNA, 25 bp, Homo sapien
caaagtggaaataactcttgtacca

SEQ ID NO: 3302575 - DNA, 25 bp, Homo sapien
gcaaatcaattctgcggcaaagtgg

SEQ ID NO: 3302576 - DNA, 25 bp, Homo sapien
gttgcaaatcaattctgcggcaaag

SEQ ID NO: 3302577 - DNA, 25 bp, Homo sapien
gaaagagaagccatcaatcatgcta

SEQ ID NO: 3302578 - DNA, 25 bp, Homo sapien
gaatttccaacttgcagacagaaag

SEQ ID NO: 3302579 - DNA, 25 bp, Homo sapien
tagagagcttccatttcagggccat

SEQ ID NO: 3302580 - DNA, 25 bp, Homo sapien
catcaatcatgctagagagcttcca

SEQ ID NO: 3302581 - DNA, 25 bp, Homo sapien
ccattagaaataggttcagtcccag

SEQ ID NO: 3302582 - DNA, 25 bp, Homo sapien
ttttaatatacgaagggtgtcaatg

SEQ ID NO: 3302583 - DNA, 25 bp, Homo sapien
tttaatatacgaagggtgtcaatgt

SEQ ID NO: 3302584 - DNA, 25 bp, Homo sapien
catgaaaatccagtgccatctatga

SEQ ID NO: 3302585 - DNA, 25 bp, Homo sapien
tcatgaaaatccagtgccatctatg

SEQ ID NO: 3302586 - DNA, 25 bp, Homo sapien
ctctagctcgtttatctgtgctttg

SEQ ID NO: 3302587 - DNA, 25 bp, Homo sapien
tgacctctagctcgtttatctgtgc

SEQ ID NO: 3302588 - DNA, 25 bp, Homo sapien
gctgcccaacttttcacgttgaatg

SEQ ID NO: 3302589 - DNA, 25 bp, Homo sapien
ctggcgggtctcagccatctctcct

SEQ ID NO: 3302590 - DNA, 25 bp, Homo sapien
taaatctctccatgaacataggccc

SEQ ID NO: 3302591 - DNA, 25 bp, Homo sapien
tcacgttgaatgactttatgcacca

SEQ ID NO: 3302592 - DNA, 25 bp, Homo sapien
caatggtctgtagtttagcaacttc

SEQ ID NO: 3302593 - DNA, 25 bp, Homo sapien
ttagccttcacaattgttgacaaca

SEQ ID NO: 3302594 - DNA, 25 bp, Homo sapien
ggtctgtagtttagcaacttcgtta

SEQ ID NO: 3302595 - DNA, 25 bp, Homo sapien
gtagtttagcaacttcgttatgtgc

SEQ ID NO: 3302596 - DNA, 25 bp, Homo sapien
ttacttcctaattctgcaaattcca

SEQ ID NO: 3302597 - DNA, 25 bp, Homo sapien
gctattttcacaaggtcttcattac

SEQ ID NO: 3302598 - DNA, 25 bp, Homo sapien
tattaacagctattttcacaaggtc

SEQ ID NO: 3302599 - DNA, 25 bp, Homo sapien
cattacttcctaattctgcaaattc

SEQ ID NO: 3302600 - DNA, 25 bp, Homo sapien
tatcttgccaaagttgagaaaggag

SEQ ID NO: 3302601 - DNA, 25 bp, Homo sapien
ttgccaaagttgagaaaggagttca

SEQ ID NO: 3302602 - DNA, 25 bp, Homo sapien
tttatcttgccaaagttgagaaagg

SEQ ID NO: 3302603 - DNA, 25 bp, Homo sapien
cttatttatcttgccaaagttgaga

SEQ ID NO: 3302604 - DNA, 25 bp, Homo sapien
catggtggcccaaatttccctgact

SEQ ID NO: 3302605 - DNA, 25 bp, Homo sapien
accattcgtcttcctatttgcctag

SEQ ID NO: 3302606 - DNA, 25 bp, Homo sapien
caactgtcagcgtgtttcaaaggga

SEQ ID NO: 3302607 - DNA, 25 bp, Homo sapien
tcaaagggactctgcccataatgtt

SEQ ID NO: 3302608 - DNA, 25 bp, Homo sapien
tttggcttgaatatgaatgagctgt

SEQ ID NO: 3302609 - DNA, 25 bp, Homo sapien
gcatgaaagctctgtatgtgctcag

SEQ ID NO: 3302610 - DNA, 25 bp, Homo sapien
tatgaatgagctgtggcatgaaagc

SEQ ID NO: 3302611 - DNA, 25 bp, Homo sapien
tatgtgctcagagcccaaagtccac

SEQ ID NO: 3302612 - DNA, 25 bp, Homo sapien
catggtcaagcagttgtctgtctgc

SEQ ID NO: 3302613 - DNA, 25 bp, Homo sapien
ttgttgacatggtcaagcagttgtc

SEQ ID NO: 3302614 - DNA, 25 bp, Homo sapien
cctggtggaggcacgcagtttgttg

SEQ ID NO: 3302615 - DNA, 25 bp, Homo sapien
atgctctctgagcaggagcctggtg

SEQ ID NO: 3302616 - DNA, 25 bp, Homo sapien
catactgagatgaaattggtttggt

SEQ ID NO: 3302617 - DNA, 25 bp, Homo sapien
agagaaatgtctcggtagagtgaga

SEQ ID NO: 3302618 - DNA, 25 bp, Homo sapien
ggatcagttctagctctggaaagga

SEQ ID NO: 3302619 - DNA, 25 bp, Homo sapien
catgtctacagccatcatactgaga

SEQ ID NO: 3302620 - DNA, 25 bp, Homo sapien
tgatatagtcaatccagtttcccaa

SEQ ID NO: 3302621 - DNA, 25 bp, Homo sapien
ctatgttgatactgatatagtcaat

SEQ ID NO: 3302622 - DNA, 25 bp, Homo sapien
tactgatatagtcaatccagtttcc

SEQ ID NO: 3302623 - DNA, 25 bp, Homo sapien
gttgatactgatatagtcaatccag

SEQ ID NO: 3302624 - DNA, 25 bp, Homo sapien
aaatttaatgctgtgtgaaatgcac

SEQ ID NO: 3302625 - DNA, 25 bp, Homo sapien
tgtgtgaaatgcactccaagaaact

SEQ ID NO: 3302626 - DNA, 25 bp, Homo sapien
gaatgactggggcaattcacggagc

SEQ ID NO: 3302627 - DNA, 25 bp, Homo sapien
ggcaattcacggagctcactaaagg

SEQ ID NO: 3302628 - DNA, 25 bp, Homo sapien
actggaagaaacggtatcagcggtg

SEQ ID NO: 3302629 - DNA, 25 bp, Homo sapien
aacggtatcagcggtggaagatgaa

SEQ ID NO: 3302630 - DNA, 25 bp, Homo sapien
agaaacggtatcagcggtggaagat

SEQ ID NO: 3302631 - DNA, 25 bp, Homo sapien
ggaagaaacggtatcagcggtggaa

SEQ ID NO: 3302632 - DNA, 25 bp, Homo sapien
tcagtcctatgtttagccagtccaa

SEQ ID NO: 3302633 - DNA, 25 bp, Homo sapien
tctttagggcatagtaactgtggga

SEQ ID NO: 3302634 - DNA, 25 bp, Homo sapien
tcatggtatagaggaatgactaggg

SEQ ID NO: 3302635 - DNA, 25 bp, Homo sapien
cattttagccctactctctggacac

SEQ ID NO: 3302636 - DNA, 25 bp, Homo sapien
gatttgctgcggtgctgaccaggaa

SEQ ID NO: 3302637 - DNA, 25 bp, Homo sapien
ctgcacttgccacggatttgctgcg

SEQ ID NO: 3302638 - DNA, 25 bp, Homo sapien
caggaatgctcttgggagtttgctc

SEQ ID NO: 3302639 - DNA, 25 bp, Homo sapien
tcttgggagtttgctcactttggcc

SEQ ID NO: 3302640 - DNA, 25 bp, Homo sapien
actcaatctgttgatagtagctctc

SEQ ID NO: 3302641 - DNA, 25 bp, Homo sapien
ctgttgatagtagctctctgaagaa

SEQ ID NO: 3302642 - DNA, 25 bp, Homo sapien
tgtcaactcaatctgttgatagtag

SEQ ID NO: 3302643 - DNA, 25 bp, Homo sapien
caatctgttgatagtagctctctga

SEQ ID NO: 3302644 - DNA, 25 bp, Homo sapien
tcagcttcggccgatgtgtaaatat

SEQ ID NO: 3302645 - DNA, 25 bp, Homo sapien
tgctcaatcagcttcggccgatgtg

SEQ ID NO: 3302646 - DNA, 25 bp, Homo sapien
ctcaatcagcttcggccgatgtgta

SEQ ID NO: 3302647 - DNA, 25 bp, Homo sapien
gcttcggccgatgtgtaaatattga

SEQ ID NO: 3302648 - DNA, 25 bp, Homo sapien
tccccaccggtcttgtccacctaca

SEQ ID NO: 3302649 - DNA, 25 bp, Homo sapien
cagatgtttttccccaccggtcttg

SEQ ID NO: 3302650 - DNA, 25 bp, Homo sapien
ctacagaacatcttctagccatccc

SEQ ID NO: 3302651 - DNA, 25 bp, Homo sapien
ccaccggtcttgtccacctacaagt

SEQ ID NO: 3302652 - DNA, 25 bp, Homo sapien
tataacaatgcaataacactctccc

SEQ ID NO: 3302653 - DNA, 25 bp, Homo sapien
atttataacaatgcaataacactct

SEQ ID NO: 3302654 - DNA, 25 bp, Homo sapien
tttataacaatgcaataacactctc

SEQ ID NO: 3302655 - DNA, 25 bp, Homo sapien
ttataacaatgcaataacactctcc

SEQ ID NO: 3302656 - DNA, 25 bp, Homo sapien
aaagccactacagactggtcagtca

SEQ ID NO: 3302657 - DNA, 25 bp, Homo sapien
tggacgtaaagccactacagactgg

SEQ ID NO: 3302658 - DNA, 25 bp, Homo sapien
gacgtaaagccactacagactggtc

SEQ ID NO: 3302659 - DNA, 25 bp, Homo sapien
gtgttctggacgtaaagccactaca

SEQ ID NO: 3302660 - DNA, 25 bp, Homo sapien
actccaaatcacaggaggtggacag

SEQ ID NO: 3302661 - DNA, 25 bp, Homo sapien
gatgattaactcagcagcttgagct

SEQ ID NO: 3302662 - DNA, 25 bp, Homo sapien
tgttgctctcttgtcggagaaaaag

SEQ ID NO: 3302663 - DNA, 25 bp, Homo sapien
aaaacatccctgtggcggcctgatg

SEQ ID NO: 3302664 - DNA, 25 bp, Homo sapien
ggctcatctggcatatttattgtca

SEQ ID NO: 3302665 - DNA, 25 bp, Homo sapien
gctttggcccttaggtgctcattca

SEQ ID NO: 3302666 - DNA, 25 bp, Homo sapien
ttttgacatgaactcagtactactg

SEQ ID NO: 3302667 - DNA, 25 bp, Homo sapien
ttgcttcccagagggtttcagcttt

SEQ ID NO: 3302668 - DNA, 25 bp, Homo sapien
gcattcattggacaggcttgcatta

SEQ ID NO: 3302669 - DNA, 25 bp, Homo sapien
attcattggacaggcttgcattaac

SEQ ID NO: 3302670 - DNA, 25 bp, Homo sapien
aaaccaatgagttcttctgccaact

SEQ ID NO: 3302671 - DNA, 25 bp, Homo sapien
ctgcattcattggacaggcttgcat

SEQ ID NO: 3302672 - DNA, 25 bp, Homo sapien
ccttttctgaccacactagataata

SEQ ID NO: 3302673 - DNA, 25 bp, Homo sapien
tccaccttttctgaccacactagat

SEQ ID NO: 3302674 - DNA, 25 bp, Homo sapien
gaccacactagataatatgatgcca

SEQ ID NO: 3302675 - DNA, 25 bp, Homo sapien
tctgaccacactagataatatgatg

SEQ ID NO: 3302676 - DNA, 25 bp, Homo sapien
cacattgtaaagactattgacacca

SEQ ID NO: 3302677 - DNA, 25 bp, Homo sapien
ccacattgtaaagactattgacacc

SEQ ID NO: 3302678 - DNA, 25 bp, Homo sapien
tcttctctagctcccatttcgatca

SEQ ID NO: 3302679 - DNA, 25 bp, Homo sapien
tcctcccaaaggttgaagggcaatc

SEQ ID NO: 3302680 - DNA, 25 bp, Homo sapien
tctctagctcccatttcgatcattt

SEQ ID NO: 3302681 - DNA, 25 bp, Homo sapien
tcatgggtgattgttggtgtccttt

SEQ ID NO: 3302682 - DNA, 25 bp, Homo sapien
cctgggagcctgaatgatgctaata

SEQ ID NO: 3302683 - DNA, 25 bp, Homo sapien
agcaatggctgcattggccccgagg

SEQ ID NO: 3302684 - DNA, 25 bp, Homo sapien
caatggctgcattggccccgaggtc

SEQ ID NO: 3302685 - DNA, 25 bp, Homo sapien
atgatgctaatattctgtgtccagc

SEQ ID NO: 3302686 - DNA, 25 bp, Homo sapien
tgcgatcacaccataagttaatagc

SEQ ID NO: 3302687 - DNA, 25 bp, Homo sapien
tcacaccataagttaatagcagagc

SEQ ID NO: 3302688 - DNA, 25 bp, Homo sapien
tcagtcaaagacacttggatcctga

SEQ ID NO: 3302689 - DNA, 25 bp, Homo sapien
cctgactctcagtgtgcaatgcttc

SEQ ID NO: 3302690 - DNA, 25 bp, Homo sapien
caggtgactctctaggaagaagctt

SEQ ID NO: 3302691 - DNA, 25 bp, Homo sapien
tcatttcggggagctctggctggca

SEQ ID NO: 3302692 - DNA, 25 bp, Homo sapien
tgactctctaggaagaagcttccag

SEQ ID NO: 3302693 - DNA, 25 bp, Homo sapien
ggcatctggcaggtgactctctagg

SEQ ID NO: 3302694 - DNA, 25 bp, Homo sapien
gatcctggagttggtgttcctaacc

SEQ ID NO: 3302695 - DNA, 25 bp, Homo sapien
gctgctagtgacagggattcaaaga

SEQ ID NO: 3302696 - DNA, 25 bp, Homo sapien
catgtaactgtagtcaggatgccaa

SEQ ID NO: 3302697 - DNA, 25 bp, Homo sapien
tctccgttgagttgccattgcagca

SEQ ID NO: 3302698 - DNA, 25 bp, Homo sapien
ggctcggaggctcctacgcccacgg

SEQ ID NO: 3302699 - DNA, 25 bp, Homo sapien
ctcggaggctcctacgcccacggag

SEQ ID NO: 3302700 - DNA, 25 bp, Homo sapien
ctggctcggaggctcctacgcccac

SEQ ID NO: 3302701 - DNA, 25 bp, Homo sapien
tcggaggctcctacgcccacggagt

SEQ ID NO: 3302702 - DNA, 25 bp, Homo sapien
tgacctcttgattactgaagccttc

SEQ ID NO: 3302703 - DNA, 25 bp, Homo sapien
ctcttgattactgaagccttcagaa

SEQ ID NO: 3302704 - DNA, 25 bp, Homo sapien
ttcttcagtgaagaacatctatctt

SEQ ID NO: 3302705 - DNA, 25 bp, Homo sapien
tcttccatgacctcttgattactga

SEQ ID NO: 3302706 - DNA, 25 bp, Homo sapien
tttccaggtcactgcggccttcctc

SEQ ID NO: 3302707 - DNA, 25 bp, Homo sapien
ttccaggtcactgcggccttcctca

SEQ ID NO: 3302708 - DNA, 25 bp, Homo sapien
cagaggcggtgccatttccaggtca

SEQ ID NO: 3302709 - DNA, 25 bp, Homo sapien
accaactgtgttattgcatccactg

SEQ ID NO: 3302710 - DNA, 25 bp, Homo sapien
ggacaccaactgtgttattgcatcc

SEQ ID NO: 3302711 - DNA, 25 bp, Homo sapien
gacaccaactgtgttattgcatcca

SEQ ID NO: 3302712 - DNA, 25 bp, Homo sapien
caccaactgtgttattgcatccact

SEQ ID NO: 3302713 - DNA, 25 bp, Homo sapien
tagggaagagggatgcactgaacaa

SEQ ID NO: 3302714 - DNA, 25 bp, Homo sapien
aataatgcaggccagagtatggcgg

SEQ ID NO: 3302715 - DNA, 25 bp, Homo sapien
gaacaaactgaataatgcaggccag

SEQ ID NO: 3302716 - DNA, 25 bp, Homo sapien
ttagggaagagggatgcactgaaca

SEQ ID NO: 3302717 - DNA, 25 bp, Homo sapien
ttagcctccagatcacaggggtaat

SEQ ID NO: 3302718 - DNA, 25 bp, Homo sapien
ctccagatcacaggggtaatccctg

SEQ ID NO: 3302719 - DNA, 25 bp, Homo sapien
tagcctccagatcacaggggtaatc

SEQ ID NO: 3302720 - DNA, 25 bp, Homo sapien
gcctccagatcacaggggtaatccc

SEQ ID NO: 3302721 - DNA, 25 bp, Homo sapien
caatgaaaccatgcagaggcccttt

SEQ ID NO: 3302722 - DNA, 25 bp, Homo sapien
cactactgtgtagcaatatccaagt

SEQ ID NO: 3302723 - DNA, 25 bp, Homo sapien
gccacaggataactgagcatgaatc

SEQ ID NO: 3302724 - DNA, 25 bp, Homo sapien
tgctgcattttaagtggtgggccca

SEQ ID NO: 3302725 - DNA, 25 bp, Homo sapien
cctccacccagctacacctgcttca

SEQ ID NO: 3302726 - DNA, 25 bp, Homo sapien
tcctccacccagctacacctgcttc

SEQ ID NO: 3302727 - DNA, 25 bp, Homo sapien
ctccacccagctacacctgcttcag

SEQ ID NO: 3302728 - DNA, 25 bp, Homo sapien
ggactggaagccacaactcttattt

SEQ ID NO: 3302729 - DNA, 25 bp, Homo sapien
acagatcggggtggccatggttaca

SEQ ID NO: 3302730 - DNA, 25 bp, Homo sapien
gaagcagaaccaactcaacatcatc

SEQ ID NO: 3302731 - DNA, 25 bp, Homo sapien
gccatggttacactgaagcagaacc

SEQ ID NO: 3302732 - DNA, 25 bp, Homo sapien
cttgcttgcttcccaaagtttagca

SEQ ID NO: 3302733 - DNA, 25 bp, Homo sapien
ttgcgtctcacttcatgcatatcca

SEQ ID NO: 3302734 - DNA, 25 bp, Homo sapien
ctttggagcactgccgtcaacctgg

SEQ ID NO: 3302735 - DNA, 25 bp, Homo sapien
gggcagctgcctgattggtaaatca

SEQ ID NO: 3302736 - DNA, 25 bp, Homo sapien
tctggcggtaaatatgaggtcacct

SEQ ID NO: 3302737 - DNA, 25 bp, Homo sapien
gggccgacaatcacaataaatatta

SEQ ID NO: 3302738 - DNA, 25 bp, Homo sapien
gggggccgacaatcacaataaatat

SEQ ID NO: 3302739 - DNA, 25 bp, Homo sapien
ggccgacaatcacaataaatattac

SEQ ID NO: 3302740 - DNA, 25 bp, Homo sapien
ctggggggccgacaatcacaataaa

SEQ ID NO: 3302741 - DNA, 25 bp, Homo sapien
ccagtttaattgttatggctgctct

SEQ ID NO: 3302742 - DNA, 25 bp, Homo sapien
tctcatgtgggattgatgaagcgca

SEQ ID NO: 3302743 - DNA, 25 bp, Homo sapien
cagaagttcctatactgcttagaga

SEQ ID NO: 3302744 - DNA, 25 bp, Homo sapien
caggatgggttcactaccagaagtt

SEQ ID NO: 3302745 - DNA, 25 bp, Homo sapien
tatttgtttagtcaatagtctaatg

SEQ ID NO: 3302746 - DNA, 25 bp, Homo sapien
ggtgtcaggtcattggtgaaaacaa

SEQ ID NO: 3302747 - DNA, 25 bp, Homo sapien
tagtcaatagtctaatgtaaatgat

SEQ ID NO: 3302748 - DNA, 25 bp, Homo sapien
taattaattatagatggtggtgtca

SEQ ID NO: 3302749 - DNA, 25 bp, Homo sapien
gccatgccggtgttaatgacagatt

SEQ ID NO: 3302750 - DNA, 25 bp, Homo sapien
aaaataactgccatgccggtgttaa

SEQ ID NO: 3302751 - DNA, 25 bp, Homo sapien
tccctacctcacaatctgtcacccc

SEQ ID NO: 3302752 - DNA, 25 bp, Homo sapien
aatagtctgaattactctccctacc

SEQ ID NO: 3302753 - DNA, 25 bp, Homo sapien
tgtaaaacaggatggattttttgcc

SEQ ID NO: 3302754 - DNA, 25 bp, Homo sapien
cttgtaaaacaggatggattttttg

SEQ ID NO: 3302755 - DNA, 25 bp, Homo sapien
taaaacaggatggattttttgccca

SEQ ID NO: 3302756 - DNA, 25 bp, Homo sapien
aaaacaggatggattttttgcccat

SEQ ID NO: 3302757 - DNA, 25 bp, Homo sapien
tgacttttctcggttttgctctctg

SEQ ID NO: 3302758 - DNA, 25 bp, Homo sapien
acttttctcggttttgctctctgat

SEQ ID NO: 3302759 - DNA, 25 bp, Homo sapien
ctctgacttttctcggttttgctct

SEQ ID NO: 3302760 - DNA, 25 bp, Homo sapien
tctgacttttctcggttttgctctc

SEQ ID NO: 3302761 - DNA, 25 bp, Homo sapien
cgtaggcacagcagaataattaata

SEQ ID NO: 3302762 - DNA, 25 bp, Homo sapien
aacatggaccgtaggcacagcagaa

SEQ ID NO: 3302763 - DNA, 25 bp, Homo sapien
ctagcagcaaagcaccaacatggac

SEQ ID NO: 3302764 - DNA, 25 bp, Homo sapien
caaagcaccaacatggaccgtaggc

SEQ ID NO: 3302765 - DNA, 25 bp, Homo sapien
tgtaagaagacttcatgtcccctct

SEQ ID NO: 3302766 - DNA, 25 bp, Homo sapien
tctgtaagaagacttcatgtcccct

SEQ ID NO: 3302767 - DNA, 25 bp, Homo sapien
taagaagacttcatgtcccctctca

SEQ ID NO: 3302768 - DNA, 25 bp, Homo sapien
agaagacttcatgtcccctctcagg

SEQ ID NO: 3302769 - DNA, 25 bp, Homo sapien
ggacctccatttctccaagattaat

SEQ ID NO: 3302770 - DNA, 25 bp, Homo sapien
cctccatttctccaagattaatcat

SEQ ID NO: 3302771 - DNA, 25 bp, Homo sapien
tttaaccatcctttctggacctcca

SEQ ID NO: 3302772 - DNA, 25 bp, Homo sapien
catcctttctggacctccatttctc

SEQ ID NO: 3302773 - DNA, 25 bp, Homo sapien
tctagaaatgtacttgtacacaatg

SEQ ID NO: 3302774 - DNA, 25 bp, Homo sapien
ttcagtcattaaggaatcataaggc

SEQ ID NO: 3302775 - DNA, 25 bp, Homo sapien
gaaatgtacttgtacacaatgttgg

SEQ ID NO: 3302776 - DNA, 25 bp, Homo sapien
aaggaatcataaggcaagtgtctca

SEQ ID NO: 3302777 - DNA, 25 bp, Homo sapien
gattctgcaaatccaaacgggaaag

SEQ ID NO: 3302778 - DNA, 25 bp, Homo sapien
ccggctgcgggtttcagtagcgaca

SEQ ID NO: 3302779 - DNA, 25 bp, Homo sapien
taacttctagtcagtgtaactcacg

SEQ ID NO: 3302780 - DNA, 25 bp, Homo sapien
gacccagagcggttgtaacaattcc

SEQ ID NO: 3302781 - DNA, 25 bp, Homo sapien
cccagaggtggaggccggagccggg

SEQ ID NO: 3302782 - DNA, 25 bp, Homo sapien
ccgctgctggacttgtgcttcttca

SEQ ID NO: 3302783 - DNA, 25 bp, Homo sapien
ccttgaggcgctctgtctccgagtc

SEQ ID NO: 3302784 - DNA, 25 bp, Homo sapien
cagaggcttattgtagtcgtcgtcc

SEQ ID NO: 3302785 - DNA, 25 bp, Homo sapien
tcaggatgagctctccggctcggac

SEQ ID NO: 3302786 - DNA, 25 bp, Homo sapien
tttgtccaacaaaatggatccttga

SEQ ID NO: 3302787 - DNA, 25 bp, Homo sapien
tctgtcatccccaacgaataggcca

SEQ ID NO: 3302788 - DNA, 25 bp, Homo sapien
aataggccaaacgagccctctcggg

SEQ ID NO: 3302789 - DNA, 25 bp, Homo sapien
ggcgaagatctgctgtccggaaaaa

SEQ ID NO: 3302790 - DNA, 25 bp, Homo sapien
aaacaatcggttacaagcggctgca

SEQ ID NO: 3302791 - DNA, 25 bp, Homo sapien
ctgtgagaaccaataaacaacgaga

SEQ ID NO: 3302792 - DNA, 25 bp, Homo sapien
aaaaacaatcggttacaagcggctg

SEQ ID NO: 3302793 - DNA, 25 bp, Homo sapien
agaaccaataaacaacgagagaggg

SEQ ID NO: 3302794 - DNA, 25 bp, Homo sapien
acagcctttgttggcggcccctaat

SEQ ID NO: 3302795 - DNA, 25 bp, Homo sapien
tgttggcggcccctaatacggccat

SEQ ID NO: 3302796 - DNA, 25 bp, Homo sapien
aaccgatacaatagcgtctccctgg

SEQ ID NO: 3302797 - DNA, 25 bp, Homo sapien
taatacggccatcaaaaccgataca

SEQ ID NO: 3302798 - DNA, 25 bp, Homo sapien
cacagtccccgggcttcccaagaga

SEQ ID NO: 3302799 - DNA, 25 bp, Homo sapien
ctttcgcaacttcccgcagttactg

SEQ ID NO: 3302800 - DNA, 25 bp, Homo sapien
acttggctttcgcaacttcccgcag

SEQ ID NO: 3302801 - DNA, 25 bp, Homo sapien
cagccgcactaaggaggtccggaga

SEQ ID NO: 3302802 - DNA, 25 bp, Homo sapien
gagacttggaagaaacttcggagac

SEQ ID NO: 3302803 - DNA, 25 bp, Homo sapien
tagggtgttgagctccacgatgtcc

SEQ ID NO: 3302804 - DNA, 25 bp, Homo sapien
gatgtccccaaatgtgcccggacgc

SEQ ID NO: 3302805 - DNA, 25 bp, Homo sapien
tactaccccgaagactagcgtgatc

SEQ ID NO: 3302806 - DNA, 25 bp, Homo sapien
ctgagcgagaaaaggaccccaggct

SEQ ID NO: 3302807 - DNA, 25 bp, Homo sapien
agagaggcagcgggttaggctggcg

SEQ ID NO: 3302808 - DNA, 25 bp, Homo sapien
taggctggcgaaggcggaatggggc

SEQ ID NO: 3302809 - DNA, 25 bp, Homo sapien
aagagaggcagcgggttaggctggc

SEQ ID NO: 3302810 - DNA, 25 bp, Homo sapien
gggttaggctggcgaaggcggaatg

SEQ ID NO: 3302811 - DNA, 25 bp, Homo sapien
tcagccagcggcttggggtaccggc

SEQ ID NO: 3302812 - DNA, 25 bp, Homo sapien
agaagatgggcgtccggccaggcag

SEQ ID NO: 3302813 - DNA, 25 bp, Homo sapien
ctctgcatcactccgggccagaaga

SEQ ID NO: 3302814 - DNA, 25 bp, Homo sapien
gggtacaggccaggcgtgcgtccct

SEQ ID NO: 3302815 - DNA, 25 bp, Homo sapien
gctcaggctgctaaagcgtggcagt

SEQ ID NO: 3302816 - DNA, 25 bp, Homo sapien
ggccacgggcatggagggccggctc

SEQ ID NO: 3302817 - DNA, 25 bp, Homo sapien
gagggccggctcaggatatcgttga

SEQ ID NO: 3302818 - DNA, 25 bp, Homo sapien
gaggcagaggcggacgaggaagagg

SEQ ID NO: 3302819 - DNA, 25 bp, Homo sapien
aggagggggggccggcaggcagcgg

SEQ ID NO: 3302820 - DNA, 25 bp, Homo sapien
gaggaggagggggggccggcaggca

SEQ ID NO: 3302821 - DNA, 25 bp, Homo sapien
ggacgacgacgaggacgaggaggag

SEQ ID NO: 3302822 - DNA, 25 bp, Homo sapien
ggggccggcaggcagcgggggatac

SEQ ID NO: 3302823 - DNA, 25 bp, Homo sapien
cttcatctcggccatgctgtgcagg

SEQ ID NO: 3302824 - DNA, 25 bp, Homo sapien
gctctgccgggtgccctccattgcc

SEQ ID NO: 3302825 - DNA, 25 bp, Homo sapien
ggtacagcggggtcttcatctcggc

SEQ ID NO: 3302826 - DNA, 25 bp, Homo sapien
gctgctgagcaggaatgcgctctgc

SEQ ID NO: 3302827 - DNA, 25 bp, Homo sapien
actgaaccaaaaatgccgctgccgg

SEQ ID NO: 3302828 - DNA, 25 bp, Homo sapien
accgtagccttgcagcgagggcgct

SEQ ID NO: 3302829 - DNA, 25 bp, Homo sapien
ccgctgccgggagttgctcgcctag

SEQ ID NO: 3302830 - DNA, 25 bp, Homo sapien
gcccggaggcgagctgccaactgaa

SEQ ID NO: 3302831 - DNA, 25 bp, Homo sapien
ttcaaaggacgccttgtgcagcccg

SEQ ID NO: 3302832 - DNA, 25 bp, Homo sapien
gagtcctagattcgatccctggcta

SEQ ID NO: 3302833 - DNA, 25 bp, Homo sapien
tagttgccgaatctccactttgaag

SEQ ID NO: 3302834 - DNA, 25 bp, Homo sapien
taggcagtcctttcgttccgcgagt

SEQ ID NO: 3302835 - DNA, 25 bp, Homo sapien
agaaagggcagtgccacggatcccc

SEQ ID NO: 3302836 - DNA, 25 bp, Homo sapien
agcccgcgggagatctagcctctgt

SEQ ID NO: 3302837 - DNA, 25 bp, Homo sapien
gatgctctgctctttcggtcgcgcg

SEQ ID NO: 3302838 - DNA, 25 bp, Homo sapien
gattcgcattcgacgctcactgtgc

SEQ ID NO: 3302839 - DNA, 25 bp, Homo sapien
ttcggcgccgctcgtcagtccactt

SEQ ID NO: 3302840 - DNA, 25 bp, Homo sapien
tgaaaagtctgacggctgggtttcg

SEQ ID NO: 3302841 - DNA, 25 bp, Homo sapien
ctgggtttcggcgccgctcgtcagt

SEQ ID NO: 3302842 - DNA, 25 bp, Homo sapien
gactaagtgtgaaaagtctgacggc

SEQ ID NO: 3302843 - DNA, 25 bp, Homo sapien
cggcttcccaggcttcggtcttcta

SEQ ID NO: 3302844 - DNA, 25 bp, Homo sapien
tgtcctctggccaaactgaccctct

SEQ ID NO: 3302845 - DNA, 25 bp, Homo sapien
ttcggtcttctaagtcctgtcctct

SEQ ID NO: 3302846 - DNA, 25 bp, Homo sapien
tctggcattttcttcgcggcttccc

SEQ ID NO: 3302847 - DNA, 25 bp, Homo sapien
ggtgaagtccttcgtcagcatgaat

SEQ ID NO: 3302848 - DNA, 25 bp, Homo sapien
aaggtgaagtccttcgtcagcatga

SEQ ID NO: 3302849 - DNA, 25 bp, Homo sapien
gggtaaggtgaagtccttcgtcagc

SEQ ID NO: 3302850 - DNA, 25 bp, Homo sapien
aagtccttcgtcagcatgaatagtg

SEQ ID NO: 3302851 - DNA, 25 bp, Homo sapien
tctgcatttccacgcggggatccag

SEQ ID NO: 3302852 - DNA, 25 bp, Homo sapien
tccagtgcttgggtctaaaccccag

SEQ ID NO: 3302853 - DNA, 25 bp, Homo sapien
gtgcttgggtctaaaccccagcgcc

SEQ ID NO: 3302854 - DNA, 25 bp, Homo sapien
gggatccagtgcttgggtctaaacc

SEQ ID NO: 3302855 - DNA, 25 bp, Homo sapien
catagcccgtcctagccttgaaact

SEQ ID NO: 3302856 - DNA, 25 bp, Homo sapien
ctggcggtggtacccaaccttcagt

SEQ ID NO: 3302857 - DNA, 25 bp, Homo sapien
ctccaggacactgcattctcaagga

SEQ ID NO: 3302858 - DNA, 25 bp, Homo sapien
ctctggcttcgttacaaacgaaacg

SEQ ID NO: 3302859 - DNA, 25 bp, Homo sapien
cccgggtgctcgatcccgcgtagag

SEQ ID NO: 3302860 - DNA, 25 bp, Homo sapien
gctcgatcccgcgtagagcagcgtg

SEQ ID NO: 3302861 - DNA, 25 bp, Homo sapien
gagcagcgtgtattgcagacgcacg

SEQ ID NO: 3302862 - DNA, 25 bp, Homo sapien
cccgcgtagagcagcgtgtattgca

SEQ ID NO: 3302863 - DNA, 25 bp, Homo sapien
ctttgcttcctataaacgccgtaga

SEQ ID NO: 3302864 - DNA, 25 bp, Homo sapien
ccttgaggaaggatagcagggcgag

SEQ ID NO: 3302865 - DNA, 25 bp, Homo sapien
agggggagaacgtgtctgtctttct

SEQ ID NO: 3302866 - DNA, 25 bp, Homo sapien
taaacgccgtagagtggaaactgca

SEQ ID NO: 3302867 - DNA, 25 bp, Homo sapien
ggaagcgaccagtgtaaacagcccc

SEQ ID NO: 3302868 - DNA, 25 bp, Homo sapien
gaaaagcgccgtaggatcttgcgtt

SEQ ID NO: 3302869 - DNA, 25 bp, Homo sapien
ggcgctctcccagtggaggccaaca

SEQ ID NO: 3302870 - DNA, 25 bp, Homo sapien
gaattgaagcagacagcgtggaaaa

SEQ ID NO: 3302871 - DNA, 25 bp, Homo sapien
cagaaaagatctcgaagtccaggac

SEQ ID NO: 3302872 - DNA, 25 bp, Homo sapien
gattacagctctccatagagtcgca

SEQ ID NO: 3302873 - DNA, 25 bp, Homo sapien
ggacctccctcagcgatatcgtcag

SEQ ID NO: 3302874 - DNA, 25 bp, Homo sapien
cgtcagtgagagagaggattacagc

SEQ ID NO: 3302875 - DNA, 25 bp, Homo sapien
agtgcggccataggcccgtttgatg

SEQ ID NO: 3302876 - DNA, 25 bp, Homo sapien
aaaaacttcttagcgtttcactctg

SEQ ID NO: 3302877 - DNA, 25 bp, Homo sapien
tgaaacgctgaacagttatcgccct

SEQ ID NO: 3302878 - DNA, 25 bp, Homo sapien
gctgaacagttatcgccctcttgtg

SEQ ID NO: 3302879 - DNA, 25 bp, Homo sapien
acttcctgatgttaatcatcaatgg

SEQ ID NO: 3302880 - DNA, 25 bp, Homo sapien
tgatgttaatcatcaatggaagatc

SEQ ID NO: 3302881 - DNA, 25 bp, Homo sapien
cacacttcagctttatatccttgtt

SEQ ID NO: 3302882 - DNA, 25 bp, Homo sapien
gttccctgaacctagcaggttcata

SEQ ID NO: 3302883 - DNA, 25 bp, Homo sapien
cagtcgacaccaccccacatgcatt

SEQ ID NO: 3302884 - DNA, 25 bp, Homo sapien
catttcatatggggagcttgatgaa

SEQ ID NO: 3302885 - DNA, 25 bp, Homo sapien
ttcaagtggtaaatccttggttgac

SEQ ID NO: 3302886 - DNA, 25 bp, Homo sapien
agcttcaagtggtaaatccttggtt

SEQ ID NO: 3302887 - DNA, 25 bp, Homo sapien
atttcatatggggagcttgatgaag

SEQ ID NO: 3302888 - DNA, 25 bp, Homo sapien
tctccctaagcaccagactattttg

SEQ ID NO: 3302889 - DNA, 25 bp, Homo sapien
ccatatatatataggacccagcttc

SEQ ID NO: 3302890 - DNA, 25 bp, Homo sapien
caaacacgtcatttctgaaagggac

SEQ ID NO: 3302891 - DNA, 25 bp, Homo sapien
gtagaatagaatatgaccttacccc

SEQ ID NO: 3302892 - DNA, 25 bp, Homo sapien
cctttgatctggtggcctcatgtaa

SEQ ID NO: 3302893 - DNA, 25 bp, Homo sapien
cagatgggcatcacgtgcctgcaga

SEQ ID NO: 3302894 - DNA, 25 bp, Homo sapien
gattgaagagacttctcctggccaa

SEQ ID NO: 3302895 - DNA, 25 bp, Homo sapien
aaggagcgagtcacaaagacacagg

SEQ ID NO: 3302896 - DNA, 25 bp, Homo sapien
ttttgcagttcgatctttcttgagt

SEQ ID NO: 3302897 - DNA, 25 bp, Homo sapien
tcttcttttgcagttcgatctttct

SEQ ID NO: 3302898 - DNA, 25 bp, Homo sapien
tggttccatgaacgctttcttctct

SEQ ID NO: 3302899 - DNA, 25 bp, Homo sapien
ttcttttgcagttcgatctttcttg

SEQ ID NO: 3302900 - DNA, 25 bp, Homo sapien
cgtgggctctcatccaattaaaggg

SEQ ID NO: 3302901 - DNA, 25 bp, Homo sapien
taactacaattgaacccaacatggg

SEQ ID NO: 3302902 - DNA, 25 bp, Homo sapien
tgtgttaaagttacactggccaaca

SEQ ID NO: 3302903 - DNA, 25 bp, Homo sapien
tctgaaaagcttactaactggaagg

SEQ ID NO: 3302904 - DNA, 25 bp, Homo sapien
tccatgaatgtgctttgccatgtgt

SEQ ID NO: 3302905 - DNA, 25 bp, Homo sapien
ctccagctttaccaactcttggcat

SEQ ID NO: 3302906 - DNA, 25 bp, Homo sapien
cagctttaccaactcttggcatttc

SEQ ID NO: 3302907 - DNA, 25 bp, Homo sapien
tcagtttaacacttggtggtcctcc

SEQ ID NO: 3302908 - DNA, 25 bp, Homo sapien
cacatcagcaggggtatgtgctgtc

SEQ ID NO: 3302909 - DNA, 25 bp, Homo sapien
ccacatcagcaggggtatgtgctgt

SEQ ID NO: 3302910 - DNA, 25 bp, Homo sapien
caggggtatgtgctgtcagactcat

SEQ ID NO: 3302911 - DNA, 25 bp, Homo sapien
gcaggggtatgtgctgtcagactca

SEQ ID NO: 3302912 - DNA, 25 bp, Homo sapien
cagggaagcggtgtcgccgccacac

SEQ ID NO: 3302913 - DNA, 25 bp, Homo sapien
gcgaccacgaaaccgagagcaccag

SEQ ID NO: 3302914 - DNA, 25 bp, Homo sapien
agaaccctgcttgcagctcaggttt

SEQ ID NO: 3302915 - DNA, 25 bp, Homo sapien
cggaagatgttggagctgaggcacc

SEQ ID NO: 3302916 - DNA, 25 bp, Homo sapien
tgtatttgaatacacctgtatttcc

SEQ ID NO: 3302917 - DNA, 25 bp, Homo sapien
tatcatgaggaacttttgacttggc

SEQ ID NO: 3302918 - DNA, 25 bp, Homo sapien
gctgatagatattgaactctatccc

SEQ ID NO: 3302919 - DNA, 25 bp, Homo sapien
tgaactctatccctgtctgtccttt

SEQ ID NO: 3302920 - DNA, 25 bp, Homo sapien
ttaaaatcagtttgcacactggagg

SEQ ID NO: 3302921 - DNA, 25 bp, Homo sapien
gcagaggaatgttcccaagtgttaa

SEQ ID NO: 3302922 - DNA, 25 bp, Homo sapien
gttggagtggtacttgaaaaatgac

SEQ ID NO: 3302923 - DNA, 25 bp, Homo sapien
caagtgttaaatgttggagtggtac

SEQ ID NO: 3302924 - DNA, 25 bp, Homo sapien
aaaatgacaagggacatcttcaagg

SEQ ID NO: 3302925 - DNA, 25 bp, Homo sapien
tgttctaggcaaaggacgtgttggg

SEQ ID NO: 3302926 - DNA, 25 bp, Homo sapien
ggtgttctaggcaaaggacgtgttg

SEQ ID NO: 3302927 - DNA, 25 bp, Homo sapien
gtgttctaggcaaaggacgtgttgg

SEQ ID NO: 3302928 - DNA, 25 bp, Homo sapien
caataaatttgtattcagttgaatc

SEQ ID NO: 3302929 - DNA, 25 bp, Homo sapien
tcagttgaatcttcactgagtttaa

SEQ ID NO: 3302930 - DNA, 25 bp, Homo sapien
ttgaatcttcactgagtttaataat

SEQ ID NO: 3302931 - DNA, 25 bp, Homo sapien
ttctgtatagttttataatagttac

SEQ ID NO: 3302932 - DNA, 25 bp, Homo sapien
gactgtgtgttaggaatatccccat

SEQ ID NO: 3302933 - DNA, 25 bp, Homo sapien
tgtgttccagtcacgttcagtgttg

SEQ ID NO: 3302934 - DNA, 25 bp, Homo sapien
tatcacacttcccaaaaatgacagt

SEQ ID NO: 3302935 - DNA, 25 bp, Homo sapien
gtcacgttcagtgttgtgtgactgt

SEQ ID NO: 3302936 - DNA, 25 bp, Homo sapien
agctcctggttgcaggaatggccat

SEQ ID NO: 3302937 - DNA, 25 bp, Homo sapien
aagctcctggttgcaggaatggcca

SEQ ID NO: 3302938 - DNA, 25 bp, Homo sapien
cagactgacggcaggtgccctgcca

SEQ ID NO: 3302939 - DNA, 25 bp, Homo sapien
acggcaggtgccctgccattttctg

SEQ ID NO: 3302940 - DNA, 25 bp, Homo sapien
ctatctggttgtttattagttacca

SEQ ID NO: 3302941 - DNA, 25 bp, Homo sapien
ctgacggcaggtgccctgccatttt

SEQ ID NO: 3302942 - DNA, 25 bp, Homo sapien
tggattccagaacagattctgatat

SEQ ID NO: 3302943 - DNA, 25 bp, Homo sapien
ttggattccagaacagattctgata

SEQ ID NO: 3302944 - DNA, 25 bp, Homo sapien
gatttggattccagaacagattctg

SEQ ID NO: 3302945 - DNA, 25 bp, Homo sapien
cattaaatagttatgatgttcttct

SEQ ID NO: 3302946 - DNA, 25 bp, Homo sapien
ccttcagttcctaggccttctaatt

SEQ ID NO: 3302947 - DNA, 25 bp, Homo sapien
gctccttcagttcctaggccttcta

SEQ ID NO: 3302948 - DNA, 25 bp, Homo sapien
taaatagttatgatgttcttcttgg

SEQ ID NO: 3302949 - DNA, 25 bp, Homo sapien
tgtgtagaaggtagttgtcttatgt

SEQ ID NO: 3302950 - DNA, 25 bp, Homo sapien
catggcctgctgtagtttcttatga

SEQ ID NO: 3302951 - DNA, 25 bp, Homo sapien
aaatgatgtgtagaaggtagttgtc

SEQ ID NO: 3302952 - DNA, 25 bp, Homo sapien
ggcctgctgtagtttcttatgaaat

SEQ ID NO: 3302953 - DNA, 25 bp, Homo sapien
tttgcagaggcttactaccattccc

SEQ ID NO: 3302954 - DNA, 25 bp, Homo sapien
tgggcacccagacatgtgaatctac

SEQ ID NO: 3302955 - DNA, 25 bp, Homo sapien
tagaagagcagttagtcatgtccat

SEQ ID NO: 3302956 - DNA, 25 bp, Homo sapien
taatgtgtcccatatgggctcactg

SEQ ID NO: 3302957 - DNA, 25 bp, Homo sapien
tgtagactcacctcgcaagaaggaa

SEQ ID NO: 3302958 - DNA, 25 bp, Homo sapien
agaacacagtgtacggatcctccgc

SEQ ID NO: 3302959 - DNA, 25 bp, Homo sapien
tatgcaaggcacaataggaagtcag

SEQ ID NO: 3302960 - DNA, 25 bp, Homo sapien
gatgttttaagattgcacctggcag

SEQ ID NO: 3302961 - DNA, 25 bp, Homo sapien
agaattactatcaatcacgagaata

SEQ ID NO: 3302962 - DNA, 25 bp, Homo sapien
gaattactatcaatcacgagaatag

SEQ ID NO: 3302963 - DNA, 25 bp, Homo sapien
tgaattgtgagctgaattctctgcc

SEQ ID NO: 3302964 - DNA, 25 bp, Homo sapien
ggaaccttagtatggtggcaccaaa

SEQ ID NO: 3302965 - DNA, 25 bp, Homo sapien
tgagaagtacccataaagcacctgc

SEQ ID NO: 3302966 - DNA, 25 bp, Homo sapien
tcttggtccttaagtagagtgacac

SEQ ID NO: 3302967 - DNA, 25 bp, Homo sapien
aaagaccagctgctaacagcggctg

SEQ ID NO: 3302968 - DNA, 25 bp, Homo sapien
agttctaacactctcagactgaagg

SEQ ID NO: 3302969 - DNA, 25 bp, Homo sapien
ttttggctggagaataaagctcagg

SEQ ID NO: 3302970 - DNA, 25 bp, Homo sapien
tatagtatgggtgcaagagacacac

SEQ ID NO: 3302971 - DNA, 25 bp, Homo sapien
gctgccagaggaaatactaccatga

SEQ ID NO: 3302972 - DNA, 25 bp, Homo sapien
tatccagacggatggctgctatggg

SEQ ID NO: 3302973 - DNA, 25 bp, Homo sapien
tctgttgctgtacaaataattggcc

SEQ ID NO: 3302974 - DNA, 25 bp, Homo sapien
aaatcatctagagggccagacaggg

SEQ ID NO: 3302975 - DNA, 25 bp, Homo sapien
cattatttattagaattgaagatgg

SEQ ID NO: 3302976 - DNA, 25 bp, Homo sapien
catcagcattatttattagaattga

SEQ ID NO: 3302977 - DNA, 25 bp, Homo sapien
cagcattatttattagaattgaaga

SEQ ID NO: 3302978 - DNA, 25 bp, Homo sapien
aacatcagcattatttattagaatt

SEQ ID NO: 3302979 - DNA, 25 bp, Homo sapien
tgtaggctcaaacccaggtaaataa

SEQ ID NO: 3302980 - DNA, 25 bp, Homo sapien
taatcataaatagactgtaggctca

SEQ ID NO: 3302981 - DNA, 25 bp, Homo sapien
taagcgtaaggcactaaagcagcct

SEQ ID NO: 3302982 - DNA, 25 bp, Homo sapien
gagacctagttatcatatcaggaag

SEQ ID NO: 3302983 - DNA, 25 bp, Homo sapien
aagccgctgtcctttgcatgatgcc

SEQ ID NO: 3302984 - DNA, 25 bp, Homo sapien
gcctatttttgaatgcatgtgcata

SEQ ID NO: 3302985 - DNA, 25 bp, Homo sapien
tcagcccatcaggtacaagatcacc

SEQ ID NO: 3302986 - DNA, 25 bp, Homo sapien
ataagtgtgcctctcaccagggcct

SEQ ID NO: 3302987 - DNA, 25 bp, Homo sapien
gtagccaggtacaagacgcccaaat

SEQ ID NO: 3302988 - DNA, 25 bp, Homo sapien
gggctgtttcctgcactacactggt

SEQ ID NO: 3302989 - DNA, 25 bp, Homo sapien
tcgaaagtgttgctcctaggaacca

SEQ ID NO: 3302990 - DNA, 25 bp, Homo sapien
cacactgtttcctaaagaaggtcca

SEQ ID NO: 3302991 - DNA, 25 bp, Homo sapien
caacaatttcgaggcccatcttctg

SEQ ID NO: 3302992 - DNA, 25 bp, Homo sapien
gaacctctctcatgctgtaagttat

SEQ ID NO: 3302993 - DNA, 25 bp, Homo sapien
acagttctgacaaacacgcaccggg

SEQ ID NO: 3302994 - DNA, 25 bp, Homo sapien
gatttcagattgaaagcgactgcac

SEQ ID NO: 3302995 - DNA, 25 bp, Homo sapien
ccacagttcctgcaatggtgtcgtc

SEQ ID NO: 3302996 - DNA, 25 bp, Homo sapien
ttctggcagaagagctgaccacagt

SEQ ID NO: 3302997 - DNA, 25 bp, Homo sapien
cagttcctgcaatggtgtcgtcttt

SEQ ID NO: 3302998 - DNA, 25 bp, Homo sapien
tggcagaagagctgaccacagttcc

SEQ ID NO: 3302999 - DNA, 25 bp, Homo sapien
gactgtcaccaacgaggatcctact

SEQ ID NO: 3303000 - DNA, 25 bp, Homo sapien
cggcctcgactgtcaccaacgagga

SEQ ID NO: 3303001 - DNA, 25 bp, Homo sapien
ctcgactgtcaccaacgaggatcct

SEQ ID NO: 3303002 - DNA, 25 bp, Homo sapien
tgtcaccaacgaggatcctactgtg

SEQ ID NO: 3303003 - DNA, 25 bp, Homo sapien
ttggagatgcccaaggcagtgacct

SEQ ID NO: 3303004 - DNA, 25 bp, Homo sapien
ttactcctgaacaccagctgccgtt

SEQ ID NO: 3303005 - DNA, 25 bp, Homo sapien
tcctttcgatcaaaggctgtgtgca

SEQ ID NO: 3303006 - DNA, 25 bp, Homo sapien
cagctgggtgtgcattgtcctttcg

SEQ ID NO: 3303007 - DNA, 25 bp, Homo sapien
ttcaatctgctgtaattccgcacct

SEQ ID NO: 3303008 - DNA, 25 bp, Homo sapien
tgctgtaattccgcacctcaatggg

SEQ ID NO: 3303009 - DNA, 25 bp, Homo sapien
ctgctgtaattccgcacctcaatgg

SEQ ID NO: 3303010 - DNA, 25 bp, Homo sapien
tcatctagactgagctggtcggacc

SEQ ID NO: 3303011 - DNA, 25 bp, Homo sapien
tgtcagtacaccaggcggctgttgc

SEQ ID NO: 3303012 - DNA, 25 bp, Homo sapien
gaatcactgctgtcctcgtcttggg

SEQ ID NO: 3303013 - DNA, 25 bp, Homo sapien
cagcgtctggagtcgtcagagccac

SEQ ID NO: 3303014 - DNA, 25 bp, Homo sapien
ctatttgtgcttctggacagtcttc

SEQ ID NO: 3303015 - DNA, 25 bp, Homo sapien
tttctaggacttcagcaggctcagg

SEQ ID NO: 3303016 - DNA, 25 bp, Homo sapien
atttctaggacttcagcaggctcag

SEQ ID NO: 3303017 - DNA, 25 bp, Homo sapien
tcccgtatcttggaagatgtggcag

SEQ ID NO: 3303018 - DNA, 25 bp, Homo sapien
ggaaccaatttacattactcaatga

SEQ ID NO: 3303019 - DNA, 25 bp, Homo sapien
catgttatacagttagatttcccgt

SEQ ID NO: 3303020 - DNA, 25 bp, Homo sapien
gagagactgtcagggttaacagata

SEQ ID NO: 3303021 - DNA, 25 bp, Homo sapien
agatgatctgctggctcctacctgt

SEQ ID NO: 3303022 - DNA, 25 bp, Homo sapien
gttcatctccgacatgcagcagcag

SEQ ID NO: 3303023 - DNA, 25 bp, Homo sapien
tcctacctgtgaacgtgttgacact

SEQ ID NO: 3303024 - DNA, 25 bp, Homo sapien
tgttgacactcacgatagggttccc

SEQ ID NO: 3303025 - DNA, 25 bp, Homo sapien
cacatggatatatgtgccagcgcag

SEQ ID NO: 3303026 - DNA, 25 bp, Homo sapien
atggatatatgtgccagcgcaggac

SEQ ID NO: 3303027 - DNA, 25 bp, Homo sapien
cacacatggatatatgtgccagcgc

SEQ ID NO: 3303028 - DNA, 25 bp, Homo sapien
ctccacacatggatatatgtgccag

SEQ ID NO: 3303029 - DNA, 25 bp, Homo sapien
ctctactgcatggagcagtgaatgg

SEQ ID NO: 3303030 - DNA, 25 bp, Homo sapien
tactgcatggagcagtgaatggatt

SEQ ID NO: 3303031 - DNA, 25 bp, Homo sapien
ctgcatggagcagtgaatggatttt

SEQ ID NO: 3303032 - DNA, 25 bp, Homo sapien
catggagcagtgaatggattttaag

SEQ ID NO: 3303033 - DNA, 25 bp, Homo sapien
acacctgatgggtatagtgcctaca

SEQ ID NO: 3303034 - DNA, 25 bp, Homo sapien
cacctgatgggtatagtgcctacag

SEQ ID NO: 3303035 - DNA, 25 bp, Homo sapien
tgatgggtatagtgcctacagccca

SEQ ID NO: 3303036 - DNA, 25 bp, Homo sapien
cctgatgggtatagtgcctacagcc

SEQ ID NO: 3303037 - DNA, 25 bp, Homo sapien
gaaactggagctcgatgccctcgaa

SEQ ID NO: 3303038 - DNA, 25 bp, Homo sapien
agaaactggagctcgatgccctcga

SEQ ID NO: 3303039 - DNA, 25 bp, Homo sapien
aaactggagctcgatgccctcgaag

SEQ ID NO: 3303040 - DNA, 25 bp, Homo sapien
gcagaaactggagctcgatgccctc

SEQ ID NO: 3303041 - DNA, 25 bp, Homo sapien
aaatgatacaggttcgatcacggga

SEQ ID NO: 3303042 - DNA, 25 bp, Homo sapien
aatgatacaggttcgatcacgggac

SEQ ID NO: 3303043 - DNA, 25 bp, Homo sapien
caaatgatacaggttcgatcacggg

SEQ ID NO: 3303044 - DNA, 25 bp, Homo sapien
ccaaatgatacaggttcgatcacgg

SEQ ID NO: 3303045 - DNA, 25 bp, Homo sapien
gcaggtgacggtatcagtgtggccc

SEQ ID NO: 3303046 - DNA, 25 bp, Homo sapien
caattatgtgataggctaatgatgc

SEQ ID NO: 3303047 - DNA, 25 bp, Homo sapien
ccactgacaattatgtgataggcta

SEQ ID NO: 3303048 - DNA, 25 bp, Homo sapien
ctaatgatgctgtggcgcaggtgac

SEQ ID NO: 3303049 - DNA, 25 bp, Homo sapien
tgagggtgacggtcttggccttttc

SEQ ID NO: 3303050 - DNA, 25 bp, Homo sapien
gacaagcattcataaacagtcatgg

SEQ ID NO: 3303051 - DNA, 25 bp, Homo sapien
acacacacaaccgtgcttgttccac

SEQ ID NO: 3303052 - DNA, 25 bp, Homo sapien
acaagcattcataaacagtcatggc

SEQ ID NO: 3303053 - DNA, 25 bp, Homo sapien
cttgttccacccgtgatgaccagct

SEQ ID NO: 3303054 - DNA, 25 bp, Homo sapien
tattccaggttggtgggataagaac

SEQ ID NO: 3303055 - DNA, 25 bp, Homo sapien
tttattccaggttggtgggataaga

SEQ ID NO: 3303056 - DNA, 25 bp, Homo sapien
ttattccaggttggtgggataagaa

SEQ ID NO: 3303057 - DNA, 25 bp, Homo sapien
tctgttccaccgcaagaataccttt

SEQ ID NO: 3303058 - DNA, 25 bp, Homo sapien
gaatacctttatctgtacatacgat

SEQ ID NO: 3303059 - DNA, 25 bp, Homo sapien
cttattctgttccaccgcaagaata

SEQ ID NO: 3303060 - DNA, 25 bp, Homo sapien
cgatttgtcctacaggttctttgag

SEQ ID NO: 3303061 - DNA, 25 bp, Homo sapien
cctgcattgtctccattgagtcgac

SEQ ID NO: 3303062 - DNA, 25 bp, Homo sapien
tgagtcgacttctcactcgctttgg

SEQ ID NO: 3303063 - DNA, 25 bp, Homo sapien
gaaaaaagatcttgtcacttgtaga

SEQ ID NO: 3303064 - DNA, 25 bp, Homo sapien
tcctggtaggacagagattcctgca

SEQ ID NO: 3303065 - DNA, 25 bp, Homo sapien
gggccttgctgtttataaccgaaga

SEQ ID NO: 3303066 - DNA, 25 bp, Homo sapien
tgttgtagatatccacttgaccctc

SEQ ID NO: 3303067 - DNA, 25 bp, Homo sapien
tagatgggcactcacgtaatcacac

SEQ ID NO: 3303068 - DNA, 25 bp, Homo sapien
gtcaatccactcatgtagatgggca

SEQ ID NO: 3303069 - DNA, 25 bp, Homo sapien
ggtggaaggataacatctccaagct

SEQ ID NO: 3303070 - DNA, 25 bp, Homo sapien
actctgatgaattctcgtgggtccc

SEQ ID NO: 3303071 - DNA, 25 bp, Homo sapien
ctctgatgaattctcgtgggtcccc

SEQ ID NO: 3303072 - DNA, 25 bp, Homo sapien
gcccagggtggaaggataacatctc

SEQ ID NO: 3303073 - DNA, 25 bp, Homo sapien
tcagacacaatgttacgcaaccacg

SEQ ID NO: 3303074 - DNA, 25 bp, Homo sapien
gcagtggcatttagttcagacacaa

SEQ ID NO: 3303075 - DNA, 25 bp, Homo sapien
tacctgttaatcagtagctgcccgt

SEQ ID NO: 3303076 - DNA, 25 bp, Homo sapien
gtgaaattcacataaagccagccat

SEQ ID NO: 3303077 - DNA, 25 bp, Homo sapien
cagatcacttggctgagacgggcag

SEQ ID NO: 3303078 - DNA, 25 bp, Homo sapien
tgtaagtggtcggtctggaacacct

SEQ ID NO: 3303079 - DNA, 25 bp, Homo sapien
cctgtaaccactgagacgggcagat

SEQ ID NO: 3303080 - DNA, 25 bp, Homo sapien
tggaacacctttgcaacatggatta

SEQ ID NO: 3303081 - DNA, 25 bp, Homo sapien
tggaattgaacaggaattctggtaa

SEQ ID NO: 3303082 - DNA, 25 bp, Homo sapien
actgtgaaacatccggtcagccagg

SEQ ID NO: 3303083 - DNA, 25 bp, Homo sapien
tgctttgacgctgaataccaggcct

SEQ ID NO: 3303084 - DNA, 25 bp, Homo sapien
catctgccatattgtgctttgacgc

SEQ ID NO: 3303085 - DNA, 25 bp, Homo sapien
taagaatatctgtgtgaaaggctcc

SEQ ID NO: 3303086 - DNA, 25 bp, Homo sapien
tagtgggtcccatagtggtatgcag

SEQ ID NO: 3303087 - DNA, 25 bp, Homo sapien
ggtatgaggccacaatcattgcaga

SEQ ID NO: 3303088 - DNA, 25 bp, Homo sapien
ggctccatccttacaaggtatgagg

SEQ ID NO: 3303089 - DNA, 25 bp, Homo sapien
gctcccattggcttagccaggtttc

SEQ ID NO: 3303090 - DNA, 25 bp, Homo sapien
accgcttcttatactgagctaatcg

SEQ ID NO: 3303091 - DNA, 25 bp, Homo sapien
gagctaatcgttcatctgtttgtgc

SEQ ID NO: 3303092 - DNA, 25 bp, Homo sapien
tcttgggattagtaagatccacctc

SEQ ID NO: 3303093 - DNA, 25 bp, Homo sapien
gaaggttcagtaatgggacctgcca

SEQ ID NO: 3303094 - DNA, 25 bp, Homo sapien
tcagaattgcatcgggagaatgtgg

SEQ ID NO: 3303095 - DNA, 25 bp, Homo sapien
aatacacggtgaaggtcagaattgc

SEQ ID NO: 3303096 - DNA, 25 bp, Homo sapien
tgagttgacaaagtactccactccc

SEQ ID NO: 3303097 - DNA, 25 bp, Homo sapien
gggacatctggggtctggcaccaca

SEQ ID NO: 3303098 - DNA, 25 bp, Homo sapien
acatctggggtctggcaccacacct

SEQ ID NO: 3303099 - DNA, 25 bp, Homo sapien
ggacatctggggtctggcaccacac

SEQ ID NO: 3303100 - DNA, 25 bp, Homo sapien
catctggggtctggcaccacacctg

SEQ ID NO: 3303101 - DNA, 25 bp, Homo sapien
tgcatgagatcattatatgatctgc

SEQ ID NO: 3303102 - DNA, 25 bp, Homo sapien
tccaggggaagacaggatactgcat

SEQ ID NO: 3303103 - DNA, 25 bp, Homo sapien
cagccaaagtgttcaaatgcatcaa

SEQ ID NO: 3303104 - DNA, 25 bp, Homo sapien
tgccagccaaagtgttcaaatgcat

SEQ ID NO: 3303105 - DNA, 25 bp, Homo sapien
tgagtcacagacttctctccaacca

SEQ ID NO: 3303106 - DNA, 25 bp, Homo sapien
ctgagtcacagacttctctccaacc

SEQ ID NO: 3303107 - DNA, 25 bp, Homo sapien
tctgagtcacagacttctctccaac

SEQ ID NO: 3303108 - DNA, 25 bp, Homo sapien
ctctgagtcacagacttctctccaa

SEQ ID NO: 3303109 - DNA, 25 bp, Homo sapien
tccagctcgatggtactattttcca

SEQ ID NO: 3303110 - DNA, 25 bp, Homo sapien
gcagtagcaattcgcttacaagtag

SEQ ID NO: 3303111 - DNA, 25 bp, Homo sapien
tcaacatcgtaagaaagaggataac

SEQ ID NO: 3303112 - DNA, 25 bp, Homo sapien
caactcagcacaggcagtagcaaga

SEQ ID NO: 3303113 - DNA, 25 bp, Homo sapien
tccgttagagatggcactacagcca

SEQ ID NO: 3303114 - DNA, 25 bp, Homo sapien
tccacactcgtgtttggtcgttgcc

SEQ ID NO: 3303115 - DNA, 25 bp, Homo sapien
tggtcgttgcccagatacagattct

SEQ ID NO: 3303116 - DNA, 25 bp, Homo sapien
tacagattctgaactgtccgttaga

SEQ ID NO: 3303117 - DNA, 25 bp, Homo sapien
ggtgctcacgggtaatattactgta

SEQ ID NO: 3303118 - DNA, 25 bp, Homo sapien
catttcccaggtgctcacgggtaat

SEQ ID NO: 3303119 - DNA, 25 bp, Homo sapien
cccaggtgctcacgggtaatattac

SEQ ID NO: 3303120 - DNA, 25 bp, Homo sapien
tttcccaggtgctcacgggtaatat

SEQ ID NO: 3303121 - DNA, 25 bp, Homo sapien
aggtaattccgtccatctccagaga

SEQ ID NO: 3303122 - DNA, 25 bp, Homo sapien
aaagcaaggaggtaattccgtccat

SEQ ID NO: 3303123 - DNA, 25 bp, Homo sapien
ggaggtaattccgtccatctccaga

SEQ ID NO: 3303124 - DNA, 25 bp, Homo sapien
gcaaggaggtaattccgtccatctc

SEQ ID NO: 3303125 - DNA, 25 bp, Homo sapien
ttgagttgactagggccttgcctgg

SEQ ID NO: 3303126 - DNA, 25 bp, Homo sapien
tgcctggctcctctaggaataatag

SEQ ID NO: 3303127 - DNA, 25 bp, Homo sapien
tcctctaggaataataggctcatgc

SEQ ID NO: 3303128 - DNA, 25 bp, Homo sapien
caggagatatctccttttatgaact

SEQ ID NO: 3303129 - DNA, 25 bp, Homo sapien
gagcacagcggtacatgtgttggat

SEQ ID NO: 3303130 - DNA, 25 bp, Homo sapien
ggtatctaggccctggactcgagca

SEQ ID NO: 3303131 - DNA, 25 bp, Homo sapien
gaaggagcccctcactggtatctag

SEQ ID NO: 3303132 - DNA, 25 bp, Homo sapien
tggaggtaaggtttcaatatctctt

SEQ ID NO: 3303133 - DNA, 25 bp, Homo sapien
tctcctccatcaggtgcagatcggg

SEQ ID NO: 3303134 - DNA, 25 bp, Homo sapien
aatctggtcttgtagctgctcctgg

SEQ ID NO: 3303135 - DNA, 25 bp, Homo sapien
tctaacaggcgcagtaaggtagcat

SEQ ID NO: 3303136 - DNA, 25 bp, Homo sapien
ttctccttcctctaacaggcgcagt

SEQ ID NO: 3303137 - DNA, 25 bp, Homo sapien
catagtcatcacatgagagaacagg

SEQ ID NO: 3303138 - DNA, 25 bp, Homo sapien
taacagacatgagcgaagtattatc

SEQ ID NO: 3303139 - DNA, 25 bp, Homo sapien
tattatcagtgaacagaggagttgg

SEQ ID NO: 3303140 - DNA, 25 bp, Homo sapien
cattctgtgctagtcatgtgtcaaa

SEQ ID NO: 3303141 - DNA, 25 bp, Homo sapien
tacggctcttctatatcgagcaggt

SEQ ID NO: 3303142 - DNA, 25 bp, Homo sapien
cgtcttggacaatggcgggattgcc

SEQ ID NO: 3303143 - DNA, 25 bp, Homo sapien
tgccagaggccagtcgcatgtagta

SEQ ID NO: 3303144 - DNA, 25 bp, Homo sapien
tgaactctccacaatggcgtcttgg

SEQ ID NO: 3303145 - DNA, 25 bp, Homo sapien
tcaggctgtttacttgggatctcag

SEQ ID NO: 3303146 - DNA, 25 bp, Homo sapien
gaggaatatcatcgggtgtctcagg

SEQ ID NO: 3303147 - DNA, 25 bp, Homo sapien
caggctgtttacttgggatctcaga

SEQ ID NO: 3303148 - DNA, 25 bp, Homo sapien
cttttgaggaatatcatcgggtgtc

SEQ ID NO: 3303149 - DNA, 25 bp, Homo sapien
tccacttgtcgaggtgggagccgat

SEQ ID NO: 3303150 - DNA, 25 bp, Homo sapien
ctcagtttctggcacgtaagggtaa

SEQ ID NO: 3303151 - DNA, 25 bp, Homo sapien
tcaacagctcgcactcgatctgaca

SEQ ID NO: 3303152 - DNA, 25 bp, Homo sapien
cgtacttcagggcattctgctgacg

SEQ ID NO: 3303153 - DNA, 25 bp, Homo sapien
tgagtaaacatccactgcgaaatct

SEQ ID NO: 3303154 - DNA, 25 bp, Homo sapien
ctactaagtcacgaacaacagcaat

SEQ ID NO: 3303155 - DNA, 25 bp, Homo sapien
caacagcaatgtgagtaaacatcca

SEQ ID NO: 3303156 - DNA, 25 bp, Homo sapien
tatctactaagtcacgaacaacagc

SEQ ID NO: 3303157 - DNA, 25 bp, Homo sapien
tgtggtgggcgctaaagcttctcct

SEQ ID NO: 3303158 - DNA, 25 bp, Homo sapien
gcttctcctcgacttatgcatttct

SEQ ID NO: 3303159 - DNA, 25 bp, Homo sapien
tcttttcgattccttcttgatcctg

SEQ ID NO: 3303160 - DNA, 25 bp, Homo sapien
gccactgctgacacgggataatttg

SEQ ID NO: 3303161 - DNA, 25 bp, Homo sapien
gttcagtccaaactctgttgacagc

SEQ ID NO: 3303162 - DNA, 25 bp, Homo sapien
taagacttgtttcttactatgtatc

SEQ ID NO: 3303163 - DNA, 25 bp, Homo sapien
tatgtccacgtggcccctttcattc

SEQ ID NO: 3303164 - DNA, 25 bp, Homo sapien
tcacaggtagagttactttgaaaag

SEQ ID NO: 3303165 - DNA, 25 bp, Homo sapien
taatgtgccatgtggtcatgcgggc

SEQ ID NO: 3303166 - DNA, 25 bp, Homo sapien
ggtcatgcgggcttctgcttccagt

SEQ ID NO: 3303167 - DNA, 25 bp, Homo sapien
tgtccgaggggatcataatgtgcca

SEQ ID NO: 3303168 - DNA, 25 bp, Homo sapien
ttccagtccaaatccatccacgttg

SEQ ID NO: 3303169 - DNA, 25 bp, Homo sapien
ttaagaggtgatcaaataaatccac

SEQ ID NO: 3303170 - DNA, 25 bp, Homo sapien
attactctatttccattaccagcag

SEQ ID NO: 3303171 - DNA, 25 bp, Homo sapien
aaatgattagctgaagactacagta

SEQ ID NO: 3303172 - DNA, 25 bp, Homo sapien
gactacagtaactaagaattactct

SEQ ID NO: 3303173 - DNA, 25 bp, Homo sapien
gcagagctacttgctgaggaacggt

SEQ ID NO: 3303174 - DNA, 25 bp, Homo sapien
tttgtgtgcccgtgagaactggtac

SEQ ID NO: 3303175 - DNA, 25 bp, Homo sapien
tagatttatcaagcagtgggccaga

SEQ ID NO: 3303176 - DNA, 25 bp, Homo sapien
gaccctgagtgaatcaagcagagct

SEQ ID NO: 3303177 - DNA, 25 bp, Homo sapien
gatacactgcatccagtgacaatcc

SEQ ID NO: 3303178 - DNA, 25 bp, Homo sapien
gcatccagtgacaatccctgtgatc

SEQ ID NO: 3303179 - DNA, 25 bp, Homo sapien
tacactgcatccagtgacaatccct

SEQ ID NO: 3303180 - DNA, 25 bp, Homo sapien
actgcatccagtgacaatccctgtg

SEQ ID NO: 3303181 - DNA, 25 bp, Homo sapien
caacaattttgacaccataggcaaa

SEQ ID NO: 3303182 - DNA, 25 bp, Homo sapien
ttttgacaccataggcaaaacagga

SEQ ID NO: 3303183 - DNA, 25 bp, Homo sapien
tcaacaattttgacaccataggcaa

SEQ ID NO: 3303184 - DNA, 25 bp, Homo sapien
caattttgacaccataggcaaaaca

SEQ ID NO: 3303185 - DNA, 25 bp, Homo sapien
ggtaataggcagagatgcatcttcc

SEQ ID NO: 3303186 - DNA, 25 bp, Homo sapien
cattgttcaccaatacctggtagct

SEQ ID NO: 3303187 - DNA, 25 bp, Homo sapien
gtccaccacacgctgtgtgaaataa

SEQ ID NO: 3303188 - DNA, 25 bp, Homo sapien
tttagattctttgttgaacatgcct

SEQ ID NO: 3303189 - DNA, 25 bp, Homo sapien
gcaaatggtccatcacgctatccaa

SEQ ID NO: 3303190 - DNA, 25 bp, Homo sapien
atcagctgcaagcaaatggtccatc

SEQ ID NO: 3303191 - DNA, 25 bp, Homo sapien
tcacgctatccaaaatgtaagtttg

SEQ ID NO: 3303192 - DNA, 25 bp, Homo sapien
tggtccatcacgctatccaaaatgt

SEQ ID NO: 3303193 - DNA, 25 bp, Homo sapien
tattaaacgtacagaaatgcttggt

SEQ ID NO: 3303194 - DNA, 25 bp, Homo sapien
gaggattgattgacctcagcaggtc

SEQ ID NO: 3303195 - DNA, 25 bp, Homo sapien
tgagtagggcttatcaaatcttaac

SEQ ID NO: 3303196 - DNA, 25 bp, Homo sapien
gactatgcaacagaccaagatcctg

SEQ ID NO: 3303197 - DNA, 25 bp, Homo sapien
caccagacaaccagaatgaaggcag

SEQ ID NO: 3303198 - DNA, 25 bp, Homo sapien
tctggactctggtggtcagatctgt

SEQ ID NO: 3303199 - DNA, 25 bp, Homo sapien
ggtcaagtcacaactaggattcaaa

SEQ ID NO: 3303200 - DNA, 25 bp, Homo sapien
tagataagactggttggcccaccag

SEQ ID NO: 3303201 - DNA, 25 bp, Homo sapien
cattgccacggtatttatttgcagc

SEQ ID NO: 3303202 - DNA, 25 bp, Homo sapien
tgcagcaaattcatttggctcttca

SEQ ID NO: 3303203 - DNA, 25 bp, Homo sapien
tcttcccattgccacggtatttatt

SEQ ID NO: 3303204 - DNA, 25 bp, Homo sapien
tatttgcagcaaattcatttggctc

SEQ ID NO: 3303205 - DNA, 25 bp, Homo sapien
ttagaaatccttgttatagaacttg

SEQ ID NO: 3303206 - DNA, 25 bp, Homo sapien
agagatgtaaatgcgtttctttttc

SEQ ID NO: 3303207 - DNA, 25 bp, Homo sapien
tctgcctacacataaacaagaggaa

SEQ ID NO: 3303208 - DNA, 25 bp, Homo sapien
gtttaaagcacatgtgggattaaga

SEQ ID NO: 3303209 - DNA, 25 bp, Homo sapien
tcatccctgtgtctgctgcaaacgc

SEQ ID NO: 3303210 - DNA, 25 bp, Homo sapien
caattagtggagtttgcttgctggc

SEQ ID NO: 3303211 - DNA, 25 bp, Homo sapien
ggtcagatatgtcttggtgcccaca

SEQ ID NO: 3303212 - DNA, 25 bp, Homo sapien
taagacccgcatgaagtcaaaaacg

SEQ ID NO: 3303213 - DNA, 25 bp, Homo sapien
agtaaaatcaagtggaaagatacgg

SEQ ID NO: 3303214 - DNA, 25 bp, Homo sapien
tagtaaaatcaagtggaaagatacg

SEQ ID NO: 3303215 - DNA, 25 bp, Homo sapien
ctagtaaaatcaagtggaaagatac

SEQ ID NO: 3303216 - DNA, 25 bp, Homo sapien
catctctgagtaagggcgaatattg

SEQ ID NO: 3303217 - DNA, 25 bp, Homo sapien
tcagggtcacaggatattctcggag

SEQ ID NO: 3303218 - DNA, 25 bp, Homo sapien
cggagccaagatccctcttcttctg

SEQ ID NO: 3303219 - DNA, 25 bp, Homo sapien
cgttgtgatacaaatatctgaagaa

SEQ ID NO: 3303220 - DNA, 25 bp, Homo sapien
gctgcggagcattcccaataataaa

SEQ ID NO: 3303221 - DNA, 25 bp, Homo sapien
tacgttatggatagaagagaccaca

SEQ ID NO: 3303222 - DNA, 25 bp, Homo sapien
ggaactccaaagatgaatgtccaaa

SEQ ID NO: 3303223 - DNA, 25 bp, Homo sapien
agagaccacagttccgctggaggca

SEQ ID NO: 3303224 - DNA, 25 bp, Homo sapien
ttactccggcagctgatgacaggca

SEQ ID NO: 3303225 - DNA, 25 bp, Homo sapien
caggaaaatgacaagcatctcggtt

SEQ ID NO: 3303226 - DNA, 25 bp, Homo sapien
ggttaatctccctgaccgtcgatct

SEQ ID NO: 3303227 - DNA, 25 bp, Homo sapien
gacaggcacactgacctgcaggttc

SEQ ID NO: 3303228 - DNA, 25 bp, Homo sapien
tatccactggctgaacttaacatcc

SEQ ID NO: 3303229 - DNA, 25 bp, Homo sapien
cccagctttttaaggagataatcag

SEQ ID NO: 3303230 - DNA, 25 bp, Homo sapien
tggtaaatccaagcccgttgtggct

SEQ ID NO: 3303231 - DNA, 25 bp, Homo sapien
tgtagcttatggcatcagtgtttcc

SEQ ID NO: 3303232 - DNA, 25 bp, Homo sapien
ttcccatcggaccaaggtaaataga

SEQ ID NO: 3303233 - DNA, 25 bp, Homo sapien
gatatgatagcatttgcacctcaca

SEQ ID NO: 3303234 - DNA, 25 bp, Homo sapien
ggtaaatgctcagttataggctgaa

SEQ ID NO: 3303235 - DNA, 25 bp, Homo sapien
tggtactagtgagcttaaatccttg

SEQ ID NO: 3303236 - DNA, 25 bp, Homo sapien
tctccttaatggtgatcaaaccgca

SEQ ID NO: 3303237 - DNA, 25 bp, Homo sapien
caaaccgcagaggataagtttacat

SEQ ID NO: 3303238 - DNA, 25 bp, Homo sapien
ttcaagcagctgactagaaaagtcc

SEQ ID NO: 3303239 - DNA, 25 bp, Homo sapien
taatggtgatcaaaccgcagaggat

SEQ ID NO: 3303240 - DNA, 25 bp, Homo sapien
agaatctgtctgttcaagccatcct

SEQ ID NO: 3303241 - DNA, 25 bp, Homo sapien
ttccaatcttattagttaagacaga

SEQ ID NO: 3303242 - DNA, 25 bp, Homo sapien
gttccaatcttattagttaagacag

SEQ ID NO: 3303243 - DNA, 25 bp, Homo sapien
cagaatctgtctgttcaagccatcc

SEQ ID NO: 3303244 - DNA, 25 bp, Homo sapien
tgagtccttctttaaacttgatgag

SEQ ID NO: 3303245 - DNA, 25 bp, Homo sapien
taggacaacaagaatcctcatggct

SEQ ID NO: 3303246 - DNA, 25 bp, Homo sapien
gaatgtaagtgttcctccataaaca

SEQ ID NO: 3303247 - DNA, 25 bp, Homo sapien
gaatagactgattacttagtaggac

SEQ ID NO: 3303248 - DNA, 25 bp, Homo sapien
gattagctgatacaagacctccaaa

SEQ ID NO: 3303249 - DNA, 25 bp, Homo sapien
tcctcaaaagtataagattagctga

SEQ ID NO: 3303250 - DNA, 25 bp, Homo sapien
aattagttttagcaagatatccaga

SEQ ID NO: 3303251 - DNA, 25 bp, Homo sapien
taaattagttttagcaagatatcca

SEQ ID NO: 3303252 - DNA, 25 bp, Homo sapien
ttaaatctccctagtagataagcta

SEQ ID NO: 3303253 - DNA, 25 bp, Homo sapien
aatctccctagtagataagctaaaa

SEQ ID NO: 3303254 - DNA, 25 bp, Homo sapien
tctccctagtagataagctaaaaga

SEQ ID NO: 3303255 - DNA, 25 bp, Homo sapien
tccctagtagataagctaaaagaaa

SEQ ID NO: 3303256 - DNA, 25 bp, Homo sapien
gcatttcgtaggaaaatgtagtagt

SEQ ID NO: 3303257 - DNA, 25 bp, Homo sapien
aatttacaacactactatggttact

SEQ ID NO: 3303258 - DNA, 25 bp, Homo sapien
ttcctcccttgtataattggaataa

SEQ ID NO: 3303259 - DNA, 25 bp, Homo sapien
aaagcactttcactacctaattata

SEQ ID NO: 3303260 - DNA, 25 bp, Homo sapien
cgcaaaggttggcaaagtagaagaa

SEQ ID NO: 3303261 - DNA, 25 bp, Homo sapien
cacaaaccgcaaaggttggcaaagt

SEQ ID NO: 3303262 - DNA, 25 bp, Homo sapien
aatttctcacaaaccgcaaaggttg

SEQ ID NO: 3303263 - DNA, 25 bp, Homo sapien
ttccattactacaaatttctcacaa

SEQ ID NO: 3303264 - DNA, 25 bp, Homo sapien
tgcagtaagaagctcaggacattac

SEQ ID NO: 3303265 - DNA, 25 bp, Homo sapien
accttgcagtaagaagctcaggaca

SEQ ID NO: 3303266 - DNA, 25 bp, Homo sapien
tgctgctaggaaaaccttgcagtaa

SEQ ID NO: 3303267 - DNA, 25 bp, Homo sapien
gctcaggacattactaatagcagca

SEQ ID NO: 3303268 - DNA, 25 bp, Homo sapien
gagtcaggagcagctttgggattaa

SEQ ID NO: 3303269 - DNA, 25 bp, Homo sapien
ctgggataaagacatatctcgaaga

SEQ ID NO: 3303270 - DNA, 25 bp, Homo sapien
caggagcagctttgggattaactgg

SEQ ID NO: 3303271 - DNA, 25 bp, Homo sapien
gacatatctcgaagagtcaggagca

SEQ ID NO: 3303272 - DNA, 25 bp, Homo sapien
ataaagtgttcaaataaggaaagat

SEQ ID NO: 3303273 - DNA, 25 bp, Homo sapien
tctgtgagcagttcaataaagtgtt

SEQ ID NO: 3303274 - DNA, 25 bp, Homo sapien
tgtgagcagttcaataaagtgttca

SEQ ID NO: 3303275 - DNA, 25 bp, Homo sapien
actctgtgagcagttcaataaagtg

SEQ ID NO: 3303276 - DNA, 25 bp, Homo sapien
tgtccactatcaacagttcccacca

SEQ ID NO: 3303277 - DNA, 25 bp, Homo sapien
ggaggtcctggaaagcagttgaatt

SEQ ID NO: 3303278 - DNA, 25 bp, Homo sapien
taatggaggtctcatgtccactatc

SEQ ID NO: 3303279 - DNA, 25 bp, Homo sapien
gttgaatttggaataatggaggtct

SEQ ID NO: 3303280 - DNA, 25 bp, Homo sapien
ataccaaatgcctgttgataaatca

SEQ ID NO: 3303281 - DNA, 25 bp, Homo sapien
gaaagtaataccaaatgcctgttga

SEQ ID NO: 3303282 - DNA, 25 bp, Homo sapien
acaagaaagtaataccaaatgcctg

SEQ ID NO: 3303283 - DNA, 25 bp, Homo sapien
ctacaagaaagtaataccaaatgcc

SEQ ID NO: 3303284 - DNA, 25 bp, Homo sapien
gttttcaggaatagcaatggtacac

SEQ ID NO: 3303285 - DNA, 25 bp, Homo sapien
tatgtagtggctttcacgtctcctg

SEQ ID NO: 3303286 - DNA, 25 bp, Homo sapien
gggagagccctgaatctaccatgga

SEQ ID NO: 3303287 - DNA, 25 bp, Homo sapien
taatgttgcctaactcaagtgttta

SEQ ID NO: 3303288 - DNA, 25 bp, Homo sapien
gctccaccaacgtactgcaaagtag

SEQ ID NO: 3303289 - DNA, 25 bp, Homo sapien
gactgctgcatataacccttccaca

SEQ ID NO: 3303290 - DNA, 25 bp, Homo sapien
tgcagctccaccaacgtactgcaaa

SEQ ID NO: 3303291 - DNA, 25 bp, Homo sapien
gggccttgactgctgcatataaccc

SEQ ID NO: 3303292 - DNA, 25 bp, Homo sapien
tgaaaactagctcctaaggtaatta

SEQ ID NO: 3303293 - DNA, 25 bp, Homo sapien
tatattacagtgctggattttgaaa

SEQ ID NO: 3303294 - DNA, 25 bp, Homo sapien
ctagctcctaaggtaattagggcca

SEQ ID NO: 3303295 - DNA, 25 bp, Homo sapien
gctcctaaggtaattagggccagta

SEQ ID NO: 3303296 - DNA, 25 bp, Homo sapien
tgtatcaacttcacaggagtggcat

SEQ ID NO: 3303297 - DNA, 25 bp, Homo sapien
aattgtccgtgcagatccattaaga

SEQ ID NO: 3303298 - DNA, 25 bp, Homo sapien
tatccaatcagagcggccccaattg

SEQ ID NO: 3303299 - DNA, 25 bp, Homo sapien
caggagtggcattctcatgtgagga

SEQ ID NO: 3303300 - DNA, 25 bp, Homo sapien
tctcctctggtactaatgacacagg

SEQ ID NO: 3303301 - DNA, 25 bp, Homo sapien
acgacacagagagtgcatagaggcc

SEQ ID NO: 3303302 - DNA, 25 bp, Homo sapien
catagaggccaaatgacactttctc

SEQ ID NO: 3303303 - DNA, 25 bp, Homo sapien
tcttgccactgttagagacgacaca

SEQ ID NO: 3303304 - DNA, 25 bp, Homo sapien
gcatatacctatatctcagagccag

SEQ ID NO: 3303305 - DNA, 25 bp, Homo sapien
gaagagtgtcacagttagactccta

SEQ ID NO: 3303306 - DNA, 25 bp, Homo sapien
gagtactaccaaggaactgccagct

SEQ ID NO: 3303307 - DNA, 25 bp, Homo sapien
taagtgcccaagaagtgttagcttt

SEQ ID NO: 3303308 - DNA, 25 bp, Homo sapien
caggcgccaaaccaatgaggcaatt

SEQ ID NO: 3303309 - DNA, 25 bp, Homo sapien
cactggtggatttgccgaacctgaa

SEQ ID NO: 3303310 - DNA, 25 bp, Homo sapien
atagaccgtgctcaccactggtgga

SEQ ID NO: 3303311 - DNA, 25 bp, Homo sapien
gagtaccaatgtaggcatagaccgt

SEQ ID NO: 3303312 - DNA, 25 bp, Homo sapien
ccaggaccaaatgatgccactgtcc

SEQ ID NO: 3303313 - DNA, 25 bp, Homo sapien
caagctgtccatcaatataaagggc

SEQ ID NO: 3303314 - DNA, 25 bp, Homo sapien
catcgaaagcgagcacagcatggga

SEQ ID NO: 3303315 - DNA, 25 bp, Homo sapien
tgtccctcaatgataagctctccac

SEQ ID NO: 3303316 - DNA, 25 bp, Homo sapien
tttggaggagttcctctttggtgga

SEQ ID NO: 3303317 - DNA, 25 bp, Homo sapien
cataattttggaggagttcctcttt

SEQ ID NO: 3303318 - DNA, 25 bp, Homo sapien
tggaggagttcctctttggtggaaa

SEQ ID NO: 3303319 - DNA, 25 bp, Homo sapien
attttggaggagttcctctttggtg

SEQ ID NO: 3303320 - DNA, 25 bp, Homo sapien
ctcggcgcacaacagtaagaagtct

SEQ ID NO: 3303321 - DNA, 25 bp, Homo sapien
cacacgtaatgttgctcagaagaat

SEQ ID NO: 3303322 - DNA, 25 bp, Homo sapien
gagatcggtcttttgctgatagaac

SEQ ID NO: 3303323 - DNA, 25 bp, Homo sapien
ctagagtaacttaagccggagggag

SEQ ID NO: 3303324 - DNA, 25 bp, Homo sapien
tgtgacggtattatttgtaggagca

SEQ ID NO: 3303325 - DNA, 25 bp, Homo sapien
tcaataagacctgttgtgacggtat

SEQ ID NO: 3303326 - DNA, 25 bp, Homo sapien
acagccccatcaataagacctgttg

SEQ ID NO: 3303327 - DNA, 25 bp, Homo sapien
tgtaggagcattatgaggggccaaa

SEQ ID NO: 3303328 - DNA, 25 bp, Homo sapien
catggagaccagacacttcaccctg

SEQ ID NO: 3303329 - DNA, 25 bp, Homo sapien
tacttccttccgcagattttaccag

SEQ ID NO: 3303330 - DNA, 25 bp, Homo sapien
gaccttccagagatgtgatcatact

SEQ ID NO: 3303331 - DNA, 25 bp, Homo sapien
caggctcttgcttatccggtaatgg

SEQ ID NO: 3303332 - DNA, 25 bp, Homo sapien
tgtggaccctatattgttttagcag

SEQ ID NO: 3303333 - DNA, 25 bp, Homo sapien
caggcaccacaatttaaaggacttg

SEQ ID NO: 3303334 - DNA, 25 bp, Homo sapien
tttagcagttttttgtcccaggcac

SEQ ID NO: 3303335 - DNA, 25 bp, Homo sapien
ctcatttctggttcataactcagtg

SEQ ID NO: 3303336 - DNA, 25 bp, Homo sapien
ggattgtaaaatatttgccacggca

SEQ ID NO: 3303337 - DNA, 25 bp, Homo sapien
aatcgttcaaacatccgctgcaggg

SEQ ID NO: 3303338 - DNA, 25 bp, Homo sapien
cagcagtcgtgcatgaagaccagct

SEQ ID NO: 3303339 - DNA, 25 bp, Homo sapien
gccacggcaagttgaagatccaaag

SEQ ID NO: 3303340 - DNA, 25 bp, Homo sapien
ccaacagaggccagtaggtccagca

SEQ ID NO: 3303341 - DNA, 25 bp, Homo sapien
ctggctgtgtcactgacccaacaga

SEQ ID NO: 3303342 - DNA, 25 bp, Homo sapien
ctctgcagagatgaagttgtcacat

SEQ ID NO: 3303343 - DNA, 25 bp, Homo sapien
caggtcggcaacatttttaggaggg

SEQ ID NO: 3303344 - DNA, 25 bp, Homo sapien
ggacactgaactctttactaacaca

SEQ ID NO: 3303345 - DNA, 25 bp, Homo sapien
tactaacacaggttgagtaccccta

SEQ ID NO: 3303346 - DNA, 25 bp, Homo sapien
ttttaagcacccacatgacgccata

SEQ ID NO: 3303347 - DNA, 25 bp, Homo sapien
catctgaccttatatgatggatcag

SEQ ID NO: 3303348 - DNA, 25 bp, Homo sapien
gaggcactaagtaatggatcccatg

SEQ ID NO: 3303349 - DNA, 25 bp, Homo sapien
tcctggatactacatgtcagacaag

SEQ ID NO: 3303350 - DNA, 25 bp, Homo sapien
gacaagtatcacaacctcaaaacgt

SEQ ID NO: 3303351 - DNA, 25 bp, Homo sapien
caaaacgtccttagcatctgagagt

SEQ ID NO: 3303352 - DNA, 25 bp, Homo sapien
ttccctttgtcaaattaccatttca

SEQ ID NO: 3303353 - DNA, 25 bp, Homo sapien
tccctttgtcaaattaccatttcaa

SEQ ID NO: 3303354 - DNA, 25 bp, Homo sapien
tacatggagctacactgtaaatgat

SEQ ID NO: 3303355 - DNA, 25 bp, Homo sapien
taaggccataagtaactctttaaga

SEQ ID NO: 3303356 - DNA, 25 bp, Homo sapien
cagaaaaatacacgatatcaactca

SEQ ID NO: 3303357 - DNA, 25 bp, Homo sapien
caacaattccttgggctcatgaaca

SEQ ID NO: 3303358 - DNA, 25 bp, Homo sapien
aaattgcagtttttaagcacaaata

SEQ ID NO: 3303359 - DNA, 25 bp, Homo sapien
acacacattttttacctcgaccatt

SEQ ID NO: 3303360 - DNA, 25 bp, Homo sapien
aaatcacaaaacacaatcaacatgt

SEQ ID NO: 3303361 - DNA, 25 bp, Homo sapien
gaaaaactgatatctttaaaatcta

SEQ ID NO: 3303362 - DNA, 25 bp, Homo sapien
tcacaaaacacaatcaacatgttaa

SEQ ID NO: 3303363 - DNA, 25 bp, Homo sapien
cacaaaacacaatcaacatgttaac

SEQ ID NO: 3303364 - DNA, 25 bp, Homo sapien
gacaaagctggtgtaccccaaggag

SEQ ID NO: 3303365 - DNA, 25 bp, Homo sapien
ggacaaagctggtgtaccccaagga

SEQ ID NO: 3303366 - DNA, 25 bp, Homo sapien
acaaagctggtgtaccccaaggaga

SEQ ID NO: 3303367 - DNA, 25 bp, Homo sapien
tcacttgtcaggcaaggagggatct

SEQ ID NO: 3303368 - DNA, 25 bp, Homo sapien
tagagctgaatcctcaatgcctagc

SEQ ID NO: 3303369 - DNA, 25 bp, Homo sapien
gaacaagactacaacacaagcactg

SEQ ID NO: 3303370 - DNA, 25 bp, Homo sapien
gatgaagtggctctcctacaatctg

SEQ ID NO: 3303371 - DNA, 25 bp, Homo sapien
tattgagtctgatggcctcttgaac

SEQ ID NO: 3303372 - DNA, 25 bp, Homo sapien
tacaccctttaattcagaggacaga

SEQ ID NO: 3303373 - DNA, 25 bp, Homo sapien
gtatacaccctttaattcagaggac

SEQ ID NO: 3303374 - DNA, 25 bp, Homo sapien
tatacaccctttaattcagaggaca

SEQ ID NO: 3303375 - DNA, 25 bp, Homo sapien
tagtatacaccctttaattcagagg

SEQ ID NO: 3303376 - DNA, 25 bp, Homo sapien
gaacgatggctttctcgaaggaccg

SEQ ID NO: 3303377 - DNA, 25 bp, Homo sapien
gccattcttgggtggacagctcaaa

SEQ ID NO: 3303378 - DNA, 25 bp, Homo sapien
tactgcagtgccgtaacgtgggtga

SEQ ID NO: 3303379 - DNA, 25 bp, Homo sapien
tcatagcgcattgctgcagtcaacg

SEQ ID NO: 3303380 - DNA, 25 bp, Homo sapien
gctgccggcattgagggtactttac

SEQ ID NO: 3303381 - DNA, 25 bp, Homo sapien
tcttcaactgcaattccgtcggtgg

SEQ ID NO: 3303382 - DNA, 25 bp, Homo sapien
gctgaatgcattagccccaggagag

SEQ ID NO: 3303383 - DNA, 25 bp, Homo sapien
gcaccagctgttggatagtcatcaa

SEQ ID NO: 3303384 - DNA, 25 bp, Homo sapien
tgcacctccaaattctcgaaaaatt

SEQ ID NO: 3303385 - DNA, 25 bp, Homo sapien
cttgcacctccaaattctcgaaaaa

SEQ ID NO: 3303386 - DNA, 25 bp, Homo sapien
ttgcacctccaaattctcgaaaaat

SEQ ID NO: 3303387 - DNA, 25 bp, Homo sapien
gcacctccaaattctcgaaaaattc

SEQ ID NO: 3303388 - DNA, 25 bp, Homo sapien
ccatgtccaagctctcaaaatctag

SEQ ID NO: 3303389 - DNA, 25 bp, Homo sapien
aaatttgcacagtgggttgtcagca

SEQ ID NO: 3303390 - DNA, 25 bp, Homo sapien
ggcagaccctaggagactctctatt

SEQ ID NO: 3303391 - DNA, 25 bp, Homo sapien
gattaatgccgtgatatgttcacca

SEQ ID NO: 3303392 - DNA, 25 bp, Homo sapien
tttggtcttcaactgaactattatt

SEQ ID NO: 3303393 - DNA, 25 bp, Homo sapien
taaagccaggtgtttttggtcttca

SEQ ID NO: 3303394 - DNA, 25 bp, Homo sapien
tctccataaccaataaagccaggtg

SEQ ID NO: 3303395 - DNA, 25 bp, Homo sapien
aaggtctccataaccaataaagcca

SEQ ID NO: 3303396 - DNA, 25 bp, Homo sapien
ggcctggacgtttctcacactgtga

SEQ ID NO: 3303397 - DNA, 25 bp, Homo sapien
tcaaggatgatttgggcaaggaagc

SEQ ID NO: 3303398 - DNA, 25 bp, Homo sapien
ggatccttcaacagggcagcatatt

SEQ ID NO: 3303399 - DNA, 25 bp, Homo sapien
gcaaaaggtttaccatgacctccaa

SEQ ID NO: 3303400 - DNA, 25 bp, Homo sapien
acaacttatgtactgagggcacatc

SEQ ID NO: 3303401 - DNA, 25 bp, Homo sapien
tcatattacactgatgacgccatct

SEQ ID NO: 3303402 - DNA, 25 bp, Homo sapien
tacaggtgtgaattgccacactatt

SEQ ID NO: 3303403 - DNA, 25 bp, Homo sapien
aacatggatttctccctatttactg

SEQ ID NO: 3303404 - DNA, 25 bp, Homo sapien
ggtgcccctgtggtaataccagctg

SEQ ID NO: 3303405 - DNA, 25 bp, Homo sapien
ggctgaggtactgcaaatccaggca

SEQ ID NO: 3303406 - DNA, 25 bp, Homo sapien
caccatatgttgttagggaagttat

SEQ ID NO: 3303407 - DNA, 25 bp, Homo sapien
taccagctggttttagttcactgac

SEQ ID NO: 3303408 - DNA, 25 bp, Homo sapien
tgccatatccgaaaatcatccagaa

SEQ ID NO: 3303409 - DNA, 25 bp, Homo sapien
tgtttgggaaacatcgctggaatct

SEQ ID NO: 3303410 - DNA, 25 bp, Homo sapien
catttcgacaatttctaggggagac

SEQ ID NO: 3303411 - DNA, 25 bp, Homo sapien
gaaacatcgctggaatctttgagga

SEQ ID NO: 3303412 - DNA, 25 bp, Homo sapien
tgaacacatgtagataaacactctt

SEQ ID NO: 3303413 - DNA, 25 bp, Homo sapien
ctgaacacatgtagataaacactct

SEQ ID NO: 3303414 - DNA, 25 bp, Homo sapien
tatagggagggcaccaagaggttat

SEQ ID NO: 3303415 - DNA, 25 bp, Homo sapien
tacattgacactaagaccatgacga

SEQ ID NO: 3303416 - DNA, 25 bp, Homo sapien
ttctccaaggcaggttatagggagg

SEQ ID NO: 3303417 - DNA, 25 bp, Homo sapien
aagctggagatcatctttctgagcc

SEQ ID NO: 3303418 - DNA, 25 bp, Homo sapien
tccgcaggggaaacaaaactgcaca

SEQ ID NO: 3303419 - DNA, 25 bp, Homo sapien
ctccgcaggggaaacaaaactgcac

SEQ ID NO: 3303420 - DNA, 25 bp, Homo sapien
gatataaacatttaaccagggtgga

SEQ ID NO: 3303421 - DNA, 25 bp, Homo sapien
agtagtcctcgacgttctgctagag

SEQ ID NO: 3303422 - DNA, 25 bp, Homo sapien
aaactttctggagtagtcctcgacg

SEQ ID NO: 3303423 - DNA, 25 bp, Homo sapien
ctagaggtagctcattctgtgcacc

SEQ ID NO: 3303424 - DNA, 25 bp, Homo sapien
caaattaattgtcgttagaagcatc

SEQ ID NO: 3303425 - DNA, 25 bp, Homo sapien
tctaggaactgaactatggcccgac

SEQ ID NO: 3303426 - DNA, 25 bp, Homo sapien
tagaagcatccagcctctactggct

SEQ ID NO: 3303427 - DNA, 25 bp, Homo sapien
tgaccagaggaagctaacaaattaa

SEQ ID NO: 3303428 - DNA, 25 bp, Homo sapien
ctgaaggtgttgtggctttgaaatc

SEQ ID NO: 3303429 - DNA, 25 bp, Homo sapien
gtgttgtggctttgaaatccttggg

SEQ ID NO: 3303430 - DNA, 25 bp, Homo sapien
ggctttgaaatccttgggggacagc

SEQ ID NO: 3303431 - DNA, 25 bp, Homo sapien
tggctttgaaatccttgggggacag

SEQ ID NO: 3303432 - DNA, 25 bp, Homo sapien
tcaatgtgctgagaacaaggtctgt

SEQ ID NO: 3303433 - DNA, 25 bp, Homo sapien
gccttgagcagaactactggagagt

SEQ ID NO: 3303434 - DNA, 25 bp, Homo sapien
gagttgaagatgctgaaaccaggaa

SEQ ID NO: 3303435 - DNA, 25 bp, Homo sapien
aaagaatgtgactctaagaaaggga

SEQ ID NO: 3303436 - DNA, 25 bp, Homo sapien
caccattagtcgtgagacttgtgtt

SEQ ID NO: 3303437 - DNA, 25 bp, Homo sapien
tttctgtcattgtattcggcggagc

SEQ ID NO: 3303438 - DNA, 25 bp, Homo sapien
tattcggcggagcatttccaaaaac

SEQ ID NO: 3303439 - DNA, 25 bp, Homo sapien
gctctccttcgaatttctgtcacca

SEQ ID NO: 3303440 - DNA, 25 bp, Homo sapien
gcagctctactgctaaatcccaggc

SEQ ID NO: 3303441 - DNA, 25 bp, Homo sapien
aggcacactggatggtgaaaagcag

SEQ ID NO: 3303442 - DNA, 25 bp, Homo sapien
gatctttgatggagtacaggcacac

SEQ ID NO: 3303443 - DNA, 25 bp, Homo sapien
gacgtcagaattcactaaactcatt

SEQ ID NO: 3303444 - DNA, 25 bp, Homo sapien
ttctctctggcatacacaagtggcc

SEQ ID NO: 3303445 - DNA, 25 bp, Homo sapien
ggtctcataactgaggctgctacta

SEQ ID NO: 3303446 - DNA, 25 bp, Homo sapien
cttgataccaggacaataggtctca

SEQ ID NO: 3303447 - DNA, 25 bp, Homo sapien
taagtgactattgggcaggtggccc

SEQ ID NO: 3303448 - DNA, 25 bp, Homo sapien
gcgtagcactattcaagaacttggt

SEQ ID NO: 3303449 - DNA, 25 bp, Homo sapien
tctaatggcattcataaaggctcaa

SEQ ID NO: 3303450 - DNA, 25 bp, Homo sapien
tacagaataggttctactagtagcc

SEQ ID NO: 3303451 - DNA, 25 bp, Homo sapien
taacttaaaacaggaggcaatacag

SEQ ID NO: 3303452 - DNA, 25 bp, Homo sapien
acaactccgtgaagagccggcggag

SEQ ID NO: 3303453 - DNA, 25 bp, Homo sapien
tccttctgagtcatgtgccggggag

SEQ ID NO: 3303454 - DNA, 25 bp, Homo sapien
gaggtgcatcagtcctaaggcgttg

SEQ ID NO: 3303455 - DNA, 25 bp, Homo sapien
taaggcgttgtcttgtgggctgcac

SEQ ID NO: 3303456 - DNA, 25 bp, Homo sapien
tggttggtgagacgcacttctaatt

SEQ ID NO: 3303457 - DNA, 25 bp, Homo sapien
ctggttggtgagacgcacttctaat

SEQ ID NO: 3303458 - DNA, 25 bp, Homo sapien
agagcagaaagaataggcacttatc

SEQ ID NO: 3303459 - DNA, 25 bp, Homo sapien
tctgtaacatgccaagcacactagt

SEQ ID NO: 3303460 - DNA, 25 bp, Homo sapien
taaatcaggtaacttcaggagaaag

SEQ ID NO: 3303461 - DNA, 25 bp, Homo sapien
gaaaggctctaaacacccttgaatc

SEQ ID NO: 3303462 - DNA, 25 bp, Homo sapien
gactagctctactttcagcagctta

SEQ ID NO: 3303463 - DNA, 25 bp, Homo sapien
tttcagcagcttatattcactatgt

SEQ ID NO: 3303464 - DNA, 25 bp, Homo sapien
tctgttccagccacgactagctcta

SEQ ID NO: 3303465 - DNA, 25 bp, Homo sapien
tcttgtcaccacagcaattgaagac

SEQ ID NO: 3303466 - DNA, 25 bp, Homo sapien
ccaacattgttctggtagtgttcaa

SEQ ID NO: 3303467 - DNA, 25 bp, Homo sapien
gtcttcagacaaacctacccatggt

SEQ ID NO: 3303468 - DNA, 25 bp, Homo sapien
tagtgttcaataccctagatttgcc

SEQ ID NO: 3303469 - DNA, 25 bp, Homo sapien
ttttggagtcatcacaactttggca

SEQ ID NO: 3303470 - DNA, 25 bp, Homo sapien
aaattgtcatgtacttatgtataag

SEQ ID NO: 3303471 - DNA, 25 bp, Homo sapien
ttgagaacataaactctggttatgt

SEQ ID NO: 3303472 - DNA, 25 bp, Homo sapien
taagtgatttgcatgaaaagtattc

SEQ ID NO: 3303473 - DNA, 25 bp, Homo sapien
ttctgaatcatctaagagtactttt

SEQ ID NO: 3303474 - DNA, 25 bp, Homo sapien
tccaggctgggcaacagagtgagac

SEQ ID NO: 3303475 - DNA, 25 bp, Homo sapien
aaaattgcaccacggcactccaggc

SEQ ID NO: 3303476 - DNA, 25 bp, Homo sapien
gcagtgagccaaaattgcaccacgg

SEQ ID NO: 3303477 - DNA, 25 bp, Homo sapien
tcacttgaacctggggggaggagat

SEQ ID NO: 3303478 - DNA, 25 bp, Homo sapien
tccaggttgggtgatacgaacaatg

SEQ ID NO: 3303479 - DNA, 25 bp, Homo sapien
gatcaagaggactcagaattccagg

SEQ ID NO: 3303480 - DNA, 25 bp, Homo sapien
gctttcagcgataaaggcagtgcca

SEQ ID NO: 3303481 - DNA, 25 bp, Homo sapien
tacaagtaatgccactgacaaagga

SEQ ID NO: 3303482 - DNA, 25 bp, Homo sapien
cattcgcttgaaggtattttactca

SEQ ID NO: 3303483 - DNA, 25 bp, Homo sapien
attccttgggtaacaggttctgaat

SEQ ID NO: 3303484 - DNA, 25 bp, Homo sapien
tgaatgtgtgagcacaatagggccc

SEQ ID NO: 3303485 - DNA, 25 bp, Homo sapien
caatagggcccattcgcttgaaggt

SEQ ID NO: 3303486 - DNA, 25 bp, Homo sapien
cctcatggatctgtaggctgagaaa

SEQ ID NO: 3303487 - DNA, 25 bp, Homo sapien
gcaatggccggttcacttgtctggt

SEQ ID NO: 3303488 - DNA, 25 bp, Homo sapien
aaattgtcctgtatcctcactgtgg

SEQ ID NO: 3303489 - DNA, 25 bp, Homo sapien
gagagactgtgactataaaggaaca

SEQ ID NO: 3303490 - DNA, 25 bp, Homo sapien
cagccatgtacgtgagccatcctgg

SEQ ID NO: 3303491 - DNA, 25 bp, Homo sapien
gagaaatcctaagccagggccacct

SEQ ID NO: 3303492 - DNA, 25 bp, Homo sapien
tcttgctgcagtatggaaaacggct

SEQ ID NO: 3303493 - DNA, 25 bp, Homo sapien
tgaaaacactccagcaaccctatgg

SEQ ID NO: 3303494 - DNA, 25 bp, Homo sapien
cagagtaaagctcccagaatgaaag

SEQ ID NO: 3303495 - DNA, 25 bp, Homo sapien
atgcctagcccaatggtttcttaaa

SEQ ID NO: 3303496 - DNA, 25 bp, Homo sapien
aacagagtaaagctcccagaatgaa

SEQ ID NO: 3303497 - DNA, 25 bp, Homo sapien
catgcctagcccaatggtttcttaa

SEQ ID NO: 3303498 - DNA, 25 bp, Homo sapien
gacctttaaggctcactactctatg

SEQ ID NO: 3303499 - DNA, 25 bp, Homo sapien
cgctgaagttagaaagtaccttgcc

SEQ ID NO: 3303500 - DNA, 25 bp, Homo sapien
taccttgccagtaagagactgcctt

SEQ ID NO: 3303501 - DNA, 25 bp, Homo sapien
tctaactcagcctctaaataagggc

SEQ ID NO: 3303502 - DNA, 25 bp, Homo sapien
ctcagttcaaggcatcaatatataa

SEQ ID NO: 3303503 - DNA, 25 bp, Homo sapien
agttcaaggcatcaatatataacta

SEQ ID NO: 3303504 - DNA, 25 bp, Homo sapien
tcagttcaaggcatcaatatataac

SEQ ID NO: 3303505 - DNA, 25 bp, Homo sapien
cagttcaaggcatcaatatataact

SEQ ID NO: 3303506 - DNA, 25 bp, Homo sapien
tatgcaacagagttatttaatttac

SEQ ID NO: 3303507 - DNA, 25 bp, Homo sapien
gtgtttggcctatcttctattcagc

SEQ ID NO: 3303508 - DNA, 25 bp, Homo sapien
aaatgatagctaaaaatcgaagtgt

SEQ ID NO: 3303509 - DNA, 25 bp, Homo sapien
aatcccatatgcaacagagttattt

SEQ ID NO: 3303510 - DNA, 25 bp, Homo sapien
tacagataatgccaactaggtcaaa

SEQ ID NO: 3303511 - DNA, 25 bp, Homo sapien
gatttctgctaaccctgctaacaag

SEQ ID NO: 3303512 - DNA, 25 bp, Homo sapien
catatgcttaagaagtcatgctcca

SEQ ID NO: 3303513 - DNA, 25 bp, Homo sapien
gacttaaacgtccaaatctagtgag

SEQ ID NO: 3303514 - DNA, 25 bp, Homo sapien
ctgggctggcatgaacctgcttaga

SEQ ID NO: 3303515 - DNA, 25 bp, Homo sapien
gttctgggctggcatgaacctgctt

SEQ ID NO: 3303516 - DNA, 25 bp, Homo sapien
gcactttcttcctgaagcagacgtg

SEQ ID NO: 3303517 - DNA, 25 bp, Homo sapien
gaaatgataagaatggcaggcactt

SEQ ID NO: 3303518 - DNA, 25 bp, Homo sapien
tagaggactgactcatgacagggca

SEQ ID NO: 3303519 - DNA, 25 bp, Homo sapien
tggtggagactatccaattatagac

SEQ ID NO: 3303520 - DNA, 25 bp, Homo sapien
tcaagcattacgctaagtgcaaggg

SEQ ID NO: 3303521 - DNA, 25 bp, Homo sapien
tgcaagggaacacgaaaggctacat

SEQ ID NO: 3303522 - DNA, 25 bp, Homo sapien
caggagacgggaccgcggcgggccg

SEQ ID NO: 3303523 - DNA, 25 bp, Homo sapien
ggcgaccggcgcgacgtccgcggcg

SEQ ID NO: 3303524 - DNA, 25 bp, Homo sapien
acaggcccaggagacgggaccgcgg

SEQ ID NO: 3303525 - DNA, 25 bp, Homo sapien
gggcccgagctcgattctgcggccg

SEQ ID NO: 3303526 - DNA, 25 bp, Homo sapien
tttcccgcagctgttggtggccatc

SEQ ID NO: 3303527 - DNA, 25 bp, Homo sapien
caggcagcggtgctaggcagcaggg

SEQ ID NO: 3303528 - DNA, 25 bp, Homo sapien
agcctcggcgctcctcgggtttctt

SEQ ID NO: 3303529 - DNA, 25 bp, Homo sapien
cccgcagggaccatcccggaaagtg

SEQ ID NO: 3303530 - DNA, 25 bp, Homo sapien
ttccatattgtgtagggttgaggaa

SEQ ID NO: 3303531 - DNA, 25 bp, Homo sapien
gtttccatattgtgtagggttgagg

SEQ ID NO: 3303532 - DNA, 25 bp, Homo sapien
agtgtttccatattgtgtagggttg

SEQ ID NO: 3303533 - DNA, 25 bp, Homo sapien
tgtttccatattgtgtagggttgag

SEQ ID NO: 3303534 - DNA, 25 bp, Homo sapien
tcagcgtcttccaggaccaaccaga

SEQ ID NO: 3303535 - DNA, 25 bp, Homo sapien
cagcgtcttccaggaccaaccagac

SEQ ID NO: 3303536 - DNA, 25 bp, Homo sapien
gatctcgtatagtctgagatcccca

SEQ ID NO: 3303537 - DNA, 25 bp, Homo sapien
tatagtctgagatccccaatatttc

SEQ ID NO: 3303538 - DNA, 25 bp, Homo sapien
aacagcacagatctcgtatagtctg

SEQ ID NO: 3303539 - DNA, 25 bp, Homo sapien
agcacagatctcgtatagtctgaga

SEQ ID NO: 3303540 - DNA, 25 bp, Homo sapien
gagatgctcccagtgtttgctgtgc

SEQ ID NO: 3303541 - DNA, 25 bp, Homo sapien
ttgactctcagagatgctcccagtg

SEQ ID NO: 3303542 - DNA, 25 bp, Homo sapien
atgctcccagtgtttgctgtgcctg

SEQ ID NO: 3303543 - DNA, 25 bp, Homo sapien
tgactctcagagatgctcccagtgt

SEQ ID NO: 3303544 - DNA, 25 bp, Homo sapien
tcggtccccttgtccagtattctcc

SEQ ID NO: 3303545 - DNA, 25 bp, Homo sapien
tcacagtcttctggcctcggtcccc

SEQ ID NO: 3303546 - DNA, 25 bp, Homo sapien
cagtcttctggcctcggtccccttg

SEQ ID NO: 3303547 - DNA, 25 bp, Homo sapien
cctcggtccccttgtccagtattct

SEQ ID NO: 3303548 - DNA, 25 bp, Homo sapien
tggcaagggctttacttctgcctga

SEQ ID NO: 3303549 - DNA, 25 bp, Homo sapien
cagttgagttggtgggtgctttcac

SEQ ID NO: 3303550 - DNA, 25 bp, Homo sapien
tgctggccccagaggctttcatgtc

SEQ ID NO: 3303551 - DNA, 25 bp, Homo sapien
gtgacagagaatcccgagtgctggc

SEQ ID NO: 3303552 - DNA, 25 bp, Homo sapien
attccacaggactctcctaccgtgg

SEQ ID NO: 3303553 - DNA, 25 bp, Homo sapien
gcctgatgagcaaactgttgctgct

SEQ ID NO: 3303554 - DNA, 25 bp, Homo sapien
cactggcctgatgagcaaactgttg

SEQ ID NO: 3303555 - DNA, 25 bp, Homo sapien
aggactctcctaccgtggaaactgc

SEQ ID NO: 3303556 - DNA, 25 bp, Homo sapien
aactccctgggtcagaggacctcgg

SEQ ID NO: 3303557 - DNA, 25 bp, Homo sapien
cctgaggttgacatgggatgcttga

SEQ ID NO: 3303558 - DNA, 25 bp, Homo sapien
caaactccctgggtcagaggacctc

SEQ ID NO: 3303559 - DNA, 25 bp, Homo sapien
gaactttgaactgggcggagccaac

SEQ ID NO: 3303560 - DNA, 25 bp, Homo sapien
cttttaggtttatcaagtgattcca

SEQ ID NO: 3303561 - DNA, 25 bp, Homo sapien
ttttaggtttatcaagtgattccat

SEQ ID NO: 3303562 - DNA, 25 bp, Homo sapien
ccttctgccaaggttcgtggctaca

SEQ ID NO: 3303563 - DNA, 25 bp, Homo sapien
aaaggagcccttctgccaaggttcg

SEQ ID NO: 3303564 - DNA, 25 bp, Homo sapien
gttgacctttcacactgccctcaaa

SEQ ID NO: 3303565 - DNA, 25 bp, Homo sapien
tgttagtttatggcaaaaccgttga

SEQ ID NO: 3303566 - DNA, 25 bp, Homo sapien
tgaacaatagctagcttgataggct

SEQ ID NO: 3303567 - DNA, 25 bp, Homo sapien
cttcctccatgcaaaatagttctgc

SEQ ID NO: 3303568 - DNA, 25 bp, Homo sapien
tagcttgataggctagttctttttc

SEQ ID NO: 3303569 - DNA, 25 bp, Homo sapien
gcctggtggcagaactatagcttga

SEQ ID NO: 3303570 - DNA, 25 bp, Homo sapien
ctgtgcgagtagactattgctatat

SEQ ID NO: 3303571 - DNA, 25 bp, Homo sapien
gctatatttctaggacagtgtccag

SEQ ID NO: 3303572 - DNA, 25 bp, Homo sapien
gacagtgtccagagatatctttttc

SEQ ID NO: 3303573 - DNA, 25 bp, Homo sapien
tctaggacagtgtccagagatatct

SEQ ID NO: 3303574 - DNA, 25 bp, Homo sapien
taaggcaaaggattgtctgctgtgc

SEQ ID NO: 3303575 - DNA, 25 bp, Homo sapien
tgtgcctgagggtttcattacctga

SEQ ID NO: 3303576 - DNA, 25 bp, Homo sapien
tttgtgaccttgatttgtgcctgag

SEQ ID NO: 3303577 - DNA, 25 bp, Homo sapien
tctgctgtgcatacatggctgctgt

SEQ ID NO: 3303578 - DNA, 25 bp, Homo sapien
gaaaataccatgtagaggacaacca

SEQ ID NO: 3303579 - DNA, 25 bp, Homo sapien
tgtgaaaataccatgtagaggacaa

SEQ ID NO: 3303580 - DNA, 25 bp, Homo sapien
taccatgtagaggacaaccaagtag

SEQ ID NO: 3303581 - DNA, 25 bp, Homo sapien
catgtagaggacaaccaagtagcat

SEQ ID NO: 3303582 - DNA, 25 bp, Homo sapien
gtttcctggtcttccatacggcttg

SEQ ID NO: 3303583 - DNA, 25 bp, Homo sapien
gtgctggttttagaaccatcttccc

SEQ ID NO: 3303584 - DNA, 25 bp, Homo sapien
tgtttcctggtcttccatacggctt

SEQ ID NO: 3303585 - DNA, 25 bp, Homo sapien
ggttttagaaccatcttccctcaga

SEQ ID NO: 3303586 - DNA, 25 bp, Homo sapien
cattgtctatcactggctcaggctt

SEQ ID NO: 3303587 - DNA, 25 bp, Homo sapien
gagacattgtctatcactggctcag

SEQ ID NO: 3303588 - DNA, 25 bp, Homo sapien
gacattgtctatcactggctcaggc

SEQ ID NO: 3303589 - DNA, 25 bp, Homo sapien
ctgagacattgtctatcactggctc

SEQ ID NO: 3303590 - DNA, 25 bp, Homo sapien
acagacctagagttatccttcctcc

SEQ ID NO: 3303591 - DNA, 25 bp, Homo sapien
gacagacctagagttatccttcctc

SEQ ID NO: 3303592 - DNA, 25 bp, Homo sapien
gacctagagttatccttcctccctc

SEQ ID NO: 3303593 - DNA, 25 bp, Homo sapien
gattctctgttattgttaagctcat

SEQ ID NO: 3303594 - DNA, 25 bp, Homo sapien
cacagttactagtacagtacccagt

SEQ ID NO: 3303595 - DNA, 25 bp, Homo sapien
tacccagtaggttgtctcttaataa

SEQ ID NO: 3303596 - DNA, 25 bp, Homo sapien
gtacagtacccagtaggttgtctct

SEQ ID NO: 3303597 - DNA, 25 bp, Homo sapien
tactagtacagtacccagtaggttg

SEQ ID NO: 3303598 - DNA, 25 bp, Homo sapien
gacaaggtcttatagctgtagcgtg

SEQ ID NO: 3303599 - DNA, 25 bp, Homo sapien
ctattgccgcttgcttaagacaagg

SEQ ID NO: 3303600 - DNA, 25 bp, Homo sapien
ggatttgcgagctttttctctgcca

SEQ ID NO: 3303601 - DNA, 25 bp, Homo sapien
ttcctacttactgcctgcttggtgg

SEQ ID NO: 3303602 - DNA, 25 bp, Homo sapien
catactcaatggcaagtgcatcttt

SEQ ID NO: 3303603 - DNA, 25 bp, Homo sapien
tagctcatactcaatggcaagtgca

SEQ ID NO: 3303604 - DNA, 25 bp, Homo sapien
ctatagctcatactcaatggcaagt

SEQ ID NO: 3303605 - DNA, 25 bp, Homo sapien
gctcatactcaatggcaagtgcatc

SEQ ID NO: 3303606 - DNA, 25 bp, Homo sapien
catagtcagcatgggtcgagtcaaa

SEQ ID NO: 3303607 - DNA, 25 bp, Homo sapien
gatgaaacatagtcagcatgggtcg

SEQ ID NO: 3303608 - DNA, 25 bp, Homo sapien
gcatgggtcgagtcaaaatatttct

SEQ ID NO: 3303609 - DNA, 25 bp, Homo sapien
ctaaggatgaaacatagtcagcatg

SEQ ID NO: 3303610 - DNA, 25 bp, Homo sapien
aaccttccttctgccatttcataat

SEQ ID NO: 3303611 - DNA, 25 bp, Homo sapien
ggtgttagaacttgcagatccactt

SEQ ID NO: 3303612 - DNA, 25 bp, Homo sapien
gcaacccttctgcaaacttcaggtc

SEQ ID NO: 3303613 - DNA, 25 bp, Homo sapien
cagatccacttcagataaccttcct

SEQ ID NO: 3303614 - DNA, 25 bp, Homo sapien
gatccttgccaggaggcaccttgta

SEQ ID NO: 3303615 - DNA, 25 bp, Homo sapien
gtaagtttctgttgacagcaagcct

SEQ ID NO: 3303616 - DNA, 25 bp, Homo sapien
taagtttctgttgacagcaagcctg

SEQ ID NO: 3303617 - DNA, 25 bp, Homo sapien
ctgcaagatccttgccaggaggcac

SEQ ID NO: 3303618 - DNA, 25 bp, Homo sapien
tgatgggttggaacagttaatcctc

SEQ ID NO: 3303619 - DNA, 25 bp, Homo sapien
tctgatgggttggaacagttaatcc

SEQ ID NO: 3303620 - DNA, 25 bp, Homo sapien
agaggcctctgatgggttggaacag

SEQ ID NO: 3303621 - DNA, 25 bp, Homo sapien
cagttaatcctcatgagctgtatat

SEQ ID NO: 3303622 - DNA, 25 bp, Homo sapien
ccttttatccaaagatttcatgccc

SEQ ID NO: 3303623 - DNA, 25 bp, Homo sapien
cattatagaacacaaccagagcttt

SEQ ID NO: 3303624 - DNA, 25 bp, Homo sapien
aaaccttttatccaaagatttcatg

SEQ ID NO: 3303625 - DNA, 25 bp, Homo sapien
ttttatccaaagatttcatgccctg

SEQ ID NO: 3303626 - DNA, 25 bp, Homo sapien
ttgctggtgttgtaaatacggagca

SEQ ID NO: 3303627 - DNA, 25 bp, Homo sapien
gcattggctaaaggtgagtccaact

SEQ ID NO: 3303628 - DNA, 25 bp, Homo sapien
tgagtccaactgagaatgcatgaat

SEQ ID NO: 3303629 - DNA, 25 bp, Homo sapien
gaataagtgcacagctttgtcagca

SEQ ID NO: 3303630 - DNA, 25 bp, Homo sapien
cattgataaccagccctgcaaggca

SEQ ID NO: 3303631 - DNA, 25 bp, Homo sapien
tttgcgtttaaccacactctggaag

SEQ ID NO: 3303632 - DNA, 25 bp, Homo sapien
cccattgataaccagccctgcaagg

SEQ ID NO: 3303633 - DNA, 25 bp, Homo sapien
agatggcaaatttgcgtttaaccac

SEQ ID NO: 3303634 - DNA, 25 bp, Homo sapien
caatctgatagtgtgtgatggcatc

SEQ ID NO: 3303635 - DNA, 25 bp, Homo sapien
ggataaaggactacagctgcaaaag

SEQ ID NO: 3303636 - DNA, 25 bp, Homo sapien
tgccactaatggtgtatgtgttccc

SEQ ID NO: 3303637 - DNA, 25 bp, Homo sapien
tatggctgcccagtatttccgtatg

SEQ ID NO: 3303638 - DNA, 25 bp, Homo sapien
taatctgataggtttccctctttat

SEQ ID NO: 3303639 - DNA, 25 bp, Homo sapien
gctccttttagtggtccctgtagtg

SEQ ID NO: 3303640 - DNA, 25 bp, Homo sapien
ctccttttagtggtccctgtagtgc

SEQ ID NO: 3303641 - DNA, 25 bp, Homo sapien
agctccttttagtggtccctgtagt

SEQ ID NO: 3303642 - DNA, 25 bp, Homo sapien
tcacagacaaggtacattggatgat

SEQ ID NO: 3303643 - DNA, 25 bp, Homo sapien
caatcttacagtaagtgatgttgaa

SEQ ID NO: 3303644 - DNA, 25 bp, Homo sapien
tgaccgggtgtcaacaatcttacag

SEQ ID NO: 3303645 - DNA, 25 bp, Homo sapien
cattggatgatgaccgggtgtcaac

SEQ ID NO: 3303646 - DNA, 25 bp, Homo sapien
cagcagctgacacagctttggcatg

SEQ ID NO: 3303647 - DNA, 25 bp, Homo sapien
gcagctgacacagctttggcatgtg

SEQ ID NO: 3303648 - DNA, 25 bp, Homo sapien
cagctgacacagctttggcatgtga

SEQ ID NO: 3303649 - DNA, 25 bp, Homo sapien
cacagcagctgacacagctttggca

SEQ ID NO: 3303650 - DNA, 25 bp, Homo sapien
tagcccttttggatggagacccttc

SEQ ID NO: 3303651 - DNA, 25 bp, Homo sapien
tcctcttgtctggtccatgtgtgta

SEQ ID NO: 3303652 - DNA, 25 bp, Homo sapien
ggatggagacccttccaaggtgtct

SEQ ID NO: 3303653 - DNA, 25 bp, Homo sapien
gaaatccacccctcttcagaattat

SEQ ID NO: 3303654 - DNA, 25 bp, Homo sapien
tcattgacaccaatgcctcgaagcc

SEQ ID NO: 3303655 - DNA, 25 bp, Homo sapien
tctcattgacaccaatgcctcgaag

SEQ ID NO: 3303656 - DNA, 25 bp, Homo sapien
cagttctcattgacaccaatgcctc

SEQ ID NO: 3303657 - DNA, 25 bp, Homo sapien
gttctcattgacaccaatgcctcga

SEQ ID NO: 3303658 - DNA, 25 bp, Homo sapien
atgatatgtggccttcaacaagatc

SEQ ID NO: 3303659 - DNA, 25 bp, Homo sapien
gatatgtggccttcaacaagatcat

SEQ ID NO: 3303660 - DNA, 25 bp, Homo sapien
aactttatgatatgtggccttcaac

SEQ ID NO: 3303661 - DNA, 25 bp, Homo sapien
tttatgatatgtggccttcaacaag

SEQ ID NO: 3303662 - DNA, 25 bp, Homo sapien
tctactgaacaggacccactgccag

SEQ ID NO: 3303663 - DNA, 25 bp, Homo sapien
caggtcatcagtgctctcatcccac

SEQ ID NO: 3303664 - DNA, 25 bp, Homo sapien
ctgaacaggacccactgccagagaa

SEQ ID NO: 3303665 - DNA, 25 bp, Homo sapien
gctctcatcccacccaattcttctg

SEQ ID NO: 3303666 - DNA, 25 bp, Homo sapien
ctacaaagtgggcatgggaatggca

SEQ ID NO: 3303667 - DNA, 25 bp, Homo sapien
tacaaagtgggcatgggaatggcat

SEQ ID NO: 3303668 - DNA, 25 bp, Homo sapien
tctggtgcttccatgaggaaccatg

SEQ ID NO: 3303669 - DNA, 25 bp, Homo sapien
gtgtatctgtagagttcctctggtg

SEQ ID NO: 3303670 - DNA, 25 bp, Homo sapien
tccatgaggaaccatgattcctgca

SEQ ID NO: 3303671 - DNA, 25 bp, Homo sapien
attcctgcattagtattttcacaaa

SEQ ID NO: 3303672 - DNA, 25 bp, Homo sapien
actggaagaaacagttcattttttg

SEQ ID NO: 3303673 - DNA, 25 bp, Homo sapien
ggcttctatgaatttttcattataa

SEQ ID NO: 3303674 - DNA, 25 bp, Homo sapien
agaaacagttcattttttggtgtca

SEQ ID NO: 3303675 - DNA, 25 bp, Homo sapien
ttttcattataaactggaagaaaca

SEQ ID NO: 3303676 - DNA, 25 bp, Homo sapien
tccattatcattcatcagtgttttc

SEQ ID NO: 3303677 - DNA, 25 bp, Homo sapien
ttcaagaggtactttagtgagaagc

SEQ ID NO: 3303678 - DNA, 25 bp, Homo sapien
cagatgatgacgtgctgatgttcca

SEQ ID NO: 3303679 - DNA, 25 bp, Homo sapien
tgtaattcaagaggtactttagtga

SEQ ID NO: 3303680 - DNA, 25 bp, Homo sapien
tccaggtatgccactcttttacact

SEQ ID NO: 3303681 - DNA, 25 bp, Homo sapien
ccaggtatgccactcttttacactg

SEQ ID NO: 3303682 - DNA, 25 bp, Homo sapien
ctccaggtatgccactcttttacac

SEQ ID NO: 3303683 - DNA, 25 bp, Homo sapien
caggtatgccactcttttacactgg

SEQ ID NO: 3303684 - DNA, 25 bp, Homo sapien
ctcatgttcctggaagggcctaata

SEQ ID NO: 3303685 - DNA, 25 bp, Homo sapien
catgttcctggaagggcctaatacc

SEQ ID NO: 3303686 - DNA, 25 bp, Homo sapien
taataccttgaacatctgcactgtg

SEQ ID NO: 3303687 - DNA, 25 bp, Homo sapien
agggcctaataccttgaacatctgc

SEQ ID NO: 3303688 - DNA, 25 bp, Homo sapien
gtgctgccatgttttggtcacactg

SEQ ID NO: 3303689 - DNA, 25 bp, Homo sapien
tctgtgctgccatgttttggtcaca

SEQ ID NO: 3303690 - DNA, 25 bp, Homo sapien
tgtgctgccatgttttggtcacact

SEQ ID NO: 3303691 - DNA, 25 bp, Homo sapien
ctgtgctgccatgttttggtcacac

SEQ ID NO: 3303692 - DNA, 25 bp, Homo sapien
tccacgtggagactgcttcctgctc

SEQ ID NO: 3303693 - DNA, 25 bp, Homo sapien
tactccttgatctactgttactcat

SEQ ID NO: 3303694 - DNA, 25 bp, Homo sapien
gccctactccttgatctactgttac

SEQ ID NO: 3303695 - DNA, 25 bp, Homo sapien
tgtccacgtggagactgcttcctgc

SEQ ID NO: 3303696 - DNA, 25 bp, Homo sapien
ttaggtagaactgatacctgagtga

SEQ ID NO: 3303697 - DNA, 25 bp, Homo sapien
tcttgaattaggtagaactgatacc

SEQ ID NO: 3303698 - DNA, 25 bp, Homo sapien
gaagattggacagcatttcgttttc

SEQ ID NO: 3303699 - DNA, 25 bp, Homo sapien
ctgagtgaacttgccagcttcccaa

SEQ ID NO: 3303700 - DNA, 25 bp, Homo sapien
gctgatactccccttggctttttgg

SEQ ID NO: 3303701 - DNA, 25 bp, Homo sapien
gctttttggccaattcactgtccat

SEQ ID NO: 3303702 - DNA, 25 bp, Homo sapien
ggctttttggccaattcactgtcca

SEQ ID NO: 3303703 - DNA, 25 bp, Homo sapien
tattccacttgctgatactcccctt

SEQ ID NO: 3303704 - DNA, 25 bp, Homo sapien
tcagaggccagaaaacaacgcagtt

SEQ ID NO: 3303705 - DNA, 25 bp, Homo sapien
tagaaaaggaatgcaatggtccacc

SEQ ID NO: 3303706 - DNA, 25 bp, Homo sapien
gaagatcctggaaagttagccctta

SEQ ID NO: 3303707 - DNA, 25 bp, Homo sapien
cttggaacagactccttgctgaggg

SEQ ID NO: 3303708 - DNA, 25 bp, Homo sapien
cagcccagctccgggtggaaaccag

SEQ ID NO: 3303709 - DNA, 25 bp, Homo sapien
tcaagtgcatgtggcaacacagccc

SEQ ID NO: 3303710 - DNA, 25 bp, Homo sapien
tccgggtggaaaccagcagggctct

SEQ ID NO: 3303711 - DNA, 25 bp, Homo sapien
ggggctcggagaccaggggagctgt

SEQ ID NO: 3303712 - DNA, 25 bp, Homo sapien
gctctctcggccgcctatttcctcc

SEQ ID NO: 3303713 - DNA, 25 bp, Homo sapien
tctcggccgcctatttcctccgaaa

SEQ ID NO: 3303714 - DNA, 25 bp, Homo sapien
aacttcccatcgcaggcgcagctct

SEQ ID NO: 3303715 - DNA, 25 bp, Homo sapien
ccccaacttcccatcgcaggcgcag

SEQ ID NO: 3303716 - DNA, 25 bp, Homo sapien
aagtaaaggagcctcactaccacct

SEQ ID NO: 3303717 - DNA, 25 bp, Homo sapien
gcatagagttcaacacttccccttg

SEQ ID NO: 3303718 - DNA, 25 bp, Homo sapien
tgcggagcagcccagtgcatagagt

SEQ ID NO: 3303719 - DNA, 25 bp, Homo sapien
caacacttccccttgttgtggaaag

SEQ ID NO: 3303720 - DNA, 25 bp, Homo sapien
tccggcatctgtcttgagctcccag

SEQ ID NO: 3303721 - DNA, 25 bp, Homo sapien
ccttttccttcggagcagcagccct

SEQ ID NO: 3303722 - DNA, 25 bp, Homo sapien
caaggtaggtgatgcggtcgcgagg

SEQ ID NO: 3303723 - DNA, 25 bp, Homo sapien
tgatgcggtcgcgaggaagtgcgcg

SEQ ID NO: 3303724 - DNA, 25 bp, Homo sapien
catacgtgtggttcagggtatagcc

SEQ ID NO: 3303725 - DNA, 25 bp, Homo sapien
ccagttagcacgtggataatacgta

SEQ ID NO: 3303726 - DNA, 25 bp, Homo sapien
tatagccagggattgaaagctcaag

SEQ ID NO: 3303727 - DNA, 25 bp, Homo sapien
ctttgtcatgtgcatactgccagtt

SEQ ID NO: 3303728 - DNA, 25 bp, Homo sapien
tatgaaaggtgttgtatggataaaa

SEQ ID NO: 3303729 - DNA, 25 bp, Homo sapien
aattgttgcctagcaagccgaagcc

SEQ ID NO: 3303730 - DNA, 25 bp, Homo sapien
tgttgtatggataaaattgttgcct

SEQ ID NO: 3303731 - DNA, 25 bp, Homo sapien
gcaagccgaagccaccttgatattt

SEQ ID NO: 3303732 - DNA, 25 bp, Homo sapien
tgagccaaaaatgaccctccacttt

SEQ ID NO: 3303733 - DNA, 25 bp, Homo sapien
tgatttgtttccgggtttcagcgaa

SEQ ID NO: 3303734 - DNA, 25 bp, Homo sapien
taaatgaccgagtatgaacagtatc

SEQ ID NO: 3303735 - DNA, 25 bp, Homo sapien
cttcctgaaagacatgacctataaa

SEQ ID NO: 3303736 - DNA, 25 bp, Homo sapien
cagggctttcagcagaaataggtct

SEQ ID NO: 3303737 - DNA, 25 bp, Homo sapien
gcacaggaatccttgctatggtggg

SEQ ID NO: 3303738 - DNA, 25 bp, Homo sapien
cagcttgtgagttttaccataggac

SEQ ID NO: 3303739 - DNA, 25 bp, Homo sapien
ccgtgaagttcaacagcatactgat

SEQ ID NO: 3303740 - DNA, 25 bp, Homo sapien
tgagctcagcctcgtgctgaacagc

SEQ ID NO: 3303741 - DNA, 25 bp, Homo sapien
ctgtttgtgagctcagcctcgtgct

SEQ ID NO: 3303742 - DNA, 25 bp, Homo sapien
ccaaatggggaaatccacgggcctg

SEQ ID NO: 3303743 - DNA, 25 bp, Homo sapien
cctgtgtagatgtcttggccacaag

SEQ ID NO: 3303744 - DNA, 25 bp, Homo sapien
gtctctcttatctctaggcctttcc

SEQ ID NO: 3303745 - DNA, 25 bp, Homo sapien
tgtgagtcttgcttatcaggtctgg

SEQ ID NO: 3303746 - DNA, 25 bp, Homo sapien
ggcctagtcttcctattgtcctcca

SEQ ID NO: 3303747 - DNA, 25 bp, Homo sapien
cacattccaaggtctctcttatctc

SEQ ID NO: 3303748 - DNA, 25 bp, Homo sapien
tcttataaaaggtctgcattcctgt

SEQ ID NO: 3303749 - DNA, 25 bp, Homo sapien
tggaaattatctcctcatcaatcct

SEQ ID NO: 3303750 - DNA, 25 bp, Homo sapien
ttcttctcttataaaaggtctgcat

SEQ ID NO: 3303751 - DNA, 25 bp, Homo sapien
tctcttataaaaggtctgcattcct

SEQ ID NO: 3303752 - DNA, 25 bp, Homo sapien
tacagcaggacctggaataacatct

SEQ ID NO: 3303753 - DNA, 25 bp, Homo sapien
tatttaatatgtgtacagcaggacc

SEQ ID NO: 3303754 - DNA, 25 bp, Homo sapien
tgtcgacatagtcccagtctaagtg

SEQ ID NO: 3303755 - DNA, 25 bp, Homo sapien
cactaggtgaatgggcatgtcgaca

SEQ ID NO: 3303756 - DNA, 25 bp, Homo sapien
aaatgactttctagggacaccttat

SEQ ID NO: 3303757 - DNA, 25 bp, Homo sapien
aatgactttctagggacaccttatt

SEQ ID NO: 3303758 - DNA, 25 bp, Homo sapien
accattctgacttaaggctgatcat

SEQ ID NO: 3303759 - DNA, 25 bp, Homo sapien
tctccaaaccattctgacttaaggc

SEQ ID NO: 3303760 - DNA, 25 bp, Homo sapien
atgtggtggcaataaccaatggagc

SEQ ID NO: 3303761 - DNA, 25 bp, Homo sapien
caataaccaatggagcctgtgagtg

SEQ ID NO: 3303762 - DNA, 25 bp, Homo sapien
ggtggcaataaccaatggagcctgt

SEQ ID NO: 3303763 - DNA, 25 bp, Homo sapien
aaccaatggagcctgtgagtgacat

SEQ ID NO: 3303764 - DNA, 25 bp, Homo sapien
ctgcagggcatagcaaattggaggc

SEQ ID NO: 3303765 - DNA, 25 bp, Homo sapien
tcaggcatggtccagtctgcagaca

SEQ ID NO: 3303766 - DNA, 25 bp, Homo sapien
tcgggtactgcgaaagaaaggagat

SEQ ID NO: 3303767 - DNA, 25 bp, Homo sapien
cttggctcatcatagtaggtcgggt

SEQ ID NO: 3303768 - DNA, 25 bp, Homo sapien
cattccattagcgtgtaagtaggaa

SEQ ID NO: 3303769 - DNA, 25 bp, Homo sapien
tgctcctcaggtcgcttttgactgt

SEQ ID NO: 3303770 - DNA, 25 bp, Homo sapien
cgtgtaagtaggaattacaggaatg

SEQ ID NO: 3303771 - DNA, 25 bp, Homo sapien
ttacaggaatgctcctcaggtcgct

SEQ ID NO: 3303772 - DNA, 25 bp, Homo sapien
tgagatggaaaagcacagaggatat

SEQ ID NO: 3303773 - DNA, 25 bp, Homo sapien
acctgagatggaaaagcacagagga

SEQ ID NO: 3303774 - DNA, 25 bp, Homo sapien
tggagagggcacctgagatggaaaa

SEQ ID NO: 3303775 - DNA, 25 bp, Homo sapien
ctggagagggcacctgagatggaaa

SEQ ID NO: 3303776 - DNA, 25 bp, Homo sapien
ctttgctctacgaactttttccagt

SEQ ID NO: 3303777 - DNA, 25 bp, Homo sapien
ttctttgctctacgaactttttcca

SEQ ID NO: 3303778 - DNA, 25 bp, Homo sapien
tctttgctctacgaactttttccag

SEQ ID NO: 3303779 - DNA, 25 bp, Homo sapien
aatccatacatggttgccatgacaa

SEQ ID NO: 3303780 - DNA, 25 bp, Homo sapien
caataataaagtgtttgggagcttg

SEQ ID NO: 3303781 - DNA, 25 bp, Homo sapien
cagagatctacgaagcagctttggc

SEQ ID NO: 3303782 - DNA, 25 bp, Homo sapien
tcaataataaagtgtttgggagctt

SEQ ID NO: 3303783 - DNA, 25 bp, Homo sapien
gctgacagctaaatgcttacttcga

SEQ ID NO: 3303784 - DNA, 25 bp, Homo sapien
taaatgcttacttcgagttatgtgg

SEQ ID NO: 3303785 - DNA, 25 bp, Homo sapien
gaaaaccaggtcattattggagaag

SEQ ID NO: 3303786 - DNA, 25 bp, Homo sapien
gcttacttcgagttatgtggttact

SEQ ID NO: 3303787 - DNA, 25 bp, Homo sapien
tgttcttacatgatgttaacatggt

SEQ ID NO: 3303788 - DNA, 25 bp, Homo sapien
tgtacctcaaaactcaagtgtctgt

SEQ ID NO: 3303789 - DNA, 25 bp, Homo sapien
ttgtctctcaaattggaaaatgtat

SEQ ID NO: 3303790 - DNA, 25 bp, Homo sapien
tattgacatagctttagggaaatat

SEQ ID NO: 3303791 - DNA, 25 bp, Homo sapien
catattgaagtaagttagatctgga

SEQ ID NO: 3303792 - DNA, 25 bp, Homo sapien
tttgtcgaggctcttggtgtggttt

SEQ ID NO: 3303793 - DNA, 25 bp, Homo sapien
aagttagatctggatttgtcgaggc

SEQ ID NO: 3303794 - DNA, 25 bp, Homo sapien
gaagagttaggctgcatattgaagt

SEQ ID NO: 3303795 - DNA, 25 bp, Homo sapien
tgtccgacagtagtccctgtcctca

SEQ ID NO: 3303796 - DNA, 25 bp, Homo sapien
gcactgtccgacagtagtccctgtc

SEQ ID NO: 3303797 - DNA, 25 bp, Homo sapien
ctctgtccatgaacccgatcccttc

SEQ ID NO: 3303798 - DNA, 25 bp, Homo sapien
ttcccctctgtccatgaacccgatc

SEQ ID NO: 3303799 - DNA, 25 bp, Homo sapien
gttgcttctcaactggcttatacat

SEQ ID NO: 3303800 - DNA, 25 bp, Homo sapien
ctgtgcggaaataaataagtctcac

SEQ ID NO: 3303801 - DNA, 25 bp, Homo sapien
tctcaccagggtaccattttctaag

SEQ ID NO: 3303802 - DNA, 25 bp, Homo sapien
tgcggaaataaataagtctcaccag

SEQ ID NO: 3303803 - DNA, 25 bp, Homo sapien
tcatgggaagagaaacctttatgcc

SEQ ID NO: 3303804 - DNA, 25 bp, Homo sapien
ctttatgccttttccgcatcattgg

SEQ ID NO: 3303805 - DNA, 25 bp, Homo sapien
gagaaacctttatgccttttccgca

SEQ ID NO: 3303806 - DNA, 25 bp, Homo sapien
gccttttccgcatcattggtttctt

SEQ ID NO: 3303807 - DNA, 25 bp, Homo sapien
cccatggaaggttggcagggtttct

SEQ ID NO: 3303808 - DNA, 25 bp, Homo sapien
tgatggactgctggacccatggaag

SEQ ID NO: 3303809 - DNA, 25 bp, Homo sapien
tggcagggtttctgtgactgtctgc

SEQ ID NO: 3303810 - DNA, 25 bp, Homo sapien
catttttagtcatttgatggactgc

SEQ ID NO: 3303811 - DNA, 25 bp, Homo sapien
atttactggatataagacgatgtgc

SEQ ID NO: 3303812 - DNA, 25 bp, Homo sapien
tactggatataagacgatgtgctgt

SEQ ID NO: 3303813 - DNA, 25 bp, Homo sapien
tggatataagacgatgtgctgtgac

SEQ ID NO: 3303814 - DNA, 25 bp, Homo sapien
ttcatgaagtactgaatgtattttc

SEQ ID NO: 3303815 - DNA, 25 bp, Homo sapien
taaatatgaggactattatatttct

SEQ ID NO: 3303816 - DNA, 25 bp, Homo sapien
tgtaacccatggcttattttaccat

SEQ ID NO: 3303817 - DNA, 25 bp, Homo sapien
ccttctttccttcgtgtgagtggaa

SEQ ID NO: 3303818 - DNA, 25 bp, Homo sapien
ttttaccatgaaacaagctcttcct

SEQ ID NO: 3303819 - DNA, 25 bp, Homo sapien
ttggtagatctgacctgggaaacac

SEQ ID NO: 3303820 - DNA, 25 bp, Homo sapien
tgtgcgtagaccagaccagtgactt

SEQ ID NO: 3303821 - DNA, 25 bp, Homo sapien
gggcagggcagtctaggcactttaa

SEQ ID NO: 3303822 - DNA, 25 bp, Homo sapien
acaagagtcggcactgggaacagct

SEQ ID NO: 3303823 - DNA, 25 bp, Homo sapien
cagtgactaaacaaatcccaagagg

SEQ ID NO: 3303824 - DNA, 25 bp, Homo sapien
tactggaggtgtgtgtcaaggaatc

SEQ ID NO: 3303825 - DNA, 25 bp, Homo sapien
gacatctattttgggtgctcaggag

SEQ ID NO: 3303826 - DNA, 25 bp, Homo sapien
gaaacgtgcatgtgccaaaggacat

SEQ ID NO: 3303827 - DNA, 25 bp, Homo sapien
ggaagacttcgatttagaaagatac

SEQ ID NO: 3303828 - DNA, 25 bp, Homo sapien
gaatacacgcttaggaagacttcga

SEQ ID NO: 3303829 - DNA, 25 bp, Homo sapien
cacgcttaggaagacttcgatttag

SEQ ID NO: 3303830 - DNA, 25 bp, Homo sapien
gtcattttgaatacacgcttaggaa

SEQ ID NO: 3303831 - DNA, 25 bp, Homo sapien
cagagaagttttcccagttcttgtt

SEQ ID NO: 3303832 - DNA, 25 bp, Homo sapien
cacatgcaggtggtttttcagccca

SEQ ID NO: 3303833 - DNA, 25 bp, Homo sapien
ttcagcccagagaagttttcccagt

SEQ ID NO: 3303834 - DNA, 25 bp, Homo sapien
tttgtatggtttgccacatgcaggt

SEQ ID NO: 3303835 - DNA, 25 bp, Homo sapien
cagttgcaagtcgttaagtcttggc

SEQ ID NO: 3303836 - DNA, 25 bp, Homo sapien
ttgcaagtcgttaagtcttggcttc

SEQ ID NO: 3303837 - DNA, 25 bp, Homo sapien
agttgcaagtcgttaagtcttggct

SEQ ID NO: 3303838 - DNA, 25 bp, Homo sapien
atcagttgcaagtcgttaagtcttg

SEQ ID NO: 3303839 - DNA, 25 bp, Homo sapien
gaccgctggctataaggacttggga

SEQ ID NO: 3303840 - DNA, 25 bp, Homo sapien
ggtagattagtcctgagaccacagt

SEQ ID NO: 3303841 - DNA, 25 bp, Homo sapien
gctcctcagtggaccgctggctata

SEQ ID NO: 3303842 - DNA, 25 bp, Homo sapien
gcagggtacgtgatgtgattatttc

SEQ ID NO: 3303843 - DNA, 25 bp, Homo sapien
ggtatgggatgttgtgttcacattc

SEQ ID NO: 3303844 - DNA, 25 bp, Homo sapien
tgtgttaagttttgtggtacaccaa

SEQ ID NO: 3303845 - DNA, 25 bp, Homo sapien
cttatctgggtatgggatgttgtgt

SEQ ID NO: 3303846 - DNA, 25 bp, Homo sapien
ttgtgttaagttttgtggtacacca

SEQ ID NO: 3303847 - DNA, 25 bp, Homo sapien
tatttaatgctggtatcatactgac

SEQ ID NO: 3303848 - DNA, 25 bp, Homo sapien
aatatttaatgctggtatcatactg

SEQ ID NO: 3303849 - DNA, 25 bp, Homo sapien
atatttaatgctggtatcatactga

SEQ ID NO: 3303850 - DNA, 25 bp, Homo sapien
gaaggtgtctccaagcggaaaaaga

SEQ ID NO: 3303851 - DNA, 25 bp, Homo sapien
gaagaggagaagactggtcgtccca

SEQ ID NO: 3303852 - DNA, 25 bp, Homo sapien
cggaaaaagaccagctagtggcaaa

SEQ ID NO: 3303853 - DNA, 25 bp, Homo sapien
ccttaccatacacatgactggcaga

SEQ ID NO: 3303854 - DNA, 25 bp, Homo sapien
tgcctgccagcaagcaaagtctctt

SEQ ID NO: 3303855 - DNA, 25 bp, Homo sapien
cattcttacacatttagaaagattc

SEQ ID NO: 3303856 - DNA, 25 bp, Homo sapien
ttagaaagattcagtgcagagatct

SEQ ID NO: 3303857 - DNA, 25 bp, Homo sapien
cccacatgaacaagctcaactttca

SEQ ID NO: 3303858 - DNA, 25 bp, Homo sapien
ctttcatcacttatctgcaaaagct

SEQ ID NO: 3303859 - DNA, 25 bp, Homo sapien
ttcatcacttatctgcaaaagctct

SEQ ID NO: 3303860 - DNA, 25 bp, Homo sapien
tttcatcacttatctgcaaaagctc

SEQ ID NO: 3303861 - DNA, 25 bp, Homo sapien
tgatcaactctttctttgacaactg

SEQ ID NO: 3303862 - DNA, 25 bp, Homo sapien
gattccatactcgttgatcaactct

SEQ ID NO: 3303863 - DNA, 25 bp, Homo sapien
ttagttgattccatactcgttgatc

SEQ ID NO: 3303864 - DNA, 25 bp, Homo sapien
tactcgttgatcaactctttctttg

SEQ ID NO: 3303865 - DNA, 25 bp, Homo sapien
ctgacacattatggccgcttgataa

SEQ ID NO: 3303866 - DNA, 25 bp, Homo sapien
ggaattatctactgtgtagcagggc

SEQ ID NO: 3303867 - DNA, 25 bp, Homo sapien
catgcatctttagtcataaatcaat

SEQ ID NO: 3303868 - DNA, 25 bp, Homo sapien
tctccctatttcctttccaagtgag

SEQ ID NO: 3303869 - DNA, 25 bp, Homo sapien
tatttacaccatcttggacaccaaa

SEQ ID NO: 3303870 - DNA, 25 bp, Homo sapien
tagtacccactgcttttttgtcctg

SEQ ID NO: 3303871 - DNA, 25 bp, Homo sapien
aaattctatctgtacaggagtgatg

SEQ ID NO: 3303872 - DNA, 25 bp, Homo sapien
aggagtgatgtttataagcttcaga

SEQ ID NO: 3303873 - DNA, 25 bp, Homo sapien
tttccatagggtatatgtatcacat

SEQ ID NO: 3303874 - DNA, 25 bp, Homo sapien
gttttccatagggtatatgtatcac

SEQ ID NO: 3303875 - DNA, 25 bp, Homo sapien
tagttttccatagggtatatgtatc

SEQ ID NO: 3303876 - DNA, 25 bp, Homo sapien
atagttttccatagggtatatgtat

SEQ ID NO: 3303877 - DNA, 25 bp, Homo sapien
cagatatctgactatgtctacctgc

SEQ ID NO: 3303878 - DNA, 25 bp, Homo sapien
tctatcagtatatgttctccccacc

SEQ ID NO: 3303879 - DNA, 25 bp, Homo sapien
taaaatgtttatgctgtcaacctgt

SEQ ID NO: 3303880 - DNA, 25 bp, Homo sapien
gacagtgttggccaatcatttcagc

SEQ ID NO: 3303881 - DNA, 25 bp, Homo sapien
agcagcagcatgacgcacaggagct

SEQ ID NO: 3303882 - DNA, 25 bp, Homo sapien
catgacgcacaggagctttacatct

SEQ ID NO: 3303883 - DNA, 25 bp, Homo sapien
gctgcagtcatcactcagggcagca

SEQ ID NO: 3303884 - DNA, 25 bp, Homo sapien
tgctcttgctgcagtcatcactcag

SEQ ID NO: 3303885 - DNA, 25 bp, Homo sapien
tcttctgtcctttgctgccctttca

SEQ ID NO: 3303886 - DNA, 25 bp, Homo sapien
tgtcctttgctgccctttcaactct

SEQ ID NO: 3303887 - DNA, 25 bp, Homo sapien
tctcagagcacctttctcttccaga

SEQ ID NO: 3303888 - DNA, 25 bp, Homo sapien
gcacctttctcttccagacctcttc

SEQ ID NO: 3303889 - DNA, 25 bp, Homo sapien
catcctttgtagcttagaacagcga

SEQ ID NO: 3303890 - DNA, 25 bp, Homo sapien
gatatgacttagaaccaggtggctg

SEQ ID NO: 3303891 - DNA, 25 bp, Homo sapien
gattcagtgagcctgctttcgcctg

SEQ ID NO: 3303892 - DNA, 25 bp, Homo sapien
taaaaatgcgaaatgccgagcgagc

SEQ ID NO: 3303893 - DNA, 25 bp, Homo sapien
gcataatcggaaatagagactacat

SEQ ID NO: 3303894 - DNA, 25 bp, Homo sapien
tgtggtcctatggtatcaaccagta

SEQ ID NO: 3303895 - DNA, 25 bp, Homo sapien
cttccacctggacatacgataggaa

SEQ ID NO: 3303896 - DNA, 25 bp, Homo sapien
cactgagcaagcgtctgtggtccta

SEQ ID NO: 3303897 - DNA, 25 bp, Homo sapien
ctatgtcaaatttctggttcagatg

SEQ ID NO: 3303898 - DNA, 25 bp, Homo sapien
tctatgtcaaatttctggttcagat

SEQ ID NO: 3303899 - DNA, 25 bp, Homo sapien
tctcagggcttgatttacaccaaat

SEQ ID NO: 3303900 - DNA, 25 bp, Homo sapien
atccaagttcgcaatgtattaacat

SEQ ID NO: 3303901 - DNA, 25 bp, Homo sapien
gcaatatatatctcctacaccgaag

SEQ ID NO: 3303902 - DNA, 25 bp, Homo sapien
gaatgttgctcagaaattaagctag

SEQ ID NO: 3303903 - DNA, 25 bp, Homo sapien
taagagcaatcatcttgtggaatgc

SEQ ID NO: 3303904 - DNA, 25 bp, Homo sapien
ttaaactaggatagaagctgttcca

SEQ ID NO: 3303905 - DNA, 25 bp, Homo sapien
gcaaagtaaactaatgcaagtgcag

SEQ ID NO: 3303906 - DNA, 25 bp, Homo sapien
tagaagagccactcctcaactgttc

SEQ ID NO: 3303907 - DNA, 25 bp, Homo sapien
cacagatttctacatggtcacattc

SEQ ID NO: 3303908 - DNA, 25 bp, Homo sapien
tacaactagtatctacagacagaaa

SEQ ID NO: 3303909 - DNA, 25 bp, Homo sapien
tttagaagaaaccagtgtcaaatga

SEQ ID NO: 3303910 - DNA, 25 bp, Homo sapien
ggtcacattcatatcacacactctt

SEQ ID NO: 3303911 - DNA, 25 bp, Homo sapien
tgcaaagaaactggacgtacatggt

SEQ ID NO: 3303912 - DNA, 25 bp, Homo sapien
caggcaaactccaacaatgtctggg

SEQ ID NO: 3303913 - DNA, 25 bp, Homo sapien
acaggcaggtgcaagttaggtctca

SEQ ID NO: 3303914 - DNA, 25 bp, Homo sapien
taacagaaggttaggctcctcagag

SEQ ID NO: 3303915 - DNA, 25 bp, Homo sapien
attctgtgaatttgataatatcatc

SEQ ID NO: 3303916 - DNA, 25 bp, Homo sapien
gacaagtgaatgcagaacatattat

SEQ ID NO: 3303917 - DNA, 25 bp, Homo sapien
tattctgtgaatttgataatatcat

SEQ ID NO: 3303918 - DNA, 25 bp, Homo sapien
tgttaagacagacaagtgaatgcag

SEQ ID NO: 3303919 - DNA, 25 bp, Homo sapien
gtacgagagatagcctgtcaagcac

SEQ ID NO: 3303920 - DNA, 25 bp, Homo sapien
tcaccacttatgcaggtacgagaga

SEQ ID NO: 3303921 - DNA, 25 bp, Homo sapien
taagggaaatctggctaaagctaac

SEQ ID NO: 3303922 - DNA, 25 bp, Homo sapien
aaactgatcctgcaaaaattctggg

SEQ ID NO: 3303923 - DNA, 25 bp, Homo sapien
tctgaaagtagtctaggcaggctca

SEQ ID NO: 3303924 - DNA, 25 bp, Homo sapien
taatctcagaatggcagcaccactg

SEQ ID NO: 3303925 - DNA, 25 bp, Homo sapien
catcagccacattaaggagtcaggg

SEQ ID NO: 3303926 - DNA, 25 bp, Homo sapien
ccaacatggtcagagtgcaaataac

SEQ ID NO: 3303927 - DNA, 25 bp, Homo sapien
tctaaaacagggacaccagtgtctc

SEQ ID NO: 3303928 - DNA, 25 bp, Homo sapien
aattcacatggaggcaattctgctc

SEQ ID NO: 3303929 - DNA, 25 bp, Homo sapien
tttattcacacctgccttcagaagg

SEQ ID NO: 3303930 - DNA, 25 bp, Homo sapien
tctcctagtatctgggtaataacct

SEQ ID NO: 3303931 - DNA, 25 bp, Homo sapien
tacaggttgccggttttgcagccat

SEQ ID NO: 3303932 - DNA, 25 bp, Homo sapien
tcaagggtctgagagagctcactcc

SEQ ID NO: 3303933 - DNA, 25 bp, Homo sapien
gcattatgtcttggtagagccctga

SEQ ID NO: 3303934 - DNA, 25 bp, Homo sapien
tacatccatctgactaggccaagga

SEQ ID NO: 3303935 - DNA, 25 bp, Homo sapien
ctgaagaacgctgggtttcgcaggc

SEQ ID NO: 3303936 - DNA, 25 bp, Homo sapien
ctgggtttcgcaggcaggcggctag

SEQ ID NO: 3303937 - DNA, 25 bp, Homo sapien
catctcctgaagaacgctgggtttc

SEQ ID NO: 3303938 - DNA, 25 bp, Homo sapien
gtgtgtgtgttccatcacatcatct

SEQ ID NO: 3303939 - DNA, 25 bp, Homo sapien
gagatgtcattgacagacgaggatg

SEQ ID NO: 3303940 - DNA, 25 bp, Homo sapien
cagacgaggatggagggagactctc

SEQ ID NO: 3303941 - DNA, 25 bp, Homo sapien
tcacctgcaacaacccaggggtcct

SEQ ID NO: 3303942 - DNA, 25 bp, Homo sapien
ccagggtctggtcggtggacatgga

SEQ ID NO: 3303943 - DNA, 25 bp, Homo sapien
ttaaggcagcgagtctggagctttt

SEQ ID NO: 3303944 - DNA, 25 bp, Homo sapien
cacttgaggaactgacaaactgtgt

SEQ ID NO: 3303945 - DNA, 25 bp, Homo sapien
tcatgcacgagttttgtatggacat

SEQ ID NO: 3303946 - DNA, 25 bp, Homo sapien
taattctagctttaacacttgagga

SEQ ID NO: 3303947 - DNA, 25 bp, Homo sapien
gaaggctgtccttttactacaccat

SEQ ID NO: 3303948 - DNA, 25 bp, Homo sapien
gaaggagaaggctgtccttttacta

SEQ ID NO: 3303949 - DNA, 25 bp, Homo sapien
aggagaaggctgtccttttactaca

SEQ ID NO: 3303950 - DNA, 25 bp, Homo sapien
gagaaggctgtccttttactacacc

SEQ ID NO: 3303951 - DNA, 25 bp, Homo sapien
tttccattcttcaattgtgtgttct

SEQ ID NO: 3303952 - DNA, 25 bp, Homo sapien
aattgtgtgttctctttcatccaac

SEQ ID NO: 3303953 - DNA, 25 bp, Homo sapien
ttcttcaattgtgtgttctctttca

SEQ ID NO: 3303954 - DNA, 25 bp, Homo sapien
tctttcatccaactgcttgtcatat

SEQ ID NO: 3303955 - DNA, 25 bp, Homo sapien
ataatctttgtgtgataatgtaaac

SEQ ID NO: 3303956 - DNA, 25 bp, Homo sapien
aatctttgtgtgataatgtaaacat

SEQ ID NO: 3303957 - DNA, 25 bp, Homo sapien
aaaataatctttgtgtgataatgta

SEQ ID NO: 3303958 - DNA, 25 bp, Homo sapien
aaaaaataatctttgtgtgataatg

SEQ ID NO: 3303959 - DNA, 25 bp, Homo sapien
cttcttcctgatatttaggctttgg

SEQ ID NO: 3303960 - DNA, 25 bp, Homo sapien
tatttaggctttgggagatctacca

SEQ ID NO: 3303961 - DNA, 25 bp, Homo sapien
gatatttaggctttgggagatctac

SEQ ID NO: 3303962 - DNA, 25 bp, Homo sapien
tcctgatatttaggctttgggagat

SEQ ID NO: 3303963 - DNA, 25 bp, Homo sapien
taatgctgtggttaggccgctatcc

SEQ ID NO: 3303964 - DNA, 25 bp, Homo sapien
tgtaaagacgctttgccaagtggta

SEQ ID NO: 3303965 - DNA, 25 bp, Homo sapien
cgctatccaagcgaccttgtccagg

SEQ ID NO: 3303966 - DNA, 25 bp, Homo sapien
aatttccggctttgcctcttcctga

SEQ ID NO: 3303967 - DNA, 25 bp, Homo sapien
aaagggtggatcaaggatgatccag

SEQ ID NO: 3303968 - DNA, 25 bp, Homo sapien
aagggtggatcaaggatgatccagg

SEQ ID NO: 3303969 - DNA, 25 bp, Homo sapien
ttccttctctgagacagcacgtcag

SEQ ID NO: 3303970 - DNA, 25 bp, Homo sapien
gagacagcacgtcagcatttccttc

SEQ ID NO: 3303971 - DNA, 25 bp, Homo sapien
tctctgagacagcacgtcagcattt

SEQ ID NO: 3303972 - DNA, 25 bp, Homo sapien
tctgagacagcacgtcagcatttcc

SEQ ID NO: 3303973 - DNA, 25 bp, Homo sapien
atgtgtgttacatgacgggcaaggg

SEQ ID NO: 3303974 - DNA, 25 bp, Homo sapien
atgttttagtgccaggttacacacg

SEQ ID NO: 3303975 - DNA, 25 bp, Homo sapien
caaggatcccctctgctacatatga

SEQ ID NO: 3303976 - DNA, 25 bp, Homo sapien
tagtgccaggttacacacgaatgtg

SEQ ID NO: 3303977 - DNA, 25 bp, Homo sapien
tctggaatgcccagatcaagctctg

SEQ ID NO: 3303978 - DNA, 25 bp, Homo sapien
tggtcttgactgcttggcctacata

SEQ ID NO: 3303979 - DNA, 25 bp, Homo sapien
cacttcatcatggttgctggtccta

SEQ ID NO: 3303980 - DNA, 25 bp, Homo sapien
tgtctctcctgactacccagctggt

SEQ ID NO: 3303981 - DNA, 25 bp, Homo sapien
cacttcggctgggtcataccagacg

SEQ ID NO: 3303982 - DNA, 25 bp, Homo sapien
taaggcgtcgtccactgatattctt

SEQ ID NO: 3303983 - DNA, 25 bp, Homo sapien
accagacgttgatgtagggatgctg

SEQ ID NO: 3303984 - DNA, 25 bp, Homo sapien
gctgggtcaatcactagcatctttg

SEQ ID NO: 3303985 - DNA, 25 bp, Homo sapien
tattgtgctcggagtccgctgggaa

SEQ ID NO: 3303986 - DNA, 25 bp, Homo sapien
ctttgagtttattgtgctcggagtc

SEQ ID NO: 3303987 - DNA, 25 bp, Homo sapien
gtcccgcatacttgggccgattctc

SEQ ID NO: 3303988 - DNA, 25 bp, Homo sapien
aggtgagtcccgcatacttgggccg

SEQ ID NO: 3303989 - DNA, 25 bp, Homo sapien
tgttcctagttgttcaattacctta

SEQ ID NO: 3303990 - DNA, 25 bp, Homo sapien
gttgttcaattaccttattccactg

SEQ ID NO: 3303991 - DNA, 25 bp, Homo sapien
tggacatggtgttcctagttgttca

SEQ ID NO: 3303992 - DNA, 25 bp, Homo sapien
catggtgttcctagttgttcaatta

SEQ ID NO: 3303993 - DNA, 25 bp, Homo sapien
gatttctatccaagtacatccaagt

SEQ ID NO: 3303994 - DNA, 25 bp, Homo sapien
catctactctgaagaaccaactgga

SEQ ID NO: 3303995 - DNA, 25 bp, Homo sapien
gagccttgataatgataaacaccat

SEQ ID NO: 3303996 - DNA, 25 bp, Homo sapien
gatttcctcgccatgtgccagtgaa

SEQ ID NO: 3303997 - DNA, 25 bp, Homo sapien
acacaagcaaccaaagtaaaaatgg

SEQ ID NO: 3303998 - DNA, 25 bp, Homo sapien
ggacagtggtcagggcaaaaattta

SEQ ID NO: 3303999 - DNA, 25 bp, Homo sapien
tatgcaaataacaaacaggcatatg

SEQ ID NO: 3304000 - DNA, 25 bp, Homo sapien
tttattgagtaatacctcccaaaca

SEQ ID NO: 3304001 - DNA, 25 bp, Homo sapien
ttatcatttctcccatgatgcaccc

SEQ ID NO: 3304002 - DNA, 25 bp, Homo sapien
catgatgcaccctactgaccacatg

SEQ ID NO: 3304003 - DNA, 25 bp, Homo sapien
cagtgccaggaaacagcactgcacc

SEQ ID NO: 3304004 - DNA, 25 bp, Homo sapien
ggaaacagcactgcaccttttatca

SEQ ID NO: 3304005 - DNA, 25 bp, Homo sapien
actgggctactcatgccatagagca

SEQ ID NO: 3304006 - DNA, 25 bp, Homo sapien
ccatagagcaatagtctgacttttc

SEQ ID NO: 3304007 - DNA, 25 bp, Homo sapien
tacccaatgctacctaatgtagaat

SEQ ID NO: 3304008 - DNA, 25 bp, Homo sapien
acagaaataacaacactacccaatg

SEQ ID NO: 3304009 - DNA, 25 bp, Homo sapien
gaatgcctactaaattgtttcatcc

SEQ ID NO: 3304010 - DNA, 25 bp, Homo sapien
gaagagttagcaggcacactagtgg

SEQ ID NO: 3304011 - DNA, 25 bp, Homo sapien
tgcttatagatttgaaagaatgcct

SEQ ID NO: 3304012 - DNA, 25 bp, Homo sapien
tctctgtgctagattgatataacaa

SEQ ID NO: 3304013 - DNA, 25 bp, Homo sapien
gacaattccctgtgatatcatctag

SEQ ID NO: 3304014 - DNA, 25 bp, Homo sapien
gaaagtcagcatgcgtttaagaatg

SEQ ID NO: 3304015 - DNA, 25 bp, Homo sapien
taattcagtaaccaagacaattccc

SEQ ID NO: 3304016 - DNA, 25 bp, Homo sapien
aatggacttggcctatttactactc

SEQ ID NO: 3304017 - DNA, 25 bp, Homo sapien
aaaatgttgattattatgatagtat

SEQ ID NO: 3304018 - DNA, 25 bp, Homo sapien
ttattatgatagtattatcacatca

SEQ ID NO: 3304019 - DNA, 25 bp, Homo sapien
agaaaaatgttgattattatgatag

SEQ ID NO: 3304020 - DNA, 25 bp, Homo sapien
tgattattatgatagtattatcaca

SEQ ID NO: 3304021 - DNA, 25 bp, Homo sapien
tcttctgccgataaataacttgaat

SEQ ID NO: 3304022 - DNA, 25 bp, Homo sapien
tgactgctcagttgttggtaggaag

SEQ ID NO: 3304023 - DNA, 25 bp, Homo sapien
taacttgaatcagccctcagccttg

SEQ ID NO: 3304024 - DNA, 25 bp, Homo sapien
gaagtagtcaaggtatcaattagca

SEQ ID NO: 3304025 - DNA, 25 bp, Homo sapien
tctgagtattgattgagaggttcct

SEQ ID NO: 3304026 - DNA, 25 bp, Homo sapien
aatgatacttcacactatagatagg

SEQ ID NO: 3304027 - DNA, 25 bp, Homo sapien
tcacaaatgccaatcatatacgtag

SEQ ID NO: 3304028 - DNA, 25 bp, Homo sapien
cagagattcaagaccttaagattgg

SEQ ID NO: 3304029 - DNA, 25 bp, Homo sapien
actttttgcttctatctttactctc

SEQ ID NO: 3304030 - DNA, 25 bp, Homo sapien
ccaactttttgcttctatctttact

SEQ ID NO: 3304031 - DNA, 25 bp, Homo sapien
aactttttgcttctatctttactct

SEQ ID NO: 3304032 - DNA, 25 bp, Homo sapien
caactttttgcttctatctttactc

SEQ ID NO: 3304033 - DNA, 25 bp, Homo sapien
ctggaaagaggattttgtggcgaac

SEQ ID NO: 3304034 - DNA, 25 bp, Homo sapien
taatgcatcccacagaccatatatc

SEQ ID NO: 3304035 - DNA, 25 bp, Homo sapien
agaggattttgtggcgaaccatttc

SEQ ID NO: 3304036 - DNA, 25 bp, Homo sapien
gattttgtggcgaaccatttctccc

SEQ ID NO: 3304037 - DNA, 25 bp, Homo sapien
gagaatagggcaacaagagaccacc

SEQ ID NO: 3304038 - DNA, 25 bp, Homo sapien
gaattcctggtatttgggacttagc

SEQ ID NO: 3304039 - DNA, 25 bp, Homo sapien
tgtgaattcaaaccagcgctatgct

SEQ ID NO: 3304040 - DNA, 25 bp, Homo sapien
tctcagcagtgccacaaagtggtga

SEQ ID NO: 3304041 - DNA, 25 bp, Homo sapien
acagcagggcatgcctgatgtggga

SEQ ID NO: 3304042 - DNA, 25 bp, Homo sapien
tccaaattgtcaaacttgttaggaa

SEQ ID NO: 3304043 - DNA, 25 bp, Homo sapien
tcatttggccgaattgttccatggg

SEQ ID NO: 3304044 - DNA, 25 bp, Homo sapien
tgatgtgggagcaagcaggtttttc

SEQ ID NO: 3304045 - DNA, 25 bp, Homo sapien
gtcaaaaggtaccagaactccgata

SEQ ID NO: 3304046 - DNA, 25 bp, Homo sapien
caaaagtaccctgtagcacctgtac

SEQ ID NO: 3304047 - DNA, 25 bp, Homo sapien
ttctcaatatctaggcacgtgtgct

SEQ ID NO: 3304048 - DNA, 25 bp, Homo sapien
tggtagtgccaagatctgaaagccc

SEQ ID NO: 3304049 - DNA, 25 bp, Homo sapien
tggctatctacaacgtgcacccgtt

SEQ ID NO: 3304050 - DNA, 25 bp, Homo sapien
catggttttgatgctgctctcccga

SEQ ID NO: 3304051 - DNA, 25 bp, Homo sapien
ttgatgctgctctcccgaagcatcc

SEQ ID NO: 3304052 - DNA, 25 bp, Homo sapien
gttttgatgctgctctcccgaagca

SEQ ID NO: 3304053 - DNA, 25 bp, Homo sapien
attcatggttttgatgctgctctcc

SEQ ID NO: 3304054 - DNA, 25 bp, Homo sapien
gggctctgtaataacgtgtcaccac

SEQ ID NO: 3304055 - DNA, 25 bp, Homo sapien
gacttgactacaatgttacttggtt

SEQ ID NO: 3304056 - DNA, 25 bp, Homo sapien
tcaatgtgcaatcagacttgactac

SEQ ID NO: 3304057 - DNA, 25 bp, Homo sapien
tcaccacatatggagtcatcatgaa

SEQ ID NO: 3304058 - DNA, 25 bp, Homo sapien
gacataagttggcatccatcagttc

SEQ ID NO: 3304059 - DNA, 25 bp, Homo sapien
ttggtacagcaggtaagacattcgc

SEQ ID NO: 3304060 - DNA, 25 bp, Homo sapien
taatgccacacaacatttggtacag

SEQ ID NO: 3304061 - DNA, 25 bp, Homo sapien
agacattcgctcatggtctaattcc

SEQ ID NO: 3304062 - DNA, 25 bp, Homo sapien
acatcttggaactcctccagcgttt

SEQ ID NO: 3304063 - DNA, 25 bp, Homo sapien
catcttggaactcctccagcgtttt

SEQ ID NO: 3304064 - DNA, 25 bp, Homo sapien
ctggggtgtgaagacatttaataaa

SEQ ID NO: 3304065 - DNA, 25 bp, Homo sapien
gggtgtgaagacatttaataaacta

SEQ ID NO: 3304066 - DNA, 25 bp, Homo sapien
tgaagacatttaataaactaataat

SEQ ID NO: 3304067 - DNA, 25 bp, Homo sapien
ggtgtgaagacatttaataaactaa

SEQ ID NO: 3304068 - DNA, 25 bp, Homo sapien
tatcaagatctattccctactgtat

SEQ ID NO: 3304069 - DNA, 25 bp, Homo sapien
tctctaggactttatcaatctcata

SEQ ID NO: 3304070 - DNA, 25 bp, Homo sapien
tgctaacccagatcacttagtgaac

SEQ ID NO: 3304071 - DNA, 25 bp, Homo sapien
aaatattagagactgtgtatacagc

SEQ ID NO: 3304072 - DNA, 25 bp, Homo sapien
tgaccaagtaagtgagcatttctcc

SEQ ID NO: 3304073 - DNA, 25 bp, Homo sapien
cacacataaaaggaaggtagcaggt

SEQ ID NO: 3304074 - DNA, 25 bp, Homo sapien
cattctattgcattacagggtctgg

SEQ ID NO: 3304075 - DNA, 25 bp, Homo sapien
tgggaagtattctctcaaactgacc

SEQ ID NO: 3304076 - DNA, 25 bp, Homo sapien
cgaatgtagcatattggcaggataa

SEQ ID NO: 3304077 - DNA, 25 bp, Homo sapien
taagcagaaagctaccatgaggaca

SEQ ID NO: 3304078 - DNA, 25 bp, Homo sapien
aatcttacaaactcccactgccaga

SEQ ID NO: 3304079 - DNA, 25 bp, Homo sapien
tccacatcatatggtttttaggtga

SEQ ID NO: 3304080 - DNA, 25 bp, Homo sapien
ttggttctgaaagggtctgctgagc

SEQ ID NO: 3304081 - DNA, 25 bp, Homo sapien
ccggtacgctctcttggcatgtgtt

SEQ ID NO: 3304082 - DNA, 25 bp, Homo sapien
tgtgtttggttctgaaagggtctgc

SEQ ID NO: 3304083 - DNA, 25 bp, Homo sapien
atgaggaccagctcccggtacgctc

SEQ ID NO: 3304084 - DNA, 25 bp, Homo sapien
gaactcttgcctacttgattaagga

SEQ ID NO: 3304085 - DNA, 25 bp, Homo sapien
aaagattccttagaactcttgccta

SEQ ID NO: 3304086 - DNA, 25 bp, Homo sapien
agagatccaagagcaactcagaatt

SEQ ID NO: 3304087 - DNA, 25 bp, Homo sapien
gagatccaagagcaactcagaatta

SEQ ID NO: 3304088 - DNA, 25 bp, Homo sapien
tctacatgctaggaggatgaagaag

SEQ ID NO: 3304089 - DNA, 25 bp, Homo sapien
gaatcttagatactgtctactctgg

SEQ ID NO: 3304090 - DNA, 25 bp, Homo sapien
gtgactggcataagaatattctaca

SEQ ID NO: 3304091 - DNA, 25 bp, Homo sapien
taagtaaagatatgagtgactggca

SEQ ID NO: 3304092 - DNA, 25 bp, Homo sapien
agaagtcctttatgtcccttgttag

SEQ ID NO: 3304093 - DNA, 25 bp, Homo sapien
ttcacaatatttgttcttcctatcc

SEQ ID NO: 3304094 - DNA, 25 bp, Homo sapien
aggtagtatgatgtctccagctttc

SEQ ID NO: 3304095 - DNA, 25 bp, Homo sapien
tctctttaaagaagtcctttatgtc

SEQ ID NO: 3304096 - DNA, 25 bp, Homo sapien
aattttttgtctcgatgatctgcct

SEQ ID NO: 3304097 - DNA, 25 bp, Homo sapien
taattttttgtctcgatgatctgcc

SEQ ID NO: 3304098 - DNA, 25 bp, Homo sapien
cagcacagataaagagccaagtggg

SEQ ID NO: 3304099 - DNA, 25 bp, Homo sapien
ggcagcacagataaagagccaagtg

SEQ ID NO: 3304100 - DNA, 25 bp, Homo sapien
ctaccaatggcagcacagataaaga

SEQ ID NO: 3304101 - DNA, 25 bp, Homo sapien
gcacagataaagagccaagtgggca

SEQ ID NO: 3304102 - DNA, 25 bp, Homo sapien
cctgcagatgcacctatgagcgatt

SEQ ID NO: 3304103 - DNA, 25 bp, Homo sapien
gcagaagtgaggattatcagcatct

SEQ ID NO: 3304104 - DNA, 25 bp, Homo sapien
ggagatgtgaggttttcttccaaag

SEQ ID NO: 3304105 - DNA, 25 bp, Homo sapien
tgcagctagcactctggatccaagt

SEQ ID NO: 3304106 - DNA, 25 bp, Homo sapien
cctcataaccataagatgctcccat

SEQ ID NO: 3304107 - DNA, 25 bp, Homo sapien
ctcataaccataagatgctcccatc

SEQ ID NO: 3304108 - DNA, 25 bp, Homo sapien
tgcacacggtgtgttccctttaaaa

SEQ ID NO: 3304109 - DNA, 25 bp, Homo sapien
tttccctcccaaattatgctattta

SEQ ID NO: 3304110 - DNA, 25 bp, Homo sapien
tgtttgtgtctagtagttgcacacg

SEQ ID NO: 3304111 - DNA, 25 bp, Homo sapien
tagcaagtggataacaaattaaaca

SEQ ID NO: 3304112 - DNA, 25 bp, Homo sapien
cacactgtagaactggttgtcaact

SEQ ID NO: 3304113 - DNA, 25 bp, Homo sapien
caataggctttagattctggtagcg

SEQ ID NO: 3304114 - DNA, 25 bp, Homo sapien
tctggtagcgcttgagaactgtgaa

SEQ ID NO: 3304115 - DNA, 25 bp, Homo sapien
gaactgtgaaggttgagtctcccac

SEQ ID NO: 3304116 - DNA, 25 bp, Homo sapien
gttgtaatgtttggcaatatatgac

SEQ ID NO: 3304117 - DNA, 25 bp, Homo sapien
tgtttggcaatatatgacacatcca

SEQ ID NO: 3304118 - DNA, 25 bp, Homo sapien
gtaatgtttggcaatatatgacaca

SEQ ID NO: 3304119 - DNA, 25 bp, Homo sapien
gcaatatatgacacatccacttgtt

SEQ ID NO: 3304120 - DNA, 25 bp, Homo sapien
agtggcaggttttgatttattaatc

SEQ ID NO: 3304121 - DNA, 25 bp, Homo sapien
taataccaattcataggaaagataa

SEQ ID NO: 3304122 - DNA, 25 bp, Homo sapien
aaaatatataataccaattcatagg

SEQ ID NO: 3304123 - DNA, 25 bp, Homo sapien
aaaattcatcagctaaacttcagga

SEQ ID NO: 3304124 - DNA, 25 bp, Homo sapien
ttaaaatcctgactgtgagcccttg

SEQ ID NO: 3304125 - DNA, 25 bp, Homo sapien
gttagacaacatttaagacccatag

SEQ ID NO: 3304126 - DNA, 25 bp, Homo sapien
agacccatagttagcagttttagag

SEQ ID NO: 3304127 - DNA, 25 bp, Homo sapien
agttggcctagctcctaaaccacag

SEQ ID NO: 3304128 - DNA, 25 bp, Homo sapien
tagctgacttgacctttattgaatg

SEQ ID NO: 3304129 - DNA, 25 bp, Homo sapien
ttttgtagctgacttgacctttatt

SEQ ID NO: 3304130 - DNA, 25 bp, Homo sapien
tgtagctgacttgacctttattgaa

SEQ ID NO: 3304131 - DNA, 25 bp, Homo sapien
agctgacttgacctttattgaatga

SEQ ID NO: 3304132 - DNA, 25 bp, Homo sapien
ttgaatgatacactccagattagaa

SEQ ID NO: 3304133 - DNA, 25 bp, Homo sapien
cagattagaactggttttagaactc

SEQ ID NO: 3304134 - DNA, 25 bp, Homo sapien
caaaagaggaattgaatgatacact

SEQ ID NO: 3304135 - DNA, 25 bp, Homo sapien
ttttagaactcagaaccaaagtgga

SEQ ID NO: 3304136 - DNA, 25 bp, Homo sapien
tttgaggaccacagttaacagtagg

SEQ ID NO: 3304137 - DNA, 25 bp, Homo sapien
tgcacaacctaagtgggatggagca

SEQ ID NO: 3304138 - DNA, 25 bp, Homo sapien
cattatatggacgtgctgcacaacc

SEQ ID NO: 3304139 - DNA, 25 bp, Homo sapien
gttacgtaattcactggcaggtggc

SEQ ID NO: 3304140 - DNA, 25 bp, Homo sapien
tctatgtatttgttttggtaccagc

SEQ ID NO: 3304141 - DNA, 25 bp, Homo sapien
tgcctgttcactctggtaataattt

SEQ ID NO: 3304142 - DNA, 25 bp, Homo sapien
cagatggttgtagatttggggcatt

SEQ ID NO: 3304143 - DNA, 25 bp, Homo sapien
tccccatggcttatttttgttgaag

SEQ ID NO: 3304144 - DNA, 25 bp, Homo sapien
gttcactgcagtagtataagaaatg

SEQ ID NO: 3304145 - DNA, 25 bp, Homo sapien
ttcactgcagtagtataagaaatgg

SEQ ID NO: 3304146 - DNA, 25 bp, Homo sapien
ggttcactgcagtagtataagaaat

SEQ ID NO: 3304147 - DNA, 25 bp, Homo sapien
tcttggtgggaagtacaaaaattca

SEQ ID NO: 3304148 - DNA, 25 bp, Homo sapien
caatatgcgacttccatttctggca

SEQ ID NO: 3304149 - DNA, 25 bp, Homo sapien
tgcaaaacgcacaatactgtcagat

SEQ ID NO: 3304150 - DNA, 25 bp, Homo sapien
ttctggcaaggattgatagatgtcc

SEQ ID NO: 3304151 - DNA, 25 bp, Homo sapien
gaatactcagcatgtaacgtccttg

SEQ ID NO: 3304152 - DNA, 25 bp, Homo sapien
ctcagcatgtaacgtccttgtattc

SEQ ID NO: 3304153 - DNA, 25 bp, Homo sapien
catccgacacacagaatactcagca

SEQ ID NO: 3304154 - DNA, 25 bp, Homo sapien
cagccatcatccgacacacagaata

SEQ ID NO: 3304155 - DNA, 25 bp, Homo sapien
aatccatcccttaagtgatatggaa

SEQ ID NO: 3304156 - DNA, 25 bp, Homo sapien
tgaacaaatccatcccttaagtgat

SEQ ID NO: 3304157 - DNA, 25 bp, Homo sapien
catcccttaagtgatatggaaaaat

SEQ ID NO: 3304158 - DNA, 25 bp, Homo sapien
caaatccatcccttaagtgatatgg

SEQ ID NO: 3304159 - DNA, 25 bp, Homo sapien
gaagtccgtactcacagatccctag

SEQ ID NO: 3304160 - DNA, 25 bp, Homo sapien
caaggcccgagatgccagagaatca

SEQ ID NO: 3304161 - DNA, 25 bp, Homo sapien
aggtgagacgaaagagcatggccca

SEQ ID NO: 3304162 - DNA, 25 bp, Homo sapien
tagacctagactgggaaattgccac

SEQ ID NO: 3304163 - DNA, 25 bp, Homo sapien
catgaacggaatttgatatgaagtt

SEQ ID NO: 3304164 - DNA, 25 bp, Homo sapien
tattgtgctctatagagttttcaga

SEQ ID NO: 3304165 - DNA, 25 bp, Homo sapien
tcagaaatgtatatccctgtgtcaa

SEQ ID NO: 3304166 - DNA, 25 bp, Homo sapien
gaataaagagcatgaacggaatttg

SEQ ID NO: 3304167 - DNA, 25 bp, Homo sapien
cagaggaagacatctcgagaggaag

SEQ ID NO: 3304168 - DNA, 25 bp, Homo sapien
tatgctgtcctgatagtgtatctgc

SEQ ID NO: 3304169 - DNA, 25 bp, Homo sapien
gctgttcagtctgcccgtaagcagt

SEQ ID NO: 3304170 - DNA, 25 bp, Homo sapien
cgtaagcagtgctaggctgggaact

SEQ ID NO: 3304171 - DNA, 25 bp, Homo sapien
cctcttcatcactgccttcatgctc

SEQ ID NO: 3304172 - DNA, 25 bp, Homo sapien
tggttcacagtctccctcttcatca

SEQ ID NO: 3304173 - DNA, 25 bp, Homo sapien
ctggttcacagtctccctcttcatc

SEQ ID NO: 3304174 - DNA, 25 bp, Homo sapien
cttcatcactgccttcatgctccat

SEQ ID NO: 3304175 - DNA, 25 bp, Homo sapien
gattccggcttcaagtaaactctga

SEQ ID NO: 3304176 - DNA, 25 bp, Homo sapien
cagacctggatcagttcagctgtat

SEQ ID NO: 3304177 - DNA, 25 bp, Homo sapien
gaaattagtcctcacgtggttgacc

SEQ ID NO: 3304178 - DNA, 25 bp, Homo sapien
taacatcctcctgtcaactcctggg

SEQ ID NO: 3304179 - DNA, 25 bp, Homo sapien
tctcagccactgtcatgattgaaac

SEQ ID NO: 3304180 - DNA, 25 bp, Homo sapien
aactatctccttcatgttagcttct

SEQ ID NO: 3304181 - DNA, 25 bp, Homo sapien
catgttagcttctgaaatatctata

SEQ ID NO: 3304182 - DNA, 25 bp, Homo sapien
gccactgtcatgattgaaactatct

SEQ ID NO: 3304183 - DNA, 25 bp, Homo sapien
acatttggaggtcccacagacaaca

SEQ ID NO: 3304184 - DNA, 25 bp, Homo sapien
ctacatttggaggtcccacagacaa

SEQ ID NO: 3304185 - DNA, 25 bp, Homo sapien
tttggaggtcccacagacaacacaa

SEQ ID NO: 3304186 - DNA, 25 bp, Homo sapien
tggaggtcccacagacaacacaaac

SEQ ID NO: 3304187 - DNA, 25 bp, Homo sapien
tgaagcacaaatcgagagccacatt

SEQ ID NO: 3304188 - DNA, 25 bp, Homo sapien
caagcagtgctatttcaatgtcaaa

SEQ ID NO: 3304189 - DNA, 25 bp, Homo sapien
tgacagcatgccacccattgttgag

SEQ ID NO: 3304190 - DNA, 25 bp, Homo sapien
gataggaaaatgcttagggtcccat

SEQ ID NO: 3304191 - DNA, 25 bp, Homo sapien
gccacattatctaccaagttgctga

SEQ ID NO: 3304192 - DNA, 25 bp, Homo sapien
taggattcttcagcaggtcatgtcc

SEQ ID NO: 3304193 - DNA, 25 bp, Homo sapien
gatggtgtttcaactgcccctcagg

SEQ ID NO: 3304194 - DNA, 25 bp, Homo sapien
tgaattcttgcaagaggctcctagt

SEQ ID NO: 3304195 - DNA, 25 bp, Homo sapien
gaaatggcctggatacccatcaagt

SEQ ID NO: 3304196 - DNA, 25 bp, Homo sapien
tgcctttggctatggagtctactcc

SEQ ID NO: 3304197 - DNA, 25 bp, Homo sapien
caaaaggagttatgtctagttcagg

SEQ ID NO: 3304198 - DNA, 25 bp, Homo sapien
tattatacatcacagggaacgttag

SEQ ID NO: 3304199 - DNA, 25 bp, Homo sapien
tggaacttgattcgcatatttgctt

SEQ ID NO: 3304200 - DNA, 25 bp, Homo sapien
gaatgtggggctaccggcaagataa

SEQ ID NO: 3304201 - DNA, 25 bp, Homo sapien
gctatatttgtagagcattccttgc

SEQ ID NO: 3304202 - DNA, 25 bp, Homo sapien
tgggatcatcaagattgattatttc

SEQ ID NO: 3304203 - DNA, 25 bp, Homo sapien
ctatgtaccgataagttcagacact

SEQ ID NO: 3304204 - DNA, 25 bp, Homo sapien
ctcttcatgacaacatcttgacatt

SEQ ID NO: 3304205 - DNA, 25 bp, Homo sapien
catttataagtcatgtgctatatgc

SEQ ID NO: 3304206 - DNA, 25 bp, Homo sapien
cattacccttttctgtgacttcgac

SEQ ID NO: 3304207 - DNA, 25 bp, Homo sapien
ttctgtgacttcgactttcattcat

SEQ ID NO: 3304208 - DNA, 25 bp, Homo sapien
taagtcatgtgctatatgcttggca

SEQ ID NO: 3304209 - DNA, 25 bp, Homo sapien
tggaatcaacagtccccacaggatc

SEQ ID NO: 3304210 - DNA, 25 bp, Homo sapien
gcacccagtggtctctttagtccat

SEQ ID NO: 3304211 - DNA, 25 bp, Homo sapien
catttccaagtcttgaacggtttat

SEQ ID NO: 3304212 - DNA, 25 bp, Homo sapien
tccccacaggatcttctagatagca

SEQ ID NO: 3304213 - DNA, 25 bp, Homo sapien
agatgaaaatcttgccatgaaggcc

SEQ ID NO: 3304214 - DNA, 25 bp, Homo sapien
cagtaattacagtgtagtgtgccca

SEQ ID NO: 3304215 - DNA, 25 bp, Homo sapien
taataattactctccgtgtgcccac

SEQ ID NO: 3304216 - DNA, 25 bp, Homo sapien
taatcctgaaatatagtggtacggc

SEQ ID NO: 3304217 - DNA, 25 bp, Homo sapien
tatataggtttcctgtaagagtcca

SEQ ID NO: 3304218 - DNA, 25 bp, Homo sapien
gcactatatgattacacagttttaa

SEQ ID NO: 3304219 - DNA, 25 bp, Homo sapien
gtggcacaggtcagaacattagaac

SEQ ID NO: 3304220 - DNA, 25 bp, Homo sapien
gacacctgatcccaagcactatatg

SEQ ID NO: 3304221 - DNA, 25 bp, Homo sapien
tgcacatgtttaagcagcactgtag

SEQ ID NO: 3304222 - DNA, 25 bp, Homo sapien
gagactatgtctcttacacatgaag

SEQ ID NO: 3304223 - DNA, 25 bp, Homo sapien
gggttacaagaataagccgccacac

SEQ ID NO: 3304224 - DNA, 25 bp, Homo sapien
tatagccccaaattagtgcacatgt

SEQ ID NO: 3304225 - DNA, 25 bp, Homo sapien
agcctaaagtcaaatatttcattaa

SEQ ID NO: 3304226 - DNA, 25 bp, Homo sapien
tggagactttgaatattccaagtga

SEQ ID NO: 3304227 - DNA, 25 bp, Homo sapien
aattttacaaatcttggagactttg

SEQ ID NO: 3304228 - DNA, 25 bp, Homo sapien
gaatattccaagtgaagtttaccaa

SEQ ID NO: 3304229 - DNA, 25 bp, Homo sapien
tgtaagaagtaagatatgtgcagcc

SEQ ID NO: 3304230 - DNA, 25 bp, Homo sapien
gcagccatcattgtattgtaagaag

SEQ ID NO: 3304231 - DNA, 25 bp, Homo sapien
tccaagccagcagcaacgagagatc

SEQ ID NO: 3304232 - DNA, 25 bp, Homo sapien
tatgcttatgcagagatccggagtc

SEQ ID NO: 3304233 - DNA, 25 bp, Homo sapien
ttaaagccaaagcctttctcagact

SEQ ID NO: 3304234 - DNA, 25 bp, Homo sapien
gttcttaaagccaaagcctttctca

SEQ ID NO: 3304235 - DNA, 25 bp, Homo sapien
aaagccaaagcctttctcagactct

SEQ ID NO: 3304236 - DNA, 25 bp, Homo sapien
agccaaagcctttctcagactctca

SEQ ID NO: 3304237 - DNA, 25 bp, Homo sapien
gagtcagaaaaatggtcgttttcaa

SEQ ID NO: 3304238 - DNA, 25 bp, Homo sapien
accataagagtcagaaaaatggtcg

SEQ ID NO: 3304239 - DNA, 25 bp, Homo sapien
caaaccataagagtcagaaaaatgg

SEQ ID NO: 3304240 - DNA, 25 bp, Homo sapien
cataagagtcagaaaaatggtcgtt

SEQ ID NO: 3304241 - DNA, 25 bp, Homo sapien
tcacttagtggcacgcaggcaaaac

SEQ ID NO: 3304242 - DNA, 25 bp, Homo sapien
aggatgtgagcagcgcaccatgaga

SEQ ID NO: 3304243 - DNA, 25 bp, Homo sapien
cagagtcttgtcagaataggcccaa

SEQ ID NO: 3304244 - DNA, 25 bp, Homo sapien
gaaaaacgttctcagttggcatcac

SEQ ID NO: 3304245 - DNA, 25 bp, Homo sapien
caattctctcaaagactcaggtatg

SEQ ID NO: 3304246 - DNA, 25 bp, Homo sapien
tcttcccagtcctagtagggttcac

SEQ ID NO: 3304247 - DNA, 25 bp, Homo sapien
aaaagtactcccagggcatttgtca

SEQ ID NO: 3304248 - DNA, 25 bp, Homo sapien
tagggttcacccaggagtacacatg

SEQ ID NO: 3304249 - DNA, 25 bp, Homo sapien
ggactgcttcctccagctcctccat

SEQ ID NO: 3304250 - DNA, 25 bp, Homo sapien
taaaggactgcttcctccagctcct

SEQ ID NO: 3304251 - DNA, 25 bp, Homo sapien
catctgtaaaggactgcttcctcca

SEQ ID NO: 3304252 - DNA, 25 bp, Homo sapien
aaggactgcttcctccagctcctcc

SEQ ID NO: 3304253 - DNA, 25 bp, Homo sapien
gatttgacccaaatgaacagtgtca

SEQ ID NO: 3304254 - DNA, 25 bp, Homo sapien
tactcttagtacctacaatacctgg

SEQ ID NO: 3304255 - DNA, 25 bp, Homo sapien
taacctgacacttagaaacatgtga

SEQ ID NO: 3304256 - DNA, 25 bp, Homo sapien
agccacttaccctccttagcagttg

SEQ ID NO: 3304257 - DNA, 25 bp, Homo sapien
aatattgaatctacctagccgacag

SEQ ID NO: 3304258 - DNA, 25 bp, Homo sapien
ggcttgaatgctaagtccactgttc

SEQ ID NO: 3304259 - DNA, 25 bp, Homo sapien
caaaaagatttgagcaggtacttca

SEQ ID NO: 3304260 - DNA, 25 bp, Homo sapien
gattcctgcaatagcaccttagatg

SEQ ID NO: 3304261 - DNA, 25 bp, Homo sapien
tgtatggtttctcatctataggaaa

SEQ ID NO: 3304262 - DNA, 25 bp, Homo sapien
cataagttgccatagtgaagatctg

SEQ ID NO: 3304263 - DNA, 25 bp, Homo sapien
gggcctgctgttggtgtttctcaca

SEQ ID NO: 3304264 - DNA, 25 bp, Homo sapien
tataggaaacgggtctaattcaaca

SEQ ID NO: 3304265 - DNA, 25 bp, Homo sapien
ttgtcactactggacacttccgtgc

SEQ ID NO: 3304266 - DNA, 25 bp, Homo sapien
gattgttgcaatgtccaaccaaaag

SEQ ID NO: 3304267 - DNA, 25 bp, Homo sapien
ccacaagtccttggtcctcagaaga

SEQ ID NO: 3304268 - DNA, 25 bp, Homo sapien
gaggaaggcactcagcagtcctgca

SEQ ID NO: 3304269 - DNA, 25 bp, Homo sapien
tgggatctgttcataaacatcccct

SEQ ID NO: 3304270 - DNA, 25 bp, Homo sapien
gatctgttcataaacatccccttcc

SEQ ID NO: 3304271 - DNA, 25 bp, Homo sapien
ggatctgttcataaacatccccttc

SEQ ID NO: 3304272 - DNA, 25 bp, Homo sapien
gggatctgttcataaacatcccctt

SEQ ID NO: 3304273 - DNA, 25 bp, Homo sapien
taaaatctaatggttctgaagtgga

SEQ ID NO: 3304274 - DNA, 25 bp, Homo sapien
agaggcagccaaaccgctacatcca

SEQ ID NO: 3304275 - DNA, 25 bp, Homo sapien
atccaaagcatccagcccctaaaat

SEQ ID NO: 3304276 - DNA, 25 bp, Homo sapien
cctaaagtagaaaattcacagaagc

SEQ ID NO: 3304277 - DNA, 25 bp, Homo sapien
ccgatgagggatagaaggagatatt

SEQ ID NO: 3304278 - DNA, 25 bp, Homo sapien
tattggatgttgtgctggcaatgcc

SEQ ID NO: 3304279 - DNA, 25 bp, Homo sapien
taaatatgttgataagcattctgtg

SEQ ID NO: 3304280 - DNA, 25 bp, Homo sapien
tatcttccagggtccgacaactagc

SEQ ID NO: 3304281 - DNA, 25 bp, Homo sapien
gattgcttcagagcctactgctgtg

SEQ ID NO: 3304282 - DNA, 25 bp, Homo sapien
tatcccatatgacttagcctgcttc

SEQ ID NO: 3304283 - DNA, 25 bp, Homo sapien
gagcctactgctgtggcataagcca

SEQ ID NO: 3304284 - DNA, 25 bp, Homo sapien
tgaactgtagtctatcccatatgac

SEQ ID NO: 3304285 - DNA, 25 bp, Homo sapien
aattgcagtaccctgggaagttatc

SEQ ID NO: 3304286 - DNA, 25 bp, Homo sapien
gcagagactaggtctctagatttaa

SEQ ID NO: 3304287 - DNA, 25 bp, Homo sapien
tatctatagcctgatttacttacag

SEQ ID NO: 3304288 - DNA, 25 bp, Homo sapien
tttattttgttgaaggcacaaatac

SEQ ID NO: 3304289 - DNA, 25 bp, Homo sapien
gaaaccattgtgcagcgtgatgctg

SEQ ID NO: 3304290 - DNA, 25 bp, Homo sapien
tgcctgagaactacgatcctgatcc

SEQ ID NO: 3304291 - DNA, 25 bp, Homo sapien
gatccggcagtgtttgccccagaaa

SEQ ID NO: 3304292 - DNA, 25 bp, Homo sapien
cgtgatgctgcctgtaccattgtgg

SEQ ID NO: 3304293 - DNA, 25 bp, Homo sapien
tgttttccggtgaaatgaggaccag

SEQ ID NO: 3304294 - DNA, 25 bp, Homo sapien
aaggaataaggttcgtcggcagcca

SEQ ID NO: 3304295 - DNA, 25 bp, Homo sapien
gcaactacgacatcaaggcagccag

SEQ ID NO: 3304296 - DNA, 25 bp, Homo sapien
aaagaggaagcgtctatgtgcagct

SEQ ID NO: 3304297 - DNA, 25 bp, Homo sapien
tcttgcaaaacttgtgaccactggg

SEQ ID NO: 3304298 - DNA, 25 bp, Homo sapien
tagtcctgtgtcagactgtcttgca

SEQ ID NO: 3304299 - DNA, 25 bp, Homo sapien
gaatccagtcgccaaacatcagtca

SEQ ID NO: 3304300 - DNA, 25 bp, Homo sapien
tatccagtagccaaacccatcttgg

SEQ ID NO: 3304301 - DNA, 25 bp, Homo sapien
gaaaccttagtctcagttccactgt

SEQ ID NO: 3304302 - DNA, 25 bp, Homo sapien
tgtgactatgactacccatcagatg

SEQ ID NO: 3304303 - DNA, 25 bp, Homo sapien
tacaatgtatcaggtctagatcaca

SEQ ID NO: 3304304 - DNA, 25 bp, Homo sapien
tcagatgttgggcagatagtggctc

SEQ ID NO: 3304305 - DNA, 25 bp, Homo sapien
gcttgactctttgagagattagctc

SEQ ID NO: 3304306 - DNA, 25 bp, Homo sapien
gagcctgtgccacataattgctatc

SEQ ID NO: 3304307 - DNA, 25 bp, Homo sapien
tatctgtttgcattaccagtgcaac

SEQ ID NO: 3304308 - DNA, 25 bp, Homo sapien
ctggtatcttactaggcttgactct

SEQ ID NO: 3304309 - DNA, 25 bp, Homo sapien
cattagtggaacaataatgtggcaa

SEQ ID NO: 3304310 - DNA, 25 bp, Homo sapien
cactgaggtggttcattagtggaac

SEQ ID NO: 3304311 - DNA, 25 bp, Homo sapien
agtggaacaataatgtggcaaatgc

SEQ ID NO: 3304312 - DNA, 25 bp, Homo sapien
actgaggtggttcattagtggaaca

SEQ ID NO: 3304313 - DNA, 25 bp, Homo sapien
tgtgaaaattactccctaaggctta

SEQ ID NO: 3304314 - DNA, 25 bp, Homo sapien
tgagttctggcaattcaatcctacc

SEQ ID NO: 3304315 - DNA, 25 bp, Homo sapien
gcttaatgcacagattataggactg

SEQ ID NO: 3304316 - DNA, 25 bp, Homo sapien
taatgtacttaccaatgcctactgc

SEQ ID NO: 3304317 - DNA, 25 bp, Homo sapien
tttgctagcaacagcccattcccga

SEQ ID NO: 3304318 - DNA, 25 bp, Homo sapien
attcaggactagaaactttgctagc

SEQ ID NO: 3304319 - DNA, 25 bp, Homo sapien
gcccattcccgatccatattgtcag

SEQ ID NO: 3304320 - DNA, 25 bp, Homo sapien
gactagaaactttgctagcaacagc

SEQ ID NO: 3304321 - DNA, 25 bp, Homo sapien
gcaaaatcttgctccagagggagtt

SEQ ID NO: 3304322 - DNA, 25 bp, Homo sapien
caaaatcttgctccagagggagttc

SEQ ID NO: 3304323 - DNA, 25 bp, Homo sapien
taatctacacccagtacacactcgg

SEQ ID NO: 3304324 - DNA, 25 bp, Homo sapien
tctctgaagagactacagcctatgt

SEQ ID NO: 3304325 - DNA, 25 bp, Homo sapien
tatgtcagtaaaccatcaggcccca

SEQ ID NO: 3304326 - DNA, 25 bp, Homo sapien
cacactcggtaaatgtcactggaga

SEQ ID NO: 3304327 - DNA, 25 bp, Homo sapien
aatactctagaactccctgtggaat

SEQ ID NO: 3304328 - DNA, 25 bp, Homo sapien
cactctgaggttttaggccctccag

SEQ ID NO: 3304329 - DNA, 25 bp, Homo sapien
gaaaccacacttgtacagagggagg

SEQ ID NO: 3304330 - DNA, 25 bp, Homo sapien
ggtaattgcccttggacaacaggag

SEQ ID NO: 3304331 - DNA, 25 bp, Homo sapien
tcgctgggtcccctgccacgccatt

SEQ ID NO: 3304332 - DNA, 25 bp, Homo sapien
cgctgggtcccctgccacgccattt

SEQ ID NO: 3304333 - DNA, 25 bp, Homo sapien
aaatccctctgggctcgctgggtcc

SEQ ID NO: 3304334 - DNA, 25 bp, Homo sapien
gcaaaatccctctgggctcgctggg

SEQ ID NO: 3304335 - DNA, 25 bp, Homo sapien
gcctgtgacaaagcccaaggagttc

SEQ ID NO: 3304336 - DNA, 25 bp, Homo sapien
ggcagacatcaatccagaaaggcgg

SEQ ID NO: 3304337 - DNA, 25 bp, Homo sapien
agttacaggcagacatcaatccaga

SEQ ID NO: 3304338 - DNA, 25 bp, Homo sapien
ctgtgcccaaggcggttggtttaca

SEQ ID NO: 3304339 - DNA, 25 bp, Homo sapien
taagagatcttcaaataccgatgtg

SEQ ID NO: 3304340 - DNA, 25 bp, Homo sapien
tcatcaggaataaaccaattgccat

SEQ ID NO: 3304341 - DNA, 25 bp, Homo sapien
tacaacaaaattagcagagcatgat

SEQ ID NO: 3304342 - DNA, 25 bp, Homo sapien
cactggattcacacaataaggttta

SEQ ID NO: 3304343 - DNA, 25 bp, Homo sapien
agggcagaaagaccgctaagccgca

SEQ ID NO: 3304344 - DNA, 25 bp, Homo sapien
cagcttgaattagttgaaatgccca

SEQ ID NO: 3304345 - DNA, 25 bp, Homo sapien
gatgtcgtcacattggtaaaccgta

SEQ ID NO: 3304346 - DNA, 25 bp, Homo sapien
ctagagagacttcatgaaacgtgca

SEQ ID NO: 3304347 - DNA, 25 bp, Homo sapien
taacaggatgtttaaacggagtggc

SEQ ID NO: 3304348 - DNA, 25 bp, Homo sapien
gatttatgggagagcaatgcacttc

SEQ ID NO: 3304349 - DNA, 25 bp, Homo sapien
cagctaagaacggaggcaagctttc

SEQ ID NO: 3304350 - DNA, 25 bp, Homo sapien
ctttattgagtgctaatgggcgcca

SEQ ID NO: 3304351 - DNA, 25 bp, Homo sapien
gcagtcggtcatatgaaaatccagg

SEQ ID NO: 3304352 - DNA, 25 bp, Homo sapien
gaaagtcagagggtcttggttcaaa

SEQ ID NO: 3304353 - DNA, 25 bp, Homo sapien
taatctagctggaaactccaggagc

SEQ ID NO: 3304354 - DNA, 25 bp, Homo sapien
taccactactggagcctaatctagc

SEQ ID NO: 3304355 - DNA, 25 bp, Homo sapien
caaggtcagaactgctcccagactg

SEQ ID NO: 3304356 - DNA, 25 bp, Homo sapien
caacaatcaaggtcagaactgctcc

SEQ ID NO: 3304357 - DNA, 25 bp, Homo sapien
caatcaaggtcagaactgctcccag

SEQ ID NO: 3304358 - DNA, 25 bp, Homo sapien
tcccagactgaggagcagaaattcc

SEQ ID NO: 3304359 - DNA, 25 bp, Homo sapien
atgcaatcatagctcccttcagcct

SEQ ID NO: 3304360 - DNA, 25 bp, Homo sapien
acataccactatgctcaatttattt

SEQ ID NO: 3304361 - DNA, 25 bp, Homo sapien
aggcacataccactatgctcaattt

SEQ ID NO: 3304362 - DNA, 25 bp, Homo sapien
gcacataccactatgctcaatttat

SEQ ID NO: 3304363 - DNA, 25 bp, Homo sapien
tactggccacgcactttgagatgat

SEQ ID NO: 3304364 - DNA, 25 bp, Homo sapien
tagtagcctttaagcctagtccatg

SEQ ID NO: 3304365 - DNA, 25 bp, Homo sapien
tgtacctgggtatattcctctggga

SEQ ID NO: 3304366 - DNA, 25 bp, Homo sapien
gataacaaagacctatggaactgac

SEQ ID NO: 3304367 - DNA, 25 bp, Homo sapien
gatttttgcatctctgtccatcaag

SEQ ID NO: 3304368 - DNA, 25 bp, Homo sapien
tttgcatctctgtccatcaaggata

SEQ ID NO: 3304369 - DNA, 25 bp, Homo sapien
gcacccggcctattatctttttgat

SEQ ID NO: 3304370 - DNA, 25 bp, Homo sapien
gagactacaggggccggccaccgcg

SEQ ID NO: 3304371 - DNA, 25 bp, Homo sapien
tgttttgcagcctatcatatggcat

SEQ ID NO: 3304372 - DNA, 25 bp, Homo sapien
gcagcctatcatatggcatctcttg

SEQ ID NO: 3304373 - DNA, 25 bp, Homo sapien
tttgcagcctatcatatggcatctc

SEQ ID NO: 3304374 - DNA, 25 bp, Homo sapien
agcctatcatatggcatctcttgga

SEQ ID NO: 3304375 - DNA, 25 bp, Homo sapien
tttaagcaggagcaacagcactgcc

SEQ ID NO: 3304376 - DNA, 25 bp, Homo sapien
tgatcgttgcacgtacaagctcccc

SEQ ID NO: 3304377 - DNA, 25 bp, Homo sapien
tacgcttggcttagatgtttgtccc

SEQ ID NO: 3304378 - DNA, 25 bp, Homo sapien
tacatctggctacaaatacctggct

SEQ ID NO: 3304379 - DNA, 25 bp, Homo sapien
catattctctgcaccaactctcaag

SEQ ID NO: 3304380 - DNA, 25 bp, Homo sapien
gaccagaggtggctctaagttttcc

SEQ ID NO: 3304381 - DNA, 25 bp, Homo sapien
agcctattgtctccgggctcgatga

SEQ ID NO: 3304382 - DNA, 25 bp, Homo sapien
cacactgcatcaatcctgggacatt

SEQ ID NO: 3304383 - DNA, 25 bp, Homo sapien
gccccatggactcaaccttatttgc

SEQ ID NO: 3304384 - DNA, 25 bp, Homo sapien
tgtggacttcatgccccatggactc

SEQ ID NO: 3304385 - DNA, 25 bp, Homo sapien
catggactcaaccttatttgcttcc

SEQ ID NO: 3304386 - DNA, 25 bp, Homo sapien
ctctgtggacttcatgccccatgga

SEQ ID NO: 3304387 - DNA, 25 bp, Homo sapien
tgtgatctaccaaattcccagggct

SEQ ID NO: 3304388 - DNA, 25 bp, Homo sapien
tataatctggtacaagacacgtcaa

SEQ ID NO: 3304389 - DNA, 25 bp, Homo sapien
tatggccactgtgctcttagggaat

SEQ ID NO: 3304390 - DNA, 25 bp, Homo sapien
gaagattcctatcaagtctatggcc

SEQ ID NO: 3304391 - DNA, 25 bp, Homo sapien
gggctactgtacatctaaactactt

SEQ ID NO: 3304392 - DNA, 25 bp, Homo sapien
gagacctactaagtaactaatggga

SEQ ID NO: 3304393 - DNA, 25 bp, Homo sapien
gctggacagcatgcgatttcatcat

SEQ ID NO: 3304394 - DNA, 25 bp, Homo sapien
gaaaccacggatagtactgaatcat

SEQ ID NO: 3304395 - DNA, 25 bp, Homo sapien
caaggtccctctaaaacatcagtga

SEQ ID NO: 3304396 - DNA, 25 bp, Homo sapien
aaggtccctctaaaacatcagtgat

SEQ ID NO: 3304397 - DNA, 25 bp, Homo sapien
tcaaggtccctctaaaacatcagtg

SEQ ID NO: 3304398 - DNA, 25 bp, Homo sapien
ccccaagtctcttgtaacttctcca

SEQ ID NO: 3304399 - DNA, 25 bp, Homo sapien
ttctttctactttcatggttttgct

SEQ ID NO: 3304400 - DNA, 25 bp, Homo sapien
cccaagtctcttgtaacttctccat

SEQ ID NO: 3304401 - DNA, 25 bp, Homo sapien
tcatggttttgctcaattccttccc

SEQ ID NO: 3304402 - DNA, 25 bp, Homo sapien
aaacaaacaatcaacgcagtaaaca

SEQ ID NO: 3304403 - DNA, 25 bp, Homo sapien
gataattaaagagcaatatgcagaa

SEQ ID NO: 3304404 - DNA, 25 bp, Homo sapien
acaaacaatcaacgcagtaaacaga

SEQ ID NO: 3304405 - DNA, 25 bp, Homo sapien
gctgggataattaaagagcaatatg

SEQ ID NO: 3304406 - DNA, 25 bp, Homo sapien
ctccattatgtggttgtccatgggt

SEQ ID NO: 3304407 - DNA, 25 bp, Homo sapien
tccatgggtccaacataaaatactg

SEQ ID NO: 3304408 - DNA, 25 bp, Homo sapien
aagttgctatattgctgcaaggagc

SEQ ID NO: 3304409 - DNA, 25 bp, Homo sapien
cccgccatttctaagttgctatatt

SEQ ID NO: 3304410 - DNA, 25 bp, Homo sapien
tttctaagttgctatattgctgcaa

SEQ ID NO: 3304411 - DNA, 25 bp, Homo sapien
cgccatttctaagttgctatattgc

SEQ ID NO: 3304412 - DNA, 25 bp, Homo sapien
ttcaaagaccaaagcgccccgtgag

SEQ ID NO: 3304413 - DNA, 25 bp, Homo sapien
aaacaaggctgagaggcagcgaaga

SEQ ID NO: 3304414 - DNA, 25 bp, Homo sapien
tcaaagaccaaagcgccccgtgaga

SEQ ID NO: 3304415 - DNA, 25 bp, Homo sapien
ccccgtgagaatatagaaacaaggc

SEQ ID NO: 3304416 - DNA, 25 bp, Homo sapien
agaagtgtgggggtcgtcggctgca

SEQ ID NO: 3304417 - DNA, 25 bp, Homo sapien
ccctagggtcatagttttgattctg

SEQ ID NO: 3304418 - DNA, 25 bp, Homo sapien
cactccctagggtcatagttttgat

SEQ ID NO: 3304419 - DNA, 25 bp, Homo sapien
cctcactccctagggtcatagtttt

SEQ ID NO: 3304420 - DNA, 25 bp, Homo sapien
ctaaaagttggagttcaccacactg

SEQ ID NO: 3304421 - DNA, 25 bp, Homo sapien
aaagttggagttcaccacactgcag

SEQ ID NO: 3304422 - DNA, 25 bp, Homo sapien
taaaagttggagttcaccacactgc

SEQ ID NO: 3304423 - DNA, 25 bp, Homo sapien
aaaagttggagttcaccacactgca

SEQ ID NO: 3304424 - DNA, 25 bp, Homo sapien
ctggcgacctcgtccctagggagga

SEQ ID NO: 3304425 - DNA, 25 bp, Homo sapien
agcctctggctagtccgaagaacgc

SEQ ID NO: 3304426 - DNA, 25 bp, Homo sapien
aagaacgcgaaaagccaggcccaag

SEQ ID NO: 3304427 - DNA, 25 bp, Homo sapien
gctcggtcaccaacctgagcctctg

SEQ ID NO: 3304428 - DNA, 25 bp, Homo sapien
tcggggtgggagatctgcggtcctc

SEQ ID NO: 3304429 - DNA, 25 bp, Homo sapien
ccaggcgggccaatgaggtcgaggg

SEQ ID NO: 3304430 - DNA, 25 bp, Homo sapien
ctggatgccaggcgggccaatgagg

SEQ ID NO: 3304431 - DNA, 25 bp, Homo sapien
cagtgccggggaatggttgagtgac

SEQ ID NO: 3304432 - DNA, 25 bp, Homo sapien
gtggtgcgagtagctccagcggcca

SEQ ID NO: 3304433 - DNA, 25 bp, Homo sapien
tggtgcgagtagctccagcggccac

SEQ ID NO: 3304434 - DNA, 25 bp, Homo sapien
gagccccagtggtgcgagtagctcc

SEQ ID NO: 3304435 - DNA, 25 bp, Homo sapien
cccagtggtgcgagtagctccagcg

SEQ ID NO: 3304436 - DNA, 25 bp, Homo sapien
gaccgtcgtgctggcgagccgtgct

SEQ ID NO: 3304437 - DNA, 25 bp, Homo sapien
ctggagaccgtcgtgctggcgagcc

SEQ ID NO: 3304438 - DNA, 25 bp, Homo sapien
gtagctccccggtccgcctcggcag

SEQ ID NO: 3304439 - DNA, 25 bp, Homo sapien
gctggcgagccgtgctccgtagctc

SEQ ID NO: 3304440 - DNA, 25 bp, Homo sapien
agccgcccgcgccagaaggttttgg

SEQ ID NO: 3304441 - DNA, 25 bp, Homo sapien
gcgtcgagcacagtagggcggcggg

SEQ ID NO: 3304442 - DNA, 25 bp, Homo sapien
gggtcaggcagtcggccgggatcgc

SEQ ID NO: 3304443 - DNA, 25 bp, Homo sapien
aaggttttggcgaagctcttggaga

SEQ ID NO: 3304444 - DNA, 25 bp, Homo sapien
tgacattgccccgtcgtgcttgcac

SEQ ID NO: 3304445 - DNA, 25 bp, Homo sapien
gagtgacattgccccgtcgtgcttg

SEQ ID NO: 3304446 - DNA, 25 bp, Homo sapien
attgccccgtcgtgcttgcacagct

SEQ ID NO: 3304447 - DNA, 25 bp, Homo sapien
acagctccgctctgtgcgtgcttaa

SEQ ID NO: 3304448 - DNA, 25 bp, Homo sapien
gagatttacagcaatacagttttca

SEQ ID NO: 3304449 - DNA, 25 bp, Homo sapien
acagttttcattggccatacacgta

SEQ ID NO: 3304450 - DNA, 25 bp, Homo sapien
ccaactaatctgttcgacagccttg

SEQ ID NO: 3304451 - DNA, 25 bp, Homo sapien
tacacgtatatgatcgacaccaccg

SEQ ID NO: 3304452 - DNA, 25 bp, Homo sapien
caaacttccagacattcttccccat

SEQ ID NO: 3304453 - DNA, 25 bp, Homo sapien
acaaacttccagacattcttcccca

SEQ ID NO: 3304454 - DNA, 25 bp, Homo sapien
gcacaaacttccagacattcttccc

SEQ ID NO: 3304455 - DNA, 25 bp, Homo sapien
ctgcacaaacttccagacattcttc

SEQ ID NO: 3304456 - DNA, 25 bp, Homo sapien
attcccttgttatcttcggagctaa

SEQ ID NO: 3304457 - DNA, 25 bp, Homo sapien
tgttatcttcggagctaatgatctg

SEQ ID NO: 3304458 - DNA, 25 bp, Homo sapien
cccttgttatcttcggagctaatga

SEQ ID NO: 3304459 - DNA, 25 bp, Homo sapien
tcttcggagctaatgatctgaagtg

SEQ ID NO: 3304460 - DNA, 25 bp, Homo sapien
ttagagctatctaaccagttctcag

SEQ ID NO: 3304461 - DNA, 25 bp, Homo sapien
actttggaaatttgctacagggtag

SEQ ID NO: 3304462 - DNA, 25 bp, Homo sapien
cagttctcagacatattactttgga

SEQ ID NO: 3304463 - DNA, 25 bp, Homo sapien
cagggtagtccttcacacaagtcat

SEQ ID NO: 3304464 - DNA, 25 bp, Homo sapien
ggacttgctttgtacagctgacaga

SEQ ID NO: 3304465 - DNA, 25 bp, Homo sapien
catatcgtcgttgtcaccctgaggc

SEQ ID NO: 3304466 - DNA, 25 bp, Homo sapien
ggagcatttaggaaattgccaccac

SEQ ID NO: 3304467 - DNA, 25 bp, Homo sapien
ccctgaggcagtaacagtgcggact

SEQ ID NO: 3304468 - DNA, 25 bp, Homo sapien
cctccttgccagtctactcgtccca

SEQ ID NO: 3304469 - DNA, 25 bp, Homo sapien
cagtctactcgtcccacatgtgttc

SEQ ID NO: 3304470 - DNA, 25 bp, Homo sapien
tctactcgtcccacatgtgttcttt

SEQ ID NO: 3304471 - DNA, 25 bp, Homo sapien
ttgccagtctactcgtcccacatgt

SEQ ID NO: 3304472 - DNA, 25 bp, Homo sapien
tcaaaagcgtctttcagtgaccaaa

SEQ ID NO: 3304473 - DNA, 25 bp, Homo sapien
gtttctgactccaaacagagttgtt

SEQ ID NO: 3304474 - DNA, 25 bp, Homo sapien
taaaatggcaaaacagatccagaga

SEQ ID NO: 3304475 - DNA, 25 bp, Homo sapien
caggaaattatgagtcagatgcagc

SEQ ID NO: 3304476 - DNA, 25 bp, Homo sapien
gataaatccttaagtcagcccagtg

SEQ ID NO: 3304477 - DNA, 25 bp, Homo sapien
cactgtgacattggttcctacaaaa

SEQ ID NO: 3304478 - DNA, 25 bp, Homo sapien
aaactgtctgggcaaaacccctctg

SEQ ID NO: 3304479 - DNA, 25 bp, Homo sapien
aaagtatgcaattcaccatcaccgc

SEQ ID NO: 3304480 - DNA, 25 bp, Homo sapien
catttggtggaccaaatttggtagt

SEQ ID NO: 3304481 - DNA, 25 bp, Homo sapien
gccattatcatacatttctaacatg

SEQ ID NO: 3304482 - DNA, 25 bp, Homo sapien
cccttcatttggtggaccaaatttg

SEQ ID NO: 3304483 - DNA, 25 bp, Homo sapien
tctcccccttcatttggtggaccaa

SEQ ID NO: 3304484 - DNA, 25 bp, Homo sapien
aagatatcaactgccagcctggaga

SEQ ID NO: 3304485 - DNA, 25 bp, Homo sapien
ttccgctagccaagaacctatatgg

SEQ ID NO: 3304486 - DNA, 25 bp, Homo sapien
acctatatggccttcttttggacaa

SEQ ID NO: 3304487 - DNA, 25 bp, Homo sapien
tgaacatgtactggtttatgtggac

SEQ ID NO: 3304488 - DNA, 25 bp, Homo sapien
cagcattgactggaacacagcaagg

SEQ ID NO: 3304489 - DNA, 25 bp, Homo sapien
tggagttgcttagcttcaagaagac

SEQ ID NO: 3304490 - DNA, 25 bp, Homo sapien
gacacaatggcgtccttcacaggga

SEQ ID NO: 3304491 - DNA, 25 bp, Homo sapien
cagggagtgccgtatttagagtgtc

SEQ ID NO: 3304492 - DNA, 25 bp, Homo sapien
taaagatcacagagcagcaagttca

SEQ ID NO: 3304493 - DNA, 25 bp, Homo sapien
tgatagcagacattgttacaaggac

SEQ ID NO: 3304494 - DNA, 25 bp, Homo sapien
ccaaacaatgcagatcttagggatg

SEQ ID NO: 3304495 - DNA, 25 bp, Homo sapien
tatgtcctgacacgtcttcaagcag

SEQ ID NO: 3304496 - DNA, 25 bp, Homo sapien
accaaactataaccatattccaaag

SEQ ID NO: 3304497 - DNA, 25 bp, Homo sapien
tattccaaaggttgtgctaagcaaa

SEQ ID NO: 3304498 - DNA, 25 bp, Homo sapien
caaactataaccatattccaaaggt

SEQ ID NO: 3304499 - DNA, 25 bp, Homo sapien
aggttgtgctaagcaaaacctcagg

SEQ ID NO: 3304500 - DNA, 25 bp, Homo sapien
gctgaatgatcctcgacgcaaaggg

SEQ ID NO: 3304501 - DNA, 25 bp, Homo sapien
caatgggaaggttgcctagagacca

SEQ ID NO: 3304502 - DNA, 25 bp, Homo sapien
gaaagtacatgtcaaggccaatggg

SEQ ID NO: 3304503 - DNA, 25 bp, Homo sapien
tattaaagtagaatgcaggctgggc

SEQ ID NO: 3304504 - DNA, 25 bp, Homo sapien
gaatgcaacttactcaaatcggact

SEQ ID NO: 3304505 - DNA, 25 bp, Homo sapien
tctgagtttcatataggtcccagct

SEQ ID NO: 3304506 - DNA, 25 bp, Homo sapien
taaagataacgtggccttctgaaca

SEQ ID NO: 3304507 - DNA, 25 bp, Homo sapien
catccttggaacgtcctaactgttg

SEQ ID NO: 3304508 - DNA, 25 bp, Homo sapien
gtgagactgtgggaaaccaggccct

SEQ ID NO: 3304509 - DNA, 25 bp, Homo sapien
gcactgctgtacaacgttgccagat

SEQ ID NO: 3304510 - DNA, 25 bp, Homo sapien
gctgaaagctatctaagtgtccatg

SEQ ID NO: 3304511 - DNA, 25 bp, Homo sapien
catacatttcggtaagcaattggct

SEQ ID NO: 3304512 - DNA, 25 bp, Homo sapien
ctttactggccactgaaaaagaagg

SEQ ID NO: 3304513 - DNA, 25 bp, Homo sapien
tggcagacttctgtgcaacctgagt

SEQ ID NO: 3304514 - DNA, 25 bp, Homo sapien
tgtggcaatccattggccctggtgg

SEQ ID NO: 3304515 - DNA, 25 bp, Homo sapien
gaagtcgatttcctcgtatggcaga

SEQ ID NO: 3304516 - DNA, 25 bp, Homo sapien
gatgtggccaactggctcgagagcc

SEQ ID NO: 3304517 - DNA, 25 bp, Homo sapien
tatcagctggaagagtccataggcc

SEQ ID NO: 3304518 - DNA, 25 bp, Homo sapien
caagtgctcagcagtgaaagataac

SEQ ID NO: 3304519 - DNA, 25 bp, Homo sapien
agataactggagcatggtgatgcac

SEQ ID NO: 3304520 - DNA, 25 bp, Homo sapien
gaaactcaacatctggaccaagtgc

SEQ ID NO: 3304521 - DNA, 25 bp, Homo sapien
tgaattccaagatcctttcgccagg

SEQ ID NO: 3304522 - DNA, 25 bp, Homo sapien
gaaaacccgtgacatggccaatcaa

SEQ ID NO: 3304523 - DNA, 25 bp, Homo sapien
ggtgggtaaaaagtgccagcagaaa

SEQ ID NO: 3304524 - DNA, 25 bp, Homo sapien
tcagaagggtgatgtctgaattcca

SEQ ID NO: 3304525 - DNA, 25 bp, Homo sapien
caccagaaggaggaccccaccaaca

SEQ ID NO: 3304526 - DNA, 25 bp, Homo sapien
gaccaccagaaggaggaccccacca

SEQ ID NO: 3304527 - DNA, 25 bp, Homo sapien
cagaaggaggaccccaccaacaacg

SEQ ID NO: 3304528 - DNA, 25 bp, Homo sapien
ctgcgaccaccagaaggaggacccc

SEQ ID NO: 3304529 - DNA, 25 bp, Homo sapien
tctgtaattcacatagacaccaaag

SEQ ID NO: 3304530 - DNA, 25 bp, Homo sapien
atctgtaattcacatagacaccaaa

SEQ ID NO: 3304531 - DNA, 25 bp, Homo sapien
ctccatttcccaggcccatacagac

SEQ ID NO: 3304532 - DNA, 25 bp, Homo sapien
tcctccatttcccaggcccatacag

SEQ ID NO: 3304533 - DNA, 25 bp, Homo sapien
cattactgttagtcctccatttccc

SEQ ID NO: 3304534 - DNA, 25 bp, Homo sapien
agtcctccatttcccaggcccatac

SEQ ID NO: 3304535 - DNA, 25 bp, Homo sapien
taaggaatggtgagattctgctgaa

SEQ ID NO: 3304536 - DNA, 25 bp, Homo sapien
cggccacggtggaacaggttgtcat

SEQ ID NO: 3304537 - DNA, 25 bp, Homo sapien
agagtggcatcattcccagggcggc

SEQ ID NO: 3304538 - DNA, 25 bp, Homo sapien
caggaccaggtgtagagataaatgc

SEQ ID NO: 3304539 - DNA, 25 bp, Homo sapien
taaaaggcatgagcccaaactggca

SEQ ID NO: 3304540 - DNA, 25 bp, Homo sapien
gcagcagcccatgatgagaacagca

SEQ ID NO: 3304541 - DNA, 25 bp, Homo sapien
cagcaatagcttggactggcttcag

SEQ ID NO: 3304542 - DNA, 25 bp, Homo sapien
tgatgtgcgaccacagcttccggat

SEQ ID NO: 3304543 - DNA, 25 bp, Homo sapien
tgcaacgaagtcacacatggagaat

SEQ ID NO: 3304544 - DNA, 25 bp, Homo sapien
acaatggctgggcaggtctatcctg

SEQ ID NO: 3304545 - DNA, 25 bp, Homo sapien
ggcagcattacaaatgaacatcggc

SEQ ID NO: 3304546 - DNA, 25 bp, Homo sapien
cacattttgtaatagtgcaacgaag

SEQ ID NO: 3304547 - DNA, 25 bp, Homo sapien
acatttacagaagccgggcagagtg

SEQ ID NO: 3304548 - DNA, 25 bp, Homo sapien
atacatttacagaagccgggcagag

SEQ ID NO: 3304549 - DNA, 25 bp, Homo sapien
tacatttacagaagccgggcagagt

SEQ ID NO: 3304550 - DNA, 25 bp, Homo sapien
cttcatctacaatccgcgcttcagg

SEQ ID NO: 3304551 - DNA, 25 bp, Homo sapien
atggctgcagcgcagcgacggccgg

SEQ ID NO: 3304552 - DNA, 25 bp, Homo sapien
aattaagagattttctcggtctctg

SEQ ID NO: 3304553 - DNA, 25 bp, Homo sapien
ttctcggtctctgggcgggccgtgg

SEQ ID NO: 3304554 - DNA, 25 bp, Homo sapien
ctgaaattgtatggtgaagctatgg

SEQ ID NO: 3304555 - DNA, 25 bp, Homo sapien
tagaaatgtcggattgtgtgaagct

SEQ ID NO: 3304556 - DNA, 25 bp, Homo sapien
tacaaggacctttagcccatcaaaa

SEQ ID NO: 3304557 - DNA, 25 bp, Homo sapien
gctatgggtgatctttactattcag

SEQ ID NO: 3304558 - DNA, 25 bp, Homo sapien
acaccagttagaatgaggatcatta

SEQ ID NO: 3304559 - DNA, 25 bp, Homo sapien
tcatcactggccatcagagaaatgc

SEQ ID NO: 3304560 - DNA, 25 bp, Homo sapien
ccaacaggcacatgaaaaaatgtgc

SEQ ID NO: 3304561 - DNA, 25 bp, Homo sapien
aaatcaaaaccacaatgagatatca

SEQ ID NO: 3304562 - DNA, 25 bp, Homo sapien
tccaccagtgggcattcaaatatct

SEQ ID NO: 3304563 - DNA, 25 bp, Homo sapien
gatctgtcagaactgggtactaacc

SEQ ID NO: 3304564 - DNA, 25 bp, Homo sapien
caaggaacaagagtatgtcagggac

SEQ ID NO: 3304565 - DNA, 25 bp, Homo sapien
ccctccttgggatctcaaagatgca

SEQ ID NO: 3304566 - DNA, 25 bp, Homo sapien
tggaagaggtcttctcaaaccggct

SEQ ID NO: 3304567 - DNA, 25 bp, Homo sapien
tcacttcatactccctttcgagttt

SEQ ID NO: 3304568 - DNA, 25 bp, Homo sapien
agaggtcttctcaaaccggctggcc

SEQ ID NO: 3304569 - DNA, 25 bp, Homo sapien
cttgacacttcagtttacaaagacg

SEQ ID NO: 3304570 - DNA, 25 bp, Homo sapien
agcagtccatctttaatggtggtac

SEQ ID NO: 3304571 - DNA, 25 bp, Homo sapien
tttaatggtggtacattttgtgagc

SEQ ID NO: 3304572 - DNA, 25 bp, Homo sapien
ggtggtacattttgtgagctgcaca

SEQ ID NO: 3304573 - DNA, 25 bp, Homo sapien
ccatctttaatggtggtacattttg

SEQ ID NO: 3304574 - DNA, 25 bp, Homo sapien
gcaagcaatgcaatatcccaaggtt

SEQ ID NO: 3304575 - DNA, 25 bp, Homo sapien
gatattggctaggtttgtggaccag

SEQ ID NO: 3304576 - DNA, 25 bp, Homo sapien
attggctaggtttgtggaccaggtc

SEQ ID NO: 3304577 - DNA, 25 bp, Homo sapien
gcaatgcaatatcccaaggttcctg

SEQ ID NO: 3304578 - DNA, 25 bp, Homo sapien
agcccaggaggtgcacaacattcca

SEQ ID NO: 3304579 - DNA, 25 bp, Homo sapien
aagcccaggaggtgcacaacattcc

SEQ ID NO: 3304580 - DNA, 25 bp, Homo sapien
tcaagcccaggaggtgcacaacatt

SEQ ID NO: 3304581 - DNA, 25 bp, Homo sapien
actcaagcccaggaggtgcacaaca

SEQ ID NO: 3304582 - DNA, 25 bp, Homo sapien
acattataacaactgccccgcaaaa

SEQ ID NO: 3304583 - DNA, 25 bp, Homo sapien
ccccgcaaaatggttttcactgtgt

SEQ ID NO: 3304584 - DNA, 25 bp, Homo sapien
ttctttcttggcactccatacgcca

SEQ ID NO: 3304585 - DNA, 25 bp, Homo sapien
tctttcttggcactccatacgccat

SEQ ID NO: 3304586 - DNA, 25 bp, Homo sapien
tacataggtgcctgatggaatgtca

SEQ ID NO: 3304587 - DNA, 25 bp, Homo sapien
ggaatgtcacagataactctgttca

SEQ ID NO: 3304588 - DNA, 25 bp, Homo sapien
ggtgagttattacggtatgatttcg

SEQ ID NO: 3304589 - DNA, 25 bp, Homo sapien
tacggtatgatttcgttacataggt

SEQ ID NO: 3304590 - DNA, 25 bp, Homo sapien
tgggggcctcggccgcccacagagc

SEQ ID NO: 3304591 - DNA, 25 bp, Homo sapien
gccgcccacagagcccgcggagaag

SEQ ID NO: 3304592 - DNA, 25 bp, Homo sapien
ctgcctccgactcgccaggaatgcg

SEQ ID NO: 3304593 - DNA, 25 bp, Homo sapien
ctcgccaggaatgcgctgtgtgcgc

SEQ ID NO: 3304594 - DNA, 25 bp, Homo sapien
ctccgactcgccaggaatgcgctgt

SEQ ID NO: 3304595 - DNA, 25 bp, Homo sapien
ccgactcgccaggaatgcgctgtgt

SEQ ID NO: 3304596 - DNA, 25 bp, Homo sapien
ccaggggctcggagggtcgcggccg

SEQ ID NO: 3304597 - DNA, 25 bp, Homo sapien
cgctgcgctaagcgcacatggccgc

SEQ ID NO: 3304598 - DNA, 25 bp, Homo sapien
ctgaggtaagagcgcgctgcgctaa

SEQ ID NO: 3304599 - DNA, 25 bp, Homo sapien
gggccgcgccgcaggcacacgcctc

SEQ ID NO: 3304600 - DNA, 25 bp, Homo sapien
tgcgctaagcgcacatggccgcgca

SEQ ID NO: 3304601 - DNA, 25 bp, Homo sapien
gaaccgaagccctgttgccagcgtt

SEQ ID NO: 3304602 - DNA, 25 bp, Homo sapien
tgggaaggacgctttccaatgtagg

SEQ ID NO: 3304603 - DNA, 25 bp, Homo sapien
gatctggacttcgtttgcgggcgcc

SEQ ID NO: 3304604 - DNA, 25 bp, Homo sapien
gggctgcatccaagcgatctggact

SEQ ID NO: 3304605 - DNA, 25 bp, Homo sapien
tgctttgctggcgtcctacacacat

SEQ ID NO: 3304606 - DNA, 25 bp, Homo sapien
gatctggtttttctcacaatgacta

SEQ ID NO: 3304607 - DNA, 25 bp, Homo sapien
aattggttaagagagcattgctgcc

SEQ ID NO: 3304608 - DNA, 25 bp, Homo sapien
tgccatccaggacgacttaagatcc

SEQ ID NO: 3304609 - DNA, 25 bp, Homo sapien
gagagtagagaagctgcccgcccat

SEQ ID NO: 3304610 - DNA, 25 bp, Homo sapien
gaatctaaagctggtgagtcgaaga

SEQ ID NO: 3304611 - DNA, 25 bp, Homo sapien
ggttttggaatctaaagctggtgag

SEQ ID NO: 3304612 - DNA, 25 bp, Homo sapien
taaagctggtgagtcgaagaagcag

SEQ ID NO: 3304613 - DNA, 25 bp, Homo sapien
cccagtgtccccgtaatcagtcggt

SEQ ID NO: 3304614 - DNA, 25 bp, Homo sapien
cagacccttatggtgaatgtcacag

SEQ ID NO: 3304615 - DNA, 25 bp, Homo sapien
tggtctcgctgaatgaagccacaga

SEQ ID NO: 3304616 - DNA, 25 bp, Homo sapien
gtaatcagtcggttcttggtctcgc

SEQ ID NO: 3304617 - DNA, 25 bp, Homo sapien
catgccacacgtagctgctgttaag

SEQ ID NO: 3304618 - DNA, 25 bp, Homo sapien
gaagctacaaagcagcaacatgcca

SEQ ID NO: 3304619 - DNA, 25 bp, Homo sapien
cagcctgggccgcataaaaaggccg

SEQ ID NO: 3304620 - DNA, 25 bp, Homo sapien
ttacagattcgaaaagtacacttgg

SEQ ID NO: 3304621 - DNA, 25 bp, Homo sapien
aagatgattagtcagcaaaccgggg

SEQ ID NO: 3304622 - DNA, 25 bp, Homo sapien
ggttctgattcctgtttgatgaacc

SEQ ID NO: 3304623 - DNA, 25 bp, Homo sapien
gtcatggctccaccgatgtcagtag

SEQ ID NO: 3304624 - DNA, 25 bp, Homo sapien
ctaaattgtcatggctccaccgatg

SEQ ID NO: 3304625 - DNA, 25 bp, Homo sapien
atttgcgacaatcttgcttgcccac

SEQ ID NO: 3304626 - DNA, 25 bp, Homo sapien
ccaccgatgtcagtagtgcaaaatt

SEQ ID NO: 3304627 - DNA, 25 bp, Homo sapien
catctccaacaccgtgttgcggtcc

SEQ ID NO: 3304628 - DNA, 25 bp, Homo sapien
atctccaacaccgtgttgcggtcct

SEQ ID NO: 3304629 - DNA, 25 bp, Homo sapien
agcatctccaacaccgtgttgcggt

SEQ ID NO: 3304630 - DNA, 25 bp, Homo sapien
gcatctccaacaccgtgttgcggtc

SEQ ID NO: 3304631 - DNA, 25 bp, Homo sapien
gacatggtgctgttgtggctgaccc

SEQ ID NO: 3304632 - DNA, 25 bp, Homo sapien
gacaaatgaaacacttaggagcagc

SEQ ID NO: 3304633 - DNA, 25 bp, Homo sapien
tgaaacacttaggagcagcaggaac

SEQ ID NO: 3304634 - DNA, 25 bp, Homo sapien
aggaactctgtgtgagacctgcaca

SEQ ID NO: 3304635 - DNA, 25 bp, Homo sapien
tgccactgccacctaactctgacat

SEQ ID NO: 3304636 - DNA, 25 bp, Homo sapien
gtggacccagccaccagtgccactg

SEQ ID NO: 3304637 - DNA, 25 bp, Homo sapien
accagtgccactgccacctaactct

SEQ ID NO: 3304638 - DNA, 25 bp, Homo sapien
gccaccagtgccactgccacctaac

SEQ ID NO: 3304639 - DNA, 25 bp, Homo sapien
cactacgaactctcccgggctcacg

SEQ ID NO: 3304640 - DNA, 25 bp, Homo sapien
tcactacgaactctcccgggctcac

SEQ ID NO: 3304641 - DNA, 25 bp, Homo sapien
gtcacatgatcctgctgccagcaaa

SEQ ID NO: 3304642 - DNA, 25 bp, Homo sapien
tttgaagtcacatgatcctgctgcc

SEQ ID NO: 3304643 - DNA, 25 bp, Homo sapien
aagtcacatgatcctgctgccagca

SEQ ID NO: 3304644 - DNA, 25 bp, Homo sapien
tgaagtcacatgatcctgctgccag

SEQ ID NO: 3304645 - DNA, 25 bp, Homo sapien
tcaatacctgtgatatgtccgttgt

SEQ ID NO: 3304646 - DNA, 25 bp, Homo sapien
caatacctgtgatatgtccgttgtg

SEQ ID NO: 3304647 - DNA, 25 bp, Homo sapien
gtcaatacctgtgatatgtccgttg

SEQ ID NO: 3304648 - DNA, 25 bp, Homo sapien
tcaaagtgctggaattataggcgtg

SEQ ID NO: 3304649 - DNA, 25 bp, Homo sapien
aattataggcgtgagccacagcgcc

SEQ ID NO: 3304650 - DNA, 25 bp, Homo sapien
cgtgatccacctgccgaggcctctc

SEQ ID NO: 3304651 - DNA, 25 bp, Homo sapien
cacaccatgcctggctaatttttgt

SEQ ID NO: 3304652 - DNA, 25 bp, Homo sapien
cttggtgattattggaactgagggc

SEQ ID NO: 3304653 - DNA, 25 bp, Homo sapien
gatgtgcacttggtgattattggaa

SEQ ID NO: 3304654 - DNA, 25 bp, Homo sapien
aactgagggcaatctgggtatgatc

SEQ ID NO: 3304655 - DNA, 25 bp, Homo sapien
tgcacttggtgattattggaactga

SEQ ID NO: 3304656 - DNA, 25 bp, Homo sapien
aaactggtgcagtgacattattctt

SEQ ID NO: 3304657 - DNA, 25 bp, Homo sapien
tgttccaggcacgataggtgattgg

SEQ ID NO: 3304658 - DNA, 25 bp, Homo sapien
gcacgataggtgattggctctaata

SEQ ID NO: 3304659 - DNA, 25 bp, Homo sapien
cttggagtggaggattcatggactc

SEQ ID NO: 3304660 - DNA, 25 bp, Homo sapien
caatttagactttagctaacagaat

SEQ ID NO: 3304661 - DNA, 25 bp, Homo sapien
aatatttagtaaactgtgactgaat

SEQ ID NO: 3304662 - DNA, 25 bp, Homo sapien
tgtgattgtcttatttcaagtataa

SEQ ID NO: 3304663 - DNA, 25 bp, Homo sapien
ctgtatgaatctgactatgccaggc

SEQ ID NO: 3304664 - DNA, 25 bp, Homo sapien
cagtatagccgtgaatggaaaaaca

SEQ ID NO: 3304665 - DNA, 25 bp, Homo sapien
gatggaaaatggtctaaccacaggg

SEQ ID NO: 3304666 - DNA, 25 bp, Homo sapien
aatgttaggcttatcagcagagggc

SEQ ID NO: 3304667 - DNA, 25 bp, Homo sapien
aaaagggagggtaacactgtgccag

SEQ ID NO: 3304668 - DNA, 25 bp, Homo sapien
tcagccttagaggtagtcatgctgt

SEQ ID NO: 3304669 - DNA, 25 bp, Homo sapien
gcctcagggttgagatctcttccaa

SEQ ID NO: 3304670 - DNA, 25 bp, Homo sapien
tcaccccagtagatggcttccagct

SEQ ID NO: 3304671 - DNA, 25 bp, Homo sapien
tatctgcagcactccagtgaattcc

SEQ ID NO: 3304672 - DNA, 25 bp, Homo sapien
acagacgtgcatcggcacacctggc

SEQ ID NO: 3304673 - DNA, 25 bp, Homo sapien
cagacgtgcatcggcacacctggct

SEQ ID NO: 3304674 - DNA, 25 bp, Homo sapien
ccacaccagggccatggctaatttt

SEQ ID NO: 3304675 - DNA, 25 bp, Homo sapien
agccaccacaccagggccatggcta

SEQ ID NO: 3304676 - DNA, 25 bp, Homo sapien
caccacaccagggccatggctaatt

SEQ ID NO: 3304677 - DNA, 25 bp, Homo sapien
gccaccacaccagggccatggctaa

SEQ ID NO: 3304678 - DNA, 25 bp, Homo sapien
tggcatcggcttatcttcttgggag

SEQ ID NO: 3304679 - DNA, 25 bp, Homo sapien
gtaacatatttgtgtgctagcacat

SEQ ID NO: 3304680 - DNA, 25 bp, Homo sapien
ttctgtgaacttgtatgcttgaggc

SEQ ID NO: 3304681 - DNA, 25 bp, Homo sapien
tctcttataatgtgggtccttgtgt

SEQ ID NO: 3304682 - DNA, 25 bp, Homo sapien
actcactgtcatgaggacaaaccag

SEQ ID NO: 3304683 - DNA, 25 bp, Homo sapien
gacaaaccaggaagatggtgttaaa

SEQ ID NO: 3304684 - DNA, 25 bp, Homo sapien
tggtgttaaaccattcatggaaatc

SEQ ID NO: 3304685 - DNA, 25 bp, Homo sapien
tcaatttgtcagtctcatatatata

SEQ ID NO: 3304686 - DNA, 25 bp, Homo sapien
atgttatttctttgactatatcatc

SEQ ID NO: 3304687 - DNA, 25 bp, Homo sapien
tatttctttgactatatcatctttt

SEQ ID NO: 3304688 - DNA, 25 bp, Homo sapien
ttaatgttatttctttgactatatc

SEQ ID NO: 3304689 - DNA, 25 bp, Homo sapien
gttatttctttgactatatcatctt

SEQ ID NO: 3304690 - DNA, 25 bp, Homo sapien
ctggcctatgtcctcttcttccttt

SEQ ID NO: 3304691 - DNA, 25 bp, Homo sapien
gccgtgcctggcctatgtcctcttc

SEQ ID NO: 3304692 - DNA, 25 bp, Homo sapien
ttctaatttcccctcttgggactca

SEQ ID NO: 3304693 - DNA, 25 bp, Homo sapien
tctaatttcccctcttgggactcac

SEQ ID NO: 3304694 - DNA, 25 bp, Homo sapien
tgctggacccgttgacttcattagg

SEQ ID NO: 3304695 - DNA, 25 bp, Homo sapien
tcattagggatggtaccatgtttga

SEQ ID NO: 3304696 - DNA, 25 bp, Homo sapien
taggtgctgacacttgtacttccat

SEQ ID NO: 3304697 - DNA, 25 bp, Homo sapien
ttccatcctgtcatgctggacccgt

SEQ ID NO: 3304698 - DNA, 25 bp, Homo sapien
tttctgagagacaatgcagctgggt

SEQ ID NO: 3304699 - DNA, 25 bp, Homo sapien
gagctgactcagaatggtgatggaa

SEQ ID NO: 3304700 - DNA, 25 bp, Homo sapien
aacatcccaactgtgtgacgttagg

SEQ ID NO: 3304701 - DNA, 25 bp, Homo sapien
caaacatggtgattcagtgaggatc

SEQ ID NO: 3304702 - DNA, 25 bp, Homo sapien
tagggtgctcttacctccaatcctg

SEQ ID NO: 3304703 - DNA, 25 bp, Homo sapien
gctcccttgagcctgctgatgtgaa

SEQ ID NO: 3304704 - DNA, 25 bp, Homo sapien
gaatcccgagtctataatggcacca

SEQ ID NO: 3304705 - DNA, 25 bp, Homo sapien
tggacacttgaatcagaatcccgag

SEQ ID NO: 3304706 - DNA, 25 bp, Homo sapien
gtggaggttgcggcgagctgagatg

SEQ ID NO: 3304707 - DNA, 25 bp, Homo sapien
aggttgcggcgagctgagatggtgc

SEQ ID NO: 3304708 - DNA, 25 bp, Homo sapien
ggaggttgcggcgagctgagatggt

SEQ ID NO: 3304709 - DNA, 25 bp, Homo sapien
ggtggaggttgcggcgagctgagat

SEQ ID NO: 3304710 - DNA, 25 bp, Homo sapien
cgtcacctagcacattgccttaaga

SEQ ID NO: 3304711 - DNA, 25 bp, Homo sapien
tagccagtcaccattcacgaaataa

SEQ ID NO: 3304712 - DNA, 25 bp, Homo sapien
tttgtcatcaatatggctcgtcacc

SEQ ID NO: 3304713 - DNA, 25 bp, Homo sapien
gtgtgtactggaattatttacttgc

SEQ ID NO: 3304714 - DNA, 25 bp, Homo sapien
ctaagttgaccacagtttgaagagc

SEQ ID NO: 3304715 - DNA, 25 bp, Homo sapien
tcaacatcatttactaagttgacca

SEQ ID NO: 3304716 - DNA, 25 bp, Homo sapien
ttgaccacagtttgaagagccctat

SEQ ID NO: 3304717 - DNA, 25 bp, Homo sapien
catttactaagttgaccacagtttg

SEQ ID NO: 3304718 - DNA, 25 bp, Homo sapien
aacccggaggctagattcaggagac

SEQ ID NO: 3304719 - DNA, 25 bp, Homo sapien
cacttagtagcctgtgacattgagc

SEQ ID NO: 3304720 - DNA, 25 bp, Homo sapien
tctgcgtccctttcaggaaggaagg

SEQ ID NO: 3304721 - DNA, 25 bp, Homo sapien
tttacagcaggaatcgggcagcgac

SEQ ID NO: 3304722 - DNA, 25 bp, Homo sapien
ttctaaattgtaaagcgctccccag

SEQ ID NO: 3304723 - DNA, 25 bp, Homo sapien
gaaatgggaacaatatatctgtttt

SEQ ID NO: 3304724 - DNA, 25 bp, Homo sapien
ggaggttgcaaaaaggctccttgac

SEQ ID NO: 3304725 - DNA, 25 bp, Homo sapien
gggcacagaatctgtttcaatatta

SEQ ID NO: 3304726 - DNA, 25 bp, Homo sapien
cattgccgtattccgtcctgagctg

SEQ ID NO: 3304727 - DNA, 25 bp, Homo sapien
cttgccgcttgggtggcgccagcta

SEQ ID NO: 3304728 - DNA, 25 bp, Homo sapien
cctgagcttaatctcgccgtaaagt

SEQ ID NO: 3304729 - DNA, 25 bp, Homo sapien
agccggcgtgctgagcttgccagcc

SEQ ID NO: 3304730 - DNA, 25 bp, Homo sapien
gactagaggacggaagggtctggaa

SEQ ID NO: 3304731 - DNA, 25 bp, Homo sapien
tgcgtcgtccgcacttgcgcccttt

SEQ ID NO: 3304732 - DNA, 25 bp, Homo sapien
cggacttctcggaagccgaggctct

SEQ ID NO: 3304733 - DNA, 25 bp, Homo sapien
gggaggaggcgctcccctgcgtcgt

SEQ ID NO: 3304734 - DNA, 25 bp, Homo sapien
agtcgctggcgttcccacttttccg

SEQ ID NO: 3304735 - DNA, 25 bp, Homo sapien
cgctggcgttcccacttttccggtg

SEQ ID NO: 3304736 - DNA, 25 bp, Homo sapien
tcaagtcgctggcgttcccactttt

SEQ ID NO: 3304737 - DNA, 25 bp, Homo sapien
caagtcgctggcgttcccacttttc

SEQ ID NO: 3304738 - DNA, 25 bp, Homo sapien
ccctgtgcctgtcgtggagagagat

SEQ ID NO: 3304739 - DNA, 25 bp, Homo sapien
aagtcagacgtttgcctgtgcaccc

SEQ ID NO: 3304740 - DNA, 25 bp, Homo sapien
cccgttgttgggacctgctacttga

SEQ ID NO: 3304741 - DNA, 25 bp, Homo sapien
tacttgagttgcgtaatgagtccca

SEQ ID NO: 3304742 - DNA, 25 bp, Homo sapien
gttaatttctcttgataatgctttt

SEQ ID NO: 3304743 - DNA, 25 bp, Homo sapien
acagagggagaggcgtctttagtat

SEQ ID NO: 3304744 - DNA, 25 bp, Homo sapien
tagtatgggactggttaatttctct

SEQ ID NO: 3304745 - DNA, 25 bp, Homo sapien
cgtgtgtcggtggtccgtagcctcc

SEQ ID NO: 3304746 - DNA, 25 bp, Homo sapien
tcatcccgggaaggcacttggcttt

SEQ ID NO: 3304747 - DNA, 25 bp, Homo sapien
aaattgttatgcagatcatcccggg

SEQ ID NO: 3304748 - DNA, 25 bp, Homo sapien
tgcattaatggagctgcgacgggcc

SEQ ID NO: 3304749 - DNA, 25 bp, Homo sapien
cttgtaaattaaggcgaagacccag

SEQ ID NO: 3304750 - DNA, 25 bp, Homo sapien
gggacagttgcaaagtgagaagagc

SEQ ID NO: 3304751 - DNA, 25 bp, Homo sapien
ctgggacagttgcaaagtgagaaga

SEQ ID NO: 3304752 - DNA, 25 bp, Homo sapien
gacagttgcaaagtgagaagagctc

SEQ ID NO: 3304753 - DNA, 25 bp, Homo sapien
cagttgcaaagtgagaagagctcag

SEQ ID NO: 3304754 - DNA, 25 bp, Homo sapien
ggcgtggagaattttgcttgtgcaa

SEQ ID NO: 3304755 - DNA, 25 bp, Homo sapien
gtggccgtgggttacctctctcaga

SEQ ID NO: 3304756 - DNA, 25 bp, Homo sapien
tcagacctgcgtggtgttggcctct

SEQ ID NO: 3304757 - DNA, 25 bp, Homo sapien
tatttcagagcaaggtcgtgcggtg

SEQ ID NO: 3304758 - DNA, 25 bp, Homo sapien
gattacttgagtggatattccggaa

SEQ ID NO: 3304759 - DNA, 25 bp, Homo sapien
tagctcgcctttcatctttagtggg

SEQ ID NO: 3304760 - DNA, 25 bp, Homo sapien
gcatggccctgtttcagtgtttact

SEQ ID NO: 3304761 - DNA, 25 bp, Homo sapien
tgttgtctcttgtggatgttgggaa

SEQ ID NO: 3304762 - DNA, 25 bp, Homo sapien
tgagacttgcaggtatgttgctgtg

SEQ ID NO: 3304763 - DNA, 25 bp, Homo sapien
acttgcaggtatgttgctgtgaatt

SEQ ID NO: 3304764 - DNA, 25 bp, Homo sapien
gagacttgcaggtatgttgctgtga

SEQ ID NO: 3304765 - DNA, 25 bp, Homo sapien
agacttgcaggtatgttgctgtgaa

SEQ ID NO: 3304766 - DNA, 25 bp, Homo sapien
ttcagatgaacagactagccacttt

SEQ ID NO: 3304767 - DNA, 25 bp, Homo sapien
tactcacaggctaatgttcacaggc

SEQ ID NO: 3304768 - DNA, 25 bp, Homo sapien
caacttaagaactcacgggtgcaag

SEQ ID NO: 3304769 - DNA, 25 bp, Homo sapien
gcttcttacaggtcatgcgtatccc

SEQ ID NO: 3304770 - DNA, 25 bp, Homo sapien
gctttattccgggtgctggagagct

SEQ ID NO: 3304771 - DNA, 25 bp, Homo sapien
ctttattccgggtgctggagagctg

SEQ ID NO: 3304772 - DNA, 25 bp, Homo sapien
gcgggctttattccgggtgctggag

SEQ ID NO: 3304773 - DNA, 25 bp, Homo sapien
ggcaggcgggctttattccgggtgc

SEQ ID NO: 3304774 - DNA, 25 bp, Homo sapien
ccccagaatgccaccgggttgaggg

SEQ ID NO: 3304775 - DNA, 25 bp, Homo sapien
tagtcccggaactccttcaggtagc

SEQ ID NO: 3304776 - DNA, 25 bp, Homo sapien
caggtagctgcggtgcttgcccttg

SEQ ID NO: 3304777 - DNA, 25 bp, Homo sapien
cggaactccttcaggtagctgcggt

SEQ ID NO: 3304778 - DNA, 25 bp, Homo sapien
tccttcaggtagctgcggtgcttgc

SEQ ID NO: 3304779 - DNA, 25 bp, Homo sapien
cagggagaacagggccactgggaga

SEQ ID NO: 3304780 - DNA, 25 bp, Homo sapien
accagggagaacagggccactggga

SEQ ID NO: 3304781 - DNA, 25 bp, Homo sapien
gggagaacagggccactgggagaca

SEQ ID NO: 3304782 - DNA, 25 bp, Homo sapien
ccaccagggagaacagggccactgg

SEQ ID NO: 3304783 - DNA, 25 bp, Homo sapien
tggcgaaaccgatccaggaccccac

SEQ ID NO: 3304784 - DNA, 25 bp, Homo sapien
tgcgtcatgatggcgaaaccgatcc

SEQ ID NO: 3304785 - DNA, 25 bp, Homo sapien
cgtcatgatggcgaaaccgatccag

SEQ ID NO: 3304786 - DNA, 25 bp, Homo sapien
ctgcgtcatgatggcgaaaccgatc

SEQ ID NO: 3304787 - DNA, 25 bp, Homo sapien
gaagagccacgtgaaggggttcttg

SEQ ID NO: 3304788 - DNA, 25 bp, Homo sapien
gagccacgtgaaggggttcttggtg

SEQ ID NO: 3304789 - DNA, 25 bp, Homo sapien
gcaggaagagccacgtgaaggggtt

SEQ ID NO: 3304790 - DNA, 25 bp, Homo sapien
ctcgtaggtgtagttggggcaggac

SEQ ID NO: 3304791 - DNA, 25 bp, Homo sapien
ggatggagaagttgccgagctggca

SEQ ID NO: 3304792 - DNA, 25 bp, Homo sapien
tggatggagaagttgccgagctggc

SEQ ID NO: 3304793 - DNA, 25 bp, Homo sapien
cttgggccagcaccggacaaggcag

SEQ ID NO: 3304794 - DNA, 25 bp, Homo sapien
acttgggccagcaccggacaaggca

SEQ ID NO: 3304795 - DNA, 25 bp, Homo sapien
ggccagcaccggacaaggcagatgc

SEQ ID NO: 3304796 - DNA, 25 bp, Homo sapien
cagcaccggacaaggcagatgctgc

SEQ ID NO: 3304797 - DNA, 25 bp, Homo sapien
tcataatattgaggcagattctttg

SEQ ID NO: 3304798 - DNA, 25 bp, Homo sapien
gattggaatcccttggaattcatca

SEQ ID NO: 3304799 - DNA, 25 bp, Homo sapien
cacagtcttgggtctgttgttgggc

SEQ ID NO: 3304800 - DNA, 25 bp, Homo sapien
gcaactgtggcatattgtttcactg

SEQ ID NO: 3304801 - DNA, 25 bp, Homo sapien
ctgtgcctaggacggcccagcaggt

SEQ ID NO: 3304802 - DNA, 25 bp, Homo sapien
tgctgtgcctaggacggcccagcag

SEQ ID NO: 3304803 - DNA, 25 bp, Homo sapien
aaatgctgtgcctaggacggcccag

SEQ ID NO: 3304804 - DNA, 25 bp, Homo sapien
aatgctgtgcctaggacggcccagc

SEQ ID NO: 3304805 - DNA, 25 bp, Homo sapien
cccaccaagcttatctcttgctgtt

SEQ ID NO: 3304806 - DNA, 25 bp, Homo sapien
caccaagcttatctcttgctgtttt

SEQ ID NO: 3304807 - DNA, 25 bp, Homo sapien
ctctcgttgtgtagtcagctcccca

SEQ ID NO: 3304808 - DNA, 25 bp, Homo sapien
gttgtgtagtcagctccccaccaag

SEQ ID NO: 3304809 - DNA, 25 bp, Homo sapien
gtttcagcatggctacagtagtcag

SEQ ID NO: 3304810 - DNA, 25 bp, Homo sapien
tctgagctctggtttaaaactctga

SEQ ID NO: 3304811 - DNA, 25 bp, Homo sapien
ttgttcctgggagatagtttcagca

SEQ ID NO: 3304812 - DNA, 25 bp, Homo sapien
gagaaacgtgcatcttttccagtga

SEQ ID NO: 3304813 - DNA, 25 bp, Homo sapien
accatgcctgggttgttcttttggt

SEQ ID NO: 3304814 - DNA, 25 bp, Homo sapien
ccatgcctgggttgttcttttggtt

SEQ ID NO: 3304815 - DNA, 25 bp, Homo sapien
gcccatgggtatttgcatacgcctt

SEQ ID NO: 3304816 - DNA, 25 bp, Homo sapien
catgggtatttgcatacgccttccc

SEQ ID NO: 3304817 - DNA, 25 bp, Homo sapien
tgcagcccatgggtatttgcatacg

SEQ ID NO: 3304818 - DNA, 25 bp, Homo sapien
cagcccatgggtatttgcatacgcc

SEQ ID NO: 3304819 - DNA, 25 bp, Homo sapien
cagttgaatcggtttatcaataggg

SEQ ID NO: 3304820 - DNA, 25 bp, Homo sapien
aaaacagttgaatcggtttatcaat

SEQ ID NO: 3304821 - DNA, 25 bp, Homo sapien
tcggtttatcaataggggattagat

SEQ ID NO: 3304822 - DNA, 25 bp, Homo sapien
acagttgaatcggtttatcaatagg

SEQ ID NO: 3304823 - DNA, 25 bp, Homo sapien
gacaaaggagatcctgctttcctgg

SEQ ID NO: 3304824 - DNA, 25 bp, Homo sapien
cataggccctgaggcagtgtgtgct

SEQ ID NO: 3304825 - DNA, 25 bp, Homo sapien
ctaaggttatgttcgagcagagacc

SEQ ID NO: 3304826 - DNA, 25 bp, Homo sapien
cagagacctgaggaagtttgccaga

SEQ ID NO: 3304827 - DNA, 25 bp, Homo sapien
ggaaccagctgttccttgcagatgc

SEQ ID NO: 3304828 - DNA, 25 bp, Homo sapien
cttgcagatgcactgatattaaggg

SEQ ID NO: 3304829 - DNA, 25 bp, Homo sapien
cttggaaccagctgttccttgcaga

SEQ ID NO: 3304830 - DNA, 25 bp, Homo sapien
gatgcactgatattaagggtacaca

SEQ ID NO: 3304831 - DNA, 25 bp, Homo sapien
cagagtgaacaggcagtctgcagaa

SEQ ID NO: 3304832 - DNA, 25 bp, Homo sapien
accatccaaaggtgggtgaaggata

SEQ ID NO: 3304833 - DNA, 25 bp, Homo sapien
gagtgaacaggcagtctgcagaatg

SEQ ID NO: 3304834 - DNA, 25 bp, Homo sapien
agaaacaaacaacaccatccaaagg

SEQ ID NO: 3304835 - DNA, 25 bp, Homo sapien
cagaagtcgtctagctgagcttgaa

SEQ ID NO: 3304836 - DNA, 25 bp, Homo sapien
cgagtgcagggtcatatctcagtcc

SEQ ID NO: 3304837 - DNA, 25 bp, Homo sapien
tgaagattatggactctcgagtgca

SEQ ID NO: 3304838 - DNA, 25 bp, Homo sapien
tatgactgcttcctcaagagtgtaa

SEQ ID NO: 3304839 - DNA, 25 bp, Homo sapien
aacctcttttatgtgtgaggagacc

SEQ ID NO: 3304840 - DNA, 25 bp, Homo sapien
aagtgccagtagttgatgtaacctc

SEQ ID NO: 3304841 - DNA, 25 bp, Homo sapien
caggctaggtatcacagaaagtgcc

SEQ ID NO: 3304842 - DNA, 25 bp, Homo sapien
aacagcacatttacgacaggctagg

SEQ ID NO: 3304843 - DNA, 25 bp, Homo sapien
tcgagagcaggtagtcccgtaacat

SEQ ID NO: 3304844 - DNA, 25 bp, Homo sapien
attagcgcgagccaatacgggccga

SEQ ID NO: 3304845 - DNA, 25 bp, Homo sapien
tcgtctgaagtgcagatcgccgcag

SEQ ID NO: 3304846 - DNA, 25 bp, Homo sapien
cggatgtccatcaggattagcgcga

SEQ ID NO: 3304847 - DNA, 25 bp, Homo sapien
gcctaggggtactgctgaacaaata

SEQ ID NO: 3304848 - DNA, 25 bp, Homo sapien
acaaataatgttcaacaagacattt

SEQ ID NO: 3304849 - DNA, 25 bp, Homo sapien
gaaaagctttgcctaggggtactgc

SEQ ID NO: 3304850 - DNA, 25 bp, Homo sapien
ctttgcctaggggtactgctgaaca

SEQ ID NO: 3304851 - DNA, 25 bp, Homo sapien
tcaggaaacagtctttggtatgtgg

SEQ ID NO: 3304852 - DNA, 25 bp, Homo sapien
gaaacagtctttggtatgtgggtgt

SEQ ID NO: 3304853 - DNA, 25 bp, Homo sapien
tggtatgtgggtgttgtaacttttc

SEQ ID NO: 3304854 - DNA, 25 bp, Homo sapien
tctttggtatgtgggtgttgtaact

SEQ ID NO: 3304855 - DNA, 25 bp, Homo sapien
gattatcacgtgactttcatcctgg

SEQ ID NO: 3304856 - DNA, 25 bp, Homo sapien
tgtttttgtggtcaagacagaccca

SEQ ID NO: 3304857 - DNA, 25 bp, Homo sapien
caggtgtatctgatttactctggac

SEQ ID NO: 3304858 - DNA, 25 bp, Homo sapien
cctccctagctttgcagaaattttg

SEQ ID NO: 3304859 - DNA, 25 bp, Homo sapien
tatatgtgatcttaaaacaccgctc

SEQ ID NO: 3304860 - DNA, 25 bp, Homo sapien
taagtgaagcgtctggaaattatcg

SEQ ID NO: 3304861 - DNA, 25 bp, Homo sapien
gttcgggcaaaaatgcgctgttctc

SEQ ID NO: 3304862 - DNA, 25 bp, Homo sapien
aagtagtggttctgagatctgatca

SEQ ID NO: 3304863 - DNA, 25 bp, Homo sapien
tgtggcaagttactgaaatctgctg

SEQ ID NO: 3304864 - DNA, 25 bp, Homo sapien
gagagcctcaatgcattgtggcaag

SEQ ID NO: 3304865 - DNA, 25 bp, Homo sapien
aaaaaagctgtgaggctctggctag

SEQ ID NO: 3304866 - DNA, 25 bp, Homo sapien
agcattcagtcgttctatttaaaaa

SEQ ID NO: 3304867 - DNA, 25 bp, Homo sapien
tctctatatttaagcgccatcatca

SEQ ID NO: 3304868 - DNA, 25 bp, Homo sapien
caagactcaccattctgttctctat

SEQ ID NO: 3304869 - DNA, 25 bp, Homo sapien
gagtgatggaagatttctgaaccct

SEQ ID NO: 3304870 - DNA, 25 bp, Homo sapien
gaaggtttctttgagtataggtgat

SEQ ID NO: 3304871 - DNA, 25 bp, Homo sapien
atacatatatccatgtggccagtga

SEQ ID NO: 3304872 - DNA, 25 bp, Homo sapien
gcaaaggaaggcatagaaaatggaa

SEQ ID NO: 3304873 - DNA, 25 bp, Homo sapien
catacatatatccatgtggccagtg

SEQ ID NO: 3304874 - DNA, 25 bp, Homo sapien
cagacgtgccggtcataaatgtagc

SEQ ID NO: 3304875 - DNA, 25 bp, Homo sapien
gacgtgccggtcataaatgtagcca

SEQ ID NO: 3304876 - DNA, 25 bp, Homo sapien
gcatctcagacgtgccggtcataaa

SEQ ID NO: 3304877 - DNA, 25 bp, Homo sapien
agtgacagcatctcagacgtgccgg

SEQ ID NO: 3304878 - DNA, 25 bp, Homo sapien
cttgcattaccatatattcatctct

SEQ ID NO: 3304879 - DNA, 25 bp, Homo sapien
taagattagtagtgctaaatgccag

SEQ ID NO: 3304880 - DNA, 25 bp, Homo sapien
atttcagataaagggatacccagtc

SEQ ID NO: 3304881 - DNA, 25 bp, Homo sapien
tggtgtgatcaatgcagtggcccat

SEQ ID NO: 3304882 - DNA, 25 bp, Homo sapien
gaaccagcccttctcacactgaagg

SEQ ID NO: 3304883 - DNA, 25 bp, Homo sapien
tcacctaggttgtctcttgctgaga

SEQ ID NO: 3304884 - DNA, 25 bp, Homo sapien
gttgtgtgtgcttgataatacctca

SEQ ID NO: 3304885 - DNA, 25 bp, Homo sapien
tccttgaggtctcagaccaaagctc

SEQ ID NO: 3304886 - DNA, 25 bp, Homo sapien
ttgaggcactccagaccagtggagt

SEQ ID NO: 3304887 - DNA, 25 bp, Homo sapien
tgggtggctgcaagacgttatcgtc

SEQ ID NO: 3304888 - DNA, 25 bp, Homo sapien
tatcgtccccacagagtatcaggca

SEQ ID NO: 3304889 - DNA, 25 bp, Homo sapien
tgacagttttccacgtgcacagtaa

SEQ ID NO: 3304890 - DNA, 25 bp, Homo sapien
caacctctactatcactcttagcat

SEQ ID NO: 3304891 - DNA, 25 bp, Homo sapien
gccatagataaatgcattcctgttc

SEQ ID NO: 3304892 - DNA, 25 bp, Homo sapien
tctcgctaaattgtggaatccctca

SEQ ID NO: 3304893 - DNA, 25 bp, Homo sapien
taggtctagcacataagaggaagtc

SEQ ID NO: 3304894 - DNA, 25 bp, Homo sapien
tacaaccttgaagtacagaaagcca

SEQ ID NO: 3304895 - DNA, 25 bp, Homo sapien
cggtggctcatgtctataatctcag

SEQ ID NO: 3304896 - DNA, 25 bp, Homo sapien
gggtgcctgtaatcctcaggaggct

SEQ ID NO: 3304897 - DNA, 25 bp, Homo sapien
cactttgggaggctgaggtgggtgg

SEQ ID NO: 3304898 - DNA, 25 bp, Homo sapien
cattttaaaaattagcggctgggca

SEQ ID NO: 3304899 - DNA, 25 bp, Homo sapien
ttggctaccactagaggcttggaat

SEQ ID NO: 3304900 - DNA, 25 bp, Homo sapien
gaggcttggaatacctcttgagatt

SEQ ID NO: 3304901 - DNA, 25 bp, Homo sapien
tagtttagattatggattcattctc

SEQ ID NO: 3304902 - DNA, 25 bp, Homo sapien
catggttgttagtttagattatgga

SEQ ID NO: 3304903 - DNA, 25 bp, Homo sapien
tctcagcctaaatatgatgtatgtg

SEQ ID NO: 3304904 - DNA, 25 bp, Homo sapien
tattggcagcttctcagcctaaata

SEQ ID NO: 3304905 - DNA, 25 bp, Homo sapien
catgtgcatgcacactccatccaag

SEQ ID NO: 3304906 - DNA, 25 bp, Homo sapien
cacactccatccaagatgttatttg

SEQ ID NO: 3304907 - DNA, 25 bp, Homo sapien
tgcagtttctttcggcctcatccag

SEQ ID NO: 3304908 - DNA, 25 bp, Homo sapien
tccgttaatacgatttgagagacag

SEQ ID NO: 3304909 - DNA, 25 bp, Homo sapien
atgtgacagaacaccaccacgctgc

SEQ ID NO: 3304910 - DNA, 25 bp, Homo sapien
gtttatctgactcatatgactgcag

SEQ ID NO: 3304911 - DNA, 25 bp, Homo sapien
tctgcttccgcctgtttcagtgctg

SEQ ID NO: 3304912 - DNA, 25 bp, Homo sapien
tcatgtctagacaaatgcagctgcc

SEQ ID NO: 3304913 - DNA, 25 bp, Homo sapien
tgtctcatagcccagcaaatacagt

SEQ ID NO: 3304914 - DNA, 25 bp, Homo sapien
ccttctaagttatgccaggtagcac

SEQ ID NO: 3304915 - DNA, 25 bp, Homo sapien
tctcccctgttgaaaatgataggtc

SEQ ID NO: 3304916 - DNA, 25 bp, Homo sapien
gaaaacttggtttcagtaggctgct

SEQ ID NO: 3304917 - DNA, 25 bp, Homo sapien
gccaggactgaccatgagactgagt

SEQ ID NO: 3304918 - DNA, 25 bp, Homo sapien
gataggtcttctctgtcattgctag

SEQ ID NO: 3304919 - DNA, 25 bp, Homo sapien
catgctagttagattactgacatcg

SEQ ID NO: 3304920 - DNA, 25 bp, Homo sapien
taattgaaacttgatagtctggcgt

SEQ ID NO: 3304921 - DNA, 25 bp, Homo sapien
gtaaaataaatggtcccatcctgcc

SEQ ID NO: 3304922 - DNA, 25 bp, Homo sapien
gttatgtattgcagatccaggcttg

SEQ ID NO: 3304923 - DNA, 25 bp, Homo sapien
tcttaataaacacttcgagagttct

SEQ ID NO: 3304924 - DNA, 25 bp, Homo sapien
ccagtccattttgaacatggcgatg

SEQ ID NO: 3304925 - DNA, 25 bp, Homo sapien
gcgatgtttcgttgtaaaaaagaca

SEQ ID NO: 3304926 - DNA, 25 bp, Homo sapien
caataaagtattctcgtactcttaa

SEQ ID NO: 3304927 - DNA, 25 bp, Homo sapien
cacctggccgagctttgaggatctt

SEQ ID NO: 3304928 - DNA, 25 bp, Homo sapien
aacacaaaacaagaggcggagccaa

SEQ ID NO: 3304929 - DNA, 25 bp, Homo sapien
tatgtatggacatagcttcttggca

SEQ ID NO: 3304930 - DNA, 25 bp, Homo sapien
ccagattggtatcgaacttgtcacc

SEQ ID NO: 3304931 - DNA, 25 bp, Homo sapien
aatctccccattgcctagagcgctg

SEQ ID NO: 3304932 - DNA, 25 bp, Homo sapien
cgaaagggactctctaacagggcag

SEQ ID NO: 3304933 - DNA, 25 bp, Homo sapien
taaaaaagaagcaccacgagatggc

SEQ ID NO: 3304934 - DNA, 25 bp, Homo sapien
cagagatgatcttgcccttcctaac

SEQ ID NO: 3304935 - DNA, 25 bp, Homo sapien
tcactaagtcagaggtctggtccct

SEQ ID NO: 3304936 - DNA, 25 bp, Homo sapien
tatatgtaaaggacaaggcaccaga

SEQ ID NO: 3304937 - DNA, 25 bp, Homo sapien
tccctcatgtttaggtgaaagccag

SEQ ID NO: 3304938 - DNA, 25 bp, Homo sapien
gatgggagcgatgcttatctctcac

SEQ ID NO: 3304939 - DNA, 25 bp, Homo sapien
gtgaaaggtagtggctgatgaatcc

SEQ ID NO: 3304940 - DNA, 25 bp, Homo sapien
ttattgcattgtacctaaaggagag

SEQ ID NO: 3304941 - DNA, 25 bp, Homo sapien
tacggttgtatatagaggtctgaag

SEQ ID NO: 3304942 - DNA, 25 bp, Homo sapien
actgcatgcttacaattcccaaagg

SEQ ID NO: 3304943 - DNA, 25 bp, Homo sapien
taagaccactcatagtgaggctggc

SEQ ID NO: 3304944 - DNA, 25 bp, Homo sapien
tctattggaaggaggtgtaacggca

SEQ ID NO: 3304945 - DNA, 25 bp, Homo sapien
tatattagtatatcggcctggagag

SEQ ID NO: 3304946 - DNA, 25 bp, Homo sapien
gggaaaccctacagctccttgtgag

SEQ ID NO: 3304947 - DNA, 25 bp, Homo sapien
tgtatgtacgcacgcatgtgtccca

SEQ ID NO: 3304948 - DNA, 25 bp, Homo sapien
ttcagcaatggaactgcaacttggg

SEQ ID NO: 3304949 - DNA, 25 bp, Homo sapien
aattactgtggaataacgtgccagc

SEQ ID NO: 3304950 - DNA, 25 bp, Homo sapien
tgttttggatgatacctgagcaggg

SEQ ID NO: 3304951 - DNA, 25 bp, Homo sapien
tcagaggaggctagtggtacacaag

SEQ ID NO: 3304952 - DNA, 25 bp, Homo sapien
cagtattgatttgaggcccgcggac

SEQ ID NO: 3304953 - DNA, 25 bp, Homo sapien
gacaagatcatccaaagggctctcc

SEQ ID NO: 3304954 - DNA, 25 bp, Homo sapien
taaggtctataagcagcagtctcca

SEQ ID NO: 3304955 - DNA, 25 bp, Homo sapien
aaatagcactgatgtgaccccaact

SEQ ID NO: 3304956 - DNA, 25 bp, Homo sapien
ggaaagagacatagccaatggcatc

SEQ ID NO: 3304957 - DNA, 25 bp, Homo sapien
caatttcaagaagtccttaccaagg

SEQ ID NO: 3304958 - DNA, 25 bp, Homo sapien
tacacatctgatacgagaaaccaca

SEQ ID NO: 3304959 - DNA, 25 bp, Homo sapien
cctggaagagaggtgccaaactgca

SEQ ID NO: 3304960 - DNA, 25 bp, Homo sapien
gaaccagattactgaccagcggtga

SEQ ID NO: 3304961 - DNA, 25 bp, Homo sapien
gaactttagggctggatggatcaac

SEQ ID NO: 3304962 - DNA, 25 bp, Homo sapien
tacagggttaactgcctctggactg

SEQ ID NO: 3304963 - DNA, 25 bp, Homo sapien
cactgcctgacgttaacatctttag

SEQ ID NO: 3304964 - DNA, 25 bp, Homo sapien
ggcataaattcatcagcaccaagta

SEQ ID NO: 3304965 - DNA, 25 bp, Homo sapien
gagttagcccagctaggtcttttgg

SEQ ID NO: 3304966 - DNA, 25 bp, Homo sapien
ttgggcaccagaataacatcagatc

SEQ ID NO: 3304967 - DNA, 25 bp, Homo sapien
gagacacagatccaacaagctccca

SEQ ID NO: 3304968 - DNA, 25 bp, Homo sapien
tattggatccatgacctacatctcg

SEQ ID NO: 3304969 - DNA, 25 bp, Homo sapien
tcgaatttggctagttaaacaggaa

SEQ ID NO: 3304970 - DNA, 25 bp, Homo sapien
agtcaaccacattattggatccatg

SEQ ID NO: 3304971 - DNA, 25 bp, Homo sapien
tattcagcactggatcaaacgcttc

SEQ ID NO: 3304972 - DNA, 25 bp, Homo sapien
aaagattttgcccatcactgttgcg

SEQ ID NO: 3304973 - DNA, 25 bp, Homo sapien
tctgggagtagtaagtgctgccaca

SEQ ID NO: 3304974 - DNA, 25 bp, Homo sapien
ggtcataccgctcaactgaactcag

SEQ ID NO: 3304975 - DNA, 25 bp, Homo sapien
atgaggtctcaactatgttgctcag

SEQ ID NO: 3304976 - DNA, 25 bp, Homo sapien
ggtctcaactatgttgctcagtctg

SEQ ID NO: 3304977 - DNA, 25 bp, Homo sapien
gttttgaactcctggcctcaagtga

SEQ ID NO: 3304978 - DNA, 25 bp, Homo sapien
gaggtctcaactatgttgctcagtc

SEQ ID NO: 3304979 - DNA, 25 bp, Homo sapien
tcaaaccagggatagaaaaagcaaa

SEQ ID NO: 3304980 - DNA, 25 bp, Homo sapien
cctgttttaagtagaacctgaatga

SEQ ID NO: 3304981 - DNA, 25 bp, Homo sapien
tgtctattctaattataagggtcca

SEQ ID NO: 3304982 - DNA, 25 bp, Homo sapien
ggatgttagacatgcccacaccttc

SEQ ID NO: 3304983 - DNA, 25 bp, Homo sapien
gctgtggccctactcaagactcatg

SEQ ID NO: 3304984 - DNA, 25 bp, Homo sapien
tatccagagcaacgaggctgtggcc

SEQ ID NO: 3304985 - DNA, 25 bp, Homo sapien
caattactgaacactacagccaggg

SEQ ID NO: 3304986 - DNA, 25 bp, Homo sapien
gaagcacctcaatggaattcgggaa

SEQ ID NO: 3304987 - DNA, 25 bp, Homo sapien
tgaagcttgctaactccattgcctg

SEQ ID NO: 3304988 - DNA, 25 bp, Homo sapien
cacgctagataaagaagccattcca

SEQ ID NO: 3304989 - DNA, 25 bp, Homo sapien
caactacgtataagcaaccatgaag

SEQ ID NO: 3304990 - DNA, 25 bp, Homo sapien
tggatcatatctctccacgctagat

SEQ ID NO: 3304991 - DNA, 25 bp, Homo sapien
cataaattgggcctcctaaggaagc

SEQ ID NO: 3304992 - DNA, 25 bp, Homo sapien
tactagagcaacagagccaactcct

SEQ ID NO: 3304993 - DNA, 25 bp, Homo sapien
ggagtattcattggtgccactgtac

SEQ ID NO: 3304994 - DNA, 25 bp, Homo sapien
taaggaagccaaggcaattcctcgc

SEQ ID NO: 3304995 - DNA, 25 bp, Homo sapien
attgatgccttcatcatccatttat

SEQ ID NO: 3304996 - DNA, 25 bp, Homo sapien
ttagtgagaggatcaaacatctcca

SEQ ID NO: 3304997 - DNA, 25 bp, Homo sapien
tccatactccctaaatgttcatttc

SEQ ID NO: 3304998 - DNA, 25 bp, Homo sapien
tcatccatttattagtgagaggatc

SEQ ID NO: 3304999 - DNA, 25 bp, Homo sapien
tgtcgccttcgactattcatttctg

SEQ ID NO: 3305000 - DNA, 25 bp, Homo sapien
catttctggtccaaagaaccaactg

SEQ ID NO: 3305001 - DNA, 25 bp, Homo sapien
ccacagagattacacccacatgtcg

SEQ ID NO: 3305002 - DNA, 25 bp, Homo sapien
gaatagcattcaatactgcgaaagg

SEQ ID NO: 3305003 - DNA, 25 bp, Homo sapien
aaaggtaaagccacaaaatagagat

SEQ ID NO: 3305004 - DNA, 25 bp, Homo sapien
aagccacaaaatagagataaatcat

SEQ ID NO: 3305005 - DNA, 25 bp, Homo sapien
ctaaaggtaaagccacaaaatagag

SEQ ID NO: 3305006 - DNA, 25 bp, Homo sapien
gccacaaaatagagataaatcatag

SEQ ID NO: 3305007 - DNA, 25 bp, Homo sapien
gattttgcttgacaatctgttcttt

SEQ ID NO: 3305008 - DNA, 25 bp, Homo sapien
tagtccgaatggagtattcaaagtc

SEQ ID NO: 3305009 - DNA, 25 bp, Homo sapien
taagaaaatcaaccggcaacaatgg

SEQ ID NO: 3305010 - DNA, 25 bp, Homo sapien
ctgctactcaagtgaaggtggtaat

SEQ ID NO: 3305011 - DNA, 25 bp, Homo sapien
aatggtcacaggcatactgatccgc

SEQ ID NO: 3305012 - DNA, 25 bp, Homo sapien
caaaagcttatggaggtgctgcggt

SEQ ID NO: 3305013 - DNA, 25 bp, Homo sapien
tcaatatttagatcactggaggaca

SEQ ID NO: 3305014 - DNA, 25 bp, Homo sapien
tctgcaaaggctcttactgccaggc

SEQ ID NO: 3305015 - DNA, 25 bp, Homo sapien
aagagaggctggacattgtcaacag

SEQ ID NO: 3305016 - DNA, 25 bp, Homo sapien
ttgtcaacagtcaaagtgagccgtg

SEQ ID NO: 3305017 - DNA, 25 bp, Homo sapien
tcaaaatctctaatctcaatcagcg

SEQ ID NO: 3305018 - DNA, 25 bp, Homo sapien
gagccgtgaagaatagacaaacttt

SEQ ID NO: 3305019 - DNA, 25 bp, Homo sapien
aaagaaacatggctctaaagtaggg

SEQ ID NO: 3305020 - DNA, 25 bp, Homo sapien
gacaagagattagctttgagccaac

SEQ ID NO: 3305021 - DNA, 25 bp, Homo sapien
aataacacaagccaataccagcttg

SEQ ID NO: 3305022 - DNA, 25 bp, Homo sapien
gaaacatggctctaaagtagggaat

SEQ ID NO: 3305023 - DNA, 25 bp, Homo sapien
caagctgtacaaatcaatggccggc

SEQ ID NO: 3305024 - DNA, 25 bp, Homo sapien
tcacgtcagctctaaaatgggatct

SEQ ID NO: 3305025 - DNA, 25 bp, Homo sapien
tgaacctcagtgattagcacaagag

SEQ ID NO: 3305026 - DNA, 25 bp, Homo sapien
aacagacgggtcagttacagctcag

SEQ ID NO: 3305027 - DNA, 25 bp, Homo sapien
tgttaactataggatcactttcgcc

SEQ ID NO: 3305028 - DNA, 25 bp, Homo sapien
tacaactggcaatgaggtaagtttg

SEQ ID NO: 3305029 - DNA, 25 bp, Homo sapien
tactgatttactagcggaatggatg

SEQ ID NO: 3305030 - DNA, 25 bp, Homo sapien
caagcatgtgagtaaagcactgtgc

SEQ ID NO: 3305031 - DNA, 25 bp, Homo sapien
ttgcttttaggagaacaacatgatc

SEQ ID NO: 3305032 - DNA, 25 bp, Homo sapien
tttaccctctatgtcctttctccta

SEQ ID NO: 3305033 - DNA, 25 bp, Homo sapien
taccctctatgtcctttctcctaca

SEQ ID NO: 3305034 - DNA, 25 bp, Homo sapien
atttaccctctatgtcctttctcct

SEQ ID NO: 3305035 - DNA, 25 bp, Homo sapien
tcatttaccctctatgtcctttctc

SEQ ID NO: 3305036 - DNA, 25 bp, Homo sapien
tctttccaagcttcatttgcttcaa

SEQ ID NO: 3305037 - DNA, 25 bp, Homo sapien
taatgtgattcctagcttgtttact

SEQ ID NO: 3305038 - DNA, 25 bp, Homo sapien
ttctccatcaccatcactaattgag

SEQ ID NO: 3305039 - DNA, 25 bp, Homo sapien
catcacagagttctccattttcata

SEQ ID NO: 3305040 - DNA, 25 bp, Homo sapien
ggcagaaggtagatgtagacactac

SEQ ID NO: 3305041 - DNA, 25 bp, Homo sapien
ttttcaaagggtagagagaaggcag

SEQ ID NO: 3305042 - DNA, 25 bp, Homo sapien
tcaactgccattgtacagtttgctg

SEQ ID NO: 3305043 - DNA, 25 bp, Homo sapien
gacactacaattcagacgtttttca

SEQ ID NO: 3305044 - DNA, 25 bp, Homo sapien
taccaactgtatgagcttgagcaaa

SEQ ID NO: 3305045 - DNA, 25 bp, Homo sapien
aaatgacaacctgcttagacctcga

SEQ ID NO: 3305046 - DNA, 25 bp, Homo sapien
tcatccaagcctaagtagaccgtat

SEQ ID NO: 3305047 - DNA, 25 bp, Homo sapien
gaagtcagactatggttctaccaca

SEQ ID NO: 3305048 - DNA, 25 bp, Homo sapien
gagacagtcatgtagcagggaaact

SEQ ID NO: 3305049 - DNA, 25 bp, Homo sapien
caatccctaggacctgagagaggct

SEQ ID NO: 3305050 - DNA, 25 bp, Homo sapien
agcagactggagtaagaagctttcc

SEQ ID NO: 3305051 - DNA, 25 bp, Homo sapien
caatgacctgaataagtgtggaagc

SEQ ID NO: 3305052 - DNA, 25 bp, Homo sapien
gccagtaaaggcatatcgatcaaca

SEQ ID NO: 3305053 - DNA, 25 bp, Homo sapien
tgtcataacatgctacagatgtcca

SEQ ID NO: 3305054 - DNA, 25 bp, Homo sapien
gcagacaggtttatagttcaacgca

SEQ ID NO: 3305055 - DNA, 25 bp, Homo sapien
catccgtggcacatcattgtcataa

SEQ ID NO: 3305056 - DNA, 25 bp, Homo sapien
tagagctacccctgaaagttgatgg

SEQ ID NO: 3305057 - DNA, 25 bp, Homo sapien
ggcactttgaaagcacctcttaaag

SEQ ID NO: 3305058 - DNA, 25 bp, Homo sapien
aatctgccggcttcggactaccaaa

SEQ ID NO: 3305059 - DNA, 25 bp, Homo sapien
gatggaagacgtgtgtgcatttacc

SEQ ID NO: 3305060 - DNA, 25 bp, Homo sapien
ttcaacactgataggagacccaatg

SEQ ID NO: 3305061 - DNA, 25 bp, Homo sapien
taactggaagtcagggcgtgctgaa

SEQ ID NO: 3305062 - DNA, 25 bp, Homo sapien
gacttccaacaaattactgccgtga

SEQ ID NO: 3305063 - DNA, 25 bp, Homo sapien
tgcaacagctcgatgtcagagtcct

SEQ ID NO: 3305064 - DNA, 25 bp, Homo sapien
gtttcttaagagtgtatccccatcc

SEQ ID NO: 3305065 - DNA, 25 bp, Homo sapien
tagacacacgaataggtaaccactg

SEQ ID NO: 3305066 - DNA, 25 bp, Homo sapien
gaactgggccacttagtttatcaca

SEQ ID NO: 3305067 - DNA, 25 bp, Homo sapien
tctggtccacaatagatgatgatgg

SEQ ID NO: 3305068 - DNA, 25 bp, Homo sapien
taaagagctgtcatcgtggcggtaa

SEQ ID NO: 3305069 - DNA, 25 bp, Homo sapien
tgcaagtccagtaaagcacgagaca

SEQ ID NO: 3305070 - DNA, 25 bp, Homo sapien
caactgaacccagcacggagtggaa

SEQ ID NO: 3305071 - DNA, 25 bp, Homo sapien
tcacccgattaaacactgccaagag

SEQ ID NO: 3305072 - DNA, 25 bp, Homo sapien
caaaagccgtggaaggttgctcagg

SEQ ID NO: 3305073 - DNA, 25 bp, Homo sapien
tgggcccctcttcgaaagactggga

SEQ ID NO: 3305074 - DNA, 25 bp, Homo sapien
cccaagacgggacggtgttgcgact

SEQ ID NO: 3305075 - DNA, 25 bp, Homo sapien
tcccctacgggagccgggagcataa

SEQ ID NO: 3305076 - DNA, 25 bp, Homo sapien
cggaggtccccataacaaatcttga

SEQ ID NO: 3305077 - DNA, 25 bp, Homo sapien
aaggttgcagccacgttaccacgct

SEQ ID NO: 3305078 - DNA, 25 bp, Homo sapien
gttgattgacctgagagctcgctgc

SEQ ID NO: 3305079 - DNA, 25 bp, Homo sapien
tatgtccatcaaatccccttctgcg

SEQ ID NO: 3305080 - DNA, 25 bp, Homo sapien
acaatatgcatgacttcgatgtaac

SEQ ID NO: 3305081 - DNA, 25 bp, Homo sapien
gaggactccagtgatcgtacattct

SEQ ID NO: 3305082 - DNA, 25 bp, Homo sapien
tataagggtacatagcaaatacaag

SEQ ID NO: 3305083 - DNA, 25 bp, Homo sapien
caatgctgctatggacactcgtgta

SEQ ID NO: 3305084 - DNA, 25 bp, Homo sapien
gcactgtgtaatagaactttttgtg

SEQ ID NO: 3305085 - DNA, 25 bp, Homo sapien
tgtgtaatagaactttttgtgataa

SEQ ID NO: 3305086 - DNA, 25 bp, Homo sapien
ctgtgtaatagaactttttgtgata

SEQ ID NO: 3305087 - DNA, 25 bp, Homo sapien
agcctacatcttatattccatgcat

SEQ ID NO: 3305088 - DNA, 25 bp, Homo sapien
aatcaaaccaaggcaacatagctca

SEQ ID NO: 3305089 - DNA, 25 bp, Homo sapien
tagattaaggaatcgttagataatc

SEQ ID NO: 3305090 - DNA, 25 bp, Homo sapien
taaggaatcgttagataatcaaacc

SEQ ID NO: 3305091 - DNA, 25 bp, Homo sapien
cataaatgaatcatgatggtttctt

SEQ ID NO: 3305092 - DNA, 25 bp, Homo sapien
tgacagcatctaaagaggaattacc

SEQ ID NO: 3305093 - DNA, 25 bp, Homo sapien
cagcatctaaagaggaattaccaga

SEQ ID NO: 3305094 - DNA, 25 bp, Homo sapien
tttaggttgtagaggcatttacatc

SEQ ID NO: 3305095 - DNA, 25 bp, Homo sapien
ctgggctttaggttgtagaggcatt

SEQ ID NO: 3305096 - DNA, 25 bp, Homo sapien
caatatgcacctttattatgggctc

SEQ ID NO: 3305097 - DNA, 25 bp, Homo sapien
tctgggaggagtttactagatgccg

SEQ ID NO: 3305098 - DNA, 25 bp, Homo sapien
tcattcttgatgaagatccacttgt

SEQ ID NO: 3305099 - DNA, 25 bp, Homo sapien
tttagggaaaagcatgtctctagtt

SEQ ID NO: 3305100 - DNA, 25 bp, Homo sapien
aacgtcggcatatgagttgtggcaa

SEQ ID NO: 3305101 - DNA, 25 bp, Homo sapien
tttgggcacagccaaaacgtcggca

SEQ ID NO: 3305102 - DNA, 25 bp, Homo sapien
tgtgagagcaacatcctccagctgg

SEQ ID NO: 3305103 - DNA, 25 bp, Homo sapien
taccttgttgcttttctgatggcaa

SEQ ID NO: 3305104 - DNA, 25 bp, Homo sapien
gcagcctacacaagggttcccaata

SEQ ID NO: 3305105 - DNA, 25 bp, Homo sapien
gggatatgcagcctacacaagggtt

SEQ ID NO: 3305106 - DNA, 25 bp, Homo sapien
tctcatcctcgcttttttcaaatgt

SEQ ID NO: 3305107 - DNA, 25 bp, Homo sapien
tagttactggggatatgcagcctac

SEQ ID NO: 3305108 - DNA, 25 bp, Homo sapien
tctaaaatcatgtgaaggctttgtc

SEQ ID NO: 3305109 - DNA, 25 bp, Homo sapien
ctctaaaatcatgtgaaggctttgt

SEQ ID NO: 3305110 - DNA, 25 bp, Homo sapien
ctaaaatcatgtgaaggctttgtcc

SEQ ID NO: 3305111 - DNA, 25 bp, Homo sapien
aaaagaggacagcacctcctatgaa

SEQ ID NO: 3305112 - DNA, 25 bp, Homo sapien
gaggacagcacctcctatgaagagc

SEQ ID NO: 3305113 - DNA, 25 bp, Homo sapien
aagaggacagcacctcctatgaaga

SEQ ID NO: 3305114 - DNA, 25 bp, Homo sapien
ggacagcacctcctatgaagagcat

SEQ ID NO: 3305115 - DNA, 25 bp, Homo sapien
gagatttaaaatagagtcggtcacc

SEQ ID NO: 3305116 - DNA, 25 bp, Homo sapien
taaagtccagaatagagttgcaccg

SEQ ID NO: 3305117 - DNA, 25 bp, Homo sapien
gaaacttgatctcttagctgtgcac

SEQ ID NO: 3305118 - DNA, 25 bp, Homo sapien
cagattggaatgctacttgaacagt

SEQ ID NO: 3305119 - DNA, 25 bp, Homo sapien
tgttcgtttgactgctgctagtgcc

SEQ ID NO: 3305120 - DNA, 25 bp, Homo sapien
tgctgctagtgccaaaccaatgttt

SEQ ID NO: 3305121 - DNA, 25 bp, Homo sapien
taattaatcttgttcgtttgactgc

SEQ ID NO: 3305122 - DNA, 25 bp, Homo sapien
tgctagtgccaaaccaatgttttta

SEQ ID NO: 3305123 - DNA, 25 bp, Homo sapien
ttatcatgcatacatctctggctgg

SEQ ID NO: 3305124 - DNA, 25 bp, Homo sapien
acatctctggctggagcttatttat

SEQ ID NO: 3305125 - DNA, 25 bp, Homo sapien
gcagcattgattcgaaactattcat

SEQ ID NO: 3305126 - DNA, 25 bp, Homo sapien
ttgcagcattgattcgaaactattc

SEQ ID NO: 3305127 - DNA, 25 bp, Homo sapien
tattctgcatacgatttaaaatcgc

SEQ ID NO: 3305128 - DNA, 25 bp, Homo sapien
tcaaattgaatattctgcatacgat

SEQ ID NO: 3305129 - DNA, 25 bp, Homo sapien
cgctgaggcgcgttcaggaagaaac

SEQ ID NO: 3305130 - DNA, 25 bp, Homo sapien
tacgatttaaaatcgctgaggcgcg

SEQ ID NO: 3305131 - DNA, 25 bp, Homo sapien
ttaatcttgatgctaaaagctcacc

SEQ ID NO: 3305132 - DNA, 25 bp, Homo sapien
gctcattgctgaaactgctgattaa

SEQ ID NO: 3305133 - DNA, 25 bp, Homo sapien
gaatccattctatgcaagccttcac

SEQ ID NO: 3305134 - DNA, 25 bp, Homo sapien
gatctaaaactgaaggtctgagctc

SEQ ID NO: 3305135 - DNA, 25 bp, Homo sapien
cagaaagatattgatatacgatgga

SEQ ID NO: 3305136 - DNA, 25 bp, Homo sapien
gatatacgatggaacaaaaatcatt

SEQ ID NO: 3305137 - DNA, 25 bp, Homo sapien
tatcagacttcttacgacttcatct

SEQ ID NO: 3305138 - DNA, 25 bp, Homo sapien
tggtaagtattccatctatcagact

SEQ ID NO: 3305139 - DNA, 25 bp, Homo sapien
ttggtgaacccagtattcacaaaaa

SEQ ID NO: 3305140 - DNA, 25 bp, Homo sapien
actgggcagagacatgaggttttga

SEQ ID NO: 3305141 - DNA, 25 bp, Homo sapien
ttcacaaaaactgggcagagacatg

SEQ ID NO: 3305142 - DNA, 25 bp, Homo sapien
gtgcttggatttttggtgaacccag

SEQ ID NO: 3305143 - DNA, 25 bp, Homo sapien
aagccaacagcggcaaatttgctgg

SEQ ID NO: 3305144 - DNA, 25 bp, Homo sapien
gaaagccaacagcggcaaatttgct

SEQ ID NO: 3305145 - DNA, 25 bp, Homo sapien
gccaacagcggcaaatttgctggaa

SEQ ID NO: 3305146 - DNA, 25 bp, Homo sapien
tgaaagccaacagcggcaaatttgc

SEQ ID NO: 3305147 - DNA, 25 bp, Homo sapien
gaagccactgtgacgatgtggccat

SEQ ID NO: 3305148 - DNA, 25 bp, Homo sapien
ggaatcccttcgtggccgcacactg

SEQ ID NO: 3305149 - DNA, 25 bp, Homo sapien
ggtaaggaatcccttcgtggccgca

SEQ ID NO: 3305150 - DNA, 25 bp, Homo sapien
ggatgaggtaaggaatcccttcgtg

SEQ ID NO: 3305151 - DNA, 25 bp, Homo sapien
tggatctagaacacttgcctcagag

SEQ ID NO: 3305152 - DNA, 25 bp, Homo sapien
ttctcagttccagcaccccatggat

SEQ ID NO: 3305153 - DNA, 25 bp, Homo sapien
gagtctcgtccaaaagtgtcctcga

SEQ ID NO: 3305154 - DNA, 25 bp, Homo sapien
gtgtcctcgatcctatatacatcca

SEQ ID NO: 3305155 - DNA, 25 bp, Homo sapien
gaagatcggctggatatactgtccc

SEQ ID NO: 3305156 - DNA, 25 bp, Homo sapien
ccaaaaatgtcctaggatgttgacc

SEQ ID NO: 3305157 - DNA, 25 bp, Homo sapien
ggtaatctcttcatccttggtgctg

SEQ ID NO: 3305158 - DNA, 25 bp, Homo sapien
gatgttgacctcaaatgtcttggta

SEQ ID NO: 3305159 - DNA, 25 bp, Homo sapien
acctctctgagtcataatttgctta

SEQ ID NO: 3305160 - DNA, 25 bp, Homo sapien
tccctgatgataaatcttttgtcag

SEQ ID NO: 3305161 - DNA, 25 bp, Homo sapien
ctgcaaagttaataggactaaaaca

SEQ ID NO: 3305162 - DNA, 25 bp, Homo sapien
taaagtttgttagagtgcttagttc

SEQ ID NO: 3305163 - DNA, 25 bp, Homo sapien
gaacaataataatgggcagagctga

SEQ ID NO: 3305164 - DNA, 25 bp, Homo sapien
cattttccacgtcagcgtcctagga

SEQ ID NO: 3305165 - DNA, 25 bp, Homo sapien
tctgaagaaatttgtgaacctgcag

SEQ ID NO: 3305166 - DNA, 25 bp, Homo sapien
aaatccaatttaaatcaggcagtca

SEQ ID NO: 3305167 - DNA, 25 bp, Homo sapien
cctagttttcggcactcagctgcag

SEQ ID NO: 3305168 - DNA, 25 bp, Homo sapien
catgcgcagtgacgcctagttttcg

SEQ ID NO: 3305169 - DNA, 25 bp, Homo sapien
gtctaccacatacgcatgcgcagtg

SEQ ID NO: 3305170 - DNA, 25 bp, Homo sapien
tttagagagcgatagatctcttctc

SEQ ID NO: 3305171 - DNA, 25 bp, Homo sapien
ggtagcttgctcactgccagattgc

SEQ ID NO: 3305172 - DNA, 25 bp, Homo sapien
aaatagccttttgtgggattgcaga

SEQ ID NO: 3305173 - DNA, 25 bp, Homo sapien
caaacatggatgttaggacccagtc

SEQ ID NO: 3305174 - DNA, 25 bp, Homo sapien
ttcgctactgtaggctaaaccctgg

SEQ ID NO: 3305175 - DNA, 25 bp, Homo sapien
ccaatatgctctgtcgttttgcaaa

SEQ ID NO: 3305176 - DNA, 25 bp, Homo sapien
gcaaattcataagtagtctgcctgc

SEQ ID NO: 3305177 - DNA, 25 bp, Homo sapien
cttcaccaacgactccaagtaggag

SEQ ID NO: 3305178 - DNA, 25 bp, Homo sapien
catgcccagctccagtaatgagaac

SEQ ID NO: 3305179 - DNA, 25 bp, Homo sapien
cttccttctggttcagtccttgtgt

SEQ ID NO: 3305180 - DNA, 25 bp, Homo sapien
cctcttccttctggttcagtccttg

SEQ ID NO: 3305181 - DNA, 25 bp, Homo sapien
cttctggttcagtccttgtgtagtc

SEQ ID NO: 3305182 - DNA, 25 bp, Homo sapien
tccttctggttcagtccttgtgtag

SEQ ID NO: 3305183 - DNA, 25 bp, Homo sapien
tgaaagcaaatctgttcccttggga

SEQ ID NO: 3305184 - DNA, 25 bp, Homo sapien
tacgtatagagtaagaagacctcaa

SEQ ID NO: 3305185 - DNA, 25 bp, Homo sapien
ttcagagactattccaggtattggg

SEQ ID NO: 3305186 - DNA, 25 bp, Homo sapien
aatggaatcttgtagggtatggctg

SEQ ID NO: 3305187 - DNA, 25 bp, Homo sapien
tacctaggagtattcatagtagtct

SEQ ID NO: 3305188 - DNA, 25 bp, Homo sapien
ccttatatcccaggtataaagccta

SEQ ID NO: 3305189 - DNA, 25 bp, Homo sapien
agtggttaccctttgtcatcgctga

SEQ ID NO: 3305190 - DNA, 25 bp, Homo sapien
ttacaacttctgtacctaggagtat

SEQ ID NO: 3305191 - DNA, 25 bp, Homo sapien
taatttgattgtttaccaaatagtc

SEQ ID NO: 3305192 - DNA, 25 bp, Homo sapien
gttcctctacatgtgatgttaggtg

SEQ ID NO: 3305193 - DNA, 25 bp, Homo sapien
aactttttgattgggcattttgcac

SEQ ID NO: 3305194 - DNA, 25 bp, Homo sapien
gattgtttaccaaatagtcattcag

SEQ ID NO: 3305195 - DNA, 25 bp, Homo sapien
gaagacaccgtgtcattgagtcttg

SEQ ID NO: 3305196 - DNA, 25 bp, Homo sapien
taggtcttcttattcccattacgta

SEQ ID NO: 3305197 - DNA, 25 bp, Homo sapien
aggtatctcttaggcccatatggtc

SEQ ID NO: 3305198 - DNA, 25 bp, Homo sapien
ttagaagagcaacccgtgatttttg

SEQ ID NO: 3305199 - DNA, 25 bp, Homo sapien
aatttgaaggttgtcatgttctgtt

SEQ ID NO: 3305200 - DNA, 25 bp, Homo sapien
ctttaatttgaaggttgtcatgttc

SEQ ID NO: 3305201 - DNA, 25 bp, Homo sapien
taatttgaaggttgtcatgttctgt

SEQ ID NO: 3305202 - DNA, 25 bp, Homo sapien
ttaatttgaaggttgtcatgttctg

SEQ ID NO: 3305203 - DNA, 25 bp, Homo sapien
gaaacctacccattgagagttcatg

SEQ ID NO: 3305204 - DNA, 25 bp, Homo sapien
gatattcattgtgaaataccactag

SEQ ID NO: 3305205 - DNA, 25 bp, Homo sapien
gcaacacgtgtatccacctctagct

SEQ ID NO: 3305206 - DNA, 25 bp, Homo sapien
gcttccctgtgcagaaatgtttggc

SEQ ID NO: 3305207 - DNA, 25 bp, Homo sapien
gcaaagccttcaggtgagccacaaa

SEQ ID NO: 3305208 - DNA, 25 bp, Homo sapien
tatggtacaaattttgcaaagcctt

SEQ ID NO: 3305209 - DNA, 25 bp, Homo sapien
cattttatttagagagcttgaagtt

SEQ ID NO: 3305210 - DNA, 25 bp, Homo sapien
tacaaaatttaagtgcaatcaaaaa

SEQ ID NO: 3305211 - DNA, 25 bp, Homo sapien
taaacctggtaaatcagttttcaga

SEQ ID NO: 3305212 - DNA, 25 bp, Homo sapien
tctggcactattagatgacatcaac

SEQ ID NO: 3305213 - DNA, 25 bp, Homo sapien
tctgtttatatcatatgtaatcagc

SEQ ID NO: 3305214 - DNA, 25 bp, Homo sapien
agtcacctctaaaggtatttctctg

SEQ ID NO: 3305215 - DNA, 25 bp, Homo sapien
ctgcatcaaacttaacactgatttt

SEQ ID NO: 3305216 - DNA, 25 bp, Homo sapien
aactgcatcaaacttaacactgatt

SEQ ID NO: 3305217 - DNA, 25 bp, Homo sapien
taactgcatcaaacttaacactgat

SEQ ID NO: 3305218 - DNA, 25 bp, Homo sapien
actgcatcaaacttaacactgattt

SEQ ID NO: 3305219 - DNA, 25 bp, Homo sapien
gagactgcggaagtagaactgctaa

SEQ ID NO: 3305220 - DNA, 25 bp, Homo sapien
gaaaaattaacatctatccctcagt

SEQ ID NO: 3305221 - DNA, 25 bp, Homo sapien
cagacaacgctttggttttgagcat

SEQ ID NO: 3305222 - DNA, 25 bp, Homo sapien
tgtcttgaacagtgacggacactag

SEQ ID NO: 3305223 - DNA, 25 bp, Homo sapien
tattaagtcaattccatttaactgt

SEQ ID NO: 3305224 - DNA, 25 bp, Homo sapien
gtactttatcaactgcctgatttaa

SEQ ID NO: 3305225 - DNA, 25 bp, Homo sapien
tgtgtggaaattactcggttcattt

SEQ ID NO: 3305226 - DNA, 25 bp, Homo sapien
ggttcatttacccaagagctgtatc

SEQ ID NO: 3305227 - DNA, 25 bp, Homo sapien
ttcctcaggttccagagtgggtccc

SEQ ID NO: 3305228 - DNA, 25 bp, Homo sapien
tcctcaggttccagagtgggtccca

SEQ ID NO: 3305229 - DNA, 25 bp, Homo sapien
cttctgctcagtcagaatcccatgc

SEQ ID NO: 3305230 - DNA, 25 bp, Homo sapien
gaatcccatgcatcagcctgtttac

SEQ ID NO: 3305231 - DNA, 25 bp, Homo sapien
caacagctttagtatggtacagaca

SEQ ID NO: 3305232 - DNA, 25 bp, Homo sapien
acaaaatacttcaccgaggcttcag

SEQ ID NO: 3305233 - DNA, 25 bp, Homo sapien
tcagctttagtttggtgctaaccaa

SEQ ID NO: 3305234 - DNA, 25 bp, Homo sapien
aactgatttgtagtgtctagcctag

SEQ ID NO: 3305235 - DNA, 25 bp, Homo sapien
agttccatgttacatctttgttgtg

SEQ ID NO: 3305236 - DNA, 25 bp, Homo sapien
tacatctttgttgtgtaatcactca

SEQ ID NO: 3305237 - DNA, 25 bp, Homo sapien
tgtgtaatcactcaagtatatgtac

SEQ ID NO: 3305238 - DNA, 25 bp, Homo sapien
tgttacttagttccatgttacatct

SEQ ID NO: 3305239 - DNA, 25 bp, Homo sapien
cagtatctcttaggaatatagatgc

SEQ ID NO: 3305240 - DNA, 25 bp, Homo sapien
tctttaataagagattgaatcagca

SEQ ID NO: 3305241 - DNA, 25 bp, Homo sapien
ccaggactagatggcttcataatga

SEQ ID NO: 3305242 - DNA, 25 bp, Homo sapien
tctgagtcccgaattaccccgatac

SEQ ID NO: 3305243 - DNA, 25 bp, Homo sapien
gaaaaaacctacaccatcatctcag

SEQ ID NO: 3305244 - DNA, 25 bp, Homo sapien
tcatctcagtaggtatcaaaaacgc

SEQ ID NO: 3305245 - DNA, 25 bp, Homo sapien
cgttccttcgtgataaaaacactca

SEQ ID NO: 3305246 - DNA, 25 bp, Homo sapien
tttgacatgatacaacgttccttcg

SEQ ID NO: 3305247 - DNA, 25 bp, Homo sapien
aataattggaacacctgatttacat

SEQ ID NO: 3305248 - DNA, 25 bp, Homo sapien
ttccaataaacccagattatgctgt

SEQ ID NO: 3305249 - DNA, 25 bp, Homo sapien
gggacactgaggcaagatcagcctg

SEQ ID NO: 3305250 - DNA, 25 bp, Homo sapien
tgtattatacctttatagtaaacag

SEQ ID NO: 3305251 - DNA, 25 bp, Homo sapien
gcgccgtttcttaagccggtctgaa

SEQ ID NO: 3305252 - DNA, 25 bp, Homo sapien
cttaagccggtctgaaaagcgcaat

SEQ ID NO: 3305253 - DNA, 25 bp, Homo sapien
cgcgcacggtgcgcacacacactgg

SEQ ID NO: 3305254 - DNA, 25 bp, Homo sapien
cgcacggtgcgcacacacactggcc

SEQ ID NO: 3305255 - DNA, 25 bp, Homo sapien
cagtgtttacgaaattaggacacag

SEQ ID NO: 3305256 - DNA, 25 bp, Homo sapien
gatttttgatgaagccagtgtttac

SEQ ID NO: 3305257 - DNA, 25 bp, Homo sapien
ggacacagacatgttgttttgactc

SEQ ID NO: 3305258 - DNA, 25 bp, Homo sapien
actccagttatttgtaaggcagcca

SEQ ID NO: 3305259 - DNA, 25 bp, Homo sapien
tggttattcttcgtcattgcaggaa

SEQ ID NO: 3305260 - DNA, 25 bp, Homo sapien
ccgaagccacagtgacaatatggcc

SEQ ID NO: 3305261 - DNA, 25 bp, Homo sapien
ggaccgagacatgtccagctgccga

SEQ ID NO: 3305262 - DNA, 25 bp, Homo sapien
cagtaagccagtaagaaggggaccg

SEQ ID NO: 3305263 - DNA, 25 bp, Homo sapien
acagacgatgactcggatggtcccc

SEQ ID NO: 3305264 - DNA, 25 bp, Homo sapien
cacagacgatgactcggatggtccc

SEQ ID NO: 3305265 - DNA, 25 bp, Homo sapien
ctgaggatcttgtgtagcaaacaaa

SEQ ID NO: 3305266 - DNA, 25 bp, Homo sapien
agactacaccagcattatttactaa

SEQ ID NO: 3305267 - DNA, 25 bp, Homo sapien
aatgtgcaagtacattaacttcaaa

SEQ ID NO: 3305268 - DNA, 25 bp, Homo sapien
acaaatctgatgtatagactacacc

SEQ ID NO: 3305269 - DNA, 25 bp, Homo sapien
aaaatatctgataatgggctaggcg

SEQ ID NO: 3305270 - DNA, 25 bp, Homo sapien
atatctgataatgggctaggcgcgg

SEQ ID NO: 3305271 - DNA, 25 bp, Homo sapien
tgatactaaaatggccacctcaaaa

SEQ ID NO: 3305272 - DNA, 25 bp, Homo sapien
caaaatagctacttcaaaatatctg

SEQ ID NO: 3305273 - DNA, 25 bp, Homo sapien
ctcaagtcttgctgaatcacacttt

SEQ ID NO: 3305274 - DNA, 25 bp, Homo sapien
tttatactgcactgaattagaatat

SEQ ID NO: 3305275 - DNA, 25 bp, Homo sapien
tatccaggggtaaggtccaggaatg

SEQ ID NO: 3305276 - DNA, 25 bp, Homo sapien
acaaagaggttctcaagtcttgctg

SEQ ID NO: 3305277 - DNA, 25 bp, Homo sapien
gctgtaaatatcttctcggttgctg

SEQ ID NO: 3305278 - DNA, 25 bp, Homo sapien
aaggtatgaaccttggcacccagtc

SEQ ID NO: 3305279 - DNA, 25 bp, Homo sapien
aatatcttctcggttgctgcagtct

SEQ ID NO: 3305280 - DNA, 25 bp, Homo sapien
ccacaaaggtatgaaccttggcacc

SEQ ID NO: 3305281 - DNA, 25 bp, Homo sapien
tctagtattgtgcattctgcaggcc

SEQ ID NO: 3305282 - DNA, 25 bp, Homo sapien
taatgcactaatgggcagaccctag

SEQ ID NO: 3305283 - DNA, 25 bp, Homo sapien
tctgcaggccaagtattaggttgtt

SEQ ID NO: 3305284 - DNA, 25 bp, Homo sapien
gaccctaggaggactcatacattta

SEQ ID NO: 3305285 - DNA, 25 bp, Homo sapien
ctccctgttgcgcaggttgagtgca

SEQ ID NO: 3305286 - DNA, 25 bp, Homo sapien
tccttcatgcccaccgccagaaggt

SEQ ID NO: 3305287 - DNA, 25 bp, Homo sapien
gcagacatgcagagcgcaccacagt

SEQ ID NO: 3305288 - DNA, 25 bp, Homo sapien
caccgccagaaggtaccatattgat

SEQ ID NO: 3305289 - DNA, 25 bp, Homo sapien
acattggaagtcattaacctaacta

SEQ ID NO: 3305290 - DNA, 25 bp, Homo sapien
accagcactggacattggaagtcat

SEQ ID NO: 3305291 - DNA, 25 bp, Homo sapien
cattggaagtcattaacctaactaa

SEQ ID NO: 3305292 - DNA, 25 bp, Homo sapien
gtttaccttataccacactgtgcta

SEQ ID NO: 3305293 - DNA, 25 bp, Homo sapien
gcagtgtgtttaccttataccacac

SEQ ID NO: 3305294 - DNA, 25 bp, Homo sapien
catatcatactgacagctttttgag

SEQ ID NO: 3305295 - DNA, 25 bp, Homo sapien
tatgcattatctcatatcatactga

SEQ ID NO: 3305296 - DNA, 25 bp, Homo sapien
aacgaaagctcagatgtgtctgact

SEQ ID NO: 3305297 - DNA, 25 bp, Homo sapien
ccatgccagaccttgaccatgctgg

SEQ ID NO: 3305298 - DNA, 25 bp, Homo sapien
ttacccaatcagaaaacgaaagctc

SEQ ID NO: 3305299 - DNA, 25 bp, Homo sapien
gactatatcaccatgccagaccttg

SEQ ID NO: 3305300 - DNA, 25 bp, Homo sapien
cagcattgcatgtcaactagtgtgt

SEQ ID NO: 3305301 - DNA, 25 bp, Homo sapien
tcatcagccactcactgggttaacc

SEQ ID NO: 3305302 - DNA, 25 bp, Homo sapien
ggataatgtttcaggccatcaggta

SEQ ID NO: 3305303 - DNA, 25 bp, Homo sapien
cctatccctaatgtctaagcagcag

SEQ ID NO: 3305304 - DNA, 25 bp, Homo sapien
caatgtagcattggtttctgttgag

SEQ ID NO: 3305305 - DNA, 25 bp, Homo sapien
gcaatgtagcattggtttctgttga

SEQ ID NO: 3305306 - DNA, 25 bp, Homo sapien
cattaacagtaagtaggactttctc

SEQ ID NO: 3305307 - DNA, 25 bp, Homo sapien
aacctctaggtctgtttatcatgtg

SEQ ID NO: 3305308 - DNA, 25 bp, Homo sapien
taaagggtggttgccagcaaaatgc

SEQ ID NO: 3305309 - DNA, 25 bp, Homo sapien
cttaataggtacaagcttcttactc

SEQ ID NO: 3305310 - DNA, 25 bp, Homo sapien
tgtaatcagcacgatttcgccggtg

SEQ ID NO: 3305311 - DNA, 25 bp, Homo sapien
tcgccggtgactgattttctcctct

SEQ ID NO: 3305312 - DNA, 25 bp, Homo sapien
gagcagacgatcagtaacgggagaa

SEQ ID NO: 3305313 - DNA, 25 bp, Homo sapien
cacgaaggactctagggagcagacg

SEQ ID NO: 3305314 - DNA, 25 bp, Homo sapien
tggtctttcgcaattggctcgggct

SEQ ID NO: 3305315 - DNA, 25 bp, Homo sapien
ggtagctcgatctaacaccagaaag

SEQ ID NO: 3305316 - DNA, 25 bp, Homo sapien
gcgagagcaaggaggaactcccgta

SEQ ID NO: 3305317 - DNA, 25 bp, Homo sapien
aaactgcttttagagggtagctcga

SEQ ID NO: 3305318 - DNA, 25 bp, Homo sapien
taccggtcttgtacagggactagga

SEQ ID NO: 3305319 - DNA, 25 bp, Homo sapien
ctagctaaagcaaggtaccggtctt

SEQ ID NO: 3305320 - DNA, 25 bp, Homo sapien
ggtagacttacatcaccaagggtag

SEQ ID NO: 3305321 - DNA, 25 bp, Homo sapien
cagtgatgctagtccaatagggaaa

SEQ ID NO: 3305322 - DNA, 25 bp, Homo sapien
tgtaacgtcggtgtattggaaccac

SEQ ID NO: 3305323 - DNA, 25 bp, Homo sapien
aactggtcctagcaaagccttgtga

SEQ ID NO: 3305324 - DNA, 25 bp, Homo sapien
ccttcaagatacgagggctgagtct

SEQ ID NO: 3305325 - DNA, 25 bp, Homo sapien
caatacctgtcgagagttctgcagt

SEQ ID NO: 3305326 - DNA, 25 bp, Homo sapien
gcacgacctttgctttgcggcgcgg

SEQ ID NO: 3305327 - DNA, 25 bp, Homo sapien
ccaagtaagcctgcgcagactggga

SEQ ID NO: 3305328 - DNA, 25 bp, Homo sapien
tgtgggaggcccaaacagttggatt

SEQ ID NO: 3305329 - DNA, 25 bp, Homo sapien
caaaaatatggctaagacctgcgtc

SEQ ID NO: 3305330 - DNA, 25 bp, Homo sapien
ggactctgaagctgactgccatgcg

SEQ ID NO: 3305331 - DNA, 25 bp, Homo sapien
gatggtctccgtgtaagccaaaggc

SEQ ID NO: 3305332 - DNA, 25 bp, Homo sapien
tgagaaacgagatgcacactggagc

SEQ ID NO: 3305333 - DNA, 25 bp, Homo sapien
catcaaacttgtggctgagaaacga

SEQ ID NO: 3305334 - DNA, 25 bp, Homo sapien
aaaactaccatcaactatagttaag

SEQ ID NO: 3305335 - DNA, 25 bp, Homo sapien
ttcactggaacatgcacaaagtatg

SEQ ID NO: 3305336 - DNA, 25 bp, Homo sapien
gttaagatagaagtagatactcttc

SEQ ID NO: 3305337 - DNA, 25 bp, Homo sapien
taaagcccatggtctagatacattc

SEQ ID NO: 3305338 - DNA, 25 bp, Homo sapien
ctggcatagtagtgggagaattatt

SEQ ID NO: 3305339 - DNA, 25 bp, Homo sapien
tcccacttggcctcagatagtctaa

SEQ ID NO: 3305340 - DNA, 25 bp, Homo sapien
tacagcatagagcttaatctctccc

SEQ ID NO: 3305341 - DNA, 25 bp, Homo sapien
taatcatgtatgttggaggtggaaa

SEQ ID NO: 3305342 - DNA, 25 bp, Homo sapien
cgataagatcattaggtgtgaggac

SEQ ID NO: 3305343 - DNA, 25 bp, Homo sapien
ggcagaatatatttaccgcgataag

SEQ ID NO: 3305344 - DNA, 25 bp, Homo sapien
tatttaccgcgataagatcattagg

SEQ ID NO: 3305345 - DNA, 25 bp, Homo sapien
aacagggcagaatatatttaccgcg

SEQ ID NO: 3305346 - DNA, 25 bp, Homo sapien
gagaagtttgaatagctgattcctg

SEQ ID NO: 3305347 - DNA, 25 bp, Homo sapien
ttcctggggactgcctaaagcctca

SEQ ID NO: 3305348 - DNA, 25 bp, Homo sapien
ttcagattccccaaacccatgctta

SEQ ID NO: 3305349 - DNA, 25 bp, Homo sapien
gtttcataaccaccatccaacaaat

SEQ ID NO: 3305350 - DNA, 25 bp, Homo sapien
tggtacttgtggtgggtaaaagata

SEQ ID NO: 3305351 - DNA, 25 bp, Homo sapien
gtggcagtgctcaaaaggccagcca

SEQ ID NO: 3305352 - DNA, 25 bp, Homo sapien
aaggccagccaagatgagaaatttc

SEQ ID NO: 3305353 - DNA, 25 bp, Homo sapien
agagcagtggcagtgctcaaaaggc

SEQ ID NO: 3305354 - DNA, 25 bp, Homo sapien
ggccagccaagatgagaaatttcat

SEQ ID NO: 3305355 - DNA, 25 bp, Homo sapien
ctcataagtcaatgcagagagtgaa

SEQ ID NO: 3305356 - DNA, 25 bp, Homo sapien
cctggtgcataggttgttgtcaagc

SEQ ID NO: 3305357 - DNA, 25 bp, Homo sapien
tataaatctacaagtatcacagctg

SEQ ID NO: 3305358 - DNA, 25 bp, Homo sapien
tacacgtaaaccacaaaagagtagc

SEQ ID NO: 3305359 - DNA, 25 bp, Homo sapien
tcaaaacaagagattttcatctatg

SEQ ID NO: 3305360 - DNA, 25 bp, Homo sapien
aaacaagagattttcatctatgtcc

SEQ ID NO: 3305361 - DNA, 25 bp, Homo sapien
aacaagagattttcatctatgtcct

SEQ ID NO: 3305362 - DNA, 25 bp, Homo sapien
caaaacaagagattttcatctatgt

SEQ ID NO: 3305363 - DNA, 25 bp, Homo sapien
cctcaactttggtaggacagcaaca

SEQ ID NO: 3305364 - DNA, 25 bp, Homo sapien
tatgtatttttaggcctcacctctg

SEQ ID NO: 3305365 - DNA, 25 bp, Homo sapien
tagccagagtagtagcacaaacaat

SEQ ID NO: 3305366 - DNA, 25 bp, Homo sapien
taaggcagtataatggtgatcctca

SEQ ID NO: 3305367 - DNA, 25 bp, Homo sapien
tttcacccaggccagactgaagtgg

SEQ ID NO: 3305368 - DNA, 25 bp, Homo sapien
tctttcacccaggccagactgaagt

SEQ ID NO: 3305369 - DNA, 25 bp, Homo sapien
gctctttcacccaggccagactgaa

SEQ ID NO: 3305370 - DNA, 25 bp, Homo sapien
cgctctttcacccaggccagactga

SEQ ID NO: 3305371 - DNA, 25 bp, Homo sapien
acatccactccttaccctttctaat

SEQ ID NO: 3305372 - DNA, 25 bp, Homo sapien
aaaggagtgctcaaatctcttttat

SEQ ID NO: 3305373 - DNA, 25 bp, Homo sapien
gaatgtgacttccatgtctaccatt

SEQ ID NO: 3305374 - DNA, 25 bp, Homo sapien
ggtctttcctgcactcaaacatcca

SEQ ID NO: 3305375 - DNA, 25 bp, Homo sapien
tgacatctcagtcgcatttggcact

SEQ ID NO: 3305376 - DNA, 25 bp, Homo sapien
gcagtgttcaatcctagaccccttt

SEQ ID NO: 3305377 - DNA, 25 bp, Homo sapien
ccctgtcttgatatataagcggcca

SEQ ID NO: 3305378 - DNA, 25 bp, Homo sapien
taactcaatgcgttttccttgggag

SEQ ID NO: 3305379 - DNA, 25 bp, Homo sapien
tcccctctagataatggtgggcagg

SEQ ID NO: 3305380 - DNA, 25 bp, Homo sapien
gagcctgggtgagcttacacactga

SEQ ID NO: 3305381 - DNA, 25 bp, Homo sapien
gagcacgtctatcacaggcagttaa

SEQ ID NO: 3305382 - DNA, 25 bp, Homo sapien
cacatgtcatataaacaggcatcca

SEQ ID NO: 3305383 - DNA, 25 bp, Homo sapien
caaggcccaggttaaggtaggatat

SEQ ID NO: 3305384 - DNA, 25 bp, Homo sapien
gattcacacgtctttctaggcttag

SEQ ID NO: 3305385 - DNA, 25 bp, Homo sapien
taagaagtgacttcgcaatgacagc

SEQ ID NO: 3305386 - DNA, 25 bp, Homo sapien
caatgacagcatgtgcaccaaggga

SEQ ID NO: 3305387 - DNA, 25 bp, Homo sapien
ttagggcttgtctgaggaagaagac

SEQ ID NO: 3305388 - DNA, 25 bp, Homo sapien
ggcttgtctgaggaagaagacatcc

SEQ ID NO: 3305389 - DNA, 25 bp, Homo sapien
tctgaggaagaagacatccctcttc

SEQ ID NO: 3305390 - DNA, 25 bp, Homo sapien
gacatccctcttctttggctggtga

SEQ ID NO: 3305391 - DNA, 25 bp, Homo sapien
caccagagatgctcgcagaggagca

SEQ ID NO: 3305392 - DNA, 25 bp, Homo sapien
aagaaacgggttatgcagtgttcca

SEQ ID NO: 3305393 - DNA, 25 bp, Homo sapien
tgttggggtcacactcctcaaagaa

SEQ ID NO: 3305394 - DNA, 25 bp, Homo sapien
gatgtgcttatccttgttggggtca

SEQ ID NO: 3305395 - DNA, 25 bp, Homo sapien
tgcacaggatacacatacatgtggt

SEQ ID NO: 3305396 - DNA, 25 bp, Homo sapien
agttcactaaactgccagtgcacag

SEQ ID NO: 3305397 - DNA, 25 bp, Homo sapien
tatccatagggtgttggtcaagttc

SEQ ID NO: 3305398 - DNA, 25 bp, Homo sapien
cttaaagtcccttaagagaagatca

SEQ ID NO: 3305399 - DNA, 25 bp, Homo sapien
catgaggatattcttgagccagtct

SEQ ID NO: 3305400 - DNA, 25 bp, Homo sapien
gagccagtctctcatccgtagagga

SEQ ID NO: 3305401 - DNA, 25 bp, Homo sapien
tctcatttagataaccagcgtgttc

SEQ ID NO: 3305402 - DNA, 25 bp, Homo sapien
tcacttcaaagtccgtacaagtagg

SEQ ID NO: 3305403 - DNA, 25 bp, Homo sapien
tcactgctgtagaatcagagttgaa

SEQ ID NO: 3305404 - DNA, 25 bp, Homo sapien
gcagctaggccccagaatcactgct

SEQ ID NO: 3305405 - DNA, 25 bp, Homo sapien
caaatgccagcttccaatcaagtaa

SEQ ID NO: 3305406 - DNA, 25 bp, Homo sapien
gatctatttggatgtgcagctaggc

SEQ ID NO: 3305407 - DNA, 25 bp, Homo sapien
cattatttctgagccatctgctctg

SEQ ID NO: 3305408 - DNA, 25 bp, Homo sapien
caaatatcagatggctgtatatgtg

SEQ ID NO: 3305409 - DNA, 25 bp, Homo sapien
ggcattatttctgagccatctgctc

SEQ ID NO: 3305410 - DNA, 25 bp, Homo sapien
tgtcaaatatcagatggctgtatat

SEQ ID NO: 3305411 - DNA, 25 bp, Homo sapien
gtttggaatactttctgaaggaata

SEQ ID NO: 3305412 - DNA, 25 bp, Homo sapien
tctctttccttctctattagtctgg

SEQ ID NO: 3305413 - DNA, 25 bp, Homo sapien
ctgtctggtccccagctttttttgg

SEQ ID NO: 3305414 - DNA, 25 bp, Homo sapien
tgaatctgtctggtccccagctttt

SEQ ID NO: 3305415 - DNA, 25 bp, Homo sapien
tggttgacaggagggacataatctt

SEQ ID NO: 3305416 - DNA, 25 bp, Homo sapien
gatggttgacaggagggacataatc

SEQ ID NO: 3305417 - DNA, 25 bp, Homo sapien
tgatggttgacaggagggacataat

SEQ ID NO: 3305418 - DNA, 25 bp, Homo sapien
gttgacaggagggacataatcttac

SEQ ID NO: 3305419 - DNA, 25 bp, Homo sapien
ccagtctgcatttagtagcgaatag

SEQ ID NO: 3305420 - DNA, 25 bp, Homo sapien
cataggtctgattgtcagtgccaca

SEQ ID NO: 3305421 - DNA, 25 bp, Homo sapien
gatgacaggaactagcataggtctg

SEQ ID NO: 3305422 - DNA, 25 bp, Homo sapien
tgcaggctccaaaataatccagctg

SEQ ID NO: 3305423 - DNA, 25 bp, Homo sapien
tggtctgccttacagatgtggcctc

SEQ ID NO: 3305424 - DNA, 25 bp, Homo sapien
ttttacactggaagctcatgcaaga

SEQ ID NO: 3305425 - DNA, 25 bp, Homo sapien
cagacacagtgaggttttccctgtt

SEQ ID NO: 3305426 - DNA, 25 bp, Homo sapien
tgttggaggacaagtcactggatcc

SEQ ID NO: 3305427 - DNA, 25 bp, Homo sapien
ctcctcatttgatgagttctctgct

SEQ ID NO: 3305428 - DNA, 25 bp, Homo sapien
atgttgccttcacttgacgtttcct

SEQ ID NO: 3305429 - DNA, 25 bp, Homo sapien
agcatgcaccctcatgttgccttca

SEQ ID NO: 3305430 - DNA, 25 bp, Homo sapien
ttcctcctcatttgatgagttctct

SEQ ID NO: 3305431 - DNA, 25 bp, Homo sapien
tttagaataacaagagcaaaagtta

SEQ ID NO: 3305432 - DNA, 25 bp, Homo sapien
ctttagaataacaagagcaaaagtt

SEQ ID NO: 3305433 - DNA, 25 bp, Homo sapien
tttgaatgaaagctccaaatatgct

SEQ ID NO: 3305434 - DNA, 25 bp, Homo sapien
ttccagattatcattttggtatgtg

SEQ ID NO: 3305435 - DNA, 25 bp, Homo sapien
ccagattatcattttggtatgtgtt

SEQ ID NO: 3305436 - DNA, 25 bp, Homo sapien
gaaagctccaaatatgcttcctccc

SEQ ID NO: 3305437 - DNA, 25 bp, Homo sapien
gcaatggattgagctctctcggcct

SEQ ID NO: 3305438 - DNA, 25 bp, Homo sapien
gtagtcatcacttgcactgtgcctg

SEQ ID NO: 3305439 - DNA, 25 bp, Homo sapien
gcctggcttgggatgaagtagtcat

SEQ ID NO: 3305440 - DNA, 25 bp, Homo sapien
tcaactccatgatttctgggcgtgg

SEQ ID NO: 3305441 - DNA, 25 bp, Homo sapien
tctctttgtggttgctgatagcttc

SEQ ID NO: 3305442 - DNA, 25 bp, Homo sapien
tgtctctttgtggttgctgatagct

SEQ ID NO: 3305443 - DNA, 25 bp, Homo sapien
tcatcagtaggttccatgagcagag

SEQ ID NO: 3305444 - DNA, 25 bp, Homo sapien
catcatcagtaggttccatgagcag

SEQ ID NO: 3305445 - DNA, 25 bp, Homo sapien
gaatgtgcttattgacgttcgatgc

SEQ ID NO: 3305446 - DNA, 25 bp, Homo sapien
cattgtgggtaccaacttcacctgg

SEQ ID NO: 3305447 - DNA, 25 bp, Homo sapien
tccttgatcccttaggccttggcta

SEQ ID NO: 3305448 - DNA, 25 bp, Homo sapien
catcagattgggtattgtcttcctc

SEQ ID NO: 3305449 - DNA, 25 bp, Homo sapien
gaaggaactaacaccaggagccaaa

SEQ ID NO: 3305450 - DNA, 25 bp, Homo sapien
tcttttatgtccaatgtaccttcag

SEQ ID NO: 3305451 - DNA, 25 bp, Homo sapien
caaaaaatcagtgttctctgagagt

SEQ ID NO: 3305452 - DNA, 25 bp, Homo sapien
gtaccttcagttggtgcatactcca

SEQ ID NO: 3305453 - DNA, 25 bp, Homo sapien
ttaagtgaccatcactgtcctcttg

SEQ ID NO: 3305454 - DNA, 25 bp, Homo sapien
tcttggctagaactcttgccctgtt

SEQ ID NO: 3305455 - DNA, 25 bp, Homo sapien
tcaatcccagctcttggctagaact

SEQ ID NO: 3305456 - DNA, 25 bp, Homo sapien
cctcttttgactttagtactgatga

SEQ ID NO: 3305457 - DNA, 25 bp, Homo sapien
ggtgggaatcgtcttctgtggatac

SEQ ID NO: 3305458 - DNA, 25 bp, Homo sapien
tgggaatcgtcttctgtggatactg

SEQ ID NO: 3305459 - DNA, 25 bp, Homo sapien
tatggtgggaatcgtcttctgtgga

SEQ ID NO: 3305460 - DNA, 25 bp, Homo sapien
cttatggtgggaatcgtcttctgtg

SEQ ID NO: 3305461 - DNA, 25 bp, Homo sapien
cagcccttaaactggggattgcagt

SEQ ID NO: 3305462 - DNA, 25 bp, Homo sapien
ggattgcagtgttgtcaggtgctac

SEQ ID NO: 3305463 - DNA, 25 bp, Homo sapien
cagtgttgtcaggtgctaccgtttc

SEQ ID NO: 3305464 - DNA, 25 bp, Homo sapien
tcaggtgctaccgtttcagcagttg

SEQ ID NO: 3305465 - DNA, 25 bp, Homo sapien
gtttggaatgatcagataataatct

SEQ ID NO: 3305466 - DNA, 25 bp, Homo sapien
ttggaatgatcagataataatcttg

SEQ ID NO: 3305467 - DNA, 25 bp, Homo sapien
tttggaatgatcagataataatctt

SEQ ID NO: 3305468 - DNA, 25 bp, Homo sapien
agctgcagttcccaagagacatagg

SEQ ID NO: 3305469 - DNA, 25 bp, Homo sapien
cagctgcagttcccaagagacatag

SEQ ID NO: 3305470 - DNA, 25 bp, Homo sapien
tgatggcagttcttactcgattgtg

SEQ ID NO: 3305471 - DNA, 25 bp, Homo sapien
tggcagttcttactcgattgtgtac

SEQ ID NO: 3305472 - DNA, 25 bp, Homo sapien
gatggcagttcttactcgattgtgt

SEQ ID NO: 3305473 - DNA, 25 bp, Homo sapien
atggcagttcttactcgattgtgta

SEQ ID NO: 3305474 - DNA, 25 bp, Homo sapien
aattgctccctgatttttcggtccg

SEQ ID NO: 3305475 - DNA, 25 bp, Homo sapien
ctccctgatttttcggtccggccat

SEQ ID NO: 3305476 - DNA, 25 bp, Homo sapien
gtgaaaattgctccctgatttttcg

SEQ ID NO: 3305477 - DNA, 25 bp, Homo sapien
ctgtgaaaattgctccctgattttt

SEQ ID NO: 3305478 - DNA, 25 bp, Homo sapien
ttatgacagtacttcttcgagtaaa

SEQ ID NO: 3305479 - DNA, 25 bp, Homo sapien
gacagtacttcttcgagtaaagact

SEQ ID NO: 3305480 - DNA, 25 bp, Homo sapien
tatgacagtacttcttcgagtaaag

SEQ ID NO: 3305481 - DNA, 25 bp, Homo sapien
tgacagtacttcttcgagtaaagac

SEQ ID NO: 3305482 - DNA, 25 bp, Homo sapien
gtgaagatttttagtcatgcagcac

SEQ ID NO: 3305483 - DNA, 25 bp, Homo sapien
ggttgagtaaaaacacgctgcctgt

SEQ ID NO: 3305484 - DNA, 25 bp, Homo sapien
cagagtaatagacctagagggtatt

SEQ ID NO: 3305485 - DNA, 25 bp, Homo sapien
gaggtctttactggcaatctgtgag

SEQ ID NO: 3305486 - DNA, 25 bp, Homo sapien
gttctttattagtgtgacatatgtt

SEQ ID NO: 3305487 - DNA, 25 bp, Homo sapien
ttctttattagtgtgacatatgttc

SEQ ID NO: 3305488 - DNA, 25 bp, Homo sapien
tctttattagtgtgacatatgttct

SEQ ID NO: 3305489 - DNA, 25 bp, Homo sapien
ttctttcaataaaacatcttatggc

SEQ ID NO: 3305490 - DNA, 25 bp, Homo sapien
tacttgatattgaaagtttctttca

SEQ ID NO: 3305491 - DNA, 25 bp, Homo sapien
tatcttagaaggttggttggattac

SEQ ID NO: 3305492 - DNA, 25 bp, Homo sapien
ggttggttggattacttgatattga

SEQ ID NO: 3305493 - DNA, 25 bp, Homo sapien
tagtgaagggtttctttatcttggc

SEQ ID NO: 3305494 - DNA, 25 bp, Homo sapien
caaaatagtatggtttagtgaaggg

SEQ ID NO: 3305495 - DNA, 25 bp, Homo sapien
ttagatgtcagtagcgagcccccat

SEQ ID NO: 3305496 - DNA, 25 bp, Homo sapien
tgttaacattttggcttgatgattc

SEQ ID NO: 3305497 - DNA, 25 bp, Homo sapien
taagcacaaggacacatagtttctc

SEQ ID NO: 3305498 - DNA, 25 bp, Homo sapien
gaacattaaagtccattctggccac

SEQ ID NO: 3305499 - DNA, 25 bp, Homo sapien
tccagttggccagaacttgcatcac

SEQ ID NO: 3305500 - DNA, 25 bp, Homo sapien
gaattaggcacatggaatgctaccc

SEQ ID NO: 3305501 - DNA, 25 bp, Homo sapien
ctcttcccgattctgttcagtggcg

SEQ ID NO: 3305502 - DNA, 25 bp, Homo sapien
cttaaaattgatagcaacaggaggc

SEQ ID NO: 3305503 - DNA, 25 bp, Homo sapien
gtgcccataaagaccccagaactca

SEQ ID NO: 3305504 - DNA, 25 bp, Homo sapien
tatataatatgtgttccgcatgtct

SEQ ID NO: 3305505 - DNA, 25 bp, Homo sapien
agagtatggttacacgccctctggg

SEQ ID NO: 3305506 - DNA, 25 bp, Homo sapien
gtcacaccatgaaaaccatcaagtg

SEQ ID NO: 3305507 - DNA, 25 bp, Homo sapien
tcaggttcctgcagtcattcgcttg

SEQ ID NO: 3305508 - DNA, 25 bp, Homo sapien
tgcccacacctggacgctggtgagg

SEQ ID NO: 3305509 - DNA, 25 bp, Homo sapien
ggtaaacaatgatgacccccagtaa

SEQ ID NO: 3305510 - DNA, 25 bp, Homo sapien
tgtgggccttaaccttgtgatttgc

SEQ ID NO: 3305511 - DNA, 25 bp, Homo sapien
aattgaagataaagggtaagagagg

SEQ ID NO: 3305512 - DNA, 25 bp, Homo sapien
tgacattagcaagcatgatgccagc

SEQ ID NO: 3305513 - DNA, 25 bp, Homo sapien
taccaaactttcaggagaacctcag

SEQ ID NO: 3305514 - DNA, 25 bp, Homo sapien
gaacagggtgtctcattaccaaact

SEQ ID NO: 3305515 - DNA, 25 bp, Homo sapien
ggagagccctttccttctgttagga

SEQ ID NO: 3305516 - DNA, 25 bp, Homo sapien
cagaaataggtctcccattaagagc

SEQ ID NO: 3305517 - DNA, 25 bp, Homo sapien
aggcaattagataactcaagttgaa

SEQ ID NO: 3305518 - DNA, 25 bp, Homo sapien
tgtccggcctgggtccctatcatat

SEQ ID NO: 3305519 - DNA, 25 bp, Homo sapien
gcctgggtccctatcatattatata

SEQ ID NO: 3305520 - DNA, 25 bp, Homo sapien
ttatataggcaattagataactcaa

SEQ ID NO: 3305521 - DNA, 25 bp, Homo sapien
ccctggaaattttagtgctggtagt

SEQ ID NO: 3305522 - DNA, 25 bp, Homo sapien
ttgtgttgcctagcattcccctggt

SEQ ID NO: 3305523 - DNA, 25 bp, Homo sapien
caagtctttctaattgaattttcct

SEQ ID NO: 3305524 - DNA, 25 bp, Homo sapien
gtaaacgcagtcatccatacctctg

SEQ ID NO: 3305525 - DNA, 25 bp, Homo sapien
ttaagtaaggggctggacccagagc

SEQ ID NO: 3305526 - DNA, 25 bp, Homo sapien
taagtaaggggctggacccagagcc

SEQ ID NO: 3305527 - DNA, 25 bp, Homo sapien
aagtaaggggctggacccagagcca

SEQ ID NO: 3305528 - DNA, 25 bp, Homo sapien
gctggcctctcatgcgagggcttta

SEQ ID NO: 3305529 - DNA, 25 bp, Homo sapien
tggatttccctagcaggctggcctc

SEQ ID NO: 3305530 - DNA, 25 bp, Homo sapien
gcagtgcttgcaaaccaaaagggaa

SEQ ID NO: 3305531 - DNA, 25 bp, Homo sapien
tggcaccagagagtatttcagactg

SEQ ID NO: 3305532 - DNA, 25 bp, Homo sapien
gcctcagacaataggatgtttttcc

SEQ ID NO: 3305533 - DNA, 25 bp, Homo sapien
tgtttgaccatgcttctccctggtg

SEQ ID NO: 3305534 - DNA, 25 bp, Homo sapien
gggttgagcaatctcctcggaggaa

SEQ ID NO: 3305535 - DNA, 25 bp, Homo sapien
tcaggataacttgttccaaaccgcc

SEQ ID NO: 3305536 - DNA, 25 bp, Homo sapien
agagccctgagagaactgtgttcct

SEQ ID NO: 3305537 - DNA, 25 bp, Homo sapien
aaccagagccctgagagaactgtgt

SEQ ID NO: 3305538 - DNA, 25 bp, Homo sapien
ctttgcatgaaaccagagccctgag

SEQ ID NO: 3305539 - DNA, 25 bp, Homo sapien
ccagagccctgagagaactgtgttc

SEQ ID NO: 3305540 - DNA, 25 bp, Homo sapien
ctgaagacgaaccacctactgggga

SEQ ID NO: 3305541 - DNA, 25 bp, Homo sapien
caacaggaactggtaaatgccatca

SEQ ID NO: 3305542 - DNA, 25 bp, Homo sapien
aacaggaactggtaaatgccatcaa

SEQ ID NO: 3305543 - DNA, 25 bp, Homo sapien
acaggaactggtaaatgccatcaac

SEQ ID NO: 3305544 - DNA, 25 bp, Homo sapien
ttttagatacttgctgttgactttc

SEQ ID NO: 3305545 - DNA, 25 bp, Homo sapien
gactctgagaatgtatttgcagctt

SEQ ID NO: 3305546 - DNA, 25 bp, Homo sapien
tcttctatttacagtgactctgaga

SEQ ID NO: 3305547 - DNA, 25 bp, Homo sapien
gaaattttgcaccagagttttagat

SEQ ID NO: 3305548 - DNA, 25 bp, Homo sapien
tagtagtacagatctcacagaggcc

SEQ ID NO: 3305549 - DNA, 25 bp, Homo sapien
ggccctaagcacagcatccgtggat

SEQ ID NO: 3305550 - DNA, 25 bp, Homo sapien
ggttcatttgtcaccacgaagcgag

SEQ ID NO: 3305551 - DNA, 25 bp, Homo sapien
ggcctgaagctcgtacaattttgga

SEQ ID NO: 3305552 - DNA, 25 bp, Homo sapien
cagtgattgatcctaagtactctga

SEQ ID NO: 3305553 - DNA, 25 bp, Homo sapien
cgtagagagggagtttagccacgtt

SEQ ID NO: 3305554 - DNA, 25 bp, Homo sapien
ggtcctcattatattagtttattgc

SEQ ID NO: 3305555 - DNA, 25 bp, Homo sapien
aactaatttgatggctaggtcctca

SEQ ID NO: 3305556 - DNA, 25 bp, Homo sapien
ttaagaacagtcttgacacgtaaag

SEQ ID NO: 3305557 - DNA, 25 bp, Homo sapien
caatgttctttaaggattgaagtac

SEQ ID NO: 3305558 - DNA, 25 bp, Homo sapien
gaagtacttcaataacactggtagc

SEQ ID NO: 3305559 - DNA, 25 bp, Homo sapien
ggtagcagccatgaatagtgctgta

SEQ ID NO: 3305560 - DNA, 25 bp, Homo sapien
tagtaaacagctggccttcaacatc

SEQ ID NO: 3305561 - DNA, 25 bp, Homo sapien
taggcttgggactgcaaagtacagg

SEQ ID NO: 3305562 - DNA, 25 bp, Homo sapien
tctgaactgtagctcagaaactgga

SEQ ID NO: 3305563 - DNA, 25 bp, Homo sapien
cttccaaatcacagtgcagacgggc

SEQ ID NO: 3305564 - DNA, 25 bp, Homo sapien
tgcctgcagtaacagcctaagctgg

SEQ ID NO: 3305565 - DNA, 25 bp, Homo sapien
gataaaagtctctgcagatattgcc

SEQ ID NO: 3305566 - DNA, 25 bp, Homo sapien
tggttcatagcacacagatcaactt

SEQ ID NO: 3305567 - DNA, 25 bp, Homo sapien
gttcagaatctagggttgataccag

SEQ ID NO: 3305568 - DNA, 25 bp, Homo sapien
aggtcgctgtgcactaactttgtag

SEQ ID NO: 3305569 - DNA, 25 bp, Homo sapien
gtcgctgtgcactaactttgtagat

SEQ ID NO: 3305570 - DNA, 25 bp, Homo sapien
ggtcgctgtgcactaactttgtaga

SEQ ID NO: 3305571 - DNA, 25 bp, Homo sapien
caggtcgctgtgcactaactttgta

SEQ ID NO: 3305572 - DNA, 25 bp, Homo sapien
ccacaatattattcacggctctcca

SEQ ID NO: 3305573 - DNA, 25 bp, Homo sapien
gttcaacccaaagttctcaccacag

SEQ ID NO: 3305574 - DNA, 25 bp, Homo sapien
cactccgactagatccaggacaaac

SEQ ID NO: 3305575 - DNA, 25 bp, Homo sapien
gagtgcagctattttgttcaaccca

SEQ ID NO: 3305576 - DNA, 25 bp, Homo sapien
cagaagttatatttatctgtaccca

SEQ ID NO: 3305577 - DNA, 25 bp, Homo sapien
tctgtacccattctttccgctttct

SEQ ID NO: 3305578 - DNA, 25 bp, Homo sapien
agaagttatatttatctgtacccat

SEQ ID NO: 3305579 - DNA, 25 bp, Homo sapien
ccagaagttatatttatctgtaccc

SEQ ID NO: 3305580 - DNA, 25 bp, Homo sapien
tttctctattcatccatctgttgat

SEQ ID NO: 3305581 - DNA, 25 bp, Homo sapien
tgaatagggttgcaataaacatgag

SEQ ID NO: 3305582 - DNA, 25 bp, Homo sapien
attttctctattcatccatctgttg

SEQ ID NO: 3305583 - DNA, 25 bp, Homo sapien
cacattttctctattcatccatctg

SEQ ID NO: 3305584 - DNA, 25 bp, Homo sapien
tttcctgaaacttgatggctggatc

SEQ ID NO: 3305585 - DNA, 25 bp, Homo sapien
gatgtttgaattgtcgagtttccca

SEQ ID NO: 3305586 - DNA, 25 bp, Homo sapien
caatgaatttgatccctttaacaga

SEQ ID NO: 3305587 - DNA, 25 bp, Homo sapien
tgtaatgcaactcaaaatcgtcctg

SEQ ID NO: 3305588 - DNA, 25 bp, Homo sapien
tctggcaaggaagcatattttctgt

SEQ ID NO: 3305589 - DNA, 25 bp, Homo sapien
taacaagagttatctggtgggcaag

SEQ ID NO: 3305590 - DNA, 25 bp, Homo sapien
gatgcatgacaatgaatcaagagtc

SEQ ID NO: 3305591 - DNA, 25 bp, Homo sapien
taagctaagctatagagttcataga

SEQ ID NO: 3305592 - DNA, 25 bp, Homo sapien
tcctctaggttgtatgaacggccag

SEQ ID NO: 3305593 - DNA, 25 bp, Homo sapien
ccaagatgattggttttcagggcta

SEQ ID NO: 3305594 - DNA, 25 bp, Homo sapien
cctgtgttacgtttcctctaggttg

SEQ ID NO: 3305595 - DNA, 25 bp, Homo sapien
tttcagtgctaacaccaagatgatt

SEQ ID NO: 3305596 - DNA, 25 bp, Homo sapien
gggcttgaggtctaatcttattttc

SEQ ID NO: 3305597 - DNA, 25 bp, Homo sapien
gaagaattagcacctgatgtgaggg

SEQ ID NO: 3305598 - DNA, 25 bp, Homo sapien
catctgcctgaacgcggatgatggg

SEQ ID NO: 3305599 - DNA, 25 bp, Homo sapien
gcttccaaggaggcatgttgcaaag

SEQ ID NO: 3305600 - DNA, 25 bp, Homo sapien
caataactctagatgctgccaataa

SEQ ID NO: 3305601 - DNA, 25 bp, Homo sapien
caataacattggaactactcgtgcc

SEQ ID NO: 3305602 - DNA, 25 bp, Homo sapien
tctccataggccctggtttgttgta

SEQ ID NO: 3305603 - DNA, 25 bp, Homo sapien
ccctggtttgttgtatcacaagttc

SEQ ID NO: 3305604 - DNA, 25 bp, Homo sapien
taggcactatgccacaggtcctgtg

SEQ ID NO: 3305605 - DNA, 25 bp, Homo sapien
ggaactgacatttattgcataggca

SEQ ID NO: 3305606 - DNA, 25 bp, Homo sapien
gagaatagaggagccttgaaatgca

SEQ ID NO: 3305607 - DNA, 25 bp, Homo sapien
cacaggtcctgtgcgagatgtctca

SEQ ID NO: 3305608 - DNA, 25 bp, Homo sapien
ggaatttcactgatgggtcccggag

SEQ ID NO: 3305609 - DNA, 25 bp, Homo sapien
tcccccttataaaactgagactcca

SEQ ID NO: 3305610 - DNA, 25 bp, Homo sapien
ctgggaggcatcacaatcatgacgg

SEQ ID NO: 3305611 - DNA, 25 bp, Homo sapien
ggctgggaggcatcacaatcatgac

SEQ ID NO: 3305612 - DNA, 25 bp, Homo sapien
attttacatgaatggcagcagacaa

SEQ ID NO: 3305613 - DNA, 25 bp, Homo sapien
tcaccaaggggtaaatttgatggaa

SEQ ID NO: 3305614 - DNA, 25 bp, Homo sapien
cctctagcttcaccaaggggtaaat

SEQ ID NO: 3305615 - DNA, 25 bp, Homo sapien
tgcaggacttaagggatgtgaatta

SEQ ID NO: 3305616 - DNA, 25 bp, Homo sapien
ctatgcaggacttaagggatgtgaa

SEQ ID NO: 3305617 - DNA, 25 bp, Homo sapien
tacagtcatctcaggtctcaaccgg

SEQ ID NO: 3305618 - DNA, 25 bp, Homo sapien
tagggcctttcataggctgcaatca

SEQ ID NO: 3305619 - DNA, 25 bp, Homo sapien
ttcctatgggtcaggaacctggcct

SEQ ID NO: 3305620 - DNA, 25 bp, Homo sapien
caaggtgtcaactgggtctacagtc

SEQ ID NO: 3305621 - DNA, 25 bp, Homo sapien
tgttctttattatcttgcttacaca

SEQ ID NO: 3305622 - DNA, 25 bp, Homo sapien
gttctttattatcttgcttacacat

SEQ ID NO: 3305623 - DNA, 25 bp, Homo sapien
ctgttctttattatcttgcttacac

SEQ ID NO: 3305624 - DNA, 25 bp, Homo sapien
ttagtgcaccacttagtaacatctt

SEQ ID NO: 3305625 - DNA, 25 bp, Homo sapien
gtgcaccacttagtaacatcttgag

SEQ ID NO: 3305626 - DNA, 25 bp, Homo sapien
cacttagtaacatcttgaggaaaac

SEQ ID NO: 3305627 - DNA, 25 bp, Homo sapien
gcaccacttagtaacatcttgagga

SEQ ID NO: 3305628 - DNA, 25 bp, Homo sapien
ccgcagtggacttcagacctgagac

SEQ ID NO: 3305629 - DNA, 25 bp, Homo sapien
gatgaccacgagagggaaataggca

SEQ ID NO: 3305630 - DNA, 25 bp, Homo sapien
ctgggcgagacttgatgaccacgag

SEQ ID NO: 3305631 - DNA, 25 bp, Homo sapien
aataggcacaagactggggccaccc

SEQ ID NO: 3305632 - DNA, 25 bp, Homo sapien
ctagtttgctgagagatgaaaagag

SEQ ID NO: 3305633 - DNA, 25 bp, Homo sapien
ctgagagatgaaaagagctgttatg

SEQ ID NO: 3305634 - DNA, 25 bp, Homo sapien
agagatgaaaagagctgttatgcat

SEQ ID NO: 3305635 - DNA, 25 bp, Homo sapien
tagtttgctgagagatgaaaagagc

SEQ ID NO: 3305636 - DNA, 25 bp, Homo sapien
agcattcaataattgggtgcctggg

SEQ ID NO: 3305637 - DNA, 25 bp, Homo sapien
gctgttcatagagattcatttgaga

SEQ ID NO: 3305638 - DNA, 25 bp, Homo sapien
ctgttcatagagattcatttgagaa

SEQ ID NO: 3305639 - DNA, 25 bp, Homo sapien
cattcaataattgggtgcctgggtc

SEQ ID NO: 3305640 - DNA, 25 bp, Homo sapien
ccgtgggcctggactcaatgtgcag

SEQ ID NO: 3305641 - DNA, 25 bp, Homo sapien
taggtctgcctttggctccgtgggc

SEQ ID NO: 3305642 - DNA, 25 bp, Homo sapien
atgtgcagcgctccattctcatcag

SEQ ID NO: 3305643 - DNA, 25 bp, Homo sapien
tgagagacaacaattattctgctgc

SEQ ID NO: 3305644 - DNA, 25 bp, Homo sapien
taaacaccattgcactcagatcagc

SEQ ID NO: 3305645 - DNA, 25 bp, Homo sapien
gacatctgtaacttgttgtgatcaa

SEQ ID NO: 3305646 - DNA, 25 bp, Homo sapien
aagacatctgtaacttgttgtgatc

SEQ ID NO: 3305647 - DNA, 25 bp, Homo sapien
ttgtaaacaccattgcactcagatc

SEQ ID NO: 3305648 - DNA, 25 bp, Homo sapien
tcttcatccctacatctgggtttct

SEQ ID NO: 3305649 - DNA, 25 bp, Homo sapien
ctggcttcttcatccctacatctgg

SEQ ID NO: 3305650 - DNA, 25 bp, Homo sapien
ctacaaccatttataccatctggct

SEQ ID NO: 3305651 - DNA, 25 bp, Homo sapien
tgccaattctacaaccatttatacc

SEQ ID NO: 3305652 - DNA, 25 bp, Homo sapien
agcttggtttccacacttgccagtc

SEQ ID NO: 3305653 - DNA, 25 bp, Homo sapien
tctcaactaactcatgcgtttgcat

SEQ ID NO: 3305654 - DNA, 25 bp, Homo sapien
gtttccacacttgccagtctggcca

SEQ ID NO: 3305655 - DNA, 25 bp, Homo sapien
aacattttctcaactaactcatgcg

SEQ ID NO: 3305656 - DNA, 25 bp, Homo sapien
tgatggcatgacctaatgtgtgccc

SEQ ID NO: 3305657 - DNA, 25 bp, Homo sapien
tgaggctcctgataagcgatgtggg

SEQ ID NO: 3305658 - DNA, 25 bp, Homo sapien
tcatataagtaagcctgcccctgtg

SEQ ID NO: 3305659 - DNA, 25 bp, Homo sapien
gccacgccaactgctatggttgcca

SEQ ID NO: 3305660 - DNA, 25 bp, Homo sapien
tgctgcgggcctgtgtgcagttctc

SEQ ID NO: 3305661 - DNA, 25 bp, Homo sapien
gctgctgcgggcctgtgtgcagttc

SEQ ID NO: 3305662 - DNA, 25 bp, Homo sapien
ctgcgggcctgtgtgcagttctcac

SEQ ID NO: 3305663 - DNA, 25 bp, Homo sapien
ccaactgcagagagggtgctgctgc

SEQ ID NO: 3305664 - DNA, 25 bp, Homo sapien
tgagatgcccggctggccagagggg

SEQ ID NO: 3305665 - DNA, 25 bp, Homo sapien
ctgagatgcccggctggccagaggg

SEQ ID NO: 3305666 - DNA, 25 bp, Homo sapien
atgcccggctggccagaggggccat

SEQ ID NO: 3305667 - DNA, 25 bp, Homo sapien
agatgcccggctggccagaggggcc

SEQ ID NO: 3305668 - DNA, 25 bp, Homo sapien
gtgggaggtgtggcttcggcttcca

SEQ ID NO: 3305669 - DNA, 25 bp, Homo sapien
gggaggtgtggcttcggcttccaca

SEQ ID NO: 3305670 - DNA, 25 bp, Homo sapien
ggaggtgtggcttcggcttccacat

SEQ ID NO: 3305671 - DNA, 25 bp, Homo sapien
tgggaggtgtggcttcggcttccac

SEQ ID NO: 3305672 - DNA, 25 bp, Homo sapien
tctgcagttgaaccctaagggagca

SEQ ID NO: 3305673 - DNA, 25 bp, Homo sapien
aggtcgttctgctactgaggagtca

SEQ ID NO: 3305674 - DNA, 25 bp, Homo sapien
taagggagcaaggtcaaaagtcctg

SEQ ID NO: 3305675 - DNA, 25 bp, Homo sapien
tcatcttccacaaggtagggaggtg

SEQ ID NO: 3305676 - DNA, 25 bp, Homo sapien
tccgcaatgaagaggccagcatgtt

SEQ ID NO: 3305677 - DNA, 25 bp, Homo sapien
ctgggaattccgcaatgaagaggcc

SEQ ID NO: 3305678 - DNA, 25 bp, Homo sapien
catgttcattgcctgacgagggctg

SEQ ID NO: 3305679 - DNA, 25 bp, Homo sapien
ggcaccttgctactgcatctccaga

SEQ ID NO: 3305680 - DNA, 25 bp, Homo sapien
tctattccaacgaggagattttcct

SEQ ID NO: 3305681 - DNA, 25 bp, Homo sapien
gagcctgacagacccttcaaagttg

SEQ ID NO: 3305682 - DNA, 25 bp, Homo sapien
taatgcttctgatgccttggacaag

SEQ ID NO: 3305683 - DNA, 25 bp, Homo sapien
gacaagattcgctatgagagcctga

SEQ ID NO: 3305684 - DNA, 25 bp, Homo sapien
caacgatgatgaacagtatgcttgg

SEQ ID NO: 3305685 - DNA, 25 bp, Homo sapien
agcacaacgatgatgaacagtatgc

SEQ ID NO: 3305686 - DNA, 25 bp, Homo sapien
tgatgaacagtatgcttgggagtct

SEQ ID NO: 3305687 - DNA, 25 bp, Homo sapien
gaacagtatgcttgggagtcttctg

SEQ ID NO: 3305688 - DNA, 25 bp, Homo sapien
agaactaaacaagaccaagcctatt

SEQ ID NO: 3305689 - DNA, 25 bp, Homo sapien
aagaactaaacaagaccaagcctat

SEQ ID NO: 3305690 - DNA, 25 bp, Homo sapien
cattgttaagaagtgccttgagctc

SEQ ID NO: 3305691 - DNA, 25 bp, Homo sapien
tggtctcagttaccaaggagggtct

SEQ ID NO: 3305692 - DNA, 25 bp, Homo sapien
tgactgagcccattgacgagtactg

SEQ ID NO: 3305693 - DNA, 25 bp, Homo sapien
tcgaggtggtatatatgactgagcc

SEQ ID NO: 3305694 - DNA, 25 bp, Homo sapien
ccattttccagtctacgagagcaga

SEQ ID NO: 3305695 - DNA, 25 bp, Homo sapien
gccagtgcgcaaaacaatcaatccc

SEQ ID NO: 3305696 - DNA, 25 bp, Homo sapien
acaggacaggaatgcaagtggtgct

SEQ ID NO: 3305697 - DNA, 25 bp, Homo sapien
cccatatgctttcccacaggacagg

SEQ ID NO: 3305698 - DNA, 25 bp, Homo sapien
cctctgcaaggctatgggtgggaat

SEQ ID NO: 3305699 - DNA, 25 bp, Homo sapien
tgtgtttctgatgctcatgccttcg

SEQ ID NO: 3305700 - DNA, 25 bp, Homo sapien
catgccttcgtttctggcatgtggc

SEQ ID NO: 3305701 - DNA, 25 bp, Homo sapien
tctttgtagcactcagcacgtggga

SEQ ID NO: 3305702 - DNA, 25 bp, Homo sapien
tgcaacagcagacaatctaggcaaa

SEQ ID NO: 3305703 - DNA, 25 bp, Homo sapien
ctgcaacagcagacaatctaggcaa

SEQ ID NO: 3305704 - DNA, 25 bp, Homo sapien
aggaggagccacaaatccttcccaa

SEQ ID NO: 3305705 - DNA, 25 bp, Homo sapien
tagaatgcctaagcattggccagtg

SEQ ID NO: 3305706 - DNA, 25 bp, Homo sapien
aaaggctttgctaatctggttgacc

SEQ ID NO: 3305707 - DNA, 25 bp, Homo sapien
tcctacatccacgtgatggcaaagg

SEQ ID NO: 3305708 - DNA, 25 bp, Homo sapien
tctctcctttcttctatgactagtt

SEQ ID NO: 3305709 - DNA, 25 bp, Homo sapien
gaacagttaatttttcgttgatgcc

SEQ ID NO: 3305710 - DNA, 25 bp, Homo sapien
taatttttcgttgatgcccttacca

SEQ ID NO: 3305711 - DNA, 25 bp, Homo sapien
tagttgttccatttcctgtctcctt

SEQ ID NO: 3305712 - DNA, 25 bp, Homo sapien
aatttaagtagaaacatctgtacat

SEQ ID NO: 3305713 - DNA, 25 bp, Homo sapien
tgcacaagcaaatttaagtagaaac

SEQ ID NO: 3305714 - DNA, 25 bp, Homo sapien
agcaaatttaagtagaaacatctgt

SEQ ID NO: 3305715 - DNA, 25 bp, Homo sapien
ctgcacaagcaaatttaagtagaaa

SEQ ID NO: 3305716 - DNA, 25 bp, Homo sapien
aaggtgctcagtggcggtgttttcg

SEQ ID NO: 3305717 - DNA, 25 bp, Homo sapien
gctcagtggcggtgttttcgagcca

SEQ ID NO: 3305718 - DNA, 25 bp, Homo sapien
gtgctcagtggcggtgttttcgagc

SEQ ID NO: 3305719 - DNA, 25 bp, Homo sapien
ctcagtggcggtgttttcgagccag

SEQ ID NO: 3305720 - DNA, 25 bp, Homo sapien
ggtcatggccacaaactatacaagg

SEQ ID NO: 3305721 - DNA, 25 bp, Homo sapien
gcacccatccctctatttttctaaa

SEQ ID NO: 3305722 - DNA, 25 bp, Homo sapien
gccttgcaagatactcatggaaata

SEQ ID NO: 3305723 - DNA, 25 bp, Homo sapien
ggtccatgtcctctattaaaaaaca

SEQ ID NO: 3305724 - DNA, 25 bp, Homo sapien
ccccaggtgaggttaggtgttgtgc

SEQ ID NO: 3305725 - DNA, 25 bp, Homo sapien
tttcacctggttaactcctgcttcc

SEQ ID NO: 3305726 - DNA, 25 bp, Homo sapien
tcaggttcgttgtctgatgtcccca

SEQ ID NO: 3305727 - DNA, 25 bp, Homo sapien
tatcatccatgcagctttcacctgg

SEQ ID NO: 3305728 - DNA, 25 bp, Homo sapien
ccacgtctaatgggagtggtataat

SEQ ID NO: 3305729 - DNA, 25 bp, Homo sapien
tgtggaaagcctgagggagttgttg

SEQ ID NO: 3305730 - DNA, 25 bp, Homo sapien
atatgtggaaagcctgagggagttg

SEQ ID NO: 3305731 - DNA, 25 bp, Homo sapien
gaaagcctgagggagttgttgggca

SEQ ID NO: 3305732 - DNA, 25 bp, Homo sapien
gcagcgttaccctgtaaggagagca

SEQ ID NO: 3305733 - DNA, 25 bp, Homo sapien
ttggtcaaggaagtcacagaggccc

SEQ ID NO: 3305734 - DNA, 25 bp, Homo sapien
gacagggtggcatgaacaacagaga

SEQ ID NO: 3305735 - DNA, 25 bp, Homo sapien
tccgtcttcgaggagagtggacttc

SEQ ID NO: 3305736 - DNA, 25 bp, Homo sapien
tcagggtcatacatggcaagaggag

SEQ ID NO: 3305737 - DNA, 25 bp, Homo sapien
gtcatacatggcaagaggaggtgca

SEQ ID NO: 3305738 - DNA, 25 bp, Homo sapien
tcagtcagggtcatacatggcaaga

SEQ ID NO: 3305739 - DNA, 25 bp, Homo sapien
aggaggtgcacagtagttggtggga

SEQ ID NO: 3305740 - DNA, 25 bp, Homo sapien
tgaatacatggaattgactgtcatt

SEQ ID NO: 3305741 - DNA, 25 bp, Homo sapien
agtactgctttctgaatacatggaa

SEQ ID NO: 3305742 - DNA, 25 bp, Homo sapien
gtactgctttctgaatacatggaat

SEQ ID NO: 3305743 - DNA, 25 bp, Homo sapien
ctcataatgtcaattccagtactgc

SEQ ID NO: 3305744 - DNA, 25 bp, Homo sapien
tgtttggatccaatcccagaatacc

SEQ ID NO: 3305745 - DNA, 25 bp, Homo sapien
tcactgaccgcttattgccacaaaa

SEQ ID NO: 3305746 - DNA, 25 bp, Homo sapien
tccccaggttgttataggtctcgag

SEQ ID NO: 3305747 - DNA, 25 bp, Homo sapien
gattacagcctcctctattgttccc

SEQ ID NO: 3305748 - DNA, 25 bp, Homo sapien
cccattctcctgagtagctgggact

SEQ ID NO: 3305749 - DNA, 25 bp, Homo sapien
ctgcgcccggctgttttttcatctt

SEQ ID NO: 3305750 - DNA, 25 bp, Homo sapien
ccattctcctgagtagctgggacta

SEQ ID NO: 3305751 - DNA, 25 bp, Homo sapien
ccactgcgcccggctgttttttcat

SEQ ID NO: 3305752 - DNA, 25 bp, Homo sapien
tagtttagtttgtggcttcatggaa

SEQ ID NO: 3305753 - DNA, 25 bp, Homo sapien
tgagtctggaaataactaatgtgtt

SEQ ID NO: 3305754 - DNA, 25 bp, Homo sapien
tgttcattctatagaagaaatgcaa

SEQ ID NO: 3305755 - DNA, 25 bp, Homo sapien
gcaaactatcactgtattttaatat

SEQ ID NO: 3305756 - DNA, 25 bp, Homo sapien
gaaaattacatgtcaaagagtgctt

SEQ ID NO: 3305757 - DNA, 25 bp, Homo sapien
aatataaatagacgaagcctctctg

SEQ ID NO: 3305758 - DNA, 25 bp, Homo sapien
gaggctatatagcttgcaaaatatg

SEQ ID NO: 3305759 - DNA, 25 bp, Homo sapien
taaagaaaacgatacataaagtgaa

SEQ ID NO: 3305760 - DNA, 25 bp, Homo sapien
cgggtacttcactttgtgtctgttt

SEQ ID NO: 3305761 - DNA, 25 bp, Homo sapien
cctctcgaggtggagaccgcgaaac

SEQ ID NO: 3305762 - DNA, 25 bp, Homo sapien
acgggtacttcactttgtgtctgtt

SEQ ID NO: 3305763 - DNA, 25 bp, Homo sapien
tcctctcgaggtggagaccgcgaaa

SEQ ID NO: 3305764 - DNA, 25 bp, Homo sapien
tggagatggacgtagagtggcgccc

SEQ ID NO: 3305765 - DNA, 25 bp, Homo sapien
cgataaccccggcttcgaggccgag

SEQ ID NO: 3305766 - DNA, 25 bp, Homo sapien
ctccgctctcgtcgtgctcccggca

SEQ ID NO: 3305767 - DNA, 25 bp, Homo sapien
cgtgagctccgtgggcgcgcggagc

SEQ ID NO: 3305768 - DNA, 25 bp, Homo sapien
agtcggcggcggggacccgctgcat

SEQ ID NO: 3305769 - DNA, 25 bp, Homo sapien
cagtcggcggcggggacccgctgca

SEQ ID NO: 3305770 - DNA, 25 bp, Homo sapien
ccagtcggcggcggggacccgctgc

SEQ ID NO: 3305771 - DNA, 25 bp, Homo sapien
cccagtcggcggcggggacccgctg

SEQ ID NO: 3305772 - DNA, 25 bp, Homo sapien
agccgccccgagtggcctgggcgga

SEQ ID NO: 3305773 - DNA, 25 bp, Homo sapien
gagaggctggttcgcgggctgcgag

SEQ ID NO: 3305774 - DNA, 25 bp, Homo sapien
gggcggagaggctggttcgcgggct

SEQ ID NO: 3305775 - DNA, 25 bp, Homo sapien
gcggagaggctggttcgcgggctgc

SEQ ID NO: 3305776 - DNA, 25 bp, Homo sapien
gaggaaagcagcactaaccgagaga

SEQ ID NO: 3305777 - DNA, 25 bp, Homo sapien
gggaacaagactcatggaggaaagc

SEQ ID NO: 3305778 - DNA, 25 bp, Homo sapien
gcactaaccgagagaaataccttaa

SEQ ID NO: 3305779 - DNA, 25 bp, Homo sapien
gaacaagactcatggaggaaagcag

SEQ ID NO: 3305780 - DNA, 25 bp, Homo sapien
gcagcctcgagctcctaggcttcag

SEQ ID NO: 3305781 - DNA, 25 bp, Homo sapien
gtcttgatctgtttcacaggccgga

SEQ ID NO: 3305782 - DNA, 25 bp, Homo sapien
agagtcttgatctgtttcacaggcc

SEQ ID NO: 3305783 - DNA, 25 bp, Homo sapien
cagcctcgagctcctaggcttcagt

SEQ ID NO: 3305784 - DNA, 25 bp, Homo sapien
cgaagcctcacagtatcagcagagt

SEQ ID NO: 3305785 - DNA, 25 bp, Homo sapien
tcaaggctctttggttggagttcac

SEQ ID NO: 3305786 - DNA, 25 bp, Homo sapien
tatattatcatccagctcagagtgt

SEQ ID NO: 3305787 - DNA, 25 bp, Homo sapien
caaatgcctgtctgagtaattcccc

SEQ ID NO: 3305788 - DNA, 25 bp, Homo sapien
gacccacaatcatgaacagaggcag

SEQ ID NO: 3305789 - DNA, 25 bp, Homo sapien
gagtgaatgctaccttccaagtggg

SEQ ID NO: 3305790 - DNA, 25 bp, Homo sapien
ggatctcaagatgcaagacccacaa

SEQ ID NO: 3305791 - DNA, 25 bp, Homo sapien
tgtagctgaccaccagagtttgtag

SEQ ID NO: 3305792 - DNA, 25 bp, Homo sapien
catcaattttaacaggaccatgagc

SEQ ID NO: 3305793 - DNA, 25 bp, Homo sapien
tattatatacagtcacaccattttg

SEQ ID NO: 3305794 - DNA, 25 bp, Homo sapien
gccatcgccattatgctgcattatt

SEQ ID NO: 3305795 - DNA, 25 bp, Homo sapien
gtatccattgaacactaactcccaa

SEQ ID NO: 3305796 - DNA, 25 bp, Homo sapien
tccctgtgtactggtattattaaaa

SEQ ID NO: 3305797 - DNA, 25 bp, Homo sapien
aaaagacattacatacgcaagtctt

SEQ ID NO: 3305798 - DNA, 25 bp, Homo sapien
gttattaatgtgtaatactgagcac

SEQ ID NO: 3305799 - DNA, 25 bp, Homo sapien
gtctttctcgacaatcaagaatgtt

SEQ ID NO: 3305800 - DNA, 25 bp, Homo sapien
aatccaaacgcctatgaatttcaac

SEQ ID NO: 3305801 - DNA, 25 bp, Homo sapien
ctcccagaaaatccaaacgcctatg

SEQ ID NO: 3305802 - DNA, 25 bp, Homo sapien
ccagaaaatccaaacgcctatgaat

SEQ ID NO: 3305803 - DNA, 25 bp, Homo sapien
gacagccagtgctcccagaaaatcc

SEQ ID NO: 3305804 - DNA, 25 bp, Homo sapien
tgaaccttcaatctcgagggctcag

SEQ ID NO: 3305805 - DNA, 25 bp, Homo sapien
gctgtcggctggtacttcaactgta

SEQ ID NO: 3305806 - DNA, 25 bp, Homo sapien
gctgtagtaataacttcaccctcta

SEQ ID NO: 3305807 - DNA, 25 bp, Homo sapien
tgcttgcctggtgcgctgatctgaa

SEQ ID NO: 3305808 - DNA, 25 bp, Homo sapien
acactgagttatctctgtgaaatct

SEQ ID NO: 3305809 - DNA, 25 bp, Homo sapien
cgtggagcatggaaacactgagtta

SEQ ID NO: 3305810 - DNA, 25 bp, Homo sapien
gccgtggagcatggaaacactgagt

SEQ ID NO: 3305811 - DNA, 25 bp, Homo sapien
agagccgtggagcatggaaacactg

SEQ ID NO: 3305812 - DNA, 25 bp, Homo sapien
aattatgtagcagtaaccccagcct

SEQ ID NO: 3305813 - DNA, 25 bp, Homo sapien
atgtagcagtaaccccagcctctca

SEQ ID NO: 3305814 - DNA, 25 bp, Homo sapien
ccaattatgtagcagtaaccccagc

SEQ ID NO: 3305815 - DNA, 25 bp, Homo sapien
ctgcccaattatgtagcagtaaccc

SEQ ID NO: 3305816 - DNA, 25 bp, Homo sapien
ggcaggcagtatcagactcagtgga

SEQ ID NO: 3305817 - DNA, 25 bp, Homo sapien
tccaggttggacacgtcctcctact

SEQ ID NO: 3305818 - DNA, 25 bp, Homo sapien
cgggcagagtctaaagctgcagaaa

SEQ ID NO: 3305819 - DNA, 25 bp, Homo sapien
tccagggcatctaaacgggcagagt

SEQ ID NO: 3305820 - DNA, 25 bp, Homo sapien
tagcttgacacacaaatccctatgg

SEQ ID NO: 3305821 - DNA, 25 bp, Homo sapien
gattactcagagaatagccacgctt

SEQ ID NO: 3305822 - DNA, 25 bp, Homo sapien
tatgtatacaaacaggctgcaagcc

SEQ ID NO: 3305823 - DNA, 25 bp, Homo sapien
tctgtgtttaccaaggaaccctctg

SEQ ID NO: 3305824 - DNA, 25 bp, Homo sapien
gatgcagaaacccacttttcgcctt

SEQ ID NO: 3305825 - DNA, 25 bp, Homo sapien
ccttgaaactaatgccagatgcaga

SEQ ID NO: 3305826 - DNA, 25 bp, Homo sapien
ccagatgcagaaacccacttttcgc

SEQ ID NO: 3305827 - DNA, 25 bp, Homo sapien
gtactcagaacaaccttgaaactaa

SEQ ID NO: 3305828 - DNA, 25 bp, Homo sapien
tctacaggaggtatctctgcaaatg

SEQ ID NO: 3305829 - DNA, 25 bp, Homo sapien
tattagcatattgacacagtctcac

SEQ ID NO: 3305830 - DNA, 25 bp, Homo sapien
cccctgctaagtagagtttttacat

SEQ ID NO: 3305831 - DNA, 25 bp, Homo sapien
cctctgggccagatctggtgttcct

SEQ ID NO: 3305832 - DNA, 25 bp, Homo sapien
tgtcagggcgtctatacaccatgat

SEQ ID NO: 3305833 - DNA, 25 bp, Homo sapien
ttccaagatgaccagtgtcagggcg

SEQ ID NO: 3305834 - DNA, 25 bp, Homo sapien
gggcacccactgacaaactaaatga

SEQ ID NO: 3305835 - DNA, 25 bp, Homo sapien
tgttaacattaagggaagctgagca

SEQ ID NO: 3305836 - DNA, 25 bp, Homo sapien
ggttacgtgacctcccagagctaga

SEQ ID NO: 3305837 - DNA, 25 bp, Homo sapien
gattctgacgcacacctggattata

SEQ ID NO: 3305838 - DNA, 25 bp, Homo sapien
cctttatgaaggtagatctggagct

SEQ ID NO: 3305839 - DNA, 25 bp, Homo sapien
tgttctcataacagcaacagaggga

SEQ ID NO: 3305840 - DNA, 25 bp, Homo sapien
gaagggctactaacctacctattca

SEQ ID NO: 3305841 - DNA, 25 bp, Homo sapien
taactaatatgcgatacatgatgtc

SEQ ID NO: 3305842 - DNA, 25 bp, Homo sapien
ccatagcatcataaagtattaagac

SEQ ID NO: 3305843 - DNA, 25 bp, Homo sapien
gtaataacttgtcaggagtttccag

SEQ ID NO: 3305844 - DNA, 25 bp, Homo sapien
cagtgtgatggcaagggaacagaaa

SEQ ID NO: 3305845 - DNA, 25 bp, Homo sapien
tgcaacagtgtgatggcaagggaac

SEQ ID NO: 3305846 - DNA, 25 bp, Homo sapien
ttttttatgtgaggataaatcatac

SEQ ID NO: 3305847 - DNA, 25 bp, Homo sapien
gctgctgtgcaacagtgtgatggca

SEQ ID NO: 3305848 - DNA, 25 bp, Homo sapien
caaggccacgtgattcttccacaag

SEQ ID NO: 3305849 - DNA, 25 bp, Homo sapien
gatcgatgccctgctttaccaaata

SEQ ID NO: 3305850 - DNA, 25 bp, Homo sapien
taacaatcatacaagccaaggccac

SEQ ID NO: 3305851 - DNA, 25 bp, Homo sapien
caggtaggcaattgtgaggaaaata

SEQ ID NO: 3305852 - DNA, 25 bp, Homo sapien
tcctgggcagaagttttgtcccaaa

SEQ ID NO: 3305853 - DNA, 25 bp, Homo sapien
agtcctgggcagaagttttgtccca

SEQ ID NO: 3305854 - DNA, 25 bp, Homo sapien
attgtttcctgttgcattgagtcct

SEQ ID NO: 3305855 - DNA, 25 bp, Homo sapien
tgtttcctgttgcattgagtcctgg

SEQ ID NO: 3305856 - DNA, 25 bp, Homo sapien
acagccaagatgcaatggttgtgag

SEQ ID NO: 3305857 - DNA, 25 bp, Homo sapien
cgtaaatccatatcgtggaatgctg

SEQ ID NO: 3305858 - DNA, 25 bp, Homo sapien
tgctgaagtactgaagccatgacag

SEQ ID NO: 3305859 - DNA, 25 bp, Homo sapien
caatggttgtgagattgaccaacag

SEQ ID NO: 3305860 - DNA, 25 bp, Homo sapien
gagaagtgttgctacagaaaccaca

SEQ ID NO: 3305861 - DNA, 25 bp, Homo sapien
catcataacgaagaaggcatctgcc

SEQ ID NO: 3305862 - DNA, 25 bp, Homo sapien
catggaactggctgaataagccacc

SEQ ID NO: 3305863 - DNA, 25 bp, Homo sapien
gccaccatcataagggtaaacatca

SEQ ID NO: 3305864 - DNA, 25 bp, Homo sapien
taatacttggtaacatcctcatggg

SEQ ID NO: 3305865 - DNA, 25 bp, Homo sapien
tgtagtatccgctgatgtattcatg

SEQ ID NO: 3305866 - DNA, 25 bp, Homo sapien
taacatcctcatgggtaataaatca

SEQ ID NO: 3305867 - DNA, 25 bp, Homo sapien
agatgacactctgtagtatccgctg

SEQ ID NO: 3305868 - DNA, 25 bp, Homo sapien
gctggacagccccgttcccagaaca

SEQ ID NO: 3305869 - DNA, 25 bp, Homo sapien
tgctggacagccccgttcccagaac

SEQ ID NO: 3305870 - DNA, 25 bp, Homo sapien
gctgaaacactgctgaaacactggt

SEQ ID NO: 3305871 - DNA, 25 bp, Homo sapien
cactggttggtcgtcaggaagaaga

SEQ ID NO: 3305872 - DNA, 25 bp, Homo sapien
taccacaaagagttccacggctgaa

SEQ ID NO: 3305873 - DNA, 25 bp, Homo sapien
gagttccacggctgaaacactgctg

SEQ ID NO: 3305874 - DNA, 25 bp, Homo sapien
gttctggattccagtagaatcattt

SEQ ID NO: 3305875 - DNA, 25 bp, Homo sapien
tgttctggattccagtagaatcatt

SEQ ID NO: 3305876 - DNA, 25 bp, Homo sapien
ctgttctggattccagtagaatcat

SEQ ID NO: 3305877 - DNA, 25 bp, Homo sapien
ttctggattccagtagaatcatttt

SEQ ID NO: 3305878 - DNA, 25 bp, Homo sapien
accagtcccagtacgactgtgacaa

SEQ ID NO: 3305879 - DNA, 25 bp, Homo sapien
gtcccagtacgactgtgacaatgat

SEQ ID NO: 3305880 - DNA, 25 bp, Homo sapien
tataaccagtcccagtacgactgtg

SEQ ID NO: 3305881 - DNA, 25 bp, Homo sapien
taaccagtcccagtacgactgtgac

SEQ ID NO: 3305882 - DNA, 25 bp, Homo sapien
gatgacagaaggaggtggtgtagct

SEQ ID NO: 3305883 - DNA, 25 bp, Homo sapien
cttggaaacccatctgagttgatga

SEQ ID NO: 3305884 - DNA, 25 bp, Homo sapien
aggcctggggattacccagcaagtt

SEQ ID NO: 3305885 - DNA, 25 bp, Homo sapien
caagtttttgaatgaacgcttggaa

SEQ ID NO: 3305886 - DNA, 25 bp, Homo sapien
tttttctatgagtggcttatcctgc

SEQ ID NO: 3305887 - DNA, 25 bp, Homo sapien
tttctatgagtggcttatcctgctt

SEQ ID NO: 3305888 - DNA, 25 bp, Homo sapien
ttttctatgagtggcttatcctgct

SEQ ID NO: 3305889 - DNA, 25 bp, Homo sapien
aaagtcttcttctctgtttaatgcc

SEQ ID NO: 3305890 - DNA, 25 bp, Homo sapien
aagtcttcttctctgtttaatgcca

SEQ ID NO: 3305891 - DNA, 25 bp, Homo sapien
agtcttcttctctgtttaatgccac

SEQ ID NO: 3305892 - DNA, 25 bp, Homo sapien
ttaaagtcttcttctctgtttaatg

SEQ ID NO: 3305893 - DNA, 25 bp, Homo sapien
tgtccaagaagaagtctgcagggtt

SEQ ID NO: 3305894 - DNA, 25 bp, Homo sapien
aatctccattaatgatgtccaagaa

SEQ ID NO: 3305895 - DNA, 25 bp, Homo sapien
gaagtctgcagggttattataggcc

SEQ ID NO: 3305896 - DNA, 25 bp, Homo sapien
ttattataggcctcacagtgataac

SEQ ID NO: 3305897 - DNA, 25 bp, Homo sapien
gaaagaaggcagctcaaaaacacaa

SEQ ID NO: 3305898 - DNA, 25 bp, Homo sapien
aagaaggcagctcaaaaacacaaac

SEQ ID NO: 3305899 - DNA, 25 bp, Homo sapien
atgaaagaaggcagctcaaaaacac

SEQ ID NO: 3305900 - DNA, 25 bp, Homo sapien
ctatgaaagaaggcagctcaaaaac

SEQ ID NO: 3305901 - DNA, 25 bp, Homo sapien
cttgaagatggaatatcgaggctga

SEQ ID NO: 3305902 - DNA, 25 bp, Homo sapien
cagctgattcaaagtatcccaaggc

SEQ ID NO: 3305903 - DNA, 25 bp, Homo sapien
cttcctgaggccaataaggtgaggc

SEQ ID NO: 3305904 - DNA, 25 bp, Homo sapien
tgagcaggcccgtggaacataagtc

SEQ ID NO: 3305905 - DNA, 25 bp, Homo sapien
ccttccacgaaaattgtgagatctc

SEQ ID NO: 3305906 - DNA, 25 bp, Homo sapien
ctggtagagcaggatgctgctgtaa

SEQ ID NO: 3305907 - DNA, 25 bp, Homo sapien
acgaaaattgtgagatctccccagc

SEQ ID NO: 3305908 - DNA, 25 bp, Homo sapien
tactggtagagcaggatgctgctgt

SEQ ID NO: 3305909 - DNA, 25 bp, Homo sapien
gccagttgtaggctcatccaagaac

SEQ ID NO: 3305910 - DNA, 25 bp, Homo sapien
cacaccacggataaactgagttcca

SEQ ID NO: 3305911 - DNA, 25 bp, Homo sapien
gataagctccattcctatactagtc

SEQ ID NO: 3305912 - DNA, 25 bp, Homo sapien
gatggaaggatcagtgataagctcc

SEQ ID NO: 3305913 - DNA, 25 bp, Homo sapien
cgtcagagtgcccatcacaacatca

SEQ ID NO: 3305914 - DNA, 25 bp, Homo sapien
tcatagttgttgcaagccgaagagc

SEQ ID NO: 3305915 - DNA, 25 bp, Homo sapien
tgaatgaccctgttaatccgttcgt

SEQ ID NO: 3305916 - DNA, 25 bp, Homo sapien
taagttttctctcaccgtcagagtg

SEQ ID NO: 3305917 - DNA, 25 bp, Homo sapien
ggaaacagaaaatgcaaacccacta

SEQ ID NO: 3305918 - DNA, 25 bp, Homo sapien
ccatatagaaacagaggaaacagaa

SEQ ID NO: 3305919 - DNA, 25 bp, Homo sapien
aacagaaaatgcaaacccactaata

SEQ ID NO: 3305920 - DNA, 25 bp, Homo sapien
agaaaatgcaaacccactaatactt

SEQ ID NO: 3305921 - DNA, 25 bp, Homo sapien
ggtcgcggtgctccatttatcagaa

SEQ ID NO: 3305922 - DNA, 25 bp, Homo sapien
cagataatccacttggatctttcct

SEQ ID NO: 3305923 - DNA, 25 bp, Homo sapien
ttgaaattggcaggtcgcggtgctc

SEQ ID NO: 3305924 - DNA, 25 bp, Homo sapien
gaacatctccagataatccacttgg

SEQ ID NO: 3305925 - DNA, 25 bp, Homo sapien
caggatggcgttgagaccaggtttc

SEQ ID NO: 3305926 - DNA, 25 bp, Homo sapien
tcaggtcattggaagctgtcgcggg

SEQ ID NO: 3305927 - DNA, 25 bp, Homo sapien
tccttgtgacactgggataaaaact

SEQ ID NO: 3305928 - DNA, 25 bp, Homo sapien
tctcaactggttttcgacaaggtag

SEQ ID NO: 3305929 - DNA, 25 bp, Homo sapien
cagttttactcgatagcagatgtta

SEQ ID NO: 3305930 - DNA, 25 bp, Homo sapien
cgcattccgaagacaggcccgaatt

SEQ ID NO: 3305931 - DNA, 25 bp, Homo sapien
tgtcctatataagtattggtgatgg

SEQ ID NO: 3305932 - DNA, 25 bp, Homo sapien
gggctgtattttgtcgcattccgaa

SEQ ID NO: 3305933 - DNA, 25 bp, Homo sapien
gaagaaacaattgtcctatataagt

SEQ ID NO: 3305934 - DNA, 25 bp, Homo sapien
tagagctcggtcttaaccaaaggct

SEQ ID NO: 3305935 - DNA, 25 bp, Homo sapien
tcaggatctcaggatgcgtgcgctc

SEQ ID NO: 3305936 - DNA, 25 bp, Homo sapien
tcggaggcagcgctttaacaattaa

SEQ ID NO: 3305937 - DNA, 25 bp, Homo sapien
tgtgcacggtgcgttcctaaatcct

SEQ ID NO: 3305938 - DNA, 25 bp, Homo sapien
aaccttttgagtgggcacagcacgc

SEQ ID NO: 3305939 - DNA, 25 bp, Homo sapien
ctcaggcagcgctgacacgaacttc

SEQ ID NO: 3305940 - DNA, 25 bp, Homo sapien
tgccgcgtctctcaatctcagtggg

SEQ ID NO: 3305941 - DNA, 25 bp, Homo sapien
tgcgcgcccggaaccttttgagtgg

SEQ ID NO: 3305942 - DNA, 25 bp, Homo sapien
ccgcctccgggatcgaacggaatga

SEQ ID NO: 3305943 - DNA, 25 bp, Homo sapien
cggctgaaagcgcacacgtgtcctg

SEQ ID NO: 3305944 - DNA, 25 bp, Homo sapien
gaccgccagagctgaacgcagtggc

SEQ ID NO: 3305945 - DNA, 25 bp, Homo sapien
gtgacacgcagggacaagccaaaca

SEQ ID NO: 3305946 - DNA, 25 bp, Homo sapien
gggacgctgacgcacaggttgccca

SEQ ID NO: 3305947 - DNA, 25 bp, Homo sapien
tgacgcacaggttgcccagtcacaa

SEQ ID NO: 3305948 - DNA, 25 bp, Homo sapien
ctcgtctgacctagctgggtttggt

SEQ ID NO: 3305949 - DNA, 25 bp, Homo sapien
tagctgggtttggtcgccgtcactg

SEQ ID NO: 3305950 - DNA, 25 bp, Homo sapien
catgttcaggaaacgggccatcagg

SEQ ID NO: 3305951 - DNA, 25 bp, Homo sapien
gtgtagccatcccaacatctacctg

SEQ ID NO: 3305952 - DNA, 25 bp, Homo sapien
tgtggaaaggctagaaagtgattgc

SEQ ID NO: 3305953 - DNA, 25 bp, Homo sapien
tctgtgcaatattccgatggtgtgg

SEQ ID NO: 3305954 - DNA, 25 bp, Homo sapien
taagaatccctcacgctcttctttt

SEQ ID NO: 3305955 - DNA, 25 bp, Homo sapien
gggctattctgccataaacgaggta

SEQ ID NO: 3305956 - DNA, 25 bp, Homo sapien
tattctgccataaacgaggtagtga

SEQ ID NO: 3305957 - DNA, 25 bp, Homo sapien
gaagaagggctattctgccataaac

SEQ ID NO: 3305958 - DNA, 25 bp, Homo sapien
tgcataaccgaacataatcacaaat

SEQ ID NO: 3305959 - DNA, 25 bp, Homo sapien
ctgaatgacgaattgcataaccgaa

SEQ ID NO: 3305960 - DNA, 25 bp, Homo sapien
cgaattgcataaccgaacataatca

SEQ ID NO: 3305961 - DNA, 25 bp, Homo sapien
gaatgacgaattgcataaccgaaca

SEQ ID NO: 3305962 - DNA, 25 bp, Homo sapien
aatcacaattacctcaagtatcttc

SEQ ID NO: 3305963 - DNA, 25 bp, Homo sapien
tatatgcacctacataaaaaggtag

SEQ ID NO: 3305964 - DNA, 25 bp, Homo sapien
aaaaaatcacaattacctcaagtat

SEQ ID NO: 3305965 - DNA, 25 bp, Homo sapien
gtactaacagggaagtttatatatg

SEQ ID NO: 3305966 - DNA, 25 bp, Homo sapien
actgtgtgcttgttgtcaggcccga

SEQ ID NO: 3305967 - DNA, 25 bp, Homo sapien
ccttgtcaagagaagtgttaacctt

SEQ ID NO: 3305968 - DNA, 25 bp, Homo sapien
agagaagtgttaaccttctgtcctt

SEQ ID NO: 3305969 - DNA, 25 bp, Homo sapien
taaaaatgatagttggatgccatga

SEQ ID NO: 3305970 - DNA, 25 bp, Homo sapien
cagaatctatatactaagagagttg

SEQ ID NO: 3305971 - DNA, 25 bp, Homo sapien
taatcctggcacttccgtaggctga

SEQ ID NO: 3305972 - DNA, 25 bp, Homo sapien
caggtcttctctaggagaagacaga

SEQ ID NO: 3305973 - DNA, 25 bp, Homo sapien
aggtcttctctaggagaagacagaa

SEQ ID NO: 3305974 - DNA, 25 bp, Homo sapien
caattaatggctgcagcgttctcat

SEQ ID NO: 3305975 - DNA, 25 bp, Homo sapien
tcctcctggtttccaattaatggct

SEQ ID NO: 3305976 - DNA, 25 bp, Homo sapien
tggtttccaattaatggctgcagcg

SEQ ID NO: 3305977 - DNA, 25 bp, Homo sapien
tttccaattaatggctgcagcgttc

SEQ ID NO: 3305978 - DNA, 25 bp, Homo sapien
gataatcgaccaccattgtccccaa

SEQ ID NO: 3305979 - DNA, 25 bp, Homo sapien
tcacttgttcagatacacactgcta

SEQ ID NO: 3305980 - DNA, 25 bp, Homo sapien
cacactgctatctttctggtataat

SEQ ID NO: 3305981 - DNA, 25 bp, Homo sapien
ttccatctcctgacaaaatctctct

SEQ ID NO: 3305982 - DNA, 25 bp, Homo sapien
taagacatacaaagatctggccagg

SEQ ID NO: 3305983 - DNA, 25 bp, Homo sapien
tttgtcgaacctggcaatctcagtg

SEQ ID NO: 3305984 - DNA, 25 bp, Homo sapien
caaacgaacagctgatggagaacag

SEQ ID NO: 3305985 - DNA, 25 bp, Homo sapien
tcccggataaagcagagtcaagtct

SEQ ID NO: 3305986 - DNA, 25 bp, Homo sapien
tctgctgataatcactgggtctcca

SEQ ID NO: 3305987 - DNA, 25 bp, Homo sapien
cttcctaagttacacagcaagctga

SEQ ID NO: 3305988 - DNA, 25 bp, Homo sapien
gcaagatggtttcccgctttagttg

SEQ ID NO: 3305989 - DNA, 25 bp, Homo sapien
aattctccatgttcctaaaggtagc

SEQ ID NO: 3305990 - DNA, 25 bp, Homo sapien
tgctttcaccagtaagtggtccaga

SEQ ID NO: 3305991 - DNA, 25 bp, Homo sapien
caaaagaaacccatagctgcctaag

SEQ ID NO: 3305992 - DNA, 25 bp, Homo sapien
ccatttaaagactcacagtagcttc

SEQ ID NO: 3305993 - DNA, 25 bp, Homo sapien
actgaacatgtacagcggaacataa

SEQ ID NO: 3305994 - DNA, 25 bp, Homo sapien
tcttgacatgctcagtgaaaaactg

SEQ ID NO: 3305995 - DNA, 25 bp, Homo sapien
cgctgatctagtgagttaggagacc

SEQ ID NO: 3305996 - DNA, 25 bp, Homo sapien
taggagacctttttgatcttatcag

SEQ ID NO: 3305997 - DNA, 25 bp, Homo sapien
cagaaactctaagtcccagctggta

SEQ ID NO: 3305998 - DNA, 25 bp, Homo sapien
aggcccatcgtccactggaggcaaa

SEQ ID NO: 3305999 - DNA, 25 bp, Homo sapien
ggcccatcgtccactggaggcaaag

SEQ ID NO: 3306000 - DNA, 25 bp, Homo sapien
tcaggcccatcgtccactggaggca

SEQ ID NO: 3306001 - DNA, 25 bp, Homo sapien
ccatcgtccactggaggcaaagctt

SEQ ID NO: 3306002 - DNA, 25 bp, Homo sapien
ctgttatcctcagtaccgtactgta

SEQ ID NO: 3306003 - DNA, 25 bp, Homo sapien
tactactgcagtactgttatcctca

SEQ ID NO: 3306004 - DNA, 25 bp, Homo sapien
tgcagtactgttatcctcagtaccg

SEQ ID NO: 3306005 - DNA, 25 bp, Homo sapien
aaaaggcactactactgcagtactg

SEQ ID NO: 3306006 - DNA, 25 bp, Homo sapien
ttgcacacggaataacagatgaccc

SEQ ID NO: 3306007 - DNA, 25 bp, Homo sapien
ttttggcaacagaaacaccagtgga

SEQ ID NO: 3306008 - DNA, 25 bp, Homo sapien
gcattcagcgtagggagtaacacac

SEQ ID NO: 3306009 - DNA, 25 bp, Homo sapien
gaagatacctgtaaagcattcagcg

SEQ ID NO: 3306010 - DNA, 25 bp, Homo sapien
gacatcagaatgtttattactgggc

SEQ ID NO: 3306011 - DNA, 25 bp, Homo sapien
aatttcttgaccagaggaactgtta

SEQ ID NO: 3306012 - DNA, 25 bp, Homo sapien
gaaacagatatgcacaaatagacat

SEQ ID NO: 3306013 - DNA, 25 bp, Homo sapien
cacacctggatactattcctaagaa

SEQ ID NO: 3306014 - DNA, 25 bp, Homo sapien
attagaatgcaaatatctgcaagac

SEQ ID NO: 3306015 - DNA, 25 bp, Homo sapien
gaattagaatgcaaatatctgcaag

SEQ ID NO: 3306016 - DNA, 25 bp, Homo sapien
aagaagtgttcatccatgaaattgg

SEQ ID NO: 3306017 - DNA, 25 bp, Homo sapien
aagtgttcatccatgaaattgggcc

SEQ ID NO: 3306018 - DNA, 25 bp, Homo sapien
cttaatttgggaaatgcaaaaatag

SEQ ID NO: 3306019 - DNA, 25 bp, Homo sapien
aataatacgaagcatagtttatgtt

SEQ ID NO: 3306020 - DNA, 25 bp, Homo sapien
agcacgggtgaaggcagtaaccaaa

SEQ ID NO: 3306021 - DNA, 25 bp, Homo sapien
tgcccatctaagcaaataatacttt

SEQ ID NO: 3306022 - DNA, 25 bp, Homo sapien
ctcaaaagctaaaacacaatgcctg

SEQ ID NO: 3306023 - DNA, 25 bp, Homo sapien
attcactgcaacactcaaaagctaa

SEQ ID NO: 3306024 - DNA, 25 bp, Homo sapien
tggaaatattatggaatcaagtgta

SEQ ID NO: 3306025 - DNA, 25 bp, Homo sapien
aattggaaatattatggaatcaagt

SEQ ID NO: 3306026 - DNA, 25 bp, Homo sapien
gcactgattgacaaagtcacaaatc

SEQ ID NO: 3306027 - DNA, 25 bp, Homo sapien
cgcatgggctgcttcgttgggatca

SEQ ID NO: 3306028 - DNA, 25 bp, Homo sapien
atgaagttaattccatctgtggtga

SEQ ID NO: 3306029 - DNA, 25 bp, Homo sapien
tcttgactattcaccatgaagttaa

SEQ ID NO: 3306030 - DNA, 25 bp, Homo sapien
ctgactggatgcaagtgatgctggc

SEQ ID NO: 3306031 - DNA, 25 bp, Homo sapien
gggtgcaggtgttagctgattgggt

SEQ ID NO: 3306032 - DNA, 25 bp, Homo sapien
tggatgcaagtgatgctggccgatt

SEQ ID NO: 3306033 - DNA, 25 bp, Homo sapien
gcaggtgttagctgattgggtgcag

SEQ ID NO: 3306034 - DNA, 25 bp, Homo sapien
agcaggaccatttcaccaggagaat

SEQ ID NO: 3306035 - DNA, 25 bp, Homo sapien
acagcaggaccatttcaccaggaga

SEQ ID NO: 3306036 - DNA, 25 bp, Homo sapien
tgctgcatgattgagtgcaggtgat

SEQ ID NO: 3306037 - DNA, 25 bp, Homo sapien
cagcaggaccatttcaccaggagaa

SEQ ID NO: 3306038 - DNA, 25 bp, Homo sapien
gcttccaagaaaggtgcagcagaga

SEQ ID NO: 3306039 - DNA, 25 bp, Homo sapien
cagttaaggcttccaagaaaggtgc

SEQ ID NO: 3306040 - DNA, 25 bp, Homo sapien
gcagagacaatcctacattcactct

SEQ ID NO: 3306041 - DNA, 25 bp, Homo sapien
tctccgcaggtttatcaagtgtttg

SEQ ID NO: 3306042 - DNA, 25 bp, Homo sapien
gacaccactggtcttaaggtccaaa

SEQ ID NO: 3306043 - DNA, 25 bp, Homo sapien
tgccatttacgtgaggctgccccaa

SEQ ID NO: 3306044 - DNA, 25 bp, Homo sapien
tacttcttgtcattgcaagcctgcc

SEQ ID NO: 3306045 - DNA, 25 bp, Homo sapien
tcaggttctgctatgacaccactgg

SEQ ID NO: 3306046 - DNA, 25 bp, Homo sapien
ttttctacacaaaatagcccggctg

SEQ ID NO: 3306047 - DNA, 25 bp, Homo sapien
caatggtcagcttcatgggttttcc

SEQ ID NO: 3306048 - DNA, 25 bp, Homo sapien
agttcaataccatctcgcaataggg

SEQ ID NO: 3306049 - DNA, 25 bp, Homo sapien
ctttctggagtatggtcaatggtca

SEQ ID NO: 3306050 - DNA, 25 bp, Homo sapien
gtagtcccagaggtcagaagagttg

SEQ ID NO: 3306051 - DNA, 25 bp, Homo sapien
cagtagtcccagaggtcagaagagt

SEQ ID NO: 3306052 - DNA, 25 bp, Homo sapien
tgcagtagtcccagaggtcagaaga

SEQ ID NO: 3306053 - DNA, 25 bp, Homo sapien
ctgttgcagtagtcccagaggtcag

SEQ ID NO: 3306054 - DNA, 25 bp, Homo sapien
catggatatctggtgtccagactga

SEQ ID NO: 3306055 - DNA, 25 bp, Homo sapien
catgcaaacggaaaggttgctaacc

SEQ ID NO: 3306056 - DNA, 25 bp, Homo sapien
taagtaacagcatgcagagaaacaa

SEQ ID NO: 3306057 - DNA, 25 bp, Homo sapien
ggcaaacactgcatcactatctaca

SEQ ID NO: 3306058 - DNA, 25 bp, Homo sapien
tcatcagtaatgcattggaaggaga

SEQ ID NO: 3306059 - DNA, 25 bp, Homo sapien
gcaggtattgtctttagtaacactg

SEQ ID NO: 3306060 - DNA, 25 bp, Homo sapien
catttaggaaaaacgaagtgctact

SEQ ID NO: 3306061 - DNA, 25 bp, Homo sapien
gcatgaacaaactctacttaatctt

SEQ ID NO: 3306062 - DNA, 25 bp, Homo sapien
tactgcaagtcatctcaactaatgg

SEQ ID NO: 3306063 - DNA, 25 bp, Homo sapien
gatgtgggaaccttcccgtagtcca

SEQ ID NO: 3306064 - DNA, 25 bp, Homo sapien
gataggaaccgctggactccttcac

SEQ ID NO: 3306065 - DNA, 25 bp, Homo sapien
ctaatgggacaaagagatgtgggaa

SEQ ID NO: 3306066 - DNA, 25 bp, Homo sapien
actgaagccccgcatatagtgtcca

SEQ ID NO: 3306067 - DNA, 25 bp, Homo sapien
gtctagagctgctgaccaggcacag

SEQ ID NO: 3306068 - DNA, 25 bp, Homo sapien
ccgcatatagtgtccacgggctcca

SEQ ID NO: 3306069 - DNA, 25 bp, Homo sapien
tccacgggctccaggtctagagctg

SEQ ID NO: 3306070 - DNA, 25 bp, Homo sapien
cgcacagaggcaaatacgaatttca

SEQ ID NO: 3306071 - DNA, 25 bp, Homo sapien
ggaattgtgctcaaacattacaaac

SEQ ID NO: 3306072 - DNA, 25 bp, Homo sapien
ctgccacaaataacacgcacagagg

SEQ ID NO: 3306073 - DNA, 25 bp, Homo sapien
ggcaaatacgaatttcacccaggaa

SEQ ID NO: 3306074 - DNA, 25 bp, Homo sapien
gactcataatgccatcaatgtcccc

SEQ ID NO: 3306075 - DNA, 25 bp, Homo sapien
atcaatgtcccccactctgaatgtc

SEQ ID NO: 3306076 - DNA, 25 bp, Homo sapien
agtttctggtgagactcataatgcc

SEQ ID NO: 3306077 - DNA, 25 bp, Homo sapien
gctgtgtttacagccctggttcttt

SEQ ID NO: 3306078 - DNA, 25 bp, Homo sapien
tatcttaagaatgttctgggatcat

SEQ ID NO: 3306079 - DNA, 25 bp, Homo sapien
tacacactaagagcatcatcttgtc

SEQ ID NO: 3306080 - DNA, 25 bp, Homo sapien
tcttgctccattatactttcaaaca

SEQ ID NO: 3306081 - DNA, 25 bp, Homo sapien
cttcaaagcatatgatagaggaatt

SEQ ID NO: 3306082 - DNA, 25 bp, Homo sapien
tggaactcttcatgcatttgtgtgc

SEQ ID NO: 3306083 - DNA, 25 bp, Homo sapien
ctcttcatgcatttgtgtgccatcc

SEQ ID NO: 3306084 - DNA, 25 bp, Homo sapien
ttgcacaaggaccatgctgatctct

SEQ ID NO: 3306085 - DNA, 25 bp, Homo sapien
gaactcttcatgcatttgtgtgcca

SEQ ID NO: 3306086 - DNA, 25 bp, Homo sapien
taaatagagccatcgcagagttacc

SEQ ID NO: 3306087 - DNA, 25 bp, Homo sapien
taatgctggtggtcaggaaaatccc

SEQ ID NO: 3306088 - DNA, 25 bp, Homo sapien
tgggcctaaatgatctacaaactgg

SEQ ID NO: 3306089 - DNA, 25 bp, Homo sapien
caatgactgtcctcgctagatgtga

SEQ ID NO: 3306090 - DNA, 25 bp, Homo sapien
ttcagcacttggtcaccagatccat

SEQ ID NO: 3306091 - DNA, 25 bp, Homo sapien
tagtgtatttcagcacttggtcacc

SEQ ID NO: 3306092 - DNA, 25 bp, Homo sapien
tgtatttcagcacttggtcaccaga

SEQ ID NO: 3306093 - DNA, 25 bp, Homo sapien
cctgtagtgtatttcagcacttggt

SEQ ID NO: 3306094 - DNA, 25 bp, Homo sapien
catgtactccctaggatccaaggaa

SEQ ID NO: 3306095 - DNA, 25 bp, Homo sapien
cattaattggagttcccaacagcat

SEQ ID NO: 3306096 - DNA, 25 bp, Homo sapien
taaatccttacaaacaattgtccat

SEQ ID NO: 3306097 - DNA, 25 bp, Homo sapien
aaacaaaactcatagtatggacatt

SEQ ID NO: 3306098 - DNA, 25 bp, Homo sapien
aagccaaggtcaacagagtttccaa

SEQ ID NO: 3306099 - DNA, 25 bp, Homo sapien
caagttcttctccttaggaagcaaa

SEQ ID NO: 3306100 - DNA, 25 bp, Homo sapien
gggcatgactcgaaaaggctttatc

SEQ ID NO: 3306101 - DNA, 25 bp, Homo sapien
catcagcagacaggcgggcatgact

SEQ ID NO: 3306102 - DNA, 25 bp, Homo sapien
caaatgctgaagacctactggctaa

SEQ ID NO: 3306103 - DNA, 25 bp, Homo sapien
cggaagagctccaaaatgcctgcat

SEQ ID NO: 3306104 - DNA, 25 bp, Homo sapien
caaccctgagaggtcgagagttcct

SEQ ID NO: 3306105 - DNA, 25 bp, Homo sapien
taactatgtttacgctggaagcctc

SEQ ID NO: 3306106 - DNA, 25 bp, Homo sapien
gcagaattggctcatcaatgcggtt

SEQ ID NO: 3306107 - DNA, 25 bp, Homo sapien
tgtcagctgagcgaagtcaaaccga

SEQ ID NO: 3306108 - DNA, 25 bp, Homo sapien
tccgtttgccaatctgtgaggcgca

SEQ ID NO: 3306109 - DNA, 25 bp, Homo sapien
caatgcggttatcccagatcccaaa

SEQ ID NO: 3306110 - DNA, 25 bp, Homo sapien
aaaccgagaacacctaggctctgaa

SEQ ID NO: 3306111 - DNA, 25 bp, Homo sapien
cacctaggctctgaagtggagctgt

SEQ ID NO: 3306112 - DNA, 25 bp, Homo sapien
cgagaacacctaggctctgaagtgg

SEQ ID NO: 3306113 - DNA, 25 bp, Homo sapien
ctgggtcaaaccgagaacacctagg

SEQ ID NO: 3306114 - DNA, 25 bp, Homo sapien
agcttagcagcactctccttctcac

SEQ ID NO: 3306115 - DNA, 25 bp, Homo sapien
gagcttagcagcactctccttctca

SEQ ID NO: 3306116 - DNA, 25 bp, Homo sapien
accacttctgaccaaagtaattaag

SEQ ID NO: 3306117 - DNA, 25 bp, Homo sapien
tgaccaaagtaattaaggcagctgt

SEQ ID NO: 3306118 - DNA, 25 bp, Homo sapien
tctgaccaaagtaattaaggcagct

SEQ ID NO: 3306119 - DNA, 25 bp, Homo sapien
acttctgaccaaagtaattaaggca

SEQ ID NO: 3306120 - DNA, 25 bp, Homo sapien
actcagctccaaaggactcagtgat

SEQ ID NO: 3306121 - DNA, 25 bp, Homo sapien
tagcagactctctcactaggagggt

SEQ ID NO: 3306122 - DNA, 25 bp, Homo sapien
caacaccctggtgatacagaagctg

SEQ ID NO: 3306123 - DNA, 25 bp, Homo sapien
tgggtatgatctcaggaacctggca

SEQ ID NO: 3306124 - DNA, 25 bp, Homo sapien
tggtgtgcaaacaccccagaggcac

SEQ ID NO: 3306125 - DNA, 25 bp, Homo sapien
aacgagatgttacgaactggctcca

SEQ ID NO: 3306126 - DNA, 25 bp, Homo sapien
caaacaggtcggcatcgcttaggta

SEQ ID NO: 3306127 - DNA, 25 bp, Homo sapien
aatgtgacccagatatatagctagt

SEQ ID NO: 3306128 - DNA, 25 bp, Homo sapien
taaaatcaatcatcaacctggcatc

SEQ ID NO: 3306129 - DNA, 25 bp, Homo sapien
ttttgatcggaaaacatggctagtt

SEQ ID NO: 3306130 - DNA, 25 bp, Homo sapien
tcctatctgcccattatgaagtggc

SEQ ID NO: 3306131 - DNA, 25 bp, Homo sapien
catgccaaaattattcaggagttct

SEQ ID NO: 3306132 - DNA, 25 bp, Homo sapien
gaagtggcatttaggtatctacaac

SEQ ID NO: 3306133 - DNA, 25 bp, Homo sapien
tccaaagggaagaaagcgacgctct

SEQ ID NO: 3306134 - DNA, 25 bp, Homo sapien
gacgagctgctcacgacctccaaag

SEQ ID NO: 3306135 - DNA, 25 bp, Homo sapien
tctgagaactccgagaggccgccgg

SEQ ID NO: 3306136 - DNA, 25 bp, Homo sapien
agaaagcgacgctctgagaactccg

SEQ ID NO: 3306137 - DNA, 25 bp, Homo sapien
tcacagatgccgatgggaacgagcc

SEQ ID NO: 3306138 - DNA, 25 bp, Homo sapien
ttttctcccgcagttgaccagatgg

SEQ ID NO: 3306139 - DNA, 25 bp, Homo sapien
taagagtgccttctccgtcgtctcg

SEQ ID NO: 3306140 - DNA, 25 bp, Homo sapien
tcggatctccgaagcaagcagtcaa

SEQ ID NO: 3306141 - DNA, 25 bp, Homo sapien
gtgttgtatattcaatgggttttta

SEQ ID NO: 3306142 - DNA, 25 bp, Homo sapien
gcaccatggtgctattgtgtctgga

SEQ ID NO: 3306143 - DNA, 25 bp, Homo sapien
taaacatatacttattaaggactgc

SEQ ID NO: 3306144 - DNA, 25 bp, Homo sapien
agtcttccattgtggccaccacagc

SEQ ID NO: 3306145 - DNA, 25 bp, Homo sapien
gatggaataaagaaatccataactg

SEQ ID NO: 3306146 - DNA, 25 bp, Homo sapien
atggaataaagaaatccataactgg

SEQ ID NO: 3306147 - DNA, 25 bp, Homo sapien
aagatggaataaagaaatccataac

SEQ ID NO: 3306148 - DNA, 25 bp, Homo sapien
tgaagatggaataaagaaatccata

SEQ ID NO: 3306149 - DNA, 25 bp, Homo sapien
tgttactgacaagtgcagtaggagt

SEQ ID NO: 3306150 - DNA, 25 bp, Homo sapien
caaagaagaggaggccactataggc

SEQ ID NO: 3306151 - DNA, 25 bp, Homo sapien
tactgacaagtgcagtaggagttca

SEQ ID NO: 3306152 - DNA, 25 bp, Homo sapien
ggaatgttactgacaagtgcagtag

SEQ ID NO: 3306153 - DNA, 25 bp, Homo sapien
ggaatgcagaagcttaaatgccatc

SEQ ID NO: 3306154 - DNA, 25 bp, Homo sapien
tctcattacatagttgaaacttcac

SEQ ID NO: 3306155 - DNA, 25 bp, Homo sapien
caggtagcagtcctgttagagaata

SEQ ID NO: 3306156 - DNA, 25 bp, Homo sapien
attactgagtgattacccaaccccg

SEQ ID NO: 3306157 - DNA, 25 bp, Homo sapien
atcaaggaaatagccttctcgcctg

SEQ ID NO: 3306158 - DNA, 25 bp, Homo sapien
ttccctccaatctttcattgtagtt

SEQ ID NO: 3306159 - DNA, 25 bp, Homo sapien
ccttctcgcctgacttgaataaacc

SEQ ID NO: 3306160 - DNA, 25 bp, Homo sapien
atattggcactgcactcgggtggta

SEQ ID NO: 3306161 - DNA, 25 bp, Homo sapien
gagcaccagctcggcaagccccaca

SEQ ID NO: 3306162 - DNA, 25 bp, Homo sapien
ggcaagccccacacttggcgtggcc

SEQ ID NO: 3306163 - DNA, 25 bp, Homo sapien
aagccccacacttggcgtggccagc

SEQ ID NO: 3306164 - DNA, 25 bp, Homo sapien
agccccacacttggcgtggccagct

SEQ ID NO: 3306165 - DNA, 25 bp, Homo sapien
tcttcgccaggatagcaggtctcca

SEQ ID NO: 3306166 - DNA, 25 bp, Homo sapien
ggctgaatcccgtgtgtggaccacc

SEQ ID NO: 3306167 - DNA, 25 bp, Homo sapien
ttccctcttcgccaggatagcaggt

SEQ ID NO: 3306168 - DNA, 25 bp, Homo sapien
ccgaggctgaatcccgtgtgtggac

SEQ ID NO: 3306169 - DNA, 25 bp, Homo sapien
aaatggtgccctgtgctaccgaaga

SEQ ID NO: 3306170 - DNA, 25 bp, Homo sapien
gatattcaggaaatcatcgcgcacc

SEQ ID NO: 3306171 - DNA, 25 bp, Homo sapien
tgtgaggaccccagtacatgggcgc

SEQ ID NO: 3306172 - DNA, 25 bp, Homo sapien
cacttgaagttcaggcagcgagagt

SEQ ID NO: 3306173 - DNA, 25 bp, Homo sapien
cttgagcgctgtggcgtgatctctg

SEQ ID NO: 3306174 - DNA, 25 bp, Homo sapien
gcctccgcctcgtgggttcatgtga

SEQ ID NO: 3306175 - DNA, 25 bp, Homo sapien
tcacccaggcttgagcgctgtggcg

SEQ ID NO: 3306176 - DNA, 25 bp, Homo sapien
tcgtgggttcatgtgattcttccac

SEQ ID NO: 3306177 - DNA, 25 bp, Homo sapien
ctttgcacaggttcattcagggctg

SEQ ID NO: 3306178 - DNA, 25 bp, Homo sapien
ccttaggacatgaaaggcaaacact

SEQ ID NO: 3306179 - DNA, 25 bp, Homo sapien
tctaatcgagtaacgctgacttcct

SEQ ID NO: 3306180 - DNA, 25 bp, Homo sapien
tggcctggccttaatgtgtcacaca

SEQ ID NO: 3306181 - DNA, 25 bp, Homo sapien
tgtataaatttcacccctagagttg

SEQ ID NO: 3306182 - DNA, 25 bp, Homo sapien
gagttgggaaacctgtccgtactga

SEQ ID NO: 3306183 - DNA, 25 bp, Homo sapien
gaactcttactataggaccaccagg

SEQ ID NO: 3306184 - DNA, 25 bp, Homo sapien
tctggacacaggtgatggcctaaag

SEQ ID NO: 3306185 - DNA, 25 bp, Homo sapien
gagaaatcagactggactcttgact

SEQ ID NO: 3306186 - DNA, 25 bp, Homo sapien
tcactgggcgtggttacatcatcct

SEQ ID NO: 3306187 - DNA, 25 bp, Homo sapien
gtggtatccagaagtcactgggcgt

SEQ ID NO: 3306188 - DNA, 25 bp, Homo sapien
ctagagtcagtggtatccagaagtc

SEQ ID NO: 3306189 - DNA, 25 bp, Homo sapien
cattgctgatacctgaaggatttat

SEQ ID NO: 3306190 - DNA, 25 bp, Homo sapien
tctgagaaattcttaagtgatgtca

SEQ ID NO: 3306191 - DNA, 25 bp, Homo sapien
tctgatccggtaggcctggggtggt

SEQ ID NO: 3306192 - DNA, 25 bp, Homo sapien
aattcttaagtgatgtcattgctga

SEQ ID NO: 3306193 - DNA, 25 bp, Homo sapien
tgtgtctttgacctggtagtgaaat

SEQ ID NO: 3306194 - DNA, 25 bp, Homo sapien
tctttgacctggtagtgaaatgaat

SEQ ID NO: 3306195 - DNA, 25 bp, Homo sapien
tgtctttgacctggtagtgaaatga

SEQ ID NO: 3306196 - DNA, 25 bp, Homo sapien
tccatttgtcgggcttttgattgtg

SEQ ID NO: 3306197 - DNA, 25 bp, Homo sapien
tgtcagggtgcctcctagtggaact

SEQ ID NO: 3306198 - DNA, 25 bp, Homo sapien
tccaggagttaaggtggccgctgcc

SEQ ID NO: 3306199 - DNA, 25 bp, Homo sapien
tcgaaagccattccgtccaggagtt

SEQ ID NO: 3306200 - DNA, 25 bp, Homo sapien
aactgcagcgtttcctcgaaagcca

SEQ ID NO: 3306201 - DNA, 25 bp, Homo sapien
cggagggtggaggtgacgcgccaac

SEQ ID NO: 3306202 - DNA, 25 bp, Homo sapien
ctccggagggtggaggtgacgcgcc

SEQ ID NO: 3306203 - DNA, 25 bp, Homo sapien
gtggaggtgacgcgccaactctgct

SEQ ID NO: 3306204 - DNA, 25 bp, Homo sapien
ggtgacgcgccaactctgctgctcg

SEQ ID NO: 3306205 - DNA, 25 bp, Homo sapien
cagcggatcctccgctcagcaaagt

SEQ ID NO: 3306206 - DNA, 25 bp, Homo sapien
gagctgtcttttatcccggtcagtg

SEQ ID NO: 3306207 - DNA, 25 bp, Homo sapien
ctgagctgtcttttatcccggtcag

SEQ ID NO: 3306208 - DNA, 25 bp, Homo sapien
gggtgagcgggatactggcgaccag

SEQ ID NO: 3306209 - DNA, 25 bp, Homo sapien
ccacattctcatcgaagtgggggaa

SEQ ID NO: 3306210 - DNA, 25 bp, Homo sapien
cattctcatcgaagtgggggaaata

SEQ ID NO: 3306211 - DNA, 25 bp, Homo sapien
ttctcatcgaagtgggggaaatagt

SEQ ID NO: 3306212 - DNA, 25 bp, Homo sapien
ctcccacattctcatcgaagtgggg

SEQ ID NO: 3306213 - DNA, 25 bp, Homo sapien
ggcagattccttgctacacaacagt

SEQ ID NO: 3306214 - DNA, 25 bp, Homo sapien
gattggttaaatcattgcccggata

SEQ ID NO: 3306215 - DNA, 25 bp, Homo sapien
gtaggtctgatttacatcacaggcc

SEQ ID NO: 3306216 - DNA, 25 bp, Homo sapien
ttacctcctaggaacagggcaccag

SEQ ID NO: 3306217 - DNA, 25 bp, Homo sapien
caaaatgtagggtagccatcatggt

SEQ ID NO: 3306218 - DNA, 25 bp, Homo sapien
gagatcacaaaatgtagggtagcca

SEQ ID NO: 3306219 - DNA, 25 bp, Homo sapien
tgtagggtagccatcatggtcttgg

SEQ ID NO: 3306220 - DNA, 25 bp, Homo sapien
caaagagatcacaaaatgtagggta

SEQ ID NO: 3306221 - DNA, 25 bp, Homo sapien
tacactctgcaaaacttctgcaggg

SEQ ID NO: 3306222 - DNA, 25 bp, Homo sapien
ctagaaggagccgttgcctttgatg

SEQ ID NO: 3306223 - DNA, 25 bp, Homo sapien
caggcatcccattattttgtctatc

SEQ ID NO: 3306224 - DNA, 25 bp, Homo sapien
gaaggagccgttgcctttgatgcct

SEQ ID NO: 3306225 - DNA, 25 bp, Homo sapien
ggctggttgacccaacagttgatat

SEQ ID NO: 3306226 - DNA, 25 bp, Homo sapien
ctcaggcttctccaacttacaggat

SEQ ID NO: 3306227 - DNA, 25 bp, Homo sapien
cattgtaggaatggaacaagaattt

SEQ ID NO: 3306228 - DNA, 25 bp, Homo sapien
cagttgatataggagttggttttga

SEQ ID NO: 3306229 - DNA, 25 bp, Homo sapien
tcttgaggagcaagttttcaaagcc

SEQ ID NO: 3306230 - DNA, 25 bp, Homo sapien
ttgaggagcaagttttcaaagccct

SEQ ID NO: 3306231 - DNA, 25 bp, Homo sapien
ttcttgttgctgactcttgaggagc

SEQ ID NO: 3306232 - DNA, 25 bp, Homo sapien
cttgttgctgactcttgaggagcaa

SEQ ID NO: 3306233 - DNA, 25 bp, Homo sapien
tgagccagtcgtggggggttgttcc

SEQ ID NO: 3306234 - DNA, 25 bp, Homo sapien
ggctctggaagaagtctattctcca

SEQ ID NO: 3306235 - DNA, 25 bp, Homo sapien
gaagtctattctccaacgtctgctt

SEQ ID NO: 3306236 - DNA, 25 bp, Homo sapien
cagtcgtggggggttgttcctgaag

SEQ ID NO: 3306237 - DNA, 25 bp, Homo sapien
gcattaggatatagcctctcttctc

SEQ ID NO: 3306238 - DNA, 25 bp, Homo sapien
caggaagggcctgatacttgataag

SEQ ID NO: 3306239 - DNA, 25 bp, Homo sapien
tggcattaggatatagcctctcttc

SEQ ID NO: 3306240 - DNA, 25 bp, Homo sapien
ctggcattaggatatagcctctctt

SEQ ID NO: 3306241 - DNA, 25 bp, Homo sapien
aatgtggtgatagtcatgcagagca

SEQ ID NO: 3306242 - DNA, 25 bp, Homo sapien
gcatgaagtgtttaggaatttgaat

SEQ ID NO: 3306243 - DNA, 25 bp, Homo sapien
cccaaatgtggtgatagtcatgcag

SEQ ID NO: 3306244 - DNA, 25 bp, Homo sapien
ctagcatgaggcatgaagtgtttag

SEQ ID NO: 3306245 - DNA, 25 bp, Homo sapien
tgggcctgtggctgaagtgtctcct

SEQ ID NO: 3306246 - DNA, 25 bp, Homo sapien
ctttaagctgatagatgaggtctac

SEQ ID NO: 3306247 - DNA, 25 bp, Homo sapien
cagtagagctgctgggcctgtggct

SEQ ID NO: 3306248 - DNA, 25 bp, Homo sapien
tctcctctttaagctgatagatgag

SEQ ID NO: 3306249 - DNA, 25 bp, Homo sapien
ctttaatttgctgtttggcccaggg

SEQ ID NO: 3306250 - DNA, 25 bp, Homo sapien
taatttgctgtttggcccagggaac

SEQ ID NO: 3306251 - DNA, 25 bp, Homo sapien
tttaatttgctgtttggcccaggga

SEQ ID NO: 3306252 - DNA, 25 bp, Homo sapien
atttgctgtttggcccagggaactc

SEQ ID NO: 3306253 - DNA, 25 bp, Homo sapien
tgttcatctccaaccaagacactgt

SEQ ID NO: 3306254 - DNA, 25 bp, Homo sapien
tgatacagcagttataagtcagagc

SEQ ID NO: 3306255 - DNA, 25 bp, Homo sapien
ttctgatacagcagttataagtcag

SEQ ID NO: 3306256 - DNA, 25 bp, Homo sapien
atgttcatctccaaccaagacactg

SEQ ID NO: 3306257 - DNA, 25 bp, Homo sapien
agcatctgcaacttaagcctcccac

SEQ ID NO: 3306258 - DNA, 25 bp, Homo sapien
aagcatctgcaacttaagcctccca

SEQ ID NO: 3306259 - DNA, 25 bp, Homo sapien
gaagcatctgcaacttaagcctccc

SEQ ID NO: 3306260 - DNA, 25 bp, Homo sapien
cctgaagagtttaatacccatccaa

SEQ ID NO: 3306261 - DNA, 25 bp, Homo sapien
tatggtattaagaaaagttggctgt

SEQ ID NO: 3306262 - DNA, 25 bp, Homo sapien
tggtattaagaaaagttggctgttg

SEQ ID NO: 3306263 - DNA, 25 bp, Homo sapien
tatatggtattaagaaaagttggct

SEQ ID NO: 3306264 - DNA, 25 bp, Homo sapien
tattaagaaaagttggctgttgcgt

SEQ ID NO: 3306265 - DNA, 25 bp, Homo sapien
tgctccacttcttcttgcttcttac

SEQ ID NO: 3306266 - DNA, 25 bp, Homo sapien
gcgctgctccacttcttcttgcttc

SEQ ID NO: 3306267 - DNA, 25 bp, Homo sapien
ctagcgctgctccacttcttcttgc

SEQ ID NO: 3306268 - DNA, 25 bp, Homo sapien
gctgctccacttcttcttgcttctt

SEQ ID NO: 3306269 - DNA, 25 bp, Homo sapien
ggtatcatattagggatcccatcaa

SEQ ID NO: 3306270 - DNA, 25 bp, Homo sapien
tcctagctgcctgtggtatcatatt

SEQ ID NO: 3306271 - DNA, 25 bp, Homo sapien
gcctgtggtatcatattagggatcc

SEQ ID NO: 3306272 - DNA, 25 bp, Homo sapien
tagctgcctgtggtatcatattagg

SEQ ID NO: 3306273 - DNA, 25 bp, Homo sapien
acctggtggtacattagaaatcatt

SEQ ID NO: 3306274 - DNA, 25 bp, Homo sapien
atcgcagtggttcataaacctggtg

SEQ ID NO: 3306275 - DNA, 25 bp, Homo sapien
acttgtcctgaatcgcagtggttca

SEQ ID NO: 3306276 - DNA, 25 bp, Homo sapien
cctggtggtacattagaaatcattt

SEQ ID NO: 3306277 - DNA, 25 bp, Homo sapien
atacaaatgttcaggtcccatcccg

SEQ ID NO: 3306278 - DNA, 25 bp, Homo sapien
gtccccgggtgattgcaatgcgcag

SEQ ID NO: 3306279 - DNA, 25 bp, Homo sapien
gcgcctgtctctcgactcctgagga

SEQ ID NO: 3306280 - DNA, 25 bp, Homo sapien
tccagaatgtggcagcggagagtac

SEQ ID NO: 3306281 - DNA, 25 bp, Homo sapien
ggccccagtggctgcaagaggccgc

SEQ ID NO: 3306282 - DNA, 25 bp, Homo sapien
tgaccgacctacaaggccccagtgg

SEQ ID NO: 3306283 - DNA, 25 bp, Homo sapien
ctgaccgacctacaaggccccagtg

SEQ ID NO: 3306284 - DNA, 25 bp, Homo sapien
gtggctgcaagaggccgcggtccac

SEQ ID NO: 3306285 - DNA, 25 bp, Homo sapien
aaggaagggccaaggccagcgagtt

SEQ ID NO: 3306286 - DNA, 25 bp, Homo sapien
ctgcaaaggaagggccaaggccagc

SEQ ID NO: 3306287 - DNA, 25 bp, Homo sapien
caaaggaagggccaaggccagcgag

SEQ ID NO: 3306288 - DNA, 25 bp, Homo sapien
ggaagggccaaggccagcgagttac

SEQ ID NO: 3306289 - DNA, 25 bp, Homo sapien
gcttcttggagagcgggcacaccag

SEQ ID NO: 3306290 - DNA, 25 bp, Homo sapien
tggagagcgggcacaccaggaactc

SEQ ID NO: 3306291 - DNA, 25 bp, Homo sapien
acgcgtgcaggcacctacgggcgac

SEQ ID NO: 3306292 - DNA, 25 bp, Homo sapien
gaccccgacgcgtgcaggcacctac

SEQ ID NO: 3306293 - DNA, 25 bp, Homo sapien
ctcgccacccgtggccgagctcccg

SEQ ID NO: 3306294 - DNA, 25 bp, Homo sapien
gccacccgtggccgagctcccggct

SEQ ID NO: 3306295 - DNA, 25 bp, Homo sapien
cacccgtggccgagctcccggcttc

SEQ ID NO: 3306296 - DNA, 25 bp, Homo sapien
gcctcgccacccgtggccgagctcc

SEQ ID NO: 3306297 - DNA, 25 bp, Homo sapien
gataatcacaaattctgtctgaagg

SEQ ID NO: 3306298 - DNA, 25 bp, Homo sapien
tgtctgaagggctgaggactagtgc

SEQ ID NO: 3306299 - DNA, 25 bp, Homo sapien
ttgttttggccatctgaaggataat

SEQ ID NO: 3306300 - DNA, 25 bp, Homo sapien
tggccatctgaaggataatcacaaa

SEQ ID NO: 3306301 - DNA, 25 bp, Homo sapien
ggctgctgcagttatggggatgtac

SEQ ID NO: 3306302 - DNA, 25 bp, Homo sapien
ctgaatgtataggtagctgagggcc

SEQ ID NO: 3306303 - DNA, 25 bp, Homo sapien
aatgtgcttgtcatcgtggtctcca

SEQ ID NO: 3306304 - DNA, 25 bp, Homo sapien
acaacagtttgggagtgctcttcca

SEQ ID NO: 3306305 - DNA, 25 bp, Homo sapien
cttgctgaggtgatcttggccatcc

SEQ ID NO: 3306306 - DNA, 25 bp, Homo sapien
catgatgcagactagcttggaaggg

SEQ ID NO: 3306307 - DNA, 25 bp, Homo sapien
gaaacagcatgccaaaagcctttgt

SEQ ID NO: 3306308 - DNA, 25 bp, Homo sapien
tcagcactttgatcttaatagtcat

SEQ ID NO: 3306309 - DNA, 25 bp, Homo sapien
tcatactactatcccctgccctttc

SEQ ID NO: 3306310 - DNA, 25 bp, Homo sapien
gcttgcaaagggatttcagtgctta

SEQ ID NO: 3306311 - DNA, 25 bp, Homo sapien
ctcagaggaagggaactctggacta

SEQ ID NO: 3306312 - DNA, 25 bp, Homo sapien
gatgccatagctacactacattgaa

SEQ ID NO: 3306313 - DNA, 25 bp, Homo sapien
gcaattaacctggtgacagatgcca

SEQ ID NO: 3306314 - DNA, 25 bp, Homo sapien
gacagttatgtacctactgctaccg

SEQ ID NO: 3306315 - DNA, 25 bp, Homo sapien
aattagaacacagctaacatggccc

SEQ ID NO: 3306316 - DNA, 25 bp, Homo sapien
tccattccaggtattgggcaagtca

SEQ ID NO: 3306317 - DNA, 25 bp, Homo sapien
gctaccgtttgaatgttgtcccctc

SEQ ID NO: 3306318 - DNA, 25 bp, Homo sapien
tatggccaacctataaagctgtcta

SEQ ID NO: 3306319 - DNA, 25 bp, Homo sapien
tattctgtgcagctacatgatgaca

SEQ ID NO: 3306320 - DNA, 25 bp, Homo sapien
ggaggaaccttcacgaaatacttca

SEQ ID NO: 3306321 - DNA, 25 bp, Homo sapien
gaccagctaatgctcaacttaaagg

SEQ ID NO: 3306322 - DNA, 25 bp, Homo sapien
aatatgtgtatgcagcatgagctcc

SEQ ID NO: 3306323 - DNA, 25 bp, Homo sapien
acaggtgagcctatggagacagtac

SEQ ID NO: 3306324 - DNA, 25 bp, Homo sapien
tgcgactgtgcacggaatatgtgta

SEQ ID NO: 3306325 - DNA, 25 bp, Homo sapien
cagaccgagaggagcatgtgtaacc

SEQ ID NO: 3306326 - DNA, 25 bp, Homo sapien
agccactacgcctggcctaaaattt

SEQ ID NO: 3306327 - DNA, 25 bp, Homo sapien
gccactacgcctggcctaaaattta

SEQ ID NO: 3306328 - DNA, 25 bp, Homo sapien
gccgcactgcgtctgtctgcatact

SEQ ID NO: 3306329 - DNA, 25 bp, Homo sapien
aaagcagccgcactgcgtctgtctg

SEQ ID NO: 3306330 - DNA, 25 bp, Homo sapien
tgagtgagctctggcaaagcagccg

SEQ ID NO: 3306331 - DNA, 25 bp, Homo sapien
agctggccctcagtcatcctgcaga

SEQ ID NO: 3306332 - DNA, 25 bp, Homo sapien
tcgggcatctgaagggcgcaataac

SEQ ID NO: 3306333 - DNA, 25 bp, Homo sapien
tgctgaaaagcaaaccagctgagct

SEQ ID NO: 3306334 - DNA, 25 bp, Homo sapien
tagaagggaccctgtaatgacttcc

SEQ ID NO: 3306335 - DNA, 25 bp, Homo sapien
aaaagcttcaattcccaaactgtgc

SEQ ID NO: 3306336 - DNA, 25 bp, Homo sapien
tgacacacttatggcttgatcagga

SEQ ID NO: 3306337 - DNA, 25 bp, Homo sapien
tcacatagattctggaggcaggatt

SEQ ID NO: 3306338 - DNA, 25 bp, Homo sapien
tgtaaacctagcatatagcacagga

SEQ ID NO: 3306339 - DNA, 25 bp, Homo sapien
ggacctggcatgaacttgtcactca

SEQ ID NO: 3306340 - DNA, 25 bp, Homo sapien
tggctgattactggtggctgcatca

SEQ ID NO: 3306341 - DNA, 25 bp, Homo sapien
tatccttggacagaacctacacagt

SEQ ID NO: 3306342 - DNA, 25 bp, Homo sapien
ctgtggctgattactggtggctgca

SEQ ID NO: 3306343 - DNA, 25 bp, Homo sapien
cagtcaaatgagttgtaggcatcca

SEQ ID NO: 3306344 - DNA, 25 bp, Homo sapien
ttcaaagggcatctagattccgtag

SEQ ID NO: 3306345 - DNA, 25 bp, Homo sapien
taagatctacttcaggaccgctggc

SEQ ID NO: 3306346 - DNA, 25 bp, Homo sapien
tccgtagtgagaacctgagaataaa

SEQ ID NO: 3306347 - DNA, 25 bp, Homo sapien
aacacttcttgctccttaagatcta

SEQ ID NO: 3306348 - DNA, 25 bp, Homo sapien
caagggtatcctgttagatgttaac

SEQ ID NO: 3306349 - DNA, 25 bp, Homo sapien
aacatgcaggttttagggttgccag

SEQ ID NO: 3306350 - DNA, 25 bp, Homo sapien
tcctgttagatgttaacatgcaggt

SEQ ID NO: 3306351 - DNA, 25 bp, Homo sapien
cttgaagcaagggtatcctgttaga

SEQ ID NO: 3306352 - DNA, 25 bp, Homo sapien
tgaaggcacagctaatacaagcaaa

SEQ ID NO: 3306353 - DNA, 25 bp, Homo sapien
tatgcatctgtcctcaagcagtaaa

SEQ ID NO: 3306354 - DNA, 25 bp, Homo sapien
ctttatagatcactggctcacacat

SEQ ID NO: 3306355 - DNA, 25 bp, Homo sapien
ttaacaccacagtgataaacaactt

SEQ ID NO: 3306356 - DNA, 25 bp, Homo sapien
gtcacaaggcgcaaagtacataacg

SEQ ID NO: 3306357 - DNA, 25 bp, Homo sapien
tacataacgctggatacacatgctt

SEQ ID NO: 3306358 - DNA, 25 bp, Homo sapien
gattttcacagctacaccctaaaag

SEQ ID NO: 3306359 - DNA, 25 bp, Homo sapien
ccctaaaagctacatgacagaaaga

SEQ ID NO: 3306360 - DNA, 25 bp, Homo sapien
ggcagttttcctggccttattaaca

SEQ ID NO: 3306361 - DNA, 25 bp, Homo sapien
ggccttattaacagtagtgtcatga

SEQ ID NO: 3306362 - DNA, 25 bp, Homo sapien
tcagaacttgaaatggcagttttcc

SEQ ID NO: 3306363 - DNA, 25 bp, Homo sapien
cagtagtgtcatgatctccattgca

SEQ ID NO: 3306364 - DNA, 25 bp, Homo sapien
tgttccatgtgtagcgtatgctgtg

SEQ ID NO: 3306365 - DNA, 25 bp, Homo sapien
gagaacgtgttcagtcatggcttgg

SEQ ID NO: 3306366 - DNA, 25 bp, Homo sapien
tctctgcactgcgaaatgtcatgag

SEQ ID NO: 3306367 - DNA, 25 bp, Homo sapien
caaatttgaatcgagctggccagga

SEQ ID NO: 3306368 - DNA, 25 bp, Homo sapien
cgtgggcatcgtcatgtttggcccc

SEQ ID NO: 3306369 - DNA, 25 bp, Homo sapien
gcatctcggcgtgggcatcgtcatg

SEQ ID NO: 3306370 - DNA, 25 bp, Homo sapien
ttggcgtcatcaggcatctcggcgt

SEQ ID NO: 3306371 - DNA, 25 bp, Homo sapien
ttacttcttggcgtcatcaggcatc

SEQ ID NO: 3306372 - DNA, 25 bp, Homo sapien
catcctcgtactcctcttcctcctc

SEQ ID NO: 3306373 - DNA, 25 bp, Homo sapien
tcatcctcgtactcctcttcctcct

SEQ ID NO: 3306374 - DNA, 25 bp, Homo sapien
taggcaggctctcgataaagtcatt

SEQ ID NO: 3306375 - DNA, 25 bp, Homo sapien
tatcttatcgcatcgcttctgcagc

SEQ ID NO: 3306376 - DNA, 25 bp, Homo sapien
gccaggactcggcatttcaccgaat

SEQ ID NO: 3306377 - DNA, 25 bp, Homo sapien
ccatctcgccggtgagctcttggat

SEQ ID NO: 3306378 - DNA, 25 bp, Homo sapien
ggctaggctccgcaggcccctggtt

SEQ ID NO: 3306379 - DNA, 25 bp, Homo sapien
gccgccgcctggctaggctccgcag

SEQ ID NO: 3306380 - DNA, 25 bp, Homo sapien
ctaggctccgcaggcccctggtttt

SEQ ID NO: 3306381 - DNA, 25 bp, Homo sapien
cgcaggcccctggttttccgagtcg

SEQ ID NO: 3306382 - DNA, 25 bp, Homo sapien
ccctgcacccgagctggtccagaga

SEQ ID NO: 3306383 - DNA, 25 bp, Homo sapien
gccctgcacccgagctggtccagag

SEQ ID NO: 3306384 - DNA, 25 bp, Homo sapien
tgttggacagacaccctgttcccag

SEQ ID NO: 3306385 - DNA, 25 bp, Homo sapien
cactatcagctgacggccgtgtgct

SEQ ID NO: 3306386 - DNA, 25 bp, Homo sapien
gctttcgcggcacttgactggcttc

SEQ ID NO: 3306387 - DNA, 25 bp, Homo sapien
gattcctcctgttgctaccctgaca

SEQ ID NO: 3306388 - DNA, 25 bp, Homo sapien
catagctggcgtttgatcacctctt

SEQ ID NO: 3306389 - DNA, 25 bp, Homo sapien
cagtgcatatgtcttcgctttcctc

SEQ ID NO: 3306390 - DNA, 25 bp, Homo sapien
aatgccagtgcatatgtcttcgctt

SEQ ID NO: 3306391 - DNA, 25 bp, Homo sapien
atctctctccatagctggcgtttga

SEQ ID NO: 3306392 - DNA, 25 bp, Homo sapien
ccagactggtcctcgtcttgaactc

SEQ ID NO: 3306393 - DNA, 25 bp, Homo sapien
tatatgtaagttattcaagtattcc

SEQ ID NO: 3306394 - DNA, 25 bp, Homo sapien
cagactggtcctcgtcttgaactcc

SEQ ID NO: 3306395 - DNA, 25 bp, Homo sapien
catttatgaagtcaaattgtttgga

SEQ ID NO: 3306396 - DNA, 25 bp, Homo sapien
gacccaggcccttgacaactatgaa

SEQ ID NO: 3306397 - DNA, 25 bp, Homo sapien
aaagagattctgagtgcccggctga

SEQ ID NO: 3306398 - DNA, 25 bp, Homo sapien
tctgcgcatgcgagaacatcacctt

SEQ ID NO: 3306399 - DNA, 25 bp, Homo sapien
tagcattcgttgcagctgagcctaa

SEQ ID NO: 3306400 - DNA, 25 bp, Homo sapien
tctgttacttgactcagtgctccct

SEQ ID NO: 3306401 - DNA, 25 bp, Homo sapien
tctctgttacttgactcagtgctcc

SEQ ID NO: 3306402 - DNA, 25 bp, Homo sapien
cattctctgttacttgactcagtgc

SEQ ID NO: 3306403 - DNA, 25 bp, Homo sapien
atcccattctctgttacttgactca

SEQ ID NO: 3306404 - DNA, 25 bp, Homo sapien
catcatggagtaagaaaattctaca

SEQ ID NO: 3306405 - DNA, 25 bp, Homo sapien
tgaactgtgataaagcatcaaatct

SEQ ID NO: 3306406 - DNA, 25 bp, Homo sapien
ccctaattgctaagatttaaggacg

SEQ ID NO: 3306407 - DNA, 25 bp, Homo sapien
aataatgacatgctcaaccttcctc

SEQ ID NO: 3306408 - DNA, 25 bp, Homo sapien
gacctgagccgggtcttaagaagga

SEQ ID NO: 3306409 - DNA, 25 bp, Homo sapien
tatttaggcaagagccaagaacagt

SEQ ID NO: 3306410 - DNA, 25 bp, Homo sapien
ggctgaggaactagcctaacactgg

SEQ ID NO: 3306411 - DNA, 25 bp, Homo sapien
acttgagggtgataagacctgagcc

SEQ ID NO: 3306412 - DNA, 25 bp, Homo sapien
tgggaaggactgaagcagaaagaca

SEQ ID NO: 3306413 - DNA, 25 bp, Homo sapien
caggagctgagacagcagtgacagt

SEQ ID NO: 3306414 - DNA, 25 bp, Homo sapien
ggagctgagacagcagtgacagtgg

SEQ ID NO: 3306415 - DNA, 25 bp, Homo sapien
ctaaatctggaggtattgaggtggg

SEQ ID NO: 3306416 - DNA, 25 bp, Homo sapien
ggcactaaaggtggatcagagactg

SEQ ID NO: 3306417 - DNA, 25 bp, Homo sapien
tgttaggccatttaagcacaccaaa

SEQ ID NO: 3306418 - DNA, 25 bp, Homo sapien
tggaggtggtaggagcctgcaggga

SEQ ID NO: 3306419 - DNA, 25 bp, Homo sapien
catttagtgattggtgattgttagg

SEQ ID NO: 3306420 - DNA, 25 bp, Homo sapien
cgtatctgcaaagacatcgcactga

SEQ ID NO: 3306421 - DNA, 25 bp, Homo sapien
gttccacgtatctgcaaagacatcg

SEQ ID NO: 3306422 - DNA, 25 bp, Homo sapien
gttccacgtatctgcaaagacatca

SEQ ID NO: 3306423 - DNA, 25 bp, Homo sapien
tctgcaaagacatcgcactgagttc

SEQ ID NO: 3306424 - DNA, 25 bp, Homo sapien
ccatatccagctagatgttttccta

SEQ ID NO: 3306425 - DNA, 25 bp, Homo sapien
gttttcctattacatgttagcaccc

SEQ ID NO: 3306426 - DNA, 25 bp, Homo sapien
agctgtattggatgtggtatgtttc

SEQ ID NO: 3306427 - DNA, 25 bp, Homo sapien
tcagattgcagaactctgtttagca

SEQ ID NO: 3306428 - DNA, 25 bp, Homo sapien
tcgcatgaagattcctagaccagtg

SEQ ID NO: 3306429 - DNA, 25 bp, Homo sapien
tctgtgatgaacacccaggtcattg

SEQ ID NO: 3306430 - DNA, 25 bp, Homo sapien
cccaatggttctgatcaaataggac

SEQ ID NO: 3306431 - DNA, 25 bp, Homo sapien
tctctgtgagtggtactatgccagc

SEQ ID NO: 3306432 - DNA, 25 bp, Homo sapien
gctgtacaatcttgggacatagggt

SEQ ID NO: 3306433 - DNA, 25 bp, Homo sapien
taaagtgaagggcctcttcgggcag

SEQ ID NO: 3306434 - DNA, 25 bp, Homo sapien
cagcagtatgagtaagcattgaggc

SEQ ID NO: 3306435 - DNA, 25 bp, Homo sapien
caggtaagtcatcaggccactccat

SEQ ID NO: 3306436 - DNA, 25 bp, Homo sapien
tcggcagcaggtgccaactaggtac

SEQ ID NO: 3306437 - DNA, 25 bp, Homo sapien
ctcttgaggacgaaggtcggcagca

SEQ ID NO: 3306438 - DNA, 25 bp, Homo sapien
tactgggtcataagaggctggtgct

SEQ ID NO: 3306439 - DNA, 25 bp, Homo sapien
cgttctccggaactcagatgtttgt

SEQ ID NO: 3306440 - DNA, 25 bp, Homo sapien
tgctggcctcggcaatggcaccttc

SEQ ID NO: 3306441 - DNA, 25 bp, Homo sapien
ggaaagcttgccctattgctggcct

SEQ ID NO: 3306442 - DNA, 25 bp, Homo sapien
tgaatgggaaagcttgccctattgc

SEQ ID NO: 3306443 - DNA, 25 bp, Homo sapien
tgccctattgctggcctcggcaatg

SEQ ID NO: 3306444 - DNA, 25 bp, Homo sapien
gatttctgtgcatctttgaattgct

SEQ ID NO: 3306445 - DNA, 25 bp, Homo sapien
aagctgtaggatcagaagcttgaca

SEQ ID NO: 3306446 - DNA, 25 bp, Homo sapien
taggatcagaagcttgacatgaaga

SEQ ID NO: 3306447 - DNA, 25 bp, Homo sapien
cttgacatgaagatttctgtgcatc

SEQ ID NO: 3306448 - DNA, 25 bp, Homo sapien
tcaggaagacccctcttgaaagcaa

SEQ ID NO: 3306449 - DNA, 25 bp, Homo sapien
tatcacagaggcattgatcttggtg

SEQ ID NO: 3306450 - DNA, 25 bp, Homo sapien
tagactacagctagctttcacaaag

SEQ ID NO: 3306451 - DNA, 25 bp, Homo sapien
tagtatagtttgtccctcctcattg

SEQ ID NO: 3306452 - DNA, 25 bp, Homo sapien
tcttgagaactaggcaacccctggg

SEQ ID NO: 3306453 - DNA, 25 bp, Homo sapien
gcagaaccagcttgattagcaccat

SEQ ID NO: 3306454 - DNA, 25 bp, Homo sapien
ttggctggaaatgtcacacctggga

SEQ ID NO: 3306455 - DNA, 25 bp, Homo sapien
gactgctggtcttgggataccttag

SEQ ID NO: 3306456 - DNA, 25 bp, Homo sapien
ccattccatgaagaatataagttag

SEQ ID NO: 3306457 - DNA, 25 bp, Homo sapien
agtctgcactctttaattcttaagt

SEQ ID NO: 3306458 - DNA, 25 bp, Homo sapien
gacaccgcctctagtgccttgagat

SEQ ID NO: 3306459 - DNA, 25 bp, Homo sapien
aataagatctagtgtgaaaagggct

SEQ ID NO: 3306460 - DNA, 25 bp, Homo sapien
taatttacctttggcagaaacaaca

SEQ ID NO: 3306461 - DNA, 25 bp, Homo sapien
aatttacctttggcagaaacaacag

SEQ ID NO: 3306462 - DNA, 25 bp, Homo sapien
gcatctcatttatttgtagcttaaa

SEQ ID NO: 3306463 - DNA, 25 bp, Homo sapien
atctcatttatttgtagcttaaaaa

SEQ ID NO: 3306464 - DNA, 25 bp, Homo sapien
catctcatttatttgtagcttaaaa

SEQ ID NO: 3306465 - DNA, 25 bp, Homo sapien
agcatctcatttatttgtagcttaa

SEQ ID NO: 3306466 - DNA, 25 bp, Homo sapien
caagcttccatacgattaagagcaa

SEQ ID NO: 3306467 - DNA, 25 bp, Homo sapien
taagagagctattaaaggacagact

SEQ ID NO: 3306468 - DNA, 25 bp, Homo sapien
gggcacttccaacacatagctcaag

SEQ ID NO: 3306469 - DNA, 25 bp, Homo sapien
gagagctgctacctcacttcagcaa

SEQ ID NO: 3306470 - DNA, 25 bp, Homo sapien
ctttcaaaacatacgagggtgcctc

SEQ ID NO: 3306471 - DNA, 25 bp, Homo sapien
tcgcaaagcacaaaggtggacacag

SEQ ID NO: 3306472 - DNA, 25 bp, Homo sapien
cagtgttcaggaaagaatctccagg

SEQ ID NO: 3306473 - DNA, 25 bp, Homo sapien
agaacccactgtccttggcgcagga

SEQ ID NO: 3306474 - DNA, 25 bp, Homo sapien
tctctctgtcctctgcagatgaccc

SEQ ID NO: 3306475 - DNA, 25 bp, Homo sapien
catctctctgtcctctgcagatgac

SEQ ID NO: 3306476 - DNA, 25 bp, Homo sapien
tctgtcctctgcagatgacccggtc

SEQ ID NO: 3306477 - DNA, 25 bp, Homo sapien
tctctgtcctctgcagatgacccgg

SEQ ID NO: 3306478 - DNA, 25 bp, Homo sapien
cactgccatcgtgggcagatgcagc

SEQ ID NO: 3306479 - DNA, 25 bp, Homo sapien
aattccttgtcagctgaggaagtcc

SEQ ID NO: 3306480 - DNA, 25 bp, Homo sapien
aagatgatgactgcactgccatcgt

SEQ ID NO: 3306481 - DNA, 25 bp, Homo sapien
tcgtgggcagatgcagcttccatct

SEQ ID NO: 3306482 - DNA, 25 bp, Homo sapien
aactgggtccaaggagagcatggcc

SEQ ID NO: 3306483 - DNA, 25 bp, Homo sapien
tttcacacacgtgaggaaggcgcag

SEQ ID NO: 3306484 - DNA, 25 bp, Homo sapien
aaaggtcactagaatggcagcggca

SEQ ID NO: 3306485 - DNA, 25 bp, Homo sapien
atagggctccaatgcacgtttgcag

SEQ ID NO: 3306486 - DNA, 25 bp, Homo sapien
gacagtaaactctcaccgcagctgc

SEQ ID NO: 3306487 - DNA, 25 bp, Homo sapien
gatgccaaatggtctagaggcagaa

SEQ ID NO: 3306488 - DNA, 25 bp, Homo sapien
gggacagtaaactctcaccgcagct

SEQ ID NO: 3306489 - DNA, 25 bp, Homo sapien
gcaatggaaacaggagccgatgcca

SEQ ID NO: 3306490 - DNA, 25 bp, Homo sapien
caggagcctcagtttcgcctttatg

SEQ ID NO: 3306491 - DNA, 25 bp, Homo sapien
tcttcagccataggagtgcggtctt

SEQ ID NO: 3306492 - DNA, 25 bp, Homo sapien
gagcctcagtttcgcctttatgtgc

SEQ ID NO: 3306493 - DNA, 25 bp, Homo sapien
ataggagtgcggtcttccttctgga

SEQ ID NO: 3306494 - DNA, 25 bp, Homo sapien
cctgggtggtttgcgtaattctaca

SEQ ID NO: 3306495 - DNA, 25 bp, Homo sapien
tgagagcttataggtcaagccctgt

SEQ ID NO: 3306496 - DNA, 25 bp, Homo sapien
gaacccttataacaccttgatgaga

SEQ ID NO: 3306497 - DNA, 25 bp, Homo sapien
cataccctgccttgttctaggaaag

SEQ ID NO: 3306498 - DNA, 25 bp, Homo sapien
aggtgtgccactacggccgcttggc

SEQ ID NO: 3306499 - DNA, 25 bp, Homo sapien
gctgaatctgcattagtcttgggca

SEQ ID NO: 3306500 - DNA, 25 bp, Homo sapien
gaaaaaagcgttggtgccaccacca

SEQ ID NO: 3306501 - DNA, 25 bp, Homo sapien
tgggcattacccaaagagcatttct

SEQ ID NO: 3306502 - DNA, 25 bp, Homo sapien
ttccattctgtctgaaaaagttgtc

SEQ ID NO: 3306503 - DNA, 25 bp, Homo sapien
cttccattctgtctgaaaaagttgt

SEQ ID NO: 3306504 - DNA, 25 bp, Homo sapien
cctcaaataacatgggctgaagcat

SEQ ID NO: 3306505 - DNA, 25 bp, Homo sapien
ttttatccagatacaccccaggtag

SEQ ID NO: 3306506 - DNA, 25 bp, Homo sapien
tcttagcccttgtgaaatcccatgg

SEQ ID NO: 3306507 - DNA, 25 bp, Homo sapien
cacacgatgccctttagagagagaa

SEQ ID NO: 3306508 - DNA, 25 bp, Homo sapien
catggagatttgaaagccctgtgtc

SEQ ID NO: 3306509 - DNA, 25 bp, Homo sapien
aattggtccagaaagcatcgtgcac

SEQ ID NO: 3306510 - DNA, 25 bp, Homo sapien
aagtctggcttcacattgctatcgt

SEQ ID NO: 3306511 - DNA, 25 bp, Homo sapien
tcagcgtcatcttcgaattggtcca

SEQ ID NO: 3306512 - DNA, 25 bp, Homo sapien
cagtggcaatgcacaagtatacagc

SEQ ID NO: 3306513 - DNA, 25 bp, Homo sapien
taagcagaccctacgaaaggaaagc

SEQ ID NO: 3306514 - DNA, 25 bp, Homo sapien
aatgactgaagggtgacatgaacct

SEQ ID NO: 3306515 - DNA, 25 bp, Homo sapien
tacaaagcgggtagggatatctgat

SEQ ID NO: 3306516 - DNA, 25 bp, Homo sapien
ttctgcttcaggtttaactcttgct

SEQ ID NO: 3306517 - DNA, 25 bp, Homo sapien
ctgcttcaggtttaactcttgcttt

SEQ ID NO: 3306518 - DNA, 25 bp, Homo sapien
taactcttgctttggagttaaatga

SEQ ID NO: 3306519 - DNA, 25 bp, Homo sapien
caggtttaactcttgctttggagtt

SEQ ID NO: 3306520 - DNA, 25 bp, Homo sapien
gagaaattagcactctttagaggaa

SEQ ID NO: 3306521 - DNA, 25 bp, Homo sapien
ctgatttttagggaatgctgtaaga

SEQ ID NO: 3306522 - DNA, 25 bp, Homo sapien
aaaagcattgtggacaacaaaacca

SEQ ID NO: 3306523 - DNA, 25 bp, Homo sapien
aactggtgcggatttagcaatgggt

SEQ ID NO: 3306524 - DNA, 25 bp, Homo sapien
gccctcgataattggctgcagcaaa

SEQ ID NO: 3306525 - DNA, 25 bp, Homo sapien
gtttcgccctcgataattggctgca

SEQ ID NO: 3306526 - DNA, 25 bp, Homo sapien
aaggaagcagtttcgccctcgataa

SEQ ID NO: 3306527 - DNA, 25 bp, Homo sapien
agcagtttcgccctcgataattggc

SEQ ID NO: 3306528 - DNA, 25 bp, Homo sapien
gcttcatcacctgccgttcgttctt

SEQ ID NO: 3306529 - DNA, 25 bp, Homo sapien
tacctgtcgtatagtggcttcatca

SEQ ID NO: 3306530 - DNA, 25 bp, Homo sapien
tagctcgggagaggatctgtttgac

SEQ ID NO: 3306531 - DNA, 25 bp, Homo sapien
gatctgtttgaccagccggtacctg

SEQ ID NO: 3306532 - DNA, 25 bp, Homo sapien
gatcaaaccacagatgtcacccgct

SEQ ID NO: 3306533 - DNA, 25 bp, Homo sapien
cactgctggtaagagtgaaacactt

SEQ ID NO: 3306534 - DNA, 25 bp, Homo sapien
aaagactgtgtctagtgctggcaag

SEQ ID NO: 3306535 - DNA, 25 bp, Homo sapien
tacacacctaccacagagctgaaat

SEQ ID NO: 3306536 - DNA, 25 bp, Homo sapien
tttcataatataacagagctttctg

SEQ ID NO: 3306537 - DNA, 25 bp, Homo sapien
cactttctcattagcaatctggtct

SEQ ID NO: 3306538 - DNA, 25 bp, Homo sapien
gccactttctcattagcaatctggt

SEQ ID NO: 3306539 - DNA, 25 bp, Homo sapien
ctttctcattagcaatctggtcttt

SEQ ID NO: 3306540 - DNA, 25 bp, Homo sapien
catcctgggagttaggtcctcttca

SEQ ID NO: 3306541 - DNA, 25 bp, Homo sapien
ttaatgtcctcagggcggctgcttt

SEQ ID NO: 3306542 - DNA, 25 bp, Homo sapien
ggagtgtgttgcttcgctgccgcat

SEQ ID NO: 3306543 - DNA, 25 bp, Homo sapien
gaatagattccaatgtggcttcaac

SEQ ID NO: 3306544 - DNA, 25 bp, Homo sapien
gatggaggccataccctttgcagat

SEQ ID NO: 3306545 - DNA, 25 bp, Homo sapien
tatttagtgatctaatgcccagcca

SEQ ID NO: 3306546 - DNA, 25 bp, Homo sapien
gaattcgcctcttagctgatcgggt

SEQ ID NO: 3306547 - DNA, 25 bp, Homo sapien
tgactgagaccatgtgaagacctgg

SEQ ID NO: 3306548 - DNA, 25 bp, Homo sapien
gattggctgctttgtcactgtggga

SEQ ID NO: 3306549 - DNA, 25 bp, Homo sapien
tttaagttgtctccggaatttggca

SEQ ID NO: 3306550 - DNA, 25 bp, Homo sapien
cagaacctccggattggctgctttg

SEQ ID NO: 3306551 - DNA, 25 bp, Homo sapien
tccggaatttggcaaggtcatttgt

SEQ ID NO: 3306552 - DNA, 25 bp, Homo sapien
tgaatccttcgtgtgagctgggcag

SEQ ID NO: 3306553 - DNA, 25 bp, Homo sapien
gctctgaatccttcgtgtgagctgg

SEQ ID NO: 3306554 - DNA, 25 bp, Homo sapien
ttttaaggctctgaatccttcgtgt

SEQ ID NO: 3306555 - DNA, 25 bp, Homo sapien
cttctcttcttcgaatctatcttca

SEQ ID NO: 3306556 - DNA, 25 bp, Homo sapien
gctgtcttcgtccagcagctgacgg

SEQ ID NO: 3306557 - DNA, 25 bp, Homo sapien
agcagctgacggatcaggcgcccag

SEQ ID NO: 3306558 - DNA, 25 bp, Homo sapien
aagcgtagaaccgaggagagagcat

SEQ ID NO: 3306559 - DNA, 25 bp, Homo sapien
tgctctgcccataagcgtagaaccg

SEQ ID NO: 3306560 - DNA, 25 bp, Homo sapien
gcgagaggtgggcttcatcagagtc

SEQ ID NO: 3306561 - DNA, 25 bp, Homo sapien
gcggcgagaggtgggcttcatcaga

SEQ ID NO: 3306562 - DNA, 25 bp, Homo sapien
ggcgagaggtgggcttcatcagagt

SEQ ID NO: 3306563 - DNA, 25 bp, Homo sapien
ctgcggcgagaggtgggcttcatca

SEQ ID NO: 3306564 - DNA, 25 bp, Homo sapien
caggaggagaaagcagggataggct

SEQ ID NO: 3306565 - DNA, 25 bp, Homo sapien
ctgccaggaggagaaagcagggata

SEQ ID NO: 3306566 - DNA, 25 bp, Homo sapien
ccaggaggagaaagcagggataggc

SEQ ID NO: 3306567 - DNA, 25 bp, Homo sapien
tgccaggaggagaaagcagggatag

SEQ ID NO: 3306568 - DNA, 25 bp, Homo sapien
gaaaaccgggtactgggatgattga

SEQ ID NO: 3306569 - DNA, 25 bp, Homo sapien
gcacagaattaagggggccgatgtt

SEQ ID NO: 3306570 - DNA, 25 bp, Homo sapien
tctcagaaatctgcacagaattaag

SEQ ID NO: 3306571 - DNA, 25 bp, Homo sapien
cctttccaactatattatttagagc

SEQ ID NO: 3306572 - DNA, 25 bp, Homo sapien
gttttcactaaagccctggatgcca

SEQ ID NO: 3306573 - DNA, 25 bp, Homo sapien
gaaacccactgcctaattatataaa

SEQ ID NO: 3306574 - DNA, 25 bp, Homo sapien
caggtttcttagctttcaaggacag

SEQ ID NO: 3306575 - DNA, 25 bp, Homo sapien
aattaaacaaccctgcgttttgctg

SEQ ID NO: 3306576 - DNA, 25 bp, Homo sapien
gatccttcatctaaggtcattaaga

SEQ ID NO: 3306577 - DNA, 25 bp, Homo sapien
tgatccttcatctaaggtcattaag

SEQ ID NO: 3306578 - DNA, 25 bp, Homo sapien
cattgtgttaagtcatcctgctgta

SEQ ID NO: 3306579 - DNA, 25 bp, Homo sapien
gatccacgtgctgaaacgggactga

SEQ ID NO: 3306580 - DNA, 25 bp, Homo sapien
tttttcacagctaagacctcctggt

SEQ ID NO: 3306581 - DNA, 25 bp, Homo sapien
ggaaagcgggtagggagagaagaca

SEQ ID NO: 3306582 - DNA, 25 bp, Homo sapien
gaggtattcctatgacaggtcaagg

SEQ ID NO: 3306583 - DNA, 25 bp, Homo sapien
gatttcatgaaagaggcaggcgact

SEQ ID NO: 3306584 - DNA, 25 bp, Homo sapien
gacatacacatatcagcactcccgg

SEQ ID NO: 3306585 - DNA, 25 bp, Homo sapien
tcgcgccacagaaggtagaaatcct

SEQ ID NO: 3306586 - DNA, 25 bp, Homo sapien
cttcggagacaaagctctcctcctg

SEQ ID NO: 3306587 - DNA, 25 bp, Homo sapien
tcatcacacaatgcagtcaggtccg

SEQ ID NO: 3306588 - DNA, 25 bp, Homo sapien
cctggtcaccggcatcttgatttct

SEQ ID NO: 3306589 - DNA, 25 bp, Homo sapien
gtgtcagataggctgggatgctcct

SEQ ID NO: 3306590 - DNA, 25 bp, Homo sapien
cggatcctagctggccacttgcatg

SEQ ID NO: 3306591 - DNA, 25 bp, Homo sapien
aaaaccccaagacgtctgcagcaat

SEQ ID NO: 3306592 - DNA, 25 bp, Homo sapien
gcacaatgtccccaaatatctactg

SEQ ID NO: 3306593 - DNA, 25 bp, Homo sapien
tgctcttcccgataactgcaggcag

SEQ ID NO: 3306594 - DNA, 25 bp, Homo sapien
gaggctgtgtacgtgaaagctcccc

SEQ ID NO: 3306595 - DNA, 25 bp, Homo sapien
taggtaaacagtcctgcaagccagg

SEQ ID NO: 3306596 - DNA, 25 bp, Homo sapien
aacaacaatgaaaaccgggctactg

SEQ ID NO: 3306597 - DNA, 25 bp, Homo sapien
caacatggtgtctttcgcaggtgga

SEQ ID NO: 3306598 - DNA, 25 bp, Homo sapien
cccagggagcagtgtgctaggctct

SEQ ID NO: 3306599 - DNA, 25 bp, Homo sapien
aagactctagattttgcatgcccag

SEQ ID NO: 3306600 - DNA, 25 bp, Homo sapien
tctaagctctcttaagcagtaggct

SEQ ID NO: 3306601 - DNA, 25 bp, Homo sapien
ggtaactattattgaccaatgccca

SEQ ID NO: 3306602 - DNA, 25 bp, Homo sapien
gcagtggcactgggcacgattggtg

SEQ ID NO: 3306603 - DNA, 25 bp, Homo sapien
cagcagtggcactgggcacgattgg

SEQ ID NO: 3306604 - DNA, 25 bp, Homo sapien
cagtggcactgggcacgattggtgg

SEQ ID NO: 3306605 - DNA, 25 bp, Homo sapien
agcagtggcactgggcacgattggt

SEQ ID NO: 3306606 - DNA, 25 bp, Homo sapien
atgctgagtgtgtccaccatctttt

SEQ ID NO: 3306607 - DNA, 25 bp, Homo sapien
ctgagtgtgtccaccatctttttca

SEQ ID NO: 3306608 - DNA, 25 bp, Homo sapien
ctcaaaatgctgagtgtgtccacca

SEQ ID NO: 3306609 - DNA, 25 bp, Homo sapien
tcaaaatgctgagtgtgtccaccat

SEQ ID NO: 3306610 - DNA, 25 bp, Homo sapien
ctttcatcagacatccattcaaaat

SEQ ID NO: 3306611 - DNA, 25 bp, Homo sapien
catgagatcgtgtggaattgagact

SEQ ID NO: 3306612 - DNA, 25 bp, Homo sapien
tctctcatgagatcgtgtggaattg

SEQ ID NO: 3306613 - DNA, 25 bp, Homo sapien
cattcaaaatcatcaggtccagttc

SEQ ID NO: 3306614 - DNA, 25 bp, Homo sapien
taaagtactagaataatgatgggcg

SEQ ID NO: 3306615 - DNA, 25 bp, Homo sapien
tatatgaccctacttgagccttaat

SEQ ID NO: 3306616 - DNA, 25 bp, Homo sapien
gctctgaatcagaatacttgggtta

SEQ ID NO: 3306617 - DNA, 25 bp, Homo sapien
tatggtctaacatagggtggtcatg

SEQ ID NO: 3306618 - DNA, 25 bp, Homo sapien
taccaggcgtagtaagagtagtcca

SEQ ID NO: 3306619 - DNA, 25 bp, Homo sapien
tattctaaccttgagctctaagagg

SEQ ID NO: 3306620 - DNA, 25 bp, Homo sapien
gaaagctaggctcaaaacctgtttg

SEQ ID NO: 3306621 - DNA, 25 bp, Homo sapien
tcaatctgaaggctacaggaatgct

SEQ ID NO: 3306622 - DNA, 25 bp, Homo sapien
gagctcccatcaaggtagctgtggg

SEQ ID NO: 3306623 - DNA, 25 bp, Homo sapien
tagcctagcctaaacatggtcagaa

SEQ ID NO: 3306624 - DNA, 25 bp, Homo sapien
tgtggttagaacacaaagatggacc

SEQ ID NO: 3306625 - DNA, 25 bp, Homo sapien
tccatgttgcactggagatcggcag

SEQ ID NO: 3306626 - DNA, 25 bp, Homo sapien
ttgtgtaccttttcgacttcctgag

SEQ ID NO: 3306627 - DNA, 25 bp, Homo sapien
gatttctgacgtttaggcttgctcc

SEQ ID NO: 3306628 - DNA, 25 bp, Homo sapien
cccagaaggagtattttctttgttg

SEQ ID NO: 3306629 - DNA, 25 bp, Homo sapien
cacaagaccgtcctgattgtcatga

SEQ ID NO: 3306630 - DNA, 25 bp, Homo sapien
gaaaatctgaccatgctgttgtgct

SEQ ID NO: 3306631 - DNA, 25 bp, Homo sapien
ccatgagcctggatgcgatatctgt

SEQ ID NO: 3306632 - DNA, 25 bp, Homo sapien
cattgaatcaccttatagtactggg

SEQ ID NO: 3306633 - DNA, 25 bp, Homo sapien
gttgtgctcatggacaaatcctgtc

SEQ ID NO: 3306634 - DNA, 25 bp, Homo sapien
tgtctctcccatgtcgaacttcatc

SEQ ID NO: 3306635 - DNA, 25 bp, Homo sapien
tcaaaaagatgttgttctacagctg

SEQ ID NO: 3306636 - DNA, 25 bp, Homo sapien
gtgttccagattctgagtcctctga

SEQ ID NO: 3306637 - DNA, 25 bp, Homo sapien
cagaagatgctgatagtgttccaga

SEQ ID NO: 3306638 - DNA, 25 bp, Homo sapien
cacattgctgacttggggtacatga

SEQ ID NO: 3306639 - DNA, 25 bp, Homo sapien
ccggttgcagacacattgctgactt

SEQ ID NO: 3306640 - DNA, 25 bp, Homo sapien
tctccggttgcagacacattgctga

SEQ ID NO: 3306641 - DNA, 25 bp, Homo sapien
tccggttgcagacacattgctgact

SEQ ID NO: 3306642 - DNA, 25 bp, Homo sapien
cctaagcctactgttagtgatgatg

SEQ ID NO: 3306643 - DNA, 25 bp, Homo sapien
tcatatgcagatcccagttctatgg

SEQ ID NO: 3306644 - DNA, 25 bp, Homo sapien
tatgcagatcccagttctatggcca

SEQ ID NO: 3306645 - DNA, 25 bp, Homo sapien
gccaaattcaaacctaagcctactg

SEQ ID NO: 3306646 - DNA, 25 bp, Homo sapien
tcaatctaggcagaaccagttccaa

SEQ ID NO: 3306647 - DNA, 25 bp, Homo sapien
gctgagtcattgaggcagatcatcc

SEQ ID NO: 3306648 - DNA, 25 bp, Homo sapien
cagttccaacaacctgggaaggtag

SEQ ID NO: 3306649 - DNA, 25 bp, Homo sapien
tgcttcggcctcacaagaaactggt

SEQ ID NO: 3306650 - DNA, 25 bp, Homo sapien
aaccaccaaactgaatatgccattg

SEQ ID NO: 3306651 - DNA, 25 bp, Homo sapien
gaattaaccaccaaactgaatatgc

SEQ ID NO: 3306652 - DNA, 25 bp, Homo sapien
ttaaccaccaaactgaatatgccat

SEQ ID NO: 3306653 - DNA, 25 bp, Homo sapien
agaattaaccaccaaactgaatatg

SEQ ID NO: 3306654 - DNA, 25 bp, Homo sapien
ctcaaatagaaaggtgacagaggtc

SEQ ID NO: 3306655 - DNA, 25 bp, Homo sapien
aatgatctcaaagtatagaatgaat

SEQ ID NO: 3306656 - DNA, 25 bp, Homo sapien
gcacgtgctaccatgtcaggctagt

SEQ ID NO: 3306657 - DNA, 25 bp, Homo sapien
ctcaaagtatagaatgaatccctcc

SEQ ID NO: 3306658 - DNA, 25 bp, Homo sapien
cccccttgcggtccactggagtgat

SEQ ID NO: 3306659 - DNA, 25 bp, Homo sapien
gattacatgcaaactgatgatatga

SEQ ID NO: 3306660 - DNA, 25 bp, Homo sapien
aaagattacctatgatatgattaca

SEQ ID NO: 3306661 - DNA, 25 bp, Homo sapien
ttacatgcaaactgtacaactctgt

SEQ ID NO: 3306662 - DNA, 25 bp, Homo sapien
gaattgcatatttgtatgatatgtg

SEQ ID NO: 3306663 - DNA, 25 bp, Homo sapien
tggtgaactcccataccatccccat

SEQ ID NO: 3306664 - DNA, 25 bp, Homo sapien
tgcaagggaatctcacaactgtctc

SEQ ID NO: 3306665 - DNA, 25 bp, Homo sapien
tttggtcgtctgtacagtgaacgtc

SEQ ID NO: 3306666 - DNA, 25 bp, Homo sapien
tctcttccacggcaagtttggtcgt

SEQ ID NO: 3306667 - DNA, 25 bp, Homo sapien
gtgaacgtcttcttacagtggctaa

SEQ ID NO: 3306668 - DNA, 25 bp, Homo sapien
tgtaggcatgaggtatccccttccc

SEQ ID NO: 3306669 - DNA, 25 bp, Homo sapien
tcttctttggtgtagaataccaggg

SEQ ID NO: 3306670 - DNA, 25 bp, Homo sapien
ccagaccatcacttctagtagtaga

SEQ ID NO: 3306671 - DNA, 25 bp, Homo sapien
tagtagaaggaacatgacattcaga

SEQ ID NO: 3306672 - DNA, 25 bp, Homo sapien
aactggatgccacatgtaggttcaa

SEQ ID NO: 3306673 - DNA, 25 bp, Homo sapien
tagggctacacataagataaactgg

SEQ ID NO: 3306674 - DNA, 25 bp, Homo sapien
tctacattatccagtttctcctagg

SEQ ID NO: 3306675 - DNA, 25 bp, Homo sapien
tacacgttttagctggcttgcagat

SEQ ID NO: 3306676 - DNA, 25 bp, Homo sapien
agtgtttggcaatatctgcatttgc

SEQ ID NO: 3306677 - DNA, 25 bp, Homo sapien
gtttggcaatatctgcatttgctct

SEQ ID NO: 3306678 - DNA, 25 bp, Homo sapien
caagtgtttggcaatatctgcattt

SEQ ID NO: 3306679 - DNA, 25 bp, Homo sapien
tccaagtgtttggcaatatctgcat

SEQ ID NO: 3306680 - DNA, 25 bp, Homo sapien
ttcttacaagtttgataagaaggtc

SEQ ID NO: 3306681 - DNA, 25 bp, Homo sapien
caagtttgataagaaggtccttcta

SEQ ID NO: 3306682 - DNA, 25 bp, Homo sapien
tacaagtttgataagaaggtccttc

SEQ ID NO: 3306683 - DNA, 25 bp, Homo sapien
tttgataagaaggtccttctagcct

SEQ ID NO: 3306684 - DNA, 25 bp, Homo sapien
actactcaaaagaagatgtttatgt

SEQ ID NO: 3306685 - DNA, 25 bp, Homo sapien
attgagtctacgaggaacttaaaca

SEQ ID NO: 3306686 - DNA, 25 bp, Homo sapien
ctaatattgagtctacgaggaactt

SEQ ID NO: 3306687 - DNA, 25 bp, Homo sapien
agaggctggcaaggttaaggagaaa

SEQ ID NO: 3306688 - DNA, 25 bp, Homo sapien
tgtatagagcattattagaatttga

SEQ ID NO: 3306689 - DNA, 25 bp, Homo sapien
gtcattcatgtatagagcattatta

SEQ ID NO: 3306690 - DNA, 25 bp, Homo sapien
aattagactcagtgcatcaaataat

SEQ ID NO: 3306691 - DNA, 25 bp, Homo sapien
gactcagtgcatcaaataattgttt

SEQ ID NO: 3306692 - DNA, 25 bp, Homo sapien
ggaaataatatcatcctagacttca

SEQ ID NO: 3306693 - DNA, 25 bp, Homo sapien
taacaactgtaaatacctctggaaa

SEQ ID NO: 3306694 - DNA, 25 bp, Homo sapien
gacttcaaatcactgtctacaaaac

SEQ ID NO: 3306695 - DNA, 25 bp, Homo sapien
ggccaaaccaagtgatacctgaatg

SEQ ID NO: 3306696 - DNA, 25 bp, Homo sapien
cttgccaactggatataactacctg

SEQ ID NO: 3306697 - DNA, 25 bp, Homo sapien
caaattaagtagctggtcttgccaa

SEQ ID NO: 3306698 - DNA, 25 bp, Homo sapien
gaaagcacccaggaatgagtatagg

SEQ ID NO: 3306699 - DNA, 25 bp, Homo sapien
taatgaagaggctagagctagaagt

SEQ ID NO: 3306700 - DNA, 25 bp, Homo sapien
tatctttatcatcttcgccatctaa

SEQ ID NO: 3306701 - DNA, 25 bp, Homo sapien
tctttatcatcttcgccatctaaat

SEQ ID NO: 3306702 - DNA, 25 bp, Homo sapien
atcatcttcgccatctaaattatct

SEQ ID NO: 3306703 - DNA, 25 bp, Homo sapien
ttatcatcttcgccatctaaattat

SEQ ID NO: 3306704 - DNA, 25 bp, Homo sapien
gaatgccatcagatagctctggttg

SEQ ID NO: 3306705 - DNA, 25 bp, Homo sapien
ggcactaatagcaccctctgctgaa

SEQ ID NO: 3306706 - DNA, 25 bp, Homo sapien
taacttagccgcaagctgagctgag

SEQ ID NO: 3306707 - DNA, 25 bp, Homo sapien
ctctggttgcagtactctgtgggcc

SEQ ID NO: 3306708 - DNA, 25 bp, Homo sapien
cactgtggaacagttaaacagataa

SEQ ID NO: 3306709 - DNA, 25 bp, Homo sapien
tatattcatcctgtacaacatgttg

SEQ ID NO: 3306710 - DNA, 25 bp, Homo sapien
tcagtctaggtcgacaccatctagt

SEQ ID NO: 3306711 - DNA, 25 bp, Homo sapien
tgcccatattaaagcaagcacaagg

SEQ ID NO: 3306712 - DNA, 25 bp, Homo sapien
ggagggatttcgtttactggacagc

SEQ ID NO: 3306713 - DNA, 25 bp, Homo sapien
ggcagagttaccatcagaacccaga

SEQ ID NO: 3306714 - DNA, 25 bp, Homo sapien
tccacaggagagtgtagagtacgaa

SEQ ID NO: 3306715 - DNA, 25 bp, Homo sapien
tacacatgataaaggattacccagc

SEQ ID NO: 3306716 - DNA, 25 bp, Homo sapien
cctaagcactgttcagttgctgtgc

SEQ ID NO: 3306717 - DNA, 25 bp, Homo sapien
gtaagctattatgagacagtattgt

SEQ ID NO: 3306718 - DNA, 25 bp, Homo sapien
tgatagtttagacttaggagtcacc

SEQ ID NO: 3306719 - DNA, 25 bp, Homo sapien
taaaagcttaggcataataaactga

SEQ ID NO: 3306720 - DNA, 25 bp, Homo sapien
attatttctctgtgcttcctttttc

SEQ ID NO: 3306721 - DNA, 25 bp, Homo sapien
tatttctctgtgcttcctttttcct

SEQ ID NO: 3306722 - DNA, 25 bp, Homo sapien
ttctctgtgcttcctttttccttaa

SEQ ID NO: 3306723 - DNA, 25 bp, Homo sapien
tttctctgtgcttcctttttcctta

SEQ ID NO: 3306724 - DNA, 25 bp, Homo sapien
gagcctccactactttctgtgcgtg

SEQ ID NO: 3306725 - DNA, 25 bp, Homo sapien
tgtactgaagtgtgaatggcattgt

SEQ ID NO: 3306726 - DNA, 25 bp, Homo sapien
tgttgaatgtggttatactgtccca

SEQ ID NO: 3306727 - DNA, 25 bp, Homo sapien
catagatcctcagaccaagaagagc

SEQ ID NO: 3306728 - DNA, 25 bp, Homo sapien
cttctgtgctgtggcggttatggac

SEQ ID NO: 3306729 - DNA, 25 bp, Homo sapien
gaagggataagtatcacttctgtgc

SEQ ID NO: 3306730 - DNA, 25 bp, Homo sapien
ccagatggagtactcatgtattatc

SEQ ID NO: 3306731 - DNA, 25 bp, Homo sapien
cctgtgctcactggaagatgacatt

SEQ ID NO: 3306732 - DNA, 25 bp, Homo sapien
ccagtagaagatggaagcagcctgt

SEQ ID NO: 3306733 - DNA, 25 bp, Homo sapien
gaagggaaactggaacatagaggcc

SEQ ID NO: 3306734 - DNA, 25 bp, Homo sapien
aatcactgcttagggtcttgctgcc

SEQ ID NO: 3306735 - DNA, 25 bp, Homo sapien
tgtgaaagaaccgagaaatacactg

SEQ ID NO: 3306736 - DNA, 25 bp, Homo sapien
tcccgcatcttatagttaatatgac

SEQ ID NO: 3306737 - DNA, 25 bp, Homo sapien
atcccgcatcttatagttaatatga

SEQ ID NO: 3306738 - DNA, 25 bp, Homo sapien
cccgcatcttatagttaatatgact

SEQ ID NO: 3306739 - DNA, 25 bp, Homo sapien
accagatcctcccgcaacactccct

SEQ ID NO: 3306740 - DNA, 25 bp, Homo sapien
ccagatcctcccgcaacactccctc

SEQ ID NO: 3306741 - DNA, 25 bp, Homo sapien
caccagatcctcccgcaacactccc

SEQ ID NO: 3306742 - DNA, 25 bp, Homo sapien
gcagggagttcttataatagacctc

SEQ ID NO: 3306743 - DNA, 25 bp, Homo sapien
aggtggttttggcatgtctctttct

SEQ ID NO: 3306744 - DNA, 25 bp, Homo sapien
tgggcagggagttcttataatagac

SEQ ID NO: 3306745 - DNA, 25 bp, Homo sapien
tttggcatgtctctttctaagcctc

SEQ ID NO: 3306746 - DNA, 25 bp, Homo sapien
cacaggacacaggtaacaccttcct

SEQ ID NO: 3306747 - DNA, 25 bp, Homo sapien
cacaggtaacaccttcctataaggc

SEQ ID NO: 3306748 - DNA, 25 bp, Homo sapien
gacacaggtaacaccttcctataag

SEQ ID NO: 3306749 - DNA, 25 bp, Homo sapien
agagccacaggacacaggtaacacc

SEQ ID NO: 3306750 - DNA, 25 bp, Homo sapien
gaattgaaatcgtgcagcattgatg

SEQ ID NO: 3306751 - DNA, 25 bp, Homo sapien
tagtagttaactatgtgcacggttt

SEQ ID NO: 3306752 - DNA, 25 bp, Homo sapien
tcaaactaataaacaacactggcta

SEQ ID NO: 3306753 - DNA, 25 bp, Homo sapien
tgtctttcatattgtgggcactcga

SEQ ID NO: 3306754 - DNA, 25 bp, Homo sapien
ttatacaggtaagccaccgagctca

SEQ ID NO: 3306755 - DNA, 25 bp, Homo sapien
cctacttggtcaagtctattattgg

SEQ ID NO: 3306756 - DNA, 25 bp, Homo sapien
ggattatacaggtaagccaccgagc

SEQ ID NO: 3306757 - DNA, 25 bp, Homo sapien
aagtctattattggagctttcaaat

SEQ ID NO: 3306758 - DNA, 25 bp, Homo sapien
ttctgtagtaaaggtggtgcggcca

SEQ ID NO: 3306759 - DNA, 25 bp, Homo sapien
caaagtcatggcctcaactgggaga

SEQ ID NO: 3306760 - DNA, 25 bp, Homo sapien
taagtcattcacgaaggatccgccc

SEQ ID NO: 3306761 - DNA, 25 bp, Homo sapien
ccagggactgcgtttcaatatgaga

SEQ ID NO: 3306762 - DNA, 25 bp, Homo sapien
caaacagggtattgtaattttctag

SEQ ID NO: 3306763 - DNA, 25 bp, Homo sapien
ttttactatgataagcctagccagg

SEQ ID NO: 3306764 - DNA, 25 bp, Homo sapien
ccaggttttcacatctcagatgatc

SEQ ID NO: 3306765 - DNA, 25 bp, Homo sapien
tcattttctgtatactctacttcaa

SEQ ID NO: 3306766 - DNA, 25 bp, Homo sapien
tgctgacacttcttgctgcatatag

SEQ ID NO: 3306767 - DNA, 25 bp, Homo sapien
agataaatatgctgggtattggaga

SEQ ID NO: 3306768 - DNA, 25 bp, Homo sapien
gccagatgatagaattactatctac

SEQ ID NO: 3306769 - DNA, 25 bp, Homo sapien
catatagataaatatgctgggtatt

SEQ ID NO: 3306770 - DNA, 25 bp, Homo sapien
aaccaagttgttaccggactgccag

SEQ ID NO: 3306771 - DNA, 25 bp, Homo sapien
gaagtcgcccatgctaaagttccac

SEQ ID NO: 3306772 - DNA, 25 bp, Homo sapien
gagatagcctaatttccgaaacagg

SEQ ID NO: 3306773 - DNA, 25 bp, Homo sapien
tttggactaagcacctgcacgaggc

SEQ ID NO: 3306774 - DNA, 25 bp, Homo sapien
cattatacacagtagaagttgcctg

SEQ ID NO: 3306775 - DNA, 25 bp, Homo sapien
cctggttctcggcaagaaggcactt

SEQ ID NO: 3306776 - DNA, 25 bp, Homo sapien
caaagtagcactgaagggcaattcc

SEQ ID NO: 3306777 - DNA, 25 bp, Homo sapien
tctgggttgtagaaagtcatctccc

SEQ ID NO: 3306778 - DNA, 25 bp, Homo sapien
ctccctggtagctaggattataggc

SEQ ID NO: 3306779 - DNA, 25 bp, Homo sapien
acctgccaccatgcccagcgaattt

SEQ ID NO: 3306780 - DNA, 25 bp, Homo sapien
gcctccctggtagctaggattatag

SEQ ID NO: 3306781 - DNA, 25 bp, Homo sapien
tgccaccatgcccagcgaatttttg

SEQ ID NO: 3306782 - DNA, 25 bp, Homo sapien
caagtggaagaaacagtgcctttca

SEQ ID NO: 3306783 - DNA, 25 bp, Homo sapien
aaataagtaaagcattagcagaacc

SEQ ID NO: 3306784 - DNA, 25 bp, Homo sapien
caacgataacatagaaatccttgtg

SEQ ID NO: 3306785 - DNA, 25 bp, Homo sapien
cgataacatagaaatccttgtgcac

SEQ ID NO: 3306786 - DNA, 25 bp, Homo sapien
gataacatagaaatccttgtgcacc

SEQ ID NO: 3306787 - DNA, 25 bp, Homo sapien
gagacaacgataacatagaaatcct

SEQ ID NO: 3306788 - DNA, 25 bp, Homo sapien
cacttttaagccacgtaagtgttat

SEQ ID NO: 3306789 - DNA, 25 bp, Homo sapien
tcacttttaagccacgtaagtgtta

SEQ ID NO: 3306790 - DNA, 25 bp, Homo sapien
caaaaagctacattaaacgactgat

SEQ ID NO: 3306791 - DNA, 25 bp, Homo sapien
gaattattgtataacgttgtaccac

SEQ ID NO: 3306792 - DNA, 25 bp, Homo sapien
gctcggctactctggccaagataaa

SEQ ID NO: 3306793 - DNA, 25 bp, Homo sapien
tcaaaagctacatgagggtcgggcc

SEQ ID NO: 3306794 - DNA, 25 bp, Homo sapien
caaaggtttactgggcagaacaaat

SEQ ID NO: 3306795 - DNA, 25 bp, Homo sapien
gatattctgactgactacctggagc

SEQ ID NO: 3306796 - DNA, 25 bp, Homo sapien
gaaattccagatcaagcccaatgtc

SEQ ID NO: 3306797 - DNA, 25 bp, Homo sapien
tatagactttttactatcacggagc

SEQ ID NO: 3306798 - DNA, 25 bp, Homo sapien
taatattactagttctgggcagctg

SEQ ID NO: 3306799 - DNA, 25 bp, Homo sapien
caaaagttcctgtggctagcaacaa

SEQ ID NO: 3306800 - DNA, 25 bp, Homo sapien
tgtagtcactaggatctaagccaga

SEQ ID NO: 3306801 - DNA, 25 bp, Homo sapien
gctgtgaatgacctggaaccctgta

SEQ ID NO: 3306802 - DNA, 25 bp, Homo sapien
tggctacttttgtcaagaactggca

SEQ ID NO: 3306803 - DNA, 25 bp, Homo sapien
tggcccaaatacagtggcgagattg

SEQ ID NO: 3306804 - DNA, 25 bp, Homo sapien
catgcgattctgcacatgatgcttg

SEQ ID NO: 3306805 - DNA, 25 bp, Homo sapien
aactggcaaaggtacttgaggaggc

SEQ ID NO: 3306806 - DNA, 25 bp, Homo sapien
tttaaaatgaactcctcgtcacggc

SEQ ID NO: 3306807 - DNA, 25 bp, Homo sapien
ttaaaggatcaactgtcaagatgtc

SEQ ID NO: 3306808 - DNA, 25 bp, Homo sapien
taggtttattaaaggatcaactgtc

SEQ ID NO: 3306809 - DNA, 25 bp, Homo sapien
ttaaaatgaactcctcgtcacggcc

SEQ ID NO: 3306810 - DNA, 25 bp, Homo sapien
tgcccagcctagtaaagttgtttta

SEQ ID NO: 3306811 - DNA, 25 bp, Homo sapien
acctcagcctcccaaagtgttggga

SEQ ID NO: 3306812 - DNA, 25 bp, Homo sapien
accgtgcccagcctagtaaagttgt

SEQ ID NO: 3306813 - DNA, 25 bp, Homo sapien
tggcttcaagcaatctttctacctc

SEQ ID NO: 3306814 - DNA, 25 bp, Homo sapien
tgctgagcagacatcaccgtccttc

SEQ ID NO: 3306815 - DNA, 25 bp, Homo sapien
gggcactccactctcgaacttcagt

SEQ ID NO: 3306816 - DNA, 25 bp, Homo sapien
tcgaggctgcaacgctgaggtgatc

SEQ ID NO: 3306817 - DNA, 25 bp, Homo sapien
tgatcagactgtcaggcagctccct

SEQ ID NO: 3306818 - DNA, 25 bp, Homo sapien
caagaactgtcttgtggtcctcaag

SEQ ID NO: 3306819 - DNA, 25 bp, Homo sapien
gataattcgtgatgttcaactaggg

SEQ ID NO: 3306820 - DNA, 25 bp, Homo sapien
tggaccaaactagcagtcatataag

SEQ ID NO: 3306821 - DNA, 25 bp, Homo sapien
tagccagtacccacatgaggcttac

SEQ ID NO: 3306822 - DNA, 25 bp, Homo sapien
tcggtgagcccctgccgttcaagtt

SEQ ID NO: 3306823 - DNA, 25 bp, Homo sapien
acttctgataggtaaaatccttctg

SEQ ID NO: 3306824 - DNA, 25 bp, Homo sapien
tgtcttctttcagccgaaccgctgc

SEQ ID NO: 3306825 - DNA, 25 bp, Homo sapien
catgctgcgtcaaatattccactat

SEQ ID NO: 3306826 - DNA, 25 bp, Homo sapien
gagcagtcagtcatatttaccacag

SEQ ID NO: 3306827 - DNA, 25 bp, Homo sapien
aaaggagcgtaagaaaaaagagcag

SEQ ID NO: 3306828 - DNA, 25 bp, Homo sapien
aaaagagcagtcagtcatatttacc

SEQ ID NO: 3306829 - DNA, 25 bp, Homo sapien
agtcatatttaccacaggaggttgc

SEQ ID NO: 3306830 - DNA, 25 bp, Homo sapien
tagagcacactgtcagaaggagctg

SEQ ID NO: 3306831 - DNA, 25 bp, Homo sapien
gagcacactgtcagaaggagctgaa

SEQ ID NO: 3306832 - DNA, 25 bp, Homo sapien
agagcacactgtcagaaggagctga

SEQ ID NO: 3306833 - DNA, 25 bp, Homo sapien
agcacactgtcagaaggagctgaac

SEQ ID NO: 3306834 - DNA, 25 bp, Homo sapien
tgcaaaattaccacacaacccgata

SEQ ID NO: 3306835 - DNA, 25 bp, Homo sapien
caacccaaggatctatcagtgaatg

SEQ ID NO: 3306836 - DNA, 25 bp, Homo sapien
gaaaaggcaaacgtatagtgacata

SEQ ID NO: 3306837 - DNA, 25 bp, Homo sapien
gctgatcacaagagaacatataagt

SEQ ID NO: 3306838 - DNA, 25 bp, Homo sapien
tacatggaaggtagttgatggtacc

SEQ ID NO: 3306839 - DNA, 25 bp, Homo sapien
tgtaacgcgactgtacgttcctgct

SEQ ID NO: 3306840 - DNA, 25 bp, Homo sapien
tagttgatggtaccaggcggtaaga

SEQ ID NO: 3306841 - DNA, 25 bp, Homo sapien
tcctgcttgcgctatgggatacatg

SEQ ID NO: 3306842 - DNA, 25 bp, Homo sapien
cagcagcaggatatttcagtagttg

SEQ ID NO: 3306843 - DNA, 25 bp, Homo sapien
tgtaattccctacaccacctcagaa

SEQ ID NO: 3306844 - DNA, 25 bp, Homo sapien
ttaacactaacaacatggcaaagag

SEQ ID NO: 3306845 - DNA, 25 bp, Homo sapien
tttgtgtcccacttcaagagtccac

SEQ ID NO: 3306846 - DNA, 25 bp, Homo sapien
agatggctagagctcctgcccccat

SEQ ID NO: 3306847 - DNA, 25 bp, Homo sapien
acagatggctagagctcctgccccc

SEQ ID NO: 3306848 - DNA, 25 bp, Homo sapien
cagatggctagagctcctgccccca

SEQ ID NO: 3306849 - DNA, 25 bp, Homo sapien
caaaggccccaaggtaagcgaagag

SEQ ID NO: 3306850 - DNA, 25 bp, Homo sapien
gaggaagaccagacgaaaatattaa

SEQ ID NO: 3306851 - DNA, 25 bp, Homo sapien
gccccaaggtaagcgaagagcagct

SEQ ID NO: 3306852 - DNA, 25 bp, Homo sapien
caaggtaagcgaagagcagcttcta

SEQ ID NO: 3306853 - DNA, 25 bp, Homo sapien
aagagtggttttgcttctctttccg

SEQ ID NO: 3306854 - DNA, 25 bp, Homo sapien
gagtggttttgcttctctttccgct

SEQ ID NO: 3306855 - DNA, 25 bp, Homo sapien
ggaagagtggttttgcttctctttc

SEQ ID NO: 3306856 - DNA, 25 bp, Homo sapien
tttaggaagagtggttttgcttctc

SEQ ID NO: 3306857 - DNA, 25 bp, Homo sapien
cactgagtataccagcttggaccag

SEQ ID NO: 3306858 - DNA, 25 bp, Homo sapien
gaaccaccctaagccacattggaaa

SEQ ID NO: 3306859 - DNA, 25 bp, Homo sapien
ccgtgtagtagggatcagaaagcat

SEQ ID NO: 3306860 - DNA, 25 bp, Homo sapien
cttggaccagagtcagcagtatccc

SEQ ID NO: 3306861 - DNA, 25 bp, Homo sapien
tgaagttgggcctattctttctttc

SEQ ID NO: 3306862 - DNA, 25 bp, Homo sapien
ctgaagttgggcctattctttcttt

SEQ ID NO: 3306863 - DNA, 25 bp, Homo sapien
ttctccacattttttgaaagatttc

SEQ ID NO: 3306864 - DNA, 25 bp, Homo sapien
tctttctttctccacattttttgaa

SEQ ID NO: 3306865 - DNA, 25 bp, Homo sapien
cgttcacttcatgcctcacttggag

SEQ ID NO: 3306866 - DNA, 25 bp, Homo sapien
caagaatgcgttcacttcatgcctc

SEQ ID NO: 3306867 - DNA, 25 bp, Homo sapien
aatcagtgacaacccctcactctgg

SEQ ID NO: 3306868 - DNA, 25 bp, Homo sapien
tttgcaagcccaccaatcagtgaca

SEQ ID NO: 3306869 - DNA, 25 bp, Homo sapien
gctgtgtgccagagatccttgtacg

SEQ ID NO: 3306870 - DNA, 25 bp, Homo sapien
tgtgccagagatccttgtacgtcgt

SEQ ID NO: 3306871 - DNA, 25 bp, Homo sapien
ccagagatccttgtacgtcgtgtct

SEQ ID NO: 3306872 - DNA, 25 bp, Homo sapien
gagatccttgtacgtcgtgtctttg

SEQ ID NO: 3306873 - DNA, 25 bp, Homo sapien
gcggcgcggctgctgtttgtaaaca

SEQ ID NO: 3306874 - DNA, 25 bp, Homo sapien
ccactgggaaaagcgccaggacaag

SEQ ID NO: 3306875 - DNA, 25 bp, Homo sapien
ccaggacaaggcgagcgtgtgcctc

SEQ ID NO: 3306876 - DNA, 25 bp, Homo sapien
gagaaaagagcctcgtcggcagagc

SEQ ID NO: 3306877 - DNA, 25 bp, Homo sapien
taggaagacgttttcctgtatcttc

SEQ ID NO: 3306878 - DNA, 25 bp, Homo sapien
tctaggaagacgttttcctgtatct

SEQ ID NO: 3306879 - DNA, 25 bp, Homo sapien
ctatctaggaagacgttttcctgta

SEQ ID NO: 3306880 - DNA, 25 bp, Homo sapien
tatctaggaagacgttttcctgtat

SEQ ID NO: 3306881 - DNA, 25 bp, Homo sapien
tgaacaccagggctgctggacccat

SEQ ID NO: 3306882 - DNA, 25 bp, Homo sapien
gcagtgaacaccagggctgctggac

SEQ ID NO: 3306883 - DNA, 25 bp, Homo sapien
gatacagagtccctggcagtgaaca

SEQ ID NO: 3306884 - DNA, 25 bp, Homo sapien
tgatacagagtccctggcagtgaac

SEQ ID NO: 3306885 - DNA, 25 bp, Homo sapien
tgatccagagattgtacatctagta

SEQ ID NO: 3306886 - DNA, 25 bp, Homo sapien
gcttcaaagaagaatactcaggcca

SEQ ID NO: 3306887 - DNA, 25 bp, Homo sapien
catggagggcaacttggtgattgca

SEQ ID NO: 3306888 - DNA, 25 bp, Homo sapien
ggtgattgcatctaaactacaaatg

SEQ ID NO: 3306889 - DNA, 25 bp, Homo sapien
agcctcagagagagactcgatgctc

SEQ ID NO: 3306890 - DNA, 25 bp, Homo sapien
gccgcctgcttgtgggagacactga

SEQ ID NO: 3306891 - DNA, 25 bp, Homo sapien
gtcagccttccaggtacatcctgaa

SEQ ID NO: 3306892 - DNA, 25 bp, Homo sapien
cacagaagcagctaggatcttcatt

SEQ ID NO: 3306893 - DNA, 25 bp, Homo sapien
caaaacgtctggcacaaaggcatta

SEQ ID NO: 3306894 - DNA, 25 bp, Homo sapien
tgagacatagatggaagtgcccagc

SEQ ID NO: 3306895 - DNA, 25 bp, Homo sapien
ggtcctttgattccaagcccagata

SEQ ID NO: 3306896 - DNA, 25 bp, Homo sapien
caagcaaatgctttggagcccttta

SEQ ID NO: 3306897 - DNA, 25 bp, Homo sapien
acgtgagccggcaagtaggccctca

SEQ ID NO: 3306898 - DNA, 25 bp, Homo sapien
tgaagtctgaactcctaaggcgatg

SEQ ID NO: 3306899 - DNA, 25 bp, Homo sapien
tgattagatggtggtcacagagccc

SEQ ID NO: 3306900 - DNA, 25 bp, Homo sapien
catcccttttactgtgtgaggacac

SEQ ID NO: 3306901 - DNA, 25 bp, Homo sapien
tggtgggacataaacagctataggc

SEQ ID NO: 3306902 - DNA, 25 bp, Homo sapien
taaattcagacagggtggttgacca

SEQ ID NO: 3306903 - DNA, 25 bp, Homo sapien
gttagagaatggcagccacagggca

SEQ ID NO: 3306904 - DNA, 25 bp, Homo sapien
aacatttggctggaaacggcaccta

SEQ ID NO: 3306905 - DNA, 25 bp, Homo sapien
taaggcaatctaagcgccctggacc

SEQ ID NO: 3306906 - DNA, 25 bp, Homo sapien
tatatagggtacacctgatggctct

SEQ ID NO: 3306907 - DNA, 25 bp, Homo sapien
aaacctcgcgtttgatgaccaggag

SEQ ID NO: 3306908 - DNA, 25 bp, Homo sapien
gattcctagcagaagctgtcacatg

SEQ ID NO: 3306909 - DNA, 25 bp, Homo sapien
caatatctggaggatgagaactttc

SEQ ID NO: 3306910 - DNA, 25 bp, Homo sapien
gtaatattataccacacttttgatc

SEQ ID NO: 3306911 - DNA, 25 bp, Homo sapien
aatacattcataaatggactttcca

SEQ ID NO: 3306912 - DNA, 25 bp, Homo sapien
ccaaaatgaaggtgtaagtatacgt

SEQ ID NO: 3306913 - DNA, 25 bp, Homo sapien
caagacacgaggcaatttaagtgcc

SEQ ID NO: 3306914 - DNA, 25 bp, Homo sapien
catcaagatttcaggtatgctgcac

SEQ ID NO: 3306915 - DNA, 25 bp, Homo sapien
gtagctactcagttaccagtctgtg

SEQ ID NO: 3306916 - DNA, 25 bp, Homo sapien
gacttctcttcggtgttggtaggca

SEQ ID NO: 3306917 - DNA, 25 bp, Homo sapien
tagtgattttacatccgggagccca

SEQ ID NO: 3306918 - DNA, 25 bp, Homo sapien
gagttcactgttctaccacaaaggg

SEQ ID NO: 3306919 - DNA, 25 bp, Homo sapien
tagaggtctacacaaggctacaagt

SEQ ID NO: 3306920 - DNA, 25 bp, Homo sapien
aaagctggtaatcctctgggcagag

SEQ ID NO: 3306921 - DNA, 25 bp, Homo sapien
caacccaatgtgtgtcatgcaggta

SEQ ID NO: 3306922 - DNA, 25 bp, Homo sapien
taaagtagttggtctgtggcattca

SEQ ID NO: 3306923 - DNA, 25 bp, Homo sapien
tccaagagtctaccaagaaaactgt

SEQ ID NO: 3306924 - DNA, 25 bp, Homo sapien
tgccagtgacccaaagcacaaaggt

SEQ ID NO: 3306925 - DNA, 25 bp, Homo sapien
ccatctggagtaggccctgttgaca

SEQ ID NO: 3306926 - DNA, 25 bp, Homo sapien
cactttacagcagaggattacctgg

SEQ ID NO: 3306927 - DNA, 25 bp, Homo sapien
tgacacgaacacaactacaaatggg

SEQ ID NO: 3306928 - DNA, 25 bp, Homo sapien
tgaattgactgtacccacgggacac

SEQ ID NO: 3306929 - DNA, 25 bp, Homo sapien
attctcaaggcgatgctgctcatcc

SEQ ID NO: 3306930 - DNA, 25 bp, Homo sapien
ttcccagggccgttgttcattcttc

SEQ ID NO: 3306931 - DNA, 25 bp, Homo sapien
ttaggtactcttttctagctcatta

SEQ ID NO: 3306932 - DNA, 25 bp, Homo sapien
tcaaagaagacaaccggtgcccctc

SEQ ID NO: 3306933 - DNA, 25 bp, Homo sapien
cacgtctcttctggagacacgggag

SEQ ID NO: 3306934 - DNA, 25 bp, Homo sapien
gtgtctcgggacacacgtctcttct

SEQ ID NO: 3306935 - DNA, 25 bp, Homo sapien
caagccatgttttcgtaaaggcctc

SEQ ID NO: 3306936 - DNA, 25 bp, Homo sapien
taatccacccaaatcacaagccatg

SEQ ID NO: 3306937 - DNA, 25 bp, Homo sapien
tgttactggaagttactgaacccaa

SEQ ID NO: 3306938 - DNA, 25 bp, Homo sapien
tatagagctccaggtcaaaggatct

SEQ ID NO: 3306939 - DNA, 25 bp, Homo sapien
caagctttgacatagagggacgcat

SEQ ID NO: 3306940 - DNA, 25 bp, Homo sapien
cagagatgcgccttgccttcagtgc

SEQ ID NO: 3306941 - DNA, 25 bp, Homo sapien
ccttgaggaactcgctgacgcggct

SEQ ID NO: 3306942 - DNA, 25 bp, Homo sapien
caaatggttctggatcgcgattccc

SEQ ID NO: 3306943 - DNA, 25 bp, Homo sapien
ggagtgagtcctacctgagcagcag

SEQ ID NO: 3306944 - DNA, 25 bp, Homo sapien
ggaaatggatctccgggtctggcta

SEQ ID NO: 3306945 - DNA, 25 bp, Homo sapien
tcaatggcggtagctttcagggagc

SEQ ID NO: 3306946 - DNA, 25 bp, Homo sapien
catccgaggtatcagtgccagtaga

SEQ ID NO: 3306947 - DNA, 25 bp, Homo sapien
cagctttgctgatagagccacaaga

SEQ ID NO: 3306948 - DNA, 25 bp, Homo sapien
tatgctgggcattactggagaccaa

SEQ ID NO: 3306949 - DNA, 25 bp, Homo sapien
tcactttcagcttggttggtcatcg

SEQ ID NO: 3306950 - DNA, 25 bp, Homo sapien
tgtggcaaatgacacgcagctgctc

SEQ ID NO: 3306951 - DNA, 25 bp, Homo sapien
gagacggatctgctctcgacactcg

SEQ ID NO: 3306952 - DNA, 25 bp, Homo sapien
gctagcgtgctgtcagagagctcca

SEQ ID NO: 3306953 - DNA, 25 bp, Homo sapien
gcacttcattgaacacaccaggaga

SEQ ID NO: 3306954 - DNA, 25 bp, Homo sapien
cttttccggaagctgcaatcaggga

SEQ ID NO: 3306955 - DNA, 25 bp, Homo sapien
tgatctttgctgctactgaggacgc

SEQ ID NO: 3306956 - DNA, 25 bp, Homo sapien
cattggcattcttacacaggagagc

SEQ ID NO: 3306957 - DNA, 25 bp, Homo sapien
ccagagctctcttgagtactggtcc

SEQ ID NO: 3306958 - DNA, 25 bp, Homo sapien
agagctctcttgagtactggtccca

SEQ ID NO: 3306959 - DNA, 25 bp, Homo sapien
cagagctctcttgagtactggtccc

SEQ ID NO: 3306960 - DNA, 25 bp, Homo sapien
agtcagagctcagagtgatgacaca

SEQ ID NO: 3306961 - DNA, 25 bp, Homo sapien
cagtcagagctcagagtgatgacac

SEQ ID NO: 3306962 - DNA, 25 bp, Homo sapien
gggaggggagcgcagtcagagctca

SEQ ID NO: 3306963 - DNA, 25 bp, Homo sapien
ggaggggagcgcagtcagagctcag

SEQ ID NO: 3306964 - DNA, 25 bp, Homo sapien
agcccatgaacctggcctataagca

SEQ ID NO: 3306965 - DNA, 25 bp, Homo sapien
tagaaagaataactagacactaggt

SEQ ID NO: 3306966 - DNA, 25 bp, Homo sapien
aataactagacactaggtcatgtgg

SEQ ID NO: 3306967 - DNA, 25 bp, Homo sapien
aagcccatgaacctggcctataagc

SEQ ID NO: 3306968 - DNA, 25 bp, Homo sapien
caggctacttgtctgcaacaaggag

SEQ ID NO: 3306969 - DNA, 25 bp, Homo sapien
aggctacttgtctgcaacaaggaga

SEQ ID NO: 3306970 - DNA, 25 bp, Homo sapien
ttcaggctacttgtctgcaacaagg

SEQ ID NO: 3306971 - DNA, 25 bp, Homo sapien
tcaggctacttgtctgcaacaagga

SEQ ID NO: 3306972 - DNA, 25 bp, Homo sapien
tactgggagtcaggaatgtttccaa

SEQ ID NO: 3306973 - DNA, 25 bp, Homo sapien
tgcctggtagtctcagtatcctgca

SEQ ID NO: 3306974 - DNA, 25 bp, Homo sapien
catgccttgttaccttgaccctcaa

SEQ ID NO: 3306975 - DNA, 25 bp, Homo sapien
ctagcaatgatgagaattatgtcca

SEQ ID NO: 3306976 - DNA, 25 bp, Homo sapien
cgttcaggcctaaaaagaccgattg

SEQ ID NO: 3306977 - DNA, 25 bp, Homo sapien
aactaagcaggacttcaccagtggg

SEQ ID NO: 3306978 - DNA, 25 bp, Homo sapien
gacaattattccagcgtgacccagg

SEQ ID NO: 3306979 - DNA, 25 bp, Homo sapien
gcatatctaagagaaggcccaccca

SEQ ID NO: 3306980 - DNA, 25 bp, Homo sapien
gggctttgtaagtgaaactgtgaga

SEQ ID NO: 3306981 - DNA, 25 bp, Homo sapien
tgcagctccggatgcaagatatagg

SEQ ID NO: 3306982 - DNA, 25 bp, Homo sapien
caagatatagggctaaagggtgtga

SEQ ID NO: 3306983 - DNA, 25 bp, Homo sapien
ctgtgagaagtagggcactggcagc

SEQ ID NO: 3306984 - DNA, 25 bp, Homo sapien
tattcaggttcacatctggttggcc

SEQ ID NO: 3306985 - DNA, 25 bp, Homo sapien
tagttgactccccagtgcctaaggt

SEQ ID NO: 3306986 - DNA, 25 bp, Homo sapien
ccacaagctggtgaggtaagggcct

SEQ ID NO: 3306987 - DNA, 25 bp, Homo sapien
ggtttgtaacacttgccacccagga

SEQ ID NO: 3306988 - DNA, 25 bp, Homo sapien
tgataatctcgtatgatcttagggt

SEQ ID NO: 3306989 - DNA, 25 bp, Homo sapien
tcttagggtatctaatggtactgac

SEQ ID NO: 3306990 - DNA, 25 bp, Homo sapien
attcgttctttgacccgaaatgttg

SEQ ID NO: 3306991 - DNA, 25 bp, Homo sapien
ctaattcgttctttgacccgaaatg

SEQ ID NO: 3306992 - DNA, 25 bp, Homo sapien
tccctttcctcatgtgcctggtcgt

SEQ ID NO: 3306993 - DNA, 25 bp, Homo sapien
tacataataagtgcgggccagatat

SEQ ID NO: 3306994 - DNA, 25 bp, Homo sapien
tgcatattctgccagggtcccaaat

SEQ ID NO: 3306995 - DNA, 25 bp, Homo sapien
gcctggtcgtcttctattacataat

SEQ ID NO: 3306996 - DNA, 25 bp, Homo sapien
cactagactaaaggtttctttgtgg

SEQ ID NO: 3306997 - DNA, 25 bp, Homo sapien
gacataattaatacatccaaaggct

SEQ ID NO: 3306998 - DNA, 25 bp, Homo sapien
tgtgtacatgaagctctgccacccc

SEQ ID NO: 3306999 - DNA, 25 bp, Homo sapien
ggttctttgtattagctctcccact

SEQ ID NO: 3307000 - DNA, 25 bp, Homo sapien
ggcttccaccattggtaaactcacc

SEQ ID NO: 3307001 - DNA, 25 bp, Homo sapien
ccagccacatgggagttaatctcat

SEQ ID NO: 3307002 - DNA, 25 bp, Homo sapien
gaggcaacttcttaactgaactttc

SEQ ID NO: 3307003 - DNA, 25 bp, Homo sapien
taggatgatgcataccttggagaga

SEQ ID NO: 3307004 - DNA, 25 bp, Homo sapien
caatgtggtgtatctcgtaatgtca

SEQ ID NO: 3307005 - DNA, 25 bp, Homo sapien
tgaacaaggcctaaccagtaaatta

SEQ ID NO: 3307006 - DNA, 25 bp, Homo sapien
aaataatcacgccacaatgtggtgt

SEQ ID NO: 3307007 - DNA, 25 bp, Homo sapien
tcggccttctgtgccaacgactgta

SEQ ID NO: 3307008 - DNA, 25 bp, Homo sapien
cacatcgtcttaaccttgaactgcc

SEQ ID NO: 3307009 - DNA, 25 bp, Homo sapien
accccaagcggtgatttctcccaat

SEQ ID NO: 3307010 - DNA, 25 bp, Homo sapien
tcacccaaaattcacttcccagtgg

SEQ ID NO: 3307011 - DNA, 25 bp, Homo sapien
tattgcgtctgaaatgatgcctaca

SEQ ID NO: 3307012 - DNA, 25 bp, Homo sapien
caaaggatccctgtgcaaaatgtgg

SEQ ID NO: 3307013 - DNA, 25 bp, Homo sapien
cctcctagagcgcaggatgggacag

SEQ ID NO: 3307014 - DNA, 25 bp, Homo sapien
gaaattcatcacctgcgagaaagac

SEQ ID NO: 3307015 - DNA, 25 bp, Homo sapien
aatgtgggaccgaatcccttccgca

SEQ ID NO: 3307016 - DNA, 25 bp, Homo sapien
cctgcgctgtggcgggggcttcccg

SEQ ID NO: 3307017 - DNA, 25 bp, Homo sapien
tgcgctgtggcgggggcttcccgtc

SEQ ID NO: 3307018 - DNA, 25 bp, Homo sapien
gctgtggcgggggcttcccgtcgca

SEQ ID NO: 3307019 - DNA, 25 bp, Homo sapien
ctgtggcgggggcttcccgtcgcat

SEQ ID NO: 3307020 - DNA, 25 bp, Homo sapien
tgaggtccttctcagcccggtcccg

SEQ ID NO: 3307021 - DNA, 25 bp, Homo sapien
atcccaagcaccgtctctcggcgcc

SEQ ID NO: 3307022 - DNA, 25 bp, Homo sapien
acaccgatggctccggcgggcccgc

SEQ ID NO: 3307023 - DNA, 25 bp, Homo sapien
cgggcccgcgagctgaggtccttct

SEQ ID NO: 3307024 - DNA, 25 bp, Homo sapien
gttttgcaaaatgtacagtatcctg

SEQ ID NO: 3307025 - DNA, 25 bp, Homo sapien
catccgataagtaatatgttttgca

SEQ ID NO: 3307026 - DNA, 25 bp, Homo sapien
cctgcgtattcggagaggcactgct

SEQ ID NO: 3307027 - DNA, 25 bp, Homo sapien
cagtatcctgcgtattcggagaggc

SEQ ID NO: 3307028 - DNA, 25 bp, Homo sapien
tcatcccatagcagtgtcttccccc

SEQ ID NO: 3307029 - DNA, 25 bp, Homo sapien
aaacactgaaggctaacattaaggt

SEQ ID NO: 3307030 - DNA, 25 bp, Homo sapien
agagaatcagtggagaaacactgaa

SEQ ID NO: 3307031 - DNA, 25 bp, Homo sapien
ggctaacattaaggtccattttgat

SEQ ID NO: 3307032 - DNA, 25 bp, Homo sapien
gtctggatttctggaagatcatggc

SEQ ID NO: 3307033 - DNA, 25 bp, Homo sapien
tataagtcaggctcctgtttcttcc

SEQ ID NO: 3307034 - DNA, 25 bp, Homo sapien
ggaagatcatggcaagcatataagt

SEQ ID NO: 3307035 - DNA, 25 bp, Homo sapien
catggcaagcatataagtcaggctc

SEQ ID NO: 3307036 - DNA, 25 bp, Homo sapien
atcctcaactgaactcagtaactgt

SEQ ID NO: 3307037 - DNA, 25 bp, Homo sapien
aactcagtaactgttgcttgtgtga

SEQ ID NO: 3307038 - DNA, 25 bp, Homo sapien
aatatctggccaaatatctcactgt

SEQ ID NO: 3307039 - DNA, 25 bp, Homo sapien
gaagtacgttctctaaatatctggc

SEQ ID NO: 3307040 - DNA, 25 bp, Homo sapien
tcctgtaggtatttcatgtagagca

SEQ ID NO: 3307041 - DNA, 25 bp, Homo sapien
gatatttacctgcacctttagaagc

SEQ ID NO: 3307042 - DNA, 25 bp, Homo sapien
agaagatatttacctgcacctttag

SEQ ID NO: 3307043 - DNA, 25 bp, Homo sapien
tcatgtagagcacaaagttatttag

SEQ ID NO: 3307044 - DNA, 25 bp, Homo sapien
cctgaacaacgtaaagaaagcaagc

SEQ ID NO: 3307045 - DNA, 25 bp, Homo sapien
cagctcttcgttatttcaacctgaa

SEQ ID NO: 3307046 - DNA, 25 bp, Homo sapien
taaagaaagcaagctatctccaagg

SEQ ID NO: 3307047 - DNA, 25 bp, Homo sapien
cttcgttatttcaacctgaacaacg

SEQ ID NO: 3307048 - DNA, 25 bp, Homo sapien
cttttccagggtgagtcagtgtttc

SEQ ID NO: 3307049 - DNA, 25 bp, Homo sapien
ccttccccaggatgagatctagacc

SEQ ID NO: 3307050 - DNA, 25 bp, Homo sapien
ttcctcttttccagggtgagtcagt

SEQ ID NO: 3307051 - DNA, 25 bp, Homo sapien
ttcccttccccaggatgagatctag

SEQ ID NO: 3307052 - DNA, 25 bp, Homo sapien
gaggtgggcctaaggacctttgtga

SEQ ID NO: 3307053 - DNA, 25 bp, Homo sapien
cagtgttgggatgtgtgcgtgcatg

SEQ ID NO: 3307054 - DNA, 25 bp, Homo sapien
ggcctaaggacctttgtgaagtcat

SEQ ID NO: 3307055 - DNA, 25 bp, Homo sapien
tgcgtgcatgtgtgcttggtggggg

SEQ ID NO: 3307056 - DNA, 25 bp, Homo sapien
ttatgggtgcactaagtcccctggg

SEQ ID NO: 3307057 - DNA, 25 bp, Homo sapien
ttctctcttcccaatgtcctcatgg

SEQ ID NO: 3307058 - DNA, 25 bp, Homo sapien
gattctctgttctcgagctcccatt

SEQ ID NO: 3307059 - DNA, 25 bp, Homo sapien
gggcacaatcctgcttctctatttt

SEQ ID NO: 3307060 - DNA, 25 bp, Homo sapien
gaaggccagttgctgagagtcagct

SEQ ID NO: 3307061 - DNA, 25 bp, Homo sapien
tgaaggccagttgctgagagtcagc

SEQ ID NO: 3307062 - DNA, 25 bp, Homo sapien
ctgaaggccagttgctgagagtcag

SEQ ID NO: 3307063 - DNA, 25 bp, Homo sapien
tctgaacagctggatgggtatcagg

SEQ ID NO: 3307064 - DNA, 25 bp, Homo sapien
tgtggtaaatatagctcatgttgat

SEQ ID NO: 3307065 - DNA, 25 bp, Homo sapien
gctgaactcgtcctgaagagtcctg

SEQ ID NO: 3307066 - DNA, 25 bp, Homo sapien
tggtcacagctgaaagattgagtgc

SEQ ID NO: 3307067 - DNA, 25 bp, Homo sapien
tataaattaccactatggaaatatt

SEQ ID NO: 3307068 - DNA, 25 bp, Homo sapien
cattataaattaccactatggaaat

SEQ ID NO: 3307069 - DNA, 25 bp, Homo sapien
aaattaccactatggaaatattcat

SEQ ID NO: 3307070 - DNA, 25 bp, Homo sapien
cctctgtgtcccttcattataaatt

SEQ ID NO: 3307071 - DNA, 25 bp, Homo sapien
atgctggcatccactttgttatctg

SEQ ID NO: 3307072 - DNA, 25 bp, Homo sapien
tgttatctggaggtaggccttgata

SEQ ID NO: 3307073 - DNA, 25 bp, Homo sapien
tatctggaggtaggccttgatactt

SEQ ID NO: 3307074 - DNA, 25 bp, Homo sapien
ctttgttatctggaggtaggccttg

SEQ ID NO: 3307075 - DNA, 25 bp, Homo sapien
cagtttgccaccactactgagtgct

SEQ ID NO: 3307076 - DNA, 25 bp, Homo sapien
tcccatgtttttggccagacattta

SEQ ID NO: 3307077 - DNA, 25 bp, Homo sapien
tgagatgatccgacagcaacttatc

SEQ ID NO: 3307078 - DNA, 25 bp, Homo sapien
ggcactgcttcgtggctgctgagat

SEQ ID NO: 3307079 - DNA, 25 bp, Homo sapien
tcaaaagtccttgtaggaataggag

SEQ ID NO: 3307080 - DNA, 25 bp, Homo sapien
gtccttgtaggaataggagaaaatg

SEQ ID NO: 3307081 - DNA, 25 bp, Homo sapien
tggttttgaaggcatagtcatagga

SEQ ID NO: 3307082 - DNA, 25 bp, Homo sapien
tagtcataggaatccttgccagttt

SEQ ID NO: 3307083 - DNA, 25 bp, Homo sapien
tgcagaatttcttacgcatgtagag

SEQ ID NO: 3307084 - DNA, 25 bp, Homo sapien
cttgcagaatttcttacgcatgtag

SEQ ID NO: 3307085 - DNA, 25 bp, Homo sapien
ttgcagaatttcttacgcatgtaga

SEQ ID NO: 3307086 - DNA, 25 bp, Homo sapien
cttgttctgatccttcttggcatca

SEQ ID NO: 3307087 - DNA, 25 bp, Homo sapien
ttgttctgatccttcttggcatcac

SEQ ID NO: 3307088 - DNA, 25 bp, Homo sapien
tttcatagccagtgtgtatccaatg

SEQ ID NO: 3307089 - DNA, 25 bp, Homo sapien
agacctatgggccactcttgtctgt

SEQ ID NO: 3307090 - DNA, 25 bp, Homo sapien
gccagtgtgtatccaatgagtagac

SEQ ID NO: 3307091 - DNA, 25 bp, Homo sapien
tatccaatgagtagacctatgggcc

SEQ ID NO: 3307092 - DNA, 25 bp, Homo sapien
ggcctggtgccagaccttacttagt

SEQ ID NO: 3307093 - DNA, 25 bp, Homo sapien
gagaggagagttctcgtatcagttt

SEQ ID NO: 3307094 - DNA, 25 bp, Homo sapien
tcttcactaagaacttcgagatggt

SEQ ID NO: 3307095 - DNA, 25 bp, Homo sapien
ggttccatctgggttgccttcggcc

SEQ ID NO: 3307096 - DNA, 25 bp, Homo sapien
tattccactcacaattcagttcagg

SEQ ID NO: 3307097 - DNA, 25 bp, Homo sapien
taagaagatgttgcggtatcatcga

SEQ ID NO: 3307098 - DNA, 25 bp, Homo sapien
ttctatcatagacgcagctggcctc

SEQ ID NO: 3307099 - DNA, 25 bp, Homo sapien
tactacaatttgctgggttttccca

SEQ ID NO: 3307100 - DNA, 25 bp, Homo sapien
agtaagtgccctgtatatgtgtacc

SEQ ID NO: 3307101 - DNA, 25 bp, Homo sapien
ttcacatttatgcaccgcgcgctca

SEQ ID NO: 3307102 - DNA, 25 bp, Homo sapien
caaccgtacaatgcatttgtgtttt

SEQ ID NO: 3307103 - DNA, 25 bp, Homo sapien
gctcattgattcacccagagtaact

SEQ ID NO: 3307104 - DNA, 25 bp, Homo sapien
gaatggatctactcctctcagcact

SEQ ID NO: 3307105 - DNA, 25 bp, Homo sapien
gccttcaggcccacgttggattcta

SEQ ID NO: 3307106 - DNA, 25 bp, Homo sapien
ggattctataccatggccctccagc

SEQ ID NO: 3307107 - DNA, 25 bp, Homo sapien
tctcttagattgtgggatttctcca

SEQ ID NO: 3307108 - DNA, 25 bp, Homo sapien
gactgaattcttttcgccagatata

SEQ ID NO: 3307109 - DNA, 25 bp, Homo sapien
tcttttcgccagatatattctgagc

SEQ ID NO: 3307110 - DNA, 25 bp, Homo sapien
tgttccaatcctaagtgactgaatt

SEQ ID NO: 3307111 - DNA, 25 bp, Homo sapien
taagtgttccaatcctaagtgactg

SEQ ID NO: 3307112 - DNA, 25 bp, Homo sapien
taggtatgaagcatcagactaggct

SEQ ID NO: 3307113 - DNA, 25 bp, Homo sapien
tagaagatttaatggagacaatgcc

SEQ ID NO: 3307114 - DNA, 25 bp, Homo sapien
tgccatttaaacaggtcttcaggga

SEQ ID NO: 3307115 - DNA, 25 bp, Homo sapien
tgggtgagggtaacaattaaagcaa

SEQ ID NO: 3307116 - DNA, 25 bp, Homo sapien
tctgcctccacaagtatgaagttct

SEQ ID NO: 3307117 - DNA, 25 bp, Homo sapien
gatgcaccttcttcatgatgaggcc

SEQ ID NO: 3307118 - DNA, 25 bp, Homo sapien
gggtctcttgttctctggactgaca

SEQ ID NO: 3307119 - DNA, 25 bp, Homo sapien
tattgtcaaaccaggctgatgcacc

SEQ ID NO: 3307120 - DNA, 25 bp, Homo sapien
cttggaaaacggtgtcaggacccat

SEQ ID NO: 3307121 - DNA, 25 bp, Homo sapien
gacccatgatcttggttgttccagc

SEQ ID NO: 3307122 - DNA, 25 bp, Homo sapien
ccagccactcttccatatggtagag

SEQ ID NO: 3307123 - DNA, 25 bp, Homo sapien
ttccagccactcttccatatggtag

SEQ ID NO: 3307124 - DNA, 25 bp, Homo sapien
tccaggtttcctctattgctcatgt

SEQ ID NO: 3307125 - DNA, 25 bp, Homo sapien
ttcctctattgctcatgtcctcatg

SEQ ID NO: 3307126 - DNA, 25 bp, Homo sapien
ctccaggtttcctctattgctcatg

SEQ ID NO: 3307127 - DNA, 25 bp, Homo sapien
ggtttcctctattgctcatgtcctc

SEQ ID NO: 3307128 - DNA, 25 bp, Homo sapien
gagaaggtagtgttcacgtttaaca

SEQ ID NO: 3307129 - DNA, 25 bp, Homo sapien
gcaaggttaccagtgaggctccaac

SEQ ID NO: 3307130 - DNA, 25 bp, Homo sapien
cattccagtcgtgtggctgagcaag

SEQ ID NO: 3307131 - DNA, 25 bp, Homo sapien
cagatttgtgctactgagaaggtag

SEQ ID NO: 3307132 - DNA, 25 bp, Homo sapien
caacaaattataagcaaatactcat

SEQ ID NO: 3307133 - DNA, 25 bp, Homo sapien
tataagcaaatactcattatgagaa

SEQ ID NO: 3307134 - DNA, 25 bp, Homo sapien
ttataagcaaatactcattatgaga

SEQ ID NO: 3307135 - DNA, 25 bp, Homo sapien
cttacaacaaattataagcaaatac

SEQ ID NO: 3307136 - DNA, 25 bp, Homo sapien
ttttgcttgactaattctgctgctg

SEQ ID NO: 3307137 - DNA, 25 bp, Homo sapien
atagtctctgtttcacttttcactt

SEQ ID NO: 3307138 - DNA, 25 bp, Homo sapien
tcttttgcttgactaattctgctgc

SEQ ID NO: 3307139 - DNA, 25 bp, Homo sapien
cttttgcttgactaattctgctgct

SEQ ID NO: 3307140 - DNA, 25 bp, Homo sapien
tctgtaattctaactgactcagttc

SEQ ID NO: 3307141 - DNA, 25 bp, Homo sapien
cctgagcgggatggtgatgataaaa

SEQ ID NO: 3307142 - DNA, 25 bp, Homo sapien
gatgccaatgatgcagcctcacaaa

SEQ ID NO: 3307143 - DNA, 25 bp, Homo sapien
gcctcacaaactctctgtctacctg

SEQ ID NO: 3307144 - DNA, 25 bp, Homo sapien
tgcagtattccacctgcagcttcct

SEQ ID NO: 3307145 - DNA, 25 bp, Homo sapien
tcctttccacatctcctctagccat

SEQ ID NO: 3307146 - DNA, 25 bp, Homo sapien
agcttcctttccacatctcctctag

SEQ ID NO: 3307147 - DNA, 25 bp, Homo sapien
gcagcttcctttccacatctcctct

SEQ ID NO: 3307148 - DNA, 25 bp, Homo sapien
gctgaattgaagcaatcctttcagg

SEQ ID NO: 3307149 - DNA, 25 bp, Homo sapien
gaattgaagcaatcctttcaggatg

SEQ ID NO: 3307150 - DNA, 25 bp, Homo sapien
gaatttacgtaatatttcttgtgaa

SEQ ID NO: 3307151 - DNA, 25 bp, Homo sapien
ttgaatttacgtaatatttcttgtg

SEQ ID NO: 3307152 - DNA, 25 bp, Homo sapien
tgcaaaatgacctttttctcccgca

SEQ ID NO: 3307153 - DNA, 25 bp, Homo sapien
tttctcccgcattttaaaatgataa

SEQ ID NO: 3307154 - DNA, 25 bp, Homo sapien
ccatagctgacaccaacatttgcaa

SEQ ID NO: 3307155 - DNA, 25 bp, Homo sapien
gataatttccattggtgtttattac

SEQ ID NO: 3307156 - DNA, 25 bp, Homo sapien
tgtggtgctattacacactgccagt

SEQ ID NO: 3307157 - DNA, 25 bp, Homo sapien
aatcgttattggatgacttagcttg

SEQ ID NO: 3307158 - DNA, 25 bp, Homo sapien
caaaagctctcattgccgtatggaa

SEQ ID NO: 3307159 - DNA, 25 bp, Homo sapien
tgaaaaacctggataatcgttattg

SEQ ID NO: 3307160 - DNA, 25 bp, Homo sapien
acctactccaccaaatgcctggaat

SEQ ID NO: 3307161 - DNA, 25 bp, Homo sapien
gtccaatgtacatagcctcctgtca

SEQ ID NO: 3307162 - DNA, 25 bp, Homo sapien
tactccaccaaatgcctggaatatg

SEQ ID NO: 3307163 - DNA, 25 bp, Homo sapien
gcatgctgcctcagtccaatgtaca

SEQ ID NO: 3307164 - DNA, 25 bp, Homo sapien
catctaggataaagataatcgtggc

SEQ ID NO: 3307165 - DNA, 25 bp, Homo sapien
aataaggtggtagcaatggaagtga

SEQ ID NO: 3307166 - DNA, 25 bp, Homo sapien
gcttccattatttccctagagtagg

SEQ ID NO: 3307167 - DNA, 25 bp, Homo sapien
gagtgggctattacaatcatctagg

SEQ ID NO: 3307168 - DNA, 25 bp, Homo sapien
ggtgagggtcaagggctcaaagtat

SEQ ID NO: 3307169 - DNA, 25 bp, Homo sapien
ccttgagggtgagggtcaagggctc

SEQ ID NO: 3307170 - DNA, 25 bp, Homo sapien
gaaaatggagttttgtggagctccc

SEQ ID NO: 3307171 - DNA, 25 bp, Homo sapien
ttttgtggagctccctggtgtttcc

SEQ ID NO: 3307172 - DNA, 25 bp, Homo sapien
ctgtcttacatgcactgctggtgtc

SEQ ID NO: 3307173 - DNA, 25 bp, Homo sapien
agaatctaacagctcctctgaatgt

SEQ ID NO: 3307174 - DNA, 25 bp, Homo sapien
tcctctgaatgtacaaaggattctg

SEQ ID NO: 3307175 - DNA, 25 bp, Homo sapien
ttcctgtcttacatgcactgctggt

SEQ ID NO: 3307176 - DNA, 25 bp, Homo sapien
cagctataaagctatgtggctcttt

SEQ ID NO: 3307177 - DNA, 25 bp, Homo sapien
tataaagctatgtggctctttgatc

SEQ ID NO: 3307178 - DNA, 25 bp, Homo sapien
gacagctataaagctatgtggctct

SEQ ID NO: 3307179 - DNA, 25 bp, Homo sapien
gctataaagctatgtggctctttga

SEQ ID NO: 3307180 - DNA, 25 bp, Homo sapien
tcagacaatctgcagcttcggggtc

SEQ ID NO: 3307181 - DNA, 25 bp, Homo sapien
gtcacattgcggcagggcttcttta

SEQ ID NO: 3307182 - DNA, 25 bp, Homo sapien
cagcttcggggtcacattgcggcag

SEQ ID NO: 3307183 - DNA, 25 bp, Homo sapien
cacattgcggcagggcttctttatc

SEQ ID NO: 3307184 - DNA, 25 bp, Homo sapien
ctactttccacactgctgcacagga

SEQ ID NO: 3307185 - DNA, 25 bp, Homo sapien
tttccacactgctgcacaggaaaat

SEQ ID NO: 3307186 - DNA, 25 bp, Homo sapien
tactttccacactgctgcacaggaa

SEQ ID NO: 3307187 - DNA, 25 bp, Homo sapien
ctttccacactgctgcacaggaaaa

SEQ ID NO: 3307188 - DNA, 25 bp, Homo sapien
taaagccgaccgtggagtcatatga

SEQ ID NO: 3307189 - DNA, 25 bp, Homo sapien
gaaacatgtttgcatctcacactag

SEQ ID NO: 3307190 - DNA, 25 bp, Homo sapien
tctgaactgttttggtaaagccgac

SEQ ID NO: 3307191 - DNA, 25 bp, Homo sapien
gattgatcctcaggccacttggcag

SEQ ID NO: 3307192 - DNA, 25 bp, Homo sapien
tatggtaaccatccttatagtcact

SEQ ID NO: 3307193 - DNA, 25 bp, Homo sapien
gatgacacatgcagcttagcactct

SEQ ID NO: 3307194 - DNA, 25 bp, Homo sapien
tagcactctgtagtagtctctcttc

SEQ ID NO: 3307195 - DNA, 25 bp, Homo sapien
tctctctagtgtaagatgacacatg

SEQ ID NO: 3307196 - DNA, 25 bp, Homo sapien
tctacactgcttagttcccgggaac

SEQ ID NO: 3307197 - DNA, 25 bp, Homo sapien
gctaatgtgtcttatggctctctaa

SEQ ID NO: 3307198 - DNA, 25 bp, Homo sapien
gctctctaaggagggtgtagtcaaa

SEQ ID NO: 3307199 - DNA, 25 bp, Homo sapien
taaggtgactctggtagttccaacg

SEQ ID NO: 3307200 - DNA, 25 bp, Homo sapien
cagtgttgcttcagggaattccgag

SEQ ID NO: 3307201 - DNA, 25 bp, Homo sapien
tcctccttcttcaaatggctattaa

SEQ ID NO: 3307202 - DNA, 25 bp, Homo sapien
cacagccacttaaggaaccagtgca

SEQ ID NO: 3307203 - DNA, 25 bp, Homo sapien
tccgagtgtagggttaatgttccat

SEQ ID NO: 3307204 - DNA, 25 bp, Homo sapien
caatacgtcattattcttagacagt

SEQ ID NO: 3307205 - DNA, 25 bp, Homo sapien
cacaagtgaataaaacacatcgcaa

SEQ ID NO: 3307206 - DNA, 25 bp, Homo sapien
gatagcaaatcactaacaacttctg

SEQ ID NO: 3307207 - DNA, 25 bp, Homo sapien
gtatttataggtgcatagtttcatg

SEQ ID NO: 3307208 - DNA, 25 bp, Homo sapien
catgactgggcacattggaactgag

SEQ ID NO: 3307209 - DNA, 25 bp, Homo sapien
gatggaagacttcgagatacactgt

SEQ ID NO: 3307210 - DNA, 25 bp, Homo sapien
gaactgagcacttgtacaggatgga

SEQ ID NO: 3307211 - DNA, 25 bp, Homo sapien
cagtgaaagggaagcaccgaaatgc

SEQ ID NO: 3307212 - DNA, 25 bp, Homo sapien
caggttcgtagtcttgatacccttc

SEQ ID NO: 3307213 - DNA, 25 bp, Homo sapien
ttaggcttcaggttcgtagtcttga

SEQ ID NO: 3307214 - DNA, 25 bp, Homo sapien
ggcttcaggttcgtagtcttgatac

SEQ ID NO: 3307215 - DNA, 25 bp, Homo sapien
ttcaggttcgtagtcttgataccct

SEQ ID NO: 3307216 - DNA, 25 bp, Homo sapien
ccaatgagataggaaatggctcccc

SEQ ID NO: 3307217 - DNA, 25 bp, Homo sapien
tataagtttcaattacgcatcagca

SEQ ID NO: 3307218 - DNA, 25 bp, Homo sapien
aattacgcatcagcactgacagcca

SEQ ID NO: 3307219 - DNA, 25 bp, Homo sapien
cagcacacactgttagtataagttt

SEQ ID NO: 3307220 - DNA, 25 bp, Homo sapien
aataagttggactgtctggttctca

SEQ ID NO: 3307221 - DNA, 25 bp, Homo sapien
tgaaaatttcgtcttcatctatggc

SEQ ID NO: 3307222 - DNA, 25 bp, Homo sapien
caaaatcaagctgtctataaagcct

SEQ ID NO: 3307223 - DNA, 25 bp, Homo sapien
gccttttccagactaagatgctcta

SEQ ID NO: 3307224 - DNA, 25 bp, Homo sapien
tgtcttgcataaaagaccccaaaat

SEQ ID NO: 3307225 - DNA, 25 bp, Homo sapien
gttttccattgtgtttagtactgtg

SEQ ID NO: 3307226 - DNA, 25 bp, Homo sapien
cattgtgtttagtactgtgtcttgc

SEQ ID NO: 3307227 - DNA, 25 bp, Homo sapien
tcaatatgcctttcgtgtgtctgtg

SEQ ID NO: 3307228 - DNA, 25 bp, Homo sapien
taatctattcgctgtgttacaaatc

SEQ ID NO: 3307229 - DNA, 25 bp, Homo sapien
ttcgctgtgttacaaatctattcag

SEQ ID NO: 3307230 - DNA, 25 bp, Homo sapien
ttactaatttaatctattcgctgtg

SEQ ID NO: 3307231 - DNA, 25 bp, Homo sapien
caaatctattcagatttactgtttc

SEQ ID NO: 3307232 - DNA, 25 bp, Homo sapien
ctcagaaggcatttcataagcctca

SEQ ID NO: 3307233 - DNA, 25 bp, Homo sapien
tccacaggcatatcttccagaattc

SEQ ID NO: 3307234 - DNA, 25 bp, Homo sapien
ataagcctcattgtcaggatccaca

SEQ ID NO: 3307235 - DNA, 25 bp, Homo sapien
atccacaggcatatcttccagaatt

SEQ ID NO: 3307236 - DNA, 25 bp, Homo sapien
gaatcttgaaggtcagccccttggg

SEQ ID NO: 3307237 - DNA, 25 bp, Homo sapien
taataagacttcacagcgcagcaac

SEQ ID NO: 3307238 - DNA, 25 bp, Homo sapien
ttggcaagcctaacaagcagggcag

SEQ ID NO: 3307239 - DNA, 25 bp, Homo sapien
tactaatgcacaaagggaaatctgg

SEQ ID NO: 3307240 - DNA, 25 bp, Homo sapien
tccctatgtgctcagtcaaatgctc

SEQ ID NO: 3307241 - DNA, 25 bp, Homo sapien
tgattggtgtaagcgaatgtcctct

SEQ ID NO: 3307242 - DNA, 25 bp, Homo sapien
ggactgagttcagcataaactgcca

SEQ ID NO: 3307243 - DNA, 25 bp, Homo sapien
caaatgctctcccattggactgagt

SEQ ID NO: 3307244 - DNA, 25 bp, Homo sapien
ctactttctatagttcttttgtcca

SEQ ID NO: 3307245 - DNA, 25 bp, Homo sapien
gagcaggacaacatcacatgcttct

SEQ ID NO: 3307246 - DNA, 25 bp, Homo sapien
ctaagagcaggacaacatcacatgc

SEQ ID NO: 3307247 - DNA, 25 bp, Homo sapien
tcacatgcttctctactttctatag

SEQ ID NO: 3307248 - DNA, 25 bp, Homo sapien
caatgggatgcttgcagcagcttaa

SEQ ID NO: 3307249 - DNA, 25 bp, Homo sapien
cccaaagagggacacttgaggattt

SEQ ID NO: 3307250 - DNA, 25 bp, Homo sapien
ggaatgcacaatatacggtactgaa

SEQ ID NO: 3307251 - DNA, 25 bp, Homo sapien
tagcaaagccccaatccatatgact

SEQ ID NO: 3307252 - DNA, 25 bp, Homo sapien
gatctcaagtaattggccagccttg

SEQ ID NO: 3307253 - DNA, 25 bp, Homo sapien
gggctcaatcaatgactatgaagtt

SEQ ID NO: 3307254 - DNA, 25 bp, Homo sapien
gaaaaattgctgaaaacttggcaat

SEQ ID NO: 3307255 - DNA, 25 bp, Homo sapien
ccccagatctacaggttatatgtgc

SEQ ID NO: 3307256 - DNA, 25 bp, Homo sapien
gctcatatttatagacttcccaagt

SEQ ID NO: 3307257 - DNA, 25 bp, Homo sapien
tcccaagtagtacaatctgttaact

SEQ ID NO: 3307258 - DNA, 25 bp, Homo sapien
ggtctctgagccatattcaatataa

SEQ ID NO: 3307259 - DNA, 25 bp, Homo sapien
atataatgaatcctgaataggagtt

SEQ ID NO: 3307260 - DNA, 25 bp, Homo sapien
aacgcttctgttttgattgtggtaa

SEQ ID NO: 3307261 - DNA, 25 bp, Homo sapien
ggtaattggaacaatcagggcacaa

SEQ ID NO: 3307262 - DNA, 25 bp, Homo sapien
aaacgcttctgttttgattgtggta

SEQ ID NO: 3307263 - DNA, 25 bp, Homo sapien
taattggacagaacaattatctggt

SEQ ID NO: 3307264 - DNA, 25 bp, Homo sapien
tggtaacctaaacaatggtaacatg

SEQ ID NO: 3307265 - DNA, 25 bp, Homo sapien
tatcttgccatttagctaatgggca

SEQ ID NO: 3307266 - DNA, 25 bp, Homo sapien
tcattttaagtgtagttgtctagca

SEQ ID NO: 3307267 - DNA, 25 bp, Homo sapien
tctcttaagcacaggtatacacact

SEQ ID NO: 3307268 - DNA, 25 bp, Homo sapien
tttatcttagcctaaggcagtctga

SEQ ID NO: 3307269 - DNA, 25 bp, Homo sapien
ccagtggttcggttgattacttctc

SEQ ID NO: 3307270 - DNA, 25 bp, Homo sapien
tgtgacgcacatttacaccagtggt

SEQ ID NO: 3307271 - DNA, 25 bp, Homo sapien
gaaaaacaggtgctgctcaattgct

SEQ ID NO: 3307272 - DNA, 25 bp, Homo sapien
gcttcaataataccaaacaagtggg

SEQ ID NO: 3307273 - DNA, 25 bp, Homo sapien
gagactattacatagccaccaggac

SEQ ID NO: 3307274 - DNA, 25 bp, Homo sapien
tcgttcaggctggagagtaggctca

SEQ ID NO: 3307275 - DNA, 25 bp, Homo sapien
gcctggtggattattcgtcctcata

SEQ ID NO: 3307276 - DNA, 25 bp, Homo sapien
caaatgaaagggtcagttggttgcc

SEQ ID NO: 3307277 - DNA, 25 bp, Homo sapien
caatactgccatgtttactgccact

SEQ ID NO: 3307278 - DNA, 25 bp, Homo sapien
tctggagagctgtttgaagtgacaa

SEQ ID NO: 3307279 - DNA, 25 bp, Homo sapien
aactaagagttatggagcatctttc

SEQ ID NO: 3307280 - DNA, 25 bp, Homo sapien
ggtgtatccatgtagctgaatttct

SEQ ID NO: 3307281 - DNA, 25 bp, Homo sapien
gagtaactgttccatatcttagaaa

SEQ ID NO: 3307282 - DNA, 25 bp, Homo sapien
tttctaaacggtgcaggacaaatga

SEQ ID NO: 3307283 - DNA, 25 bp, Homo sapien
aagaaatgtttccacggacagggat

SEQ ID NO: 3307284 - DNA, 25 bp, Homo sapien
ttcatgcaccaacacatacctaggt

SEQ ID NO: 3307285 - DNA, 25 bp, Homo sapien
ctggtatcgaacagcctaacaggct

SEQ ID NO: 3307286 - DNA, 25 bp, Homo sapien
ggaacctccgtactattgtccataa

SEQ ID NO: 3307287 - DNA, 25 bp, Homo sapien
taggcttgtctctatcccctgtcct

SEQ ID NO: 3307288 - DNA, 25 bp, Homo sapien
gatccctgcaacttgacctccaaaa

SEQ ID NO: 3307289 - DNA, 25 bp, Homo sapien
tggctaggcttgtctctatcccctg

SEQ ID NO: 3307290 - DNA, 25 bp, Homo sapien
caagtgatccctgcaacttgacctc

SEQ ID NO: 3307291 - DNA, 25 bp, Homo sapien
tccttaaatatgctgtgcctttttg

SEQ ID NO: 3307292 - DNA, 25 bp, Homo sapien
gatgcactgtttcttatgagcttcc

SEQ ID NO: 3307293 - DNA, 25 bp, Homo sapien
tatgggcatctccagtgccaaagta

SEQ ID NO: 3307294 - DNA, 25 bp, Homo sapien
tttttgctttctgcgtatgggcatc

SEQ ID NO: 3307295 - DNA, 25 bp, Homo sapien
ttaaagaaccagaactatatgcatc

SEQ ID NO: 3307296 - DNA, 25 bp, Homo sapien
tctttggattcatggtcaccctata

SEQ ID NO: 3307297 - DNA, 25 bp, Homo sapien
tatatgcatctagtgttccccaagt

SEQ ID NO: 3307298 - DNA, 25 bp, Homo sapien
tgtataacaatcaactcagggtttt

SEQ ID NO: 3307299 - DNA, 25 bp, Homo sapien
tatcactttttaagtgactaaacta

SEQ ID NO: 3307300 - DNA, 25 bp, Homo sapien
catatcactttttaagtgactaaac

SEQ ID NO: 3307301 - DNA, 25 bp, Homo sapien
atatcactttttaagtgactaaact

SEQ ID NO: 3307302 - DNA, 25 bp, Homo sapien
agtgactaaactactaaagaaacat

SEQ ID NO: 3307303 - DNA, 25 bp, Homo sapien
tcttcagttgttagacctaggacac

SEQ ID NO: 3307304 - DNA, 25 bp, Homo sapien
tactcacttagtttgggtccatgcc

SEQ ID NO: 3307305 - DNA, 25 bp, Homo sapien
cagctttgtaatgggtctctgcccc

SEQ ID NO: 3307306 - DNA, 25 bp, Homo sapien
taagccaacattccagagacctagt

SEQ ID NO: 3307307 - DNA, 25 bp, Homo sapien
gatgcttgtctgtactatagtggac

SEQ ID NO: 3307308 - DNA, 25 bp, Homo sapien
ggatgcttgtctgtactatagtgga

SEQ ID NO: 3307309 - DNA, 25 bp, Homo sapien
tgcttgtctgtactatagtggacat

SEQ ID NO: 3307310 - DNA, 25 bp, Homo sapien
aggatgcttgtctgtactatagtgg

SEQ ID NO: 3307311 - DNA, 25 bp, Homo sapien
aaggccttccactgaacttcattca

SEQ ID NO: 3307312 - DNA, 25 bp, Homo sapien
cccttcctgcctcacggatgtccgt

SEQ ID NO: 3307313 - DNA, 25 bp, Homo sapien
gaaggccttccactgaacttcattc

SEQ ID NO: 3307314 - DNA, 25 bp, Homo sapien
cctctggtgcctctagttttactga

SEQ ID NO: 3307315 - DNA, 25 bp, Homo sapien
aacctaatgtaaatgtaaacctctg

SEQ ID NO: 3307316 - DNA, 25 bp, Homo sapien
taatgtaaatgtaaacctctggtgc

SEQ ID NO: 3307317 - DNA, 25 bp, Homo sapien
aaatgtaaacctctggtgcctctag

SEQ ID NO: 3307318 - DNA, 25 bp, Homo sapien
gggaaaggaccatgactttggtgac

SEQ ID NO: 3307319 - DNA, 25 bp, Homo sapien
cctgcagcagcaatcggcggggaaa

SEQ ID NO: 3307320 - DNA, 25 bp, Homo sapien
actttggtgacaaaagtgatggcag

SEQ ID NO: 3307321 - DNA, 25 bp, Homo sapien
ttggtgccctagacctgcagcagca

SEQ ID NO: 3307322 - DNA, 25 bp, Homo sapien
gcaaaacatatccaagggcccactg

SEQ ID NO: 3307323 - DNA, 25 bp, Homo sapien
tacaacagggtcattagggccatcc

SEQ ID NO: 3307324 - DNA, 25 bp, Homo sapien
gatcctagcgatggagtacctacca

SEQ ID NO: 3307325 - DNA, 25 bp, Homo sapien
cctcaaaaatgagaagggctttccg

SEQ ID NO: 3307326 - DNA, 25 bp, Homo sapien
aagacacaatacctgccttcggaaa

SEQ ID NO: 3307327 - DNA, 25 bp, Homo sapien
catgccaggcgagaatttgctttta

SEQ ID NO: 3307328 - DNA, 25 bp, Homo sapien
agtttataggcataataagtcataa

SEQ ID NO: 3307329 - DNA, 25 bp, Homo sapien
cacaatacctgccttcggaaagttc

SEQ ID NO: 3307330 - DNA, 25 bp, Homo sapien
agcaagcatggatcttgttgttacc

SEQ ID NO: 3307331 - DNA, 25 bp, Homo sapien
caagcatggatcttgttgttaccat

SEQ ID NO: 3307332 - DNA, 25 bp, Homo sapien
ccagcaagcatggatcttgttgtta

SEQ ID NO: 3307333 - DNA, 25 bp, Homo sapien
ctccagcaagcatggatcttgttgt

SEQ ID NO: 3307334 - DNA, 25 bp, Homo sapien
tattgactattctcgccctgctagg

SEQ ID NO: 3307335 - DNA, 25 bp, Homo sapien
cctagtggttataacggtgctcgct

SEQ ID NO: 3307336 - DNA, 25 bp, Homo sapien
ggtcaggtgatccattttccagata

SEQ ID NO: 3307337 - DNA, 25 bp, Homo sapien
ggtgctcgctgttgccatcctaaag

SEQ ID NO: 3307338 - DNA, 25 bp, Homo sapien
ggaagctgtacaactaaccacggca

SEQ ID NO: 3307339 - DNA, 25 bp, Homo sapien
cctttagagtatacggagaaatggg

SEQ ID NO: 3307340 - DNA, 25 bp, Homo sapien
ctttatgatgcagtaaggcaaccac

SEQ ID NO: 3307341 - DNA, 25 bp, Homo sapien
tctgtgagcctcaaaagtgcatttg

SEQ ID NO: 3307342 - DNA, 25 bp, Homo sapien
aaagtattgactctactggcttgtg

SEQ ID NO: 3307343 - DNA, 25 bp, Homo sapien
cacataaaggatctgaaatgggcat

SEQ ID NO: 3307344 - DNA, 25 bp, Homo sapien
taaaatgcatttctagcttaggtca

SEQ ID NO: 3307345 - DNA, 25 bp, Homo sapien
taacaggtcttgaaaaaagtattga

SEQ ID NO: 3307346 - DNA, 25 bp, Homo sapien
ggtcttactccctggtaggatgcag

SEQ ID NO: 3307347 - DNA, 25 bp, Homo sapien
cttggtgttgtctgaaagcaggaag

SEQ ID NO: 3307348 - DNA, 25 bp, Homo sapien
tgagtggggactcatgaggcttggt

SEQ ID NO: 3307349 - DNA, 25 bp, Homo sapien
gcaggaaggacttgggtcttactcc

SEQ ID NO: 3307350 - DNA, 25 bp, Homo sapien
gtcaccccattgtaagcatagatag

SEQ ID NO: 3307351 - DNA, 25 bp, Homo sapien
taccgtaacgtacactgaaagggca

SEQ ID NO: 3307352 - DNA, 25 bp, Homo sapien
ggattgtcagacttatgtcacccca

SEQ ID NO: 3307353 - DNA, 25 bp, Homo sapien
ctgtgtggcatgaaataccgtaacg

SEQ ID NO: 3307354 - DNA, 25 bp, Homo sapien
tctggctcagtattctttgcattag

SEQ ID NO: 3307355 - DNA, 25 bp, Homo sapien
tttggaattttcacaagtaactgct

SEQ ID NO: 3307356 - DNA, 25 bp, Homo sapien
tcaacaagcataatttctggctcag

SEQ ID NO: 3307357 - DNA, 25 bp, Homo sapien
caagtaactgcttagtgattccaga

SEQ ID NO: 3307358 - DNA, 25 bp, Homo sapien
ttaaaggtgaataacactttggcaa

SEQ ID NO: 3307359 - DNA, 25 bp, Homo sapien
taaaggtgaataacactttggcaaa

SEQ ID NO: 3307360 - DNA, 25 bp, Homo sapien
tatagattagggcaggcctccccaa

SEQ ID NO: 3307361 - DNA, 25 bp, Homo sapien
aggtcattgtggcagggaaaaagca

SEQ ID NO: 3307362 - DNA, 25 bp, Homo sapien
ccaagaacgtgtcagggcaagggta

SEQ ID NO: 3307363 - DNA, 25 bp, Homo sapien
ggtataatcttattcgtgtcccatg

SEQ ID NO: 3307364 - DNA, 25 bp, Homo sapien
gcacaaagggatttgttactccaag

SEQ ID NO: 3307365 - DNA, 25 bp, Homo sapien
tgtaacacaaaacgtacacagccat

SEQ ID NO: 3307366 - DNA, 25 bp, Homo sapien
gaaaatgaaccgtaatctcaccagc

SEQ ID NO: 3307367 - DNA, 25 bp, Homo sapien
gccgttccccacagtaagtatcttg

SEQ ID NO: 3307368 - DNA, 25 bp, Homo sapien
catttgtcacttgctctttggtctt

SEQ ID NO: 3307369 - DNA, 25 bp, Homo sapien
ctgctcctccaacatttgtcacttg

SEQ ID NO: 3307370 - DNA, 25 bp, Homo sapien
tgggctactgctgtcacacccgtca

SEQ ID NO: 3307371 - DNA, 25 bp, Homo sapien
tctgggctactgctgtcacacccgt

SEQ ID NO: 3307372 - DNA, 25 bp, Homo sapien
gaaccagactcagcatgaatatttc

SEQ ID NO: 3307373 - DNA, 25 bp, Homo sapien
caggtgcagttatatttgaaccaga

SEQ ID NO: 3307374 - DNA, 25 bp, Homo sapien
caccttctaagcaacacaatacata

SEQ ID NO: 3307375 - DNA, 25 bp, Homo sapien
tcagcaagttaatttccaccacacc

SEQ ID NO: 3307376 - DNA, 25 bp, Homo sapien
gttgccacaccatgcaccactccct

SEQ ID NO: 3307377 - DNA, 25 bp, Homo sapien
ttgccacaccatgcaccactccctc

SEQ ID NO: 3307378 - DNA, 25 bp, Homo sapien
acaccatgcaccactccctccttgg

SEQ ID NO: 3307379 - DNA, 25 bp, Homo sapien
gccacaccatgcaccactccctcct

SEQ ID NO: 3307380 - DNA, 25 bp, Homo sapien
gcagtgagctgtatggctcaagcca

SEQ ID NO: 3307381 - DNA, 25 bp, Homo sapien
gtgctatctgattccttacccaaaa

SEQ ID NO: 3307382 - DNA, 25 bp, Homo sapien
gactatactattgtgtcttcacatg

SEQ ID NO: 3307383 - DNA, 25 bp, Homo sapien
ccaatccctggactatactattgtg

SEQ ID NO: 3307384 - DNA, 25 bp, Homo sapien
ttcagctaggcaactcaatgtggtc

SEQ ID NO: 3307385 - DNA, 25 bp, Homo sapien
gttgtgaactttgatgagatgcatt

SEQ ID NO: 3307386 - DNA, 25 bp, Homo sapien
gacatagacggagcacatgtttcag

SEQ ID NO: 3307387 - DNA, 25 bp, Homo sapien
tccacctgactgttcatcctgtgac

SEQ ID NO: 3307388 - DNA, 25 bp, Homo sapien
ccctgtttggttttctcagcagcag

SEQ ID NO: 3307389 - DNA, 25 bp, Homo sapien
accctgtttggttttctcagcagca

SEQ ID NO: 3307390 - DNA, 25 bp, Homo sapien
cacaccctgtttggttttctcagca

SEQ ID NO: 3307391 - DNA, 25 bp, Homo sapien
ggctaatgaattcctttacaccaca

SEQ ID NO: 3307392 - DNA, 25 bp, Homo sapien
gcccaagtgtgatggttctaatcca

SEQ ID NO: 3307393 - DNA, 25 bp, Homo sapien
cccaagtgtgatggttctaatccat

SEQ ID NO: 3307394 - DNA, 25 bp, Homo sapien
tggttcaaactcaggcaaacagcag

SEQ ID NO: 3307395 - DNA, 25 bp, Homo sapien
tgcttctccacaactccgactcctc

SEQ ID NO: 3307396 - DNA, 25 bp, Homo sapien
agaaggaaaaggagcgcacaggaag

SEQ ID NO: 3307397 - DNA, 25 bp, Homo sapien
gaggccgctgtgagccggcgacgcg

SEQ ID NO: 3307398 - DNA, 25 bp, Homo sapien
ctgtgagccggcgacgcgaggctgg

SEQ ID NO: 3307399 - DNA, 25 bp, Homo sapien
aaggcaaggcgtgagggagcgccca

SEQ ID NO: 3307400 - DNA, 25 bp, Homo sapien
gagcgcccaggacgctctcggaggg

SEQ ID NO: 3307401 - DNA, 25 bp, Homo sapien
gggtctgcgctgcagcccgcacgca

SEQ ID NO: 3307402 - DNA, 25 bp, Homo sapien
agttctccgctcacgagggtggaaa

SEQ ID NO: 3307403 - DNA, 25 bp, Homo sapien
cgtcgcggcgctcggtcgctcgccc

SEQ ID NO: 3307404 - DNA, 25 bp, Homo sapien
cgctcgccccctctcttgggcccct

SEQ ID NO: 3307405 - DNA, 25 bp, Homo sapien
cgcgtcgcggcgctcggtcgctcgc

SEQ ID NO: 3307406 - DNA, 25 bp, Homo sapien
gtcgctcgccccctctcttgggccc

SEQ ID NO: 3307407 - DNA, 25 bp, Homo sapien
tcgttgccctcagaattgacacccc

SEQ ID NO: 3307408 - DNA, 25 bp, Homo sapien
gacaatttttgcatcgcttaacaca

SEQ ID NO: 3307409 - DNA, 25 bp, Homo sapien
gacttctgattctcgttgccctcag

SEQ ID NO: 3307410 - DNA, 25 bp, Homo sapien
acatacacacgcgaacttcaagaca

SEQ ID NO: 3307411 - DNA, 25 bp, Homo sapien
gacagctgttcctggatcacaccag

SEQ ID NO: 3307412 - DNA, 25 bp, Homo sapien
tcctggatcacaccagaatggagaa

SEQ ID NO: 3307413 - DNA, 25 bp, Homo sapien
gctgttcctggatcacaccagaatg

SEQ ID NO: 3307414 - DNA, 25 bp, Homo sapien
ctggaagacagctgttcctggatca

SEQ ID NO: 3307415 - DNA, 25 bp, Homo sapien
atgcaccaacttatcagtttgttta

SEQ ID NO: 3307416 - DNA, 25 bp, Homo sapien
caaaatgcaccaacttatcagtttg

SEQ ID NO: 3307417 - DNA, 25 bp, Homo sapien
ttttcaaaatgcaccaacttatcag

SEQ ID NO: 3307418 - DNA, 25 bp, Homo sapien
tctccacttctatattctcttcttc

SEQ ID NO: 3307419 - DNA, 25 bp, Homo sapien
tgtgaaaagttgaagttgctgtccc

SEQ ID NO: 3307420 - DNA, 25 bp, Homo sapien
tgaaaagttgaagttgctgtcccat

SEQ ID NO: 3307421 - DNA, 25 bp, Homo sapien
ctgtgaaaagttgaagttgctgtcc

SEQ ID NO: 3307422 - DNA, 25 bp, Homo sapien
gtgaaaagttgaagttgctgtccca

SEQ ID NO: 3307423 - DNA, 25 bp, Homo sapien
ccacgtgcataggcagagctaaaac

SEQ ID NO: 3307424 - DNA, 25 bp, Homo sapien
catccacgtgcataggcagagctaa

SEQ ID NO: 3307425 - DNA, 25 bp, Homo sapien
tcatccacgtgcataggcagagcta

SEQ ID NO: 3307426 - DNA, 25 bp, Homo sapien
tccacgtgcataggcagagctaaaa

SEQ ID NO: 3307427 - DNA, 25 bp, Homo sapien
cgctgaggccatagtttgaggccga

SEQ ID NO: 3307428 - DNA, 25 bp, Homo sapien
tccgcaaatcaggaaactgtcgctg

SEQ ID NO: 3307429 - DNA, 25 bp, Homo sapien
atttactccgcaaatcaggaaactg

SEQ ID NO: 3307430 - DNA, 25 bp, Homo sapien
agtttgaggccgaggacccaagctg

SEQ ID NO: 3307431 - DNA, 25 bp, Homo sapien
tgccagtactgctacagacaaagag

SEQ ID NO: 3307432 - DNA, 25 bp, Homo sapien
tagctagcaatatctgtcaccagtg

SEQ ID NO: 3307433 - DNA, 25 bp, Homo sapien
gcaggtattactggcagatgaggca

SEQ ID NO: 3307434 - DNA, 25 bp, Homo sapien
caccagtgctataggagacaaagaa

SEQ ID NO: 3307435 - DNA, 25 bp, Homo sapien
tcatgtcggcggagatagctacaac

SEQ ID NO: 3307436 - DNA, 25 bp, Homo sapien
tagctacaactccagaggcaagaac

SEQ ID NO: 3307437 - DNA, 25 bp, Homo sapien
aatacaaagtttgcaaatactgcca

SEQ ID NO: 3307438 - DNA, 25 bp, Homo sapien
ctgccaaccactcgggtcatgtcgg

SEQ ID NO: 3307439 - DNA, 25 bp, Homo sapien
atagaggtagttttacttagaatag

SEQ ID NO: 3307440 - DNA, 25 bp, Homo sapien
gaggtagttttacttagaatagtca

SEQ ID NO: 3307441 - DNA, 25 bp, Homo sapien
aggtagttttacttagaatagtcat

SEQ ID NO: 3307442 - DNA, 25 bp, Homo sapien
tatagaggtagttttacttagaata

SEQ ID NO: 3307443 - DNA, 25 bp, Homo sapien
ctgtgactaacaatgggccctcttt

SEQ ID NO: 3307444 - DNA, 25 bp, Homo sapien
ctgcccctgtgactaacaatgggcc

SEQ ID NO: 3307445 - DNA, 25 bp, Homo sapien
gtgactaacaatgggccctcttttg

SEQ ID NO: 3307446 - DNA, 25 bp, Homo sapien
ccctgtgactaacaatgggccctct

SEQ ID NO: 3307447 - DNA, 25 bp, Homo sapien
gagggatcagctggaaatctgtctc

SEQ ID NO: 3307448 - DNA, 25 bp, Homo sapien
ttcacttgatattgagggatcagct

SEQ ID NO: 3307449 - DNA, 25 bp, Homo sapien
ctgtctcctcaagccacacaggaag

SEQ ID NO: 3307450 - DNA, 25 bp, Homo sapien
taatgacatcctccatatggctcaa

SEQ ID NO: 3307451 - DNA, 25 bp, Homo sapien
tctaagtcgttgatctgtcaaggtc

SEQ ID NO: 3307452 - DNA, 25 bp, Homo sapien
gcttctctaagtcgttgatctgtca

SEQ ID NO: 3307453 - DNA, 25 bp, Homo sapien
cgttgatctgtcaaggtcagggctt

SEQ ID NO: 3307454 - DNA, 25 bp, Homo sapien
cttgcttctctaagtcgttgatctg

SEQ ID NO: 3307455 - DNA, 25 bp, Homo sapien
tctggttacgacttgcaaaaggaac

SEQ ID NO: 3307456 - DNA, 25 bp, Homo sapien
cgtatggaatgactatacctggtcc

SEQ ID NO: 3307457 - DNA, 25 bp, Homo sapien
caattatggagcttcatatacccca

SEQ ID NO: 3307458 - DNA, 25 bp, Homo sapien
tacaccatcgagtcatttagtgctc

SEQ ID NO: 3307459 - DNA, 25 bp, Homo sapien
ccccacgtccacttcttttccatga

SEQ ID NO: 3307460 - DNA, 25 bp, Homo sapien
tcattggcaggaacgttcattcatt

SEQ ID NO: 3307461 - DNA, 25 bp, Homo sapien
tccccacgtccacttcttttccatg

SEQ ID NO: 3307462 - DNA, 25 bp, Homo sapien
cgtggctggtgccaacaaaaccaca

SEQ ID NO: 3307463 - DNA, 25 bp, Homo sapien
aaccacaaattatagccctagacct

SEQ ID NO: 3307464 - DNA, 25 bp, Homo sapien
tcagttctaccagtaccacttccca

SEQ ID NO: 3307465 - DNA, 25 bp, Homo sapien
tactaccatcactatcaccactgct

SEQ ID NO: 3307466 - DNA, 25 bp, Homo sapien
ccttcctcatttggtaaattcctgc

SEQ ID NO: 3307467 - DNA, 25 bp, Homo sapien
cctcatttggtaaattcctgcccat

SEQ ID NO: 3307468 - DNA, 25 bp, Homo sapien
aggttcgtgttcattatctgtgagg

SEQ ID NO: 3307469 - DNA, 25 bp, Homo sapien
cattatctgtgaggattcccgcaat

SEQ ID NO: 3307470 - DNA, 25 bp, Homo sapien
tgtctattaggttcgtgttcattat

SEQ ID NO: 3307471 - DNA, 25 bp, Homo sapien
tatctgtgaggattcccgcaatggg

SEQ ID NO: 3307472 - DNA, 25 bp, Homo sapien
ggactgaggtctcatgagtgaaact

SEQ ID NO: 3307473 - DNA, 25 bp, Homo sapien
cacttggtagcagtttagtctccag

SEQ ID NO: 3307474 - DNA, 25 bp, Homo sapien
tattcactccttagggttccaggga

SEQ ID NO: 3307475 - DNA, 25 bp, Homo sapien
gacagggattcccaatcatcaaacc

SEQ ID NO: 3307476 - DNA, 25 bp, Homo sapien
agtcagccctcagtagggcattatc

SEQ ID NO: 3307477 - DNA, 25 bp, Homo sapien
tgacccaggtaacgaaagtcagccc

SEQ ID NO: 3307478 - DNA, 25 bp, Homo sapien
acttctaatggtattcacggctgcc

SEQ ID NO: 3307479 - DNA, 25 bp, Homo sapien
tagggcattatccaaccctggagct

SEQ ID NO: 3307480 - DNA, 25 bp, Homo sapien
tatcgtgcaaggtcagtaatatgtg

SEQ ID NO: 3307481 - DNA, 25 bp, Homo sapien
gtatcgtgcaaggtcagtaatatgt

SEQ ID NO: 3307482 - DNA, 25 bp, Homo sapien
cgtgcaaggtcagtaatatgtggct

SEQ ID NO: 3307483 - DNA, 25 bp, Homo sapien
tcgtgcaaggtcagtaatatgtggc

SEQ ID NO: 3307484 - DNA, 25 bp, Homo sapien
tggcatgaggcgtcagaaagcccct

SEQ ID NO: 3307485 - DNA, 25 bp, Homo sapien
ccttgtccgtagacgtaaaccacat

SEQ ID NO: 3307486 - DNA, 25 bp, Homo sapien
tcaatgactgaagggtagcttgtcc

SEQ ID NO: 3307487 - DNA, 25 bp, Homo sapien
tgctgaaccagagggtcaatgactg

SEQ ID NO: 3307488 - DNA, 25 bp, Homo sapien
tcagcaagggctgtaggctcatagg

SEQ ID NO: 3307489 - DNA, 25 bp, Homo sapien
gcctaggcagagtgcatattctatc

SEQ ID NO: 3307490 - DNA, 25 bp, Homo sapien
gctcatagggtatgattgcaaaaga

SEQ ID NO: 3307491 - DNA, 25 bp, Homo sapien
gataaatcttcagctagcctaggca

SEQ ID NO: 3307492 - DNA, 25 bp, Homo sapien
ttagggccagatatcagaagtcttg

SEQ ID NO: 3307493 - DNA, 25 bp, Homo sapien
gaagagaaccgcaggcttgacaagg

SEQ ID NO: 3307494 - DNA, 25 bp, Homo sapien
ggcagggaccccattccaaacatta

SEQ ID NO: 3307495 - DNA, 25 bp, Homo sapien
gaagtcttggaatcatcagggcagg

SEQ ID NO: 3307496 - DNA, 25 bp, Homo sapien
cactgctccgtgtattgtaacttta

SEQ ID NO: 3307497 - DNA, 25 bp, Homo sapien
cattgaaacctaaaagatggagact

SEQ ID NO: 3307498 - DNA, 25 bp, Homo sapien
tggagactggtagcagagctcttct

SEQ ID NO: 3307499 - DNA, 25 bp, Homo sapien
ggtatgtggttgtctcctgctggcc

SEQ ID NO: 3307500 - DNA, 25 bp, Homo sapien
actgatcatgttgccagtaccatac

SEQ ID NO: 3307501 - DNA, 25 bp, Homo sapien
cagtaccatactctggaagtagcaa

SEQ ID NO: 3307502 - DNA, 25 bp, Homo sapien
catactctggaagtagcaatgaggt

SEQ ID NO: 3307503 - DNA, 25 bp, Homo sapien
caactgatcatgttgccagtaccat

SEQ ID NO: 3307504 - DNA, 25 bp, Homo sapien
cagcagctgagagttgaaccctcag

SEQ ID NO: 3307505 - DNA, 25 bp, Homo sapien
aatcagggcactgcttatggttagt

SEQ ID NO: 3307506 - DNA, 25 bp, Homo sapien
gagagttgaaccctcagtaccaaca

SEQ ID NO: 3307507 - DNA, 25 bp, Homo sapien
tatggttagtaacaggataaggcat

SEQ ID NO: 3307508 - DNA, 25 bp, Homo sapien
ctcggcaggtgaccgcgccgtgtcg

SEQ ID NO: 3307509 - DNA, 25 bp, Homo sapien
gacgcggggatgaccgctcggcagg

SEQ ID NO: 3307510 - DNA, 25 bp, Homo sapien
tcgcgcgtcgcgtcgccgctttgcg

SEQ ID NO: 3307511 - DNA, 25 bp, Homo sapien
agcgctcagcgggtcgcgcgtcgcg

SEQ ID NO: 3307512 - DNA, 25 bp, Homo sapien
cagtgcgccgcgtggccatttcctc

SEQ ID NO: 3307513 - DNA, 25 bp, Homo sapien
gccaaggcggcgagagttggcgcag

SEQ ID NO: 3307514 - DNA, 25 bp, Homo sapien
ttggcgcaggcttcgggtcgctccc

SEQ ID NO: 3307515 - DNA, 25 bp, Homo sapien
tcgccactcgcgtcccgcaggtaga

SEQ ID NO: 3307516 - DNA, 25 bp, Homo sapien
tgccaccatcttgaatgatgctgcc

SEQ ID NO: 3307517 - DNA, 25 bp, Homo sapien
aggacttggagatggaggacctgca

SEQ ID NO: 3307518 - DNA, 25 bp, Homo sapien
ggacctgcaaggctggtactcccat

SEQ ID NO: 3307519 - DNA, 25 bp, Homo sapien
gctgccattgcttcttgggtcactg

SEQ ID NO: 3307520 - DNA, 25 bp, Homo sapien
tggggatattgtgcactctcagtgc

SEQ ID NO: 3307521 - DNA, 25 bp, Homo sapien
cttattgctattttcagtggggata

SEQ ID NO: 3307522 - DNA, 25 bp, Homo sapien
agtggggatattgtgcactctcagt

SEQ ID NO: 3307523 - DNA, 25 bp, Homo sapien
gtggggatattgtgcactctcagtg

SEQ ID NO: 3307524 - DNA, 25 bp, Homo sapien
gctgtcttgggtcatgtttgtcagg

SEQ ID NO: 3307525 - DNA, 25 bp, Homo sapien
ttcaggcaacagcaggctccctgga

SEQ ID NO: 3307526 - DNA, 25 bp, Homo sapien
taggatgttgtgcagcttcaggcaa

SEQ ID NO: 3307527 - DNA, 25 bp, Homo sapien
aaaattccgtggcttatgagaacct

SEQ ID NO: 3307528 - DNA, 25 bp, Homo sapien
tatttttcaccagttaaccatcgcc

SEQ ID NO: 3307529 - DNA, 25 bp, Homo sapien
taccctttgcctagcaataaactca

SEQ ID NO: 3307530 - DNA, 25 bp, Homo sapien
ccctttgcctagcaataaactcaac

SEQ ID NO: 3307531 - DNA, 25 bp, Homo sapien
ttaccctttgcctagcaataaactc

SEQ ID NO: 3307532 - DNA, 25 bp, Homo sapien
cagtttttgcaacttccgcagagaa

SEQ ID NO: 3307533 - DNA, 25 bp, Homo sapien
atacagtttttgcaacttccgcaga

SEQ ID NO: 3307534 - DNA, 25 bp, Homo sapien
tacagtttttgcaacttccgcagag

SEQ ID NO: 3307535 - DNA, 25 bp, Homo sapien
acagtttttgcaacttccgcagaga

SEQ ID NO: 3307536 - DNA, 25 bp, Homo sapien
aacacttggcatagtttctggactc

SEQ ID NO: 3307537 - DNA, 25 bp, Homo sapien
acttggcatagtttctggactcctg

SEQ ID NO: 3307538 - DNA, 25 bp, Homo sapien
gatggtgtgaaacacttggcatagt

SEQ ID NO: 3307539 - DNA, 25 bp, Homo sapien
tgtgaaacacttggcatagtttctg

SEQ ID NO: 3307540 - DNA, 25 bp, Homo sapien
tttctacatagttggatacaaaaga

SEQ ID NO: 3307541 - DNA, 25 bp, Homo sapien
acatagttggatacaaaagaaagga

SEQ ID NO: 3307542 - DNA, 25 bp, Homo sapien
tctacatagttggatacaaaagaaa

SEQ ID NO: 3307543 - DNA, 25 bp, Homo sapien
tacatagttggatacaaaagaaagg

SEQ ID NO: 3307544 - DNA, 25 bp, Homo sapien
agtgtcactcgctgttgtatctgag

SEQ ID NO: 3307545 - DNA, 25 bp, Homo sapien
catccgtctctagcccatgtgagga

SEQ ID NO: 3307546 - DNA, 25 bp, Homo sapien
cctagggaataggagtgaggataat

SEQ ID NO: 3307547 - DNA, 25 bp, Homo sapien
catgtgaggacagtattcccatcag

SEQ ID NO: 3307548 - DNA, 25 bp, Homo sapien
tttcagctctcaaatattcctcctc

SEQ ID NO: 3307549 - DNA, 25 bp, Homo sapien
ctcctcacattttaacaccaccggg

SEQ ID NO: 3307550 - DNA, 25 bp, Homo sapien
ctcacattttaacaccaccggggct

SEQ ID NO: 3307551 - DNA, 25 bp, Homo sapien
attttcagctctcaaatattcctcc

SEQ ID NO: 3307552 - DNA, 25 bp, Homo sapien
catctctgttaccatcgagaccggg

SEQ ID NO: 3307553 - DNA, 25 bp, Homo sapien
gctgctgcggcttctactgttgtct

SEQ ID NO: 3307554 - DNA, 25 bp, Homo sapien
gtcactgggagacgaaagtgctgct

SEQ ID NO: 3307555 - DNA, 25 bp, Homo sapien
aagtgctgctggttagcacagaaga

SEQ ID NO: 3307556 - DNA, 25 bp, Homo sapien
tgggctctccatgtcccagggtgat

SEQ ID NO: 3307557 - DNA, 25 bp, Homo sapien
gttatcactaactgcaccgctgctg

SEQ ID NO: 3307558 - DNA, 25 bp, Homo sapien
ccagtgccaattctgctgatgcctt

SEQ ID NO: 3307559 - DNA, 25 bp, Homo sapien
gctgtcattagtgctgctgccaaca

SEQ ID NO: 3307560 - DNA, 25 bp, Homo sapien
cttgaaccaaacatgtgcacctcgt

SEQ ID NO: 3307561 - DNA, 25 bp, Homo sapien
ttctctagcatctgggacaactggc

SEQ ID NO: 3307562 - DNA, 25 bp, Homo sapien
tagatcctttgccttaggactcaag

SEQ ID NO: 3307563 - DNA, 25 bp, Homo sapien
catgaagcctgggatagaagacaat

SEQ ID NO: 3307564 - DNA, 25 bp, Homo sapien
ctggaaacaggaacataaacactcg

SEQ ID NO: 3307565 - DNA, 25 bp, Homo sapien
gaaacaggaacataaacactcgaac

SEQ ID NO: 3307566 - DNA, 25 bp, Homo sapien
tggaaacaggaacataaacactcga

SEQ ID NO: 3307567 - DNA, 25 bp, Homo sapien
ggaaacaggaacataaacactcgaa

SEQ ID NO: 3307568 - DNA, 25 bp, Homo sapien
gaagaagggcaatagtctatcaaac

SEQ ID NO: 3307569 - DNA, 25 bp, Homo sapien
tgattttgttagtgggagtggttta

SEQ ID NO: 3307570 - DNA, 25 bp, Homo sapien
tcagaagaagggcaatagtctatca

SEQ ID NO: 3307571 - DNA, 25 bp, Homo sapien
tgcttccaaccctaactcagaagaa

SEQ ID NO: 3307572 - DNA, 25 bp, Homo sapien
tcttaaagagaaggtgtaattcatc

SEQ ID NO: 3307573 - DNA, 25 bp, Homo sapien
gatcttaaagagaaggtgtaattca

SEQ ID NO: 3307574 - DNA, 25 bp, Homo sapien
atcttaaagagaaggtgtaattcat

SEQ ID NO: 3307575 - DNA, 25 bp, Homo sapien
gagcagagaagttttcgagtttggc

SEQ ID NO: 3307576 - DNA, 25 bp, Homo sapien
tggcggccagtagaatagtcggcat

SEQ ID NO: 3307577 - DNA, 25 bp, Homo sapien
gtttggctgagcatccagagatggc

SEQ ID NO: 3307578 - DNA, 25 bp, Homo sapien
tccagagatggcccatagtcatggg

SEQ ID NO: 3307579 - DNA, 25 bp, Homo sapien
aaaccagtggctatgtttcagagga

SEQ ID NO: 3307580 - DNA, 25 bp, Homo sapien
aaccagtggctatgtttcagaggac

SEQ ID NO: 3307581 - DNA, 25 bp, Homo sapien
gaagagtatggggcctgtagtggac

SEQ ID NO: 3307582 - DNA, 25 bp, Homo sapien
tatggggcctgtagtggactcagta

SEQ ID NO: 3307583 - DNA, 25 bp, Homo sapien
ttttattgccaagagagactcacat

SEQ ID NO: 3307584 - DNA, 25 bp, Homo sapien
tattgccaagagagactcacataaa

SEQ ID NO: 3307585 - DNA, 25 bp, Homo sapien
gccaagagagactcacataaatcag

SEQ ID NO: 3307586 - DNA, 25 bp, Homo sapien
caagagagactcacataaatcagaa

SEQ ID NO: 3307587 - DNA, 25 bp, Homo sapien
caggccctttctttcggcatccgat

SEQ ID NO: 3307588 - DNA, 25 bp, Homo sapien
tttcaagagagataggtgcagtagg

SEQ ID NO: 3307589 - DNA, 25 bp, Homo sapien
tagggggtggtctggaatatccctc

SEQ ID NO: 3307590 - DNA, 25 bp, Homo sapien
cctttctttcggcatccgatgagcc

SEQ ID NO: 3307591 - DNA, 25 bp, Homo sapien
caggtcatctgctttcttactttca

SEQ ID NO: 3307592 - DNA, 25 bp, Homo sapien
aggtcatctgctttcttactttcag

SEQ ID NO: 3307593 - DNA, 25 bp, Homo sapien
tttcaggaaagcagacaccattttc

SEQ ID NO: 3307594 - DNA, 25 bp, Homo sapien
ttactttcaggaaagcagacaccat

SEQ ID NO: 3307595 - DNA, 25 bp, Homo sapien
gccagacagtccttgattcccatgt

SEQ ID NO: 3307596 - DNA, 25 bp, Homo sapien
attcccatgtttgacagtttgctca

SEQ ID NO: 3307597 - DNA, 25 bp, Homo sapien
ctactttctcgttgtgtataaaata

SEQ ID NO: 3307598 - DNA, 25 bp, Homo sapien
tttcctcgtaacattcatttgacca

SEQ ID NO: 3307599 - DNA, 25 bp, Homo sapien
cctgattctgcagagaggctaccat

SEQ ID NO: 3307600 - DNA, 25 bp, Homo sapien
tcttgccctgattctgcagagaggc

SEQ ID NO: 3307601 - DNA, 25 bp, Homo sapien
ttctttccttttccgctggcttctc

SEQ ID NO: 3307602 - DNA, 25 bp, Homo sapien
ccacatgctgcctgaatatttcttt

SEQ ID NO: 3307603 - DNA, 25 bp, Homo sapien
caacaatgtggttggtattggcctc

SEQ ID NO: 3307604 - DNA, 25 bp, Homo sapien
aaatggtacctagggagcctccagc

SEQ ID NO: 3307605 - DNA, 25 bp, Homo sapien
cctctgcgtgaatgtaaatggtacc

SEQ ID NO: 3307606 - DNA, 25 bp, Homo sapien
tcgtcttgtcattttcatatcggac

SEQ ID NO: 3307607 - DNA, 25 bp, Homo sapien
tttagcttcgaggattttcttctga

SEQ ID NO: 3307608 - DNA, 25 bp, Homo sapien
ttaagagccaatttagcttcgagga

SEQ ID NO: 3307609 - DNA, 25 bp, Homo sapien
gccaatttagcttcgaggattttct

SEQ ID NO: 3307610 - DNA, 25 bp, Homo sapien
agagctttaactttaagagccaatt

SEQ ID NO: 3307611 - DNA, 25 bp, Homo sapien
gacattcctgtggtaatattgggtt

SEQ ID NO: 3307612 - DNA, 25 bp, Homo sapien
taatattgggttattacagttacat

SEQ ID NO: 3307613 - DNA, 25 bp, Homo sapien
gagaggcctagaagaagttaagaga

SEQ ID NO: 3307614 - DNA, 25 bp, Homo sapien
cctattagatagcatgacattcctg

SEQ ID NO: 3307615 - DNA, 25 bp, Homo sapien
catttttggaggattatgttttagc

SEQ ID NO: 3307616 - DNA, 25 bp, Homo sapien
cgttttgcttcgactgtccacaaca

SEQ ID NO: 3307617 - DNA, 25 bp, Homo sapien
ctagatcttgcaattaacgatatta

SEQ ID NO: 3307618 - DNA, 25 bp, Homo sapien
tctaggggtgataaacactgccatt

SEQ ID NO: 3307619 - DNA, 25 bp, Homo sapien
gtatgccaataatttggttctgttc

SEQ ID NO: 3307620 - DNA, 25 bp, Homo sapien
ttaagcttgtatgccaataatttgg

SEQ ID NO: 3307621 - DNA, 25 bp, Homo sapien
gcttgtatgccaataatttggttct

SEQ ID NO: 3307622 - DNA, 25 bp, Homo sapien
tctttttaagcttgtatgccaataa

SEQ ID NO: 3307623 - DNA, 25 bp, Homo sapien
ctggagagcgcaatgtatgaatggc

SEQ ID NO: 3307624 - DNA, 25 bp, Homo sapien
tgtccactggagagcgcaatgtatg

SEQ ID NO: 3307625 - DNA, 25 bp, Homo sapien
tgcattttcacccttgtcattgacc

SEQ ID NO: 3307626 - DNA, 25 bp, Homo sapien
cattgaccacccacaagctttttac

SEQ ID NO: 3307627 - DNA, 25 bp, Homo sapien
gcgtatatttaatcctgcattgtgt

SEQ ID NO: 3307628 - DNA, 25 bp, Homo sapien
cctgaggtcaatcagctcttttcca

SEQ ID NO: 3307629 - DNA, 25 bp, Homo sapien
tacttttctgcaacagctgtgtaag

SEQ ID NO: 3307630 - DNA, 25 bp, Homo sapien
tcaatgaggctttgtgaattttcat

SEQ ID NO: 3307631 - DNA, 25 bp, Homo sapien
tcccattaggtttgcggataatatt

SEQ ID NO: 3307632 - DNA, 25 bp, Homo sapien
gatcccattaggtttgcggataata

SEQ ID NO: 3307633 - DNA, 25 bp, Homo sapien
cagatcccattaggtttgcggataa

SEQ ID NO: 3307634 - DNA, 25 bp, Homo sapien
tcagatcccattaggtttgcggata

SEQ ID NO: 3307635 - DNA, 25 bp, Homo sapien
gttccaggtaagtttgtgatgagtt

SEQ ID NO: 3307636 - DNA, 25 bp, Homo sapien
ccaggtaagtttgtgatgagttgaa

SEQ ID NO: 3307637 - DNA, 25 bp, Homo sapien
ccagggcagtatatcatgaagatgt

SEQ ID NO: 3307638 - DNA, 25 bp, Homo sapien
agggcagtatatcatgaagatgttc

SEQ ID NO: 3307639 - DNA, 25 bp, Homo sapien
agtgtaaagtccaaatctcttcaca

SEQ ID NO: 3307640 - DNA, 25 bp, Homo sapien
tagtgtaaagtccaaatctcttcac

SEQ ID NO: 3307641 - DNA, 25 bp, Homo sapien
ttagtgtaaagtccaaatctcttca

SEQ ID NO: 3307642 - DNA, 25 bp, Homo sapien
gctttttactcatgcatagtttttc

SEQ ID NO: 3307643 - DNA, 25 bp, Homo sapien
cctcagagcgcacttttctatcagc

SEQ ID NO: 3307644 - DNA, 25 bp, Homo sapien
cttgcaggcctcagagcgcactttt

SEQ ID NO: 3307645 - DNA, 25 bp, Homo sapien
ttctatcagccacagtactttcttc

SEQ ID NO: 3307646 - DNA, 25 bp, Homo sapien
cagtgtcagtgctcccatttgtgga

SEQ ID NO: 3307647 - DNA, 25 bp, Homo sapien
ttaagtgccagtgtcagtgctccca

SEQ ID NO: 3307648 - DNA, 25 bp, Homo sapien
gccagtgtcagtgctcccatttgtg

SEQ ID NO: 3307649 - DNA, 25 bp, Homo sapien
tgtcagtgctcccatttgtggagtt

SEQ ID NO: 3307650 - DNA, 25 bp, Homo sapien
aattacctgttgatttgagtaagta

SEQ ID NO: 3307651 - DNA, 25 bp, Homo sapien
cactgtgtaacatatggtgtttaca

SEQ ID NO: 3307652 - DNA, 25 bp, Homo sapien
acagcgtaagtggtaacagctgcct

SEQ ID NO: 3307653 - DNA, 25 bp, Homo sapien
tatgtggtaaaaacagcgtaagtgg

SEQ ID NO: 3307654 - DNA, 25 bp, Homo sapien
acattgattatttcaattaaaccta

SEQ ID NO: 3307655 - DNA, 25 bp, Homo sapien
ttataactttccggtgtcctctgca

SEQ ID NO: 3307656 - DNA, 25 bp, Homo sapien
taaagagcttctaatttcacattga

SEQ ID NO: 3307657 - DNA, 25 bp, Homo sapien
ggtgtcctctgcattagcttttaaa

SEQ ID NO: 3307658 - DNA, 25 bp, Homo sapien
tgttgtagcagataaaatgaagcct

SEQ ID NO: 3307659 - DNA, 25 bp, Homo sapien
caaatcattctctaatctgaagtac

SEQ ID NO: 3307660 - DNA, 25 bp, Homo sapien
tgggcttaagttaatgtagaattca

SEQ ID NO: 3307661 - DNA, 25 bp, Homo sapien
aatgtttccatgcatgggcttaagt

SEQ ID NO: 3307662 - DNA, 25 bp, Homo sapien
tggattgatgctgatccttggtccc

SEQ ID NO: 3307663 - DNA, 25 bp, Homo sapien
tatttaaatatagccctctaggtac

SEQ ID NO: 3307664 - DNA, 25 bp, Homo sapien
tatttattactttgtcagagagtgc

SEQ ID NO: 3307665 - DNA, 25 bp, Homo sapien
ggtcccattaacatgttactgtggc

SEQ ID NO: 3307666 - DNA, 25 bp, Homo sapien
caataattaaaatcatttgaacaaa

SEQ ID NO: 3307667 - DNA, 25 bp, Homo sapien
aaaaaattgtgcattccaataatta

SEQ ID NO: 3307668 - DNA, 25 bp, Homo sapien
ccaataattaaaatcatttgaacaa

SEQ ID NO: 3307669 - DNA, 25 bp, Homo sapien
tatttgcatattaaaaaaattgtgc

SEQ ID NO: 3307670 - DNA, 25 bp, Homo sapien
aaaaaatggcactctgattaaactg

SEQ ID NO: 3307671 - DNA, 25 bp, Homo sapien
caccttgggccagcttggttttact

SEQ ID NO: 3307672 - DNA, 25 bp, Homo sapien
actctgattaaactgcattacagcc

SEQ ID NO: 3307673 - DNA, 25 bp, Homo sapien
attacagcctgcaggacaccttggg

SEQ ID NO: 3307674 - DNA, 25 bp, Homo sapien
caccaacatgcaagttctttccttc

SEQ ID NO: 3307675 - DNA, 25 bp, Homo sapien
cactgttgtcccaccccacttcttc

SEQ ID NO: 3307676 - DNA, 25 bp, Homo sapien
gatttcactgttgtcccaccccact

SEQ ID NO: 3307677 - DNA, 25 bp, Homo sapien
acttcttccttcaccaacatgcaag

SEQ ID NO: 3307678 - DNA, 25 bp, Homo sapien
ggcgcggccttcgttgtcagtagtt

SEQ ID NO: 3307679 - DNA, 25 bp, Homo sapien
atgggaaaggcaggcgcggccttcg

SEQ ID NO: 3307680 - DNA, 25 bp, Homo sapien
ggcaggcgcggccttcgttgtcagt

SEQ ID NO: 3307681 - DNA, 25 bp, Homo sapien
aaaggcaggcgcggccttcgttgtc

SEQ ID NO: 3307682 - DNA, 25 bp, Homo sapien
tgtggaatgtacagtgcatattggc

SEQ ID NO: 3307683 - DNA, 25 bp, Homo sapien
gtacagtgcatattggcggcgcacg

SEQ ID NO: 3307684 - DNA, 25 bp, Homo sapien
gatccaacctctttgcatcttacaa

SEQ ID NO: 3307685 - DNA, 25 bp, Homo sapien
tgcttgtggaatgtacagtgcatat

SEQ ID NO: 3307686 - DNA, 25 bp, Homo sapien
tcggcttatcgaatttctcgatctc

SEQ ID NO: 3307687 - DNA, 25 bp, Homo sapien
tcttcttcagtttcggcttatcgaa

SEQ ID NO: 3307688 - DNA, 25 bp, Homo sapien
gatctcagccatatcgggtttgtca

SEQ ID NO: 3307689 - DNA, 25 bp, Homo sapien
tgttcaatcgtttctttggaaggca

SEQ ID NO: 3307690 - DNA, 25 bp, Homo sapien
agcgaggcgcgcgagtacgagcgaa

SEQ ID NO: 3307691 - DNA, 25 bp, Homo sapien
tgcggaggaaaagcggagcgaggcg

SEQ ID NO: 3307692 - DNA, 25 bp, Homo sapien
gcgcgcgagtacgagcgaagtctgg

SEQ ID NO: 3307693 - DNA, 25 bp, Homo sapien
aaagcggagcgaggcgcgcgagtac

SEQ ID NO: 3307694 - DNA, 25 bp, Homo sapien
tatgctgggtctaacatgaagaaca

SEQ ID NO: 3307695 - DNA, 25 bp, Homo sapien
aaatggaatgttaagattgagcccc

SEQ ID NO: 3307696 - DNA, 25 bp, Homo sapien
tattcctaagaacgtagttgcccac

SEQ ID NO: 3307697 - DNA, 25 bp, Homo sapien
tgctcttgccatagggagaaaatgg

SEQ ID NO: 3307698 - DNA, 25 bp, Homo sapien
gggctgcccactgtatctctccggt

SEQ ID NO: 3307699 - DNA, 25 bp, Homo sapien
gtagactcttgtccagctatgtggc

SEQ ID NO: 3307700 - DNA, 25 bp, Homo sapien
taggcatactggtcagctggtagac

SEQ ID NO: 3307701 - DNA, 25 bp, Homo sapien
tgtccagctatgtggctcccctgtt

SEQ ID NO: 3307702 - DNA, 25 bp, Homo sapien
ctgcgtgggccgtcatcctgcctgg

SEQ ID NO: 3307703 - DNA, 25 bp, Homo sapien
tttgtctctgtgtcatgcctgcgtg

SEQ ID NO: 3307704 - DNA, 25 bp, Homo sapien
gaaggtgctgaatttacctgcccct

SEQ ID NO: 3307705 - DNA, 25 bp, Homo sapien
ctggaggtatcaccattgaaggcac

SEQ ID NO: 3307706 - DNA, 25 bp, Homo sapien
atacattaccaacaccaaaacaagc

SEQ ID NO: 3307707 - DNA, 25 bp, Homo sapien
caataaccatgagactccttcacaa

SEQ ID NO: 3307708 - DNA, 25 bp, Homo sapien
catgagactccttcacaaactgcag

SEQ ID NO: 3307709 - DNA, 25 bp, Homo sapien
tacattaccaacaccaaaacaagcc

SEQ ID NO: 3307710 - DNA, 25 bp, Homo sapien
tacccctgcttgactttcaacagac

SEQ ID NO: 3307711 - DNA, 25 bp, Homo sapien
ttatttacccctgcttgactttcaa

SEQ ID NO: 3307712 - DNA, 25 bp, Homo sapien
tttacccctgcttgactttcaacag

SEQ ID NO: 3307713 - DNA, 25 bp, Homo sapien
tatttacccctgcttgactttcaac

SEQ ID NO: 3307714 - DNA, 25 bp, Homo sapien
caagaagttgtgcaaaatgattcca

SEQ ID NO: 3307715 - DNA, 25 bp, Homo sapien
catgtgcaagaagttgtgcaaaatg

SEQ ID NO: 3307716 - DNA, 25 bp, Homo sapien
caccatgtgcaagaagttgtgcaaa

SEQ ID NO: 3307717 - DNA, 25 bp, Homo sapien
ttctcaccatgtgcaagaagttgtg

SEQ ID NO: 3307718 - DNA, 25 bp, Homo sapien
gaaatgcgttaacatttctgcatgt

SEQ ID NO: 3307719 - DNA, 25 bp, Homo sapien
actttgaggaaatgcgttaacattt

SEQ ID NO: 3307720 - DNA, 25 bp, Homo sapien
atgcgttaacatttctgcatgtctt

SEQ ID NO: 3307721 - DNA, 25 bp, Homo sapien
ctttgaggaaatgcgttaacatttc

SEQ ID NO: 3307722 - DNA, 25 bp, Homo sapien
tattatttgcattatggatgtacac

SEQ ID NO: 3307723 - DNA, 25 bp, Homo sapien
tatggatgtacactttgaaaaactt

SEQ ID NO: 3307724 - DNA, 25 bp, Homo sapien
gctcctggcgcagtttgcagatagt

SEQ ID NO: 3307725 - DNA, 25 bp, Homo sapien
cttttctcagatttaattttggtgg

SEQ ID NO: 3307726 - DNA, 25 bp, Homo sapien
atattcatctagcataagcactgag

SEQ ID NO: 3307727 - DNA, 25 bp, Homo sapien
gaatacggtctacctgagggaacag

SEQ ID NO: 3307728 - DNA, 25 bp, Homo sapien
gggaacagccgacgcaacttctata

SEQ ID NO: 3307729 - DNA, 25 bp, Homo sapien
gccgacgcaacttctatatcatatt

SEQ ID NO: 3307730 - DNA, 25 bp, Homo sapien
tgataacaattttttccgtaacata

SEQ ID NO: 3307731 - DNA, 25 bp, Homo sapien
tccgtaacatagaagatggtatttt

SEQ ID NO: 3307732 - DNA, 25 bp, Homo sapien
gtttttcacagtacactagctcatg

SEQ ID NO: 3307733 - DNA, 25 bp, Homo sapien
acagtacactagctcatggcttttc

SEQ ID NO: 3307734 - DNA, 25 bp, Homo sapien
tgagcatgatatacaccattgacat

SEQ ID NO: 3307735 - DNA, 25 bp, Homo sapien
tccaccattcactctgagcatgata

SEQ ID NO: 3307736 - DNA, 25 bp, Homo sapien
ccattgacatgaatggtaaatcatg

SEQ ID NO: 3307737 - DNA, 25 bp, Homo sapien
agttgctataactccttcttcccca

SEQ ID NO: 3307738 - DNA, 25 bp, Homo sapien
cgactccttgctgcattagctggaa

SEQ ID NO: 3307739 - DNA, 25 bp, Homo sapien
agctacacttgccttcacctcagag

SEQ ID NO: 3307740 - DNA, 25 bp, Homo sapien
gaaccgctgtacctggaatcctgat

SEQ ID NO: 3307741 - DNA, 25 bp, Homo sapien
gaactaaatgcctcactgctgacca

SEQ ID NO: 3307742 - DNA, 25 bp, Homo sapien
aatcaagccaattattgctggtgct

SEQ ID NO: 3307743 - DNA, 25 bp, Homo sapien
agccaattattgctggtgctaatca

SEQ ID NO: 3307744 - DNA, 25 bp, Homo sapien
tattgctggtgctaatcatcatgtt

SEQ ID NO: 3307745 - DNA, 25 bp, Homo sapien
gctggtgctaatcatcatgttttta

SEQ ID NO: 3307746 - DNA, 25 bp, Homo sapien
cgcttgccaacaatgtgctagacac

SEQ ID NO: 3307747 - DNA, 25 bp, Homo sapien
tttttgccaagctcctgaggatgcg

SEQ ID NO: 3307748 - DNA, 25 bp, Homo sapien
gcagacattgtttgactgatcgcaa

SEQ ID NO: 3307749 - DNA, 25 bp, Homo sapien
tgaggtccacttgttagttcttagt

SEQ ID NO: 3307750 - DNA, 25 bp, Homo sapien
tgactgatcgcaatgtcacatctga

SEQ ID NO: 3307751 - DNA, 25 bp, Homo sapien
gactcttgtcgttctttgggccaca

SEQ ID NO: 3307752 - DNA, 25 bp, Homo sapien
tctgtcactaatatgatgctgccat

SEQ ID NO: 3307753 - DNA, 25 bp, Homo sapien
tatccttatcatccaacaatgtgtt

SEQ ID NO: 3307754 - DNA, 25 bp, Homo sapien
tgaaaagcaagcaggccagaagtgt

SEQ ID NO: 3307755 - DNA, 25 bp, Homo sapien
ggtgcttgccagctttcctttatgt

SEQ ID NO: 3307756 - DNA, 25 bp, Homo sapien
tgtcctctccatttgtagcttcctt

SEQ ID NO: 3307757 - DNA, 25 bp, Homo sapien
taaacagatttcttccctatagtgg

SEQ ID NO: 3307758 - DNA, 25 bp, Homo sapien
ccatttgtagcttcctttctgtata

SEQ ID NO: 3307759 - DNA, 25 bp, Homo sapien
tgaagtgaggtgaaagtcttatctt

SEQ ID NO: 3307760 - DNA, 25 bp, Homo sapien
agtgaagtgaggtgaaagtcttatc

SEQ ID NO: 3307761 - DNA, 25 bp, Homo sapien
aagtcttatctttcattgattaaaa

SEQ ID NO: 3307762 - DNA, 25 bp, Homo sapien
tcagtgaagtgaggtgaaagtctta

SEQ ID NO: 3307763 - DNA, 25 bp, Homo sapien
ttatgcagtctctacttcaatctca

SEQ ID NO: 3307764 - DNA, 25 bp, Homo sapien
ttctctcttatactccctgttctca

SEQ ID NO: 3307765 - DNA, 25 bp, Homo sapien
tcttcctgtttatctcaattcgtgt

SEQ ID NO: 3307766 - DNA, 25 bp, Homo sapien
gttctcaaggtcattatgcagtctc

SEQ ID NO: 3307767 - DNA, 25 bp, Homo sapien
gccggcccagccagctacgtttttc

SEQ ID NO: 3307768 - DNA, 25 bp, Homo sapien
cggcccagccagctacgtttttcca

SEQ ID NO: 3307769 - DNA, 25 bp, Homo sapien
cccagccagctacgtttttccacag

SEQ ID NO: 3307770 - DNA, 25 bp, Homo sapien
ctgtggggcttgcccagctcattct

SEQ ID NO: 3307771 - DNA, 25 bp, Homo sapien
aaaggaaaattaggtaactgcatgg

SEQ ID NO: 3307772 - DNA, 25 bp, Homo sapien
ataagatggaccatggaaaggatgc

SEQ ID NO: 3307773 - DNA, 25 bp, Homo sapien
cttacttgaaagatataagatggac

SEQ ID NO: 3307774 - DNA, 25 bp, Homo sapien
aggaaaattaggtaactgcatggat

SEQ ID NO: 3307775 - DNA, 25 bp, Homo sapien
taattgtaaaattgagctgtgctcc

SEQ ID NO: 3307776 - DNA, 25 bp, Homo sapien
tgtgctccattaagctcctgccgag

SEQ ID NO: 3307777 - DNA, 25 bp, Homo sapien
tattctagggctcgtttgaaaacag

SEQ ID NO: 3307778 - DNA, 25 bp, Homo sapien
gagatgcatccacattctccccttg

SEQ ID NO: 3307779 - DNA, 25 bp, Homo sapien
aggtgcattcagggtagtatggcta

SEQ ID NO: 3307780 - DNA, 25 bp, Homo sapien
gcttctgagatagagatcaggtgca

SEQ ID NO: 3307781 - DNA, 25 bp, Homo sapien
ttagcttctgagatagagatcaggt

SEQ ID NO: 3307782 - DNA, 25 bp, Homo sapien
gtgcattcagggtagtatggctata

SEQ ID NO: 3307783 - DNA, 25 bp, Homo sapien
taatttctagtggaagacaccgtgc

SEQ ID NO: 3307784 - DNA, 25 bp, Homo sapien
aaacattgccaagttagcagctcgg

SEQ ID NO: 3307785 - DNA, 25 bp, Homo sapien
gacaccgtgcgagaagtaaaagaga

SEQ ID NO: 3307786 - DNA, 25 bp, Homo sapien
gctttaaatgaacgacttgctactc

SEQ ID NO: 3307787 - DNA, 25 bp, Homo sapien
aatatttacaagtgacagggctgac

SEQ ID NO: 3307788 - DNA, 25 bp, Homo sapien
atatttacaagtgacagggctgact

SEQ ID NO: 3307789 - DNA, 25 bp, Homo sapien
tttgtaatcactattcttgcctcca

SEQ ID NO: 3307790 - DNA, 25 bp, Homo sapien
gtatcttctcgccaagtgtctatag

SEQ ID NO: 3307791 - DNA, 25 bp, Homo sapien
tagtcagtgaccatacctcagtaac

SEQ ID NO: 3307792 - DNA, 25 bp, Homo sapien
gctttgacttggttgctgctttccc

SEQ ID NO: 3307793 - DNA, 25 bp, Homo sapien
tattatggaagggtagggctctctg

SEQ ID NO: 3307794 - DNA, 25 bp, Homo sapien
tcagcaatacattagccagactggc

SEQ ID NO: 3307795 - DNA, 25 bp, Homo sapien
tatcccgagggctaattttctcaca

SEQ ID NO: 3307796 - DNA, 25 bp, Homo sapien
taaagaatgtgtaacccaaccaggc

SEQ ID NO: 3307797 - DNA, 25 bp, Homo sapien
cagatggtaattaagacagacggta

SEQ ID NO: 3307798 - DNA, 25 bp, Homo sapien
tggtaaggaaattaacagatggtaa

SEQ ID NO: 3307799 - DNA, 25 bp, Homo sapien
agacagacggtatcagcttctggat

SEQ ID NO: 3307800 - DNA, 25 bp, Homo sapien
ggtaattaagacagacggtatcagc

SEQ ID NO: 3307801 - DNA, 25 bp, Homo sapien
tgtgtgtccctcaggtttctatagc

SEQ ID NO: 3307802 - DNA, 25 bp, Homo sapien
gtgtgtccctcaggtttctatagca

SEQ ID NO: 3307803 - DNA, 25 bp, Homo sapien
tgtgcacatgggtcctaggcaggaa

SEQ ID NO: 3307804 - DNA, 25 bp, Homo sapien
tcaaatgggttagcagtggtcctct

SEQ ID NO: 3307805 - DNA, 25 bp, Homo sapien
ccagcatagtaggtggctcttgcca

SEQ ID NO: 3307806 - DNA, 25 bp, Homo sapien
ggctgttgcacatctaagcctgtgc

SEQ ID NO: 3307807 - DNA, 25 bp, Homo sapien
cacaaaggcaatcttcgcgaaacat

SEQ ID NO: 3307808 - DNA, 25 bp, Homo sapien
attcttgtcacaaaggcaatcttcg

SEQ ID NO: 3307809 - DNA, 25 bp, Homo sapien
tatgcttatgagcatctaaacatcc

SEQ ID NO: 3307810 - DNA, 25 bp, Homo sapien
tgagcatctaaacatccattcttgt

SEQ ID NO: 3307811 - DNA, 25 bp, Homo sapien
gagaggaattgtccaagtgtgcatg

SEQ ID NO: 3307812 - DNA, 25 bp, Homo sapien
ccaagtgtgcatgtttttataacat

SEQ ID NO: 3307813 - DNA, 25 bp, Homo sapien
taacataccattatggttggattga

SEQ ID NO: 3307814 - DNA, 25 bp, Homo sapien
tgctattgttatgagaggaattgtc

SEQ ID NO: 3307815 - DNA, 25 bp, Homo sapien
atttgtacttttaaggcaagaatca

SEQ ID NO: 3307816 - DNA, 25 bp, Homo sapien
tttgtacttttaaggcaagaatcat

SEQ ID NO: 3307817 - DNA, 25 bp, Homo sapien
tgttccaggaagagaaaacagcggg

SEQ ID NO: 3307818 - DNA, 25 bp, Homo sapien
gttccaggaagagaaaacagcggga

SEQ ID NO: 3307819 - DNA, 25 bp, Homo sapien
tccaggaagagaaaacagcgggaag

SEQ ID NO: 3307820 - DNA, 25 bp, Homo sapien
caggaagagaaaacagcgggaaggg

SEQ ID NO: 3307821 - DNA, 25 bp, Homo sapien
gctgtaggaggtacatttcatgaaa

SEQ ID NO: 3307822 - DNA, 25 bp, Homo sapien
tctgcttcagtaaatcgtgattctc

SEQ ID NO: 3307823 - DNA, 25 bp, Homo sapien
gatgcccaaggttcttacatgccat

SEQ ID NO: 3307824 - DNA, 25 bp, Homo sapien
gcctcgtaagattgagttcccctag

SEQ ID NO: 3307825 - DNA, 25 bp, Homo sapien
gcagcttactatggtactgactagg

SEQ ID NO: 3307826 - DNA, 25 bp, Homo sapien
cacatcaatgttgcacaatactcaa

SEQ ID NO: 3307827 - DNA, 25 bp, Homo sapien
tgaagaagggaaactatattatggg

SEQ ID NO: 3307828 - DNA, 25 bp, Homo sapien
gggctttaatttgggtcttacatgc

SEQ ID NO: 3307829 - DNA, 25 bp, Homo sapien
cagaacggcatcttattccatgctg

SEQ ID NO: 3307830 - DNA, 25 bp, Homo sapien
cttactatcaatagcagcacaagtg

SEQ ID NO: 3307831 - DNA, 25 bp, Homo sapien
tagcagcacaagtgtcaaattttaa

SEQ ID NO: 3307832 - DNA, 25 bp, Homo sapien
tttagtttacagaacggcatcttat

SEQ ID NO: 3307833 - DNA, 25 bp, Homo sapien
gctgcttatactgctgttcttttaa

SEQ ID NO: 3307834 - DNA, 25 bp, Homo sapien
cagctgttactgtctgtgtacggaa

SEQ ID NO: 3307835 - DNA, 25 bp, Homo sapien
gttactgtctgtgtacggaaactgg

SEQ ID NO: 3307836 - DNA, 25 bp, Homo sapien
acttacaattggtttagatggcctt

SEQ ID NO: 3307837 - DNA, 25 bp, Homo sapien
tacatccatgcgtgcatcatacatg

SEQ ID NO: 3307838 - DNA, 25 bp, Homo sapien
ctgaggtaaacaataactacatcca

SEQ ID NO: 3307839 - DNA, 25 bp, Homo sapien
taaacaataactacatccatgcgtg

SEQ ID NO: 3307840 - DNA, 25 bp, Homo sapien
ccatgcgtgcatcatacatgcatac

SEQ ID NO: 3307841 - DNA, 25 bp, Homo sapien
ggcttttgatcaattgagtcattga

SEQ ID NO: 3307842 - DNA, 25 bp, Homo sapien
tgtatggcttttgatcaattgagtc

SEQ ID NO: 3307843 - DNA, 25 bp, Homo sapien
tatggcttttgatcaattgagtcat

SEQ ID NO: 3307844 - DNA, 25 bp, Homo sapien
tggcttttgatcaattgagtcattg

SEQ ID NO: 3307845 - DNA, 25 bp, Homo sapien
gaaggagctctcactgtaaaatctg

SEQ ID NO: 3307846 - DNA, 25 bp, Homo sapien
aagagatggcaaatagatggattat

SEQ ID NO: 3307847 - DNA, 25 bp, Homo sapien
cagaattcatgagtctatattagta

SEQ ID NO: 3307848 - DNA, 25 bp, Homo sapien
gggttccaccaagaaatggctgatt

SEQ ID NO: 3307849 - DNA, 25 bp, Homo sapien
aaatcaaatctgtcgacatcccaag

SEQ ID NO: 3307850 - DNA, 25 bp, Homo sapien
catgtttgggtgaacatcttttacc

SEQ ID NO: 3307851 - DNA, 25 bp, Homo sapien
tacacgttcttatgaattacatggg

SEQ ID NO: 3307852 - DNA, 25 bp, Homo sapien
tcactagtaagaatggacccaattc

SEQ ID NO: 3307853 - DNA, 25 bp, Homo sapien
tcacttcagtgtgctgtgcttcagg

SEQ ID NO: 3307854 - DNA, 25 bp, Homo sapien
gtgcttcaggatgtactttggtata

SEQ ID NO: 3307855 - DNA, 25 bp, Homo sapien
ttcctcacactatggctaaacattc

SEQ ID NO: 3307856 - DNA, 25 bp, Homo sapien
ctaaaattcagtggccttcctcaca

SEQ ID NO: 3307857 - DNA, 25 bp, Homo sapien
gaattgaaattggatcattctctgc

SEQ ID NO: 3307858 - DNA, 25 bp, Homo sapien
tctggtccaaattaatcggtctcat

SEQ ID NO: 3307859 - DNA, 25 bp, Homo sapien
gcatgaattgaaattggatcattct

SEQ ID NO: 3307860 - DNA, 25 bp, Homo sapien
tctgcattctggtccaaattaatcg

SEQ ID NO: 3307861 - DNA, 25 bp, Homo sapien
tgctgctataacacaatgccttaga

SEQ ID NO: 3307862 - DNA, 25 bp, Homo sapien
tgtactaggtactttatgaggcccc

SEQ ID NO: 3307863 - DNA, 25 bp, Homo sapien
gccttaatccaaagactgagcatgt

SEQ ID NO: 3307864 - DNA, 25 bp, Homo sapien
gaagtggcctatcttgtagtatcag

SEQ ID NO: 3307865 - DNA, 25 bp, Homo sapien
ttaaaatcttggagagttatctttc

SEQ ID NO: 3307866 - DNA, 25 bp, Homo sapien
aaatcttggagagttatctttcact

SEQ ID NO: 3307867 - DNA, 25 bp, Homo sapien
tcttggagagttatctttcacttca

SEQ ID NO: 3307868 - DNA, 25 bp, Homo sapien
ggagagttatctttcacttcattct

SEQ ID NO: 3307869 - DNA, 25 bp, Homo sapien
tcagtcacaatcctcaattttttgc

SEQ ID NO: 3307870 - DNA, 25 bp, Homo sapien
catcagcagttcactgaatgttctt

SEQ ID NO: 3307871 - DNA, 25 bp, Homo sapien
gaatgttcttatcctattcttcagg

SEQ ID NO: 3307872 - DNA, 25 bp, Homo sapien
caggggagacaactcatctgtcaca

SEQ ID NO: 3307873 - DNA, 25 bp, Homo sapien
taggttttaccattaggtagagagc

SEQ ID NO: 3307874 - DNA, 25 bp, Homo sapien
gagagctaatagttccccctccatg

SEQ ID NO: 3307875 - DNA, 25 bp, Homo sapien
ttaggtagagagctaatagttcccc

SEQ ID NO: 3307876 - DNA, 25 bp, Homo sapien
taccattaggtagagagctaatagt

SEQ ID NO: 3307877 - DNA, 25 bp, Homo sapien
atgatctgaataattctccccacga

SEQ ID NO: 3307878 - DNA, 25 bp, Homo sapien
ataattctccccacgaacacatcaa

SEQ ID NO: 3307879 - DNA, 25 bp, Homo sapien
ttgtttgctctaatagcccctatac

SEQ ID NO: 3307880 - DNA, 25 bp, Homo sapien
ttcttgtttgctctaatagccccta

SEQ ID NO: 3307881 - DNA, 25 bp, Homo sapien
tagtgtaacctatcttgatgaagag

SEQ ID NO: 3307882 - DNA, 25 bp, Homo sapien
acttgtctgatctgtaggttggcac

SEQ ID NO: 3307883 - DNA, 25 bp, Homo sapien
tatcagttttggcactagtgtaacc

SEQ ID NO: 3307884 - DNA, 25 bp, Homo sapien
tgagctcctttagtgacctgggaag

SEQ ID NO: 3307885 - DNA, 25 bp, Homo sapien
tcttggaggacaacctgtatccgac

SEQ ID NO: 3307886 - DNA, 25 bp, Homo sapien
ccagcctcttggaggacaacctgta

SEQ ID NO: 3307887 - DNA, 25 bp, Homo sapien
gaaggggaactgatccagcctcttg

SEQ ID NO: 3307888 - DNA, 25 bp, Homo sapien
ggaggacaacctgtatccgactcat

SEQ ID NO: 3307889 - DNA, 25 bp, Homo sapien
tcttgctgacaaaggttgttaccag

SEQ ID NO: 3307890 - DNA, 25 bp, Homo sapien
aaggctgagttatcactaagcagga

SEQ ID NO: 3307891 - DNA, 25 bp, Homo sapien
tgctgaaaagggtcacaattaattc

SEQ ID NO: 3307892 - DNA, 25 bp, Homo sapien
tatggctgtactatgtggaatatga

SEQ ID NO: 3307893 - DNA, 25 bp, Homo sapien
agtataaacttcatcactagaggca

SEQ ID NO: 3307894 - DNA, 25 bp, Homo sapien
tgattaagttgtagagccccaggga

SEQ ID NO: 3307895 - DNA, 25 bp, Homo sapien
tacatgactgtgtaaacagagtact

SEQ ID NO: 3307896 - DNA, 25 bp, Homo sapien
gatttagcagtataaacttcatcac

SEQ ID NO: 3307897 - DNA, 25 bp, Homo sapien
tgtcatcggaatccatgtgtagcaa

SEQ ID NO: 3307898 - DNA, 25 bp, Homo sapien
aatcccatctttaagggtcatcaaa

SEQ ID NO: 3307899 - DNA, 25 bp, Homo sapien
gaaagctgaccatgtatacagttct

SEQ ID NO: 3307900 - DNA, 25 bp, Homo sapien
taaatattcgtatcttttccaagta

SEQ ID NO: 3307901 - DNA, 25 bp, Homo sapien
tggaatattccccagtgtccgttac

SEQ ID NO: 3307902 - DNA, 25 bp, Homo sapien
aatattccccagtgtccgttactgg

SEQ ID NO: 3307903 - DNA, 25 bp, Homo sapien
tccccagtgtccgttactggctaca

SEQ ID NO: 3307904 - DNA, 25 bp, Homo sapien
tcagtggaatattccccagtgtccg

SEQ ID NO: 3307905 - DNA, 25 bp, Homo sapien
ccagtggccactgccagagttcttt

SEQ ID NO: 3307906 - DNA, 25 bp, Homo sapien
tgctggagcactttcgcccacaact

SEQ ID NO: 3307907 - DNA, 25 bp, Homo sapien
aactgccctgctggagcactttcgc

SEQ ID NO: 3307908 - DNA, 25 bp, Homo sapien
tgaactgccctgctggagcactttc

SEQ ID NO: 3307909 - DNA, 25 bp, Homo sapien
tttcttaactccatgattaggactt

SEQ ID NO: 3307910 - DNA, 25 bp, Homo sapien
tcaacatgtttccatgatgtcttac

SEQ ID NO: 3307911 - DNA, 25 bp, Homo sapien
tactgtgttttcttcgttcatcaat

SEQ ID NO: 3307912 - DNA, 25 bp, Homo sapien
cttgttctgatatcatcattactca

SEQ ID NO: 3307913 - DNA, 25 bp, Homo sapien
taattacggaggatctacactgggt

SEQ ID NO: 3307914 - DNA, 25 bp, Homo sapien
ctaaggccatgtattgaaagaggtc

SEQ ID NO: 3307915 - DNA, 25 bp, Homo sapien
ggtcttgacggcattggatatctgt

SEQ ID NO: 3307916 - DNA, 25 bp, Homo sapien
ttaatgattgcccttacccgctgat

SEQ ID NO: 3307917 - DNA, 25 bp, Homo sapien
cttataggaataattggtctggaag

SEQ ID NO: 3307918 - DNA, 25 bp, Homo sapien
tataggaataattggtctggaagag

SEQ ID NO: 3307919 - DNA, 25 bp, Homo sapien
taggaataattggtctggaagagac

SEQ ID NO: 3307920 - DNA, 25 bp, Homo sapien
ataggaataattggtctggaagaga

SEQ ID NO: 3307921 - DNA, 25 bp, Homo sapien
ctggacaagtggaaagacatgctaa

SEQ ID NO: 3307922 - DNA, 25 bp, Homo sapien
gacaagtggaaagacatgctaaaaa

SEQ ID NO: 3307923 - DNA, 25 bp, Homo sapien
caagtggaaagacatgctaaaaatt

SEQ ID NO: 3307924 - DNA, 25 bp, Homo sapien
tggacaagtggaaagacatgctaaa

SEQ ID NO: 3307925 - DNA, 25 bp, Homo sapien
gatctataaacattttcttgggctt

SEQ ID NO: 3307926 - DNA, 25 bp, Homo sapien
acagatctataaacattttcttggg

SEQ ID NO: 3307927 - DNA, 25 bp, Homo sapien
tcaccaccccacaaaccgggatgag

SEQ ID NO: 3307928 - DNA, 25 bp, Homo sapien
ggacttgaggacagatcacagatct

SEQ ID NO: 3307929 - DNA, 25 bp, Homo sapien
tctgaatcagatggtaagactatgt

SEQ ID NO: 3307930 - DNA, 25 bp, Homo sapien
tattaatttgcctacagaaaaacac

SEQ ID NO: 3307931 - DNA, 25 bp, Homo sapien
cagaaaaacacgttggttgcttcca

SEQ ID NO: 3307932 - DNA, 25 bp, Homo sapien
ctctgaatcagatggtaagactatg

SEQ ID NO: 3307933 - DNA, 25 bp, Homo sapien
aatcagcttggtcacttgtgcttac

SEQ ID NO: 3307934 - DNA, 25 bp, Homo sapien
aatgaaatcagcttggtcacttgtg

SEQ ID NO: 3307935 - DNA, 25 bp, Homo sapien
gaaatcagcttggtcacttgtgctt

SEQ ID NO: 3307936 - DNA, 25 bp, Homo sapien
tgaaatcagcttggtcacttgtgct

SEQ ID NO: 3307937 - DNA, 25 bp, Homo sapien
attttgacaccatgtaaatttgtca

SEQ ID NO: 3307938 - DNA, 25 bp, Homo sapien
gtctgtatacctttaatacttcaaa

SEQ ID NO: 3307939 - DNA, 25 bp, Homo sapien
tcttcaaaggaatgtctgtatacct

SEQ ID NO: 3307940 - DNA, 25 bp, Homo sapien
tttgacaccatgtaaatttgtcatt

SEQ ID NO: 3307941 - DNA, 25 bp, Homo sapien
tagggcattgggagtttgacagaag

SEQ ID NO: 3307942 - DNA, 25 bp, Homo sapien
cagaagggtgggttcgaaggacagt

SEQ ID NO: 3307943 - DNA, 25 bp, Homo sapien
ccaacccacatactagaatgatgtc

SEQ ID NO: 3307944 - DNA, 25 bp, Homo sapien
cattattgctctggaaaagatgtag

SEQ ID NO: 3307945 - DNA, 25 bp, Homo sapien
ggagccagttcaactgcgtggcccc

SEQ ID NO: 3307946 - DNA, 25 bp, Homo sapien
gagccagttcaactgcgtggcccca

SEQ ID NO: 3307947 - DNA, 25 bp, Homo sapien
tggagccagttcaactgcgtggccc

SEQ ID NO: 3307948 - DNA, 25 bp, Homo sapien
ctggagccagttcaactgcgtggcc

SEQ ID NO: 3307949 - DNA, 25 bp, Homo sapien
ttcaataaatccattggttacttgc

SEQ ID NO: 3307950 - DNA, 25 bp, Homo sapien
aaaattgcaactcctttagtcacag

SEQ ID NO: 3307951 - DNA, 25 bp, Homo sapien
ctctaacttggtgtagtcagggaag

SEQ ID NO: 3307952 - DNA, 25 bp, Homo sapien
tcagggaagttgcacatctgactgc

SEQ ID NO: 3307953 - DNA, 25 bp, Homo sapien
atgcataccccagttgttgcctcct

SEQ ID NO: 3307954 - DNA, 25 bp, Homo sapien
tagatccagcaatataaggtatctg

SEQ ID NO: 3307955 - DNA, 25 bp, Homo sapien
taaggtatctgttcacaccatgata

SEQ ID NO: 3307956 - DNA, 25 bp, Homo sapien
ggtatctgttcacaccatgataact

SEQ ID NO: 3307957 - DNA, 25 bp, Homo sapien
ctggcagttgtagatccagcaatat

SEQ ID NO: 3307958 - DNA, 25 bp, Homo sapien
tttgcggccattttctgatatttga

SEQ ID NO: 3307959 - DNA, 25 bp, Homo sapien
aagtctctcatacatattatctacc

SEQ ID NO: 3307960 - DNA, 25 bp, Homo sapien
tatctactatacatttgcggccatt

SEQ ID NO: 3307961 - DNA, 25 bp, Homo sapien
caacattctcacaattggaggataa

SEQ ID NO: 3307962 - DNA, 25 bp, Homo sapien
gataacctgcttccttactgcagca

SEQ ID NO: 3307963 - DNA, 25 bp, Homo sapien
gggacctaggaacattacagtttgc

SEQ ID NO: 3307964 - DNA, 25 bp, Homo sapien
tataaggtacgaagagaaagtctgg

SEQ ID NO: 3307965 - DNA, 25 bp, Homo sapien
aataaaacctgttagatccaaacag

SEQ ID NO: 3307966 - DNA, 25 bp, Homo sapien
ttatcttttgctacacctttataga

SEQ ID NO: 3307967 - DNA, 25 bp, Homo sapien
agagtactttcatagctctgtcacc

SEQ ID NO: 3307968 - DNA, 25 bp, Homo sapien
tctgtcaccaatcccttggtaaaaa

SEQ ID NO: 3307969 - DNA, 25 bp, Homo sapien
agatgattcaggaaagcatgctaca

SEQ ID NO: 3307970 - DNA, 25 bp, Homo sapien
gcatctgggtgttagcttgccagct

SEQ ID NO: 3307971 - DNA, 25 bp, Homo sapien
gggtgttagcttgccagctgccaag

SEQ ID NO: 3307972 - DNA, 25 bp, Homo sapien
cttggcatctgggtgttagcttgcc

SEQ ID NO: 3307973 - DNA, 25 bp, Homo sapien
tctgggtgttagcttgccagctgcc

SEQ ID NO: 3307974 - DNA, 25 bp, Homo sapien
cggaagatccggtaagtcctgagca

SEQ ID NO: 3307975 - DNA, 25 bp, Homo sapien
tcccctggagtatcttagaagcaac

SEQ ID NO: 3307976 - DNA, 25 bp, Homo sapien
cgtcttccggcttctcgttgcggat

SEQ ID NO: 3307977 - DNA, 25 bp, Homo sapien
ttgcggatgaacgtgcacagctcct

SEQ ID NO: 3307978 - DNA, 25 bp, Homo sapien
ctggaacctgcctcgggtcggcgct

SEQ ID NO: 3307979 - DNA, 25 bp, Homo sapien
atatccagtggtgcctgctgagcac

SEQ ID NO: 3307980 - DNA, 25 bp, Homo sapien
aggtagtaggaggtcgcgttatata

SEQ ID NO: 3307981 - DNA, 25 bp, Homo sapien
cgttatatatccagtggtgcctgct

SEQ ID NO: 3307982 - DNA, 25 bp, Homo sapien
gaggtcgcgttatatatccagtggt

SEQ ID NO: 3307983 - DNA, 25 bp, Homo sapien
tcgaggtagagcctggagaatatgc

SEQ ID NO: 3307984 - DNA, 25 bp, Homo sapien
gaggtagagcctggagaatatgccc

SEQ ID NO: 3307985 - DNA, 25 bp, Homo sapien
tagagcctggagaatatgcccttgc

SEQ ID NO: 3307986 - DNA, 25 bp, Homo sapien
cctggagaatatgcccttgctgggc

SEQ ID NO: 3307987 - DNA, 25 bp, Homo sapien
ccagccgagaaggagccgcctccgc

SEQ ID NO: 3307988 - DNA, 25 bp, Homo sapien
agaaggagccgcctccgcccatcat

SEQ ID NO: 3307989 - DNA, 25 bp, Homo sapien
aaggagccgcctccgcccatcatca

SEQ ID NO: 3307990 - DNA, 25 bp, Homo sapien
ctgccagccgagaaggagccgcctc

SEQ ID NO: 3307991 - DNA, 25 bp, Homo sapien
tcaacaaagcgaaggggatgaagtc

SEQ ID NO: 3307992 - DNA, 25 bp, Homo sapien
ccaggctgacgtctctttctagctt

SEQ ID NO: 3307993 - DNA, 25 bp, Homo sapien
tgatcccccatcggggatgggggtc

SEQ ID NO: 3307994 - DNA, 25 bp, Homo sapien
caagccgcctggacccccaggaggt

SEQ ID NO: 3307995 - DNA, 25 bp, Homo sapien
tcaagccgcctggacccccaggagg

SEQ ID NO: 3307996 - DNA, 25 bp, Homo sapien
cagcacttcccgattgatctttgct

SEQ ID NO: 3307997 - DNA, 25 bp, Homo sapien
tcccgattgatctttgctatgtttt

SEQ ID NO: 3307998 - DNA, 25 bp, Homo sapien
cgccagccagtaccacgcggtcggg

SEQ ID NO: 3307999 - DNA, 25 bp, Homo sapien
gtcctccacactcacgccagccagt

SEQ ID NO: 3308000 - DNA, 25 bp, Homo sapien
gtgggacagaaacggtggaggccaa

SEQ ID NO: 3308001 - DNA, 25 bp, Homo sapien
ctgtgggacagaaacggtggaggcc

SEQ ID NO: 3308002 - DNA, 25 bp, Homo sapien
tgtgggacagaaacggtggaggcca

SEQ ID NO: 3308003 - DNA, 25 bp, Homo sapien
tgggacagaaacggtggaggccaac

SEQ ID NO: 3308004 - DNA, 25 bp, Homo sapien
cgttgaggtagagcctgtaagccgc

SEQ ID NO: 3308005 - DNA, 25 bp, Homo sapien
tgtggtgcctgttgagcacgttgag

SEQ ID NO: 3308006 - DNA, 25 bp, Homo sapien
tggtgcctgttgagcacgttgaggt

SEQ ID NO: 3308007 - DNA, 25 bp, Homo sapien
tgcctgttgagcacgttgaggtaga

SEQ ID NO: 3308008 - DNA, 25 bp, Homo sapien
gggtcaggctgcatgttcgggtcct

SEQ ID NO: 3308009 - DNA, 25 bp, Homo sapien
tcaggctgcatgttcgggtcctcca

SEQ ID NO: 3308010 - DNA, 25 bp, Homo sapien
aggctgcatgttcgggtcctccagc

SEQ ID NO: 3308011 - DNA, 25 bp, Homo sapien
gtcaggctgcatgttcgggtcctcc

SEQ ID NO: 3308012 - DNA, 25 bp, Homo sapien
cagaaccgcatcagccagtaagccg

SEQ ID NO: 3308013 - DNA, 25 bp, Homo sapien
atcagccagtaagccgaacaccgtg

SEQ ID NO: 3308014 - DNA, 25 bp, Homo sapien
gtaagccgaacaccgtgtccaagcc

SEQ ID NO: 3308015 - DNA, 25 bp, Homo sapien
accgcatcagccagtaagccgaaca

SEQ ID NO: 3308016 - DNA, 25 bp, Homo sapien
gcatacgtggtggtgtcacttgatg

SEQ ID NO: 3308017 - DNA, 25 bp, Homo sapien
cagcatacgtggtggtgtcacttga

SEQ ID NO: 3308018 - DNA, 25 bp, Homo sapien
atacgtggtggtgtcacttgatgtc

SEQ ID NO: 3308019 - DNA, 25 bp, Homo sapien
acacagcatacgtggtggtgtcact

SEQ ID NO: 3308020 - DNA, 25 bp, Homo sapien
acttattttgagaggccacgcgaaa

SEQ ID NO: 3308021 - DNA, 25 bp, Homo sapien
tgttgcttcatatcttgatcctgaa

SEQ ID NO: 3308022 - DNA, 25 bp, Homo sapien
gaggccacgcgaaacccgttatcca

SEQ ID NO: 3308023 - DNA, 25 bp, Homo sapien
ccgttatccaatgtggtttgaaact

SEQ ID NO: 3308024 - DNA, 25 bp, Homo sapien
gataggtgccaccactactaaactg

SEQ ID NO: 3308025 - DNA, 25 bp, Homo sapien
ggataggtgccaccactactaaact

SEQ ID NO: 3308026 - DNA, 25 bp, Homo sapien
ataggtgccaccactactaaactgt

SEQ ID NO: 3308027 - DNA, 25 bp, Homo sapien
aaacctcagccgctagcggccccga

SEQ ID NO: 3308028 - DNA, 25 bp, Homo sapien
cctcagccgctagcggccccgagaa

SEQ ID NO: 3308029 - DNA, 25 bp, Homo sapien
aacctcagccgctagcggccccgag

SEQ ID NO: 3308030 - DNA, 25 bp, Homo sapien
ccaaacctcagccgctagcggcccc

SEQ ID NO: 3308031 - DNA, 25 bp, Homo sapien
ctcagcgaccgcgtagccgccagca

SEQ ID NO: 3308032 - DNA, 25 bp, Homo sapien
ctgagcccctcagcgaccgcgtagc

SEQ ID NO: 3308033 - DNA, 25 bp, Homo sapien
agcgaccgcgtagccgccagcaccg

SEQ ID NO: 3308034 - DNA, 25 bp, Homo sapien
gcgtagccgccagcaccgtagccgc

SEQ ID NO: 3308035 - DNA, 25 bp, Homo sapien
tatatagtaggatattatgtatcac

SEQ ID NO: 3308036 - DNA, 25 bp, Homo sapien
gacagtggtttcttaggtttgctat

SEQ ID NO: 3308037 - DNA, 25 bp, Homo sapien
tattatgagtatttgggaaagtatc

SEQ ID NO: 3308038 - DNA, 25 bp, Homo sapien
gaaatacttaaatctgtagacagtg

SEQ ID NO: 3308039 - DNA, 25 bp, Homo sapien
tctgtaattgcaggattatctgcca

SEQ ID NO: 3308040 - DNA, 25 bp, Homo sapien
catctgtaattgcaggattatctgc

SEQ ID NO: 3308041 - DNA, 25 bp, Homo sapien
ttccatctgtaattgcaggattatc

SEQ ID NO: 3308042 - DNA, 25 bp, Homo sapien
ctgtaattgcaggattatctgccat

SEQ ID NO: 3308043 - DNA, 25 bp, Homo sapien
tctgcatttgctcttactttgccaa

SEQ ID NO: 3308044 - DNA, 25 bp, Homo sapien
tactttgccaattgctatgaaggaa

SEQ ID NO: 3308045 - DNA, 25 bp, Homo sapien
gcatttgctcttactttgccaattg

SEQ ID NO: 3308046 - DNA, 25 bp, Homo sapien
caattgctatgaaggaaaatcccat

SEQ ID NO: 3308047 - DNA, 25 bp, Homo sapien
tgctatggcaaaccaccattggcct

SEQ ID NO: 3308048 - DNA, 25 bp, Homo sapien
tttccaataggagagagcgttatgc

SEQ ID NO: 3308049 - DNA, 25 bp, Homo sapien
tatagtcctgcaagtctgcttacag

SEQ ID NO: 3308050 - DNA, 25 bp, Homo sapien
gaatcaccagaacactgcaagatgt

SEQ ID NO: 3308051 - DNA, 25 bp, Homo sapien
tcacagctaacaagaagatacatgc

SEQ ID NO: 3308052 - DNA, 25 bp, Homo sapien
gcatccagaaaccacaacaactgta

SEQ ID NO: 3308053 - DNA, 25 bp, Homo sapien
gccatccctggcacttagaatcaat

SEQ ID NO: 3308054 - DNA, 25 bp, Homo sapien
gatgtttagcctgctggatgctgct

SEQ ID NO: 3308055 - DNA, 25 bp, Homo sapien
tgatttgtttcctagtagacttctc

SEQ ID NO: 3308056 - DNA, 25 bp, Homo sapien
tctctccagatatgatattccagca

SEQ ID NO: 3308057 - DNA, 25 bp, Homo sapien
aaaaacatttgggatatactaggat

SEQ ID NO: 3308058 - DNA, 25 bp, Homo sapien
gaaaatgcgttgcaacagtgtaaca

SEQ ID NO: 3308059 - DNA, 25 bp, Homo sapien
catgattgaagcagtcagcatttgt

SEQ ID NO: 3308060 - DNA, 25 bp, Homo sapien
tcagcatttgtagtttcccctccaa

SEQ ID NO: 3308061 - DNA, 25 bp, Homo sapien
cagtcagcatttgtagtttcccctc

SEQ ID NO: 3308062 - DNA, 25 bp, Homo sapien
tccacaattgtgcatgattgaagca

SEQ ID NO: 3308063 - DNA, 25 bp, Homo sapien
tgctccgtttggaatctcctaatct

SEQ ID NO: 3308064 - DNA, 25 bp, Homo sapien
cccccctccctggtggaatctggct

SEQ ID NO: 3308065 - DNA, 25 bp, Homo sapien
tccgtttggaatctcctaatctttc

SEQ ID NO: 3308066 - DNA, 25 bp, Homo sapien
cgtttggaatctcctaatctttcct

SEQ ID NO: 3308067 - DNA, 25 bp, Homo sapien
tccttgcgtgtagtctttgagacgg

SEQ ID NO: 3308068 - DNA, 25 bp, Homo sapien
cggcagtgtcgccaaggactgattg

SEQ ID NO: 3308069 - DNA, 25 bp, Homo sapien
aaggactgattgtcgcgtgcctcgc

SEQ ID NO: 3308070 - DNA, 25 bp, Homo sapien
ctttatgatccttgcgtgtagtctt

SEQ ID NO: 3308071 - DNA, 25 bp, Homo sapien
ctggcgcggcggcgaaactgacccc

SEQ ID NO: 3308072 - DNA, 25 bp, Homo sapien
accagacgggccgggactggccgcg

SEQ ID NO: 3308073 - DNA, 25 bp, Homo sapien
agacgggccgggactggccgcggcg

SEQ ID NO: 3308074 - DNA, 25 bp, Homo sapien
acgggccgggactggccgcggcgag

SEQ ID NO: 3308075 - DNA, 25 bp, Homo sapien
gcaaccagacgggccgggactggcc

SEQ ID NO: 3308076 - DNA, 25 bp, Homo sapien
gagctgagcgggagacaggctcttg

SEQ ID NO: 3308077 - DNA, 25 bp, Homo sapien
ttgctaatccgtgagagctgagcgg

SEQ ID NO: 3308078 - DNA, 25 bp, Homo sapien
taatgcgacgatttctttttcggaa

SEQ ID NO: 3308079 - DNA, 25 bp, Homo sapien
ctcttgcagccttttctgcgttaat

SEQ ID NO: 3308080 - DNA, 25 bp, Homo sapien
gggcacaggacttttatctgtacgc

SEQ ID NO: 3308081 - DNA, 25 bp, Homo sapien
gcacaggacttttatctgtacgcat

SEQ ID NO: 3308082 - DNA, 25 bp, Homo sapien
ggcacaggacttttatctgtacgca

SEQ ID NO: 3308083 - DNA, 25 bp, Homo sapien
tcatacatcagtcgtcccacactct

SEQ ID NO: 3308084 - DNA, 25 bp, Homo sapien
tttcttcatacatcagtcgtcccac

SEQ ID NO: 3308085 - DNA, 25 bp, Homo sapien
ttcttcatacatcagtcgtcccaca

SEQ ID NO: 3308086 - DNA, 25 bp, Homo sapien
tacatcagtcgtcccacactcttta

SEQ ID NO: 3308087 - DNA, 25 bp, Homo sapien
ttattaatgtgggtgatgcttcatc

SEQ ID NO: 3308088 - DNA, 25 bp, Homo sapien
atgtgggtgatgcttcatccacaga

SEQ ID NO: 3308089 - DNA, 25 bp, Homo sapien
gatgtaagagggactgctcttctgt

SEQ ID NO: 3308090 - DNA, 25 bp, Homo sapien
agatgtaagagggactgctcttctg

SEQ ID NO: 3308091 - DNA, 25 bp, Homo sapien
tgcagccaattgagcttcatgatgt

SEQ ID NO: 3308092 - DNA, 25 bp, Homo sapien
ttcttgcagccaattgagcttcatg

SEQ ID NO: 3308093 - DNA, 25 bp, Homo sapien
catgatgtggcccttgattgaattt

SEQ ID NO: 3308094 - DNA, 25 bp, Homo sapien
gtggcccttgattgaatttccaatg

SEQ ID NO: 3308095 - DNA, 25 bp, Homo sapien
gtagcctgcattggtctcttcccct

SEQ ID NO: 3308096 - DNA, 25 bp, Homo sapien
aaatgattgtgtggtagcctgcatt

SEQ ID NO: 3308097 - DNA, 25 bp, Homo sapien
gattgtgtggtagcctgcattggtc

SEQ ID NO: 3308098 - DNA, 25 bp, Homo sapien
ttgtgtggtagcctgcattggtctc

SEQ ID NO: 3308099 - DNA, 25 bp, Homo sapien
agaatgcaaatcacaaagctcgttt

SEQ ID NO: 3308100 - DNA, 25 bp, Homo sapien
gttattctacatgagctgcttatct

SEQ ID NO: 3308101 - DNA, 25 bp, Homo sapien
ccaaaccaatatgcataaacactga

SEQ ID NO: 3308102 - DNA, 25 bp, Homo sapien
gtttcccttgccaagttattctaca

SEQ ID NO: 3308103 - DNA, 25 bp, Homo sapien
tctctgaaacaatggaaaaacgctt

SEQ ID NO: 3308104 - DNA, 25 bp, Homo sapien
cgcattctaggtgttccaggatggc

SEQ ID NO: 3308105 - DNA, 25 bp, Homo sapien
tattgtccgtaaagattcacgacgc

SEQ ID NO: 3308106 - DNA, 25 bp, Homo sapien
ttgaattttcagacggtattgtccg

SEQ ID NO: 3308107 - DNA, 25 bp, Homo sapien
tgggtttcggaggacacccaacatg

SEQ ID NO: 3308108 - DNA, 25 bp, Homo sapien
tgtccttgaacacgcttcaacttct

SEQ ID NO: 3308109 - DNA, 25 bp, Homo sapien
cccaacatgactttccgggaagcat

SEQ ID NO: 3308110 - DNA, 25 bp, Homo sapien
caacttctttgtgtagtggggcaaa

SEQ ID NO: 3308111 - DNA, 25 bp, Homo sapien
tttcgtgttacactacatttgttga

SEQ ID NO: 3308112 - DNA, 25 bp, Homo sapien
tgacagagatgtttcgtgttacact

SEQ ID NO: 3308113 - DNA, 25 bp, Homo sapien
taggcttcttcccatgacagagatg

SEQ ID NO: 3308114 - DNA, 25 bp, Homo sapien
ggcttcttcccatgacagagatgtt

SEQ ID NO: 3308115 - DNA, 25 bp, Homo sapien
gaaatgctcatgatgatgactacag

SEQ ID NO: 3308116 - DNA, 25 bp, Homo sapien
taaacttacaactggacaatactcc

SEQ ID NO: 3308117 - DNA, 25 bp, Homo sapien
tcgtagttgatatgacaggatgacc

SEQ ID NO: 3308118 - DNA, 25 bp, Homo sapien
tgacacataagccaccaacatgtgg

SEQ ID NO: 3308119 - DNA, 25 bp, Homo sapien
tacttctaagtctacagcctgttct

SEQ ID NO: 3308120 - DNA, 25 bp, Homo sapien
tagagttacttctaagtctacagcc

SEQ ID NO: 3308121 - DNA, 25 bp, Homo sapien
acaccttgcatagattggtggacca

SEQ ID NO: 3308122 - DNA, 25 bp, Homo sapien
gcctgttctattgcaacaccttgca

SEQ ID NO: 3308123 - DNA, 25 bp, Homo sapien
cttcgaagtaacaccaattccttga

SEQ ID NO: 3308124 - DNA, 25 bp, Homo sapien
ctgataaccttcgaagtaacaccaa

SEQ ID NO: 3308125 - DNA, 25 bp, Homo sapien
ccttcgaagtaacaccaattccttg

SEQ ID NO: 3308126 - DNA, 25 bp, Homo sapien
tgataaccttcgaagtaacaccaat

SEQ ID NO: 3308127 - DNA, 25 bp, Homo sapien
tgtagtcatgtagctccttaatgct

SEQ ID NO: 3308128 - DNA, 25 bp, Homo sapien
aatgctgtgacacgtctgtgattct

SEQ ID NO: 3308129 - DNA, 25 bp, Homo sapien
tccttaatgctgtgacacgtctgtg

SEQ ID NO: 3308130 - DNA, 25 bp, Homo sapien
acgtctgtgattctgtgcatcaatc

SEQ ID NO: 3308131 - DNA, 25 bp, Homo sapien
cttcacagtttcagggtactttaca

SEQ ID NO: 3308132 - DNA, 25 bp, Homo sapien
tcagcctctctaattgagggcacct

SEQ ID NO: 3308133 - DNA, 25 bp, Homo sapien
agggtactttacagcacggagaaga

SEQ ID NO: 3308134 - DNA, 25 bp, Homo sapien
agcttgctctgggatccttgttttc

SEQ ID NO: 3308135 - DNA, 25 bp, Homo sapien
tgcttagattcacggcatatttgaa

SEQ ID NO: 3308136 - DNA, 25 bp, Homo sapien
aaaatgtgcttgcttagattcacgg

SEQ ID NO: 3308137 - DNA, 25 bp, Homo sapien
gattcacggcatatttgaatatcta

SEQ ID NO: 3308138 - DNA, 25 bp, Homo sapien
tgccacttctataggaaaatgtgct

SEQ ID NO: 3308139 - DNA, 25 bp, Homo sapien
gttttattcacgtacaaccaagatg

SEQ ID NO: 3308140 - DNA, 25 bp, Homo sapien
tcttaaaacttccacagctatggct

SEQ ID NO: 3308141 - DNA, 25 bp, Homo sapien
acatgtgcccttttgcatttgaaca

SEQ ID NO: 3308142 - DNA, 25 bp, Homo sapien
aagtactgcatttgcttaacactca

SEQ ID NO: 3308143 - DNA, 25 bp, Homo sapien
agtcactgtgccaaaagctgccagg

SEQ ID NO: 3308144 - DNA, 25 bp, Homo sapien
tagcaaaattcggtagtgtattact

SEQ ID NO: 3308145 - DNA, 25 bp, Homo sapien
tcggtagtgtattacttagaagagt

SEQ ID NO: 3308146 - DNA, 25 bp, Homo sapien
caagcgattagcaaaattcggtagt

SEQ ID NO: 3308147 - DNA, 25 bp, Homo sapien
aattcggtagtgtattacttagaag

SEQ ID NO: 3308148 - DNA, 25 bp, Homo sapien
taacagggtttcactattttggcca

SEQ ID NO: 3308149 - DNA, 25 bp, Homo sapien
tggagcacagtggtgccatgttggc

SEQ ID NO: 3308150 - DNA, 25 bp, Homo sapien
gctggagcacagtggtgccatgttg

SEQ ID NO: 3308151 - DNA, 25 bp, Homo sapien
gagcacagtggtgccatgttggctc

SEQ ID NO: 3308152 - DNA, 25 bp, Homo sapien
ctgtagcgtataatgctgtctgatg

SEQ ID NO: 3308153 - DNA, 25 bp, Homo sapien
tttttgtcactgaatgtagtggcaa

SEQ ID NO: 3308154 - DNA, 25 bp, Homo sapien
tgatggaactttacccacagtaaac

SEQ ID NO: 3308155 - DNA, 25 bp, Homo sapien
tcaaaattacagtccttaaactctg

SEQ ID NO: 3308156 - DNA, 25 bp, Homo sapien
tgggctttggagacagtgaacctct

SEQ ID NO: 3308157 - DNA, 25 bp, Homo sapien
tattgcctagcacatgatgcattcc

SEQ ID NO: 3308158 - DNA, 25 bp, Homo sapien
tgtgacctcctagaagagaatgggc

SEQ ID NO: 3308159 - DNA, 25 bp, Homo sapien
caaactgggcttctagcacttttac

SEQ ID NO: 3308160 - DNA, 25 bp, Homo sapien
tgagaccaggaagacaagttggaac

SEQ ID NO: 3308161 - DNA, 25 bp, Homo sapien
gaaggtgcagtcaagtggtttcatc

SEQ ID NO: 3308162 - DNA, 25 bp, Homo sapien
aaattaccccaaatgttacagctga

SEQ ID NO: 3308163 - DNA, 25 bp, Homo sapien
ggagatctacttgtaagctcgctca

SEQ ID NO: 3308164 - DNA, 25 bp, Homo sapien
ttaagatttctggcgttctgtctgg

SEQ ID NO: 3308165 - DNA, 25 bp, Homo sapien
ctttgtagcaaagggaagggctaat

SEQ ID NO: 3308166 - DNA, 25 bp, Homo sapien
aatttatgtcaaaatcacagtttga

SEQ ID NO: 3308167 - DNA, 25 bp, Homo sapien
ggcgttctgtctgggtacagtgctt

SEQ ID NO: 3308168 - DNA, 25 bp, Homo sapien
tgtgtgcttcatattgcaactgcaa

SEQ ID NO: 3308169 - DNA, 25 bp, Homo sapien
gatattctttacatgacctggtgtg

SEQ ID NO: 3308170 - DNA, 25 bp, Homo sapien
catctattgtaaaccaaataacaga

SEQ ID NO: 3308171 - DNA, 25 bp, Homo sapien
tgttagcatcacttctactatttcc

SEQ ID NO: 3308172 - DNA, 25 bp, Homo sapien
gaaatatcactagtgaggaacagcc

SEQ ID NO: 3308173 - DNA, 25 bp, Homo sapien
tatgtacaaatttggagctcaggga

SEQ ID NO: 3308174 - DNA, 25 bp, Homo sapien
gagccgtctacataatactgccgag

SEQ ID NO: 3308175 - DNA, 25 bp, Homo sapien
tcaagagccactaacatacagagtt

SEQ ID NO: 3308176 - DNA, 25 bp, Homo sapien
gatctgcatgttgactgttgactac

SEQ ID NO: 3308177 - DNA, 25 bp, Homo sapien
ttttgcaagacattcgcagatctgc

SEQ ID NO: 3308178 - DNA, 25 bp, Homo sapien
caaaattatcgatgacagaaaaacc

SEQ ID NO: 3308179 - DNA, 25 bp, Homo sapien
tgttgactactgtttccttgaaagt

SEQ ID NO: 3308180 - DNA, 25 bp, Homo sapien
aaaaaattatatcccaaattgccag

SEQ ID NO: 3308181 - DNA, 25 bp, Homo sapien
gattcagccttattacttcccgcca

SEQ ID NO: 3308182 - DNA, 25 bp, Homo sapien
tacagtgctaacttccatgtgtgct

SEQ ID NO: 3308183 - DNA, 25 bp, Homo sapien
taaaacatctgagtacacaatctgc

SEQ ID NO: 3308184 - DNA, 25 bp, Homo sapien
tggagtctgtctcaagaggtttaga

SEQ ID NO: 3308185 - DNA, 25 bp, Homo sapien
tctgactccagtgtatatgcattgg

SEQ ID NO: 3308186 - DNA, 25 bp, Homo sapien
tgtgtttttcactagaggtccagga

SEQ ID NO: 3308187 - DNA, 25 bp, Homo sapien
ttttgcagtatgcaactgtccctga

SEQ ID NO: 3308188 - DNA, 25 bp, Homo sapien
tagttcacctggtaccatatctaag

SEQ ID NO: 3308189 - DNA, 25 bp, Homo sapien
cagattccgataacttcttgcttaa

SEQ ID NO: 3308190 - DNA, 25 bp, Homo sapien
gccttgctgcagattccgataactt

SEQ ID NO: 3308191 - DNA, 25 bp, Homo sapien
ttgcttaatttctatggtggtcttg

SEQ ID NO: 3308192 - DNA, 25 bp, Homo sapien
ggtggtcttgccttctaagtcccag

SEQ ID NO: 3308193 - DNA, 25 bp, Homo sapien
tgccatagttggtttcgtccctgtt

SEQ ID NO: 3308194 - DNA, 25 bp, Homo sapien
gtttcgtccctgttcaatgtccaca

SEQ ID NO: 3308195 - DNA, 25 bp, Homo sapien
catagttggtttcgtccctgttcaa

SEQ ID NO: 3308196 - DNA, 25 bp, Homo sapien
agggcatgctgtgggatgccatagt

SEQ ID NO: 3308197 - DNA, 25 bp, Homo sapien
tcatgacatggaaaactaactgctt

SEQ ID NO: 3308198 - DNA, 25 bp, Homo sapien
tgggtgacgatcactcctgagccaa

SEQ ID NO: 3308199 - DNA, 25 bp, Homo sapien
aatagttttaggcagcagcttccgc

SEQ ID NO: 3308200 - DNA, 25 bp, Homo sapien
tattggtggctgtggtaacaggctc

SEQ ID NO: 3308201 - DNA, 25 bp, Homo sapien
tgctcaatctctgttaggaggtgag

SEQ ID NO: 3308202 - DNA, 25 bp, Homo sapien
ctcaatctctgttaggaggtgagca

SEQ ID NO: 3308203 - DNA, 25 bp, Homo sapien
caatctctgttaggaggtgagcagg

SEQ ID NO: 3308204 - DNA, 25 bp, Homo sapien
atctctgttaggaggtgagcaggga

SEQ ID NO: 3308205 - DNA, 25 bp, Homo sapien
ctgatgcattagagaagttatccaa

SEQ ID NO: 3308206 - DNA, 25 bp, Homo sapien
tccttctctgtcatccgtatcactt

SEQ ID NO: 3308207 - DNA, 25 bp, Homo sapien
tctctgtcatccgtatcacttcata

SEQ ID NO: 3308208 - DNA, 25 bp, Homo sapien
tgtcatccgtatcacttcatacaaa

SEQ ID NO: 3308209 - DNA, 25 bp, Homo sapien
catccgtatcacttcatacaaatct

SEQ ID NO: 3308210 - DNA, 25 bp, Homo sapien
tctccagaagatcaaatttcatggt

SEQ ID NO: 3308211 - DNA, 25 bp, Homo sapien
ctccagaagatcaaatttcatggta

SEQ ID NO: 3308212 - DNA, 25 bp, Homo sapien
tccagaagatcaaatttcatggtaa

SEQ ID NO: 3308213 - DNA, 25 bp, Homo sapien
ttgcctgctgcatgttttgtaaata

SEQ ID NO: 3308214 - DNA, 25 bp, Homo sapien
tctttgcctgctgcatgttttgtaa

SEQ ID NO: 3308215 - DNA, 25 bp, Homo sapien
taatggtaaaaacttgatataatag

SEQ ID NO: 3308216 - DNA, 25 bp, Homo sapien
tttctttgcctgctgcatgttttgt

SEQ ID NO: 3308217 - DNA, 25 bp, Homo sapien
agatacagtcacagatgccttttct

SEQ ID NO: 3308218 - DNA, 25 bp, Homo sapien
ttttgcagatacagtcacagatgcc

SEQ ID NO: 3308219 - DNA, 25 bp, Homo sapien
tgcagatacagtcacagatgccttt

SEQ ID NO: 3308220 - DNA, 25 bp, Homo sapien
gatacagtcacagatgccttttctc

SEQ ID NO: 3308221 - DNA, 25 bp, Homo sapien
aaacagtttggggcctatgtgcctc

SEQ ID NO: 3308222 - DNA, 25 bp, Homo sapien
caaacagtttggggcctatgtgcct

SEQ ID NO: 3308223 - DNA, 25 bp, Homo sapien
acagtttggggcctatgtgcctcat

SEQ ID NO: 3308224 - DNA, 25 bp, Homo sapien
aacagtttggggcctatgtgcctca

SEQ ID NO: 3308225 - DNA, 25 bp, Homo sapien
tgacattggtcatagaaaaacacat

SEQ ID NO: 3308226 - DNA, 25 bp, Homo sapien
tactttgactgacattggtcataga

SEQ ID NO: 3308227 - DNA, 25 bp, Homo sapien
cttactttgactgacattggtcata

SEQ ID NO: 3308228 - DNA, 25 bp, Homo sapien
tgactgacattggtcatagaaaaac

SEQ ID NO: 3308229 - DNA, 25 bp, Homo sapien
tccgttcttcctccatgaatacatg

SEQ ID NO: 3308230 - DNA, 25 bp, Homo sapien
tccatgaatacatggctggccccgt

SEQ ID NO: 3308231 - DNA, 25 bp, Homo sapien
gttaacttccgttcttcctccatga

SEQ ID NO: 3308232 - DNA, 25 bp, Homo sapien
tggccccgtgcgtgttcagcatatt

SEQ ID NO: 3308233 - DNA, 25 bp, Homo sapien
tgtactttgaactggggcctgtcca

SEQ ID NO: 3308234 - DNA, 25 bp, Homo sapien
tcttgtactttgaactggggcctgt

SEQ ID NO: 3308235 - DNA, 25 bp, Homo sapien
cttgtactttgaactggggcctgtc

SEQ ID NO: 3308236 - DNA, 25 bp, Homo sapien
ttgtactttgaactggggcctgtcc

SEQ ID NO: 3308237 - DNA, 25 bp, Homo sapien
gcactgagcaaactgggttgccgtg

SEQ ID NO: 3308238 - DNA, 25 bp, Homo sapien
gagcaaactgggttgccgtggaaac

SEQ ID NO: 3308239 - DNA, 25 bp, Homo sapien
actgagcaaactgggttgccgtgga

SEQ ID NO: 3308240 - DNA, 25 bp, Homo sapien
gagcactgagcaaactgggttgccg

SEQ ID NO: 3308241 - DNA, 25 bp, Homo sapien
tgcagtgacatctttatctcttaga

SEQ ID NO: 3308242 - DNA, 25 bp, Homo sapien
ttgctgccttaatgatgccatcatc

SEQ ID NO: 3308243 - DNA, 25 bp, Homo sapien
cattaaggtcccacataggtttctg

SEQ ID NO: 3308244 - DNA, 25 bp, Homo sapien
taggtttctgtgtgttgcagtgaca

SEQ ID NO: 3308245 - DNA, 25 bp, Homo sapien
ttactttacagatgatagtaaagtc

SEQ ID NO: 3308246 - DNA, 25 bp, Homo sapien
tactttacagatgatagtaaagtca

SEQ ID NO: 3308247 - DNA, 25 bp, Homo sapien
tcctaccctaatctactttaatata

SEQ ID NO: 3308248 - DNA, 25 bp, Homo sapien
actgttttgggaattgcaaacctca

SEQ ID NO: 3308249 - DNA, 25 bp, Homo sapien
ctgttttgggaattgcaaacctcat

SEQ ID NO: 3308250 - DNA, 25 bp, Homo sapien
tttctgtaactgttttgggaattgc

SEQ ID NO: 3308251 - DNA, 25 bp, Homo sapien
tgtaactgttttgggaattgcaaac

SEQ ID NO: 3308252 - DNA, 25 bp, Homo sapien
catctaatgcccctgttctgattta

SEQ ID NO: 3308253 - DNA, 25 bp, Homo sapien
tcatctaatgcccctgttctgattt

SEQ ID NO: 3308254 - DNA, 25 bp, Homo sapien
ataaactgtgtggtatgctaaaatt

SEQ ID NO: 3308255 - DNA, 25 bp, Homo sapien
tataaactgtgtggtatgctaaaat

SEQ ID NO: 3308256 - DNA, 25 bp, Homo sapien
gaaagagagccttccgaggcagctg

SEQ ID NO: 3308257 - DNA, 25 bp, Homo sapien
agagagccttccgaggcagctggat

SEQ ID NO: 3308258 - DNA, 25 bp, Homo sapien
agccttccgaggcagctggatgaca

SEQ ID NO: 3308259 - DNA, 25 bp, Homo sapien
agagccttccgaggcagctggatga

SEQ ID NO: 3308260 - DNA, 25 bp, Homo sapien
agagttattgggccagagagcctgt

SEQ ID NO: 3308261 - DNA, 25 bp, Homo sapien
agctggggagagttattgggccaga

SEQ ID NO: 3308262 - DNA, 25 bp, Homo sapien
agttattgggccagagagcctgttc

SEQ ID NO: 3308263 - DNA, 25 bp, Homo sapien
gggagagttattgggccagagagcc

SEQ ID NO: 3308264 - DNA, 25 bp, Homo sapien
cttgcagaaaagtcatttccatatc

SEQ ID NO: 3308265 - DNA, 25 bp, Homo sapien
tgcagaaaagtcatttccatatctg

SEQ ID NO: 3308266 - DNA, 25 bp, Homo sapien
gcagaaaagtcatttccatatctgt

SEQ ID NO: 3308267 - DNA, 25 bp, Homo sapien
agaaaagtcatttccatatctgtca

SEQ ID NO: 3308268 - DNA, 25 bp, Homo sapien
tatgtaagttctcctacctagcaga

SEQ ID NO: 3308269 - DNA, 25 bp, Homo sapien
gaggagcctcctaaattatgttgac

SEQ ID NO: 3308270 - DNA, 25 bp, Homo sapien
aaatttgctgcgtgataccgatgta

SEQ ID NO: 3308271 - DNA, 25 bp, Homo sapien
tggatttccatagaacatagcgaga

SEQ ID NO: 3308272 - DNA, 25 bp, Homo sapien
ctcttcatctagtggtaactttttc

SEQ ID NO: 3308273 - DNA, 25 bp, Homo sapien
tcttcatctagtggtaactttttcc

SEQ ID NO: 3308274 - DNA, 25 bp, Homo sapien
agaatgacaccagtattggtggttt

SEQ ID NO: 3308275 - DNA, 25 bp, Homo sapien
ctgagaatgacaccagtattggtgg

SEQ ID NO: 3308276 - DNA, 25 bp, Homo sapien
agagactatgtcttcggagaatttt

SEQ ID NO: 3308277 - DNA, 25 bp, Homo sapien
agaagagactatgtcttcggagaat

SEQ ID NO: 3308278 - DNA, 25 bp, Homo sapien
gaagagactatgtcttcggagaatt

SEQ ID NO: 3308279 - DNA, 25 bp, Homo sapien
gagaagagactatgtcttcggagaa

SEQ ID NO: 3308280 - DNA, 25 bp, Homo sapien
tatgcattaccacacatagttgtca

SEQ ID NO: 3308281 - DNA, 25 bp, Homo sapien
gaacacttcaaatctactttattgg

SEQ ID NO: 3308282 - DNA, 25 bp, Homo sapien
tggctgcatcaaattaattagcata

SEQ ID NO: 3308283 - DNA, 25 bp, Homo sapien
tatatgtcatggaatggctgcatca

SEQ ID NO: 3308284 - DNA, 25 bp, Homo sapien
cctccttaatataggtcccctgagc

SEQ ID NO: 3308285 - DNA, 25 bp, Homo sapien
ttcctccttaatataggtcccctga

SEQ ID NO: 3308286 - DNA, 25 bp, Homo sapien
ccttaatataggtcccctgagctac

SEQ ID NO: 3308287 - DNA, 25 bp, Homo sapien
tccttaatataggtcccctgagcta

SEQ ID NO: 3308288 - DNA, 25 bp, Homo sapien
tgacaactttcaatcagtcgtgggc

SEQ ID NO: 3308289 - DNA, 25 bp, Homo sapien
taattctcaggcactcgtagcccac

SEQ ID NO: 3308290 - DNA, 25 bp, Homo sapien
tcagtcgtgggctattcccagaacc

SEQ ID NO: 3308291 - DNA, 25 bp, Homo sapien
actatgcattcaggtagttcaggcc

SEQ ID NO: 3308292 - DNA, 25 bp, Homo sapien
gtcctgtatgccagttatgccccat

SEQ ID NO: 3308293 - DNA, 25 bp, Homo sapien
ttggaataaactgtggctgaaagcc

SEQ ID NO: 3308294 - DNA, 25 bp, Homo sapien
gggtcttcagaaggtcctgtatgcc

SEQ ID NO: 3308295 - DNA, 25 bp, Homo sapien
tgaaagccccatgggccgcatgaat

SEQ ID NO: 3308296 - DNA, 25 bp, Homo sapien
catttccgtgagtattagggtcttc

SEQ ID NO: 3308297 - DNA, 25 bp, Homo sapien
tgattgaacgtcttcaagaacaagc

SEQ ID NO: 3308298 - DNA, 25 bp, Homo sapien
agttcacattcatttccgtgagtat

SEQ ID NO: 3308299 - DNA, 25 bp, Homo sapien
ttttctgagtgttgatcctagctga

SEQ ID NO: 3308300 - DNA, 25 bp, Homo sapien
ggttctaaaggagaggatatagttc

SEQ ID NO: 3308301 - DNA, 25 bp, Homo sapien
gttctaaaggagaggatatagttca

SEQ ID NO: 3308302 - DNA, 25 bp, Homo sapien
ttctaaaggagaggatatagttcat

SEQ ID NO: 3308303 - DNA, 25 bp, Homo sapien
agtatgtttcaaccattccttctat

SEQ ID NO: 3308304 - DNA, 25 bp, Homo sapien
aagtatgtttcaaccattccttcta

SEQ ID NO: 3308305 - DNA, 25 bp, Homo sapien
taaagtatgtttcaaccattccttc

SEQ ID NO: 3308306 - DNA, 25 bp, Homo sapien
aaagtatgtttcaaccattccttct

SEQ ID NO: 3308307 - DNA, 25 bp, Homo sapien
cagcatgagatgagatatccacagg

SEQ ID NO: 3308308 - DNA, 25 bp, Homo sapien
catgagatgagatatccacaggcag

SEQ ID NO: 3308309 - DNA, 25 bp, Homo sapien
tgagatgagatatccacaggcagcc

SEQ ID NO: 3308310 - DNA, 25 bp, Homo sapien
agatgagatatccacaggcagccac

SEQ ID NO: 3308311 - DNA, 25 bp, Homo sapien
gactcgaagcattagaaagactcag

SEQ ID NO: 3308312 - DNA, 25 bp, Homo sapien
tctctgactagtagaggaggaaatc

SEQ ID NO: 3308313 - DNA, 25 bp, Homo sapien
gaaaggcgctaggagagccagacca

SEQ ID NO: 3308314 - DNA, 25 bp, Homo sapien
ggaggaaatcagagagactcgaagc

SEQ ID NO: 3308315 - DNA, 25 bp, Homo sapien
acaatggagaatgtccactgagagc

SEQ ID NO: 3308316 - DNA, 25 bp, Homo sapien
aatggagaatgtccactgagagcca

SEQ ID NO: 3308317 - DNA, 25 bp, Homo sapien
ggagaatgtccactgagagccatcg

SEQ ID NO: 3308318 - DNA, 25 bp, Homo sapien
tggagaatgtccactgagagccatc

SEQ ID NO: 3308319 - DNA, 25 bp, Homo sapien
tggcacaaagatttgctaagaaagc

SEQ ID NO: 3308320 - DNA, 25 bp, Homo sapien
gattaacatttctgtaatggcacaa

SEQ ID NO: 3308321 - DNA, 25 bp, Homo sapien
tctgtaatggcacaaagatttgcta

SEQ ID NO: 3308322 - DNA, 25 bp, Homo sapien
catttctgtaatggcacaaagattt

SEQ ID NO: 3308323 - DNA, 25 bp, Homo sapien
agttgaaatcccccccatagagctc

SEQ ID NO: 3308324 - DNA, 25 bp, Homo sapien
aatgcatccctagctacattcttct

SEQ ID NO: 3308325 - DNA, 25 bp, Homo sapien
aaccagaaattggtggtttcatcct

SEQ ID NO: 3308326 - DNA, 25 bp, Homo sapien
gattaaccagaaattggtggtttca

SEQ ID NO: 3308327 - DNA, 25 bp, Homo sapien
tcagaggcaaaggctaccattgact

SEQ ID NO: 3308328 - DNA, 25 bp, Homo sapien
gccttagatgtctgatcaatttcag

SEQ ID NO: 3308329 - DNA, 25 bp, Homo sapien
cttagatgtctgatcaatttcagag

SEQ ID NO: 3308330 - DNA, 25 bp, Homo sapien
aggcaaaggctaccattgactgttc

SEQ ID NO: 3308331 - DNA, 25 bp, Homo sapien
cccagaggtaaagattggtatagca

SEQ ID NO: 3308332 - DNA, 25 bp, Homo sapien
tcactcaataatgagtcgtttcctg

SEQ ID NO: 3308333 - DNA, 25 bp, Homo sapien
tcgtttcctgaatacccagaggtaa

SEQ ID NO: 3308334 - DNA, 25 bp, Homo sapien
caataatgagtcgtttcctgaatac

SEQ ID NO: 3308335 - DNA, 25 bp, Homo sapien
tggcaatttactcccagaagccctg

SEQ ID NO: 3308336 - DNA, 25 bp, Homo sapien
ccattggaatccactggcaatttac

SEQ ID NO: 3308337 - DNA, 25 bp, Homo sapien
gcaatttactcccagaagccctgtc

SEQ ID NO: 3308338 - DNA, 25 bp, Homo sapien
ctggacctctcacctccattggaat

SEQ ID NO: 3308339 - DNA, 25 bp, Homo sapien
taagccagtgatcttcaaggcatgg

SEQ ID NO: 3308340 - DNA, 25 bp, Homo sapien
tagtgaggctgtccaaaatgcttat

SEQ ID NO: 3308341 - DNA, 25 bp, Homo sapien
ccagatatcaagattcacggagtct

SEQ ID NO: 3308342 - DNA, 25 bp, Homo sapien
gctattaagaattgcctagtgaggc

SEQ ID NO: 3308343 - DNA, 25 bp, Homo sapien
taactcgaggaaatgtcgttgagag

SEQ ID NO: 3308344 - DNA, 25 bp, Homo sapien
ctcgaggaaatgtcgttgagagaca

SEQ ID NO: 3308345 - DNA, 25 bp, Homo sapien
ctaactcgaggaaatgtcgttgaga

SEQ ID NO: 3308346 - DNA, 25 bp, Homo sapien
actcgaggaaatgtcgttgagagac

SEQ ID NO: 3308347 - DNA, 25 bp, Homo sapien
tcacaccattgcacttcagcctggg

SEQ ID NO: 3308348 - DNA, 25 bp, Homo sapien
ggcaagataattgcttgaactcggg

SEQ ID NO: 3308349 - DNA, 25 bp, Homo sapien
aggcggagactgcagtgagtcgaga

SEQ ID NO: 3308350 - DNA, 25 bp, Homo sapien
gcctgggcaacaagagcaaaactcc

SEQ ID NO: 3308351 - DNA, 25 bp, Homo sapien
aggagacccgtctcccatgcagaca

SEQ ID NO: 3308352 - DNA, 25 bp, Homo sapien
tgatattaagagactttaaaccaac

SEQ ID NO: 3308353 - DNA, 25 bp, Homo sapien
ccctggtctctgatattaagagact

SEQ ID NO: 3308354 - DNA, 25 bp, Homo sapien
caggagacccgtctcccatgcagac

SEQ ID NO: 3308355 - DNA, 25 bp, Homo sapien
taatgaacatatcttaagagtctta

SEQ ID NO: 3308356 - DNA, 25 bp, Homo sapien
tgaacatatcttaagagtcttatct

SEQ ID NO: 3308357 - DNA, 25 bp, Homo sapien
ttgtttaatgaacatatcttaagag

SEQ ID NO: 3308358 - DNA, 25 bp, Homo sapien
aagagtcttatctgcttcaggcact

SEQ ID NO: 3308359 - DNA, 25 bp, Homo sapien
atatggtaaattttaagaggtgatt

SEQ ID NO: 3308360 - DNA, 25 bp, Homo sapien
ttaagaggtgatttttccaaataga

SEQ ID NO: 3308361 - DNA, 25 bp, Homo sapien
atgttatatggtaaattttaagagg

SEQ ID NO: 3308362 - DNA, 25 bp, Homo sapien
taagaggtgatttttccaaatagaa

SEQ ID NO: 3308363 - DNA, 25 bp, Homo sapien
gatatcctatcagctgtctcacagt

SEQ ID NO: 3308364 - DNA, 25 bp, Homo sapien
caggcaaaggctattctatgtcaca

SEQ ID NO: 3308365 - DNA, 25 bp, Homo sapien
tgcaaagagcataggaagatagcct

SEQ ID NO: 3308366 - DNA, 25 bp, Homo sapien
gtggcccttgccgtaaactacatag

SEQ ID NO: 3308367 - DNA, 25 bp, Homo sapien
gagaaacactgaccgatagcaccta

SEQ ID NO: 3308368 - DNA, 25 bp, Homo sapien
cactgagcacagttaactggactga

SEQ ID NO: 3308369 - DNA, 25 bp, Homo sapien
ggtagtcttcgcatcacattgtgag

SEQ ID NO: 3308370 - DNA, 25 bp, Homo sapien
tagggtctagggtaccacagacact

SEQ ID NO: 3308371 - DNA, 25 bp, Homo sapien
caagcgtagatgtaggaggaaaaaa

SEQ ID NO: 3308372 - DNA, 25 bp, Homo sapien
ctgtgcaccaaaggctcaagcgtag

SEQ ID NO: 3308373 - DNA, 25 bp, Homo sapien
agaactcaaactcaaaccactagtt

SEQ ID NO: 3308374 - DNA, 25 bp, Homo sapien
aaactgatccctctacttccagtca

SEQ ID NO: 3308375 - DNA, 25 bp, Homo sapien
cattatattgccttcagattctgag

SEQ ID NO: 3308376 - DNA, 25 bp, Homo sapien
tatattgccttcagattctgagtag

SEQ ID NO: 3308377 - DNA, 25 bp, Homo sapien
ttgccttcagattctgagtagttct

SEQ ID NO: 3308378 - DNA, 25 bp, Homo sapien
tattgccttcagattctgagtagtt

SEQ ID NO: 3308379 - DNA, 25 bp, Homo sapien
agcaagcatttgaacggaggcctta

SEQ ID NO: 3308380 - DNA, 25 bp, Homo sapien
ccttaatggacttaagggcagagcc

SEQ ID NO: 3308381 - DNA, 25 bp, Homo sapien
catggctcagaggataagtttttct

SEQ ID NO: 3308382 - DNA, 25 bp, Homo sapien
ttgtaatcagttagcagagcatggc

SEQ ID NO: 3308383 - DNA, 25 bp, Homo sapien
catccagtttcaacttgtcttttat

SEQ ID NO: 3308384 - DNA, 25 bp, Homo sapien
agaaagctaaatcttcagtcagttt

SEQ ID NO: 3308385 - DNA, 25 bp, Homo sapien
gctcttccataggtatgtcagttgt

SEQ ID NO: 3308386 - DNA, 25 bp, Homo sapien
cttccataggtatgtcagttgtttt

SEQ ID NO: 3308387 - DNA, 25 bp, Homo sapien
tttgcttggttagttacattgattt

SEQ ID NO: 3308388 - DNA, 25 bp, Homo sapien
ggtagtatgttcctctcagagcacc

SEQ ID NO: 3308389 - DNA, 25 bp, Homo sapien
aaactctctgggtagtatgttcctc

SEQ ID NO: 3308390 - DNA, 25 bp, Homo sapien
tcctctcagagcaccaactagtgac

SEQ ID NO: 3308391 - DNA, 25 bp, Homo sapien
tcgaccacccgtttaactgtcttca

SEQ ID NO: 3308392 - DNA, 25 bp, Homo sapien
cacccgtttaactgtcttcagagtt

SEQ ID NO: 3308393 - DNA, 25 bp, Homo sapien
taactgtcttcagagttacttcact

SEQ ID NO: 3308394 - DNA, 25 bp, Homo sapien
agggcatcaacgtcgaccacccgtt

SEQ ID NO: 3308395 - DNA, 25 bp, Homo sapien
tttcggtatgtgctgaacttctgaa

SEQ ID NO: 3308396 - DNA, 25 bp, Homo sapien
aagggctggacaataatttcggtat

SEQ ID NO: 3308397 - DNA, 25 bp, Homo sapien
ggtatgtgctgaacttctgaagtaa

SEQ ID NO: 3308398 - DNA, 25 bp, Homo sapien
ctggacaataatttcggtatgtgct

SEQ ID NO: 3308399 - DNA, 25 bp, Homo sapien
tgtcttttgtagagccagatggtgg

SEQ ID NO: 3308400 - DNA, 25 bp, Homo sapien
cagatggtggcgctgtggtatcatt

SEQ ID NO: 3308401 - DNA, 25 bp, Homo sapien
tggtgacaattacagagtcacactg

SEQ ID NO: 3308402 - DNA, 25 bp, Homo sapien
cacactgagagtccccttcttgttt

SEQ ID NO: 3308403 - DNA, 25 bp, Homo sapien
ggatgacccataacctctaccagca

SEQ ID NO: 3308404 - DNA, 25 bp, Homo sapien
catagcctgcaccaatcatcacaaa

SEQ ID NO: 3308405 - DNA, 25 bp, Homo sapien
taccagcacaagaactgctgatctg

SEQ ID NO: 3308406 - DNA, 25 bp, Homo sapien
tattgatttcaggacccattagatc

SEQ ID NO: 3308407 - DNA, 25 bp, Homo sapien
tctcacccttacacaagtgaattgt

SEQ ID NO: 3308408 - DNA, 25 bp, Homo sapien
gatgaagtacatgccttcctggata

SEQ ID NO: 3308409 - DNA, 25 bp, Homo sapien
aaagaagatgaagtacatgccttcc

SEQ ID NO: 3308410 - DNA, 25 bp, Homo sapien
tctagtttcagatggaaattctgat

SEQ ID NO: 3308411 - DNA, 25 bp, Homo sapien
taccactggacctggatatcagcca

SEQ ID NO: 3308412 - DNA, 25 bp, Homo sapien
tgacaaagaagtagtccggaggacc

SEQ ID NO: 3308413 - DNA, 25 bp, Homo sapien
ggagtcaccagccattccaggaaag

SEQ ID NO: 3308414 - DNA, 25 bp, Homo sapien
ctactgccatagagacattccacca

SEQ ID NO: 3308415 - DNA, 25 bp, Homo sapien
aagattggttaaaggagacactgac

SEQ ID NO: 3308416 - DNA, 25 bp, Homo sapien
caagaagattggttaaaggagacac

SEQ ID NO: 3308417 - DNA, 25 bp, Homo sapien
taaagcaagaagattggttaaagga

SEQ ID NO: 3308418 - DNA, 25 bp, Homo sapien
tggttaaaggagacactgaccccat

SEQ ID NO: 3308419 - DNA, 25 bp, Homo sapien
ccacttgaccaagcttagcctggcc

SEQ ID NO: 3308420 - DNA, 25 bp, Homo sapien
attggctgagaagacacgcgaccgg

SEQ ID NO: 3308421 - DNA, 25 bp, Homo sapien
agcgccttcagcaaccggagaagca

SEQ ID NO: 3308422 - DNA, 25 bp, Homo sapien
aaactctttgattggctgctcgcac

SEQ ID NO: 3308423 - DNA, 25 bp, Homo sapien
tgagtggcgcgtgccgctttttaaa

SEQ ID NO: 3308424 - DNA, 25 bp, Homo sapien
tcttttaggaaactccgcgcacgca

SEQ ID NO: 3308425 - DNA, 25 bp, Homo sapien
tttaatttagcaaagccaactgccc

SEQ ID NO: 3308426 - DNA, 25 bp, Homo sapien
tacccagtatgtgcatccgatcgcg

SEQ ID NO: 3308427 - DNA, 25 bp, Homo sapien
tccgatcgcgagaacgttggcgtct

SEQ ID NO: 3308428 - DNA, 25 bp, Homo sapien
gccaaaatgataaccagtgagtgtt

SEQ ID NO: 3308429 - DNA, 25 bp, Homo sapien
tccaacataagtgactcagtgggag

SEQ ID NO: 3308430 - DNA, 25 bp, Homo sapien
taaccagtgagtgtttatgaaaagc

SEQ ID NO: 3308431 - DNA, 25 bp, Homo sapien
attccaggaggtacaacacattcac

SEQ ID NO: 3308432 - DNA, 25 bp, Homo sapien
acacatgttttattcacctggtcat

SEQ ID NO: 3308433 - DNA, 25 bp, Homo sapien
ctggtactttgtagctgcggattca

SEQ ID NO: 3308434 - DNA, 25 bp, Homo sapien
tattcacctggtcattggagctgtt

SEQ ID NO: 3308435 - DNA, 25 bp, Homo sapien
tcattcagtgacaacacacatgttt

SEQ ID NO: 3308436 - DNA, 25 bp, Homo sapien
atgacatttgctcttgcttaataat

SEQ ID NO: 3308437 - DNA, 25 bp, Homo sapien
gcttaataataatcggttaacagca

SEQ ID NO: 3308438 - DNA, 25 bp, Homo sapien
caagggcaggtgttctcaaggatgt

SEQ ID NO: 3308439 - DNA, 25 bp, Homo sapien
ttgctcttgcttaataataatcggt

SEQ ID NO: 3308440 - DNA, 25 bp, Homo sapien
ctccagaatggaagccttctacatt

SEQ ID NO: 3308441 - DNA, 25 bp, Homo sapien
cctccagaatggaagccttctacat

SEQ ID NO: 3308442 - DNA, 25 bp, Homo sapien
cagaatggaagccttctacattcat

SEQ ID NO: 3308443 - DNA, 25 bp, Homo sapien
tccagaatggaagccttctacattc

SEQ ID NO: 3308444 - DNA, 25 bp, Homo sapien
agggacttctattttactagataga

SEQ ID NO: 3308445 - DNA, 25 bp, Homo sapien
acttgagaatttagggacttctatt

SEQ ID NO: 3308446 - DNA, 25 bp, Homo sapien
tagggacttctattttactagatag

SEQ ID NO: 3308447 - DNA, 25 bp, Homo sapien
tgagaatttagggacttctatttta

SEQ ID NO: 3308448 - DNA, 25 bp, Homo sapien
ctcgagtggctgtaatcatcagaag

SEQ ID NO: 3308449 - DNA, 25 bp, Homo sapien
caccctcgagtggctgtaatcatca

SEQ ID NO: 3308450 - DNA, 25 bp, Homo sapien
ccctcgagtggctgtaatcatcaga

SEQ ID NO: 3308451 - DNA, 25 bp, Homo sapien
cctcgagtggctgtaatcatcagaa

SEQ ID NO: 3308452 - DNA, 25 bp, Homo sapien
tgtgtgttgctcagttttcgtgcca

SEQ ID NO: 3308453 - DNA, 25 bp, Homo sapien
tcgtgccagcgttgtctgaacattg

SEQ ID NO: 3308454 - DNA, 25 bp, Homo sapien
ctactgctatctgtgggatagtggg

SEQ ID NO: 3308455 - DNA, 25 bp, Homo sapien
tgcatctactgctatctgtgggata

SEQ ID NO: 3308456 - DNA, 25 bp, Homo sapien
aatagttttgacagcaagtatgcat

SEQ ID NO: 3308457 - DNA, 25 bp, Homo sapien
atctacatagcacaacccaaatagt

SEQ ID NO: 3308458 - DNA, 25 bp, Homo sapien
gtggataatgtgacacgcgctttac

SEQ ID NO: 3308459 - DNA, 25 bp, Homo sapien
tcttcctttagcgacagtagcttta

SEQ ID NO: 3308460 - DNA, 25 bp, Homo sapien
tctgaatttttcatgacggctttgg

SEQ ID NO: 3308461 - DNA, 25 bp, Homo sapien
tggtaacctgtagcctggagttgaa

SEQ ID NO: 3308462 - DNA, 25 bp, Homo sapien
tcatgacggctttggtaacctgtag

SEQ ID NO: 3308463 - DNA, 25 bp, Homo sapien
aacctgtagcctggagttgaagctc

SEQ ID NO: 3308464 - DNA, 25 bp, Homo sapien
tgatgtgggacacccattgtcgtgc

SEQ ID NO: 3308465 - DNA, 25 bp, Homo sapien
atgtgggacacccattgtcgtgcat

SEQ ID NO: 3308466 - DNA, 25 bp, Homo sapien
gctgatgtgggacacccattgtcgt

SEQ ID NO: 3308467 - DNA, 25 bp, Homo sapien
ctgatgtgggacacccattgtcgtg

SEQ ID NO: 3308468 - DNA, 25 bp, Homo sapien
agctgccgctcgtgtaagtaatacc

SEQ ID NO: 3308469 - DNA, 25 bp, Homo sapien
tcagaatatagttagtcaatgtgtt

SEQ ID NO: 3308470 - DNA, 25 bp, Homo sapien
actggcttcagaatatagttagtca

SEQ ID NO: 3308471 - DNA, 25 bp, Homo sapien
gtaataccctcatacacagtggcat

SEQ ID NO: 3308472 - DNA, 25 bp, Homo sapien
taagaatcgctacactcttgagtca

SEQ ID NO: 3308473 - DNA, 25 bp, Homo sapien
taaatacgggacttctgagtgacag

SEQ ID NO: 3308474 - DNA, 25 bp, Homo sapien
ccaattagtggatcctgaatcaaca

SEQ ID NO: 3308475 - DNA, 25 bp, Homo sapien
gctgtccaggtgataccaataagcc

SEQ ID NO: 3308476 - DNA, 25 bp, Homo sapien
gaacatctggtatgtgatgctccat

SEQ ID NO: 3308477 - DNA, 25 bp, Homo sapien
tgatccacttgcaaacctagaacat

SEQ ID NO: 3308478 - DNA, 25 bp, Homo sapien
cacttgcaaacctagaacatctggt

SEQ ID NO: 3308479 - DNA, 25 bp, Homo sapien
acctagaacatctggtatgtgatgc

SEQ ID NO: 3308480 - DNA, 25 bp, Homo sapien
ggagtaacgaatcttgattgccagg

SEQ ID NO: 3308481 - DNA, 25 bp, Homo sapien
gaaaatcagcaagtagagactggag

SEQ ID NO: 3308482 - DNA, 25 bp, Homo sapien
gctgcaagtgggcaatagcagaccc

SEQ ID NO: 3308483 - DNA, 25 bp, Homo sapien
tgcaagtgggcaatagcagacccct

SEQ ID NO: 3308484 - DNA, 25 bp, Homo sapien
tatgtaagcctataattgaaaagga

SEQ ID NO: 3308485 - DNA, 25 bp, Homo sapien
gtattcctaggaccattcatacgga

SEQ ID NO: 3308486 - DNA, 25 bp, Homo sapien
gaggttggagtatggatctcatcac

SEQ ID NO: 3308487 - DNA, 25 bp, Homo sapien
catgagtcagagtatatttttgctc

SEQ ID NO: 3308488 - DNA, 25 bp, Homo sapien
tgagcagccatatgtacaagaaggc

SEQ ID NO: 3308489 - DNA, 25 bp, Homo sapien
aaagaagccagtaactgagcagcca

SEQ ID NO: 3308490 - DNA, 25 bp, Homo sapien
cattgcgtactatgcacaaagtgaa

SEQ ID NO: 3308491 - DNA, 25 bp, Homo sapien
cagtcatgagtgagcagtccaagcc

SEQ ID NO: 3308492 - DNA, 25 bp, Homo sapien
acactgcccatgacttgactgtctg

SEQ ID NO: 3308493 - DNA, 25 bp, Homo sapien
ttttacactgcccatgacttgactg

SEQ ID NO: 3308494 - DNA, 25 bp, Homo sapien
cagcaggcacgttgttaacagtttt

SEQ ID NO: 3308495 - DNA, 25 bp, Homo sapien
tccacagcaggcacgttgttaacag

SEQ ID NO: 3308496 - DNA, 25 bp, Homo sapien
tgggtaacagggcagaggttggaac

SEQ ID NO: 3308497 - DNA, 25 bp, Homo sapien
gggctcagaaaaagacagaaaaata

SEQ ID NO: 3308498 - DNA, 25 bp, Homo sapien
gaactgggtaacagggcagaggttg

SEQ ID NO: 3308499 - DNA, 25 bp, Homo sapien
ttggagggctcagaaaaagacagaa

SEQ ID NO: 3308500 - DNA, 25 bp, Homo sapien
ctcagatggatatgaggaacttctt

SEQ ID NO: 3308501 - DNA, 25 bp, Homo sapien
gatggatatgaggaacttcttggga

SEQ ID NO: 3308502 - DNA, 25 bp, Homo sapien
gtctcagatggatatgaggaacttc

SEQ ID NO: 3308503 - DNA, 25 bp, Homo sapien
cagatggatatgaggaacttcttgg

SEQ ID NO: 3308504 - DNA, 25 bp, Homo sapien
gggttttgcattgtcccacacatag

SEQ ID NO: 3308505 - DNA, 25 bp, Homo sapien
gaacaatgtccctctatacaaggtg

SEQ ID NO: 3308506 - DNA, 25 bp, Homo sapien
caatgtccctctatacaaggtgggt

SEQ ID NO: 3308507 - DNA, 25 bp, Homo sapien
cacacatagtctgctgatggccgtg

SEQ ID NO: 3308508 - DNA, 25 bp, Homo sapien
ctcttatttcctgggtatttggcat

SEQ ID NO: 3308509 - DNA, 25 bp, Homo sapien
caaaagcactgaagtaccggtgaat

SEQ ID NO: 3308510 - DNA, 25 bp, Homo sapien
ttctccatagacagaatctatattt

SEQ ID NO: 3308511 - DNA, 25 bp, Homo sapien
taccggtgaataacaaaggatagaa

SEQ ID NO: 3308512 - DNA, 25 bp, Homo sapien
aaatacagctacttccacggatctc

SEQ ID NO: 3308513 - DNA, 25 bp, Homo sapien
tacagctacttccacggatctctga

SEQ ID NO: 3308514 - DNA, 25 bp, Homo sapien
ctggaggactgaaaatacagctact

SEQ ID NO: 3308515 - DNA, 25 bp, Homo sapien
gctacttccacggatctctgacatc

SEQ ID NO: 3308516 - DNA, 25 bp, Homo sapien
tggagacaaggctacatctggtagc

SEQ ID NO: 3308517 - DNA, 25 bp, Homo sapien
cagagtggagacaaggctacatctg

SEQ ID NO: 3308518 - DNA, 25 bp, Homo sapien
ttgagagctgttaccacaacctcca

SEQ ID NO: 3308519 - DNA, 25 bp, Homo sapien
ctttttccttgagagctgttaccac

SEQ ID NO: 3308520 - DNA, 25 bp, Homo sapien
atagtctccaccaagtgacctcttg

SEQ ID NO: 3308521 - DNA, 25 bp, Homo sapien
catagtctccaccaagtgacctctt

SEQ ID NO: 3308522 - DNA, 25 bp, Homo sapien
gtctccaccaagtgacctcttgctc

SEQ ID NO: 3308523 - DNA, 25 bp, Homo sapien
tagtctccaccaagtgacctcttgc

SEQ ID NO: 3308524 - DNA, 25 bp, Homo sapien
gctcctgtagtcatgctcaccatct

SEQ ID NO: 3308525 - DNA, 25 bp, Homo sapien
gcagtgcaatgaattagtccaggtc

SEQ ID NO: 3308526 - DNA, 25 bp, Homo sapien
caggtcttagccctctgacagagaa

SEQ ID NO: 3308527 - DNA, 25 bp, Homo sapien
gtttgtccccttgtgacaccgaaga

SEQ ID NO: 3308528 - DNA, 25 bp, Homo sapien
tacagtttatcattgactccacgga

SEQ ID NO: 3308529 - DNA, 25 bp, Homo sapien
gaaatttggggaaatgcggtgaatg

SEQ ID NO: 3308530 - DNA, 25 bp, Homo sapien
aaatttggggaaatgcggtgaatgt

SEQ ID NO: 3308531 - DNA, 25 bp, Homo sapien
cgccatcaataaatcaagcgtgatc

SEQ ID NO: 3308532 - DNA, 25 bp, Homo sapien
tggaaccgccatcaataaatcaagc

SEQ ID NO: 3308533 - DNA, 25 bp, Homo sapien
tttggttacctgaatggatttccgc

SEQ ID NO: 3308534 - DNA, 25 bp, Homo sapien
cagttttaaggctagttttgctaat

SEQ ID NO: 3308535 - DNA, 25 bp, Homo sapien
tgagttaccttttactcttcaaaca

SEQ ID NO: 3308536 - DNA, 25 bp, Homo sapien
actgtaccagcttgccattcattgc

SEQ ID NO: 3308537 - DNA, 25 bp, Homo sapien
taaatgaactggataggtctctaca

SEQ ID NO: 3308538 - DNA, 25 bp, Homo sapien
ctgataagtgaccttgggtatcatt

SEQ ID NO: 3308539 - DNA, 25 bp, Homo sapien
aatgaactggataggtctctacaag

SEQ ID NO: 3308540 - DNA, 25 bp, Homo sapien
gaccttgggtatcattttatctctg

SEQ ID NO: 3308541 - DNA, 25 bp, Homo sapien
tcagttacattgactgccagcaatt

SEQ ID NO: 3308542 - DNA, 25 bp, Homo sapien
ctgaggacttcatttattattctcc

SEQ ID NO: 3308543 - DNA, 25 bp, Homo sapien
tcatttattattctcctcaatgcct

SEQ ID NO: 3308544 - DNA, 25 bp, Homo sapien
tcttgctgctcagttacattgactg

SEQ ID NO: 3308545 - DNA, 25 bp, Homo sapien
cctcctctctagaattgattggcca

SEQ ID NO: 3308546 - DNA, 25 bp, Homo sapien
aattcactagctacttcaacaactg

SEQ ID NO: 3308547 - DNA, 25 bp, Homo sapien
gagagagtcttccatacgggttaca

SEQ ID NO: 3308548 - DNA, 25 bp, Homo sapien
cacactaagcggtaaaattcactag

SEQ ID NO: 3308549 - DNA, 25 bp, Homo sapien
gtagtgcactatgatgatcgtacgt

SEQ ID NO: 3308550 - DNA, 25 bp, Homo sapien
tacgtatgaacagccattgcactcc

SEQ ID NO: 3308551 - DNA, 25 bp, Homo sapien
tgatgatcgtacgtatgaacagcca

SEQ ID NO: 3308552 - DNA, 25 bp, Homo sapien
gcactatgatgatcgtacgtatgaa

SEQ ID NO: 3308553 - DNA, 25 bp, Homo sapien
tctatatattactttgggaattctg

SEQ ID NO: 3308554 - DNA, 25 bp, Homo sapien
ctgtccattttcaagatattgattc

SEQ ID NO: 3308555 - DNA, 25 bp, Homo sapien
catgagcatgaaattttttatgagg

SEQ ID NO: 3308556 - DNA, 25 bp, Homo sapien
tgagcatgaaattttttatgaggcc

SEQ ID NO: 3308557 - DNA, 25 bp, Homo sapien
tcagtaggagttctgtcaccaaaac

SEQ ID NO: 3308558 - DNA, 25 bp, Homo sapien
tcatcctagagtgggagcttatttc

SEQ ID NO: 3308559 - DNA, 25 bp, Homo sapien
aggagttctgtcaccaaaaccaggg

SEQ ID NO: 3308560 - DNA, 25 bp, Homo sapien
gggggctgctcctcaatgatgcatc

SEQ ID NO: 3308561 - DNA, 25 bp, Homo sapien
ttttgatttatcatcccagttgaaa

SEQ ID NO: 3308562 - DNA, 25 bp, Homo sapien
cttttgatttatcatcccagttgaa

SEQ ID NO: 3308563 - DNA, 25 bp, Homo sapien
tatcatactcagagtgactatatgt

SEQ ID NO: 3308564 - DNA, 25 bp, Homo sapien
cagagtgactatatgtttctgattc

SEQ ID NO: 3308565 - DNA, 25 bp, Homo sapien
atactcagagtgactatatgtttct

SEQ ID NO: 3308566 - DNA, 25 bp, Homo sapien
tatgtttctgattccaaacatccct

SEQ ID NO: 3308567 - DNA, 25 bp, Homo sapien
cataatattgcaggccctgggtacg

SEQ ID NO: 3308568 - DNA, 25 bp, Homo sapien
agtattgacccataatattgcaggc

SEQ ID NO: 3308569 - DNA, 25 bp, Homo sapien
caggccctgggtacgtcccttagag

SEQ ID NO: 3308570 - DNA, 25 bp, Homo sapien
ttctgtttcatgaagtattgaccca

SEQ ID NO: 3308571 - DNA, 25 bp, Homo sapien
gatttaccaagcgtattttctgtcc

SEQ ID NO: 3308572 - DNA, 25 bp, Homo sapien
tagaagactgatttaccaagcgtat

SEQ ID NO: 3308573 - DNA, 25 bp, Homo sapien
cagcttttagaagactgatttacca

SEQ ID NO: 3308574 - DNA, 25 bp, Homo sapien
gcgtattttctgtccaagctttctt

SEQ ID NO: 3308575 - DNA, 25 bp, Homo sapien
tcctattctttaaagccgcagtggg

SEQ ID NO: 3308576 - DNA, 25 bp, Homo sapien
ctgtggccagatattgaaggaaacc

SEQ ID NO: 3308577 - DNA, 25 bp, Homo sapien
gaattagttgggacaaactggcacc

SEQ ID NO: 3308578 - DNA, 25 bp, Homo sapien
tgaactgggctggaatctaataacc

SEQ ID NO: 3308579 - DNA, 25 bp, Homo sapien
agcgttctttatccaccttggccgt

SEQ ID NO: 3308580 - DNA, 25 bp, Homo sapien
tagcgttctttatccaccttggccg

SEQ ID NO: 3308581 - DNA, 25 bp, Homo sapien
agagcacttcgtggaaaattctgca

SEQ ID NO: 3308582 - DNA, 25 bp, Homo sapien
cacctctcagagcacttcgtggaaa

SEQ ID NO: 3308583 - DNA, 25 bp, Homo sapien
cagagcacttcgtggaaaattctgc

SEQ ID NO: 3308584 - DNA, 25 bp, Homo sapien
ttccacctctcagagcacttcgtgg

SEQ ID NO: 3308585 - DNA, 25 bp, Homo sapien
ctgcccaaagaaggcataagcagag

SEQ ID NO: 3308586 - DNA, 25 bp, Homo sapien
cccaaagaaggcataagcagagatc

SEQ ID NO: 3308587 - DNA, 25 bp, Homo sapien
taagcagagatcttgccctttggtt

SEQ ID NO: 3308588 - DNA, 25 bp, Homo sapien
aagcagagatcttgccctttggttt

SEQ ID NO: 3308589 - DNA, 25 bp, Homo sapien
cttcaagagaacagacacgtacaac

SEQ ID NO: 3308590 - DNA, 25 bp, Homo sapien
ttcaagagaacagacacgtacaaca

SEQ ID NO: 3308591 - DNA, 25 bp, Homo sapien
tcaagagaacagacacgtacaacat

SEQ ID NO: 3308592 - DNA, 25 bp, Homo sapien
gaaacaaatgtagacatgagggcta

SEQ ID NO: 3308593 - DNA, 25 bp, Homo sapien
ccatgtaaaagaattcaagaggttg

SEQ ID NO: 3308594 - DNA, 25 bp, Homo sapien
taatttagtatatcacacactccag

SEQ ID NO: 3308595 - DNA, 25 bp, Homo sapien
caagtgatccccttcagttctagaa

SEQ ID NO: 3308596 - DNA, 25 bp, Homo sapien
gacagattagatcacaatatgctaa

SEQ ID NO: 3308597 - DNA, 25 bp, Homo sapien
tcagctatgaaggaaattttacact

SEQ ID NO: 3308598 - DNA, 25 bp, Homo sapien
aattggtacagcttaagtgaatttg

SEQ ID NO: 3308599 - DNA, 25 bp, Homo sapien
tgtgatttatgtctgctgtaatttt

SEQ ID NO: 3308600 - DNA, 25 bp, Homo sapien
cttccatctgtaggagtgtctaaaa

SEQ ID NO: 3308601 - DNA, 25 bp, Homo sapien
tggccaggctgatcggctgatctcg

SEQ ID NO: 3308602 - DNA, 25 bp, Homo sapien
gaatttaaggatatgtttgtcgtaa

SEQ ID NO: 3308603 - DNA, 25 bp, Homo sapien
aactatatttagtaaccaatggaca

SEQ ID NO: 3308604 - DNA, 25 bp, Homo sapien
tgaaagaacagacgcctcctagtcg

SEQ ID NO: 3308605 - DNA, 25 bp, Homo sapien
aagaatatgttcaaaactcagaaat

SEQ ID NO: 3308606 - DNA, 25 bp, Homo sapien
tatgttcaaaactcagaaatgaaag

SEQ ID NO: 3308607 - DNA, 25 bp, Homo sapien
aatgaaagaacagacgcctcctagt

SEQ ID NO: 3308608 - DNA, 25 bp, Homo sapien
cttggaagcaaggatgtcagtgaac

SEQ ID NO: 3308609 - DNA, 25 bp, Homo sapien
gctattttcaagtctgtggatgagc

SEQ ID NO: 3308610 - DNA, 25 bp, Homo sapien
gaactgacatccctaagagttgatg

SEQ ID NO: 3308611 - DNA, 25 bp, Homo sapien
aatacagcgatttaacagttgtgac

SEQ ID NO: 3308612 - DNA, 25 bp, Homo sapien
gattatctgccactgtgacacaaag

SEQ ID NO: 3308613 - DNA, 25 bp, Homo sapien
cactgaagcaaactagcccttgaaa

SEQ ID NO: 3308614 - DNA, 25 bp, Homo sapien
tagggcaaacattggataaaccagg

SEQ ID NO: 3308615 - DNA, 25 bp, Homo sapien
gatacgatccagtgtattaccgtgt

SEQ ID NO: 3308616 - DNA, 25 bp, Homo sapien
gaccatggggtttatgaacatttat

SEQ ID NO: 3308617 - DNA, 25 bp, Homo sapien
gatgaccatggggtttatgaacatt

SEQ ID NO: 3308618 - DNA, 25 bp, Homo sapien
tctccaaatactcacacgtgaaatt

SEQ ID NO: 3308619 - DNA, 25 bp, Homo sapien
caaatactcacacgtgaaatttcaa

SEQ ID NO: 3308620 - DNA, 25 bp, Homo sapien
ttgtctttcactggataatgtgtgt

SEQ ID NO: 3308621 - DNA, 25 bp, Homo sapien
gattagttggtgattgtttgtaaca

SEQ ID NO: 3308622 - DNA, 25 bp, Homo sapien
tgtaacaaatatgctaatgctttag

SEQ ID NO: 3308623 - DNA, 25 bp, Homo sapien
ttacatgtgccttatttgacaatgc

SEQ ID NO: 3308624 - DNA, 25 bp, Homo sapien
aactcacggcttaaccccagtcttg

SEQ ID NO: 3308625 - DNA, 25 bp, Homo sapien
taagatgctaggtagtacgaccctc

SEQ ID NO: 3308626 - DNA, 25 bp, Homo sapien
gatattaaagactgagaactcacgg

SEQ ID NO: 3308627 - DNA, 25 bp, Homo sapien
ttacagggctaaaaggagtcttcat

SEQ ID NO: 3308628 - DNA, 25 bp, Homo sapien
catgttagaacctgtgcaaagcaag

SEQ ID NO: 3308629 - DNA, 25 bp, Homo sapien
caaagggatttatcactgggccaca

SEQ ID NO: 3308630 - DNA, 25 bp, Homo sapien
tagagccttttgagccgtgtcagat

SEQ ID NO: 3308631 - DNA, 25 bp, Homo sapien
tgtgaactggagagctactagcaaa

SEQ ID NO: 3308632 - DNA, 25 bp, Homo sapien
ggagcatgtggattatctggcaggc

SEQ ID NO: 3308633 - DNA, 25 bp, Homo sapien
gatgagagagatgcccccgagaaaa

SEQ ID NO: 3308634 - DNA, 25 bp, Homo sapien
gtagctgtcttatctgatgagagag

SEQ ID NO: 3308635 - DNA, 25 bp, Homo sapien
aagtgaaaatcttagtggagctggg

SEQ ID NO: 3308636 - DNA, 25 bp, Homo sapien
gttttatccagttagcgacggcagg

SEQ ID NO: 3308637 - DNA, 25 bp, Homo sapien
tcttccgtaaagtcaccagccttgg

SEQ ID NO: 3308638 - DNA, 25 bp, Homo sapien
gatggttgtctaacaggtcaggctt

SEQ ID NO: 3308639 - DNA, 25 bp, Homo sapien
caaaagtgtggtactgcaaatctcc

SEQ ID NO: 3308640 - DNA, 25 bp, Homo sapien
ttcatttgaacatagaaagtgtagc

SEQ ID NO: 3308641 - DNA, 25 bp, Homo sapien
gtgtagctgtatcagcattccaaaa

SEQ ID NO: 3308642 - DNA, 25 bp, Homo sapien
catagaaagtgtagctgtatcagca

SEQ ID NO: 3308643 - DNA, 25 bp, Homo sapien
tgtatcagcattccaaaattgaaat

SEQ ID NO: 3308644 - DNA, 25 bp, Homo sapien
attctctcccccctaaatatgtgtc

SEQ ID NO: 3308645 - DNA, 25 bp, Homo sapien
gagttaccaataagccattctctcc

SEQ ID NO: 3308646 - DNA, 25 bp, Homo sapien
ccaagtcttgcataagatgaggcgc

SEQ ID NO: 3308647 - DNA, 25 bp, Homo sapien
ggcgcattatacgtgagcagctcat

SEQ ID NO: 3308648 - DNA, 25 bp, Homo sapien
tccacaatagcatcaacatgacatt

SEQ ID NO: 3308649 - DNA, 25 bp, Homo sapien
gtccacaatagcatcaacatgacat

SEQ ID NO: 3308650 - DNA, 25 bp, Homo sapien
gacatgaaatcatccagagtgtcca

SEQ ID NO: 3308651 - DNA, 25 bp, Homo sapien
gtaagtccatcaacttccaaaatgg

SEQ ID NO: 3308652 - DNA, 25 bp, Homo sapien
gctctggtgaagagtaagtccatca

SEQ ID NO: 3308653 - DNA, 25 bp, Homo sapien
cttgctattgctaggctctggtgaa

SEQ ID NO: 3308654 - DNA, 25 bp, Homo sapien
tgtttttggtcaaatatcttgctat

SEQ ID NO: 3308655 - DNA, 25 bp, Homo sapien
tagcttgagcctggtattaaactga

SEQ ID NO: 3308656 - DNA, 25 bp, Homo sapien
tgtgcacttcagctatcccagtgac

SEQ ID NO: 3308657 - DNA, 25 bp, Homo sapien
cagttctacttgctagggtcgtgaa

SEQ ID NO: 3308658 - DNA, 25 bp, Homo sapien
taggaaatttgcttgatcacacagc

SEQ ID NO: 3308659 - DNA, 25 bp, Homo sapien
aaaacaaaaggttctgaaagcatat

SEQ ID NO: 3308660 - DNA, 25 bp, Homo sapien
ttcctacatttattatttttgctac

SEQ ID NO: 3308661 - DNA, 25 bp, Homo sapien
caaaaggttctgaaagcatattttt

SEQ ID NO: 3308662 - DNA, 25 bp, Homo sapien
tcctacatttattatttttgctact

SEQ ID NO: 3308663 - DNA, 25 bp, Homo sapien
gatttgatttcaggccagtcagctt

SEQ ID NO: 3308664 - DNA, 25 bp, Homo sapien
catactgtatgtccaaataagcaaa

SEQ ID NO: 3308665 - DNA, 25 bp, Homo sapien
gctctccccctcatattaaaataag

SEQ ID NO: 3308666 - DNA, 25 bp, Homo sapien
tatgtaacgaataatttctgctctc

SEQ ID NO: 3308667 - DNA, 25 bp, Homo sapien
ttgcccttgtgacacagctcagagt

SEQ ID NO: 3308668 - DNA, 25 bp, Homo sapien
tttgcccttgtgacacagctcagag

SEQ ID NO: 3308669 - DNA, 25 bp, Homo sapien
tgtttgcccttgtgacacagctcag

SEQ ID NO: 3308670 - DNA, 25 bp, Homo sapien
ttgtttgcccttgtgacacagctca

SEQ ID NO: 3308671 - DNA, 25 bp, Homo sapien
cacaccccatctccagacctctgca

SEQ ID NO: 3308672 - DNA, 25 bp, Homo sapien
taattcaatcccagaggcaatttta

SEQ ID NO: 3308673 - DNA, 25 bp, Homo sapien
tttcatctgattaattcaatcccag

SEQ ID NO: 3308674 - DNA, 25 bp, Homo sapien
gaaaactaactaatacaatgctgat

SEQ ID NO: 3308675 - DNA, 25 bp, Homo sapien
tatattattccgtatactgctgtaa

SEQ ID NO: 3308676 - DNA, 25 bp, Homo sapien
ctatgtggagttcagtaatatgact

SEQ ID NO: 3308677 - DNA, 25 bp, Homo sapien
tgtggagttcagtaatatgacttac

SEQ ID NO: 3308678 - DNA, 25 bp, Homo sapien
atgtggagttcagtaatatgactta

SEQ ID NO: 3308679 - DNA, 25 bp, Homo sapien
tatgtggagttcagtaatatgactt

SEQ ID NO: 3308680 - DNA, 25 bp, Homo sapien
gttcaagcctgcgaagactgctggt

SEQ ID NO: 3308681 - DNA, 25 bp, Homo sapien
tcttagataaaacatgcatgccagg

SEQ ID NO: 3308682 - DNA, 25 bp, Homo sapien
taagtgataatcacgagccagtgag

SEQ ID NO: 3308683 - DNA, 25 bp, Homo sapien
cagtgagaggacaggcaacttcctt

SEQ ID NO: 3308684 - DNA, 25 bp, Homo sapien
aacagaggctgctctagaggcatcc

SEQ ID NO: 3308685 - DNA, 25 bp, Homo sapien
ctctgcagctcctgtagcattctca

SEQ ID NO: 3308686 - DNA, 25 bp, Homo sapien
ccagtacccaacagagccacttctt

SEQ ID NO: 3308687 - DNA, 25 bp, Homo sapien
tcatcacaacgctgcctgagattcc

SEQ ID NO: 3308688 - DNA, 25 bp, Homo sapien
ccgttgctgcccaccaacaaatccc

SEQ ID NO: 3308689 - DNA, 25 bp, Homo sapien
tgctgcccaccaacaaatcccttgg

SEQ ID NO: 3308690 - DNA, 25 bp, Homo sapien
gctgcccaccaacaaatcccttggt

SEQ ID NO: 3308691 - DNA, 25 bp, Homo sapien
gttgctgcccaccaacaaatccctt

SEQ ID NO: 3308692 - DNA, 25 bp, Homo sapien
tatagaatgcattcgcctctggctc

SEQ ID NO: 3308693 - DNA, 25 bp, Homo sapien
cacggaaggtaagagaggacttcca

SEQ ID NO: 3308694 - DNA, 25 bp, Homo sapien
ccaaggtttctgtcaactcggattt

SEQ ID NO: 3308695 - DNA, 25 bp, Homo sapien
gctcggataatgaaccacggaaggt

SEQ ID NO: 3308696 - DNA, 25 bp, Homo sapien
tcatcctgatacacgctttcttggg

SEQ ID NO: 3308697 - DNA, 25 bp, Homo sapien
ctggcgcaataccacggagcacaga

SEQ ID NO: 3308698 - DNA, 25 bp, Homo sapien
tactgtcggcactcaaccatgaact

SEQ ID NO: 3308699 - DNA, 25 bp, Homo sapien
catgaactatgacttggcatctgta

SEQ ID NO: 3308700 - DNA, 25 bp, Homo sapien
cactactggcatccatataaggaat

SEQ ID NO: 3308701 - DNA, 25 bp, Homo sapien
tacaggacttggtcatggcagccca

SEQ ID NO: 3308702 - DNA, 25 bp, Homo sapien
gctcttcgtaattccgtgcaaccat

SEQ ID NO: 3308703 - DNA, 25 bp, Homo sapien
tgaggagcacactactggcatccat

SEQ ID NO: 3308704 - DNA, 25 bp, Homo sapien
gaggacgaggctgtccggcccctcc

SEQ ID NO: 3308705 - DNA, 25 bp, Homo sapien
aagtgaggacgaggctgtccggccc

SEQ ID NO: 3308706 - DNA, 25 bp, Homo sapien
gacgaggctgtccggcccctccctg

SEQ ID NO: 3308707 - DNA, 25 bp, Homo sapien
gtgaggacgaggctgtccggcccct

SEQ ID NO: 3308708 - DNA, 25 bp, Homo sapien
tcaaaatccgctaagactactccca

SEQ ID NO: 3308709 - DNA, 25 bp, Homo sapien
tcccaccgaaactcggtagcgcagt

SEQ ID NO: 3308710 - DNA, 25 bp, Homo sapien
tagcgcagttgtctttccgcagctg

SEQ ID NO: 3308711 - DNA, 25 bp, Homo sapien
ttagacctttgccaggtagcgctca

SEQ ID NO: 3308712 - DNA, 25 bp, Homo sapien
gcctctcggatctccggtgggagaa

SEQ ID NO: 3308713 - DNA, 25 bp, Homo sapien
tgcgccgaacgcgagaagggaagcc

SEQ ID NO: 3308714 - DNA, 25 bp, Homo sapien
tcagcccttgtctgaggcggaggca

SEQ ID NO: 3308715 - DNA, 25 bp, Homo sapien
aagaaccggccgctgtgcgccgaac

SEQ ID NO: 3308716 - DNA, 25 bp, Homo sapien
aaaagggcagcgctggagtccgcat

SEQ ID NO: 3308717 - DNA, 25 bp, Homo sapien
cggaaaagggcagcgctggagtccg

SEQ ID NO: 3308718 - DNA, 25 bp, Homo sapien
aaggagcgcccggaaaagggcagcg

SEQ ID NO: 3308719 - DNA, 25 bp, Homo sapien
agcgcccggaaaagggcagcgctgg

SEQ ID NO: 3308720 - DNA, 25 bp, Homo sapien
ggagagtcatcacacgcacacttaa

SEQ ID NO: 3308721 - DNA, 25 bp, Homo sapien
caaaaagcaggttgtgactaacatc

SEQ ID NO: 3308722 - DNA, 25 bp, Homo sapien
caaaagaaagcaccgaagcactggt

SEQ ID NO: 3308723 - DNA, 25 bp, Homo sapien
tattgcctatcgttgactatctgaa

SEQ ID NO: 3308724 - DNA, 25 bp, Homo sapien
cacatgccaccacacccggctaatt

SEQ ID NO: 3308725 - DNA, 25 bp, Homo sapien
caggcacatgccaccacacccggct

SEQ ID NO: 3308726 - DNA, 25 bp, Homo sapien
ctctcgggtttaagtaattgtcctg

SEQ ID NO: 3308727 - DNA, 25 bp, Homo sapien
taagcctccccagtagccgggagta

SEQ ID NO: 3308728 - DNA, 25 bp, Homo sapien
tcttgggtggcctttgacaatagct

SEQ ID NO: 3308729 - DNA, 25 bp, Homo sapien
ttttagagatctgggtggagttact

SEQ ID NO: 3308730 - DNA, 25 bp, Homo sapien
gctcttcgtagagccagccctgcta

SEQ ID NO: 3308731 - DNA, 25 bp, Homo sapien
ggagttactattggcagttatccat

SEQ ID NO: 3308732 - DNA, 25 bp, Homo sapien
acacaccaaaaccaccatttcagta

SEQ ID NO: 3308733 - DNA, 25 bp, Homo sapien
aaacacaccaaaaccaccatttcag

SEQ ID NO: 3308734 - DNA, 25 bp, Homo sapien
acaccaaaaccaccatttcagtact

SEQ ID NO: 3308735 - DNA, 25 bp, Homo sapien
caccaaaaccaccatttcagtactt

SEQ ID NO: 3308736 - DNA, 25 bp, Homo sapien
gcatattatatacatccgaaaagtc

SEQ ID NO: 3308737 - DNA, 25 bp, Homo sapien
cgaaaagtcgctgtgtttctccttg

SEQ ID NO: 3308738 - DNA, 25 bp, Homo sapien
gacagtgtcagcctgcctgtactcc

SEQ ID NO: 3308739 - DNA, 25 bp, Homo sapien
cttgacagtgtcagcctgcctgtac

SEQ ID NO: 3308740 - DNA, 25 bp, Homo sapien
tttttgctatcgttgttttttgtga

SEQ ID NO: 3308741 - DNA, 25 bp, Homo sapien
ttttgctatcgttgttttttgtgac

SEQ ID NO: 3308742 - DNA, 25 bp, Homo sapien
cacagtttttttgctatcgttgttt

SEQ ID NO: 3308743 - DNA, 25 bp, Homo sapien
tttgctatcgttgttttttgtgaca

SEQ ID NO: 3308744 - DNA, 25 bp, Homo sapien
cagtgactggtgtactccgatttga

SEQ ID NO: 3308745 - DNA, 25 bp, Homo sapien
tggtgtactccgatttgaaataact

SEQ ID NO: 3308746 - DNA, 25 bp, Homo sapien
taattcagtgactggtgtactccga

SEQ ID NO: 3308747 - DNA, 25 bp, Homo sapien
cacctaaactgcttaaactgctgag

SEQ ID NO: 3308748 - DNA, 25 bp, Homo sapien
tgtaatgagtttgcatagtctgaat

SEQ ID NO: 3308749 - DNA, 25 bp, Homo sapien
gtttgcatagtctgaattttataac

SEQ ID NO: 3308750 - DNA, 25 bp, Homo sapien
tctaaaccaagtttcttgtaatgag

SEQ ID NO: 3308751 - DNA, 25 bp, Homo sapien
gggtcctcactgagactttctaaac

SEQ ID NO: 3308752 - DNA, 25 bp, Homo sapien
gagcacaggaacacatggtccacca

SEQ ID NO: 3308753 - DNA, 25 bp, Homo sapien
gaggatgaatcagcagacagtgtgc

SEQ ID NO: 3308754 - DNA, 25 bp, Homo sapien
aatctcagcattacccagagcacag

SEQ ID NO: 3308755 - DNA, 25 bp, Homo sapien
tggtatggactttgctcaactggga

SEQ ID NO: 3308756 - DNA, 25 bp, Homo sapien
tgtgtttacgtctgtgtatgatagc

SEQ ID NO: 3308757 - DNA, 25 bp, Homo sapien
gatttgcagtgtggcagttcatcag

SEQ ID NO: 3308758 - DNA, 25 bp, Homo sapien
tttgatttgcagtgtggcagttcat

SEQ ID NO: 3308759 - DNA, 25 bp, Homo sapien
tgcagtgtggcagttcatcagatgt

SEQ ID NO: 3308760 - DNA, 25 bp, Homo sapien
tagacgcctttgaggatttgtgaaa

SEQ ID NO: 3308761 - DNA, 25 bp, Homo sapien
gtgaaaagtcgtggtcccactcaat

SEQ ID NO: 3308762 - DNA, 25 bp, Homo sapien
gtggtcccactcaatggaatataca

SEQ ID NO: 3308763 - DNA, 25 bp, Homo sapien
ttttggttatagacgcctttgagga

SEQ ID NO: 3308764 - DNA, 25 bp, Homo sapien
ttatcttagtcttccataaattatc

SEQ ID NO: 3308765 - DNA, 25 bp, Homo sapien
attatgaatctttaagagggaaata

SEQ ID NO: 3308766 - DNA, 25 bp, Homo sapien
tatacgaggtagttatggagatttt

SEQ ID NO: 3308767 - DNA, 25 bp, Homo sapien
aaattatcatgcatattatgaatct

SEQ ID NO: 3308768 - DNA, 25 bp, Homo sapien
cctgactcacaagtgttttgcctaa

SEQ ID NO: 3308769 - DNA, 25 bp, Homo sapien
gtgatttgatgtcccgtggctggcc

SEQ ID NO: 3308770 - DNA, 25 bp, Homo sapien
agtgttttgcctaaccctgtgcttt

SEQ ID NO: 3308771 - DNA, 25 bp, Homo sapien
tttgatgtcccgtggctggccatgc

SEQ ID NO: 3308772 - DNA, 25 bp, Homo sapien
cttgagttgaaaaagccatctaagg

SEQ ID NO: 3308773 - DNA, 25 bp, Homo sapien
ttgagttgaaaaagccatctaaggt

SEQ ID NO: 3308774 - DNA, 25 bp, Homo sapien
tgagttgaaaaagccatctaaggtg

SEQ ID NO: 3308775 - DNA, 25 bp, Homo sapien
cttagtgtgtcgtgtgaatgatcct

SEQ ID NO: 3308776 - DNA, 25 bp, Homo sapien
tgtgtcgtgtgaatgatcctgcagc

SEQ ID NO: 3308777 - DNA, 25 bp, Homo sapien
tcatccctccttgccagattacaga

SEQ ID NO: 3308778 - DNA, 25 bp, Homo sapien
tcgtgtgaatgatcctgcagctcat

SEQ ID NO: 3308779 - DNA, 25 bp, Homo sapien
tccttgtacctaggattcagtgaag

SEQ ID NO: 3308780 - DNA, 25 bp, Homo sapien
gttgttgtccttgtacctaggattc

SEQ ID NO: 3308781 - DNA, 25 bp, Homo sapien
ttgtacctaggattcagtgaagggc

SEQ ID NO: 3308782 - DNA, 25 bp, Homo sapien
tgttgtccttgtacctaggattcag

SEQ ID NO: 3308783 - DNA, 25 bp, Homo sapien
tattagtgtcgggtttatttggcag

SEQ ID NO: 3308784 - DNA, 25 bp, Homo sapien
gtcgggtttatttggcagtctgttc

SEQ ID NO: 3308785 - DNA, 25 bp, Homo sapien
tctttgaagtcagtattagtgtcgg

SEQ ID NO: 3308786 - DNA, 25 bp, Homo sapien
tccacctcgttacaaatagtatact

SEQ ID NO: 3308787 - DNA, 25 bp, Homo sapien
gatagacttggcctatgtatggcta

SEQ ID NO: 3308788 - DNA, 25 bp, Homo sapien
taataaggctgtgttgaatgctgga

SEQ ID NO: 3308789 - DNA, 25 bp, Homo sapien
gctaaagtagccacatttgatcact

SEQ ID NO: 3308790 - DNA, 25 bp, Homo sapien
gaatgctggaatacttatcccctta

SEQ ID NO: 3308791 - DNA, 25 bp, Homo sapien
tctgccctaataccctcttattttc

SEQ ID NO: 3308792 - DNA, 25 bp, Homo sapien
ttattttcttcctttcttccatcca

SEQ ID NO: 3308793 - DNA, 25 bp, Homo sapien
tattttcttcctttcttccatccat

SEQ ID NO: 3308794 - DNA, 25 bp, Homo sapien
gctctgccctaataccctcttattt

SEQ ID NO: 3308795 - DNA, 25 bp, Homo sapien
tggtgatacttcatctctattgaaa

SEQ ID NO: 3308796 - DNA, 25 bp, Homo sapien
atggtgatacttcatctctattgaa

SEQ ID NO: 3308797 - DNA, 25 bp, Homo sapien
cagaattttgtcagaccggtagtcc

SEQ ID NO: 3308798 - DNA, 25 bp, Homo sapien
gccaagttggctttcataatcccag

SEQ ID NO: 3308799 - DNA, 25 bp, Homo sapien
aagtcagtgttcgtaatatgccaag

SEQ ID NO: 3308800 - DNA, 25 bp, Homo sapien
tattcaccacgttccttagaggcag

SEQ ID NO: 3308801 - DNA, 25 bp, Homo sapien
tgctattctagtttatgtatttcag

SEQ ID NO: 3308802 - DNA, 25 bp, Homo sapien
ggatatttagacatcttcactttcc

SEQ ID NO: 3308803 - DNA, 25 bp, Homo sapien
acattgcaggtttcagaagtccaag

SEQ ID NO: 3308804 - DNA, 25 bp, Homo sapien
tatatagtataaagcatatgacagg

SEQ ID NO: 3308805 - DNA, 25 bp, Homo sapien
cgctcagggtatgtagaggacttac

SEQ ID NO: 3308806 - DNA, 25 bp, Homo sapien
ggtatgtagaggacttacagatgag

SEQ ID NO: 3308807 - DNA, 25 bp, Homo sapien
tatgtagaggacttacagatgagat

SEQ ID NO: 3308808 - DNA, 25 bp, Homo sapien
cagggtatgtagaggacttacagat

SEQ ID NO: 3308809 - DNA, 25 bp, Homo sapien
tctgaaggatgcagaattcatctgc

SEQ ID NO: 3308810 - DNA, 25 bp, Homo sapien
gaaaaggtgggagcactgtctgcca

SEQ ID NO: 3308811 - DNA, 25 bp, Homo sapien
caaacttgaaattcccacaacagtc

SEQ ID NO: 3308812 - DNA, 25 bp, Homo sapien
ggatgcagaattcatctgccaggat

SEQ ID NO: 3308813 - DNA, 25 bp, Homo sapien
cattgtagactgagctttggagaga

SEQ ID NO: 3308814 - DNA, 25 bp, Homo sapien
gtgactggcaactgctaagatctgt

SEQ ID NO: 3308815 - DNA, 25 bp, Homo sapien
taatcatacccgcttctggtgtgtg

SEQ ID NO: 3308816 - DNA, 25 bp, Homo sapien
taatagggagcttcaagtgactggc

SEQ ID NO: 3308817 - DNA, 25 bp, Homo sapien
cctcttgccgtaaagccctgactgg

SEQ ID NO: 3308818 - DNA, 25 bp, Homo sapien
taaacagccctcttgccgtaaagcc

SEQ ID NO: 3308819 - DNA, 25 bp, Homo sapien
tcttgccgtaaagccctgactggag

SEQ ID NO: 3308820 - DNA, 25 bp, Homo sapien
cattaaactaaacagccctcttgcc

SEQ ID NO: 3308821 - DNA, 25 bp, Homo sapien
aaaattgcttgtaggctgagcgcgg

SEQ ID NO: 3308822 - DNA, 25 bp, Homo sapien
aaaaattgcttgtaggctgagcgcg

SEQ ID NO: 3308823 - DNA, 25 bp, Homo sapien
aaattgcttgtaggctgagcgcggt

SEQ ID NO: 3308824 - DNA, 25 bp, Homo sapien
tcaaaatgtgtcatgccagtaagag

SEQ ID NO: 3308825 - DNA, 25 bp, Homo sapien
tacagtggatcattctagtaggaaa

SEQ ID NO: 3308826 - DNA, 25 bp, Homo sapien
cacccaaaaataagctaccatatag

SEQ ID NO: 3308827 - DNA, 25 bp, Homo sapien
gtatgcttcatcacctatattaggc

SEQ ID NO: 3308828 - DNA, 25 bp, Homo sapien
ttgtgctaaggtaaagatttaatta

SEQ ID NO: 3308829 - DNA, 25 bp, Homo sapien
taattttggcctctcatagttttct

SEQ ID NO: 3308830 - DNA, 25 bp, Homo sapien
tttggcctctcatagttttctctct

SEQ ID NO: 3308831 - DNA, 25 bp, Homo sapien
aagagaataaatagagggccaggtg

SEQ ID NO: 3308832 - DNA, 25 bp, Homo sapien
taaatcagtttctgagttatgccac

SEQ ID NO: 3308833 - DNA, 25 bp, Homo sapien
gtttctgagttatgccactggctga

SEQ ID NO: 3308834 - DNA, 25 bp, Homo sapien
ccactggctgatgaagagttgagag

SEQ ID NO: 3308835 - DNA, 25 bp, Homo sapien
attgtgaatcagaagattatacccc

SEQ ID NO: 3308836 - DNA, 25 bp, Homo sapien
gcagtaatcctttaataactggcag

SEQ ID NO: 3308837 - DNA, 25 bp, Homo sapien
cctgaaagggtagtgttgcttccta

SEQ ID NO: 3308838 - DNA, 25 bp, Homo sapien
tttgtccatctcttccgtggcgaag

SEQ ID NO: 3308839 - DNA, 25 bp, Homo sapien
cgtggcgaagctttatatctgttcc

SEQ ID NO: 3308840 - DNA, 25 bp, Homo sapien
tctgaatgttgcctgctgaagtagc

SEQ ID NO: 3308841 - DNA, 25 bp, Homo sapien
ttcttggaacccatcacccataggg

SEQ ID NO: 3308842 - DNA, 25 bp, Homo sapien
aaatggatggttgcgcctttgctga

SEQ ID NO: 3308843 - DNA, 25 bp, Homo sapien
taatgcatgactaaaaactccttgg

SEQ ID NO: 3308844 - DNA, 25 bp, Homo sapien
taattttgtatatctgctgttttgc

SEQ ID NO: 3308845 - DNA, 25 bp, Homo sapien
tggattctcaatgtataagttgcct

SEQ ID NO: 3308846 - DNA, 25 bp, Homo sapien
tagtaataataccataatgtgcaca

SEQ ID NO: 3308847 - DNA, 25 bp, Homo sapien
taagttgccttatctgttaatgtct

SEQ ID NO: 3308848 - DNA, 25 bp, Homo sapien
gtttctatcaatcacgtcattgcac

SEQ ID NO: 3308849 - DNA, 25 bp, Homo sapien
taagagcatcaagtctgcatctgac

SEQ ID NO: 3308850 - DNA, 25 bp, Homo sapien
cacagtatattaaactccagaagcc

SEQ ID NO: 3308851 - DNA, 25 bp, Homo sapien
tgcaccgacaaaataagagatctgt

SEQ ID NO: 3308852 - DNA, 25 bp, Homo sapien
tgtagattatgttctccaagggcag

SEQ ID NO: 3308853 - DNA, 25 bp, Homo sapien
cagcaggctctgtggtattgggatc

SEQ ID NO: 3308854 - DNA, 25 bp, Homo sapien
tagtgccttgtcacttagcagcagg

SEQ ID NO: 3308855 - DNA, 25 bp, Homo sapien
catctgtgggatgcatgggtttcaa

SEQ ID NO: 3308856 - DNA, 25 bp, Homo sapien
gtacctagaagctcttcactaattt

SEQ ID NO: 3308857 - DNA, 25 bp, Homo sapien
acagtcccttttcataggcaggaag

SEQ ID NO: 3308858 - DNA, 25 bp, Homo sapien
ctgtgtacctagaagctcttcacta

SEQ ID NO: 3308859 - DNA, 25 bp, Homo sapien
gtcccttttcataggcaggaagagg

SEQ ID NO: 3308860 - DNA, 25 bp, Homo sapien
gaaaattaagaatcaggatccagtc

SEQ ID NO: 3308861 - DNA, 25 bp, Homo sapien
caattgcttttggaacaggtgctgg

SEQ ID NO: 3308862 - DNA, 25 bp, Homo sapien
aaaactgagcgccaagaattcccat

SEQ ID NO: 3308863 - DNA, 25 bp, Homo sapien
ggatccagtcaagccctttcaattg

SEQ ID NO: 3308864 - DNA, 25 bp, Homo sapien
tatctcggcgactctatttcctttt

SEQ ID NO: 3308865 - DNA, 25 bp, Homo sapien
ctgctttccggtgctactggagcct

SEQ ID NO: 3308866 - DNA, 25 bp, Homo sapien
gggggcagtgcccttttctgatgcc

SEQ ID NO: 3308867 - DNA, 25 bp, Homo sapien
gtggaactgctttccggtgctactg

SEQ ID NO: 3308868 - DNA, 25 bp, Homo sapien
gactgaaggattcctcatggaatca

SEQ ID NO: 3308869 - DNA, 25 bp, Homo sapien
ccaaatacaggaattgtttgctatg

SEQ ID NO: 3308870 - DNA, 25 bp, Homo sapien
gctatgtagaagcagctctccttaa

SEQ ID NO: 3308871 - DNA, 25 bp, Homo sapien
tgcacagaggctcaagctctaacct

SEQ ID NO: 3308872 - DNA, 25 bp, Homo sapien
tttggatcttgtgggaaaagttgac

SEQ ID NO: 3308873 - DNA, 25 bp, Homo sapien
aaaagttgactttgttggcagagta

SEQ ID NO: 3308874 - DNA, 25 bp, Homo sapien
tgtgttggtttgtaggactgaaact

SEQ ID NO: 3308875 - DNA, 25 bp, Homo sapien
ggagattttacatatgtggacagta

SEQ ID NO: 3308876 - DNA, 25 bp, Homo sapien
tgtaacctccttaagggaagtgtca

SEQ ID NO: 3308877 - DNA, 25 bp, Homo sapien
cctccttaagggaagtgtcagagcc

SEQ ID NO: 3308878 - DNA, 25 bp, Homo sapien
ccttaagggaagtgtcagagcctcc

SEQ ID NO: 3308879 - DNA, 25 bp, Homo sapien
taagggaagtgtcagagcctccagc

SEQ ID NO: 3308880 - DNA, 25 bp, Homo sapien
aatgcaaatttccttgtagtttcct

SEQ ID NO: 3308881 - DNA, 25 bp, Homo sapien
tgcttgccacaaagtaggtacctga

SEQ ID NO: 3308882 - DNA, 25 bp, Homo sapien
ggatggatttctggaattatctagt

SEQ ID NO: 3308883 - DNA, 25 bp, Homo sapien
gccacaaagtaggtacctgataaat

SEQ ID NO: 3308884 - DNA, 25 bp, Homo sapien
ccctcccccagcagggctttctaag

SEQ ID NO: 3308885 - DNA, 25 bp, Homo sapien
ctcccccagcagggctttctaagtg

SEQ ID NO: 3308886 - DNA, 25 bp, Homo sapien
cctcccccagcagggctttctaagt

SEQ ID NO: 3308887 - DNA, 25 bp, Homo sapien
catgagaatagaggtgttaattagt

SEQ ID NO: 3308888 - DNA, 25 bp, Homo sapien
aattagtaagtttatgaaccagact

SEQ ID NO: 3308889 - DNA, 25 bp, Homo sapien
tgttaattagtaagtttatgaacca

SEQ ID NO: 3308890 - DNA, 25 bp, Homo sapien
tagttgatacatgagaatagaggtg

SEQ ID NO: 3308891 - DNA, 25 bp, Homo sapien
tgagtgcaacgaaatagaccatgac

SEQ ID NO: 3308892 - DNA, 25 bp, Homo sapien
gaagtagaagtataagcagggccat

SEQ ID NO: 3308893 - DNA, 25 bp, Homo sapien
tcctgctgcagtcattagttcttca

SEQ ID NO: 3308894 - DNA, 25 bp, Homo sapien
cattaataaaggcaagtgttggctg

SEQ ID NO: 3308895 - DNA, 25 bp, Homo sapien
cctggccaacatgatcaaactccgt

SEQ ID NO: 3308896 - DNA, 25 bp, Homo sapien
tggccaacatgatcaaactccgtct

SEQ ID NO: 3308897 - DNA, 25 bp, Homo sapien
cagcctggccaacatgatcaaactc

SEQ ID NO: 3308898 - DNA, 25 bp, Homo sapien
agcctggccaacatgatcaaactcc

SEQ ID NO: 3308899 - DNA, 25 bp, Homo sapien
cgtggcttacaaatctccagtgctt

SEQ ID NO: 3308900 - DNA, 25 bp, Homo sapien
tgaaaatcccagtccaccatttgac

SEQ ID NO: 3308901 - DNA, 25 bp, Homo sapien
cagtccaccatttgactccgtggct

SEQ ID NO: 3308902 - DNA, 25 bp, Homo sapien
ttgactccgtggcttacaaatctcc

SEQ ID NO: 3308903 - DNA, 25 bp, Homo sapien
caacgttttatcaatttctgaaaag

SEQ ID NO: 3308904 - DNA, 25 bp, Homo sapien
tctatggccccgaaaagttgaaatc

SEQ ID NO: 3308905 - DNA, 25 bp, Homo sapien
cattttttacaaggtgtgtcaacgt

SEQ ID NO: 3308906 - DNA, 25 bp, Homo sapien
tcaaactgcaggcttaattttaatg

SEQ ID NO: 3308907 - DNA, 25 bp, Homo sapien
aaccaggacaggacccatgagggaa

SEQ ID NO: 3308908 - DNA, 25 bp, Homo sapien
tcttaaacaaccaggacaggaccca

SEQ ID NO: 3308909 - DNA, 25 bp, Homo sapien
caggacccatgagggaaatcttggg

SEQ ID NO: 3308910 - DNA, 25 bp, Homo sapien
gaagcgcacccctgtacccgggctg

SEQ ID NO: 3308911 - DNA, 25 bp, Homo sapien
gagaagtgtaatccctccgctaagt

SEQ ID NO: 3308912 - DNA, 25 bp, Homo sapien
tctcagtctccaatcactagtggga

SEQ ID NO: 3308913 - DNA, 25 bp, Homo sapien
cgctaagtacttggctctcagtctc

SEQ ID NO: 3308914 - DNA, 25 bp, Homo sapien
ggccgctccaagtgcgttgagaagt

SEQ ID NO: 3308915 - DNA, 25 bp, Homo sapien
ccgagttcccgagcgcgcgggaggc

SEQ ID NO: 3308916 - DNA, 25 bp, Homo sapien
cgagccggcgagagccgggcagagc

SEQ ID NO: 3308917 - DNA, 25 bp, Homo sapien
acgggtagcggctgggtgcggagct

SEQ ID NO: 3308918 - DNA, 25 bp, Homo sapien
gtcgccctaggcaggacggagcgcg

SEQ ID NO: 3308919 - DNA, 25 bp, Homo sapien
ctgcagcaaagcagagccacctgag

SEQ ID NO: 3308920 - DNA, 25 bp, Homo sapien
ccacctgagaaaaggttcttgagtt

SEQ ID NO: 3308921 - DNA, 25 bp, Homo sapien
agccacctgagaaaaggttcttgag

SEQ ID NO: 3308922 - DNA, 25 bp, Homo sapien
gcagagccacctgagaaaaggttct

SEQ ID NO: 3308923 - DNA, 25 bp, Homo sapien
ctgcaaagaaacataaaaggctcca

SEQ ID NO: 3308924 - DNA, 25 bp, Homo sapien
ccctgtgtatatcattggatttatg

SEQ ID NO: 3308925 - DNA, 25 bp, Homo sapien
gacagtccccaaaagtggtatttga

SEQ ID NO: 3308926 - DNA, 25 bp, Homo sapien
ggtatttgatcatgggacttgtatt

SEQ ID NO: 3308927 - DNA, 25 bp, Homo sapien
ttttccctgtgtatatcattggatt

SEQ ID NO: 3308928 - DNA, 25 bp, Homo sapien
gccagtgggcttcatatcttcacac

SEQ ID NO: 3308929 - DNA, 25 bp, Homo sapien
gggcttcatatcttcacacactttt

SEQ ID NO: 3308930 - DNA, 25 bp, Homo sapien
tgctattatgcaacccagtgtggat

SEQ ID NO: 3308931 - DNA, 25 bp, Homo sapien
gtgttaccggttaacctcattgcag

SEQ ID NO: 3308932 - DNA, 25 bp, Homo sapien
tggacataagactcatggttgatgg

SEQ ID NO: 3308933 - DNA, 25 bp, Homo sapien
cattgcagtttccttgtatgcaaag

SEQ ID NO: 3308934 - DNA, 25 bp, Homo sapien
caataccaagcccttgatatgtagg

SEQ ID NO: 3308935 - DNA, 25 bp, Homo sapien
gatatgtaggagaccagttgccgcc

SEQ ID NO: 3308936 - DNA, 25 bp, Homo sapien
ctatggctgaatgcccaacctggga

SEQ ID NO: 3308937 - DNA, 25 bp, Homo sapien
tagtctgatggcagatgggtcatct

SEQ ID NO: 3308938 - DNA, 25 bp, Homo sapien
catttccttgctcccacggacgttt

SEQ ID NO: 3308939 - DNA, 25 bp, Homo sapien
tgacagaccttcagcaggttgagct

SEQ ID NO: 3308940 - DNA, 25 bp, Homo sapien
cggacgtttactcagaagccaggca

SEQ ID NO: 3308941 - DNA, 25 bp, Homo sapien
cgtccttcatatgtgtttttactac

SEQ ID NO: 3308942 - DNA, 25 bp, Homo sapien
ttcatggaattctccccgactccca

SEQ ID NO: 3308943 - DNA, 25 bp, Homo sapien
ccagtccagtgtcatatgccttatg

SEQ ID NO: 3308944 - DNA, 25 bp, Homo sapien
ccctttgcacataatagttcttctt

SEQ ID NO: 3308945 - DNA, 25 bp, Homo sapien
tcatatgccttatgacagatcatca

SEQ ID NO: 3308946 - DNA, 25 bp, Homo sapien
tagttgctgaatgccgtattgacct

SEQ ID NO: 3308947 - DNA, 25 bp, Homo sapien
tgctcatggttgcaagtgatgaact

SEQ ID NO: 3308948 - DNA, 25 bp, Homo sapien
tcatggttgcaagtgatgaactcat

SEQ ID NO: 3308949 - DNA, 25 bp, Homo sapien
gaatgccgtattgacctccagtgct

SEQ ID NO: 3308950 - DNA, 25 bp, Homo sapien
gctggtgttcggatctatgttttgg

SEQ ID NO: 3308951 - DNA, 25 bp, Homo sapien
ctggtgttcggatctatgttttggg

SEQ ID NO: 3308952 - DNA, 25 bp, Homo sapien
caaagctggtgttcggatctatgtt

SEQ ID NO: 3308953 - DNA, 25 bp, Homo sapien
gggcaaagctggtgttcggatctat

SEQ ID NO: 3308954 - DNA, 25 bp, Homo sapien
taactggtgaagaatattaaggttc

SEQ ID NO: 3308955 - DNA, 25 bp, Homo sapien
aaatgtagtcatttgcacacctgca

SEQ ID NO: 3308956 - DNA, 25 bp, Homo sapien
cagaaaaggtctcggggatattgca

SEQ ID NO: 3308957 - DNA, 25 bp, Homo sapien
gctgtggtctttcggtagagttgat

SEQ ID NO: 3308958 - DNA, 25 bp, Homo sapien
tcaggtgtctaacttcagatgaatg

SEQ ID NO: 3308959 - DNA, 25 bp, Homo sapien
tcatgcttcactgggtctttgatgt

SEQ ID NO: 3308960 - DNA, 25 bp, Homo sapien
tgataacataatagaactggagttc

SEQ ID NO: 3308961 - DNA, 25 bp, Homo sapien
tctgtcttggttcctttcaggtgtc

SEQ ID NO: 3308962 - DNA, 25 bp, Homo sapien
aatacctatttctttcagtcacaag

SEQ ID NO: 3308963 - DNA, 25 bp, Homo sapien
taattgaaattctaagtataagcaa

SEQ ID NO: 3308964 - DNA, 25 bp, Homo sapien
agtcacaagctaaagtttttatctc

SEQ ID NO: 3308965 - DNA, 25 bp, Homo sapien
tcagtcacaagctaaagtttttatc

SEQ ID NO: 3308966 - DNA, 25 bp, Homo sapien
tgcgtggactccgaaaccttttgtg

SEQ ID NO: 3308967 - DNA, 25 bp, Homo sapien
tgggtgctcccaatgtaaataagcg

SEQ ID NO: 3308968 - DNA, 25 bp, Homo sapien
ttatataggatgaccctgcgtggac

SEQ ID NO: 3308969 - DNA, 25 bp, Homo sapien
taaatatccgccagtcagagtgggt

SEQ ID NO: 3308970 - DNA, 25 bp, Homo sapien
cagggcttcccttttcatcataggc

SEQ ID NO: 3308971 - DNA, 25 bp, Homo sapien
tcatactctcccgtggccacaagga

SEQ ID NO: 3308972 - DNA, 25 bp, Homo sapien
tattatgggcaaagtctatgatcca

SEQ ID NO: 3308973 - DNA, 25 bp, Homo sapien
catcataggctgagccttttctata

SEQ ID NO: 3308974 - DNA, 25 bp, Homo sapien
cacttctctccaacaagacagtcca

SEQ ID NO: 3308975 - DNA, 25 bp, Homo sapien
acttctctccaacaagacagtccat

SEQ ID NO: 3308976 - DNA, 25 bp, Homo sapien
tgccacttctctccaacaagacagt

SEQ ID NO: 3308977 - DNA, 25 bp, Homo sapien
gccacttctctccaacaagacagtc

SEQ ID NO: 3308978 - DNA, 25 bp, Homo sapien
ttgtacccattgtcgaaagaaagcc

SEQ ID NO: 3308979 - DNA, 25 bp, Homo sapien
caaatgaatttttgtacccattgtc

SEQ ID NO: 3308980 - DNA, 25 bp, Homo sapien
tgaatttttgtacccattgtcgaaa

SEQ ID NO: 3308981 - DNA, 25 bp, Homo sapien
ttgtcgaaagaaagcctgatgaaca

SEQ ID NO: 3308982 - DNA, 25 bp, Homo sapien
tgcatgtagcactggtactgataag

SEQ ID NO: 3308983 - DNA, 25 bp, Homo sapien
ggcaggtctcagattgttttgcatg

SEQ ID NO: 3308984 - DNA, 25 bp, Homo sapien
ctgcatattgtaaagtaggtagaag

SEQ ID NO: 3308985 - DNA, 25 bp, Homo sapien
aaagtaggtagaagtggcaggtctc

SEQ ID NO: 3308986 - DNA, 25 bp, Homo sapien
tccctttgagaagccctagatcaaa

SEQ ID NO: 3308987 - DNA, 25 bp, Homo sapien
ctaaagagcctttatccataccagg

SEQ ID NO: 3308988 - DNA, 25 bp, Homo sapien
aattctacagtaatgcaccagaatc

SEQ ID NO: 3308989 - DNA, 25 bp, Homo sapien
gagcctttatccataccaggtggta

SEQ ID NO: 3308990 - DNA, 25 bp, Homo sapien
ccttcacattcacagtctgtctcca

SEQ ID NO: 3308991 - DNA, 25 bp, Homo sapien
cttcacattcacagtctgtctccat

SEQ ID NO: 3308992 - DNA, 25 bp, Homo sapien
ctgcttttaggaggaaacgctacca

SEQ ID NO: 3308993 - DNA, 25 bp, Homo sapien
ggaggaaacgctaccagtgtcacat

SEQ ID NO: 3308994 - DNA, 25 bp, Homo sapien
cttttaggaggaaacgctaccagtg

SEQ ID NO: 3308995 - DNA, 25 bp, Homo sapien
aggaaacgctaccagtgtcacattt

SEQ ID NO: 3308996 - DNA, 25 bp, Homo sapien
tgctgggtagtgagccaatccacag

SEQ ID NO: 3308997 - DNA, 25 bp, Homo sapien
ggtgttcagtaacacagacctgtgc

SEQ ID NO: 3308998 - DNA, 25 bp, Homo sapien
ccatagcatctgtaaagctggcagc

SEQ ID NO: 3308999 - DNA, 25 bp, Homo sapien
agaactttgccggagtattaccacg

SEQ ID NO: 3309000 - DNA, 25 bp, Homo sapien
agacttctgctgattcataaccatt

SEQ ID NO: 3309001 - DNA, 25 bp, Homo sapien
cttctgctgattcataaccatttgg

SEQ ID NO: 3309002 - DNA, 25 bp, Homo sapien
gctgattcataaccatttggctctg

SEQ ID NO: 3309003 - DNA, 25 bp, Homo sapien
tgctgattcataaccatttggctct

SEQ ID NO: 3309004 - DNA, 25 bp, Homo sapien
gaatcaaagtgatcttcatggttct

SEQ ID NO: 3309005 - DNA, 25 bp, Homo sapien
ctcctccctcatatcagaatcaaag

SEQ ID NO: 3309006 - DNA, 25 bp, Homo sapien
ccctcatatcagaatcaaagtgatc

SEQ ID NO: 3309007 - DNA, 25 bp, Homo sapien
atcaaagtgatcttcatggttctcc

SEQ ID NO: 3309008 - DNA, 25 bp, Homo sapien
cagtgcatggttgttaattgatgtg

SEQ ID NO: 3309009 - DNA, 25 bp, Homo sapien
cctggaagctatttccatccattcc

SEQ ID NO: 3309010 - DNA, 25 bp, Homo sapien
ttccagtgcatggttgttaattgat

SEQ ID NO: 3309011 - DNA, 25 bp, Homo sapien
ctggaagctatttccatccattcca

SEQ ID NO: 3309012 - DNA, 25 bp, Homo sapien
ctggctctgaaataaggcttgggca

SEQ ID NO: 3309013 - DNA, 25 bp, Homo sapien
tggctctgaaataaggcttgggcat

SEQ ID NO: 3309014 - DNA, 25 bp, Homo sapien
atttgtactcccagaaagtgatcat

SEQ ID NO: 3309015 - DNA, 25 bp, Homo sapien
ccataggctatttctatttgtactc

SEQ ID NO: 3309016 - DNA, 25 bp, Homo sapien
ggctatttctatttgtactcccaga

SEQ ID NO: 3309017 - DNA, 25 bp, Homo sapien
caagctttatttccataggctattt

SEQ ID NO: 3309018 - DNA, 25 bp, Homo sapien
tgttgcatgacacagtgcttattgt

SEQ ID NO: 3309019 - DNA, 25 bp, Homo sapien
actgctgttgcatgacacagtgctt

SEQ ID NO: 3309020 - DNA, 25 bp, Homo sapien
tgcatgacacagtgcttattgttac

SEQ ID NO: 3309021 - DNA, 25 bp, Homo sapien
tgaaggcactgctgttgcatgacac

SEQ ID NO: 3309022 - DNA, 25 bp, Homo sapien
tatctgaccctccttttttgctcca

SEQ ID NO: 3309023 - DNA, 25 bp, Homo sapien
aatatctgaccctccttttttgctc

SEQ ID NO: 3309024 - DNA, 25 bp, Homo sapien
tccagccctcagactttctggtagt

SEQ ID NO: 3309025 - DNA, 25 bp, Homo sapien
ttttttgctccagccctcagacttt

SEQ ID NO: 3309026 - DNA, 25 bp, Homo sapien
ggttgctgatatgagttcttttgaa

SEQ ID NO: 3309027 - DNA, 25 bp, Homo sapien
gtggtgttataaccttcttgaggaa

SEQ ID NO: 3309028 - DNA, 25 bp, Homo sapien
tagttcaaaatcagaaatggttgct

SEQ ID NO: 3309029 - DNA, 25 bp, Homo sapien
tcttgaggaaccaaatcagcttgca

SEQ ID NO: 3309030 - DNA, 25 bp, Homo sapien
ggtgagcatcacagatgtaagaaat

SEQ ID NO: 3309031 - DNA, 25 bp, Homo sapien
tcaggctattaatcggcagtaactg

SEQ ID NO: 3309032 - DNA, 25 bp, Homo sapien
gatgtaagaaatttgatctctggta

SEQ ID NO: 3309033 - DNA, 25 bp, Homo sapien
gtaactgcaagttgtggtgagcatc

SEQ ID NO: 3309034 - DNA, 25 bp, Homo sapien
cgtgactgctgtcagggctacagcc

SEQ ID NO: 3309035 - DNA, 25 bp, Homo sapien
ccgtgactgctgtcagggctacagc

SEQ ID NO: 3309036 - DNA, 25 bp, Homo sapien
gtgactgctgtcagggctacagcca

SEQ ID NO: 3309037 - DNA, 25 bp, Homo sapien
tgactgctgtcagggctacagccac

SEQ ID NO: 3309038 - DNA, 25 bp, Homo sapien
gccaatacttcataactggctgaat

SEQ ID NO: 3309039 - DNA, 25 bp, Homo sapien
atatttgccaatacttcataactgg

SEQ ID NO: 3309040 - DNA, 25 bp, Homo sapien
cataactggctgaatctaagaggtg

SEQ ID NO: 3309041 - DNA, 25 bp, Homo sapien
tacttcataactggctgaatctaag

SEQ ID NO: 3309042 - DNA, 25 bp, Homo sapien
gtgtttacaacctgagtcttatttg

SEQ ID NO: 3309043 - DNA, 25 bp, Homo sapien
atgtatcgtgagaacctgtgtttac

SEQ ID NO: 3309044 - DNA, 25 bp, Homo sapien
gatttctgagacagtagcatagcta

SEQ ID NO: 3309045 - DNA, 25 bp, Homo sapien
cttaacaaatgtatcgtgagaacct

SEQ ID NO: 3309046 - DNA, 25 bp, Homo sapien
tacacctgcttggagtgtagttatc

SEQ ID NO: 3309047 - DNA, 25 bp, Homo sapien
tcctacacctgcttggagtgtagtt

SEQ ID NO: 3309048 - DNA, 25 bp, Homo sapien
gattcctacacctgcttggagtgta

SEQ ID NO: 3309049 - DNA, 25 bp, Homo sapien
cctacacctgcttggagtgtagtta

SEQ ID NO: 3309050 - DNA, 25 bp, Homo sapien
gacatctgggtctcaaagaatacca

SEQ ID NO: 3309051 - DNA, 25 bp, Homo sapien
cctgtcctctcagtgtgtgcaggag

SEQ ID NO: 3309052 - DNA, 25 bp, Homo sapien
ggaagaaaggagacatctgggtctc

SEQ ID NO: 3309053 - DNA, 25 bp, Homo sapien
tcaaagaataccaaagtttttgaga

SEQ ID NO: 3309054 - DNA, 25 bp, Homo sapien
tgagcagcatcaggccagaatgttc

SEQ ID NO: 3309055 - DNA, 25 bp, Homo sapien
tgtgccatgcccagattgaagataa

SEQ ID NO: 3309056 - DNA, 25 bp, Homo sapien
tctgcccagaattcaacaagattgt

SEQ ID NO: 3309057 - DNA, 25 bp, Homo sapien
tgggagagcccatattgacagttat

SEQ ID NO: 3309058 - DNA, 25 bp, Homo sapien
gccatgggtcctgaacatagctcat

SEQ ID NO: 3309059 - DNA, 25 bp, Homo sapien
tatgccatgggtcctgaacatagct

SEQ ID NO: 3309060 - DNA, 25 bp, Homo sapien
tgtcatatgccatgggtcctgaaca

SEQ ID NO: 3309061 - DNA, 25 bp, Homo sapien
catatgccatgggtcctgaacatag

SEQ ID NO: 3309062 - DNA, 25 bp, Homo sapien
tcgtcatcaagtctagctccactgc

SEQ ID NO: 3309063 - DNA, 25 bp, Homo sapien
caagtctagctccactgctcagtga

SEQ ID NO: 3309064 - DNA, 25 bp, Homo sapien
tagctccactgctcagtgaccatac

SEQ ID NO: 3309065 - DNA, 25 bp, Homo sapien
cctacatcgtcatcaagtctagctc

SEQ ID NO: 3309066 - DNA, 25 bp, Homo sapien
atgtccagaaatttagcaccaacat

SEQ ID NO: 3309067 - DNA, 25 bp, Homo sapien
tctgacatttcactcctgcatagca

SEQ ID NO: 3309068 - DNA, 25 bp, Homo sapien
atctgacatttcactcctgcatagc

SEQ ID NO: 3309069 - DNA, 25 bp, Homo sapien
ctgacatttcactcctgcatagcat

SEQ ID NO: 3309070 - DNA, 25 bp, Homo sapien
ccttatcttttatctgatttctgtc

SEQ ID NO: 3309071 - DNA, 25 bp, Homo sapien
cttatcttttatctgatttctgtct

SEQ ID NO: 3309072 - DNA, 25 bp, Homo sapien
tcccttatcttttatctgatttctg

SEQ ID NO: 3309073 - DNA, 25 bp, Homo sapien
cttcccttatcttttatctgatttc

SEQ ID NO: 3309074 - DNA, 25 bp, Homo sapien
ttagcgtttaaggtgagtctcccca

SEQ ID NO: 3309075 - DNA, 25 bp, Homo sapien
agcgtttaaggtgagtctccccagg

SEQ ID NO: 3309076 - DNA, 25 bp, Homo sapien
catggttttcttagcgtttaaggtg

SEQ ID NO: 3309077 - DNA, 25 bp, Homo sapien
tttcttagcgtttaaggtgagtctc

SEQ ID NO: 3309078 - DNA, 25 bp, Homo sapien
cattcctctgatcactatagctgca

SEQ ID NO: 3309079 - DNA, 25 bp, Homo sapien
cttacggtaaggtcaacagtggata

SEQ ID NO: 3309080 - DNA, 25 bp, Homo sapien
cagtggataaagagctatagcctaa

SEQ ID NO: 3309081 - DNA, 25 bp, Homo sapien
tatagcctaatgaggccagtgtgtg

SEQ ID NO: 3309082 - DNA, 25 bp, Homo sapien
gggccgctatggtaatgtgaatgca

SEQ ID NO: 3309083 - DNA, 25 bp, Homo sapien
taagttggaggacatagaacggaac

SEQ ID NO: 3309084 - DNA, 25 bp, Homo sapien
aaacaccgcctgtctaggaccacat

SEQ ID NO: 3309085 - DNA, 25 bp, Homo sapien
gaatgcactgggtacaaacaccgcc

SEQ ID NO: 3309086 - DNA, 25 bp, Homo sapien
taatgtgcagaggattgacctgtgc

SEQ ID NO: 3309087 - DNA, 25 bp, Homo sapien
gatagagaggaaacatccgtcaggc

SEQ ID NO: 3309088 - DNA, 25 bp, Homo sapien
cataacctctagatgggacagcaga

SEQ ID NO: 3309089 - DNA, 25 bp, Homo sapien
cagcagaggacagttagtagaggcc

SEQ ID NO: 3309090 - DNA, 25 bp, Homo sapien
tctaccctaggttctgatctgagct

SEQ ID NO: 3309091 - DNA, 25 bp, Homo sapien
taggttgggccctcagtgaagtctt

SEQ ID NO: 3309092 - DNA, 25 bp, Homo sapien
tacagatgactgcactctcagaagt

SEQ ID NO: 3309093 - DNA, 25 bp, Homo sapien
gagggaggccaagcttcagaactct

SEQ ID NO: 3309094 - DNA, 25 bp, Homo sapien
catgctaaataggtctgaggcacac

SEQ ID NO: 3309095 - DNA, 25 bp, Homo sapien
tactcagaagctagttgggccacaa

SEQ ID NO: 3309096 - DNA, 25 bp, Homo sapien
tctcaaagaagatggataaagtccc

SEQ ID NO: 3309097 - DNA, 25 bp, Homo sapien
gaggttccatagcaaggtatcagca

SEQ ID NO: 3309098 - DNA, 25 bp, Homo sapien
gtgggacaggtctagtcaataacca

SEQ ID NO: 3309099 - DNA, 25 bp, Homo sapien
tagagcaccatagggagtcgacgtg

SEQ ID NO: 3309100 - DNA, 25 bp, Homo sapien
tgagcaagctgaaggaacagactga

SEQ ID NO: 3309101 - DNA, 25 bp, Homo sapien
ctcaaggtggcgcaacaagacagtg

SEQ ID NO: 3309102 - DNA, 25 bp, Homo sapien
tgagacacttgatgcacacgatttg

SEQ ID NO: 3309103 - DNA, 25 bp, Homo sapien
tgtaagatcctgtaccacacagcat

SEQ ID NO: 3309104 - DNA, 25 bp, Homo sapien
gaacgagccatggacagtgtctgca

SEQ ID NO: 3309105 - DNA, 25 bp, Homo sapien
tctggatagcaataaaaagcgtttc

SEQ ID NO: 3309106 - DNA, 25 bp, Homo sapien
gctgtgattcacctggacggccaca

SEQ ID NO: 3309107 - DNA, 25 bp, Homo sapien
caatttttcttaactcccgtgatga

SEQ ID NO: 3309108 - DNA, 25 bp, Homo sapien
gcctgtgaagtgcattggtctcatc

SEQ ID NO: 3309109 - DNA, 25 bp, Homo sapien
cccgtgatgatgtccgagtaaagtg

SEQ ID NO: 3309110 - DNA, 25 bp, Homo sapien
actgcccttctgctgctaaggacac

SEQ ID NO: 3309111 - DNA, 25 bp, Homo sapien
tgcccttctgctgctaaggacacca

SEQ ID NO: 3309112 - DNA, 25 bp, Homo sapien
ctgcccttctgctgctaaggacacc

SEQ ID NO: 3309113 - DNA, 25 bp, Homo sapien
gcccttctgctgctaaggacaccac

SEQ ID NO: 3309114 - DNA, 25 bp, Homo sapien
ctgggaagttctgtgcttcccaaag

SEQ ID NO: 3309115 - DNA, 25 bp, Homo sapien
gatccaggattacgccagttgggct

SEQ ID NO: 3309116 - DNA, 25 bp, Homo sapien
ggattacgccagttgggctggattt

SEQ ID NO: 3309117 - DNA, 25 bp, Homo sapien
gaagttctgtgcttcccaaagatcc

SEQ ID NO: 3309118 - DNA, 25 bp, Homo sapien
gggcatccaggctgctacagagctt

SEQ ID NO: 3309119 - DNA, 25 bp, Homo sapien
ggatgctgaaagcactgggccccgt

SEQ ID NO: 3309120 - DNA, 25 bp, Homo sapien
cagcagcggcaaatcgatgccagta

SEQ ID NO: 3309121 - DNA, 25 bp, Homo sapien
tccaggttcagcttatgggccagca

SEQ ID NO: 3309122 - DNA, 25 bp, Homo sapien
ctgcgcatccgaaggcctggcggtt

SEQ ID NO: 3309123 - DNA, 25 bp, Homo sapien
caaaattccgcagcctttgttgtca

SEQ ID NO: 3309124 - DNA, 25 bp, Homo sapien
tgctgtgtgcctgggagatagggct

SEQ ID NO: 3309125 - DNA, 25 bp, Homo sapien
actggagctgggtggttattgaact

SEQ ID NO: 3309126 - DNA, 25 bp, Homo sapien
tctgacacggtgcagttgagctgga

SEQ ID NO: 3309127 - DNA, 25 bp, Homo sapien
actgtgttcaggctaaatctttcca

SEQ ID NO: 3309128 - DNA, 25 bp, Homo sapien
cacctgccgcacacagagtttgcaa

SEQ ID NO: 3309129 - DNA, 25 bp, Homo sapien
tgcaggtttctttgagatccactcc

SEQ ID NO: 3309130 - DNA, 25 bp, Homo sapien
gatatcgtgaattgacaggcgcagg

SEQ ID NO: 3309131 - DNA, 25 bp, Homo sapien
tcttccagagggaatgggcgatatc

SEQ ID NO: 3309132 - DNA, 25 bp, Homo sapien
caggttgtgggtgctgcctttaaaa

SEQ ID NO: 3309133 - DNA, 25 bp, Homo sapien
ggttcttctaggagctgtcctccca

SEQ ID NO: 3309134 - DNA, 25 bp, Homo sapien
tgcaaagacaccctcaagagtaggt

SEQ ID NO: 3309135 - DNA, 25 bp, Homo sapien
tcgttaaggcttgacagagaggcag

SEQ ID NO: 3309136 - DNA, 25 bp, Homo sapien
tctgagcaatcctgtgggagggcct

SEQ ID NO: 3309137 - DNA, 25 bp, Homo sapien
gattccacagtagaaacaagcagct

SEQ ID NO: 3309138 - DNA, 25 bp, Homo sapien
ctcctctccggcttgcaggcctcag

SEQ ID NO: 3309139 - DNA, 25 bp, Homo sapien
ttttcggcgacgctgctgtcagccc

SEQ ID NO: 3309140 - DNA, 25 bp, Homo sapien
tgctcgggtcgccatccctggcgcc

SEQ ID NO: 3309141 - DNA, 25 bp, Homo sapien
ctctgccagcttttcggcgacgctg

SEQ ID NO: 3309142 - DNA, 25 bp, Homo sapien
gcttggtctgagctgccacttccag

SEQ ID NO: 3309143 - DNA, 25 bp, Homo sapien
ctgtggccacggatgcttggtctga

SEQ ID NO: 3309144 - DNA, 25 bp, Homo sapien
aacatctccccgtcaagttgcttcg

SEQ ID NO: 3309145 - DNA, 25 bp, Homo sapien
gttgcttcgtttctagggctctgcc

SEQ ID NO: 3309146 - DNA, 25 bp, Homo sapien
gggaaggcatcccttagaacaggta

SEQ ID NO: 3309147 - DNA, 25 bp, Homo sapien
tgggcttattcagtggagggtatcc

SEQ ID NO: 3309148 - DNA, 25 bp, Homo sapien
cagcagctcataatgacgagagagt

SEQ ID NO: 3309149 - DNA, 25 bp, Homo sapien
tttcatagcaactcatcaacctgga

SEQ ID NO: 3309150 - DNA, 25 bp, Homo sapien
ctaatctggctgcttatccttcttt

SEQ ID NO: 3309151 - DNA, 25 bp, Homo sapien
ttcctccttccttgcaaagccaggg

SEQ ID NO: 3309152 - DNA, 25 bp, Homo sapien
ggctgcttatccttctttagctcct

SEQ ID NO: 3309153 - DNA, 25 bp, Homo sapien
cagggctttccctggtccccaggct

SEQ ID NO: 3309154 - DNA, 25 bp, Homo sapien
tctgtgtttattcacgctgttccct

SEQ ID NO: 3309155 - DNA, 25 bp, Homo sapien
tgtttattcacgctgttccctccac

SEQ ID NO: 3309156 - DNA, 25 bp, Homo sapien
tccctccacctagaaatcttgtatt

SEQ ID NO: 3309157 - DNA, 25 bp, Homo sapien
tttccctctactattgctggtcaaa

SEQ ID NO: 3309158 - DNA, 25 bp, Homo sapien
tgggtgtcatccagacagtagactc

SEQ ID NO: 3309159 - DNA, 25 bp, Homo sapien
tgaggcgcttcgcagccgctttggt

SEQ ID NO: 3309160 - DNA, 25 bp, Homo sapien
tggtggaatgtcctaccagggcgta

SEQ ID NO: 3309161 - DNA, 25 bp, Homo sapien
cagacagtagactcggatgctgtac

SEQ ID NO: 3309162 - DNA, 25 bp, Homo sapien
ctccaggtttattccagtcccaaag

SEQ ID NO: 3309163 - DNA, 25 bp, Homo sapien
ccctagtggtgacatggtgcagaaa

SEQ ID NO: 3309164 - DNA, 25 bp, Homo sapien
aaagagtaacgatgcccacgtccca

SEQ ID NO: 3309165 - DNA, 25 bp, Homo sapien
gtcccagtcactcacaagtacaagg

SEQ ID NO: 3309166 - DNA, 25 bp, Homo sapien
aagcctccggtatcccctagtggtg

SEQ ID NO: 3309167 - DNA, 25 bp, Homo sapien
ggtacatgtctgcaagtaagtgcct

SEQ ID NO: 3309168 - DNA, 25 bp, Homo sapien
gagctttggagacacaccctttctg

SEQ ID NO: 3309169 - DNA, 25 bp, Homo sapien
taagtgcctaacattttctgatcca

SEQ ID NO: 3309170 - DNA, 25 bp, Homo sapien
cagacagccagaatgctgcagattt

SEQ ID NO: 3309171 - DNA, 25 bp, Homo sapien
cagtgatgcatagtgaggacgactg

SEQ ID NO: 3309172 - DNA, 25 bp, Homo sapien
agtattttccagtcctcggtattgg

SEQ ID NO: 3309173 - DNA, 25 bp, Homo sapien
ctcaccacaggggtcaaaagtgtct

SEQ ID NO: 3309174 - DNA, 25 bp, Homo sapien
tgcctggttcttgagcagtattttc

SEQ ID NO: 3309175 - DNA, 25 bp, Homo sapien
tattcatgaactatgcacttgggtt

SEQ ID NO: 3309176 - DNA, 25 bp, Homo sapien
gtattcatgaactatgcacttgggt

SEQ ID NO: 3309177 - DNA, 25 bp, Homo sapien
ttagcagcattaattgtggaaattg

SEQ ID NO: 3309178 - DNA, 25 bp, Homo sapien
caggaaaacaaaggcgtcgccgcct

SEQ ID NO: 3309179 - DNA, 25 bp, Homo sapien
tcatttgtgcaaactgctactagaa

SEQ ID NO: 3309180 - DNA, 25 bp, Homo sapien
acaaggcaaaaaggcccatgttagc

SEQ ID NO: 3309181 - DNA, 25 bp, Homo sapien
tattcagcaatgataagacccctct

SEQ ID NO: 3309182 - DNA, 25 bp, Homo sapien
cactttcgcttagagcatattcagc

SEQ ID NO: 3309183 - DNA, 25 bp, Homo sapien
gataagacccctcttgtcacattca

SEQ ID NO: 3309184 - DNA, 25 bp, Homo sapien
gctctgcaccctctttggtcagaga

SEQ ID NO: 3309185 - DNA, 25 bp, Homo sapien
aagttcacgcctcccttcagacaat

SEQ ID NO: 3309186 - DNA, 25 bp, Homo sapien
cagacaattcacatccgcagatgac

SEQ ID NO: 3309187 - DNA, 25 bp, Homo sapien
tgtaattaagttcacgcctcccttc

SEQ ID NO: 3309188 - DNA, 25 bp, Homo sapien
cacatccgcagatgaccagctggat

SEQ ID NO: 3309189 - DNA, 25 bp, Homo sapien
cagcagccccttaaggcttgatctt

SEQ ID NO: 3309190 - DNA, 25 bp, Homo sapien
ctctttcagcttcagcccgtgcctg

SEQ ID NO: 3309191 - DNA, 25 bp, Homo sapien
ctttcagcttcagcccgtgcctgca

SEQ ID NO: 3309192 - DNA, 25 bp, Homo sapien
ctgcagcagccccttaaggcttgat

SEQ ID NO: 3309193 - DNA, 25 bp, Homo sapien
cttgatggatagatgtacttaatgc

SEQ ID NO: 3309194 - DNA, 25 bp, Homo sapien
taaagcacaagccaatacttatttc

SEQ ID NO: 3309195 - DNA, 25 bp, Homo sapien
ccacgctgacaaaggccttgatgga

SEQ ID NO: 3309196 - DNA, 25 bp, Homo sapien
aatgtccacgctgacaaaggccttg

SEQ ID NO: 3309197 - DNA, 25 bp, Homo sapien
attgtacaattctcctccaagttag

SEQ ID NO: 3309198 - DNA, 25 bp, Homo sapien
taaagtcagtgcaccagaaaaagca

SEQ ID NO: 3309199 - DNA, 25 bp, Homo sapien
tgtgtctattgtacaattctcctcc

SEQ ID NO: 3309200 - DNA, 25 bp, Homo sapien
tccaagttagacattggtaaagtca

SEQ ID NO: 3309201 - DNA, 25 bp, Homo sapien
gccccagcgggaatcagcaagctga

SEQ ID NO: 3309202 - DNA, 25 bp, Homo sapien
tggccccagcgggaatcagcaagct

SEQ ID NO: 3309203 - DNA, 25 bp, Homo sapien
ccagcgggaatcagcaagctgactc

SEQ ID NO: 3309204 - DNA, 25 bp, Homo sapien
ggaatggccccagcgggaatcagca

SEQ ID NO: 3309205 - DNA, 25 bp, Homo sapien
tccaacaacgactgggtcatctgag

SEQ ID NO: 3309206 - DNA, 25 bp, Homo sapien
gggacagcttggacgtaaactcaga

SEQ ID NO: 3309207 - DNA, 25 bp, Homo sapien
ttttgtctgagacgtcatgcagggc

SEQ ID NO: 3309208 - DNA, 25 bp, Homo sapien
caaatgcggtacaggatggatcagt

SEQ ID NO: 3309209 - DNA, 25 bp, Homo sapien
ccattcaggccaacctacattagtc

SEQ ID NO: 3309210 - DNA, 25 bp, Homo sapien
tacattagtcagactccccctcaca

SEQ ID NO: 3309211 - DNA, 25 bp, Homo sapien
ctccattcaggccaacctacattag

SEQ ID NO: 3309212 - DNA, 25 bp, Homo sapien
gaaaataatcccattggcattctcc

SEQ ID NO: 3309213 - DNA, 25 bp, Homo sapien
gattcttccgatacacaaacaaggc

SEQ ID NO: 3309214 - DNA, 25 bp, Homo sapien
acaactacagagatcgccaggcaaa

SEQ ID NO: 3309215 - DNA, 25 bp, Homo sapien
gccaggcaaacgatcactgctatca

SEQ ID NO: 3309216 - DNA, 25 bp, Homo sapien
tcccaacatagagagcaacatcatc

SEQ ID NO: 3309217 - DNA, 25 bp, Homo sapien
ggttctctgttcagttgaaatggga

SEQ ID NO: 3309218 - DNA, 25 bp, Homo sapien
gttctctgttcagttgaaatgggat

SEQ ID NO: 3309219 - DNA, 25 bp, Homo sapien
ttctctgttcagttgaaatgggata

SEQ ID NO: 3309220 - DNA, 25 bp, Homo sapien
gggttctctgttcagttgaaatggg

SEQ ID NO: 3309221 - DNA, 25 bp, Homo sapien
caactttcaaaatcacctctttttg

SEQ ID NO: 3309222 - DNA, 25 bp, Homo sapien
ctcccttgataacaactttcaaaat

SEQ ID NO: 3309223 - DNA, 25 bp, Homo sapien
ttgataacaactttcaaaatcacct

SEQ ID NO: 3309224 - DNA, 25 bp, Homo sapien
ataacaactttcaaaatcacctctt

SEQ ID NO: 3309225 - DNA, 25 bp, Homo sapien
ctgcacccccgtgatctcgaaggag

SEQ ID NO: 3309226 - DNA, 25 bp, Homo sapien
gaacctatctgctagatttctagca

SEQ ID NO: 3309227 - DNA, 25 bp, Homo sapien
agaagaaaattgagcttgcagccct

SEQ ID NO: 3309228 - DNA, 25 bp, Homo sapien
aaaattgagcttgcagccctggacc

SEQ ID NO: 3309229 - DNA, 25 bp, Homo sapien
gtgctccgtaggtgttcattaggct

SEQ ID NO: 3309230 - DNA, 25 bp, Homo sapien
ggcttctgtaggctaaagtttctaa

SEQ ID NO: 3309231 - DNA, 25 bp, Homo sapien
tcattaggcttctgtaggctaaagt

SEQ ID NO: 3309232 - DNA, 25 bp, Homo sapien
gctccgtaggtgttcattaggcttc

SEQ ID NO: 3309233 - DNA, 25 bp, Homo sapien
gtatagaatagaaagcatatagggt

SEQ ID NO: 3309234 - DNA, 25 bp, Homo sapien
tagaatagaaagcatatagggttgt

SEQ ID NO: 3309235 - DNA, 25 bp, Homo sapien
tagaaagcatatagggttgtttgtt

SEQ ID NO: 3309236 - DNA, 25 bp, Homo sapien
gaatagaaagcatatagggttgttt

SEQ ID NO: 3309237 - DNA, 25 bp, Homo sapien
ctctgtgaggagtttagagtgctct

SEQ ID NO: 3309238 - DNA, 25 bp, Homo sapien
gagaatatctagcttatagcaccca

SEQ ID NO: 3309239 - DNA, 25 bp, Homo sapien
ggacattttcgttaggtacctgcca

SEQ ID NO: 3309240 - DNA, 25 bp, Homo sapien
tgagaaatgtcaacactagacaacc

SEQ ID NO: 3309241 - DNA, 25 bp, Homo sapien
cccctcaatgtctgcagtttgctta

SEQ ID NO: 3309242 - DNA, 25 bp, Homo sapien
cctcaatgtctgcagtttgcttaaa

SEQ ID NO: 3309243 - DNA, 25 bp, Homo sapien
agccccctcaatgtctgcagtttgc

SEQ ID NO: 3309244 - DNA, 25 bp, Homo sapien
gccccctcaatgtctgcagtttgct

SEQ ID NO: 3309245 - DNA, 25 bp, Homo sapien
cactcagttccacaagtagaccact

SEQ ID NO: 3309246 - DNA, 25 bp, Homo sapien
gattgcaagacgaggccgtcgcagt

SEQ ID NO: 3309247 - DNA, 25 bp, Homo sapien
tcctgcgccagtgggtgcactcagt

SEQ ID NO: 3309248 - DNA, 25 bp, Homo sapien
agtgcagttcttggattgcaagacg

SEQ ID NO: 3309249 - DNA, 25 bp, Homo sapien
gtcagcaacttcaaagataatgaac

SEQ ID NO: 3309250 - DNA, 25 bp, Homo sapien
tcaaagataatgaacttagatatct

SEQ ID NO: 3309251 - DNA, 25 bp, Homo sapien
cttcctaattttggtggctggcttg

SEQ ID NO: 3309252 - DNA, 25 bp, Homo sapien
tttggtggctggcttgtcagcaact

SEQ ID NO: 3309253 - DNA, 25 bp, Homo sapien
ctgggcataacgtagtacaggctat

SEQ ID NO: 3309254 - DNA, 25 bp, Homo sapien
tacaggctattttctgcacactctg

SEQ ID NO: 3309255 - DNA, 25 bp, Homo sapien
tttctgataccctcgtccacagcgg

SEQ ID NO: 3309256 - DNA, 25 bp, Homo sapien
tgccgggttggtacaagtccttgta

SEQ ID NO: 3309257 - DNA, 25 bp, Homo sapien
gaggcaaacagtaaaaagtggatta

SEQ ID NO: 3309258 - DNA, 25 bp, Homo sapien
aggaggcaaacagtaaaaagtggat

SEQ ID NO: 3309259 - DNA, 25 bp, Homo sapien
ctgaaaggaggcaaacagtaaaaag

SEQ ID NO: 3309260 - DNA, 25 bp, Homo sapien
actagcagagtgatcttgagcccgc

SEQ ID NO: 3309261 - DNA, 25 bp, Homo sapien
caacacagccattatctggactagg

SEQ ID NO: 3309262 - DNA, 25 bp, Homo sapien
tatctggatcgtaacttccccgtgg

SEQ ID NO: 3309263 - DNA, 25 bp, Homo sapien
tcatcctttggaacagcatagtggt

SEQ ID NO: 3309264 - DNA, 25 bp, Homo sapien
tagattgagaccctgaagggccact

SEQ ID NO: 3309265 - DNA, 25 bp, Homo sapien
ctagattgagaccctgaagggccac

SEQ ID NO: 3309266 - DNA, 25 bp, Homo sapien
aaaattccgatcttcaacgggatca

SEQ ID NO: 3309267 - DNA, 25 bp, Homo sapien
acagtggcagttgtacttttcctct

SEQ ID NO: 3309268 - DNA, 25 bp, Homo sapien
gatgaggttgtgatcaatagtaata

SEQ ID NO: 3309269 - DNA, 25 bp, Homo sapien
cagtatcagagagtcgggcctgctt

SEQ ID NO: 3309270 - DNA, 25 bp, Homo sapien
tcttctggaggtaaactacttctta

SEQ ID NO: 3309271 - DNA, 25 bp, Homo sapien
ttattctggcagttgccttttgttt

SEQ ID NO: 3309272 - DNA, 25 bp, Homo sapien
caacaaacaacgttgatatttacca

SEQ ID NO: 3309273 - DNA, 25 bp, Homo sapien
tcttattctggcagttgccttttgt

SEQ ID NO: 3309274 - DNA, 25 bp, Homo sapien
tagggtgaatgtggatacaggtaac

SEQ ID NO: 3309275 - DNA, 25 bp, Homo sapien
gaataattgccacatgcaaaacgaa

SEQ ID NO: 3309276 - DNA, 25 bp, Homo sapien
taattgccacatgcaaaacgaaaca

SEQ ID NO: 3309277 - DNA, 25 bp, Homo sapien
aaacgaataattgccacatgcaaaa

SEQ ID NO: 3309278 - DNA, 25 bp, Homo sapien
ttaaaaacgaataattgccacatgc

SEQ ID NO: 3309279 - DNA, 25 bp, Homo sapien
catttagccttctgagctttctggg

SEQ ID NO: 3309280 - DNA, 25 bp, Homo sapien
gccttctgagctttctgggcagact

SEQ ID NO: 3309281 - DNA, 25 bp, Homo sapien
gagctttctgggcagacttggtgac

SEQ ID NO: 3309282 - DNA, 25 bp, Homo sapien
tctgagctttctgggcagacttggt

SEQ ID NO: 3309283 - DNA, 25 bp, Homo sapien
agccttcgatccatggctttgatga

SEQ ID NO: 3309284 - DNA, 25 bp, Homo sapien
ctttgatgacacacatggaatagtt

SEQ ID NO: 3309285 - DNA, 25 bp, Homo sapien
tcgatccatggctttgatgacacac

SEQ ID NO: 3309286 - DNA, 25 bp, Homo sapien
acacacatggaatagttgtccctga

SEQ ID NO: 3309287 - DNA, 25 bp, Homo sapien
tcttgagcaaatggcagttgtaata

SEQ ID NO: 3309288 - DNA, 25 bp, Homo sapien
tttttaacgtatctgctcctcttga

SEQ ID NO: 3309289 - DNA, 25 bp, Homo sapien
ttcttttttaacgtatctgctcctc

SEQ ID NO: 3309290 - DNA, 25 bp, Homo sapien
tgctcctcttgagcaaatggcagtt

SEQ ID NO: 3309291 - DNA, 25 bp, Homo sapien
aatgcaaagaattgttgttattcac

SEQ ID NO: 3309292 - DNA, 25 bp, Homo sapien
tgctaaatgcaaagaattgttgtta

SEQ ID NO: 3309293 - DNA, 25 bp, Homo sapien
aacttagtgccaattgctaaatgca

SEQ ID NO: 3309294 - DNA, 25 bp, Homo sapien
gccaattgctaaatgcaaagaattg

SEQ ID NO: 3309295 - DNA, 25 bp, Homo sapien
actgggatcccttcaggtggtcgac

SEQ ID NO: 3309296 - DNA, 25 bp, Homo sapien
ccttcaggtggtcgacactggagta

SEQ ID NO: 3309297 - DNA, 25 bp, Homo sapien
ggttcctgctcaaatgtcttccgta

SEQ ID NO: 3309298 - DNA, 25 bp, Homo sapien
gtggtcgacactggagtaagacttc

SEQ ID NO: 3309299 - DNA, 25 bp, Homo sapien
gccttagaacctgctgatacggatt

SEQ ID NO: 3309300 - DNA, 25 bp, Homo sapien
ccttagaacctgctgatacggattt

SEQ ID NO: 3309301 - DNA, 25 bp, Homo sapien
gctgccttagaacctgctgatacgg

SEQ ID NO: 3309302 - DNA, 25 bp, Homo sapien
tgccttagaacctgctgatacggat

SEQ ID NO: 3309303 - DNA, 25 bp, Homo sapien
gtactcttccaatggaaacattaag

SEQ ID NO: 3309304 - DNA, 25 bp, Homo sapien
acattaagaattttctcttctgatg

SEQ ID NO: 3309305 - DNA, 25 bp, Homo sapien
catctcttttggttaatttgtactc

SEQ ID NO: 3309306 - DNA, 25 bp, Homo sapien
tggttaatttgtactcttccaatgg

SEQ ID NO: 3309307 - DNA, 25 bp, Homo sapien
gcaaacattagctctgctttttgac

SEQ ID NO: 3309308 - DNA, 25 bp, Homo sapien
tttttttgcacaatatactgtggct

SEQ ID NO: 3309309 - DNA, 25 bp, Homo sapien
aatatactgtggctacaaattagct

SEQ ID NO: 3309310 - DNA, 25 bp, Homo sapien
tggctacaaattagctgtgatgcag

SEQ ID NO: 3309311 - DNA, 25 bp, Homo sapien
aaagctaaggctcttttctcagagt

SEQ ID NO: 3309312 - DNA, 25 bp, Homo sapien
gtattcagatagtcttgttaaagag

SEQ ID NO: 3309313 - DNA, 25 bp, Homo sapien
aatgattgcagacaagctgttttct

SEQ ID NO: 3309314 - DNA, 25 bp, Homo sapien
gctagcactccaaatgacatccact

SEQ ID NO: 3309315 - DNA, 25 bp, Homo sapien
cctgccagtacatttggtgttaggc

SEQ ID NO: 3309316 - DNA, 25 bp, Homo sapien
taccagccctgcctataacatacgt

SEQ ID NO: 3309317 - DNA, 25 bp, Homo sapien
ttttatgccaagtagagtagacagg

SEQ ID NO: 3309318 - DNA, 25 bp, Homo sapien
tgaattcgttgtctacctctcagaa

SEQ ID NO: 3309319 - DNA, 25 bp, Homo sapien
gacagacccctctataggagtgaca

SEQ ID NO: 3309320 - DNA, 25 bp, Homo sapien
caagggacgtcttctaggcactgga

SEQ ID NO: 3309321 - DNA, 25 bp, Homo sapien
gaggcaattacgtccagctacctga

SEQ ID NO: 3309322 - DNA, 25 bp, Homo sapien
tgtgacaggaatcaccctaggcgtt

SEQ ID NO: 3309323 - DNA, 25 bp, Homo sapien
tctgtccaatgcaaaccacatgagg

SEQ ID NO: 3309324 - DNA, 25 bp, Homo sapien
gaattgccagctgatctacaaatcc

SEQ ID NO: 3309325 - DNA, 25 bp, Homo sapien
ttggatgctggcctgactcactgct

SEQ ID NO: 3309326 - DNA, 25 bp, Homo sapien
cagtgtactggttaaacacatggac

SEQ ID NO: 3309327 - DNA, 25 bp, Homo sapien
ccggaagatgaatcttgggtgcatg

SEQ ID NO: 3309328 - DNA, 25 bp, Homo sapien
ggtgcatgtaaatcccattatagct

SEQ ID NO: 3309329 - DNA, 25 bp, Homo sapien
cacacgatcgagaggaaatccggag

SEQ ID NO: 3309330 - DNA, 25 bp, Homo sapien
ggctgtgatttattggtttgcacac

SEQ ID NO: 3309331 - DNA, 25 bp, Homo sapien
tcttgatctcatggaactcactggc

SEQ ID NO: 3309332 - DNA, 25 bp, Homo sapien
tattgagaaaggaatgcccagcctc

SEQ ID NO: 3309333 - DNA, 25 bp, Homo sapien
tattaggagtatggacaaactgctc

SEQ ID NO: 3309334 - DNA, 25 bp, Homo sapien
gatgactctgatgactctgctaatg

SEQ ID NO: 3309335 - DNA, 25 bp, Homo sapien
ctaactggaagatctgcaatggtcc

SEQ ID NO: 3309336 - DNA, 25 bp, Homo sapien
taactggaagatctgcaatggtcca

SEQ ID NO: 3309337 - DNA, 25 bp, Homo sapien
aactggaagatctgcaatggtccac

SEQ ID NO: 3309338 - DNA, 25 bp, Homo sapien
ctggaagatctgcaatggtccacat

SEQ ID NO: 3309339 - DNA, 25 bp, Homo sapien
gcaccagtaatcttcaggtccaaag

SEQ ID NO: 3309340 - DNA, 25 bp, Homo sapien
atgcaatgcgcacatacgccttccg

SEQ ID NO: 3309341 - DNA, 25 bp, Homo sapien
tgctggcgcgaaatctcaatgctca

SEQ ID NO: 3309342 - DNA, 25 bp, Homo sapien
gctctttgtggtacccgcggagctc

SEQ ID NO: 3309343 - DNA, 25 bp, Homo sapien
ctggtatcgtatccgaagaatatat

SEQ ID NO: 3309344 - DNA, 25 bp, Homo sapien
tatcgtatccgaagaatatataact

SEQ ID NO: 3309345 - DNA, 25 bp, Homo sapien
tgttaacaagcttctggtatcgtat

SEQ ID NO: 3309346 - DNA, 25 bp, Homo sapien
ttctggtatcgtatccgaagaatat

SEQ ID NO: 3309347 - DNA, 25 bp, Homo sapien
gctacaggagttattcatagtctga

SEQ ID NO: 3309348 - DNA, 25 bp, Homo sapien
ccaaccctcctgctacaggagttat

SEQ ID NO: 3309349 - DNA, 25 bp, Homo sapien
cctcctgctacaggagttattcata

SEQ ID NO: 3309350 - DNA, 25 bp, Homo sapien
cctgctacaggagttattcatagtc

SEQ ID NO: 3309351 - DNA, 25 bp, Homo sapien
tgggccttcaaaaagattgtatcaa

SEQ ID NO: 3309352 - DNA, 25 bp, Homo sapien
gctatgcaacagcaatgaaggttca

SEQ ID NO: 3309353 - DNA, 25 bp, Homo sapien
taacaaatgtttggatcctgatgac

SEQ ID NO: 3309354 - DNA, 25 bp, Homo sapien
taaacacccatcaagaaattatgcc

SEQ ID NO: 3309355 - DNA, 25 bp, Homo sapien
tccattccactaattgaaataacag

SEQ ID NO: 3309356 - DNA, 25 bp, Homo sapien
agtgaatcttgaagtgcaatgcaaa

SEQ ID NO: 3309357 - DNA, 25 bp, Homo sapien
aacagtatgtccacatgctagagta

SEQ ID NO: 3309358 - DNA, 25 bp, Homo sapien
tgctagagtagtgagtaagtgaatc

SEQ ID NO: 3309359 - DNA, 25 bp, Homo sapien
gcttcttcaggctcaataaggaaat

SEQ ID NO: 3309360 - DNA, 25 bp, Homo sapien
ctactatgtggtccttctgatgaac

SEQ ID NO: 3309361 - DNA, 25 bp, Homo sapien
cagtacaggttcacgggcttattct

SEQ ID NO: 3309362 - DNA, 25 bp, Homo sapien
gcagggcttgctttacagtacaggt

SEQ ID NO: 3309363 - DNA, 25 bp, Homo sapien
ctgggagttcatgaaaaaagtcatc

SEQ ID NO: 3309364 - DNA, 25 bp, Homo sapien
gggagttcatgaaaaaagtcatcat

SEQ ID NO: 3309365 - DNA, 25 bp, Homo sapien
tgggagttcatgaaaaaagtcatca

SEQ ID NO: 3309366 - DNA, 25 bp, Homo sapien
ttccaattcaaatctgttgttattt

SEQ ID NO: 3309367 - DNA, 25 bp, Homo sapien
gttccaattcaaatctgttgttatt

SEQ ID NO: 3309368 - DNA, 25 bp, Homo sapien
tttctataaatgcacaccccagctg

SEQ ID NO: 3309369 - DNA, 25 bp, Homo sapien
ttttctataaatgcacaccccagct

SEQ ID NO: 3309370 - DNA, 25 bp, Homo sapien
ttctataaatgcacaccccagctgc

SEQ ID NO: 3309371 - DNA, 25 bp, Homo sapien
gaacagctgctttctaagtgtttgg

SEQ ID NO: 3309372 - DNA, 25 bp, Homo sapien
ttaatacatttagaagaacagctgc

SEQ ID NO: 3309373 - DNA, 25 bp, Homo sapien
acagctgctttctaagtgtttggca

SEQ ID NO: 3309374 - DNA, 25 bp, Homo sapien
tgctttctaagtgtttggcatccat

SEQ ID NO: 3309375 - DNA, 25 bp, Homo sapien
cacaacaacttttgagcccagataa

SEQ ID NO: 3309376 - DNA, 25 bp, Homo sapien
tctgagctctccacacagttgtaaa

SEQ ID NO: 3309377 - DNA, 25 bp, Homo sapien
gatggtctctaaccagttccgactt

SEQ ID NO: 3309378 - DNA, 25 bp, Homo sapien
tatgggctgagtattcacttctcca

SEQ ID NO: 3309379 - DNA, 25 bp, Homo sapien
tagatgtctgcaaatgcacccttta

SEQ ID NO: 3309380 - DNA, 25 bp, Homo sapien
agatgtctgcaaatgcaccctttaa

SEQ ID NO: 3309381 - DNA, 25 bp, Homo sapien
ttagatgtctgcaaatgcacccttt

SEQ ID NO: 3309382 - DNA, 25 bp, Homo sapien
gatgtctgcaaatgcaccctttaac

SEQ ID NO: 3309383 - DNA, 25 bp, Homo sapien
ggagggaaatgatatggtggagctc

SEQ ID NO: 3309384 - DNA, 25 bp, Homo sapien
caggagggaaatgatatggtggagc

SEQ ID NO: 3309385 - DNA, 25 bp, Homo sapien
cccaggagggaaatgatatggtgga

SEQ ID NO: 3309386 - DNA, 25 bp, Homo sapien
gaaatgatatggtggagctctccat

SEQ ID NO: 3309387 - DNA, 25 bp, Homo sapien
tctgcctacagtgaattctacatgg

SEQ ID NO: 3309388 - DNA, 25 bp, Homo sapien
gcaaactgtctaccaaactagtgag

SEQ ID NO: 3309389 - DNA, 25 bp, Homo sapien
ccaactttggtggacagattctgca

SEQ ID NO: 3309390 - DNA, 25 bp, Homo sapien
cactacatacaagaggcaagaaccc

SEQ ID NO: 3309391 - DNA, 25 bp, Homo sapien
taggagggtatttccgaagaggcca

SEQ ID NO: 3309392 - DNA, 25 bp, Homo sapien
tccagccattgaaagctaccttggg

SEQ ID NO: 3309393 - DNA, 25 bp, Homo sapien
cgtagcagctacagatggattacca

SEQ ID NO: 3309394 - DNA, 25 bp, Homo sapien
gatgttttccatattcgtagcagct

SEQ ID NO: 3309395 - DNA, 25 bp, Homo sapien
tatctgcggccctaaatgagaacag

SEQ ID NO: 3309396 - DNA, 25 bp, Homo sapien
tgctactgatgtggacaggacacag

SEQ ID NO: 3309397 - DNA, 25 bp, Homo sapien
taatgggccacatacgttctctggg

SEQ ID NO: 3309398 - DNA, 25 bp, Homo sapien
gatacaagagggtggttctctggca

SEQ ID NO: 3309399 - DNA, 25 bp, Homo sapien
gatggcaatctcatgttaggtcccc

SEQ ID NO: 3309400 - DNA, 25 bp, Homo sapien
ttgtaattctccagagtgtgctgct

SEQ ID NO: 3309401 - DNA, 25 bp, Homo sapien
agtgtcctgcgtgagcttcttcatc

SEQ ID NO: 3309402 - DNA, 25 bp, Homo sapien
ggtcccctccaatcctagactggaa

SEQ ID NO: 3309403 - DNA, 25 bp, Homo sapien
tcttcttggcatgttatggtctcaa

SEQ ID NO: 3309404 - DNA, 25 bp, Homo sapien
ttaggtaggcacacatgaaatatta

SEQ ID NO: 3309405 - DNA, 25 bp, Homo sapien
ctggattgtctgcatttgcatagta

SEQ ID NO: 3309406 - DNA, 25 bp, Homo sapien
ggtctcaattagcaattctattgtc

SEQ ID NO: 3309407 - DNA, 25 bp, Homo sapien
ccctttcacttttattgacatggac

SEQ ID NO: 3309408 - DNA, 25 bp, Homo sapien
ttattgacatggactgtggagcact

SEQ ID NO: 3309409 - DNA, 25 bp, Homo sapien
tacacactaaattcagaccaccttc

SEQ ID NO: 3309410 - DNA, 25 bp, Homo sapien
tttacacactaaattcagaccacct

SEQ ID NO: 3309411 - DNA, 25 bp, Homo sapien
tgttctctggcaatgcagcgaccct

SEQ ID NO: 3309412 - DNA, 25 bp, Homo sapien
tgcattttgtgcaaaatcggccacc

SEQ ID NO: 3309413 - DNA, 25 bp, Homo sapien
atgcagcgaccctcagatacctttg

SEQ ID NO: 3309414 - DNA, 25 bp, Homo sapien
tttgtgcaaaatcggccacctgttg

SEQ ID NO: 3309415 - DNA, 25 bp, Homo sapien
catcttcaatgtactttacaaacat

SEQ ID NO: 3309416 - DNA, 25 bp, Homo sapien
atggctattaatatagcgcatctcc

SEQ ID NO: 3309417 - DNA, 25 bp, Homo sapien
tggctattaatatagcgcatctcca

SEQ ID NO: 3309418 - DNA, 25 bp, Homo sapien
ggctattaatatagcgcatctccat

SEQ ID NO: 3309419 - DNA, 25 bp, Homo sapien
tctatttttgtaatggagagggcat

SEQ ID NO: 3309420 - DNA, 25 bp, Homo sapien
tgagggaactaaactgacagctgtg

SEQ ID NO: 3309421 - DNA, 25 bp, Homo sapien
cttgagtgcgtcatttcagaaggga

SEQ ID NO: 3309422 - DNA, 25 bp, Homo sapien
aaggagagcgcgaatccaattaaaa

SEQ ID NO: 3309423 - DNA, 25 bp, Homo sapien
ggcaagcccaccggcagcatgctgt

SEQ ID NO: 3309424 - DNA, 25 bp, Homo sapien
ttttctaatccagcaccaaccgaac

SEQ ID NO: 3309425 - DNA, 25 bp, Homo sapien
ttggcaagcccaccggcagcatgct

SEQ ID NO: 3309426 - DNA, 25 bp, Homo sapien
caagcccaccggcagcatgctgttg

SEQ ID NO: 3309427 - DNA, 25 bp, Homo sapien
ctaaacaccgggctttcatgttgga

SEQ ID NO: 3309428 - DNA, 25 bp, Homo sapien
cttccagctgccgccctcaaacatg

SEQ ID NO: 3309429 - DNA, 25 bp, Homo sapien
cactaactaaacaccgggctttcat

SEQ ID NO: 3309430 - DNA, 25 bp, Homo sapien
tgctctctccactaactaaacaccg

SEQ ID NO: 3309431 - DNA, 25 bp, Homo sapien
tgctgacaggttaactgctctctaa

SEQ ID NO: 3309432 - DNA, 25 bp, Homo sapien
tatctaagctactcctagattcccc

SEQ ID NO: 3309433 - DNA, 25 bp, Homo sapien
tgacaggttaactgctctctaatga

SEQ ID NO: 3309434 - DNA, 25 bp, Homo sapien
gattctgagctagagccaactatct

SEQ ID NO: 3309435 - DNA, 25 bp, Homo sapien
aacccttcacatagccaaaaatctg

SEQ ID NO: 3309436 - DNA, 25 bp, Homo sapien
aatatctttactactcattaatagg

SEQ ID NO: 3309437 - DNA, 25 bp, Homo sapien
cattaataggtagtggatcatcata

SEQ ID NO: 3309438 - DNA, 25 bp, Homo sapien
aaatattattaagagcatcataagg

SEQ ID NO: 3309439 - DNA, 25 bp, Homo sapien
cttgggttacctggtcgacagagaa

SEQ ID NO: 3309440 - DNA, 25 bp, Homo sapien
tcgacagagaatggacggcaccatg

SEQ ID NO: 3309441 - DNA, 25 bp, Homo sapien
gacggcaccatgagtatacaacatc

SEQ ID NO: 3309442 - DNA, 25 bp, Homo sapien
aaggagatagggactgtgcctgtga

SEQ ID NO: 3309443 - DNA, 25 bp, Homo sapien
ttaagcgtgaacaaagtgcacactc

SEQ ID NO: 3309444 - DNA, 25 bp, Homo sapien
aattccttatttctatgagggcggg

SEQ ID NO: 3309445 - DNA, 25 bp, Homo sapien
caggtagtggacaataaagggcaga

SEQ ID NO: 3309446 - DNA, 25 bp, Homo sapien
tctagccatcatgagtgtcaggata

SEQ ID NO: 3309447 - DNA, 25 bp, Homo sapien
cactgttcaggcttattaactggca

SEQ ID NO: 3309448 - DNA, 25 bp, Homo sapien
cataaggcacaatgtagagcacaga

SEQ ID NO: 3309449 - DNA, 25 bp, Homo sapien
aacagataatctgacaatcgtttca

SEQ ID NO: 3309450 - DNA, 25 bp, Homo sapien
gccaggcatgccaaacagataatct

SEQ ID NO: 3309451 - DNA, 25 bp, Homo sapien
tttggaatgaagaccatatgatgaa

SEQ ID NO: 3309452 - DNA, 25 bp, Homo sapien
cattcccagttagataagtaaatat

SEQ ID NO: 3309453 - DNA, 25 bp, Homo sapien
gtcaacattcccagttagataagta

SEQ ID NO: 3309454 - DNA, 25 bp, Homo sapien
gaatgaagaccatatgatgaactgt

SEQ ID NO: 3309455 - DNA, 25 bp, Homo sapien
cttatgttgacttgtataaagagtt

SEQ ID NO: 3309456 - DNA, 25 bp, Homo sapien
ttcttatgttgacttgtataaagag

SEQ ID NO: 3309457 - DNA, 25 bp, Homo sapien
tcttatgttgacttgtataaagagt

SEQ ID NO: 3309458 - DNA, 25 bp, Homo sapien
ttatgttgacttgtataaagagtta

SEQ ID NO: 3309459 - DNA, 25 bp, Homo sapien
ttccttcaaatttaagtgtgcttaa

SEQ ID NO: 3309460 - DNA, 25 bp, Homo sapien
aatccctgaagtccatgcctttgca

SEQ ID NO: 3309461 - DNA, 25 bp, Homo sapien
gcacctaccacccaagaaatgtaca

SEQ ID NO: 3309462 - DNA, 25 bp, Homo sapien
ttggtgcacctaccacccaagaaat

SEQ ID NO: 3309463 - DNA, 25 bp, Homo sapien
tccctgaagtccatgcctttgcatc

SEQ ID NO: 3309464 - DNA, 25 bp, Homo sapien
tgagcagatatatcatagtcatggc

SEQ ID NO: 3309465 - DNA, 25 bp, Homo sapien
tagagttaggtaattgctctaccac

SEQ ID NO: 3309466 - DNA, 25 bp, Homo sapien
tactcatttactacttgaccatttg

SEQ ID NO: 3309467 - DNA, 25 bp, Homo sapien
tagcaaaggtgaaaagcataataag

SEQ ID NO: 3309468 - DNA, 25 bp, Homo sapien
gcaactgcagacctggtcactgtcc

SEQ ID NO: 3309469 - DNA, 25 bp, Homo sapien
ggtcactgtcccatcaggaatgttt

SEQ ID NO: 3309470 - DNA, 25 bp, Homo sapien
ttaggcaactgcagacctggtcact

SEQ ID NO: 3309471 - DNA, 25 bp, Homo sapien
agacctggtcactgtcccatcagga

SEQ ID NO: 3309472 - DNA, 25 bp, Homo sapien
cggctgtggagcaatgctggatgtg

SEQ ID NO: 3309473 - DNA, 25 bp, Homo sapien
ctggatgtggctttcagcttcacca

SEQ ID NO: 3309474 - DNA, 25 bp, Homo sapien
cccagtgtgctaagtggtgccttca

SEQ ID NO: 3309475 - DNA, 25 bp, Homo sapien
ggcaggcattaacgcaacagcttta

SEQ ID NO: 3309476 - DNA, 25 bp, Homo sapien
taaccatggattacatcccggcatg

SEQ ID NO: 3309477 - DNA, 25 bp, Homo sapien
tatggcaggaaacaactaatgtggg

SEQ ID NO: 3309478 - DNA, 25 bp, Homo sapien
aagtccccaggatagaggcttccgg

SEQ ID NO: 3309479 - DNA, 25 bp, Homo sapien
tacacatggagagcactacgaaaag

SEQ ID NO: 3309480 - DNA, 25 bp, Homo sapien
tggagagccaagcaacagaaggcct

SEQ ID NO: 3309481 - DNA, 25 bp, Homo sapien
aaaggacctacagcgagtgccaagt

SEQ ID NO: 3309482 - DNA, 25 bp, Homo sapien
ttttccttggtacatacagaaagag

SEQ ID NO: 3309483 - DNA, 25 bp, Homo sapien
cacattgcttttccttggtacatac

SEQ ID NO: 3309484 - DNA, 25 bp, Homo sapien
gaaagagagatctagtgtctcttct

SEQ ID NO: 3309485 - DNA, 25 bp, Homo sapien
cagaaagagagatctagtgtctctt

SEQ ID NO: 3309486 - DNA, 25 bp, Homo sapien
taagtccctggctgaacagatgcat

SEQ ID NO: 3309487 - DNA, 25 bp, Homo sapien
caagggataacactaaatggtgcaa

SEQ ID NO: 3309488 - DNA, 25 bp, Homo sapien
caacatacacattgtggagagacac

SEQ ID NO: 3309489 - DNA, 25 bp, Homo sapien
tataagggcattgattcccatcatc

SEQ ID NO: 3309490 - DNA, 25 bp, Homo sapien
cctaatagtgagtttttatctgtgc

SEQ ID NO: 3309491 - DNA, 25 bp, Homo sapien
agaaacgaaagtgccccacagttgc

SEQ ID NO: 3309492 - DNA, 25 bp, Homo sapien
tattcaaacactccaagatctgtgg

SEQ ID NO: 3309493 - DNA, 25 bp, Homo sapien
tctatgtcacatgttctcgtaattg

SEQ ID NO: 3309494 - DNA, 25 bp, Homo sapien
ccaaggaacatgagttgtagcccca

SEQ ID NO: 3309495 - DNA, 25 bp, Homo sapien
caaggaagcataagactcagaggca

SEQ ID NO: 3309496 - DNA, 25 bp, Homo sapien
tcctgcagtgagaacctggagtctt

SEQ ID NO: 3309497 - DNA, 25 bp, Homo sapien
tttagacgggacatgtgctctccag

SEQ ID NO: 3309498 - DNA, 25 bp, Homo sapien
tcggcgtggaggttctcgtaatact

SEQ ID NO: 3309499 - DNA, 25 bp, Homo sapien
tatagtggtgtaagcacgacagcca

SEQ ID NO: 3309500 - DNA, 25 bp, Homo sapien
ggtcatatgcttaagcagggctcca

SEQ ID NO: 3309501 - DNA, 25 bp, Homo sapien
tagttgcagaacactgtcctagaga

SEQ ID NO: 3309502 - DNA, 25 bp, Homo sapien
tatcgctcaaggcaaacttactcta

SEQ ID NO: 3309503 - DNA, 25 bp, Homo sapien
aacactagtgtttgaatatcgctca

SEQ ID NO: 3309504 - DNA, 25 bp, Homo sapien
cagcaccaagtttctgtgagtaaaa

SEQ ID NO: 3309505 - DNA, 25 bp, Homo sapien
catccttgagctaagagatactgga

SEQ ID NO: 3309506 - DNA, 25 bp, Homo sapien
tcagagggaatgctgtccggaaacc

SEQ ID NO: 3309507 - DNA, 25 bp, Homo sapien
tttgtatgcccagtaacagcaggcg

SEQ ID NO: 3309508 - DNA, 25 bp, Homo sapien
gaaagttgttgcctacagcctagag

SEQ ID NO: 3309509 - DNA, 25 bp, Homo sapien
caaggaaagtgttaacggtggctca

SEQ ID NO: 3309510 - DNA, 25 bp, Homo sapien
cagagttataaactggtcgactacc

SEQ ID NO: 3309511 - DNA, 25 bp, Homo sapien
tggtttgaacaagcagccggttccc

SEQ ID NO: 3309512 - DNA, 25 bp, Homo sapien
gctgctaacacttcaaactaggcgg

SEQ ID NO: 3309513 - DNA, 25 bp, Homo sapien
agagctccgggattttcatttctac

SEQ ID NO: 3309514 - DNA, 25 bp, Homo sapien
gcatctacggtatgtcacacagcca

SEQ ID NO: 3309515 - DNA, 25 bp, Homo sapien
agctgaaagggcacaagacactcca

SEQ ID NO: 3309516 - DNA, 25 bp, Homo sapien
gacacatttccttagctgagcgccc

SEQ ID NO: 3309517 - DNA, 25 bp, Homo sapien
tgcaatatgcaacaacgtgcgcgtg

SEQ ID NO: 3309518 - DNA, 25 bp, Homo sapien
ttccagttgaaagcaacgaggcaaa

SEQ ID NO: 3309519 - DNA, 25 bp, Homo sapien
ggaagaagctaagggaggtggccgc

SEQ ID NO: 3309520 - DNA, 25 bp, Homo sapien
aattgaggaagtcaagagaactggg

SEQ ID NO: 3309521 - DNA, 25 bp, Homo sapien
aagcttcttgactagttgggaaagt

SEQ ID NO: 3309522 - DNA, 25 bp, Homo sapien
gcgggccgctgtcgcccgcagacct

SEQ ID NO: 3309523 - DNA, 25 bp, Homo sapien
gccagggcaggtagcacgagcattt

SEQ ID NO: 3309524 - DNA, 25 bp, Homo sapien
ttgcagcaagtatcccagtcccagt

SEQ ID NO: 3309525 - DNA, 25 bp, Homo sapien
ggcggagccagtgccgctggcgctg

SEQ ID NO: 3309526 - DNA, 25 bp, Homo sapien
aatgccttctaactgacgtctcccg

SEQ ID NO: 3309527 - DNA, 25 bp, Homo sapien
cgcacgccgaagtctggactgctct

SEQ ID NO: 3309528 - DNA, 25 bp, Homo sapien
gaagaaataacgacaaccaagcgcc

SEQ ID NO: 3309529 - DNA, 25 bp, Homo sapien
ctgaatccgtgcaccgcgaagcagt

SEQ ID NO: 3309530 - DNA, 25 bp, Homo sapien
tattcatacatcgaatagaccataa

SEQ ID NO: 3309531 - DNA, 25 bp, Homo sapien
attctcaagatggatgggagcagtc

SEQ ID NO: 3309532 - DNA, 25 bp, Homo sapien
tttattctcaagatggatgggagca

SEQ ID NO: 3309533 - DNA, 25 bp, Homo sapien
ttcatacatcgaatagaccataata

SEQ ID NO: 3309534 - DNA, 25 bp, Homo sapien
tctgctcctttctggttcttctgca

SEQ ID NO: 3309535 - DNA, 25 bp, Homo sapien
tttctggttcttctgcatccaccat

SEQ ID NO: 3309536 - DNA, 25 bp, Homo sapien
tcctttctggttcttctgcatccac

SEQ ID NO: 3309537 - DNA, 25 bp, Homo sapien
gctcctttctggttcttctgcatcc

SEQ ID NO: 3309538 - DNA, 25 bp, Homo sapien
caggattcagggcatttggaagacg

SEQ ID NO: 3309539 - DNA, 25 bp, Homo sapien
caaggaccagtgtgaccaggattca

SEQ ID NO: 3309540 - DNA, 25 bp, Homo sapien
ttattcgtaagtggagtagagtgcc

SEQ ID NO: 3309541 - DNA, 25 bp, Homo sapien
tggaagacgtagcaggatatgtaac

SEQ ID NO: 3309542 - DNA, 25 bp, Homo sapien
ctctctctatattgggctctgtcat

SEQ ID NO: 3309543 - DNA, 25 bp, Homo sapien
cctctctctatattgggctctgtca

SEQ ID NO: 3309544 - DNA, 25 bp, Homo sapien
gaaccactattctcttagtagagga

SEQ ID NO: 3309545 - DNA, 25 bp, Homo sapien
caaccactggttgtgctaagagaac

SEQ ID NO: 3309546 - DNA, 25 bp, Homo sapien
catacctttagggattcaccctctt

SEQ ID NO: 3309547 - DNA, 25 bp, Homo sapien
taatatgcgcttggctggcacaacc

SEQ ID NO: 3309548 - DNA, 25 bp, Homo sapien
gccatgtactgactacacttttcaa

SEQ ID NO: 3309549 - DNA, 25 bp, Homo sapien
ctgtgaattggcacctgctttggcc

SEQ ID NO: 3309550 - DNA, 25 bp, Homo sapien
ttgctgttcccaattggcccactga

SEQ ID NO: 3309551 - DNA, 25 bp, Homo sapien
cagggcccagactgccatgtactga

SEQ ID NO: 3309552 - DNA, 25 bp, Homo sapien
gagtctctaactctctgcaccattg

SEQ ID NO: 3309553 - DNA, 25 bp, Homo sapien
ttatgtcctcccacatggttgctgc

SEQ ID NO: 3309554 - DNA, 25 bp, Homo sapien
cgtcatgtgtctttcaggagttgca

SEQ ID NO: 3309555 - DNA, 25 bp, Homo sapien
actttggcctgtccctgcatttttg

SEQ ID NO: 3309556 - DNA, 25 bp, Homo sapien
gaataagcaagaagacagggaacca

SEQ ID NO: 3309557 - DNA, 25 bp, Homo sapien
caaataccgacacacaggtggttgg

SEQ ID NO: 3309558 - DNA, 25 bp, Homo sapien
cagggaaccaaatcagaacctctgg

SEQ ID NO: 3309559 - DNA, 25 bp, Homo sapien
ggagaacagcatgccaatcactgag

SEQ ID NO: 3309560 - DNA, 25 bp, Homo sapien
gtcccattgcccctctgagtggaat

SEQ ID NO: 3309561 - DNA, 25 bp, Homo sapien
ggtcccattgcccctctgagtggaa

SEQ ID NO: 3309562 - DNA, 25 bp, Homo sapien
gggtcccattgcccctctgagtgga

SEQ ID NO: 3309563 - DNA, 25 bp, Homo sapien
ggggtcccattgcccctctgagtgg

SEQ ID NO: 3309564 - DNA, 25 bp, Homo sapien
agctgctttggtcggatctctggtg

SEQ ID NO: 3309565 - DNA, 25 bp, Homo sapien
ctcatggacttcttgatccccgatc

SEQ ID NO: 3309566 - DNA, 25 bp, Homo sapien
ttttgttatgattttctcatggact

SEQ ID NO: 3309567 - DNA, 25 bp, Homo sapien
tggtcggatctctggtgggaggact

SEQ ID NO: 3309568 - DNA, 25 bp, Homo sapien
tgtagtatattagtcattcgatgaa

SEQ ID NO: 3309569 - DNA, 25 bp, Homo sapien
gtcattcgatgaagtacctcatcct

SEQ ID NO: 3309570 - DNA, 25 bp, Homo sapien
ctgtgaaatggtctctcggtttatc

SEQ ID NO: 3309571 - DNA, 25 bp, Homo sapien
taatccccgagaaccatactagtaa

SEQ ID NO: 3309572 - DNA, 25 bp, Homo sapien
tggtagtcagaaaggctgcatacat

SEQ ID NO: 3309573 - DNA, 25 bp, Homo sapien
ctggtagtcagaaaggctgcataca

SEQ ID NO: 3309574 - DNA, 25 bp, Homo sapien
tagctccaaaacagaaacgacattt

SEQ ID NO: 3309575 - DNA, 25 bp, Homo sapien
aatagctccaaaacagaaacgacat

SEQ ID NO: 3309576 - DNA, 25 bp, Homo sapien
taaatagctccaaaacagaaacgac

SEQ ID NO: 3309577 - DNA, 25 bp, Homo sapien
agctccaaaacagaaacgacattta

SEQ ID NO: 3309578 - DNA, 25 bp, Homo sapien
cagtccaggctacgtgtgacaagat

SEQ ID NO: 3309579 - DNA, 25 bp, Homo sapien
catcttctgtgggaacccgtagtac

SEQ ID NO: 3309580 - DNA, 25 bp, Homo sapien
ccaagaggtctatgggagtttcaca

SEQ ID NO: 3309581 - DNA, 25 bp, Homo sapien
gcctggctgatacctctgagagaag

SEQ ID NO: 3309582 - DNA, 25 bp, Homo sapien
gaatttgtgttgcatccttttgcag

SEQ ID NO: 3309583 - DNA, 25 bp, Homo sapien
atttgtgttgcatccttttgcaggg

SEQ ID NO: 3309584 - DNA, 25 bp, Homo sapien
aatttgtgttgcatccttttgcagg

SEQ ID NO: 3309585 - DNA, 25 bp, Homo sapien
gctgacacactattacacttatata

SEQ ID NO: 3309586 - DNA, 25 bp, Homo sapien
ctgctgctgacacactattacactt

SEQ ID NO: 3309587 - DNA, 25 bp, Homo sapien
cactattacacttatatacagacac

SEQ ID NO: 3309588 - DNA, 25 bp, Homo sapien
gacacactattacacttatatacag

SEQ ID NO: 3309589 - DNA, 25 bp, Homo sapien
catttactaagtgattagcatatgt

SEQ ID NO: 3309590 - DNA, 25 bp, Homo sapien
aagttaagtgagtttcccagtgcca

SEQ ID NO: 3309591 - DNA, 25 bp, Homo sapien
caggaggtttaatccttatccccat

SEQ ID NO: 3309592 - DNA, 25 bp, Homo sapien
catacaggaactaagtgactcaaat

SEQ ID NO: 3309593 - DNA, 25 bp, Homo sapien
ctcattgccagggaagctgtcactg

SEQ ID NO: 3309594 - DNA, 25 bp, Homo sapien
ccttgagggcactgtcccatggata

SEQ ID NO: 3309595 - DNA, 25 bp, Homo sapien
gaagaatagctgtcctcactgaaat

SEQ ID NO: 3309596 - DNA, 25 bp, Homo sapien
tctcagtgtaggaagacctgtgctt

SEQ ID NO: 3309597 - DNA, 25 bp, Homo sapien
tctcttcccgatctacatttgctga

SEQ ID NO: 3309598 - DNA, 25 bp, Homo sapien
cttctcttcccgatctacatttgct

SEQ ID NO: 3309599 - DNA, 25 bp, Homo sapien
tctggtatctcagtgtcccatctgc

SEQ ID NO: 3309600 - DNA, 25 bp, Homo sapien
cttctggtatctcagtgtcccatct

SEQ ID NO: 3309601 - DNA, 25 bp, Homo sapien
tttgccgcaagatatctggtctccc

SEQ ID NO: 3309602 - DNA, 25 bp, Homo sapien
gcaagatatctggtctccctcaaag

SEQ ID NO: 3309603 - DNA, 25 bp, Homo sapien
tatctggtctccctcaaagaacact

SEQ ID NO: 3309604 - DNA, 25 bp, Homo sapien
ttctcgttgtttgccgcaagatatc

SEQ ID NO: 3309605 - DNA, 25 bp, Homo sapien
gtgctggagaagacgacatcgccta

SEQ ID NO: 3309606 - DNA, 25 bp, Homo sapien
tggagaagacgacatcgcctaccac

SEQ ID NO: 3309607 - DNA, 25 bp, Homo sapien
ttctgagtgctggagaagacgacat

SEQ ID NO: 3309608 - DNA, 25 bp, Homo sapien
agaagacgacatcgcctaccaccat

SEQ ID NO: 3309609 - DNA, 25 bp, Homo sapien
agttctcttgtattttttgactcta

SEQ ID NO: 3309610 - DNA, 25 bp, Homo sapien
tgactctatcccactccagagtctt

SEQ ID NO: 3309611 - DNA, 25 bp, Homo sapien
tttttgactctatcccactccagag

SEQ ID NO: 3309612 - DNA, 25 bp, Homo sapien
tcttgtattttttgactctatccca

SEQ ID NO: 3309613 - DNA, 25 bp, Homo sapien
cccagccatgtagctgaatgtcctc

SEQ ID NO: 3309614 - DNA, 25 bp, Homo sapien
gagtggggccacctaaagctttgct

SEQ ID NO: 3309615 - DNA, 25 bp, Homo sapien
gtagctgaatgtcctcaatttcccc

SEQ ID NO: 3309616 - DNA, 25 bp, Homo sapien
tcaaatatcttgagggggaacccag

SEQ ID NO: 3309617 - DNA, 25 bp, Homo sapien
tttggtctgcctagccccctgaatc

SEQ ID NO: 3309618 - DNA, 25 bp, Homo sapien
ttggtctgcctagccccctgaatct

SEQ ID NO: 3309619 - DNA, 25 bp, Homo sapien
tggtctgcctagccccctgaatctc

SEQ ID NO: 3309620 - DNA, 25 bp, Homo sapien
ctggtagaggcctgcacctagcgga

SEQ ID NO: 3309621 - DNA, 25 bp, Homo sapien
agcggaacagcttttatatgtctac

SEQ ID NO: 3309622 - DNA, 25 bp, Homo sapien
ttatagccagactatagcattaagt

SEQ ID NO: 3309623 - DNA, 25 bp, Homo sapien
taagtagccagatggttacatgctg

SEQ ID NO: 3309624 - DNA, 25 bp, Homo sapien
ggcacatagggtctttggccacagc

SEQ ID NO: 3309625 - DNA, 25 bp, Homo sapien
tcctgaacaccataggcacataggg

SEQ ID NO: 3309626 - DNA, 25 bp, Homo sapien
tcacagtatgaaactgtcctgaaca

SEQ ID NO: 3309627 - DNA, 25 bp, Homo sapien
cagtatgaaactgtcctgaacacca

SEQ ID NO: 3309628 - DNA, 25 bp, Homo sapien
ttaatatagtatctttactactctt

SEQ ID NO: 3309629 - DNA, 25 bp, Homo sapien
taatatagtatctttactactcttc

SEQ ID NO: 3309630 - DNA, 25 bp, Homo sapien
aatatagtatctttactactcttca

SEQ ID NO: 3309631 - DNA, 25 bp, Homo sapien
tatagtatctttactactcttcatg

SEQ ID NO: 3309632 - DNA, 25 bp, Homo sapien
gatacatttggattaggcttcaggt

SEQ ID NO: 3309633 - DNA, 25 bp, Homo sapien
tattggcctaaactctacagtggta

SEQ ID NO: 3309634 - DNA, 25 bp, Homo sapien
gaggtttttatactagccaaggata

SEQ ID NO: 3309635 - DNA, 25 bp, Homo sapien
tgcctccaacgaaggttagccatgg

SEQ ID NO: 3309636 - DNA, 25 bp, Homo sapien
gggagtaattagtgcaacagaagaa

SEQ ID NO: 3309637 - DNA, 25 bp, Homo sapien
atcatctgtaatcttgtgcttttgg

SEQ ID NO: 3309638 - DNA, 25 bp, Homo sapien
cagaatgctagggagtaattagtgc

SEQ ID NO: 3309639 - DNA, 25 bp, Homo sapien
aagtgtaccctttactagagatggc

SEQ ID NO: 3309640 - DNA, 25 bp, Homo sapien
ctttcagagccaatgtcatgttgct

SEQ ID NO: 3309641 - DNA, 25 bp, Homo sapien
tcttctgctggtagcggaacctctg

SEQ ID NO: 3309642 - DNA, 25 bp, Homo sapien
gaagactctgttaggtcctctgtca

SEQ ID NO: 3309643 - DNA, 25 bp, Homo sapien
catgttgctgttgtgcgtgaagact

SEQ ID NO: 3309644 - DNA, 25 bp, Homo sapien
acaggaatgaatagctttctctcag

SEQ ID NO: 3309645 - DNA, 25 bp, Homo sapien
aacaggaatgaatagctttctctca

SEQ ID NO: 3309646 - DNA, 25 bp, Homo sapien
ggaatgaatagctttctctcaggtg

SEQ ID NO: 3309647 - DNA, 25 bp, Homo sapien
caggaatgaatagctttctctcagg

SEQ ID NO: 3309648 - DNA, 25 bp, Homo sapien
gtatatgtgctgctgaagcgagcac

SEQ ID NO: 3309649 - DNA, 25 bp, Homo sapien
agcattccaattttagtatatgtgc

SEQ ID NO: 3309650 - DNA, 25 bp, Homo sapien
cacgaatttgcgtgccatccttgcg

SEQ ID NO: 3309651 - DNA, 25 bp, Homo sapien
caggggccatgctaatcttctctgt

SEQ ID NO: 3309652 - DNA, 25 bp, Homo sapien
gagagagtccctacagtattcactt

SEQ ID NO: 3309653 - DNA, 25 bp, Homo sapien
gaatacctcattttccctatgtgtg

SEQ ID NO: 3309654 - DNA, 25 bp, Homo sapien
tgtgcctaaatcgtttggtaacctc

SEQ ID NO: 3309655 - DNA, 25 bp, Homo sapien
gtgtgtatgagagagtccctacagt

SEQ ID NO: 3309656 - DNA, 25 bp, Homo sapien
ggaatctgagagtcgtttaggatac

SEQ ID NO: 3309657 - DNA, 25 bp, Homo sapien
ctgagagtcgtttaggatacaccat

SEQ ID NO: 3309658 - DNA, 25 bp, Homo sapien
aatctgagagtcgtttaggatacac

SEQ ID NO: 3309659 - DNA, 25 bp, Homo sapien
tttggaatctgagagtcgtttagga

SEQ ID NO: 3309660 - DNA, 25 bp, Homo sapien
tgtagtcttagaggaccccaaagct

SEQ ID NO: 3309661 - DNA, 25 bp, Homo sapien
gatcccctcatggttccggcagttg

SEQ ID NO: 3309662 - DNA, 25 bp, Homo sapien
gatttacctctagacatctcacgag

SEQ ID NO: 3309663 - DNA, 25 bp, Homo sapien
cacgaggtccttgtggtgaatatca

SEQ ID NO: 3309664 - DNA, 25 bp, Homo sapien
aatgttttcatgtgccataaaagtc

SEQ ID NO: 3309665 - DNA, 25 bp, Homo sapien
gagtttgacaaatccccactgaagc

SEQ ID NO: 3309666 - DNA, 25 bp, Homo sapien
tttacttgtggcaatataggatttc

SEQ ID NO: 3309667 - DNA, 25 bp, Homo sapien
ttttaccagaaagtgtcattgattt

SEQ ID NO: 3309668 - DNA, 25 bp, Homo sapien
ccatgtcttagatccagctccaact

SEQ ID NO: 3309669 - DNA, 25 bp, Homo sapien
tgtggctgccacacgtaggcttctg

SEQ ID NO: 3309670 - DNA, 25 bp, Homo sapien
caactccttggagtctggtgaacta

SEQ ID NO: 3309671 - DNA, 25 bp, Homo sapien
ccacagactcaaccatgccatgtct

SEQ ID NO: 3309672 - DNA, 25 bp, Homo sapien
agtttgtctggcatattctttgccc

SEQ ID NO: 3309673 - DNA, 25 bp, Homo sapien
aatgtgacctatctctaccatcatc

SEQ ID NO: 3309674 - DNA, 25 bp, Homo sapien
cttcctcttgagtttgtctggcata

SEQ ID NO: 3309675 - DNA, 25 bp, Homo sapien
tgacactccaatgtgacctatctct

SEQ ID NO: 3309676 - DNA, 25 bp, Homo sapien
agctcctcaggcagatgctcttagg

SEQ ID NO: 3309677 - DNA, 25 bp, Homo sapien
cttagggtagggagctgttctctct

SEQ ID NO: 3309678 - DNA, 25 bp, Homo sapien
ctcaggcagatgctcttagggtagg

SEQ ID NO: 3309679 - DNA, 25 bp, Homo sapien
ctctctttactatcttttgcacaga

SEQ ID NO: 3309680 - DNA, 25 bp, Homo sapien
ctcggaggcttttaacattcggtct

SEQ ID NO: 3309681 - DNA, 25 bp, Homo sapien
cttgtgctcctaataatttactgtg

SEQ ID NO: 3309682 - DNA, 25 bp, Homo sapien
ttcccttgtgctcctaataatttac

SEQ ID NO: 3309683 - DNA, 25 bp, Homo sapien
cttttcccttgtgctcctaataatt

SEQ ID NO: 3309684 - DNA, 25 bp, Homo sapien
ggtatcataccggaatcttactgtc

SEQ ID NO: 3309685 - DNA, 25 bp, Homo sapien
accagacataccctttccgctggta

SEQ ID NO: 3309686 - DNA, 25 bp, Homo sapien
ccgctggtatcataccggaatctta

SEQ ID NO: 3309687 - DNA, 25 bp, Homo sapien
ccctttccgctggtatcataccgga

SEQ ID NO: 3309688 - DNA, 25 bp, Homo sapien
gtgacagcacattcagctcgtccca

SEQ ID NO: 3309689 - DNA, 25 bp, Homo sapien
tcacagttggtttaagattggcaac

SEQ ID NO: 3309690 - DNA, 25 bp, Homo sapien
gtttaagattggcaactctgtcgga

SEQ ID NO: 3309691 - DNA, 25 bp, Homo sapien
caactctgtcggatgtgacagcaca

SEQ ID NO: 3309692 - DNA, 25 bp, Homo sapien
cgaagaccagtcctcggatctatcg

SEQ ID NO: 3309693 - DNA, 25 bp, Homo sapien
gaccagtcctcggatctatcgagga

SEQ ID NO: 3309694 - DNA, 25 bp, Homo sapien
agtcctcggatctatcgaggatggt

SEQ ID NO: 3309695 - DNA, 25 bp, Homo sapien
ttctaagatgaagctctttgcaagc

SEQ ID NO: 3309696 - DNA, 25 bp, Homo sapien
cctctaactgttgcactgaaataaa

SEQ ID NO: 3309697 - DNA, 25 bp, Homo sapien
tttagaaatacggctgccatgtttt

SEQ ID NO: 3309698 - DNA, 25 bp, Homo sapien
tacccccaaatccagcaggataatg

SEQ ID NO: 3309699 - DNA, 25 bp, Homo sapien
cagttagttctctgtatgccaactt

SEQ ID NO: 3309700 - DNA, 25 bp, Homo sapien
aaggcaaacatatgaatcttccagt

SEQ ID NO: 3309701 - DNA, 25 bp, Homo sapien
aggaaaaggcaaacatatgaatctt

SEQ ID NO: 3309702 - DNA, 25 bp, Homo sapien
actaccacctgataagcagcaaaag

SEQ ID NO: 3309703 - DNA, 25 bp, Homo sapien
ttgaactttccaagtttctcttcat

SEQ ID NO: 3309704 - DNA, 25 bp, Homo sapien
atttcctatgcctgtgaaacacatc

SEQ ID NO: 3309705 - DNA, 25 bp, Homo sapien
tttcctatgcctgtgaaacacatca

SEQ ID NO: 3309706 - DNA, 25 bp, Homo sapien
ttcctatgcctgtgaaacacatcat

SEQ ID NO: 3309707 - DNA, 25 bp, Homo sapien
cctatgcctgtgaaacacatcatac

SEQ ID NO: 3309708 - DNA, 25 bp, Homo sapien
cctaaactttgagtcacaagcttac

SEQ ID NO: 3309709 - DNA, 25 bp, Homo sapien
actttgagtcacaagcttactatta

SEQ ID NO: 3309710 - DNA, 25 bp, Homo sapien
aaagtcctaaactttgagtcacaag

SEQ ID NO: 3309711 - DNA, 25 bp, Homo sapien
gagtcacaagcttactattaatgac

SEQ ID NO: 3309712 - DNA, 25 bp, Homo sapien
gtaggtatccaagataagtcttaga

SEQ ID NO: 3309713 - DNA, 25 bp, Homo sapien
gcattattctgctttgtaggtatcc

SEQ ID NO: 3309714 - DNA, 25 bp, Homo sapien
tattctgctttgtaggtatccaaga

SEQ ID NO: 3309715 - DNA, 25 bp, Homo sapien
gctttgtaggtatccaagataagtc

SEQ ID NO: 3309716 - DNA, 25 bp, Homo sapien
tcattcttcgtttgcatctgaagac

SEQ ID NO: 3309717 - DNA, 25 bp, Homo sapien
acctttcagggcatctacttgagag

SEQ ID NO: 3309718 - DNA, 25 bp, Homo sapien
gggcatctacttgagagcaatcgct

SEQ ID NO: 3309719 - DNA, 25 bp, Homo sapien
gagcaatcgctcatttccagttcac

SEQ ID NO: 3309720 - DNA, 25 bp, Homo sapien
tacttgagagcaatcgctcatttcc

SEQ ID NO: 3309721 - DNA, 25 bp, Homo sapien
caaggctgtaagaatcatttatgca

SEQ ID NO: 3309722 - DNA, 25 bp, Homo sapien
tcaccatcatgcagtaggaagcaga

SEQ ID NO: 3309723 - DNA, 25 bp, Homo sapien
gaacattcggtattgttgccactaa

SEQ ID NO: 3309724 - DNA, 25 bp, Homo sapien
gaatcacagtgttctcgtacttaac

SEQ ID NO: 3309725 - DNA, 25 bp, Homo sapien
agtttgatgtctatagggtgtttgt

SEQ ID NO: 3309726 - DNA, 25 bp, Homo sapien
tctatagggtgtttgtactgcctca

SEQ ID NO: 3309727 - DNA, 25 bp, Homo sapien
gatgtctatagggtgtttgtactgc

SEQ ID NO: 3309728 - DNA, 25 bp, Homo sapien
gggtgtttgtactgcctcatttggt

SEQ ID NO: 3309729 - DNA, 25 bp, Homo sapien
gttcgacatcctctctcataacaca

SEQ ID NO: 3309730 - DNA, 25 bp, Homo sapien
tcaaacttcttgttcgacatcctct

SEQ ID NO: 3309731 - DNA, 25 bp, Homo sapien
tcttgttcgacatcctctctcataa

SEQ ID NO: 3309732 - DNA, 25 bp, Homo sapien
cttagccttcaaacttcttgttcga

SEQ ID NO: 3309733 - DNA, 25 bp, Homo sapien
ttttctgtaaagacgcatacataaa

SEQ ID NO: 3309734 - DNA, 25 bp, Homo sapien
cgcatacataaatctggtctctgga

SEQ ID NO: 3309735 - DNA, 25 bp, Homo sapien
cataaatctggtctctggataatcc

SEQ ID NO: 3309736 - DNA, 25 bp, Homo sapien
tgtaaagacgcatacataaatctgg

SEQ ID NO: 3309737 - DNA, 25 bp, Homo sapien
caaacactttgaccatagaaaaata

SEQ ID NO: 3309738 - DNA, 25 bp, Homo sapien
acactttgaccatagaaaaataggt

SEQ ID NO: 3309739 - DNA, 25 bp, Homo sapien
aacactttgaccatagaaaaatagg

SEQ ID NO: 3309740 - DNA, 25 bp, Homo sapien
cactttgaccatagaaaaataggtc

SEQ ID NO: 3309741 - DNA, 25 bp, Homo sapien
ctataatcttctcaaggcctttcct

SEQ ID NO: 3309742 - DNA, 25 bp, Homo sapien
tataatcttctcaaggcctttcctt

SEQ ID NO: 3309743 - DNA, 25 bp, Homo sapien
cctataatcttctcaaggcctttcc

SEQ ID NO: 3309744 - DNA, 25 bp, Homo sapien
aactcctggcctatctctcgtctgt

SEQ ID NO: 3309745 - DNA, 25 bp, Homo sapien
ccacattctgtctcatgtgaattag

SEQ ID NO: 3309746 - DNA, 25 bp, Homo sapien
tctcatgtgaattagaatctttctt

SEQ ID NO: 3309747 - DNA, 25 bp, Homo sapien
tctgtctcatgtgaattagaatctt

SEQ ID NO: 3309748 - DNA, 25 bp, Homo sapien
cttcccttgctggcttttattgggt

SEQ ID NO: 3309749 - DNA, 25 bp, Homo sapien
tcccttgctggcttttattgggttg

SEQ ID NO: 3309750 - DNA, 25 bp, Homo sapien
tccctttgcattcatctactcccat

SEQ ID NO: 3309751 - DNA, 25 bp, Homo sapien
aattccctttgcattcatctactcc

SEQ ID NO: 3309752 - DNA, 25 bp, Homo sapien
ctgtaattccctttgcattcatcta

SEQ ID NO: 3309753 - DNA, 25 bp, Homo sapien
tgtaattccctttgcattcatctac

SEQ ID NO: 3309754 - DNA, 25 bp, Homo sapien
cgatgccgtagttcaaaccggacat

SEQ ID NO: 3309755 - DNA, 25 bp, Homo sapien
tctttttccgatgccgatgccgtag

SEQ ID NO: 3309756 - DNA, 25 bp, Homo sapien
tccgatgccgatgccgtagttcaaa

SEQ ID NO: 3309757 - DNA, 25 bp, Homo sapien
tttcctctttttccgatgccgatgc

SEQ ID NO: 3309758 - DNA, 25 bp, Homo sapien
catgaccacaggcaggcatgtctgg

SEQ ID NO: 3309759 - DNA, 25 bp, Homo sapien
gatagccagtaagatctcttgaatg

SEQ ID NO: 3309760 - DNA, 25 bp, Homo sapien
tgtctggaagagagaatctgatagc

SEQ ID NO: 3309761 - DNA, 25 bp, Homo sapien
tgctgaggacaaaccaaggacctgg

SEQ ID NO: 3309762 - DNA, 25 bp, Homo sapien
accaggttctaagaaggccagattt

SEQ ID NO: 3309763 - DNA, 25 bp, Homo sapien
caggttctaagaaggccagattttg

SEQ ID NO: 3309764 - DNA, 25 bp, Homo sapien
cctgagtattgagatagggagtaga

SEQ ID NO: 3309765 - DNA, 25 bp, Homo sapien
ctctcctgagtattgagatagggag

SEQ ID NO: 3309766 - DNA, 25 bp, Homo sapien
cattggaacattggatgagcagtct

SEQ ID NO: 3309767 - DNA, 25 bp, Homo sapien
tcctttaaagcaaggacctgcacct

SEQ ID NO: 3309768 - DNA, 25 bp, Homo sapien
gggaccatggactttccaacagagt

SEQ ID NO: 3309769 - DNA, 25 bp, Homo sapien
gacatagatagatgcgacaccaaag

SEQ ID NO: 3309770 - DNA, 25 bp, Homo sapien
tagcctcagatttgttaactcaagg

SEQ ID NO: 3309771 - DNA, 25 bp, Homo sapien
gaccattagaatgatcttcccctga

SEQ ID NO: 3309772 - DNA, 25 bp, Homo sapien
cctgccttcggtaaaatcatctcat

SEQ ID NO: 3309773 - DNA, 25 bp, Homo sapien
gatatcatcaggtcagattccaagt

SEQ ID NO: 3309774 - DNA, 25 bp, Homo sapien
ccacatatatgttcttaaagagtca

SEQ ID NO: 3309775 - DNA, 25 bp, Homo sapien
tctagggatcccagaaattatacca

SEQ ID NO: 3309776 - DNA, 25 bp, Homo sapien
tttaaaatgggtggatgtaccacac

SEQ ID NO: 3309777 - DNA, 25 bp, Homo sapien
taaccatgatagcattcacacacaa

SEQ ID NO: 3309778 - DNA, 25 bp, Homo sapien
aaacacattccccagtcctcactga

SEQ ID NO: 3309779 - DNA, 25 bp, Homo sapien
cattttgtatgttctgaatgccacc

SEQ ID NO: 3309780 - DNA, 25 bp, Homo sapien
cactgatgaacaatgtggtagaaga

SEQ ID NO: 3309781 - DNA, 25 bp, Homo sapien
ccacccttagggctttgcaatctct

SEQ ID NO: 3309782 - DNA, 25 bp, Homo sapien
gaggagttacaacattacctgttaa

SEQ ID NO: 3309783 - DNA, 25 bp, Homo sapien
gtttgtcatctgaggagttacaaca

SEQ ID NO: 3309784 - DNA, 25 bp, Homo sapien
tgttaatgtttgtcatctgaggagt

SEQ ID NO: 3309785 - DNA, 25 bp, Homo sapien
caacattacctgttaatttatccaa

SEQ ID NO: 3309786 - DNA, 25 bp, Homo sapien
ctaagctgttaagtgtgttactgtt

SEQ ID NO: 3309787 - DNA, 25 bp, Homo sapien
agtttcccagagcctttacatcttt

SEQ ID NO: 3309788 - DNA, 25 bp, Homo sapien
ttctaagctgttaagtgtgttactg

SEQ ID NO: 3309789 - DNA, 25 bp, Homo sapien
tttttctaagctgttaagtgtgtta

SEQ ID NO: 3309790 - DNA, 25 bp, Homo sapien
gatagaacaccaataatattctcac

SEQ ID NO: 3309791 - DNA, 25 bp, Homo sapien
tgtagatagaacaccaataatattc

SEQ ID NO: 3309792 - DNA, 25 bp, Homo sapien
tgttgtagatagaacaccaataata

SEQ ID NO: 3309793 - DNA, 25 bp, Homo sapien
catgttgtagatagaacaccaataa

SEQ ID NO: 3309794 - DNA, 25 bp, Homo sapien
tgtttcttttgcttccctccaactc

SEQ ID NO: 3309795 - DNA, 25 bp, Homo sapien
tttcttttgcttccctccaactcac

SEQ ID NO: 3309796 - DNA, 25 bp, Homo sapien
ctgtttcttttgcttccctccaact

SEQ ID NO: 3309797 - DNA, 25 bp, Homo sapien
gtttcttttgcttccctccaactca

SEQ ID NO: 3309798 - DNA, 25 bp, Homo sapien
tacagtcgagggctctgtgtctttc

SEQ ID NO: 3309799 - DNA, 25 bp, Homo sapien
ttacagtcgagggctctgtgtcttt

SEQ ID NO: 3309800 - DNA, 25 bp, Homo sapien
ctcctcattagcaaatgttaagtgt

SEQ ID NO: 3309801 - DNA, 25 bp, Homo sapien
ggttgtgactatcaaccagcacatt

SEQ ID NO: 3309802 - DNA, 25 bp, Homo sapien
tgatctgctttggtactctaggctc

SEQ ID NO: 3309803 - DNA, 25 bp, Homo sapien
tggtactctaggctcctacacattt

SEQ ID NO: 3309804 - DNA, 25 bp, Homo sapien
caagtgatctgctttggtactctag

SEQ ID NO: 3309805 - DNA, 25 bp, Homo sapien
tatcatccagaggatctgagatggt

SEQ ID NO: 3309806 - DNA, 25 bp, Homo sapien
cccatgggtgtttagaatatcatcc

SEQ ID NO: 3309807 - DNA, 25 bp, Homo sapien
aaaagttccaacagtcccatgggtg

SEQ ID NO: 3309808 - DNA, 25 bp, Homo sapien
tagaatatcatccagaggatctgag

SEQ ID NO: 3309809 - DNA, 25 bp, Homo sapien
tgccttttcatcttccgtttcacca

SEQ ID NO: 3309810 - DNA, 25 bp, Homo sapien
ttgccttttcatcttccgtttcacc

SEQ ID NO: 3309811 - DNA, 25 bp, Homo sapien
gattgatttaccactaataaatctc

SEQ ID NO: 3309812 - DNA, 25 bp, Homo sapien
tgatttaccactaataaatctcaca

SEQ ID NO: 3309813 - DNA, 25 bp, Homo sapien
atttaccactaataaatctcacaag

SEQ ID NO: 3309814 - DNA, 25 bp, Homo sapien
cggcgattgatttaccactaataaa

SEQ ID NO: 3309815 - DNA, 25 bp, Homo sapien
ggcatctgctacacagacatgtctt

SEQ ID NO: 3309816 - DNA, 25 bp, Homo sapien
tgtcttatacacctgctgccatctc

SEQ ID NO: 3309817 - DNA, 25 bp, Homo sapien
tccatgggcccacagcttagtcttc

SEQ ID NO: 3309818 - DNA, 25 bp, Homo sapien
cagcttagtcttcccgggaagatct

SEQ ID NO: 3309819 - DNA, 25 bp, Homo sapien
catgttttgctaaacgaacaaggca

SEQ ID NO: 3309820 - DNA, 25 bp, Homo sapien
ctaaacgaacaaggcaattggcatc

SEQ ID NO: 3309821 - DNA, 25 bp, Homo sapien
tttgtgcatgttttgctaaacgaac

SEQ ID NO: 3309822 - DNA, 25 bp, Homo sapien
tttgctaaacgaacaaggcaattgg

SEQ ID NO: 3309823 - DNA, 25 bp, Homo sapien
gagaagcagctagagtaatggtgac

SEQ ID NO: 3309824 - DNA, 25 bp, Homo sapien
agagggttagtgttgcgccctgcat

SEQ ID NO: 3309825 - DNA, 25 bp, Homo sapien
tccagtgtgagagggttagtgttgc

SEQ ID NO: 3309826 - DNA, 25 bp, Homo sapien
cagccatttggaacttaggtacttt

SEQ ID NO: 3309827 - DNA, 25 bp, Homo sapien
tatcatccagcagctcttgtgcacc

SEQ ID NO: 3309828 - DNA, 25 bp, Homo sapien
tcttgtgcacccaccgcagctcctg

SEQ ID NO: 3309829 - DNA, 25 bp, Homo sapien
aaattgctgttatcatccagcagct

SEQ ID NO: 3309830 - DNA, 25 bp, Homo sapien
cagctcctggcactgagttatcttc

SEQ ID NO: 3309831 - DNA, 25 bp, Homo sapien
ctgtgtcttcttgctttatctctat

SEQ ID NO: 3309832 - DNA, 25 bp, Homo sapien
tgtgtcttcttgctttatctctatc

SEQ ID NO: 3309833 - DNA, 25 bp, Homo sapien
gtgtcttcttgctttatctctatca

SEQ ID NO: 3309834 - DNA, 25 bp, Homo sapien
tgtcttcttgctttatctctatcat

SEQ ID NO: 3309835 - DNA, 25 bp, Homo sapien
tgagcaatgtttgaaggctgtggca

SEQ ID NO: 3309836 - DNA, 25 bp, Homo sapien
tgctcttgaaggttagttctgaaag

SEQ ID NO: 3309837 - DNA, 25 bp, Homo sapien
gctattgaacaggtaggactgcttg

SEQ ID NO: 3309838 - DNA, 25 bp, Homo sapien
tctactgtgtgactgaagaggaaca

SEQ ID NO: 3309839 - DNA, 25 bp, Homo sapien
gcagcagcaacagagtaatacatgc

SEQ ID NO: 3309840 - DNA, 25 bp, Homo sapien
gaccattgtcagtacaattgcactg

SEQ ID NO: 3309841 - DNA, 25 bp, Homo sapien
cactgtgatgaccattgtcagtaca

SEQ ID NO: 3309842 - DNA, 25 bp, Homo sapien
agtacaattgcactgtcactagcag

SEQ ID NO: 3309843 - DNA, 25 bp, Homo sapien
aactctgatggttagtgtctgttcc

SEQ ID NO: 3309844 - DNA, 25 bp, Homo sapien
gccattctaccccaactctgatggt

SEQ ID NO: 3309845 - DNA, 25 bp, Homo sapien
gaattcaatctagaatatggtagcc

SEQ ID NO: 3309846 - DNA, 25 bp, Homo sapien
ggagaaaaggcctgaattcaatcta

SEQ ID NO: 3309847 - DNA, 25 bp, Homo sapien
gtgcctgctggatagaaagagtctg

SEQ ID NO: 3309848 - DNA, 25 bp, Homo sapien
tacacccatgtaagtgatggaagac

SEQ ID NO: 3309849 - DNA, 25 bp, Homo sapien
tcgtgttatagcatatacacccatg

SEQ ID NO: 3309850 - DNA, 25 bp, Homo sapien
aaagagtctgattaatgtgtggcac

SEQ ID NO: 3309851 - DNA, 25 bp, Homo sapien
cagttgcctggtaatcaccaatttt

SEQ ID NO: 3309852 - DNA, 25 bp, Homo sapien
caggatgttttgggctggcaaacat

SEQ ID NO: 3309853 - DNA, 25 bp, Homo sapien
tcagttgcctggtaatcaccaattt

SEQ ID NO: 3309854 - DNA, 25 bp, Homo sapien
gttgcctggtaatcaccaattttca

SEQ ID NO: 3309855 - DNA, 25 bp, Homo sapien
ttatcccataatcatgccacattca

SEQ ID NO: 3309856 - DNA, 25 bp, Homo sapien
aaatgcttcaaaaactctccatttc

SEQ ID NO: 3309857 - DNA, 25 bp, Homo sapien
cacattcatgcttaaaatgcttcaa

SEQ ID NO: 3309858 - DNA, 25 bp, Homo sapien
tgccacattcatgcttaaaatgctt

SEQ ID NO: 3309859 - DNA, 25 bp, Homo sapien
caggtgtactgaccacaggatgatt

SEQ ID NO: 3309860 - DNA, 25 bp, Homo sapien
tgattcacacaacaggcacttcctg

SEQ ID NO: 3309861 - DNA, 25 bp, Homo sapien
catttagtttgagtagctagcccac

SEQ ID NO: 3309862 - DNA, 25 bp, Homo sapien
taatttggttaggagtcaggtgacc

SEQ ID NO: 3309863 - DNA, 25 bp, Homo sapien
cattacatgtcacaagtaggaaccc

SEQ ID NO: 3309864 - DNA, 25 bp, Homo sapien
tgataaattactccctgaaaggttg

SEQ ID NO: 3309865 - DNA, 25 bp, Homo sapien
tgatttgccctgaataattgcagca

SEQ ID NO: 3309866 - DNA, 25 bp, Homo sapien
caaggcgttcaactaagacggagga

SEQ ID NO: 3309867 - DNA, 25 bp, Homo sapien
ctttcttggcattgcggacccagac

SEQ ID NO: 3309868 - DNA, 25 bp, Homo sapien
gtccggtttagcctgccaccctgag

SEQ ID NO: 3309869 - DNA, 25 bp, Homo sapien
tactccaactgctcacagtccggtt

SEQ ID NO: 3309870 - DNA, 25 bp, Homo sapien
tatttactgccataagctttcttgg

SEQ ID NO: 3309871 - DNA, 25 bp, Homo sapien
aaaaggcacagggacgaaagactct

SEQ ID NO: 3309872 - DNA, 25 bp, Homo sapien
aaggcacagggacgaaagactctga

SEQ ID NO: 3309873 - DNA, 25 bp, Homo sapien
ggcacagggacgaaagactctgaga

SEQ ID NO: 3309874 - DNA, 25 bp, Homo sapien
gcacagggacgaaagactctgagaa

SEQ ID NO: 3309875 - DNA, 25 bp, Homo sapien
ttgggctgtggcatctattccaaat

SEQ ID NO: 3309876 - DNA, 25 bp, Homo sapien
gctgtggcatctattccaaatgaaa

SEQ ID NO: 3309877 - DNA, 25 bp, Homo sapien
aaagtaattggtctgacaagaaggc

SEQ ID NO: 3309878 - DNA, 25 bp, Homo sapien
ctggcagacattgaggatgagatgc

SEQ ID NO: 3309879 - DNA, 25 bp, Homo sapien
tatgtagatgggcttcatcatacac

SEQ ID NO: 3309880 - DNA, 25 bp, Homo sapien
gggcttcatcatacacatgaacaga

SEQ ID NO: 3309881 - DNA, 25 bp, Homo sapien
atgactatgtagatgggcttcatca

SEQ ID NO: 3309882 - DNA, 25 bp, Homo sapien
gtagatgggcttcatcatacacatg

SEQ ID NO: 3309883 - DNA, 25 bp, Homo sapien
tcatgcattacccgcatctatggaa

SEQ ID NO: 3309884 - DNA, 25 bp, Homo sapien
tgcattacccgcatctatggaatta

SEQ ID NO: 3309885 - DNA, 25 bp, Homo sapien
atgcattacccgcatctatggaatt

SEQ ID NO: 3309886 - DNA, 25 bp, Homo sapien
gcattacccgcatctatggaattat

SEQ ID NO: 3309887 - DNA, 25 bp, Homo sapien
ataaatttaaggagtccagcacgct

SEQ ID NO: 3309888 - DNA, 25 bp, Homo sapien
taaatttaaggagtccagcacgctg

SEQ ID NO: 3309889 - DNA, 25 bp, Homo sapien
ttctcatctccaacttgtgttcctt

SEQ ID NO: 3309890 - DNA, 25 bp, Homo sapien
tgtttatgggcatggatcttcttgt

SEQ ID NO: 3309891 - DNA, 25 bp, Homo sapien
tattattgtgcatatgtttatgggc

SEQ ID NO: 3309892 - DNA, 25 bp, Homo sapien
caacattccatttcgtcttttctgg

SEQ ID NO: 3309893 - DNA, 25 bp, Homo sapien
ctgccaacattccatttcgtctttt

SEQ ID NO: 3309894 - DNA, 25 bp, Homo sapien
tagacacctgtcatgaggagccgcc

SEQ ID NO: 3309895 - DNA, 25 bp, Homo sapien
gaggagccgccagtatattttgttc

SEQ ID NO: 3309896 - DNA, 25 bp, Homo sapien
tatgagaagaaccaagcattttcca

SEQ ID NO: 3309897 - DNA, 25 bp, Homo sapien
tagctttaaagctcatgtcatagac

SEQ ID NO: 3309898 - DNA, 25 bp, Homo sapien
caatacaaagcctgttctccaaaca

SEQ ID NO: 3309899 - DNA, 25 bp, Homo sapien
ccaatacaaagcctgttctccaaac

SEQ ID NO: 3309900 - DNA, 25 bp, Homo sapien
cccaatacaaagcctgttctccaaa

SEQ ID NO: 3309901 - DNA, 25 bp, Homo sapien
atgaaaccatttgatctcccaatac

SEQ ID NO: 3309902 - DNA, 25 bp, Homo sapien
taatactctttgcataaacaaaaca

SEQ ID NO: 3309903 - DNA, 25 bp, Homo sapien
actattatcagtaaattctgtacct

SEQ ID NO: 3309904 - DNA, 25 bp, Homo sapien
gtctttcttcttaagtcaatacaag

SEQ ID NO: 3309905 - DNA, 25 bp, Homo sapien
tgaacaccgttttctttcagaatga

SEQ ID NO: 3309906 - DNA, 25 bp, Homo sapien
ggtaaatttccctagaccctgtgca

SEQ ID NO: 3309907 - DNA, 25 bp, Homo sapien
ggagcctaagcctggactcaatttc

SEQ ID NO: 3309908 - DNA, 25 bp, Homo sapien
tgcttgttgctctatcccactgtag

SEQ ID NO: 3309909 - DNA, 25 bp, Homo sapien
cctgaagctagcatggcactggtcc

SEQ ID NO: 3309910 - DNA, 25 bp, Homo sapien
agtctttcaaggtctgtgttacact

SEQ ID NO: 3309911 - DNA, 25 bp, Homo sapien
caaatcagtctttcaaggtctgtgt

SEQ ID NO: 3309912 - DNA, 25 bp, Homo sapien
atcagtctttcaaggtctgtgttac

SEQ ID NO: 3309913 - DNA, 25 bp, Homo sapien
tcaaatcagtctttcaaggtctgtg

SEQ ID NO: 3309914 - DNA, 25 bp, Homo sapien
tcaaacatttttatcaatggcattt

SEQ ID NO: 3309915 - DNA, 25 bp, Homo sapien
ttttatcaatggcatttagtgagct

SEQ ID NO: 3309916 - DNA, 25 bp, Homo sapien
ttatcaatggcatttagtgagctac

SEQ ID NO: 3309917 - DNA, 25 bp, Homo sapien
atttttatcaatggcatttagtgag

SEQ ID NO: 3309918 - DNA, 25 bp, Homo sapien
gggatgggtgattattttcacagaa

SEQ ID NO: 3309919 - DNA, 25 bp, Homo sapien
tgagctcttgataagctgtctgaat

SEQ ID NO: 3309920 - DNA, 25 bp, Homo sapien
aagtacagcatttcatgagctcttg

SEQ ID NO: 3309921 - DNA, 25 bp, Homo sapien
atgagctcttgataagctgtctgaa

SEQ ID NO: 3309922 - DNA, 25 bp, Homo sapien
agtacagcatttcatgagctcttga

SEQ ID NO: 3309923 - DNA, 25 bp, Homo sapien
ctttttggcttagaaagaaaatctg

SEQ ID NO: 3309924 - DNA, 25 bp, Homo sapien
tttttggcttagaaagaaaatctgc

SEQ ID NO: 3309925 - DNA, 25 bp, Homo sapien
tgcctgtccttctgggcactgtgga

SEQ ID NO: 3309926 - DNA, 25 bp, Homo sapien
ctgcctgtccttctgggcactgtgg

SEQ ID NO: 3309927 - DNA, 25 bp, Homo sapien
tgaagaattagtctggcatccccat

SEQ ID NO: 3309928 - DNA, 25 bp, Homo sapien
aaactatggccatccaactttttct

SEQ ID NO: 3309929 - DNA, 25 bp, Homo sapien
ggacatgaagattatccctctaagt

SEQ ID NO: 3309930 - DNA, 25 bp, Homo sapien
ttgttatccatgatggaccccagtc

SEQ ID NO: 3309931 - DNA, 25 bp, Homo sapien
ccttattgtatggactgagaactcc

SEQ ID NO: 3309932 - DNA, 25 bp, Homo sapien
tagcagtggttataactggcattcc

SEQ ID NO: 3309933 - DNA, 25 bp, Homo sapien
actccagtatagaattgaatagcag

SEQ ID NO: 3309934 - DNA, 25 bp, Homo sapien
gaattgtattgtaaccgatacctca

SEQ ID NO: 3309935 - DNA, 25 bp, Homo sapien
tcctaggtgaggttcttatgtggca

SEQ ID NO: 3309936 - DNA, 25 bp, Homo sapien
cagtgacaaactcgtgcattacgtt

SEQ ID NO: 3309937 - DNA, 25 bp, Homo sapien
taagatgggataggactctacctac

SEQ ID NO: 3309938 - DNA, 25 bp, Homo sapien
ctctacctactgcattaagaatgga

SEQ ID NO: 3309939 - DNA, 25 bp, Homo sapien
tactgatcatgagtagacacctgac

SEQ ID NO: 3309940 - DNA, 25 bp, Homo sapien
tgagcttattattaggacaggtccc

SEQ ID NO: 3309941 - DNA, 25 bp, Homo sapien
gaggatatcactgtatccatccaga

SEQ ID NO: 3309942 - DNA, 25 bp, Homo sapien
caataaactctaagtggttccaaat

SEQ ID NO: 3309943 - DNA, 25 bp, Homo sapien
tcatttaaagttactccaaatccat

SEQ ID NO: 3309944 - DNA, 25 bp, Homo sapien
tactgtctttcttaacatattctaa

SEQ ID NO: 3309945 - DNA, 25 bp, Homo sapien
attctaactctggtgaggtgttaac

SEQ ID NO: 3309946 - DNA, 25 bp, Homo sapien
ttgactgagacctaagtccaccatt

SEQ ID NO: 3309947 - DNA, 25 bp, Homo sapien
gctactttaacaaaaagaatatcaa

SEQ ID NO: 3309948 - DNA, 25 bp, Homo sapien
ctttaacaaaaagaatatcaaccat

SEQ ID NO: 3309949 - DNA, 25 bp, Homo sapien
ttgctactttaacaaaaagaatatc

SEQ ID NO: 3309950 - DNA, 25 bp, Homo sapien
ttctattgctactttaacaaaaaga

SEQ ID NO: 3309951 - DNA, 25 bp, Homo sapien
catatagtcactaaagcctgagcga

SEQ ID NO: 3309952 - DNA, 25 bp, Homo sapien
tctccgtggttgtgtcatatagtca

SEQ ID NO: 3309953 - DNA, 25 bp, Homo sapien
agaaataaactgacttccatgaagt

SEQ ID NO: 3309954 - DNA, 25 bp, Homo sapien
ctgagcgaatgcctgaacaagtgaa

SEQ ID NO: 3309955 - DNA, 25 bp, Homo sapien
cagccatttcaccaatgagatttcc

SEQ ID NO: 3309956 - DNA, 25 bp, Homo sapien
gcagccatttcaccaatgagatttc

SEQ ID NO: 3309957 - DNA, 25 bp, Homo sapien
gccatttcaccaatgagatttcctt

SEQ ID NO: 3309958 - DNA, 25 bp, Homo sapien
cagcagccatttcaccaatgagatt

SEQ ID NO: 3309959 - DNA, 25 bp, Homo sapien
cctttttagcttttacaagcatagg

SEQ ID NO: 3309960 - DNA, 25 bp, Homo sapien
gggatgtgaacttctatatcaaata

SEQ ID NO: 3309961 - DNA, 25 bp, Homo sapien
ttgataaaaagaaacgacattcagc

SEQ ID NO: 3309962 - DNA, 25 bp, Homo sapien
gacattcagctctacactgtatttc

SEQ ID NO: 3309963 - DNA, 25 bp, Homo sapien
tttcttcggttgtgttcaaagtatc

SEQ ID NO: 3309964 - DNA, 25 bp, Homo sapien
tcttcggttgtgttcaaagtatctt

SEQ ID NO: 3309965 - DNA, 25 bp, Homo sapien
caaagtatcttctggagtcaacagt

SEQ ID NO: 3309966 - DNA, 25 bp, Homo sapien
agtatcttctggagtcaacagtgtc

SEQ ID NO: 3309967 - DNA, 25 bp, Homo sapien
ggcctgatattactactgcagccta

SEQ ID NO: 3309968 - DNA, 25 bp, Homo sapien
gagattcagcagtccctggtctttg

SEQ ID NO: 3309969 - DNA, 25 bp, Homo sapien
actgctattaatgcctgtgacttgc

SEQ ID NO: 3309970 - DNA, 25 bp, Homo sapien
gacttgctttcatgtagtgaattaa

SEQ ID NO: 3309971 - DNA, 25 bp, Homo sapien
ttgtccgccaagatgctagcactgt

SEQ ID NO: 3309972 - DNA, 25 bp, Homo sapien
ccaagcagtggtgggtggccacaac

SEQ ID NO: 3309973 - DNA, 25 bp, Homo sapien
cacaatttgaggatggtaagggacg

SEQ ID NO: 3309974 - DNA, 25 bp, Homo sapien
gcactgtctgtaggaataccacctt

SEQ ID NO: 3309975 - DNA, 25 bp, Homo sapien
tttttcgtaacccatagtatcacag

SEQ ID NO: 3309976 - DNA, 25 bp, Homo sapien
cgtaacccatagtatcacaggaata

SEQ ID NO: 3309977 - DNA, 25 bp, Homo sapien
tcacaggaatagacactattatcat

SEQ ID NO: 3309978 - DNA, 25 bp, Homo sapien
catgcaccatacagcctagatactt

SEQ ID NO: 3309979 - DNA, 25 bp, Homo sapien
ggaagcacttcctttacagtgctag

SEQ ID NO: 3309980 - DNA, 25 bp, Homo sapien
tagtttagtcttctgcatgccatgg

SEQ ID NO: 3309981 - DNA, 25 bp, Homo sapien
atgccatggatgttcaataaaagaa

SEQ ID NO: 3309982 - DNA, 25 bp, Homo sapien
tataaccgagaagttgttcaatctt

SEQ ID NO: 3309983 - DNA, 25 bp, Homo sapien
ctttcacaaataagggtatggggca

SEQ ID NO: 3309984 - DNA, 25 bp, Homo sapien
ggagtaatctctttggactcttcaa

SEQ ID NO: 3309985 - DNA, 25 bp, Homo sapien
caaagcgctttgatgctttcacaaa

SEQ ID NO: 3309986 - DNA, 25 bp, Homo sapien
aaaacaggattgtatgctgcaggac

SEQ ID NO: 3309987 - DNA, 25 bp, Homo sapien
acagcaagcaatcttttctgatctc

SEQ ID NO: 3309988 - DNA, 25 bp, Homo sapien
gcaagcaatcttttctgatctcctt

SEQ ID NO: 3309989 - DNA, 25 bp, Homo sapien
agcaatcttttctgatctccttgca

SEQ ID NO: 3309990 - DNA, 25 bp, Homo sapien
cagcaagcaatcttttctgatctcc

SEQ ID NO: 3309991 - DNA, 25 bp, Homo sapien
tgtattctcatgaggcaagtaggtg

SEQ ID NO: 3309992 - DNA, 25 bp, Homo sapien
tttgtattctcatgaggcaagtagg

SEQ ID NO: 3309993 - DNA, 25 bp, Homo sapien
ctcatgaggcaagtaggtggcaaat

SEQ ID NO: 3309994 - DNA, 25 bp, Homo sapien
attctcatgaggcaagtaggtggca

SEQ ID NO: 3309995 - DNA, 25 bp, Homo sapien
ggcaccgaggagttgcactaagaaa

SEQ ID NO: 3309996 - DNA, 25 bp, Homo sapien
gtgaacatcatagctgcctggcgct

SEQ ID NO: 3309997 - DNA, 25 bp, Homo sapien
cagtcactttttctaggcaccgagg

SEQ ID NO: 3309998 - DNA, 25 bp, Homo sapien
gcttaacttgggacatctcatatga

SEQ ID NO: 3309999 - DNA, 25 bp, Homo sapien
tagccttgttgttaagttcttccat

SEQ ID NO: 3310000 - DNA, 25 bp, Homo sapien
ttagccttgttgttaagttcttcca

SEQ ID NO: 3310001 - DNA, 25 bp, Homo sapien
ctgctcatttacacccctcaccatg

SEQ ID NO: 3310002 - DNA, 25 bp, Homo sapien
aagtatgtggaaggacactgtgcac

SEQ ID NO: 3310003 - DNA, 25 bp, Homo sapien
gggtatttcactaacatcaggaaga

SEQ ID NO: 3310004 - DNA, 25 bp, Homo sapien
ctctaagtagaaaacccctatgtat

SEQ ID NO: 3310005 - DNA, 25 bp, Homo sapien
gatttcactcaatcaggaagtgcta

SEQ ID NO: 3310006 - DNA, 25 bp, Homo sapien
gaaagtattagcctgtgcaggaaaa

SEQ ID NO: 3310007 - DNA, 25 bp, Homo sapien
gcatttttgcatgctggtaagagga

SEQ ID NO: 3310008 - DNA, 25 bp, Homo sapien
ttgcatttttgcatgctggtaagag

SEQ ID NO: 3310009 - DNA, 25 bp, Homo sapien
atttttgcatgctggtaagaggagc

SEQ ID NO: 3310010 - DNA, 25 bp, Homo sapien
atttttgcatttttgcatgctggta

SEQ ID NO: 3310011 - DNA, 25 bp, Homo sapien
ggatttcccctgtatcacatgaagg

SEQ ID NO: 3310012 - DNA, 25 bp, Homo sapien
ctgtatcacatgaaggaaggcatca

SEQ ID NO: 3310013 - DNA, 25 bp, Homo sapien
ccctgtatcacatgaaggaaggcat

SEQ ID NO: 3310014 - DNA, 25 bp, Homo sapien
ttcccctgtatcacatgaaggaagg

SEQ ID NO: 3310015 - DNA, 25 bp, Homo sapien
tctatcactacaaggcctgtggctc

SEQ ID NO: 3310016 - DNA, 25 bp, Homo sapien
cagaaggttggctggcaccgaaaca

SEQ ID NO: 3310017 - DNA, 25 bp, Homo sapien
cgaaacaatgctccctccagcaaat

SEQ ID NO: 3310018 - DNA, 25 bp, Homo sapien
tatagttcacgctgaactgtgtgcc

SEQ ID NO: 3310019 - DNA, 25 bp, Homo sapien
tttctccaggttgggtatgggccga

SEQ ID NO: 3310020 - DNA, 25 bp, Homo sapien
tctccaggttgggtatgggccgatg

SEQ ID NO: 3310021 - DNA, 25 bp, Homo sapien
acaatttctccaggttgggtatggg

SEQ ID NO: 3310022 - DNA, 25 bp, Homo sapien
caatttctccaggttgggtatgggc

SEQ ID NO: 3310023 - DNA, 25 bp, Homo sapien
ggttcttctgatcagtgacacattc

SEQ ID NO: 3310024 - DNA, 25 bp, Homo sapien
tcttctgatcagtgacacattcttc

SEQ ID NO: 3310025 - DNA, 25 bp, Homo sapien
gttcttctgatcagtgacacattct

SEQ ID NO: 3310026 - DNA, 25 bp, Homo sapien
aggttcttctgatcagtgacacatt

SEQ ID NO: 3310027 - DNA, 25 bp, Homo sapien
aagttaactccacagaaatggacat

SEQ ID NO: 3310028 - DNA, 25 bp, Homo sapien
tctcctgcagagcaacgactgagag

SEQ ID NO: 3310029 - DNA, 25 bp, Homo sapien
ctctctcctgcagagcaacgactga

SEQ ID NO: 3310030 - DNA, 25 bp, Homo sapien
ctgcagagcaacgactgagagaggc

SEQ ID NO: 3310031 - DNA, 25 bp, Homo sapien
ggtagtgccggccgcagtcctgcct

SEQ ID NO: 3310032 - DNA, 25 bp, Homo sapien
gattcccctaacacatactcaaaac

SEQ ID NO: 3310033 - DNA, 25 bp, Homo sapien
tcagggtgattcccctaacacatac

SEQ ID NO: 3310034 - DNA, 25 bp, Homo sapien
ttcaacacaggcaatcttcctttca

SEQ ID NO: 3310035 - DNA, 25 bp, Homo sapien
ggtgattcccctaacacatactcaa

SEQ ID NO: 3310036 - DNA, 25 bp, Homo sapien
catatctggtactttcatagttctt

SEQ ID NO: 3310037 - DNA, 25 bp, Homo sapien
atatctggtactttcatagttcttt

SEQ ID NO: 3310038 - DNA, 25 bp, Homo sapien
aagttaggtaattcatcagaaattc

SEQ ID NO: 3310039 - DNA, 25 bp, Homo sapien
agtcaagttaggtaattcatcagaa

SEQ ID NO: 3310040 - DNA, 25 bp, Homo sapien
cttgacaagaaagcagcatatttgt

SEQ ID NO: 3310041 - DNA, 25 bp, Homo sapien
gcagcatatttgttagtcaagttag

SEQ ID NO: 3310042 - DNA, 25 bp, Homo sapien
ctgataatcagcaggtccaggggta

SEQ ID NO: 3310043 - DNA, 25 bp, Homo sapien
gtccaggggtagcacaagcttcttt

SEQ ID NO: 3310044 - DNA, 25 bp, Homo sapien
gcaggtccaggggtagcacaagctt

SEQ ID NO: 3310045 - DNA, 25 bp, Homo sapien
ggtccaggggtagcacaagcttctt

SEQ ID NO: 3310046 - DNA, 25 bp, Homo sapien
ctgaaccgagaagaaagtccgagga

SEQ ID NO: 3310047 - DNA, 25 bp, Homo sapien
cgagaagaaagtccgaggaacagaa

SEQ ID NO: 3310048 - DNA, 25 bp, Homo sapien
aacagaagaaccaaatgcacttttc

SEQ ID NO: 3310049 - DNA, 25 bp, Homo sapien
cagaagaaccaaatgcacttttctt

SEQ ID NO: 3310050 - DNA, 25 bp, Homo sapien
tctaacactggcaattatagtattg

SEQ ID NO: 3310051 - DNA, 25 bp, Homo sapien
ggcaattatagtattgttcaagaca

SEQ ID NO: 3310052 - DNA, 25 bp, Homo sapien
tgagcagatatttctaacactggca

SEQ ID NO: 3310053 - DNA, 25 bp, Homo sapien
tgttcaagacattataaaatccagg

SEQ ID NO: 3310054 - DNA, 25 bp, Homo sapien
tgtcctgtgtgaatcgaacagcact

SEQ ID NO: 3310055 - DNA, 25 bp, Homo sapien
ttcaaagacttgagagcagttcgag

SEQ ID NO: 3310056 - DNA, 25 bp, Homo sapien
cagttcgaggttcattatatgtgcc

SEQ ID NO: 3310057 - DNA, 25 bp, Homo sapien
cattatatgtgccaggagccggggt

SEQ ID NO: 3310058 - DNA, 25 bp, Homo sapien
atttgctgattacccgcaacagtgg

SEQ ID NO: 3310059 - DNA, 25 bp, Homo sapien
tcatcgtgtttatatagccaagtag

SEQ ID NO: 3310060 - DNA, 25 bp, Homo sapien
ttgcaagccagtacaaataaacagc

SEQ ID NO: 3310061 - DNA, 25 bp, Homo sapien
gatgctgcgctacttgggacagaaa

SEQ ID NO: 3310062 - DNA, 25 bp, Homo sapien
aaaagcaggagatgcatcatttgca

SEQ ID NO: 3310063 - DNA, 25 bp, Homo sapien
gaaaagcaggagatgcatcatttgc

SEQ ID NO: 3310064 - DNA, 25 bp, Homo sapien
aagcaggagatgcatcatttgcatt

SEQ ID NO: 3310065 - DNA, 25 bp, Homo sapien
aagaaaagcaggagatgcatcattt

SEQ ID NO: 3310066 - DNA, 25 bp, Homo sapien
tcatattttccaggccctggtactc

SEQ ID NO: 3310067 - DNA, 25 bp, Homo sapien
gacttttaatgtcatattttccagg

SEQ ID NO: 3310068 - DNA, 25 bp, Homo sapien
ttaatgtcatattttccaggccctg

SEQ ID NO: 3310069 - DNA, 25 bp, Homo sapien
ctatcttctgaaattgacttttaat

SEQ ID NO: 3310070 - DNA, 25 bp, Homo sapien
tatcattcttaccattcagttcaaa

SEQ ID NO: 3310071 - DNA, 25 bp, Homo sapien
tatattacacaggtttgagaggttg

SEQ ID NO: 3310072 - DNA, 25 bp, Homo sapien
tcttctacttctatattacacaggt

SEQ ID NO: 3310073 - DNA, 25 bp, Homo sapien
gtttgagaggttgtatcattcttac

SEQ ID NO: 3310074 - DNA, 25 bp, Homo sapien
acagcgatgactgtagaacagcgga

SEQ ID NO: 3310075 - DNA, 25 bp, Homo sapien
aacagcgatgactgtagaacagcgg

SEQ ID NO: 3310076 - DNA, 25 bp, Homo sapien
tccttcaaagtcagaagatacagtg

SEQ ID NO: 3310077 - DNA, 25 bp, Homo sapien
tcctaatgcaaggtagtcatcgtcc

SEQ ID NO: 3310078 - DNA, 25 bp, Homo sapien
agtgtgtgttgagccctcctcctga

SEQ ID NO: 3310079 - DNA, 25 bp, Homo sapien
gatagtaatccctggctgacaactc

SEQ ID NO: 3310080 - DNA, 25 bp, Homo sapien
cttatgacagcgctcaagccaggat

SEQ ID NO: 3310081 - DNA, 25 bp, Homo sapien
tatgacagcgctcaagccaggatac

SEQ ID NO: 3310082 - DNA, 25 bp, Homo sapien
ttatgacagcgctcaagccaggata

SEQ ID NO: 3310083 - DNA, 25 bp, Homo sapien
tgacagcgctcaagccaggatacat

SEQ ID NO: 3310084 - DNA, 25 bp, Homo sapien
gcaagtgtttataggttatccaacc

SEQ ID NO: 3310085 - DNA, 25 bp, Homo sapien
gaccttaatcagtcccatctcagaa

SEQ ID NO: 3310086 - DNA, 25 bp, Homo sapien
aaatacccaagattgacaagcagaa

SEQ ID NO: 3310087 - DNA, 25 bp, Homo sapien
gcaaatctttggtggagcttaaccc

SEQ ID NO: 3310088 - DNA, 25 bp, Homo sapien
gccatgagtggaatatatgtagaat

SEQ ID NO: 3310089 - DNA, 25 bp, Homo sapien
gcagaaacagacatgggaatagacc

SEQ ID NO: 3310090 - DNA, 25 bp, Homo sapien
gggaatagaccataataatataaca

SEQ ID NO: 3310091 - DNA, 25 bp, Homo sapien
caagaatggaatgatctggtggcag

SEQ ID NO: 3310092 - DNA, 25 bp, Homo sapien
ttttggcagtattcctaaattagca

SEQ ID NO: 3310093 - DNA, 25 bp, Homo sapien
gaaactagtgtaatgctgaacaaaa

SEQ ID NO: 3310094 - DNA, 25 bp, Homo sapien
tgatgtatgtctccaactaggtgac

SEQ ID NO: 3310095 - DNA, 25 bp, Homo sapien
taaacctagatcttattttggcagt

SEQ ID NO: 3310096 - DNA, 25 bp, Homo sapien
caaaacccaggtggcaatcacagta

SEQ ID NO: 3310097 - DNA, 25 bp, Homo sapien
gggactttacattgaacttggtgct

SEQ ID NO: 3310098 - DNA, 25 bp, Homo sapien
aactgtagccatgcagcacagagac

SEQ ID NO: 3310099 - DNA, 25 bp, Homo sapien
gacttcataacgctaaaagaggcat

SEQ ID NO: 3310100 - DNA, 25 bp, Homo sapien
tcgaccatctgatttttcttcttcc

SEQ ID NO: 3310101 - DNA, 25 bp, Homo sapien
cgaccatctgatttttcttcttccc

SEQ ID NO: 3310102 - DNA, 25 bp, Homo sapien
tcatatagtcgtgggataaatgaac

SEQ ID NO: 3310103 - DNA, 25 bp, Homo sapien
tagtcgtgggataaatgaacaataa

SEQ ID NO: 3310104 - DNA, 25 bp, Homo sapien
gttgttgatctctcttgatgttaac

SEQ ID NO: 3310105 - DNA, 25 bp, Homo sapien
ctattatttcatatagtcgtgggat

SEQ ID NO: 3310106 - DNA, 25 bp, Homo sapien
tactgtcctggaccaggacctgact

SEQ ID NO: 3310107 - DNA, 25 bp, Homo sapien
tatcatactgtcctggaccaggacc

SEQ ID NO: 3310108 - DNA, 25 bp, Homo sapien
ctatatcatactgtcctggaccagg

SEQ ID NO: 3310109 - DNA, 25 bp, Homo sapien
tggactatatcatactgtcctggac

SEQ ID NO: 3310110 - DNA, 25 bp, Homo sapien
tgaagagttgccaaaatgtatacct

SEQ ID NO: 3310111 - DNA, 25 bp, Homo sapien
tacagtatcaatttggcagtagttt

SEQ ID NO: 3310112 - DNA, 25 bp, Homo sapien
ttacagtatcaatttggcagtagtt

SEQ ID NO: 3310113 - DNA, 25 bp, Homo sapien
cagtagtttgtgaagaacctgtgtt

SEQ ID NO: 3310114 - DNA, 25 bp, Homo sapien
caagcctggcctacaaaaacttcca

SEQ ID NO: 3310115 - DNA, 25 bp, Homo sapien
tgactggctatagctccaagcctgg

SEQ ID NO: 3310116 - DNA, 25 bp, Homo sapien
actggaataatcctgtgtccctgaa

SEQ ID NO: 3310117 - DNA, 25 bp, Homo sapien
tacacttgacaacaaggccctagag

SEQ ID NO: 3310118 - DNA, 25 bp, Homo sapien
tactgtcacaagcaggtggaaaaca

SEQ ID NO: 3310119 - DNA, 25 bp, Homo sapien
tatgataaccatatgactttccaca

SEQ ID NO: 3310120 - DNA, 25 bp, Homo sapien
aaccatatgactttccacaagaagg

SEQ ID NO: 3310121 - DNA, 25 bp, Homo sapien
tgaggtttgtagtatgctggaccaa

SEQ ID NO: 3310122 - DNA, 25 bp, Homo sapien
taagtgtaggtgatcttgaaatttt

SEQ ID NO: 3310123 - DNA, 25 bp, Homo sapien
ctggtaagtgtaggtgatcttgaaa

SEQ ID NO: 3310124 - DNA, 25 bp, Homo sapien
ggtaagtgtaggtgatcttgaaatt

SEQ ID NO: 3310125 - DNA, 25 bp, Homo sapien
tggtaagtgtaggtgatcttgaaat

SEQ ID NO: 3310126 - DNA, 25 bp, Homo sapien
gaattcaagtctgttgcttcacctt

SEQ ID NO: 3310127 - DNA, 25 bp, Homo sapien
tttaaaggagtgaattcaagtctgt

SEQ ID NO: 3310128 - DNA, 25 bp, Homo sapien
ctgttgcttcacctttaaaccaaga

SEQ ID NO: 3310129 - DNA, 25 bp, Homo sapien
aaggagtgaattcaagtctgttgct

SEQ ID NO: 3310130 - DNA, 25 bp, Homo sapien
gactgaagatgctctctggtctcta

SEQ ID NO: 3310131 - DNA, 25 bp, Homo sapien
taggataaaactgatcatagcttgc

SEQ ID NO: 3310132 - DNA, 25 bp, Homo sapien
tagcttgctggtcctggattatctg

SEQ ID NO: 3310133 - DNA, 25 bp, Homo sapien
ttctcccggttttgtagactatggc

SEQ ID NO: 3310134 - DNA, 25 bp, Homo sapien
gcttctgaaacattatagtgtcctg

SEQ ID NO: 3310135 - DNA, 25 bp, Homo sapien
tctgaaacattatagtgtcctggac

SEQ ID NO: 3310136 - DNA, 25 bp, Homo sapien
cttctgaaacattatagtgtcctgg

SEQ ID NO: 3310137 - DNA, 25 bp, Homo sapien
ttctgaaacattatagtgtcctgga

SEQ ID NO: 3310138 - DNA, 25 bp, Homo sapien
tctcaatgctagaggcaatggtaaa

SEQ ID NO: 3310139 - DNA, 25 bp, Homo sapien
tgctagaggcaatggtaaaagtact

SEQ ID NO: 3310140 - DNA, 25 bp, Homo sapien
acagctttctcaatgctagaggcaa

SEQ ID NO: 3310141 - DNA, 25 bp, Homo sapien
aatggtaaaagtactttctctggca

SEQ ID NO: 3310142 - DNA, 25 bp, Homo sapien
tgcttcaggaaaggtacctggtagg

SEQ ID NO: 3310143 - DNA, 25 bp, Homo sapien
ctgcttcaggaaaggtacctggtag

SEQ ID NO: 3310144 - DNA, 25 bp, Homo sapien
ccttcagccaatttgagcaggcggg

SEQ ID NO: 3310145 - DNA, 25 bp, Homo sapien
gccaccttcagccaatttgagcagg

SEQ ID NO: 3310146 - DNA, 25 bp, Homo sapien
gaagggcaggtgccgaaaacgataa

SEQ ID NO: 3310147 - DNA, 25 bp, Homo sapien
ggaagggcaggtgccgaaaacgata

SEQ ID NO: 3310148 - DNA, 25 bp, Homo sapien
agaagtgtggagaaaaaggaagccg

SEQ ID NO: 3310149 - DNA, 25 bp, Homo sapien
tagaagtgtggagaaaaaggaagcc

SEQ ID NO: 3310150 - DNA, 25 bp, Homo sapien
ctagaagtgtggagaaaaaggaagc

SEQ ID NO: 3310151 - DNA, 25 bp, Homo sapien
gccaggtaaccacaatactgattca

SEQ ID NO: 3310152 - DNA, 25 bp, Homo sapien
tgtcgtatgccaggtaaccacaata

SEQ ID NO: 3310153 - DNA, 25 bp, Homo sapien
aaagctgcctcttttgtcgtatgcc

SEQ ID NO: 3310154 - DNA, 25 bp, Homo sapien
gcctcttttgtcgtatgccaggtaa

SEQ ID NO: 3310155 - DNA, 25 bp, Homo sapien
caacccaaactgcatactcaggtct

SEQ ID NO: 3310156 - DNA, 25 bp, Homo sapien
gccatggttgccgtaagcattgatg

SEQ ID NO: 3310157 - DNA, 25 bp, Homo sapien
gcagaatttcaagccctgtctggcc

SEQ ID NO: 3310158 - DNA, 25 bp, Homo sapien
actgcatactcaggtctaggccatg

SEQ ID NO: 3310159 - DNA, 25 bp, Homo sapien
tacacccaaggagataacctttgcc

SEQ ID NO: 3310160 - DNA, 25 bp, Homo sapien
ctgacctggtctgagccatacaccc

SEQ ID NO: 3310161 - DNA, 25 bp, Homo sapien
acacccaaggagataacctttgcca

SEQ ID NO: 3310162 - DNA, 25 bp, Homo sapien
actgacctggtctgagccatacacc

SEQ ID NO: 3310163 - DNA, 25 bp, Homo sapien
aaagcctaggttagtatgtcatgag

SEQ ID NO: 3310164 - DNA, 25 bp, Homo sapien
tagaacaaatgcttcgaagtaacca

SEQ ID NO: 3310165 - DNA, 25 bp, Homo sapien
tgatacagacgagaaaaaacatcct

SEQ ID NO: 3310166 - DNA, 25 bp, Homo sapien
gcctatcagacctaacacgctgtgt

SEQ ID NO: 3310167 - DNA, 25 bp, Homo sapien
tgttaagttatctgtgttgttatca

SEQ ID NO: 3310168 - DNA, 25 bp, Homo sapien
cagtgttaagttatctgtgttgtta

SEQ ID NO: 3310169 - DNA, 25 bp, Homo sapien
tgtccagtgttaagttatctgtgtt

SEQ ID NO: 3310170 - DNA, 25 bp, Homo sapien
tccagtgttaagttatctgtgttgt

SEQ ID NO: 3310171 - DNA, 25 bp, Homo sapien
taatccccggtgtgcggacttttgc

SEQ ID NO: 3310172 - DNA, 25 bp, Homo sapien
gcctgtttggaagcattgtctccta

SEQ ID NO: 3310173 - DNA, 25 bp, Homo sapien
tcacattctgggatagggcccctaa

SEQ ID NO: 3310174 - DNA, 25 bp, Homo sapien
tagcatggtctaatgtcacattctg

SEQ ID NO: 3310175 - DNA, 25 bp, Homo sapien
caccatttttatacactactttcct

SEQ ID NO: 3310176 - DNA, 25 bp, Homo sapien
catttttatacactactttcctgac

SEQ ID NO: 3310177 - DNA, 25 bp, Homo sapien
tttttatacactactttcctgacca

SEQ ID NO: 3310178 - DNA, 25 bp, Homo sapien
ccatttttatacactactttcctga

SEQ ID NO: 3310179 - DNA, 25 bp, Homo sapien
gagagaggagtatggcgtcatcata

SEQ ID NO: 3310180 - DNA, 25 bp, Homo sapien
cactcagtagaggaaggtatggaga

SEQ ID NO: 3310181 - DNA, 25 bp, Homo sapien
ggaagaaggcattaaaatcactcag

SEQ ID NO: 3310182 - DNA, 25 bp, Homo sapien
tatggcgtcatcataaaatatccca

SEQ ID NO: 3310183 - DNA, 25 bp, Homo sapien
gattgatgtttaccatactgagatc

SEQ ID NO: 3310184 - DNA, 25 bp, Homo sapien
ccagattgatgtttaccatactgag

SEQ ID NO: 3310185 - DNA, 25 bp, Homo sapien
aaactgatcttgtccgtgtaacaag

SEQ ID NO: 3310186 - DNA, 25 bp, Homo sapien
aacaagatcatcacactttctggat

SEQ ID NO: 3310187 - DNA, 25 bp, Homo sapien
ttttcccctgatggcacaagtcctg

SEQ ID NO: 3310188 - DNA, 25 bp, Homo sapien
tgacttcagcaactggacgtcatgc

SEQ ID NO: 3310189 - DNA, 25 bp, Homo sapien
cggcatactgttatctgacttcagc

SEQ ID NO: 3310190 - DNA, 25 bp, Homo sapien
catttctgaactcggcatactgtta

SEQ ID NO: 3310191 - DNA, 25 bp, Homo sapien
gagaggtaaatgtattcagggtgat

SEQ ID NO: 3310192 - DNA, 25 bp, Homo sapien
attctccaatcagcagactcagtaa

SEQ ID NO: 3310193 - DNA, 25 bp, Homo sapien
aaggaaagcctgcagttccgctctg

SEQ ID NO: 3310194 - DNA, 25 bp, Homo sapien
gcagactcagtaataaagctgccat

SEQ ID NO: 3310195 - DNA, 25 bp, Homo sapien
cttcatctagtaactcttgagtctc

SEQ ID NO: 3310196 - DNA, 25 bp, Homo sapien
tagtaactcttgagtctcatctccc

SEQ ID NO: 3310197 - DNA, 25 bp, Homo sapien
tttgatcttcatctagtaactcttg

SEQ ID NO: 3310198 - DNA, 25 bp, Homo sapien
gatcttcatctagtaactcttgagt

SEQ ID NO: 3310199 - DNA, 25 bp, Homo sapien
ttacatcatggaaccagccaggcgc

SEQ ID NO: 3310200 - DNA, 25 bp, Homo sapien
gaataactgaacctatgtcttaaaa

SEQ ID NO: 3310201 - DNA, 25 bp, Homo sapien
tatgatattaatgcagagattcttc

SEQ ID NO: 3310202 - DNA, 25 bp, Homo sapien
gatctcactcttaagaaccatttaa

SEQ ID NO: 3310203 - DNA, 25 bp, Homo sapien
aaaaactgaggtgggcagaatggca

SEQ ID NO: 3310204 - DNA, 25 bp, Homo sapien
atctccagctcctgacttaagtgat

SEQ ID NO: 3310205 - DNA, 25 bp, Homo sapien
tgatctccagctcctgacttaagtg

SEQ ID NO: 3310206 - DNA, 25 bp, Homo sapien
gctgatctccagctcctgacttaag

SEQ ID NO: 3310207 - DNA, 25 bp, Homo sapien
ggctgatctccagctcctgacttaa

SEQ ID NO: 3310208 - DNA, 25 bp, Homo sapien
gtcgcttctgatttgtgtgctcgaa

SEQ ID NO: 3310209 - DNA, 25 bp, Homo sapien
taattatcgtttcttgctgtagaaa

SEQ ID NO: 3310210 - DNA, 25 bp, Homo sapien
tgtgctcgaaatactagtcaccaag

SEQ ID NO: 3310211 - DNA, 25 bp, Homo sapien
gactgtgagaataggcgactaatta

SEQ ID NO: 3310212 - DNA, 25 bp, Homo sapien
attgaccgagtgaaagttgacaggg

SEQ ID NO: 3310213 - DNA, 25 bp, Homo sapien
ttggattgaccgagtgaaagttgac

SEQ ID NO: 3310214 - DNA, 25 bp, Homo sapien
acattggattgaccgagtgaaagtt

SEQ ID NO: 3310215 - DNA, 25 bp, Homo sapien
tcaacattggattgaccgagtgaaa

SEQ ID NO: 3310216 - DNA, 25 bp, Homo sapien
ttagggtgcagagaaatcggtttcc

SEQ ID NO: 3310217 - DNA, 25 bp, Homo sapien
caggttgtactgctgactgcacagt

SEQ ID NO: 3310218 - DNA, 25 bp, Homo sapien
tgaaggactccggtcgctgtagcct

SEQ ID NO: 3310219 - DNA, 25 bp, Homo sapien
tagccttggagagcgaccagattcc

SEQ ID NO: 3310220 - DNA, 25 bp, Homo sapien
ccagggaagaggaccgaagccagcc

SEQ ID NO: 3310221 - DNA, 25 bp, Homo sapien
cagggaagaggaccgaagccagccc

SEQ ID NO: 3310222 - DNA, 25 bp, Homo sapien
acacactcttcgaggaaatcctggg

SEQ ID NO: 3310223 - DNA, 25 bp, Homo sapien
tagttcctcccgctttcacagcagg

SEQ ID NO: 3310224 - DNA, 25 bp, Homo sapien
cccagcaggacgcttattttcaagc

SEQ ID NO: 3310225 - DNA, 25 bp, Homo sapien
gacctccgccgggttagctttggca

SEQ ID NO: 3310226 - DNA, 25 bp, Homo sapien
aatgacacgcctgctatcgagcgcc

SEQ ID NO: 3310227 - DNA, 25 bp, Homo sapien
tacacgtcctttccaacttcgtcag

SEQ ID NO: 3310228 - DNA, 25 bp, Homo sapien
ggcgcaggcctagtcgcctacacgt

SEQ ID NO: 3310229 - DNA, 25 bp, Homo sapien
ctcaggtgtccccaagaggcgcagg

SEQ ID NO: 3310230 - DNA, 25 bp, Homo sapien
ggtgagtcctctgctagcagatcgg

SEQ ID NO: 3310231 - DNA, 25 bp, Homo sapien
gctcaatatccccattccctgtttt

SEQ ID NO: 3310232 - DNA, 25 bp, Homo sapien
tctccggttaattccggcctgtgcg

SEQ ID NO: 3310233 - DNA, 25 bp, Homo sapien
gccatgaagatcctctgccgcggct

SEQ ID NO: 3310234 - DNA, 25 bp, Homo sapien
gcaacatgggtaagtcatccttcct

SEQ ID NO: 3310235 - DNA, 25 bp, Homo sapien
cctcggggagcaacatgggtaagtc

SEQ ID NO: 3310236 - DNA, 25 bp, Homo sapien
ggagcaacatgggtaagtcatcctt

SEQ ID NO: 3310237 - DNA, 25 bp, Homo sapien
atgggtaagtcatccttcctccgcc

SEQ ID NO: 3310238 - DNA, 25 bp, Homo sapien
ggagagtcggcgcacgcggaacgca

SEQ ID NO: 3310239 - DNA, 25 bp, Homo sapien
cagtccccgggtgtgagacggtggc

SEQ ID NO: 3310240 - DNA, 25 bp, Homo sapien
ttttctttctcggcgtgctgcaggg

SEQ ID NO: 3310241 - DNA, 25 bp, Homo sapien
caaagttgccggatttctccagtcc

SEQ ID NO: 3310242 - DNA, 25 bp, Homo sapien
tgagctcgaggctcgggtccgacca

SEQ ID NO: 3310243 - DNA, 25 bp, Homo sapien
gcctcgcgggctcgcatctgcagct

SEQ ID NO: 3310244 - DNA, 25 bp, Homo sapien
cccgcgtgtactgagctcgaggctc

SEQ ID NO: 3310245 - DNA, 25 bp, Homo sapien
ggtccgaccactaccacttcgtgta

SEQ ID NO: 3310246 - DNA, 25 bp, Homo sapien
cgtggagactcctcatcccgggcgg

SEQ ID NO: 3310247 - DNA, 25 bp, Homo sapien
ctttccccgtcgtggagactcctca

SEQ ID NO: 3310248 - DNA, 25 bp, Homo sapien
cgtcgtggagactcctcatcccggg

SEQ ID NO: 3310249 - DNA, 25 bp, Homo sapien
tttccccgtcgtggagactcctcat

SEQ ID NO: 3310250 - DNA, 25 bp, Homo sapien
tcctccccatagatcatgtagggcc

SEQ ID NO: 3310251 - DNA, 25 bp, Homo sapien
caggagcagttaaaacagagtcttc

SEQ ID NO: 3310252 - DNA, 25 bp, Homo sapien
tccatgagtgtgacctgaagaactt

SEQ ID NO: 3310253 - DNA, 25 bp, Homo sapien
taagtgttcacaccagcgcatgcgt

SEQ ID NO: 3310254 - DNA, 25 bp, Homo sapien
aacatgagcatgatatctagagtaa

SEQ ID NO: 3310255 - DNA, 25 bp, Homo sapien
tctagagtaatagtggagtgatact

SEQ ID NO: 3310256 - DNA, 25 bp, Homo sapien
taaatcaatgaaaacctgaagccct

SEQ ID NO: 3310257 - DNA, 25 bp, Homo sapien
tattttatagcttgccctttaaaca

SEQ ID NO: 3310258 - DNA, 25 bp, Homo sapien
gaatgtgcatgttgtagtcctatga

SEQ ID NO: 3310259 - DNA, 25 bp, Homo sapien
ccataccacttgtgcatgcatgtga

SEQ ID NO: 3310260 - DNA, 25 bp, Homo sapien
tgaagaaccgctgtaggtacctccc

SEQ ID NO: 3310261 - DNA, 25 bp, Homo sapien
taatgacttgctccacacatgcagt

SEQ ID NO: 3310262 - DNA, 25 bp, Homo sapien
gccatagtagccagtccagttcatt

SEQ ID NO: 3310263 - DNA, 25 bp, Homo sapien
ccccttggcgaaatatagtgtactc

SEQ ID NO: 3310264 - DNA, 25 bp, Homo sapien
ttgaccactactggcctaaaaggca

SEQ ID NO: 3310265 - DNA, 25 bp, Homo sapien
gatggccccataccaatcgctgtta

SEQ ID NO: 3310266 - DNA, 25 bp, Homo sapien
gtgacagctgcagtctgacaagtgg

SEQ ID NO: 3310267 - DNA, 25 bp, Homo sapien
ctgcagtctgacaagtggcaggaac

SEQ ID NO: 3310268 - DNA, 25 bp, Homo sapien
ccagagaagacttgccatcctgaga

SEQ ID NO: 3310269 - DNA, 25 bp, Homo sapien
cagctgcaagccatgcccaagcctg

SEQ ID NO: 3310270 - DNA, 25 bp, Homo sapien
aagtatctgagttgggtgactgggc

SEQ ID NO: 3310271 - DNA, 25 bp, Homo sapien
gaagtatctgagttgggtgactggg

SEQ ID NO: 3310272 - DNA, 25 bp, Homo sapien
tcattctgaagtatctgagttgggt

SEQ ID NO: 3310273 - DNA, 25 bp, Homo sapien
ttctgaagtatctgagttgggtgac

SEQ ID NO: 3310274 - DNA, 25 bp, Homo sapien
cttgtttggtcaagtaggtagccat

SEQ ID NO: 3310275 - DNA, 25 bp, Homo sapien
tttgctgatagtctgagactttgag

SEQ ID NO: 3310276 - DNA, 25 bp, Homo sapien
ccatcatccttatgaaaagcatgtt

SEQ ID NO: 3310277 - DNA, 25 bp, Homo sapien
ccccatcatccttatgaaaagcatg

SEQ ID NO: 3310278 - DNA, 25 bp, Homo sapien
tgttctctcagacatccaaagtctt

SEQ ID NO: 3310279 - DNA, 25 bp, Homo sapien
ttatccctgaactattccaactcca

SEQ ID NO: 3310280 - DNA, 25 bp, Homo sapien
tattccaactccagtccggagtggt

SEQ ID NO: 3310281 - DNA, 25 bp, Homo sapien
attccaactccagtccggagtggtt

SEQ ID NO: 3310282 - DNA, 25 bp, Homo sapien
tatccctgaactattccaactccag

SEQ ID NO: 3310283 - DNA, 25 bp, Homo sapien
acgcagtcgacactagagggcaggc

SEQ ID NO: 3310284 - DNA, 25 bp, Homo sapien
ttacgcagtcgacactagagggcag

SEQ ID NO: 3310285 - DNA, 25 bp, Homo sapien
tacgcagtcgacactagagggcagg

SEQ ID NO: 3310286 - DNA, 25 bp, Homo sapien
ctgaaggtccgctccgtatctgaaa

SEQ ID NO: 3310287 - DNA, 25 bp, Homo sapien
gagaatgcaagcgtgcgttcggtat

SEQ ID NO: 3310288 - DNA, 25 bp, Homo sapien
tgctcttcccttagatttactttac

SEQ ID NO: 3310289 - DNA, 25 bp, Homo sapien
tagctttcccccacggagaatgcaa

SEQ ID NO: 3310290 - DNA, 25 bp, Homo sapien
cacaaagtattctagctggctgccc

SEQ ID NO: 3310291 - DNA, 25 bp, Homo sapien
tttccaggatagaccaagtgtgctc

SEQ ID NO: 3310292 - DNA, 25 bp, Homo sapien
tacagtagagattcacggcgcaacg

SEQ ID NO: 3310293 - DNA, 25 bp, Homo sapien
ctaaaatgtacatggagggatgccc

SEQ ID NO: 3310294 - DNA, 25 bp, Homo sapien
tcgaagatcagttcggcacgcggga

SEQ ID NO: 3310295 - DNA, 25 bp, Homo sapien
tgattaggtccatgcagctcgaaga

SEQ ID NO: 3310296 - DNA, 25 bp, Homo sapien
cattaggcgagactgcaggctgcat

SEQ ID NO: 3310297 - DNA, 25 bp, Homo sapien
ccagtgtcttgcagcagcggttgca

SEQ ID NO: 3310298 - DNA, 25 bp, Homo sapien
cagctcgccctgacagcttcgatat

SEQ ID NO: 3310299 - DNA, 25 bp, Homo sapien
tcgatatcgctaaccaaattctggg

SEQ ID NO: 3310300 - DNA, 25 bp, Homo sapien
gacagcttcgatatcgctaaccaaa

SEQ ID NO: 3310301 - DNA, 25 bp, Homo sapien
tctgggccaggcatatcccaaatat

SEQ ID NO: 3310302 - DNA, 25 bp, Homo sapien
aaagcatccttgaaatgtgtataat

SEQ ID NO: 3310303 - DNA, 25 bp, Homo sapien
gaaaatgtgagtgaaacagtgacac

SEQ ID NO: 3310304 - DNA, 25 bp, Homo sapien
tgtgagtgaaacagtgacacttgta

SEQ ID NO: 3310305 - DNA, 25 bp, Homo sapien
taattcatatgtggtaaaaagcatc

SEQ ID NO: 3310306 - DNA, 25 bp, Homo sapien
tgtttcccaaagaggttgcaacatt

SEQ ID NO: 3310307 - DNA, 25 bp, Homo sapien
gggtactcctctaggagtagaattg

SEQ ID NO: 3310308 - DNA, 25 bp, Homo sapien
caacatatgagggtttcgttttctc

SEQ ID NO: 3310309 - DNA, 25 bp, Homo sapien
gctgactcatatggtagcactatat

SEQ ID NO: 3310310 - DNA, 25 bp, Homo sapien
tcagatcctctgcccgtatttttgt

SEQ ID NO: 3310311 - DNA, 25 bp, Homo sapien
cagatcctctgcccgtatttttgtt

SEQ ID NO: 3310312 - DNA, 25 bp, Homo sapien
agatcctctgcccgtatttttgttt

SEQ ID NO: 3310313 - DNA, 25 bp, Homo sapien
gggcacacagcctttcgtgtagatt

SEQ ID NO: 3310314 - DNA, 25 bp, Homo sapien
gcaatgcaatgcctatgaaaatacc

SEQ ID NO: 3310315 - DNA, 25 bp, Homo sapien
cagcaacgatggttaaattgtcctg

SEQ ID NO: 3310316 - DNA, 25 bp, Homo sapien
agattacaatctgctggtcaacttc

SEQ ID NO: 3310317 - DNA, 25 bp, Homo sapien
gcacattgtcacagatagagcacca

SEQ ID NO: 3310318 - DNA, 25 bp, Homo sapien
acattgtcacagatagagcaccagg

SEQ ID NO: 3310319 - DNA, 25 bp, Homo sapien
gagcacattgtcacagatagagcac

SEQ ID NO: 3310320 - DNA, 25 bp, Homo sapien
cacattgtcacagatagagcaccag

SEQ ID NO: 3310321 - DNA, 25 bp, Homo sapien
gtttttgcctggcatcatagccaca

SEQ ID NO: 3310322 - DNA, 25 bp, Homo sapien
tggtttttgcctggcatcatagcca

SEQ ID NO: 3310323 - DNA, 25 bp, Homo sapien
catcatagccacactgagtgttgat

SEQ ID NO: 3310324 - DNA, 25 bp, Homo sapien
cacactgagtgttgatgacatcttc

SEQ ID NO: 3310325 - DNA, 25 bp, Homo sapien
gagaaaagtgaaatttactcattag

SEQ ID NO: 3310326 - DNA, 25 bp, Homo sapien
gaaacagctgaggtggtcccctgga

SEQ ID NO: 3310327 - DNA, 25 bp, Homo sapien
tctcctctttcagaccaagagaaac

SEQ ID NO: 3310328 - DNA, 25 bp, Homo sapien
ccaagagaaacagctgaggtggtcc

SEQ ID NO: 3310329 - DNA, 25 bp, Homo sapien
gtctcctctttcagaccaagagaaa

SEQ ID NO: 3310330 - DNA, 25 bp, Homo sapien
ggaagttctgcttttccactccaag

SEQ ID NO: 3310331 - DNA, 25 bp, Homo sapien
agggaagttctgcttttccactcca

SEQ ID NO: 3310332 - DNA, 25 bp, Homo sapien
ctctgcttctgaggggtaagggcga

SEQ ID NO: 3310333 - DNA, 25 bp, Homo sapien
tgagctcatcagcacccactcggct

SEQ ID NO: 3310334 - DNA, 25 bp, Homo sapien
gcagctaggagcacacagagatgcg

SEQ ID NO: 3310335 - DNA, 25 bp, Homo sapien
cagagatgcgtggagtaacctctca

SEQ ID NO: 3310336 - DNA, 25 bp, Homo sapien
cagctaggagcacacagagatgcgt

SEQ ID NO: 3310337 - DNA, 25 bp, Homo sapien
gagcacacagagatgcgtggagtaa

SEQ ID NO: 3310338 - DNA, 25 bp, Homo sapien
tacacagcagtccaggcctatcttg

SEQ ID NO: 3310339 - DNA, 25 bp, Homo sapien
gaaaggctaacagatgatacaggca

SEQ ID NO: 3310340 - DNA, 25 bp, Homo sapien
cctgctagcagtgcaagcttgggaa

SEQ ID NO: 3310341 - DNA, 25 bp, Homo sapien
aagttgcctgggtctcatattccac

SEQ ID NO: 3310342 - DNA, 25 bp, Homo sapien
gatgtacagagtaggccaatagttc

SEQ ID NO: 3310343 - DNA, 25 bp, Homo sapien
gagtaggccaatagttcgctggcat

SEQ ID NO: 3310344 - DNA, 25 bp, Homo sapien
tcgtcccatgcacactctcggcatg
